United States Patent Application Publication US 2025/0327063 A1 - sequence listing, part 3

SEQ ID NO: 25755 - DNA, 80 bp, synthetic construct
  misc_feature 1..80: note = Artificially Synthesized Probe
  source 1..80: mol_type = other DNA
tattttaagtaaaagttaagagggaaaaaggaaaagggacaaagcatgctgggtgataagaaggcattctggggggccag

SEQ ID NO: 25756 - DNA, 80 bp, synthetic construct
  misc_feature 1..80: note = Artificially Synthesized Probe
  source 1..80: mol_type = other DNA
tgcatttccatgtagacactgtaggtggcgccggaggagtcatttcccatcactaatggcttctcttgcacacccagggc

SEQ ID NO: 25757 - DNA, 80 bp, synthetic construct
  misc_feature 1..80: note = Artificially Synthesized Probe
  source 1..80: mol_type = other DNA
cggcagacaaaggacagtcggctggggggcggcacggggcccacccactgcaacagggtacacgcacgcgtgtgagtgtg

SEQ ID NO: 25758 - DNA, 80 bp, synthetic construct
  misc_feature 1..80: note = Artificially Synthesized Probe
  source 1..80: mol_type = other DNA
ttggcttcctgcgacccggggtctgccctcctcaaaagcaggcactgcctctggcccagaagtatcagctccaccctcag

SEQ ID NO: 25759 - DNA, 80 bp, synthetic construct
  misc_feature 1..80: note = Artificially Synthesized Probe
  source 1..80: mol_type = other DNA
ggactgcacagagagcgtctccatgagcaattcccatgggtgggtgtgggagggccgaggtcagcattgctggagggcca

SEQ ID NO: 25760 - DNA, 80 bp, synthetic construct
  misc_feature 1..80: note = Artificially Synthesized Probe
  source 1..80: mol_type = other DNA
cgttctgtgtcctgccttctggaaacctgcggaagcccagataacctgttaacccagaaatcgttttagtggccgaatgc

SEQ ID NO: 25761 - DNA, 80 bp, synthetic construct
  misc_feature 1..80: note = Artificially Synthesized Probe
  source 1..80: mol_type = other DNA
gcagggacccgggtcggggcacagttcctggcagggcgatgtgccttcctctgtccactgtgctgcaagtctgattttgt

SEQ ID NO: 25762 - DNA, 80 bp, synthetic construct
  misc_feature 1..80: note = Artificially Synthesized Probe
  source 1..80: mol_type = other DNA
catgtccaaaacgtcaggagctcctcaccttggctggacggggttggcactaacggggaactttccccagaacatggcca

SEQ ID NO: 25763 - DNA, 80 bp, synthetic construct
  misc_feature 1..80: note = Artificially Synthesized Probe
  source 1..80: mol_type = other DNA
tgtgtctctagtatgtgtgcatacacgtacacatgtaggctttgagttaagcaggggaggaatattttgatcaactttaa

SEQ ID NO: 25764 - DNA, 80 bp, synthetic construct
  misc_feature 1..80: note = Artificially Synthesized Probe
  source 1..80: mol_type = other DNA
taaaaggatgccaggcactaagacagattaaagccaagaaagtaaaatctaagattctcatgaagttagccctcaagtta

SEQ ID NO: 25765 - DNA, 80 bp, synthetic construct
  misc_feature 1..80: note = Artificially Synthesized Probe
  source 1..80: mol_type = other DNA
cttggcagaatgttccttaccttttgatttgcagggtttagaaagcatcataagaaaacgtgtctacgctggggttgcag

SEQ ID NO: 25766 - DNA, 80 bp, synthetic construct
  misc_feature 1..80: note = Artificially Synthesized Probe
  source 1..80: mol_type = other DNA
cttcattgaactaaagtcacggggtgagggcctggtctgcaaagtgggagacactgtgagtggtcaagacaaaggaacac

SEQ ID NO: 25767 - DNA, 80 bp, synthetic construct
  misc_feature 1..80: note = Artificially Synthesized Probe
  source 1..80: mol_type = other DNA
ttagtacatttccttttacacacgtattttgaagtcttgactgttactagcgggcttttcttgcggcagacgcatctcac

SEQ ID NO: 25768 - DNA, 80 bp, synthetic construct
  misc_feature 1..80: note = Artificially Synthesized Probe
  source 1..80: mol_type = other DNA
atttgcaagacatcgggacactcaaaaggctgacttatgggaagggccgtgtgtttgctttcttaaattgtttgaatgag

SEQ ID NO: 25769 - DNA, 80 bp, synthetic construct
  misc_feature 1..80: note = Artificially Synthesized Probe
  source 1..80: mol_type = other DNA
gcattgctgggccccaggtgagttgccttggtgggcccagggtgcagggggggcgtggagccctgaagggactatgctaa

SEQ ID NO: 25770 - DNA, 80 bp, synthetic construct
  misc_feature 1..80: note = Artificially Synthesized Probe
  source 1..80: mol_type = other DNA
tgtggtctacgtgtcggagcaggacgtaaggacgctgcgtgggtgggcacccaatctgtccagaccccccacggggtgca

SEQ ID NO: 25771 - DNA, 80 bp, synthetic construct
  misc_feature 1..80: note = Artificially Synthesized Probe
  source 1..80: mol_type = other DNA
acctccgccggcaagcaagggagcgtctagcagaggcaggagcattttaaaacaaaatggaagtaaaaaccatggccctt

SEQ ID NO: 25772 - DNA, 80 bp, synthetic construct
  misc_feature 1..80: note = Artificially Synthesized Probe
  source 1..80: mol_type = other DNA
caggacccaagggcaacctgggctctaagggcgaacgaggctccccgggacccaaggtaaggggctcaggtgctgtccct

SEQ ID NO: 25773 - DNA, 80 bp, synthetic construct
  misc_feature 1..80: note = Artificially Synthesized Probe
  source 1..80: mol_type = other DNA
tgtttggggtgggcctcagacacaggatccccaggcccagtgagagctccactatcccacccagctgtgcattggagctg

SEQ ID NO: 25774 - DNA, 80 bp, synthetic construct
  misc_feature 1..80: note = Artificially Synthesized Probe
  source 1..80: mol_type = other DNA
ttcctcttgcagggtccatacggacggccggggtacaagggagagattggctttcctggacggccggtgaggacctgggg

SEQ ID NO: 25775 - DNA, 80 bp, synthetic construct
  misc_feature 1..80: note = Artificially Synthesized Probe
  source 1..80: mol_type = other DNA
cacataggtgcacatatacacatgtattcatgcatatacgagcctgtccacgtgcacacccatacaggtatatacataca

SEQ ID NO: 25776 - DNA, 80 bp, synthetic construct
  misc_feature 1..80: note = Artificially Synthesized Probe
  source 1..80: mol_type = other DNA
cccctggcctctgcgtctgggggtccttctaggatgtgccagtctggtgggcagtggattagcagctgagttcccacgga

SEQ ID NO: 25777 - DNA, 80 bp, synthetic construct
  misc_feature 1..80: note = Artificially Synthesized Probe
  source 1..80: mol_type = other DNA
gggtggctgcagggcacaagcccagcaagatagccccatcacctcctgaggagcagatggctgcccttccatgctagacc

SEQ ID NO: 25778 - DNA, 80 bp, synthetic construct
  misc_feature 1..80: note = Artificially Synthesized Probe
  source 1..80: mol_type = other DNA
ctgaaggtcacacattcaaaagccacaggaagtctggagatggcagcagagagctgggaagctcagaggtgtcaggatga

SEQ ID NO: 25779 - DNA, 80 bp, synthetic construct
  misc_feature 1..80: note = Artificially Synthesized Probe
  source 1..80: mol_type = other DNA
tggcaggaaccggcgtcccagcgacagggaggtcagaggctccctcgggaaccagcgtgggctgccccacatggcatccc

SEQ ID NO: 25780 - DNA, 80 bp, synthetic construct
  misc_feature 1..80: note = Artificially Synthesized Probe
  source 1..80: mol_type = other DNA
ggtgtgtggtgtggggtgtgtgtggagtgtggctatgggggtgctgggtgtgtagtgtgggggtgtggtttggtgtgttg

SEQ ID NO: 25781 - DNA, 80 bp, synthetic construct
  misc_feature 1..80: note = Artificially Synthesized Probe
  source 1..80: mol_type = other DNA
aggggcccaggctgggctgaaagcaggcctggcttccaggaactgtgaccccacgagtgcagtagaagcaagtgggaagt

SEQ ID NO: 25782 - DNA, 80 bp, synthetic construct
  misc_feature 1..80: note = Artificially Synthesized Probe
  source 1..80: mol_type = other DNA
ccaaaaatccaaagttaattctttgcaaaggcgaacaacattcctgcacctctgccgggactgaggaaaaggagagaagc

SEQ ID NO: 25783 - DNA, 80 bp, synthetic construct
  misc_feature 1..80: note = Artificially Synthesized Probe
  source 1..80: mol_type = other DNA
agtttacagtcccaccaacagtgtaaaagtgttcctatttctctacatcctctccggcacctgttgtttccttacttttt

SEQ ID NO: 25784 - DNA, 80 bp, synthetic construct
  misc_feature 1..80: note = Artificially Synthesized Probe
  source 1..80: mol_type = other DNA
gcccagccctggctcggggggatgggaggccacctgtggcttgtaggggttcagggctcccgtgtaacaagtgtttccgt

SEQ ID NO: 25785 - DNA, 80 bp, synthetic construct
  misc_feature 1..80: note = Artificially Synthesized Probe
  source 1..80: mol_type = other DNA
gggagtgggccccgggcagaggccgcctcgtgtggcttcgtgttcccaccttggtttctctcctgcagctatcagcgttc

SEQ ID NO: 25786 - DNA, 80 bp, synthetic construct
  misc_feature 1..80: note = Artificially Synthesized Probe
  source 1..80: mol_type = other DNA
gtgggtcatgtcacagtgaacgtttacaaagataaatgtcacctcacacacccgataataagacaaggcgcctgacggga

SEQ ID NO: 25787 - DNA, 80 bp, synthetic construct
  misc_feature 1..80: note = Artificially Synthesized Probe
  source 1..80: mol_type = other DNA
gagggagaggcgggtgctgggcagggagggcaccctcctgtgggctgggagggccgggtgttggggagggagaggtgggt

SEQ ID NO: 25788 - DNA, 80 bp, synthetic construct
  misc_feature 1..80: note = Artificially Synthesized Probe
  source 1..80: mol_type = other DNA
gatgggcagatggatggtggacaagtgggtgagtggatgggtggatggatggtgggcagatggatggtggataggtagat

SEQ ID NO: 25789 - DNA, 80 bp, synthetic construct
  misc_feature 1..80: note = Artificially Synthesized Probe
  source 1..80: mol_type = other DNA
gaggtcacctctgagggagacagagcaaggccctgggagattagaaggtcgaaggtcgccgtgttgaggtcaggggccct

SEQ ID NO: 25790 - DNA, 80 bp, synthetic construct
  misc_feature 1..80: note = Artificially Synthesized Probe
  source 1..80: mol_type = other DNA
ccttccgcgccttcctgtcctcgcgcctgcaggacctgtacagcatcgtgcgccgtgccgaccgcgcagccgtgcccatc

SEQ ID NO: 25791 - DNA, 80 bp, synthetic construct
  misc_feature 1..80: note = Artificially Synthesized Probe
  source 1..80: mol_type = other DNA
gcattgagaaaaatgagaactgctctgagaagtcatcattagcaatgcgtttgagagccaggtagttgtaagaaggcccc

SEQ ID NO: 25792 - DNA, 80 bp, synthetic construct
  misc_feature 1..80: note = Artificially Synthesized Probe
  source 1..80: mol_type = other DNA
gccccctccacaggcagccagcagggaggccatgtggccctccaggttgtgggagcctctgcagccccctggtaacccca

SEQ ID NO: 25793 - DNA, 80 bp, synthetic construct
  misc_feature 1..80: note = Artificially Synthesized Probe
  source 1..80: mol_type = other DNA
cgagtccaagctgggagattcaagggacccatgagttggggtctggcagcctcccatccagggcccccatctcatgcccc

SEQ ID NO: 25794 - DNA, 80 bp, synthetic construct
  misc_feature 1..80: note = Artificially Synthesized Probe
  source 1..80: mol_type = other DNA
aagcgcttcatcgacaacctgagggacaggtaggagggacgccccgtgaccttcctcctgtgcttctgggcctcttggag

SEQ ID NO: 25795 - DNA, 80 bp, synthetic construct
  misc_feature 1..80: note = Artificially Synthesized Probe
  source 1..80: mol_type = other DNA
ttctgaaggtccccgactcgggagccaggaggggtgtcgctctgcagccccagggcccccaggcttggttctgggcttgg

SEQ ID NO: 25796 - DNA, 80 bp, synthetic construct
  misc_feature 1..80: note = Artificially Synthesized Probe
  source 1..80: mol_type = other DNA
agggcacctacaccgactgcgctatcaagaaggggctggagcagctcctcgtggggtgagtggcccccagcctcctgccc

SEQ ID NO: 25797 - DNA, 80 bp, synthetic construct
  misc_feature 1..80: note = Artificially Synthesized Probe
  source 1..80: mol_type = other DNA
cagacagagacagacagagagacagggacagacagagacagagagaccggaaacagaggcagagagactgagagactgag

SEQ ID NO: 25798 - DNA, 80 bp, synthetic construct
  misc_feature 1..80: note = Artificially Synthesized Probe
  source 1..80: mol_type = other DNA
agaaatgagacccacaggcgttatttcccatggtgaggttcttttcagtaacccccaccgtatagccaggatcagcaaag

SEQ ID NO: 25799 - DNA, 80 bp, synthetic construct
  misc_feature 1..80: note = Artificially Synthesized Probe
  source 1..80: mol_type = other DNA
cacgtccacccacacgtccacctgtgtgttcaggacgcatgtccctatgcatatccgcccatgtgcccgggacacatgtc

SEQ ID NO: 25800 - DNA, 80 bp, synthetic construct
  misc_feature 1..80: note = Artificially Synthesized Probe
  source 1..80: mol_type = other DNA
ccagatggaggggacggcggggtccagatggaggggacgtcggggctccagatggaggggacggcgggagtccagatgga

SEQ ID NO: 25801 - DNA, 80 bp, synthetic construct
  misc_feature 1..80: note = Artificially Synthesized Probe
  source 1..80: mol_type = other DNA
cccaggctgaccagatgtgatggggaaggtgctttaaagcccttgatccctgaaggctggatgaagcgtctttttaaaaa

SEQ ID NO: 25802 - DNA, 80 bp, synthetic construct
  misc_feature 1..80: note = Artificially Synthesized Probe
  source 1..80: mol_type = other DNA
gagcggcccctccccatcactgtcagtccccatgattctcagcagtgatgttgtcccctcgggttgggggcacccaagcc

SEQ ID NO: 25803 - DNA, 80 bp, synthetic construct
  misc_feature 1..80: note = Artificially Synthesized Probe
  source 1..80: mol_type = other DNA
cccgggtttgacgtaagtcacttcctctcactgatactttaaaactagcgctgtcagcagcacctcgtgtggaccgtttt

SEQ ID NO: 25804 - DNA, 80 bp, synthetic construct
  misc_feature 1..80: note = Artificially Synthesized Probe
  source 1..80: mol_type = other DNA
cccttagacaagatggcccttggctgggcctcacagggaacaaggttggagcattccaggaggtctttgtgcagggttgt

SEQ ID NO: 25805 - DNA, 80 bp, synthetic construct
  misc_feature 1..80: note = Artificially Synthesized Probe
  source 1..80: mol_type = other DNA
gcgcccagccatgtgcctgatgctgggacctgtttcatgtgaaggcgttgcccgtggacccggtgcccactttcccacca

SEQ ID NO: 25806 - DNA, 80 bp, synthetic construct
  misc_feature 1..80: note = Artificially Synthesized Probe
  source 1..80: mol_type = other DNA
cgtggaggggtcggggggacgtcaaagcagggatcgtgtgacttagtgactcagactgccttctaggcccactcctctga

SEQ ID NO: 25807 - DNA, 80 bp, synthetic construct
  misc_feature 1..80: note = Artificially Synthesized Probe
  source 1..80: mol_type = other DNA
aatcccagggtgtcaggatgaaaatgcactttcatctcattctaaattcccttctccgagcctctggaatcgctgtgcac

SEQ ID NO: 25808 - DNA, 80 bp, synthetic construct
  misc_feature 1..80: note = Artificially Synthesized Probe
  source 1..80: mol_type = other DNA
gtaatcaatagccactataagaaaaaaacaaagccactttcaaagggttgtggtaagaggcagtcctgtgagcaggccgg

SEQ ID NO: 25809 - DNA, 80 bp, synthetic construct
  misc_feature 1..80: note = Artificially Synthesized Probe
  source 1..80: mol_type = other DNA
tagtggggaagttgtaaacatttgaaccaccggacaggcctcatcgggaagcatcagcctaaccacaggccagggacagg

SEQ ID NO: 25810 - DNA, 80 bp, synthetic construct
  misc_feature 1..80: note = Artificially Synthesized Probe
  source 1..80: mol_type = other DNA
ctgggtgaggcctgtggtccaacgtgccatatccatctctctacagggcgaggctggccctatcggacctaaaggctacc

SEQ ID NO: 25811 - DNA, 80 bp, synthetic construct
  misc_feature 1..80: note = Artificially Synthesized Probe
  source 1..80: mol_type = other DNA
gcccctcacagcctcccctctcaaatcagaacccggtatcactgccctgcttttccatgacaggggtatccgggcaacag

SEQ ID NO: 25812 - DNA, 80 bp, synthetic construct
  misc_feature 1..80: note = Artificially Synthesized Probe
  source 1..80: mol_type = other DNA
gtgcctgggacgccggatgctggggctggggaatgctggaagaggctgggagagtgggaggcggcgggagggaattttgg

SEQ ID NO: 25813 - DNA, 80 bp, synthetic construct
  misc_feature 1..80: note = Artificially Synthesized Probe
  source 1..80: mol_type = other DNA
tgggggcctgggtctctgggtacatccttgaggaggctcctcagccagcccctaccggcctccaaagccctcccaggccc

SEQ ID NO: 25814 - DNA, 80 bp, synthetic construct
  misc_feature 1..80: note = Artificially Synthesized Probe
  source 1..80: mol_type = other DNA
cggccctgacccctgatcccaggtgggctcggccccgcggcaggcctggccccaaccggcccttcctgccctttgctatg

SEQ ID NO: 25815 - DNA, 80 bp, synthetic construct
  misc_feature 1..80: note = Artificially Synthesized Probe
  source 1..80: mol_type = other DNA
actgcacggcttttctcttttacagacaagaagtgtccagattacacctgccccagtgagtacctcggcggccgggacac

SEQ ID NO: 25816 - DNA, 80 bp, synthetic construct
  misc_feature 1..80: note = Artificially Synthesized Probe
  source 1..80: mol_type = other DNA
tccccactcatcactaaacagagtaaaatgtgatgcgaattttcccgaccaacctgattcgctagattttttttaaggaa

SEQ ID NO: 25817 - DNA, 80 bp, synthetic construct
  misc_feature 1..80: note = Artificially Synthesized Probe
  source 1..80: mol_type = other DNA
aacaacgcaaacctctccttcctcagaatagtgatgtgttcgacgttttatcaaaggccccctttctatgttcatgttag

SEQ ID NO: 25818 - DNA, 80 bp, synthetic construct
  misc_feature 1..80: note = Artificially Synthesized Probe
  source 1..80: mol_type = other DNA
cgatccgcggagctccttgttcttgggataacacagctctggcttggaggcccccttgcacttcgactctggtgattatt

SEQ ID NO: 25819 - DNA, 80 bp, synthetic construct
  misc_feature 1..80: note = Artificially Synthesized Probe
  source 1..80: mol_type = other DNA
tttcatagataaggaatgatgccttgttggggggtttgttctgcatgtctttggtttttgtgcagtacaaggctatttgg

SEQ ID NO: 25820 - DNA, 80 bp, synthetic construct
  misc_feature 1..80: note = Artificially Synthesized Probe
  source 1..80: mol_type = other DNA
tccacatctgcaccaacaggtgtcattttccgggttcgcttggttttttttaaatgttaaccatcctaatgggtgtgagg

SEQ ID NO: 25821 - DNA, 80 bp, synthetic construct
  misc_feature 1..80: note = Artificially Synthesized Probe
  source 1..80: mol_type = other DNA
cgtttgttgaaaagactgtctttatcgaatggtcttgacggcttgattgaaagtcatatatgcaagggtttctttctgga

SEQ ID NO: 25822 - DNA, 80 bp, synthetic construct
  misc_feature 1..80: note = Artificially Synthesized Probe
  source 1..80: mol_type = other DNA
tcatgaaagggtattgaattttgtcatatggtttctctgcatcaactgcaatgatcatgtgtgagttttttttcctcctt

SEQ ID NO: 25823 - DNA, 80 bp, synthetic construct
  misc_feature 1..80: note = Artificially Synthesized Probe
  source 1..80: mol_type = other DNA
tgtatgatgtagatctttcaaaatctattgacacagactttgttgttgcaactaaccccgtcattgcaagcccttctccg

SEQ ID NO: 25824 - DNA, 80 bp, synthetic construct
  misc_feature 1..80: note = Artificially Synthesized Probe
  source 1..80: mol_type = other DNA
attgagtctgaggagcagaaataaaaagattgaataaaggtgatcagagcctaaggggtctgtgggataccatcaagcaa

SEQ ID NO: 25825 - DNA, 80 bp, synthetic construct
  misc_feature 1..80: note = Artificially Synthesized Probe
  source 1..80: mol_type = other DNA
ttttgtgacatcaataactaaaagggttggggacagagccattcagggagcagagttttgtttatgccattgaagctaaa

SEQ ID NO: 25826 - DNA, 80 bp, synthetic construct
  misc_feature 1..80: note = Artificially Synthesized Probe
  source 1..80: mol_type = other DNA
gggatggtaatagtacctatgtccaaggccataagtccaattgtgaatgttgaatgaagggatataggacagtatctggt

SEQ ID NO: 25827 - DNA, 80 bp, synthetic construct
  misc_feature 1..80: note = Artificially Synthesized Probe
  source 1..80: mol_type = other DNA
taaattctcatcagatggttttatctaaccctatatgctgtgacttactttccatctgactctggcatgacactacacga

SEQ ID NO: 25828 - DNA, 80 bp, synthetic construct
  misc_feature 1..80: note = Artificially Synthesized Probe
  source 1..80: mol_type = other DNA
ttccaacagttatacttttatttttactgtcttattgcattggcttccaacacaacactgaatggtagcgtaagatctgc

SEQ ID NO: 25829 - DNA, 80 bp, synthetic construct
  misc_feature 1..80: note = Artificially Synthesized Probe
  source 1..80: mol_type = other DNA
gcatctcaactagtgttcagctctcagcagagagaaagccctggagagggtagctcctctctgcagctggtcgtcctgac

SEQ ID NO: 25830 - DNA, 80 bp, synthetic construct
  misc_feature 1..80: note = Artificially Synthesized Probe
  source 1..80: mol_type = other DNA
gggctgccgctgccatcagtaatatttatagtgatatttatctgtagagttacttttagggacttttttttttatcaagc

SEQ ID NO: 25831 - DNA, 80 bp, synthetic construct
  misc_feature 1..80: note = Artificially Synthesized Probe
  source 1..80: mol_type = other DNA
atgacggctgtgtccctacacttgacagagtcctccctccctccttatcaaagtcctgtttaaagggaatggagccaggc

SEQ ID NO: 25832 - DNA, 80 bp, synthetic construct
  misc_feature 1..80: note = Artificially Synthesized Probe
  source 1..80: mol_type = other DNA
gggcagtgaggtcaaacccacaaacaggcacggggccaggaaacggggctccaacagcagtccctcctgaggctggctcg

SEQ ID NO: 25833 - DNA, 80 bp, synthetic construct
  misc_feature 1..80: note = Artificially Synthesized Probe
  source 1..80: mol_type = other DNA
ctggcctccgggcaggtgggatccatccaccctggactcgaggcccgagcccagcccagcaggtcaggggagaaggaact

SEQ ID NO: 25834 - DNA, 80 bp, synthetic construct
  misc_feature 1..80: note = Artificially Synthesized Probe
  source 1..80: mol_type = other DNA
ccggcctttcttcccttctattttctgtcatggcttaagccaggcttggttttttaaacttgcctagaacacctgaccga

SEQ ID NO: 25835 - DNA, 80 bp, synthetic construct
  misc_feature 1..80: note = Artificially Synthesized Probe
  source 1..80: mol_type = other DNA
ctcttttgtggcttactaaataagcagttttagggagcctggtttgaatgtcccctgcattttctggtttgaacatcccc

SEQ ID NO: 25836 - DNA, 80 bp, synthetic construct
  misc_feature 1..80: note = Artificially Synthesized Probe
  source 1..80: mol_type = other DNA
ttttgcaggtggctttgtgggaagcttccctcagagctgggagaaatgggtcaaagcaaacccttgtctgacagaggctg

SEQ ID NO: 25837 - DNA, 80 bp, synthetic construct
  misc_feature 1..80: note = Artificially Synthesized Probe
  source 1..80: mol_type = other DNA
agctggactggtctcacagaggcatcccagcctctgcagggcccccagatccagcctgatctgtcagcttacacatgtgt

SEQ ID NO: 25838 - DNA, 80 bp, synthetic construct
  misc_feature 1..80: note = Artificially Synthesized Probe
  source 1..80: mol_type = other DNA
tggagcacttgggccctggctcatggggagaaccccacccgccgtgtgccgagctccacctctcactcctctctcagggc

SEQ ID NO: 25839 - DNA, 80 bp, synthetic construct
  misc_feature 1..80: note = Artificially Synthesized Probe
  source 1..80: mol_type = other DNA
ccatctctgctgtcaccatggtgccgcattgggctctggggacacggggagggacaggaagaacaggccatgtgccctga

SEQ ID NO: 25840 - DNA, 80 bp, synthetic construct
  misc_feature 1..80: note = Artificially Synthesized Probe
  source 1..80: mol_type = other DNA
tccccaccaggccccagcccatcacctaaaacgccactcaccagacatccaactccacctggagcctccccagatcattc

SEQ ID NO: 25841 - DNA, 80 bp, synthetic construct
  misc_feature 1..80: note = Artificially Synthesized Probe
  source 1..80: mol_type = other DNA
aggggacccgggtgggtgctgcaccccaaggtaaggggggcccaggtgagggctatacctcaaggtaggggacccaggcg

SEQ ID NO: 25842 - DNA, 80 bp, synthetic construct
  misc_feature 1..80: note = Artificially Synthesized Probe
  source 1..80: mol_type = other DNA
tgggcctgaggtcctggatgggccacagggaaaggaggagctgggaccctcaagacagaggtccacggcccccacaggca

SEQ ID NO: 25843 - DNA, 80 bp, synthetic construct
  misc_feature 1..80: note = Artificially Synthesized Probe
  source 1..80: mol_type = other DNA
gtgaaggataggtccagcccagcatcaggaaaagagcacagctcagaacgcagcacagtggcctcacccagagtgtgaat

SEQ ID NO: 25844 - DNA, 80 bp, synthetic construct
  misc_feature 1..80: note = Artificially Synthesized Probe
  source 1..80: mol_type = other DNA
ctgagcacaaaacaagggatggataacgatggatggatgggcaagtggatgggggtgggcaaatggatggatgggaggat

SEQ ID NO: 25845 - DNA, 80 bp, synthetic construct
  misc_feature 1..80: note = Artificially Synthesized Probe
  source 1..80: mol_type = other DNA
ggttagtgggtggctgggtggatggatgatggatgggtgactgggtggatggatggatgggttagtgggtggctgggtgg

SEQ ID NO: 25846 - DNA, 80 bp, synthetic construct
  misc_feature 1..80: note = Artificially Synthesized Probe
  source 1..80: mol_type = other DNA
gcatgtgcacgtgaccctagggtctgaggtctccccggtaccccccgatgaccctgccacccccccagactgtgagaagc

SEQ ID NO: 25847 - DNA, 80 bp, synthetic construct
  misc_feature 1..80: note = Artificially Synthesized Probe
  source 1..80: mol_type = other DNA
gagagtgaaaacctctactccatcgcctgcgacaagccacagcaggtgcgcaacatgacgctgttctccgacctggtcgc

SEQ ID NO: 25848 - DNA, 80 bp, synthetic construct
  misc_feature 1..80: note = Artificially Synthesized Probe
  source 1..80: mol_type = other DNA
gcgggtcgcggtgtgcgttcgggcgttccatggggagctcccggtgggtgagctgggccactgagcacattcacaggccc

SEQ ID NO: 25849 - DNA, 80 bp, synthetic construct
  misc_feature 1..80: note = Artificially Synthesized Probe
  source 1..80: mol_type = other DNA
tttcttttctcgtgatctctctggttctggcctcagggtgacgtgggcctcgtagggtcctgtggtggctcctccccaga

SEQ ID NO: 25850 - DNA, 80 bp, synthetic construct
  misc_feature 1..80: note = Artificially Synthesized Probe
  source 1..80: mol_type = other DNA
cgcacggaagaggggccggacgccaccttccccaggaccattcccctgatccaacagttgctaaacgccacggagctcac

SEQ ID NO: 25851 - DNA, 80 bp, synthetic construct
  misc_feature 1..80: note = Artificially Synthesized Probe
  source 1..80: mol_type = other DNA
gatgttccagcaccaggttccagcggagcctcggaaacaggccccagaggctggtgagcctcgctgggtgtgggcactaa

SEQ ID NO: 25852 - DNA, 80 bp, synthetic construct
  misc_feature 1..80: note = Artificially Synthesized Probe
  source 1..80: mol_type = other DNA
tctgccagctcgtgcgtgctcagacggcgtccatgtctcaagcgttctgtgaaggctgcggtgcagcgtgaggtcaccct

SEQ ID NO: 25853 - DNA, 80 bp, synthetic construct
  misc_feature 1..80: note = Artificially Synthesized Probe
  source 1..80: mol_type = other DNA
cacacccagggctgccctgcagaaacgcccccgcagagcccagtggtctgtgaggttgcaggcagggtgcgaatggaagg

SEQ ID NO: 25854 - DNA, 80 bp, synthetic construct
  misc_feature 1..80: note = Artificially Synthesized Probe
  source 1..80: mol_type = other DNA
cctccctccccctgcagccatcccaaggctcctgacctacctggcccctgagctctggagcaagccctgacccaataaag

SEQ ID NO: 25855 - DNA, 80 bp, synthetic construct
  misc_feature 1..80: note = Artificially Synthesized Probe
  source 1..80: mol_type = other DNA
ccataagctcctgtatgacagaagccatgttctttttagcggcctccgtagcatgatgtacgttatgttatgttatgtta

SEQ ID NO: 25856 - DNA, 80 bp, synthetic construct
  misc_feature 1..80: note = Artificially Synthesized Probe
  source 1..80: mol_type = other DNA
ggagtcttgctctgtcgcccaggctggggtcccgtggcgggatctcggctcactacaagctccgccttccgggttcatgc

SEQ ID NO: 25857 - DNA, 80 bp, synthetic construct
  misc_feature 1..80: note = Artificially Synthesized Probe
  source 1..80: mol_type = other DNA
gtcaccacacccagctatggttctcaatttttattctagcctaacacactggaaagatacagtacacctccatcagtggc

SEQ ID NO: 25858 - DNA, 80 bp, synthetic construct
  misc_feature 1..80: note = Artificially Synthesized Probe
  source 1..80: mol_type = other DNA
attacaggcgtgagccaccgtgcccggccggtttttttttttttttttaaatagagatggggtctcgctgtgttgcctag

SEQ ID NO: 25859 - DNA, 80 bp, synthetic construct
  misc_feature 1..80: note = Artificially Synthesized Probe
  source 1..80: mol_type = other DNA
gccctaattcgctccattgataaatccttttctacttccaaagtatcttctgcatctgttctttccacttctactgctac

SEQ ID NO: 25860 - DNA, 80 bp, synthetic construct
  misc_feature 1..80: note = Artificially Synthesized Probe
  source 1..80: mol_type = other DNA
actctgagaagtatttacatgtctgtacccatgtctgacccctctaaaccagcgaatcctgagctttactttcaattttt

SEQ ID NO: 25861 - DNA, 80 bp, synthetic construct
  misc_feature 1..80: note = Artificially Synthesized Probe
  source 1..80: mol_type = other DNA
cgcaatctcacctcgctgcaacctccgcctcccaggttcaagcagttctcctgccttagcctctcgagtagctgggatta

SEQ ID NO: 25862 - DNA, 80 bp, synthetic construct
  misc_feature 1..80: note = Artificially Synthesized Probe
  source 1..80: mol_type = other DNA
cctgacttttaagaaacctatctcgctaatttcagtcagtcttttaatttcagttccctcaacagagtagcacctaggaa

SEQ ID NO: 25863 - DNA, 80 bp, synthetic construct
  misc_feature 1..80: note = Artificially Synthesized Probe
  source 1..80: mol_type = other DNA
tgatgacattcagagacacctggttccaggcttgtttctgtatcttgtaggcacattttatttgcccttttgaatcatag

SEQ ID NO: 25864 - DNA, 80 bp, synthetic construct
  misc_feature 1..80: note = Artificially Synthesized Probe
  source 1..80: mol_type = other DNA
tgatacggttcttccttgatgccaggcaacatcccaaacaactttaattaatttatttaactctcccaccagccctatga

SEQ ID NO: 25865 - DNA, 80 bp, synthetic construct
  misc_feature 1..80: note = Artificially Synthesized Probe
  source 1..80: mol_type = other DNA
gggattacaggcgtgagccacctcttccggccaattttaatattttttttgtagagatgagatggggtttcaccatgttg

SEQ ID NO: 25866 - DNA, 80 bp, synthetic construct
  misc_feature 1..80: note = Artificially Synthesized Probe
  source 1..80: mol_type = other DNA
agaaaaaaaaaaacattcagcgagaggtttctgggattcatcagactgctgaggagtttgtggcaccaaaaagattaaga

SEQ ID NO: 25867 - DNA, 80 bp, synthetic construct
  misc_feature 1..80: note = Artificially Synthesized Probe
  source 1..80: mol_type = other DNA
tttattctgaacatccttactctggaaggcccatgcctctcatcacctgctgttcaggtccaggctagggttacaaactt

SEQ ID NO: 25868 - DNA, 80 bp, synthetic construct
  misc_feature 1..80: note = Artificially Synthesized Probe
  source 1..80: mol_type = other DNA
aacacagcaccccgctctccccagtagagaagtgacgccactaactgggggttatcacatctttgtttttggttttggtt

SEQ ID NO: 25869 - DNA, 80 bp, synthetic construct
  misc_feature 1..80: note = Artificially Synthesized Probe
  source 1..80: mol_type = other DNA
caccgtgcctggccaattttttgtattttttttttttttttgagatggagtctcgctctgtcgcccaggctggagtgcag

SEQ ID NO: 25870 - DNA, 80 bp, synthetic construct
  misc_feature 1..80: note = Artificially Synthesized Probe
  source 1..80: mol_type = other DNA
aaaaaaaaaaaaaaatgtgttccaactcttgatctgggctgacttgaacccctttcttcacagacttccaccgctgtcag

SEQ ID NO: 25871 - DNA, 80 bp, synthetic construct
  misc_feature 1..80: note = Artificially Synthesized Probe
  source 1..80: mol_type = other DNA
gatttatccacggtttcttcatctaccccttttcgttttcttctttcctttgctgaagtattctaaagcaagtcccagac

SEQ ID NO: 25872 - DNA, 80 bp, synthetic construct
  misc_feature 1..80: note = Artificially Synthesized Probe
  source 1..80: mol_type = other DNA
gcatgagctaccgcacccagctgaatctttcaaaataaaaaaaattaccctttaacttggcaattccacatctagggatg

SEQ ID NO: 25873 - DNA, 80 bp, synthetic construct
  misc_feature 1..80: note = Artificially Synthesized Probe
  source 1..80: mol_type = other DNA
agacagtttttccacagacagggttggggatggtgtaaggatgagtccagcatattacatttattgtccactttatttct

SEQ ID NO: 25874 - DNA, 80 bp, synthetic construct
  misc_feature 1..80: note = Artificially Synthesized Probe
  source 1..80: mol_type = other DNA
cagcctcgttttttttcacagctgcctgctattccatctcccctgtttggacaaacagcatagtgttgacttgaggtttt

SEQ ID NO: 25875 - DNA, 80 bp, synthetic construct
  misc_feature 1..80: note = Artificially Synthesized Probe
  source 1..80: mol_type = other DNA
ctattttcgctgagcttttcctcttatttcagttttcttcgagatcaaatctggtttgtagatgtgcttggggagaatgg

SEQ ID NO: 25876 - DNA, 80 bp, synthetic construct
  misc_feature 1..80: note = Artificially Synthesized Probe
  source 1..80: mol_type = other DNA
gaagtcttcttggttgcctagactcactggcaacatctcatttgaagtgacagtcttggttgtttttgtccagcctattc

SEQ ID NO: 25877 - DNA, 80 bp, synthetic construct
  misc_feature 1..80: note = Artificially Synthesized Probe
  source 1..80: mol_type = other DNA
agagctctgcacccaaagtgtatgcatatagaagtaggtggtggagttttatgaaatctacttattaggaagccagcgtt

SEQ ID NO: 25878 - DNA, 80 bp, synthetic construct
  misc_feature 1..80: note = Artificially Synthesized Probe
  source 1..80: mol_type = other DNA
agtaaatggataaagatataccatgctaatgctagtcacagaaagcaggaatagctgtgttaatttcaaacacagcagac

SEQ ID NO: 25879 - DNA, 80 bp, synthetic construct
  misc_feature 1..80: note = Artificially Synthesized Probe
  source 1..80: mol_type = other DNA
acaggtaacatcaaaagtgtcctacacagaaatgctgggtgaagatcccagtaataaaaccaactccagaaaacaagaaa

SEQ ID NO: 25880 - DNA, 80 bp, synthetic construct
  misc_feature 1..80: note = Artificially Synthesized Probe
  source 1..80: mol_type = other DNA
tatacatgcagcaacctagatggatctctaattatgctgtgtgaaggctaaaccataaaaaaaaacctgagtgatttcct

SEQ ID NO: 25881 - DNA, 80 bp, synthetic construct
  misc_feature 1..80: note = Artificially Synthesized Probe
  source 1..80: mol_type = other DNA
ccaagaatggttcattcaatttgctttgttactttaggtctcattccttcctctcgttgcaagctttgctgtgacattta

SEQ ID NO: 25882 - DNA, 80 bp, synthetic construct
  misc_feature 1..80: note = Artificially Synthesized Probe
  source 1..80: mol_type = other DNA
cagtagaaagcacagagttaggcttccaattctgactaaagccattgacaacagggaaaaggcaaccttaggaattctcc

SEQ ID NO: 25883 - DNA, 80 bp, synthetic construct
  misc_feature 1..80: note = Artificially Synthesized Probe
  source 1..80: mol_type = other DNA
ttaaccattacaggtaacaatcacaggcttcagggatcagaacatggatatctctgagaggtccttacttagcctaccac

SEQ ID NO: 25884 - DNA, 80 bp, synthetic construct
  misc_feature 1..80: note = Artificially Synthesized Probe
  source 1..80: mol_type = other DNA
ctgtgaaatgcaccttatcctttagtgaaagatgatataaatagcttagttgccttcaaactggcagagactttttgaat

SEQ ID NO: 25885 - DNA, 80 bp, synthetic construct
  misc_feature 1..80: note = Artificially Synthesized Probe
  source 1..80: mol_type = other DNA
aactttgatgcttctatggtcttgatctccaggtcaatgcaatgccccagaatggcttccatttgccaggcctaccaacc

SEQ ID NO: 25886 - DNA, 80 bp, synthetic construct
  misc_feature 1..80: note = Artificially Synthesized Probe
  source 1..80: mol_type = other DNA
gtttactctacttggctccaaaattctgtttctttcctgtaggtaaatcatgtcgtaatcctccagatcctgtgaatggc

SEQ ID NO: 25887 - DNA, 80 bp, synthetic construct
  misc_feature 1..80: note = Artificially Synthesized Probe
  source 1..80: mol_type = other DNA
agatcacattaataagcactggggattaagacatcaatatatttcggggtaagggggacacaattctcattcattgctgg

SEQ ID NO: 25888 - DNA, 80 bp, synthetic construct
  misc_feature 1..80: note = Artificially Synthesized Probe
  source 1..80: mol_type = other DNA
gtgcataaacagacacgcacacaaataagtgcaggtaaaacaggaaatttgaacaaaatctgtggattataactgtttca

SEQ ID NO: 25889 - DNA, 80 bp, synthetic construct
  misc_feature 1..80: note = Artificially Synthesized Probe
  source 1..80: mol_type = other DNA
ctcttcggggccctggggaggagactcccaaaagtctagacatgttcacccacatcctgtatgtggtttctggaaacgaa

SEQ ID NO: 25890 - DNA, 80 bp, synthetic construct
  misc_feature 1..80: note = Artificially Synthesized Probe
  source 1..80: mol_type = other DNA
agccaagatcgcaccattgcactccagccttggcgacaagagtgaaaatctgtctcaaaaaaaaagaacaacaacaacag

SEQ ID NO: 25891 - DNA, 80 bp, synthetic construct
  misc_feature 1..80: note = Artificially Synthesized Probe
  source 1..80: mol_type = other DNA
gtgaagggcctaatttggccttctttaatgaatcttattgataaaagcccatccatgcatccatgcatccatacttttaa

SEQ ID NO: 25892 - DNA, 80 bp, synthetic construct
  misc_feature 1..80: note = Artificially Synthesized Probe
  source 1..80: mol_type = other DNA
catgtaccacgagatcaacacatcctcttgaaaggccccatgcactataaacctcagaagtgaacatatattttaaccta

SEQ ID NO: 25893 - DNA, 80 bp, synthetic construct
  misc_feature 1..80: note = Artificially Synthesized Probe
  source 1..80: mol_type = other DNA
ccgtctactttggttttagagactccatgatcaattagcccaataacaatgtcctcttcaatcaaatcattctgattgct

SEQ ID NO: 25894 - DNA, 80 bp, synthetic construct
  misc_feature 1..80: note = Artificially Synthesized Probe
  source 1..80: mol_type = other DNA
tctttgaatcatgttgaagtttatcaaacactttagttacatatattgatgtaatcatatctgtttctctttttctgtta

SEQ ID NO: 25895 - DNA, 80 bp, synthetic construct
  misc_feature 1..80: note = Artificially Synthesized Probe
  source 1..80: mol_type = other DNA
cgttcttgggaagtttttttttttccaaccattttcctgtaccatgtagacttttggctgaagtataacatatatatata

SEQ ID NO: 25896 - DNA, 80 bp, synthetic construct
  misc_feature 1..80: note = Artificially Synthesized Probe
  source 1..80: mol_type = other DNA
gtcttctttattattatgttgtatttcattgatgatcttgagtaccttttcacgtttgtgaagtgctattccaaactttt

SEQ ID NO: 25897 - DNA, 80 bp, synthetic construct
  misc_feature 1..80: note = Artificially Synthesized Probe
  source 1..80: mol_type = other DNA
attctttaattatttacttcttagatatgcacctgtttcatctcagctccagcaaatttgttaaatttacttataaattg

SEQ ID NO: 25898 - DNA, 80 bp, synthetic construct
  misc_feature 1..80: note = Artificially Synthesized Probe
  source 1..80: mol_type = other DNA
ttgcttttattttaatgtccttatcaggtttgggcatcaagattatgttggcctgataaaatgtgttaaaaattatttat

SEQ ID NO: 25899 - DNA, 80 bp, synthetic construct
  misc_feature 1..80: note = Artificially Synthesized Probe
  source 1..80: mol_type = other DNA
aggccagaaatccagttaagatgtcaataggattggttccatctgcaagctgttctgtgcctctctccaggcttccttcc

SEQ ID NO: 25900 - DNA, 80 bp, synthetic construct
  misc_feature 1..80: note = Artificially Synthesized Probe
  source 1..80: mol_type = other DNA
ttcttaaatgactactctagagatagacatccttgatttactatagtctgctaaaattgtacttttaccactctccaaac

SEQ ID NO: 25901 - DNA, 80 bp, synthetic construct
  misc_feature 1..80: note = Artificially Synthesized Probe
  source 1..80: mol_type = other DNA
atgtgcctgctttctttaaactcaccaattagaactccccatgggagataccttggcttgtagatgcaagatgctgggtc

SEQ ID NO: 25902 - DNA, 80 bp, synthetic construct
  misc_feature 1..80: note = Artificially Synthesized Probe
  source 1..80: mol_type = other DNA
ggttttgagtattttcttctgtcctagcttccggttcattgattttctttcagagtctaacctgctattaatctcacaca

SEQ ID NO: 25903 - DNA, 80 bp, synthetic construct
  misc_feature 1..80: note = Artificially Synthesized Probe
  source 1..80: mol_type = other DNA
tttgtcattgtttctgcaggcatctggggacattagcaatctaggaccactctaattcagtctcaggaactgtgattttc

SEQ ID NO: 25904 - DNA, 80 bp, synthetic construct
  misc_feature 1..80: note = Artificially Synthesized Probe
  source 1..80: mol_type = other DNA
catgcatgcaaatactataggaaatcatatcagtaagaaaggcaggacacatcatattatgcccattgaagctacaactt

SEQ ID NO: 25905 - DNA, 80 bp, synthetic construct
  misc_feature 1..80: note = Artificially Synthesized Probe
  source 1..80: mol_type = other DNA
gttattaggtagttaccagttgttctatgtttgtctgtattgttttgcttgagatactgtcttgatctgtcactcacgtt

SEQ ID NO: 25906 - DNA, 80 bp, synthetic construct
  misc_feature 1..80: note = Artificially Synthesized Probe
  source 1..80: mol_type = other DNA
gctaataggtcacaaaaatgttagaagggcaggaaaagcaataggacaaaggcaaagttacgagagatcagggagctgct

SEQ ID NO: 25907 - DNA, 80 bp, synthetic construct
  misc_feature 1..80: note = Artificially Synthesized Probe
  source 1..80: mol_type = other DNA
tttgtactgggtgaacagtaattggaagcattctagaaggaactgtccattgtgaaatcttagttgcatactttagatga

SEQ ID NO: 25908 - DNA, 80 bp, synthetic construct
  misc_feature 1..80: note = Artificially Synthesized Probe
  source 1..80: mol_type = other DNA
aatatataagtaacacattaagcaaaaaatatcagccagaaacggtggctcacccctgtaatcctagcacctttgggagg

SEQ ID NO: 25909 - DNA, 80 bp, synthetic construct
  misc_feature 1..80: note = Artificially Synthesized Probe
  source 1..80: mol_type = other DNA
gtgtgtgaacgtgagtagcaggagtaacatttcaggccagtctctcccttcatctgttcagtatttgacccatgacctcc

SEQ ID NO: 25910 - DNA, 80 bp, synthetic construct
  misc_feature 1..80: note = Artificially Synthesized Probe
  source 1..80: mol_type = other DNA
gtccctaaaaaggacatgaactcatcaatttttatggctgcatagtattccatggtgtatatgtgccacattttcttaat

SEQ ID NO: 25911 - DNA, 80 bp, synthetic construct
  misc_feature 1..80: note = Artificially Synthesized Probe
  source 1..80: mol_type = other DNA
aaaaatgagccccatatgttcaataatgagtagactactgatttctcctagtctccccatttataatttccccaatagaa

SEQ ID NO: 25912 - DNA, 80 bp, synthetic construct
  misc_feature 1..80: note = Artificially Synthesized Probe
  source 1..80: mol_type = other DNA
ccaggaaccgttactatccggaagattcaggatagacaagtctcttttgtactttgcaatacactttcattgatatctca

SEQ ID NO: 25913 - DNA, 80 bp, synthetic construct
  misc_feature 1..80: note = Artificially Synthesized Probe
  source 1..80: mol_type = other DNA
ctggcttcctaaaaatgtgaaaaattaaatgggagctatctttacattaaattatatgagcattagctgagcgtggtggc

SEQ ID NO: 25914 - DNA, 80 bp, synthetic construct
  misc_feature 1..80: note = Artificially Synthesized Probe
  source 1..80: mol_type = other DNA
atgggaaagaaaataataaatgactagatcaggaaaaaaatggtgtaggaagacaaattctgtttgaataactaggtggg

SEQ ID NO: 25915 - DNA, 80 bp, synthetic construct
  misc_feature 1..80: note = Artificially Synthesized Probe
  source 1..80: mol_type = other DNA
cgcagatgttatgctttttacaaattgaacgcttgtgggaacgctgtgtaagcatgttcgtcggcatcatttatccaaca

SEQ ID NO: 25916 - DNA, 80 bp, synthetic construct
  misc_feature 1..80: note = Artificially Synthesized Probe
  source 1..80: mol_type = other DNA
cccttaagcattaagttaaatataccttgcctgtgtctataaatggaagaacaaagcctgatgacagaggtatgtttgcg

SEQ ID NO: 25917 - DNA, 80 bp, synthetic construct
  misc_feature 1..80: note = Artificially Synthesized Probe
  source 1..80: mol_type = other DNA
gaccacaaaggatacagaatattacaaaaacttaggtgataaagcagcagcagtatcgggaggattaactccaattttga

SEQ ID NO: 25918 - DNA, 80 bp, synthetic construct
  misc_feature 1..80: note = Artificially Synthesized Probe
  source 1..80: mol_type = other DNA
gagcccctttgaaaatgtcaggcatcaggtgctcacagcacacggtccagctgttggtgctcacccttgctcagcacacg

SEQ ID NO: 25919 - DNA, 80 bp, synthetic construct
  misc_feature 1..80: note = Artificially Synthesized Probe
  source 1..80: mol_type = other DNA
tagctgggcatggcagcatgtgactgtagtcacagctaggcaggagaatgaagtgggaggatcacctgagcccaggaggc

SEQ ID NO: 25920 - DNA, 80 bp, synthetic construct
  misc_feature 1..80: note = Artificially Synthesized Probe
  source 1..80: mol_type = other DNA
ttccatatagtaattgagggggaaggaaaaggaatagcaaggaatccatttttctcttccaccagaaataagctccctca

SEQ ID NO: 25921 - DNA, 80 bp, synthetic construct
  misc_feature 1..80: note = Artificially Synthesized Probe
  source 1..80: mol_type = other DNA
tctaattttttttaaactagtctttagctcacttaaacagtcccccaatttcatcctctgttgggtgaacacctcccagt

SEQ ID NO: 25922 - DNA, 80 bp, synthetic construct
  misc_feature 1..80: note = Artificially Synthesized Probe
  source 1..80: mol_type = other DNA
ttattatattaatatccaatagaataaagacacatgccttctatatagagagaactaaattaataatggtgagataacag

SEQ ID NO: 25923 - DNA, 80 bp, synthetic construct
  misc_feature 1..80: note = Artificially Synthesized Probe
  source 1..80: mol_type = other DNA
tgctgagcagggtcgaggagcaaattttctaagtagtgaacatgaaattcaggtgtgtagacatgcacatgtgctgaaat

SEQ ID NO: 25924 - DNA, 80 bp, synthetic construct; identical to SEQ ID NO: 25906
  misc_feature 1..80: note = Artificially Synthesized Probe
  source 1..80: mol_type = other DNA

SEQ ID NO: 25925 - DNA, 80 bp, synthetic construct; identical to SEQ ID NO: 25907
  misc_feature 1..80: note = Artificially Synthesized Probe
  source 1..80: mol_type = other DNA

SEQ ID NO: 25926 - DNA, 80 bp, synthetic construct; identical to SEQ ID NO: 25908
  misc_feature 1..80: note = Artificially Synthesized Probe
  source 1..80: mol_type = other DNA

SEQ ID NO: 25927 - DNA, 80 bp, synthetic construct; identical to SEQ ID NO: 25909
  misc_feature 1..80: note = Artificially Synthesized Probe
  source 1..80: mol_type = other DNA

SEQ ID NO: 25928 - DNA, 80 bp, synthetic construct; identical to SEQ ID NO: 25910
  misc_feature 1..80: note = Artificially Synthesized Probe
  source 1..80: mol_type = other DNA

SEQ ID NO: 25929 - DNA, 80 bp, synthetic construct; identical to SEQ ID NO: 25911
  misc_feature 1..80: note = Artificially Synthesized Probe
  source 1..80: mol_type = other DNA

SEQ ID NO: 25930 - DNA, 80 bp, synthetic construct; identical to SEQ ID NO: 25912
  misc_feature 1..80: note = Artificially Synthesized Probe
  source 1..80: mol_type = other DNA

SEQ ID NO: 25931 - DNA, 80 bp, synthetic construct; identical to SEQ ID NO: 25913
  misc_feature 1..80: note = Artificially Synthesized Probe
  source 1..80: mol_type = other DNA

SEQ ID NO: 25932 - DNA, 80 bp, synthetic construct; identical to SEQ ID NO: 25914
  misc_feature 1..80: note = Artificially Synthesized Probe
  source 1..80: mol_type = other DNA

SEQ ID NO: 25933 - DNA, 80 bp, synthetic construct; identical to SEQ ID NO: 25915
  misc_feature 1..80: note = Artificially Synthesized Probe
  source 1..80: mol_type = other DNA

SEQ ID NO: 25934 - DNA, 80 bp, synthetic construct; identical to SEQ ID NO: 25916
  misc_feature 1..80: note = Artificially Synthesized Probe
  source 1..80: mol_type = other DNA

SEQ ID NO: 25935 - DNA, 80 bp, synthetic construct; identical to SEQ ID NO: 25917
  misc_feature 1..80: note = Artificially Synthesized Probe
  source 1..80: mol_type = other DNA

SEQ ID NO: 25936 - DNA, 80 bp, synthetic construct; identical to SEQ ID NO: 25918
  misc_feature 1..80: note = Artificially Synthesized Probe
  source 1..80: mol_type = other DNA

SEQ ID NO: 25937 - DNA, 80 bp, synthetic construct; identical to SEQ ID NO: 25919
  misc_feature 1..80: note = Artificially Synthesized Probe
  source 1..80: mol_type = other DNA

SEQ ID NO: 25938 - DNA, 80 bp, synthetic construct; identical to SEQ ID NO: 25920
  misc_feature 1..80: note = Artificially Synthesized Probe
  source 1..80: mol_type = other DNA

SEQ ID NO: 25939 - DNA, 80 bp, synthetic construct; identical to SEQ ID NO: 25921
  misc_feature 1..80: note = Artificially Synthesized Probe
  source 1..80: mol_type = other DNA

SEQ ID NO: 25940 - DNA, 80 bp, synthetic construct; identical to SEQ ID NO: 25922
  misc_feature 1..80: note = Artificially Synthesized Probe
  source 1..80: mol_type = other DNA

SEQ ID NO: 25941 - DNA, 80 bp, synthetic construct; identical to SEQ ID NO: 25923
  misc_feature 1..80: note = Artificially Synthesized Probe
  source 1..80: mol_type = other DNA

SEQ ID NO: 25942 - DNA, 80 bp, synthetic construct; identical to SEQ ID NO: 25906
  misc_feature 1..80: note = Artificially Synthesized Probe
  source 1..80: mol_type = other DNA

SEQ ID NO: 25943 - DNA, 80 bp, synthetic construct; identical to SEQ ID NO: 25907
  misc_feature 1..80: note = Artificially Synthesized Probe
  source 1..80: mol_type = other DNA

SEQ ID NO: 25944 - DNA, 80 bp, synthetic construct
  misc_feature 1..80: note = Artificially Synthesized Probe
  source 1..80: mol_type = other DNA
tgggaggtggagtttgcagtgagccgagatggcaccattgcactccagcgtggacaataagagtgaaactccatctcagg

SEQ ID NO: 25945 - DNA, 80 bp, synthetic construct
  misc_feature 1..80: note = Artificially Synthesized Probe
  source 1..80: mol_type = other DNA
gtgcaactctgccatctgctggcctcagatcctcaaaatcctgaaattggggctgggccttagattgtgaactaagtgtc

SEQ ID NO: 25946 - DNA, 80 bp, synthetic construct
  misc_feature 1..80: note = Artificially Synthesized Probe
  source 1..80: mol_type = other DNA
acttaggtggggagagggacaagaaaaaaaataaattcaatgctatgagacaatagagcaaagcactgaggaatgaggca

SEQ ID NO: 25947 - DNA, 80 bp, synthetic construct
  misc_feature 1..80: note = Artificially Synthesized Probe
  source 1..80: mol_type = other DNA
ttagcacacatatatacatttgagaaatatttcctaagaatgtaggctccttcctcagcgctgtgtccccaggatcctga

SEQ ID NO: 25948 - DNA, 80 bp, synthetic construct
  misc_feature 1..80: note = Artificially Synthesized Probe
  source 1..80: mol_type = other DNA
gggttcagaatatctaacccagcccctccatatttccataattacagtgtagtatttatttgtatgtatgcatttgccac

SEQ ID NO: 25949 - DNA, 80 bp, synthetic construct
  misc_feature 1..80: note = Artificially Synthesized Probe
  source 1..80: mol_type = other DNA
gatttcttggtctctaggtcactgtcaagccccagatcattttctgtttgccaagttgaaaacccaaaccaatgcatctg

SEQ ID NO: 25950 - DNA, 80 bp, synthetic construct
  misc_feature 1..80: note = Artificially Synthesized Probe
  source 1..80: mol_type = other DNA
gatagtactttctagccacatctcagcaaggaaactaggctattgccacctgctcttaagaggcttgaacacaggtgtta

SEQ ID NO: 25951 - DNA, 80 bp, synthetic construct
  misc_feature 1..80: note = Artificially Synthesized Probe
  source 1..80: mol_type = other DNA
tgaaggctgacagaagctggaagctagcagaatttggttcctgaggtttaaggaaagaagccctctccataacataaagg

SEQ ID NO: 25952 - DNA, 80 bp, synthetic construct
  misc_feature 1..80: note = Artificially Synthesized Probe
  source 1..80: mol_type = other DNA
tggctgactttgagaggttcaagacttcagcggaggaaataactgaagatgtggtgaaaatcgcaagagaactacaatta

SEQ ID NO: 25953 - DNA, 80 bp, synthetic construct
  misc_feature 1..80: note = Artificially Synthesized Probe
  source 1..80: mol_type = other DNA
cttccctctgggtctgtgtcctcatatgctgttctctctgtgcatgtctgtttccaaagttttcccttttaataaggaca

SEQ ID NO: 25954 - DNA, 80 bp, synthetic construct
  misc_feature 1..80: note = Artificially Synthesized Probe
  source 1..80: mol_type = other DNA
gcatggcagcatatgcctgtagtcacagctaggcaggagactaaagtgggaggatcacctgagcccaggaggctgaggct

SEQ ID NO: 25955 - DNA, 80 bp, synthetic construct
  misc_feature 1..80: note = Artificially Synthesized Probe
  source 1..80: mol_type = other DNA
agctgaatctatctcttccatatagcaagtgagagggaaagaaaaggaaagacaaggaatgcatttgtctcttccaccag

SEQ ID NO: 25956 - DNA, 80 bp, synthetic construct
  misc_feature 1..80: note = Artificially Synthesized Probe
  source 1..80: mol_type = other DNA
tttgtcaacgtgagttgaaatctctttccccattcaccccaccattgaatcctagagttgtcctcctagaattacaaaga

SEQ ID NO: 25957 - DNA, 80 bp, synthetic construct
  misc_feature 1..80: note = Artificially Synthesized Probe
  source 1..80: mol_type = other DNA
acatggtgaaatcatgtctctacaaaaaatacaaaaactaaacaggcacggtggcacatgcctgtagtcccaactactcg

SEQ ID NO: 25958 - DNA, 80 bp, synthetic construct
  misc_feature 1..80: note = Artificially Synthesized Probe
  source 1..80: mol_type = other DNA
aaataaggttaactgagtagagcagcactcataacattttaaaactataagaacatgtctgtacattagcaaatattaga

SEQ ID NO: 25959 - DNA, 80 bp, synthetic construct
  misc_feature 1..80: note = Artificially Synthesized Probe
  source 1..80: mol_type = other DNA
atctctctcaagtatattgaaaaattatatggactttctctatgatcagctatgtgctaagcactttatatgcattttct

SEQ ID NO: 25960 - DNA, 80 bp, synthetic construct
  misc_feature 1..80: note = Artificially Synthesized Probe
  source 1..80: mol_type = other DNA
ctgtcttatttaatggcttgtgtttttgatggctcatcttgtctactgatgccacaatagctggcttagcagctgtgtag

SEQ ID NO: 25961 - DNA, 80 bp, synthetic construct
  misc_feature 1..80: note = Artificially Synthesized Probe
  source 1..80: mol_type = other DNA
agctaggagaaaatacctcatgccctgtagatttacaagtgaatttggggccttgtgctagggagaattgggttctattt

SEQ ID NO: 25962 - DNA, 80 bp, synthetic construct
  misc_feature 1..80: note = Artificially Synthesized Probe
  source 1..80: mol_type = other DNA
agacgtatacatatggacacgtatatgtagacgtatacatatggacacgtatatgtatacgtatacatatggacacgtat

SEQ ID NO: 25963 - DNA, 80 bp, synthetic construct
  misc_feature 1..80: note = Artificially Synthesized Probe
  source 1..80: mol_type = other DNA
cacctactatgtgccaagcaatcttctgggaactggggatatacctataaacaagacagataagtccatgtttaagtttt

SEQ ID NO: 25964 - DNA, 80 bp, synthetic construct
  misc_feature 1..80: note = Artificially Synthesized Probe
  source 1..80: mol_type = other DNA
cttggaggtaacaagtggaagtttcagtggagtgctggcaaacactgattggaatgaattctagggagaatgaatgggag

SEQ ID NO: 25965 - DNA, 80 bp, synthetic construct
  misc_feature 1..80: note = Artificially Synthesized Probe
  source 1..80: mol_type = other DNA
ttaaacagtacttgacatacagcagatattcaaaaacatgcttgttgaattaatggatgattcccctttaatgtgactgt

SEQ ID NO: 25966 - DNA, 80 bp, synthetic construct
  misc_feature 1..80: note = Artificially Synthesized Probe
  source 1..80: mol_type = other DNA
actgagggaggggtggagggaaggcagtaaggcacagttatgtaaatcaggaagaaaaatgtattcactggagacgacat

SEQ ID NO: 25967 - DNA, 80 bp, synthetic construct
  misc_feature 1..80: note = Artificially Synthesized Probe
  source 1..80: mol_type = other DNA
cacacaatatactctctcagaaagaagacatagcttcttacagaaggctgatggcttagtctgttttgttctggttcttt

SEQ ID NO: 25968 - DNA, 80 bp, synthetic construct
  misc_feature 1..80: note = Artificially Synthesized Probe
  source 1..80: mol_type = other DNA
attggatttagggcccactctaaataaaagatgatctaatctcaagaacctaatcttaattctatctgaaaaaccattat

SEQ ID NO: 25969 - DNA, 80 bp, synthetic construct
  misc_feature 1..80: note = Artificially Synthesized Probe
  source 1..80: mol_type = other DNA
aacaggggtacaaaagaaatttatgtgagttgcagtgaactgtgcttggctaactaaaaataggggagacatcccaaatt

SEQ ID NO: 25970 - DNA, 80 bp, synthetic construct
  misc_feature 1..80: note = Artificially Synthesized Probe
  source 1..80: mol_type = other DNA
taggaaaatcatgtggacctccaccagaacccttcaatggaatggtgcatataaacacagatacacagtttggatcaaca

SEQ ID NO: 25971 - DNA, 80 bp, synthetic construct
  misc_feature 1..80: note = Artificially Synthesized Probe
  source 1..80: mol_type = other DNA
ttgaagatcaacttaatgaaataaagcatgaagacaaaaaaagaatgaaaaggaatgaacaaagcctccaagaaatatgg

SEQ ID NO: 25972 - DNA, 80 bp, synthetic construct
  misc_feature 1..80: note = Artificially Synthesized Probe
  source 1..80: mol_type = other DNA
ctttaaaccaacgaagatcaaaagagacaagagcattacataatggcaaaggatgcaacaagaagagctaactatcctaa

SEQ ID NO: 25973 - DNA, 80 bp, synthetic construct
  misc_feature 1..80: note = Artificially Synthesized Probe
  source 1..80: mol_type = other DNA
taccatcagagaatactataaacacctctacgcaaataaactagaaaatctagaagaaatggataaattcctggatacat

SEQ ID NO: 25974 - DNA, 80 bp, synthetic construct
  misc_feature 1..80: note = Artificially Synthesized Probe
  source 1..80: mol_type = other DNA
gcatgcgctttgaaaaccagcacaagacaaggatgccctctctcaccactcctattcaacatagtattggaagctctggc

SEQ ID NO: 25975 - DNA, 80 bp, synthetic construct
  misc_feature 1..80: note = Artificially Synthesized Probe
  source 1..80: mol_type = other DNA
agacttaaatgtaagacctaaaactataaaaaccctagaagaaaacctaggcaataccattcaggacataggcatgggca

SEQ ID NO: 25976 - DNA, 80 bp, synthetic construct
  misc_feature 1..80: note = Artificially Synthesized Probe
  source 1..80: mol_type = other DNA
ttaaattttactgcaacaactaactgccccttgtcatcagcctattctgtcactagagtgagtcagtattcctcttttct

SEQ ID NO: 25977 - DNA, 80 bp, synthetic construct
  misc_feature 1..80: note = Artificially Synthesized Probe
  source 1..80: mol_type = other DNA
gtcttaaataagaaggaaccccaaacatacaccagttagatatactgcctacaaaaagaaaaactcccacaaagctgtgg

SEQ ID NO: 25978 - DNA, 80 bp, synthetic construct
  misc_feature 1..80: note = Artificially Synthesized Probe
  source 1..80: mol_type = other DNA
attaacagatataaactccattggtaaaatcactttgaggtccttaatacttcttaaagtggccgggcgctgtggctcat

SEQ ID NO: 25979 - DNA, 80 bp, synthetic construct
  misc_feature 1..80: note = Artificially Synthesized Probe
  source 1..80: mol_type = other DNA
caagacctgtgcactgaaaactcagtaactgaaaatgagcaaatgatgtgatagacatgtctccaagggaaatatacaaa

SEQ ID NO: 25980 - DNA, 80 bp, synthetic construct
  misc_feature 1..80: note = Artificially Synthesized Probe
  source 1..80: mol_type = other DNA
agataaccagtggaaggagagaatagggagttacaactcaatacatccagtttctcattgggatggtgaaaatttttgga

SEQ ID NO: 25981 - DNA, 80 bp, synthetic construct
  misc_feature 1..80: note = Artificially Synthesized Probe
  source 1..80: mol_type = other DNA
accgagagaaagttaagagcatacaacagtagataagcaatagacaacccgatataaaaatgaggaaagaatatgcacag

SEQ ID NO: 25982 - DNA, 80 bp, synthetic construct
  misc_feature 1..80: note = Artificially Synthesized Probe
  source 1..80: mol_type = other DNA
tgtgtgtttgattgggtttggaaaaatcaggaccacctgagatggaggtgggagtgacaaaatatacatggtatactaag

SEQ ID NO: 25983 - DNA, 80 bp, synthetic construct
  misc_feature 1..80: note = Artificially Synthesized Probe
  source 1..80: mol_type = other DNA
attactcataaaaatttctggggtgctgatgccaaaactgtcctcagagaaatttttcaatcctttttgttacttgacag

SEQ ID NO: 25984 - DNA, 80 bp, synthetic construct
  misc_feature 1..80: note = Artificially Synthesized Probe
  source 1..80: mol_type = other DNA
aatctcttggtggtatcttttgttcttgacttggactgcaggacacttcagttcctcactacatgggcttctccaaagga

SEQ ID NO: 25985 - DNA, 80 bp, synthetic construct
  misc_feature 1..80: note = Artificially Synthesized Probe
  source 1..80: mol_type = other DNA
gttcaaaggaaaagaacactcggcatccttcctattattcaaagtagttgtggaaattcaaaccagtaaaatgacagccc

SEQ ID NO: 25986 - DNA, 80 bp, synthetic construct
  misc_feature 1..80: note = Artificially Synthesized Probe
  source 1..80: mol_type = other DNA
agtccataacctacctaacaaagtccttaatgtctggaattaaagtggtttcgcatttcaactgttagcaaaaacactac

SEQ ID NO: 25987 - DNA, 80 bp, synthetic construct
  misc_feature 1..80: note = Artificially Synthesized Probe
  source 1..80: mol_type = other DNA
gatacacacggattttgctttgatgaatgtcatgaggcagagatctagcttagcttttcagatatttgccctatcaatga

SEQ ID NO: 25988 - DNA, 80 bp, synthetic construct
  misc_feature 1..80: note = Artificially Synthesized Probe
  source 1..80: mol_type = other DNA
cagaggactcccatgatcctgtgctcttagacaacttttaaatgtatgataggagacaggcagaggaaaacacaggtaat

SEQ ID NO: 25989 - DNA, 80 bp, synthetic construct
  misc_feature 1..80: note = Artificially Synthesized Probe
  source 1..80: mol_type = other DNA
aaggaaaggtgagaagtgaaacctttattgcaggtggccaatggcccagttaaaaatagagggttccattactaatgaag

SEQ ID NO: 25990 - DNA, 80 bp, synthetic construct
  misc_feature 1..80: note = Artificially Synthesized Probe
  source 1..80: mol_type = other DNA
atctactacttgtctcgtctcaggcaataatgtcacatgggataagaaggcacctatttgtgagagtaagttgaaatact

SEQ ID NO: 25991 - DNA, 80 bp, synthetic construct
  misc_feature 1..80: note = Artificially Synthesized Probe
  source 1..80: mol_type = other DNA
gaaataaggcatattttaatggctatcagtttttcggaaaggtaaaaaagtgcaccaggaggaattaaaggttgagatgc

SEQ ID NO: 25992 - DNA, 80 bp, synthetic construct
  misc_feature 1..80: note = Artificially Synthesized Probe
  source 1..80: mol_type = other DNA
aaccatatccaatggagacttctacagcaacaatagaacatcttttcacaatggaacggtggtaacttaccagtgccaca

SEQ ID NO: 25993 - DNA, 80 bp, synthetic construct
  misc_feature 1..80: note = Artificially Synthesized Probe
  source 1..80: mol_type = other DNA
ttgagagaactgagtcttagtgatattaaagaacttttccaaggctctgactccagagcctaatcataatgtacagtgga

SEQ ID NO: 25994 - DNA, 80 bp, synthetic construct
  misc_feature 1..80: note = Artificially Synthesized Probe
  source 1..80: mol_type = other DNA
acatggagtgggaagaattaggactggtcacagggacagaaaggaagctaacagttcagccctgtgctgactgaaagagg

SEQ ID NO: 25995 - DNA, 80 bp, synthetic construct
  misc_feature 1..80: note = Artificially Synthesized Probe
  source 1..80: mol_type = other DNA
gagattaatttatggaagggtagttttgaaataagggtagggactaagtggcaccactttcagaaggcaatgagaaaatg

SEQ ID NO: 25996 - DNA, 80 bp, synthetic construct
  misc_feature 1..80: note = Artificially Synthesized Probe
  source 1..80: mol_type = other DNA
gagttgttgtcccgcatccaagaagaacaaggttatactgacaatagaagggtgaggagggtggagaagagttttattga

SEQ ID NO: 25997 - DNA, 80 bp, synthetic construct
  misc_feature 1..80: note = Artificially Synthesized Probe
  source 1..80: mol_type = other DNA
gcctcatgacccactaatgagaataagtgggatgtcagagagccatcagtgaaagatgacacctgaaggttatggctctt

SEQ ID NO: 25998 - DNA, 80 bp, synthetic construct
  misc_feature 1..80: note = Artificially Synthesized Probe
  source 1..80: mol_type = other DNA
gggcttcccatgtgccaggactttccatgtgtagaaaaagcaatgaatagtgaatgaatagtgaagacacctccctactt

SEQ ID NO: 25999 - DNA, 80 bp, synthetic construct
  misc_feature 1..80: note = Artificially Synthesized Probe
  source 1..80: mol_type = other DNA
gatgacaccactggaaatttggtattggtcctgatggtaatggtcttgaatcaccaagaaacatttacattgctaaagat

SEQ ID NO: 26000 - DNA, 80 bp, synthetic construct
  misc_feature 1..80: note = Artificially Synthesized Probe
  source 1..80: mol_type = other DNA
agagaagggggtggacagtgaagagaattgatgaggtccagatttagtagggaatgttttcaaagtactgaaaacaaatg

SEQ ID NO: 26001 - DNA, 80 bp, synthetic construct
  misc_feature 1..80: note = Artificially Synthesized Probe
  source 1..80: mol_type = other DNA
ggctggttgaggtcttcatgtacctctaatagccagagatattggatgtgttcatgtattcatatgtctatgtttaactg

SEQ ID NO: 26002 - DNA, 80 bp, synthetic construct
  misc_feature 1..80: note = Artificially Synthesized Probe
  source 1..80: mol_type = other DNA
gaaaagaagtctgtgcttgaagatgaaggatgtactgatggctgggcagaaaaagaaagtaaaacaaaggataagttaaa

SEQ ID NO: 26003 - DNA, 80 bp, synthetic construct
  misc_feature 1..80: note = Artificially Synthesized Probe
  source 1..80: mol_type = other DNA
ttgcagagctgttaatcaacagtgaatgcacagtacattccatattctattactttacattaagaaatgggagtcaggaa

SEQ ID NO: 26004 - DNA, 80 bp, synthetic construct
  misc_feature 1..80: note = Artificially Synthesized Probe
  source 1..80: mol_type = other DNA
catggagcagatgagcaaagttaataatgaacagcctttcttaatccaagttagtgctacactttcccttctccccatct

SEQ ID NO: 26005 - DNA, 80 bp, synthetic construct
  misc_feature 1..80: note = Artificially Synthesized Probe
  source 1..80: mol_type = other DNA
atgtaccagaacagaatgtatcaaaacattttttgggtatgaggattggggtgacttttttctttagttctgtattataa

SEQ ID NO: 26006 - DNA, 80 bp, synthetic construct
  misc_feature 1..80: note = Artificially Synthesized Probe
  source 1..80: mol_type = other DNA
cctgctcatttgcacaaatagaaagccataagaccagtcttctgagcccatatctgtgatttgcctaaataagaatagtt

SEQ ID NO: 26007 - DNA, 80 bp, synthetic construct
  misc_feature 1..80: note = Artificially Synthesized Probe
  source 1..80: mol_type = other DNA
ggcaacatggtaaaaccctgtctctactaaacatacacaaaattagctgggcgaggtgggacacacaactgtaataccag

SEQ ID NO: 26008 - DNA, 80 bp, synthetic construct
  misc_feature 1..80: note = Artificially Synthesized Probe
  source 1..80: mol_type = other DNA
tacgccactacaccaggctattttttgtatttttagtacagaaagggttttgccatcttggccaggctggtcttgaattc

SEQ ID NO: 26009 - DNA, 80 bp, synthetic construct
  misc_feature 1..80: note = Artificially Synthesized Probe
  source 1..80: mol_type = other DNA
gtaatgtccatggcacaaccattctctctctgaccagtggctaccagaaatgtggcagaaagaaagatcatgatcctcgt

SEQ ID NO: 26010 - DNA, 80 bp, synthetic construct
  misc_feature 1..80: note = Artificially Synthesized Probe
  source 1..80: mol_type = other DNA
gcctttcattaggtttcaggtcctgagcaaggagagagctagttttaggaagagactgttattatccttgctccaaagtt

SEQ ID NO: 26011 - DNA, 80 bp, synthetic construct
  misc_feature 1..80: note = Artificially Synthesized Probe
  source 1..80: mol_type = other DNA
acacacacagaaatgatctcaccttctttaaaatgctcctcaaggaggtctactttaactatcctagtaaagatgacatg

SEQ ID NO: 26012 - DNA, 80 bp, synthetic construct
  misc_feature 1..80: note = Artificially Synthesized Probe
  source 1..80: mol_type = other DNA
attcagtgtctggtggggatcgctttctagttaatagacttcaatcttttctccgtgttctcaaatcagagaaaaggagt

SEQ ID NO: 26013 - DNA, 80 bp, synthetic construct
  misc_feature 1..80: note = Artificially Synthesized Probe
  source 1..80: mol_type = other DNA
catctttccatattgagatttcctggcgtttcacacagacttggcaagttcttcctgtgatttaatctcactgccttgtt

SEQ ID NO: 26014 - DNA, 80 bp, synthetic construct
  misc_feature 1..80: note = Artificially Synthesized Probe
  source 1..80: mol_type = other DNA
cactcactctctatgagaccctgagcaagatacttatcctcagtaaatttcattttccttgcctgtgaaatggagataat

SEQ ID NO: 26015 - DNA, 80 bp, synthetic construct
  misc_feature 1..80: note = Artificially Synthesized Probe
  source 1..80: mol_type = other DNA
tccatttacattctcaaggaggcagcagcgttcatccccgaactctgcaaacaaatgaagaaaatagcaggtacctatat

SEQ ID NO: 26016 - DNA, 80 bp, synthetic construct
  misc_feature 1..80: note = Artificially Synthesized Probe
  source 1..80: mol_type = other DNA
cctttagtggaagactttgctaacccctgaactatatcatactatgagaaatttctcactggctagttccccttttaacc

SEQ ID NO: 26017 - DNA, 80 bp, synthetic construct
  misc_feature 1..80: note = Artificially Synthesized Probe
  source 1..80: mol_type = other DNA
tctggctaacacggtgaaaccccttctctactaaatacacacacacacacacaaaatttagccaggcgtggtggtgggcg

SEQ ID NO: 26018 - DNA, 80 bp, synthetic construct
  misc_feature 1..80: note = Artificially Synthesized Probe
  source 1..80: mol_type = other DNA
cctgtgttgttttttgcctgttaactctattgcattcatgtagttgcttatttattcttcaaacattcttagccacttac

SEQ ID NO: 26019 - DNA, 80 bp, synthetic construct
  misc_feature 1..80: note = Artificially Synthesized Probe
  source 1..80: mol_type = other DNA
aagcacgtggataccttgtactaaatccactactgcagctcattcttaactgtaagtagaagaggaggacatgctttctg

SEQ ID NO: 26020 - DNA, 80 bp, synthetic construct
  misc_feature 1..80: note = Artificially Synthesized Probe
  source 1..80: mol_type = other DNA
tactaatcttcctcagcgcagaccctttacgggtgtcaggctgggggaaggtcaggtctttcccttcccatgaggccata

SEQ ID NO: 26021 - DNA, 80 bp, synthetic construct
  misc_feature 1..80: note = Artificially Synthesized Probe
  source 1..80: mol_type = other DNA
gaaatgtctaaagtgagattatcttctgttccctgtagatggcatctgaccatgtcccagtgatgctcagactcattata

SEQ ID NO: 26022 - DNA, 80 bp, synthetic construct
  misc_feature 1..80: note = Artificially Synthesized Probe
  source 1..80: mol_type = other DNA
gggacacgactgagtttgtcctgtgcaattgtggtagaattgacctcgaggtgcccaatctataatagttccgaattcac

SEQ ID NO: 26023 - DNA, 80 bp, synthetic construct
  misc_feature 1..80: note = Artificially Synthesized Probe
  source 1..80: mol_type = other DNA
ttttggaaagctttactacagtatcctggtccattgtcagttttgatctttttctggaactcccattacagcaaaacaag

SEQ ID NO: 26024 - DNA, 80 bp, synthetic construct
  misc_feature 1..80: note = Artificially Synthesized Probe
  source 1..80: mol_type = other DNA
acatctcgaatacaattttggtgggaaaggagccaattgatttcaacagaatcagatctgagcttcataaagtctttgaa

SEQ ID NO: 26025 - DNA, 80 bp, synthetic construct
  misc_feature 1..80: note = Artificially Synthesized Probe
  source 1..80: mol_type = other DNA
cccaaagtgctgcgattacaggcatgagccaccgcgcctggccgctttcgatattttctaaactttaattcaaaagcact

SEQ ID NO: 26026 - DNA, 80 bp, synthetic construct
  misc_feature 1..80: note = Artificially Synthesized Probe
  source 1..80: mol_type = other DNA
tcaccaagaaagaagggcaaataggtggtgagtatatgtaaagatacttgataggacttttgcttagttgaatctttagc

SEQ ID NO: 26027 - DNA, 80 bp, synthetic construct
  misc_feature 1..80: note = Artificially Synthesized Probe
  source 1..80: mol_type = other DNA
tgctgggattacagatgtgagccaccgtgcctgccatacttttttgttttttgaaacaaggtcttgctctgtgacccagg

SEQ ID NO: 26028 - DNA, 80 bp, synthetic construct
  misc_feature 1..80: note = Artificially Synthesized Probe
  source 1..80: mol_type = other DNA
cggcaactgaactctagccggaaagagccagggttatgtgcacatgggaggtggggaggacaggggctgtatgtgaccct

SEQ ID NO: 26029 - DNA, 80 bp, synthetic construct
  misc_feature 1..80: note = Artificially Synthesized Probe
  source 1..80: mol_type = other DNA
cctttctccctctttcttttactctctttttttttttttgagatagagtttcactcttgtcacccaggctggagcgcaat

SEQ ID NO: 26030 - DNA, 80 bp, synthetic construct
  misc_feature 1..80: note = Artificially Synthesized Probe
  source 1..80: mol_type = other DNA
tactttttgtatttttagaagaaatggggtttcatcatgttggccaggcggatctcgaactcctgacctcaagtgattcg

SEQ ID NO: 26031 - DNA, 80 bp, synthetic construct
  misc_feature 1..80: note = Artificially Synthesized Probe
  source 1..80: mol_type = other DNA
agcacagcccaaagtcagggtcttgccttctacgtgtctgtaccccgtgcctggttcctagtagatttttttttattttt

SEQ ID NO: 26032 - DNA, 80 bp, synthetic construct
  misc_feature 1..80: note = Artificially Synthesized Probe
  source 1..80: mol_type = other DNA
cgagactccgtctcaaaaaaaaaaaaaaaaaaaaatctgaggctcagagaggtgaagtcacttactcaaggtcacacagc

SEQ ID NO: 26033 - DNA, 80 bp, synthetic construct
  misc_feature 1..80: note = Artificially Synthesized Probe
  source 1..80: mol_type = other DNA
actagtgagggctgcccccttcaactcaggccttggggactccaaactctggcagaagtcatatgaatgttgggattaat

SEQ ID NO: 26034 - DNA, 80 bp, synthetic construct
  misc_feature 1..80: note = Artificially Synthesized Probe
  source 1..80: mol_type = other DNA
ctgcctcagcctcccaagtagctgagattacaggcatgcaccaccaggcctggctaattttgtttttcttttttcttttt

SEQ ID NO: 26035 - DNA, 80 bp, synthetic construct
  misc_feature 1..80: note = Artificially Synthesized Probe
  source 1..80: mol_type = other DNA
gtcctctcacagtgctggattataggcatgagctactgcgccccgcctggggcttttattatcttaattttacataggag

SEQ ID NO: 26036 - DNA, 80 bp, synthetic construct
  misc_feature 1..80: note = Artificially Synthesized Probe
  source 1..80: mol_type = other DNA
gtgcctggccttattttattttatttaaagtcaaggtttccctctgtcaccacaactgcctcaaattcctaagctcaagt

SEQ ID NO: 26037 - DNA, 80 bp, synthetic construct
  misc_feature 1..80: note = Artificially Synthesized Probe
  source 1..80: mol_type = other DNA
gaccgtgtgttggttatttcgagccctgctgccaagggagattctgtggtggcaggagtgatagtttttgttgttgctgt

SEQ ID NO: 26038 - DNA, 80 bp, synthetic construct
  misc_feature 1..80: note = Artificially Synthesized Probe
  source 1..80: mol_type = other DNA
tagtgttttcgatctgatacctctttcatttcctgaaggcagttggcgtccctgcacccgccgtcattcctctgattttt

SEQ ID NO: 26039 - DNA, 80 bp, synthetic construct
  misc_feature 1..80: note = Artificially Synthesized Probe
  source 1..80: mol_type = other DNA
tatcaacatccaggaatgaatggcggactccaggtggcagcaatttgggtgcagcaaacttttttttttttttggagata

SEQ ID NO: 26040 - DNA, 80 bp, synthetic construct
  misc_feature 1..80: note = Artificially Synthesized Probe
  source 1..80: mol_type = other DNA
ccacagtccccacccagcctgctgcactcagtatcaatgcctgagtttgatattctcatctgttttttttttttttctat

SEQ ID NO: 26041 - DNA, 80 bp, synthetic construct
  misc_feature 1..80: note = Artificially Synthesized Probe
  source 1..80: mol_type = other DNA
agtcttgaactcctggacttatgcgatcctcttgccttggcctcccaaagtgctgggattacagcactgtgaaccaccgc

SEQ ID NO: 26042 - DNA, 80 bp, synthetic construct
  misc_feature 1..80: note = Artificially Synthesized Probe
  source 1..80: mol_type = other DNA
aggtgaagtggggtcaggacagtggggactgtcgcaccatccccaaagtgaagactttaattttttaattttaattattt

SEQ ID NO: 26043 - DNA, 80 bp, synthetic construct
  misc_feature 1..80: note = Artificially Synthesized Probe
  source 1..80: mol_type = other DNA
tctgctaagctcctgatcatctttatccagggtcattccccccaccaccctatgtcctgggtaattgtatcccattttac

SEQ ID NO: 26044 - DNA, 80 bp, synthetic construct
  misc_feature 1..80: note = Artificially Synthesized Probe
  source 1..80: mol_type = other DNA
accttggatgaatgacttcccctctctggccttgggttctcttggcttgtaacgtgaggcctctgggggagatgtcagtg

SEQ ID NO: 26045 - DNA, 80 bp, synthetic construct
  misc_feature 1..80: note = Artificially Synthesized Probe
  source 1..80: mol_type = other DNA
taaataaaataaataataaagagccagaggcccttgaagaatggatggaatttggactttagcggggctgggggaccccg

SEQ ID NO: 26046 - DNA, 80 bp, synthetic construct
  misc_feature 1..80: note = Artificially Synthesized Probe
  source 1..80: mol_type = other DNA
tgccccccttccccaatcagtgttctccagaactttgcacaacgatgctgcctcccgcgtggctgctgatgctgtgccag

SEQ ID NO: 26047 - DNA, 80 bp, synthetic construct
  misc_feature 1..80: note = Artificially Synthesized Probe
  source 1..80: mol_type = other DNA
gcctaaaacagacctggacagacaggcagacgtagtctgaaacagacctgaacagacagacagacgcacacacacaacag

SEQ ID NO: 26048 - DNA, 80 bp, synthetic construct
  misc_feature 1..80: note = Artificially Synthesized Probe
  source 1..80: mol_type = other DNA
cctgaatccacctttgctttcctccatcagctcatgacccatgtgtgctttgtaaggcaccagccacatactggaaaccc

SEQ ID NO: 26049 - DNA, 80 bp, synthetic construct
  misc_feature 1..80: note = Artificially Synthesized Probe
  source 1..80: mol_type = other DNA
cgtttggatttcaggttcgatccgaccgggacaagttcgtcatcttcctcgatgtgaagcacttctccccggaggacctc

SEQ ID NO: 26050 - DNA, 80 bp, synthetic construct
  misc_feature 1..80: note = Artificially Synthesized Probe
  source 1..80: mol_type = other DNA
gctggagaaggtggtgctggggggtgaacgctgacctcctcatgtgctgcccctccctcgcctgggcccggtaaagcccc

SEQ ID NO: 26051 - DNA, 80 bp, synthetic construct
  misc_feature 1..80: note = Artificially Synthesized Probe
  source 1..80: mol_type = other DNA
ggccagtggcggaagtgaccgcacctcacactcctttagatagcagcctggctcccctggggtgcaggcgcctcaactct

SEQ ID NO: 26052 - DNA, 80 bp, synthetic construct
  misc_feature 1..80: note = Artificially Synthesized Probe
  source 1..80: mol_type = other DNA
agcattttgagataaaaggaaagggtcctgcgtagcgacacgaagttactgtttggaaaagctatgtttgtttctttctt

SEQ ID NO: 26053 - DNA, 80 bp, synthetic construct
  misc_feature 1..80: note = Artificially Synthesized Probe
  source 1..80: mol_type = other DNA
tggttatgtggcaagttagtattgaaattccatgttcagtcagtctagtgaataaaaccaacccagtgcatcagtcagtc

SEQ ID NO: 26054 - DNA, 80 bp, synthetic construct
  misc_feature 1..80: note = Artificially Synthesized Probe
  source 1..80: mol_type = other DNA
aaaatgcctgctgcacctttgtggaacacagttgaaaattactagattcagtcacttgttgacagattttgtgaacaggg

SEQ ID NO: 26055 - DNA, 80 bp, synthetic construct
  misc_feature 1..80: note = Artificially Synthesized Probe
  source 1..80: mol_type = other DNA
cttatcttgaccacctctaaaagttctcttgaagttacagattcctgagatctttatctgggagagcaagcatttggttg

SEQ ID NO: 26056 - DNA, 80 bp, synthetic construct
  misc_feature 1..80: note = Artificially Synthesized Probe
  source 1..80: mol_type = other DNA
ttagctgagactgtgtttgagaaactgagaggtgtggatgttgcttgtacatgtgcagccagcatgctcacagtgccgag

SEQ ID NO: 26057 - DNA, 80 bp, synthetic construct
  misc_feature 1..80: note = Artificially Synthesized Probe
  source 1..80: mol_type = other DNA
catctttcagaaactaagtcttttttttcctgcagatttctttgctttggctttttcccagtcactcacagggaggtatt

SEQ ID NO: 26058 - DNA, 80 bp, synthetic construct
  misc_feature 1..80: note = Artificially Synthesized Probe
  source 1..80: mol_type = other DNA
aatttggggggctgtcactttgtcagcccattaaacgtgggtaagttgcacttcaaacgttttgctttgtttttcccact

SEQ ID NO: 26059 - DNA, 80 bp, synthetic construct
  misc_feature 1..80: note = Artificially Synthesized Probe
  source 1..80: mol_type = other DNA
cttctccagttcactggtgggcctgcaccgcagcagttggcttcgtcagttcactggtgggcctgcaccgcagcagttgg

SEQ ID NO: 26060 - DNA, 80 bp, synthetic construct
  misc_feature 1..80: note = Artificially Synthesized Probe
  source 1..80: mol_type = other DNA
gctcccacccctgtggctgcacaggagacaaaacaacaacacttgttcctttgaagctgtttgttttttgttttgagatg

SEQ ID NO: 26061 - DNA, 80 bp, synthetic construct
  misc_feature 1..80: note = Artificially Synthesized Probe
  source 1..80: mol_type = other DNA
caaatgttaatgctttgctgagtttgcttatctttccccatgcacacgcacatttttctggagttggagagttagttgca

SEQ ID NO: 26062 - DNA, 80 bp, synthetic construct
  misc_feature 1..80: note = Artificially Synthesized Probe
  source 1..80: mol_type = other DNA
ttagaaacccaaggtctaggtgcaaaaaatacactcttccctctaaatacatttctacactcagaatgttggaacttagg

SEQ ID NO: 26063 - DNA, 80 bp, synthetic construct
  misc_feature 1..80: note = Artificially Synthesized Probe
  source 1..80: mol_type = other DNA
acgtggccagtatgcgagtgattttctacgaaggcctgtgtttggtcacgttgctggaagcctgcggagtgctgcctgcg

SEQ ID NO: 26064 - DNA, 80 bp, synthetic construct
  misc_feature 1..80: note = Artificially Synthesized Probe
  source 1..80: mol_type = other DNA
aggagtggacggctcccagggtggactcggggtgggggaggagtggacggctcccagggtggacttggggtgggggagga

SEQ ID NO: 26065 - DNA, 80 bp, synthetic construct
  misc_feature 1..80: note = Artificially Synthesized Probe
  source 1..80: mol_type = other DNA
gtggggcaggagctgtgcagagtttccttgcagaaggctgattgcaaaatgatgtcagctggagaccagggaagcctgtt

SEQ ID NO: 26066 - DNA, 80 bp, synthetic construct
  misc_feature 1..80: note = Artificially Synthesized Probe
  source 1..80: mol_type = other DNA
tttggaatatttgcacgtatacatgacgagatgtcttggggatgggacgtgagtaaacgcggaatccatttgtgttgcac

SEQ ID NO: 26067 - DNA, 80 bp, synthetic construct
  misc_feature 1..80: note = Artificially Synthesized Probe
  source 1..80: mol_type = other DNA
atagccttcagatttcagcacttcttccatggcttctgccagaagaccactgtttggacaaataaaacagtttgtgttta

SEQ ID NO: 26068 - DNA, 80 bp, synthetic construct
  misc_feature 1..80: note = Artificially Synthesized Probe
  source 1..80: mol_type = other DNA
gtttcccagcggcagatgcagacgcctcccttgggccccatacgagtcacactcaatgggtttccctggaggcagtcctt

SEQ ID NO: 26069 - DNA, 80 bp, synthetic construct
  misc_feature 1..80: note = Artificially Synthesized Probe
  source 1..80: mol_type = other DNA
tgggttcccttgagccaagtcctaactggggagggatgtgacagctgctcatggagctcaggaggtggccgcgctgccga

SEQ ID NO: 26070 - DNA, 80 bp, synthetic construct
  misc_feature 1..80: note = Artificially Synthesized Probe
  source 1..80: mol_type = other DNA
agcactccatactgttgaatccagcttttatagaaacaaccagtttcccttccccctccgttttcattggctcatgtatt

SEQ ID NO: 26071 - DNA, 80 bp, synthetic construct
  misc_feature 1..80: note = Artificially Synthesized Probe
  source 1..80: mol_type = other DNA
gaggtgaccagcgtacattctccaggggaaacacggggaaatgcagggtgagggcagaaccctgtttaatgcacacgaaa

SEQ ID NO: 26072 - DNA, 80 bp, synthetic construct
  misc_feature 1..80: note = Artificially Synthesized Probe
  source 1..80: mol_type = other DNA
atttctggctgtgttagtcatttgtgtgtctcgtggcatcttacacagcagtctattcttctgtgcagtataaactgtga

SEQ ID NO: 26073 - DNA, 80 bp, synthetic construct
  misc_feature 1..80: note = Artificially Synthesized Probe
  source 1..80: mol_type = other DNA
gtcactgttgtcatagttgcttcatcagtgttctgtcagctatagggatttgtggtcagtgatctttgaggtcactgttg

SEQ ID NO: 26074 - DNA, 80 bp, synthetic construct
  misc_feature 1..80: note = Artificially Synthesized Probe
  source 1..80: mol_type = other DNA
aatgttgttttcatgctgctgacaccacatccaccctgcagcccagggctcaagaaatgatttccagcttcaagtcttat

SEQ ID NO: 26075 - DNA, 80 bp, synthetic construct
  misc_feature 1..80: note = Artificially Synthesized Probe
  source 1..80: mol_type = other DNA
tgttgttgaaatgaccaaaaaggatttggaagattccatcaacttagttggtaaaccagcggcagggtctacgaggattg

SEQ ID NO: 26076 - DNA, 80 bp, synthetic construct
  misc_feature 1..80: note = Artificially Synthesized Probe
  source 1..80: mol_type = other DNA
ataggcattgagccaccacgcccggtgatttttaataataaagtatttttaaattaagttaggtacattgttcttttaga

SEQ ID NO: 26077 - DNA, 80 bp, synthetic construct
  misc_feature 1..80: note = Artificially Synthesized Probe
  source 1..80: mol_type = other DNA
ttagtgtagctatcatcggtggttatgtagttatcataggtggtgactgttggcgtggttattggggatggttatcgtgt

SEQ ID NO: 26078 - DNA, 80 bp, synthetic construct
  misc_feature 1..80: note = Artificially Synthesized Probe
  source 1..80: mol_type = other DNA
caggccttttctcccgactgttgctactattctttttagggcatctttcacttccagctgggccggggtgagcccatgct

SEQ ID NO: 26079 - DNA, 80 bp, synthetic construct
  misc_feature 1..80: note = Artificially Synthesized Probe
  source 1..80: mol_type = other DNA
gcaagctcctccgtactggctccagaggttgttagactgagcattttaaaattcaaaggtctttctagattggtcttagt

SEQ ID NO: 26080 - DNA, 80 bp, synthetic construct
  misc_feature 1..80: note = Artificially Synthesized Probe
  source 1..80: mol_type = other DNA
agaatttatccatcacgttgttataaatcttcatcattttatgtaagatttttttccctcctctgtggactggatcctct

SEQ ID NO: 26081 - DNA, 80 bp, synthetic construct
  misc_feature 1..80: note = Artificially Synthesized Probe
  source 1..80: mol_type = other DNA
caagaaaactgcagaccagtatccctttgaacatggatgcagaaattctcaacagaacatgggccctcgagcccagcaac

SEQ ID NO: 26082 - DNA, 80 bp, synthetic construct
  misc_feature 1..80: note = Artificially Synthesized Probe
  source 1..80: mol_type = other DNA
gtaatgtgtatgttttaacctgtatcaaaaacagcaaatgtgtttctcgcatttgtgatctcagaggtggtggtgcagag

SEQ ID NO: 26083 - DNA, 80 bp, synthetic construct
  misc_feature 1..80: note = Artificially Synthesized Probe
  source 1..80: mol_type = other DNA
ctttgcaaacttaggaagataacacagtaggcttaaagttcagaagataaatttatagatcaagaaacccagagcagagg

SEQ ID NO: 26084 - DNA, 80 bp, synthetic construct
  misc_feature 1..80: note = Artificially Synthesized Probe
  source 1..80: mol_type = other DNA
ctccatcacgtgaagaaccacatgcagagtgttttgagatcaaatgatgacttacctgttttacttatgcaagtgccttc

SEQ ID NO: 26085 - DNA, 80 bp, synthetic construct
  misc_feature 1..80: note = Artificially Synthesized Probe
  source 1..80: mol_type = other DNA
tcccctttccagttttcattgttagcctcagaatacttagaaagttcctttctaacctgtactcccactgtctcccaggt

SEQ ID NO: 26086 - DNA, 80 bp, synthetic construct
  misc_feature 1..80: note = Artificially Synthesized Probe
  source 1..80: mol_type = other DNA
aaagtatttacttcagaaacctcctttttgctagttagcgccagagtgagtagattaatcagggcaaaagagaatgagag

SEQ ID NO: 26087 - DNA, 80 bp, synthetic construct
  misc_feature 1..80: note = Artificially Synthesized Probe
  source 1..80: mol_type = other DNA
gtagaaatctctttccttgtggagactcaatggtttgcattattgatgatcgagaagatgtctggaagtttgcccccaat

SEQ ID NO: 26088 - DNA, 80 bp, synthetic construct
  misc_feature 1..80: note = Artificially Synthesized Probe
  source 1..80: mol_type = other DNA
cgtggtttaacttgtcagtcaggcatgcagctgacgtccaccctacgaaagttaagtgttttttgatctttagttttttg

SEQ ID NO: 26089 - DNA, 80 bp, synthetic construct
  misc_feature 1..80: note = Artificially Synthesized Probe
  source 1..80: mol_type = other DNA
aatgctaaattgcggtaacttttccttttgcatgcatatttagtaaatcattctcgaggcactgaggtctcagagccatc

SEQ ID NO: 26090 - DNA, 80 bp, synthetic construct
  misc_feature 1..80: note = Artificially Synthesized Probe
  source 1..80: mol_type = other DNA
caccatcttttaagaatagatcatgacagtgggtgaaattggagtttgggcacgttcatgctttcagaccgcagtcatcg

SEQ ID NO: 26091 - DNA, 80 bp, synthetic construct
  misc_feature 1..80: note = Artificially Synthesized Probe
  source 1..80: mol_type = other DNA
gtcttatttgaggccacggctctggcacgtatcatggggcgttggacacgcatgtgctcagtaaagcatttgaatcaagg

SEQ ID NO: 26092 - DNA, 80 bp, synthetic construct
  misc_feature 1..80: note = Artificially Synthesized Probe
  source 1..80: mol_type = other DNA
cctccagtgctggccggaacagcctgacgcagccgggtctcctgcaggcacagagaaggtgctgcaggcacaggagtgcg

SEQ ID NO: 26093 - DNA, 80 bp, synthetic construct
  misc_feature 1..80: note = Artificially Synthesized Probe
  source 1..80: mol_type = other DNA
tcttgggtcccaaaactaaaacaaaaccccgaccatcagcttctcagatgttgtccaggcacccgcatgtgcccacctgt

SEQ ID NO: 26094 - DNA, 80 bp, synthetic construct
  misc_feature 1..80: note = Artificially Synthesized Probe
  source 1..80: mol_type = other DNA
ttcctccccggttttctgtttcatagattgtgttttgtcttttacgattctggagagcagcgtgtgcccctctcggctga

SEQ ID NO: 26095 - DNA, 80 bp, synthetic construct
  misc_feature 1..80: note = Artificially Synthesized Probe
  source 1..80: mol_type = other DNA
tgtgtcctggtgatgatgtcatctcctgctgttaggaaggcgtcctggtgatgctgtcacctcccattaggaaggtgtcc

SEQ ID NO: 26096 - DNA, 80 bp, synthetic construct
  misc_feature 1..80: note = Artificially Synthesized Probe
  source 1..80: mol_type = other DNA
atcggctcacaaaattctggaaaacgtttcactcagcaataccagtttattttaaaggctcaagaacagccgaatgaggg

SEQ ID NO: 26097 - DNA, 80 bp, synthetic construct
  misc_feature 1..80: note = Artificially Synthesized Probe
  source 1..80: mol_type = other DNA
tcctgtcctcattgtcttaaactacataaagtggttaaagattagatacaaaactggtgttttaataattcagccttgct

SEQ ID NO: 26098 - DNA, 80 bp, synthetic construct
  misc_feature 1..80: note = Artificially Synthesized Probe
  source 1..80: mol_type = other DNA
acgacctacttacatcagaaaaaaggaatccctgtttgaatgtctccctccccaggctagacatagtgctggaagtctga

SEQ ID NO: 26099 - DNA, 80 bp, synthetic construct
  misc_feature 1..80: note = Artificially Synthesized Probe
  source 1..80: mol_type = other DNA
atgtccttctcttgcggagccgggtctcatggtgtgtggtggagccaactgtggtttcaccgttcaccctttgagggata

SEQ ID NO: 26100 - DNA, 80 bp, synthetic construct
  misc_feature 1..80: note = Artificially Synthesized Probe
  source 1..80: mol_type = other DNA
attttcttgatgttttatcctaaaagttctatagtctttcatgcgacacctcagccccagatgctcttgagggtggtttt

SEQ ID NO: 26101 - DNA, 80 bp, synthetic construct
  misc_feature 1..80: note = Artificially Synthesized Probe
  source 1..80: mol_type = other DNA
ttctgcttgctttgggattatttcttatgacttttgttttgacagtcaagtgtggtctagagaactcgagcggagtctcc

SEQ ID NO: 26102 - DNA, 80 bp, synthetic construct
  misc_feature 1..80: note = Artificially Synthesized Probe
  source 1..80: mol_type = other DNA
tagtttgagatcttcctggttcttgctgtggcaagtgatactggattgaaacctggacctgtcacatcatgttaggagac

SEQ ID NO: 26103 - DNA, 80 bp, synthetic construct
  misc_feature 1..80: note = Artificially Synthesized Probe
  source 1..80: mol_type = other DNA
gttgaaacatttaattcagtttaaaataacagtgcagttggccctttgaacaacactgctttggactgcgtgtgtccagt

SEQ ID NO: 26104 - DNA, 80 bp, synthetic construct
  misc_feature 1..80: note = Artificially Synthesized Probe
  source 1..80: mol_type = other DNA
attttaatttcagcccactgacgtctgttttgtcacttggccgttttttgtgtctgttttcgtagcctggagatgttgca

SEQ ID NO: 26105 - DNA, 80 bp, synthetic construct
  misc_feature 1..80: note = Artificially Synthesized Probe
  source 1..80: mol_type = other DNA
tgtctgagacaatgccgctgtacactctttgtaaggaggatttagagagtatggacaaagaggtgagccaaccccacgcc

SEQ ID NO: 26106 - DNA, 80 bp, synthetic construct
  misc_feature 1..80: note = Artificially Synthesized Probe
  source 1..80: mol_type = other DNA
ttgcatccagaaggcagcagaggttcttgaggaggaaaacagctcctgtgtatcttcaacagtagcagaaaaatgcagat

SEQ ID NO: 26107 - DNA, 80 bp, synthetic construct
  misc_feature 1..80: note = Artificially Synthesized Probe
  source 1..80: mol_type = other DNA
ctgctcgttttggggcacagacgatggggagtcaagaggatctggaaccagggtcaagtgcagcccgtcagggggccttt

SEQ ID NO: 26108 - DNA, 80 bp, synthetic construct
  misc_feature 1..80: note = Artificially Synthesized Probe
  source 1..80: mol_type = other DNA
catcaggagtgctcccaaaatcacgtgagatgtaagaactcacattaggagtgctccccaaatcaggtgagacatgagaa

SEQ ID NO: 26109 - DNA, 80 bp, synthetic construct
  misc_feature 1..80: note = Artificially Synthesized Probe
  source 1..80: mol_type = other DNA
atagcactcagtcctcgtgctgtggcctcagcacaggacgaatgtgtgttgtgtgtgtggatcctcacgccacggcctcg

SEQ ID NO: 26110 - DNA, 80 bp, synthetic construct
  misc_feature 1..80: note = Artificially Synthesized Probe
  source 1..80: mol_type = other DNA
aggaggttggtagaaacatttcatttccgtgcattgacaggataccgtagcatctgctgttatctgtatttgctctttgg

SEQ ID NO: 26111 - DNA, 80 bp, synthetic construct
  misc_feature 1..80: note = Artificially Synthesized Probe
  source 1..80: mol_type = other DNA
gatttgccatcgaaacagtaaattcagtgatgtaagcattctggtgaagtgtgaatattagtaaccttgtcgagtaacca

SEQ ID NO: 26112 - DNA, 80 bp, synthetic construct
  misc_feature 1..80: note = Artificially Synthesized Probe
  source 1..80: mol_type = other DNA
ctccctgaaagccctgccactcaggagtcttgctgtgaatctcattgatcttgaaaatttcaagcaaatattctgattat

SEQ ID NO: 26113 - DNA, 80 bp, synthetic construct
  misc_feature 1..80: note = Artificially Synthesized Probe
  source 1..80: mol_type = other DNA
tctccatgctgatccatgtcatcttacatgtgtgcaggcgtgtgaggtgtgtgcaggtgtggggggggatctgtacatct

SEQ ID NO: 26114 - DNA, 80 bp, synthetic construct
  misc_feature 1..80: note = Artificially Synthesized Probe
  source 1..80: mol_type = other DNA
ccctttcttaaacatctgttttacctggatttgataatcacctcacttttgttagctttcttcctttttgcctgtttctg

SEQ ID NO: 26115 - DNA, 80 bp, synthetic construct
  misc_feature 1..80: note = Artificially Synthesized Probe
  source 1..80: mol_type = other DNA
tttctccccacgtctggtcttactcttaggctctcctgtaggtgaataaacagcatttcaagaaaagagcgtaactcatt

SEQ ID NO: 26116 - DNA, 80 bp, synthetic construct
  misc_feature 1..80: note = Artificially Synthesized Probe
  source 1..80: mol_type = other DNA
taattgccgtttcactctatgtcttacagactcggtgggcttgggtgatttcagaatttgagatcaggagaataaagtgt

SEQ ID NO: 26117 - DNA, 80 bp, synthetic construct
  misc_feature 1..80: note = Artificially Synthesized Probe
  source 1..80: mol_type = other DNA
tcttggactttggggacctcacttcttccttaaagaccagggacttccagttttatttcattcctgtttatggggtattc

SEQ ID NO: 26118 - DNA, 80 bp, synthetic construct
  misc_feature 1..80: note = Artificially Synthesized Probe
  source 1..80: mol_type = other DNA
atcactcacaaaggcaactttaaaatataccatagcctctttcttcagatcattcctagagttcgcggagaagtgaaaac

SEQ ID NO: 26119 - DNA, 80 bp, synthetic construct
  misc_feature 1..80: note = Artificially Synthesized Probe
  source 1..80: mol_type = other DNA
tacaagaagttctaaaggaagctcttcaggctgaaagcaggtgacttagatgaaatctgaatccacacaaacaagcaagc

SEQ ID NO: 26120 - DNA, 80 bp, synthetic construct
  misc_feature 1..80: note = Artificially Synthesized Probe
  source 1..80: mol_type = other DNA
tcctgctgtaaataattacaacgatgcattgttgggtttgtagcatgcatggatgtggtatcgtacagtgaagcaaggcc

SEQ ID NO: 26121 - DNA, 80 bp, synthetic construct
  misc_feature 1..80: note = Artificially Synthesized Probe
  source 1..80: mol_type = other DNA
ggaagtccctccctggttccagctgtcccacctttccagagtgaaccagtgttcatcttacatatgttctttcatgtctc

SEQ ID NO: 26122 - DNA, 80 bp, synthetic construct
  misc_feature 1..80: note = Artificially Synthesized Probe
  source 1..80: mol_type = other DNA
ggtgctcctgggattaggaggtgtccccacgacatgtaagttcatgtgagtttcaggcttttccaaagcagttgtaatga

SEQ ID NO: 26123 - DNA, 80 bp, synthetic construct
  misc_feature 1..80: note = Artificially Synthesized Probe
  source 1..80: mol_type = other DNA
gcgcgttctgtccccgcgtccctcccgtgcgcgttctgtccccgcgtccctcccgtgcgggttctgtccccgcgtccctc

SEQ ID NO: 26124 - DNA, 80 bp, synthetic construct
  misc_feature 1..80: note = Artificially Synthesized Probe
  source 1..80: mol_type = other DNA
gctgccagccactctggtgcctgcagtttagaatttgggtacaaagctgctgaatcaaatagtgttttttaatgattgcc

SEQ ID NO: 26125 - DNA, 80 bp, synthetic construct
  misc_feature 1..80: note = Artificially Synthesized Probe
  source 1..80: mol_type = other DNA
gttatgctgaggaagtgaagctagtatcagttgcggacatttactaaccatagtctgcagctgtgtctaatgttcgaggt

SEQ ID NO: 26126 - DNA, 80 bp, synthetic construct
  misc_feature 1..80: note = Artificially Synthesized Probe
  source 1..80: mol_type = other DNA
tgaggggaacatatttctaaacctcaaacagagagtcacagctggcatttcccattctttgccatcctcttgctgccatt

SEQ ID NO: 26127 - DNA, 80 bp, synthetic construct
  misc_feature 1..80: note = Artificially Synthesized Probe
  source 1..80: mol_type = other DNA
ccctcacggcagcaccttcacgtttacgagaactgtctctgtcttgttttgtttcaagttctcaaaacggagtgaggtgg

SEQ ID NO: 26128 - DNA, 80 bp, synthetic construct
  misc_feature 1..80: note = Artificially Synthesized Probe
  source 1..80: mol_type = other DNA
cacacctggctaattttttgctttttttttttttttttttttttaatgtggagatggggtttcaccatgttggtcaggct

SEQ ID NO: 26129 - DNA, 80 bp, synthetic construct
  misc_feature 1..80: note = Artificially Synthesized Probe
  source 1..80: mol_type = other DNA
gctaagaaaatattcttagggtactcacatatggtgactgtccctagtttctctcagtgacttttcgggattgtaactga

SEQ ID NO: 26130 - DNA, 80 bp, synthetic construct
  misc_feature 1..80: note = Artificially Synthesized Probe
  source 1..80: mol_type = other DNA
ctggttatgcagaggctcctaaggaaagcctagtggcacccgctggttatgcagaggctcgtaaggaaagcctagtggca

SEQ ID NO: 26131 - DNA, 80 bp, synthetic construct
  misc_feature 1..80: note = Artificially Synthesized Probe
  source 1..80: mol_type = other DNA
tgtgtgacgtggccctgggtcggtggcctgtgtgtgtccttgaccagagaattgtgccgtcttgtgttaaaaccacggaa

SEQ ID NO: 26132 - DNA, 80 bp, synthetic construct
  misc_feature 1..80: note = Artificially Synthesized Probe
  source 1..80: mol_type = other DNA
ttatgtcttggagacacctgatgtaaagtttctgtaaatctatttcatatctgacccaccaaacagatttctctttaata

SEQ ID NO: 26133 - DNA, 80 bp, synthetic construct
  misc_feature 1..80: note = Artificially Synthesized Probe
  source 1..80: mol_type = other DNA
catattttgtccaatcactctaaaaatacactccatgcccttagaacaggtggggttatgtcctcttggccatcaggcat

SEQ ID NO: 26134 - DNA, 80 bp, synthetic construct
  misc_feature 1..80: note = Artificially Synthesized Probe
  source 1..80: mol_type = other DNA
cccggcctcctttcttgttcttttacaactcatttagagctgtgttgatttttaaaattcttcgtataggtaggtgatac

SEQ ID NO: 26135 - DNA, 80 bp, synthetic construct
  misc_feature 1..80: note = Artificially Synthesized Probe
  source 1..80: mol_type = other DNA
tggggccttcctgctgccccgttttaagaacagccccacacccaccttgcctcatcacctctgtaatttaccaccatgca

SEQ ID NO: 26136 - DNA, 80 bp, synthetic construct
  misc_feature 1..80: note = Artificially Synthesized Probe
  source 1..80: mol_type = other DNA
atgactctgaaaaagccaatacgcaagaggctaacacaactgtagtctaaaggcaacgtcgaggtcactgatatgtccct

SEQ ID NO: 26137 - DNA, 80 bp, synthetic construct
  misc_feature 1..80: note = Artificially Synthesized Probe
  source 1..80: mol_type = other DNA
caggttgggaaggcaggcgtactggatcatgggtggggggccacacatcagcaccagcggctcctcctctgggggtggaa

SEQ ID NO: 26138 - DNA, 80 bp, synthetic construct
  misc_feature 1..80: note = Artificially Synthesized Probe
  source 1..80: mol_type = other DNA
atatggctggtctctatccttagtaaccagaaacaaccaccccacagccctcaacaccaagagaaaagctgctgaagcct

SEQ ID NO: 26139 - DNA, 80 bp, synthetic construct
  misc_feature 1..80: note = Artificially Synthesized Probe
  source 1..80: mol_type = other DNA
cagactggcctgttaccactttctttctcaacctctggaatttcagcttacatttaatgctacagcagtacctcaactaa

SEQ ID NO: 26140 - DNA, 80 bp, synthetic construct
  misc_feature 1..80: note = Artificially Synthesized Probe
  source 1..80: mol_type = other DNA
ggtgcaagtcccagagcccatgtgctcctttctgggaggagcagagggtggtgtggacagagctccctcatcagtagagg

SEQ ID NO: 26141 - DNA, 80 bp, synthetic construct
  misc_feature 1..80: note = Artificially Synthesized Probe
  source 1..80: mol_type = other DNA
caatgggagagaagatggccttggtgtaactcggcagcacctgagagtatgcacgctgggatgtggaagcagcagccgcc

SEQ ID NO: 26142 - DNA, 80 bp, synthetic construct
  misc_feature 1..80: note = Artificially Synthesized Probe
  source 1..80: mol_type = other DNA
cggcaagtctttttgcgttctgggatctcattcaggttgtacctccagaaaccaggaagtacagacaccactccccaccc

SEQ ID NO: 26143 - DNA, 80 bp, synthetic construct
  misc_feature 1..80: note = Artificially Synthesized Probe
  source 1..80: mol_type = other DNA
tcctctctgagctaaagtgtgtctcatgctttaatcctcaccaccatcctttgaggtggccaccgccgcgacccacctga

SEQ ID NO: 26144 - DNA, 80 bp, synthetic construct
  misc_feature 1..80: note = Artificially Synthesized Probe
  source 1..80: mol_type = other DNA
actctgaaccagcaccaccaagtctcactgctgccctctctccctccacaccagccagcttagaatttctggctctttct

SEQ ID NO: 26145 - DNA, 80 bp, synthetic construct
  misc_feature 1..80: note = Artificially Synthesized Probe
  source 1..80: mol_type = other DNA
gggccccccatcccggtcatccccagaatctcagcagagctgtgcagacccctggaacagcacctgaccaggcccgaagt

SEQ ID NO: 26146 - DNA, 80 bp, synthetic construct
  misc_feature 1..80: note = Artificially Synthesized Probe
  source 1..80: mol_type = other DNA
attccgacccgaatcacctttgccctggtagaccagcagcccactggggccccggaactcaatggtgtctccaatctgca

SEQ ID NO: 26147 - DNA, 80 bp, synthetic construct
  misc_feature 1..80: note = Artificially Synthesized Probe
  source 1..80: mol_type = other DNA
tttcatcctcaatttgaatcctcctaatagcttctccacatttggccagagagacttcaacgtgaacagatgcttgagcc

SEQ ID NO: 26148 - DNA, 80 bp, synthetic construct
  misc_feature 1..80: note = Artificially Synthesized Probe
  source 1..80: mol_type = other DNA
tgaaagcttgtatttctaattttcataaaaacgtccctgctggggccgtcatgctgcctcttacttcccactcggcatgt

SEQ ID NO: 26149 - DNA, 80 bp, synthetic construct
  misc_feature 1..80: note = Artificially Synthesized Probe
  source 1..80: mol_type = other DNA
tccacatgggctgttgccatggccacccacccacaccccctccacagtcatgacccagaggcttcaccttgatgaccagg

SEQ ID NO: 26150 - DNA, 80 bp, synthetic construct
  misc_feature 1..80: note = Artificially Synthesized Probe
  source 1..80: mol_type = other DNA
gggaggatgccagacaggacggggagggaggaatccatctctgccatcagctcaagcagtggcctgaaggggcaggaaga

SEQ ID NO: 26151 - DNA, 80 bp, synthetic construct
  misc_feature 1..80: note = Artificially Synthesized Probe
  source 1..80: mol_type = other DNA
tcagacacccatgtaccagaaaatatttggaggaagaatagaaatgagatggccaggcgtggtggctcatgcctgtaatc

SEQ ID NO: 26152 - DNA, 80 bp, synthetic construct
  misc_feature 1..80: note = Artificially Synthesized Probe
  source 1..80: mol_type = other DNA
ctgggtgacagagcgagaccttgttctaaaaaaacacaaacaaaaacaaaacaacccaccaataacaataacaagggaaa

SEQ ID NO: 26153 - DNA, 80 bp, synthetic construct
  misc_feature 1..80: note = Artificially Synthesized Probe
  source 1..80: mol_type = other DNA
agtgcagtgacacgatctcggctcactgcaagctccacctcccaggttcacgccattctcctgcttcagcctctggagta

SEQ ID NO: 26154 - DNA, 80 bp, synthetic construct
  misc_feature 1..80: note = Artificially Synthesized Probe
  source 1..80: mol_type = other DNA
tggccaataatttacttttcattttgtatttttttgcttctctctggttgtcaacttctctgtgagctcctgggacaatt

SEQ ID NO: 26155 - DNA, 80 bp, synthetic construct
  misc_feature 1..80: note = Artificially Synthesized Probe
  source 1..80: mol_type = other DNA
gggtttaaattcctctgctacttcctggtggccttagcaagagacatcaccttgctttctccatctgtaaaatgggtgga

SEQ ID NO: 26156 - DNA, 80 bp, synthetic construct
  misc_feature 1..80: note = Artificially Synthesized Probe
  source 1..80: mol_type = other DNA
tattaagtgatgtcaagttctagcttgatttagacaaacagacaaataataaccccaactcagaatctatctgaaaggcc

SEQ ID NO: 26157 - DNA, 80 bp, synthetic construct
  misc_feature 1..80: note = Artificially Synthesized Probe
  source 1..80: mol_type = other DNA
agctactcagatggcagaggcagaagattgcttgagcccagtagttcgcgaccagcctgggcaacatagcaaaactctgt

SEQ ID NO: 26158 - DNA, 80 bp, synthetic construct
  misc_feature 1..80: note = Artificially Synthesized Probe
  source 1..80: mol_type = other DNA
gtggattagataatagtgttgtaccaatgttactttcctgtaattattctgtggttacgcaaaggaatgtccttgttctt

SEQ ID NO: 26159 - DNA, 80 bp, synthetic construct
  misc_feature 1..80: note = Artificially Synthesized Probe
  source 1..80: mol_type = other DNA
ttacggacaaatggagccatggttctgggatggaaagtccatcatcccgaatggccagctgaaggtcaccccccggaagg

SEQ ID NO: 26160 - DNA, 80 bp, synthetic construct
  misc_feature 1..80: note = Artificially Synthesized Probe
  source 1..80: mol_type = other DNA
taatacatacaatatacaaatatgttattggtaaggcttctagtcaatagtatattagtaggaaagttttgggggaacca

SEQ ID NO: 26161 - DNA, 80 bp, synthetic construct
  misc_feature 1..80: note = Artificially Synthesized Probe
  source 1..80: mol_type = other DNA
agttctaggattgcaggtataagcccctgcgtccagcccataaatgttcttttacagtaactttgaaattattatttttt

SEQ ID NO: 26162 - DNA, 80 bp, synthetic construct
  misc_feature 1..80: note = Artificially Synthesized Probe
  source 1..80: mol_type = other DNA
tcctgcagaacacagacaagtgcctctgctctattcagagccaggtaagatgctcctaacctctcaaggcctagccccat

SEQ ID NO: 26163 - DNA, 80 bp, synthetic construct
  misc_feature 1..80: note = Artificially Synthesized Probe
  source 1..80: mol_type = other DNA
ctgcccggagtacaccaaagccagccctccaagcatcgctcaccacatgacactgttatctatccctcagatagatgaag

SEQ ID NO: 26164 - DNA, 80 bp, synthetic construct
  misc_feature 1..80: note = Artificially Synthesized Probe
  source 1..80: mol_type = other DNA
tctgtgtctgtcgtcaccactgtatccccaacactccacacagaaagcactcaacaaatatttgtggaatgaattagtga

SEQ ID NO: 26165 - DNA, 80 bp, synthetic construct
  misc_feature 1..80: note = Artificially Synthesized Probe
  source 1..80: mol_type = other DNA
cccctgtgcctcctcacctgtgctgcgtgcacactcacacacacactcacacacacagaccacctcaccccagccacctg

SEQ ID NO: 26166 - DNA, 80 bp, synthetic construct
  misc_feature 1..80: note = Artificially Synthesized Probe
  source 1..80: mol_type = other DNA
gaggcctggctcagaatgtgctggagacattctgggccaagcgaggatcccagcagcacccacaaagggtaatccccacc

SEQ ID NO: 26167 - DNA, 80 bp, synthetic construct
  misc_feature 1..80: note = Artificially Synthesized Probe
  source 1..80: mol_type = other DNA
actcttctcaaaaaagaaaaaagaaaaaagaaatgtatggagcagccaggtgcaggggacgtggccataaatccaaccac

SEQ ID NO: 26168 - DNA, 80 bp, synthetic construct
  misc_feature 1..80: note = Artificially Synthesized Probe
  source 1..80: mol_type = other DNA
acatcgcccattcacatactcccgtacacacacacacaccccatcacacgtttccatgcccgcccttcacacccacggtc

SEQ ID NO: 26169 - DNA, 80 bp, synthetic construct
  misc_feature 1..80: note = Artificially Synthesized Probe
  source 1..80: mol_type = other DNA
ctagcatatagtaggtgctcaataaatacctttttttttttttttttttttggtaaagcagggtctcactcttgcccaga

SEQ ID NO: 26170 - DNA, 80 bp, synthetic construct
  misc_feature 1..80: note = Artificially Synthesized Probe
  source 1..80: mol_type = other DNA
acagtgggcaccttctctgtgtaggctcatgctgggccttagcgtcattctcttgccttgctctcctggtagggtcttgg

SEQ ID NO: 26171 - DNA, 80 bp, synthetic construct
  misc_feature 1..80: note = Artificially Synthesized Probe
  source 1..80: mol_type = other DNA
gtggagggagggacctactgccatagaatacaaacgtaaatcttgacttgggatcagctaagcattatttcaattttatt

SEQ ID NO: 26172 - DNA, 80 bp, synthetic construct
  misc_feature 1..80: note = Artificially Synthesized Probe
  source 1..80: mol_type = other DNA
ttggatctgcttgcaacagccaagtgaggccccagaacttgctgctttccaggggacactgttaaaatgtccttttttct

SEQ ID NO: 26173 - DNA, 80 bp, synthetic construct
  misc_feature 1..80: note = Artificially Synthesized Probe
  source 1..80: mol_type = other DNA
acattcaccagtggttatcatttcagctctttctctttctccctgcttttctctctatctccctatctctctatttggtt

SEQ ID NO: 26174 - DNA, 80 bp, synthetic construct
  misc_feature 1..80: note = Artificially Synthesized Probe
  source 1..80: mol_type = other DNA
tgggaggtagacggggcagagaaacagtcattttctagaggaggaaaatgaggcccagagagagcagagaatcaggaggg

SEQ ID NO: 26175 - DNA, 80 bp, synthetic construct
  misc_feature 1..80: note = Artificially Synthesized Probe
  source 1..80: mol_type = other DNA
tttgcctgtgtggagagataggatcatgatgttctctctgttttctcctgtattttccgcttccctttccctgtgtttgc

SEQ ID NO: 26176 - DNA, 80 bp, synthetic construct
  misc_feature 1..80: note = Artificially Synthesized Probe
  source 1..80: mol_type = other DNA
aaaagcctgagaagacatcttgaaaggccaagtcttaggttctgcagtagggatgttatctgcagaaataactgggggag

SEQ ID NO: 26177 - DNA, 80 bp, synthetic construct
  misc_feature 1..80: note = Artificially Synthesized Probe
  source 1..80: mol_type = other DNA
attgtgcaacaagggaaagatttttgctgcacttgtttcctgggtggggtaatgctgaaagacagcaggggtcttcccgg

SEQ ID NO: 26178 - DNA, 80 bp, synthetic construct
  misc_feature 1..80: note = Artificially Synthesized Probe
  source 1..80: mol_type = other DNA
attgctgggcgcggtggctcatgcctgtaatcccagcactttgggaggccgaggtgggcggatcacaaggtcaggagatt

SEQ ID NO: 26179 - DNA, 80 bp, synthetic construct
  misc_feature 1..80: note = Artificially Synthesized Probe
  source 1..80: mol_type = other DNA
gactgataccagtttacggcctttaggaactggaccacacatcaagaggtgagtggggggcgagtaagcagagcttcatc

SEQ ID NO: 26180 - DNA, 80 bp, synthetic construct
  misc_feature 1..80: note = Artificially Synthesized Probe
  source 1..80: mol_type = other DNA
ttctgactgtccagctgtaagttggagttcccaagacccgccacttacgtttgattaatttggtagcatggctcacagaa

SEQ ID NO: 26181 - DNA, 80 bp, synthetic construct
  misc_feature 1..80: note = Artificially Synthesized Probe
  source 1..80: mol_type = other DNA
atattattatttatatacatatttttaattttatttttttggctgggtggggtggtacacgcctgtaatcccagcacttt

SEQ ID NO: 26182 - DNA, 80 bp, synthetic construct
  misc_feature 1..80: note = Artificially Synthesized Probe
  source 1..80: mol_type = other DNA
gctctgctccagccgagccccaaatcctgcctcctctaccccttcctcggacccagcccgtgcccaccttgggtcccggc

SEQ ID NO: 26183 - DNA, 80 bp, synthetic construct
  misc_feature 1..80: note = Artificially Synthesized Probe
  source 1..80: mol_type = other DNA
aggttatcatttttatttcatgagaaagttctggctaatgagaacccaaaacccaaaggaggtgttgatttcaggcacag

SEQ ID NO: 26184 - DNA, 80 bp, synthetic construct
  misc_feature 1..80: note = Artificially Synthesized Probe
  source 1..80: mol_type = other DNA
aatggcccaagcctcaattgttctcatctgtaaaatgggcttaaccatggcctttcctgtgtatcttacaattttgtaat

SEQ ID NO: 26185 - DNA, 80 bp, synthetic construct
  misc_feature 1..80: note = Artificially Synthesized Probe
  source 1..80: mol_type = other DNA
ttgcattgtaacatgcaaatgatggcatgtatttctatcctcatctgagatctgggacttttatgggtttcctggtattc

SEQ ID NO: 26186 - DNA, 80 bp, synthetic construct
  misc_feature 1..80: note = Artificially Synthesized Probe
  source 1..80: mol_type = other DNA
cgagactcggtctcaaaaaaaaaaaaaaaaaggaacaaacaaacaaaaactgaaattaggtggggtgcagtgactcacgc

SEQ ID NO: 26187 - DNA, 80 bp, synthetic construct
  misc_feature 1..80: note = Artificially Synthesized Probe
  source 1..80: mol_type = other DNA
ctggcattttcaacatttcaacataacgtactctagccaagtgccaagcaatcctccttatcaggtggaccgggtacaat

SEQ ID NO: 26188 - DNA, 80 bp, synthetic construct
  misc_feature 1..80: note = Artificially Synthesized Probe
  source 1..80: mol_type = other DNA
gccataatcctaggtcaggaatccctcctgcactgatgaagtcaagagaggtgattaaaacaagcgttccagtatatctc

SEQ ID NO: 26189 - DNA, 80 bp, synthetic construct
  misc_feature 1..80: note = Artificially Synthesized Probe
  source 1..80: mol_type = other DNA
ttgtttctgtaccaccctacttttacgtgtcacactgtcttccggtcattgatcataacaaaccaccccaaaattcagta

SEQ ID NO: 26190 - DNA, 80 bp, synthetic construct
  misc_feature 1..80: note = Artificially Synthesized Probe
  source 1..80: mol_type = other DNA
agatggctcattctcctgcctgggagactgcggggtggctgggagccactgttaccctccgtgtggacctatccatggag

SEQ ID NO: 26191 - DNA, 80 bp, synthetic construct
  misc_feature 1..80: note = Artificially Synthesized Probe
  source 1..80: mol_type = other DNA
cttttctttagtttagcaaaggtggtttcagtttccaagcaaggaaggaagcagttttagggagggactattactgtctt

SEQ ID NO: 26192 - DNA, 80 bp, synthetic construct
  misc_feature 1..80: note = Artificially Synthesized Probe
  source 1..80: mol_type = other DNA
gttctgtggtgagcaggtctgtgcaaacctactcccaaaggcccaggaagctgagagattcaaagaaagcctcaaagaaa

SEQ ID NO: 26193 - DNA, 80 bp, synthetic construct
  misc_feature 1..80: note = Artificially Synthesized Probe
  source 1..80: mol_type = other DNA
aaaaaaagacaggccctcgctctgttgcccaggctggagggcaatgatgggataatagatcactgcagactcaaactcct

SEQ ID NO: 26194 - DNA, 80 bp, synthetic construct
  misc_feature 1..80: note = Artificially Synthesized Probe
  source 1..80: mol_type = other DNA
gagtagctgggattacaggcgtgcgtcaccttgcccggctaattttttttatttttagtagagtcgggatttcaccatat

SEQ ID NO: 26195 - DNA, 80 bp, synthetic construct
  misc_feature 1..80: note = Artificially Synthesized Probe
  source 1..80: mol_type = other DNA
aagatcaatctttgggccctgactgcccacctctggtctcttacctcagagggaaatacagttccaccttctttacgcca

SEQ ID NO: 26196 - DNA, 80 bp, synthetic construct
  misc_feature 1..80: note = Artificially Synthesized Probe
  source 1..80: mol_type = other DNA
tgcttctctagggatgtgccagctggaccagtaaatctctatggtctatggtccctcacagtttgtttgtttgtttgttt

SEQ ID NO: 26197 - DNA, 80 bp, synthetic construct
  misc_feature 1..80: note = Artificially Synthesized Probe
  source 1..80: mol_type = other DNA
cccagcctgatcttttctatccttccttctttcatgtgaactcttttccctcgacctcagttctgaccttctgtaattga

SEQ ID NO: 26198 - DNA, 80 bp, synthetic construct
  misc_feature 1..80: note = Artificially Synthesized Probe
  source 1..80: mol_type = other DNA
aaagaaggaaggtgctgacattctcctgaaatctgaggaactttagggttggcatttgtgttttttaagcacaattagtg

SEQ ID NO: 26199 - DNA, 80 bp, synthetic construct
  misc_feature 1..80: note = Artificially Synthesized Probe
  source 1..80: mol_type = other DNA
agagcgagactccctctcaaaaacaaacaaacaaacaaacaaaaaaacaaacaaaacaaaacccagtgtcttgggtattt

SEQ ID NO: 26200 - DNA, 80 bp, synthetic construct
  misc_feature 1..80: note = Artificially Synthesized Probe
  source 1..80: mol_type = other DNA
aacagcttgcactgtgtgcctgaaaaagtcacaaacactcaacactaacctgtgaaagcagccaggaagaggagctatat

SEQ ID NO: 26201 - DNA, 80 bp, synthetic construct
  misc_feature 1..80: note = Artificially Synthesized Probe
  source 1..80: mol_type = other DNA
gaccttacctcacacttcccatctcattattattattttaatttagtcatggtaaaacaagcctggtgcagtggttcgct

SEQ ID NO: 26202 - DNA, 80 bp, synthetic construct
  misc_feature 1..80: note = Artificially Synthesized Probe
  source 1..80: mol_type = other DNA
aacacacagccaggaatcatgactgcactgagtcatcacccacagaattgtcatttccggttcctgaaacttggagctct

SEQ ID NO: 26203 - DNA, 80 bp, synthetic construct
  misc_feature 1..80: note = Artificially Synthesized Probe
  source 1..80: mol_type = other DNA
ccgtgcccggctctcccttccttccttttccttctttctttcttttctttcactttcttctttccttcttctctcttttt

SEQ ID NO: 26204 - DNA, 80 bp, synthetic construct
  misc_feature 1..80: note = Artificially Synthesized Probe
  source 1..80: mol_type = other DNA
ggagtgaaagtatctttctaggaagagaaggtccatcactcgaagcagaaggatgacatgcttgttgctgttgatggagg

SEQ ID NO: 26205 - DNA, 80 bp, synthetic construct
  misc_feature 1..80: note = Artificially Synthesized Probe
  source 1..80: mol_type = other DNA
aaataactcataaggttcctgttttcctaactggaccctggctgattcatggagacgatgcttcatccattcattccttc

SEQ ID NO: 26206 - DNA, 80 bp, synthetic construct
  misc_feature 1..80: note = Artificially Synthesized Probe
  source 1..80: mol_type = other DNA
agagttctgtgcagaagagggagagggagtgctttgtgaaaggtaaaatcctgtagccggtgaaaggggttattctacaa

SEQ ID NO: 26207 - DNA, 80 bp, synthetic construct
  misc_feature 1..80: note = Artificially Synthesized Probe
  source 1..80: mol_type = other DNA
tgctctttttgcccaggctggagtgcaatgtcaagatttcggatcactgcaacctcggcctcctacgtttaggcgattct

SEQ ID NO: 26208 - DNA, 80 bp, synthetic construct
  misc_feature 1..80: note = Artificially Synthesized Probe
  source 1..80: mol_type = other DNA
cctcagcctctggggacgtgagtttctcatttattcatccctcagtaagcaggcatgtcctgtccaaccctggattgggc

SEQ ID NO: 26209 - DNA, 80 bp, synthetic construct
  misc_feature 1..80: note = Artificially Synthesized Probe
  source 1..80: mol_type = other DNA
cggcctctgtcttgttgttcatgtcaatgttcttgaagtccacaaactctaaatctaaaatcggtgaattttcaccaaat

SEQ ID NO: 26210 - DNA, 80 bp, synthetic construct
  misc_feature 1..80: note = Artificially Synthesized Probe
  source 1..80: mol_type = other DNA
attctctacgacacagagtggtgttatcacacctccactttccacacagagaaagaagctcagcaagtaggtggcggtgc

SEQ ID NO: 26211 - DNA, 80 bp, synthetic construct
  misc_feature 1..80: note = Artificially Synthesized Probe
  source 1..80: mol_type = other DNA
atattcaacttcttgtttaaatattaaattgtaatgtcctctgagtgcccaacagagatcggggatgagtgagcccccgt

SEQ ID NO: 26212 - DNA, 80 bp, synthetic construct
  misc_feature 1..80: note = Artificially Synthesized Probe
  source 1..80: mol_type = other DNA
tcaaaaaaaaaaaaagaagattgtttctgtctcacattacagtcccaaggtgagtgctccaaggccactggggccactct

SEQ ID NO: 26213 - DNA, 80 bp, synthetic construct
  misc_feature 1..80: note = Artificially Synthesized Probe
  source 1..80: mol_type = other DNA
caacagcatcctccctgggaactggcacttcctacccacctctctgccctaagcagacatttatgcacataatttcataa

SEQ ID NO: 26214 - DNA, 80 bp, synthetic construct
  misc_feature 1..80: note = Artificially Synthesized Probe
  source 1..80: mol_type = other DNA
aaaacgacacataacctgctcttgaatactcctaagagccagggagctcacctccttcccacgctgctcaagacggtctg

SEQ ID NO: 26215 - DNA, 80 bp, synthetic construct
  misc_feature 1..80: note = Artificially Synthesized Probe
  source 1..80: mol_type = other DNA
tcagtccctgttgacctcccccaccccccgcgaaagaggaaccaaaaccagaaaagaacaaagcatcctccgccccggac

SEQ ID NO: 26216 - DNA, 80 bp, synthetic construct
  misc_feature 1..80: note = Artificially Synthesized Probe
  source 1..80: mol_type = other DNA
ttggtcaggttccgcaggttcttgagaacaatgaagtccgtgtccaggtagatgccgccgaacttccacatgagtgcgat

SEQ ID NO: 26217 - DNA, 80 bp, synthetic construct
  misc_feature 1..80: note = Artificially Synthesized Probe
  source 1..80: mol_type = other DNA
gccagagtctggtctgcgtaaggactgtcagaagtgatggcttcgccatgtgacacacagggctctgtgaggattggcag

SEQ ID NO: 26218 - DNA, 80 bp, synthetic construct
  misc_feature 1..80: note = Artificially Synthesized Probe
  source 1..80: mol_type = other DNA
gcatcgtttctactttaggtgccaggaaacctgggcataaagtcaagggactgggtgcaacctgattgctaaggggagct

SEQ ID NO: 26219 - DNA, 80 bp, synthetic construct
  misc_feature 1..80: note = Artificially Synthesized Probe
  source 1..80: mol_type = other DNA
aaaaggaaacagacaaagatggtgactcccttggggaggtgacacatggttaagcaccaaggatgagcaggtcagatgga

SEQ ID NO: 26220 - DNA, 80 bp, synthetic construct
  misc_feature 1..80: note = Artificially Synthesized Probe
  source 1..80: mol_type = other DNA
gtgccccctgcccctgtctttcttctgcagggagaggggctattttggtcctgagtacttttaaccccatgtgaaccacg

SEQ ID NO: 26221 - DNA, 80 bp, synthetic construct
  misc_feature 1..80: note = Artificially Synthesized Probe
  source 1..80: mol_type = other DNA
agctcagcctagcactggccaaccatgacccaacaaaacggagtccgcactgagccctccatccaggctgagtgctgaca

SEQ ID NO: 26222 - DNA, 80 bp, synthetic construct
  misc_feature 1..80: note = Artificially Synthesized Probe
  source 1..80: mol_type = other DNA
gctggggtggccatcagagatgtttgttccaaaccacagtcggggctatgatggttaatttcatgtgtcaacttgaccag

SEQ ID NO: 26223 - DNA, 80 bp, synthetic construct
  misc_feature 1..80: note = Artificially Synthesized Probe
  source 1..80: mol_type = other DNA
ccactgtgtcaccagccatgtgactgcagtcaggccatgctcctcctcggagcctcagtctctctgcccacaaaatggga

SEQ ID NO: 26224 - DNA, 80 bp, synthetic construct
  misc_feature 1..80: note = Artificially Synthesized Probe
  source 1..80: mol_type = other DNA
aaagaatgctcccgccgcagcaggagaaaaaggagaaaagtcacatgcactgctgttctgcagtggaggcagaggggtca

SEQ ID NO: 26225 - DNA, 80 bp, synthetic construct
  misc_feature 1..80: note = Artificially Synthesized Probe
  source 1..80: mol_type = other DNA
tggactcactggaactgggtggttttggggaggggacgtagtgggagacaaagggtccggagccttcgtgcagataaggt

SEQ ID NO: 26226 - DNA, 80 bp, synthetic construct
  misc_feature 1..80: note = Artificially Synthesized Probe
  source 1..80: mol_type = other DNA
ctcagcagtgatgtcgggaagatgacttgcagtgtgaccttagacaggtcactttcctttttgggcctcagattcccttc

SEQ ID NO: 26227 - DNA, 80 bp, synthetic construct
  misc_feature 1..80: note = Artificially Synthesized Probe
  source 1..80: mol_type = other DNA
gaagggctgtttgtaagaagggcagaagggctcttttcggagcagaggttacaaaatattcttcctcccaggcctttaac

SEQ ID NO: 26228 - DNA, 80 bp, synthetic construct
  misc_feature 1..80: note = Artificially Synthesized Probe
  source 1..80: mol_type = other DNA
ggtgcggtggctcacacctgtaatcccagcactttaataggccgaggctggcagatcgtttgaggtctggagttggagac

SEQ ID NO: 26229 - DNA, 80 bp, synthetic construct
  misc_feature 1..80: note = Artificially Synthesized Probe
  source 1..80: mol_type = other DNA
tgctaacggtataattcataatgcatcaaataatactgtagcaattttcagaatagaaaaattacagatactaggataaa

SEQ ID NO: 26230 - DNA, 80 bp, synthetic construct
  misc_feature 1..80: note = Artificially Synthesized Probe
  source 1..80: mol_type = other DNA
ctcaaaatataacaccaccaccaccaacaaataccaaaacaccaagtatccatatctacaggatacagctacagcaatga

SEQ ID NO: 26231 - DNA, 80 bp, synthetic construct
  misc_feature 1..80: note = Artificially Synthesized Probe
  source 1..80: mol_type = other DNA
gctggcttgttggaaaaaagccaataaaatatacaaccaccaactaacctaatcaagataggagggtggggagaaagctt

SEQ ID NO: 26232 - DNA, 80 bp, synthetic construct
  misc_feature 1..80: note = Artificially Synthesized Probe
  source 1..80: mol_type = other DNA
gcaaggatggttcaacataattaggaaatcatgaatataattcatcatattaaatagatctaagcagaaaaatcatcatc

SEQ ID NO: 26233 - DNA, 80 bp, synthetic construct
  misc_feature 1..80: note = Artificially Synthesized Probe
  source 1..80: mol_type = other DNA
aacctgggacaacttaaatgcagctcatatcacataagtcgaatttttctaatatataaagagctcccagaaatcaataa

SEQ ID NO: 26234 - DNA, 80 bp, synthetic construct
  misc_feature 1..80: note = Artificially Synthesized Probe
  source 1..80: mol_type = other DNA
aagccgggatcaaatgtgataactaatcctgggaaatgccctttgcaaactataaactctacgcagatgcaaattacagc

SEQ ID NO: 26235 - DNA, 80 bp, synthetic construct
  misc_feature 1..80: note = Artificially Synthesized Probe
  source 1..80: mol_type = other DNA
gtaaaataaagagctgagaaaagacaatctcttaggacccttctagaaaggccttcctaatctggtctcctggcaccacc

SEQ ID NO: 26236 - DNA, 80 bp, synthetic construct
  misc_feature 1..80: note = Artificially Synthesized Probe
  source 1..80: mol_type = other DNA
ttgaggccaagagttcaataccagcctgggcaacgcaggaagacctcatctctacaaaaaataaaaataaaaaaattagc

SEQ ID NO: 26237 - DNA, 80 bp, synthetic construct
  misc_feature 1..80: note = Artificially Synthesized Probe
  source 1..80: mol_type = other DNA
gggatgattttgggagtgctacagtgtgacttacgtcttagagatctaagagagcaatacagcttcataccataaattcc

SEQ ID NO: 26238 - DNA, 80 bp, synthetic construct
  misc_feature 1..80: note = Artificially Synthesized Probe
  source 1..80: mol_type = other DNA
gtgatctcactgttgtttctgtttgcactgctgacggggtgagaaggcttctccagtgttgagttaacatttattaaaag

SEQ ID NO: 26239 - DNA, 80 bp, synthetic construct
  misc_feature 1..80: note = Artificially Synthesized Probe
  source 1..80: mol_type = other DNA
ggaagacaaaggtggcagatgggagaggaaaaggcacttattcaaagagctgccacttcctgatagctacaagaaacaga

SEQ ID NO: 26240 - DNA, 80 bp, synthetic construct
  misc_feature 1..80: note = Artificially Synthesized Probe
  source 1..80: mol_type = other DNA
atgtctgcgatgaggaatgctcgtgaaattatactaatggaaaaatattttatatagacaagatatgcaaatacagaaaa

SEQ ID NO: 26241 - DNA, 80 bp, synthetic construct
  misc_feature 1..80: note = Artificially Synthesized Probe
  source 1..80: mol_type = other DNA
gtcctagcagacaagaaacgacaggcacccaaggcattagaaaaatgtttgagagaaaaactaatgacaacattgggtgt

SEQ ID NO: 26242 - DNA, 80 bp, synthetic construct
  misc_feature 1..80: note = Artificially Synthesized Probe
  source 1..80: mol_type = other DNA
tcccgcttctgggcaggtccaaatcctcaccctccctaaggccggcgccgacgctgccagcccggcagagccccctcctg

SEQ ID NO: 26243 - DNA, 80 bp, synthetic construct
  misc_feature 1..80: note = Artificially Synthesized Probe
  source 1..80: mol_type = other DNA
gacccgggtcggcctgatcccaccgcctcctgccgggaccgtgctaagggcattgcctgcatcaccccagtgtttgcgga

SEQ ID NO: 26244 - DNA, 80 bp, synthetic construct
  misc_feature 1..80: note = Artificially Synthesized Probe
  source 1..80: mol_type = other DNA
aagtatgaatcttggaatttatcgaatccaggtcccttattttggagatgcagacagtaactcttgtgggaagggatgag

SEQ ID NO: 26245 - DNA, 80 bp, synthetic construct
  misc_feature 1..80: note = Artificially Synthesized Probe
  source 1..80: mol_type = other DNA
tcacacagtaagtggtaggataattttattttgagcctatgccatctgactccaaactgttttctgtgttatttctgctc

SEQ ID NO: 26246 - DNA, 80 bp, synthetic construct
  misc_feature 1..80: note = Artificially Synthesized Probe
  source 1..80: mol_type = other DNA
ctatctatccatctatctttctattaccttttttcttctgtccattgatctatattcatcagaaaatccattcattattc

SEQ ID NO: 26247 - DNA, 80 bp, synthetic construct
  misc_feature 1..80: note = Artificially Synthesized Probe
  source 1..80: mol_type = other DNA
atggtggcacatgcctgtagtgtcagccgcctgtggggctgaggctggaagttgcttgagcccaggagttcaaggctgca

SEQ ID NO: 26248 - DNA, 80 bp, synthetic construct
  misc_feature 1..80: note = Artificially Synthesized Probe
  source 1..80: mol_type = other DNA
catgtaccccagaaattattcataaaattgtgtatttgtgaatatgtgcattattctagagaaattgttcccagatctac

SEQ ID NO: 26249 - DNA, 80 bp, synthetic construct
  misc_feature 1..80: note = Artificially Synthesized Probe
  source 1..80: mol_type = other DNA
cagcgtagcttcttcaagcctctgtttgcttctggcatcacatcttttattctttttcattattttggagagtcttcctc

SEQ ID NO: 26250 - DNA, 80 bp, synthetic construct
  misc_feature 1..80: note = Artificially Synthesized Probe
  source 1..80: mol_type = other DNA
tgcttctatgtgccaagcactgtcctagttccttgccttgcataccagactttatgtaatgtttacaactctatgacctt

SEQ ID NO: 26251 - DNA, 80 bp, synthetic construct
  misc_feature 1..80: note = Artificially Synthesized Probe
  source 1..80: mol_type = other DNA
gctcccaagggtggatgaccgggtcaagatgccctacacagatgtcgttatccatgaaatacagagactggtagacatcg

SEQ ID NO: 26252 - DNA, 80 bp, synthetic construct
  misc_feature 1..80: note = Artificially Synthesized Probe
  source 1..80: mol_type = other DNA
tagtctctgaacctttgccattgatcaatgaaagcagccatagacaatatgtaaatgaatgagcatgtgtgtgagcctga

SEQ ID NO: 26253 - DNA, 80 bp, synthetic construct
  misc_feature 1..80: note = Artificially Synthesized Probe
  source 1..80: mol_type = other DNA
tggcccgcatggaactctttctctacttcacctccacccttcagaacttctctctatgctcgctggtgccacttgtggac

SEQ ID NO: 26254 - DNA, 80 bp, synthetic construct
  misc_feature 1..80: note = Artificially Synthesized Probe
  source 1..80: mol_type = other DNA
ttcccctgggtaaaatgccccatcctcacccatcttgctgactcattacctttctccgccatcatctcttcttctaatct

SEQ ID NO: 26255 - DNA, 80 bp, synthetic construct
  misc_feature 1..80: note = Artificially Synthesized Probe
  source 1..80: mol_type = other DNA
caaaaaacaaagcaacaaacaaaccagcagagtcctaaggcaggaggctgtgtgcatccaggaatccacagggagcaggt

SEQ ID NO: 26256 - DNA, 80 bp, synthetic construct
  misc_feature 1..80: note = Artificially Synthesized Probe
  source 1..80: mol_type = other DNA
actttggttattttaaatagaaaggctgttagctactggaaggtgattgtttagctcacaaaattaacagcaattctgga

SEQ ID NO: 26257 - DNA, 80 bp, synthetic construct
  misc_feature 1..80: note = Artificially Synthesized Probe
  source 1..80: mol_type = other DNA
aatgcatgtgaaagaccaaaaaggaaggaagcagatgacactggtagcagaaaagtcttcagaacaggatgcagatccaa

SEQ ID NO: 26258 - DNA, 80 bp, synthetic construct
  misc_feature 1..80: note = Artificially Synthesized Probe
  source 1..80: mol_type = other DNA
aagagctataggtcctcaaaatagccttcatttctatttatgacgtgagcctattagaaagttcctagaggctggcgcgg

SEQ ID NO: 26259 - DNA, 80 bp, synthetic construct
  misc_feature 1..80: note = Artificially Synthesized Probe
  source 1..80: mol_type = other DNA
atcacctctacaagaaacctcataccttctaggtcttaccccttttcccccacagtcaattccctgccctgagcaaccac

SEQ ID NO: 26260 - DNA, 80 bp, synthetic construct
  misc_feature 1..80: note = Artificially Synthesized Probe
  source 1..80: mol_type = other DNA
tgagccatatacatttaaggttcctcccagtcttttcatagattgatagctcatttctttttattgctaaataatattgt

SEQ ID NO: 26261 - DNA, 80 bp, synthetic construct
  misc_feature 1..80: note = Artificially Synthesized Probe
  source 1..80: mol_type = other DNA
acaattcttttgcagagcaatttgtaattttaatgatgtagaatttatcaattgtttctttcatggattgtgcttttggt

SEQ ID NO: 26262 - DNA, 80 bp, synthetic construct
  misc_feature 1..80: note = Artificially Synthesized Probe
  source 1..80: mol_type = other DNA
ctcagcaaggcaagtagcacttggtgtagtttcgtgggattgtgacaaagcccacgtgtttgggggacacaacaatgtcc

SEQ ID NO: 26263 - DNA, 80 bp, synthetic construct
  misc_feature 1..80: note = Artificially Synthesized Probe
  source 1..80: mol_type = other DNA
ggtgtgagtagtagcctggcagcaaacagtggtctcttactgatggagaagggcacaaaagcatcacgcttcttaaactg

SEQ ID NO: 26264 - DNA, 80 bp, synthetic construct
  misc_feature 1..80: note = Artificially Synthesized Probe
  source 1..80: mol_type = other DNA
gatagcctgaataggtaaaacggggtggatgacttggctccgtgtatgacacggaggtagaccattcataacagatgtca

SEQ ID NO: 26265 - DNA, 80 bp, synthetic construct
  misc_feature 1..80: note = Artificially Synthesized Probe
  source 1..80: mol_type = other DNA
tcaatcaatcatctatctatcttactctgttttatgctactataacaaaatactacagactaggtaacatatttatttat

SEQ ID NO: 26266 - DNA, 80 bp, synthetic construct
  misc_feature 1..80: note = Artificially Synthesized Probe
  source 1..80: mol_type = other DNA
tttgaaacgaaatggtagtttctttgttgcctgagtgatgccacacttaagactcactcatggttcagcgtggtggctta

SEQ ID NO: 26267 - DNA, 80 bp, synthetic construct
  misc_feature 1..80: note = Artificially Synthesized Probe
  source 1..80: mol_type = other DNA
caaactcccaaggattcaggtggggcccttctggactctaatcggcccatctctttccctttctgtgtggttaccaggtt

SEQ ID NO: 26268 - DNA, 80 bp, synthetic construct
  misc_feature 1..80: note = Artificially Synthesized Probe
  source 1..80: mol_type = other DNA
actcattcctctcctcactcactcattcctctcctcactcttattcgtctgctcactcactcattcctctgctcactcat

SEQ ID NO: 26269 - DNA, 80 bp, synthetic construct
  misc_feature 1..80: note = Artificially Synthesized Probe
  source 1..80: mol_type = other DNA
tctcctaggtgggagctgccatcctgatggacattagagtcacctctgctcccctggaggctgctgagaatggagggccc

SEQ ID NO: 26270 - DNA, 80 bp, synthetic construct
  misc_feature 1..80: note = Artificially Synthesized Probe
  source 1..80: mol_type = other DNA
attcatatcctcactcactcattcctctacccacactcattcctctcctcactaattccaataccaactcactcattcct

SEQ ID NO: 26271 - DNA, 80 bp, synthetic construct
  misc_feature 1..80: note = Artificially Synthesized Probe
  source 1..80: mol_type = other DNA
tcactcattcattcctttacccactcactcattcctctacccactcactcattcctctcctcactcattcccttcctccc

SEQ ID NO: 26272 - DNA, 80 bp, synthetic construct
  misc_feature 1..80: note = Artificially Synthesized Probe
  source 1..80: mol_type = other DNA
accatcacaggaagtgacagcccttgacttgctttcagatcactcctacagaggagggcttgaagaactcgacccagatg

SEQ ID NO: 26273 - DNA, 80 bp, synthetic construct
  misc_feature 1..80: note = Artificially Synthesized Probe
  source 1..80: mol_type = other DNA
ctctctggctgctgaggtctctttcagttgtgagtgatggaaactcaacttcgtgtgctctaagcaaataaagagagtca

SEQ ID NO: 26274 - DNA, 80 bp, synthetic construct
  misc_feature 1..80: note = Artificially Synthesized Probe
  source 1..80: mol_type = other DNA
ggtttcggaatccattctaatcacgcttgaagaaaactcttggttccacctgggacatgtctgggacatttaagaaatca

SEQ ID NO: 26275 - DNA, 80 bp, synthetic construct
  misc_feature 1..80: note = Artificially Synthesized Probe
  source 1..80: mol_type = other DNA
cacagtaggttctcagaaggtgtcagtttctgtgtttttctcacagaatccctgtaaactcaagagagtaaaaatgaaga

SEQ ID NO: 26276 - DNA, 80 bp, synthetic construct
  misc_feature 1..80: note = Artificially Synthesized Probe
  source 1..80: mol_type = other DNA
agtcattgccttatctctccaggtggttatctgcaaatacaactctgagaaatggctcaggtaagaacatcacagtcttg

SEQ ID NO: 26277 - DNA, 80 bp, synthetic construct
  misc_feature 1..80: note = Artificially Synthesized Probe
  source 1..80: mol_type = other DNA
agctgtgctttgaaggtcgaggaagaggagaaagtgctgtctttccaggtagaaatatgtgtgtaaaagcaagaaggtta

SEQ ID NO: 26278 - DNA, 80 bp, synthetic construct
  misc_feature 1..80: note = Artificially Synthesized Probe
  source 1..80: mol_type = other DNA
tttcaaagacaaagccaagtccaagactttggatttcattgatgtgcttctgctgagcaaggtaggtttctctatgatct

SEQ ID NO: 26279 - DNA, 80 bp, synthetic construct
  misc_feature 1..80: note = Artificially Synthesized Probe
  source 1..80: mol_type = other DNA
tatgcagaaaaatgaaaatattcgagaaccattgattcctgtcaccagggtccaaagaggaggcaaaggatctgggggaa

SEQ ID NO: 26280 - DNA, 80 bp, synthetic construct
  misc_feature 1..80: note = Artificially Synthesized Probe
  source 1..80: mol_type = other DNA
aacttcccctccactctgtttctgttctcccagaaatatcagttttttcgaaaatcctcacttcttgaatgtttgctcag

SEQ ID NO: 26281 - DNA, 80 bp, synthetic construct
  misc_feature 1..80: note = Artificially Synthesized Probe
  source 1..80: mol_type = other DNA
tacagaaagtgtgatagaaagtgtttcaagccagatctggtggctgtcgcttgtgataccaagtaccgaggaggctgaag

SEQ ID NO: 26282 - DNA, 80 bp, synthetic construct
  misc_feature 1..80: note = Artificially Synthesized Probe
  source 1..80: mol_type = other DNA
gtgtgtccctccagaagatggctatcttgatgcccactttataagaacacagacttcttctatacaaataagagtgtata

SEQ ID NO: 26283 - DNA, 80 bp, synthetic construct
  misc_feature 1..80: note = Artificially Synthesized Probe
  source 1..80: mol_type = other DNA
ccagtgacctaagaaccaccctctgactctcacagggcaaaacaaacaaacaaaaaaacagttgcaaaaaaaaaaaaata

SEQ ID NO: 26284 - DNA, 80 bp, synthetic construct
  misc_feature 1..80: note = Artificially Synthesized Probe
  source 1..80: mol_type = other DNA
caaacaaacaattagttccatcaaaaagtgggcaaagggcatgaacagataattctcaaaagaagatacacaaacagcca

SEQ ID NO: 26285 - DNA, 80 bp, synthetic construct
  misc_feature 1..80: note = Artificially Synthesized Probe
  source 1..80: mol_type = other DNA
gactgcatattggggacagtatacactgcatgggtgatgggtgcactaaaacctcagaattcaccactatagaaatcatc

SEQ ID NO: 26286 - DNA, 80 bp, synthetic construct
  misc_feature 1..80: note = Artificially Synthesized Probe
  source 1..80: mol_type = other DNA
tcctccctttctccaagggggcctgtagagatacttatttgtcatctatctgtctgtctgtttacatctatctacatatc

SEQ ID NO: 26287 - DNA, 80 bp, synthetic construct
  misc_feature 1..80: note = Artificially Synthesized Probe
  source 1..80: mol_type = other DNA
tggggggtgcttttggttaatttttatgaagttacatttgttcgtattttcttttgtaccacactacccagctatttccc

SEQ ID NO: 26288 - DNA, 80 bp, synthetic construct
  misc_feature 1..80: note = Artificially Synthesized Probe
  source 1..80: mol_type = other DNA
atagcgccagagtagggataaccttattttgacgtaagtcccaggggctatgaaaaagtgataaactgttaaatgagaga

SEQ ID NO: 26289 - DNA, 80 bp, synthetic construct
  misc_feature 1..80: note = Artificially Synthesized Probe
  source 1..80: mol_type = other DNA
tcccattttgtacgttgcctgttcactctgatggtagtttcttttgctgtgcagaagctctttagtttaattagatccca

SEQ ID NO: 26290 - DNA, 80 bp, synthetic construct
  misc_feature 1..80: note = Artificially Synthesized Probe
  source 1..80: mol_type = other DNA
ttttgggctgagacaatggggttttctagatatacaatcatgtcatctgcaaacagggacaatttgacgtcttcttttcc

SEQ ID NO: 26291 - DNA, 80 bp, synthetic construct
  misc_feature 1..80: note = Artificially Synthesized Probe
  source 1..80: mol_type = other DNA
ctaattgttttctgctttttaaaattctcaaatgtttgatccccgtggagtttattttgtgatagggagaaaaggtctca

SEQ ID NO: 26292 - DNA, 80 bp, synthetic construct
  misc_feature 1..80: note = Artificially Synthesized Probe
  source 1..80: mol_type = other DNA
cctcaccccaaaacacacacaagtgtctctccaaggctgctggacataggaaatcccactggcaaaccttctttgtctca

SEQ ID NO: 26293 - DNA, 80 bp, synthetic construct
  misc_feature 1..80: note = Artificially Synthesized Probe
  source 1..80: mol_type = other DNA
ctggcaacgtcctaatgattcaggctgggcctttctggactttaatcagtttctctgtctttctcaatctaagtgcttac

SEQ ID NO: 26294 - DNA, 80 bp, synthetic construct
  misc_feature 1..80: note = Artificially Synthesized Probe
  source 1..80: mol_type = other DNA
gcaccttcctcttatcttgttcctccccagtaagatgtcccaatggggtcctgttgccaaacccacataaaagttggcca

SEQ ID NO: 26295 - DNA, 80 bp, synthetic construct
  misc_feature 1..80: note = Artificially Synthesized Probe
  source 1..80: mol_type = other DNA
ggatagatagctagatgattgatagataataggataaatggatgagtggatgaatgtacagataagatggatggatggat

SEQ ID NO: 26296 - DNA, 80 bp, synthetic construct
  misc_feature 1..80: note = Artificially Synthesized Probe
  source 1..80: mol_type = other DNA
tctctctcagccatcttcatctttctttcatgtattcactaattcccatctcagcatctcctctctccattgccatctga

SEQ ID NO: 26297 - DNA, 80 bp, synthetic construct
  misc_feature 1..80: note = Artificially Synthesized Probe
  source 1..80: mol_type = other DNA
tttgctttcaagacagtctttccctcatgacgtcaacaatgagtcctagaagctcaattctcatgggaaagcccacattt

SEQ ID NO: 26298 - DNA, 80 bp, synthetic construct
  misc_feature 1..80: note = Artificially Synthesized Probe
  source 1..80: mol_type = other DNA
tgcactggccactccaggtagacactgcactggccacgccttgcccacagctggggtctctgtgctgcctccagcgggtc

SEQ ID NO: 26299 - DNA, 80 bp, synthetic construct
  misc_feature 1..80: note = Artificially Synthesized Probe
  source 1..80: mol_type = other DNA
tttatgtcagctgccattgtaccaaaggacaaggtcttctacagcttcctgaagccctggctgggtgagtatctgtaggt

SEQ ID NO: 26300 - DNA, 80 bp, synthetic construct
  misc_feature 1..80: note = Artificially Synthesized Probe
  source 1..80: mol_type = other DNA
ccaatagtccaacacggaatcaatggcagggggtaaaataggctctgtctattattgggagttgctgaaaaagcacattg

SEQ ID NO: 26301 - DNA, 80 bp, synthetic construct
  misc_feature 1..80: note = Artificially Synthesized Probe
  source 1..80: mol_type = other DNA
aaggagagattatgtatttctgccccatggtagatgatgaaactgcaggtctgagagattagggagctaacccaagttca

SEQ ID NO: 26302 - DNA, 80 bp, synthetic construct
  misc_feature 1..80: note = Artificially Synthesized Probe
  source 1..80: mol_type = other DNA
gactgtatactgggagggagagagggaataggagcataatgtgcaaactatcctctgggtgcctagctgcatggaggcat

SEQ ID NO: 26303 - DNA, 80 bp, synthetic construct
  misc_feature 1..80: note = Artificially Synthesized Probe
  source 1..80: mol_type = other DNA
ctttttcattggccatatctgtatgtctttgtctgcatctgtgtcttcatctttgtttatgtttatgcctttgtgctctc

SEQ ID NO: 26304 - DNA, 80 bp, synthetic construct
  misc_feature 1..80: note = Artificially Synthesized Probe
  source 1..80: mol_type = other DNA
cacctggctaattttttgtatttttagtacagacggagcttcactatttttagtctcaaactcctgagctcgtgatctgc

SEQ ID NO: 26305 - DNA, 80 bp, synthetic construct
  misc_feature 1..80: note = Artificially Synthesized Probe
  source 1..80: mol_type = other DNA
gggtttctcgaaagaggatgaatcttcagagactgtctcagattagactcaagagccctcagaggtactgtgacttttta

SEQ ID NO: 26306 - DNA, 80 bp, synthetic construct
  misc_feature 1..80: note = Artificially Synthesized Probe
  source 1..80: mol_type = other DNA
tcatccattcttgtccagaacacctgcatcattcatccatccagtcctcgttcagcaaatactctcatactgcattccaa

SEQ ID NO: 26307 - DNA, 80 bp, synthetic construct
  misc_feature 1..80: note = Artificially Synthesized Probe
  source 1..80: mol_type = other DNA
cccattaatcaacttctccttatccttccctcccctctgccaatctatcttcttttttcatgagatccactttttcagct

SEQ ID NO: 26308 - DNA, 80 bp, synthetic construct
  misc_feature 1..80: note = Artificially Synthesized Probe
  source 1..80: mol_type = other DNA
tagaaagtctttgcccagacccatgtcccggagtataaaaccaagatttcaagcaaaattatgcgtgtagtttaaaaaaa

SEQ ID NO: 26309 - DNA, 80 bp, synthetic construct
  misc_feature 1..80: note = Artificially Synthesized Probe
  source 1..80: mol_type = other DNA
ataaaaaagagttcttcttgtaccaaatgagacattacagataagactagggttttccttgacaatcctgccacctgacc

SEQ ID NO: 26310 - DNA, 80 bp, synthetic construct
  misc_feature 1..80: note = Artificially Synthesized Probe
  source 1..80: mol_type = other DNA
ttccttacatgcataggcatctctgcaggacaaattctctgaagtgcaattgctgaatcaaagaccatttgcactgtata

SEQ ID NO: 26311 - DNA, 80 bp, synthetic construct
  misc_feature 1..80: note = Artificially Synthesized Probe
  source 1..80: mol_type = other DNA
ggtacttttgattaatttttatgacgttaagtaggtccacatttttctttcacagctgtaaaatccatcaacttcccagg

SEQ ID NO: 26312 - DNA, 80 bp, synthetic construct
  misc_feature 1..80: note = Artificially Synthesized Probe
  source 1..80: mol_type = other DNA
tggggggttggagctcggctaggctcgcaggatatgcaagcccacatggggatccaggcacggatacccccttctctgtt

SEQ ID NO: 26313 - DNA, 80 bp, synthetic construct
  misc_feature 1..80: note = Artificially Synthesized Probe
  source 1..80: mol_type = other DNA
gacactgtgagtgcactaaatgctattgaattggacactttagaatggttgaaatagtgatttttatgtgaattctacct

SEQ ID NO: 26314 - DNA, 80 bp, synthetic construct
  misc_feature 1..80: note = Artificially Synthesized Probe
  source 1..80: mol_type = other DNA
ctaggcacatcagatcacctggggaccactccagagtgagtagacaagactttgacaggggtgcctaatttttttttttt

SEQ ID NO: 26315 - DNA, 80 bp, synthetic construct
  misc_feature 1..80: note = Artificially Synthesized Probe
  source 1..80: mol_type = other DNA
gttggattttgagagttctatgtacaagtcctttgtcagtcgtgtgatttgcaagtcttcttcctagtctctgaagtttc

SEQ ID NO: 26316 - DNA, 80 bp, synthetic construct
  misc_feature 1..80: note = Artificially Synthesized Probe
  source 1..80: mol_type = other DNA
atcatcagtgtgtctatttctacaaatagtcctgatagggtttgaattgggatttctgtgaatctatagatcaatctgag

SEQ ID NO: 26317 - DNA, 80 bp, synthetic construct
  misc_feature 1..80: note = Artificially Synthesized Probe
  source 1..80: mol_type = other DNA
ccctcctgccccctccctgcttctgcaagcgtgtttcaatttgtacaacgtgcataaaacatgaaattacccttggccac

SEQ ID NO: 26318 - DNA, 80 bp, synthetic construct
  misc_feature 1..80: note = Artificially Synthesized Probe
  source 1..80: mol_type = other DNA
gtagccggcccaggattgaaaaaacaaaaagtaaaaaagttactccagcccaggagttccagttttagtggactatgatc

SEQ ID NO: 26319 - DNA, 80 bp, synthetic construct
  misc_feature 1..80: note = Artificially Synthesized Probe
  source 1..80: mol_type = other DNA
gtaagcaattcagcctcccaagtaactgggattacaggtgcccgccaccatgcccggctaatttttgtatttttagtaga

SEQ ID NO: 26320 - DNA, 80 bp, synthetic construct
  misc_feature 1..80: note = Artificially Synthesized Probe
  source 1..80: mol_type = other DNA
aaagtttccagaccgtgtaatctgggagtgcagcgtatgttaaaacagttcagaaagttagcaagttgaactggggtcta

SEQ ID NO: 26321 - DNA, 80 bp, synthetic construct
  misc_feature 1..80: note = Artificially Synthesized Probe
  source 1..80: mol_type = other DNA
agagagcttgtctagacttctgaaaactcattaagcatcatattcaaaaatctagaccatttgctcaggatggatgctgc

SEQ ID NO: 26322 - DNA, 80 bp, synthetic construct
  misc_feature 1..80: note = Artificially Synthesized Probe
  source 1..80: mol_type = other DNA
gctcagagggctcccactggtcacatccaggcattcagcaaataaggcggccaagacttatagcccagtgaataaagtga

SEQ ID NO: 26323 - DNA, 80 bp, synthetic construct
  misc_feature 1..80: note = Artificially Synthesized Probe
  source 1..80: mol_type = other DNA
cccagtgcccggcccaccacctcccatgtgggacctagttttggtttttttgagatggcttcttgctctgtcacccaggc

SEQ ID NO: 26324 - DNA, 80 bp, synthetic construct
  misc_feature 1..80: note = Artificially Synthesized Probe
  source 1..80: mol_type = other DNA
taaactccatccctgggacttgctgtctccagggtttatttcatgtgtggggcttgctgtctccagggtttatttcatgt

SEQ ID NO: 26325 - DNA, 80 bp, synthetic construct
  misc_feature 1..80: note = Artificially Synthesized Probe
  source 1..80: mol_type = other DNA
gcaactgtggggtgcttgggtgggtgaatgagttagggccggcgctggggaaagaaccagcgtctgtagcctggccgcct

SEQ ID NO: 26326 - DNA, 80 bp, synthetic construct
  misc_feature 1..80: note = Artificially Synthesized Probe
  source 1..80: mol_type = other DNA
gggggtgggaagttttttcctctcttttcatgttactcattttttttttgtgtcaccataattataaaggtcctgtgagg

SEQ ID NO: 26327 - DNA, 80 bp, synthetic construct
  misc_feature 1..80: note = Artificially Synthesized Probe
  source 1..80: mol_type = other DNA
gattatctttattgtaaattacttttttgcactcatgagctgtgtaggcctccgactcacagtaccagcacacaggactc

SEQ ID NO: 26328 - DNA, 80 bp, synthetic construct
  misc_feature 1..80: note = Artificially Synthesized Probe
  source 1..80: mol_type = other DNA
gccagaagcttgggcagccctggaggatgctgagactccgcatgcttgttccttcagccacttacatcttcttgttgtga

SEQ ID NO: 26329 - DNA, 80 bp, synthetic construct
  misc_feature 1..80: note = Artificially Synthesized Probe
  source 1..80: mol_type = other DNA
ttcaggatagaatgtctcagtccgtcttctgtgtctcttaatctcccctccatattgtcatcatcgtgtctctctgtgct

SEQ ID NO: 26330 - DNA, 80 bp, synthetic construct
  misc_feature 1..80: note = Artificially Synthesized Probe
  source 1..80: mol_type = other DNA
tcttgtgtgcttggctgtctgtggcagtgtgcagctcattatgtttgaagaattatttgtaggggttcctagatgccaaa

SEQ ID NO: 26331 - DNA, 80 bp, synthetic construct
  misc_feature 1..80: note = Artificially Synthesized Probe
  source 1..80: mol_type = other DNA
ggacaggcttgcttctggccctgacttctaagatgtggccctgtgggggtctcctggattcctcactctgggtaggctgg

SEQ ID NO: 26332 - DNA, 80 bp, synthetic construct
  misc_feature 1..80: note = Artificially Synthesized Probe
  source 1..80: mol_type = other DNA
cccacttcctggggattcctgcccactctgagcaagatgcccagtccccaccgccagaccctccaacaccaccaccacct

SEQ ID NO: 26333 - DNA, 80 bp, synthetic construct
  misc_feature 1..80: note = Artificially Synthesized Probe
  source 1..80: mol_type = other DNA
agggggacttgggtgggctgggtttagctccgtgtggtgcttgacatgctgtgacccgtttcaggctgcccaggctttgc

SEQ ID NO: 26334 - DNA, 80 bp, synthetic construct
  misc_feature 1..80: note = Artificially Synthesized Probe
  source 1..80: mol_type = other DNA
tgtgcccggccaaagacgactttttaaaccttctgaaagtcagcttaaccagagagctgtgtgctccgcaggctgcctgg

SEQ ID NO: 26335 - DNA, 80 bp, synthetic construct
  misc_feature 1..80: note = Artificially Synthesized Probe
  source 1..80: mol_type = other DNA
agcctggacctcgggagtcctaggatgggcagttttccttccctaggaggaaggggcgttgactgtgtgaccagatgatt

SEQ ID NO: 26336 - DNA, 80 bp, synthetic construct
  misc_feature 1..80: note = Artificially Synthesized Probe
  source 1..80: mol_type = other DNA
ttttcccagcagaaagagcaggacagccgccggggattctctcagcttctgcttgagatggggcgggaacgtgagcccaa

SEQ ID NO: 26337 - DNA, 80 bp, synthetic construct
  misc_feature 1..80: note = Artificially Synthesized Probe
  source 1..80: mol_type = other DNA
ctgccgggcgacagcagtgaccagggcgggagaagccttgccccataaactcacgcagcagaaggaacaagctcagccca

SEQ ID NO: 26338 - DNA, 80 bp, synthetic construct
  misc_feature 1..80: note = Artificially Synthesized Probe
  source 1..80: mol_type = other DNA
attcccagtggtggcgaggaggtggtatttttttaagtgtcagtgtggcattgtggttgcctcaataaaacagagtcttt

SEQ ID NO: 26339 - DNA, 80 bp, synthetic construct
  misc_feature 1..80: note = Artificially Synthesized Probe
  source 1..80: mol_type = other DNA
ggttggagccacacctggtctggggcatttgctgtccggggtcggagcctcacctggtgaagatacagaacatgctgctg

SEQ ID NO: 26340 - DNA, 80 bp, synthetic construct
  misc_feature 1..80: note = Artificially Synthesized Probe
  source 1..80: mol_type = other DNA
tctaccccttcagatgggaggatttcaaaaccacgttcagatcatcttttttctgcagaaaaatcatgctttaacgtgta

SEQ ID NO: 26341 - DNA, 80 bp, synthetic construct
  misc_feature 1..80: note = Artificially Synthesized Probe
  source 1..80: mol_type = other DNA
cacagataaagcagaccatcttggtgagaaatggaatgagccctctgttactttgtaaaagcaagaatgggccaggcgca

SEQ ID NO: 26342 - DNA, 80 bp, synthetic construct
  misc_feature 1..80: note = Artificially Synthesized Probe
  source 1..80: mol_type = other DNA
tgttccacgctgttcctttcttctgtccatgctggattttggtatcaaaatcataacatgaatattatgcagaacttgcc

SEQ ID NO: 26343 - DNA, 80 bp, synthetic construct
  misc_feature 1..80: note = Artificially Synthesized Probe
  source 1..80: mol_type = other DNA
cgctctttatctccagcattgcccgctgccttggtgtctgctttgtttattacacagtgatgctaactttcttttattta

SEQ ID NO: 26344 - DNA, 80 bp, synthetic construct
  misc_feature 1..80: note = Artificially Synthesized Probe
  source 1..80: mol_type = other DNA
acagcgtgggtgggccttacccaatcagtcgaaggcctttgctacagtgtgggtgggccttacccaatcagtcgaaggac

SEQ ID NO: 26345 - DNA, 80 bp, synthetic construct
  misc_feature 1..80: note = Artificially Synthesized Probe
  source 1..80: mol_type = other DNA
tggtggcccctgtatttgcgggctccacatctgcagattcaaccataaaaataacaatacaacaataaaaaataaacaaa

SEQ ID NO: 26346 - DNA, 80 bp, synthetic construct
  misc_feature 1..80: note = Artificially Synthesized Probe
  source 1..80: mol_type = other DNA
gtctcgaactcctgacctcgtgatccacccgcctcagtctcccaaagtgctgagattgcaggtgtgagccaccgcgccca

SEQ ID NO: 26347 - DNA, 80 bp, synthetic construct
  misc_feature 1..80: note = Artificially Synthesized Probe
  source 1..80: mol_type = other DNA
tggtttgtcttcttgtgtgtgtgatttttggcatgagctcatattcgttagatttttatctgtaggaattatttgaggcc

SEQ ID NO: 26348 - DNA, 80 bp, synthetic construct
  misc_feature 1..80: note = Artificially Synthesized Probe
  source 1..80: mol_type = other DNA
aaaaaacaaaaccaaatgaacatattctgtggatgtggtttttcttctttcacaaccagtccttcctgggcaagtccccg

SEQ ID NO: 26349 - DNA, 80 bp, synthetic construct
  misc_feature 1..80: note = Artificially Synthesized Probe
  source 1..80: mol_type = other DNA
tgtgggaaaacagccctcaccccaacatggcacagtttggggtggtgcgtcctggtttgcctctggagctcctcctcggt

SEQ ID NO: 26350 - DNA, 80 bp, synthetic construct
  misc_feature 1..80: note = Artificially Synthesized Probe
  source 1..80: mol_type = other DNA
gctgagggagtaggaagaggggggagaagttggggagatgggagccccgggctgagggagtaggaagaggggggagaagt

SEQ ID NO: 26351 - DNA, 80 bp, synthetic construct
  misc_feature 1..80: note = Artificially Synthesized Probe
  source 1..80: mol_type = other DNA
ggagccccgggctgagggagtaggaagaggggggagaacttggggagatgggagccccgggctgagggagtaggaagagg

SEQ ID NO: 26352 - DNA, 80 bp, synthetic construct
  misc_feature 1..80: note = Artificially Synthesized Probe
  source 1..80: mol_type = other DNA
ccagggcgagtggcatgagggtgaggctcagccgggggtctcggggttgctggggaggggatcttgggaggggctgttgg

SEQ ID NO: 26353 - DNA, 80 bp, synthetic construct
  misc_feature 1..80: note = Artificially Synthesized Probe
  source 1..80: mol_type = other DNA
gtgactgtggcttgtgtctggacaggaatgtgtcatttcccacatcttctagagggctgccagctgggaagacagttatc

SEQ ID NO: 26354 - DNA, 80 bp, synthetic construct
  misc_feature 1..80: note = Artificially Synthesized Probe
  source 1..80: mol_type = other DNA
aaagaaacaggaggatttagaggataaaatgggtgggaaaaaggaagagacaggatgtggcacgtggaatattcagacag

SEQ ID NO: 26355 - DNA, 80 bp, synthetic construct
  misc_feature 1..80: note = Artificially Synthesized Probe
  source 1..80: mol_type = other DNA
ctccatctttacctggaaaagaagaaaaggggagagggtagcctgagaatgagggggaaaaaatactgctgagaggacac

SEQ ID NO: 26356 - DNA, 80 bp, synthetic construct
  misc_feature 1..80: note = Artificially Synthesized Probe
  source 1..80: mol_type = other DNA
ctgagccatgagctggagctgctgtcgggggaggccaaggctgtgtcgggcagctgccttctctacagcccgaagcacat

SEQ ID NO: 26357 - DNA, 80 bp, synthetic construct
  misc_feature 1..80: note = Artificially Synthesized Probe
  source 1..80: mol_type = other DNA
gaggctcagaggagctaggggcttctgccccaggtgaggccgcattggggagtgggtgggagggccctggctgagcagct

SEQ ID NO: 26358 - DNA, 80 bp, synthetic construct
  misc_feature 1..80: note = Artificially Synthesized Probe
  source 1..80: mol_type = other DNA
ccgccttccttcccactcccaccgcaggccccactacggaccggaagtcacagagtttccgccttcatgcaactaagcgc

SEQ ID NO: 26359 - DNA, 80 bp, synthetic construct
  misc_feature 1..80: note = Artificially Synthesized Probe
  source 1..80: mol_type = other DNA
aagactgtggtatagcaaaagggctctgatgctctagctgtttgtcacaatgtaaaatgaagacaccagctaatctagaa

SEQ ID NO: 26360 - DNA, 80 bp, synthetic construct
  misc_feature 1..80: note = Artificially Synthesized Probe
  source 1..80: mol_type = other DNA
aaagctcaatactgtaaatactgtactgttcacaggtacttgttggagaagtgaaatgtttgtattcagaccaacaaaat

SEQ ID NO: 26361 - DNA, 80 bp, synthetic construct
  misc_feature 1..80: note = Artificially Synthesized Probe
  source 1..80: mol_type = other DNA
cagctggtagaaaatgtaattctaaaaaatactgttttcactgactgaactgcatctaataggaaccacggcttgtgaac

SEQ ID NO: 26362 - DNA, 80 bp, synthetic construct
  misc_feature 1..80: note = Artificially Synthesized Probe
  source 1..80: mol_type = other DNA
ctttttaactagccaagtgtagcggtgcatgtctgtagtcctaactatttgggaggctgaggcagaaggatcccttgcgt

SEQ ID NO: 26363 - DNA, 80 bp, synthetic construct
  misc_feature 1..80: note = Artificially Synthesized Probe
  source 1..80: mol_type = other DNA
agtggttgcctagggctgcacaggatgggggaaaatagcaggtgactgctaaggtaggggggtgatttttggggtgattt

SEQ ID NO: 26364 - DNA, 80 bp, synthetic construct
  misc_feature 1..80: note = Artificially Synthesized Probe
  source 1..80: mol_type = other DNA
tctctagttaaccctttcaattacaaatttctgctgaaggattcttccctaaagataactacattatgtcaaggttcagc

SEQ ID NO: 26365 - DNA, 80 bp, synthetic construct
  misc_feature 1..80: note = Artificially Synthesized Probe
  source 1..80: mol_type = other DNA
tattactgacttcaccactgttgggaactactgccatatataatgttacagagagaatgccgtaagtaatgtgtttcact

SEQ ID NO: 26366 - DNA, 80 bp, synthetic construct
  misc_feature 1..80: note = Artificially Synthesized Probe
  source 1..80: mol_type = other DNA
ggtggagtagcttcatgaactgaacattcatttggcacaacttcagctcctggatcaacttcattacagtggtagttaac

SEQ ID NO: 26367 - DNA, 80 bp, synthetic construct
  misc_feature 1..80: note = Artificially Synthesized Probe
  source 1..80: mol_type = other DNA
caaaaacacacgagatacacaatattgaagtacttatcatgctggctcctttgttgttataataaaagaaacagaatgaa

SEQ ID NO: 26368 - DNA, 80 bp, synthetic construct
  misc_feature 1..80: note = Artificially Synthesized Probe
  source 1..80: mol_type = other DNA
aagtgttaccctttgggtggggagggggaacagacaaatgacaaaagaagtgactatttcaacaggcaaagtttatcata

SEQ ID NO: 26369 - DNA, 80 bp, synthetic construct
  misc_feature 1..80: note = Artificially Synthesized Probe
  source 1..80: mol_type = other DNA
tagacagacacataacgatagctgctttcaaatgctttaggaactagttatatggggggaaaaaggaagagatttcttca

SEQ ID NO: 26370 - DNA, 80 bp, synthetic construct
  misc_feature 1..80: note = Artificially Synthesized Probe
  source 1..80: mol_type = other DNA
attaaaaaatgaaacaaatccatagctataaaggcagataaatgaagtataaaatcaccatcatacagtacatggttcag

SEQ ID NO: 26371 - DNA, 80 bp, synthetic construct
  misc_feature 1..80: note = Artificially Synthesized Probe
  source 1..80: mol_type = other DNA
actaaaagaaggttcgatgatgtgacaatttctcccccatttatccccaaatgaccagtagctctttgtcaaagatattt

SEQ ID NO: 26372 - DNA, 80 bp, synthetic construct
  misc_feature 1..80: note = Artificially Synthesized Probe
  source 1..80: mol_type = other DNA
gcctgctttactttggaaatggatcatggaaacattatttgctcacatgtcacagctccttctaaaaaaaggattataat

SEQ ID NO: 26373 - DNA, 80 bp, synthetic construct
  misc_feature 1..80: note = Artificially Synthesized Probe
  source 1..80: mol_type = other DNA
caactaaagctgagtttattgcttttctctattcgtttgtgcttatacttgctattttgggtttgtaaataattcctaat

SEQ ID NO: 26374 - DNA, 80 bp, synthetic construct
  misc_feature 1..80: note = Artificially Synthesized Probe
  source 1..80: mol_type = other DNA
gcaggtggcgctcaaagctaacaaagtaagcaatgtacttcatttttaccacggcttgattagcaagggttgttaaattc

SEQ ID NO: 26375 - DNA, 80 bp, synthetic construct
  misc_feature 1..80: note = Artificially Synthesized Probe
  source 1..80: mol_type = other DNA
gaatcaaaactttaagtaaatccaagagtagattcttggggagttgggggtggggaggatgaaattcaagcaataaacaa

SEQ ID NO: 26376 - DNA, 80 bp, synthetic construct
  misc_feature 1..80: note = Artificially Synthesized Probe
  source 1..80: mol_type = other DNA
tattttccagctattaggttgacaattcaaaaaatcctaatacctttcattggaaagggtgtggaaaagagatcactcta

SEQ ID NO: 26377 - DNA, 80 bp, synthetic construct
  misc_feature 1..80: note = Artificially Synthesized Probe
  source 1..80: mol_type = other DNA
gtataaatttcctccctgaagagactgagaattatcaatgcagacacacacacagcatgtaatacgcgcgttcgtgactc

SEQ ID NO: 26378 - DNA, 80 bp, synthetic construct
  misc_feature 1..80: note = Artificially Synthesized Probe
  source 1..80: mol_type = other DNA
agtggtcaaaggagccaaagatgaagagaaaaggaaaaccaagagcgggtgacaaggctgaggagccccgaaaggcggac

SEQ ID NO: 26379 - DNA, 80 bp, synthetic construct
  misc_feature 1..80: note = Artificially Synthesized Probe
  source 1..80: mol_type = other DNA
ctgtactgacggaaagcattaaaatgttactttttgagctggcaaaacggtggacttctataacgtgagcagtatctcat

SEQ ID NO: 26380 - DNA, 80 bp, synthetic construct
  misc_feature 1..80: note = Artificially Synthesized Probe
  source 1..80: mol_type = other DNA
tgtgtatacgtggtttttttttctttttctcagtttttttcctcaacttatttggagtaatgctcacgctctggctctct

SEQ ID NO: 26381 - DNA, 80 bp, synthetic construct
  misc_feature 1..80: note = Artificially Synthesized Probe
  source 1..80: mol_type = other DNA
cccctcagaatattgagcatattactctgttatcttctattttctattgctactgagaaatctgctgtcagtctttttga

SEQ ID NO: 26382 - DNA, 80 bp, synthetic construct
  misc_feature 1..80: note = Artificially Synthesized Probe
  source 1..80: mol_type = other DNA
tgcctaataaatgagagtaatcatattacaaggggagaaaccaagcaagacagggaaattggaggtcctagaagctggag

SEQ ID NO: 26383 - DNA, 80 bp, synthetic construct
  misc_feature 1..80: note = Artificially Synthesized Probe
  source 1..80: mol_type = other DNA
acaacatcaatgagatgcagccatcctaaattttgaataggggactaatgatgccataatgaagggactgcagagaatac

SEQ ID NO: 26384 - DNA, 80 bp, synthetic construct
  misc_feature 1..80: note = Artificially Synthesized Probe
  source 1..80: mol_type = other DNA
acagagaaggaagcagaggtgcacagaggttgtataacttgcctgagatgatagttggtaagtatcagagctgaatttaa

SEQ ID NO: 26385 - DNA, 80 bp, synthetic construct
  misc_feature 1..80: note = Artificially Synthesized Probe
  source 1..80: mol_type = other DNA
tataaagtagcaacgaacttggatgaatcatgttcgtgtactagtgttttgtggaatattgcttttattatagcagcctg

SEQ ID NO: 26386 - DNA, 80 bp, synthetic construct
  misc_feature 1..80: note = Artificially Synthesized Probe
  source 1..80: mol_type = other DNA
gctgttaaaatgtatgtaacttgattttttttctccaacaatatgactcagaaatatctacattactaggtagatatatt

SEQ ID NO: 26387 - DNA, 80 bp, synthetic construct
  misc_feature 1..80: note = Artificially Synthesized Probe
  source 1..80: mol_type = other DNA
agctgggactacaggtgcatgtcaccatgtgcagctaatttttgtaattttagtaggagagacgggttttcaccatattg

SEQ ID NO: 26388 - DNA, 80 bp, synthetic construct
  misc_feature 1..80: note = Artificially Synthesized Probe
  source 1..80: mol_type = other DNA
aaagtccacaatttcaaaacttttttggcaaaaactttgtgtacctgcagctagcatttcagccagcatgagcaagtacg

SEQ ID NO: 26389 - DNA, 80 bp, synthetic construct
  misc_feature 1..80: note = Artificially Synthesized Probe
  source 1..80: mol_type = other DNA
aatgtgttcaagaattgacttggatgctcctaaaagcattcagttttatgcattcataaagagatggtttggaattggaa

SEQ ID NO: 26390 - DNA, 80 bp, synthetic construct
  misc_feature 1..80: note = Artificially Synthesized Probe
  source 1..80: mol_type = other DNA
acagcttgcactgtgttcctggaaaagacactcaatgccagcctgtgtaagcagccaggagaggggttgtaccctgcaaa

SEQ ID NO: 26391 - DNA, 80 bp, synthetic construct
  misc_feature 1..80: note = Artificially Synthesized Probe
  source 1..80: mol_type = other DNA
aagccatcatgccaggccaacaagttctttaaatggattctctaacaaatcttcctttccatttcaccactttcttttag

SEQ ID NO: 26392 - DNA, 80 bp, synthetic construct
  misc_feature 1..80: note = Artificially Synthesized Probe
  source 1..80: mol_type = other DNA
gcttggagggattctgagtaagtacatatctggcagaaggaaattgcacttatcataattgacttggaccagctatgatt

SEQ ID NO: 26393 - DNA, 80 bp, synthetic construct
  misc_feature 1..80: note = Artificially Synthesized Probe
  source 1..80: mol_type = other DNA
cgcctggctgcagttgcaatcctttttagttaatattttaagctgttccagaagcagataaaaagagaaacatgatgata

SEQ ID NO: 26394 - DNA, 80 bp, synthetic construct
  misc_feature 1..80: note = Artificially Synthesized Probe
  source 1..80: mol_type = other DNA
tgctattctgttaatagctcattcaaatgcttaatgggcatttgtgcaaagtctgaccagtaaaaacaaaattcccccag

SEQ ID NO: 26395 - DNA, 80 bp, synthetic construct
  misc_feature 1..80: note = Artificially Synthesized Probe
  source 1..80: mol_type = other DNA
gccatatgcccagctagaatggggattcctttactgcaggagaaagggaaggaatatggttattaatagaagtctcttcc

SEQ ID NO: 26396 - DNA, 80 bp, synthetic construct
  misc_feature 1..80: note = Artificially Synthesized Probe
  source 1..80: mol_type = other DNA
acattcatggcctaagtgttccctcatctcacctgcagctggagttgcaccatgattccatatctgttttgtcttcaaga

SEQ ID NO: 26397 - DNA, 80 bp, synthetic construct
  misc_feature 1..80: note = Artificially Synthesized Probe
  source 1..80: mol_type = other DNA
gatcgtatatttggaaaaacctaaggctccaaatttaagatcatatgatctggtcatatcattttggcctctaagaccaa

SEQ ID NO: 26398 - DNA, 80 bp, synthetic construct
  misc_feature 1..80: note = Artificially Synthesized Probe
  source 1..80: mol_type = other DNA
ctacacatttacagtgaactcatttttgacaaaggtgccaagaatatatatattggtgaaaggaaagtctctgcaataaa

SEQ ID NO: 26399 - DNA, 80 bp, synthetic construct
  misc_feature 1..80: note = Artificially Synthesized Probe
  source 1..80: mol_type = other DNA
caatcatgatgaagaacagtttgaacgttcctcaaaaaactaaaaatagagctaccatttgatccagcaatcccactgac

SEQ ID NO: 26400 - DNA, 80 bp, synthetic construct
  misc_feature 1..80: note = Artificially Synthesized Probe
  source 1..80: mol_type = other DNA
gtagtccgaggaaatatgagcttgaaccagaaacagaataaaaaaaacaagggtggtgaaaattagatagttcaggctaa

SEQ ID NO: 26401 - DNA, 80 bp, synthetic construct
  misc_feature 1..80: note = Artificially Synthesized Probe
  source 1..80: mol_type = other DNA
ggaggaccatgaactggctaacatggatgtgaaaatcattacattaaagatagagaagcagaaaaagagaaagagcctgg

SEQ ID NO: 26402 - DNA, 80 bp, synthetic construct
  misc_feature 1..80: note = Artificially Synthesized Probe
  source 1..80: mol_type = other DNA
gtagtatttgttttggccagtgaaatatagaaacagtgatgtgtgtcagtcacttctgggcaaggcagagagctagctag

SEQ ID NO: 26403 - DNA, 80 bp, synthetic construct
  misc_feature 1..80: note = Artificially Synthesized Probe
  source 1..80: mol_type = other DNA
gtcaaatcatgcctgacacagaggcaggatgtttaatatgcactttgttacatggacagcatttatctaagtctgtgcta

SEQ ID NO: 26404 - DNA, 80 bp, synthetic construct
  misc_feature 1..80: note = Artificially Synthesized Probe
  source 1..80: mol_type = other DNA
actacctaaacttgaaccttgtggatctgatattgaaagtttcaaataaaaggcagtcttgatactgcacaaactgtgtc

SEQ ID NO: 26405 - DNA, 80 bp, synthetic construct
  misc_feature 1..80: note = Artificially Synthesized Probe
  source 1..80: mol_type = other DNA
agaagcagtatgcctcttccactcacatgtcattagccaaggcaaattatatgaccacacctaatttcaaaggggacagg

SEQ ID NO: 26406 - DNA, 80 bp, synthetic construct
  misc_feature 1..80: note = Artificially Synthesized Probe
  source 1..80: mol_type = other DNA
ttgtttgtttgttttgttttaagaaaaaaaatggcctgttgcacagtggcctatagagtaacctgtgtggggccactttt

SEQ ID NO: 26407 - DNA, 80 bp, synthetic construct
  misc_feature 1..80: note = Artificially Synthesized Probe
  source 1..80: mol_type = other DNA
ttttctactctctttcttcaaactcatgtaaaaaatacattgagtgtttttatgagaatcttgggctgggcgtggtggct

SEQ ID NO: 26408 - DNA, 80 bp, synthetic construct
  misc_feature 1..80: note = Artificially Synthesized Probe
  source 1..80: mol_type = other DNA
acactcatgccatcattcttgatgttctctctgattgaaatcatcttccaccctctcttcacttgcttgctagatgaacc

SEQ ID NO: 26409 - DNA, 80 bp, synthetic construct
  misc_feature 1..80: note = Artificially Synthesized Probe
  source 1..80: mol_type = other DNA
aataagggttataatgagaagagacaatgctcacagaagaagaccaggcgtctatggacatttttgtcttttccatgtct

SEQ ID NO: 26410 - DNA, 80 bp, synthetic construct
  misc_feature 1..80: note = Artificially Synthesized Probe
  source 1..80: mol_type = other DNA
gtgctatttaactctaaccctcaattaccctctctgaaaaatagggataatagttcttattgcacagggttgcaagaaga

SEQ ID NO: 26411 - DNA, 80 bp, synthetic construct
  misc_feature 1..80: note = Artificially Synthesized Probe
  source 1..80: mol_type = other DNA
taaaaacagactttgtggagaaggaagcaatgagatggaaatatagatgagaagatgaagaaaagagttcactggtgttt

SEQ ID NO: 26412 - DNA, 80 bp, synthetic construct
  misc_feature 1..80: note = Artificially Synthesized Probe
  source 1..80: mol_type = other DNA
catttatcaattattgattacagacaataaatgttataattttagggcctgaagagacccttggggtcatgggcatcaga

SEQ ID NO: 26413 - DNA, 80 bp, synthetic construct
  misc_feature 1..80: note = Artificially Synthesized Probe
  source 1..80: mol_type = other DNA
ggatccaatccaggattccactttgcatgtagtgattatgtctccttcgtcttctccacactgagacatttcttcaggtt

SEQ ID NO: 26414 - DNA, 80 bp, synthetic construct
  misc_feature 1..80: note = Artificially Synthesized Probe
  source 1..80: mol_type = other DNA
tttggattaaaatattagacataagactatcttccatttagcagaattgactgtgagtttaccaggtaactcagcactta

SEQ ID NO: 26415 - DNA, 80 bp, synthetic construct
  misc_feature 1..80: note = Artificially Synthesized Probe
  source 1..80: mol_type = other DNA
tttttttcttgcaacagtccgtttcctcataaggtcacataaactgagcactatgtgctcaaaagctgtctgaagttctt

SEQ ID NO: 26416 - DNA, 80 bp, synthetic construct
  misc_feature 1..80: note = Artificially Synthesized Probe
  source 1..80: mol_type = other DNA
tatccccattttacaaacagggaactgaagcacagagaagattaatgctttcctgtatcagtgagcttagactgccataa

SEQ ID NO: 26417 - DNA, 80 bp, synthetic construct
  misc_feature 1..80: note = Artificially Synthesized Probe
  source 1..80: mol_type = other DNA
gaggcacctcacattattttgaaactgacttaatagtcaaggctttcccgttatatctggtacttcttatgacagacacc

SEQ ID NO: 26418 - DNA, 80 bp, synthetic construct
  misc_feature 1..80: note = Artificially Synthesized Probe
  source 1..80: mol_type = other DNA
aaaagcagggaagcgatgatttttgttttcctgggaactttcatctctataagcttcccttcctccagttgaacacagtg

SEQ ID NO: 26419 - DNA, 80 bp, synthetic construct
  misc_feature 1..80: note = Artificially Synthesized Probe
  source 1..80: mol_type = other DNA
taatgtgggtgtgtctcatccagtagaacaaaaaggctgagtaagaaataatttcttctgcctgactgccttcaagctgg

SEQ ID NO: 26420 - DNA, 80 bp, synthetic construct
  misc_feature 1..80: note = Artificially Synthesized Probe
  source 1..80: mol_type = other DNA
ctacttgctgaaaacttcaggctctaacattagacacagggccttacagagactttataaccaaatcccgtaattgtgaa

SEQ ID NO: 26421 - DNA, 80 bp, synthetic construct
  misc_feature 1..80: note = Artificially Synthesized Probe
  source 1..80: mol_type = other DNA
ctcttcgactactctctagtcccagagaacctaaaagaatattatgttttatttagccaagtagaaatctatcacaagct

SEQ ID NO: 26422 - DNA, 80 bp, synthetic construct
  misc_feature 1..80: note = Artificially Synthesized Probe
  source 1..80: mol_type = other DNA
gggtgttctttgaaagtaaagttatggatttgcagtagattgaatatgggtataagagagagaggggagtcaaggatgag

SEQ ID NO: 26423 - DNA, 80 bp, synthetic construct
  misc_feature 1..80: note = Artificially Synthesized Probe
  source 1..80: mol_type = other DNA
aattatcaaactctcagagagtagagggaaagtttttccttccctaaagttctggcagtgaagttggtatcaaataccgc

SEQ ID NO: 26424 - DNA, 80 bp, synthetic construct
  misc_feature 1..80: note = Artificially Synthesized Probe
  source 1..80: mol_type = other DNA
acattaagattttccagttgggcccctgaaaagctttgaaggagatatctttcaccctataaaagagagagattaaaata

SEQ ID NO: 26425 - DNA, 80 bp, synthetic construct
  misc_feature 1..80: note = Artificially Synthesized Probe
  source 1..80: mol_type = other DNA
atgaccagacagttttaaggaactaaggtttaactttataaagtcaataaggcctcccccactggaaaaattgccttggt

SEQ ID NO: 26426 - DNA, 80 bp, synthetic construct
  misc_feature 1..80: note = Artificially Synthesized Probe
  source 1..80: mol_type = other DNA
cactccaactaaagatgcttcaagcccaatatctagaaatagtcacaactggataccctccagactctgaaactagttta

SEQ ID NO: 26427 - DNA, 80 bp, synthetic construct
  misc_feature 1..80: note = Artificially Synthesized Probe
  source 1..80: mol_type = other DNA
agaattctccatgcccagacaaatgtttattcttctgaggacccattcaccttacctccaaatcatttactctccctgca

SEQ ID NO: 26428 - DNA, 80 bp, synthetic construct
  misc_feature 1..80: note = Artificially Synthesized Probe
  source 1..80: mol_type = other DNA
tagaagacagcaaatataggtaactcctttgaggagtttttcactctaaaggctaggagaataatgaaatgttagctgga

SEQ ID NO: 26429 - DNA, 80 bp, synthetic construct
  misc_feature 1..80: note = Artificially Synthesized Probe
  source 1..80: mol_type = other DNA
taatcacagggtccttaaaaatggaatggtagaagacagttggaggcagatgtgactacagaagaaggtcagagtgacac

SEQ ID NO: 26430 - DNA, 80 bp, synthetic construct
  misc_feature 1..80: note = Artificially Synthesized Probe
  source 1..80: mol_type = other DNA
ttcctcacaccctcccttctccacacacacacacacatcaaattattctgaaaatgaaatgcaaaataaaatgaggaagg

SEQ ID NO: 26431 - DNA, 80 bp, synthetic construct
  misc_feature 1..80: note = Artificially Synthesized Probe
  source 1..80: mol_type = other DNA
aaatgcttgcatggtgcctggcacagtgctcacggagggatgttattatcatctctattcttggaagtgaaggaagaaag

SEQ ID NO: 26432 - DNA, 80 bp, synthetic construct
  misc_feature 1..80: note = Artificially Synthesized Probe
  source 1..80: mol_type = other DNA
tatgggaaagaagtagatcaagataggaaggaccaagaatgtggagtgagaaatggactggagagagagggtaggattaa

SEQ ID NO: 26433 - DNA, 80 bp, synthetic construct
  misc_feature 1..80: note = Artificially Synthesized Probe
  source 1..80: mol_type = other DNA
taaccactctctaaaaagttccaaactttccctcaccctctgtcttcttctgagacctccaaactcttccaagctctgac

SEQ ID NO: 26434 - DNA, 80 bp, synthetic construct
  misc_feature 1..80: note = Artificially Synthesized Probe
  source 1..80: mol_type = other DNA
ttttagagaaattaaaaagcaaaaaagtcaaacagaaattacaatatgcttccatgaagccataccaagtgtgcctgcct

SEQ ID NO: 26435 - DNA, 80 bp, synthetic construct
  misc_feature 1..80: note = Artificially Synthesized Probe
  source 1..80: mol_type = other DNA
agaaaagaatggttctgagaacccttggaaagtgggaggacccctgctgttctctaaaaggcattctaagaaaagacttc

SEQ ID NO: 26436 - DNA, 80 bp, synthetic construct
  misc_feature 1..80: note = Artificially Synthesized Probe
  source 1..80: mol_type = other DNA
aaaagtgtaaaccaaaacaaaaccatactaagctgcccaactaactgaatagaccctccttttggccaaggacattccaa

SEQ ID NO: 26437 - DNA, 80 bp, synthetic construct
  misc_feature 1..80: note = Artificially Synthesized Probe
  source 1..80: mol_type = other DNA
aaggtgccatgtttcagagtagcatatcccgaaccccatcaaagccaagtaccttgtatagattgtctagtgccttattc

SEQ ID NO: 26438 - DNA, 80 bp, synthetic construct
  misc_feature 1..80: note = Artificially Synthesized Probe
  source 1..80: mol_type = other DNA
aggccttaaaagggccacgcttttagttaaatctctcttggatcaggaaagtacttagaaagaagagtcttcaaaagcaa

SEQ ID NO: 26439 - DNA, 80 bp, synthetic construct
  misc_feature 1..80: note = Artificially Synthesized Probe
  source 1..80: mol_type = other DNA
aatcataaggatggttacccctgtgctgttttcatgctagtgagtgagttctcataagatccaatgattttataaggggt

SEQ ID NO: 26440 - DNA, 80 bp, synthetic construct
  misc_feature 1..80: note = Artificially Synthesized Probe
  source 1..80: mol_type = other DNA
cagacctaaaacatgaggagtcggttaaaatatgcccataaaaatctttgcttggcatttctagggatcttccttgttgc

SEQ ID NO: 26441 - DNA, 80 bp, synthetic construct
  misc_feature 1..80: note = Artificially Synthesized Probe
  source 1..80: mol_type = other DNA
catagttaaagggagggaaggggaggaacaaagcaaggtggggatcaaaacagactggaataattgtgacagtttattga

SEQ ID NO: 26442 - DNA, 80 bp, synthetic construct
  misc_feature 1..80: note = Artificially Synthesized Probe
  source 1..80: mol_type = other DNA
ctaggaagagaggaacatgtatcttgcttgataggaaaagtttactgaaaggttgaagaaagttccagggagtagatgtg

SEQ ID NO: 26443 - DNA, 80 bp, synthetic construct
  misc_feature 1..80: note = Artificially Synthesized Probe
  source 1..80: mol_type = other DNA
tatacatacagtgatgcaccctatcacctctccattcccccataaaacctttccctctgggagaccctagtttggagaac

SEQ ID NO: 26444 - DNA, 80 bp, synthetic construct
  misc_feature 1..80: note = Artificially Synthesized Probe
  source 1..80: mol_type = other DNA
aaaagtggcaagcaagatagagtggagtgaaatgggagggctttgaaggtcactttattttgaagcaatagagacacatt

SEQ ID NO: 26445 - DNA, 80 bp, synthetic construct
  misc_feature 1..80: note = Artificially Synthesized Probe
  source 1..80: mol_type = other DNA
atacaggctctaggaagtcccttaaaaacaggagaacacagcatgagccaaaaaagggacagcagcctgtgtcagtctca

SEQ ID NO: 26446 - DNA, 80 bp, synthetic construct
  misc_feature 1..80: note = Artificially Synthesized Probe
  source 1..80: mol_type = other DNA
tgtggattggagggagatactcggggaaagtgagttatctggatgacaatcgatattcctaactcagagtagaggatctg

SEQ ID NO: 26447 - DNA, 80 bp, synthetic construct
  misc_feature 1..80: note = Artificially Synthesized Probe
  source 1..80: mol_type = other DNA
taaacccctaatattcagcatcagtcaggatggtctatgttatactatggtaacaaacaacctgccaatgttagtggctt

SEQ ID NO: 26448 - DNA, 80 bp, synthetic construct
  misc_feature 1..80: note = Artificially Synthesized Probe
  source 1..80: mol_type = other DNA
ggtaactattttacatttcagttcataatgagaaatctgagcttcagagaggataagtgtgcagtgaagaaataatctta

SEQ ID NO: 26449 - DNA, 80 bp, synthetic construct
  misc_feature 1..80: note = Artificially Synthesized Probe
  source 1..80: mol_type = other DNA
ttcaaactgaagggtaggttgagctgtgactagaaagacacaagcatggctacatatctggagttgtcaactctggattt

SEQ ID NO: 26450 - DNA, 80 bp, synthetic construct; identical to SEQ ID NO: 26449
  misc_feature 1..80: note = Artificially Synthesized Probe
  source 1..80: mol_type = other DNA

SEQ ID NO: 26451 - DNA, 80 bp, synthetic construct
  misc_feature 1..80: note = Artificially Synthesized Probe
  source 1..80: mol_type = other DNA
gacgaggacagttctatgacaacaagggaatcacgtatctctttgatctggactatgagtctgatgaattcacagtggat

SEQ ID NO: 26452 - DNA, 80 bp, synthetic construct
  misc_feature 1..80: note = Artificially Synthesized Probe
  source 1..80: mol_type = other DNA
taaaggaagtagaccatgttaaacttctgatggatttcatagtaagaaattggtgtatgattagcagagagcttctgggc

SEQ ID NO: 26453 - DNA, 80 bp, synthetic construct
  misc_feature 1..80: note = Artificially Synthesized Probe
  source 1..80: mol_type = other DNA
gcttgtttacaccgtttgtacttaaatgggttctaatgttcctttttagtgtgacccaaatcttcaggtgttcaatgttt

SEQ ID NO: 26454 - DNA, 80 bp, synthetic construct
  misc_feature 1..80: note = Artificially Synthesized Probe
  source 1..80: mol_type = other DNA
gggaactaactacatttccttgggagttaacttactctaagggtcttgaccatgtaagtaccctctatcactgataataa

SEQ ID NO: 26455 - DNA, 80 bp, synthetic construct
  misc_feature 1..80: note = Artificially Synthesized Probe
  source 1..80: mol_type = other DNA
cctcaaattcggagaaacagttaatttgggcaaatctacagttctgtttttgctactctattgtcattcctgtttaatac

SEQ ID NO: 26456 - DNA, 80 bp, synthetic construct
  misc_feature 1..80: note = Artificially Synthesized Probe
  source 1..80: mol_type = other DNA
aattgtttacatgattggaccctcagattctgttaaccaaaattgcagaatggggggccaggcctgtgtggtggctcaca

SEQ ID NO: 26457 - DNA, 80 bp, synthetic construct
  misc_feature 1..80: note = Artificially Synthesized Probe
  source 1..80: mol_type = other DNA
accatcattttcaggatctacattaagaggatggtgatacataattagtaatctcagggttttttcccccatatctaaaa

SEQ ID NO: 26458 - DNA, 80 bp, synthetic construct
  misc_feature 1..80: note = Artificially Synthesized Probe
  source 1..80: mol_type = other DNA
ttcaaacatttaagtcctggaactcttctccaagataaatgtggctgactgctgagtgtcttctgtgatacatcttggca

SEQ ID NO: 26459 - DNA, 80 bp, synthetic construct
  misc_feature 1..80: note = Artificially Synthesized Probe
  source 1..80: mol_type = other DNA
atgtgtatagttatgtgtatactaactctgagtcttgttaccctggttagtctggtggatccaatactttttggtcggat

SEQ ID NO: 26460 - DNA, 80 bp, synthetic construct
  misc_feature 1..80: note = Artificially Synthesized Probe
  source 1..80: mol_type = other DNA
tgactttctttatagacagcagatcactgggttatgttggttttttccgtgtctcttgtcattgatgcacttagaccatt

SEQ ID NO: 26461 - DNA, 80 bp, synthetic construct
  misc_feature 1..80: note = Artificially Synthesized Probe
  source 1..80: mol_type = other DNA
gtctcactgcttagagtagttggttctccagtactaggaactattgtcacatctttatctctgcttttcaaatcagagta

SEQ ID NO: 26462 - DNA, 80 bp, synthetic construct
  misc_feature 1..80: note = Artificially Synthesized Probe
  source 1..80: mol_type = other DNA
taaaggtattggcagaggatcatcaaagagatagtcatcttcctcctctgtgggacaaacaaaacaggtttataggaaac

SEQ ID NO: 26463 - DNA, 80 bp, synthetic construct
  misc_feature 1..80: note = Artificially Synthesized Probe
  source 1..80: mol_type = other DNA
aggttcagtgttatgacttgtaactgaacttagggcttaaggtcactaagatatctaacgactgtatttggaatcatcct

SEQ ID NO: 26464 - DNA, 80 bp, synthetic construct
  misc_feature 1..80: note = Artificially Synthesized Probe
  source 1..80: mol_type = other DNA
tgtcttgtcctggtcccaacagccagagtggaaaacctcatgatccatgggcatttgtaaaagaaccaagaagagccttg

SEQ ID NO: 26465 - DNA, 80 bp, synthetic construct
  misc_feature 1..80: note = Artificially Synthesized Probe
  source 1..80: mol_type = other DNA
aagctacctagtatgtgttattttcttagggcagcccaagccaactatatgactccaaaattctaccccccacaagaaat

SEQ ID NO: 26466 - DNA, 80 bp, synthetic construct
  misc_feature 1..80: note = Artificially Synthesized Probe
  source 1..80: mol_type = other DNA
acaaaccatagattagttgcggcctaaggccgggaatagtaatggggagtgactggaaatagacataaagtttctttttt

SEQ ID NO: 26467 - DNA, 80 bp, synthetic construct
  misc_feature 1..80: note = Artificially Synthesized Probe
  source 1..80: mol_type = other DNA
gcactgcaattaaaagccagaaaataccaggttggccataaaaacatccaacaacatactgcttacaagaaacccacttt

SEQ ID NO: 26468 - DNA, 80 bp, synthetic construct
  misc_feature 1..80: note = Artificially Synthesized Probe
  source 1..80: mol_type = other DNA
gtatgttctctaaccacaataacattaatttagataacagaataatccctgggaagtcctccaaaattcagaaactagta

SEQ ID NO: 26469 - DNA, 80 bp, synthetic construct
  misc_feature 1..80: note = Artificially Synthesized Probe
  source 1..80: mol_type = other DNA
gatggcttcactggtaaattctaccagtcatttaagaaagatataatgccaatcctcgaaaaatttttccagagactgag

SEQ ID NO: 26470 - DNA, 80 bp, synthetic construct
  misc_feature 1..80: note = Artificially Synthesized Probe
  source 1..80: mol_type = other DNA
aaacttaaaaagtaataccatgtgcaacagtatcccccaaaatgaaatacttagggattgatttacacagacttatacgc

SEQ ID NO: 26471 - DNA, 80 bp, synthetic construct
  misc_feature 1..80: note = Artificially Synthesized Probe
  source 1..80: mol_type = other DNA
ctgtgattgtgccactgtactccagtctgggtgacagcaagactctgtctcaaaacaaaacaaacccaacaatttaaaaa

SEQ ID NO: 26472 - DNA, 80 bp, synthetic construct
  misc_feature 1..80: note = Artificially Synthesized Probe
  source 1..80: mol_type = other DNA
gatgccttggcatgggtgagaaccggagggaattacaaaggggcataagaaaacttgaaggtgataatttcagtatctta

SEQ ID NO: 26473 - DNA, 80 bp, synthetic construct
  misc_feature 1..80: note = Artificially Synthesized Probe
  source 1..80: mol_type = other DNA
accacttgttttaacccagagaaggagagcagactcctgattttacaggctgaagacaggaaggcaaagtacttcctgag

SEQ ID NO: 26474 - DNA, 80 bp, synthetic construct
  misc_feature 1..80: note = Artificially Synthesized Probe
  source 1..80: mol_type = other DNA
cattcgggatacaatataactagctgcttctcctgccctgttcagtagggtttacttatatctcacaggaatctccacaa

SEQ ID NO: 26475 - DNA, 80 bp, synthetic construct
  misc_feature 1..80: note = Artificially Synthesized Probe
  source 1..80: mol_type = other DNA
tatttaagtctcagctattttaagatcaagcctcctgattctgttgcctcctgttgccatcttgtctctaactttccctt

SEQ ID NO: 26476 - DNA, 80 bp, synthetic construct
  misc_feature 1..80: note = Artificially Synthesized Probe
  source 1..80: mol_type = other DNA
caggctgtgtcttaggcaaattggaacccaagctccattcccaccatatggctggcactaaagaaatcattcatgggccg

SEQ ID NO: 26477 - DNA, 80 bp, synthetic construct
  misc_feature 1..80: note = Artificially Synthesized Probe
  source 1..80: mol_type = other DNA
ggcctcactcccaaagatctcctgaacactgagtactagtgggcctagaaatcagtacatttaaatattccccaggtgat

SEQ ID NO: 26478 - DNA, 80 bp, synthetic construct
  misc_feature 1..80: note = Artificially Synthesized Probe
  source 1..80: mol_type = other DNA
gctaacgggagtgcttgctctctctcactcgcgtgcgctctctctcaataaggaagtgtcccattcttatgtggccagtg

SEQ ID NO: 26479 - DNA, 80 bp, synthetic construct
  misc_feature 1..80: note = Artificially Synthesized Probe
  source 1..80: mol_type = other DNA
atagttttcacaaacagtatcttttgtaccttcacaggaggcatgcaaatagaaatcattacctgcccgcccaacaccga

SEQ ID NO: 26480 - DNA, 80 bp, synthetic construct
  misc_feature 1..80: note = Artificially Synthesized Probe
  source 1..80: mol_type = other DNA
aagccacgttacagtcctcccgtgcttaggaacactcgataggacttcagtattatgactggtcaccatttaaataagat

SEQ ID NO: 26481 - DNA, 80 bp, synthetic construct
  misc_feature 1..80: note = Artificially Synthesized Probe
  source 1..80: mol_type = other DNA
aaggaaatgaaacttacatagaaacagagatgcttctgagagtcaggggactacctgtcaactaccaaggctgcagaaca

SEQ ID NO: 26482 - DNA, 80 bp, synthetic construct
  misc_feature 1..80: note = Artificially Synthesized Probe
  source 1..80: mol_type = other DNA
aatattgtgatcatgatagtcactcctctgctccaccaagggttctgttctgtatgacatcaatttgttactctaagcca

SEQ ID NO: 26483 - DNA, 80 bp, synthetic construct
  misc_feature 1..80: note = Artificially Synthesized Probe
  source 1..80: mol_type = other DNA
gggaatattgtgcaaaacaactgggctggactcttcaaaaccatcaatgtgaagacaagcaaaaggctagacaaacgatc

SEQ ID NO: 26484 - DNA, 80 bp, synthetic construct
  misc_feature 1..80: note = Artificially Synthesized Probe
  source 1..80: mol_type = other DNA
cccagctattcaggaggccgaggcaggaagatcacttgagcctggggggtcgaggctacagtgagcaatgattgcaccac

SEQ ID NO: 26485 - DNA, 80 bp, synthetic construct
  misc_feature 1..80: note = Artificially Synthesized Probe
  source 1..80: mol_type = other DNA
tgggactccaggcatgcaccaccacactcagcaccttttttttttttttttttttttttttgtattttttgtagtgacgg

SEQ ID NO: 26486 - DNA, 80 bp, synthetic construct
  misc_feature 1..80: note = Artificially Synthesized Probe
  source 1..80: mol_type = other DNA
aattcaaaatgaaagtcttgtactcagcgtttgacaagagaaggaggttctgtgttggcattagaaaacgaatgaggctg

SEQ ID NO: 26487 - DNA, 80 bp, synthetic construct
  misc_feature 1..80: note = Artificially Synthesized Probe
  source 1..80: mol_type = other DNA
cagtgagccaagagtgggccactgcactccagtctgggcaacagaaggagaatgtctcgaaatatataaatacatatata

SEQ ID NO: 26488 - DNA, 80 bp, synthetic construct
  misc_feature 1..80: note = Artificially Synthesized Probe
  source 1..80: mol_type = other DNA
ttagtgaattaaccctctcttctttcttgaaaagtagtttttggctattcagtgcactctggtattccgccagcatgtca

SEQ ID NO: 26489 - DNA, 80 bp, synthetic construct
  misc_feature 1..80: note = Artificially Synthesized Probe
  source 1..80: mol_type = other DNA
cttgaacccgggaggtggaggctgcagtgagccgaggtcgcgtcactacactccagcctgggcaacatagcaagactccc

SEQ ID NO: 26490 - DNA, 80 bp, synthetic construct
  misc_feature 1..80: note = Artificially Synthesized Probe
  source 1..80: mol_type = other DNA
gggtttgtgccaccacaccttgctaatttttgtattttttagtagagacggggtttcaccatgttgaccaggctggtctc

SEQ ID NO: 26491 - DNA, 80 bp, synthetic construct
  misc_feature 1..80: note = Artificially Synthesized Probe
  source 1..80: mol_type = other DNA
agtggctcaatcttggctcactgcaacttccaccttctgggatcaagcaattccccagtagctgggactacaggggtgtg

SEQ ID NO: 26492 - DNA, 80 bp, synthetic construct
  misc_feature 1..80: note = Artificially Synthesized Probe
  source 1..80: mol_type = other DNA
gagggattgcgatcgctaaaggcttcttcccttggggtgctgaaaatattctgaaattgattgtggtgatggatacacaa

SEQ ID NO: 26493 - DNA, 80 bp, synthetic construct
  misc_feature 1..80: note = Artificially Synthesized Probe
  source 1..80: mol_type = other DNA
gctcagtctcaaaaaaaaaaaaaaaaaaaaaaaagattaaagcctggatgaggcctggtcccgattcacactgcacatca

SEQ ID NO: 26494 - DNA, 80 bp, synthetic construct
  misc_feature 1..80: note = Artificially Synthesized Probe
  source 1..80: mol_type = other DNA
aaatgtgacaataacatcatgtagtaatatcaacaccagggttcccatcattagcatgtaataaggaacaaatgtgacaa

SEQ ID NO: 26495 - DNA, 80 bp, synthetic construct
  misc_feature 1..80: note = Artificially Synthesized Probe
  source 1..80: mol_type = other DNA
gcctttgctgtctgaaacacagaaatggggcaaagagaagtttcagactctctatataaacaattccgattacattgtaa

SEQ ID NO: 26496 - DNA, 80 bp, synthetic construct
  misc_feature 1..80: note = Artificially Synthesized Probe
  source 1..80: mol_type = other DNA
caaaacagagactagcacataagaggcattcagtaagtatctgatgaatagatcaatgtgatttttcacctttttagtcc

SEQ ID NO: 26497 - DNA, 80 bp, synthetic construct
  misc_feature 1..80: note = Artificially Synthesized Probe
  source 1..80: mol_type = other DNA
agtgtcatgagcaccccccaaaatactattttcttccttgggtttaaagttctgttcattagtccacattcacacatttt

SEQ ID NO: 26498 - DNA, 80 bp, synthetic construct
  misc_feature 1..80: note = Artificially Synthesized Probe
  source 1..80: mol_type = other DNA
ggtggatgatatcatgcacacaaacacacgtgcacacactatgtgtgcatactcacacacgcatgcacatacacacacgc

SEQ ID NO: 26499 - DNA, 80 bp, synthetic construct
  misc_feature 1..80: note = Artificially Synthesized Probe
  source 1..80: mol_type = other DNA
ctcttcaaaccttgtctttctttgccttctagtctactttctgatattaaaaactgccactctgacattttggccttctg

SEQ ID NO: 26500 - DNA, 80 bp, synthetic construct
  misc_feature 1..80: note = Artificially Synthesized Probe
  source 1..80: mol_type = other DNA
aagtcaggagtttgagacctgcctgaccaacacagtgaaatcctctgcctactaaaaacacaaatattagccgggtatgg

SEQ ID NO: 26501 - DNA, 80 bp, synthetic construct
  misc_feature 1..80: note = Artificially Synthesized Probe
  source 1..80: mol_type = other DNA
ctgtatttcgggctcgttaacaacaactccttagtcacaggtgaacagtatagataaaccttcaagctgaaaggaaaaaa

SEQ ID NO: 26502 - DNA, 80 bp, synthetic construct
  misc_feature 1..80: note = Artificially Synthesized Probe
  source 1..80: mol_type = other DNA
aggcatgagccaccgcgcccagaccataataaacttttaaaacttaacgctatcattttgaggttaggaatatagtctac

SEQ ID NO: 26503 - DNA, 80 bp, synthetic construct
  misc_feature 1..80: note = Artificially Synthesized Probe
  source 1..80: mol_type = other DNA
aaacatgccaaatggttctagcccctagctgtgtgagttttcccagcccaggtatcagacatggataagggagtcttcag

SEQ ID NO: 26504 - DNA, 80 bp, synthetic construct
  misc_feature 1..80: note = Artificially Synthesized Probe
  source 1..80: mol_type = other DNA
cagggctttgggaggccaagatgggagatcacttgaagccaggagtttacaaccagcctgggcaacatggtaagtccccg

SEQ ID NO: 26505 - DNA, 80 bp, synthetic construct
  misc_feature 1..80: note = Artificially Synthesized Probe
  source 1..80: mol_type = other DNA
gttacctttgggaggagggaatgagttgggaggtaagaggggtctgggatattggtactgtcctatttcttaatctgggt

SEQ ID NO: 26506 - DNA, 80 bp, synthetic construct
  misc_feature 1..80: note = Artificially Synthesized Probe
  source 1..80: mol_type = other DNA
cactgcacttcggcctgggcgacagagtgagacttcatctcaaaaacaaacaaacggctgggcgcggtggctcatgcctg

SEQ ID NO: 26507 - DNA, 80 bp, synthetic construct
  misc_feature 1..80: note = Artificially Synthesized Probe
  source 1..80: mol_type = other DNA
tctcatctttcagaacttactgatgatgcttagtaaagcccaccctgcacacagcattggcttccagatggcccacaaat

SEQ ID NO: 26508 - DNA, 80 bp, synthetic construct
  misc_feature 1..80: note = Artificially Synthesized Probe
  source 1..80: mol_type = other DNA
tgaaaagccaacagaaggcaatgtgagaaacctccaaaagcagaagttgtgttttcacccttgatgagtttatgtcctgg

SEQ ID NO: 26509 - DNA, 80 bp, synthetic construct
  misc_feature 1..80: note = Artificially Synthesized Probe
  source 1..80: mol_type = other DNA
attgattccacacacaaaacaacatagctggccttcacaccaaccctgtgaggaaaggctgtgtttggatacctgtaatt

SEQ ID NO: 26510 - DNA, 80 bp, synthetic construct
  misc_feature 1..80: note = Artificially Synthesized Probe
  source 1..80: mol_type = other DNA
accctcgccaatctctgatcatcggccaccagcaaagctaccaagagaaactactagcagtgcttgaccaagccggcccg

SEQ ID NO: 26511 - DNA, 80 bp, synthetic construct
  misc_feature 1..80: note = Artificially Synthesized Probe
  source 1..80: mol_type = other DNA
tatttacactttattgacagacacaacacgtatgtatgtgcgtcgcagcacaggccctgtgggcaagaccggacgctcat

SEQ ID NO: 26512 - DNA, 80 bp, synthetic construct
  misc_feature 1..80: note = Artificially Synthesized Probe
  source 1..80: mol_type = other DNA
gtaagactctccaaaccagttgttttgtgttagggatgtaaacaaaaaatatcacacatgcagaaaaacatttaaatatg

SEQ ID NO: 26513 - DNA, 80 bp, synthetic construct
  misc_feature 1..80: note = Artificially Synthesized Probe
  source 1..80: mol_type = other DNA
ctgagctacagaagcttccatcaggttcttccagcaaagaggcaaaggcccagggttgacttttaaaatcagaactactc

SEQ ID NO: 26514 - DNA, 80 bp, synthetic construct
  misc_feature 1..80: note = Artificially Synthesized Probe
  source 1..80: mol_type = other DNA
aaacagtgactaaaaatccaattaaaacacaatccaaatctgacttacagtgatccaggcctcacaaatgaaaataatga

SEQ ID NO: 26515 - DNA, 80 bp, synthetic construct
  misc_feature 1..80: note = Artificially Synthesized Probe
  source 1..80: mol_type = other DNA
tcataacatgcataaactcgtgtatacttttgtgtacataccaagtcctctacaattaatttttaaaattatcactgcct

SEQ ID NO: 26516 - DNA, 80 bp, synthetic construct
  misc_feature 1..80: note = Artificially Synthesized Probe
  source 1..80: mol_type = other DNA
aggctgaaggaggagtattgcttgaacccgggaagcggaggttgcactgagctgagattgtgccactgcactctggcctg

SEQ ID NO: 26517 - DNA, 80 bp, synthetic construct
  misc_feature 1..80: note = Artificially Synthesized Probe
  source 1..80: mol_type = other DNA
tgaggtcaggagtttgagaccagcctggccaacatggtgaaacccgtctctattaaaaatacaaaaattagctgagtgtg

SEQ ID NO: 26518 - DNA, 80 bp, synthetic construct
  misc_feature 1..80: note = Artificially Synthesized Probe
  source 1..80: mol_type = other DNA
gtgacagagtgagactctgtctcaaaagtaaaagatgcaaacattcaccataagacaggtggagtgtctatgctactatc

SEQ ID NO: 26519 - DNA, 80 bp, synthetic construct
  misc_feature 1..80: note = Artificially Synthesized Probe
  source 1..80: mol_type = other DNA
tgaacaatactatcaaccaacctaactgatatctaatactccacccaacagagcagaatatacaagcaacactctccatg

SEQ ID NO: 26520 - DNA, 80 bp, synthetic construct
  misc_feature 1..80: note = Artificially Synthesized Probe
  source 1..80: mol_type = other DNA
attgatctgaaaggccagtgttgctctgacaccaacatgaaacaaagacatcacaggacaaaatatagaccagcatctct

SEQ ID NO: 26521 - DNA, 80 bp, synthetic construct
  misc_feature 1..80: note = Artificially Synthesized Probe
  source 1..80: mol_type = other DNA
gcacaaggggagggagggccacccaggggtcttcgtagcgagggaggaggcgggggcactgagcctggtgtaggtgagac

SEQ ID NO: 26522 - DNA, 80 bp, synthetic construct
  misc_feature 1..80: note = Artificially Synthesized Probe
  source 1..80: mol_type = other DNA
ggagcagcggctcatacctgtaatcccaggactttgggcagccgaggcgggtggatcacctgaggtcaggagttcagcac

SEQ ID NO: 26523 - DNA, 80 bp, synthetic construct
  misc_feature 1..80: note = Artificially Synthesized Probe
  source 1..80: mol_type = other DNA
agttgtaagacattcagagctccgacattcagtcactcacttcagaaaacaggagcattaggaggaattttggtgctaat

SEQ ID NO: 26524 - DNA, 80 bp, synthetic construct
  misc_feature 1..80: note = Artificially Synthesized Probe
  source 1..80: mol_type = other DNA
atgagccaccaagcccagccgacaaaatatttcttaaaaagtctgtaaccacagagaagcttctcgaaggagaacacagc

SEQ ID NO: 26525 - DNA, 80 bp, synthetic construct
  misc_feature 1..80: note = Artificially Synthesized Probe
  source 1..80: mol_type = other DNA
aggacagatggtgtgcttcacaagaaagtagtgttgccttctagctcagagtttaaaacacatataaaatgagcccatcc

SEQ ID NO: 26526 - DNA, 80 bp, synthetic construct
  misc_feature 1..80: note = Artificially Synthesized Probe
  source 1..80: mol_type = other DNA
aacaaaaaaccattcattactgcggaagaggtgtgtgtgcgttgcagaaggttaggacaagacaccgcgtttccgcagcc

SEQ ID NO: 26527 - DNA, 80 bp, synthetic construct
  misc_feature 1..80: note = Artificially Synthesized Probe
  source 1..80: mol_type = other DNA
ataaaaaataataataaaaaagaaaacctagacacaccccggatggagatgaggctgtggttggaggcagcctggtggat

SEQ ID NO: 26528 - DNA, 80 bp, synthetic construct
  misc_feature 1..80: note = Artificially Synthesized Probe
  source 1..80: mol_type = other DNA
tttgccgtttctatgaaatgaccatgatacagatctctgaggaagcatcagacaaattcagatttacaacctgtccccgc

SEQ ID NO: 26529 - DNA, 80 bp, synthetic construct
  misc_feature 1..80: note = Artificially Synthesized Probe
  source 1..80: mol_type = other DNA
attacatacacacgaatgcagatttcccatggttaaagctggcaacaatccccttaatagcttcagctgggctacatttg

SEQ ID NO: 26530 - DNA, 80 bp, synthetic construct
  misc_feature 1..80: note = Artificially Synthesized Probe
  source 1..80: mol_type = other DNA
gtctcataaaacaaaaaaaaattatgagatttttaatgtgtggcccaattcctcttcttgcagtgtggcccagggaagag

SEQ ID NO: 26531 - DNA, 80 bp, synthetic construct
  misc_feature 1..80: note = Artificially Synthesized Probe
  source 1..80: mol_type = other DNA
agcctccctgagcacaaccgctgtcctgatgctctgaaagggatgatatttggctttttactactggcctgggggccaga

SEQ ID NO: 26532 - DNA, 80 bp, synthetic construct
  misc_feature 1..80: note = Artificially Synthesized Probe
  source 1..80: mol_type = other DNA
cttcctgaagctatatgttcatttaagatgtctcaagaaaacggacaaaatagggccgagtgccatggctcccgcctata

SEQ ID NO: 26533 - DNA, 80 bp, synthetic construct
  misc_feature 1..80: note = Artificially Synthesized Probe
  source 1..80: mol_type = other DNA
cagctattcacaccgagaggaggaggacagggcgtcacactcggtcactctgagtcctggctcagctattcacaccgaga

SEQ ID NO: 26534 - DNA, 80 bp, synthetic construct
  misc_feature 1..80: note = Artificially Synthesized Probe
  source 1..80: mol_type = other DNA
acggctgaagaccgagaacactgagcagagactgcggctgctgctcaccacctgaaagtctggagtttgaaccttcacaa

SEQ ID NO: 26535 - DNA, 80 bp, synthetic construct
  misc_feature 1..80: note = Artificially Synthesized Probe
  source 1..80: mol_type = other DNA
ggaggccaaggaaggtgggttgcttgagtccaggagttcaagaccagcctgagaaacatagtgaaaccccatctatacaa

SEQ ID NO: 26536 - DNA, 80 bp, synthetic construct
  misc_feature 1..80: note = Artificially Synthesized Probe
  source 1..80: mol_type = other DNA
cctgagcaacatggcgaaaccccgtctctaccaaaaatacaaaaattagctgggtgtggtggcgcacgccgatagtccca

SEQ ID NO: 26537 - DNA, 80 bp, synthetic construct
  misc_feature 1..80: note = Artificially Synthesized Probe
  source 1..80: mol_type = other DNA
gctgcagtgagccgaggtcacacctctgtactccagcctgggtgacaaagtgaaaccctttaaaaaaaaagttttttgtt

SEQ ID NO: 26538 - DNA, 80 bp, synthetic construct
  misc_feature 1..80: note = Artificially Synthesized Probe
  source 1..80: mol_type = other DNA
tcaggagttcaagaccagcctgacaaacatggtgaaacctcgtctctacttaaaacacaaaaattagctgggcatggtgg

SEQ ID NO: 26539 - DNA, 80 bp, synthetic construct
  misc_feature 1..80: note = Artificially Synthesized Probe
  source 1..80: mol_type = other DNA
gcactctagcctgggtgacacagcaagaccatctcaaaatatatatatatctttttctttatttttttcctttttaattt

SEQ ID NO: 26540 - DNA, 80 bp, synthetic construct
  misc_feature 1..80: note = Artificially Synthesized Probe
  source 1..80: mol_type = other DNA
gaggcaggaggatctcttgagcccaggagtttgagaccaccttgggcaacacggcaagacccagtctctacaaaaaataa

SEQ ID NO: 26541 - DNA, 80 bp, synthetic construct
  misc_feature 1..80: note = Artificially Synthesized Probe
  source 1..80: mol_type = other DNA
gtaacaaacccctaacattgaatacggcctgggttgagaatcaccgttcattatgtgcttgtctagtagaatccgtaaca

SEQ ID NO: 26542 - DNA, 80 bp, synthetic construct
  misc_feature 1..80: note = Artificially Synthesized Probe
  source 1..80: mol_type = other DNA
agaaatgggggaaaacgtttcttacatagatttggtgggaaaaatatgaatttgacttttgtttacaaaccaaagtccac

SEQ ID NO: 26543 - DNA, 80 bp, synthetic construct
  misc_feature 1..80: note = Artificially Synthesized Probe
  source 1..80: mol_type = other DNA
cgatgcgcacaaaattgtttccctttctgaaacaaagcaaccttatttacaaaaaccaaaaccaccttaacaacaatagc

SEQ ID NO: 26544 - DNA, 80 bp, synthetic construct
  misc_feature 1..80: note = Artificially Synthesized Probe
  source 1..80: mol_type = other DNA
aataaaatttaaaaataaaaaataaataaaaattctcatcacccggtgcagtggctcatgcctgtaatccctgcactttg

SEQ ID NO: 26545 - DNA, 80 bp, synthetic construct
  misc_feature 1..80: note = Artificially Synthesized Probe
  source 1..80: mol_type = other DNA
ccccccagcacccgacatccccccagcacctgacatccccgagcactcagcctgacatccccccagcaggcaacacaggc

SEQ ID NO: 26546 - DNA, 80 bp, synthetic construct
  misc_feature 1..80: note = Artificially Synthesized Probe
  source 1..80: mol_type = other DNA
cgaaccccagccctcctggagaaaaagctctgatttcaagcatttgctgatttcttggtataaatacttcaccaacaccc

SEQ ID NO: 26547 - DNA, 80 bp, synthetic construct
  misc_feature 1..80: note = Artificially Synthesized Probe
  source 1..80: mol_type = other DNA
atcaaagttagaatgcatttacagtgtatcgtcattttaaagatttaggccacatttaggccttggtttttctttctttc

SEQ ID NO: 26548 - DNA, 80 bp, synthetic construct
  misc_feature 1..80: note = Artificially Synthesized Probe
  source 1..80: mol_type = other DNA
aaaaaaaaaaaatcagttctaactctattttcctcagtgtggcttctagaatattctccagcacacaaccagctaggctg

SEQ ID NO: 26549 - DNA, 80 bp, synthetic construct
  misc_feature 1..80: note = Artificially Synthesized Probe
  source 1..80: mol_type = other DNA
attgttcgctgtttaaactgtgaaccatggaaatgtgctgcccagccagaaaacaaacataaaataaaactttcagtgat

SEQ ID NO: 26550 - DNA, 80 bp, synthetic construct
  misc_feature 1..80: note = Artificially Synthesized Probe
  source 1..80: mol_type = other DNA
ttcttgggggagtccttcttcacgggagttgtgggcagttcattctccttcttgcgccttttgtaaggcacaaaaagcct

SEQ ID NO: 26551 - DNA, 80 bp, synthetic construct
  misc_feature 1..80: note = Artificially Synthesized Probe
  source 1..80: mol_type = other DNA
gtccaaggctccttgcatgtcttatcatcttttgttaagaatcagacaccgcaggtgatacattgtagcaacagtggaaa

SEQ ID NO: 26552 - DNA, 80 bp, synthetic construct
  misc_feature 1..80: note = Artificially Synthesized Probe
  source 1..80: mol_type = other DNA
gccctttccaagacttactacattttcttggatgtttatttgctgtactcccctaggacaatttctggagaccttaaggg

SEQ ID NO: 26553 - DNA, 80 bp, synthetic construct
  misc_feature 1..80: note = Artificially Synthesized Probe
  source 1..80: mol_type = other DNA
tgatagtcattgtgttaaacctacgaatcaacttgggaaaaagtcgcatctttactgagtcttctaatccacgggcgcag

SEQ ID NO: 26554 - DNA, 80 bp, synthetic construct
  misc_feature 1..80: note = Artificially Synthesized Probe
  source 1..80: mol_type = other DNA
tgaataagtttacagtagcatttttctgacatgttacaaaatgaggaatataaaatggcatgcatacaaggaaaagcgtg

SEQ ID NO: 26555 - DNA, 80 bp, synthetic construct
  misc_feature 1..80: note = Artificially Synthesized Probe
  source 1..80: mol_type = other DNA
gagggaggcctttgcctcaaaaaaaaaaaaaattgtgagaaatcaggtaatgcccaggccaggtgtggtggctcacacat

SEQ ID NO: 26556 - DNA, 80 bp, synthetic construct
  misc_feature 1..80: note = Artificially Synthesized Probe
  source 1..80: mol_type = other DNA
aaagtctctacaggaattgcttccttaacaacacccaaggagctaaactggaataggaattagaagtcctcttttcttag

SEQ ID NO: 26557 - DNA, 80 bp, synthetic construct
  misc_feature 1..80: note = Artificially Synthesized Probe
  source 1..80: mol_type = other DNA
cacgtcccagccctgcctccctcctgcttcttctcgcttgtctcctgtcccgtgggtcacgatggcttttcacccccaga

SEQ ID NO: 26558 - DNA, 80 bp, synthetic construct
  misc_feature 1..80: note = Artificially Synthesized Probe
  source 1..80: mol_type = other DNA
acaaaaagaaacaagtaaataaatccctgaaataaattctagctattctgaaacgtgttttgcccgaggcctggggtgca

SEQ ID NO: 26559 - DNA, 80 bp, synthetic construct
  misc_feature 1..80: note = Artificially Synthesized Probe
  source 1..80: mol_type = other DNA
gttttgggtgccccaaggttttcattctgaatacaaaaccaaccgaggcaaagtgagaaaacaactgtttctttttttct

SEQ ID NO: 26560 - DNA, 80 bp, synthetic construct
  misc_feature 1..80: note = Artificially Synthesized Probe
  source 1..80: mol_type = other DNA
cagcctgactgaaaacacagatcgccacgtggccatgggtcagcttgtgtgtgttctcacacccaccagaaataagccaa

SEQ ID NO: 26561 - DNA, 80 bp, synthetic construct
  misc_feature 1..80: note = Artificially Synthesized Probe
  source 1..80: mol_type = other DNA
aacaaataaccactctgctttcaggtatatggagatgatgtcccaggtatgtgaccaaggctgaaaagactacaagtaac

SEQ ID NO: 26562 - DNA, 80 bp, synthetic construct
  misc_feature 1..80: note = Artificially Synthesized Probe
  source 1..80: mol_type = other DNA
gaagatcttaacacttccatgaacacgctcgacctacatttctattccattgtctaagtcattcggctcttccaggaaaa

SEQ ID NO: 26563 - DNA, 80 bp, synthetic construct
  misc_feature 1..80: note = Artificially Synthesized Probe
  source 1..80: mol_type = other DNA
tgtctgtctccacgaccagaccacaccaggtgcacggttccctcatcctcgcctctcagcaccacaagccccggcatgcg

SEQ ID NO: 26564 - DNA, 80 bp, synthetic construct
  misc_feature 1..80: note = Artificially Synthesized Probe
  source 1..80: mol_type = other DNA
tggcaagaaactataagcagcttatataaaaatgtggactggaaagccacagcagcctccccaaaggaagcccgacagga

SEQ ID NO: 26565 - DNA, 80 bp, synthetic construct
  misc_feature 1..80: note = Artificially Synthesized Probe
  source 1..80: mol_type = other DNA
aggcagatgtgaggggtgagctagtcacgtggggcaggtgtgcagggcgggtggggcgggcgggtcacgtggagcaggtg

SEQ ID NO: 26566 - DNA, 80 bp, synthetic construct
  misc_feature 1..80: note = Artificially Synthesized Probe
  source 1..80: mol_type = other DNA
tcgccggcggccggcgcaattctgcctctcagagagagcttagtgccgcgggtttcgcccgttcccgccgccggcggaag

SEQ ID NO: 26567 - DNA, 80 bp, synthetic construct
  misc_feature 1..80: note = Artificially Synthesized Probe
  source 1..80: mol_type = other DNA
acagcctctagtaaccaggtttgttttgtgtattttcatttggttaaaaattaagtttaggttgggcgcagtggctcagg

SEQ ID NO: 26568 - DNA, 80 bp, synthetic construct
  misc_feature 1..80: note = Artificially Synthesized Probe
  source 1..80: mol_type = other DNA
gacacagctattcgtagccacattgtgattatagtaagtcactgacaaaaaatgttgtcctgaaagccaaggctacgttc

SEQ ID NO: 26569 - DNA, 80 bp, synthetic construct
  misc_feature 1..80: note = Artificially Synthesized Probe
  source 1..80: mol_type = other DNA
aaggcccaagaggttgcatgataaaaagactggacagctgcattgctggtttggaaaatccttatttttggagggatatt

SEQ ID NO: 26570 - DNA, 80 bp, synthetic construct
  misc_feature 1..80: note = Artificially Synthesized Probe
  source 1..80: mol_type = other DNA
aaatggctactagatacttaagtcccccaaacagaaatatatttcctctgaagaaactgaaaaaagtggccgggcgcagt

SEQ ID NO: 26571 - DNA, 80 bp, synthetic construct
  misc_feature 1..80: note = Artificially Synthesized Probe
  source 1..80: mol_type = other DNA
tgaggatccttaaccactcaccagctctcttcagttccccttcaaatgctgttttatctcagcggaacgtactacgccct

SEQ ID NO: 26572 - DNA, 80 bp, synthetic construct
  misc_feature 1..80: note = Artificially Synthesized Probe
  source 1..80: mol_type = other DNA
ggagagttctgccaggtcccaaaaggcagcagagtctggaggggtgggagcccccagcctccccactccagctctaggga

SEQ ID NO: 26573 - DNA, 80 bp, synthetic construct
  misc_feature 1..80: note = Artificially Synthesized Probe
  source 1..80: mol_type = other DNA
ccctgccaggctggaatcttgggcccctcttgttcacatacagatacacccctgatgcctgatgtccagtgaggaaccaa

SEQ ID NO: 26574 - DNA, 80 bp, synthetic construct
  misc_feature 1..80: note = Artificially Synthesized Probe
  source 1..80: mol_type = other DNA
aagggcacttttcctagtgactggccatagatggttttggatggttccatctgttctggcaggagtgggagcaggagcca

SEQ ID NO: 26575 - DNA, 80 bp, synthetic construct
  misc_feature 1..80: note = Artificially Synthesized Probe
  source 1..80: mol_type = other DNA
ttcccagatttactatcagttctccttaaaaagtatctaagctgttacagtagctttcccttcacttgattctattgtgt

SEQ ID NO: 26576 - DNA, 80 bp, synthetic construct
  misc_feature 1..80: note = Artificially Synthesized Probe
  source 1..80: mol_type = other DNA
cactcccagctctgcctccaggaagggtgagggcacgggtgcaccgaggggttggcgtgtgtgaccctgagctctgggtc

SEQ ID NO: 26577 - DNA, 80 bp, synthetic construct
  misc_feature 1..80: note = Artificially Synthesized Probe
  source 1..80: mol_type = other DNA
tcccacgccctcctcccccgcgcgcccgcccgctctcgggtgactccgcaacctgtcgctcaggttcctcctctcccggc

SEQ ID NO: 26578 - DNA, 80 bp, synthetic construct
  misc_feature 1..80: note = Artificially Synthesized Probe
  source 1..80: mol_type = other DNA
caagggccggtgggattctacatggtcctgcgatatccaggcgacggagtctcgcctctaaagtggcccggggagcagga

SEQ ID NO: 26579 - DNA, 80 bp, synthetic construct
  misc_feature 1..80: note = Artificially Synthesized Probe
  source 1..80: mol_type = other DNA
agaaactccctgttcgggcttccctgtgccccacccccttccaggcctgatggccctaggcctccgtgcttggttggccg

SEQ ID NO: 26580 - DNA, 80 bp, synthetic construct
  misc_feature 1..80: note = Artificially Synthesized Probe
  source 1..80: mol_type = other DNA
ggcccccttccccagaaggcaggcagtgtccatctgctccaggattggtgtgtttctatcaagaatggatgttggatttt

SEQ ID NO: 26581 - DNA, 80 bp, synthetic construct
  misc_feature 1..80: note = Artificially Synthesized Probe
  source 1..80: mol_type = other DNA
ttgcatatctagtggaatctcgtagtggacctggcacttgtagcaatgtttgatcagtagagtgaagatgatgacatttc

SEQ ID NO: 26582 - DNA, 80 bp, synthetic construct
  misc_feature 1..80: note = Artificially Synthesized Probe
  source 1..80: mol_type = other DNA
gtcttccccacccccactctctttcagtgccccgcaccttctggaatcccctggagacttgccgtgacagtggggtggga

SEQ ID NO: 26583 - DNA, 80 bp, synthetic construct
  misc_feature 1..80: note = Artificially Synthesized Probe
  source 1..80: mol_type = other DNA
ggtatagggggtgaagtggaaggattgaggctctggaaaggatttctgtgccattcccagcatggaggccaggcccattc

SEQ ID NO: 26584 - DNA, 80 bp, synthetic construct
  misc_feature 1..80: note = Artificially Synthesized Probe
  source 1..80: mol_type = other DNA
cttcatctgggacttgctgtcaaaccctaggatagtctcataaaggggaggctgggccagcctgctgctgtctgcttcag

SEQ ID NO: 26585 - DNA, 80 bp, synthetic construct
  misc_feature 1..80: note = Artificially Synthesized Probe
  source 1..80: mol_type = other DNA
cagtggctgtcccaggcaggtatcaggttcggcccacacctgagtgcccatactctgggcagggctgggaggcacctgac

SEQ ID NO: 26586 - DNA, 80 bp, synthetic construct
  misc_feature 1..80: note = Artificially Synthesized Probe
  source 1..80: mol_type = other DNA
acttcatcccctgcaaggtggggctggggtatgggctctgcctggccctgccccagtgaggcctcttcccagcaggactc

SEQ ID NO: 26587 - DNA, 80 bp, synthetic construct
  misc_feature 1..80: note = Artificially Synthesized Probe
  source 1..80: mol_type = other DNA
gtctaaagcaggcacccatctctgccacatcgccctggcttccatcttgtgtcttcctcaaccccaggacatgaacccga

SEQ ID NO: 26588 - DNA, 80 bp, synthetic construct
  misc_feature 1..80: note = Artificially Synthesized Probe
  source 1..80: mol_type = other DNA
aatttcaggccatgaaaaagtagcagcatcgtaaacaaaggctgaatgtggacatcactgaatgatttcagagccgtgag

SEQ ID NO: 26589 - DNA, 80 bp, synthetic construct
  misc_feature 1..80: note = Artificially Synthesized Probe
  source 1..80: mol_type = other DNA
tcaaaaaaagaaaaaagttaattttaaaaaccaacgtaactgcaaaaagccattgtgctctcacagtccgatgtccagaa

SEQ ID NO: 26590 - DNA, 80 bp, synthetic construct
  misc_feature 1..80: note = Artificially Synthesized Probe
  source 1..80: mol_type = other DNA
acagtgcacccctggccctgcaaggaaataaaagggaagcaggtccctgtagggcacagtgggggtgggcatcccggtgc

SEQ ID NO: 26591 - DNA, 80 bp, synthetic construct
  misc_feature 1..80: note = Artificially Synthesized Probe
  source 1..80: mol_type = other DNA
gcacgggctcgctcctgggccaggtatgcgccccgcaccagcttggccccaaaacaccagccctcacggcgagccagctc

SEQ ID NO: 26592 - DNA, 80 bp, synthetic construct
  misc_feature 1..80: note = Artificially Synthesized Probe
  source 1..80: mol_type = other DNA
gtgctgagtgtaaaaccagccaaatgccagggagctcagatgagaggagcccctcctgtggggtctccaagccccagggc

SEQ ID NO: 26593 - DNA, 80 bp, synthetic construct
  misc_feature 1..80: note = Artificially Synthesized Probe
  source 1..80: mol_type = other DNA
cactccgaagtgtgtactccccagttcccacagaggccccaccgttgtgggagagccccctgcaactcccatgtgacatt

SEQ ID NO: 26594 - DNA, 80 bp, synthetic construct
  misc_feature 1..80: note = Artificially Synthesized Probe
  source 1..80: mol_type = other DNA
agacacacgtggcaggctgaattcccttcttagcgcagcgccctgctgagctgggcctcactgaggagcggaggtgttac

SEQ ID NO: 26595 - DNA, 80 bp, synthetic construct
  misc_feature 1..80: note = Artificially Synthesized Probe
  source 1..80: mol_type = other DNA
cccaccctctcaggcagggcagccaggactgggagacgtcactggggcttggctggaaccatggctgatgctcgtgtcct

SEQ ID NO: 26596 - DNA, 80 bp, synthetic construct
  misc_feature 1..80: note = Artificially Synthesized Probe
  source 1..80: mol_type = other DNA
gtcagaagccacaggaaaagccatgacagccctgagaggtgcatggaggcagcgcagggtgcgacagggagggccagggc

SEQ ID NO: 26597 - DNA, 80 bp, synthetic construct
  misc_feature 1..80: note = Artificially Synthesized Probe
  source 1..80: mol_type = other DNA
cggcttccaagcactgctcagaagtgccaggtgcagcggcatgcacctataatcccagcactttgggaggccaaagtgta

SEQ ID NO: 26598 - DNA, 80 bp, synthetic construct
  misc_feature 1..80: note = Artificially Synthesized Probe
  source 1..80: mol_type = other DNA
cctcattggcgtagaagtaggtgcgggcactgatgacaccattcctgcggtccccgaaggcccagtgggcctggtattgc

SEQ ID NO: 26599 - DNA, 80 bp, synthetic construct
  misc_feature 1..80: note = Artificially Synthesized Probe
  source 1..80: mol_type = other DNA
accccggtggagggtagattccaaggtgcagccccagccccacccctagcctggggtggaacacttgggcctgggagggg

SEQ ID NO: 26600 - DNA, 80 bp, synthetic construct
  misc_feature 1..80: note = Artificially Synthesized Probe
  source 1..80: mol_type = other DNA
tcaagtcagtgaccacggagagagctcagctgcatgaccaacagcacccagagccttcctgaagctccccagaggcgctc

SEQ ID NO: 26601 - DNA, 80 bp, synthetic construct
  misc_feature 1..80: note = Artificially Synthesized Probe
  source 1..80: mol_type = other DNA
agaagaggaagaaagcaccctgggagcagctgattcagaactgcgggtgccacacaggaaatctggctttcgccacctgg

SEQ ID NO: 26602 - DNA, 80 bp, synthetic construct
  misc_feature 1..80: note = Artificially Synthesized Probe
  source 1..80: mol_type = other DNA
ggccagcaccacttgccatggccttaatttggggcggtggcctcagtgtctctccccagagtagagcccatggcccttgt

SEQ ID NO: 26603 - DNA, 80 bp, synthetic construct
  misc_feature 1..80: note = Artificially Synthesized Probe
  source 1..80: mol_type = other DNA
tcgcaaggcaggggctgggctcccctggccaatcctctccaggcagctggcagccgacatgctgaggcaagcctcagaca

SEQ ID NO: 26604 - DNA, 80 bp, synthetic construct
  misc_feature 1..80: note = Artificially Synthesized Probe
  source 1..80: mol_type = other DNA
ctggctcatgtgagatccaggcgagaccaaccattctttgcagagtgcttggttcatatgctggtgcctgtgctcctcca

SEQ ID NO: 26605 - DNA, 80 bp, synthetic construct
  misc_feature 1..80: note = Artificially Synthesized Probe
  source 1..80: mol_type = other DNA
gcattttgagaccatcctctgtatccacaccttggtagttctgctgcggaagaggaggatctaacttgactttctagtac

SEQ ID NO: 26606 - DNA, 80 bp, synthetic construct
  misc_feature 1..80: note = Artificially Synthesized Probe
  source 1..80: mol_type = other DNA
ttgagaccgtagtttcaggaacaacttctagtctaagcaaaaccattagcgagtcaaacacttacacccaagccagccct

SEQ ID NO: 26607 - DNA, 80 bp, synthetic construct
  misc_feature 1..80: note = Artificially Synthesized Probe
  source 1..80: mol_type = other DNA
ttgctcaggctggtcttgaactcctagccttaaatgatcctcctgccttgacctccttaagtgctagaattacaggcatg

SEQ ID NO: 26608 - DNA, 80 bp, synthetic construct
  misc_feature 1..80: note = Artificially Synthesized Probe
  source 1..80: mol_type = other DNA
tggcacttgcctcaagaaggcacccaagggacagcggagccaacagtttcctcccacagtcacggaacagcacctggcat

SEQ ID NO: 26609 - DNA, 80 bp, synthetic construct
  misc_feature 1..80: note = Artificially Synthesized Probe
  source 1..80: mol_type = other DNA
tcttcccagggtcacctggagataaccgtcatctctagtacccctaggctgatgcggctaaaacagtgttctgcttgttg

SEQ ID NO: 26610 - DNA, 80 bp, synthetic construct
  misc_feature 1..80: note = Artificially Synthesized Probe
  source 1..80: mol_type = other DNA
ccagcaggctccgcgccagctcccaggttcgccggctgcggtacgcctcctgcgcgttgccgaagtccacggcgggcacc

SEQ ID NO: 26611 - DNA, 80 bp, synthetic construct
  misc_feature 1..80: note = Artificially Synthesized Probe
  source 1..80: mol_type = other DNA
accacactctgaaataacgctgctaacattcaactgataaaagggaccatctcccttgggtaaagtgtcaagcaggatta

SEQ ID NO: 26612 - DNA, 80 bp, synthetic construct
  misc_feature 1..80: note = Artificially Synthesized Probe
  source 1..80: mol_type = other DNA
gactgcatatagcaaaggcagagaaagacgctgcccacaacataatgaaagatcatctacattttgcccagcatcaatct

SEQ ID NO: 26613 - DNA, 80 bp, synthetic construct
  misc_feature 1..80: note = Artificially Synthesized Probe
  source 1..80: mol_type = other DNA
taacttcgaaggccgtataccagcctttgtttcttcagcacatttctgacaaagaaagctgctattatctaattggaagg

SEQ ID NO: 26614 - DNA, 80 bp, synthetic construct
  misc_feature 1..80: note = Artificially Synthesized Probe
  source 1..80: mol_type = other DNA
aagccatcattatatgtttattaatgctttatttaatagccgtggtttcaaagttccacttggctctctctgacctgcct

SEQ ID NO: 26615 - DNA, 80 bp, synthetic construct
  misc_feature 1..80: note = Artificially Synthesized Probe
  source 1..80: mol_type = other DNA
ccttgaacgcagatgtggggacattgtaacaactctctctaaagcactgagcatgggctggctgccatacagccatggct

SEQ ID NO: 26616 - DNA, 80 bp, synthetic construct
  misc_feature 1..80: note = Artificially Synthesized Probe
  source 1..80: mol_type = other DNA
gactctcagagcttttacaggagctgtgcacgctatttaatgctgagaacaactgatgagaaatgagaaagtttgtttgg

SEQ ID NO: 26617 - DNA, 80 bp, synthetic construct
  misc_feature 1..80: note = Artificially Synthesized Probe
  source 1..80: mol_type = other DNA
gaacacggacaggtatgcagacttgatcttgtaaattctgccaaggccttagtgttcaaattcagcaaatggcagtaagt

SEQ ID NO: 26618 - DNA, 80 bp, synthetic construct
  misc_feature 1..80: note = Artificially Synthesized Probe
  source 1..80: mol_type = other DNA
catggcgctctgtggagtaatgacagcctgcgtaagcttccccataatgccgctcaagccgtttccttcttttcttaaaa

SEQ ID NO: 26619 - DNA, 80 bp, synthetic construct
  misc_feature 1..80: note = Artificially Synthesized Probe
  source 1..80: mol_type = other DNA
tggccgtagacagagataagtattttctaatttaaatcagacaaagaaagatggagacattgactcggcctctgccccct

SEQ ID NO: 26620 - DNA, 80 bp, synthetic construct
  misc_feature 1..80: note = Artificially Synthesized Probe
  source 1..80: mol_type = other DNA
cagctcagcttgttggacacatttgcattttgctttcctcttgctcttaaactcggttcttttcacactgggttgtagct

SEQ ID NO: 26621 - DNA, 80 bp, synthetic construct
  misc_feature 1..80: note = Artificially Synthesized Probe
  source 1..80: mol_type = other DNA
gatgaaggcacataacaccaaaaaccggaaacgaaaatgcctgatgtctgacatttggggaaataggtaagcaaagactg

SEQ ID NO: 26622 - DNA, 80 bp, synthetic construct
  misc_feature 1..80: note = Artificially Synthesized Probe
  source 1..80: mol_type = other DNA
aaagcggaaaaaacacacattcttaataagaaagtcaccctggaaatttcgccagttctggccaccctcagagggaagag

SEQ ID NO: 26623 - DNA, 80 bp, synthetic construct
  misc_feature 1..80: note = Artificially Synthesized Probe
  source 1..80: mol_type = other DNA
cacaatgaggcaaaggtgtcaagttccactgtttgctttctgatctgaaataaacacatgatctcttggctactgtgtcc

SEQ ID NO: 26624 - DNA, 80 bp, synthetic construct
  misc_feature 1..80: note = Artificially Synthesized Probe
  source 1..80: mol_type = other DNA
tttacatagagtcaatattacatctcacatcatggcacacacatggatggagggtgatgcttgcagtaatcgctgaagga

SEQ ID NO: 26625 - DNA, 80 bp, synthetic construct
  misc_feature 1..80: note = Artificially Synthesized Probe
  source 1..80: mol_type = other DNA
cacactgttaaatctcacttaagtctgaagtgagatttcagggctctggattctgctgctgactatggtccgccagactg

SEQ ID NO: 26626 - DNA, 80 bp, synthetic construct
  misc_feature 1..80: note = Artificially Synthesized Probe
  source 1..80: mol_type = other DNA
ctctcaaacctgcaaagtaactgggaaaatgactctgagctgaaagtaaccatgagtccacttagcattttcagaaaagg

SEQ ID NO: 26627 - DNA, 80 bp, synthetic construct
  misc_feature 1..80: note = Artificially Synthesized Probe
  source 1..80: mol_type = other DNA
cccactcttatgcactcgacacagcagtcttcctctgtaactgacagatgtaccaagaaggaggatgaggggtagggaag

SEQ ID NO: 26628 - DNA, 80 bp, synthetic construct
  misc_feature 1..80: note = Artificially Synthesized Probe
  source 1..80: mol_type = other DNA
taactggctgttttaacacagaattgcaagaaactaaagaacttttaggagcctggtagcattatgctaattcaggactt

SEQ ID NO: 26629 - DNA, 80 bp, synthetic construct
  misc_feature 1..80: note = Artificially Synthesized Probe
  source 1..80: mol_type = other DNA
gttgaaaacacggaagatcatcaagaattccctctctggttcatgtgaaaaaggtgtgttttgtatgaaaacaggcacag

SEQ ID NO: 26630 - DNA, 80 bp, synthetic construct
  misc_feature 1..80: note = Artificially Synthesized Probe
  source 1..80: mol_type = other DNA
attactgctgacacccttccctaggtgaaagttggttttaaacagtgcacctactttcacatcaaggttacaatttaact

SEQ ID NO: 26631 - DNA, 80 bp, synthetic construct
  misc_feature 1..80: note = Artificially Synthesized Probe
  source 1..80: mol_type = other DNA
ctgcagcacagccacgctcaccgtgtgaggatggcatttatgaatgtgccgctgaaaaaacaaccaaaacttttacttaa

SEQ ID NO: 26632 - DNA, 80 bp, synthetic construct
  misc_feature 1..80: note = Artificially Synthesized Probe
  source 1..80: mol_type = other DNA
gagcaacgagagaaaacagaggaatgttttcatctaacctaaccgcattgcacaaatgaagtaccaaagcatactttgtg

SEQ ID NO: 26633 - DNA, 80 bp, synthetic construct
  misc_feature 1..80: note = Artificially Synthesized Probe
  source 1..80: mol_type = other DNA
aatggctactccacaggcagagcagcagcaaggacggctcagctgcttatacttattgttactagggaggcaaaagtcaa

SEQ ID NO: 26634 - DNA, 80 bp, synthetic construct
  misc_feature 1..80: note = Artificially Synthesized Probe
  source 1..80: mol_type = other DNA
tttagtttaattagatcccatttgccaattctggcttttgttgccattgcttttggtgttttagacatgaagtccttgcc

SEQ ID NO: 26635 - DNA, 80 bp, synthetic construct
  misc_feature 1..80: note = Artificially Synthesized Probe
  source 1..80: mol_type = other DNA
caatgagaacacttggacacaggaaggggaacatcacacactgaggcctgttgtggggtggggggaggggggagggatag

SEQ ID NO: 26636 - DNA, 80 bp, synthetic construct
  misc_feature 1..80: note = Artificially Synthesized Probe
  source 1..80: mol_type = other DNA
ctaggaggaagataccaaacattcccaaagaaatgatgcacgctcccgatctaatatcccgatctgctaactacatgtta

SEQ ID NO: 26637 - DNA, 80 bp, synthetic construct
  misc_feature 1..80: note = Artificially Synthesized Probe
  source 1..80: mol_type = other DNA
aacttggtttccgtcactttccaccatgaagtgtgactaatgtggatcaactttccctttttgagtaagactagaaagac

SEQ ID NO: 26638 - DNA, 80 bp, synthetic construct
  misc_feature 1..80: note = Artificially Synthesized Probe
  source 1..80: mol_type = other DNA
aggaacagtcatgtgttggatatgtcatttatttcttggctaccacaccaaaagtatatgcagaaaacaaagaggataaa

SEQ ID NO: 26639 - DNA, 80 bp, synthetic construct
  misc_feature 1..80: note = Artificially Synthesized Probe
  source 1..80: mol_type = other DNA
atgaggacaatattaagtgcgtggagaaaccagaaccaggagcagccctgcgtgtgtggagaaaccggaaaccaggcacg

SEQ ID NO: 26640 - DNA, 80 bp, synthetic construct
  misc_feature 1..80: note = Artificially Synthesized Probe
  source 1..80: mol_type = other DNA
acatggacacagtctctctgggatatggatggtaattctaaaaaaggagagacaaaaatatggcaacaagcctgcctctt

SEQ ID NO: 26641 - DNA, 80 bp, synthetic construct
  misc_feature 1..80: note = Artificially Synthesized Probe
  source 1..80: mol_type = other DNA
caagtgctcccgggctgcacacctggacaacatgtgactacatacaattgtaatacaacaatatttgtgtatctaaacat

SEQ ID NO: 26642 - DNA, 80 bp, synthetic construct
  misc_feature 1..80: note = Artificially Synthesized Probe
  source 1..80: mol_type = other DNA
gtaactttctatgttgtaaattccttaaagctttttgactcacttataaaaacagattaaaacatattgtacagctgtac

SEQ ID NO: 26643 - DNA, 80 bp, synthetic construct
  misc_feature 1..80: note = Artificially Synthesized Probe
  source 1..80: mol_type = other DNA
aacacataacgcattgcattatgatggccacaacatcaataaactccatttcacaggaatttttcagcttcattacagtc

SEQ ID NO: 26644 - DNA, 80 bp, synthetic construct
  misc_feature 1..80: note = Artificially Synthesized Probe
  source 1..80: mol_type = other DNA
tttactgatgtacttctattctgtggcccctgctctcaggatcttgatacttgggctaaccaatgagtaggaattaattt

SEQ ID NO: 26645 - DNA, 80 bp, synthetic construct
  misc_feature 1..80: note = Artificially Synthesized Probe
  source 1..80: mol_type = other DNA
aattgaacagtcacttgcaaatagtctcaacacaatttcatcatttccttcctgcacatgtgggactgtaatctgttcca

SEQ ID NO: 26646 - DNA, 80 bp, synthetic construct
  misc_feature 1..80: note = Artificially Synthesized Probe
  source 1..80: mol_type = other DNA
tggaaacagactaaggcaagagggaaactgaggttacagagtgtaatacctcgtcccagaggagctgacttctgacctgt

SEQ ID NO: 26647 - DNA, 80 bp, synthetic construct
  misc_feature 1..80: note = Artificially Synthesized Probe
  source 1..80: mol_type = other DNA
cggggcccggtgaaaggaagtcactttacagccagactttgctttccttctttgtatgtaaaatgccaggtctgagtctc

SEQ ID NO: 26648 - DNA, 80 bp, synthetic construct
  misc_feature 1..80: note = Artificially Synthesized Probe
  source 1..80: mol_type = other DNA
cttaggaggccacatagagaaggtaacctgacccctaacccctatttcaagcatcttgacaaaacatttccattcatgta

SEQ ID NO: 26649 - DNA, 80 bp, synthetic construct
  misc_feature 1..80: note = Artificially Synthesized Probe
  source 1..80: mol_type = other DNA
aaggaaaaaaagaaaaaacccagaagtgtacagtacctgtcgtgtctcagggctctcatgtccacgtagacagtggttgg

SEQ ID NO: 26650 - DNA, 80 bp, synthetic construct
  misc_feature 1..80: note = Artificially Synthesized Probe
  source 1..80: mol_type = other DNA
ccagcgctgagcagagaaccggcccacagtgagtaatgcaaaatacagccatggagggtcaattaaaaataagtaaatgg

SEQ ID NO: 26651 - DNA, 80 bp, synthetic construct
  misc_feature 1..80: note = Artificially Synthesized Probe
  source 1..80: mol_type = other DNA
tttcccaaatattcccaaaaagtacaaagagtagaagatttttcacaggcgcctggactgatgcacacctgtgctttgtg

SEQ ID NO: 26652 - DNA, 80 bp, synthetic construct
  misc_feature 1..80: note = Artificially Synthesized Probe
  source 1..80: mol_type = other DNA
cccttaaatacggagatccctaatgcaaaagagtgcccctcagtatttaaggatcaaatacttgcaataaaggacccaca

SEQ ID NO: 26653 - DNA, 80 bp, synthetic construct
  misc_feature 1..80: note = Artificially Synthesized Probe
  source 1..80: mol_type = other DNA
aatttttatatttgcattaaaatctgggggctgtggaaatgttaccggcttagagaagccttaatgatgtactcccagtg

SEQ ID NO: 26654 - DNA, 80 bp, synthetic construct
  misc_feature 1..80: note = Artificially Synthesized Probe
  source 1..80: mol_type = other DNA
gttcaacacagaagttttggagggggacacagacattctgacctcagcaatcacatcatccacagttcatttacttttca

SEQ ID NO: 26655 - DNA, 80 bp, synthetic construct
  misc_feature 1..80: note = Artificially Synthesized Probe
  source 1..80: mol_type = other DNA
acgaatttctggcctcacctatcacagctatttcgaagtctctgataattgcagcatgtctcttctactgactctttcta

SEQ ID NO: 26656 - DNA, 80 bp, synthetic construct
  misc_feature 1..80: note = Artificially Synthesized Probe
  source 1..80: mol_type = other DNA
tgcacactaaaggttcagagtgcctcagagaaaatgcatccacttttaggactcccctgggattctcatctaccttgcaa

SEQ ID NO: 26657 - DNA, 80 bp, synthetic construct
  misc_feature 1..80: note = Artificially Synthesized Probe
  source 1..80: mol_type = other DNA
tgaactcagattcttgctttttggttcaagacatagactaaaagccaggcatgttctgtgactgcgatagagaatccctt

SEQ ID NO: 26658 - DNA, 80 bp, synthetic construct
  misc_feature 1..80: note = Artificially Synthesized Probe
  source 1..80: mol_type = other DNA
caaaatccccaacagcaccttatttatttccttcacctaaaagcagtgtagggggacaaggaaactgagagctcaagtta

SEQ ID NO: 26659 - DNA, 80 bp, synthetic construct
  misc_feature 1..80: note = Artificially Synthesized Probe
  source 1..80: mol_type = other DNA
ttccctgcttctactagaaggaggatgcaatttttctgttacagtgaacaatatctctaaatctaatgcaacaaaagacc

SEQ ID NO: 26660 - DNA, 80 bp, synthetic construct
  misc_feature 1..80: note = Artificially Synthesized Probe
  source 1..80: mol_type = other DNA
ctggccaacatggcaaaatcctgtccctgctaaatatacaaaaattagctcggcgaggtggcaggtgcctgtaataccag

SEQ ID NO: 26661 - DNA, 80 bp, synthetic construct
  misc_feature 1..80: note = Artificially Synthesized Probe
  source 1..80: mol_type = other DNA
tctctgtacacctgtaatgtttcctgtgtcaggtatgttctaaaaagtgcttgtccaggcgccaagtcagcactggaaaa

SEQ ID NO: 26662 - DNA, 80 bp, synthetic construct
  misc_feature 1..80: note = Artificially Synthesized Probe
  source 1..80: mol_type = other DNA
tcgggggtgcggggctccggcgagagaccagtgttgttagaacagtcagtcgggggtgcggggctccggcgagagaccgg

SEQ ID NO: 26663 - DNA, 80 bp, synthetic construct
  misc_feature 1..80: note = Artificially Synthesized Probe
  source 1..80: mol_type = other DNA
actcacgatgctgctgcttcaaactgaaagctacatttttcaacatctttaaatatttaggtacaaggtttggaattctg

SEQ ID NO: 26664 - DNA, 80 bp, synthetic construct
  misc_feature 1..80: note = Artificially Synthesized Probe
  source 1..80: mol_type = other DNA
taattccgaagcacacctgccctcaaagattctgggaaggggaggtgagctcgcattgctttgtacataaatttaatttc

SEQ ID NO: 26665 - DNA, 80 bp, synthetic construct
  misc_feature 1..80: note = Artificially Synthesized Probe
  source 1..80: mol_type = other DNA
aaatgaaaaagtaaagaggaaaataaatgtatgtactctacaagaggccaattttacaccacacgctgaactctgtcacc

SEQ ID NO: 26666 - DNA, 80 bp, synthetic construct
  misc_feature 1..80: note = Artificially Synthesized Probe
  source 1..80: mol_type = other DNA
aagtaaaagaaaaatcaagaaaagctttttgcagctactttttctgaagtgatctcgggaagagaggaggttccctcctc

SEQ ID NO: 26667 - DNA, 80 bp, synthetic construct
  misc_feature 1..80: note = Artificially Synthesized Probe
  source 1..80: mol_type = other DNA
gactgtagtttaaagaaacagagatctgcaccaaccgcatgcgtgtgactgaaagatctcttctggatgtagctaagcat

SEQ ID NO: 26668 - DNA, 80 bp, synthetic construct
  misc_feature 1..80: note = Artificially Synthesized Probe
  source 1..80: mol_type = other DNA
atagacagtgctccatttatgtcccattacgccaagaatttcttctcattctcaagcgtgtctgtttccacagtaagcaa

SEQ ID NO: 26669 - DNA, 80 bp, synthetic construct
  misc_feature 1..80: note = Artificially Synthesized Probe
  source 1..80: mol_type = other DNA
taaagttatcttgcattttgctttcctgtccaagctttatgcattaggaaaacaatgcaggacagataaatgtactgttc

SEQ ID NO: 26670 - DNA, 80 bp, synthetic construct
  misc_feature 1..80: note = Artificially Synthesized Probe
  source 1..80: mol_type = other DNA
aatacgtactacagaatcatggggcagttcctaccactttgaacacacatttaagactactaaacgctgtgatgctgtga

SEQ ID NO: 26671 - DNA, 80 bp, synthetic construct
  misc_feature 1..80: note = Artificially Synthesized Probe
  source 1..80: mol_type = other DNA
taatcatagctacctgtcacctcaaactcctgggctccagcaattctcctgcctctcctgagtcagtaggaccacaggtg

SEQ ID NO: 26672 - DNA, 80 bp, synthetic construct
  misc_feature 1..80: note = Artificially Synthesized Probe
  source 1..80: mol_type = other DNA
atagtgacctttccaagggtttaatactttgagaacagggttaggcacataaggggtgaatatcaggcctcgaattttta

SEQ ID NO: 26673 - DNA, 80 bp, synthetic construct
  misc_feature 1..80: note = Artificially Synthesized Probe
  source 1..80: mol_type = other DNA
tcctaattgcccttacctcactcaatacagcaaattttgattaattgctgtattagccaaaattgatttttggcactggc

SEQ ID NO: 26674 - DNA, 80 bp, synthetic construct
  misc_feature 1..80: note = Artificially Synthesized Probe
  source 1..80: mol_type = other DNA
atacctggattgtttccttgtgttgaccgaggttccagggaacttacaccaagtctctgagtggatgttcgctttccttt

SEQ ID NO: 26675 - DNA, 80 bp, synthetic construct
  misc_feature 1..80: note = Artificially Synthesized Probe
  source 1..80: mol_type = other DNA
tacaaaagttttaaattttgttccagtccagtttatcagtatttatgtagtatacctttgatgaactctgtgcctaacca

SEQ ID NO: 26676 - DNA, 80 bp, synthetic construct
  misc_feature 1..80: note = Artificially Synthesized Probe
  source 1..80: mol_type = other DNA
tgcgtaatcccagacacttcaggggggatttccaacaaacaagtctattttcctccataaacacctaagccatcaaaatc

SEQ ID NO: 26677 - DNA, 80 bp, synthetic construct
  misc_feature 1..80: note = Artificially Synthesized Probe
  source 1..80: mol_type = other DNA
tacaatggtggtctcatgagcctgtaacgaagctgaaaaatttctactgcctagagatgctgaagcacaccacgttactt

SEQ ID NO: 26678 - DNA, 80 bp, synthetic construct
  misc_feature 1..80: note = Artificially Synthesized Probe
  source 1..80: mol_type = other DNA
tggaggcctaggcagctgtgtgtgtgtgtgtgttgtggaggcctaggctgatgtgtgcatgcgtgtggtggaggcctagg

SEQ ID NO: 26679 - DNA, 80 bp, synthetic construct
  misc_feature 1..80: note = Artificially Synthesized Probe
  source 1..80: mol_type = other DNA
gaagctgtgtgtgtgctgtggaggcctaggctgatgtgtatgcgtgtatatattagtttttaacaaaagcttcaaatgtt

SEQ ID NO: 26680 - DNA, 80 bp, synthetic construct
  misc_feature 1..80: note = Artificially Synthesized Probe
  source 1..80: mol_type = other DNA
actgatttctaattccccacacggagccgatctccctcggctgctgccgattcttagaacaagctctgactcccccacgc

SEQ ID NO: 26681 - DNA, 80 bp, synthetic construct
  misc_feature 1..80: note = Artificially Synthesized Probe
  source 1..80: mol_type = other DNA
ctgccgttcagcttggcgcatatacctgaggccatgttctgagcgattttccaagaaaaaaaaatttactcacaatgtta

SEQ ID NO: 26682 - DNA, 80 bp, synthetic construct
  misc_feature 1..80: note = Artificially Synthesized Probe
  source 1..80: mol_type = other DNA
aaaagccaagaaacatccataagtttttctggtcattcattcatcccataaatacttgctgagcacctgctgtaagccag

SEQ ID NO: 26683 - DNA, 80 bp, synthetic construct
  misc_feature 1..80: note = Artificially Synthesized Probe
  source 1..80: mol_type = other DNA
ggacaatacggggctgcactgaatgcatgggacttcatacccaaggatacctacaagacaataaagccgcattaaatgcg

SEQ ID NO: 26684 - DNA, 80 bp, synthetic construct
  misc_feature 1..80: note = Artificially Synthesized Probe
  source 1..80: mol_type = other DNA
acactccagggcccttcactatcttccaccatcctgcatggagatggtggctaaaatccaatcatcccatcatgaccaga

SEQ ID NO: 26685 - DNA, 80 bp, synthetic construct
  misc_feature 1..80: note = Artificially Synthesized Probe
  source 1..80: mol_type = other DNA
aaggcaaatttttgtttaaaggagaaatgagactgaatttatacaacatccatccagactcctgcctccctggattagga

SEQ ID NO: 26686 - DNA, 80 bp, synthetic construct
  misc_feature 1..80: note = Artificially Synthesized Probe
  source 1..80: mol_type = other DNA
ttatttcatattgtagctactttggtattccacctcagttctactaagaggtggacagagcgtgagaactgtgcgaggta

SEQ ID NO: 26687 - DNA, 80 bp, synthetic construct
  misc_feature 1..80: note = Artificially Synthesized Probe
  source 1..80: mol_type = other DNA
gcgttgtgacatgtgcagaaaagagctcactgctcacaccattagatctgttctcctggaaaccccacacacacacaccc

SEQ ID NO: 26688 - DNA, 80 bp, synthetic construct
  misc_feature 1..80: note = Artificially Synthesized Probe
  source 1..80: mol_type = other DNA
tacacccaacccagacacatcacgtatagttctcccggaaacgtcacactcacccagacacaccgcgcatagttctccca

SEQ ID NO: 26689 - DNA, 80 bp, synthetic construct
  misc_feature 1..80: note = Artificially Synthesized Probe
  source 1..80: mol_type = other DNA
gtagttctcccggaaacgtcacacgcacccggacacatcgcgcgtagttctcccggaaacgtcacacgcacccagacaca

SEQ ID NO: 26690 - DNA, 80 bp, synthetic construct
  misc_feature 1..80: note = Artificially Synthesized Probe
  source 1..80: mol_type = other DNA
catagctctcccggaaaccccagacgcgtcgcgcatagctctcctggaaaccccacacgcacccagacgcgtcgccacac

SEQ ID NO: 26691 - DNA, 80 bp, synthetic construct
  misc_feature 1..80: note = Artificially Synthesized Probe
  source 1..80: mol_type = other DNA
gaggtgacgaggcagcctggaggtttaatgtctacatcattttgctaaggaattacccacctttgtaactgtgaatttag

SEQ ID NO: 26692 - DNA, 80 bp, synthetic construct
  misc_feature 1..80: note = Artificially Synthesized Probe
  source 1..80: mol_type = other DNA
tcactggtttttagaacaagcacagacctgtgcaaccaacatgacagtcaattttagaacgtttttagcctcccccaaaa

SEQ ID NO: 26693 - DNA, 80 bp, synthetic construct
  misc_feature 1..80: note = Artificially Synthesized Probe
  source 1..80: mol_type = other DNA
ctacagtcatttaacaacctcttctttgtgatcagattctgtctcacagctattaacagggtgaggatcttccctcaagc

SEQ ID NO: 26694 - DNA, 80 bp, synthetic construct
  misc_feature 1..80: note = Artificially Synthesized Probe
  source 1..80: mol_type = other DNA
gacaacaaggaacgcagggctggagtccgggaaatcctgctgagaagacagatttgggggcctttgaaactggactgttc

SEQ ID NO: 26695 - DNA, 80 bp, synthetic construct
  misc_feature 1..80: note = Artificially Synthesized Probe
  source 1..80: mol_type = other DNA
tttgataaccctgtgaaacacaattttctcaatgctggttgatgtctttcagggctgacataaaaacaaacagcaaagct

SEQ ID NO: 26696 - DNA, 80 bp, synthetic construct
  misc_feature 1..80: note = Artificially Synthesized Probe
  source 1..80: mol_type = other DNA
atttatattttaaaattctaaagaaggtataagttaaaaaaggtcaaaagagttggctacaaacccattggttcaaccat

SEQ ID NO: 26697 - DNA, 80 bp, synthetic construct
  misc_feature 1..80: note = Artificially Synthesized Probe
  source 1..80: mol_type = other DNA
tcggatttgcagttgatcctaataaagccctttttagagaaccggaatcatttccgggaaatacattttccctgaagatc

SEQ ID NO: 26698 - DNA, 80 bp, synthetic construct
  misc_feature 1..80: note = Artificially Synthesized Probe
  source 1..80: mol_type = other DNA
gctgcttcgcacactaagattttgatactcagcaattctaaacagccatgactttttgaagagttgcaagtacctatact

SEQ ID NO: 26699 - DNA, 80 bp, synthetic construct
  misc_feature 1..80: note = Artificially Synthesized Probe
  source 1..80: mol_type = other DNA
cttgcagatatcattactcattttgggggagaaatattgtaaataggttgctaaaatatctgtacacacaaataggtgta

SEQ ID NO: 26700 - DNA, 80 bp, synthetic construct
  misc_feature 1..80: note = Artificially Synthesized Probe
  source 1..80: mol_type = other DNA
tacagaaaaacccacagataaggtttcatccgtttcatcaacatttcacggtgctgattttgccccatttcctaatgggc

SEQ ID NO: 26701 - DNA, 80 bp, synthetic construct
  misc_feature 1..80: note = Artificially Synthesized Probe
  source 1..80: mol_type = other DNA
gccatgattgtaaaaaataaaacggaagacacacacagaattaaaagccacgatttgtctcactgcagagacctgtggct

SEQ ID NO: 26702 - DNA, 80 bp, synthetic construct
  misc_feature 1..80: note = Artificially Synthesized Probe
  source 1..80: mol_type = other DNA
actattaaatcaaattcttaaattcccgataaaggtcaagtaacaggtttctaagccaggccacatgctgcattagttac

SEQ ID NO: 26703 - DNA, 80 bp, synthetic construct
  misc_feature 1..80: note = Artificially Synthesized Probe
  source 1..80: mol_type = other DNA
gctgggcaagacgagacggctcttctaagaagtcaacttggaaactggcctaaatgggttccaaggtttcccgtaatgtt

SEQ ID NO: 26704 - DNA, 80 bp, synthetic construct
  misc_feature 1..80: note = Artificially Synthesized Probe
  source 1..80: mol_type = other DNA
taagctgcgtatcaggccctcagcagagacgtagggcctcagctctgccagttaatatttgttaaaaagctttttaaaga

SEQ ID NO: 26705 - DNA, 80 bp, synthetic construct
  misc_feature 1..80: note = Artificially Synthesized Probe
  source 1..80: mol_type = other DNA
ctgacaccattataaatcttcatactacagaaacagcctggggagagcaactgcctccgtgtccttcacaaggctgttta

SEQ ID NO: 26706 - DNA, 80 bp, synthetic construct
  misc_feature 1..80: note = Artificially Synthesized Probe
  source 1..80: mol_type = other DNA
gtttgctggcaccaaggccaggcaataaactccaacttgatgtatactgtcaatcgcctagaaagttaataaagaggaaa

SEQ ID NO: 26707 - DNA, 80 bp, synthetic construct
  misc_feature 1..80: note = Artificially Synthesized Probe
  source 1..80: mol_type = other DNA
aattcaaaggcagcaacatcatatccaggtatctacttcctgctcccatcagcttccaaactgaaaaaaggctctaaaac

SEQ ID NO: 26708 - DNA, 80 bp, synthetic construct
  misc_feature 1..80: note = Artificially Synthesized Probe
  source 1..80: mol_type = other DNA
cccagcaagcctgtccttatgaatgggtattcactgatcggagccccggagcttgtcatgggaaacacctgggggaaaca

SEQ ID NO: 26709 - DNA, 80 bp, synthetic construct
  misc_feature 1..80: note = Artificially Synthesized Probe
  source 1..80: mol_type = other DNA
tgcacacgccccatgcacgcacattacacacgcatctgtgtacaccacatgcatacttgcttgtgccactgagatcgtta

SEQ ID NO: 26710 - DNA, 80 bp, synthetic construct
  misc_feature 1..80: note = Artificially Synthesized Probe
  source 1..80: mol_type = other DNA
ttcaattgctttaatgttaatgcgcaagttgtatttaggggcgtgacatcatctgccatttagatatggggaggaacctc

SEQ ID NO: 26711 - DNA, 80 bp, synthetic construct
  misc_feature 1..80: note = Artificially Synthesized Probe
  source 1..80: mol_type = other DNA
cagcttcacaaccttcgaaaagacaatcacaaaaatcacatcggcagttctctttgaaacacaactcccacttctagaac

SEQ ID NO: 26712 - DNA, 80 bp, synthetic construct
  misc_feature 1..80: note = Artificially Synthesized Probe
  source 1..80: mol_type = other DNA
aagcccgcggttgttctcacagtcacaaaggagcattttcattgtgtccttcagaaccttttgaagatttcaccatgcag

SEQ ID NO: 26713 - DNA, 80 bp, synthetic construct
  misc_feature 1..80: note = Artificially Synthesized Probe
  source 1..80: mol_type = other DNA
cacgggaacgcgggaacgtgggaacgcaggctttggtgacatgtgttagaaaagcatttaataactggttaatctgtgca

SEQ ID NO: 26714 - DNA, 80 bp, synthetic construct
  misc_feature 1..80: note = Artificially Synthesized Probe
  source 1..80: mol_type = other DNA
cagactgcctgggcgtatgcccaattttataagaatctaaaataagatttacgctgtgccattgtggctgccaagttcta

SEQ ID NO: 26715 - DNA, 80 bp, synthetic construct
  misc_feature 1..80: note = Artificially Synthesized Probe
  source 1..80: mol_type = other DNA
taattcctagagaccccaaacaaatcaaaacttcaaaatgaaaacacaggtgttgtcagtggtcctgccaccatcccctc

SEQ ID NO: 26716 - DNA, 80 bp, synthetic construct
  misc_feature 1..80: note = Artificially Synthesized Probe
  source 1..80: mol_type = other DNA
gcaagggccggaagggaaaaagttatctcagggcccaaaaacgtatgttttattgtctcaatcacaaaaaccccctttcc

SEQ ID NO: 26717 - DNA, 80 bp, synthetic construct
  misc_feature 1..80: note = Artificially Synthesized Probe
  source 1..80: mol_type = other DNA
tccctggtctttgcctctgatcccaggacactgagtgaatcagtctactgctctcttctttttataaaaacttagaagca

SEQ ID NO: 26718 - DNA, 80 bp, synthetic construct
  misc_feature 1..80: note = Artificially Synthesized Probe
  source 1..80: mol_type = other DNA
tgcatctgtgtaggtgtgtgcaccactgaattcagctggtttgttacacacagtgtttagtaatacaaatataagatcat

SEQ ID NO: 26719 - DNA, 80 bp, synthetic construct
  misc_feature 1..80: note = Artificially Synthesized Probe
  source 1..80: mol_type = other DNA
ccacgatgacgtgcaaaagggaaacaaaataaaactaaaggacaacagagtctggatgttttgttgcctgcagatctcac

SEQ ID NO: 26720 - DNA, 80 bp, synthetic construct
  misc_feature 1..80: note = Artificially Synthesized Probe
  source 1..80: mol_type = other DNA
tttctatgcaacggaccacacacaaaacacgcctgcagtcatgtaacggcggtaacatttgttgaattcttactatgtac

SEQ ID NO: 26721 - DNA, 80 bp, synthetic construct
  misc_feature 1..80: note = Artificially Synthesized Probe
  source 1..80: mol_type = other DNA
ttcctctctgggccactctttttcacagcagcagaatgaactaataaattcacagtactggtaaaaatgccctttaaagg

SEQ ID NO: 26722 - DNA, 80 bp, synthetic construct
  misc_feature 1..80: note = Artificially Synthesized Probe
  source 1..80: mol_type = other DNA
atttttctcccagctaacttcgagcttggatactttcaaaaactagaagatggttgtggtgacaagggggtattttatct

SEQ ID NO: 26723 - DNA, 80 bp, synthetic construct
  misc_feature 1..80: note = Artificially Synthesized Probe
  source 1..80: mol_type = other DNA
acatgcataaagacacacatgaacagatatgcctaggcacacatgaacagacatgcatacacacatgaacagatatgcac

SEQ ID NO: 26724 - DNA, 80 bp, synthetic construct
  misc_feature 1..80: note = Artificially Synthesized Probe
  source 1..80: mol_type = other DNA
ctgcagccactgggtggctttcttgtgagtgcctcagcttctgatttatctacttttttgttttcttttttgcagaagag

SEQ ID NO: 26725 - DNA, 80 bp, synthetic construct
  misc_feature 1..80: note = Artificially Synthesized Probe
  source 1..80: mol_type = other DNA
gttaacaggcagaaaaggctgtccctggaagatggttaacgtgcagaagaggatgtccctagaagatggttaacacgcag

SEQ ID NO: 26726 - DNA, 80 bp, synthetic construct
  misc_feature 1..80: note = Artificially Synthesized Probe
  source 1..80: mol_type = other DNA
ggcttctctcctaaagattttcaccactgagatagagttgctgcctaattcatctcaggaaattagggagtccaactgca

SEQ ID NO: 26727 - DNA, 80 bp, synthetic construct
  misc_feature 1..80: note = Artificially Synthesized Probe
  source 1..80: mol_type = other DNA
acacaggaagaggtttgggctttacttctggtgcatgacatgagattgtcagagcaaagtgcactctgaatttacctact

SEQ ID NO: 26728 - DNA, 80 bp, synthetic construct
  misc_feature 1..80: note = Artificially Synthesized Probe
  source 1..80: mol_type = other DNA
tgaacttactttagtaacttttctgagacttgttccaccattttcagtacagaagttccaagacaggggtaaatctaaac

SEQ ID NO: 26729 - DNA, 80 bp, synthetic construct
  misc_feature 1..80: note = Artificially Synthesized Probe
  source 1..80: mol_type = other DNA
catatccctcgatttcacacacgccacttttgctaaaaagaaaaatagaaataagttaacatgtgccaccgtcagatcgt

SEQ ID NO: 26730 - DNA, 80 bp, synthetic construct
  misc_feature 1..80: note = Artificially Synthesized Probe
  source 1..80: mol_type = other DNA
ggtggggctggcagggatggcaaatacagaggggcatagtggaggagcagctctcagtgagtgccatggacaccagactg

SEQ ID NO: 26731 - DNA, 80 bp, synthetic construct
  misc_feature 1..80: note = Artificially Synthesized Probe
  source 1..80: mol_type = other DNA
gctcagagacctcgctttagatgtgacagtggagagactcgcacctgccagggctgccagctgtaccccggagcacggag

SEQ ID NO: 26732 - DNA, 80 bp, synthetic construct
  misc_feature 1..80: note = Artificially Synthesized Probe
  source 1..80: mol_type = other DNA
cttcacatgaattctggttcgccaagaaacggcgaatacaggaattcctgtattcatatgcccatcactcatgtgacaac

SEQ ID NO: 26733 - DNA, 80 bp, synthetic construct
  misc_feature 1..80: note = Artificially Synthesized Probe
  source 1..80: mol_type = other DNA
tttttacttaggacagggcggcaacagatcaaaatgcaaacaaaatccaatattgcatcaggggaaataacagatcttgg

SEQ ID NO: 26734 - DNA, 80 bp, synthetic construct
  misc_feature 1..80: note = Artificially Synthesized Probe
  source 1..80: mol_type = other DNA
attatgaggatgggcagataataaaaatagtagaaaaagaaaagtgtttcattccacagcggagcggcagatgccaccac

SEQ ID NO: 26735 - DNA, 80 bp, synthetic construct
  misc_feature 1..80: note = Artificially Synthesized Probe
  source 1..80: mol_type = other DNA
tttcaggaggtcctttgcattcagtggggtggtagggatgggttcctaactgcacatcttctcacacctcctacgagaaa

SEQ ID NO: 26736 - DNA, 80 bp, synthetic construct
  misc_feature 1..80: note = Artificially Synthesized Probe
  source 1..80: mol_type = other DNA
tcggggcggtttggagagatgtttagactctgtgacaaaccacagcagctttggccaaccttggaaataaacaacaagtt

SEQ ID NO: 26737 - DNA, 80 bp, synthetic construct
  misc_feature 1..80: note = Artificially Synthesized Probe
  source 1..80: mol_type = other DNA
gcctgaaaaaacacttctactaacatgctaacaccaagtgcctgatctttaaaacactcaaagaccaaaggcacgaaagg

SEQ ID NO: 26738 - DNA, 80 bp, synthetic construct
  misc_feature 1..80: note = Artificially Synthesized Probe
  source 1..80: mol_type = other DNA
tagtgtccgcccgtgatttaatcccccaaatgataaaatcatacacataagaagatcccaaaaaataaggaagagactga

SEQ ID NO: 26739 - DNA, 80 bp, synthetic construct
  misc_feature 1..80: note = Artificially Synthesized Probe
  source 1..80: mol_type = other DNA
agaaaagttctctaagaccaataagctgctactttctaaaggcacacttctgaaaggatggcacccaaatggccaacagg

SEQ ID NO: 26740 - DNA, 80 bp, synthetic construct
  misc_feature 1..80: note = Artificially Synthesized Probe
  source 1..80: mol_type = other DNA
aactgaaattgatcaggaatccagattatcggcatccctacattcactggagtgttatccacaagggtcaagaagacaaa

SEQ ID NO: 26741 - DNA, 80 bp, synthetic construct
  misc_feature 1..80: note = Artificially Synthesized Probe
  source 1..80: mol_type = other DNA
ggctacatgagctcatttacacgtggcatttagcagtgaatagaatggtgaccacgagggctgggggggagggaggagtt

SEQ ID NO: 26742 - DNA, 80 bp, synthetic construct
  misc_feature 1..80: note = Artificially Synthesized Probe
  source 1..80: mol_type = other DNA
ccacgtggccttggaaagatttctgatttgttcaaaacgtacggtttatgtctctactaccattcaaaggtacttaattc

SEQ ID NO: 26743 - DNA, 80 bp, synthetic construct
  misc_feature 1..80: note = Artificially Synthesized Probe
  source 1..80: mol_type = other DNA
tgaagagatacccacgtggcagatggttttcttaaatattgagtcaacaaactttaatgctggagtagccacaaagacag

SEQ ID NO: 26744 - DNA, 80 bp, synthetic construct
  misc_feature 1..80: note = Artificially Synthesized Probe
  source 1..80: mol_type = other DNA
ctccctcatcctctgtttgaaattcagacacagttgaccagcaatggcattaaaacagacacctccagactgacaaagct

SEQ ID NO: 26745 - DNA, 80 bp, synthetic construct
  misc_feature 1..80: note = Artificially Synthesized Probe
  source 1..80: mol_type = other DNA
tgcacatgacaccaaggaacaagattctcaaacacccttgctttactgaccaagaggctgctgatccacgtttgacccca

SEQ ID NO: 26746 - DNA, 80 bp, synthetic construct
  misc_feature 1..80: note = Artificially Synthesized Probe
  source 1..80: mol_type = other DNA
gtttctcactaagctttgtaaatacttccttgtatttctatacagtcttcataactgtcctgggacagcatgtgcaggac

SEQ ID NO: 26747 - DNA, 80 bp, synthetic construct
  misc_feature 1..80: note = Artificially Synthesized Probe
  source 1..80: mol_type = other DNA
ggtgtatcttgacgaagaacaattttccttcgatgatagagtgttaatagacaaccctatttctggattcccactaagcc

SEQ ID NO: 26748 - DNA, 80 bp, synthetic construct
  misc_feature 1..80: note = Artificially Synthesized Probe
  source 1..80: mol_type = other DNA
tttcatcagcccatgaatcctatgattttacatgtggggtagcattagcattactcttccttacggacaagtttggtatg

SEQ ID NO: 26749 - DNA, 80 bp, synthetic construct
  misc_feature 1..80: note = Artificially Synthesized Probe
  source 1..80: mol_type = other DNA
tggacaagtttggtacattttcatcagcacatgaatcctgtgattttacatgtgtggtagcattagcattactcttcctt

SEQ ID NO: 26750 - DNA, 80 bp, synthetic construct; identical to SEQ ID NO: 26749
  misc_feature 1..80: note = Artificially Synthesized Probe
  source 1..80: mol_type = other DNA

SEQ ID NO: 26751 - DNA, 80 bp, synthetic construct
  misc_feature 1..80: note = Artificially Synthesized Probe
  source 1..80: mol_type = other DNA
tcttccttatggacaagtttggtatgtgttcctcagcacatgaatcctgtgattttacacgtgtggtggcattagcatta

SEQ ID NO: 26752 - DNA, 80 bp, synthetic construct
  misc_feature 1..80: note = Artificially Synthesized Probe
  source 1..80: mol_type = other DNA
cacccattcatgagaacatgttcagttctgacttgttaatcttcccagaataccagctctggaggcagagtcttcaccaa

SEQ ID NO: 26753 - DNA, 80 bp, synthetic construct
  misc_feature 1..80: note = Artificially Synthesized Probe
  source 1..80: mol_type = other DNA
aaccaagccaaaccaatccctgcccaaaataagcctctttacatatttcatcaaaccgtgctcccgtatctctactgaca

SEQ ID NO: 26754 - DNA, 80 bp, synthetic construct
  misc_feature 1..80: note = Artificially Synthesized Probe
  source 1..80: mol_type = other DNA
tgggtagttacgctcgcaggaacggaatcacgcaatacctgttttgtgtctggcttactttactaggcatagtatctgca

SEQ ID NO: 26755 - DNA, 80 bp, synthetic construct
  misc_feature 1..80: note = Artificially Synthesized Probe
  source 1..80: mol_type = other DNA
ctgttggcaaataatttgcattttctcccattctgtaggtggccttttcactctcttgatagtactctttgatatacaaa

SEQ ID NO: 26756 - DNA, 80 bp, synthetic construct
  misc_feature 1..80: note = Artificially Synthesized Probe
  source 1..80: mol_type = other DNA
catacttcttgtccacagcttgcctatgaatacaaatcacagacaaatgtgcgtattaaaccatacggagagcacagctt

SEQ ID NO: 26757 - DNA, 80 bp, synthetic construct
  misc_feature 1..80: note = Artificially Synthesized Probe
  source 1..80: mol_type = other DNA
agaggctccaaactcacaagccctgtgtttctcaccttcaaactttcctaacctcagggttttagggtttttaatcacaa

SEQ ID NO: 26758 - DNA, 80 bp, synthetic construct
  misc_feature 1..80: note = Artificially Synthesized Probe
  source 1..80: mol_type = other DNA
agatgtgtgtgatgtcagcactattgtattagatattaattgtaatttcgcttggctttgactgaggaacaggcaactga

SEQ ID NO: 26759 - DNA, 80 bp, synthetic construct
  misc_feature 1..80: note = Artificially Synthesized Probe
  source 1..80: mol_type = other DNA
ccagtcatgcgttcatctacgttagcgtttctacgcagatggcgctttccagtgttcactgcgttttcatctgataagct

SEQ ID NO: 26760 - DNA, 80 bp, synthetic construct
  misc_feature 1..80: note = Artificially Synthesized Probe
  source 1..80: mol_type = other DNA
acatagcatctggcttttgacctccatggctaatgtagaaatcaattcctttcctacctgcaatcagaaaagtgttgtaa

SEQ ID NO: 26761 - DNA, 80 bp, synthetic construct
  misc_feature 1..80: note = Artificially Synthesized Probe
  source 1..80: mol_type = other DNA
tgtgcggaaacataaggcagcacaaaatcaatcagtcaccagaagtaacagacactgagctttgtgtgtttgggagtggc

SEQ ID NO: 26762 - DNA, 80 bp, synthetic construct
  misc_feature 1..80: note = Artificially Synthesized Probe
  source 1..80: mol_type = other DNA
agcatgtgggtagagcgcttaggtggacctgcacacagctgcaaactgataacaggtggaaactgcgctgcacactgtgc

SEQ ID NO: 26763 - DNA, 80 bp, synthetic construct
  misc_feature 1..80: note = Artificially Synthesized Probe
  source 1..80: mol_type = other DNA
tcttagagagagacctgacctgggtcacagaacaaaatcaactcccacagaggacgactaacaaccaggtttagagacct

SEQ ID NO: 26764 - DNA, 80 bp, synthetic construct
  misc_feature 1..80: note = Artificially Synthesized Probe
  source 1..80: mol_type = other DNA
gcgttccaaacccacgcagctcagcccacacacaggcaatgcatcctaaagcacagaagttaaagtctctaaattcaaat

SEQ ID NO: 26765 - DNA, 80 bp, synthetic construct
  misc_feature 1..80: note = Artificially Synthesized Probe
  source 1..80: mol_type = other DNA
agacagcacaacacaccacgcaggatttacctggggaacaaaggcaaaggtacagacttgaaagacgacaaagttactaa

SEQ ID NO: 26766 - DNA, 80 bp, synthetic construct
  misc_feature 1..80: note = Artificially Synthesized Probe
  source 1..80: mol_type = other DNA
cgataggcctccctgttcactgcacctgtcaggcctcagataggcatccccgtccacctgtcggagctcggataggcctc

SEQ ID NO: 26767 - DNA, 80 bp, synthetic construct
  misc_feature 1..80: note = Artificially Synthesized Probe
  source 1..80: mol_type = other DNA
cttccatgagaggctcccgaagatctgataaattggctttgtcagaaccgattgtaccccaggaagaaacacatccagtc

SEQ ID NO: 26768 - DNA, 80 bp, synthetic construct
  misc_feature 1..80: note = Artificially Synthesized Probe
  source 1..80: mol_type = other DNA
tacagcaccccctggagataaagttaagccgtacgtggctgaatggggaaaagcatgcttttctatttaatgaataacgc

SEQ ID NO: 26769 - DNA, 80 bp, synthetic construct
  misc_feature 1..80: note = Artificially Synthesized Probe
  source 1..80: mol_type = other DNA
ttaaattggtggaaaaaatccacaaaggacttgagattttgcttcaacagcaagtagaagcgtggccagctctgagagac

SEQ ID NO: 26770 - DNA, 80 bp, synthetic construct
  misc_feature 1..80: note = Artificially Synthesized Probe
  source 1..80: mol_type = other DNA
gtttaacgtactgtgatttcaagtacaggttattaattcacataaaccagtgtacatgttcctgaaactgtgttaaactg

SEQ ID NO: 26771 - DNA, 80 bp, synthetic construct
  misc_feature 1..80: note = Artificially Synthesized Probe
  source 1..80: mol_type = other DNA
aaccctgtcctgttgattgggactgttaaggtttcatgtaggagcataagtgagaagaaaagatgggagcggatacggct

SEQ ID NO: 26772 - DNA, 80 bp, synthetic construct
  misc_feature 1..80: note = Artificially Synthesized Probe
  source 1..80: mol_type = other DNA
cccttgttagtcctgagatgttcttgtgggctctgatttttctactacatcggtgtgttagatacccatgcagctgattt

SEQ ID NO: 26773 - DNA, 80 bp, synthetic construct
  misc_feature 1..80: note = Artificially Synthesized Probe
  source 1..80: mol_type = other DNA
gctgtctgggaatttttttaaaagtttacttgttagaaaagcaacaatgttaagagcctgaaaattctctatcaccttgg

SEQ ID NO: 26774 - DNA, 80 bp, synthetic construct
  misc_feature 1..80: note = Artificially Synthesized Probe
  source 1..80: mol_type = other DNA
atatgacacggatgatacagcatgaccagtggtgactaatgtgaaatggatacagcatgaccagcggtgactaatatgac

SEQ ID NO: 26775 - DNA, 80 bp, synthetic construct
  misc_feature 1..80: note = Artificially Synthesized Probe
  source 1..80: mol_type = other DNA
atgagtttgatgaggtcacaggacacaagatatacatatactagcaataaacaacctgagaataaagttaagaaaatagt

SEQ ID NO: 26776 - DNA, 80 bp, synthetic construct
  misc_feature 1..80: note = Artificially Synthesized Probe
  source 1..80: mol_type = other DNA
ggtccacctgcttaaaccaggatagtggtcccatatcaagatctctatattaatcatagctgcaaaatcccttttaccac

SEQ ID NO: 26777 - DNA, 80 bp, synthetic construct
  misc_feature 1..80: note = Artificially Synthesized Probe
  source 1..80: mol_type = other DNA
aaatttgatttctagggtcctttctttttcatagagctaacctttcatctgatagcatttgcaatcagcctaaagtacat

SEQ ID NO: 26778 - DNA, 80 bp, synthetic construct
  misc_feature 1..80: note = Artificially Synthesized Probe
  source 1..80: mol_type = other DNA
tcatattttccagctttatagtgatgtctcacttatcctttccaactccacatgtgcacagcgtcccctatcatcaacat

SEQ ID NO: 26779 - DNA, 80 bp, synthetic construct
  misc_feature 1..80: note = Artificially Synthesized Probe
  source 1..80: mol_type = other DNA
caatctgcatttctctatgacatatgatgtgaagcgtcatttcatatgtcgatttgccatctttatatcttcttagatga

SEQ ID NO: 26780 - DNA, 80 bp, synthetic construct
  misc_feature 1..80: note = Artificially Synthesized Probe
  source 1..80: mol_type = other DNA
ttctttcaccaataccacactgtctggattatcactgatttatagtaagtcttgaagttgcatagtgtcagtcttcaact

SEQ ID NO: 26781 - DNA, 80 bp, synthetic construct
  misc_feature 1..80: note = Artificially Synthesized Probe
  source 1..80: mol_type = other DNA
gacatccttgtttttcctgatcccctttccggatcttagtgggaaaaattctagtttctcacaattgggtatgatgttaa

SEQ ID NO: 26782 - DNA, 80 bp, synthetic construct
  misc_feature 1..80: note = Artificially Synthesized Probe
  source 1..80: mol_type = other DNA
atttgcaatataaattcacaagtaacccaagcccactttcaaatgacactatactgctttctggataatgcaagcacact

SEQ ID NO: 26783 - DNA, 80 bp, synthetic construct
  misc_feature 1..80: note = Artificially Synthesized Probe
  source 1..80: mol_type = other DNA
gagcccctgtacacagactctgctcttcctttctttatgcacagctgagttactgacctctactattttctctaaagaac

SEQ ID NO: 26784 - DNA, 80 bp, synthetic construct
  misc_feature 1..80: note = Artificially Synthesized Probe
  source 1..80: mol_type = other DNA
gattatcacgtatggaacctgaaactccccaactccattgtaataaaaagtgtcttcccttcctctggctcaagtattaa

SEQ ID NO: 26785 - DNA, 80 bp, synthetic construct
  misc_feature 1..80: note = Artificially Synthesized Probe
  source 1..80: mol_type = other DNA
ctccgcctcctggacatggtagggtggccatgctccacccacacctgagatctctctgagctctgcttcctggacatggt

SEQ ID NO: 26786 - DNA, 80 bp, synthetic construct
  misc_feature 1..80: note = Artificially Synthesized Probe
  source 1..80: mol_type = other DNA
cttaaaacagccatctcattcgttttgtgcagttttacagttgtttatggcagaggtgtgatttgggtccctgttatctc

SEQ ID NO: 26787 - DNA, 80 bp, synthetic construct
  misc_feature 1..80: note = Artificially Synthesized Probe
  source 1..80: mol_type = other DNA
ttccatttcaaactcatcgtttctcttataaaaagtggtcaagaaaaatgtgtgttgccttaaataaccggttagtgcca

SEQ ID NO: 26788 - DNA, 80 bp, synthetic construct
  misc_feature 1..80: note = Artificially Synthesized Probe
  source 1..80: mol_type = other DNA
ggtgtggtggcatgcacctgtggtcccaggtgcttgagaggctgaagtgggaggaccgcctgagcccaggtggtcacggc

SEQ ID NO: 26789 - DNA, 80 bp, synthetic construct
  misc_feature 1..80: note = Artificially Synthesized Probe
  source 1..80: mol_type = other DNA
ataacacaaatataaatgggctattaccttcagtaattcagatcggggttggcacatctgtgcaccaaatctggtccgct

SEQ ID NO: 26790 - DNA, 80 bp, synthetic construct
  misc_feature 1..80: note = Artificially Synthesized Probe
  source 1..80: mol_type = other DNA
gtaaactgcactgagatttgtctttttagggtgaatggaccttgatctttggagatctctttgtaggtcacacgttcgag

SEQ ID NO: 26791 - DNA, 80 bp, synthetic construct
  misc_feature 1..80: note = Artificially Synthesized Probe
  source 1..80: mol_type = other DNA
gaattaaagcagagacagacgctgtggcaactccaaactgtgaagccagggaagaaccctctcaacacaaaatcagaata

SEQ ID NO: 26792 - DNA, 80 bp, synthetic construct
  misc_feature 1..80: note = Artificially Synthesized Probe
  source 1..80: mol_type = other DNA
agttcctccaaagcaaagatgctactactcacattgcaattaagatttgggaggagagactgtgacactatgtacatatt

SEQ ID NO: 26793 - DNA, 80 bp, synthetic construct
  misc_feature 1..80: note = Artificially Synthesized Probe
  source 1..80: mol_type = other DNA
tatcaaatagagttcagtgttcatttacaattattttttcattgttttcttttggaagggcgggagtacaaagtatacac

SEQ ID NO: 26794 - DNA, 80 bp, synthetic construct
  misc_feature 1..80: note = Artificially Synthesized Probe
  source 1..80: mol_type = other DNA
tgggccatatggtaaatgtacacattttaaagaaactgccacactgtttgctaaagtggccgtgccgttttaagtctcca

SEQ ID NO: 26795 - DNA, 80 bp, synthetic construct
  misc_feature 1..80: note = Artificially Synthesized Probe
  source 1..80: mol_type = other DNA
aggcatctatatacatctgttgcaaagagtctatcttgcactgggcatctgtatacatctgttgtgaaaagtctcacagt

SEQ ID NO: 26796 - DNA, 80 bp, synthetic construct
  misc_feature 1..80: note = Artificially Synthesized Probe
  source 1..80: mol_type = other DNA
gatttttgaatgatgagccaagtgtgccaggcaaaactacaccacatcaagagaacaaactcaactggttgtgatattca

SEQ ID NO: 26797 - DNA, 80 bp, synthetic construct
  misc_feature 1..80: note = Artificially Synthesized Probe
  source 1..80: mol_type = other DNA
atcacacacagtggggcagcaggacctgctcactcccgtcgatactcaggatcacacacagtgcggcagcaggacccact

SEQ ID NO: 26798 - DNA, 80 bp, synthetic construct
  misc_feature 1..80: note = Artificially Synthesized Probe
  source 1..80: mol_type = other DNA
caggccagaaacaaagggcttgtcacacacagtggggcagcaggacccactcacccctgtcgatactcaggatcacacac

SEQ ID NO: 26799 - DNA, 80 bp, synthetic construct
  misc_feature 1..80: note = Artificially Synthesized Probe
  source 1..80: mol_type = other DNA
ttatttgtaattatactttaagttttagggtacatgtgcacattgtgcaggttagttacatatgtatacatgtgccatgc

SEQ ID NO: 26800 - DNA, 80 bp, synthetic construct
  misc_feature 1..80: note = Artificially Synthesized Probe
  source 1..80: mol_type = other DNA
aaagtacacttccttcccagaagagcttcccaagagaaaacagaaacactgataattgcaggcatttccatgactggtct

SEQ ID NO: 26801 - DNA, 80 bp, synthetic construct
  misc_feature 1..80: note = Artificially Synthesized Probe
  source 1..80: mol_type = other DNA
ctacatttggtcaaaaaactgagaaaacagtaacagaagaatacttctgcccacaaggagaccagcacacccagctcagg

SEQ ID NO: 26802 - DNA, 80 bp, synthetic construct
  misc_feature 1..80: note = Artificially Synthesized Probe
  source 1..80: mol_type = other DNA
gaatctacctccatgtgctaagttgttgctgtgtttaataatcccagtccaactcaaaatatccaagccagaaaggagca

SEQ ID NO: 26803 - DNA, 80 bp, synthetic construct
  misc_feature 1..80: note = Artificially Synthesized Probe
  source 1..80: mol_type = other DNA
aaagagaaaagaagcagatgcataaatactgaatgagaaaggaatgagggaatgtaacaggtacagctggactcagggct

SEQ ID NO: 26804 - DNA, 80 bp, synthetic construct
  misc_feature 1..80: note = Artificially Synthesized Probe
  source 1..80: mol_type = other DNA
tattcggggataaaaacatcagcacccttcgaacccctcagagaaagaggtagtatacaaatgcaccatctatgcttgat

SEQ ID NO: 26805 - DNA, 80 bp, synthetic construct
  misc_feature 1..80: note = Artificially Synthesized Probe
  source 1..80: mol_type = other DNA
ctgcctgaggggagactgtgaggaataaatgagatgaaaacactctgcagtgagtccctgcctgaggggagactgtgagg

SEQ ID NO: 26806 - DNA, 80 bp, synthetic construct
  misc_feature 1..80: note = Artificially Synthesized Probe
  source 1..80: mol_type = other DNA
gtaaatgagtgactgaatcaaagcactcacagcggagctgcctcctggtgattaaaacactctgcaagtgcaagagctta

SEQ ID NO: 26807 - DNA, 80 bp, synthetic construct
  misc_feature 1..80: note = Artificially Synthesized Probe
  source 1..80: mol_type = other DNA
ttcatcatttttcacctgaaatacaacagccccctaacctgtttctgccttcagtcaggaacccaatccaatgaaaccaa

SEQ ID NO: 26808 - DNA, 80 bp, synthetic construct
  misc_feature 1..80: note = Artificially Synthesized Probe
  source 1..80: mol_type = other DNA
agataaaccttctcagtctagaaaattaaacttcggcatagaggaggaacttatacggtgacccccatgatggcagatga

SEQ ID NO: 26809 - DNA, 80 bp, synthetic construct
  misc_feature 1..80: note = Artificially Synthesized Probe
  source 1..80: mol_type = other DNA
gttcttagttcatcaaaagacacagcagtagctccacccacatcacagaatggcctgctgcacatgggttctagtatctt

SEQ ID NO: 26810 - DNA, 80 bp, synthetic construct
  misc_feature 1..80: note = Artificially Synthesized Probe
  source 1..80: mol_type = other DNA
acaacacaagtctccaggttttcttttccagagttgttggttggggaaaaaaaggtgataactaaagctagaatctaagc

SEQ ID NO: 26811 - DNA, 80 bp, synthetic construct
  misc_feature 1..80: note = Artificially Synthesized Probe
  source 1..80: mol_type = other DNA
gagctcctgaaggaagcactaaatatggagacgaaaaactggtaccagccactgcaaaaacataacaaattgtaaagacc

SEQ ID NO: 26812 - DNA, 80 bp, synthetic construct
  misc_feature 1..80: note = Artificially Synthesized Probe
  source 1..80: mol_type = other DNA
tccaggagctggtttttggaaaagatcaacaaaatagatagaccactagccagacaaagaagaaaagagagaagaatcaa

SEQ ID NO: 26813 - DNA, 80 bp, synthetic construct
  misc_feature 1..80: note = Artificially Synthesized Probe
  source 1..80: mol_type = other DNA
agagaaagtcaaattgtttctgtttacagatgacatgattgttatttagaaaaccccatcatctcagcccaaaatctcct

SEQ ID NO: 26814 - DNA, 80 bp, synthetic construct
  misc_feature 1..80: note = Artificially Synthesized Probe
  source 1..80: mol_type = other DNA
atggtgttggggaaacaggctagccataagcagaaaactgaaactggaccccttctgtacaccttatacaaaaattaact

SEQ ID NO: 26815 - DNA, 80 bp, synthetic construct
  misc_feature 1..80: note = Artificially Synthesized Probe
  source 1..80: mol_type = other DNA
atcaatagtttaccaaccaaaaagagtccaggaccagatggattcacagccgaattctaccagaggtacaaggaggaact

SEQ ID NO: 26816 - DNA, 80 bp, synthetic construct
  misc_feature 1..80: note = Artificially Synthesized Probe
  source 1..80: mol_type = other DNA
caccaagtcaatcctaagccaaaagaacaaagctggaggcatcacactacctgacttcaaactttactacaaagctacag

SEQ ID NO: 26817 - DNA, 80 bp, synthetic construct
  misc_feature 1..80: note = Artificially Synthesized Probe
  source 1..80: mol_type = other DNA
ctggccgtcagagaaatgcaaatcaaaaccactatgagatatcatcgcacaccagttagaatggcaatcattaaaaagtc

SEQ ID NO: 26818 - DNA, 80 bp, synthetic construct
  misc_feature 1..80: note = Artificially Synthesized Probe
  source 1..80: mol_type = other DNA
aaaatatatataaattaaaaaattcagtccctggggcaaccacagtagctctactgcaagatgagtggtcacagacctcg

SEQ ID NO: 26819 - DNA, 80 bp, synthetic construct
  misc_feature 1..80: note = Artificially Synthesized Probe
  source 1..80: mol_type = other DNA
agtaaggcaaattctaccacctgtaacctatacacagtaagcttgattccctaaagagaaggagctgtggaattggagac

SEQ ID NO: 26820 - DNA, 80 bp, synthetic construct
  misc_feature 1..80: note = Artificially Synthesized Probe
  source 1..80: mol_type = other DNA
ccctcatcttccttcaaaatatagaagccaggcagtatttcaggtgcttggcctacacgaatgaacagaacagagatcct

SEQ ID NO: 26821 - DNA, 80 bp, synthetic construct
  misc_feature 1..80: note = Artificially Synthesized Probe
  source 1..80: mol_type = other DNA
atctcgtggagtagctgggattgtgaagatggcatgatccgaaggtaaacacagggtttatcaacacccctgcagcatcg

SEQ ID NO: 26822 - DNA, 80 bp, synthetic construct
  misc_feature 1..80: note = Artificially Synthesized Probe
  source 1..80: mol_type = other DNA
ttcacctgcttatcatgaaagctccatgtgagaacaatgtgaggatgccagtgaagggcatttgcaaaacaaagggattc

SEQ ID NO: 26823 - DNA, 80 bp, synthetic construct
  misc_feature 1..80: note = Artificially Synthesized Probe
  source 1..80: mol_type = other DNA
caggtggcagatggacgtattgtatcaccccaccccgtgcttacctgaccgatagcgctcatctcgtgaccctgaagacc

SEQ ID NO: 26824 - DNA, 80 bp, synthetic construct
  misc_feature 1..80: note = Artificially Synthesized Probe
  source 1..80: mol_type = other DNA
cattgatgtgaatccacctgtcacatattgattacattcaggcaataacagggtggcaaggaacacaactagacaaaact

SEQ ID NO: 26825 - DNA, 80 bp, synthetic construct
  misc_feature 1..80: note = Artificially Synthesized Probe
  source 1..80: mol_type = other DNA
agtctcacatgaaaaacagtagctacctggcacttacattcataaacatggacttaccacatgacttcctgaattgtcct

SEQ ID NO: 26826 - DNA, 80 bp, synthetic construct
  misc_feature 1..80: note = Artificially Synthesized Probe
  source 1..80: mol_type = other DNA
gtgctgtggacttatatagtcactgacagcacagttgggagaaacagataaaggcacacttccaagttgccaagcgtatc

SEQ ID NO: 26827 - DNA, 80 bp, synthetic construct
  misc_feature 1..80: note = Artificially Synthesized Probe
  source 1..80: mol_type = other DNA
gagggctcacgttcacagtcacgttcagtttggggaactgtgattgaaaaccagctctcaggagcatcacaggaagacta

SEQ ID NO: 26828 - DNA, 80 bp, synthetic construct
  misc_feature 1..80: note = Artificially Synthesized Probe
  source 1..80: mol_type = other DNA
aaaggtcaaagaaacaggcttagcaaagtcagcaaagaatagacaaatggatggaaacacacacaggaagaatggaggaa

SEQ ID NO: 26829 - DNA, 80 bp, synthetic construct
  misc_feature 1..80: note = Artificially Synthesized Probe
  source 1..80: mol_type = other DNA
ggagaaagaaaaaaggagaagtgaaggaagcagagagaagaaaacgagagagaagaaaaggaaaagagagggaaagaaaa

SEQ ID NO: 26830 - DNA, 80 bp, synthetic construct
  misc_feature 1..80: note = Artificially Synthesized Probe
  source 1..80: mol_type = other DNA
ccttagtgaaactgccggggatttttctgtattttcaggtctgtcccagagcagtttctaaatccagtcccattctctcc

SEQ ID NO: 26831 - DNA, 80 bp, synthetic construct
  misc_feature 1..80: note = Artificially Synthesized Probe
  source 1..80: mol_type = other DNA
ttcctattataatgttttaacttgattagggactcatacactggaaattgtcagtgatccagggacgggagagtctgacg

SEQ ID NO: 26832 - DNA, 80 bp, synthetic construct
  misc_feature 1..80: note = Artificially Synthesized Probe
  source 1..80: mol_type = other DNA
atagcggctggcgcctaagacgaggaatgcgattcattaaatgttgctgaaaagaccaggaaataaacgtacgggatcaa

SEQ ID NO: 26833 - DNA, 80 bp, synthetic construct
  misc_feature 1..80: note = Artificially Synthesized Probe
  source 1..80: mol_type = other DNA
caagttctgaaaagataataaaattccactgattggatggtgctgaggtacatgttaccctctgtcatttcagtcattaa

SEQ ID NO: 26834 - DNA, 80 bp, synthetic construct
  misc_feature 1..80: note = Artificially Synthesized Probe
  source 1..80: mol_type = other DNA
taaatctccacggcctgtgtcatacaagcagtgaggccttgttatccaagtcgacactgttattaagatctctctgaaga

SEQ ID NO: 26835 - DNA, 80 bp, synthetic construct
  misc_feature 1..80: note = Artificially Synthesized Probe
  source 1..80: mol_type = other DNA
gggccgtccttctcctgttttcctcacgtttccggcagataaattctgaaatggacctcgtggctaaaacccagccctgt

SEQ ID NO: 26836 - DNA, 80 bp, synthetic construct
  misc_feature 1..80: note = Artificially Synthesized Probe
  source 1..80: mol_type = other DNA
agaagttttataatttgtcacgcattcttcttaagtgttttctaagtggtgcccaactgagaaaggggaattgtaaaagc

SEQ ID NO: 26837 - DNA, 80 bp, synthetic construct
  misc_feature 1..80: note = Artificially Synthesized Probe
  source 1..80: mol_type = other DNA
ctatccctgacttaagcctctgctaagcaaggtccacagaaacatgttcactgttacatcactgtctcaaaaatcaaggc

SEQ ID NO: 26838 - DNA, 80 bp, synthetic construct
  misc_feature 1..80: note = Artificially Synthesized Probe
  source 1..80: mol_type = other DNA
gtctagatttggcctgtgccaccaacagaagccttggattaaaccagaatcaatagtaataaatagctctctaaaccaaa

SEQ ID NO: 26839 - DNA, 80 bp, synthetic construct
  misc_feature 1..80: note = Artificially Synthesized Probe
  source 1..80: mol_type = other DNA
acacagaggcccttcccattcacaagctccagcacacacagaatactcattcgctgttcatttttttggatctgttgtat

SEQ ID NO: 26840 - DNA, 80 bp, synthetic construct
  misc_feature 1..80: note = Artificially Synthesized Probe
  source 1..80: mol_type = other DNA
tccagacaagactttaataaatcctaggttactatcatctctcaaaacctaggaggtgggaaagggtggcagcactgagt

SEQ ID NO: 26841 - DNA, 80 bp, synthetic construct
  misc_feature 1..80: note = Artificially Synthesized Probe
  source 1..80: mol_type = other DNA
catgcacagttatccttaaaaccagacaatgtcccatagaactgtgccccaacccagttgtcttacaaactgaagccagg

SEQ ID NO: 26842 - DNA, 80 bp, synthetic construct
  misc_feature 1..80: note = Artificially Synthesized Probe
  source 1..80: mol_type = other DNA
acagtgcccgagccttcctccatttcacaccagggacacggtggctctgacggtgcctggggcttcctccaccttcacac

SEQ ID NO: 26843 - DNA, 80 bp, synthetic construct
  misc_feature 1..80: note = Artificially Synthesized Probe
  source 1..80: mol_type = other DNA
aagaggagagatttacacacaagtcctactttggaagtgaaaaccccagtgaggcaaagtcaccagcagaaggtcgaatg

SEQ ID NO: 26844 - DNA, 80 bp, synthetic construct
  misc_feature 1..80: note = Artificially Synthesized Probe
  source 1..80: mol_type = other DNA
aagttcaacaagcattcattcagtatctatttcacattcaattcatgagagacgtccaagttgatgggaggactcatgaa

SEQ ID NO: 26845 - DNA, 80 bp, synthetic construct
  misc_feature 1..80: note = Artificially Synthesized Probe
  source 1..80: mol_type = other DNA
ctgttgcagtaagatcttactcgggccaggcaggtggacaaggtcacttagagttttacctttttggttttaaatttgta

SEQ ID NO: 26846 - DNA, 80 bp, synthetic construct
  misc_feature 1..80: note = Artificially Synthesized Probe
  source 1..80: mol_type = other DNA
ccctttcccatgacattgattctcaattttgcagatctcaggcctcagcagtaagttggtttcagtggatgttgtattta

SEQ ID NO: 26847 - DNA, 80 bp, synthetic construct
  misc_feature 1..80: note = Artificially Synthesized Probe
  source 1..80: mol_type = other DNA
taagcagctgcatagtagctacggctttctgctcagttgcctttttaagtcaaagctaccaagagtcaaagcaatccaag

SEQ ID NO: 26848 - DNA, 80 bp, synthetic construct
  misc_feature 1..80: note = Artificially Synthesized Probe
  source 1..80: mol_type = other DNA
tgcatcatctgcctgaaactgggtaagagaatggatcttctgtattctcaccacacatacaaattaactacaaggtgagg

SEQ ID NO: 26849 - DNA, 80 bp, synthetic construct
  misc_feature 1..80: note = Artificially Synthesized Probe
  source 1..80: mol_type = other DNA
aatctctacattactcttaataccccaaacaacatgagtgctgagtacacagaaccaatgcatgccctcccgtgtactta

SEQ ID NO: 26850 - DNA, 80 bp, synthetic construct
  misc_feature 1..80: note = Artificially Synthesized Probe
  source 1..80: mol_type = other DNA
cccatgttcagaacaggttaggccattcttttctttctgaatattttcacttttagtttggctgcatccagggctataga

SEQ ID NO: 26851 - DNA, 80 bp, synthetic construct
  misc_feature 1..80: note = Artificially Synthesized Probe
  source 1..80: mol_type = other DNA
tgaatccagcctctgtcatgcgtttcataaacacagtacttgagttttcccaacctcttgctatccagctggcttccccg

SEQ ID NO: 26852 - DNA, 80 bp, synthetic construct
  misc_feature 1..80: note = Artificially Synthesized Probe
  source 1..80: mol_type = other DNA
aggcaatgcgcatttgttgagtcctgccagctaattatagataaaacaagctttctgagagctgtgaatgtggattttct

SEQ ID NO: 26853 - DNA, 80 bp, synthetic construct
  misc_feature 1..80: note = Artificially Synthesized Probe
  source 1..80: mol_type = other DNA
atgggctttactaacaccattttaaaggaactctgaaatgtctagttaccatctgccaaattgttgactttatcatagag

SEQ ID NO: 26854 - DNA, 80 bp, synthetic construct
  misc_feature 1..80: note = Artificially Synthesized Probe
  source 1..80: mol_type = other DNA
aagaggcctgaggttttcttttggagagcggagggggcaaatgacctaccagaagttatatgtaataagctcaagttatt

SEQ ID NO: 26855 - DNA, 80 bp, synthetic construct
  misc_feature 1..80: note = Artificially Synthesized Probe
  source 1..80: mol_type = other DNA
tgggaggatcacttgagcccaggagtctaagaccagcctgggtaacatagtgaaactccatttctacaaaaaacaaaatt

SEQ ID NO: 26856 - DNA, 80 bp, synthetic construct
  misc_feature 1..80: note = Artificially Synthesized Probe
  source 1..80: mol_type = other DNA
aggaaactcaagtcacaccaaaagcctacgtataaaaattcccaagggatctacaaaagtcagtcctagatccaatacct

SEQ ID NO: 26857 - DNA, 80 bp, synthetic construct
  misc_feature 1..80: note = Artificially Synthesized Probe
  source 1..80: mol_type = other DNA
aacgtttgctggcctctatatgcacactgaggtctgcatttgtaaccgcatttttacatctttcaggacaggacaatcct

SEQ ID NO: 26858 - DNA, 80 bp, synthetic construct
  misc_feature 1..80: note = Artificially Synthesized Probe
  source 1..80: mol_type = other DNA
tccaagtcacaagtgacaagatgagacgcttcccgtgttcccatgttctgtcactttaacactaaaaatttagtacatct

SEQ ID NO: 26859 - DNA, 80 bp, synthetic construct
  misc_feature 1..80: note = Artificially Synthesized Probe
  source 1..80: mol_type = other DNA
tgaggaacggacaggggcatctccaccttctactgccacaatttgtgtgttagtgatcaagccaaggttctcaacctttc

SEQ ID NO: 26860 - DNA, 80 bp, synthetic construct
  misc_feature 1..80: note = Artificially Synthesized Probe
  source 1..80: mol_type = other DNA
tccaaatgtgcataagatttatgaagagcagacaagctgcatgacatcttctgagagggaagctgtgccatgtcaggggt

SEQ ID NO: 26861 - DNA, 80 bp, synthetic construct
  misc_feature 1..80: note = Artificially Synthesized Probe
  source 1..80: mol_type = other DNA
ggcgtgaggttacggacctggtcacccgctgtgtccaatcagagacgtatgaggttacagacctagtcaccagctgcaca

SEQ ID NO: 26862 - DNA, 80 bp, synthetic construct
  misc_feature 1..80: note = Artificially Synthesized Probe
  source 1..80: mol_type = other DNA
tttctggctcaccaccgcgattcagtcacttacaccctcattccaggctgaaaatctcttctgaaaatatccaaatctta

SEQ ID NO: 26863 - DNA, 80 bp, synthetic construct
  misc_feature 1..80: note = Artificially Synthesized Probe
  source 1..80: mol_type = other DNA
gcaaggacactcacgatgcttgaccatacaactaggggtcgattggttttttagactgactgtaattccctggtggcacg

SEQ ID NO: 26864 - DNA, 80 bp, synthetic construct
  misc_feature 1..80: note = Artificially Synthesized Probe
  source 1..80: mol_type = other DNA
cagtttagagatgaggaaaatgctgcttggagaaactaaatgataaaaccagacttcaacacaccttgccgtctccaaga

SEQ ID NO: 26865 - DNA, 80 bp, synthetic construct
  misc_feature 1..80: note = Artificially Synthesized Probe
  source 1..80: mol_type = other DNA
gctttgttcaagaggtttaagacacacgtaagtctttcttgccatgctcaatacacacagccgtttctgaagtcggtgtt

SEQ ID NO: 26866 - DNA, 80 bp, synthetic construct
  misc_feature 1..80: note = Artificially Synthesized Probe
  source 1..80: mol_type = other DNA
cgttttttaaagttgacttctaatcctggaagggaaaaaaatgggccagatgtggtgctcacacctgtaatcccagcagt

SEQ ID NO: 26867 - DNA, 80 bp, synthetic construct
  misc_feature 1..80: note = Artificially Synthesized Probe
  source 1..80: mol_type = other DNA
gtttttcatttaagggaagggagaagaacattcagtatttatacatctcacgcacacatctgcagtggggccctaaagta

SEQ ID NO: 26868 - DNA, 80 bp, synthetic construct
  misc_feature 1..80: note = Artificially Synthesized Probe
  source 1..80: mol_type = other DNA
ttcagatgtaggatgctcagaaaccttgaatttccaatcagagaacaggaacatgagcaagttccccagcagtgcccacc

SEQ ID NO: 26869 - DNA, 80 bp, synthetic construct
  misc_feature 1..80: note = Artificially Synthesized Probe
  source 1..80: mol_type = other DNA
ggggtaaaattctaggtgcctgcaataacctcatttctgtagctaagcaacttcagtagtagcaaaaaacaagctttttt

SEQ ID NO: 26870 - DNA, 80 bp, synthetic construct
  misc_feature 1..80: note = Artificially Synthesized Probe
  source 1..80: mol_type = other DNA
ataaaattctattctcgtctctaaacactatggtaaacacctgccatcaacccacagaaactcctgggacccaataacac

SEQ ID NO: 26871 - DNA, 80 bp, synthetic construct
  misc_feature 1..80: note = Artificially Synthesized Probe
  source 1..80: mol_type = other DNA
gaaagggggggaagggaggggaaaggggggaagggaggggaaagggggggaagggaggggaaagggggggaagggagggg

SEQ ID NO: 26872 - DNA, 80 bp, synthetic construct
  misc_feature 1..80: note = Artificially Synthesized Probe
  source 1..80: mol_type = other DNA
aaatcaataccagaaacgtgtcaccagcagaaagatggtccctttgattgacggcttacaaacacaagtatgttacactg

SEQ ID NO: 26873 - DNA, 80 bp, synthetic construct
  misc_feature 1..80: note = Artificially Synthesized Probe
  source 1..80: mol_type = other DNA
cacccatgctgcaccctcatgccaccttccaccctccagaactgtgagaaacaaattcctgttgtttagaggccagtcaa

SEQ ID NO: 26874 - DNA, 80 bp, synthetic construct
  misc_feature 1..80: note = Artificially Synthesized Probe
  source 1..80: mol_type = other DNA
tgggtcatgcccaaagcctgcactgctgagttttcgaggtttctgaactcattcaatcgctgacccacgcagcacgtttc

SEQ ID NO: 26875 - DNA, 80 bp, synthetic construct
  misc_feature 1..80: note = Artificially Synthesized Probe
  source 1..80: mol_type = other DNA
agcaactgaaatacagcactttccgaagacgtgtgcgttacctgcagaaagttactagacattaatttaagatgggggaa

SEQ ID NO: 26876 - DNA, 80 bp, synthetic construct
  misc_feature 1..80: note = Artificially Synthesized Probe
  source 1..80: mol_type = other DNA
tcaagcatcagctcttaaaaacaaccagaaatgctgcaggcaaatcccaccaagcagcaaacaaaggaacagcacccaac

SEQ ID NO: 26877 - DNA, 80 bp, synthetic construct
  misc_feature 1..80: note = Artificially Synthesized Probe
  source 1..80: mol_type = other DNA
tttccgcatggaagtaaacttcagctcctgagtaaatgtccaggactgtggttgctcctgtggtcggagtgcttagttcc

SEQ ID NO: 26878 - DNA, 80 bp, synthetic construct
  misc_feature 1..80: note = Artificially Synthesized Probe
  source 1..80: mol_type = other DNA
actctgtgtcacccacacactcgtttctaccttacacaaatgaccctggagtgaagatgcagggactctgacccacaagc

SEQ ID NO: 26879 - DNA, 80 bp, synthetic construct
  misc_feature 1..80: note = Artificially Synthesized Probe
  source 1..80: mol_type = other DNA
gggtccctgctcagatgcaaaaagcaaggctaacagcaggaaaattatttaattaccttcatggtcatcaagtaaaatca

SEQ ID NO: 26880 - DNA, 80 bp, synthetic construct
  misc_feature 1..80: note = Artificially Synthesized Probe
  source 1..80: mol_type = other DNA
ttccaagtcacaagcaggttgtatgtccacagctattcggaatgtggtttctgatagaagcttttatgaacacacatgaa

SEQ ID NO: 26881 - DNA, 80 bp, synthetic construct
  misc_feature 1..80: note = Artificially Synthesized Probe
  source 1..80: mol_type = other DNA
ctctgaacgtccaagtggctgtgggcagggagatgctgcacagctgtttctatgctaaatacttgaaggtgtgaatttta

SEQ ID NO: 26882 - DNA, 80 bp, synthetic construct
  misc_feature 1..80: note = Artificially Synthesized Probe
  source 1..80: mol_type = other DNA
caggtgcatcaggcagcaagcaactcatccaagtctgtttagaaaccacacacttgcgacacctataggcctcagtaggt

SEQ ID NO: 26883 - DNA, 80 bp, synthetic construct
  misc_feature 1..80: note = Artificially Synthesized Probe
  source 1..80: mol_type = other DNA
aggctctctcctctgtacaacagaaaatccataagaaagtcaaatgtgaaagaaccaggtaccgctgaatggcataatca

SEQ ID NO: 26884 - DNA, 80 bp, synthetic construct
  misc_feature 1..80: note = Artificially Synthesized Probe
  source 1..80: mol_type = other DNA
tcactgtggaacttcctaggtccccacatgaacagaacctaaataacacgcaagaaacaacaggaacgagaacactacca

SEQ ID NO: 26885 - DNA, 80 bp, synthetic construct
  misc_feature 1..80: note = Artificially Synthesized Probe
  source 1..80: mol_type = other DNA
ttagccataaagtagtgagctatgtatccaaaagggagatatgggaaaacagaaaagacaggagacagatcctaaacacc

SEQ ID NO: 26886 - DNA, 80 bp, synthetic construct
  misc_feature 1..80: note = Artificially Synthesized Probe
  source 1..80: mol_type = other DNA
gactgttactaacatagtaatgaaaaggttgattaatacaataaattactatgtcaacatggcaccccctgctgtcagac

SEQ ID NO: 26887 - DNA, 80 bp, synthetic construct
  misc_feature 1..80: note = Artificially Synthesized Probe
  source 1..80: mol_type = other DNA
cacatttcccaaagtagactgttactctgaaaataaaacctttttccttcctctgtacatctcatggtcatgttgttaac

SEQ ID NO: 26888 - DNA, 80 bp, synthetic construct
  misc_feature 1..80: note = Artificially Synthesized Probe
  source 1..80: mol_type = other DNA
tcaaaccatgaggcccagggtagccttaacaggtggtcccagcaaaactggccgctgcattttcttgctggcaaatgagt

SEQ ID NO: 26889 - DNA, 80 bp, synthetic construct
  misc_feature 1..80: note = Artificially Synthesized Probe
  source 1..80: mol_type = other DNA
tggaaaacacattgaaattcccgtgttagaatcatcaccaccaacactttacgaggcaatctgctttccagaacatctag

SEQ ID NO: 26890 - DNA, 80 bp, synthetic construct
  misc_feature 1..80: note = Artificially Synthesized Probe
  source 1..80: mol_type = other DNA
gatggcaaatgccaaccagccccgaccttcatcttatagtgaagaaatccttctctttttgtcaggtccctgttagaaag

SEQ ID NO: 26891 - DNA, 80 bp, synthetic construct
  misc_feature 1..80: note = Artificially Synthesized Probe
  source 1..80: mol_type = other DNA
ctccctgcaggatggtacagaaggaaccttcagcacccgggtttgcaggatgctggatcagagcatctctcacatctcaa

SEQ ID NO: 26892 - DNA, 80 bp, synthetic construct
  misc_feature 1..80: note = Artificially Synthesized Probe
  source 1..80: mol_type = other DNA
tggatggtacgtcagctcccctgggtttccataacaaatgtcccagattgggcagcttcaacaatataaattgattctct

SEQ ID NO: 26893 - DNA, 80 bp, synthetic construct
  misc_feature 1..80: note = Artificially Synthesized Probe
  source 1..80: mol_type = other DNA
ctgtttttcccagaacttatcatccctgccgtgacaccaccacccattttgtagtcatagaagatgaacaaaagaaggtg

SEQ ID NO: 26894 - DNA, 80 bp, synthetic construct
  misc_feature 1..80: note = Artificially Synthesized Probe
  source 1..80: mol_type = other DNA
ccaccgtgcctggctgtgaatgtattttaaatttttaagctttttgtttctagactctgtatcctctgtggataacaaat

SEQ ID NO: 26895 - DNA, 80 bp, synthetic construct
  misc_feature 1..80: note = Artificially Synthesized Probe
  source 1..80: mol_type = other DNA
aattatatcaaaaaaattgtaagcactgggtaatatgactttgaaaaatgtgctcactagcaaaaagcagcacataattt

SEQ ID NO: 26896 - DNA, 80 bp, synthetic construct
  misc_feature 1..80: note = Artificially Synthesized Probe
  source 1..80: mol_type = other DNA
ccagaaaaaaacaagatgatcaaaaaagccatttgcagaaagccactttccccttcacttttcacatggtttctagaaac

SEQ ID NO: 26897 - DNA, 80 bp, synthetic construct
  misc_feature 1..80: note = Artificially Synthesized Probe
  source 1..80: mol_type = other DNA
ctctgaaacacaggtaaagtctttcaagggttttgattatagtaaagtagctggaaagcaaagcatgcattagacacagc

SEQ ID NO: 26898 - DNA, 80 bp, synthetic construct
  misc_feature 1..80: note = Artificially Synthesized Probe
  source 1..80: mol_type = other DNA
acctgtctctcctagaccccacagcatgaccctccacctgactgcaccctgtctagtgcatccctgcacctgtctctcgg

SEQ ID NO: 26899 - DNA, 80 bp, synthetic construct
  misc_feature 1..80: note = Artificially Synthesized Probe
  source 1..80: mol_type = other DNA
gccgacagcccaggctccagaaatgcacagcttcaaccttcagagtaaaaaccctcccaagccaactatttcttcaacaa

SEQ ID NO: 26900 - DNA, 80 bp, synthetic construct
  misc_feature 1..80: note = Artificially Synthesized Probe
  source 1..80: mol_type = other DNA
ttgtgtctcctaggctcaaacacatcctttaagatcctcagaaaatgaagtttaactctctggggacatgagttacatag

SEQ ID NO: 26901 - DNA, 80 bp, synthetic construct
  misc_feature 1..80: note = Artificially Synthesized Probe
  source 1..80: mol_type = other DNA
gcaatatatacagattccaattttcccatcttcaccaacatgtcaccgtccagtactggggttttacccatcccagtggt

SEQ ID NO: 26902 - DNA, 80 bp, synthetic construct
  misc_feature 1..80: note = Artificially Synthesized Probe
  source 1..80: mol_type = other DNA
tagagaatttagacacacagagtcctcagtgctgcacacacataagagaaacccatgaggacacagagaagacgccgtct

SEQ ID NO: 26903 - DNA, 80 bp, synthetic construct
  misc_feature 1..80: note = Artificially Synthesized Probe
  source 1..80: mol_type = other DNA
agaaaaaaccattttccaaaataagcagcagtgtggcaacagtttgtgctgctgtgagaacacctaacgcctctctgcac

SEQ ID NO: 26904 - DNA, 80 bp, synthetic construct
  misc_feature 1..80: note = Artificially Synthesized Probe
  source 1..80: mol_type = other DNA
ctaagataaccatcaaatcctcggaagacgcacctctgcatacttcctgtttctcattcagaacattccagagggaaccc

SEQ ID NO: 26905 - DNA, 80 bp, synthetic construct
  misc_feature 1..80: note = Artificially Synthesized Probe
  source 1..80: mol_type = other DNA
agcctttttcagccatcacaactgtcacatgtaaaagcagtctgcaatgcttcatttaggaggtgcttgtgttgcctcat

SEQ ID NO: 26906 - DNA, 80 bp, synthetic construct
  misc_feature 1..80: note = Artificially Synthesized Probe
  source 1..80: mol_type = other DNA
ttcatttaagatcagaaataaagatcctacagctcttctagtccaatcccccaccctaacgtgaatgggggaaaaagcca

SEQ ID NO: 26907 - DNA, 80 bp, synthetic construct
  misc_feature 1..80: note = Artificially Synthesized Probe
  source 1..80: mol_type = other DNA
ctaccttctggaaccatgcggtgtcctacagaagcaacaagggacgtgtagcttttttttttttttttttctcttaagac

SEQ ID NO: 26908 - DNA, 80 bp, synthetic construct
  misc_feature 1..80: note = Artificially Synthesized Probe
  source 1..80: mol_type = other DNA
caacacccacagccagtcccctccttgcaggtctcggctctgctgacactgcctcaagcgcctccctgatgcttctcaac

SEQ ID NO: 26909 - DNA, 80 bp, synthetic construct
  misc_feature 1..80: note = Artificially Synthesized Probe
  source 1..80: mol_type = other DNA
cactctgttgtaactgacggaggctgtcgatggcagctctaccaagaccaagaatggcaactaatctgagatttactatc

SEQ ID NO: 26910 - DNA, 80 bp, synthetic construct
  misc_feature 1..80: note = Artificially Synthesized Probe
  source 1..80: mol_type = other DNA
caagactccatctcaaaaaaaagtgacgaacaccccatgtctgccctggctcccgccatctccacggagtggacagagct

SEQ ID NO: 26911 - DNA, 80 bp, synthetic construct
  misc_feature 1..80: note = Artificially Synthesized Probe
  source 1..80: mol_type = other DNA
aggcaagaaatatacctcataggaaaaaacgtacagcttgtaactgtaagagtggcgaacaggcaagaaatatacatcat

SEQ ID NO: 26912 - DNA, 80 bp, synthetic construct
  misc_feature 1..80: note = Artificially Synthesized Probe
  source 1..80: mol_type = other DNA
agtctgggcttcacttttgtatatggagtctcacagtacagaaatatcacaaagggattagacttcatatactgacccca

SEQ ID NO: 26913 - DNA, 80 bp, synthetic construct
  misc_feature 1..80: note = Artificially Synthesized Probe
  source 1..80: mol_type = other DNA
taaaggcaggcaaactatgaaaagaatctatagaggaaggactagctctgctgtaagcccactacacgcaaggtcacgca

SEQ ID NO: 26914 - DNA, 80 bp, synthetic construct
  misc_feature 1..80: note = Artificially Synthesized Probe
  source 1..80: mol_type = other DNA
ccacacttccatttcaggatattctgctggaatcaacagccccagactcacccccaacacctaccacattgaaaacaacg

SEQ ID NO: 26915 - DNA, 80 bp, synthetic construct
  misc_feature 1..80: note = Artificially Synthesized Probe
  source 1..80: mol_type = other DNA
aagtgaaaaacaacaatctgtaaaatgcaacatatgacccaatacagggtggtgagtgcacaggcacatacacatgtggg

SEQ ID NO: 26916 - DNA, 80 bp, synthetic construct
  misc_feature 1..80: note = Artificially Synthesized Probe
  source 1..80: mol_type = other DNA
cctgaccctgaaccaggatgggaggactcgagtcatgtgtgtgaataatttacctggatgcatctcacggattgagattc

SEQ ID NO: 26917 - DNA, 80 bp, synthetic construct
  misc_feature 1..80: note = Artificially Synthesized Probe
  source 1..80: mol_type = other DNA
gtatctcatatgctcatgagaccctttggaggcagctgtacatctcaggtgaatcactttaataatgagagaagtgcttg

SEQ ID NO: 26918 - DNA, 80 bp, synthetic construct
  misc_feature 1..80: note = Artificially Synthesized Probe
  source 1..80: mol_type = other DNA
caatcatgattttagaaactgggagctaggtgtaaaatgagtcaataaagccagtgtccactgatcatccctccacgcac

SEQ ID NO: 26919 - DNA, 80 bp, synthetic construct
  misc_feature 1..80: note = Artificially Synthesized Probe
  source 1..80: mol_type = other DNA
acagagtttgattctctttgctgacatggtacctttcatgtgtatttattttggggcaggttaaaggggactcacaatgg

SEQ ID NO: 26920 - DNA, 80 bp, synthetic construct
  misc_feature 1..80: note = Artificially Synthesized Probe
  source 1..80: mol_type = other DNA
ccattgtgaaggcaaatactcatgaaattaatacactttttcctccttagatactgacaattcctcttctggaggtcagc

SEQ ID NO: 26921 - DNA, 80 bp, synthetic construct
  misc_feature 1..80: note = Artificially Synthesized Probe
  source 1..80: mol_type = other DNA
cctagctgagcagcagtaatcttccttgaaggcttttctcacctacactgcctacaagtgctctctgggcagtattgtgt

SEQ ID NO: 26922 - DNA, 80 bp, synthetic construct
  misc_feature 1..80: note = Artificially Synthesized Probe
  source 1..80: mol_type = other DNA
agtcattttccttagttcttaatgtgtcaaaaatcccaacactgctgaggtcgctcattcagggaatcgatgctgaattt

SEQ ID NO: 26923 - DNA, 80 bp, synthetic construct
  misc_feature 1..80: note = Artificially Synthesized Probe
  source 1..80: mol_type = other DNA
ggcattttgcctgtctccttttgacctctgtttcctcatctctaacatgaggtaaaagaagttccctccttagcggattt

SEQ ID NO: 26924 - DNA, 80 bp, synthetic construct
  misc_feature 1..80: note = Artificially Synthesized Probe
  source 1..80: mol_type = other DNA
atgaacaatcagtttttccaatcgtaagagaggcattttccacagactactaacccaacttcacctagaatttaaaacca

SEQ ID NO: 26925 - DNA, 80 bp, synthetic construct
  misc_feature 1..80: note = Artificially Synthesized Probe
  source 1..80: mol_type = other DNA
agacacaccgcacactgatatttttacagttcagttagactttgacacttacacgttcagatagcaacacagatgctgct

SEQ ID NO: 26926 - DNA, 80 bp, synthetic construct
  misc_feature 1..80: note = Artificially Synthesized Probe
  source 1..80: mol_type = other DNA
ccacctcagcctcccaaagacaggcatctgttttaacagccacccctgctcccagccacaacacaactgaaagttagcag

SEQ ID NO: 26927 - DNA, 80 bp, synthetic construct
  misc_feature 1..80: note = Artificially Synthesized Probe
  source 1..80: mol_type = other DNA
agcaaaaagaaacgaatcatccaagatcagtagaaggaaagggatcagaaatttaagcctgtaacaagctttcggaaaaa

SEQ ID NO: 26928 - DNA, 80 bp, synthetic construct
  misc_feature 1..80: note = Artificially Synthesized Probe
  source 1..80: mol_type = other DNA
ttttgaacaaccctcaatggagatgcaccatcctgtgtttaacacagatttgagttttgtaaaagccaaaacaagggagg

SEQ ID NO: 26929 - DNA, 80 bp, synthetic construct
  misc_feature 1..80: note = Artificially Synthesized Probe
  source 1..80: mol_type = other DNA
ctgtgagtctatgacgtgtcaggaagggaaggaagacactatgtagatcatctcatttaaacttcacagtgtcacaaggt

SEQ ID NO: 26930 - DNA, 80 bp, synthetic construct
  misc_feature 1..80: note = Artificially Synthesized Probe
  source 1..80: mol_type = other DNA
tcagctaaaccgggaaaaatccacaaaacagaaagaacccacagggagaagcacttctctctccaacctgacagcaaaca

SEQ ID NO: 26931 - DNA, 80 bp, synthetic construct
  misc_feature 1..80: note = Artificially Synthesized Probe
  source 1..80: mol_type = other DNA
gcgaaatctaagcaacattataataaaaaatcactgaattctgcccgaggctctaggggtgttttcctctctgaaaggag

SEQ ID NO: 26932 - DNA, 80 bp, synthetic construct
  misc_feature 1..80: note = Artificially Synthesized Probe
  source 1..80: mol_type = other DNA
ctgaatatcctacaaaggacagggctacccaactgcggactgaggcagtaaataaacatgttttcagcaaatagcatcat

SEQ ID NO: 26933 - DNA, 80 bp, synthetic construct
  misc_feature 1..80: note = Artificially Synthesized Probe
  source 1..80: mol_type = other DNA
atgcattttactgactacacggccagtaagtttaaagctttttgcatcgataaagacattgctgcttttagcaataggct

SEQ ID NO: 26934 - DNA, 80 bp, synthetic construct
  misc_feature 1..80: note = Artificially Synthesized Probe
  source 1..80: mol_type = other DNA
gaaaatagacagaaggaactaaaggctcactacagctaatatcacaacgttctcaactttaccttcgccaaaaacagcgg

SEQ ID NO: 26935 - DNA, 80 bp, synthetic construct
  misc_feature 1..80: note = Artificially Synthesized Probe
  source 1..80: mol_type = other DNA
ccacccaactaggaagcgcaaggagccaaagaagagtcaatttagggtcattttcagaaacgtgcaacaatgagaaacaa

SEQ ID NO: 26936 - DNA, 80 bp, synthetic construct
  misc_feature 1..80: note = Artificially Synthesized Probe
  source 1..80: mol_type = other DNA
tgccaaggtccacattccatttacttaaaatataaaattcattagctggtagttgatccagttttttcttacttcgttac

SEQ ID NO: 26937 - DNA, 80 bp, synthetic construct
  misc_feature 1..80: note = Artificially Synthesized Probe
  source 1..80: mol_type = other DNA
agttgggagcaatttctatttctccatggtagaacctggaatttacctttgagacagactgtccttctgttctgaaaaat

SEQ ID NO: 26938 - DNA, 80 bp, synthetic construct
  misc_feature 1..80: note = Artificially Synthesized Probe
  source 1..80: mol_type = other DNA
gcaaagcatctactaacctgccaaatttcactagcttgtaatgaacaactgttttcatcctatactctccggtgctaacg

SEQ ID NO: 26939 - DNA, 80 bp, synthetic construct
  misc_feature 1..80: note = Artificially Synthesized Probe
  source 1..80: mol_type = other DNA
atgtacatgcagagcatacacatccatatccatatagcatatgtacataggtacactataatgtgtacatgcatagcatg

SEQ ID NO: 26940 - DNA, 80 bp, synthetic construct
  misc_feature 1..80: note = Artificially Synthesized Probe
  source 1..80: mol_type = other DNA
agacccagaacaggccatgaatattaacgctgcagaaaggcttccagttccacataatttttttttccaaactgtaatag

SEQ ID NO: 26941 - DNA, 80 bp, synthetic construct
  misc_feature 1..80: note = Artificially Synthesized Probe
  source 1..80: mol_type = other DNA
ggcaagtatgatggtcaaacagtggccactgttgacaaaatacaggcagtcttctgcaaatatgagtttctaggaataca

SEQ ID NO: 26942 - DNA, 80 bp, synthetic construct
  misc_feature 1..80: note = Artificially Synthesized Probe
  source 1..80: mol_type = other DNA
acataacaagaccccatccctgcaacaaagaaaagaaagttagccaggcatgctggtgcgcgcctgaggtcccagctact

SEQ ID NO: 26943 - DNA, 80 bp, synthetic construct
  misc_feature 1..80: note = Artificially Synthesized Probe
  source 1..80: mol_type = other DNA
gcactttgccacacataatacatggcgatttatggcagttgccacatattttcacatgtattaccttttgggcatcttct

SEQ ID NO: 26944 - DNA, 80 bp, synthetic construct
  misc_feature 1..80: note = Artificially Synthesized Probe
  source 1..80: mol_type = other DNA
ataactaaaaacaaaacatcaactatgcagacaggaaaagaaaaatatacaccaatactcccctattcaacaggcattta

SEQ ID NO: 26945 - DNA, 80 bp, synthetic construct
  misc_feature 1..80: note = Artificially Synthesized Probe
  source 1..80: mol_type = other DNA
ttcaaatggtaaggaacaagggtacttttccctcaacacaaaacaagcttgacctctatgagcccggagaacaccgacgt

SEQ ID NO: 26946 - DNA, 80 bp, synthetic construct
  misc_feature 1..80: note = Artificially Synthesized Probe
  source 1..80: mol_type = other DNA
aacaccaggccattcaagactgaattttatctatacttaaatgcatttaatcaccatattagagggttaaggggggttat

SEQ ID NO: 26947 - DNA, 80 bp, synthetic construct
  misc_feature 1..80: note = Artificially Synthesized Probe
  source 1..80: mol_type = other DNA
ggaacgttctggatctcagatagataatggcttatccactcatggtaagccttggtcttgtttcacaagctatcaaatgc

SEQ ID NO: 26948 - DNA, 80 bp, synthetic construct
  misc_feature 1..80: note = Artificially Synthesized Probe
  source 1..80: mol_type = other DNA
caccaggcactgcctcagccctcaccctcctgaaaccccacatccacaccagccactgcctcagccctgaccctgcggaa

SEQ ID NO: 26949 - DNA, 80 bp, synthetic construct
  misc_feature 1..80: note = Artificially Synthesized Probe
  source 1..80: mol_type = other DNA
acaagagcccccatgttcaacatctggacacagtttttcttgaacatcagcttctgtttctctggggtaaatacccagga

SEQ ID NO: 26950 - DNA, 80 bp, synthetic construct
  misc_feature 1..80: note = Artificially Synthesized Probe
  source 1..80: mol_type = other DNA
cccgtgtgtccctcctgagcataatttacgacttcagtggatgtctctttgtgaaaaaagtaattctgtctggaagcaaa

SEQ ID NO: 26951 - DNA, 80 bp, synthetic construct
  misc_feature 1..80: note = Artificially Synthesized Probe
  source 1..80: mol_type = other DNA
aaaggtctgaaatagcacagcaccttcgagtcaagtgggacaaactgactcaaaatacagcttctaaaaaaaccacagca

SEQ ID NO: 26952 - DNA, 80 bp, synthetic construct
  misc_feature 1..80: note = Artificially Synthesized Probe
  source 1..80: mol_type = other DNA
taatttctaagccactctctcacacccactcccctattttgttaaaaaccagttatatggctatattttttccaagagaa

SEQ ID NO: 26953 - DNA, 80 bp, synthetic construct
  misc_feature 1..80: note = Artificially Synthesized Probe
  source 1..80: mol_type = other DNA
taccctcccaaaataatccaaatgtccatcgatacgaaaacagatgaatgacggtttgttcccaccatggaatattcctc

SEQ ID NO: 26954 - DNA, 80 bp, synthetic construct
  misc_feature 1..80: note = Artificially Synthesized Probe
  source 1..80: mol_type = other DNA
ccctaagtccacgtttaccccagagagtcccaattttatatgttttcccaacatcaccttagtgataatttatcctgtaa

SEQ ID NO: 26955 - DNA, 80 bp, synthetic construct
  misc_feature 1..80: note = Artificially Synthesized Probe
  source 1..80: mol_type = other DNA
ttctcagttcattatcacaactcactaacagagcagccgtgcacagatcctcagacgtttacgcagtgggatgacagagg

SEQ ID NO: 26956 - DNA, 80 bp, synthetic construct
  misc_feature 1..80: note = Artificially Synthesized Probe
  source 1..80: mol_type = other DNA
tactcacctgtgactcgtgggccatgacagaaaacttcaggttcttattagttcctattttccccatccaggaagccttt

SEQ ID NO: 26957 - DNA, 80 bp, synthetic construct
  misc_feature 1..80: note = Artificially Synthesized Probe
  source 1..80: mol_type = other DNA
tctgattagaaagcggaggaaaaagcttatttttaagccgacaaagagtggacactgctatggtgaatggaaaacagacg

SEQ ID NO: 26958 - DNA, 80 bp, synthetic construct
  misc_feature 1..80: note = Artificially Synthesized Probe
  source 1..80: mol_type = other DNA
gttctgcattatttctgtgtgagatgtgtgtttgcctctggactgagtggagactaagtggagacccatcctcgccagtg

SEQ ID NO: 26959 - DNA, 80 bp, synthetic construct
  misc_feature 1..80: note = Artificially Synthesized Probe
  source 1..80: mol_type = other DNA
cataaaagtaggcctactaacaattacgtaagtcttcagaggctcctgaactacttctgtcccttcatgtttttatacaa

SEQ ID NO: 26960 - DNA, 80 bp, synthetic construct
  misc_feature 1..80: note = Artificially Synthesized Probe
  source 1..80: mol_type = other DNA
ttgatgaagtcattcattccccaaatacaaagcaattaaaggcatgagagctcaagagaaaatccacaccgtggcttgtg

SEQ ID NO: 26961 - DNA, 80 bp, synthetic construct
  misc_feature 1..80: note = Artificially Synthesized Probe
  source 1..80: mol_type = other DNA
cctgaaaagggcaaaatcgcagaggctggagggaccttccaggtaacccagcaccctcagtggacagaggaccccctggg

SEQ ID NO: 26962 - DNA, 80 bp, synthetic construct
  misc_feature 1..80: note = Artificially Synthesized Probe
  source 1..80: mol_type = other DNA
caccaagtaagggcaattttataaccacgtctcaaccataagagaatcaggtctttggccatctggtcaaagctttttct

SEQ ID NO: 26963 - DNA, 80 bp, synthetic construct
  misc_feature 1..80: note = Artificially Synthesized Probe
  source 1..80: mol_type = other DNA
ttggctcactcaatttcaattctacctgaagctgggaaactaaaaatgcattcccagactccagggcacgagagaattcc

SEQ ID NO: 26964 - DNA, 80 bp, synthetic construct
  misc_feature 1..80: note = Artificially Synthesized Probe
  source 1..80: mol_type = other DNA
ccagagctgtgagctacagatcacccaatctacagcagcccagacagtcatgttacaacattagccactttctcagtggg

SEQ ID NO: 26965 - DNA, 80 bp, synthetic construct
  misc_feature 1..80: note = Artificially Synthesized Probe
  source 1..80: mol_type = other DNA
tgtccaactatctgttctgccatcgtttgtgtctatttcccacaaaccatctcattataatttagggcacacaaaaggct

SEQ ID NO: 26966 - DNA, 80 bp, synthetic construct
  misc_feature 1..80: note = Artificially Synthesized Probe
  source 1..80: mol_type = other DNA
gcggacacgcaccctgggcccaagtttaagatcaaatataaggagctttcaactttagtatttaactagatcttattaca

SEQ ID NO: 26967 - DNA, 80 bp, synthetic construct
  misc_feature 1..80: note = Artificially Synthesized Probe
  source 1..80: mol_type = other DNA
ctgtgctggagaaagctctcagcttaagccgaatctgtgaaactttattttccccattttagatggagtgtgaagactgt

SEQ ID NO: 26968 - DNA, 80 bp, synthetic construct
  misc_feature 1..80: note = Artificially Synthesized Probe
  source 1..80: mol_type = other DNA
gtgccagccacggcccagcagcacctggctcatgggctccacccacccccccagaggaccactgaggccccagcacgctc

SEQ ID NO: 26969 - DNA, 80 bp, synthetic construct
  misc_feature 1..80: note = Artificially Synthesized Probe
  source 1..80: mol_type = other DNA
cgcctacatgagtccctccaagacttccaagtcccacttgatttttttcattgtatccctctataacatcagagacgtta

SEQ ID NO: 26970 - DNA, 80 bp, synthetic construct
  misc_feature 1..80: note = Artificially Synthesized Probe
  source 1..80: mol_type = other DNA
tagaatatgcacaaatgttcatcagcaaatctggtctttgatctacctccctctcataacctaaaaaggaacacacacac

SEQ ID NO: 26971 - DNA, 80 bp, synthetic construct
  misc_feature 1..80: note = Artificially Synthesized Probe
  source 1..80: mol_type = other DNA
aagtcaccattcaaccaccaatacctctgctctccttacaggaactttccaaaagtaaattctggaattaacaggacaag

SEQ ID NO: 26972 - DNA, 80 bp, synthetic construct
  misc_feature 1..80: note = Artificially Synthesized Probe
  source 1..80: mol_type = other DNA
ttttttaagaagttaaaaagaacctaactgcatctttggatcttatgtgaggcaatgtccagggtcactgggacccctgc

SEQ ID NO: 26973 - DNA, 80 bp, synthetic construct
  misc_feature 1..80: note = Artificially Synthesized Probe
  source 1..80: mol_type = other DNA
tctcatgctgaactgtaacccccagtgttggaggtgggccctggtgggcggtgactgactcatgggggtggtttctaacc

SEQ ID NO: 26974 - DNA, 80 bp, synthetic construct
  misc_feature 1..80: note = Artificially Synthesized Probe
  source 1..80: mol_type = other DNA
gaattcgtactaacatgatattcagaggcagaaatgcaaatatccccacgacttcaaataccctaggatctaacaggccc

SEQ ID NO: 26975 - DNA, 80 bp, synthetic construct
  misc_feature 1..80: note = Artificially Synthesized Probe
  source 1..80: mol_type = other DNA
cacacatgttcattgctttgaacagagtctcaagaaatgagacaaatattgacgctccacagaagcaagtattctcttcc

SEQ ID NO: 26976 - DNA, 80 bp, synthetic construct
  misc_feature 1..80: note = Artificially Synthesized Probe
  source 1..80: mol_type = other DNA
attcctgagaatggaagaactgttgcccaggaatggagttcaacagatcctctccacaccctggtaaacatggcatttcg

SEQ ID NO: 26977 - DNA, 80 bp, synthetic construct
  misc_feature 1..80: note = Artificially Synthesized Probe
  source 1..80: mol_type = other DNA
aacatggccactgggcctgaagggctgagtcttgaatgtgatccataaagttcctttcaagtgtgtttagctgtgtaatc

SEQ ID NO: 26978 - DNA, 80 bp, synthetic construct
  misc_feature 1..80: note = Artificially Synthesized Probe
  source 1..80: mol_type = other DNA
ccagacttcaactctcagggttagggtcagagtcatcaaattcaccagttttacaaaacgtctatttacttcggatgcca

SEQ ID NO: 26979 - DNA, 80 bp, synthetic construct
  misc_feature 1..80: note = Artificially Synthesized Probe
  source 1..80: mol_type = other DNA
tcttcactctgggttccaagtactaaattcctcgattttatcaattagattatcaagcagccgtttgtaatctggaccgc

SEQ ID NO: 26980 - DNA, 80 bp, synthetic construct
  misc_feature 1..80: note = Artificially Synthesized Probe
  source 1..80: mol_type = other DNA
ctgagatttctcaaatgtgagatgggaatggtaactgaacccacttcccagggtggctgtggagactgagaccacacatg

SEQ ID NO: 26981 - DNA, 80 bp, synthetic construct
  misc_feature 1..80: note = Artificially Synthesized Probe
  source 1..80: mol_type = other DNA
atgctattggcatttggtctgcacataaaatgctaaaaaccctcaagtgaaacaagtatcttcaacagtttgattcaatc

SEQ ID NO: 26982 - DNA, 80 bp, synthetic construct
  misc_feature 1..80: note = Artificially Synthesized Probe
  source 1..80: mol_type = other DNA
gcctggcttctccctttttccagaacttaacaaaacctgaaaggacaggtctgtgtagaaaaacatcaaaaatacttcca

SEQ ID NO: 26983 - DNA, 80 bp, synthetic construct
  misc_feature 1..80: note = Artificially Synthesized Probe
  source 1..80: mol_type = other DNA
ggtgtcggcccccaagaacattctggatcacaattcacagtagtgattgcgatcagggtcacatgtggctgaatgtattt

SEQ ID NO: 26984 - DNA, 80 bp, synthetic construct
  misc_feature 1..80: note = Artificially Synthesized Probe
  source 1..80: mol_type = other DNA
gttgctactttggactgaaagttatccccaaccctgctttgtaagcaagtggagcagaacgcttcaattatttcaacgtt

SEQ ID NO: 26985 - DNA, 80 bp, synthetic construct
  misc_feature 1..80: note = Artificially Synthesized Probe
  source 1..80: mol_type = other DNA
ttgacatggcttccggagaggatgtcattcgctgataaactgaaacatgtgacctagaatctactgtgaaggtctaagaa

SEQ ID NO: 26986 - DNA, 80 bp, synthetic construct
  misc_feature 1..80: note = Artificially Synthesized Probe
  source 1..80: mol_type = other DNA
tgctcagggactggcttctaactccaggtgggaatgttaagctcagtccagttcaattcaataagcatttatcaagaaac

SEQ ID NO: 26987 - DNA, 80 bp, synthetic construct
  misc_feature 1..80: note = Artificially Synthesized Probe
  source 1..80: mol_type = other DNA
gatgcagggctgagggctgaggggaggaggggagggatggacacaaggccaaggggaagaggggagggatgcagggctga

SEQ ID NO: 26988 - DNA, 80 bp, synthetic construct
  misc_feature 1..80: note = Artificially Synthesized Probe
  source 1..80: mol_type = other DNA
ccgctcagctccacatccaggcttttgtgcctcactcaagaggcacacagcaccagaacacggctctttaagtgcctttc

SEQ ID NO: 26989 - DNA, 80 bp, synthetic construct
  misc_feature 1..80: note = Artificially Synthesized Probe
  source 1..80: mol_type = other DNA
aaaaatgggcagttggtaggagccgattcctaaattaaacactgttcggaggctttctgggctagcacagctctaataac

SEQ ID NO: 26990 - DNA, 80 bp, synthetic construct
  misc_feature 1..80: note = Artificially Synthesized Probe
  source 1..80: mol_type = other DNA
ctcattttcctgttcaccgagagcatgtcacatgactcttcccttttcaagaggctcagctgcacccagaggcattccgg

SEQ ID NO: 26991 - DNA, 80 bp, synthetic construct
  misc_feature 1..80: note = Artificially Synthesized Probe
  source 1..80: mol_type = other DNA
cacccagggcagacagtgtcttcaaccgagcgccactgacccagaagtgcagtaattagtacactttcaccagagtcacc

SEQ ID NO: 26992 - DNA, 80 bp, synthetic construct
  misc_feature 1..80: note = Artificially Synthesized Probe
  source 1..80: mol_type = other DNA
cacattgctgacctacctctcaggctgagataacgtccaaaattaaccaggtagaacagtgttccataaatcagccagaa

SEQ ID NO: 26993 - DNA, 80 bp, synthetic construct
  misc_feature 1..80: note = Artificially Synthesized Probe
  source 1..80: mol_type = other DNA
gaaaataaaggctggtgatgtgacagttggtgggagcacagacggaaggaactggcggtggagacacacggttggccctg

SEQ ID NO: 26994 - DNA, 80 bp, synthetic construct
  misc_feature 1..80: note = Artificially Synthesized Probe
  source 1..80: mol_type = other DNA
cgctttctcatccgtgaaagaataaagtcggattaactcatctccacactcacttccaactctaacaacctgtgttagga

SEQ ID NO: 26995 - DNA, 80 bp, synthetic construct
  misc_feature 1..80: note = Artificially Synthesized Probe
  source 1..80: mol_type = other DNA
acatctcagttttcaaagcaccacgtgccttggtactttctccttattacatgtcccatcttccagggaggtttccttcc

SEQ ID NO: 26996 - DNA, 80 bp, synthetic construct
  misc_feature 1..80: note = Artificially Synthesized Probe
  source 1..80: mol_type = other DNA
aaacttcaaaactttagaaagtattaagcgtaatcaaagattacttttaatttttgagctgggaagagcctgtgccaggg

SEQ ID NO: 26997 - DNA, 80 bp, synthetic construct
  misc_feature 1..80: note = Artificially Synthesized Probe
  source 1..80: mol_type = other DNA
aataagatactttgttctaaaatgaccaggatttcagcagcttctacatttcttcatgtcaatcaaagcttaggcacgtg

SEQ ID NO: 26998 - DNA, 80 bp, synthetic construct
  misc_feature 1..80: note = Artificially Synthesized Probe
  source 1..80: mol_type = other DNA
taatcatcagaaagagcctcccagtccacagctcaggagtggcgttttattcagggaaacactaataaaaacctggggct

SEQ ID NO: 26999 - DNA, 80 bp, synthetic construct
  misc_feature 1..80: note = Artificially Synthesized Probe
  source 1..80: mol_type = other DNA
tttctaattggcccccaatttttcagaatttaagaagactgagaggaataaccacgaacaagcaagatttacgcagacgt

SEQ ID NO: 27000 - DNA, 80 bp, synthetic construct
  misc_feature 1..80: note = Artificially Synthesized Probe
  source 1..80: mol_type = other DNA
cagaggctcaacggggtcctcggtggtgacacttaaccttgtcctctgacagacgatcatcgagatagagtcactcaaac

SEQ ID NO: 27001 - DNA, 80 bp, synthetic construct
  misc_feature 1..80: note = Artificially Synthesized Probe
  source 1..80: mol_type = other DNA
atcatcggcagacaagaaccatttcagagcatcgctgtccactttatattcaataagcacaattctcccgaaaacgtctt

SEQ ID NO: 27002 - DNA, 80 bp, synthetic construct
  misc_feature 1..80: note = Artificially Synthesized Probe
  source 1..80: mol_type = other DNA
ttgcttctacaaagtctcaagataaaatcaaaacaaagaggtcttcagaggagtcaatccacacagttctcccaaaaggg

SEQ ID NO: 27003 - DNA, 80 bp, synthetic construct
  misc_feature 1..80: note = Artificially Synthesized Probe
  source 1..80: mol_type = other DNA
aattctatttaatttgatctcctaactataaagtggctccttcgtgctgacagcagggtttgcttcagttgactcaaaaa

SEQ ID NO: 27004 - DNA, 80 bp, synthetic construct
  misc_feature 1..80: note = Artificially Synthesized Probe
  source 1..80: mol_type = other DNA
cagtatcagccgcatatgcacattctccactgaagccactgcatgaagccacgctggaagcactttctggcaggtttagg

SEQ ID NO: 27005 - DNA, 80 bp, synthetic construct
  misc_feature 1..80: note = Artificially Synthesized Probe
  source 1..80: mol_type = other DNA
tcccctctgttggtttcttactgcacctcaataaacttagctcacagcaagaggcgggcatggccagagtagaaacacac

SEQ ID NO: 27006 - DNA, 80 bp, synthetic construct
  misc_feature 1..80: note = Artificially Synthesized Probe
  source 1..80: mol_type = other DNA
ccatgccttagatcccaggcaccttaaagctgatgttcccccaccagccctcatgaagatgatactcacacaacgcccct

SEQ ID NO: 27007 - DNA, 80 bp, synthetic construct
  misc_feature 1..80: note = Artificially Synthesized Probe
  source 1..80: mol_type = other DNA
aaattattttccttcctacaccccttctaaggaaacatttctatttttctgctacacaatttggtaacctgccctttcag

SEQ ID NO: 27008 - DNA, 80 bp, synthetic construct
  misc_feature 1..80: note = Artificially Synthesized Probe
  source 1..80: mol_type = other DNA
acagtttaagaccagccagaccaacatggcaaaatcccgtctctactaaaaatacaaaaatcagccaggcatggtggcac

SEQ ID NO: 27009 - DNA, 80 bp, synthetic construct
  misc_feature 1..80: note = Artificially Synthesized Probe
  source 1..80: mol_type = other DNA
tatggaagaggtgagaaaatagaatatcctaacctctgtctttttatcaccctctaaatcctatgattccagttctgttc

SEQ ID NO: 27010 - DNA, 80 bp, synthetic construct
  misc_feature 1..80: note = Artificially Synthesized Probe
  source 1..80: mol_type = other DNA
ctgggcctcagacatacaatttagcaccagcatctgtgaaacaagaacaaaagtcgcatgggaaagtgagcataaaaatg

SEQ ID NO: 27011 - DNA, 80 bp, synthetic construct
  misc_feature 1..80: note = Artificially Synthesized Probe
  source 1..80: mol_type = other DNA
gtttatctctgaatggggggggctattttgcctatttccctaggtttgacgtgtcacttctgtaatgtaataatagagca

SEQ ID NO: 27012 - DNA, 80 bp, synthetic construct
  misc_feature 1..80: note = Artificially Synthesized Probe
  source 1..80: mol_type = other DNA
ggttaaaaacaactgccttcatacctattaaaaacaatgtttcttcctttcctgagtgaaagtgaaatgagccatggtgg

SEQ ID NO: 27013 - DNA, 80 bp, synthetic construct
  misc_feature 1..80: note = Artificially Synthesized Probe
  source 1..80: mol_type = other DNA
ccacgtccacattggatggtgggagagaacagggaaactgagtccacgtccacatttgagggtgggagggaacagaggga

SEQ ID NO: 27014 - DNA, 80 bp, synthetic construct
  misc_feature 1..80: note = Artificially Synthesized Probe
  source 1..80: mol_type = other DNA
cattggatggtgggagagaacagagcgaaattgagtccacatccacattggatggtgggcgagaacagaaggaaactgag

SEQ ID NO: 27015 - DNA, 80 bp, synthetic construct
  misc_feature 1..80: note = Artificially Synthesized Probe
  source 1..80: mol_type = other DNA
acagagaaccaacttttccttttttcacattacccaataattctaagactcagggttttgtcacgttacagcaaatgcca

SEQ ID NO: 27016 - DNA, 80 bp, synthetic construct
  misc_feature 1..80: note = Artificially Synthesized Probe
  source 1..80: mol_type = other DNA
catctatggtaggtgacccggttatcgttcctaagagagtccacggccacttctactgggttccctatactcttcccctg

SEQ ID NO: 27017 - DNA, 80 bp, synthetic construct
  misc_feature 1..80: note = Artificially Synthesized Probe
  source 1..80: mol_type = other DNA
aacaaccaaactcgtgactgaatgaacaagtatgttaagtcgttaagtaaaaatagcagaagacttagtagaatgtatga

SEQ ID NO: 27018 - DNA, 80 bp, synthetic construct
  misc_feature 1..80: note = Artificially Synthesized Probe
  source 1..80: mol_type = other DNA
actgattcctaccaacgatatccaaatcttagcatgagcagcacgataaacagaatgagcaaaattcaaaaactaaagca

SEQ ID NO: 27019 - DNA, 80 bp, synthetic construct
  misc_feature 1..80: note = Artificially Synthesized Probe
  source 1..80: mol_type = other DNA
agccccagaacagaggtgtgaggggtgacgtctgtactgccttaaaaaaaaaaaaagcagatattcaatgccacatttaa

SEQ ID NO: 27020 - DNA, 80 bp, synthetic construct
  misc_feature 1..80: note = Artificially Synthesized Probe
  source 1..80: mol_type = other DNA
gtgacgctttcattcttcacagctgctatctgatctcatgctaatcagtgtttttctgacaacaaagtcaaggtttctca

SEQ ID NO: 27021 - DNA, 80 bp, synthetic construct
  misc_feature 1..80: note = Artificially Synthesized Probe
  source 1..80: mol_type = other DNA
gtggagccaccagaaattcgctccttatgcaaacagggagcccagccccatcagcttctatgtaaaagcccttgtagtca

SEQ ID NO: 27022 - DNA, 80 bp, synthetic construct
  misc_feature 1..80: note = Artificially Synthesized Probe
  source 1..80: mol_type = other DNA
tctatgctaccctatagaacactctactatttgtcccattgtatactatactatataatgttacagtttcttctattcta

SEQ ID NO: 27023 - DNA, 80 bp, synthetic construct
  misc_feature 1..80: note = Artificially Synthesized Probe
  source 1..80: mol_type = other DNA
gcagtaggctctactaataactactgctttaaaaaatgcaagggagtgggtacattttcacatgggccatgtggaaagtt

SEQ ID NO: 27024 - DNA, 80 bp, synthetic construct
  misc_feature 1..80: note = Artificially Synthesized Probe
  source 1..80: mol_type = other DNA
ggacctgatgctggacctgacactggacctgcccctggacctgcccctggacctgccgctggacctgacactggacctgc

SEQ ID NO: 27025 - DNA, 80 bp, synthetic construct
  misc_feature 1..80: note = Artificially Synthesized Probe
  source 1..80: mol_type = other DNA
ccactgacccactgtaattctgtgtggtgtattatgtttcatgtgcaggaaatcattcacaaagcctttaacaaggaagt

SEQ ID NO: 27026 - DNA, 80 bp, synthetic construct
  misc_feature 1..80: note = Artificially Synthesized Probe
  source 1..80: mol_type = other DNA
atacatgtgaacatacgaatagaaataggcacacatgcctgaagaccctcttctgtaaaggtattctcaaacttgaattg

SEQ ID NO: 27027 - DNA, 80 bp, synthetic construct
  misc_feature 1..80: note = Artificially Synthesized Probe
  source 1..80: mol_type = other DNA
agactttaggcttacaaagaaaacaaataacattctcctagcatcaagagtcaggtgttccacaaatactaagaatagcc

SEQ ID NO: 27028 - DNA, 80 bp, synthetic construct
  misc_feature 1..80: note = Artificially Synthesized Probe
  source 1..80: mol_type = other DNA
aactgcaccgtgcagctcttctctggactctaagcagggccttttctgggtcttccgacccttcctccatttccaaatgt

SEQ ID NO: 27029 - DNA, 80 bp, synthetic construct
  misc_feature 1..80: note = Artificially Synthesized Probe
  source 1..80: mol_type = other DNA
ttccaaacgctaagtgaatacgcacttggagaacacttgcttgataattttgtggcattgccagataacgcggacaaagt

SEQ ID NO: 27030 - DNA, 80 bp, synthetic construct
  misc_feature 1..80: note = Artificially Synthesized Probe
  source 1..80: mol_type = other DNA
tccctgactaaaagtgtctttaaaaagggagatctcagaatctccttccctggaatgctttaacccttcatggaacacag

SEQ ID NO: 27031 - DNA, 80 bp, synthetic construct
  misc_feature 1..80: note = Artificially Synthesized Probe
  source 1..80: mol_type = other DNA
agagagaaaagaaggaatggtttggggagattcaccgaaattctgtgagttcttgactaaaaatcaccaagtccgctgtg

SEQ ID NO: 27032 - DNA, 80 bp, synthetic construct
  misc_feature 1..80: note = Artificially Synthesized Probe
  source 1..80: mol_type = other DNA
tcattattaacctcactctacagctaaattctaacactaatcatggtggcatcattaggacattgttctaggtggtgctt

SEQ ID NO: 27033 - DNA, 80 bp, synthetic construct
  misc_feature 1..80: note = Artificially Synthesized Probe
  source 1..80: mol_type = other DNA
ggaaagaagggctatctggaataatacgagtccgggtgacatatgtaattgtgagtttttgttttctccgaactggcctt

SEQ ID NO: 27034 - DNA, 80 bp, synthetic construct
  misc_feature 1..80: note = Artificially Synthesized Probe
  source 1..80: mol_type = other DNA
aaaagaaactactgctctgacctggaaaaatgaaatttaaaacagaaaacacacaggttgtaactaaaaggcagacggac

SEQ ID NO: 27035 - DNA, 80 bp, synthetic construct
  misc_feature 1..80: note = Artificially Synthesized Probe
  source 1..80: mol_type = other DNA
caacacaacacacatgtacaatgcactcatacagcacacacaactcataacatgcacatacaacacacaacactcataca

SEQ ID NO: 27036 - DNA, 80 bp, synthetic construct
  misc_feature 1..80: note = Artificially Synthesized Probe
  source 1..80: mol_type = other DNA
acaacatgcacatacaacacacatacaacccatgccactcacatacaacacaacacgctcatacaacacattcatacaac

SEQ ID NO: 27037 - DNA, 80 bp, synthetic construct
  misc_feature 1..80: note = Artificially Synthesized Probe
  source 1..80: mol_type = other DNA
ctggagaacctccctgcattatgaagatgagccgaaaaataacattaattcacaatgtagagtgatgattcagccacaga

SEQ ID NO: 27038 - DNA, 80 bp, synthetic construct
  misc_feature 1..80: note = Artificially Synthesized Probe
  source 1..80: mol_type = other DNA
tacgtaagtatcatctcaggtacgtggattcaaaattctgatgcaaacaagaataatcacaaaacagggtagggtgtcaa

SEQ ID NO: 27039 - DNA, 80 bp, synthetic construct
  misc_feature 1..80: note = Artificially Synthesized Probe
  source 1..80: mol_type = other DNA
agacgcaccgacggaggaaacgccacagacgcacggacggaggaaacgtcacagacgcacggacggaggaaacgtcacag

SEQ ID NO: 27040 - DNA, 80 bp, synthetic construct
  misc_feature 1..80: note = Artificially Synthesized Probe
  source 1..80: mol_type = other DNA
ttaaacagaagggcacttcacttcgaatgaaagcactctgcataaaagaactaaagattggctggcgaccgcttagaaac

SEQ ID NO: 27041 - DNA, 80 bp, synthetic construct
  misc_feature 1..80: note = Artificially Synthesized Probe
  source 1..80: mol_type = other DNA
cttggtgttaagagtgagccagcctttagaggccacgtggtctatacttgaatagaaaatgttccaggaaaccaaagatt

SEQ ID NO: 27042 - DNA, 80 bp, synthetic construct
  misc_feature 1..80: note = Artificially Synthesized Probe
  source 1..80: mol_type = other DNA
caagtaactaagtgagaaaatcttaatgtctggactgtgatatcagtagcaaaataaccccaagcaccccaattaaaaga

SEQ ID NO: 27043 - DNA, 80 bp, synthetic construct
  misc_feature 1..80: note = Artificially Synthesized Probe
  source 1..80: mol_type = other DNA
gaaacaaatgaaaacagaaacacaacatatcacagcctacggtatagagcaaaagcagtattaagaggaaagtttatagc

SEQ ID NO: 27044 - DNA, 80 bp, synthetic construct
  misc_feature 1..80: note = Artificially Synthesized Probe
  source 1..80: mol_type = other DNA
ttgataaaattcagcgctgcttcatgataaaaactctcaacaaactaggcactgaaggaaacatacctcaacacaataaa

SEQ ID NO: 27045 - DNA, 80 bp, synthetic construct
  misc_feature 1..80: note = Artificially Synthesized Probe
  source 1..80: mol_type = other DNA
taaccacttgcaaggaagactatagtcacttgagctgaaagcaaatgaatcaccacaaaaactaccactggcaccaagtc

SEQ ID NO: 27046 - DNA, 80 bp, synthetic construct
  misc_feature 1..80: note = Artificially Synthesized Probe
  source 1..80: mol_type = other DNA
catccccgagcagtggggaaagtcccagcagacatttggggagtccctacaggtggctctggaactctgagtggaagttt

SEQ ID NO: 27047 - DNA, 80 bp, synthetic construct
  misc_feature 1..80: note = Artificially Synthesized Probe
  source 1..80: mol_type = other DNA
ccccacactcgtgatccccgtgcccatctctgctccccatgtccatgctccccgcacctgtcctccctgtgcccagctcc

SEQ ID NO: 27048 - DNA, 80 bp, synthetic construct
  misc_feature 1..80: note = Artificially Synthesized Probe
  source 1..80: mol_type = other DNA
tgcgcccatatctgctcctcgagctcccttccacagatttcctctgtacgcccttcttgatagtcactgtcacctggaat

SEQ ID NO: 27049 - DNA, 80 bp, synthetic construct
  misc_feature 1..80: note = Artificially Synthesized Probe
  source 1..80: mol_type = other DNA
aacaaggattcaaaacagattgttctgaattgttttgcctgtgtgcttcctgggagtggtaaagtcaagaactgccgctc

SEQ ID NO: 27050 - DNA, 80 bp, synthetic construct
  misc_feature 1..80: note = Artificially Synthesized Probe
  source 1..80: mol_type = other DNA
atctacggccacggaaattccagggaatgcagaccccagtctctaaagtgttatttgttttatgaacttcactgcagtga

SEQ ID NO: 27051 - DNA, 80 bp, synthetic construct
  misc_feature 1..80: note = Artificially Synthesized Probe
  source 1..80: mol_type = other DNA
gaaccccaggggagccccaagtgctcaaaatcaagtaaatgtccattgtgatttaacataccaattttagaagaaagggc

SEQ ID NO: 27052 - DNA, 80 bp, synthetic construct
  misc_feature 1..80: note = Artificially Synthesized Probe
  source 1..80: mol_type = other DNA
gagatgtagcaagtttttggcacaatagtcataaaccctgcatggcacacacacagaaggaagattaaagccctggaggt

SEQ ID NO: 27053 - DNA, 80 bp, synthetic construct
  misc_feature 1..80: note = Artificially Synthesized Probe
  source 1..80: mol_type = other DNA
tttcaatgcatcttgcacgcaaccagtaatgatgttttcaatgcatcatgcaggtagccatctcattcaggatacttaaa

SEQ ID NO: 27054 - DNA, 80 bp, synthetic construct
  misc_feature 1..80: note = Artificially Synthesized Probe
  source 1..80: mol_type = other DNA
gtgggcatggaacacgctgacaattaccaaagccacagagtacaaagcatggcacctatttttcaaaacttctcttccac

SEQ ID NO: 27055 - DNA, 80 bp, synthetic construct
  misc_feature 1..80: note = Artificially Synthesized Probe
  source 1..80: mol_type = other DNA
ggcaaaaatgtagggaagagaagggagaagaaaatattctggggaaaggagtatgagaaagcagccgccacagccctctc

SEQ ID NO: 27056 - DNA, 80 bp, synthetic construct
  misc_feature 1..80: note = Artificially Synthesized Probe
  source 1..80: mol_type = other DNA
tctctccacttgaattttgattgaagatgggaaataattcagcattaacagctgttttcagctttcactctgaaagcaga

SEQ ID NO: 27057 - DNA, 80 bp, synthetic construct
  misc_feature 1..80: note = Artificially Synthesized Probe
  source 1..80: mol_type = other DNA
gctttgccatcatctgggcagcaagacagtatcactcaccctccaagagcaactgacaggcaagtgtcgtcacctcaaaa

SEQ ID NO: 27058 - DNA, 80 bp, synthetic construct
  misc_feature 1..80: note = Artificially Synthesized Probe
  source 1..80: mol_type = other DNA
catttcagatttgggaacttcagtggttttggggaaaagacctggcaaagcccgatctgaaacttatgacagttgagcac

SEQ ID NO: 27059 - DNA, 80 bp, synthetic construct
  misc_feature 1..80: note = Artificially Synthesized Probe
  source 1..80: mol_type = other DNA
taatgaggatgtaattattacagccctgcgcggagggctggggggcggcggacgcgggctcctctgcctgcgcgcccagg

SEQ ID NO: 27060 - DNA, 80 bp, synthetic construct
  misc_feature 1..80: note = Artificially Synthesized Probe
  source 1..80: mol_type = other DNA
cggtcttctatcgattaaagataaagcgatcagcagtgaatttatccttcgtgtggatgaactcggccagcccgggctgt

SEQ ID NO: 27061 - DNA, 80 bp, synthetic construct
  misc_feature 1..80: note = Artificially Synthesized Probe
  source 1..80: mol_type = other DNA
aaggaacgaagtaattaaaagtaaagctttctcagcacgaagatgttttctcagataagcattctaagtcaacttttcat

SEQ ID NO: 27062 - DNA, 80 bp, synthetic construct
  misc_feature 1..80: note = Artificially Synthesized Probe
  source 1..80: mol_type = other DNA
atcatacgaggctttctagtgccactaacttcttcaatatgttttgttgtttcctgggtacttgtgcgtacaaaaactga

SEQ ID NO: 27063 - DNA, 80 bp, synthetic construct
  misc_feature 1..80: note = Artificially Synthesized Probe
  source 1..80: mol_type = other DNA
agttatgcctgaaccatcattaccccgtgactttcagttacataaaccaggagattgtttctttgaactgagttttctgt

SEQ ID NO: 27064 - DNA, 80 bp, synthetic construct
  misc_feature 1..80: note = Artificially Synthesized Probe
  source 1..80: mol_type = other DNA
ccgtatttcagttttctcatcactaagagtggggccaatgcaatattaacttgatagggttaaggaggattaaatgaatt

SEQ ID NO: 27065 - DNA, 80 bp, synthetic construct
  misc_feature 1..80: note = Artificially Synthesized Probe
  source 1..80: mol_type = other DNA
gattttgtcttgatttggtttctttgaaataaaccaaaagcaaaactcacatgcacagcctaccctcagcactgatgacc

SEQ ID NO: 27066 - DNA, 80 bp, synthetic construct
  misc_feature 1..80: note = Artificially Synthesized Probe
  source 1..80: mol_type = other DNA
tctaatgatctgaatgggtgaaggtgcagaagaggggctgacgcctcctcgaggtacagattccccagcccaacctgcgt

SEQ ID NO: 27067 - DNA, 80 bp, synthetic construct
  misc_feature 1..80: note = Artificially Synthesized Probe
  source 1..80: mol_type = other DNA
gtttcaaccttttgttgtggccatttcagaatgaagcactactgggtctgaaacaaaatgttctaggttgtcactataat

SEQ ID NO: 27068 - DNA, 80 bp, synthetic construct
  misc_feature 1..80: note = Artificially Synthesized Probe
  source 1..80: mol_type = other DNA
tttattttcgatgttttctgatcatatctggcatctgttgaacgtttcctatgtgctgggcactgctgggcgagttactc

SEQ ID NO: 27069 - DNA, 80 bp, synthetic construct
  misc_feature 1..80: note = Artificially Synthesized Probe
  source 1..80: mol_type = other DNA
ctcttctgagtttgtgtactacccacaacgcgtcatacttctgagtcttacgggacttctttacgttttcattcagtaaa

SEQ ID NO: 27070 - DNA, 80 bp, synthetic construct
  misc_feature 1..80: note = Artificially Synthesized Probe
  source 1..80: mol_type = other DNA
ctcgctcctccaagactgaggtccacagagccagctcagctcagccgcatgctccacgtagccacaggggtgcagggccc

SEQ ID NO: 27071 - DNA, 80 bp, synthetic construct
  misc_feature 1..80: note = Artificially Synthesized Probe
  source 1..80: mol_type = other DNA
cagtgcagccttgactttctgggctcaggtgatattcctgcctcagcccttgagtagctgggactacaggtgcacaccac

SEQ ID NO: 27072 - DNA, 80 bp, synthetic construct
  misc_feature 1..80: note = Artificially Synthesized Probe
  source 1..80: mol_type = other DNA
acgaggggaggtcaaggcgattgtgcagagtgggctcagggaggacgtcacaggaaaagtaacaaaagaaaccaaaataa

SEQ ID NO: 27073 - DNA, 80 bp, synthetic construct
  misc_feature 1..80: note = Artificially Synthesized Probe
  source 1..80: mol_type = other DNA
aaacaggtgtcggtaggcacgctgatctccggccaccctctcacggaaaggagcattttcctggatctccggccaccctc

SEQ ID NO: 27074 - DNA, 80 bp, synthetic construct
  misc_feature 1..80: note = Artificially Synthesized Probe
  source 1..80: mol_type = other DNA
taggaagttcatctgacacttttttcaggcccattttttttctccttaaagaagtggtcatttgcttctggcttagaaga

SEQ ID NO: 27075 - DNA, 80 bp, synthetic construct
  misc_feature 1..80: note = Artificially Synthesized Probe
  source 1..80: mol_type = other DNA
tgtttaagtggatcaccctcactcggttcccaattattatcatgtgaaaaacggcagaaactgcagtcattgtgtggtta

SEQ ID NO: 27076 - DNA, 80 bp, synthetic construct
  misc_feature 1..80: note = Artificially Synthesized Probe
  source 1..80: mol_type = other DNA
ggaggcctcagatcaggtgcctttccgagtcctcacggcagcctctgcagcaggcgtcccagccacacctgacaaccttt

SEQ ID NO: 27077 - DNA, 80 bp, synthetic construct
  misc_feature 1..80: note = Artificially Synthesized Probe
  source 1..80: mol_type = other DNA
ttctagaagaggcttttggcatgtctggtggatacaaaagaggacacgagggtttattactgatgagtcattcattcatt

SEQ ID NO: 27078 - DNA, 80 bp, synthetic construct
  misc_feature 1..80: note = Artificially Synthesized Probe
  source 1..80: mol_type = other DNA
atccagggtcatcctagtgcttacctgaggcttggtgccctgagccgctagggtcctgttttaggttataaccggtattt

SEQ ID NO: 27079 - DNA, 80 bp, synthetic construct
  misc_feature 1..80: note = Artificially Synthesized Probe
  source 1..80: mol_type = other DNA
acacacagctgccgggataatctttctggagccatttttatcatgtcacttctctgcatgcggtgttttctgttgcgttt

SEQ ID NO: 27080 - DNA, 80 bp, synthetic construct
  misc_feature 1..80: note = Artificially Synthesized Probe
  source 1..80: mol_type = other DNA
tgctctgcatgaaagtcactgtgtaatcaaagactgagtctcctctcgtgtattttaaacaggaatcggggcacgtgtag

SEQ ID NO: 27081 - DNA, 80 bp, synthetic construct
  misc_feature 1..80: note = Artificially Synthesized Probe
  source 1..80: mol_type = other DNA
ggtcttgccattttgtccaggctggtcctgaactcctgggctcaagtgatctacccgcctcagctcccgaagtgctgaga

SEQ ID NO: 27082 - DNA, 80 bp, synthetic construct
  misc_feature 1..80: note = Artificially Synthesized Probe
  source 1..80: mol_type = other DNA
ttccaccacccagcaattgtcagggttgagaccattgagagtctgtttagtaatcagagttaattttggtgcttttttgt

SEQ ID NO: 27083 - DNA, 80 bp, synthetic construct
  misc_feature 1..80: note = Artificially Synthesized Probe
  source 1..80: mol_type = other DNA
gctgaaactgactcctgctctcatggcatagtttcttctctttatccttgtgttctagaaactcacaaaggtgtgcatgg

SEQ ID NO: 27084 - DNA, 80 bp, synthetic construct
  misc_feature 1..80: note = Artificially Synthesized Probe
  source 1..80: mol_type = other DNA
tgggtcccctccatgcacccttagggaacatcttctttcatgtttgaaagcagagacatcagcaaccatggagtgagaat

SEQ ID NO: 27085 - DNA, 80 bp, synthetic construct
  misc_feature 1..80: note = Artificially Synthesized Probe
  source 1..80: mol_type = other DNA
tcagcctccggagtaactgggatcacaggtacacaccactacaccaggctagcttttgaattttttgtagatacagagtt

SEQ ID NO: 27086 - DNA, 80 bp, synthetic construct
  misc_feature 1..80: note = Artificially Synthesized Probe
  source 1..80: mol_type = other DNA
agaccattcctcatagaatttgctcgaaagggtctgttgagaataagagagttggagtgacaatttatgatggaaacaca

SEQ ID NO: 27087 - DNA, 80 bp, synthetic construct
  misc_feature 1..80: note = Artificially Synthesized Probe
  source 1..80: mol_type = other DNA
tcagttatttttctaattagatacatcagtaacctctaccgtaagtaccataaaactggccccatcacacaccttgtggt

SEQ ID NO: 27088 - DNA, 80 bp, synthetic construct
  misc_feature 1..80: note = Artificially Synthesized Probe
  source 1..80: mol_type = other DNA
caaatgtcagtccagtttatattgaaaacagcaccccaaaatggtcctgaaacaacagtgaccctagggaaaaaattaat

SEQ ID NO: 27089 - DNA, 80 bp, synthetic construct
  misc_feature 1..80: note = Artificially Synthesized Probe
  source 1..80: mol_type = other DNA
gacccaaattagtgcagcaaatatattgtgatatagatgaattacagctggtgcctctgcctttatcaatgtgtccggcg

SEQ ID NO: 27090 - DNA, 80 bp, synthetic construct
  misc_feature 1..80: note = Artificially Synthesized Probe
  source 1..80: mol_type = other DNA
tgtggtcctgcatgatggaccttccactcttgctagcaaggaaataaaaacacaggaacaccagcctggtgagccacagt

SEQ ID NO: 27091 - DNA, 80 bp, synthetic construct
  misc_feature 1..80: note = Artificially Synthesized Probe
  source 1..80: mol_type = other DNA
tttcagttaagcttttcgctgtgggcttgtatggacttcagcatgaaccaggagggaaggcgttgatttttttttttttt

SEQ ID NO: 27092 - DNA, 80 bp, synthetic construct
  misc_feature 1..80: note = Artificially Synthesized Probe
  source 1..80: mol_type = other DNA
tccagcagaaaaacgctaacaagaacttgtttaaaggtgattgtcagtgtggtcagttgtgaagtgggatgccccataac

SEQ ID NO: 27093 - DNA, 80 bp, synthetic construct
  misc_feature 1..80: note = Artificially Synthesized Probe
  source 1..80: mol_type = other DNA
ttgtgcagctctacacaggagggttttcttcctgttcacaattatgaaacattgagggagagatagctttaagtacgaat

SEQ ID NO: 27094 - DNA, 80 bp, synthetic construct
  misc_feature 1..80: note = Artificially Synthesized Probe
  source 1..80: mol_type = other DNA
agttgtgacaggtcccttggtcctcctgtgctggggtcagaatcaagtagtgattgtaaaattacctaatttatgtcagt

SEQ ID NO: 27095 - DNA, 80 bp, synthetic construct
  misc_feature 1..80: note = Artificially Synthesized Probe
  source 1..80: mol_type = other DNA
aaattgaagtggcacatatagaataaacaatggaaagggcagtgtggagcgtgtccttctaaactgattgtgtctggtgg

SEQ ID NO: 27096 - DNA, 80 bp, synthetic construct
  misc_feature 1..80: note = Artificially Synthesized Probe
  source 1..80: mol_type = other DNA
gcacacacactccatgcaggaccttccagattgttctctgtaacagtaggatggcatggacacacttgtttatgctgggt

SEQ ID NO: 27097 - DNA, 80 bp, synthetic construct
  misc_feature 1..80: note = Artificially Synthesized Probe
  source 1..80: mol_type = other DNA
gaatcgccacactgacttccacaatggttgaactagtttacagtcccactaacagtgtaaaagtgttcctatttctccac

SEQ ID NO: 27098 - DNA, 80 bp, synthetic construct
  misc_feature 1..80: note = Artificially Synthesized Probe
  source 1..80: mol_type = other DNA
aggtttgtcaaagatcagatagttgtagatgtgcggcattatttctgagggctctgttctgttccattgatctatatctc

SEQ ID NO: 27099 - DNA, 80 bp, synthetic construct
  misc_feature 1..80: note = Artificially Synthesized Probe
  source 1..80: mol_type = other DNA
atctattaagataatcatgtggtttttgtctttggttctgtttatatgctggattacatttattgatttgcgtatattga

SEQ ID NO: 27100 - DNA, 80 bp, synthetic construct
  misc_feature 1..80: note = Artificially Synthesized Probe
  source 1..80: mol_type = other DNA
acatgtgctgaggagagctttacttccagagtatgtggtcagttttggaatcggtgtggtttggtgctgaaaaaaatgta

SEQ ID NO: 27101 - DNA, 80 bp, synthetic construct
  misc_feature 1..80: note = Artificially Synthesized Probe
  source 1..80: mol_type = other DNA
acccgacctttctctctggctgcccttaacattttttccttcgttttgactttggtgaatctgacagttatgtgtcttgg

SEQ ID NO: 27102 - DNA, 80 bp, synthetic construct
  misc_feature 1..80: note = Artificially Synthesized Probe
  source 1..80: mol_type = other DNA
agttatacattcttctaaatttttttcaaagttttcaacttctttacctttggtttgcgtgtcctctcgtagctcagagt

SEQ ID NO: 27103 - DNA, 80 bp, synthetic construct
  misc_feature 1..80: note = Artificially Synthesized Probe
  source 1..80: mol_type = other DNA
gcttttctcttcttttcttttcccttctttctttcttttttttttttttcagacagggtcttgctctgtcgcccaggctg

SEQ ID NO: 27104 - DNA, 80 bp, synthetic construct
  misc_feature 1..80: note = Artificially Synthesized Probe
  source 1..80: mol_type = other DNA
taacaggatttctttttcttttaaagccaactggcattccactgtgcacacaccacgttttccttattcatccattgaca

SEQ ID NO: 27105 - DNA, 80 bp, synthetic construct
  misc_feature 1..80: note = Artificially Synthesized Probe
  source 1..80: mol_type = other DNA
ccatgaggttgtatagtaccttatgattttcaatgcattttgtagctttgtttcagcccaggcatgaaaatatgtataga

SEQ ID NO: 27106 - DNA, 80 bp, synthetic construct
  misc_feature 1..80: note = Artificially Synthesized Probe
  source 1..80: mol_type = other DNA
gattaatgggtagaaatgtacagttaaaaggaaagagaaaacctggtgttcaatcaaccagcaggatgactaccattaac

SEQ ID NO: 27107 - DNA, 80 bp, synthetic construct
  misc_feature 1..80: note = Artificially Synthesized Probe
  source 1..80: mol_type = other DNA
ttcgtgagattaaccagtgaccgcatgaccgcatgataacataaagctgatgcaattgactaaagttacaacaaagattc

SEQ ID NO: 27108 - DNA, 80 bp, synthetic construct
  misc_feature 1..80: note = Artificially Synthesized Probe
  source 1..80: mol_type = other DNA
atcatagcgttatcggctaattcttaggagtaattgttaatggtaagtgctcagtgatttctgaaggagttccaaggctt

SEQ ID NO: 27109 - DNA, 80 bp, synthetic construct
  misc_feature 1..80: note = Artificially Synthesized Probe
  source 1..80: mol_type = other DNA
gtcataattaacatgggaaaggtacaataagccgcatctttatagtgttctttttctagtttgtaaacttgacctcagga

SEQ ID NO: 27110 - DNA, 80 bp, synthetic construct
  misc_feature 1..80: note = Artificially Synthesized Probe
  source 1..80: mol_type = other DNA
gcctttctgagaccggcttccctcctcccctcaggtctctctgagaccggcctccctcccctcaggcccctctgagaccg

SEQ ID NO: 27111 - DNA, 80 bp, synthetic construct
  misc_feature 1..80: note = Artificially Synthesized Probe
  source 1..80: mol_type = other DNA
agtttccctgttagcaactgcctccgagtgatgcctgcaccatttaaacttttacaaatggtatgagttggaagcatcat

SEQ ID NO: 27112 - DNA, 80 bp, synthetic construct
  misc_feature 1..80: note = Artificially Synthesized Probe
  source 1..80: mol_type = other DNA
ggaagggtggcctctaaaaaatatcttctaacttctctccgcttctccaaagagagcgcccttctccacgcctgtgcctg

SEQ ID NO: 27113 - DNA, 80 bp, synthetic construct
  misc_feature 1..80: note = Artificially Synthesized Probe
  source 1..80: mol_type = other DNA
ttttttcttaaggtgaagtatctcagcttggaaaaaagtgaagtttggttttgcgagaagaagcccagagcgggcagaag

SEQ ID NO: 27114 - DNA, 80 bp, synthetic construct
  misc_feature 1..80: note = Artificially Synthesized Probe
  source 1..80: mol_type = other DNA
aagaaataggtgaaactgggcaatttatgaagaaaggaggtttaattggctcacggttcctcaggatttgcgggaagcat

SEQ ID NO: 27115 - DNA, 80 bp, synthetic construct
  misc_feature 1..80: note = Artificially Synthesized Probe
  source 1..80: mol_type = other DNA
tgtttcccattttctggccgcaagtgtgagaaaatgtatttctcatactttgctgtggttttcatctataggagttacct

SEQ ID NO: 27116 - DNA, 80 bp, synthetic construct
  misc_feature 1..80: note = Artificially Synthesized Probe
  source 1..80: mol_type = other DNA
acgcccggaccaacatgcatttttgagtcattctttgtcattgtgaaaattggatttgtaattgtttttcttatttgctt

SEQ ID NO: 27117 - DNA, 80 bp, synthetic construct
  misc_feature 1..80: note = Artificially Synthesized Probe
  source 1..80: mol_type = other DNA
gtctgttacataatcacggtgcagctgtcactgcgttaagcaagtagttggatttgctgagttgctggatgtacctgtac

SEQ ID NO: 27118 - DNA, 80 bp, synthetic construct
  misc_feature 1..80: note = Artificially Synthesized Probe
  source 1..80: mol_type = other DNA
catttttgtttatggggctgagtgtgttttcacttcccacgcatttctattgtgcttttctatcagcaccttttacctta

SEQ ID NO: 27119 - DNA, 80 bp, synthetic construct
  misc_feature 1..80: note = Artificially Synthesized Probe
  source 1..80: mol_type = other DNA
aacacctctattattttgttttacagaaccaaggacaacatcttccttgcacttcctgtggccatgctggtttaacctgt

SEQ ID NO: 27120 - DNA, 80 bp, synthetic construct
  misc_feature 1..80: note = Artificially Synthesized Probe
  source 1..80: mol_type = other DNA
cctgttttgaggtcctccatttagtttgggagagaaaagttaatattgccagtgacttggcatacggaccacagaacact

SEQ ID NO: 27121 - DNA, 80 bp, synthetic construct
  misc_feature 1..80: note = Artificially Synthesized Probe
  source 1..80: mol_type = other DNA
aggcgtccagtgagagcaggcgtccagtgagagcagctgtccagtgagagcaggcgtccagtgagagcaggcatccagtg

SEQ ID NO: 27122 - DNA, 80 bp, synthetic construct
  misc_feature 1..80: note = Artificially Synthesized Probe
  source 1..80: mol_type = other DNA
cccttcaccccaccctttttgctcagcaaacacctacttatctttcaaaacacaagtcaaggatcacttttgcataggat

SEQ ID NO: 27123 - DNA, 80 bp, synthetic construct
  misc_feature 1..80: note = Artificially Synthesized Probe
  source 1..80: mol_type = other DNA
gggaatttgaggctgttgtgaatgaggctgctatgactatttctgttgaagtctttccatagacatttgttttcatttct

SEQ ID NO: 27124 - DNA, 80 bp, synthetic construct
  misc_feature 1..80: note = Artificially Synthesized Probe
  source 1..80: mol_type = other DNA
gccctgtgccctggcactggccaggtgatgggtgcctgcttccattggcactgaaagcaaactcttgttgattcaggacc

SEQ ID NO: 27125 - DNA, 80 bp, synthetic construct
  misc_feature 1..80: note = Artificially Synthesized Probe
  source 1..80: mol_type = other DNA
ctgcaaaaatgcattttgcaaatgatgcctatcaaacagctgatatgaactgtgaactcacttttaaagacagggtctct

SEQ ID NO: 27126 - DNA, 80 bp, synthetic construct
  misc_feature 1..80: note = Artificially Synthesized Probe
  source 1..80: mol_type = other DNA
catgtgtgtgtctgtgtgcacatatgttttctgagagtggggttgtgcaggcagggctgtgacatttgctgagaagaggt

SEQ ID NO: 27127 - DNA, 80 bp, synthetic construct
  misc_feature 1..80: note = Artificially Synthesized Probe
  source 1..80: mol_type = other DNA
actctccagcaatgtgactttcagctcattttgatgagaaataacgttcacaataggctgtttctctcctgggggttcac

SEQ ID NO: 27128 - DNA, 80 bp, synthetic construct
  misc_feature 1..80: note = Artificially Synthesized Probe
  source 1..80: mol_type = other DNA
ttgatcgccgccctgcatggaattttactagcagagacaggttgcatctttctgtaggccgtggtctctcagacggtcac

SEQ ID NO: 27129 - DNA, 80 bp, synthetic construct
  misc_feature 1..80: note = Artificially Synthesized Probe
  source 1..80: mol_type = other DNA
tacctctgcatgtattgtcttttttccactgtttattgattgaaagggaaagggatccttgaggccacctctactctagc

SEQ ID NO: 27130 - DNA, 80 bp, synthetic construct
  misc_feature 1..80: note = Artificially Synthesized Probe
  source 1..80: mol_type = other DNA
agatgcagggctgacatgctatggtttgctctgtgttctctaattcacaatttgtgcttattcgaagaaatgaacactgg

SEQ ID NO: 27131 - DNA, 80 bp, synthetic construct
  misc_feature 1..80: note = Artificially Synthesized Probe
  source 1..80: mol_type = other DNA
tatatccttcctaaattatttcatttcttctggatggtttcttagtctagggaagcccttctgatcgccagcacagttgc

SEQ ID NO: 27132 - DNA, 80 bp, synthetic construct
  misc_feature 1..80: note = Artificially Synthesized Probe
  source 1..80: mol_type = other DNA
agatactcagctcattctggttgacaaaagtagagactttacaggatcatgtaattggaagcaggatctgaggcctcaca

SEQ ID NO: 27133 - DNA, 80 bp, synthetic construct
  misc_feature 1..80: note = Artificially Synthesized Probe
  source 1..80: mol_type = other DNA
acgacatttcatcttctcatcctaaactccgagttcttctctggtgtgatgcaaaggtactcgttctcattcataagttc

SEQ ID NO: 27134 - DNA, 80 bp, synthetic construct
  misc_feature 1..80: note = Artificially Synthesized Probe
  source 1..80: mol_type = other DNA
aagtcccggctttgcttctggttgatttggataattttacgctcatctgtgtcagccttacctgtcatatggcggatgtg

SEQ ID NO: 27135 - DNA, 80 bp, synthetic construct
  misc_feature 1..80: note = Artificially Synthesized Probe
  source 1..80: mol_type = other DNA
ggaggcacccaccctaggtttttaagcagtgtgctaacactttctctttgagagaaatacttgtgaaatacttgtttagc

SEQ ID NO: 27136 - DNA, 80 bp, synthetic construct
  misc_feature 1..80: note = Artificially Synthesized Probe
  source 1..80: mol_type = other DNA
gtgtcctaaggtgatgagttttctctgtttctttgtccctcactgttcattctctaggatttgtcatgggaagtaccagt

SEQ ID NO: 27137 - DNA, 80 bp, synthetic construct
  misc_feature 1..80: note = Artificially Synthesized Probe
  source 1..80: mol_type = other DNA
atttgtttatcagtgggtttttaaactgagaacagaggaggaagaaaaatagctggcggtgatttatgaatcagttcctt

SEQ ID NO: 27138 - DNA, 80 bp, synthetic construct
  misc_feature 1..80: note = Artificially Synthesized Probe
  source 1..80: mol_type = other DNA
gctcctgccgtggtgagaggccaccagctttcggatgaagctcccatcaaccttggaatgagcaggaactatctgggggc

SEQ ID NO: 27139 - DNA, 80 bp, synthetic construct
  misc_feature 1..80: note = Artificially Synthesized Probe
  source 1..80: mol_type = other DNA
caggtgtggcattttgtggcaaagacagtgtcattagagaaggtagttttgagaatgatttcttttgctgataatgagat

SEQ ID NO: 27140 - DNA, 80 bp, synthetic construct
  misc_feature 1..80: note = Artificially Synthesized Probe
  source 1..80: mol_type = other DNA
atcttgtttctttttattagaaaaagatgcctcatgtgaaatagaaacatgaactctgctcttccaggcacccttgaggt

SEQ ID NO: 27141 - DNA, 80 bp, synthetic construct
  misc_feature 1..80: note = Artificially Synthesized Probe
  source 1..80: mol_type = other DNA
atatgaagtaagtcttattattttcatgtgcccattaggaaacaggcatggagactttatgtaactatgtcctgaggatg

SEQ ID NO: 27142 - DNA, 80 bp, synthetic construct
  misc_feature 1..80: note = Artificially Synthesized Probe
  source 1..80: mol_type = other DNA
aagaaggaggtaatagaaaggggggtgtcgcagtgcatgtgtgctgctacaaccaaatgcttgagactggtttctttata

SEQ ID NO: 27143 - DNA, 80 bp, synthetic construct
  misc_feature 1..80: note = Artificially Synthesized Probe
  source 1..80: mol_type = other DNA
actattccattcatcatgctatttgtttcctgaataccttgggtttttttttttttcattgcattgttgttatatgtaat

SEQ ID NO: 27144 - DNA, 80 bp, synthetic construct
  misc_feature 1..80: note = Artificially Synthesized Probe
  source 1..80: mol_type = other DNA
ggttaatttgaaagccttgtcttaagctctcaagttctttcttcagtttgttctattctattgctgagactttccagtgc

SEQ ID NO: 27145 - DNA, 80 bp, synthetic construct
  misc_feature 1..80: note = Artificially Synthesized Probe
  source 1..80: mol_type = other DNA
ctccttgggtggggctggctgcagctgctgtgggggatggacatgtggtttccaggccaatgaagttatattcccagggg

SEQ ID NO: 27146 - DNA, 80 bp, synthetic construct
  misc_feature 1..80: note = Artificially Synthesized Probe
  source 1..80: mol_type = other DNA
ttaatggagcagtaaccatggaacaactaaaaattttcatagatgtctttttacaagaggaactggctcagatattttat

SEQ ID NO: 27147 - DNA, 80 bp, synthetic construct
  misc_feature 1..80: note = Artificially Synthesized Probe
  source 1..80: mol_type = other DNA
tcatttccatgcgaaccctttcctgtttggattggtcatgaaagtgggaataggggagtggattacgtggtaatgaagtt

SEQ ID NO: 27148 - DNA, 80 bp, synthetic construct
  misc_feature 1..80: note = Artificially Synthesized Probe
  source 1..80: mol_type = other DNA
aattggagataacctaaatactcaagagtaagggatttgtggggctaaaataattgtgattgtttcaggccaggaagatg

SEQ ID NO: 27149 - DNA, 80 bp, synthetic construct
  misc_feature 1..80: note = Artificially Synthesized Probe
  source 1..80: mol_type = other DNA
cgcacacagcgtgccattccacggtctggtctacaaacagttggtggtgatttttatatacagtttctgtgcctacttct

SEQ ID NO: 27150 - DNA, 80 bp, synthetic construct
  misc_feature 1..80: note = Artificially Synthesized Probe
  source 1..80: mol_type = other DNA
aaatactgccagaatggagcttttcaaatagcagtctgaactgttttccagtggctttcaaagagctttcctgtggaagc

SEQ ID NO: 27151 - DNA, 80 bp, synthetic construct
  misc_feature 1..80: note = Artificially Synthesized Probe
  source 1..80: mol_type = other DNA
agaaaagactcactctggtgtgtttaagcagaagataacttgttaaaaaagaaatcaggcatcccagagacccttgactt

SEQ ID NO: 27152 - DNA, 80 bp, synthetic construct
  misc_feature 1..80: note = Artificially Synthesized Probe
  source 1..80: mol_type = other DNA
ctctggttcagcacagcccctcttgatttagatgctgccagggttccctgcaggaaatgagggagcgcgttggcttactt

SEQ ID NO: 27153 - DNA, 80 bp, synthetic construct
  misc_feature 1..80: note = Artificially Synthesized Probe
  source 1..80: mol_type = other DNA
aaactgtacacctttaggatgaacaggcacacagttaggatttgggatcagagagttctctgttgtgggctttcctgggt

SEQ ID NO: 27154 - DNA, 80 bp, synthetic construct
  misc_feature 1..80: note = Artificially Synthesized Probe
  source 1..80: mol_type = other DNA
atgtgcaccacattttctttatccatttgtctgtggacggacacttaggtggattccagatcttggctgttgtaaacaga

SEQ ID NO: 27155 - DNA, 80 bp, synthetic construct
  misc_feature 1..80: note = Artificially Synthesized Probe
  source 1..80: mol_type = other DNA
gtgcctggacagcgccacagccaagaatcatccagaccaaaatgctgaaaaaggcttcatttgtattacctaacctataa

SEQ ID NO: 27156 - DNA, 80 bp, synthetic construct
  misc_feature 1..80: note = Artificially Synthesized Probe
  source 1..80: mol_type = other DNA
agatctatgttgctcagagacaaagactatgtggaaaagaaactgaggacacatttattatcgggggacctgccccgata

SEQ ID NO: 27157 - DNA, 80 bp, synthetic construct
  misc_feature 1..80: note = Artificially Synthesized Probe
  source 1..80: mol_type = other DNA
tttttatttctactgggtaatgaatcactggcttttagttagggtttgggaatggcttctaattttttaaagtgtgttta

SEQ ID NO: 27158 - DNA, 80 bp, synthetic construct
  misc_feature 1..80: note = Artificially Synthesized Probe
  source 1..80: mol_type = other DNA
tttccttgtcaatcaaatattcaaaatgtgttcatagccatgaggttccccattacatgcgcacacctcagtttatgtac

SEQ ID NO: 27159 - DNA, 80 bp, synthetic construct
  misc_feature 1..80: note = Artificially Synthesized Probe
  source 1..80: mol_type = other DNA
ttggtttggcagatcatacgtaatttgcgattctatttatttaagttacgggtgctactgagtatgtttcttccttgttt

SEQ ID NO: 27160 - DNA, 80 bp, synthetic construct
  misc_feature 1..80: note = Artificially Synthesized Probe
  source 1..80: mol_type = other DNA
atggtatttctagttctagatccttaggaatggccacactgtctttcacaatggttgaactaatttacattcccaccaac

SEQ ID NO: 27161 - DNA, 80 bp, synthetic construct
  misc_feature 1..80: note = Artificially Synthesized Probe
  source 1..80: mol_type = other DNA
tcatttaggtgtatctgtaagtcaaggctctgcttgtctctgcgtctgattggtgaatccactgttgtatttactgagaa

SEQ ID NO: 27162 - DNA, 80 bp, synthetic construct
  misc_feature 1..80: note = Artificially Synthesized Probe
  source 1..80: mol_type = other DNA
accagttctcagcttctgaagatcacagtgtagacttctttgggggtcattattctgctgccagaggacttgttttttat

SEQ ID NO: 27163 - DNA, 80 bp, synthetic construct
  misc_feature 1..80: note = Artificially Synthesized Probe
  source 1..80: mol_type = other DNA
tgggctttaacatggcaaaatatgagccagacataaagacaagctgagaagtttaagccattatagttccatgaagttca

SEQ ID NO: 27164 - DNA, 80 bp, synthetic construct
  misc_feature 1..80: note = Artificially Synthesized Probe
  source 1..80: mol_type = other DNA
gtctggtactatgcactgaattgaattcaccaaacaactgagtagtgaggaataaaactttatttgaaatattgcctgcc

SEQ ID NO: 27165 - DNA, 80 bp, synthetic construct
  misc_feature 1..80: note = Artificially Synthesized Probe
  source 1..80: mol_type = other DNA
tcctgaacgctttttctctggtcttaaatttagacaccgaatcctgcagtgtcaggaaaagctggagaatgcagctgcgg

SEQ ID NO: 27166 - DNA, 80 bp, synthetic construct
  misc_feature 1..80: note = Artificially Synthesized Probe
  source 1..80: mol_type = other DNA
accctaacattctgtggtaggaaaacaatgttcttctcttacttggctagataatgtcatggttagaaacacagattctg

SEQ ID NO: 27167 - DNA, 80 bp, synthetic construct
  misc_feature 1..80: note = Artificially Synthesized Probe
  source 1..80: mol_type = other DNA
tactctgtgtggatcctgtagtgtggacgatggtggaaattgaattaaatttatgcagactcctgatgatgtcctaaaca

SEQ ID NO: 27168 - DNA, 80 bp, synthetic construct
  misc_feature 1..80: note = Artificially Synthesized Probe
  source 1..80: mol_type = other DNA
tattttgttaaatcaggaaaagccacatatgaccacagtgggatatcacctcacacctgttaggatggctgttactgaaa

SEQ ID NO: 27169 - DNA, 80 bp, synthetic construct
  misc_feature 1..80: note = Artificially Synthesized Probe
  source 1..80: mol_type = other DNA
cccctgtcctgatgctcatgattatgacttcttcatgtttattcaccgtttcatcacccacatgggcattccctgcctct

SEQ ID NO: 27170 - DNA, 80 bp, synthetic construct
  misc_feature 1..80: note = Artificially Synthesized Probe
  source 1..80: mol_type = other DNA
ttggcaggactcagcagtggctgtgccctttcatccagggacgctgtgtctagctctcactctctggtgatgtcagaaag

SEQ ID NO: 27171 - DNA, 80 bp, synthetic construct
  misc_feature 1..80: note = Artificially Synthesized Probe
  source 1..80: mol_type = other DNA
tggctatttcatatcacatttgtgtctcttgttttccatgctaggtatcctgattctcgagagcacaggatataatagag

SEQ ID NO: 27172 - DNA, 80 bp, synthetic construct
  misc_feature 1..80: note = Artificially Synthesized Probe
  source 1..80: mol_type = other DNA
tggtacatggtcgttctttcaatatgtagtcaaacttttaagttttcagggaacgtttacgaattatagcttctaacatt

SEQ ID NO: 27173 - DNA, 80 bp, synthetic construct
  misc_feature 1..80: note = Artificially Synthesized Probe
  source 1..80: mol_type = other DNA
cacctggttgctgtaaatggtttttgggttttgctatcttgttgctttgtgtgatgtgatgtgtgatatgattggtctgg

SEQ ID NO: 27174 - DNA, 80 bp, synthetic construct
  misc_feature 1..80: note = Artificially Synthesized Probe
  source 1..80: mol_type = other DNA
ccatgctgtccttcctcgcctatcaaggatccccactatggggactccaaaccacatggattagttttgcttgtatttca

SEQ ID NO: 27175 - DNA, 80 bp, synthetic construct
  misc_feature 1..80: note = Artificially Synthesized Probe
  source 1..80: mol_type = other DNA
ggcttttttattctatccatcctaagtggtgtgaagggtatggtattgtggtattttagggtatggtgttgtggttatga

SEQ ID NO: 27176 - DNA, 80 bp, synthetic construct
  misc_feature 1..80: note = Artificially Synthesized Probe
  source 1..80: mol_type = other DNA
tagtcttcctatctaactgtagctttgtgctattgaccttccttttgccatctcctcctcccacactcttacccaacctc

SEQ ID NO: 27177 - DNA, 80 bp, synthetic construct
  misc_feature 1..80: note = Artificially Synthesized Probe
  source 1..80: mol_type = other DNA
ctgttatggttataggaatattcaggttttctgctgcttcttgacacaattcaggaaaatgttgttttttctgaactttt

SEQ ID NO: 27178 - DNA, 80 bp, synthetic construct
  misc_feature 1..80: note = Artificially Synthesized Probe
  source 1..80: mol_type = other DNA
tttttataaattgctgagtagtattccagtataggatcgtgtggtgtgtgttccaatatagaaacgtgcggtgcctgttc

SEQ ID NO: 27179 - DNA, 80 bp, synthetic construct
  misc_feature 1..80: note = Artificially Synthesized Probe
  source 1..80: mol_type = other DNA
tataggaacatgccagggtttgttccagtctaggatcttgtggtgcatgttccagtataggaacacgtggtgtgtgttcc

SEQ ID NO: 27180 - DNA, 80 bp, synthetic construct
  misc_feature 1..80: note = Artificially Synthesized Probe
  source 1..80: mol_type = other DNA
aaaaaactaggttgtttgtattttaatgtttggttttgagacttccctctgtattctgggtctgagtcccctgtcagatg

SEQ ID NO: 27181 - DNA, 80 bp, synthetic construct
  misc_feature 1..80: note = Artificially Synthesized Probe
  source 1..80: mol_type = other DNA
ctctgttttcacttttgaaatagccaagattcacaccttagaaaatgctgcaaagaggccatgtacagagctatgtgatg

SEQ ID NO: 27182 - DNA, 80 bp, synthetic construct
  misc_feature 1..80: note = Artificially Synthesized Probe
  source 1..80: mol_type = other DNA
ggatttgtggactagtcagttcagcctctgttcaaaaaacttgtcacatttatttatccagctgccgaattgctcagatc

SEQ ID NO: 27183 - DNA, 80 bp, synthetic construct
  misc_feature 1..80: note = Artificially Synthesized Probe
  source 1..80: mol_type = other DNA
ttgtctgattgtggtaaatgagcaaatcaacatctctcagcctcgtgggcttttgtataaattgcggacagagtgttatg

SEQ ID NO: 27184 - DNA, 80 bp, synthetic construct
  misc_feature 1..80: note = Artificially Synthesized Probe
  source 1..80: mol_type = other DNA
ccacaccgccccgtgcacaggcttaactactttaaatcactggaggatgtgtttgtcatttaatttaataagaattcagt

SEQ ID NO: 27185 - DNA, 80 bp, synthetic construct
  misc_feature 1..80: note = Artificially Synthesized Probe
  source 1..80: mol_type = other DNA
tgtgtgcatgtgtctgcatatgtttgtgtgttcatgttgtatgtgcatgcatgtgtgtgcatgttcatgcatgtacgtgt

SEQ ID NO: 27186 - DNA, 80 bp, synthetic construct
  misc_feature 1..80: note = Artificially Synthesized Probe
  source 1..80: mol_type = other DNA
atattgagggtgccaagagaaaacaatttcaagaaggagggtgtttaacagcaccacgtgtcacacagacacatcaggag

SEQ ID NO: 27187 - DNA, 80 bp, synthetic construct
  misc_feature 1..80: note = Artificially Synthesized Probe
  source 1..80: mol_type = other DNA
agaagaattagtggaaaaatcttcttcttcttcttttttttttttttttttttgagatggagtttcgctcttgttgccca

SEQ ID NO: 27188 - DNA, 80 bp, synthetic construct
  misc_feature 1..80: note = Artificially Synthesized Probe
  source 1..80: mol_type = other DNA
gatgcatgagaaaaattgaaattggacttcattaaaatgaacagcttctgctctgcaaagacactcttcagaggatggaa

SEQ ID NO: 27189 - DNA, 80 bp, synthetic construct
  misc_feature 1..80: note = Artificially Synthesized Probe
  source 1..80: mol_type = other DNA
tggacaagaagtgctgagaaggaatgatctaccaggctgtgaaaggacgtggagcaaccgtaaatgcacgtgactacgtg

SEQ ID NO: 27190 - DNA, 80 bp, synthetic construct
  misc_feature 1..80: note = Artificially Synthesized Probe
  source 1..80: mol_type = other DNA
aactggggtggggaggaggggttatatgtgaactctgtgaactttgtgctcaacttttctgtaagcctataaaaaatagt

SEQ ID NO: 27191 - DNA, 80 bp, synthetic construct
  misc_feature 1..80: note = Artificially Synthesized Probe
  source 1..80: mol_type = other DNA
gtttataaacgcacacatgagacacatgggcttatgtgggcttcccgtaacatttccagtattgaggtgttgctgttgct

SEQ ID NO: 27192 - DNA, 80 bp, synthetic construct
  misc_feature 1..80: note = Artificially Synthesized Probe
  source 1..80: mol_type = other DNA
aatcatgccgtaatatcataccaaatcatgacgcctatgaagaaatggtaaagtaggactagggtggaggagcaatgggc

SEQ ID NO: 27193 - DNA, 80 bp, synthetic construct
  misc_feature 1..80: note = Artificially Synthesized Probe
  source 1..80: mol_type = other DNA
atggaattccaaacaacccaggaataattcaggaaatgacgagaaacatatttcacagtgttagctatggcggttgcaaa

SEQ ID NO: 27194 - DNA, 80 bp, synthetic construct
  misc_feature 1..80: note = Artificially Synthesized Probe
  source 1..80: mol_type = other DNA
agactccagttttattcctggaaataactgtgtgatcctgggaaaacctcttgactccaccatagcctcagttttctcac

SEQ ID NO: 27195 - DNA, 80 bp, synthetic construct
  misc_feature 1..80: note = Artificially Synthesized Probe
  source 1..80: mol_type = other DNA
ggtgcgcacaccacttggaattaaaatttcaggatgctggatattaaccgctgtcagatgcatgctttgctagtattttc

SEQ ID NO: 27196 - DNA, 80 bp, synthetic construct
  misc_feature 1..80: note = Artificially Synthesized Probe
  source 1..80: mol_type = other DNA
ttgggagagacttggattatcaagctacttccacatgatacgatattttaattcacttccgctcaaatgactgggagtga

SEQ ID NO: 27197 - DNA, 80 bp, synthetic construct
  misc_feature 1..80: note = Artificially Synthesized Probe
  source 1..80: mol_type = other DNA
cagttaataccaaatgacagagaggagagttattgctactaaacgctgagctcatgccacaggctcatgcttttatatta

SEQ ID NO: 27198 - DNA, 80 bp, synthetic construct
  misc_feature 1..80: note = Artificially Synthesized Probe
  source 1..80: mol_type = other DNA
ctaatccagttacttttatgggtctctttttaaattttttatggggaagaaactgtgttcttgggacaggatggtgtttc

SEQ ID NO: 27199 - DNA, 80 bp, synthetic construct
  misc_feature 1..80: note = Artificially Synthesized Probe
  source 1..80: mol_type = other DNA
ctatttgctttatgcaagaaaaatgctgagttttctttgggtctttcctggatgcaaccagctctttgctttttgcagct

SEQ ID NO: 27200 - DNA, 80 bp, synthetic construct
  misc_feature 1..80: note = Artificially Synthesized Probe
  source 1..80: mol_type = other DNA
atctgaggtgatagtttaatatttttgtattattaaaaaattcagcaatggcttcatccatcatgcatccattgcttaaa

SEQ ID NO: 27201 - DNA, 80 bp, synthetic construct
  misc_feature 1..80: note = Artificially Synthesized Probe
  source 1..80: mol_type = other DNA
gccgcgcaggttccagtcattgtgtctcctggtgttttgcgttctccacaatgaagtgaatatgtgacaatttaaaaact

SEQ ID NO: 27202 - DNA, 80 bp, synthetic construct
  misc_feature 1..80: note = Artificially Synthesized Probe
  source 1..80: mol_type = other DNA
tcaggagagcagggccatttagaaactggctgagaaagataccgtgcctaatttacaaaaaaaaaaaaaatgatttgaga

SEQ ID NO: 27203 - DNA, 80 bp, synthetic construct
  misc_feature 1..80: note = Artificially Synthesized Probe
  source 1..80: mol_type = other DNA
gtgaccatcctgtggtcattcccctaattccaaaatgcgtaactgtggtagacgtatctggcacctgagctcaacatttt

SEQ ID NO: 27204 - DNA, 80 bp, synthetic construct
  misc_feature 1..80: note = Artificially Synthesized Probe
  source 1..80: mol_type = other DNA
aggtgggcccacctacttgttggcatgtatattaagtaattcttattaatatttctttcaaggtcttcatcccttcatgc

SEQ ID NO: 27205 - DNA, 80 bp, synthetic construct
  misc_feature 1..80: note = Artificially Synthesized Probe
  source 1..80: mol_type = other DNA
taccccatactactcacccattcaaagtgtacaatccgctggcttttattatattcaaagaggtacatgcaactatcacc

SEQ ID NO: 27206 - DNA, 80 bp, synthetic construct
  misc_feature 1..80: note = Artificially Synthesized Probe
  source 1..80: mol_type = other DNA
gaatgccttttacttctcttcattaccctggctaggaccaccagcacaattttgaaatgaaggagtgagaaccaacatcc

SEQ ID NO: 27207 - DNA, 80 bp, synthetic construct
  misc_feature 1..80: note = Artificially Synthesized Probe
  source 1..80: mol_type = other DNA
atttcctttgggatttgttctttgtcccattggttatttgggagtacattgtttaatttacacaaactggtgaatttcca

SEQ ID NO: 27208 - DNA, 80 bp, synthetic construct
  misc_feature 1..80: note = Artificially Synthesized Probe
  source 1..80: mol_type = other DNA
ctccactaggcagggtagagttggatcttttttaaaaattaagtctgacaacatgcttcttttgattatattatttaatc

SEQ ID NO: 27209 - DNA, 80 bp, synthetic construct
  misc_feature 1..80: note = Artificially Synthesized Probe
  source 1..80: mol_type = other DNA
acatagctttgcttccactaaccctcttcgtgctgttattgacaaatatgttacacatatatttttatgtttgataggtc

SEQ ID NO: 27210 - DNA, 80 bp, synthetic construct
  misc_feature 1..80: note = Artificially Synthesized Probe
  source 1..80: mol_type = other DNA
gggaacatctttatgactcctttgaaatctttttctaataaacctggcctctggtcacttccacaggtagtttgtgttgc

SEQ ID NO: 27211 - DNA, 80 bp, synthetic construct
  misc_feature 1..80: note = Artificially Synthesized Probe
  source 1..80: mol_type = other DNA
ccttaggtttaagcttcttcatattctgtgcaaatgaggtttggctcctttggaaagagattgtgttccacggctctgaa

SEQ ID NO: 27212 - DNA, 80 bp, synthetic construct
  misc_feature 1..80: note = Artificially Synthesized Probe
  source 1..80: mol_type = other DNA
gattaaatgccatctctcaggagtgagttctcctgggaatgggttgctttccaagaaggtggattttataaagtgaggcc

SEQ ID NO: 27213 - DNA, 80 bp, synthetic construct
  misc_feature 1..80: note = Artificially Synthesized Probe
  source 1..80: mol_type = other DNA
actttatgtgagctctcattgttacctggactgtcttctccatgtcattgtcaagcacttctccattctccttccgtgtc

SEQ ID NO: 27214 - DNA, 80 bp, synthetic construct
  misc_feature 1..80: note = Artificially Synthesized Probe
  source 1..80: mol_type = other DNA
actgtaactcctgctcgttcatggactcaacgcagatgtaatttttgctaagaagttcctccctcctaaattagggtggg

SEQ ID NO: 27215 - DNA, 80 bp, synthetic construct
  misc_feature 1..80: note = Artificially Synthesized Probe
  source 1..80: mol_type = other DNA
acacacacacttttttttttttttttagtagagacagggtttcaccatgttggccaggctggtctcgaactcctgacctt

SEQ ID NO: 27216 - DNA, 80 bp, synthetic construct
  misc_feature 1..80: note = Artificially Synthesized Probe
  source 1..80: mol_type = other DNA
tctccctgcggaggcctctcctgcgcgcaccctcgcctgatccagcggtacctctccctgcggaggcctctcctgcgggc

SEQ ID NO: 27217 - DNA, 80 bp, synthetic construct
  misc_feature 1..80: note = Artificially Synthesized Probe
  source 1..80: mol_type = other DNA
gcctgggcctacattggcctagggacagttgtgaagcttatcttgttttgattccctggtcacatagaaatttagaataa

SEQ ID NO: 27218 - DNA, 80 bp, synthetic construct
  misc_feature 1..80: note = Artificially Synthesized Probe
  source 1..80: mol_type = other DNA
tgcaaaaattttctcccattctgtaggttgcctgttcatttcgatgatagtttcttttgctctgcacaagctctttagtt

SEQ ID NO: 27219 - DNA, 80 bp, synthetic construct
  misc_feature 1..80: note = Artificially Synthesized Probe
  source 1..80: mol_type = other DNA
agtttttgggctgaggtgatgaagttttataaatataaaatcatgtaatctgcaaacagagataacttgacttcctctct

SEQ ID NO: 27220 - DNA, 80 bp, synthetic construct
  misc_feature 1..80: note = Artificially Synthesized Probe
  source 1..80: mol_type = other DNA
gtcattttttattgtgtctttgattcttctctctctttttctttattagtctagctagcagtctattttgttaatttttt

SEQ ID NO: 27221 - DNA, 80 bp, synthetic construct
  misc_feature 1..80: note = Artificially Synthesized Probe
  source 1..80: mol_type = other DNA
ctgctttttttttttgctttccatttgcttggtaaatattcctccatccctttattttgagcctacatgtgtctttgcat

SEQ ID NO: 27222 - DNA, 80 bp, synthetic construct
  misc_feature 1..80: note = Artificially Synthesized Probe
  source 1..80: mol_type = other DNA
acctgatcctccatccagttctgcacgctgacttgtgatcatttggagaagataagaccctctggccttttgggttttca

SEQ ID NO: 27223 - DNA, 80 bp, synthetic construct
  misc_feature 1..80: note = Artificially Synthesized Probe
  source 1..80: mol_type = other DNA
acatgtgtctgggctgcctgggttcctcagaactcccaggaggagaggctaagtctgctggtccagagactgtggccacc

SEQ ID NO: 27224 - DNA, 80 bp, synthetic construct
  misc_feature 1..80: note = Artificially Synthesized Probe
  source 1..80: mol_type = other DNA
tttcagagcgtttgtgaccacttgtcgttgcaggcgcctggatgagtgtttattctgtgattctttgacttccttgacca

SEQ ID NO: 27225 - DNA, 80 bp, synthetic construct
  misc_feature 1..80: note = Artificially Synthesized Probe
  source 1..80: mol_type = other DNA
aggaccaggcgtgtgcatgtcaggaagggtattttatttcatcttaattttgagaaatgctcaggatttcaatagaaaag

SEQ ID NO: 27226 - DNA, 80 bp, synthetic construct
  misc_feature 1..80: note = Artificially Synthesized Probe
  source 1..80: mol_type = other DNA
atggggcagatgctgtggaaaatggtgtatggagattcatcaaaaactcgagacggaaccaccttgtgacccagccgttc

SEQ ID NO: 27227 - DNA, 80 bp, synthetic construct
  misc_feature 1..80: note = Artificially Synthesized Probe
  source 1..80: mol_type = other DNA
caggtttaggagggaatttagggtttttcctgctgcagcttcttagtcctacagaaatgttagatgaatgcagtttctaa

SEQ ID NO: 27228 - DNA, 80 bp, synthetic construct
  misc_feature 1..80: note = Artificially Synthesized Probe
  source 1..80: mol_type = other DNA
atccagcggccctcctgcctgcaggtctatccaggactctgttaaccgtcgttcttttggaaaatgtttgcagagcacca

SEQ ID NO: 27229 - DNA, 80 bp, synthetic construct
  misc_feature 1..80: note = Artificially Synthesized Probe
  source 1..80: mol_type = other DNA
gggtgtggtggggagagcagagtgacagctggcaggggtggggtggggagagtggagtggcggctggcaggggcggggtg

SEQ ID NO: 27230 - DNA, 80 bp, synthetic construct
  misc_feature 1..80: note = Artificially Synthesized Probe
  source 1..80: mol_type = other DNA
tagagccacattgcatggggccttcaggccctttaacgatgaaatgtttggggccattgcagtgggttttgagcagaata

SEQ ID NO: 27231 - DNA, 80 bp, synthetic construct
  misc_feature 1..80: note = Artificially Synthesized Probe
  source 1..80: mol_type = other DNA
ggggagatgatgtatttggggaagtcacactaattttggggtacccatccgacatctaaatggtgccatggactgaacat

SEQ ID NO: 27232 - DNA, 80 bp, synthetic construct
  misc_feature 1..80: note = Artificially Synthesized Probe
  source 1..80: mol_type = other DNA
cgatgtatctgcattgtaactggaaagctttaggaaggcctgggaggacttcaactccagatgaatttcacggtcatttt

SEQ ID NO: 27233 - DNA, 80 bp, synthetic construct
  misc_feature 1..80: note = Artificially Synthesized Probe
  source 1..80: mol_type = other DNA
ggaaggggcctggagaagccgcaggtttggacgtggattttgaggcgcctgccttttgggactccgcgtgcttccagccc

SEQ ID NO: 27234 - DNA, 80 bp, synthetic construct
  misc_feature 1..80: note = Artificially Synthesized Probe
  source 1..80: mol_type = other DNA
tggcctctctggctgtgtgtgtggtggcaggcacctcatctcttaattacttttaatgccatagaagggaggccagagat

SEQ ID NO: 27235 - DNA, 80 bp, synthetic construct
  misc_feature 1..80: note = Artificially Synthesized Probe
  source 1..80: mol_type = other DNA
catcctctcactcctggtgttcattttggttacaccttggaggtggtggtcttgccggcatataattactattctttgtc

SEQ ID NO: 27236 - DNA, 80 bp, synthetic construct
  misc_feature 1..80: note = Artificially Synthesized Probe
  source 1..80: mol_type = other DNA
atctttaaaaaaaattgttttttaattagctgggcatgatgttgtgtacctgcagtcccagctactcaggaggctgatgt

SEQ ID NO: 27237 - DNA, 80 bp, synthetic construct
  misc_feature 1..80: note = Artificially Synthesized Probe
  source 1..80: mol_type = other DNA
atcattcctactggataggagtcctcgctgagcccccatggtatctggcacagagcggacgtgtgttctgggactgtgtt

SEQ ID NO: 27238 - DNA, 80 bp, synthetic construct
  misc_feature 1..80: note = Artificially Synthesized Probe
  source 1..80: mol_type = other DNA
aggcagtcacaggttggttggggccaaagattacaaacaaggatgttttatgaagctactcagcaggttggggaatagct

SEQ ID NO: 27239 - DNA, 80 bp, synthetic construct
  misc_feature 1..80: note = Artificially Synthesized Probe
  source 1..80: mol_type = other DNA
tgtgagcatgtggtgtgtggacagtgtgaccgggcacccagatttcaggttttaactgattttcattaattaaaattaca

SEQ ID NO: 27240 - DNA, 80 bp, synthetic construct
  misc_feature 1..80: note = Artificially Synthesized Probe
  source 1..80: mol_type = other DNA
attgaacttttaaaagtgcctttgggcaataaggataatttcattctcctctgcggccttctgtaaatccttcagagagg

SEQ ID NO: 27241 - DNA, 80 bp, synthetic construct
  misc_feature 1..80: note = Artificially Synthesized Probe
  source 1..80: mol_type = other DNA
cccagccccaccctcccgcccccaagcacgtgtcctactgacctcacatgcatgtcttgtgacctctcgcggccctttcc

SEQ ID NO: 27242 - DNA, 80 bp, synthetic construct
  misc_feature 1..80: note = Artificially Synthesized Probe
  source 1..80: mol_type = other DNA
aggcagctctgtgcacatgagaagcatgtgattgaacttttaattccacattttgcacagcatttgctaggtactaaaac

SEQ ID NO: 27243 - DNA, 80 bp, synthetic construct
  misc_feature 1..80: note = Artificially Synthesized Probe
  source 1..80: mol_type = other DNA
gcattcccattccagaaacggcatagatgataatcacactcacctgattaaccttttcaatgaaaaatgtgtgtcatcaa

SEQ ID NO: 27244 - DNA, 80 bp, synthetic construct
  misc_feature 1..80: note = Artificially Synthesized Probe
  source 1..80: mol_type = other DNA
ggctggtggttgtgaggaagtgttttgcctgacctttaaggaaacatgacggagaaaaagaaggtctaaaaaaaacttcg

SEQ ID NO: 27245 - DNA, 80 bp, synthetic construct
  misc_feature 1..80: note = Artificially Synthesized Probe
  source 1..80: mol_type = other DNA
cttccactggggcctcaacgcagaggacattagccgggcaatttcctcaaaattatttttatagtatagaatgtttcact

SEQ ID NO: 27246 - DNA, 80 bp, synthetic construct
  misc_feature 1..80: note = Artificially Synthesized Probe
  source 1..80: mol_type = other DNA
gcagcatcaccatggcggattctgcattacgggtgcttgaccacaattagaaagaagattaactttgggatgaatcatca

SEQ ID NO: 27247 - DNA, 80 bp, synthetic construct
  misc_feature 1..80: note = Artificially Synthesized Probe
  source 1..80: mol_type = other DNA
tgcgttttccattatggattctgtttcttaggatgcgtgtgtaatgtatgttggaaggatgctggagaatcttggaagga

SEQ ID NO: 27248 - DNA, 80 bp, synthetic construct
  misc_feature 1..80: note = Artificially Synthesized Probe
  source 1..80: mol_type = other DNA
agcagggaaaactttgggagctgttcagttcctagatgatctggcttccttcccttgattattaatgaccttcacttcag

SEQ ID NO: 27249 - DNA, 80 bp, synthetic construct
  misc_feature 1..80: note = Artificially Synthesized Probe
  source 1..80: mol_type = other DNA
tttagttgtgcattggcaaaatgaaatattggattgaaatgtaacctttgtaacagagtgcttcatttttaaaaatttac

SEQ ID NO: 27250 - DNA, 80 bp, synthetic construct
  misc_feature 1..80: note = Artificially Synthesized Probe
  source 1..80: mol_type = other DNA
cctgtgacttcattgtcccacagctgtgcctcagatacaggtttgcgctaagtcagtatgtgatactatatgaccctgaa

SEQ ID NO: 27251 - DNA, 80 bp, synthetic construct
  misc_feature 1..80: note = Artificially Synthesized Probe
  source 1..80: mol_type = other DNA
attgcacggttatagatggtggccctattaaccccagagcaggttaatgtacgtatttatctaggtttgtggtttacagc

SEQ ID NO: 27252 - DNA, 80 bp, synthetic construct
  misc_feature 1..80: note = Artificially Synthesized Probe
  source 1..80: mol_type = other DNA
aaaaaaagaaacccatcgctggaatgagactgttgtcagagtctcggtggcacctgccacagccgccacccactcccctg

SEQ ID NO: 27253 - DNA, 80 bp, synthetic construct
  misc_feature 1..80: note = Artificially Synthesized Probe
  source 1..80: mol_type = other DNA
aataaatttaaaaaaaagaaactcaatccaggcttctccagtgtcaatgcagaggggcacccaagtcacccacttgttgt

SEQ ID NO: 27254 - DNA, 80 bp, synthetic construct
  misc_feature 1..80: note = Artificially Synthesized Probe
  source 1..80: mol_type = other DNA
caggtgcgagctactgcacccagactgattctcttttgttattgttgttactggacagcgtctccagaatattcttttgt

SEQ ID NO: 27255 - DNA, 80 bp, synthetic construct
  misc_feature 1..80: note = Artificially Synthesized Probe
  source 1..80: mol_type = other DNA
gtcgcttagatgggcttttataaccatgcacgtttagttctagactgttttctgattgtgtagactgggtacagtgtgat

SEQ ID NO: 27256 - DNA, 80 bp, synthetic construct
  misc_feature 1..80: note = Artificially Synthesized Probe
  source 1..80: mol_type = other DNA
atggattataagcatcagctactgtgtctggccaaaaagctttgctctattttgagagtaaaaagtacttggcatctaaa

SEQ ID NO: 27257 - DNA, 80 bp, synthetic construct
  misc_feature 1..80: note = Artificially Synthesized Probe
  source 1..80: mol_type = other DNA
cagcaggacagcaggtgtgtggtataaaccatatgtttgcacagtttaggcacaggaagcccctgttatcagggaatagc

SEQ ID NO: 27258 - DNA, 80 bp, synthetic construct
  misc_feature 1..80: note = Artificially Synthesized Probe
  source 1..80: mol_type = other DNA
aaccttccacctgcagctccatcttccacatcacaggtttacctaagtgtacatttcactctttgtaacttcgcaacttg

SEQ ID NO: 27259 - DNA, 80 bp, synthetic construct
  misc_feature 1..80: note = Artificially Synthesized Probe
  source 1..80: mol_type = other DNA
aatgacgatctgtccttgttttcagaggcgccgagtttttggtgttttcatggaagttggtggaggctgtgtaagggtgt

SEQ ID NO: 27260 - DNA, 80 bp, synthetic construct
  misc_feature 1..80: note = Artificially Synthesized Probe
  source 1..80: mol_type = other DNA
tggcagtttcattgctaaacaggtattcaggtggcacataaatcaaattggagagacttgatttatggccactgttctct

SEQ ID NO: 27261 - DNA, 80 bp, synthetic construct
  misc_feature 1..80: note = Artificially Synthesized Probe
  source 1..80: mol_type = other DNA
cctgtgcttgtatcagatgtcaggggtctgttcctggagaaataatgtaggaggaaagcgtaactaattaagggaaaatg

SEQ ID NO: 27262 - DNA, 80 bp, synthetic construct
  misc_feature 1..80: note = Artificially Synthesized Probe
  source 1..80: mol_type = other DNA
accgcgcctggccaatccaggttattcttactaaatccagacgttgtgaaggcctgcttgctattaatatattgataatt

SEQ ID NO: 27263 - DNA, 80 bp, synthetic construct
  misc_feature 1..80: note = Artificially Synthesized Probe
  source 1..80: mol_type = other DNA
aggtgtattagggccctccagagaagtggaagtcgttggatatatgtgggtgtatttgtttacacatatgtagaccccat

SEQ ID NO: 27264 - DNA, 80 bp, synthetic construct
  misc_feature 1..80: note = Artificially Synthesized Probe
  source 1..80: mol_type = other DNA
tgtgtctcaccgcacctgagtaaacagatcccaggaaccctgaaaacaagcagaatctgtgcccattgctctcctggctc

SEQ ID NO: 27265 - DNA, 80 bp, synthetic construct
  misc_feature 1..80: note = Artificially Synthesized Probe
  source 1..80: mol_type = other DNA
aggtctcagggtggaattgttcacgtcaggaatgtgctttgagcaggtggctgattttgaggtccttaaagttcaaagtc

SEQ ID NO: 27266 - DNA, 80 bp, synthetic construct
  misc_feature 1..80: note = Artificially Synthesized Probe
  source 1..80: mol_type = other DNA
aaaggcatctgtgaagggtgggatgcactcagaagacagcataaggtttttgatttagaggaataaaaaaaaataaagca

SEQ ID NO: 27267 - DNA, 80 bp, synthetic construct
  misc_feature 1..80: note = Artificially Synthesized Probe
  source 1..80: mol_type = other DNA
taaacatcccagaaccccgccattccccctctaaacatcccagacccccccattccccctctaaacatcccacacacccc

SEQ ID NO: 27268 - DNA, 80 bp, synthetic construct
  misc_feature 1..80: note = Artificially Synthesized Probe
  source 1..80: mol_type = other DNA
caatgctgagtcttttacaatagattgccaggcagacagagatattctagttagtggaggaaacctgcaaagactacctg

SEQ ID NO: 27269 - DNA, 80 bp, synthetic construct
  misc_feature 1..80: note = Artificially Synthesized Probe
  source 1..80: mol_type = other DNA
tctgggattcctggcccttctgttaagaatcccaggtatctcggccgttatttttaggcactgccacttgtcatgatgtt

SEQ ID NO: 27270 - DNA, 80 bp, synthetic construct
  misc_feature 1..80: note = Artificially Synthesized Probe
  source 1..80: mol_type = other DNA
acactttcctgaccaaagtccataaacacacatgcagtccagcagccacgtgtgttctgaaatagaaaagggtgacaaat

SEQ ID NO: 27271 - DNA, 80 bp, synthetic construct
  misc_feature 1..80: note = Artificially Synthesized Probe
  source 1..80: mol_type = other DNA
acagtggcagctgctgtctgttcccttcagagaaggaagctttggcttatgggtggtcgggttgtgacgggaattcaggc

SEQ ID NO: 27272 - DNA, 80 bp, synthetic construct
  misc_feature 1..80: note = Artificially Synthesized Probe
  source 1..80: mol_type = other DNA
gccgtgggcacgaggggagggtgagggcagagcctgctatggagacacctggccgtgggcacgaggggagggtgagggca

SEQ ID NO: 27273 - DNA, 80 bp, synthetic construct
  misc_feature 1..80: note = Artificially Synthesized Probe
  source 1..80: mol_type = other DNA
tcaaggctattctgtctgaagaagaacagatcagacgcacaggtgttctcggctataagagcaacagaaggaaagagtga

SEQ ID NO: 27274 - DNA, 80 bp, synthetic construct
  misc_feature 1..80: note = Artificially Synthesized Probe
  source 1..80: mol_type = other DNA
ttccctcaaagcatagtggttcctgtttgttggatactcggtggaattccacataaacctctgggttggctttttgtttt

SEQ ID NO: 27275 - DNA, 80 bp, synthetic construct
  misc_feature 1..80: note = Artificially Synthesized Probe
  source 1..80: mol_type = other DNA
tggatgagagcatttagtcaactttttcatgacttttgaataaaagtgctgaccaggagaatgtttccagcagtgtagga

SEQ ID NO: 27276 - DNA, 80 bp, synthetic construct
  misc_feature 1..80: note = Artificially Synthesized Probe
  source 1..80: mol_type = other DNA
tttagaatgtcgcatgattttcaaagccaaaaacaacacagtggaaagaccctcagctctgtggatggtggggtgcattt

SEQ ID NO: 27277 - DNA, 80 bp, synthetic construct
  misc_feature 1..80: note = Artificially Synthesized Probe
  source 1..80: mol_type = other DNA
tcactatgttgcccatagagagcttgaggttggatccaagttctcaaggggacggaggtgaagaagaaagaccaggcctg

SEQ ID NO: 27278 - DNA, 80 bp, synthetic construct
  misc_feature 1..80: note = Artificially Synthesized Probe
  source 1..80: mol_type = other DNA
ggagtgggaggtgcacacacaggggctggggtgcctgggagtgggaggtgcacacacagaggggctggggtgcctgggag

SEQ ID NO: 27279 - DNA, 80 bp, synthetic construct
  misc_feature 1..80: note = Artificially Synthesized Probe
  source 1..80: mol_type = other DNA
ttacttaagttctctgagtttccatttcacctttaaaattgggagaacaataatggcgacattctgagctggtcaggtgg

SEQ ID NO: 27280 - DNA, 80 bp, synthetic construct
  misc_feature 1..80: note = Artificially Synthesized Probe
  source 1..80: mol_type = other DNA
gcagatgctgtctggttttagcatagactgaggtttgggcagttaggatctgtgtatctaggattttgggaaaagccagt

SEQ ID NO: 27281 - DNA, 80 bp, synthetic construct
  misc_feature 1..80: note = Artificially Synthesized Probe
  source 1..80: mol_type = other DNA
aaatcctccctttctttttttcctcattggaagtttactgaaacctctggcattaaactcagcatttacagggctgacat

SEQ ID NO: 27282 - DNA, 80 bp, synthetic construct
  misc_feature 1..80: note = Artificially Synthesized Probe
  source 1..80: mol_type = other DNA
tgagcttgcgtgactgaccacaatccgaattcctgactttcagaagaaaatcaggtgctcagctggcatcacattgttta

SEQ ID NO: 27283 - DNA, 80 bp, synthetic construct
  misc_feature 1..80: note = Artificially Synthesized Probe
  source 1..80: mol_type = other DNA
tgtacacgatcatgtggaggagctggtagtaaattttgatctaacgcactatttagtgaaacattatggattagattgaa

SEQ ID NO: 27284 - DNA, 80 bp, synthetic construct
  misc_feature 1..80: note = Artificially Synthesized Probe
  source 1..80: mol_type = other DNA
actgattttcctagtgatctgtggagtgatagttggtcacttctgggtgtttaacacaatctatgtgttagatgtgacta

SEQ ID NO: 27285 - DNA, 80 bp, synthetic construct
  misc_feature 1..80: note = Artificially Synthesized Probe
  source 1..80: mol_type = other DNA
tctctctgcgtgtgtctctttgcctacattaatgttgttttgtctgaaatatgtgtgttgaagttcccatgtttccttga

SEQ ID NO: 27286 - DNA, 80 bp, synthetic construct
  misc_feature 1..80: note = Artificially Synthesized Probe
  source 1..80: mol_type = other DNA
atttctagattgaaattttgcatggtaacagcagacaggtaatacctgtctaggtggctgccaccgcaaagcccatgtta

SEQ ID NO: 27287 - DNA, 80 bp, synthetic construct
  misc_feature 1..80: note = Artificially Synthesized Probe
  source 1..80: mol_type = other DNA
aggggctccctcacacaggacgtaattttgcgggaaggattttcatgttgcgctggccttgcacttgctgcgacaggccc

SEQ ID NO: 27288 - DNA, 80 bp, synthetic construct
  misc_feature 1..80: note = Artificially Synthesized Probe
  source 1..80: mol_type = other DNA
ggggcctgagtgcagaggaaggaggtgaagtaagcggtgacagtgggttcctcaaggcgccgtggaaggcgaggctgcgt

SEQ ID NO: 27289 - DNA, 80 bp, synthetic construct
  misc_feature 1..80: note = Artificially Synthesized Probe
  source 1..80: mol_type = other DNA
agccaagttgccatttgtcggcaggaaaaggaggaactttcctagttcaggcacaggtgcggaccaggccgttgggcgtg

SEQ ID NO: 27290 - DNA, 80 bp, synthetic construct
  misc_feature 1..80: note = Artificially Synthesized Probe
  source 1..80: mol_type = other DNA
ctgaagttaattttgtgatctcaagatgcagcttcttgataacatggtaccaaaaatcatgaggaaatacagcatggccc

SEQ ID NO: 27291 - DNA, 80 bp, synthetic construct
  misc_feature 1..80: note = Artificially Synthesized Probe
  source 1..80: mol_type = other DNA
tattccattgtgtgcctataccataatttacttcaattataggatatctatcttgtttctgatattttgttactttaaaa

SEQ ID NO: 27292 - DNA, 80 bp, synthetic construct
  misc_feature 1..80: note = Artificially Synthesized Probe
  source 1..80: mol_type = other DNA
cttgatgctattactaagggccaacaattccccagagcttctgtttatgtctcttgatgtttattgcattcgaaattaaa

SEQ ID NO: 27293 - DNA, 80 bp, synthetic construct
  misc_feature 1..80: note = Artificially Synthesized Probe
  source 1..80: mol_type = other DNA
gcattctcacacaaatatggagttaggccatattgataaacactttgtcattccttatgttgaaatctgttggtctgttt

SEQ ID NO: 27294 - DNA, 80 bp, synthetic construct
  misc_feature 1..80: note = Artificially Synthesized Probe
  source 1..80: mol_type = other DNA
tttggtcagtcactcagatggctgaaaagagctgagatttaataaaactgatcttggttgatgcctcatcaaggatgttc

SEQ ID NO: 27295 - DNA, 80 bp, synthetic construct
  misc_feature 1..80: note = Artificially Synthesized Probe
  source 1..80: mol_type = other DNA
caagcaaatagcattccacagaacggtttcattttcagtacagaactgccagtgcctgttgtaccaatttgtctctgctt

SEQ ID NO: 27296 - DNA, 80 bp, synthetic construct
  misc_feature 1..80: note = Artificially Synthesized Probe
  source 1..80: mol_type = other DNA
tggctttaaccttttgggccctgtgactttgggaggcttattaacccctcttccttcatagccctcttcagaaagatggg

SEQ ID NO: 27297 - DNA, 80 bp, synthetic construct
  misc_feature 1..80: note = Artificially Synthesized Probe
  source 1..80: mol_type = other DNA
aacacccctgaaacctgatattttagactgctgcctccgttttcctacacccacattccatttacagatctaatacatgt

SEQ ID NO: 27298 - DNA, 80 bp, synthetic construct
  misc_feature 1..80: note = Artificially Synthesized Probe
  source 1..80: mol_type = other DNA
cgggcagcagtgttcatctttgtgctcctgtcattatttcagagggatacgttgttgcaatttcttagtgttgaaatagt

SEQ ID NO: 27299 - DNA, 80 bp, synthetic construct
  misc_feature 1..80: note = Artificially Synthesized Probe
  source 1..80: mol_type = other DNA
tggggatgagagatggaagcggctcattcagacatctttctggaatagtgttttgcaggcattccagtgattgtaatgcc

SEQ ID NO: 27300 - DNA, 80 bp, synthetic construct
  misc_feature 1..80: note = Artificially Synthesized Probe
  source 1..80: mol_type = other DNA
tgggaaactgttactggttgccagtcatgtgacattgtgagagttaattcatcatgggtgtgagaggtctctgtgagaga

SEQ ID NO: 27301 - DNA, 80 bp, synthetic construct
  misc_feature 1..80: note = Artificially Synthesized Probe
  source 1..80: mol_type = other DNA
gctactctcacttgtgttcatacaaagaccgttaattgaatttgttgtttagtcagctggtatttacttatctgatagat

SEQ ID NO: 27302 - DNA, 80 bp, synthetic construct
  misc_feature 1..80: note = Artificially Synthesized Probe
  source 1..80: mol_type = other DNA
tcatcagctcatttattttcaggcttggatccaagaaccgtccagtttgactccacacaattttgcatatttcacctgta

SEQ ID NO: 27303 - DNA, 80 bp, synthetic construct
  misc_feature 1..80: note = Artificially Synthesized Probe
  source 1..80: mol_type = other DNA
tctgaggaattagttggaacaagataccagtgaaagggtctcccatctcaagtagtaaaattacagctaaaaacagatgg

SEQ ID NO: 27304 - DNA, 80 bp, synthetic construct
  misc_feature 1..80: note = Artificially Synthesized Probe
  source 1..80: mol_type = other DNA
gtattttggaatgtgagctccctgggcagattacacaaaagataaagaataaccttttactgccttttcttatttaatta

SEQ ID NO: 27305 - DNA, 80 bp, synthetic construct
  misc_feature 1..80: note = Artificially Synthesized Probe
  source 1..80: mol_type = other DNA
atagtcctgtgtctaggtggactctctgtttataaaccagtaatgaaaaagtgcttcacagagggctattcccgcatgtt

SEQ ID NO: 27306 - DNA, 80 bp, synthetic construct
  misc_feature 1..80: note = Artificially Synthesized Probe
  source 1..80: mol_type = other DNA
accacacagggctcctgagtctgaccccgcactgcacacggcactgttcacctcacacggctcctgagcccaacccccgc

SEQ ID NO: 27307 - DNA, 80 bp, synthetic construct
  misc_feature 1..80: note = Artificially Synthesized Probe
  source 1..80: mol_type = other DNA
agtatcgaggaagcttccatttcaaaccaactccgcaggaaagttttagggtgaatcaaacatctttttctgtagttgag

SEQ ID NO: 27308 - DNA, 80 bp, synthetic construct
  misc_feature 1..80: note = Artificially Synthesized Probe
  source 1..80: mol_type = other DNA
ctgtacacgtttaaacacttccttactgatggacagtgagattctttccccatgttagtttttcctaaagtttgttctag

SEQ ID NO: 27309 - DNA, 80 bp, synthetic construct
  misc_feature 1..80: note = Artificially Synthesized Probe
  source 1..80: mol_type = other DNA
ttctgtttatgttgtaacttgggaatatctgacttttactgaatacaagccacatgtgggcagtaaaaggaagatgatta

SEQ ID NO: 27310 - DNA, 80 bp, synthetic construct
  misc_feature 1..80: note = Artificially Synthesized Probe
  source 1..80: mol_type = other DNA
tccaccttgtaaggaatcaaagttgaactaaaagacattatggtgggatttgctgtaagttgtttcacctaaagtcacag

SEQ ID NO: 27311 - DNA, 80 bp, synthetic construct
  misc_feature 1..80: note = Artificially Synthesized Probe
  source 1..80: mol_type = other DNA
gcatcagactctgatttattgttttggtgatcgtgtagacttaaagtgatggggaatatgttattagtacagattaaacc

SEQ ID NO: 27312 - DNA, 80 bp, synthetic construct
  misc_feature 1..80: note = Artificially Synthesized Probe
  source 1..80: mol_type = other DNA
aagtgaagaaaataaattttacctccatgtttaaccgtaaaccttagagtctgcccatcagtagtgtggctctcctgttc

SEQ ID NO: 27313 - DNA, 80 bp, synthetic construct
  misc_feature 1..80: note = Artificially Synthesized Probe
  source 1..80: mol_type = other DNA
cattctacttgtgtgagttttatttctaggagccacaccaggttgctcaggtgaagatcatagaaaaatacccgcatact

SEQ ID NO: 27314 - DNA, 80 bp, synthetic construct
  misc_feature 1..80: note = Artificially Synthesized Probe
  source 1..80: mol_type = other DNA
gtctaatcattagactgggcataggccaggtaaaaatcagtgagcttaaggaacttccaaactgaaaagcaaaggtagaa

SEQ ID NO: 27315 - DNA, 80 bp, synthetic construct
  misc_feature 1..80: note = Artificially Synthesized Probe
  source 1..80: mol_type = other DNA
cggggtggtggggcaggaggcgcaccccacatctcagacgatgggcggccgggcagagatgctcctcacttctttccaga

SEQ ID NO: 27316 - DNA, 80 bp, synthetic construct
  misc_feature 1..80: note = Artificially Synthesized Probe
  source 1..80: mol_type = other DNA
acaccaacccagaattctgtctatagatgacttcatccaaaacagcagaaacacattcctctcaagcttatatggaatat

SEQ ID NO: 27317 - DNA, 80 bp, synthetic construct
  misc_feature 1..80: note = Artificially Synthesized Probe
  source 1..80: mol_type = other DNA
tctgaaaattgtaatcattcacaggctaaggaagaaaaaattacatcatgtctatagtacagcaaaagcatttgccaaaa

SEQ ID NO: 27318 - DNA, 80 bp, synthetic construct
  misc_feature 1..80: note = Artificially Synthesized Probe
  source 1..80: mol_type = other DNA
acttattagaaaggtactgtaatgaagacagtgttgtattggtcaaaaaatcggccaatagaacacaatggaaagcccag

SEQ ID NO: 27319 - DNA, 80 bp, synthetic construct
  misc_feature 1..80: note = Artificially Synthesized Probe
  source 1..80: mol_type = other DNA
tgtctgtacctggttggtctaaaggcaatgagaaaatgaaatcattccttctcttgaagtctgtctccctgaagagcacc

SEQ ID NO: 27320 - DNA, 80 bp, synthetic construct
  misc_feature 1..80: note = Artificially Synthesized Probe
  source 1..80: mol_type = other DNA
ggggatgcagtgagagggtgggttctggtctttggtgttgtggggagggcgtcggggattcactgaggggctgagttctg

SEQ ID NO: 27321 - DNA, 80 bp, synthetic construct
  misc_feature 1..80: note = Artificially Synthesized Probe
  source 1..80: mol_type = other DNA
ctaagactgatgggaatctcagtggatatccaccccacaagggagaaattgagtagttgaacctaacagcagacataata

SEQ ID NO: 27322 - DNA, 80 bp, synthetic construct
  misc_feature 1..80: note = Artificially Synthesized Probe
  source 1..80: mol_type = other DNA
aggagacaaatctataacttggagggattcaggccagactttgtgatttgaaaatcatctgcgtggacattgtagccaaa

SEQ ID NO: 27323 - DNA, 80 bp, synthetic construct
  misc_feature 1..80: note = Artificially Synthesized Probe
  source 1..80: mol_type = other DNA
tgttatgtgaccaacattaccatctatttccggaaaattttccttaggccacatagaaactctatccctggtgaagactg

SEQ ID NO: 27324 - DNA, 80 bp, synthetic construct
  misc_feature 1..80: note = Artificially Synthesized Probe
  source 1..80: mol_type = other DNA
ttcatctacggagcagagataataacagtacctaacccacgggtgaccgtgcaagacccgttaatggatgaatgcacatg

SEQ ID NO: 27325 - DNA, 80 bp, synthetic construct
  misc_feature 1..80: note = Artificially Synthesized Probe
  source 1..80: mol_type = other DNA
cggccttggtccacacagcacaagtttcccatttagataatgttctcttgaaaatcggacactgatggacctttaaatat

SEQ ID NO: 27326 - DNA, 80 bp, synthetic construct
  misc_feature 1..80: note = Artificially Synthesized Probe
  source 1..80: mol_type = other DNA
gtagcttttgggcacctgtccctacctcgtagcaggaaactgtttattgggattcccaaaagtaagtattttaaaaatca

SEQ ID NO: 27327 - DNA, 80 bp, synthetic construct
  misc_feature 1..80: note = Artificially Synthesized Probe
  source 1..80: mol_type = other DNA
gttaggacaatgaatgcaagtggcataaacaaatgcacctgattcttcactggtcataaaatgagggtgacctgaatttt

SEQ ID NO: 27328 - DNA, 80 bp, synthetic construct
  misc_feature 1..80: note = Artificially Synthesized Probe
  source 1..80: mol_type = other DNA
cttcctgaagaagatgctcattagaggggagtatgactggttaggaagaagtttctggaaactcttgatatccccattat

SEQ ID NO: 27329 - DNA, 80 bp, synthetic construct
  misc_feature 1..80: note = Artificially Synthesized Probe
  source 1..80: mol_type = other DNA
gactggaggagaaaaggagactaataatgtatttactgggcacccactgcatgtcaaacactgtatttgatttttttttt

SEQ ID NO: 27330 - DNA, 80 bp, synthetic construct
  misc_feature 1..80: note = Artificially Synthesized Probe
  source 1..80: mol_type = other DNA
ggttttgtggttgccctggaaactcagccagcaaacaaaatagacaaactgcttatttgtcaagatctttagcttcctgg

SEQ ID NO: 27331 - DNA, 80 bp, synthetic construct
  misc_feature 1..80: note = Artificially Synthesized Probe
  source 1..80: mol_type = other DNA
aacactcagccttaaattctcttattacctgcccaaagtcatttcctttggtattcatttcacatgaaggacagggatgt

SEQ ID NO: 27332 - DNA, 80 bp, synthetic construct
  misc_feature 1..80: note = Artificially Synthesized Probe
  source 1..80: mol_type = other DNA
aggctcttaactgtgttgaaaggtagacattccttgaaggctgatatgtatgattctgctccatctggaacctgagaaaa

SEQ ID NO: 27333 - DNA, 80 bp, synthetic construct
  misc_feature 1..80: note = Artificially Synthesized Probe
  source 1..80: mol_type = other DNA
ccttacccggaccccctgcacccccatactcggagttcctgttcttctctcccaccttgcccagaccccctgcaccccca

SEQ ID NO: 27334 - DNA, 80 bp, synthetic construct
  misc_feature 1..80: note = Artificially Synthesized Probe
  source 1..80: mol_type = other DNA
tcttctctccctccttgcccagaccccctgcacccccatactcggagttcctgttcttctctcccaccttacccggaccc

SEQ ID NO: 27335 - DNA, 80 bp, synthetic construct; identical to SEQ ID NO: 27334
  misc_feature 1..80: note = Artificially Synthesized Probe
  source 1..80: mol_type = other DNA

SEQ ID NO: 27336 - DNA, 80 bp, synthetic construct; identical to SEQ ID NO: 27334
  misc_feature 1..80: note = Artificially Synthesized Probe
  source 1..80: mol_type = other DNA

SEQ ID NO: 27337 - DNA, 80 bp, synthetic construct
  misc_feature 1..80: note = Artificially Synthesized Probe
  source 1..80: mol_type = other DNA
gccttagcctcccgagtagctgggattacaggcatgggccaccatgcctggctaattttgtatttttagtagagacgggt

SEQ ID NO: 27338 - DNA, 80 bp, synthetic construct
  misc_feature 1..80: note = Artificially Synthesized Probe
  source 1..80: mol_type = other DNA
tccattacatatatgcataaccatagcccttccaaatagaatttgtaccacaaatgtcagccatgctgtgcttagttata

SEQ ID NO: 27339 - DNA, 80 bp, synthetic construct
  misc_feature 1..80: note = Artificially Synthesized Probe
  source 1..80: mol_type = other DNA
ctggctagaccaaagccttctttacttatagtaacttttctttgattgtgagatggaggctgtgagttacttccccagaa

SEQ ID NO: 27340 - DNA, 80 bp, synthetic construct
  misc_feature 1..80: note = Artificially Synthesized Probe
  source 1..80: mol_type = other DNA
ctatctcatgatcctcagtttctgagtagaattcacttagcaacagcatgctttgggaacttaaattttcagactgaaat

SEQ ID NO: 27341 - DNA, 80 bp, synthetic construct
  misc_feature 1..80: note = Artificially Synthesized Probe
  source 1..80: mol_type = other DNA
ggcactgctccatctgtgtcatgtcatacaactcctcagctcctacagaggctcatctttacttttagtcagtttatcta

SEQ ID NO: 27342 - DNA, 80 bp, synthetic construct
  misc_feature 1..80: note = Artificially Synthesized Probe
  source 1..80: mol_type = other DNA
tacgtgggctggttgtagcatgcttgggtcatgttacctgtagaatcctgagatgaacattgctgcctccagatgaacca

SEQ ID NO: 27343 - DNA, 80 bp, synthetic construct
  misc_feature 1..80: note = Artificially Synthesized Probe
  source 1..80: mol_type = other DNA
catctcttttattatctcattttcaagttcttgccctgttgaattaatgtgcttgctaaggattttctctagagcagaca

SEQ ID NO: 27344 - DNA, 80 bp, synthetic construct
  misc_feature 1..80: note = Artificially Synthesized Probe
  source 1..80: mol_type = other DNA
gcaggctattgttgatagtttccactcacttctctgagtggcaatgacagagggaatcacaatttctccactctcttctt

SEQ ID NO: 27345 - DNA, 80 bp, synthetic construct
  misc_feature 1..80: note = Artificially Synthesized Probe
  source 1..80: mol_type = other DNA
ctacacaatatacgatacgggcacttagcatattctgggactgtgctacctgtttacatagatttcctcaattgtcttcc

SEQ ID NO: 27346 - DNA, 80 bp, synthetic construct
  misc_feature 1..80: note = Artificially Synthesized Probe
  source 1..80: mol_type = other DNA
atcaggttaacactcattaaataagaagtgtctgtgcctcctgggataaaaatcctttataacgatctgggacgcgagct

SEQ ID NO: 27347 - DNA, 80 bp, synthetic construct
  misc_feature 1..80: note = Artificially Synthesized Probe
  source 1..80: mol_type = other DNA
gccatacagacatttcttacttgtgtttttgtcatcatgtttcagcttgttttagcttggtgtccccctcccaaaagatt

SEQ ID NO: 27348 - DNA, 80 bp, synthetic construct
  misc_feature 1..80: note = Artificially Synthesized Probe
  source 1..80: mol_type = other DNA
tggctcagtcacagcttagaagtggttaccaacttaatttcattttcttaggaaggtgggagtgtctccagtatgtgcgg

SEQ ID NO: 27349 - DNA, 80 bp, synthetic construct
  misc_feature 1..80: note = Artificially Synthesized Probe
  source 1..80: mol_type = other DNA
cctgggaactgcagacaccaatctggataatctctcttgtacttgtattgagtgtccctgttgaaattcaatgacccaaa

SEQ ID NO: 27350 - DNA, 80 bp, synthetic construct
  misc_feature 1..80: note = Artificially Synthesized Probe
  source 1..80: mol_type = other DNA
cacatcagggacaccgtgtgtctcaagtctcaggatgtggtcctttatcatgtcagggacaccgtgtgtctcaagtctca

SEQ ID NO: 27351 - DNA, 80 bp, synthetic construct
  misc_feature 1..80: note = Artificially Synthesized Probe
  source 1..80: mol_type = other DNA
tccatctctttaggagtcagcagtagcaatacctgccagcagtgatggaaaccttcatataaggaagcagctgatttggg

SEQ ID NO: 27352 - DNA, 80 bp, synthetic construct
  misc_feature 1..80: note = Artificially Synthesized Probe
  source 1..80: mol_type = other DNA
aagttaagacttgcatgaaaacttgatataaaatcttaaatgcttagagctgcctttgtcagtggaagccaatgtccttt

SEQ ID NO: 27353 - DNA, 80 bp, synthetic construct
  misc_feature 1..80: note = Artificially Synthesized Probe
  source 1..80: mol_type = other DNA
ctaaattcaaatgtgggaattagctttacacgtgggaatttttttgagctcacactgttcatagtggaagtggatggagt

SEQ ID NO: 27354 - DNA, 80 bp, synthetic construct
  misc_feature 1..80: note = Artificially Synthesized Probe
  source 1..80: mol_type = other DNA
cacacacatactcatattctcacatatgtgtgcacacatgtgcactctaaaatactacacattacccacatatgggcaca

SEQ ID NO: 27355 - DNA, 80 bp, synthetic construct
  misc_feature 1..80: note = Artificially Synthesized Probe
  source 1..80: mol_type = other DNA
gaggggtctcagtctgcacagtgagccctggaatgaggagtctcagtctatagagtgagccctggaatgaggagtctcag

SEQ ID NO: 27356 - DNA, 80 bp, synthetic construct
  misc_feature 1..80: note = Artificially Synthesized Probe
  source 1..80: mol_type = other DNA
atactgtactgtgatagaaagcgcccgcggcaaatgcttcttggacccacaggctgctgcgcgagcgaggatctccagta

SEQ ID NO: 27357 - DNA, 80 bp, synthetic construct
  misc_feature 1..80: note = Artificially Synthesized Probe
  source 1..80: mol_type = other DNA
atgtactgccctgtgcaggatacagtagagctttgagcatctcgtaggttgataaggaaaagccacaggcacagattaaa

SEQ ID NO: 27358 - DNA, 80 bp, synthetic construct
  misc_feature 1..80: note = Artificially Synthesized Probe
  source 1..80: mol_type = other DNA
actgtgtgtgtgaccaggacagacgcctccactgtgtgagaccaggacagacgatgcctccattgtgtgtatgaccagga

SEQ ID NO: 27359 - DNA, 80 bp, synthetic construct; identical to SEQ ID NO: 27358
  misc_feature 1..80: note = Artificially Synthesized Probe
  source 1..80: mol_type = other DNA

SEQ ID NO: 27360 - DNA, 80 bp, synthetic construct
  misc_feature 1..80: note = Artificially Synthesized Probe
  source 1..80: mol_type = other DNA
tgtgaccaggacagacgacgcctccactgtgtgtgtgaccgggacagacggcgcctccactgtgtgtgtgaccaggacag

SEQ ID NO: 27361 - DNA, 80 bp, synthetic construct; identical to SEQ ID NO: 27360
  misc_feature 1..80: note = Artificially Synthesized Probe
  source 1..80: mol_type = other DNA

SEQ ID NO: 27362 - DNA, 80 bp, synthetic construct
  misc_feature 1..80: note = Artificially Synthesized Probe
  source 1..80: mol_type = other DNA
ggcctccagctgctttagttcagggcaggcaaactgtggcctgcatcctgccactgagtttgcagagaaagtttgattgg

SEQ ID NO: 27363 - DNA, 80 bp, synthetic construct
  misc_feature 1..80: note = Artificially Synthesized Probe
  source 1..80: mol_type = other DNA
agtttgtgcaatgacaagctggtgtggctgaaacggcagttgctcaagagcattagaacagccttcaccatgtgggttta

SEQ ID NO: 27364 - DNA, 80 bp, synthetic construct
  misc_feature 1..80: note = Artificially Synthesized Probe
  source 1..80: mol_type = other DNA
attcatgctggaatttcgtgatctctgtggggactgtggcttattcattggagcttgaatatttttcagggtttgctttg

SEQ ID NO: 27365 - DNA, 80 bp, synthetic construct
  misc_feature 1..80: note = Artificially Synthesized Probe
  source 1..80: mol_type = other DNA
tattatcgcacctgattttgtactgaattgaagaagggattgaggtctcagagatggtgctcacacaatgtgttgagcac

SEQ ID NO: 27366 - DNA, 80 bp, synthetic construct
  misc_feature 1..80: note = Artificially Synthesized Probe
  source 1..80: mol_type = other DNA
gtcttggctgtcttgatctcaggcagtcagagtcctggaaaaactattgatataagaggtcagagaccacagataattca

SEQ ID NO: 27367 - DNA, 80 bp, synthetic construct
  misc_feature 1..80: note = Artificially Synthesized Probe
  source 1..80: mol_type = other DNA
aggtagacactccagccgccacccatcctccctgggagtggacactcccgtgccgaggtagatgctccaaacagcaccca

SEQ ID NO: 27368 - DNA, 80 bp, synthetic construct
  misc_feature 1..80: note = Artificially Synthesized Probe
  source 1..80: mol_type = other DNA
attggcgtgatgccgattttcaaattttcaaaggacacactgtcgctaatagaaatattttcttttgttcagatgcccag

SEQ ID NO: 27369 - DNA, 80 bp, synthetic construct
  misc_feature 1..80: note = Artificially Synthesized Probe
  source 1..80: mol_type = other DNA
tggctgtgggtttgcaccttcccctttttctcagcctccacctcttgtgtctcagggcccctgtcttcctcatgcctctg

SEQ ID NO: 27370 - DNA, 80 bp, synthetic construct
  misc_feature 1..80: note = Artificially Synthesized Probe
  source 1..80: mol_type = other DNA
tgcgcacgtgtgtgtgtcttaattagttgcattgtttgggttgccctagaacattcttaaatcatagcctgagcaacttc

SEQ ID NO: 27371 - DNA, 80 bp, synthetic construct
  misc_feature 1..80: note = Artificially Synthesized Probe
  source 1..80: mol_type = other DNA
aatatacaaagtgagggacagggacagagcacgctgcagggaaagttccgtagagtttctagggagcagggagcacctgg

SEQ ID NO: 27372 - DNA, 80 bp, synthetic construct
  misc_feature 1..80: note = Artificially Synthesized Probe
  source 1..80: mol_type = other DNA
cactgtttgtggcaggtgaaatatgtgcccataatggctgtgcctctttatttctagtatttagggaagggttttttttt

SEQ ID NO: 27373 - DNA, 80 bp, synthetic construct
  misc_feature 1..80: note = Artificially Synthesized Probe
  source 1..80: mol_type = other DNA
tattctccaggagcagtgccaggtgccggttactctccaggtagggtgctcggtgcccattattctccaggtggggtgcc

SEQ ID NO: 27374 - DNA, 80 bp, synthetic construct
  misc_feature 1..80: note = Artificially Synthesized Probe
  source 1..80: mol_type = other DNA
ggtcactgctactgtcaaccatggcggggaatttggagttttaaaggcagtgagaatcccttgggattttttaaagctgg

SEQ ID NO: 27375 - DNA, 80 bp, synthetic construct
  misc_feature 1..80: note = Artificially Synthesized Probe
  source 1..80: mol_type = other DNA
atgggttactgttcgagctggggaaggcaagagcttatttcaatcttgacagaaagactcttgcagacacaaacatgtgg

SEQ ID NO: 27376 - DNA, 80 bp, synthetic construct
  misc_feature 1..80: note = Artificially Synthesized Probe
  source 1..80: mol_type = other DNA
gcagctgtactcttgatatcctcagatgccagaatgcttcctagagacccaggttattgaggttttgtgaactgacctaa

SEQ ID NO: 27377 - DNA, 80 bp, synthetic construct
  misc_feature 1..80: note = Artificially Synthesized Probe
  source 1..80: mol_type = other DNA
gttcctctgagatcactttcaatggaaaaaaaataatgacccctttcaaaaagagcactgatgccgaagtatggaaatag

SEQ ID NO: 27378 - DNA, 80 bp, synthetic construct
  misc_feature 1..80: note = Artificially Synthesized Probe
  source 1..80: mol_type = other DNA
ggactaagggagtccacccacagctgttttcctttgttgatttaaacattttctggtctgtttttctttttaggtctgct

SEQ ID NO: 27379 - DNA, 80 bp, synthetic construct
  misc_feature 1..80: note = Artificially Synthesized Probe
  source 1..80: mol_type = other DNA
ctggaacagaaatgacaaacaggcccctcgcctcgtgatcttaaaatcctcttatacaacttgcttctcttagaaaacac

SEQ ID NO: 27380 - DNA, 80 bp, synthetic construct
  misc_feature 1..80: note = Artificially Synthesized Probe
  source 1..80: mol_type = other DNA
ccgcgtgtcaccgcgaggggactcacaccctcatcccgaccccacgtgtcaccgcgagtggactcacacgctcatcccga

SEQ ID NO: 27381 - DNA, 80 bp, synthetic construct; identical to SEQ ID NO: 27380
  misc_feature 1..80: note = Artificially Synthesized Probe
  source 1..80: mol_type = other DNA

SEQ ID NO: 27382 - DNA, 80 bp, synthetic construct
  misc_feature 1..80: note = Artificially Synthesized Probe
  source 1..80: mol_type = other DNA
cgaccccgcgtgtcaccgcgagtgggttcacacactcatcccgaccccgcgtgtcaccgcgagtgggttcacacgctcat

SEQ ID NO: 27383 - DNA, 80 bp, synthetic construct
  misc_feature 1..80: note = Artificially Synthesized Probe
  source 1..80: mol_type = other DNA
ctcaaaataataaaaggtgatgccctgctcttgattttaccccttgaaacataagctgctttttttaggataccagaagg

SEQ ID NO: 27384 - DNA, 80 bp, synthetic construct
  misc_feature 1..80: note = Artificially Synthesized Probe
  source 1..80: mol_type = other DNA
aaaatatccaagcaggctggttccctctgccttgtctcagccaggggctctccagcgttaatatgtgtcagaatcaccct

SEQ ID NO: 27385 - DNA, 80 bp, synthetic construct
  misc_feature 1..80: note = Artificially Synthesized Probe
  source 1..80: mol_type = other DNA
cagtcggaaaatcaagttgtgtgaggaacctcattgagactcagtgtcatattacatcaactatttgtcagtttctcggg

SEQ ID NO: 27386 - DNA, 80 bp, synthetic construct
  misc_feature 1..80: note = Artificially Synthesized Probe
  source 1..80: mol_type = other DNA
tagtcggctcggtgtgtgtggttggctcggtatgcatgttcagctcggtttccgtggtcggctcggtgtgcatggtcggc

SEQ ID NO: 27387 - DNA, 80 bp, synthetic construct
  misc_feature 1..80: note = Artificially Synthesized Probe
  source 1..80: mol_type = other DNA
gctagatttctgtggtcagctccgttcagaagaggtgcatatgaggggacatgatgctttgggctgtgaaaatgcagatc

SEQ ID NO: 27388 - DNA, 80 bp, synthetic construct
  misc_feature 1..80: note = Artificially Synthesized Probe
  source 1..80: mol_type = other DNA
ccaggttttggggtgagggaggatgtggcattttctcctttcctgtatttctgtgcctgtttctcctgtttctgagaaaa

SEQ ID NO: 27389 - DNA, 80 bp, synthetic construct
  misc_feature 1..80: note = Artificially Synthesized Probe
  source 1..80: mol_type = other DNA
ttccttaggggtttcaggaaaaacatgttagacgcagaggtggcttaggatttaacatctgaccttgaatctgtcagatc

SEQ ID NO: 27390 - DNA, 80 bp, synthetic construct
  misc_feature 1..80: note = Artificially Synthesized Probe
  source 1..80: mol_type = other DNA
cctggccttcgtaggacaaaggattcttcaggaagcagtaggtggctgagagacccctgtgacagtgttggtgagtgata

SEQ ID NO: 27391 - DNA, 80 bp, synthetic construct
  misc_feature 1..80: note = Artificially Synthesized Probe
  source 1..80: mol_type = other DNA
gagaggaactggtggtcataaaacccaaaatacggcaagttgtcacttagtgttatcccagataaatggaatatgtaaga

SEQ ID NO: 27392 - DNA, 80 bp, synthetic construct
  misc_feature 1..80: note = Artificially Synthesized Probe
  source 1..80: mol_type = other DNA
aaaaggtccttgtcatttcctcataagcacacatgataagtgagcagagagaacctcctgcctatttctttcttctttcc

SEQ ID NO: 27393 - DNA, 80 bp, synthetic construct
  misc_feature 1..80: note = Artificially Synthesized Probe
  source 1..80: mol_type = other DNA
ttcaaagtgaagggggcaagaggtaaagcctttgggttttaattagtgagagggggaaagtgagagaatgctaggaatgt

SEQ ID NO: 27394 - DNA, 80 bp, synthetic construct
  misc_feature 1..80: note = Artificially Synthesized Probe
  source 1..80: mol_type = other DNA
cctcacccattgtcagtgcttggtaaatgcacgccaggtttgaaaggactgaaatgcatcctttttttgttgttttatta

SEQ ID NO: 27395 - DNA, 80 bp, synthetic construct
  misc_feature 1..80: note = Artificially Synthesized Probe
  source 1..80: mol_type = other DNA
tcccactgtgtcccacagaaggccaaggcgggtctctgtggcctttttttttaaggactctactctcattcatgagggat

SEQ ID NO: 27396 - DNA, 80 bp, synthetic construct
  misc_feature 1..80: note = Artificially Synthesized Probe
  source 1..80: mol_type = other DNA
tgtgtgcctttcttctctgtaaaatgagtagccgggattgcatattctcctggtacactctgactttaaaattcagtgtg

SEQ ID NO: 27397 - DNA, 80 bp, synthetic construct
  misc_feature 1..80: note = Artificially Synthesized Probe
  source 1..80: mol_type = other DNA
atgaatacagacccatgcatgcgtggatacagacacaggcacatatgaatggaggcacagacatacatgaacagagacac

SEQ ID NO: 27398 - DNA, 80 bp, synthetic construct
  misc_feature 1..80: note = Artificially Synthesized Probe
  source 1..80: mol_type = other DNA
aacttggtgttcttagactacaggaatagctaattgcatcccatgtacatgggataattcttccaacccagtctcctcat

SEQ ID NO: 27399 - DNA, 80 bp, synthetic construct
  misc_feature 1..80: note = Artificially Synthesized Probe
  source 1..80: mol_type = other DNA
ccatacaagatcgttttaccctcagatgcagaatgatccaataccgtcagctgtttaccctcagatgcaaaatgatccaa

SEQ ID NO: 27400 - DNA, 80 bp, synthetic construct
  misc_feature 1..80: note = Artificially Synthesized Probe
  source 1..80: mol_type = other DNA
gcaaaaccatgccaaatgccatggggtatttaaagctcagtagcctgtaatccctgactcaaaggcagtaaaaaggaaat

SEQ ID NO: 27401 - DNA, 80 bp, synthetic construct
  misc_feature 1..80: note = Artificially Synthesized Probe
  source 1..80: mol_type = other DNA
tgttcagctgccccttgaatttacatgtggagtaacaaacaaggaagcatatgtaatgtgctttgccgtttgcaatttcg

SEQ ID NO: 27402 - DNA, 80 bp, synthetic construct
  misc_feature 1..80: note = Artificially Synthesized Probe
  source 1..80: mol_type = other DNA
ttttatttgggtctttttgtgtaaagaaatctgtggttagcagtacaacaaatgtgttacaccggcttccttttcccggt

SEQ ID NO: 27403 - DNA, 80 bp, synthetic construct
  misc_feature 1..80: note = Artificially Synthesized Probe
  source 1..80: mol_type = other DNA
aatatacttccacagcaaggaatgttgaggccacatggtcagaaaacagttccatgttacgacgcacatttaagatgttt

SEQ ID NO: 27404 - DNA, 80 bp, synthetic construct
  misc_feature 1..80: note = Artificially Synthesized Probe
  source 1..80: mol_type = other DNA
tctctatggatctctgcttctcaatcttcagatgtcaggaataataatacctggccagctaaagaaaagagtgggttgga

SEQ ID NO: 27405 - DNA, 80 bp, synthetic construct
  misc_feature 1..80: note = Artificially Synthesized Probe
  source 1..80: mol_type = other DNA
ccagcacttacatcagaccagctgcaatgagtacatgcaactgtgcccctgaatttctaattgtacctggtaggtaactt

SEQ ID NO: 27406 - DNA, 80 bp, synthetic construct
  misc_feature 1..80: note = Artificially Synthesized Probe
  source 1..80: mol_type = other DNA
ttccttctatggatataaatggcattgcctaagaattcagctcttcgtttgttgtctctctaacttactggctgtgctat

SEQ ID NO: 27407 - DNA, 80 bp, synthetic construct
  misc_feature 1..80: note = Artificially Synthesized Probe
  source 1..80: mol_type = other DNA
gagatgcggtgtgatatgggttcaaagttttgcatcgtccagttcaatcatcaatagaactctaagggtggcttctaata

SEQ ID NO: 27408 - DNA, 80 bp, synthetic construct
  misc_feature 1..80: note = Artificially Synthesized Probe
  source 1..80: mol_type = other DNA
ttcatggcttttgttctggtttgctccctcctgtgtccccaccacttcacaaatgcctggtgaatgcttgtgggtagata

SEQ ID NO: 27409 - DNA, 80 bp, synthetic construct
  misc_feature 1..80: note = Artificially Synthesized Probe
  source 1..80: mol_type = other DNA
atttagggcctgctctaatccaggatgacctcacctcaaggtccttaattaatcacatccgtaaagacctcattcccgag

SEQ ID NO: 27410 - DNA, 80 bp, synthetic construct
  misc_feature 1..80: note = Artificially Synthesized Probe
  source 1..80: mol_type = other DNA
ctgtggaatcgtcgcccatccctcgtgaactctttgggtcactggaatagttgcggggaaattttagaagattttatgat

SEQ ID NO: 27411 - DNA, 80 bp, synthetic construct
  misc_feature 1..80: note = Artificially Synthesized Probe
  source 1..80: mol_type = other DNA
aggaaggagcttgcctctcctgctctgcaccaagcagcccccacatccacatggagtcgactccagatccatgttttcta

SEQ ID NO: 27412 - DNA, 80 bp, synthetic construct
  misc_feature 1..80: note = Artificially Synthesized Probe
  source 1..80: mol_type = other DNA
cggcttcctttgtaatgctgagtgcagtgaaagattgggtgcctcttatcagctgcattaaataggataaaaagaaaaga

SEQ ID NO: 27413 - DNA, 80 bp, synthetic construct
  misc_feature 1..80: note = Artificially Synthesized Probe
  source 1..80: mol_type = other DNA
tggataaccagaaaataagttgtgtgtatatacagtgttcagattggaaaaatatagctgcaagaggtacacacaattcc

SEQ ID NO: 27414 - DNA, 80 bp, synthetic construct
  misc_feature 1..80: note = Artificially Synthesized Probe
  source 1..80: mol_type = other DNA
gctgtgtctaaacctctgactcagtaaggtctttttaaagatacagccattgccaggaatttgattattaggtcatgatt

SEQ ID NO: 27415 - DNA, 80 bp, synthetic construct
  misc_feature 1..80: note = Artificially Synthesized Probe
  source 1..80: mol_type = other DNA
gctttcgagttgtcattctcccgcgtggtctgtggggagaatgctctgggcctgacttgagtgtcaggagccctcagagg

SEQ ID NO: 27416 - DNA, 80 bp, synthetic construct
  misc_feature 1..80: note = Artificially Synthesized Probe
  source 1..80: mol_type = other DNA
gggacgtgggagagctgcggcccagtatagtctcagtcccaatttcttcttaagtcaccgtcagagcccacgatacccat

SEQ ID NO: 27417 - DNA, 80 bp, synthetic construct
  misc_feature 1..80: note = Artificially Synthesized Probe
  source 1..80: mol_type = other DNA
atcatttatttgatgggaaccacagtgcacagccttttcaaatgggcttcgttcactttgtaatgtgcatttacggtgcc

SEQ ID NO: 27418 - DNA, 80 bp, synthetic construct
  misc_feature 1..80: note = Artificially Synthesized Probe
  source 1..80: mol_type = other DNA
aggaatgtgcctaatggaaacccagtctgggtaacaagaacaaacattaaaaatccccggctgaagttggcgggtagcac

SEQ ID NO: 27419 - DNA, 80 bp, synthetic construct
  misc_feature 1..80: note = Artificially Synthesized Probe
  source 1..80: mol_type = other DNA
tatttgtgctcgccaaatgctgagtgctggcctgagggcttggaattcaacatcatgtttggattccacaacaagatgag

SEQ ID NO: 27420 - DNA, 80 bp, synthetic construct
  misc_feature 1..80: note = Artificially Synthesized Probe
  source 1..80: mol_type = other DNA
aaacactcactccctccttacagaaaagaccatggggaaagttagccttcaaaactgttttccctcagctagtatttgga

SEQ ID NO: 27421 - DNA, 80 bp, synthetic construct
  misc_feature 1..80: note = Artificially Synthesized Probe
  source 1..80: mol_type = other DNA
agcgctagcctgattctttccattttctattttctgtgtctaattttttccatatccattttccacctggttcatttagt

SEQ ID NO: 27422 - DNA, 80 bp, synthetic construct
  misc_feature 1..80: note = Artificially Synthesized Probe
  source 1..80: mol_type = other DNA
ccaatgtaagaatgttcttggagacttgaaatgcagagtcctcattcacgttatcttggagaactcgacgcgtgtttgat

SEQ ID NO: 27423 - DNA, 80 bp, synthetic construct
  misc_feature 1..80: note = Artificially Synthesized Probe
  source 1..80: mol_type = other DNA
tccaaagatggtttttgttttcttagaagcactgtgtcatagttccttgagtgaaatggtggaacgtggcacagacatgt

SEQ ID NO: 27424 - DNA, 80 bp, synthetic construct
  misc_feature 1..80: note = Artificially Synthesized Probe
  source 1..80: mol_type = other DNA
agagagagctcccaccttcacagccgaggctgccctggctcaggggcttctccactcccctctttttgcttcttaccaag

SEQ ID NO: 27425 - DNA, 80 bp, synthetic construct
  misc_feature 1..80: note = Artificially Synthesized Probe
  source 1..80: mol_type = other DNA
catttttccctctactgtcctcttctgtgatggcattttcatcccctgcaggggagatgggacagaagtttgcttaagta

SEQ ID NO: 27426 - DNA, 80 bp, synthetic construct
  misc_feature 1..80: note = Artificially Synthesized Probe
  source 1..80: mol_type = other DNA
ttccatgcaggagacgtacggtattttgcggaaagtcggatgggttagagggcaggatgctttcgaagttcttgtggaac

SEQ ID NO: 27427 - DNA, 80 bp, synthetic construct
  misc_feature 1..80: note = Artificially Synthesized Probe
  source 1..80: mol_type = other DNA
cacactcctgatttgctgtcaatgtttggggttccgtggcctgatagtcccgatcccagccttcaccttcatgcagtgtt

SEQ ID NO: 27428 - DNA, 80 bp, synthetic construct
  misc_feature 1..80: note = Artificially Synthesized Probe
  source 1..80: mol_type = other DNA
gccctccagagacgctctcctggtttagaacatttattcatctagaacattattaacaatggaaagaacagtggcttgca

SEQ ID NO: 27429 - DNA, 80 bp, synthetic construct
  misc_feature 1..80: note = Artificially Synthesized Probe
  source 1..80: mol_type = other DNA
gcaggtttttgtatggagatgttttcaactcatccaggtaaatagcaaggagtacagttactggattgtctagtagaagt

SEQ ID NO: 27430 - DNA, 80 bp, synthetic construct
  misc_feature 1..80: note = Artificially Synthesized Probe
  source 1..80: mol_type = other DNA
ggggcagaggagagaaaattagctcaatttgggtctgaaacgtcagtgaggatttcacaggagagcagcttttgattgga

SEQ ID NO: 27431 - DNA, 80 bp, synthetic construct
  misc_feature 1..80: note = Artificially Synthesized Probe
  source 1..80: mol_type = other DNA
tcctgtgcactaatatatttaaatccttaagtgttgaaattatactaggtcagatccactcactcagcgctctgaggagt

SEQ ID NO: 27432 - DNA, 80 bp, synthetic construct
  misc_feature 1..80: note = Artificially Synthesized Probe
  source 1..80: mol_type = other DNA
tgatttattgagtctttcctataggcagggcacccaaagttcacccaggatactaggaactttgagaatttaaaacactc

SEQ ID NO: 27433 - DNA, 80 bp, synthetic construct
  misc_feature 1..80: note = Artificially Synthesized Probe
  source 1..80: mol_type = other DNA
gctgggagatcagaggtattcatcacacaggaagagggtgtgcactcttttctttgttaaaaattttatctagattgaaa

SEQ ID NO: 27434 - DNA, 80 bp, synthetic construct
  misc_feature 1..80: note = Artificially Synthesized Probe
  source 1..80: mol_type = other DNA
attatgctaactgatgtagtgaaatgttgagaaaatcagatattaatggttggctgagctggggcaattaggtggcattt

SEQ ID NO: 27435 - DNA, 80 bp, synthetic construct
  misc_feature 1..80: note = Artificially Synthesized Probe
  source 1..80: mol_type = other DNA
ccattccatgcatgttttcagaaatgacagacattctttccttcttttgaggctgaatattgttccattgtgtgcgtaca

SEQ ID NO: 27436 - DNA, 80 bp, synthetic construct
  misc_feature 1..80: note = Artificially Synthesized Probe
  source 1..80: mol_type = other DNA
gcgcctttattgaagatcaagctgtgcatgtgtgggttcgtttctgggctctctgttctgttccattcgttgatgtgcat

SEQ ID NO: 27437 - DNA, 80 bp, synthetic construct
  misc_feature 1..80: note = Artificially Synthesized Probe
  source 1..80: mol_type = other DNA
gcccacaagaggttcacttcattttgaaggacacacagcctgagagtgatggaaaaagatattccatgcaaatggaagtc

SEQ ID NO: 27438 - DNA, 80 bp, synthetic construct
  misc_feature 1..80: note = Artificially Synthesized Probe
  source 1..80: mol_type = other DNA
ttggcaggatgatttgtaatctcagacattttgtttagttgtcagtgaaccacatgtgtgactcctctttctctctctct

SEQ ID NO: 27439 - DNA, 80 bp, synthetic construct
  misc_feature 1..80: note = Artificially Synthesized Probe
  source 1..80: mol_type = other DNA
ggcagttgaccagtaacactgccggaaattcagaaaacagctgaattttagtctttctctgtctgtttttcatgcccttg

SEQ ID NO: 27440 - DNA, 80 bp, synthetic construct
  misc_feature 1..80: note = Artificially Synthesized Probe
  source 1..80: mol_type = other DNA
gctatgcaattgctctggccatagtagctgctgcaaaagtaaaaatgaaagtaacaaatctcttaggcctgcacaggctt

SEQ ID NO: 27441 - DNA, 80 bp, synthetic construct
  misc_feature 1..80: note = Artificially Synthesized Probe
  source 1..80: mol_type = other DNA
cactctggagccctcctgggcagacaggggtggaaactcacaccccgaggacctgctgcctgtctgcgctctggagccct

SEQ ID NO: 27442 - DNA, 80 bp, synthetic construct
  misc_feature 1..80: note = Artificially Synthesized Probe
  source 1..80: mol_type = other DNA
ggcctgtgaggattaaatctgccggcaccttgtctgtaaaaactgtacaaaaatgttcagaagcgtctgctgagcattgg

SEQ ID NO: 27443 - DNA, 80 bp, synthetic construct
  misc_feature 1..80: note = Artificially Synthesized Probe
  source 1..80: mol_type = other DNA
gtcgtctgccacttctgccccacgttttattttctgattgttcagtagtgacaatggaacaaaacacagcgtcagagagc

SEQ ID NO: 27444 - DNA, 80 bp, synthetic construct
  misc_feature 1..80: note = Artificially Synthesized Probe
  source 1..80: mol_type = other DNA
tgagggccatctccttcacccacagtccaccaatctaaccattaatcccttctaaaaaacaccttcacaccaacagccag

SEQ ID NO: 27445 - DNA, 80 bp, synthetic construct
  misc_feature 1..80: note = Artificially Synthesized Probe
  source 1..80: mol_type = other DNA
aatattcaggtctggaatgagagttggggtctcaaaggtgacgatgggtgccagccgaggggtctgtctgcatctgagga

SEQ ID NO: 27446 - DNA, 80 bp, synthetic construct
  misc_feature 1..80: note = Artificially Synthesized Probe
  source 1..80: mol_type = other DNA
gccgcaggttcttctcttagcgtgggcatggcattgaacacagaaggcttatattaggatgttagaatgtactgagagta

SEQ ID NO: 27447 - DNA, 80 bp, synthetic construct
  misc_feature 1..80: note = Artificially Synthesized Probe
  source 1..80: mol_type = other DNA
aagaaatgtttgcggagtgaatgcatgctcttccctagagaacaggctctgggtgaatttgacaccaaaactatctaaca

SEQ ID NO: 27448 - DNA, 80 bp, synthetic construct
  misc_feature 1..80: note = Artificially Synthesized Probe
  source 1..80: mol_type = other DNA
cctctgtggcatagagaggacccctccagcgtgagacccacctccctgcgctcagtagagtggagctgggagcccggggc

SEQ ID NO: 27449 - DNA, 80 bp, synthetic construct
  misc_feature 1..80: note = Artificially Synthesized Probe
  source 1..80: mol_type = other DNA
gtgagacccacctccctgtgctcaggagagtcaagctgggagcccagggcaggccttcaccctctgtggcatgcagaggt

SEQ ID NO: 27450 - DNA, 80 bp, synthetic construct
  misc_feature 1..80: note = Artificially Synthesized Probe
  source 1..80: mol_type = other DNA
ttggaagtgaatcgttttggatgcaaaatggcaaatgaggtgcccaaacaatgtttgttcaccttcaatgaatgttcacc

SEQ ID NO: 27451 - DNA, 80 bp, synthetic construct
  misc_feature 1..80: note = Artificially Synthesized Probe
  source 1..80: mol_type = other DNA
ataggagcctttgatcattcctgcagccatttatctttgctcgcaagtttcattcaacaaattaccgagtgtctgggatg

SEQ ID NO: 27452 - DNA, 80 bp, synthetic construct
  misc_feature 1..80: note = Artificially Synthesized Probe
  source 1..80: mol_type = other DNA
gctctgccctgcctgggacatgaatcatccctttgtccagcatgtacagtgtgtgtagggaaaagctttgtccagcatgt

SEQ ID NO: 27453 - DNA, 80 bp, synthetic construct
  misc_feature 1..80: note = Artificially Synthesized Probe
  source 1..80: mol_type = other DNA
atgttagcaatttgaatctgcactgatgggcatggcagacgcaaatgttaagtgacataaaatctgtctctgagtgtgca

SEQ ID NO: 27454 - DNA, 80 bp, synthetic construct
  misc_feature 1..80: note = Artificially Synthesized Probe
  source 1..80: mol_type = other DNA
gaaaaaagatttatgaacttaaaaaagcagccagcatattgtattataggggaacattcaattcaggaaatgttcagata

SEQ ID NO: 27455 - DNA, 80 bp, synthetic construct
  misc_feature 1..80: note = Artificially Synthesized Probe
  source 1..80: mol_type = other DNA
catgcaattctgataatatttcaggaaatgttatctccccactgggcctgtcatgtgggcactcgcctctgtggcaaggg

SEQ ID NO: 27456 - DNA, 80 bp, synthetic construct
  misc_feature 1..80: note = Artificially Synthesized Probe
  source 1..80: mol_type = other DNA
ccttggttgacggtgatgactggcaggtgtctgctgtattcaggagtgtgcaagtggttgtttattggaaatcagttcga

SEQ ID NO: 27457 - DNA, 80 bp, synthetic construct
  misc_feature 1..80: note = Artificially Synthesized Probe
  source 1..80: mol_type = other DNA
gggacttgaactcttgacttaattgatcctgaacacgatcaataacagaggcccgaatggtttctagcctggccgaggcg

SEQ ID NO: 27458 - DNA, 80 bp, synthetic construct
  misc_feature 1..80: note = Artificially Synthesized Probe
  source 1..80: mol_type = other DNA
tgagaacagtcaccctaacatggttctggtccgtgtttctctgatggtgggagatgcagggagggggtagccatgctgag

SEQ ID NO: 27459 - DNA, 80 bp, synthetic construct
  misc_feature 1..80: note = Artificially Synthesized Probe
  source 1..80: mol_type = other DNA
ggccattctaggatggttttctactgaagggggccgttctaagagggttttctacttaagggggccattctaggagggtt

SEQ ID NO: 27460 - DNA, 80 bp, synthetic construct
  misc_feature 1..80: note = Artificially Synthesized Probe
  source 1..80: mol_type = other DNA
ttttccagcggaattccagggtggaaacacggaggcagctgactatcgagaatcctaggagaatgggctttctgtgtgac

SEQ ID NO: 27461 - DNA, 80 bp, synthetic construct
  misc_feature 1..80: note = Artificially Synthesized Probe
  source 1..80: mol_type = other DNA
ggagaatggtttccaaactcagtatgtgctgaatgtttccccaatctatggggaaatgaaaagaagacagtgcagtcaat

SEQ ID NO: 27462 - DNA, 80 bp, synthetic construct
  misc_feature 1..80: note = Artificially Synthesized Probe
  source 1..80: mol_type = other DNA
gaagtgtgctggatctgtgaggtgtgcataggtctgtgacgtgctgggtctgtgaggtgtgtacgggtctgtgaggtgtg

SEQ ID NO: 27463 - DNA, 80 bp, synthetic construct
  misc_feature 1..80: note = Artificially Synthesized Probe
  source 1..80: mol_type = other DNA
gatctgtgaggtgtgcatgggtctgagaggtgtgcatgggtctgtgacacgtgctgggtctgtggggtgtgcatgggtct

SEQ ID NO: 27464 - DNA, 80 bp, synthetic construct
  misc_feature 1..80: note = Artificially Synthesized Probe
  source 1..80: mol_type = other DNA
ggctgtggattttcaggccagactccctgggttcacgttccagtccccattttctgtgtgaccttgggcgtgtttctttt

SEQ ID NO: 27465 - DNA, 80 bp, synthetic construct
  misc_feature 1..80: note = Artificially Synthesized Probe
  source 1..80: mol_type = other DNA
gcccatttttttttttttttttttttgagacagagttttgctctgttgcccaggctgaagtgcagtggtgtgatcttggc

SEQ ID NO: 27466 - DNA, 80 bp, synthetic construct
  misc_feature 1..80: note = Artificially Synthesized Probe
  source 1..80: mol_type = other DNA
tctttttgcttatgatggccttggatatttgggcttttttttggttccatatgaattttacaatagtttttttctagttc

SEQ ID NO: 27467 - DNA, 80 bp, synthetic construct
  misc_feature 1..80: note = Artificially Synthesized Probe
  source 1..80: mol_type = other DNA
ttcattactgattcaatttcagagcttgttattggtctgctcaaggaatcagcttcttcctggttcagtcttgggagggt

SEQ ID NO: 27468 - DNA, 80 bp, synthetic construct
  misc_feature 1..80: note = Artificially Synthesized Probe
  source 1..80: mol_type = other DNA
tcagttctttagcatttgcctgaggattatgttcaattatgtggtctgttttagagtgtgtgccatgtggcaataagaag

SEQ ID NO: 27469 - DNA, 80 bp, synthetic construct
  misc_feature 1..80: note = Artificially Synthesized Probe
  source 1..80: mol_type = other DNA
gggtcctgacatgctcttgggttttctgtattgtcaagtgactaagggttaccgaccaccctccaaagcaccagctgtgt

SEQ ID NO: 27470 - DNA, 80 bp, synthetic construct
  misc_feature 1..80: note = Artificially Synthesized Probe
  source 1..80: mol_type = other DNA
atcaagaagaggttttggaaaacccaacaccgtctctttgacctgtcttggaaaacccaacaccgtctgtttgacctgtc

SEQ ID NO: 27471 - DNA, 80 bp, synthetic construct
  misc_feature 1..80: note = Artificially Synthesized Probe
  source 1..80: mol_type = other DNA
tgtatagattcatttggtcttaagtggttttgacctgaatgctgtacctcagctcccaaaagcattgcatgtcagttgac

SEQ ID NO: 27472 - DNA, 80 bp, synthetic construct
  misc_feature 1..80: note = Artificially Synthesized Probe
  source 1..80: mol_type = other DNA
aacttggagataaatatacatgtactatgtggtgggaccgtttttgaatctgaactaaattaaatgatggaaaacgacct

SEQ ID NO: 27473 - DNA, 80 bp, synthetic construct
  misc_feature 1..80: note = Artificially Synthesized Probe
  source 1..80: mol_type = other DNA
cttcgccactcaactttgaatttaagtatccccagggactgtcaaactttttatatccaatggggaatttcaccttgaag

SEQ ID NO: 27474 - DNA, 80 bp, synthetic construct
  misc_feature 1..80: note = Artificially Synthesized Probe
  source 1..80: mol_type = other DNA
ttccttcagaactcatgactataaaccctagtcctttggatgccatgatgcctatcctggtatctttagaatccgttacc

SEQ ID NO: 27475 - DNA, 80 bp, synthetic construct
  misc_feature 1..80: note = Artificially Synthesized Probe
  source 1..80: mol_type = other DNA
cacatccttgtctcttcagaacttataaccttctatccttgttcctttagcatccatgagcatctgtcctattttggcca

SEQ ID NO: 27476 - DNA, 80 bp, synthetic construct
  misc_feature 1..80: note = Artificially Synthesized Probe
  source 1..80: mol_type = other DNA
aagtttgattcagtcttgaaaataccatttctctcatttctcctgaccagtagctcccctcgtatttgatggtgaagatt

SEQ ID NO: 27477 - DNA, 80 bp, synthetic construct
  misc_feature 1..80: note = Artificially Synthesized Probe
  source 1..80: mol_type = other DNA
ttttctctttttttctctatgtacaacctctttttctcctcctccagttcctaggtgtctctccctgcctttctctcacc

SEQ ID NO: 27478 - DNA, 80 bp, synthetic construct
  misc_feature 1..80: note = Artificially Synthesized Probe
  source 1..80: mol_type = other DNA
gctgtgttcctgcactaagctgcttaagaaagccaagcagctgaaaacaggaaacctgcattttagctaatctgtgtttt

SEQ ID NO: 27479 - DNA, 80 bp, synthetic construct
  misc_feature 1..80: note = Artificially Synthesized Probe
  source 1..80: mol_type = other DNA
aaaaatctccctgtaagatatttcattgtcattgtccacctggtacttccagcctccagaacgttatggttagagctttg

SEQ ID NO: 27480 - DNA, 80 bp, synthetic construct
  misc_feature 1..80: note = Artificially Synthesized Probe
  source 1..80: mol_type = other DNA
tttggcagagccatggattttcacagccctgtaccctttattctcaaaaataggttgatttttttaagtaggtaggtcct

SEQ ID NO: 27481 - DNA, 80 bp, synthetic construct
  misc_feature 1..80: note = Artificially Synthesized Probe
  source 1..80: mol_type = other DNA
gctacagccaccatgaggggtcatggaacgggcaggctgagagccatgggccccaggtctggtggccctgcatatggagg

SEQ ID NO: 27482 - DNA, 80 bp, synthetic construct
  misc_feature 1..80: note = Artificially Synthesized Probe
  source 1..80: mol_type = other DNA
accaggctttttaggtttacatgtttgcctttttagaaaagagcagccccacatttcaatacggttgtgcaccatatccc

SEQ ID NO: 27483 - DNA, 80 bp, synthetic construct
  misc_feature 1..80: note = Artificially Synthesized Probe
  source 1..80: mol_type = other DNA
gaagtctgttctttactagtttttggctgatggaaataagccctgaaggtacagcatgagttaacctggatggaagcatc

SEQ ID NO: 27484 - DNA, 80 bp, synthetic construct
  misc_feature 1..80: note = Artificially Synthesized Probe
  source 1..80: mol_type = other DNA
tcccacgttgtaccttttcacatgttaacctgaatcctacgttttacgataggaaagaatcagtccttgtggcagaggcc

SEQ ID NO: 27485 - DNA, 80 bp, synthetic construct
  misc_feature 1..80: note = Artificially Synthesized Probe
  source 1..80: mol_type = other DNA
gcgtggcacggaccagaggctgcacagcagcatcttcgtaaccatagcaaccagcaaccagcctcttcctcccaggcagg

SEQ ID NO: 27486 - DNA, 80 bp, synthetic construct
  misc_feature 1..80: note = Artificially Synthesized Probe
  source 1..80: mol_type = other DNA
ttttttcctccttggaaatggtcccgtttttcaatgctgagtcattcttccattctactggatttgattgacagatacct

SEQ ID NO: 27487 - DNA, 80 bp, synthetic construct
  misc_feature 1..80: note = Artificially Synthesized Probe
  source 1..80: mol_type = other DNA
tatagcaaggatttttaaaggtagggttgcagaagctacaggcaacatcataaatcaacccatggaggccacacattggt

SEQ ID NO: 27488 - DNA, 80 bp, synthetic construct
  misc_feature 1..80: note = Artificially Synthesized Probe
  source 1..80: mol_type = other DNA
ccaaattataaagctggtttggagttaagaagggcctggacacaaacactttgctcaccaagtcaaaataaatattattc

SEQ ID NO: 27489 - DNA, 80 bp, synthetic construct
  misc_feature 1..80: note = Artificially Synthesized Probe
  source 1..80: mol_type = other DNA
tcttgtgaatagtgctgcaatgaacgtgcatgtgtcttagtggtagaacgatgtatattcctttgggtttatacccagtc

SEQ ID NO: 27490 - DNA, 80 bp, synthetic construct
  misc_feature 1..80: note = Artificially Synthesized Probe
  source 1..80: mol_type = other DNA
aacctttgtccccaaatccattttcaagaattaaaaagcagcttcaggacacagtttcataaaaacaaaagcaaagctaa

SEQ ID NO: 27491 - DNA, 80 bp, synthetic construct
  misc_feature 1..80: note = Artificially Synthesized Probe
  source 1..80: mol_type = other DNA
ggttgacctcacacctggcctcaatttccagccctctcatttaccagcgaatagacttcaaacctcgtaaaaaaaaactc

SEQ ID NO: 27492 - DNA, 80 bp, synthetic construct
  misc_feature 1..80: note = Artificially Synthesized Probe
  source 1..80: mol_type = other DNA
tgtgcgtaattcagtccatagcacccaccaaaccacagaagctgccccgagctgatgtcccgctatcggtgcggctgcag

SEQ ID NO: 27493 - DNA, 80 bp, synthetic construct
  misc_feature 1..80: note = Artificially Synthesized Probe
  source 1..80: mol_type = other DNA
ccgctgacaccgggatggcagctcttaatcccttgatgccatgaatccagcagagcgagcctgagaatggatttgagggg

SEQ ID NO: 27494 - DNA, 80 bp, synthetic construct
  misc_feature 1..80: note = Artificially Synthesized Probe
  source 1..80: mol_type = other DNA
ctgttctagttgaaggaacttttgaaattgctctggaagtcctggttgttcaggtgtttcctcgggtgatgactgtttcc

SEQ ID NO: 27495 - DNA, 80 bp, synthetic construct
  misc_feature 1..80: note = Artificially Synthesized Probe
  source 1..80: mol_type = other DNA
aaattttaaatggtgctttttttctatgtaagcatcataacagtgtggccatcagcccagtaagaagaatcatctcccat

SEQ ID NO: 27496 - DNA, 80 bp, synthetic construct
  misc_feature 1..80: note = Artificially Synthesized Probe
  source 1..80: mol_type = other DNA
aaaaatgataagttctctgtcttcttcattgaaggtgtggcaggaatgtggtttggtttccttgggtctgtctttgttga

SEQ ID NO: 27497 - DNA, 80 bp, synthetic construct
  misc_feature 1..80: note = Artificially Synthesized Probe
  source 1..80: mol_type = other DNA
tgacttggagaaatacatctcaaggtatttttctgctttttagatgattcagaagtgtccatattctgcctacgtatata

SEQ ID NO: 27498 - DNA, 80 bp, synthetic construct
  misc_feature 1..80: note = Artificially Synthesized Probe
  source 1..80: mol_type = other DNA
cgtatccccttcctttcagaattgctcgtcatgttctcatagagactttcccagggagaactacacaggatagaggccat

SEQ ID NO: 27499 - DNA, 80 bp, synthetic construct
  misc_feature 1..80: note = Artificially Synthesized Probe
  source 1..80: mol_type = other DNA
ctttctgtctccattgctagctcagctagcaacataacagaggactagatgcacgtgtgttatttgaatggcataacaga

SEQ ID NO: 27500 - DNA, 80 bp, synthetic construct
  misc_feature 1..80: note = Artificially Synthesized Probe
  source 1..80: mol_type = other DNA
acagacggcctgtatgcacaaccaaaccgcagacggcctgtacccacagtcagaccgcagacggcctgtatgaacagtca

SEQ ID NO: 27501 - DNA, 80 bp, synthetic construct
  misc_feature 1..80: note = Artificially Synthesized Probe
  source 1..80: mol_type = other DNA
ctcctccttccacttctctcctcctgttttctagtttgaaactcttaccaataatgctgctgtaaacatcttctgcatat

SEQ ID NO: 27502 - DNA, 80 bp, synthetic construct
  misc_feature 1..80: note = Artificially Synthesized Probe
  source 1..80: mol_type = other DNA
tgatcagaggttcttacatgtaattcagtgccattcatcaatattatcctttgtagttagaacttccattaggttctgga

SEQ ID NO: 27503 - DNA, 80 bp, synthetic construct
  misc_feature 1..80: note = Artificially Synthesized Probe
  source 1..80: mol_type = other DNA
tgagatcagagtttactgcagccttgaactcctggctcaggctctccttctgcctcagtcaccctagtcactgagactaa

SEQ ID NO: 27504 - DNA, 80 bp, synthetic construct
  misc_feature 1..80: note = Artificially Synthesized Probe
  source 1..80: mol_type = other DNA
ttacgtatttcaattacttgagcttttctgggtctttttttaggttcctgcatatggccaattttggcaaatgttttgtg

SEQ ID NO: 27505 - DNA, 80 bp, synthetic construct
  misc_feature 1..80: note = Artificially Synthesized Probe
  source 1..80: mol_type = other DNA
caccgcgcctggcctgaaattaccctctttatctctttcagtgatttcagtcttaaaatctacttatctgattttagtat

SEQ ID NO: 27506 - DNA, 80 bp, synthetic construct
  misc_feature 1..80: note = Artificially Synthesized Probe
  source 1..80: mol_type = other DNA
tgcctttggtttttaaaagttttaccctgctgtcctaggcatggctttgtatccatgtgttctgtgtagagctgaaggct

SEQ ID NO: 27507 - DNA, 80 bp, synthetic construct
  misc_feature 1..80: note = Artificially Synthesized Probe
  source 1..80: mol_type = other DNA
gcaggagactcaggggctcatagggcactttaacaaagggtaacacgatgcagagaagtcactgtacagaggaaaaggac

SEQ ID NO: 27508 - DNA, 80 bp, synthetic construct
  misc_feature 1..80: note = Artificially Synthesized Probe
  source 1..80: mol_type = other DNA
ttcctctcccaaaggcccttttttgtatgacttaaaaagtgcaaagcagtgagtaaggtggtggttgatggaatgatgtc

SEQ ID NO: 27509 - DNA, 80 bp, synthetic construct
  misc_feature 1..80: note = Artificially Synthesized Probe
  source 1..80: mol_type = other DNA
tcagtctcgatctgaacatgcccagataattggggtcattttcttcggaaggaaaaaaatcagcttttggcactggctat

SEQ ID NO: 27510 - DNA, 80 bp, synthetic construct
  misc_feature 1..80: note = Artificially Synthesized Probe
  source 1..80: mol_type = other DNA
ttatccagatgcccctctcttccaactgatcaaagtagtaggtgtcactcacttctaccgtaaatttgtgcatattaatg

SEQ ID NO: 27511 - DNA, 80 bp, synthetic construct
  misc_feature 1..80: note = Artificially Synthesized Probe
  source 1..80: mol_type = other DNA
accagggtttctaggaacgcttgctggatgagtgaacagatgcgtgaatgacttgtcgcttcttcttcttgtggctgcac

SEQ ID NO: 27512 - DNA, 80 bp, synthetic construct
  misc_feature 1..80: note = Artificially Synthesized Probe
  source 1..80: mol_type = other DNA
agcaaggaaagctcttggtacagccgagccctgtttcaggggccgcaggtgcaggggcttccctaggagcctcccctggg

SEQ ID NO: 27513 - DNA, 80 bp, synthetic construct
  misc_feature 1..80: note = Artificially Synthesized Probe
  source 1..80: mol_type = other DNA
cagtggtaccttcagaggaagcctctgagggactcggtggtgtcagttaattacagaagttttgacagactttggtttat

SEQ ID NO: 27514 - DNA, 80 bp, synthetic construct
  misc_feature 1..80: note = Artificially Synthesized Probe
  source 1..80: mol_type = other DNA
tgtacgtcaacagttatcatccacactgttcactgtgccttcaagagtatcaggagttatacaagagacagattccagtt

SEQ ID NO: 27515 - DNA, 80 bp, synthetic construct
  misc_feature 1..80: note = Artificially Synthesized Probe
  source 1..80: mol_type = other DNA
atcgacaactgcacagttttttttcttgtgtgttggtcactttggggaccccgttagtgggattcttacttcctattttc

SEQ ID NO: 27516 - DNA, 80 bp, synthetic construct
  misc_feature 1..80: note = Artificially Synthesized Probe
  source 1..80: mol_type = other DNA
tgtatcgtatgtcgacaattaatacgcagttatcagagttccttacgtatggagcattgcacttggtttatggagacact

SEQ ID NO: 27517 - DNA, 80 bp, synthetic construct
  misc_feature 1..80: note = Artificially Synthesized Probe
  source 1..80: mol_type = other DNA
cgctgggccccattcgtttttacttaaatgtgtgtgtaatgaggctaactccaggacagtgcggaccctaacatcagcat

SEQ ID NO: 27518 - DNA, 80 bp, synthetic construct
  misc_feature 1..80: note = Artificially Synthesized Probe
  source 1..80: mol_type = other DNA
ttacaggcaggtggaagatttcactgagcttctcaacttcctgatcaaaggttctctctggaacagagatcaaaaggctt

SEQ ID NO: 27519 - DNA, 80 bp, synthetic construct
  misc_feature 1..80: note = Artificially Synthesized Probe
  source 1..80: mol_type = other DNA
agtagtctggtaatagtcaatgacattcagaataaatgatgtgcaatgtgagcgtgcatagcttgaagttccatcttagg

SEQ ID NO: 27520 - DNA, 80 bp, synthetic construct
  misc_feature 1..80: note = Artificially Synthesized Probe
  source 1..80: mol_type = other DNA
ctcgggagctgtaggatttgggattcattagcgagtgtgagcaaggtgcttttggggcagagagctgcgtgagccaagaa

SEQ ID NO: 27521 - DNA, 80 bp, synthetic construct
  misc_feature 1..80: note = Artificially Synthesized Probe
  source 1..80: mol_type = other DNA
acagatttttctgtgagcccccccagggcccctcgttttggtttgtggggactgattgtgagccccccagggtttgtttt

SEQ ID NO: 27522 - DNA, 80 bp, synthetic construct
  misc_feature 1..80: note = Artificially Synthesized Probe
  source 1..80: mol_type = other DNA
tctcaaagtgtgcatgtgtgtctgtgcatttgtttttggtgcaaagggcatcgcactaattaatgtgtacatttgctcat

SEQ ID NO: 27523 - DNA, 80 bp, synthetic construct
  misc_feature 1..80: note = Artificially Synthesized Probe
  source 1..80: mol_type = other DNA
ctccttgaagatgtaaccaggttgatcatttaataatgcgccatctgatttgacttctgatagctcaagctcttaccctc

SEQ ID NO: 27524 - DNA, 80 bp, synthetic construct
  misc_feature 1..80: note = Artificially Synthesized Probe
  source 1..80: mol_type = other DNA
aaagttagaagaaaaaagcacatgcatgaaattcacaagcaaaggcccccaaaggtctgactccatgaaatttatcacaa

SEQ ID NO: 27525 - DNA, 80 bp, synthetic construct
  misc_feature 1..80: note = Artificially Synthesized Probe
  source 1..80: mol_type = other DNA
ggtacatgtgcacaatgtgtaggctagttacatatgtatacatgtgccatgctggtgtgctgcacccattaactcgtcat

SEQ ID NO: 27526 - DNA, 80 bp, synthetic construct
  misc_feature 1..80: note = Artificially Synthesized Probe
  source 1..80: mol_type = other DNA
tcccagcaccatttattaaatagggaatcctttccccattgcttgtttttctaaggtttgtcaaagatcagatggttgta

SEQ ID NO: 27527 - DNA, 80 bp, synthetic construct
  misc_feature 1..80: note = Artificially Synthesized Probe
  source 1..80: mol_type = other DNA
ttgagagtttttagcatgaagtgttgttgaattttgtcaaaggccttttctgcgtctattaagataatcatgtggttttt

SEQ ID NO: 27528 - DNA, 80 bp, synthetic construct; identical to SEQ ID NO: 27100
  misc_feature 1..80: note = Artificially Synthesized Probe
  source 1..80: mol_type = other DNA

SEQ ID NO: 27529 - DNA, 80 bp, synthetic construct
  misc_feature 1..80: note = Artificially Synthesized Probe
  source 1..80: mol_type = other DNA
ttttggcatgattttgcagtggctggtactggttgttccttttcatgtttagtgcttccttcaggagctcttttagggca

SEQ ID NO: 27530 - DNA, 80 bp, synthetic construct
  misc_feature 1..80: note = Artificially Synthesized Probe
  source 1..80: mol_type = other DNA
gtggtttttcgtgaaccgcgaatgctgctgcctgatcgttcttctggaagttttgtctcagaggagtacccggccacgtg

SEQ ID NO: 27531 - DNA, 80 bp, synthetic construct
  misc_feature 1..80: note = Artificially Synthesized Probe
  source 1..80: mol_type = other DNA
tgaagggtgagttaggaattaggtacattttccaggattctaaggaagaaggaaaaacagaaaaattgctattctgcagg

SEQ ID NO: 27532 - DNA, 80 bp, synthetic construct
  misc_feature 1..80: note = Artificially Synthesized Probe
  source 1..80: mol_type = other DNA
ctgagttctgtttatctatgtttacaaaatcctaagtgagtgagggaaagaaggtgagacaggcaggaggcagctctgag

SEQ ID NO: 27533 - DNA, 80 bp, synthetic construct
  misc_feature 1..80: note = Artificially Synthesized Probe
  source 1..80: mol_type = other DNA
atccgcccgataaatattgactggtccatcttcccagatggataagcccattcatacactgcataaaaatactacctgaa

SEQ ID NO: 27534 - DNA, 80 bp, synthetic construct
  misc_feature 1..80: note = Artificially Synthesized Probe
  source 1..80: mol_type = other DNA
caaggactagatatgtcaccaactcagacaggacctgcctttcatgccatggcagcaaagcagcacaattctgggaactg

SEQ ID NO: 27535 - DNA, 80 bp, synthetic construct
  misc_feature 1..80: note = Artificially Synthesized Probe
  source 1..80: mol_type = other DNA
gattctgaatgcatggtgttgatgtcagatattagcaccattgttctggcttgcgattgtgttgcttcatttgtttgtgt

SEQ ID NO: 27536 - DNA, 80 bp, synthetic construct
  misc_feature 1..80: note = Artificially Synthesized Probe
  source 1..80: mol_type = other DNA
attttgggaagtgcacaaaatgtagaagttttagcaactgctgggcagtgcttttcttcccctttggctcagagacagtc

SEQ ID NO: 27537 - DNA, 80 bp, synthetic construct
  misc_feature 1..80: note = Artificially Synthesized Probe
  source 1..80: mol_type = other DNA
ctgtttttctatgtgtattgcaatcctaatttgtgttttaaacatatattaagcgaccctggaatatcaggggccacctt

SEQ ID NO: 27538 - DNA, 80 bp, synthetic construct
  misc_feature 1..80: note = Artificially Synthesized Probe
  source 1..80: mol_type = other DNA
tcctgccaaatcccagttacaccctggccaccagaagcacgcttctgatttctttgattcatttattatcatttttgaga

SEQ ID NO: 27539 - DNA, 80 bp, synthetic construct
  misc_feature 1..80: note = Artificially Synthesized Probe
  source 1..80: mol_type = other DNA
cgtgtgcaagggcagtacacttaacgtgtttcgtggtctgtagaaaaattaaagcttgagtgcactgtttgatctttaac

SEQ ID NO: 27540 - DNA, 80 bp, synthetic construct
  misc_feature 1..80: note = Artificially Synthesized Probe
  source 1..80: mol_type = other DNA
aattgtatcagtaggacctgagcgtgcatttaatgctcacacgtgtgatgtctgcatgagatgtgggttgctgaattctc

SEQ ID NO: 27541 - DNA, 80 bp, synthetic construct
  misc_feature 1..80: note = Artificially Synthesized Probe
  source 1..80: mol_type = other DNA
atgggaaaacagccaatttgtaattagcctagcaattatttacttttagattatagatgtggcagtgcttggtgtgtgca

SEQ ID NO: 27542 - DNA, 80 bp, synthetic construct
  misc_feature 1..80: note = Artificially Synthesized Probe
  source 1..80: mol_type = other DNA
ctgtagcttttcaccatgatcactgttaatattatatgatggtcatagaactcagacagctgaaaggctttggggaagca

SEQ ID NO: 27543 - DNA, 80 bp, synthetic construct
  misc_feature 1..80: note = Artificially Synthesized Probe
  source 1..80: mol_type = other DNA
acacgtgccgggcgaatgctgttcatttttattccatttgttcctctccagggctccacagaaaggtggttttcctgtat

SEQ ID NO: 27544 - DNA, 80 bp, synthetic construct
  misc_feature 1..80: note = Artificially Synthesized Probe
  source 1..80: mol_type = other DNA
gctggtggaagaacaatgtaatctagctttaaacacaaacacacattcaggagatccaatcagcagtgacgcccaacttg

SEQ ID NO: 27545 - DNA, 80 bp, synthetic construct
  misc_feature 1..80: note = Artificially Synthesized Probe
  source 1..80: mol_type = other DNA
tatttgggaaattgtgtggggcagaaggaaaatccaggagccttgttttccacatgtttccatcacacccgttaattgaa

SEQ ID NO: 27546 - DNA, 80 bp, synthetic construct
  misc_feature 1..80: note = Artificially Synthesized Probe
  source 1..80: mol_type = other DNA
gcctcatggaatctcacacgcccgggacttccgtgatgtttccctcacggaatctcacacacccgggacccccgtgacgt

SEQ ID NO: 27547 - DNA, 80 bp, synthetic construct
  misc_feature 1..80: note = Artificially Synthesized Probe
  source 1..80: mol_type = other DNA
tgaacagtaatcatgagtacagagtctgagatgtcagcgtctggaaagacatttcctgttacacgctgaacaaaagcttt

SEQ ID NO: 27548 - DNA, 80 bp, synthetic construct
  misc_feature 1..80: note = Artificially Synthesized Probe
  source 1..80: mol_type = other DNA
agaggagtggtcaccaccaagagacgtttaaaccagaccttcttttatccactcaagcaactagtgtagagtaactcaag

SEQ ID NO: 27549 - DNA, 80 bp, synthetic construct
  misc_feature 1..80: note = Artificially Synthesized Probe
  source 1..80: mol_type = other DNA
ttctcatctcacagggcactgcgagccgcctgtcgcaatcagcattgagagccaaaacagctgtttggtgactgtgcgag

SEQ ID NO: 27550 - DNA, 80 bp, synthetic construct
  misc_feature 1..80: note = Artificially Synthesized Probe
  source 1..80: mol_type = other DNA
tactaagtaaaacaagaagtagaaagtgttatctcttgaaattaattctgaaaatccgccctctgcacttcttacataga

SEQ ID NO: 27551 - DNA, 80 bp, synthetic construct
  misc_feature 1..80: note = Artificially Synthesized Probe
  source 1..80: mol_type = other DNA
cacctcacttttttgcggtgagaacaatgaaatccactgtcagtgattttctagaatatgatgtgttgctatgaactgca

SEQ ID NO: 27552 - DNA, 80 bp, synthetic construct
  misc_feature 1..80: note = Artificially Synthesized Probe
  source 1..80: mol_type = other DNA
tccacatcctctccagcacctgttgtttcctggctttttaatgatcgccattctaactggtctgagatggtatctcattg

SEQ ID NO: 27553 - DNA, 80 bp, synthetic construct
  misc_feature 1..80: note = Artificially Synthesized Probe
  source 1..80: mol_type = other DNA
cctcaggtgaaatttctccttggcattaccgggaccaaatccacgtactgtgacattcaagtcaacgtgacaggtgtgaa

SEQ ID NO: 27554 - DNA, 80 bp, synthetic construct
  misc_feature 1..80: note = Artificially Synthesized Probe
  source 1..80: mol_type = other DNA
tgtcccagcatagggctgcaccccctccgctctcccggccttcattcctcgtgccctgctctcctgagaagcttgggcac

SEQ ID NO: 27555 - DNA, 80 bp, synthetic construct
  misc_feature 1..80: note = Artificially Synthesized Probe
  source 1..80: mol_type = other DNA
ccgtcacattttttcctgatccacttaactgcttgttgtagtagtgctcacctgttaaagaccctactttcatgttatgt

SEQ ID NO: 27556 - DNA, 80 bp, synthetic construct
  misc_feature 1..80: note = Artificially Synthesized Probe
  source 1..80: mol_type = other DNA
tgatgagccaggggcggtaactgctcatcacacatacaccagggttctcccgaaaagtgagactgacaggatatatacag

SEQ ID NO: 27557 - DNA, 80 bp, synthetic construct
  misc_feature 1..80: note = Artificially Synthesized Probe
  source 1..80: mol_type = other DNA
ttgaggagtagcctgggtcattcagggacccactggaaatgagccatggccgtggatgaggaacagaggccaattctgtg

SEQ ID NO: 27558 - DNA, 80 bp, synthetic construct
  misc_feature 1..80: note = Artificially Synthesized Probe
  source 1..80: mol_type = other DNA
gcaagggctataccagttgtggatgaatcctcagagctgagtttcagctgctccttaaaatgcagcagaggtcgcgtggt

SEQ ID NO: 27559 - DNA, 80 bp, synthetic construct
  misc_feature 1..80: note = Artificially Synthesized Probe
  source 1..80: mol_type = other DNA
tagaaagtgaatgctgtccttttagtgaaaaatcccactttctgatggagagtcttatgggtatttgcactcggtggctc

SEQ ID NO: 27560 - DNA, 80 bp, synthetic construct
  misc_feature 1..80: note = Artificially Synthesized Probe
  source 1..80: mol_type = other DNA
gaagactctgagagaatggagagtggcagctttcgctttgttttccgttcccacatatcggtttggcatcgaacgatgcg

SEQ ID NO: 27561 - DNA, 80 bp, synthetic construct
  misc_feature 1..80: note = Artificially Synthesized Probe
  source 1..80: mol_type = other DNA
gcccagggagtccgttttggacatcgcatctccggacggatatagatcgctttagacacccagtgtgtggtcaccggcac

SEQ ID NO: 27562 - DNA, 80 bp, synthetic construct
  misc_feature 1..80: note = Artificially Synthesized Probe
  source 1..80: mol_type = other DNA
gctgttgtggggcgtgtgtgagccctcaggactgtgaggatgtgtggtttcagtttgggtttcttataatggggaatcat

SEQ ID NO: 27563 - DNA, 80 bp, synthetic construct
  misc_feature 1..80: note = Artificially Synthesized Probe
  source 1..80: mol_type = other DNA
acccttctcagcgatctctgtggaacagatgctaaaggttctcttttatctagcagattctctactcttccctttaagtt

SEQ ID NO: 27564 - DNA, 80 bp, synthetic construct
  misc_feature 1..80: note = Artificially Synthesized Probe
  source 1..80: mol_type = other DNA
tgcgctgtgttagattccgcgagagattgaaactaaacaggatgagacaatctcatcatcttctgagatcggaagttctc

SEQ ID NO: 27565 - DNA, 80 bp, synthetic construct
  misc_feature 1..80: note = Artificially Synthesized Probe
  source 1..80: mol_type = other DNA
gtttttattttttgtaactgtaggttaagaagtcaatgctctgcctcagtaaagtgatagttttatagctgatgtcgagg

SEQ ID NO: 27566 - DNA, 80 bp, synthetic construct
  misc_feature 1..80: note = Artificially Synthesized Probe
  source 1..80: mol_type = other DNA
ctgagcatttagaaatcatgttaacccctctgcacccaaggtgatgttactgtgagctgctcggtggatcacaaaggagt

SEQ ID NO: 27567 - DNA, 80 bp, synthetic construct
  misc_feature 1..80: note = Artificially Synthesized Probe
  source 1..80: mol_type = other DNA
tttcaccctctccattcctagatgtgtccttcacagtgttacctaaatctgcaattcttccttttttatttcaatagatt

SEQ ID NO: 27568 - DNA, 80 bp, synthetic construct
  misc_feature 1..80: note = Artificially Synthesized Probe
  source 1..80: mol_type = other DNA
tcttgtataaggtgagagatgaggatccagtttcattcttctatatgtggcttgccgattatcccaggaccatttgttga

SEQ ID NO: 27569 - DNA, 80 bp, synthetic construct
  misc_feature 1..80: note = Artificially Synthesized Probe
  source 1..80: mol_type = other DNA
tacacctctacaaggaaaactgtaaaacactgatgaaagaaatcatagatgacacaaacaaatggtaacacatctcatgc

SEQ ID NO: 27570 - DNA, 80 bp, synthetic construct
  misc_feature 1..80: note = Artificially Synthesized Probe
  source 1..80: mol_type = other DNA
cgtgtcatcagcggtgcttgaccactttcaactggagaaattttatctttttagcaactcaaataatttgccagtttcat

SEQ ID NO: 27571 - DNA, 80 bp, synthetic construct
  misc_feature 1..80: note = Artificially Synthesized Probe
  source 1..80: mol_type = other DNA
tcaagtgaggatgagctgtggtttgaggacgtttccaagcttattttgaacaatgttccgtggttttgcaacatgatctc

SEQ ID NO: 27572 - DNA, 80 bp, synthetic construct
  misc_feature 1..80: note = Artificially Synthesized Probe
  source 1..80: mol_type = other DNA
aaggctcttggttcttggtccttcacctgattcacagcgctaaagcctagagcagagtgggcacacaattattttatgaa

SEQ ID NO: 27573 - DNA, 80 bp, synthetic construct
  misc_feature 1..80: note = Artificially Synthesized Probe
  source 1..80: mol_type = other DNA
ctctctcttcccccccgcccaccccccatgattagcattttaattggattaatgttcttaaattcatgtttctgaataag

SEQ ID NO: 27574 - DNA, 80 bp, synthetic construct
  misc_feature 1..80: note = Artificially Synthesized Probe
  source 1..80: mol_type = other DNA
catattgctcacattataatgttaaatattcctgactttatatcacccgtgttttagtgagggatttccacctgtattcc

SEQ ID NO: 27575 - DNA, 80 bp, synthetic construct
  misc_feature 1..80: note = Artificially Synthesized Probe
  source 1..80: mol_type = other DNA
ggcctctttcaattaattgatcatgtgtctgcttcttccctattgtctgttttcagttaggctctgaggtcctttttaac

SEQ ID NO: 27576 - DNA, 80 bp, synthetic construct
  misc_feature 1..80: note = Artificially Synthesized Probe
  source 1..80: mol_type = other DNA
atgatcatgcgaggctgatagctgaggctggttgagagctgagatctaaagctaatcgtgcaggttgagagtggtaccct

SEQ ID NO: 27577 - DNA, 80 bp, synthetic construct
  misc_feature 1..80: note = Artificially Synthesized Probe
  source 1..80: mol_type = other DNA
cacgtatgtgccaccatgcctggctaattttttttttcaatttttttacagattgtctcactatgttgcccaggctggac

SEQ ID NO: 27578 - DNA, 80 bp, synthetic construct
  misc_feature 1..80: note = Artificially Synthesized Probe
  source 1..80: mol_type = other DNA
ctttgtgctcatgaattctcagtgtttagctctcaattatcagggagaacatggagtatttagttttctgtctctgtgtt

SEQ ID NO: 27579 - DNA, 80 bp, synthetic construct
  misc_feature 1..80: note = Artificially Synthesized Probe
  source 1..80: mol_type = other DNA
atttttgtttttgtagaaattgctttcagaggcatcatacaatgtttgccaacactatgttcagaatggtattttctagg

SEQ ID NO: 27580 - DNA, 80 bp, synthetic construct
  misc_feature 1..80: note = Artificially Synthesized Probe
  source 1..80: mol_type = other DNA
tagtttgacttcttctctttctatctgaatgctttctatttgtttctcttgcctgactgctctggcaaggacttccagta

SEQ ID NO: 27581 - DNA, 80 bp, synthetic construct
  misc_feature 1..80: note = Artificially Synthesized Probe
  source 1..80: mol_type = other DNA
ctttacctgtgacccaaagattgtggcatgttgtatatttgttttcattagtttcaaataatgtttggatttctaccttc

SEQ ID NO: 27582 - DNA, 80 bp, synthetic construct
  misc_feature 1..80: note = Artificially Synthesized Probe
  source 1..80: mol_type = other DNA
ttcacatgtgagatgagtctcttgaagacagcgtacagttgagtcttgcttgtttcttcagctttccactctttgccttt

SEQ ID NO: 27583 - DNA, 80 bp, synthetic construct
  misc_feature 1..80: note = Artificially Synthesized Probe
  source 1..80: mol_type = other DNA
tggttctgtctgaaaattgttgtcgttcaactgttggaccattttactgttttccttggattaggtttcaacctcattct

SEQ ID NO: 27584 - DNA, 80 bp, synthetic construct
  misc_feature 1..80: note = Artificially Synthesized Probe
  source 1..80: mol_type = other DNA
agtcctcccctaggagtcactcaaggccaataacaagtcctggtgcccagcaaccctgtccagggttcccaccttcctcc

SEQ ID NO: 27585 - DNA, 80 bp, synthetic construct
  misc_feature 1..80: note = Artificially Synthesized Probe
  source 1..80: mol_type = other DNA
gggaagtgggataatcaacctgtcggaatctcaaggataaaaacaattgaatagtaggcagagatttattaagcacccat

SEQ ID NO: 27586 - DNA, 80 bp, synthetic construct
  misc_feature 1..80: note = Artificially Synthesized Probe
  source 1..80: mol_type = other DNA
caaggatatggacaaactgaaatcctcatatgttgctgttggaaatgtaaagttatttagccattgtggaaaagagttta

SEQ ID NO: 27587 - DNA, 80 bp, synthetic construct
  misc_feature 1..80: note = Artificially Synthesized Probe
  source 1..80: mol_type = other DNA
ttctactaggtacatactaccaaaaataagaagaaatactggggagctcttggtccaaggacagaacatctcagttagac

SEQ ID NO: 27588 - DNA, 80 bp, synthetic construct
  misc_feature 1..80: note = Artificially Synthesized Probe
  source 1..80: mol_type = other DNA
caaatagcatagctatgaaaagagagaggagataacaaatgttagtgcagagaaaagggaacccccacacttcagcagga

SEQ ID NO: 27589 - DNA, 80 bp, synthetic construct
  misc_feature 1..80: note = Artificially Synthesized Probe
  source 1..80: mol_type = other DNA
tacagttgagatttgcttcttttcttttcttttttttttttgatggagttctgctctgtcgcccagactggagtgcagtg

SEQ ID NO: 27590 - DNA, 80 bp, synthetic construct
  misc_feature 1..80: note = Artificially Synthesized Probe
  source 1..80: mol_type = other DNA
tggagggagtccccaactcattctgtgaagccgatatttgtctgatactaaaaccatacaatgacatcataagaaactac

SEQ ID NO: 27591 - DNA, 80 bp, synthetic construct
  misc_feature 1..80: note = Artificially Synthesized Probe
  source 1..80: mol_type = other DNA
gttttggaacttgataatgatctgtttagggtttgtatttcttgctgattcaatctggcaagattatgtatttccaggga

SEQ ID NO: 27592 - DNA, 80 bp, synthetic construct
  misc_feature 1..80: note = Artificially Synthesized Probe
  source 1..80: mol_type = other DNA
acctgacttcaaactgtactataaacctacagtaaccaaatagcatggcactggtacaaaaacagacacataaaccaaca

SEQ ID NO: 27593 - DNA, 80 bp, synthetic construct
  misc_feature 1..80: note = Artificially Synthesized Probe
  source 1..80: mol_type = other DNA
ctattattaaaaagtcgaaaaacaacagatgctggtgagggtgcagagaaaagggaatgcttatatcctgtttgtgggaa

SEQ ID NO: 27594 - DNA, 80 bp, synthetic construct
  misc_feature 1..80: note = Artificially Synthesized Probe
  source 1..80: mol_type = other DNA
ggtgtcttcctctggccccacaggctgtgaagagcccactttttggggccaacatgagcagtcctctgtcctcatcattc

SEQ ID NO: 27595 - DNA, 80 bp, synthetic construct
  misc_feature 1..80: note = Artificially Synthesized Probe
  source 1..80: mol_type = other DNA
ggatgcattcccctacctttcactgaatatttgccacgtgatatatttacagagatgagtcaggcctggcctgtgctcta

SEQ ID NO: 27596 - DNA, 80 bp, synthetic construct
  misc_feature 1..80: note = Artificially Synthesized Probe
  source 1..80: mol_type = other DNA
atcagggcctgtctccccaggattagggtgacctctccttaaccatttacagcaacaatgaccctatttctaaactaagg

SEQ ID NO: 27597 - DNA, 80 bp, synthetic construct
  misc_feature 1..80: note = Artificially Synthesized Probe
  source 1..80: mol_type = other DNA
gtctcgttctctctcacgtggcatcgtgtctagttccctcacacatggcgtcgtgtctagttccctctcacatgttgccg

SEQ ID NO: 27598 - DNA, 80 bp, synthetic construct
  misc_feature 1..80: note = Artificially Synthesized Probe
  source 1..80: mol_type = other DNA
gcaccatgtctgcttctctcacatggcgccgtgtctagttctctcacatggcgccgtgtctggttctctcacatggtgcc

SEQ ID NO: 27599 - DNA, 80 bp, synthetic construct
  misc_feature 1..80: note = Artificially Synthesized Probe
  source 1..80: mol_type = other DNA
tctcacatggtgctatgtctagatctctctcacacatagcgtcatgtctagttctgtctcacacagagcatcgtgtctag

SEQ ID NO: 27600 - DNA, 80 bp, synthetic construct; identical to SEQ ID NO: 27598
  misc_feature 1..80: note = Artificially Synthesized Probe
  source 1..80: mol_type = other DNA

SEQ ID NO: 27601 - DNA, 80 bp, synthetic construct; identical to SEQ ID NO: 27599
  misc_feature 1..80: note = Artificially Synthesized Probe
  source 1..80: mol_type = other DNA

SEQ ID NO: 27602 - DNA, 80 bp, synthetic construct
  misc_feature 1..80: note = Artificially Synthesized Probe
  source 1..80: mol_type = other DNA
ggtgacgtgtctagttctctcacatggcgccgtgtctggttctctcgcatggcgccgtgtctagttctctcacgtggtgc

SEQ ID NO: 27603 - DNA, 80 bp, synthetic construct
  misc_feature 1..80: note = Artificially Synthesized Probe
  source 1..80: mol_type = other DNA
gaagttttaatatgacaaggtacatgaatgatgatcactgcctctactgaaacattcctttatggcccgagatggtctct

SEQ ID NO: 27604 - DNA, 80 bp, synthetic construct
  misc_feature 1..80: note = Artificially Synthesized Probe
  source 1..80: mol_type = other DNA
ttgtatgtttgttcttaggattccctgattaacatgccctctcctccttaatggtaagggacccacagtgagtgagtgca

SEQ ID NO: 27605 - DNA, 80 bp, synthetic construct
  misc_feature 1..80: note = Artificially Synthesized Probe
  source 1..80: mol_type = other DNA
accattgaaaccttcctcagtccacatttacttatataactccttttcttcaggcccctgagtaacctcactatccacat

SEQ ID NO: 27606 - DNA, 80 bp, synthetic construct
  misc_feature 1..80: note = Artificially Synthesized Probe
  source 1..80: mol_type = other DNA
caaaatgggtcgaagacctaaaggcaagagataaaattataaaaccgcaaggacgtgcatctttgtgatcttagattaag

SEQ ID NO: 27607 - DNA, 80 bp, synthetic construct
  misc_feature 1..80: note = Artificially Synthesized Probe
  source 1..80: mol_type = other DNA
agggttaactgccgaagggcatggatttatttttggagtgacgaaatgttatgtgattgattgtggggatggctgcacag

SEQ ID NO: 27608 - DNA, 80 bp, synthetic construct
  misc_feature 1..80: note = Artificially Synthesized Probe
  source 1..80: mol_type = other DNA
tctcactgaggggagcagcacagagccattggatttgggaattcatcatgctcttctgcctcaggttgaaaaattaaata

SEQ ID NO: 27609 - DNA, 80 bp, synthetic construct
  misc_feature 1..80: note = Artificially Synthesized Probe
  source 1..80: mol_type = other DNA
gtgtggagtgatggtccacatcggtggccgggaagacctttgagatcagtgtggagtgatggtccatgtcggtggccggg

SEQ ID NO: 27610 - DNA, 80 bp, synthetic construct
  misc_feature 1..80: note = Artificially Synthesized Probe
  source 1..80: mol_type = other DNA
tttgagatcagtgtgggaggcggtgccagcctgggtaatggctgagttcagggcgcctgggaagaggactgggcatagga

SEQ ID NO: 27611 - DNA, 80 bp, synthetic construct
  misc_feature 1..80: note = Artificially Synthesized Probe
  source 1..80: mol_type = other DNA
gcactgtcactgtgcttcccatctagttccttatgtcatctcttcaggtgtttctgaactactgaggcctaaatacaact

SEQ ID NO: 27612 - DNA, 80 bp, synthetic construct
  misc_feature 1..80: note = Artificially Synthesized Probe
  source 1..80: mol_type = other DNA
ctaggaccgtggtagatgttcagtcatgttcgctgaaggaagaagggagtgaatgaatgtcttctctgaggatagctgag

SEQ ID NO: 27613 - DNA, 80 bp, synthetic construct
  misc_feature 1..80: note = Artificially Synthesized Probe
  source 1..80: mol_type = other DNA
ttgtctgccttccctaacccgtgcaacaagcaatatcattaccacaatttctccctgagaactaacttctaaaaatttac

SEQ ID NO: 27614 - DNA, 80 bp, synthetic construct
  misc_feature 1..80: note = Artificially Synthesized Probe
  source 1..80: mol_type = other DNA
gtgtgggtgtgttgtgttgtcctgggtcacggtgtcaaagtcatgtcatgtcacacttgccacactgtggtgttgtcaca

SEQ ID NO: 27615 - DNA, 80 bp, synthetic construct
  misc_feature 1..80: note = Artificially Synthesized Probe
  source 1..80: mol_type = other DNA
gtgtgtgccctttcttcccggggctccaggagagctgccagggcccctttatctcccggctccatcggctgctactgcgc

SEQ ID NO: 27616 - DNA, 80 bp, synthetic construct
  misc_feature 1..80: note = Artificially Synthesized Probe
  source 1..80: mol_type = other DNA
aaacatatgtaacctgtgatgaagatgaactgtggggaaagccctgaatctgtggtcagttttgacgcatattttggttc

SEQ ID NO: 27617 - DNA, 80 bp, synthetic construct
  misc_feature 1..80: note = Artificially Synthesized Probe
  source 1..80: mol_type = other DNA
tgagacgaaaaaatcccttttgggtttcgggggccgagtgagtgtgcagagttgttgacttttggattttagcttccctg

SEQ ID NO: 27618 - DNA, 80 bp, synthetic construct
  misc_feature 1..80: note = Artificially Synthesized Probe
  source 1..80: mol_type = other DNA
cctgcccgagcactgtatgtgtgtcctctcttgcctgggtgctgtgtgtgtgtgtcctcatcttgcccgggcgctgtgtg

SEQ ID NO: 27619 - DNA, 80 bp, synthetic construct
  misc_feature 1..80: note = Artificially Synthesized Probe
  source 1..80: mol_type = other DNA
cgcgcctcctgcaatcagatgcccgcgtggggagtctcaccttggaaactgaggggaaactgactgtgggccctctgttc

SEQ ID NO: 27620 - DNA, 80 bp, synthetic construct
  misc_feature 1..80: note = Artificially Synthesized Probe
  source 1..80: mol_type = other DNA
gaggctctgcctcagaatcccttgttgcctcctaacttttattttgaacaacacctcaactccctttttaatgttccgct

SEQ ID NO: 27621 - DNA, 80 bp, synthetic construct
  misc_feature 1..80: note = Artificially Synthesized Probe
  source 1..80: mol_type = other DNA
tgatggttgcagcaaaccaccatggcacctgtatacctatgtaagctgcacgttctgcacatgtatcccagaacttagta

SEQ ID NO: 27622 - DNA, 80 bp, synthetic construct
  misc_feature 1..80: note = Artificially Synthesized Probe
  source 1..80: mol_type = other DNA
aataaggacaatgtgataaacacctgacccctattagcggggactctgaattaactggagctttgatttcgaggtctgct

SEQ ID NO: 27623 - DNA, 80 bp, synthetic construct
  misc_feature 1..80: note = Artificially Synthesized Probe
  source 1..80: mol_type = other DNA
gaccccaaggctgctgcagaggatgatgaaattctgcagcctgtctgttgggtgtttgaaagctttattatttcttatta

SEQ ID NO: 27624 - DNA, 80 bp, synthetic construct
  misc_feature 1..80: note = Artificially Synthesized Probe
  source 1..80: mol_type = other DNA
atctttaaaacgagacagaccgggagggctggtcaacttccagatctttaaaaccagacagactgggagggcaggtcagc

SEQ ID NO: 27625 - DNA, 80 bp, synthetic construct
  misc_feature 1..80: note = Artificially Synthesized Probe
  source 1..80: mol_type = other DNA
tctcgctttcttgtcagaaagctgttaacagccttccctggctaagccagtgaagtgggaaacacctatttgcattttaa

SEQ ID NO: 27626 - DNA, 80 bp, synthetic construct
  misc_feature 1..80: note = Artificially Synthesized Probe
  source 1..80: mol_type = other DNA
gggccacagatgtcagttcatggatttgtctgttggtttacatttttatggcttgatttgtcaccacagcagatagattt

SEQ ID NO: 27627 - DNA, 80 bp, synthetic construct
  misc_feature 1..80: note = Artificially Synthesized Probe
  source 1..80: mol_type = other DNA
actaaaaagttccactaatatttgaaggaaaacagactcagctctagccagtctgtcttctaggacctgaacatggttag

SEQ ID NO: 27628 - DNA, 80 bp, synthetic construct
  misc_feature 1..80: note = Artificially Synthesized Probe
  source 1..80: mol_type = other DNA
tatgtacacagaattcttgacaacataggggtcaaaggacttctccactataaaatagtacccactttagataaacatac

SEQ ID NO: 27629 - DNA, 80 bp, synthetic construct
  misc_feature 1..80: note = Artificially Synthesized Probe
  source 1..80: mol_type = other DNA
aggccaagattttcctagaagtgaagaaatatactgggcctctttgatctaaagactcctaagactgaagccagacaagt

SEQ ID NO: 27630 - DNA, 80 bp, synthetic construct
  misc_feature 1..80: note = Artificially Synthesized Probe
  source 1..80: mol_type = other DNA
attatttgcttccttaaatcctgtcagttcctcctctgttggataaattccacattcataatcttgcccctactggtctg

SEQ ID NO: 27631 - DNA, 80 bp, synthetic construct
  misc_feature 1..80: note = Artificially Synthesized Probe
  source 1..80: mol_type = other DNA
cccctccgtagcaactctgttggacttcctttgccatcccttccctttttctcctctgcagatgtctgttggggcagaat

SEQ ID NO: 27632 - DNA, 80 bp, synthetic construct
  misc_feature 1..80: note = Artificially Synthesized Probe
  source 1..80: mol_type = other DNA
tatcatcttccttagctccaggaatacaaagatgttgggtggttattagatttcctgagagttacatgtctctgcagaag

SEQ ID NO: 27633 - DNA, 80 bp, synthetic construct
  misc_feature 1..80: note = Artificially Synthesized Probe
  source 1..80: mol_type = other DNA
tgagttttagatcttctttgtctgtttatgtgactgggagaagtaagaccccctcaaccctgaaaccccgtattattgtg

SEQ ID NO: 27634 - DNA, 80 bp, synthetic construct
  misc_feature 1..80: note = Artificially Synthesized Probe
  source 1..80: mol_type = other DNA
aatggggagaatgaatgtgacttttgatcgtcacagcctcattgacttataggatgcagaagcatttgttttgctttaaa

SEQ ID NO: 27635 - DNA, 80 bp, synthetic construct
  misc_feature 1..80: note = Artificially Synthesized Probe
  source 1..80: mol_type = other DNA
gactgtatacaccgttgacctgctacttagtaaaactgtttcttattgttagacgtgttgcaaaaaggtagatgggaagt

SEQ ID NO: 27636 - DNA, 80 bp, synthetic construct
  misc_feature 1..80: note = Artificially Synthesized Probe
  source 1..80: mol_type = other DNA
gcctagaatgatttcattattctccgttttctcaaataaaaaataagaaagttgatgtaatcacattttaaaagcaatta

SEQ ID NO: 27637 - DNA, 80 bp, synthetic construct
  misc_feature 1..80: note = Artificially Synthesized Probe
  source 1..80: mol_type = other DNA
gtcactgttgtaaacatctgtagaggctttgggggcagaagggtgtgtagttttcatcagattttcatggagattcatga

SEQ ID NO: 27638 - DNA, 80 bp, synthetic construct
  misc_feature 1..80: note = Artificially Synthesized Probe
  source 1..80: mol_type = other DNA
aagctttgagataaaatcattagaattctaacagcgtgacggctctgttcagcatatcggaatttgcaagagtcagattt

SEQ ID NO: 27639 - DNA, 80 bp, synthetic construct
  misc_feature 1..80: note = Artificially Synthesized Probe
  source 1..80: mol_type = other DNA
cttcggtagcaattactttatgaatattccttgtagacctctcctaatccagtgctaggaattgcggcagccatgagtga

SEQ ID NO: 27640 - DNA, 80 bp, synthetic construct
  misc_feature 1..80: note = Artificially Synthesized Probe
  source 1..80: mol_type = other DNA
atgcaaaacctctatttgtaagaagtttataggaaaagggtccaagtagttctcactctagggcttctggaactttgtcc

SEQ ID NO: 27641 - DNA, 80 bp, synthetic construct
  misc_feature 1..80: note = Artificially Synthesized Probe
  source 1..80: mol_type = other DNA
tcacatgttcggcctttgctttaccctgaaggtgtttctcttgctatagttttcacattaagtgcggtttgagtacacga

SEQ ID NO: 27642 - DNA, 80 bp, synthetic construct
  misc_feature 1..80: note = Artificially Synthesized Probe
  source 1..80: mol_type = other DNA
ggagtggccaattttaccaggagtcaggagaattagaaaaaaaaatgattatgaaacagatgattcttgagctgtcttgg

SEQ ID NO: 27643 - DNA, 80 bp, synthetic construct
  misc_feature 1..80: note = Artificially Synthesized Probe
  source 1..80: mol_type = other DNA
tttctttagtcaagccaaggacatattgcagaaaagagatccctgtgtagctggtgccttcttctctaccttacctaatc

SEQ ID NO: 27644 - DNA, 80 bp, synthetic construct
  misc_feature 1..80: note = Artificially Synthesized Probe
  source 1..80: mol_type = other DNA
atgtattagatttctatggctgcataatagactaccgtaagcttagcagtggaaaacaacacacatgtgtcatctcagtg

SEQ ID NO: 27645 - DNA, 80 bp, synthetic construct
  misc_feature 1..80: note = Artificially Synthesized Probe
  source 1..80: mol_type = other DNA
ctctggggtttcttcttcatcagccaatttgattgatcaaatctcatgagtcctgctactgaggctttgaaccatctctg

SEQ ID NO: 27646 - DNA, 80 bp, synthetic construct
  misc_feature 1..80: note = Artificially Synthesized Probe
  source 1..80: mol_type = other DNA
gctttccctgtcatcatgaccttgatttgattcctagtcccttaggcgcccccagtggcttacagctcaatgctcagtaa

SEQ ID NO: 27647 - DNA, 80 bp, synthetic construct
  misc_feature 1..80: note = Artificially Synthesized Probe
  source 1..80: mol_type = other DNA
gaaccatccggacatggtgtgacctgaacccagcactctgaaccatccggacatggtgtgacctgaacccagcgcatgta

SEQ ID NO: 27648 - DNA, 80 bp, synthetic construct
  misc_feature 1..80: note = Artificially Synthesized Probe
  source 1..80: mol_type = other DNA
aatccagccccctgaaccatacggacatggtgtgacctgagcccagcacgtgaaccatctggacatggtgtgacctgaac

SEQ ID NO: 27649 - DNA, 80 bp, synthetic construct
  misc_feature 1..80: note = Artificially Synthesized Probe
  source 1..80: mol_type = other DNA
acacatagcccttcaatgtgttgttttataacatttctgaaaacgtggaaaatgctagagcgtccatctgtagctaaagt

SEQ ID NO: 27650 - DNA, 80 bp, synthetic construct
  misc_feature 1..80: note = Artificially Synthesized Probe
  source 1..80: mol_type = other DNA
tccacctgcatcccgatttatttcccttgctttttggtgtttttccataatttagcactatcatgcccatgccatttaac

SEQ ID NO: 27651 - DNA, 80 bp, synthetic construct
  misc_feature 1..80: note = Artificially Synthesized Probe
  source 1..80: mol_type = other DNA
agcttgttataggttgctttaatgaagtgataggccataaatacaccttaaatacttctatttttctggctcatgcctgt

SEQ ID NO: 27652 - DNA, 80 bp, synthetic construct
  misc_feature 1..80: note = Artificially Synthesized Probe
  source 1..80: mol_type = other DNA
gttcaaagcaagctctaccagttaccatctgtggaagagctttccccgtagactgttttcttgtttgtaaaatgaggaca

SEQ ID NO: 27653 - DNA, 80 bp, synthetic construct
  misc_feature 1..80: note = Artificially Synthesized Probe
  source 1..80: mol_type = other DNA
tgtgtgtatgtggttctgttaggggaactagtttcggttgagtgtgtgtgtgtgtgtgtgtgtgtgtatggttctgttag

SEQ ID NO: 27654 - DNA, 80 bp, synthetic construct
  misc_feature 1..80: note = Artificially Synthesized Probe
  source 1..80: mol_type = other DNA
tgtgtgtggttaggaggggaactagtttcagttgagtgtgtgtgtgtgtgtgtgtggtaggaggggaactagtttcattt

SEQ ID NO: 27655 - DNA, 80 bp, synthetic construct
  misc_feature 1..80: note = Artificially Synthesized Probe
  source 1..80: mol_type = other DNA
gatgaggtacatggatcagtaagtttgctataggattgctaatacatagagacagctacttatttgaccaaattggagga

SEQ ID NO: 27656 - DNA, 80 bp, synthetic construct
  misc_feature 1..80: note = Artificially Synthesized Probe
  source 1..80: mol_type = other DNA
acatgagtcatcacaggcctctgtaagcagatctagtcagctagactcgaacaaaatgaagacagggagttagcaaagct

SEQ ID NO: 27657 - DNA, 80 bp, synthetic construct
  misc_feature 1..80: note = Artificially Synthesized Probe
  source 1..80: mol_type = other DNA
aactctgctaacatgtaaggattctcatggactcaagataaagggatgggaaaagtgtgaaaatggaaaccagaagcaag

SEQ ID NO: 27658 - DNA, 80 bp, synthetic construct
  misc_feature 1..80: note = Artificially Synthesized Probe
  source 1..80: mol_type = other DNA
tctgaagacagatgaattgtggtgtgtcagctaagcctgtgttattaaaaacagcaaaaaccctggacaccctccagaat

SEQ ID NO: 27659 - DNA, 80 bp, synthetic construct
  misc_feature 1..80: note = Artificially Synthesized Probe
  source 1..80: mol_type = other DNA
gtctcttttttccacatgcctaagacaggtgcttatccaggcctttgagtccaaagcagctggagtaagtcaacctgacc

SEQ ID NO: 27660 - DNA, 80 bp, synthetic construct
  misc_feature 1..80: note = Artificially Synthesized Probe
  source 1..80: mol_type = other DNA
ttctttataatacaaacaaacgataattaacatttcggagctggggcgaagtgaatcccagagtctccttcttcacttat

SEQ ID NO: 27661 - DNA, 80 bp, synthetic construct
  misc_feature 1..80: note = Artificially Synthesized Probe
  source 1..80: mol_type = other DNA
gtggcgtcccacctgtgtcgtggcatcactgggtcaatgtcgaattggaattttaaaattaagagtacataggcttttta

SEQ ID NO: 27662 - DNA, 80 bp, synthetic construct
  misc_feature 1..80: note = Artificially Synthesized Probe
  source 1..80: mol_type = other DNA
cccaaagggctttgaagtgtttcgtaaaagccaatttggatcctttaaaaacaaatagaagaaaacccactccgggcccc

SEQ ID NO: 27663 - DNA, 80 bp, synthetic construct
  misc_feature 1..80: note = Artificially Synthesized Probe
  source 1..80: mol_type = other DNA
tcctttaatctccctggcacgctggctgcatgtgccttgtaacttccaaaaacaaaatatgtcatgattatccagatcca

SEQ ID NO: 27664 - DNA, 80 bp, synthetic construct
  misc_feature 1..80: note = Artificially Synthesized Probe
  source 1..80: mol_type = other DNA
aggatgagaatgttctagagtctagaggttgttggccatctctctaagaaccagagcttcagtgagagctttaaatcatg

SEQ ID NO: 27665 - DNA, 80 bp, synthetic construct
  misc_feature 1..80: note = Artificially Synthesized Probe
  source 1..80: mol_type = other DNA
tatttcagcatctttataagtgatcaagtaaaagtcatataattgaagttatctaaaccccccatacaccaaatgcgtcc

SEQ ID NO: 27666 - DNA, 80 bp, synthetic construct
  misc_feature 1..80: note = Artificially Synthesized Probe
  source 1..80: mol_type = other DNA
tgtatggtacaaagaagcaggcaatattaagtatgattttgaccaaatgcaagatggcatttcaggggctcagagtggtg

SEQ ID NO: 27667 - DNA, 80 bp, synthetic construct
  misc_feature 1..80: note = Artificially Synthesized Probe
  source 1..80: mol_type = other DNA
acctcagtttaccttcattacatcctcacttcaaacacagccacactgggcattgggttcagcatatcgatttgtcaggg

SEQ ID NO: 27668 - DNA, 80 bp, synthetic construct
  misc_feature 1..80: note = Artificially Synthesized Probe
  source 1..80: mol_type = other DNA
ggacctgagccctcctgcaggaccctgtcctgacagcaccacgtcccacccttccatggaagctgctgtctcctccatga

SEQ ID NO: 27669 - DNA, 80 bp, synthetic construct
  misc_feature 1..80: note = Artificially Synthesized Probe
  source 1..80: mol_type = other DNA
cagggaggggggaggaaggacagaagttctaggagagtagtatgcacggccattaaaataatctttggtaattaagtcag

SEQ ID NO: 27670 - DNA, 80 bp, synthetic construct
  misc_feature 1..80: note = Artificially Synthesized Probe
  source 1..80: mol_type = other DNA
aggtactttccaaaacgtctggctgtaactcgcctccttctgccgtgcttttggtagattcagtaaaacatgcacgtcct

SEQ ID NO: 27671 - DNA, 80 bp, synthetic construct
  misc_feature 1..80: note = Artificially Synthesized Probe
  source 1..80: mol_type = other DNA
attcacctccctcgtaaatggagccgctgatgcactctcacagaagggaagaggtaatttttccatttgtgaggagagtg

SEQ ID NO: 27672 - DNA, 80 bp, synthetic construct
  misc_feature 1..80: note = Artificially Synthesized Probe
  source 1..80: mol_type = other DNA
aaaagcaagcagggtaatttatcgaaagctaagtaccccttgctacatgaacattttggggtcctgtacttgtaaatcca

SEQ ID NO: 27673 - DNA, 80 bp, synthetic construct
  misc_feature 1..80: note = Artificially Synthesized Probe
  source 1..80: mol_type = other DNA
tcttcctgtgaggtcaggaacaaggcaagtgtgcccttgcctgccctctacttatgtgcttttataaatgggattatttt

SEQ ID NO: 27674 - DNA, 80 bp, synthetic construct
  misc_feature 1..80: note = Artificially Synthesized Probe
  source 1..80: mol_type = other DNA
atatggaattacaagggaccccaaatactcaaaacaatcttgaaaaataagaactaagttggagtctcacacttcctgat

SEQ ID NO: 27675 - DNA, 80 bp, synthetic construct
  misc_feature 1..80: note = Artificially Synthesized Probe
  source 1..80: mol_type = other DNA
tctggccatacacccaaaagaagtggaagcagggctcagataattgtatactcatgctcaagcagtattagttacagtag

SEQ ID NO: 27676 - DNA, 80 bp, synthetic construct
  misc_feature 1..80: note = Artificially Synthesized Probe
  source 1..80: mol_type = other DNA
gccaaaccagaagaagggtttccagagtcagccccttctaatatccaagtgtccagttttcaacaaaatgactaaaagac

SEQ ID NO: 27677 - DNA, 80 bp, synthetic construct
  misc_feature 1..80: note = Artificially Synthesized Probe
  source 1..80: mol_type = other DNA
cagattgacataaaaggacagcggcattagctcaaagctatatgaagtgaaaggtcttcagcgatggtgaatacagggac

SEQ ID NO: 27678 - DNA, 80 bp, synthetic construct
  misc_feature 1..80: note = Artificially Synthesized Probe
  source 1..80: mol_type = other DNA
gtgtacatgaaacattctccacagtaggccacatgttaggccaaaagacaggtctcaataaattgtaaaagactaaaatc

SEQ ID NO: 27679 - DNA, 80 bp, synthetic construct
  misc_feature 1..80: note = Artificially Synthesized Probe
  source 1..80: mol_type = other DNA
atgctaaaattttccacagaataccagcaaacttaatccaacagtgtattaaaaggtttagacttgtcatcaggtgggat

SEQ ID NO: 27680 - DNA, 80 bp, synthetic construct
  misc_feature 1..80: note = Artificially Synthesized Probe
  source 1..80: mol_type = other DNA
ggtctagaatttaacatcagagggaacccaggtgactttgagtctggtgatgagtttttagagaccgcaccgaaggcacc

SEQ ID NO: 27681 - DNA, 80 bp, synthetic construct
  misc_feature 1..80: note = Artificially Synthesized Probe
  source 1..80: mol_type = other DNA
gctctcacctataatctcccctatactcccccccttaattatggagaatggtaaagtccggaattttgataaacctttga

SEQ ID NO: 27682 - DNA, 80 bp, synthetic construct
  misc_feature 1..80: note = Artificially Synthesized Probe
  source 1..80: mol_type = other DNA
tcgcactgttcaccttggaagtgcatattctgtcacagtaatgaaattaaagggcacacaatatttttttaaaactccat

SEQ ID NO: 27683 - DNA, 80 bp, synthetic construct
  misc_feature 1..80: note = Artificially Synthesized Probe
  source 1..80: mol_type = other DNA
ctccgtggcggtggttttctaagtgacgcttttttacaaaagaggttttttcagaagcggcgacaccatagaaccgtatt

SEQ ID NO: 27684 - DNA, 80 bp, synthetic construct
  misc_feature 1..80: note = Artificially Synthesized Probe
  source 1..80: mol_type = other DNA
acactcgagaaacttcgcagcttttaaaaatagaggctgtgcgagtgcagcgtctctccaacagtggtctacactcgaga

SEQ ID NO: 27685 - DNA, 80 bp, synthetic construct; identical to SEQ ID NO: 27684
  misc_feature 1..80: note = Artificially Synthesized Probe
  source 1..80: mol_type = other DNA

SEQ ID NO: 27686 - DNA, 80 bp, synthetic construct
  misc_feature 1..80: note = Artificially Synthesized Probe
  source 1..80: mol_type = other DNA
ttcaaaaccatcttcatattgtatttctcccacagggctccccactgtccatatctagttcacccagattgttagtgacc

SEQ ID NO: 27687 - DNA, 80 bp, synthetic construct
  misc_feature 1..80: note = Artificially Synthesized Probe
  source 1..80: mol_type = other DNA
ctgccacaatgtgtgctggtaaaatgaatcccctgaaacctgagaccaaccttctctgactcaaatcccagatcagaggt

SEQ ID NO: 27688 - DNA, 80 bp, synthetic construct
  misc_feature 1..80: note = Artificially Synthesized Probe
  source 1..80: mol_type = other DNA
tttccggaaatggggaagggtaaggatgaaatgatttgcaggggaaagttatgtgttcttcctgagccccactgagtgta

SEQ ID NO: 27689 - DNA, 80 bp, synthetic construct
  misc_feature 1..80: note = Artificially Synthesized Probe
  source 1..80: mol_type = other DNA
gtgtgtgcacgtgtgtttctctctgtgtttgcattcgtgtgtgtgtgcacatgtctgtatgcacaggtgtgtaggggcat

SEQ ID NO: 27690 - DNA, 80 bp, synthetic construct
  misc_feature 1..80: note = Artificially Synthesized Probe
  source 1..80: mol_type = other DNA
ttctaaggcaaagaatgtgcttggtgattatttggattctggataaacaagggttcctttctttgtttccaattagtgga

SEQ ID NO: 27691 - DNA, 80 bp, synthetic construct
  misc_feature 1..80: note = Artificially Synthesized Probe
  source 1..80: mol_type = other DNA
tatttttaaaattcacctttgtcccctccatgccccatagaataagtgcttagtagatgttgacactgttaaactcacaa

SEQ ID NO: 27692 - DNA, 80 bp, synthetic construct
  misc_feature 1..80: note = Artificially Synthesized Probe
  source 1..80: mol_type = other DNA
ttatgctctgcctcattcggaaagcccagctgttatttaataggattaatgtggcgcgtttcgacacagtaaagaagttg

SEQ ID NO: 27693 - DNA, 80 bp, synthetic construct
  misc_feature 1..80: note = Artificially Synthesized Probe
  source 1..80: mol_type = other DNA
tcaaaagcgcctttggactggaattgattcctgtgtccttgagccatgtccttttcagccatttcacaattccttaactg

SEQ ID NO: 27694 - DNA, 80 bp, synthetic construct
  misc_feature 1..80: note = Artificially Synthesized Probe
  source 1..80: mol_type = other DNA
aggtctgttttcctgagacgggtgaaatgttaatttactgtatcaagagttgtcgtcagctccttttggatcgttttttt

SEQ ID NO: 27695 - DNA, 80 bp, synthetic construct
  misc_feature 1..80: note = Artificially Synthesized Probe
  source 1..80: mol_type = other DNA
aaagaacatgcttgaaccttagtttcttcttcctgtttttccaactggagagactaagttcacagctgtttccatctctc

SEQ ID NO: 27696 - DNA, 80 bp, synthetic construct
  misc_feature 1..80: note = Artificially Synthesized Probe
  source 1..80: mol_type = other DNA
tgatgtatgcctgagtcatcattccatctcttcctttgtcttttattggtttagtgacttctcgtcatttagttattgct

SEQ ID NO: 27697 - DNA, 80 bp, synthetic construct
  misc_feature 1..80: note = Artificially Synthesized Probe
  source 1..80: mol_type = other DNA
tgcccgccttggcctcctaaagtgctgggattacaggcggaagccactgcacctggccttacagttaatattcttaaatt

SEQ ID NO: 27698 - DNA, 80 bp, synthetic construct
  misc_feature 1..80: note = Artificially Synthesized Probe
  source 1..80: mol_type = other DNA
tactctcagtaatcgcacaagtgcaccagagagtgctgcattcctgaaatttctggctgattgagattaaatggcatttc

SEQ ID NO: 27699 - DNA, 80 bp, synthetic construct
  misc_feature 1..80: note = Artificially Synthesized Probe
  source 1..80: mol_type = other DNA
ttctgggtgggagcaccgcttcgcagggactgagttctgggtgggactgagttctgggtgggagcactacttcacaggga

SEQ ID NO: 27700 - DNA, 80 bp, synthetic construct
  misc_feature 1..80: note = Artificially Synthesized Probe
  source 1..80: mol_type = other DNA
gaaatgcagcgatgtggcactgatgtgctagttgaagccatactgtgtgccataactaaggccgcaaattccttcagagg

SEQ ID NO: 27701 - DNA, 80 bp, synthetic construct
  misc_feature 1..80: note = Artificially Synthesized Probe
  source 1..80: mol_type = other DNA
gtgtctgcatgtgtgagtatatgcgtgtgtcagtgtatatatgtctgtgtacacatgtgtctgcatgagtatatgcatgt

SEQ ID NO: 27702 - DNA, 80 bp, synthetic construct
  misc_feature 1..80: note = Artificially Synthesized Probe
  source 1..80: mol_type = other DNA
gaggaggaagcagaggttgaagaggttttgctgccatattctaatgtccagggccgtcttcatttatccaactgtgatct

SEQ ID NO: 27703 - DNA, 80 bp, synthetic construct
  misc_feature 1..80: note = Artificially Synthesized Probe
  source 1..80: mol_type = other DNA
aggttctggacattctgatgggctgccttgaaagcaaaggaaatgtttcctgtgatgaaaatcaacagcttttggctgca

SEQ ID NO: 27704 - DNA, 80 bp, synthetic construct
  misc_feature 1..80: note = Artificially Synthesized Probe
  source 1..80: mol_type = other DNA
ataccaccgagaagccataatgtaacatggtaaatacatgatacatgtgttgacacgctgtaaaggaagagacacgaaat

SEQ ID NO: 27705 - DNA, 80 bp, synthetic construct
  misc_feature 1..80: note = Artificially Synthesized Probe
  source 1..80: mol_type = other DNA
aggacgcccagggaaccctgagtatgatttatgtgttttgttgctatgtttatttatgtccttccttgttccagagtggg

SEQ ID NO: 27706 - DNA, 80 bp, synthetic construct
  misc_feature 1..80: note = Artificially Synthesized Probe
  source 1..80: mol_type = other DNA
ataagacagatgcattcagtgacctctcagcttactagtgaaagcagtgggctcctctcaccctcttttaataaactact

SEQ ID NO: 27707 - DNA, 80 bp, synthetic construct
  misc_feature 1..80: note = Artificially Synthesized Probe
  source 1..80: mol_type = other DNA
gcaaaatacttgaataaacagttctccaaagaaggcctgcaaatgttccactaagtacagggaagctcaacatcatgagt

SEQ ID NO: 27708 - DNA, 80 bp, synthetic construct
  misc_feature 1..80: note = Artificially Synthesized Probe
  source 1..80: mol_type = other DNA
agcggtgattcttgcacacctttgtgaatatataaaaccaccaagttgtaaaccttgaaagagtaaattttatatcttaa

SEQ ID NO: 27709 - DNA, 80 bp, synthetic construct
  misc_feature 1..80: note = Artificially Synthesized Probe
  source 1..80: mol_type = other DNA
cctgacacccccagtgggaacaagcttccgtgtcacgtaagtagtcttcagtatttctcagtgtattatttttttccatg

SEQ ID NO: 27710 - DNA, 80 bp, synthetic construct
  misc_feature 1..80: note = Artificially Synthesized Probe
  source 1..80: mol_type = other DNA
gttccttggagacctaaagacaaacaccattggactcagcaatgccattagtgggtatagacccaaaggaatagaaaccc

SEQ ID NO: 27711 - DNA, 80 bp, synthetic construct
  misc_feature 1..80: note = Artificially Synthesized Probe
  source 1..80: mol_type = other DNA
agttagttctgtgtcgttttccccataatctttgcaggtaaatatgaacttgtgggctgtcttgaccagaggggctccta

SEQ ID NO: 27712 - DNA, 80 bp, synthetic construct
  misc_feature 1..80: note = Artificially Synthesized Probe
  source 1..80: mol_type = other DNA
attatttccagcaatttagtgcattgctgggtcccacagatgatgcgtttaatttgtgatgtatggcaggtcttccgatt

SEQ ID NO: 27713 - DNA, 80 bp, synthetic construct
  misc_feature 1..80: note = Artificially Synthesized Probe
  source 1..80: mol_type = other DNA
gtaagcaaagactctctcaggctggaagccccaaaggccaacaggttaccccagaggcgctggtcaaaaccagaactttc

SEQ ID NO: 27714 - DNA, 80 bp, synthetic construct
  misc_feature 1..80: note = Artificially Synthesized Probe
  source 1..80: mol_type = other DNA
gccatgtgggtaaaagtcgggactcagactcacctgtttgacattagttactgaagcactttgtgcctcagtttccctat

SEQ ID NO: 27715 - DNA, 80 bp, synthetic construct
  misc_feature 1..80: note = Artificially Synthesized Probe
  source 1..80: mol_type = other DNA
gcggttgttctgtttctcttcgccaaacacacttgttagatttctttcctctgctgttgagaataagtacactgcatgta

SEQ ID NO: 27716 - DNA, 80 bp, synthetic construct
  misc_feature 1..80: note = Artificially Synthesized Probe
  source 1..80: mol_type = other DNA
atgcccacgccatgggcactgtgctcatggtggctgagtggaggttgagtgcccggcagagctgcatttcccttatggtg

SEQ ID NO: 27717 - DNA, 80 bp, synthetic construct
  misc_feature 1..80: note = Artificially Synthesized Probe
  source 1..80: mol_type = other DNA
ggttgcgttcctgtacagagctgcattgctctcatggcggctgtgtggaggtagagttcctacacagagctgcattgctc

SEQ ID NO: 27718 - DNA, 80 bp, synthetic construct
  misc_feature 1..80: note = Artificially Synthesized Probe
  source 1..80: mol_type = other DNA
gaggttgagttcccacacagagctgcgctgctctcatggtaactgtctggaggctgagttcctatacagagctacattgc

SEQ ID NO: 27719 - DNA, 80 bp, synthetic construct
  misc_feature 1..80: note = Artificially Synthesized Probe
  source 1..80: mol_type = other DNA
cattcatttatctttctggaactcatggtgagataaattagctgcagggtggagatgcggccacttgctcctgccaagtc

SEQ ID NO: 27720 - DNA, 80 bp, synthetic construct
  misc_feature 1..80: note = Artificially Synthesized Probe
  source 1..80: mol_type = other DNA
acatttgcctatatctctaggcagattcttacaaatatgctgtactttacagaggctctattttttttcagcaaccaaaa

SEQ ID NO: 27721 - DNA, 80 bp, synthetic construct
  misc_feature 1..80: note = Artificially Synthesized Probe
  source 1..80: mol_type = other DNA
cctgagcgtgcgtggaaaggccgtgcgggtcctgacagtgtgtggaaaggccgcgtgggtcctgactgtgcgtggaaagg

SEQ ID NO: 27722 - DNA, 80 bp, synthetic construct
  misc_feature 1..80: note = Artificially Synthesized Probe
  source 1..80: mol_type = other DNA
gactatgtgtggaaaggccgtgcgggtcctgactgtgtgtggaaaggacgtgcgcgtcctgcgtgtggcgtggaaaggcc

SEQ ID NO: 27723 - DNA, 80 bp, synthetic construct
  misc_feature 1..80: note = Artificially Synthesized Probe
  source 1..80: mol_type = other DNA
agagctctgagtccatacccatgtgtagacaggattgaaggcagattttgactcagccgaagggagaacctgctaggatt

SEQ ID NO: 27724 - DNA, 80 bp, synthetic construct
  misc_feature 1..80: note = Artificially Synthesized Probe
  source 1..80: mol_type = other DNA
ttaatatccctagaggggaaaaaaatcagcgaaggggaaaaaagcagttatttagcccaagaaaaatttccagcgtcact

SEQ ID NO: 27725 - DNA, 80 bp, synthetic construct
  misc_feature 1..80: note = Artificially Synthesized Probe
  source 1..80: mol_type = other DNA
ggaaagtcacggatgatgctgcggatgaaggtggaaagtcacggatgatgctgcggatgaaggtggaaagtcacggatga

SEQ ID NO: 27726 - DNA, 80 bp, synthetic construct
  misc_feature 1..80: note = Artificially Synthesized Probe
  source 1..80: mol_type = other DNA
ccctgtctgcattataatcacctgttcatattcaaattaagcacattccatgcacaggcaattcaagtacatgcgtgttg

SEQ ID NO: 27727 - DNA, 80 bp, synthetic construct
  misc_feature 1..80: note = Artificially Synthesized Probe
  source 1..80: mol_type = other DNA
atgaggtgagtataagcaaagggccgtttgccacgatgtaacactacagtaaggataacagccaagcccgcacaatgagg

SEQ ID NO: 27728 - DNA, 80 bp, synthetic construct
  misc_feature 1..80: note = Artificially Synthesized Probe
  source 1..80: mol_type = other DNA
tgactgctattcctattgctggtgagtgagaatattaataccatctgtagtagtgagacagcaaatatttcccgcctcac

SEQ ID NO: 27729 - DNA, 80 bp, synthetic construct
  misc_feature 1..80: note = Artificially Synthesized Probe
  source 1..80: mol_type = other DNA
gcctggggctaaaaatgtattgatcggggttttggttaaggaggtagattttagctgtttctccacactcacagacgtaa

SEQ ID NO: 27730 - DNA, 80 bp, synthetic construct
  misc_feature 1..80: note = Artificially Synthesized Probe
  source 1..80: mol_type = other DNA
tttaggagaaaggaaattgagcctgtgctgccctgggcttcagaggaggacagttttcttttttaaaacaggaagtaagg

SEQ ID NO: 27731 - DNA, 80 bp, synthetic construct
  misc_feature 1..80: note = Artificially Synthesized Probe
  source 1..80: mol_type = other DNA
tgtttgccctcgaggggcagcacgggaccacggctgtgccatctgggtgagctgggctggcaggtaccccgaaaagcaca

SEQ ID NO: 27732 - DNA, 80 bp, synthetic construct
  misc_feature 1..80: note = Artificially Synthesized Probe
  source 1..80: mol_type = other DNA
aactaaggtaacacacggctctgtaggtagccgtctggtgctgagaattgcataaacatttcttcagcttcttcttgctc

SEQ ID NO: 27733 - DNA, 80 bp, synthetic construct
  misc_feature 1..80: note = Artificially Synthesized Probe
  source 1..80: mol_type = other DNA
aggctcggtaagggctggcgtggtccatgtgcagcctccggcggggacacccgtcagtgtcctcatttccccttacactg

SEQ ID NO: 27734 - DNA, 80 bp, synthetic construct
  misc_feature 1..80: note = Artificially Synthesized Probe
  source 1..80: mol_type = other DNA
ctgtctgaagtcttctcatttttagaagttggcaagtaattcataaaaagaaaataccatgtgggccacacaaaaccatc

SEQ ID NO: 27735 - DNA, 80 bp, synthetic construct
  misc_feature 1..80: note = Artificially Synthesized Probe
  source 1..80: mol_type = other DNA
tctgtcaggtgcaccaggtggtacccctcactgatcctcatggaaccccatatgggggtcttcctcactcctgccgcctt

SEQ ID NO: 27736 - DNA, 80 bp, synthetic construct
  misc_feature 1..80: note = Artificially Synthesized Probe
  source 1..80: mol_type = other DNA
gcctggcagaagatttacgactgagatgaccatagagaaaccccgcaaggacacgtttttataaagtagatgctctacga

SEQ ID NO: 27737 - DNA, 80 bp, synthetic construct
  misc_feature 1..80: note = Artificially Synthesized Probe
  source 1..80: mol_type = other DNA
aaaatcaatctcgggtcccagtagatggagccgctgcagccaatgtcactaaatttctaaatttcctgggagttctgagg

SEQ ID NO: 27738 - DNA, 80 bp, synthetic construct
  misc_feature 1..80: note = Artificially Synthesized Probe
  source 1..80: mol_type = other DNA
ggcgtggagaggtggcagaattcacttggtgcagaagaaaggggcaggacaggaggtgagctgggaagtggaaagagatg

SEQ ID NO: 27739 - DNA, 80 bp, synthetic construct
  misc_feature 1..80: note = Artificially Synthesized Probe
  source 1..80: mol_type = other DNA
catcaggaaaggcatagctcacatgttgctaagaaaaagcattttggaaggtaattgtggttgctatgcatggaaactat

SEQ ID NO: 27740 - DNA, 80 bp, synthetic construct
  misc_feature 1..80: note = Artificially Synthesized Probe
  source 1..80: mol_type = other DNA
tttatttttggcataaagcatgtggtatgctacagcgttacctcattagctggtgatctaataattcattatctgctgac

SEQ ID NO: 27741 - DNA, 80 bp, synthetic construct
  misc_feature 1..80: note = Artificially Synthesized Probe
  source 1..80: mol_type = other DNA
aaactccattctcacatctaaatcacacccaccttgcacgccctgtccaaatatctaggctcttaggaaggcttttccaa

SEQ ID NO: 27742 - DNA, 80 bp, synthetic construct
  misc_feature 1..80: note = Artificially Synthesized Probe
  source 1..80: mol_type = other DNA
aaatgctgaaaagtcaattttacaaaagaagaaaagctgtcttttatcaccctctggttgctacagggagcacggggagc

SEQ ID NO: 27743 - DNA, 80 bp, synthetic construct
  misc_feature 1..80: note = Artificially Synthesized Probe
  source 1..80: mol_type = other DNA
gtggtttgtggcttctgtaattggaaatctcttctgcagaactctattatcctctcacttcccgtgacttgattggaaaa

SEQ ID NO: 27744 - DNA, 80 bp, synthetic construct
  misc_feature 1..80: note = Artificially Synthesized Probe
  source 1..80: mol_type = other DNA
ggaagacaaatgtcgtgcgagtcccctccacagcagggcttctcaccctcagctctcctgacgtccgggctgcataattc

SEQ ID NO: 27745 - DNA, 80 bp, synthetic construct
  misc_feature 1..80: note = Artificially Synthesized Probe
  source 1..80: mol_type = other DNA
tcatttgctttggccgttggagcgtttgcatttgctgccgtttgcttgagtgactgcgcagcaagactctgtgctggaga

SEQ ID NO: 27746 - DNA, 80 bp, synthetic construct
  misc_feature 1..80: note = Artificially Synthesized Probe
  source 1..80: mol_type = other DNA
cacgggtccagtgacctcagcagggaggcagctccctgattacaagaccaacttttgttcttggaccaaagctgattttg

SEQ ID NO: 27747 - DNA, 80 bp, synthetic construct
  misc_feature 1..80: note = Artificially Synthesized Probe
  source 1..80: mol_type = other DNA
tgtcctcactgacagcaggtggtcactggggagcatgctactgaggtgctgttcatctccaggaaattagattcttaaca

SEQ ID NO: 27748 - DNA, 80 bp, synthetic construct
  misc_feature 1..80: note = Artificially Synthesized Probe
  source 1..80: mol_type = other DNA
ctcaaataagacaaacatcagccatgaaaggaatcagaatgaggcagtaaactcagaaagagtccttgaagcccagctgt

SEQ ID NO: 27749 - DNA, 80 bp, synthetic construct
  misc_feature 1..80: note = Artificially Synthesized Probe
  source 1..80: mol_type = other DNA
caagcgtatttggccgtgaaagcgaaatgtgcacgggtaggaaatggcctcagagcaaggcccacatcgaaggatttgtc

SEQ ID NO: 27750 - DNA, 80 bp, synthetic construct
  misc_feature 1..80: note = Artificially Synthesized Probe
  source 1..80: mol_type = other DNA
attcttggtccagcacagcttcttcatgtttttcacctttgtgatgtaagaatccagctccgtgcagaacccgagcatag

SEQ ID NO: 27751 - DNA, 80 bp, synthetic construct
  misc_feature 1..80: note = Artificially Synthesized Probe
  source 1..80: mol_type = other DNA
ggacaggctccatcttcctctgtgctttcatcaccctcatttttggaaagtcacacgttttgctttcattctaatttaca

SEQ ID NO: 27752 - DNA, 80 bp, synthetic construct
  misc_feature 1..80: note = Artificially Synthesized Probe
  source 1..80: mol_type = other DNA
aactcagtccaggccctgaaagagtttactttctaactggcagggaccccgcacttaacgtcaggagcccccagtgccgt

SEQ ID NO: 27753 - DNA, 80 bp, synthetic construct
  misc_feature 1..80: note = Artificially Synthesized Probe
  source 1..80: mol_type = other DNA
tgaaggatcagcatgaacacccgaccacatcttactccaaattgcttctgaaattaaaagttcgccgaggtgtcatgttc

SEQ ID NO: 27754 - DNA, 80 bp, synthetic construct
  misc_feature 1..80: note = Artificially Synthesized Probe
  source 1..80: mol_type = other DNA
gccctggcgcccactcttctactctgtgcttctgggaatctgggtttttctagttccacaagtaagtgaggccactcagt

SEQ ID NO: 27755 - DNA, 80 bp, synthetic construct
  misc_feature 1..80: note = Artificially Synthesized Probe
  source 1..80: mol_type = other DNA
cagtgagaccccatctctacaaaaaaataaacttttaaaaaattagcagtgcagtggtgtgtgcctgcagtcccagctac

SEQ ID NO: 27756 - DNA, 80 bp, synthetic construct
  misc_feature 1..80: note = Artificially Synthesized Probe
  source 1..80: mol_type = other DNA
taacttgacattaacaagaagcatgaattaaactcctggtcagatgaccaccagcagctcccagcgagcactttccagca

SEQ ID NO: 27757 - DNA, 80 bp, synthetic construct
  misc_feature 1..80: note = Artificially Synthesized Probe
  source 1..80: mol_type = other DNA
ctgagaacttggtgcacagttaccccggcctgtgcccggcccctgagaacttggtgcacagttaccgcggcctgtgcccg

SEQ ID NO: 27758 - DNA, 80 bp, synthetic construct
  misc_feature 1..80: note = Artificially Synthesized Probe
  source 1..80: mol_type = other DNA
gttaccccggcctatgcccgtcccctgagaacttggtgcagttaccccggcctgtgcccgtcccctgagaacttggtgca

SEQ ID NO: 27759 - DNA, 80 bp, synthetic construct
  misc_feature 1..80: note = Artificially Synthesized Probe
  source 1..80: mol_type = other DNA
caccagcatagaatgcggcaagaaggtgagatccaaagaaaaaaaggattgatttttgaatgggttttaccatattgatg

SEQ ID NO: 27760 - DNA, 80 bp, synthetic construct
  misc_feature 1..80: note = Artificially Synthesized Probe
  source 1..80: mol_type = other DNA
gcctgtttgacttcaaagtgtggaagaaataggcactaagttgggtcctgggttttgggttgaggtggttggtgactggt

SEQ ID NO: 27761 - DNA, 80 bp, synthetic construct
  misc_feature 1..80: note = Artificially Synthesized Probe
  source 1..80: mol_type = other DNA
aggccatggatgaggaggcgctggttcaggtgtcagggctgtgagagcagaggccgtggatggggaggcgctggttcaag

SEQ ID NO: 27762 - DNA, 80 bp, synthetic construct
  misc_feature 1..80: note = Artificially Synthesized Probe
  source 1..80: mol_type = other DNA
tagcagaaccaatctgcacagttctttgatttttatcccaccaggctcagcagcttggatagaaaaaaagctgatgatga

SEQ ID NO: 27763 - DNA, 80 bp, synthetic construct
  misc_feature 1..80: note = Artificially Synthesized Probe
  source 1..80: mol_type = other DNA
gaaatgtgtctgtcacctacacaacgctgtggtgtgcttgtatctttacaaactcttatgtatgaccttttaaaactccg

SEQ ID NO: 27764 - DNA, 80 bp, synthetic construct
  misc_feature 1..80: note = Artificially Synthesized Probe
  source 1..80: mol_type = other DNA
gagggatgatgaaaaatgataatagctggggttttggccccacgtaatgagagtaagattggtgtttttatcagttggag

SEQ ID NO: 27765 - DNA, 80 bp, synthetic construct
  misc_feature 1..80: note = Artificially Synthesized Probe
  source 1..80: mol_type = other DNA
ggtcgaggcgcagtccagatcctgggttgaggcgccatctggatccagggtcgaggtgcagggttacccgttacctgcac

SEQ ID NO: 27766 - DNA, 80 bp, synthetic construct
  misc_feature 1..80: note = Artificially Synthesized Probe
  source 1..80: mol_type = other DNA
ttttttacaactattccccccaaatggagacagatcagttttgctctaaatgtgaatccgaggcctcaggaaggcattcg

SEQ ID NO: 27767 - DNA, 80 bp, synthetic construct
  misc_feature 1..80: note = Artificially Synthesized Probe
  source 1..80: mol_type = other DNA
ttgagtgcttactgagcgctccctcatcgtcctccggagtcgtgtattgagtgcttactgagcgccccctcctcgtcctc

SEQ ID NO: 27768 - DNA, 80 bp, synthetic construct
  misc_feature 1..80: note = Artificially Synthesized Probe
  source 1..80: mol_type = other DNA
gagcactccctccttgtcctccagagtcgtgtattgagtgcttactgagcgccacctccttgtcctccggagtcgtgtat

SEQ ID NO: 27769 - DNA, 80 bp, synthetic construct
  misc_feature 1..80: note = Artificially Synthesized Probe
  source 1..80: mol_type = other DNA
gtgcttactgagcctcatcctccagggtagtgtattgagtgcttactgagtgccacctcctcgtcctccagagtcgtgta

SEQ ID NO: 27770 - DNA, 80 bp, synthetic construct; identical to SEQ ID NO: 27766
  misc_feature 1..80: note = Artificially Synthesized Probe
  source 1..80: mol_type = other DNA

SEQ ID NO: 27771 - DNA, 80 bp, synthetic construct; identical to SEQ ID NO: 27766
  misc_feature 1..80: note = Artificially Synthesized Probe
  source 1..80: mol_type = other DNA

SEQ ID NO: 27772 - DNA, 80 bp, synthetic construct
  misc_feature 1..80: note = Artificially Synthesized Probe
  source 1..80: mol_type = other DNA
agtcgtgtattgagtgcttactgagcgccacctcctcgtcctcctgagtcgtgtattgagtgcttactgagcgccacctc

SEQ ID NO: 27773 - DNA, 80 bp, synthetic construct
  misc_feature 1..80: note = Artificially Synthesized Probe
  source 1..80: mol_type = other DNA
tcctccagagtcgtgtattgagtgcttactgagcactccctccttgtcctccggagtcgtatattgagtgcttactgagc

SEQ ID NO: 27774 - DNA, 80 bp, synthetic construct; identical to SEQ ID NO: 27767
  misc_feature 1..80: note = Artificially Synthesized Probe
  source 1..80: mol_type = other DNA

SEQ ID NO: 27775 - DNA, 80 bp, synthetic construct
  misc_feature 1..80: note = Artificially Synthesized Probe
  source 1..80: mol_type = other DNA
gagtgccacctcctcatcctccggagtcgtgtattgagtgcttactgagcgctccctcctcgtcctcctgagtcgtgtat

SEQ ID NO: 27776 - DNA, 80 bp, synthetic construct
  misc_feature 1..80: note = Artificially Synthesized Probe
  source 1..80: mol_type = other DNA
aagtaaggagattaaggcgacttactcgtcgtcctgcgtagtgaagagattgtaaaaagagggctacatccaagtcctca

SEQ ID NO: 27777 - DNA, 80 bp, synthetic construct
  misc_feature 1..80: note = Artificially Synthesized Probe
  source 1..80: mol_type = other DNA
tactgagcgctccctccttgtcctccagagtcgtgtattgagtgcttactgagcgctccctcatcgtcctccggagtcgt

SEQ ID NO: 27778 - DNA, 80 bp, synthetic construct; identical to SEQ ID NO: 27767
  misc_feature 1..80: note = Artificially Synthesized Probe
  source 1..80: mol_type = other DNA

SEQ ID NO: 27779 - DNA, 80 bp, synthetic construct
  misc_feature 1..80: note = Artificially Synthesized Probe
  source 1..80: mol_type = other DNA
agaacttactgagcgctccctccttgtcctccagagtcgtgtattgagtgctactgagcgcaccacagtgcttactgagc

SEQ ID NO: 27780 - DNA, 80 bp, synthetic construct
  misc_feature 1..80: note = Artificially Synthesized Probe
  source 1..80: mol_type = other DNA
ccagggtagtgtattgagtgcttactgagcgccacctcctcatcgtccagagtcgtgtattgagtgcttactgagcgcca

SEQ ID NO: 27781 - DNA, 80 bp, synthetic construct
  misc_feature 1..80: note = Artificially Synthesized Probe
  source 1..80: mol_type = other DNA
gagtttctaagcctgttttctggagcaggcaacatggattcacgcataactttgaaaatgtatcttggatgtttgaggcc

SEQ ID NO: 27782 - DNA, 80 bp, synthetic construct
  misc_feature 1..80: note = Artificially Synthesized Probe
  source 1..80: mol_type = other DNA
accaaccggaagaaatgggctcagtaaagactgatttcagaaattctccagacacaagttcaagaagagagctgggtgtg

SEQ ID NO: 27783 - DNA, 80 bp, synthetic construct
  misc_feature 1..80: note = Artificially Synthesized Probe
  source 1..80: mol_type = other DNA
tttgaaatactcgctgagtgcttcctttttattctctcccctcagttcacataattctgtagcagtaacttactgtcatg

SEQ ID NO: 27784 - DNA, 80 bp, synthetic construct
  misc_feature 1..80: note = Artificially Synthesized Probe
  source 1..80: mol_type = other DNA
aattataatgttgatacatatgggtttccacataaaagagcataaaagcacgaaggacttgacccctgagccaggcggtc

SEQ ID NO: 27785 - DNA, 80 bp, synthetic construct
  misc_feature 1..80: note = Artificially Synthesized Probe
  source 1..80: mol_type = other DNA
acacatgctccgaaaacctacaggcaacagcaagggctctggaagacacagatgccatgggcaggtgatctcctgctagg

SEQ ID NO: 27786 - DNA, 80 bp, synthetic construct
  misc_feature 1..80: note = Artificially Synthesized Probe
  source 1..80: mol_type = other DNA
acagtggctccttccaagtcatggcttgtctccctcctctctgtagcacctttgtatgtttcaacacctttattattagc

SEQ ID NO: 27787 - DNA, 80 bp, synthetic construct
  misc_feature 1..80: note = Artificially Synthesized Probe
  source 1..80: mol_type = other DNA
ggcacagcctgagaagaggcacgtgcagatgcacaatgtcaatggcatacttattaaatggtgaattcttgtttatcatt

SEQ ID NO: 27788 - DNA, 80 bp, synthetic construct
  misc_feature 1..80: note = Artificially Synthesized Probe
  source 1..80: mol_type = other DNA
aatcaagcattttgatccctgtattatacttgtccagcctttggctgtggtgcacatgcatacatacgtgtacacacatg

SEQ ID NO: 27789 - DNA, 80 bp, synthetic construct
  misc_feature 1..80: note = Artificially Synthesized Probe
  source 1..80: mol_type = other DNA
cccacaaacagggtagaaactccttgaggggtcatttcatgactaaaagaatattttttaacataaattgggggagggtg

SEQ ID NO: 27790 - DNA, 80 bp, synthetic construct
  misc_feature 1..80: note = Artificially Synthesized Probe
  source 1..80: mol_type = other DNA
acatttgttgcaaagcgtgagcataatccgttctctccctaaaacctgttcgtgtgaaagcttctcagacttgcaaagaa

SEQ ID NO: 27791 - DNA, 80 bp, synthetic construct
  misc_feature 1..80: note = Artificially Synthesized Probe
  source 1..80: mol_type = other DNA
acggaccagagggtcctggaatgatttcagagaaagtgatcaatgtctccacaaatgcagctaatgcatttgaagaattc

SEQ ID NO: 27792 - DNA, 80 bp, synthetic construct
  misc_feature 1..80: note = Artificially Synthesized Probe
  source 1..80: mol_type = other DNA
tttctgtagtcgcttagcctgaaattatagccatcgttaacttctttctctcttttaaccccaaacccacgatttatgtc

SEQ ID NO: 27793 - DNA, 80 bp, synthetic construct
  misc_feature 1..80: note = Artificially Synthesized Probe
  source 1..80: mol_type = other DNA
catgttgatacgtgtacataatgtataaggtgaggtgtatgaacacatgctccagtatccagcatcgcatcactaatccc

SEQ ID NO: 27794 - DNA, 80 bp, synthetic construct
  misc_feature 1..80: note = Artificially Synthesized Probe
  source 1..80: mol_type = other DNA
cctttcaacctttattgcccttattacttaggaaaccatggggttttaggagctctgagcaagaagtcgctctatcacaa

SEQ ID NO: 27795 - DNA, 80 bp, synthetic construct
  misc_feature 1..80: note = Artificially Synthesized Probe
  source 1..80: mol_type = other DNA
atagctctaacatctgagtgtttcatgttgtgtgtgtgagagctgctgtaatctgtgaacacagcctgtcctttgctctt

SEQ ID NO: 27796 - DNA, 80 bp, synthetic construct
  misc_feature 1..80: note = Artificially Synthesized Probe
  source 1..80: mol_type = other DNA
aaagtggcgggtaaaacagttagcaatcataatagctgatatttgctgagcatctaacacacgctaggcaccgagggcga

SEQ ID NO: 27797 - DNA, 80 bp, synthetic construct
  misc_feature 1..80: note = Artificially Synthesized Probe
  source 1..80: mol_type = other DNA
aaccagcagagattgagtttttttaatgtaaacacaggtgtgtagagctcagaactctacttagtcacagctcttatcac

SEQ ID NO: 27798 - DNA, 80 bp, synthetic construct
  misc_feature 1..80: note = Artificially Synthesized Probe
  source 1..80: mol_type = other DNA
gcctgcagctatttctctctttcacgcaagttgagagacctctagaaattcagctagtcttaagctgatggtttggcata

SEQ ID NO: 27799 - DNA, 80 bp, synthetic construct
  misc_feature 1..80: note = Artificially Synthesized Probe
  source 1..80: mol_type = other DNA
ggagaagtcagatgcacagacagaaggccgaataggacaaggacagtatgatccccttatacgcagcacctggaggagtt

SEQ ID NO: 27800 - DNA, 80 bp, synthetic construct
  misc_feature 1..80: note = Artificially Synthesized Probe
  source 1..80: mol_type = other DNA
ctgtgggctcatgaaccaagataaggacgtctgtgcaccattaaaaaaataaacccacagcaaagccgctgcaggatgag

SEQ ID NO: 27801 - DNA, 80 bp, synthetic construct
  misc_feature 1..80: note = Artificially Synthesized Probe
  source 1..80: mol_type = other DNA
actaagagaaactcttattaacctcacccagaaagataggaatctacaaaggagcaaggattagaccaacaatagattct

SEQ ID NO: 27802 - DNA, 80 bp, synthetic construct
  misc_feature 1..80: note = Artificially Synthesized Probe
  source 1..80: mol_type = other DNA
ttctcttgtctgctgccatgtgagacatgcccttcatctcccaccatgattgtgaggcctccccagctacatggaaccgt

SEQ ID NO: 27803 - DNA, 80 bp, synthetic construct
  misc_feature 1..80: note = Artificially Synthesized Probe
  source 1..80: mol_type = other DNA
agagtgagtgagtatgtgccagggaatacaaaagaggggaaagctacttggctaacatgagaatgatatattcttggtaa

SEQ ID NO: 27804 - DNA, 80 bp, synthetic construct
  misc_feature 1..80: note = Artificially Synthesized Probe
  source 1..80: mol_type = other DNA
gtcactcactgtgagctcatggggtccaggattgtgtcttgttcattgctgtggcttccatactaaacaaagtacaggag

SEQ ID NO: 27805 - DNA, 80 bp, synthetic construct
  misc_feature 1..80: note = Artificially Synthesized Probe
  source 1..80: mol_type = other DNA
acatttacgttgcattgcgaatgtgtggctgttttctcaaatacaaggaagtcatgctgatgtttcttcaaggtcggttt

SEQ ID NO: 27806 - DNA, 80 bp, synthetic construct
  misc_feature 1..80: note = Artificially Synthesized Probe
  source 1..80: mol_type = other DNA
taatgtttagtaatagagtaggggctttattcatctgttcattcattgtgctccttgactgcacgtctgatccatgctga

SEQ ID NO: 27807 - DNA, 80 bp, synthetic construct
  misc_feature 1..80: note = Artificially Synthesized Probe
  source 1..80: mol_type = other DNA
aagttagaatctggggattagcccaaccaaggaagccacagtcctgtctaaatgtttatttgtcattttcccataaagat

SEQ ID NO: 27808 - DNA, 80 bp, synthetic construct
  misc_feature 1..80: note = Artificially Synthesized Probe
  source 1..80: mol_type = other DNA
gaactcttgaaggagcttaccttgaaaataagtcactgaagatgcttcctgtgcctctggcaacagaacccatccagctc

SEQ ID NO: 27809 - DNA, 80 bp, synthetic construct
  misc_feature 1..80: note = Artificially Synthesized Probe
  source 1..80: mol_type = other DNA
attaatatgaccgtcagcagctcagccgctctctctttctgggtgggtttcatcttggtaaatgtggattctcagactgg

SEQ ID NO: 27810 - DNA, 80 bp, synthetic construct
  misc_feature 1..80: note = Artificially Synthesized Probe
  source 1..80: mol_type = other DNA
gggcctactgtgtcctcttgtattttgtgaacaagcacagtttggggatatttgggtttaagccccagatcttccacatt

SEQ ID NO: 27811 - DNA, 80 bp, synthetic construct
  misc_feature 1..80: note = Artificially Synthesized Probe
  source 1..80: mol_type = other DNA
aagatggtgatatcgacagtcctgaccctgcgcaggtagaggctgatgtgtttttgggtcttagtgcttaacaagagagt

SEQ ID NO: 27812 - DNA, 80 bp, synthetic construct
  misc_feature 1..80: note = Artificially Synthesized Probe
  source 1..80: mol_type = other DNA
tatgtggagacatgttgagatacacaacttcttacccctgtgttacagttttctacagtcttcagtgcagtcacacgctg

SEQ ID NO: 27813 - DNA, 80 bp, synthetic construct
  misc_feature 1..80: note = Artificially Synthesized Probe
  source 1..80: mol_type = other DNA
cagagtacacagaacgctatctgagtggtgaattaattccttttgtgattcctaattgtgtgaggaaaagttatttcccc

SEQ ID NO: 27814 - DNA, 80 bp, synthetic construct
  misc_feature 1..80: note = Artificially Synthesized Probe
  source 1..80: mol_type = other DNA
gggcaggatttgatctatcacaatacacacttcatcagaaaatcacttccgcatgcacagactgtgataacaacgaaatt

SEQ ID NO: 27815 - DNA, 80 bp, synthetic construct
  misc_feature 1..80: note = Artificially Synthesized Probe
  source 1..80: mol_type = other DNA
ttcctttttttctagacaaatagaacgttgcaggcagaaggacggagtgcgcagagagacagggtctcgaaactgaaacg

SEQ ID NO: 27816 - DNA, 80 bp, synthetic construct
  misc_feature 1..80: note = Artificially Synthesized Probe
  source 1..80: mol_type = other DNA
cattgaattttgcgttacgtttcaaaagtgaatgtaaatatacaggtgtaaaaccagctggatggcacacaggcactccg

SEQ ID NO: 27817 - DNA, 80 bp, synthetic construct
  misc_feature 1..80: note = Artificially Synthesized Probe
  source 1..80: mol_type = other DNA
tttaaaattgcataaaattacgttacttatgtctgtgcttcttaaataatagaaatgtcttcacgcccctacttttgtta

SEQ ID NO: 27818 - DNA, 80 bp, synthetic construct
  misc_feature 1..80: note = Artificially Synthesized Probe
  source 1..80: mol_type = other DNA
gccaggctgctgatgggttcagccaccgggggagacggacccaggcatagacccgccaggctgctgtgggttcagccact

SEQ ID NO: 27819 - DNA, 80 bp, synthetic construct
  misc_feature 1..80: note = Artificially Synthesized Probe
  source 1..80: mol_type = other DNA
agccttccctctagcggctgtacatgggtttatttctgccagtttcacttaatgcttcatgaatatattctcacatccct

SEQ ID NO: 27820 - DNA, 80 bp, synthetic construct
  misc_feature 1..80: note = Artificially Synthesized Probe
  source 1..80: mol_type = other DNA
ctcatgctgaatatgtggatggaggaaaaaaaccatgctctccctacacctccctctaccttaagctccagtgctttttg

SEQ ID NO: 27821 - DNA, 80 bp, synthetic construct
  misc_feature 1..80: note = Artificially Synthesized Probe
  source 1..80: mol_type = other DNA
atctcttgaccttgtgatccacccacctcggcctcccaaagtgctgggattacaggcatgagccaccgcgcccagccaga

SEQ ID NO: 27822 - DNA, 80 bp, synthetic construct
  misc_feature 1..80: note = Artificially Synthesized Probe
  source 1..80: mol_type = other DNA
ctcttgagtttaattagatcccatttgtcaattttggcttttgttgccattgcttttggtgttttagacatgaagtcctt

SEQ ID NO: 27823 - DNA, 80 bp, synthetic construct
  misc_feature 1..80: note = Artificially Synthesized Probe
  source 1..80: mol_type = other DNA
gcatccctgtcttgtgccagttttcaaagagaatgtttccagtttttgcccattcagtataatattgcctgtgggtttgt

SEQ ID NO: 27824 - DNA, 80 bp, synthetic construct
  misc_feature 1..80: note = Artificially Synthesized Probe
  source 1..80: mol_type = other DNA
tcttgccttctgctagcttttgaatgtgttcgctcttgcttttctagttgttttaattgtgacattagggtgttgatttt

SEQ ID NO: 27825 - DNA, 80 bp, synthetic construct
  misc_feature 1..80: note = Artificially Synthesized Probe
  source 1..80: mol_type = other DNA
ctctgggaatgcctcgtgcctgtcatcccggcctaatgattattaattcctgttctctttcctctcatcttcccctgatg

SEQ ID NO: 27826 - DNA, 80 bp, synthetic construct
  misc_feature 1..80: note = Artificially Synthesized Probe
  source 1..80: mol_type = other DNA
ctgggctgccgtgaagacgaggtgggcggcctcggtggctgtgactgtagcggagctgtgagggtgaagacgaggtgggc

SEQ ID NO: 27827 - DNA, 80 bp, synthetic construct
  misc_feature 1..80: note = Artificially Synthesized Probe
  source 1..80: mol_type = other DNA
gcctgttgcagcgtaactaacatcctacataactacaccactaaaactcagctgactccccagactcagtccctggggga

SEQ ID NO: 27828 - DNA, 80 bp, synthetic construct
  misc_feature 1..80: note = Artificially Synthesized Probe
  source 1..80: mol_type = other DNA
tcccatatctgactcttaaaacgacaacaaaatctagttaagagaaccggaactgcggtttctgccgatgtcccatcctg

SEQ ID NO: 27829 - DNA, 80 bp, synthetic construct
  misc_feature 1..80: note = Artificially Synthesized Probe
  source 1..80: mol_type = other DNA
cttcttagaaacgcaggtctatggatcccagcctatgaaaccagattgtctcaggacggtgcccattaaagagtctctgt

SEQ ID NO: 27830 - DNA, 80 bp, synthetic construct
  misc_feature 1..80: note = Artificially Synthesized Probe
  source 1..80: mol_type = other DNA
tcttctcacgagagtatgcacttgcctattagaaaatgtgtttggaatagtaaccagcaggagtttcaacatactcccaa

SEQ ID NO: 27831 - DNA, 80 bp, synthetic construct
  misc_feature 1..80: note = Artificially Synthesized Probe
  source 1..80: mol_type = other DNA
tcgaccaatgtgagtgttcattgcaaggaaagccaagattcatctccattaagatccctttacatttccgagctccattc

SEQ ID NO: 27832 - DNA, 80 bp, synthetic construct
  misc_feature 1..80: note = Artificially Synthesized Probe
  source 1..80: mol_type = other DNA
ttatatattaattaagcgtcacatccacgccccccatttatatattaattaagcgtcgcatcctccagaggcacttcctg

SEQ ID NO: 27833 - DNA, 80 bp, synthetic construct
  misc_feature 1..80: note = Artificially Synthesized Probe
  source 1..80: mol_type = other DNA
aaacatcaaagcattttcaaggcaatcacataatgattcaaaattgactttggtgtctcctttgctgcttgcacacagcg

SEQ ID NO: 27834 - DNA, 80 bp, synthetic construct
  misc_feature 1..80: note = Artificially Synthesized Probe
  source 1..80: mol_type = other DNA
gcagagagaaaacaaacgtctccactagatttcttcattgttcctgctcctgctctaaaatgaaactctgagttttcctg

SEQ ID NO: 27835 - DNA, 80 bp, synthetic construct
  misc_feature 1..80: note = Artificially Synthesized Probe
  source 1..80: mol_type = other DNA
cattgttacctggcatcatgaataatggttcagacttcagggagttcatgaaaccctacaaatttctgcaaagtggtgtg

SEQ ID NO: 27836 - DNA, 80 bp, synthetic construct
  misc_feature 1..80: note = Artificially Synthesized Probe
  source 1..80: mol_type = other DNA
tctattccatgcacgcttgtttgtcactgtcaggaaaactttaaatgggcttgggctcatttcttcttcaaattaactgc

SEQ ID NO: 27837 - DNA, 80 bp, synthetic construct
  misc_feature 1..80: note = Artificially Synthesized Probe
  source 1..80: mol_type = other DNA
aacagatatctgtggagtaaattcaatgtgtcagatgctggctaggactttaatcagctgatttcgtgtcgtcctcaaca

SEQ ID NO: 27838 - DNA, 80 bp, synthetic construct
  misc_feature 1..80: note = Artificially Synthesized Probe
  source 1..80: mol_type = other DNA
acagaactgagtttggaaagcctggcctgggtttctgcctccataaaccaaaatcagcagctctcacgtgggctgggcac

SEQ ID NO: 27839 - DNA, 80 bp, synthetic construct
  misc_feature 1..80: note = Artificially Synthesized Probe
  source 1..80: mol_type = other DNA
ttgggagaaggtgctgctgtcaggtgggctgggtgcagtcactgatttggtggccaggaggagggagaagggtggcgttc

SEQ ID NO: 27840 - DNA, 80 bp, synthetic construct
  misc_feature 1..80: note = Artificially Synthesized Probe
  source 1..80: mol_type = other DNA
cgtgtgtcataaaatacatatgatgaactgacagagaaagccactcagagagaacccagcatggctatgtagtgtgtcca

SEQ ID NO: 27841 - DNA, 80 bp, synthetic construct
  misc_feature 1..80: note = Artificially Synthesized Probe
  source 1..80: mol_type = other DNA
aacctggaagaaaaagaccaaagtatcatgggaaaaaaagggaaatcaacagaattcactgaatgtcgcaacagccgcct

SEQ ID NO: 27842 - DNA, 80 bp, synthetic construct
  misc_feature 1..80: note = Artificially Synthesized Probe
  source 1..80: mol_type = other DNA
gtagagaaaaagcacaaaccatgtgagggaaaacacaccacagtggtttttctattttctcactcaacagcaaccaacac

SEQ ID NO: 27843 - DNA, 80 bp, synthetic construct
  misc_feature 1..80: note = Artificially Synthesized Probe
  source 1..80: mol_type = other DNA
ttgtgctgtctgacatactttgcattttgagtaataaattaaccatattcgtgttggagcgtttaggttgaagtcaagtg

SEQ ID NO: 27844 - DNA, 80 bp, synthetic construct
  misc_feature 1..80: note = Artificially Synthesized Probe
  source 1..80: mol_type = other DNA
gtgattttaaatttttgtaaaaagtggctgaaaggctgaacactttgaagcttcaagaaagtgggggggatgtgggcaga

SEQ ID NO: 27845 - DNA, 80 bp, synthetic construct
  misc_feature 1..80: note = Artificially Synthesized Probe
  source 1..80: mol_type = other DNA
ccccctggtcaggaggccaccacatcatacagctttgtttcactaaacataaataaataaatacgttctgaggctacaca

SEQ ID NO: 27846 - DNA, 80 bp, synthetic construct
  misc_feature 1..80: note = Artificially Synthesized Probe
  source 1..80: mol_type = other DNA
catccctccacccttgaaggaaacctgggaagcctgtgctttggggccagtgcattcctcgctttatttactggggctgc

SEQ ID NO: 27847 - DNA, 80 bp, synthetic construct
  misc_feature 1..80: note = Artificially Synthesized Probe
  source 1..80: mol_type = other DNA
aatttattatttgttgccctaaataaaaccaaccccagaaatgggccctccttgaagtgctgccattgtttgagaggaac

SEQ ID NO: 27848 - DNA, 80 bp, synthetic construct
  misc_feature 1..80: note = Artificially Synthesized Probe
  source 1..80: mol_type = other DNA
aaaagtgaaagtgactaatctctcggcacaatcctaccattttaagatcctgtagctccacgtggatattccatgatgaa

SEQ ID NO: 27849 - DNA, 80 bp, synthetic construct
  misc_feature 1..80: note = Artificially Synthesized Probe
  source 1..80: mol_type = other DNA
agcttttcccgacccctccagcctttcccgccagctgctgacctccacactctgtccccagcacagctcccaaacaaggc

SEQ ID NO: 27850 - DNA, 80 bp, synthetic construct
  misc_feature 1..80: note = Artificially Synthesized Probe
  source 1..80: mol_type = other DNA
ggtaaatcccaaagcgggtgtggcccttgcagttggttttgttatgttggtgattttcattttgttttttagtgagaatg

SEQ ID NO: 27851 - DNA, 80 bp, synthetic construct
  misc_feature 1..80: note = Artificially Synthesized Probe
  source 1..80: mol_type = other DNA
caaatgattatatcggctttattcataatcaccaaaaacctgtaaccacccaatgcccttcaggggctgagtagatgaac

SEQ ID NO: 27852 - DNA, 80 bp, synthetic construct
  misc_feature 1..80: note = Artificially Synthesized Probe
  source 1..80: mol_type = other DNA
tgttgagaatgatattattttattccgttttttggctgatttgtattccatggtatatgtataccacagtttctttatcc

SEQ ID NO: 27853 - DNA, 80 bp, synthetic construct
  misc_feature 1..80: note = Artificially Synthesized Probe
  source 1..80: mol_type = other DNA
aacgttaaaaaagaaaaaaaagccgggggagcaggttttagctgtaactctaacagcatctactgagaaatcatggagca

SEQ ID NO: 27854 - DNA, 80 bp, synthetic construct
  misc_feature 1..80: note = Artificially Synthesized Probe
  source 1..80: mol_type = other DNA
agcccagggcatccttcaaaagagggcatcactgttctgttgggattatagggcgtacagtaaccagtgtctgaagaaca

SEQ ID NO: 27855 - DNA, 80 bp, synthetic construct
  misc_feature 1..80: note = Artificially Synthesized Probe
  source 1..80: mol_type = other DNA
aagtcagacggacattgtgatctgtatgctttgtgtgaccctccaggaacctaaacacctgtgaagacaggtttattctc

SEQ ID NO: 27856 - DNA, 80 bp, synthetic construct
  misc_feature 1..80: note = Artificially Synthesized Probe
  source 1..80: mol_type = other DNA
gctgctaattaatgaaatgccctctgttttttaaatctgggtgtctgtccactctcttccattcatcttacccatgagcc

SEQ ID NO: 27857 - DNA, 80 bp, synthetic construct
  misc_feature 1..80: note = Artificially Synthesized Probe
  source 1..80: mol_type = other DNA
gttaatttattagcatttcacaaatgatgctgaaacaatcgaaaggagcacctgcttccagttgcatagcaccagctgag

SEQ ID NO: 27858 - DNA, 80 bp, synthetic construct
  misc_feature 1..80: note = Artificially Synthesized Probe
  source 1..80: mol_type = other DNA
tctgcgttgcgataaagtaatatgaatagccaacagaattttggcctggaagactttgttgggatggaaaatgtgaatgc

SEQ ID NO: 27859 - DNA, 80 bp, synthetic construct
  misc_feature 1..80: note = Artificially Synthesized Probe
  source 1..80: mol_type = other DNA
gcaaacgcacggctggctgagccctgacctggcctagtccatcactcatcagtgatttgccaaataaagagttatgttaa

SEQ ID NO: 27860 - DNA, 80 bp, synthetic construct
  misc_feature 1..80: note = Artificially Synthesized Probe
  source 1..80: mol_type = other DNA
ggagatagaaagatttacacttttctttccaatggcaaagccttttccagaaaaatcttaagaggaagggtcaaagtgag

SEQ ID NO: 27861 - DNA, 80 bp, synthetic construct
  misc_feature 1..80: note = Artificially Synthesized Probe
  source 1..80: mol_type = other DNA
agtcactgtttctcttttaaaagaaacgtggaaagccgtttgatctgcttcttgatagctgggcaggacagcaccgtggt

SEQ ID NO: 27862 - DNA, 80 bp, synthetic construct
  misc_feature 1..80: note = Artificially Synthesized Probe
  source 1..80: mol_type = other DNA
ctgaggggtccagggagtccgtactttgtggggaaactcagaaggttttcatgaggaagtgacccagcccaggctttaaa

SEQ ID NO: 27863 - DNA, 80 bp, synthetic construct
  misc_feature 1..80: note = Artificially Synthesized Probe
  source 1..80: mol_type = other DNA
tgattattttaagacacggacatgagttccttagatcctcattgcgcagggacacttcaaaagaaaaagggaaattggaa

SEQ ID NO: 27864 - DNA, 80 bp, synthetic construct
  misc_feature 1..80: note = Artificially Synthesized Probe
  source 1..80: mol_type = other DNA
gagaatgatgtggacacttacaaatatgccttgacaggaagtttcagaaacaagcttggaaattgggacgatgttaatgc

SEQ ID NO: 27865 - DNA, 80 bp, synthetic construct
  misc_feature 1..80: note = Artificially Synthesized Probe
  source 1..80: mol_type = other DNA
ttataataattttaaaaaggaagatcagtcatcagcatggtcttcaagatctctgctcgcgtcccgtgctctgccaagat

SEQ ID NO: 27866 - DNA, 80 bp, synthetic construct
  misc_feature 1..80: note = Artificially Synthesized Probe
  source 1..80: mol_type = other DNA
gcacagtcatttcttggtgaagtttcaggtcaggagctctgtaacctgttaaagcacaatcgatctagaatccgaggctt

SEQ ID NO: 27867 - DNA, 80 bp, synthetic construct
  misc_feature 1..80: note = Artificially Synthesized Probe
  source 1..80: mol_type = other DNA
ttcactgtgaggtgaaatcatacctgtggaaatcattgttgaaatgatcgctttgaaaggagtttccatcatcgctgaga

SEQ ID NO: 27868 - DNA, 80 bp, synthetic construct
  misc_feature 1..80: note = Artificially Synthesized Probe
  source 1..80: mol_type = other DNA
ttctgcacatggtccaacttctttaaggaagcaaggtgtcaccctgttcagattcttcctccagagttgcttttctagat

SEQ ID NO: 27869 - DNA, 80 bp, synthetic construct
  misc_feature 1..80: note = Artificially Synthesized Probe
  source 1..80: mol_type = other DNA
agacattttccaaagcaaactcagatcacaaaccgcatcgagtttgagtataccaattctcacgtaacgttacgatggga

SEQ ID NO: 27870 - DNA, 80 bp, synthetic construct
  misc_feature 1..80: note = Artificially Synthesized Probe
  source 1..80: mol_type = other DNA
cacttttgttcttcctcccttattggtggcctcagccctggctgtggattgattcacctgtggcactgtcaaatgaactg

SEQ ID NO: 27871 - DNA, 80 bp, synthetic construct
  misc_feature 1..80: note = Artificially Synthesized Probe
  source 1..80: mol_type = other DNA
gttgctgttagtcataactgaattccttcggaagatgatgtcgtagtttatcggaaggcatggtggtgtttaagctggta

SEQ ID NO: 27872 - DNA, 80 bp, synthetic construct
  misc_feature 1..80: note = Artificially Synthesized Probe
  source 1..80: mol_type = other DNA
acgcagccgattttgcgtgaagacctgtgtgctacccatgggaggccaataaggagaagggctgtgtacgaccacggaga

SEQ ID NO: 27873 - DNA, 80 bp, synthetic construct
  misc_feature 1..80: note = Artificially Synthesized Probe
  source 1..80: mol_type = other DNA
aagcaaaggtgtccatcagctaggaaaacgtcctatcggcaatgaaaagaagtaagtgtgcttttcagaaatggaaggga

SEQ ID NO: 27874 - DNA, 80 bp, synthetic construct
  misc_feature 1..80: note = Artificially Synthesized Probe
  source 1..80: mol_type = other DNA
aaacctgtcaatttaaagtgtgcatttcctcctctttcttcccaaaccttgcagttggcattcacggggcaggtctttaa

SEQ ID NO: 27875 - DNA, 80 bp, synthetic construct
  misc_feature 1..80: note = Artificially Synthesized Probe
  source 1..80: mol_type = other DNA
gtgctgagaccacagtgtgctcgggtcacagtggtgattgaaacgtttgcctctgcacctactgggaagcctcttcctgg

SEQ ID NO: 27876 - DNA, 80 bp, synthetic construct
  misc_feature 1..80: note = Artificially Synthesized Probe
  source 1..80: mol_type = other DNA
tcctgcttccttcccttctcaaggcgcactgcccgagtctcccttccaggaagtgtgagcagcttgtgacattgagacga

SEQ ID NO: 27877 - DNA, 80 bp, synthetic construct
  misc_feature 1..80: note = Artificially Synthesized Probe
  source 1..80: mol_type = other DNA
tctccagtgaagacagatgtgcattcccacgcgtgaatggatgattcccaagacttctcagtcaaaggcacgttttgttt

SEQ ID NO: 27878 - DNA, 80 bp, synthetic construct
  misc_feature 1..80: note = Artificially Synthesized Probe
  source 1..80: mol_type = other DNA
aggcagcaggctgcaaagaggatggatggtaagtgtttcttatcagagtcaattctctcctggatctgggaaaaggaagg

SEQ ID NO: 27879 - DNA, 80 bp, synthetic construct
  misc_feature 1..80: note = Artificially Synthesized Probe
  source 1..80: mol_type = other DNA
catgctggattgttaactttgaacggtgtcacctgagccacacagcttccagacctcctgttctctcatctgataaacag

SEQ ID NO: 27880 - DNA, 80 bp, synthetic construct
  misc_feature 1..80: note = Artificially Synthesized Probe
  source 1..80: mol_type = other DNA
tttcccaaacctctacgaacttattgaaaatggcagatgccgatttgttgaatcagagatggtgattgcagtgtaagtgg

SEQ ID NO: 27881 - DNA, 80 bp, synthetic construct
  misc_feature 1..80: note = Artificially Synthesized Probe
  source 1..80: mol_type = other DNA
tgacctgggtgatctcccaacagagggaaattaaatcagcgttttggtcaaagtggacctaatatgaactaatattaagc

SEQ ID NO: 27882 - DNA, 80 bp, synthetic construct
  misc_feature 1..80: note = Artificially Synthesized Probe
  source 1..80: mol_type = other DNA
gtcttttgacatggagctatgcttacaagaacaaggcccaatgcttctgttaaagatgtgaaatgttgaatacatctgac

SEQ ID NO: 27883 - DNA, 80 bp, synthetic construct
  misc_feature 1..80: note = Artificially Synthesized Probe
  source 1..80: mol_type = other DNA
atcgcgatgaatcttcactactcagcctgcctggggaggcttccaaatgcacgggactcatttgacgtttgttttcttga

SEQ ID NO: 27884 - DNA, 80 bp, synthetic construct
  misc_feature 1..80: note = Artificially Synthesized Probe
  source 1..80: mol_type = other DNA
aagtggaattggtggatcccatggtgaagcgatgcttcctcgttttgaggaacctccacactgcttagggacagggtgtg

SEQ ID NO: 27885 - DNA, 80 bp, synthetic construct
  misc_feature 1..80: note = Artificially Synthesized Probe
  source 1..80: mol_type = other DNA
ggttctgcgtgttggctgtggtgaacagcatcttaacgaacacgagagagcagataccccttccacacatccattttatt

SEQ ID NO: 27886 - DNA, 80 bp, synthetic construct
  misc_feature 1..80: note = Artificially Synthesized Probe
  source 1..80: mol_type = other DNA
ttacctcttaagagcatttgcgttctctgaagctcatagagtgtaatgtatgaaaagtaattttatgatggggaaaatgg

SEQ ID NO: 27887 - DNA, 80 bp, synthetic construct
  misc_feature 1..80: note = Artificially Synthesized Probe
  source 1..80: mol_type = other DNA
gagtgaagctgcagatcttcgcggtgagtgttgcagctcataaaaggagtgcggacccaaagagtgagcaacagcaagat

SEQ ID NO: 27888 - DNA, 80 bp, synthetic construct
  misc_feature 1..80: note = Artificially Synthesized Probe
  source 1..80: mol_type = other DNA
gtgatgtgctgagcttctgtctagaaagaaggtagcagtccaccctcctgtctcccaggcattcgttcacccaggtcctc

SEQ ID NO: 27889 - DNA, 80 bp, synthetic construct
  misc_feature 1..80: note = Artificially Synthesized Probe
  source 1..80: mol_type = other DNA
cctggaagctcccagacatacgtagcaggctcaacgtggcgggggagttggaaggaaaaatggaatccacaactgctgcg

SEQ ID NO: 27890 - DNA, 80 bp, synthetic construct
  misc_feature 1..80: note = Artificially Synthesized Probe
  source 1..80: mol_type = other DNA
gaatataatccaaaaagtttgaaagcccttggcaggagcaataccttgcagccatcagggtggtgcagagaaaggaagtc

SEQ ID NO: 27891 - DNA, 80 bp, synthetic construct
  misc_feature 1..80: note = Artificially Synthesized Probe
  source 1..80: mol_type = other DNA
aatatgcttaacgccacagcaaacatgaaggtcacaggacgcgcattctcattctgcaggtgaggaaactgaggcacaga

SEQ ID NO: 27892 - DNA, 80 bp, synthetic construct
  misc_feature 1..80: note = Artificially Synthesized Probe
  source 1..80: mol_type = other DNA
gacgtaagtgctgtctagtgtaagacagtcaatagatgaccatcttccatggacgtaaggtctgtctagtgtaggacaat

SEQ ID NO: 27893 - DNA, 80 bp, synthetic construct
  misc_feature 1..80: note = Artificially Synthesized Probe
  source 1..80: mol_type = other DNA
cctgttgctagcaaacagatgtccattgtagaagaatgtgtgctcctccccataaatttcaaagaaacaaatgtcccata

SEQ ID NO: 27894 - DNA, 80 bp, synthetic construct
  misc_feature 1..80: note = Artificially Synthesized Probe
  source 1..80: mol_type = other DNA
gaggccacaggccagctccagggaggctcagtgggataagcatctgcctttcccagtgcagggcaagacgggagaggcca

SEQ ID NO: 27895 - DNA, 80 bp, synthetic construct
  misc_feature 1..80: note = Artificially Synthesized Probe
  source 1..80: mol_type = other DNA
tttcagcatttactgaaaccctgctgcctacgcaatgtgattgagatgttgaactgaaaggtaccaggagctcacacatc

SEQ ID NO: 27896 - DNA, 80 bp, synthetic construct
  misc_feature 1..80: note = Artificially Synthesized Probe
  source 1..80: mol_type = other DNA
ccaagctcctagtccatgtagctgctgcatctctcagcaggacaggaaaggaaggccggcctgagtccggagggtggcgc

SEQ ID NO: 27897 - DNA, 80 bp, synthetic construct
  misc_feature 1..80: note = Artificially Synthesized Probe
  source 1..80: mol_type = other DNA
agcacacacacatgcagacatgaaatatacacatacacatgttgacacacacaacatgcacaaatatgcagacacacaaa

SEQ ID NO: 27898 - DNA, 80 bp, synthetic construct
  misc_feature 1..80: note = Artificially Synthesized Probe
  source 1..80: mol_type = other DNA
tgcctttttttgtgctgaaattagttttaagcaggtgaaactccctacagcttcaagaggatgaggagatatgttttgtt

SEQ ID NO: 27899 - DNA, 80 bp, synthetic construct
  misc_feature 1..80: note = Artificially Synthesized Probe
  source 1..80: mol_type = other DNA
ggatcacaaatgtgtgtttattttccaaaaacaagacattggcatgatagtgtggccctgggggcagggtcatggaataa

SEQ ID NO: 27900 - DNA, 80 bp, synthetic construct
  misc_feature 1..80: note = Artificially Synthesized Probe
  source 1..80: mol_type = other DNA
atggctgtggtgactgtccagtttttagatgaagaaattgagtctcatccaaccttgatcagctaataaatgaccacgtg

SEQ ID NO: 27901 - DNA, 80 bp, synthetic construct
  misc_feature 1..80: note = Artificially Synthesized Probe
  source 1..80: mol_type = other DNA
cacgacaagttcattaacctgctgctgaaagggcctttgcaattcaaggttggatccatcagaaaatagaatatgaaact

SEQ ID NO: 27902 - DNA, 80 bp, synthetic construct
  misc_feature 1..80: note = Artificially Synthesized Probe
  source 1..80: mol_type = other DNA
tccctgcccccaacccctggcaaacactgactctttcgctacctttgtagttctgccttttccagaatgacccatggatt

SEQ ID NO: 27903 - DNA, 80 bp, synthetic construct
  misc_feature 1..80: note = Artificially Synthesized Probe
  source 1..80: mol_type = other DNA
ttgttttaatttggaatactcgggcgggaggtgatatggggcgtctggtttgcacacttgttttaatttggaatacttgg

SEQ ID NO: 27904 - DNA, 80 bp, synthetic construct
  misc_feature 1..80: note = Artificially Synthesized Probe
  source 1..80: mol_type = other DNA
tgcttgttctgtttcttcaagctgtgtcttctgtgttgaaatatgccttgtggtagttttgctgaaagccgaaacagctg

SEQ ID NO: 27905 - DNA, 80 bp, synthetic construct
  misc_feature 1..80: note = Artificially Synthesized Probe
  source 1..80: mol_type = other DNA
ggatgcagctttttacctgggtgacagatgtatatgttttaaagtaacttaaatgcattaccctttgctcttcacgtcag

SEQ ID NO: 27906 - DNA, 80 bp, synthetic construct
  misc_feature 1..80: note = Artificially Synthesized Probe
  source 1..80: mol_type = other DNA
ccgcatagaatttcacttgtgaattgaaaagttcagggcctgagataatcttaagctgctggatctgtggggaaaacaaa

SEQ ID NO: 27907 - DNA, 80 bp, synthetic construct
  misc_feature 1..80: note = Artificially Synthesized Probe
  source 1..80: mol_type = other DNA
ttactttgcttccattgttttctttctgttcagaagtgctgagtgtgctcaaattccttggtcctttttgtacagcttct

SEQ ID NO: 27908 - DNA, 80 bp, synthetic construct
  misc_feature 1..80: note = Artificially Synthesized Probe
  source 1..80: mol_type = other DNA
taaaaagtcaccttgagattctaatgctgggaggttcttcctgatctcacctctgcttatacagtgtatcctcactccca

SEQ ID NO: 27909 - DNA, 80 bp, synthetic construct
  misc_feature 1..80: note = Artificially Synthesized Probe
  source 1..80: mol_type = other DNA
catgggcagtgctgcctctttattttggaagcagatgatgaaacacctgaattacaatcatttgaacaagcaaagctggt

SEQ ID NO: 27910 - DNA, 80 bp, synthetic construct
  misc_feature 1..80: note = Artificially Synthesized Probe
  source 1..80: mol_type = other DNA
cttctcacgtgcaggacagatggcgccaggaagaggatgtcagtggaaagccataataagttcaaacatgaaattagtgt

SEQ ID NO: 27911 - DNA, 80 bp, synthetic construct
  misc_feature 1..80: note = Artificially Synthesized Probe
  source 1..80: mol_type = other DNA
aaagtaaagcaaaacagaagacgtcataaactcctaagcccagagcactgggagatctcacatctatgaaaacttctcaa

SEQ ID NO: 27912 - DNA, 80 bp, synthetic construct
  misc_feature 1..80: note = Artificially Synthesized Probe
  source 1..80: mol_type = other DNA
catatcaccttcttatgatgtctttcatgccacagattatctcagtggtggccaacaagatggaccgaagacttcagaag

SEQ ID NO: 27913 - DNA, 80 bp, synthetic construct
  misc_feature 1..80: note = Artificially Synthesized Probe
  source 1..80: mol_type = other DNA
cggggagacatcacatgtcggtacgttccatgatgccccacaagccacaaaaaccagcacgtttttattagggagtttca

SEQ ID NO: 27914 - DNA, 80 bp, synthetic construct
  misc_feature 1..80: note = Artificially Synthesized Probe
  source 1..80: mol_type = other DNA
aaattgttgtggtgattataacaattccacgtgcataccttccccacttccagcagaggtaggtgaagacttggggtcag

SEQ ID NO: 27915 - DNA, 80 bp, synthetic construct
  misc_feature 1..80: note = Artificially Synthesized Probe
  source 1..80: mol_type = other DNA
ttgtttctctccttgcattgactggcagaaagttagagctacatgtaaatcatgcccatagctaactgtgaaccctgaac

SEQ ID NO: 27916 - DNA, 80 bp, synthetic construct
  misc_feature 1..80: note = Artificially Synthesized Probe
  source 1..80: mol_type = other DNA
acctttgttgggctctgagatgcattcacctgcacttctgtctactctccttgcatataaattatttccagatgattctt

SEQ ID NO: 27917 - DNA, 80 bp, synthetic construct
  misc_feature 1..80: note = Artificially Synthesized Probe
  source 1..80: mol_type = other DNA
ttgcaatgtttataccaaaggttctgagtttctgtcatcttaaaacttaaaattaacttaattttcataaaacttcaagt

SEQ ID NO: 27918 - DNA, 80 bp, synthetic construct
  misc_feature 1..80: note = Artificially Synthesized Probe
  source 1..80: mol_type = other DNA
gtgtgcttgcgtgtgtgtgaaatcagactttgcacgacccactctggaacacattataagagttaatgaaatcctaaata

SEQ ID NO: 27919 - DNA, 80 bp, synthetic construct
  misc_feature 1..80: note = Artificially Synthesized Probe
  source 1..80: mol_type = other DNA
cgttgttgtgaactcttgcattgttggtaagatgtgtgatggatttggttttaccaaaaatggcaaatgtggagttattt

SEQ ID NO: 27920 - DNA, 80 bp, synthetic construct
  misc_feature 1..80: note = Artificially Synthesized Probe
  source 1..80: mol_type = other DNA
attcattttgtctcccttttgcccaaagcatcccattccttttctgccacttctctcccaagttttcccacctctttatt

SEQ ID NO: 27921 - DNA, 80 bp, synthetic construct
  misc_feature 1..80: note = Artificially Synthesized Probe
  source 1..80: mol_type = other DNA
aggcaggaaaatggggaggccatgacagtttttatgtcattaaaatgattacctatccttgagttccaaatgatatctgc

SEQ ID NO: 27922 - DNA, 80 bp, synthetic construct
  misc_feature 1..80: note = Artificially Synthesized Probe
  source 1..80: mol_type = other DNA
gggctgatttctttcaggctcagggctcagactgcatgataagataaccattttgtgaaaagatgaaagctgctccgtgc

SEQ ID NO: 27923 - DNA, 80 bp, synthetic construct
  misc_feature 1..80: note = Artificially Synthesized Probe
  source 1..80: mol_type = other DNA
catcttttttcgtttgttttcataactaacagcatgtccaccaacagactctgagagagctcaggcagcacatattctct

SEQ ID NO: 27924 - DNA, 80 bp, synthetic construct
  misc_feature 1..80: note = Artificially Synthesized Probe
  source 1..80: mol_type = other DNA
ctcactgtctaccacggtaccttgtttgcagcaggtgctttgtaaattttgtttgaatggctgggttgagtcattaatga

SEQ ID NO: 27925 - DNA, 80 bp, synthetic construct
  misc_feature 1..80: note = Artificially Synthesized Probe
  source 1..80: mol_type = other DNA
ttctacggagcccttcctctcaagagcatcagagtacttgagaatattaaccatgtgttattcggagcaattccagcctt

SEQ ID NO: 27926 - DNA, 80 bp, synthetic construct
  misc_feature 1..80: note = Artificially Synthesized Probe
  source 1..80: mol_type = other DNA
tgtcacaggacctttgattattgatttaagagcctcagatgtttctctgagccatatagtgatcagagcaacacaggaaa

SEQ ID NO: 27927 - DNA, 80 bp, synthetic construct
  misc_feature 1..80: note = Artificially Synthesized Probe
  source 1..80: mol_type = other DNA
gcttgagtggtaccgcactgtggttttgatttcatttccctactggtgagtgattctgaacgcctttctgtgtgctcttt

SEQ ID NO: 27928 - DNA, 80 bp, synthetic construct
  misc_feature 1..80: note = Artificially Synthesized Probe
  source 1..80: mol_type = other DNA
aagccatgtgaggttttgacaggaatttcagggaatctctaggtcacttggggtaggacctacctcatcttaaccattaa

SEQ ID NO: 27929 - DNA, 80 bp, synthetic construct
  misc_feature 1..80: note = Artificially Synthesized Probe
  source 1..80: mol_type = other DNA
ctatgttgaaccacccttgcattgctaggataaattctacatagtcactgtatataattctcctcatatgctgctatatt

SEQ ID NO: 27930 - DNA, 80 bp, synthetic construct
  misc_feature 1..80: note = Artificially Synthesized Probe
  source 1..80: mol_type = other DNA
acaaaaagaaattaccagcccctaagtatttattacacattgtgcacacctaaaaaacccggagacctagcttagtgctc

SEQ ID NO: 27931 - DNA, 80 bp, synthetic construct
  misc_feature 1..80: note = Artificially Synthesized Probe
  source 1..80: mol_type = other DNA
gggactcatgaaatcgtatcccttccttatcccatgtttccatggccatgctggcccagacggctggccgtcctggatcc

SEQ ID NO: 27932 - DNA, 80 bp, synthetic construct
  misc_feature 1..80: note = Artificially Synthesized Probe
  source 1..80: mol_type = other DNA
ccagggagagaggagagagcaagcgacctgccccttggtggctcagtggccataagacaggtggtgctttgttgtagcca

SEQ ID NO: 27933 - DNA, 80 bp, synthetic construct
  misc_feature 1..80: note = Artificially Synthesized Probe
  source 1..80: mol_type = other DNA
ggccagacatggacactgattaatgaagtccacggtgggggtcacatattccccgcacctgagggtttccgccgcgcttc

SEQ ID NO: 27934 - DNA, 80 bp, synthetic construct
  misc_feature 1..80: note = Artificially Synthesized Probe
  source 1..80: mol_type = other DNA
caagacctccaagagcaacaacgacgtcaagtgctcggcctgtgaggggttggcgctgacgcccgacgccaagtacctga

SEQ ID NO: 27935 - DNA, 80 bp, synthetic construct
  misc_feature 1..80: note = Artificially Synthesized Probe
  source 1..80: mol_type = other DNA
gcagtttcttccagctcacctgtgttgtggagaatggcagatctccttctttcaaagactgagtagtgtcccctgtgtat

SEQ ID NO: 27936 - DNA, 80 bp, synthetic construct
  misc_feature 1..80: note = Artificially Synthesized Probe
  source 1..80: mol_type = other DNA
cgtccacatctcaacagctctgttttgaaaggaaatgctaaccaaattgcctttgcaggcagatttattcagagacaaat

SEQ ID NO: 27937 - DNA, 80 bp, synthetic construct
  misc_feature 1..80: note = Artificially Synthesized Probe
  source 1..80: mol_type = other DNA
ttcatggcgctcgttcacaagggcgttttcttgcagtagcaagcttcccccatccccacatccgcctcccagtgaaacca

SEQ ID NO: 27938 - DNA, 80 bp, synthetic construct
  misc_feature 1..80: note = Artificially Synthesized Probe
  source 1..80: mol_type = other DNA
cttgttttcatcttttctgcatcagcagactaagcatctaaggtcaaacttttcatgagcattgtaggaatgcagaacgg

SEQ ID NO: 27939 - DNA, 80 bp, synthetic construct
  misc_feature 1..80: note = Artificially Synthesized Probe
  source 1..80: mol_type = other DNA
taaaagtcccatctcccaggtcaacaggtcatccttgcggtgtagtttagaaaaatcatccatcttttacaaaatggagc

SEQ ID NO: 27940 - DNA, 80 bp, synthetic construct
  misc_feature 1..80: note = Artificially Synthesized Probe
  source 1..80: mol_type = other DNA
gcaatttgaaaggagggcttttgttttaagtggctcatggtatagatctggggccgtgaatggataggagagttggggtg

SEQ ID NO: 27941 - DNA, 80 bp, synthetic construct
  misc_feature 1..80: note = Artificially Synthesized Probe
  source 1..80: mol_type = other DNA
atcatcttaggacccaacacattcttatccccatgacggaaattccagcaatgtttgttgaaatgctgatggatgttgaa

SEQ ID NO: 27942 - DNA, 80 bp, synthetic construct
  misc_feature 1..80: note = Artificially Synthesized Probe
  source 1..80: mol_type = other DNA
agaaaataaagtgggcagctgaactctaaacctaactctgacttggtttcagtggctcagaggaaaaaccacaacaaaca

SEQ ID NO: 27943 - DNA, 80 bp, synthetic construct
  misc_feature 1..80: note = Artificially Synthesized Probe
  source 1..80: mol_type = other DNA
tagggttcaacataggaatttggaggaacacaattcaggccataacttgtgtgtccttcccaaggaggggtgtggggaag

SEQ ID NO: 27944 - DNA, 80 bp, synthetic construct
  misc_feature 1..80: note = Artificially Synthesized Probe
  source 1..80: mol_type = other DNA
cacattacacatacataaacacacatatgcacataggcatgcatgcacacccgtatacctgcacacatacacgtatacac

SEQ ID NO: 27945 - DNA, 80 bp, synthetic construct
  misc_feature 1..80: note = Artificially Synthesized Probe
  source 1..80: mol_type = other DNA
tattgaaatttcttctgtcaaagcctgcgaaattggcttcttaaatcagaaacagaaacatacaagctggtctcatttgt

SEQ ID NO: 27946 - DNA, 80 bp, synthetic construct
  misc_feature 1..80: note = Artificially Synthesized Probe
  source 1..80: mol_type = other DNA
agtcatctttttccagtgctcaaacttcctcactgtcaggaaatgtaaaccaaaattcacacggacaaaatgtgaacaaa

SEQ ID NO: 27947 - DNA, 80 bp, synthetic construct
  misc_feature 1..80: note = Artificially Synthesized Probe
  source 1..80: mol_type = other DNA
ccagctcacggtcacagttcaggatccttgtcctgagcctttgggcctcttggaatctgggtggagggagaatctggaac

SEQ ID NO: 27948 - DNA, 80 bp, synthetic construct
  misc_feature 1..80: note = Artificially Synthesized Probe
  source 1..80: mol_type = other DNA
gggtgtccgcgcctcgttactgggggactgtgtggagttcgggtgtccgcgcctcgttgctgcgggactgtgtgttgttg

SEQ ID NO: 27949 - DNA, 80 bp, synthetic construct
  misc_feature 1..80: note = Artificially Synthesized Probe
  source 1..80: mol_type = other DNA
cttgccacacggggtccatggtaaggggagctcctgctcgtccaggctggaagtccaggatatgtgagtgacagaaatga

SEQ ID NO: 27950 - DNA, 80 bp, synthetic construct
  misc_feature 1..80: note = Artificially Synthesized Probe
  source 1..80: mol_type = other DNA
accattgtgttccagttccatgactttttgctcatggctatgttgggtttccagtttcacagatggtggatggaaacaga

SEQ ID NO: 27951 - DNA, 80 bp, synthetic construct
  misc_feature 1..80: note = Artificially Synthesized Probe
  source 1..80: mol_type = other DNA
tcctcttataccagagggaaataaaactaaattttagccagtgctttgtcccagctgctgagattgcaagtgtcccttct

SEQ ID NO: 27952 - DNA, 80 bp, synthetic construct
  misc_feature 1..80: note = Artificially Synthesized Probe
  source 1..80: mol_type = other DNA
tctccaaaaccacttcaccgtgagctgagtgccatccatttaaactaaattgccaagctgaaaatattagacccatggct

SEQ ID NO: 27953 - DNA, 80 bp, synthetic construct
  misc_feature 1..80: note = Artificially Synthesized Probe
  source 1..80: mol_type = other DNA
ctgagaacaaagccaaaatgttgccctggggaagctcttagacttgttggaaggaaatggggagcaggtgtttgtaagcc

SEQ ID NO: 27954 - DNA, 80 bp, synthetic construct
  misc_feature 1..80: note = Artificially Synthesized Probe
  source 1..80: mol_type = other DNA
tctcagaactttacactggcaaaactcacaccatcacccaatgtagttgaaactcttcaaaaaaccagcggaaggatgtg

SEQ ID NO: 27955 - DNA, 80 bp, synthetic construct
  misc_feature 1..80: note = Artificially Synthesized Probe
  source 1..80: mol_type = other DNA
tccactcagcagacacaaatccactctgcccgtggcccccattccactgtctactcagcagacacaaatccgtctctgcc

SEQ ID NO: 27956 - DNA, 80 bp, synthetic construct
  misc_feature 1..80: note = Artificially Synthesized Probe
  source 1..80: mol_type = other DNA
ctgaagctcagctttgtaactcagggaagctctcatgatgcctgttttatggacagaaacatgactcagggaaatgaggt

SEQ ID NO: 27957 - DNA, 80 bp, synthetic construct
  misc_feature 1..80: note = Artificially Synthesized Probe
  source 1..80: mol_type = other DNA
gcacagccctttcataatgttcactcctgggggctctttcaatctaggcacatttaaatatcagcatttttaacgtgtag

SEQ ID NO: 27958 - DNA, 80 bp, synthetic construct
  misc_feature 1..80: note = Artificially Synthesized Probe
  source 1..80: mol_type = other DNA
ggggtgtctgatgagatggagaggggagaggggtgaactggaggggcatcttctgggacggagaggagagagggggtgaa

SEQ ID NO: 27959 - DNA, 80 bp, synthetic construct
  misc_feature 1..80: note = Artificially Synthesized Probe
  source 1..80: mol_type = other DNA
ggagagggggtgaactatgggggcatctgctggaatagagaggagagaggtgaactgtgggggcatctgatgagatggag

SEQ ID NO: 27960 - DNA, 80 bp, synthetic construct
  misc_feature 1..80: note = Artificially Synthesized Probe
  source 1..80: mol_type = other DNA
gaaggtgaactgtgggggcatctaatgggattgagaagacagaaagggtgaagagtgtctgagagaaaagtcctttagac

SEQ ID NO: 27961 - DNA, 80 bp, synthetic construct
  misc_feature 1..80: note = Artificially Synthesized Probe
  source 1..80: mol_type = other DNA
aagttcccaaagacagcatatttacgggagagggaaataatattttatagtaacactatttcatgttgaatgccaactct

SEQ ID NO: 27962 - DNA, 80 bp, synthetic construct
  misc_feature 1..80: note = Artificially Synthesized Probe
  source 1..80: mol_type = other DNA
gggagaaacgcaatgttaggtcataataacgcacaacaagagactatgaacaatacaaaaaatcatcacagacgacagag

SEQ ID NO: 27963 - DNA, 80 bp, synthetic construct
  misc_feature 1..80: note = Artificially Synthesized Probe
  source 1..80: mol_type = other DNA
ttttcatgtgtctgttggctgcataaatgtcttcttttgagaagtgtctgttcatgtccttcgcccacttgttgatgggg

SEQ ID NO: 27964 - DNA, 80 bp, synthetic construct
  misc_feature 1..80: note = Artificially Synthesized Probe
  source 1..80: mol_type = other DNA
cttcatttttctacattgtacttaaaatcacaacacactttttaaccccgtaaatacacatactttgtcaatatacgata

SEQ ID NO: 27965 - DNA, 80 bp, synthetic construct
  misc_feature 1..80: note = Artificially Synthesized Probe
  source 1..80: mol_type = other DNA
gcgagtgctcatagctgccagaggcaaggtgtggaaatctgcattaatgtaatctgataacgttttgttggtaaattacg

SEQ ID NO: 27966 - DNA, 80 bp, synthetic construct
  misc_feature 1..80: note = Artificially Synthesized Probe
  source 1..80: mol_type = other DNA
ggaggcctttgcttttttttctgcttagttcaattagaaagtcaaagctctaataattttgaatgtctctgggtcattct

SEQ ID NO: 27967 - DNA, 80 bp, synthetic construct
  misc_feature 1..80: note = Artificially Synthesized Probe
  source 1..80: mol_type = other DNA
gtacacgatgaccaagatttcatcaaaatttaggagacaccgtaaaattaaagctcattctcaagacacagggcaatcaa

SEQ ID NO: 27968 - DNA, 80 bp, synthetic construct
  misc_feature 1..80: note = Artificially Synthesized Probe
  source 1..80: mol_type = other DNA
tacacaccacagtaaactaccagaagtgaaggatacagacaaaaccccacacatctacacaccatagtcgaactaccaga

SEQ ID NO: 27969 - DNA, 80 bp, synthetic construct
  misc_feature 1..80: note = Artificially Synthesized Probe
  source 1..80: mol_type = other DNA
cagacaaaactccacacatatacacaccgcagtcaaactaccagaagtgaaggatacagataaaaccccacacacataca

SEQ ID NO: 27970 - DNA, 80 bp, synthetic construct
  misc_feature 1..80: note = Artificially Synthesized Probe
  source 1..80: mol_type = other DNA
aatggcccaccctcctcggcttcctaagaaaggaagttctttaagcatggctctgaaagaagagggcagcaggaacttag

SEQ ID NO: 27971 - DNA, 80 bp, synthetic construct
  misc_feature 1..80: note = Artificially Synthesized Probe
  source 1..80: mol_type = other DNA
agaaatcacagtttttgcagaatccatctagaaagatgaaagacccttcagagccacttcctgtgtttctaagcccagca

SEQ ID NO: 27972 - DNA, 80 bp, synthetic construct
  misc_feature 1..80: note = Artificially Synthesized Probe
  source 1..80: mol_type = other DNA
gccatatgctcctggggaggaggcatcctctctcacagtctcctccactaccgtgggctgctggctcttcatttttagtt

SEQ ID NO: 27973 - DNA, 80 bp, synthetic construct
  misc_feature 1..80: note = Artificially Synthesized Probe
  source 1..80: mol_type = other DNA
acacataatccacagaccacgtaagcttttctttttttaacccaactgtgccattgcaggtgcaaacaagaaatgcagct

SEQ ID NO: 27974 - DNA, 80 bp, synthetic construct
  misc_feature 1..80: note = Artificially Synthesized Probe
  source 1..80: mol_type = other DNA
ctgcgtggggagtggttttctttcacatcaagatgttacagttgcgggaccgaagccccgtgtccttgttgtcagctgaa

SEQ ID NO: 27975 - DNA, 80 bp, synthetic construct
  misc_feature 1..80: note = Artificially Synthesized Probe
  source 1..80: mol_type = other DNA
ggggtgaggccagagaggaactggctcttgggtggatttatacattttcagttgttttctaattcattaacttctgcttt

SEQ ID NO: 27976 - DNA, 80 bp, synthetic construct
  misc_feature 1..80: note = Artificially Synthesized Probe
  source 1..80: mol_type = other DNA
tcatgtctcttaatctaatggctattgaaggtgcgaccttcgagattccagagaatgtactgaatgaagagaacagagca

SEQ ID NO: 27977 - DNA, 80 bp, synthetic construct
  misc_feature 1..80: note = Artificially Synthesized Probe
  source 1..80: mol_type = other DNA
cttcatctcaagtttggagggaaatctgccttactcaaaatctgccaatgtgagcattaatctcttgtaaaacacacctt

SEQ ID NO: 27978 - DNA, 80 bp, synthetic construct
  misc_feature 1..80: note = Artificially Synthesized Probe
  source 1..80: mol_type = other DNA
tattgctagaagctttctgaggtcacttctgaccccgcaacaccatttacatttgggggatggactgtactagtttctgg

SEQ ID NO: 27979 - DNA, 80 bp, synthetic construct
  misc_feature 1..80: note = Artificially Synthesized Probe
  source 1..80: mol_type = other DNA
tctttaagccaccttaaagaagccatcttcaatggtgttggaggaccaagcaaaacatatgtgcttctagtcttgggata

SEQ ID NO: 27980 - DNA, 80 bp, synthetic construct
  misc_feature 1..80: note = Artificially Synthesized Probe
  source 1..80: mol_type = other DNA
tcacacatctacttgacctgcaggaaatatgcgtgtgattgctctacccaaaggcatgtgtgcagccagtttacacccca

SEQ ID NO: 27981 - DNA, 80 bp, synthetic construct
  misc_feature 1..80: note = Artificially Synthesized Probe
  source 1..80: mol_type = other DNA
cagggctcccattgcattactggacaacttctaactattgaaaattttccattgggagaattctccgtgtgtcatttttc

SEQ ID NO: 27982 - DNA, 80 bp, synthetic construct
  misc_feature 1..80: note = Artificially Synthesized Probe
  source 1..80: mol_type = other DNA
aatctcctgcaccttgggaaaatacaaaaccagacttaccaaagatgctcgggagattctctcaagaattcctaccctgg

SEQ ID NO: 27983 - DNA, 80 bp, synthetic construct
  misc_feature 1..80: note = Artificially Synthesized Probe
  source 1..80: mol_type = other DNA
aacagaccagatcaaacagaagaaagcatcggtgaactcaaagacaacatcgttacaaataattcaatcaggacagcaaa

SEQ ID NO: 27984 - DNA, 80 bp, synthetic construct
  misc_feature 1..80: note = Artificially Synthesized Probe
  source 1..80: mol_type = other DNA
caaaaaaaaaaaaaaaaaagaaataggtcattccggaagcccccagcgagctccccacccagttactcccttcttcccaa

SEQ ID NO: 27985 - DNA, 80 bp, synthetic construct
  misc_feature 1..80: note = Artificially Synthesized Probe
  source 1..80: mol_type = other DNA
tgggattgctgggtcaaattgtatttccagttctagatccttgaggaatcaccacacggtcttccagaatggttgaacta

SEQ ID NO: 27986 - DNA, 80 bp, synthetic construct
  misc_feature 1..80: note = Artificially Synthesized Probe
  source 1..80: mol_type = other DNA
ttccatttatttgtgtcttctcttatttccttgagtggtggtttgtagttctccttgaagaggtccttcacatcccttgt

SEQ ID NO: 27987 - DNA, 80 bp, synthetic construct
  misc_feature 1..80: note = Artificially Synthesized Probe
  source 1..80: mol_type = other DNA
ggctgtgaatccatctgatcctgggcttttttttgttggtaggctattaattactgcctcaatttcagaacttgttattg

SEQ ID NO: 27988 - DNA, 80 bp, synthetic construct
  misc_feature 1..80: note = Artificially Synthesized Probe
  source 1..80: mol_type = other DNA
atcctgagttctaatttgattgcactgtggtcggagagactgttatgatttccatccttttgcatttgctgaggagtgtt

SEQ ID NO: 27989 - DNA, 80 bp, synthetic construct
  misc_feature 1..80: note = Artificially Synthesized Probe
  source 1..80: mol_type = other DNA
tatttcctgaatttgattgttggcctttcttgctaggttggagaagttctcctggattatatcctgaagagtgttttcca

SEQ ID NO: 27990 - DNA, 80 bp, synthetic construct
  misc_feature 1..80: note = Artificially Synthesized Probe
  source 1..80: mol_type = other DNA
ggggcccacttgaggaggcactctgtgccttagcagagctcgagcgctgtgctgggagagctgctgctctcttcagagcc

SEQ ID NO: 27991 - DNA, 80 bp, synthetic construct
  misc_feature 1..80: note = Artificially Synthesized Probe
  source 1..80: mol_type = other DNA
aagctgcattgaagcactcagcccacacttgtcaaatatgtgaatgagagagtgagtgaatgtatatgttcttaatgccc

SEQ ID NO: 27992 - DNA, 80 bp, synthetic construct
  misc_feature 1..80: note = Artificially Synthesized Probe
  source 1..80: mol_type = other DNA
ataaaaagtgaagtgtgtagcaccctaaaggtgtcgagtgccgcgagggaaaattcaacagaatgagggggtctgtaagg

SEQ ID NO: 27993 - DNA, 80 bp, synthetic construct
  misc_feature 1..80: note = Artificially Synthesized Probe
  source 1..80: mol_type = other DNA
cgtcctgctggcaggagaccaccgttcaatatttgaccacttaatatttggtgagattccatgcaaattactaaactcaa

SEQ ID NO: 27994 - DNA, 80 bp, synthetic construct
  misc_feature 1..80: note = Artificially Synthesized Probe
  source 1..80: mol_type = other DNA
caggagactgtgatccagattgggatttgcaaaaccatccaatgaatgtcttcttgttgctccgacaccagcctttaaat

SEQ ID NO: 27995 - DNA, 80 bp, synthetic construct
  misc_feature 1..80: note = Artificially Synthesized Probe
  source 1..80: mol_type = other DNA
ccagcaaatctgtgatcccgctgatgttaccttccctgttataaggaagaaaacagagaatgcagcgtttgctaactgtc

SEQ ID NO: 27996 - DNA, 80 bp, synthetic construct
  misc_feature 1..80: note = Artificially Synthesized Probe
  source 1..80: mol_type = other DNA
atagaccacagtttatttacccatccatcatggatgtatacttaggttgtttccttttggaggctattatgaataattct

SEQ ID NO: 27997 - DNA, 80 bp, synthetic construct
  misc_feature 1..80: note = Artificially Synthesized Probe
  source 1..80: mol_type = other DNA
gaaaataagatttttagaaagacatcgggcctgtgtaaatatatcctttagaaaattgacttcagagcgtgagcgacgca

SEQ ID NO: 27998 - DNA, 80 bp, synthetic construct
  misc_feature 1..80: note = Artificially Synthesized Probe
  source 1..80: mol_type = other DNA
cgcagagcgcctctcctcctccaaaggaacgcagttcctcaccagcaacggaacaaagctggatggagaatgactttgac

SEQ ID NO: 27999 - DNA, 80 bp, synthetic construct
  misc_feature 1..80: note = Artificially Synthesized Probe
  source 1..80: mol_type = other DNA
cggcagaaaccctacaagccagaagagagtgggggccaatattcaacattcttgaagaaaagaattttcaacccagaatt

SEQ ID NO: 28000 - DNA, 80 bp, synthetic construct
  misc_feature 1..80: note = Artificially Synthesized Probe
  source 1..80: mol_type = other DNA
gtagagggaaatttatagcactgaatgcccacaagagaaagcaggaaagatccaaaattgacaccctaacatcacaatta

SEQ ID NO: 28001 - DNA, 80 bp, synthetic construct
  misc_feature 1..80: note = Artificially Synthesized Probe
  source 1..80: mol_type = other DNA
tgatgaacatcgatgcaaaaatcctcaataaaatactggcaaaccgaatccagcagcacatcaaaaagcttatccaccat

SEQ ID NO: 28002 - DNA, 80 bp, synthetic construct
  misc_feature 1..80: note = Artificially Synthesized Probe
  source 1..80: mol_type = other DNA
ggtgctgggaaaactggctagccatatggagaaagctgaaactggatcccttccttacaccttatacaaaaatcaattca

SEQ ID NO: 28003 - DNA, 80 bp, synthetic construct
  misc_feature 1..80: note = Artificially Synthesized Probe
  source 1..80: mol_type = other DNA
ataaacatacgtgtgcatgtgtctttatagcagcatgatttatagtcctttgggtatatacccagtaatgggatggctgg

SEQ ID NO: 28004 - DNA, 80 bp, synthetic construct
  misc_feature 1..80: note = Artificially Synthesized Probe
  source 1..80: mol_type = other DNA
actaaattgctaccttccattctagctctatcaactattcccggtacaaatatgaacagtaaggccaggctttgcaatgc

SEQ ID NO: 28005 - DNA, 80 bp, synthetic construct
  misc_feature 1..80: note = Artificially Synthesized Probe
  source 1..80: mol_type = other DNA
acgcatgccctcctgtttgaaagcagagttgggcaggaagtagagactattcacattttaaaggaaaggcgccgcgctca

SEQ ID NO: 28006 - DNA, 80 bp, synthetic construct
  misc_feature 1..80: note = Artificially Synthesized Probe
  source 1..80: mol_type = other DNA
acaaggttaaagatgttaaaggagaagaaggtcttaatgcctgactagatggagaaatgaaatccatgagaaagagacaa

SEQ ID NO: 28007 - DNA, 80 bp, synthetic construct
  misc_feature 1..80: note = Artificially Synthesized Probe
  source 1..80: mol_type = other DNA
atacatgtatccacatgtggctacttttttatctttcatttagtttcaggggtacatgcacagatttgtgatttaggtaa

SEQ ID NO: 28008 - DNA, 80 bp, synthetic construct
  misc_feature 1..80: note = Artificially Synthesized Probe
  source 1..80: mol_type = other DNA
ttaattagatcccattatctaccataatggacagcgcacctctagagcaaccactcaaatattaacgctatgcattacag

SEQ ID NO: 28009 - DNA, 80 bp, synthetic construct
  misc_feature 1..80: note = Artificially Synthesized Probe
  source 1..80: mol_type = other DNA
acacgagtagcaccctcctctaaattgtggcaaactcaaaatatctccatacatcaccagatgtcccttgagggcctaat

SEQ ID NO: 28010 - DNA, 80 bp, synthetic construct
  misc_feature 1..80: note = Artificially Synthesized Probe
  source 1..80: mol_type = other DNA
atcaacacatgtgctccactgtgcatacaaactgccttctgcgcaccatgttacttccgacctgtaaagcacatttcacg

SEQ ID NO: 28011 - DNA, 80 bp, synthetic construct
  misc_feature 1..80: note = Artificially Synthesized Probe
  source 1..80: mol_type = other DNA
ccaaaacctgtttttcttcctatcatagatcttgcctttgttgggagaagtctaggcgccttggaatcatctcacctcta

SEQ ID NO: 28012 - DNA, 80 bp, synthetic construct
  misc_feature 1..80: note = Artificially Synthesized Probe
  source 1..80: mol_type = other DNA
tgggacccaagccagcgtcatgcatctgagcatgctggctctcactctcagctggccgtgggtcagccattgcagcccca

SEQ ID NO: 28013 - DNA, 80 bp, synthetic construct
  misc_feature 1..80: note = Artificially Synthesized Probe
  source 1..80: mol_type = other DNA
tgctttccaaggtaacaagggagatggtttacgttgtgtattttcaagcatgtttagatggatctaaacagctggggtca

SEQ ID NO: 28014 - DNA, 80 bp, synthetic construct
  misc_feature 1..80: note = Artificially Synthesized Probe
  source 1..80: mol_type = other DNA
gcatgaattccagagccaggccacctggactcagaagggagtgctgcccccatcccgcccaagcctgagtgcatgacctg

SEQ ID NO: 28015 - DNA, 80 bp, synthetic construct
  misc_feature 1..80: note = Artificially Synthesized Probe
  source 1..80: mol_type = other DNA
gaacggctgttgtattggaagaaaattggtaattggtagaaagtgccgattggtagaaatggagggtatgaaaccagcaa

SEQ ID NO: 28016 - DNA, 80 bp, synthetic construct
  misc_feature 1..80: note = Artificially Synthesized Probe
  source 1..80: mol_type = other DNA
acagggttcttccatgcttttaacatttcacaaaacggcgagaaggaagaccagagaacattgatttattttaagggagt

SEQ ID NO: 28017 - DNA, 80 bp, synthetic construct
  misc_feature 1..80: note = Artificially Synthesized Probe
  source 1..80: mol_type = other DNA
agcctctgggtgtgggttggacggtcgttcccacctctgccctgtggtgggtgctcagcctctgggtgtgggttggatgg

SEQ ID NO: 28018 - DNA, 80 bp, synthetic construct
  misc_feature 1..80: note = Artificially Synthesized Probe
  source 1..80: mol_type = other DNA
tttttgacgtgtataactccatatcatttttgcgttgatttttttctgaggaagcaatgaccaaaagggtggtcatcctg

SEQ ID NO: 28019 - DNA, 80 bp, synthetic construct
  misc_feature 1..80: note = Artificially Synthesized Probe
  source 1..80: mol_type = other DNA
acttactgtggagcagggattaagagcctgagcgcagggattaagagcctgagccgacctcacattctctctgacttact

SEQ ID NO: 28020 - DNA, 80 bp, synthetic construct
  misc_feature 1..80: note = Artificially Synthesized Probe
  source 1..80: mol_type = other DNA
caggactttttccactgaactattgaggcttttcctattgcacaactcaagaaggataccacctcttttatctactcggt

SEQ ID NO: 28021 - DNA, 80 bp, synthetic construct
  misc_feature 1..80: note = Artificially Synthesized Probe
  source 1..80: mol_type = other DNA
aaggattcatcattggaaacaatggttaagcagacaagttgggtgcttgggggtttatttaacgaccttgaaatttagaa

SEQ ID NO: 28022 - DNA, 80 bp, synthetic construct
  misc_feature 1..80: note = Artificially Synthesized Probe
  source 1..80: mol_type = other DNA
tagctggaagcatagccgagggtccttgctgagatgccagcttctgtttgtgaaatgcacataccaggttaatggtgtct

SEQ ID NO: 28023 - DNA, 80 bp, synthetic construct
  misc_feature 1..80: note = Artificially Synthesized Probe
  source 1..80: mol_type = other DNA
agggagaacctgattctttgaccttgccttttactctgctgacaactaaaggaaaagaactaatctggtgtttaaaacag

SEQ ID NO: 28024 - DNA, 80 bp, synthetic construct
  misc_feature 1..80: note = Artificially Synthesized Probe
  source 1..80: mol_type = other DNA
cttcgagccattcaagccggctactcccaagatgacgaatgtattcccatgatgacaccctctgacatcacctccaccat

SEQ ID NO: 28025 - DNA, 80 bp, synthetic construct
  misc_feature 1..80: note = Artificially Synthesized Probe
  source 1..80: mol_type = other DNA
tataaaaaaacatagtgttggggactgaggtgttctgaataccagagggcttggaatgctgcagctgtatcttagaaatt

SEQ ID NO: 28026 - DNA, 80 bp, synthetic construct
  misc_feature 1..80: note = Artificially Synthesized Probe
  source 1..80: mol_type = other DNA
tcttcagaaatgctttgaaacaatcattacctcgtagaaaaggactttattgtttttaggactgtcattatagagagaat

SEQ ID NO: 28027 - DNA, 80 bp, synthetic construct
  misc_feature 1..80: note = Artificially Synthesized Probe
  source 1..80: mol_type = other DNA
acttggaaattgatatcctagcactacgttcaatagctgtcatttactgatccatgtatacatgtgtgtatgtgtgcgtg

SEQ ID NO: 28028 - DNA, 80 bp, synthetic construct
  misc_feature 1..80: note = Artificially Synthesized Probe
  source 1..80: mol_type = other DNA
acttaattttatcttgtcacaaagagtggattttcaggcgtgtgagcctggggaaattttcatcgtggactaaacttgtt

SEQ ID NO: 28029 - DNA, 80 bp, synthetic construct
  misc_feature 1..80: note = Artificially Synthesized Probe
  source 1..80: mol_type = other DNA
tttagctctttactggaaaaatgagcagctggaggttctgtgagccacaaaatctgaaaaccagaagattcctccaaaca

SEQ ID NO: 28030 - DNA, 80 bp, synthetic construct
  misc_feature 1..80: note = Artificially Synthesized Probe
  source 1..80: mol_type = other DNA
ttggtgctgaaccctaatcccaggacctgagaatgtgactgcgtttcagacagacccttcgaagaggtgaccaggtagaa

SEQ ID NO: 28031 - DNA, 80 bp, synthetic construct
  misc_feature 1..80: note = Artificially Synthesized Probe
  source 1..80: mol_type = other DNA
acaggtgccgagtagttcagatgtgttgagctgagggtcccatgacttgctaacccaacttcaagaagaggtgtggaggt

SEQ ID NO: 28032 - DNA, 80 bp, synthetic construct
  misc_feature 1..80: note = Artificially Synthesized Probe
  source 1..80: mol_type = other DNA
gttattctgtttaccatagtaggttttggtaaatactggtagagtgcatgaatgaatgaggtcttctctgaaaccgagcc

SEQ ID NO: 28033 - DNA, 80 bp, synthetic construct
  misc_feature 1..80: note = Artificially Synthesized Probe
  source 1..80: mol_type = other DNA
cagataaatcgtgcatctgtatcaggaactgcatatgtaagccagaattgctcgggtgagaacaaatgtgttcataaaga

SEQ ID NO: 28034 - DNA, 80 bp, synthetic construct
  misc_feature 1..80: note = Artificially Synthesized Probe
  source 1..80: mol_type = other DNA
gtcaccctcgaccctgccggtcctcacctgtgtcaccctcgaccccgccggtccccacctgtgtcaccctccaacccgcc

SEQ ID NO: 28035 - DNA, 80 bp, synthetic construct
  misc_feature 1..80: note = Artificially Synthesized Probe
  source 1..80: mol_type = other DNA
gtgtcaccctcgaccccgccggccctcacctgtgtcaccctccaacccgccggccctcacctgtgtcaccctcgaccccg

SEQ ID NO: 28036 - DNA, 80 bp, synthetic construct
  misc_feature 1..80: note = Artificially Synthesized Probe
  source 1..80: mol_type = other DNA
gaccaagagcctcgtctcggctctgtgcaagagccagaggagtgaagactgccgtcctctgtggggttgcaaaccccagt

SEQ ID NO: 28037 - DNA, 80 bp, synthetic construct
  misc_feature 1..80: note = Artificially Synthesized Probe
  source 1..80: mol_type = other DNA
gatggttggacttacaattttttaaccttataatagcgtgaaaatcatccacattctgtagaaaccatactctgagtgcc

SEQ ID NO: 28038 - DNA, 80 bp, synthetic construct
  misc_feature 1..80: note = Artificially Synthesized Probe
  source 1..80: mol_type = other DNA
atattccagccttgtctttcccgttcagtttgcgaatggttaggtgatgtttgccattggtggtggaggccgaataatgc

SEQ ID NO: 28039 - DNA, 80 bp, synthetic construct
  misc_feature 1..80: note = Artificially Synthesized Probe
  source 1..80: mol_type = other DNA
aaaacttttgtcccttcttctaatcagcgtctgtcaccacagagaagtgatggaaaggccagagaagcgtcggaaaggcc

SEQ ID NO: 28040 - DNA, 80 bp, synthetic construct
  misc_feature 1..80: note = Artificially Synthesized Probe
  source 1..80: mol_type = other DNA
taacccgtgcgtgtaccgtgccacaccaggctcaataaatattggttcaacgtatgagtgagtgatttgaaaatttacag

SEQ ID NO: 28041 - DNA, 80 bp, synthetic construct
  misc_feature 1..80: note = Artificially Synthesized Probe
  source 1..80: mol_type = other DNA
tgaaagtcatggtgatctttgccaatggagaggatatcgtggggttggcttcctcccatagaaatctctgaaaagaagaa

SEQ ID NO: 28042 - DNA, 80 bp, synthetic construct
  misc_feature 1..80: note = Artificially Synthesized Probe
  source 1..80: mol_type = other DNA
ctgcagattcatggaatttctggagaaaaagccccacaccttaaatatgcgggcaggttacatttccaagtctttcagtg

SEQ ID NO: 28043 - DNA, 80 bp, synthetic construct
  misc_feature 1..80: note = Artificially Synthesized Probe
  source 1..80: mol_type = other DNA
aaaagatactgggtgcttttcaaaagatcctcagaatctgcatctgcatttcttgaccaagaagacagaagcttgggtga

SEQ ID NO: 28044 - DNA, 80 bp, synthetic construct
  misc_feature 1..80: note = Artificially Synthesized Probe
  source 1..80: mol_type = other DNA
tcatcagaagtaaatttgaaaagttaaaaaaaaacgaagtgatggagggacacagtcttgtgtgtgaccacccgaggcaa

SEQ ID NO: 28045 - DNA, 80 bp, synthetic construct
  misc_feature 1..80: note = Artificially Synthesized Probe
  source 1..80: mol_type = other DNA
tgcaactaaccctggtcttgtgcgtgatatttctgagtttccaggagagcagagacaaggtagagaataaaaccctctgt

SEQ ID NO: 28046 - DNA, 80 bp, synthetic construct
  misc_feature 1..80: note = Artificially Synthesized Probe
  source 1..80: mol_type = other DNA
tgtgaactgcaggggcggactcctgtatttccttttccattagggtcaccttaagattgagattatgacatccatagtgt

SEQ ID NO: 28047 - DNA, 80 bp, synthetic construct
  misc_feature 1..80: note = Artificially Synthesized Probe
  source 1..80: mol_type = other DNA
aaaaaaagaattggaacataattgtgtcctacttatcaattggattgggaaggagccaaactatgttgctgatatgtttc

SEQ ID NO: 28048 - DNA, 80 bp, synthetic construct
  misc_feature 1..80: note = Artificially Synthesized Probe
  source 1..80: mol_type = other DNA
gataattaaacatgtgtttaaagcgatgatggattcacatttgcgattcctcaaagccatgtgaagtgtagattgtggag

SEQ ID NO: 28049 - DNA, 80 bp, synthetic construct
  misc_feature 1..80: note = Artificially Synthesized Probe
  source 1..80: mol_type = other DNA
ccaccactgcgtatttgtcaattgtgccatctccccttctgacagtccttttgactccagatatttgggcaattttttca

SEQ ID NO: 28050 - DNA, 80 bp, synthetic construct
  misc_feature 1..80: note = Artificially Synthesized Probe
  source 1..80: mol_type = other DNA
tagctcataaggattagttgtgataaacgcatgctaggcgtgcactcacagaaacagaatgaagacgattattatcaccc

SEQ ID NO: 28051 - DNA, 80 bp, synthetic construct
  misc_feature 1..80: note = Artificially Synthesized Probe
  source 1..80: mol_type = other DNA
ggattggttagaccagatgtgacatttacatagttcgcaaaaagactggccctcccaccctcgtcttttattatgcaaat

SEQ ID NO: 28052 - DNA, 80 bp, synthetic construct
  misc_feature 1..80: note = Artificially Synthesized Probe
  source 1..80: mol_type = other DNA
ctgtgttagctgtgtcccagaaactctgtgtcccagagattgtgggacacagctaaagcattggtttcaaataacttatt

SEQ ID NO: 28053 - DNA, 80 bp, synthetic construct
  misc_feature 1..80: note = Artificially Synthesized Probe
  source 1..80: mol_type = other DNA
atttctactgagagatctgctgttagtctcatgggcttccctttgtgtgtaacctgacctttctctctggctggagggct

SEQ ID NO: 28054 - DNA, 80 bp, synthetic construct
  misc_feature 1..80: note = Artificially Synthesized Probe
  source 1..80: mol_type = other DNA
aaatggcccaattgtttttgagagaacctgaagttctgataacatagtgggcttttccccttgaatggtgtcaccgaaga

SEQ ID NO: 28055 - DNA, 80 bp, synthetic construct
  misc_feature 1..80: note = Artificially Synthesized Probe
  source 1..80: mol_type = other DNA
ggagggtcagtttctatgtttatctaaagaaacccataaacatccgccctatgggacaattcagccggtgtcatcaccat

SEQ ID NO: 28056 - DNA, 80 bp, synthetic construct
  misc_feature 1..80: note = Artificially Synthesized Probe
  source 1..80: mol_type = other DNA
tgtgagtgtgggctgtgagtgtgtgcatacatgtgtgagtgtggggaatgtgtgcctgtgtgtacacgtgtgagtgtggg

SEQ ID NO: 28057 - DNA, 80 bp, synthetic construct
  misc_feature 1..80: note = Artificially Synthesized Probe
  source 1..80: mol_type = other DNA
aagatattaaatcaccagaggaaagcagagcaaaacaagcgttccagcatcacagcgcatgttttgatttagaggaagag

SEQ ID NO: 28058 - DNA, 80 bp, synthetic construct
  misc_feature 1..80: note = Artificially Synthesized Probe
  source 1..80: mol_type = other DNA
cacttagaaagagcatcatgtctttcttttgtcatccaggaaaaatcactgtgtgtgccctgccaggtagagtgtagtaa

SEQ ID NO: 28059 - DNA, 80 bp, synthetic construct
  misc_feature 1..80: note = Artificially Synthesized Probe
  source 1..80: mol_type = other DNA
aaagattctgttttctgtaaatgacccatgacaaatgggttaccatgaaaacagccgcctactctccagggctgtcacgt

SEQ ID NO: 28060 - DNA, 80 bp, synthetic construct
  misc_feature 1..80: note = Artificially Synthesized Probe
  source 1..80: mol_type = other DNA
atggcaggcttgttttgtcgtttgtccttgttaactcgggatgacattagaggtcagagtggattaggaaaatccactca

SEQ ID NO: 28061 - DNA, 80 bp, synthetic construct
  misc_feature 1..80: note = Artificially Synthesized Probe
  source 1..80: mol_type = other DNA
catcttgacctatgcatagtttagcatccggcgtgcttctgaacctagtgtgatagaatcagcattttccacgatgacat

SEQ ID NO: 28062 - DNA, 80 bp, synthetic construct
  misc_feature 1..80: note = Artificially Synthesized Probe
  source 1..80: mol_type = other DNA
ccacaggctgacggggaagaacacgcctgttgacttgggactttcttttcttacagctgtctcatatacaaattacaaga

SEQ ID NO: 28063 - DNA, 80 bp, synthetic construct
  misc_feature 1..80: note = Artificially Synthesized Probe
  source 1..80: mol_type = other DNA
tcagaccacagacggttgacccgccgtccatctgggcccccagatgtctacccatgatatagacgtggcagacggttcct

SEQ ID NO: 28064 - DNA, 80 bp, synthetic construct
  misc_feature 1..80: note = Artificially Synthesized Probe
  source 1..80: mol_type = other DNA
ggcagtgccaacttctaagcacgtgcagtaccgactttatctgaaatgagtgggacataattttggaaactcatacagtt

SEQ ID NO: 28065 - DNA, 80 bp, synthetic construct
  misc_feature 1..80: note = Artificially Synthesized Probe
  source 1..80: mol_type = other DNA
cttccgggacctttgggcacagttttgtctgagtgcagatagcaggagaatctgtgttctgcgaatgtcattcctacaaa

SEQ ID NO: 28066 - DNA, 80 bp, synthetic construct
  misc_feature 1..80: note = Artificially Synthesized Probe
  source 1..80: mol_type = other DNA
ttggggaactctgggaaatgtttacagctcccagatactgcggttaggagggacggaggcctggtctaacattcagggtc

SEQ ID NO: 28067 - DNA, 80 bp, synthetic construct
  misc_feature 1..80: note = Artificially Synthesized Probe
  source 1..80: mol_type = other DNA
tgctagcctgggactgcatgggaggtgggacagtgattttgctcattcatctttttttcttgcacccatatatttttcaa

SEQ ID NO: 28068 - DNA, 80 bp, synthetic construct
  misc_feature 1..80: note = Artificially Synthesized Probe
  source 1..80: mol_type = other DNA
tatgcttgtgcatgcccctggtcattgttgtccatggcacctgtcaacctgtgttctttaaagtctgtattataagcatt

SEQ ID NO: 28069 - DNA, 80 bp, synthetic construct
  misc_feature 1..80: note = Artificially Synthesized Probe
  source 1..80: mol_type = other DNA
tcctttgcgtaaaataacactgatcatgtttatgtcgagcaaggtaaggtttaataaagtcgtgacccacttaacactag

SEQ ID NO: 28070 - DNA, 80 bp, synthetic construct
  misc_feature 1..80: note = Artificially Synthesized Probe
  source 1..80: mol_type = other DNA
cagtgctgaaattcctttctgtgtctttctgtacgtggatgcagccatcagtataagtcttttaaatcgcttatttgttg

SEQ ID NO: 28071 - DNA, 80 bp, synthetic construct
  misc_feature 1..80: note = Artificially Synthesized Probe
  source 1..80: mol_type = other DNA
atgcctgtccttgtggaaacagggccatacgtttatacttttccattgataaccctcaagtatgaattaacacccgccta

SEQ ID NO: 28072 - DNA, 80 bp, synthetic construct
  misc_feature 1..80: note = Artificially Synthesized Probe
  source 1..80: mol_type = other DNA
aaatatagacagtgaaaatgattttccaacacctgccaaagtcagaatttggagtcattattttgcatacaggggttaat

SEQ ID NO: 28073 - DNA, 80 bp, synthetic construct
  misc_feature 1..80: note = Artificially Synthesized Probe
  source 1..80: mol_type = other DNA
agagctcaggcttccctagggcctcttaaatatcatttctcagtaatgcaaatatgcacatcacagcattagtggagaaa

SEQ ID NO: 28074 - DNA, 80 bp, synthetic construct
  misc_feature 1..80: note = Artificially Synthesized Probe
  source 1..80: mol_type = other DNA
gggtggatggcctgaggtcaggagttacagatcagcctggccaacatggtaaagccccatatctgccaaaaattcaaatg

SEQ ID NO: 28075 - DNA, 80 bp, synthetic construct
  misc_feature 1..80: note = Artificially Synthesized Probe
  source 1..80: mol_type = other DNA
acattgcctttaattgactaagcctgttcttccacatttgtctcttaatcatcaaatcccacctattctttacaggaggt

SEQ ID NO: 28076 - DNA, 80 bp, synthetic construct
  misc_feature 1..80: note = Artificially Synthesized Probe
  source 1..80: mol_type = other DNA
ccagttctccctgaacacatatgatatgtcaggccctgtgccgaatgcactgcagacctcattaatgctcatcccaatgg

SEQ ID NO: 28077 - DNA, 80 bp, synthetic construct
  misc_feature 1..80: note = Artificially Synthesized Probe
  source 1..80: mol_type = other DNA
ctttagtgctgaggccctgtcatggtaagtcctggttttctgtcactggaggcattccagaatattctataaattatgcc

SEQ ID NO: 28078 - DNA, 80 bp, synthetic construct
  misc_feature 1..80: note = Artificially Synthesized Probe
  source 1..80: mol_type = other DNA
ctctgctgtcatttgagattttaggctccttcaatgaagtggccacatttgacatttatcatccacagacagtgcctcac

SEQ ID NO: 28079 - DNA, 80 bp, synthetic construct
  misc_feature 1..80: note = Artificially Synthesized Probe
  source 1..80: mol_type = other DNA
tttcttaatttcttaaattgcccagataccttcatctttttgtggacagatgtcaaaacacttgttatgcccctcatctg

SEQ ID NO: 28080 - DNA, 80 bp, synthetic construct
  misc_feature 1..80: note = Artificially Synthesized Probe
  source 1..80: mol_type = other DNA
agaccaacagagaagattgaggaatcagaaatactgatgacgttctgagcacagcagatgcctgtgcacatattggcagc

SEQ ID NO: 28081 - DNA, 80 bp, synthetic construct
  misc_feature 1..80: note = Artificially Synthesized Probe
  source 1..80: mol_type = other DNA
atagaaccaccatgtgatccagtcattgtcctgctgggcatagacccaaacaaaaggaaattcatatgtcaaagggattt

SEQ ID NO: 28082 - DNA, 80 bp, synthetic construct
  misc_feature 1..80: note = Artificially Synthesized Probe
  source 1..80: mol_type = other DNA
gcacgtcccagtcatcctgatttgatcttagcacactgtagacatctgttcaaatatcatatgtgcccccaataatatgt

SEQ ID NO: 28083 - DNA, 80 bp, synthetic construct
  misc_feature 1..80: note = Artificially Synthesized Probe
  source 1..80: mol_type = other DNA
ttacccaggttttagaatacaaaagaaatagaaattcaacatttcaaaagcaaagatgattcctcccctcgtcatcagcg

SEQ ID NO: 28084 - DNA, 80 bp, synthetic construct
  misc_feature 1..80: note = Artificially Synthesized Probe
  source 1..80: mol_type = other DNA
aaggttatctctgcaacgtcattttcaactggctcatagcattttattacatgaacattaagaccctttgtgcccatgaa

SEQ ID NO: 28085 - DNA, 80 bp, synthetic construct
  misc_feature 1..80: note = Artificially Synthesized Probe
  source 1..80: mol_type = other DNA
tgtcgtgtaggttagtgatttgtgctctgcagagactctccagggagagcaaaaagagcaggtggaatcatcagcttggc

SEQ ID NO: 28086 - DNA, 80 bp, synthetic construct
  misc_feature 1..80: note = Artificially Synthesized Probe
  source 1..80: mol_type = other DNA
agtcattgcaattaggaaccatttgtagattaattcttcctactgaactgtggcctgctgactcatagcacactcagaaa

SEQ ID NO: 28087 - DNA, 80 bp, synthetic construct
  misc_feature 1..80: note = Artificially Synthesized Probe
  source 1..80: mol_type = other DNA
tctccagtgggactcgctcccttggtgtgatgtttctgcttttgtgtaattgacccagttttgaagttgttgtttttttg

SEQ ID NO: 28088 - DNA, 80 bp, synthetic construct
  misc_feature 1..80: note = Artificially Synthesized Probe
  source 1..80: mol_type = other DNA
ctgtgtctttgcaactggatgccccaccagagcatcttagaagaggagaaacaagggaaatttctattacgtctaatgtc

SEQ ID NO: 28089 - DNA, 80 bp, synthetic construct
  misc_feature 1..80: note = Artificially Synthesized Probe
  source 1..80: mol_type = other DNA
taatacatacatcgatttcttttcagaccaaacattttcagtcaaatgcaaataggtcttctctaggcctcgcgtagcaa

SEQ ID NO: 28090 - DNA, 80 bp, synthetic construct
  misc_feature 1..80: note = Artificially Synthesized Probe
  source 1..80: mol_type = other DNA
ggtaggtaactaagctttaagtcaaagagcgaccctagaaaatgtcagaaccccagcccgagattgaggactgaccacag

SEQ ID NO: 28091 - DNA, 80 bp, synthetic construct
  misc_feature 1..80: note = Artificially Synthesized Probe
  source 1..80: mol_type = other DNA
acagccatgcccggccctacagaaagagggggcacagccttgcccggccctacagaaagagggggcacagccatgcccgg

SEQ ID NO: 28092 - DNA, 80 bp, synthetic construct
  misc_feature 1..80: note = Artificially Synthesized Probe
  source 1..80: mol_type = other DNA
gggcgacagagaaagaccctgtctcaaaaataacatacataaatgtaggcagctggtggaaatcatgtatctgtcaggca

SEQ ID NO: 28093 - DNA, 80 bp, synthetic construct
  misc_feature 1..80: note = Artificially Synthesized Probe
  source 1..80: mol_type = other DNA
agtcttttgctggcaacacacgagcaaatttccctctatgtatgtgtgcacatgtgtatacgcacatgtgtgtgcgtgtg

SEQ ID NO: 28094 - DNA, 80 bp, synthetic construct
  misc_feature 1..80: note = Artificially Synthesized Probe
  source 1..80: mol_type = other DNA
gatgcacacctgggtcatgagaacgagagccagatctagtggtcatcatcatcggctcctcccagaaggtgccctggcca

SEQ ID NO: 28095 - DNA, 80 bp, synthetic construct
  misc_feature 1..80: note = Artificially Synthesized Probe
  source 1..80: mol_type = other DNA
acggtttggatctgaggtgaaggagatgatcagtgatgctcctgagggagaaggctgttcaaacggaacgtactgaagtt

SEQ ID NO: 28096 - DNA, 80 bp, synthetic construct
  misc_feature 1..80: note = Artificially Synthesized Probe
  source 1..80: mol_type = other DNA
gtagctgaaggtttcaatgaactgatcccccccattgttttagatggatgccaagaagtcaggtaagagtcattgcttct

SEQ ID NO: 28097 - DNA, 80 bp, synthetic construct
  misc_feature 1..80: note = Artificially Synthesized Probe
  source 1..80: mol_type = other DNA
cccattcacgtaagatggttttcatgaacatactggaatcccagagtctgcagaaaaccctgcagtgttgaatagggatg

SEQ ID NO: 28098 - DNA, 80 bp, synthetic construct
  misc_feature 1..80: note = Artificially Synthesized Probe
  source 1..80: mol_type = other DNA
cctgatttctcctgcgtgttctcagaggacggcgagaaatgcctctggagctggaacccagcttacattttgttatttct

SEQ ID NO: 28099 - DNA, 80 bp, synthetic construct
  misc_feature 1..80: note = Artificially Synthesized Probe
  source 1..80: mol_type = other DNA
atattgtgatttccagctgtagcattcaaaaaaaaaattggtgttcatgactctgtggtcggtgccagaggaaaatagga

SEQ ID NO: 28100 - DNA, 80 bp, synthetic construct
  misc_feature 1..80: note = Artificially Synthesized Probe
  source 1..80: mol_type = other DNA
tctgctgtttagaagtaaccacagaaaagcaaagtcagtgtacactctgagtgaaaggaaatgtaatgtggataaaggcc

SEQ ID NO: 28101 - DNA, 80 bp, synthetic construct
  misc_feature 1..80: note = Artificially Synthesized Probe
  source 1..80: mol_type = other DNA
ctagagtgctttccttgtgatgcgtctctcgcatcttcacgtgttgttgtgtttgaagtaaaactagttgttatcgatga

SEQ ID NO: 28102 - DNA, 80 bp, synthetic construct
  misc_feature 1..80: note = Artificially Synthesized Probe
  source 1..80: mol_type = other DNA
aaactgaaattgccccacctgtgagcacagaaacacgcttctccaacacgggccgaaataactaaactccacatggttcc

SEQ ID NO: 28103 - DNA, 80 bp, synthetic construct
  misc_feature 1..80: note = Artificially Synthesized Probe
  source 1..80: mol_type = other DNA
cagaggccatgagactgtctttggaaaggtttggaaatgcagaaataactacaagggccattctccttagcttctggctt

SEQ ID NO: 28104 - DNA, 80 bp, synthetic construct
  misc_feature 1..80: note = Artificially Synthesized Probe
  source 1..80: mol_type = other DNA
gggcatccaagctttcacctactcaatggaggagaggtgataatgaatgaaaagattgacaccaggtttcttggacaaat

SEQ ID NO: 28105 - DNA, 80 bp, synthetic construct
  misc_feature 1..80: note = Artificially Synthesized Probe
  source 1..80: mol_type = other DNA
cctccatttgacttctgtatcgctgatgttcacctcctgtaaatagtttggcaattaaattttttgagaaaagtaatgtt

SEQ ID NO: 28106 - DNA, 80 bp, synthetic construct
  misc_feature 1..80: note = Artificially Synthesized Probe
  source 1..80: mol_type = other DNA
agctttgggcagatggagggccttttattcgcgagggtcgggggtgggggtcctaggtggggacagacaataaataccga

SEQ ID NO: 28107 - DNA, 80 bp, synthetic construct
  misc_feature 1..80: note = Artificially Synthesized Probe
  source 1..80: mol_type = other DNA
tagggacctgcggggagagggcgaggtcaacacccggcatgggcctctgattggctcctgggactcgccccgcctacgcc

SEQ ID NO: 28108 - DNA, 80 bp, synthetic construct
  misc_feature 1..80: note = Artificially Synthesized Probe
  source 1..80: mol_type = other DNA
catgagggactcacctgtggctccctctgcctgcagcaactccatccgctcctgcaactgccggacgtgtgcctctaggt

SEQ ID NO: 28109 - DNA, 80 bp, synthetic construct
  misc_feature 1..80: note = Artificially Synthesized Probe
  source 1..80: mol_type = other DNA
aactacagagaccgtcccatgtctgaagtaacctcgtctctccgtggtttctgtctgcttctgttcaggaagtccctaga

SEQ ID NO: 28110 - DNA, 80 bp, synthetic construct
  misc_feature 1..80: note = Artificially Synthesized Probe
  source 1..80: mol_type = other DNA
agcaatgcattatttgtgtaattaatacttttgttgagaccaggtctcactttgttgcctaggctggaatctatcatggc

SEQ ID NO: 28111 - DNA, 80 bp, synthetic construct
  misc_feature 1..80: note = Artificially Synthesized Probe
  source 1..80: mol_type = other DNA
gagccaccgcggcccgcctaaattaatacttttaaatggccttattgttatatggctgattcaaagaatttgcattcttt

SEQ ID NO: 28112 - DNA, 80 bp, synthetic construct
  misc_feature 1..80: note = Artificially Synthesized Probe
  source 1..80: mol_type = other DNA
caaagtgctgggattacaaatataagccactgtgcccagcccagttctgttttttttttttagatggagtcttgctgtct

SEQ ID NO: 28113 - DNA, 80 bp, synthetic construct
  misc_feature 1..80: note = Artificially Synthesized Probe
  source 1..80: mol_type = other DNA
attacaggcgtgagccaccacgcccggccagcccagcctattttttaatttcagtttatcttatttttgagacagagtct

SEQ ID NO: 28114 - DNA, 80 bp, synthetic construct
  misc_feature 1..80: note = Artificially Synthesized Probe
  source 1..80: mol_type = other DNA
actgtctgaagactgctctgtgttcccccactggactgtaagtctaggtcactgctgggtcctcagtagtagatgggcac

SEQ ID NO: 28115 - DNA, 80 bp, synthetic construct
  misc_feature 1..80: note = Artificially Synthesized Probe
  source 1..80: mol_type = other DNA
ccgctcccacactctgtgccttccatccctcatcagcagccccagttgctctgtggccagggcactggctcaccgttcca

SEQ ID NO: 28116 - DNA, 80 bp, synthetic construct
  misc_feature 1..80: note = Artificially Synthesized Probe
  source 1..80: mol_type = other DNA
ttagaattcctgaagacctatcccattccaggtaagagaccccccgcaacagagacatctttataagagtcccccagatc

SEQ ID NO: 28117 - DNA, 80 bp, synthetic construct
  misc_feature 1..80: note = Artificially Synthesized Probe
  source 1..80: mol_type = other DNA
ttagggtggggtaacggagtctgcagaaggacagaccctaaagaacaaggggagaaggaaataagacccagttcttccac

SEQ ID NO: 28118 - DNA, 80 bp, synthetic construct
  misc_feature 1..80: note = Artificially Synthesized Probe
  source 1..80: mol_type = other DNA
cccatctgtgaaatgggaggaggagggaaaggaaccaggcctgggtcagaaagagatggacacaagaggaagcaggggaa

SEQ ID NO: 28119 - DNA, 80 bp, synthetic construct
  misc_feature 1..80: note = Artificially Synthesized Probe
  source 1..80: mol_type = other DNA
cagagtggtggcataggacagagaaatgttgccccagggcccaggtccacactctgagccccaggatgggaggatctccc

SEQ ID NO: 28120 - DNA, 80 bp, synthetic construct
  misc_feature 1..80: note = Artificially Synthesized Probe
  source 1..80: mol_type = other DNA
cagtgaacctgagttctatttccagctttgccaactacaaacttatgagtattaagtgaatattagcaaaccatattatg

SEQ ID NO: 28121 - DNA, 80 bp, synthetic construct
  misc_feature 1..80: note = Artificially Synthesized Probe
  source 1..80: mol_type = other DNA
tgactaacatggagaaaccccatctctactaaaaatacacaattagccaggcatggtggtgcatgcctgtaatcacagct

SEQ ID NO: 28122 - DNA, 80 bp, synthetic construct
  misc_feature 1..80: note = Artificially Synthesized Probe
  source 1..80: mol_type = other DNA
ccaggagttccaggttgcagtgcactattatcccatttgtgaacagccagtgcactccagcctgggcaacaaagtgagat

SEQ ID NO: 28123 - DNA, 80 bp, synthetic construct
  misc_feature 1..80: note = Artificially Synthesized Probe
  source 1..80: mol_type = other DNA
cagcttcatttcaactcattaggactttttttatttttcagctctaagtacatttaaaatatgagtagatataagatatt

SEQ ID NO: 28124 - DNA, 80 bp, synthetic construct
  misc_feature 1..80: note = Artificially Synthesized Probe
  source 1..80: mol_type = other DNA
ggattagtcattgtaagtcttccaaaaaagttagtaagtgaagtcattaacttttaatagattttccagctgggcatggt

SEQ ID NO: 28125 - DNA, 80 bp, synthetic construct
  misc_feature 1..80: note = Artificially Synthesized Probe
  source 1..80: mol_type = other DNA
agggctttattcggccattcggcaagaatcccgtctccaacaacctagctccctgagtgagcaattcccgtccctcttaa

SEQ ID NO: 28126 - DNA, 80 bp, synthetic construct
  misc_feature 1..80: note = Artificially Synthesized Probe
  source 1..80: mol_type = other DNA
ccacctccaatcaatcatgagatcctgtgaattctacttccaaaatatatttcaaatttgctccataggctgggcgcggt

SEQ ID NO: 28127 - DNA, 80 bp, synthetic construct
  misc_feature 1..80: note = Artificially Synthesized Probe
  source 1..80: mol_type = other DNA
aatggctgcccacatacccaggctaaccctggatgtttatcttgttcctttctcactctaaaatcaagctgtacttcctc

SEQ ID NO: 28128 - DNA, 80 bp, synthetic construct
  misc_feature 1..80: note = Artificially Synthesized Probe
  source 1..80: mol_type = other DNA
ttctacctattccacagtttttcccctgcaattatactccaaaggagcaagtattttcaagccatatcagagcaactgga

SEQ ID NO: 28129 - DNA, 80 bp, synthetic construct
  misc_feature 1..80: note = Artificially Synthesized Probe
  source 1..80: mol_type = other DNA
tcccccacctcagcctctcgactagctgggactacaggcaccaacaaccatgcccctagctaatttgtggggtgtgtgtg

SEQ ID NO: 28130 - DNA, 80 bp, synthetic construct
  misc_feature 1..80: note = Artificially Synthesized Probe
  source 1..80: mol_type = other DNA
gtgagcagtggcaggtgacaggctacacaattctttaaaatctttgattctactacacacagatttatttcagctgccat

SEQ ID NO: 28131 - DNA, 80 bp, synthetic construct
  misc_feature 1..80: note = Artificially Synthesized Probe
  source 1..80: mol_type = other DNA
agcacttttgagaggccgaggtggtccgattacaggaagccaggagttcaaggcaagcctgggcaacatggtgagaccac

SEQ ID NO: 28132 - DNA, 80 bp, synthetic construct
  misc_feature 1..80: note = Artificially Synthesized Probe
  source 1..80: mol_type = other DNA
gttacgggaaaaaacataaaatagagttaggaggaaagtgagtacttcagcaaggagttactttaggtaggtggaaaggg

SEQ ID NO: 28133 - DNA, 80 bp, synthetic construct
  misc_feature 1..80: note = Artificially Synthesized Probe
  source 1..80: mol_type = other DNA
aaactcaaaactaattttaagtagttttgctgcacactgaacagataaatggggcaatagctagatgtagagccaaaagt

SEQ ID NO: 28134 - DNA, 80 bp, synthetic construct
  misc_feature 1..80: note = Artificially Synthesized Probe
  source 1..80: mol_type = other DNA
aacccaggaggtggaggttgcagtaagcctacatcacactactgcactctagcctgggtgacaaagcaagactctgtcac

SEQ ID NO: 28135 - DNA, 80 bp, synthetic construct
  misc_feature 1..80: note = Artificially Synthesized Probe
  source 1..80: mol_type = other DNA
gttttgtatttttagtagagacagggtttcaccatgttggtcaggctggtctccaactcctgacctcatcatccacctgc

SEQ ID NO: 28136 - DNA, 80 bp, synthetic construct
  misc_feature 1..80: note = Artificially Synthesized Probe
  source 1..80: mol_type = other DNA
actaatattttgacctctgtcagcaaagagctaacgtgtggaaaataaaaatcatcccaaacctggtgtaggacagaacc

SEQ ID NO: 28137 - DNA, 80 bp, synthetic construct
  misc_feature 1..80: note = Artificially Synthesized Probe
  source 1..80: mol_type = other DNA
ttgtttatctgatcttctgataaatcatgagagagaagatagccaaatacccaaacaggccccttttagctggcaggata

SEQ ID NO: 28138 - DNA, 80 bp, synthetic construct
  misc_feature 1..80: note = Artificially Synthesized Probe
  source 1..80: mol_type = other DNA
aagattggagctgttttcttgtgctaagttagttcctggttgggggggccacaagattagatgagtcagtttattgatct

SEQ ID NO: 28139 - DNA, 80 bp, synthetic construct
  misc_feature 1..80: note = Artificially Synthesized Probe
  source 1..80: mol_type = other DNA
tgaacaaggacagcttggaggttaaaagcaagataaattcagttaagttaaatctctctcactgtcttttttttcttttt

SEQ ID NO: 28140 - DNA, 80 bp, synthetic construct
  misc_feature 1..80: note = Artificially Synthesized Probe
  source 1..80: mol_type = other DNA
aattaatcaggcgtggtggtgcctgtaatctcagctactcaggaggcctgaggcaggagaatcccttaaacctgggaggt

SEQ ID NO: 28141 - DNA, 80 bp, synthetic construct
  misc_feature 1..80: note = Artificially Synthesized Probe
  source 1..80: mol_type = other DNA
aacagaaagcgattctgtacaactggccataatatgtacaaagatgcctccagttgtttttaaaaaacttataacaatac

SEQ ID NO: 28142 - DNA, 80 bp, synthetic construct
  misc_feature 1..80: note = Artificially Synthesized Probe
  source 1..80: mol_type = other DNA
aatctaacaaatataagcaatgtgcatgcactatggtggatcagttatttccgagcttaggtgtgtgtatacacacacac

SEQ ID NO: 28143 - DNA, 80 bp, synthetic construct
  misc_feature 1..80: note = Artificially Synthesized Probe
  source 1..80: mol_type = other DNA
tccttaccttctacatacaattctagttgacagaatgctgttccacgtcgtacatgtgccttcattcttgcattagcatt

SEQ ID NO: 28144 - DNA, 80 bp, synthetic construct
  misc_feature 1..80: note = Artificially Synthesized Probe
  source 1..80: mol_type = other DNA
ccccgtctctactaaaaatacaaaaaattagccgggtatgatggcgggcgccttcagtcccagctactccggacgctgag

SEQ ID NO: 28145 - DNA, 80 bp, synthetic construct
  misc_feature 1..80: note = Artificially Synthesized Probe
  source 1..80: mol_type = other DNA
tagcgagacccactgcgcccggccagtaacagctgatttttaatctaactaactattcatagaagtcacaaaaaaacacc

SEQ ID NO: 28146 - DNA, 80 bp, synthetic construct
  misc_feature 1..80: note = Artificially Synthesized Probe
  source 1..80: mol_type = other DNA
gatgggctagtgtgacctatattgttctacttaggatgaagcctgtgggttggtttcaaagttgaagaatgaaaagttgg

SEQ ID NO: 28147 - DNA, 80 bp, synthetic construct
  misc_feature 1..80: note = Artificially Synthesized Probe
  source 1..80: mol_type = other DNA
tgttttttttctgagtagccatcctaatgggtgtgaagtggcatctcatagtggttttgataagacatttcccaaatggt

SEQ ID NO: 28148 - DNA, 80 bp, synthetic construct
  misc_feature 1..80: note = Artificially Synthesized Probe
  source 1..80: mol_type = other DNA
aaccttcagaaaaattgccaactccagctaaacgccacaaaacaatccctggtgttgtaacagacaagagaaaagaccaa

SEQ ID NO: 28149 - DNA, 80 bp, synthetic construct
  misc_feature 1..80: note = Artificially Synthesized Probe
  source 1..80: mol_type = other DNA
gcctcaaaatatgaacacaaattgccactcagaatatgccagaattcactgtttttgatcagtatgttaaaatattcacg

SEQ ID NO: 28150 - DNA, 80 bp, synthetic construct
  misc_feature 1..80: note = Artificially Synthesized Probe
  source 1..80: mol_type = other DNA
gataagaataatcaaaacagctgtagctttgcaaaaagcccgtttttatgggagacatcagaaaggacttatgtcaaatg

SEQ ID NO: 28151 - DNA, 80 bp, synthetic construct
  misc_feature 1..80: note = Artificially Synthesized Probe
  source 1..80: mol_type = other DNA
gtagtggggcctctgagaggtaatgaggtttaggtcatgagaggagagctcccaaaacgagtttatccttttaagaagag

SEQ ID NO: 28152 - DNA, 80 bp, synthetic construct
  misc_feature 1..80: note = Artificially Synthesized Probe
  source 1..80: mol_type = other DNA
cgtgcccgtccttaaacttttttttaaacctcaatagctggtggaaatacaatagataaaatttctagccaaatttcttg

SEQ ID NO: 28153 - DNA, 80 bp, synthetic construct
  misc_feature 1..80: note = Artificially Synthesized Probe
  source 1..80: mol_type = other DNA
agctagctttctaacttactaacttataatgtatatgcatatgcacatgtctgtgtcttccctgccatgtatttattctt

SEQ ID NO: 28154 - DNA, 80 bp, synthetic construct
  misc_feature 1..80: note = Artificially Synthesized Probe
  source 1..80: mol_type = other DNA
ggcacctccatgaatcaatccaggtggtccttctaggtaagggactccttgaaataagcaaaccatccttttctcaacgt

SEQ ID NO: 28155 - DNA, 80 bp, synthetic construct
  misc_feature 1..80: note = Artificially Synthesized Probe
  source 1..80: mol_type = other DNA
ttttttcatgtatctgttggctgcataaatgtcttcttttgagaagtgtctgttcatatccttcacccatgtttcgatgg

SEQ ID NO: 28156 - DNA, 80 bp, synthetic construct
  misc_feature 1..80: note = Artificially Synthesized Probe
  source 1..80: mol_type = other DNA
cctcttttcctaattgaataccctttttttttttttttttttttagtatttattgatcattcttgggtgtttctcagaga

SEQ ID NO: 28157 - DNA, 80 bp, synthetic construct
  misc_feature 1..80: note = Artificially Synthesized Probe
  source 1..80: mol_type = other DNA
cagaggcgctcctcacatcccagacggggtggccgggcagaggcgctcctcacctcccagacggggtggccgggcagagg

SEQ ID NO: 28158 - DNA, 80 bp, synthetic construct
  misc_feature 1..80: note = Artificially Synthesized Probe
  source 1..80: mol_type = other DNA
gcgctcctcacatcccagatgatgggcggccgggcagaggcgctccccacttcccagacggggcagctgggcagaggcgc

SEQ ID NO: 28159 - DNA, 80 bp, synthetic construct
  misc_feature 1..80: note = Artificially Synthesized Probe
  source 1..80: mol_type = other DNA
aattttgtcaaaggccttttctgcatctggtgagataatcatgcggtttttatctttggttctgtttatatgctggatta

SEQ ID NO: 28160 - DNA, 80 bp, synthetic construct
  misc_feature 1..80: note = Artificially Synthesized Probe
  source 1..80: mol_type = other DNA
agtgattctcctgcctcagcctcccgagtagctgggattacaggtgcctgccaccacactggactaatttttgtattttt

SEQ ID NO: 28161 - DNA, 80 bp, synthetic construct
  misc_feature 1..80: note = Artificially Synthesized Probe
  source 1..80: mol_type = other DNA
cgaagagctgttgggaatactcgaggggtaaagttgattttaatactgccaacagagcgaggagcaggaatactgtcttc

SEQ ID NO: 28162 - DNA, 80 bp, synthetic construct
  misc_feature 1..80: note = Artificially Synthesized Probe
  source 1..80: mol_type = other DNA
ttgactagacatttcaaaggactggggcaaggggggaaggagcgctcttagactcaaagatgaaagccaaataatgtgat

SEQ ID NO: 28163 - DNA, 80 bp, synthetic construct
  misc_feature 1..80: note = Artificially Synthesized Probe
  source 1..80: mol_type = other DNA
acatggctaattttttgtttgtatgcttttttgtagagatggggtcttgttttgttgcccaggctgctcttgaactcctg

SEQ ID NO: 28164 - DNA, 80 bp, synthetic construct
  misc_feature 1..80: note = Artificially Synthesized Probe
  source 1..80: mol_type = other DNA
taaaggaaatgcttcatcatcgaacttaaagccagggtcatctcaaaagctgacacaaagctgtttggaaagattttaga

SEQ ID NO: 28165 - DNA, 80 bp, synthetic construct
  misc_feature 1..80: note = Artificially Synthesized Probe
  source 1..80: mol_type = other DNA
tggttgaagaaaatttataaactagaagatagatctgaggatattatacagaaaatagctgaggaagataaagagaatac

SEQ ID NO: 28166 - DNA, 80 bp, synthetic construct
  misc_feature 1..80: note = Artificially Synthesized Probe
  source 1..80: mol_type = other DNA
aacaaccagaaacaaaggatagattactttattaagcatcaagctagatccattatacttcatcctgggtgacagggtga

SEQ ID NO: 28167 - DNA, 80 bp, synthetic construct
  misc_feature 1..80: note = Artificially Synthesized Probe
  source 1..80: mol_type = other DNA
gctctaaatgacttttcaatatgccaagcctcactgttaaagttgtaaagacatatgacctggtggaaatagcacaggtt

SEQ ID NO: 28168 - DNA, 80 bp, synthetic construct
  misc_feature 1..80: note = Artificially Synthesized Probe
  source 1..80: mol_type = other DNA
agaacagcatctggagactcacaatgcgaacttttactccaagaatcacttcaggaacaccgcaagaaacactgtaggaa

SEQ ID NO: 28169 - DNA, 80 bp, synthetic construct
  misc_feature 1..80: note = Artificially Synthesized Probe
  source 1..80: mol_type = other DNA
cactgcttacataaccagtacttgaagtgcactaaacaaaattacaacaaaagactccaacagaatccacttcactcacc

SEQ ID NO: 28170 - DNA, 80 bp, synthetic construct
  misc_feature 1..80: note = Artificially Synthesized Probe
  source 1..80: mol_type = other DNA
caatagatttgaacaagtagaagaaataacttcagagatcaaagacaaggctttcaaacgaacccaatccaacaaagaca

SEQ ID NO: 28171 - DNA, 80 bp, synthetic construct
  misc_feature 1..80: note = Artificially Synthesized Probe
  source 1..80: mol_type = other DNA
aaatcaaccaaccaagtaagtcttttaacagacttgcctaacatataaggactcataaacagggtggaaaaagatattcc

SEQ ID NO: 28172 - DNA, 80 bp, synthetic construct
  misc_feature 1..80: note = Artificially Synthesized Probe
  source 1..80: mol_type = other DNA
agcaccacaataatagtggaggacttcagtactctactgacagcactagacaggtaatcaagacagaaagtcaacaaaga

SEQ ID NO: 28173 - DNA, 80 bp, synthetic construct
  misc_feature 1..80: note = Artificially Synthesized Probe
  source 1..80: mol_type = other DNA
agtagagatggggtttcaccgtgttagccaccagattctggtctctggttagagaccagaatggtctcgatctcctgacc

SEQ ID NO: 28174 - DNA, 80 bp, synthetic construct
  misc_feature 1..80: note = Artificially Synthesized Probe
  source 1..80: mol_type = other DNA
caaaggctgggattacaggtatgagccatgtgcccagcccaacagctgaattctaacagacattctaagagaactggtac

SEQ ID NO: 28175 - DNA, 80 bp, synthetic construct
  misc_feature 1..80: note = Artificially Synthesized Probe
  source 1..80: mol_type = other DNA
aacagagtactggaagtcctagccagagcgatcagacaagagaaagaaagaaagagcatctaaatcagtaaggaggaagt

SEQ ID NO: 28176 - DNA, 80 bp, synthetic construct
  misc_feature 1..80: note = Artificially Synthesized Probe
  source 1..80: mol_type = other DNA
agacctgaaatcataaaaattctagaagataacactggaaaaccccttctaacactggcttaggcaaagacttgatggcc

SEQ ID NO: 28177 - DNA, 80 bp, synthetic construct
  misc_feature 1..80: note = Artificially Synthesized Probe
  source 1..80: mol_type = other DNA
tgcacactcatgtttatagcagcacaattgcaattgcaaaaatatagaactagcctaaatgcctatcaactaatgagaag

SEQ ID NO: 28178 - DNA, 80 bp, synthetic construct
  misc_feature 1..80: note = Artificially Synthesized Probe
  source 1..80: mol_type = other DNA
tcgtctctacaaaaaatacaaaaaagcattagctggacattgaggcacatgcctgtagtcccagctacttgggaggctaa

SEQ ID NO: 28179 - DNA, 80 bp, synthetic construct
  misc_feature 1..80: note = Artificially Synthesized Probe
  source 1..80: mol_type = other DNA
caacaggactcactactcaagaaattcttaatcattttaccttttggagcaagatttctagatgccaaatttctagtaag

SEQ ID NO: 28180 - DNA, 80 bp, synthetic construct
  misc_feature 1..80: note = Artificially Synthesized Probe
  source 1..80: mol_type = other DNA
tgcactagtagttgtctgacactttcaaagagctaaatatcagatgaatttgaaagcagtatcttgtacaggtgtgtggc

SEQ ID NO: 28181 - DNA, 80 bp, synthetic construct
  misc_feature 1..80: note = Artificially Synthesized Probe
  source 1..80: mol_type = other DNA
gggagaatatgtggagagtcagacaccctcacccatcatactccctgcaagaagaatgaattttacatgaagtttttaaa

SEQ ID NO: 28182 - DNA, 80 bp, synthetic construct
  misc_feature 1..80: note = Artificially Synthesized Probe
  source 1..80: mol_type = other DNA
gtgagccactgcgcccggcctatgcttaccaattctctaacatcagctatgtgtcctctaattcagttctgtcattatct

SEQ ID NO: 28183 - DNA, 80 bp, synthetic construct
  misc_feature 1..80: note = Artificially Synthesized Probe
  source 1..80: mol_type = other DNA
gccttctccctccaagtgttcagcaacccagaagttctccaaacctcatagttacaggaattttatggaggttttatcta

SEQ ID NO: 28184 - DNA, 80 bp, synthetic construct
  misc_feature 1..80: note = Artificially Synthesized Probe
  source 1..80: mol_type = other DNA
actcagaaaattacatgggttttaggagctctatgctaataacaagaggcagggaccaaatatatattttttatgatgtc

SEQ ID NO: 28185 - DNA, 80 bp, synthetic construct
  misc_feature 1..80: note = Artificially Synthesized Probe
  source 1..80: mol_type = other DNA
atcgccccactgcactctagcctgggtgacacagtgagacttctcaaaaaaaataaaataaacaaattgggttttaggtg

SEQ ID NO: 28186 - DNA, 80 bp, synthetic construct
  misc_feature 1..80: note = Artificially Synthesized Probe
  source 1..80: mol_type = other DNA
cttgatcaaatagggtctttcttacttaaggtattaggaaatcaatagagaaaagcattatgatgtcagtgtatgccaaa

SEQ ID NO: 28187 - DNA, 80 bp, synthetic construct
  misc_feature 1..80: note = Artificially Synthesized Probe
  source 1..80: mol_type = other DNA
tgccactgcactccagcctgggcgacagcgtgaggctccatctcaaaagaaaaaaaaagatcaacttatacaaacttata

SEQ ID NO: 28188 - DNA, 80 bp, synthetic construct
  misc_feature 1..80: note = Artificially Synthesized Probe
  source 1..80: mol_type = other DNA
cccagctaggatgatgagcctggcaattttactggctgaatatcccttgtccaaaatgcttggaactagaagtgtttcag

SEQ ID NO: 28189 - DNA, 80 bp, synthetic construct
  misc_feature 1..80: note = Artificially Synthesized Probe
  source 1..80: mol_type = other DNA
aactaattcatacctacaagaaagaatgaagagtatgagaaatggtaaatatgtgggtaagcgtaaaagacaatacaaac

SEQ ID NO: 28190 - DNA, 80 bp, synthetic construct
  misc_feature 1..80: note = Artificially Synthesized Probe
  source 1..80: mol_type = other DNA
cacatacctgaatggcactaatagaccaaagggaggagtagaaaatggagttatattagaacaagttgctatattttact

SEQ ID NO: 28191 - DNA, 80 bp, synthetic construct
  misc_feature 1..80: note = Artificially Synthesized Probe
  source 1..80: mol_type = other DNA
acatcatcattactactgaggatccctgagtaactctggacacaacgggtacacaaattcagtttctttttgattcaggg

SEQ ID NO: 28192 - DNA, 80 bp, synthetic construct
  misc_feature 1..80: note = Artificially Synthesized Probe
  source 1..80: mol_type = other DNA
ttggctggtagacactaagcataaccacctaaactgagagaacaaaaccacttgggcaactcagagtacttcccaagtgt

SEQ ID NO: 28193 - DNA, 80 bp, synthetic construct
  misc_feature 1..80: note = Artificially Synthesized Probe
  source 1..80: mol_type = other DNA
tcttacaccccctttttgaaacccttaataaaaacttgctggtttgaggctcaagcaggcatcacagtcctaccgatatg

SEQ ID NO: 28194 - DNA, 80 bp, synthetic construct
  misc_feature 1..80: note = Artificially Synthesized Probe
  source 1..80: mol_type = other DNA
gcccaaagtatgccttacaaaatcaggtagactctttggcagtcactttacaaaacagaagaggactgataaggttgggc

SEQ ID NO: 28195 - DNA, 80 bp, synthetic construct
  misc_feature 1..80: note = Artificially Synthesized Probe
  source 1..80: mol_type = other DNA
catttgtgtagggtgcaaccaatgggaagcctctaaacggtacccaggaatgctaccaaattcttttagtttagtacaaa

SEQ ID NO: 28196 - DNA, 80 bp, synthetic construct
  misc_feature 1..80: note = Artificially Synthesized Probe
  source 1..80: mol_type = other DNA
tataagccctatatacattttgctaagtgaaagaaagcctcccataaagactgatgggcatcacatccaaagaccacaca

SEQ ID NO: 28197 - DNA, 80 bp, synthetic construct
  misc_feature 1..80: note = Artificially Synthesized Probe
  source 1..80: mol_type = other DNA
cctgcctcagcctccggagtagctgggattacaagtgcacaccaccacacacggctaattttttgtatttttagtagaga

SEQ ID NO: 28198 - DNA, 80 bp, synthetic construct
  misc_feature 1..80: note = Artificially Synthesized Probe
  source 1..80: mol_type = other DNA
gcaaggagaaccagtccaagttccaaaactgaagaacttgaagtcccatgttcgagggcaggaaacacccagcacgagca

SEQ ID NO: 28199 - DNA, 80 bp, synthetic construct
  misc_feature 1..80: note = Artificially Synthesized Probe
  source 1..80: mol_type = other DNA
aaattcaagatagaagtgggtaatgtacagaacaaaatagtgaagaagacaggaaaagtaggcggccaagcgcagtggct

SEQ ID NO: 28200 - DNA, 80 bp, synthetic construct
  misc_feature 1..80: note = Artificially Synthesized Probe
  source 1..80: mol_type = other DNA
ttaattatctgtgtgcttaagaattttccagatccttagatatctattctttgttcctgctgggcaacatagttagaccc

SEQ ID NO: 28201 - DNA, 80 bp, synthetic construct
  misc_feature 1..80: note = Artificially Synthesized Probe
  source 1..80: mol_type = other DNA
aagtcagtgagaccaagaacccaccagagggaataaattctggacacattaggatattatttctgaccaataaatgttcc

SEQ ID NO: 28202 - DNA, 80 bp, synthetic construct
  misc_feature 1..80: note = Artificially Synthesized Probe
  source 1..80: mol_type = other DNA
ttcttaacagtgtctaggattgcacagagtgaaaatagcttcagctaattcaccaaagtagacgtttgctacgggtacat

SEQ ID NO: 28203 - DNA, 80 bp, synthetic construct
  misc_feature 1..80: note = Artificially Synthesized Probe
  source 1..80: mol_type = other DNA
ctaaaggcaggaatctttgaccagctgaccagttcaattattaagtaaaagacaaagtatatggctcagtgcggtgactc

SEQ ID NO: 28204 - DNA, 80 bp, synthetic construct
  misc_feature 1..80: note = Artificially Synthesized Probe
  source 1..80: mol_type = other DNA
ggtatatctattgagacagaaaatagataagcagttgcctaggactaagtgttaggggaaatggggagtggctgcttagg

SEQ ID NO: 28205 - DNA, 80 bp, synthetic construct
  misc_feature 1..80: note = Artificially Synthesized Probe
  source 1..80: mol_type = other DNA
agctggaactcactatcctcacatagtctactattatctctttagaggacttgcctgtcattctgcaacttaccttcatc

SEQ ID NO: 28206 - DNA, 80 bp, synthetic construct
  misc_feature 1..80: note = Artificially Synthesized Probe
  source 1..80: mol_type = other DNA
tacaggcatgagccaccacgcaagatctcacagttatctttatatttgatgtggcccaaagtttcacaaactgaagacta

SEQ ID NO: 28207 - DNA, 80 bp, synthetic construct
  misc_feature 1..80: note = Artificially Synthesized Probe
  source 1..80: mol_type = other DNA
ttacaggcgtgagccactgcggccggccaaattgtgatacacgattatgtgcttctttattaatgcattaatatatagca

SEQ ID NO: 28208 - DNA, 80 bp, synthetic construct
  misc_feature 1..80: note = Artificially Synthesized Probe
  source 1..80: mol_type = other DNA
ctgagattactttaggcatgagccactgtaacctggcaaaactgagtttgatttctttcttgtttttttttttttttgag

SEQ ID NO: 28209 - DNA, 80 bp, synthetic construct
  misc_feature 1..80: note = Artificially Synthesized Probe
  source 1..80: mol_type = other DNA
gcatgagccactgcgctgagcttaagtcagttttaagactgttttgatttgtctaaatcagaggttggcaaactatgacc

SEQ ID NO: 28210 - DNA, 80 bp, synthetic construct
  misc_feature 1..80: note = Artificially Synthesized Probe
  source 1..80: mol_type = other DNA
aaggaaggaggaaaacagggctaaagcagtagaggacaattactgactatggaagctgatcttggtattagtacaaagca

SEQ ID NO: 28211 - DNA, 80 bp, synthetic construct
  misc_feature 1..80: note = Artificially Synthesized Probe
  source 1..80: mol_type = other DNA
cagtcactagctgtgtgattttgccaattactcaaactttccatatgtcagtagcctcccctgtaaaaaaagggtaataa

SEQ ID NO: 28212 - DNA, 80 bp, synthetic construct
  misc_feature 1..80: note = Artificially Synthesized Probe
  source 1..80: mol_type = other DNA
tatcttcccctacacaatataggtgcttcaaaataaaattttttaaaaggtctgaaaccgaaaaggtacaaccagatgaa

SEQ ID NO: 28213 - DNA, 80 bp, synthetic construct
  misc_feature 1..80: note = Artificially Synthesized Probe
  source 1..80: mol_type = other DNA
cgtgactatccaggcgcccagaccagagagtgatgccgattcttggggttaccttacgatctgagcgaatgttcaaagaa

SEQ ID NO: 28214 - DNA, 80 bp, synthetic construct
  misc_feature 1..80: note = Artificially Synthesized Probe
  source 1..80: mol_type = other DNA
tctctggaatgcacctttgttttacacctaaggcttcaactccccagtttgcaaactgttccctgaaatagttgctttgc

SEQ ID NO: 28215 - DNA, 80 bp, synthetic construct
  misc_feature 1..80: note = Artificially Synthesized Probe
  source 1..80: mol_type = other DNA
acttttggaagcctttctttcacacaaatttcaatgctccttagaaattcattgaggaaagataaggagcaacagacttg

SEQ ID NO: 28216 - DNA, 80 bp, synthetic construct
  misc_feature 1..80: note = Artificially Synthesized Probe
  source 1..80: mol_type = other DNA
aaaatggaaacttaaaaaaaaaaatacctgtatgatattggagtaagaaaggatttttttgttgttgttttttcagacgg

SEQ ID NO: 28217 - DNA, 80 bp, synthetic construct
  misc_feature 1..80: note = Artificially Synthesized Probe
  source 1..80: mol_type = other DNA
cacagggacatttgtggttgaacaagatgaattcattgctcactgagcaagagagaacacacatcatggggtgtctcagt

SEQ ID NO: 28218 - DNA, 80 bp, synthetic construct
  misc_feature 1..80: note = Artificially Synthesized Probe
  source 1..80: mol_type = other DNA
agaaaagaatcaaatagacgcaataaaaaatgataaacgggatatcaccaccgataccacagaaatacaaactaccatca

SEQ ID NO: 28219 - DNA, 80 bp, synthetic construct
  misc_feature 1..80: note = Artificially Synthesized Probe
  source 1..80: mol_type = other DNA
tatctcaaaataataagagctatttatgaggaacccacagccaatatcaaactgaatgggcaaaaactggaagcattccc

SEQ ID NO: 28220 - DNA, 80 bp, synthetic construct
  misc_feature 1..80: note = Artificially Synthesized Probe
  source 1..80: mol_type = other DNA
gaaactggatcccttccttacaccttatacaaaaattaactcaagatggattaaagacttaaatgtaagacctaaaacca

SEQ ID NO: 28221 - DNA, 80 bp, synthetic construct
  misc_feature 1..80: note = Artificially Synthesized Probe
  source 1..80: mol_type = other DNA
gctgttgtacattttatccagaaagggggtgtctgttatcttatgggtgacacaaagaccttgtttttgcctatgcttag

SEQ ID NO: 28222 - DNA, 80 bp, synthetic construct
  misc_feature 1..80: note = Artificially Synthesized Probe
  source 1..80: mol_type = other DNA
gggtgggaatagcaaaatttcccccatctgagaattactgccctagaaaaagtcttggtcctatacactaggaaacattt

SEQ ID NO: 28223 - DNA, 80 bp, synthetic construct
  misc_feature 1..80: note = Artificially Synthesized Probe
  source 1..80: mol_type = other DNA
tggtaaccaacagaactgattaccacatagtcacactgtatgaattaaaacgaaggcccgggatgcacattgtgtctcac

SEQ ID NO: 28224 - DNA, 80 bp, synthetic construct
  misc_feature 1..80: note = Artificially Synthesized Probe
  source 1..80: mol_type = other DNA
aaccatcctgggggtgatggtggctacctctgcaaaaggatttctcctttcagtgagtgggtgtctctcatgtcactgtt

SEQ ID NO: 28225 - DNA, 80 bp, synthetic construct; identical to SEQ ID NO: 28224
  misc_feature 1..80: note = Artificially Synthesized Probe
  source 1..80: mol_type = other DNA

SEQ ID NO: 28226 - DNA, 80 bp, synthetic construct
  misc_feature 1..80: note = Artificially Synthesized Probe
  source 1..80: mol_type = other DNA
cttgtgtgagcatgtgactgagggagcatgtgggtgtgtggatgagcgtgactgtggggatgactgtgtgtgcatgcatg

SEQ ID NO: 28227 - DNA, 80 bp, synthetic construct
  misc_feature 1..80: note = Artificially Synthesized Probe
  source 1..80: mol_type = other DNA
tcctgagaagacctctgaggtttagggcctcattgcgacacactgacatgataagactccaccccggagtgaacagaggt

SEQ ID NO: 28228 - DNA, 80 bp, synthetic construct
  misc_feature 1..80: note = Artificially Synthesized Probe
  source 1..80: mol_type = other DNA
ggattcagacgtgtgaagaaaaggctgtatgtgtgtggtgtgagtatgtgtgcacgtagtgtgcctgtgtgtgtgtggca

SEQ ID NO: 28229 - DNA, 80 bp, synthetic construct
  misc_feature 1..80: note = Artificially Synthesized Probe
  source 1..80: mol_type = other DNA
tgcctcgataaagctgtttttgaaaaatgctgacaatttgcagtttctgccctggcatggaggtgtgaggagagaggaga

SEQ ID NO: 28230 - DNA, 80 bp, synthetic construct
  misc_feature 1..80: note = Artificially Synthesized Probe
  source 1..80: mol_type = other DNA
acctgtaagcttcaagatatctcgccttttggggctgatccaatgcacatcttctatgtattgatttattgattgattga

SEQ ID NO: 28231 - DNA, 80 bp, synthetic construct
  misc_feature 1..80: note = Artificially Synthesized Probe
  source 1..80: mol_type = other DNA
acactggcttcattaacagtgatggccctcactctgtcattcttattaaataaaaattaacagctggacgtggtggctaa

SEQ ID NO: 28232 - DNA, 80 bp, synthetic construct
  misc_feature 1..80: note = Artificially Synthesized Probe
  source 1..80: mol_type = other DNA
gttggacaagatgtttgcccaactgccctgctctgagctctgggctctgggctctgggcaatgctgggaccaccaaaacg

SEQ ID NO: 28233 - DNA, 80 bp, synthetic construct
  misc_feature 1..80: note = Artificially Synthesized Probe
  source 1..80: mol_type = other DNA
ttttagtagacacagggtttcaccatgttggccaggctggtctccaactcctgacctcaaatgttccgcccacttcagcc

SEQ ID NO: 28234 - DNA, 80 bp, synthetic construct
  misc_feature 1..80: note = Artificially Synthesized Probe
  source 1..80: mol_type = other DNA
agagcccttgagttacaatgaaaattcttccctggatgaacactcactcgagactcaccggagacacacataagacacac

SEQ ID NO: 28235 - DNA, 80 bp, synthetic construct
  misc_feature 1..80: note = Artificially Synthesized Probe
  source 1..80: mol_type = other DNA
ctttccttcgaattggagcaggctgaagcttgctaggcagggagagatgacttcgttcaaccttaacaaatgtgagctgg

SEQ ID NO: 28236 - DNA, 80 bp, synthetic construct
  misc_feature 1..80: note = Artificially Synthesized Probe
  source 1..80: mol_type = other DNA
caaataagatcacattcacaggtaagggatggagacttggatgtccctctcagagggacaaaattccaccttctctgcct

SEQ ID NO: 28237 - DNA, 80 bp, synthetic construct
  misc_feature 1..80: note = Artificially Synthesized Probe
  source 1..80: mol_type = other DNA
cgtagggactcccagcaaaaccaaatgtagcaacagcagctgggggagagaacttgaggagtggggagctgtaaatacga

SEQ ID NO: 28238 - DNA, 80 bp, synthetic construct
  misc_feature 1..80: note = Artificially Synthesized Probe
  source 1..80: mol_type = other DNA
tgtgtgaacctggagacttccgcagcagatgcagatgtctaaaggaaacattcaaagcacactgtgttttcccagtgctg

SEQ ID NO: 28239 - DNA, 80 bp, synthetic construct
  misc_feature 1..80: note = Artificially Synthesized Probe
  source 1..80: mol_type = other DNA
tcatatgcaataagatctggaaaggaagataagaagtagcccctttcttcttcctctgatctcttaatttaaattcggcc

SEQ ID NO: 28240 - DNA, 80 bp, synthetic construct
  misc_feature 1..80: note = Artificially Synthesized Probe
  source 1..80: mol_type = other DNA
cagggacccctggggatggtcttggccagccgcacccttgaaggcagcatggtcagggagtaggaaagagactcacaggg

SEQ ID NO: 28241 - DNA, 80 bp, synthetic construct
  misc_feature 1..80: note = Artificially Synthesized Probe
  source 1..80: mol_type = other DNA
gatgctcggcctgtgtgcatggggggctgtacgccagggggctgccagagcaccctccaggacgggtgtctgtgactccc

SEQ ID NO: 28242 - DNA, 80 bp, synthetic construct
  misc_feature 1..80: note = Artificially Synthesized Probe
  source 1..80: mol_type = other DNA
tggagctgtgggggcaccgacagagcctgggagggcgtctttgtcctccggggctgcaggggacctggtataggaaggga

SEQ ID NO: 28243 - DNA, 80 bp, synthetic construct
  misc_feature 1..80: note = Artificially Synthesized Probe
  source 1..80: mol_type = other DNA
tgcgtttttctcaatcgtgagcacgtctttctgttatgacaaggtttagcgaatgaaagggaaacccttttatcaaaggg

SEQ ID NO: 28244 - DNA, 80 bp, synthetic construct
  misc_feature 1..80: note = Artificially Synthesized Probe
  source 1..80: mol_type = other DNA
gctgaagaccgggcgtgggtggtggccagttatcctctccccatagaaacatcaagaacagggcgaccttccctcagccc

SEQ ID NO: 28245 - DNA, 80 bp, synthetic construct
  misc_feature 1..80: note = Artificially Synthesized Probe
  source 1..80: mol_type = other DNA
ctcgtttccctgtggctgtggaggtgaatgcagggggagcgtgtgtgcacgtgcgtgtgtgtgtgtgaggatgtacatgt

SEQ ID NO: 28246 - DNA, 80 bp, synthetic construct
  misc_feature 1..80: note = Artificially Synthesized Probe
  source 1..80: mol_type = other DNA
tgtacatgtacgagtgtgtgcctgtgtgtgcatgtatgtgtgcctctgtgtacatgtatgagtgtgcatgtgcgtgtgtg

SEQ ID NO: 28247 - DNA, 80 bp, synthetic construct
  misc_feature 1..80: note = Artificially Synthesized Probe
  source 1..80: mol_type = other DNA
ccccgggaaccctccaagttctgcaaaagccttccctggccaggttgcagccaatgcccgcagccagagggtgggtgggc

SEQ ID NO: 28248 - DNA, 80 bp, synthetic construct
  misc_feature 1..80: note = Artificially Synthesized Probe
  source 1..80: mol_type = other DNA
tgttctcccccttacaaggacacttgctgctgcgttcagacaatccaggatcctgaactcgattacatatgcagaaaccc

SEQ ID NO: 28249 - DNA, 80 bp, synthetic construct
  misc_feature 1..80: note = Artificially Synthesized Probe
  source 1..80: mol_type = other DNA
acgctctggccttatagctggtaacgcagacagatgtgtacctgaatatgcaagcatgtattgagtgcttactgcacaca

SEQ ID NO: 28250 - DNA, 80 bp, synthetic construct
  misc_feature 1..80: note = Artificially Synthesized Probe
  source 1..80: mol_type = other DNA
gcttttcagagcttcagatgacacgtcattctgcaatcctcttcggggacattctccccaatcccctcctgcatgctcac

SEQ ID NO: 28251 - DNA, 80 bp, synthetic construct
  misc_feature 1..80: note = Artificially Synthesized Probe
  source 1..80: mol_type = other DNA
cttggcatggctgagtggctggcttgaggtcatgaccccagcccgggtctctgcactgtcacggcctccccggggacgcc

SEQ ID NO: 28252 - DNA, 80 bp, synthetic construct
  misc_feature 1..80: note = Artificially Synthesized Probe
  source 1..80: mol_type = other DNA
agagcaagcataatcctgcatctcctaagaaaccaaaatcagtgccaaaaccccataatgagcaaaacagtagaatgtcc

SEQ ID NO: 28253 - DNA, 80 bp, synthetic construct
  misc_feature 1..80: note = Artificially Synthesized Probe
  source 1..80: mol_type = other DNA
atggactctgcataactttactttttaaaatattgattaaaatatcctggcccttgatggctgagttctttggccttgga

SEQ ID NO: 28254 - DNA, 80 bp, synthetic construct
  misc_feature 1..80: note = Artificially Synthesized Probe
  source 1..80: mol_type = other DNA
tccgaggtcaggcccctctgggacttccttgcccctgaacaaagatagttcctgggaggatggcaaggagagaagtgcag

SEQ ID NO: 28255 - DNA, 80 bp, synthetic construct
  misc_feature 1..80: note = Artificially Synthesized Probe
  source 1..80: mol_type = other DNA
cgctcatatccagatttcatggaaaggaaaaaacaaagaacaaacgcatttagcagtggggagtgtgagctcccgcataa

SEQ ID NO: 28256 - DNA, 80 bp, synthetic construct
  misc_feature 1..80: note = Artificially Synthesized Probe
  source 1..80: mol_type = other DNA
gtccctgtcctttgtcgtgtgggaagccagagctgcaggctgtagttgtcctgacacaggcagcctgtcctgtctgttgt

SEQ ID NO: 28257 - DNA, 80 bp, synthetic construct
  misc_feature 1..80: note = Artificially Synthesized Probe
  source 1..80: mol_type = other DNA
ggaagggctctgggaattcggtcaccgacggctgcacaccccgtagggtaggtgggttctggaggccaggctggaaggct

SEQ ID NO: 28258 - DNA, 80 bp, synthetic construct
  misc_feature 1..80: note = Artificially Synthesized Probe
  source 1..80: mol_type = other DNA
gggcctgtagtgtggactcctggagcttggcccgagcgcacttggcacatggcaggcgacggtctgtggacagctcaggt

SEQ ID NO: 28259 - DNA, 80 bp, synthetic construct
  misc_feature 1..80: note = Artificially Synthesized Probe
  source 1..80: mol_type = other DNA
gagccaggctctgtctcaaaaaaagaagagtaaagaatgaaaacctgaactaggaggctcttgctacatgaacgcggcat

SEQ ID NO: 28260 - DNA, 80 bp, synthetic construct
  misc_feature 1..80: note = Artificially Synthesized Probe
  source 1..80: mol_type = other DNA
tagatctaattggctcattaaatgtctgcgtggaggagcattttctttctcaagccggtgagtcctggagttagtgcaac

SEQ ID NO: 28261 - DNA, 80 bp, synthetic construct
  misc_feature 1..80: note = Artificially Synthesized Probe
  source 1..80: mol_type = other DNA
atccctcatgccactttatgccagagccatcactggctggcttcgattccagggagggagtggaccagcctctggagaag

SEQ ID NO: 28262 - DNA, 80 bp, synthetic construct
  misc_feature 1..80: note = Artificially Synthesized Probe
  source 1..80: mol_type = other DNA
gactcattgtcccgtggccactgccagctgtctgtaagctcaggattagagagcctggcctttcgtgagagctggggctg

SEQ ID NO: 28263 - DNA, 80 bp, synthetic construct
  misc_feature 1..80: note = Artificially Synthesized Probe
  source 1..80: mol_type = other DNA
agatttcccttccccccaactcctgcccaccccggcgccttccctcctgcgtacctttctttgggcaatgggcagaggcc

SEQ ID NO: 28264 - DNA, 80 bp, synthetic construct
  misc_feature 1..80: note = Artificially Synthesized Probe
  source 1..80: mol_type = other DNA
ctgacctgtctctgtccttcctctgcaggggctggcgtcttcttcctgtcctcggccgagggggagcagatcagcttcct

SEQ ID NO: 28265 - DNA, 80 bp, synthetic construct
  misc_feature 1..80: note = Artificially Synthesized Probe
  source 1..80: mol_type = other DNA
gggaagggtgactgggagggcagaggcgagcagcatgtggggtgggacctgggcctcccttctcctggccacagccccca

SEQ ID NO: 28266 - DNA, 80 bp, synthetic construct
  misc_feature 1..80: note = Artificially Synthesized Probe
  source 1..80: mol_type = other DNA
tcctgtgctgagcccgctgtgacccactggaggggccaagagatgcaggaagtccagccccttggtcttccgcatgtgga

SEQ ID NO: 28267 - DNA, 80 bp, synthetic construct
  misc_feature 1..80: note = Artificially Synthesized Probe
  source 1..80: mol_type = other DNA
agcagaggacagtgtcctatcagggacagggcctcttcagcctagatgtgaacctggacagggacaccattgctttctct

SEQ ID NO: 28268 - DNA, 80 bp, synthetic construct
  misc_feature 1..80: note = Artificially Synthesized Probe
  source 1..80: mol_type = other DNA
gaggccggccctggggatgggggaggggctggtcattttttggaacagaaaattgaaaaactcggtggtgaggaagatga

SEQ ID NO: 28269 - DNA, 80 bp, synthetic construct
  misc_feature 1..80: note = Artificially Synthesized Probe
  source 1..80: mol_type = other DNA
ttccttcttcctcctactcattaattccttcctccccccattcctttcttcaccccctcattcattcctttcttcacccc

SEQ ID NO: 28270 - DNA, 80 bp, synthetic construct
  misc_feature 1..80: note = Artificially Synthesized Probe
  source 1..80: mol_type = other DNA
tcattaccctcctgctcattaatttcttccttctctcctctgctcattcattccttccttcttcccctgctcattcattc

SEQ ID NO: 28271 - DNA, 80 bp, synthetic construct
  misc_feature 1..80: note = Artificially Synthesized Probe
  source 1..80: mol_type = other DNA
tgccctgccccaggaggaggggactcaggtttgcaataagcttttgccttcctgggggtgactcacagctgctttccatt

SEQ ID NO: 28272 - DNA, 80 bp, synthetic construct
  misc_feature 1..80: note = Artificially Synthesized Probe
  source 1..80: mol_type = other DNA
cagacccctgtacccccacaactgccttggcttcctgctctgtctcaggggatgaccgcagcctgtccagctcatcctca

SEQ ID NO: 28273 - DNA, 80 bp, synthetic construct
  misc_feature 1..80: note = Artificially Synthesized Probe
  source 1..80: mol_type = other DNA
tcacctctctggggcagtcacaccacctgttaagcatcaagctaccacagaggctccggccacctgggctccaccagccc

SEQ ID NO: 28274 - DNA, 80 bp, synthetic construct
  misc_feature 1..80: note = Artificially Synthesized Probe
  source 1..80: mol_type = other DNA
cagcccccgggctgggatgtgcatgtgtggtgtgtgcacgtgtggcacattcctgggtgtgtcctggagaccacagtggg

SEQ ID NO: 28275 - DNA, 80 bp, synthetic construct
  misc_feature 1..80: note = Artificially Synthesized Probe
  source 1..80: mol_type = other DNA
ctgtgtatgtgatgagctcagggggtgtcggcctgttgtcaaaggttctcaaagtctagaccagctcagtttgctcaggg

SEQ ID NO: 28276 - DNA, 80 bp, synthetic construct
  misc_feature 1..80: note = Artificially Synthesized Probe
  source 1..80: mol_type = other DNA
tgcactgacccaggttctctttggtctagggagcggcagcctcagccccaggacctgcgacagcacattcaggtaggcac

SEQ ID NO: 28277 - DNA, 80 bp, synthetic construct
  misc_feature 1..80: note = Artificially Synthesized Probe
  source 1..80: mol_type = other DNA
gctgagaggctggagatgaggacggctggcctggggtagatgggtggcatcagggccagttctgtgcctgtttccttgtg

SEQ ID NO: 28278 - DNA, 80 bp, synthetic construct
  misc_feature 1..80: note = Artificially Synthesized Probe
  source 1..80: mol_type = other DNA
tgcctgcctgggcaccagaacttggccgctatgttctgtggctcatctcgatgaaggggtcctggcattccgaggggacc

SEQ ID NO: 28279 - DNA, 80 bp, synthetic construct
  misc_feature 1..80: note = Artificially Synthesized Probe
  source 1..80: mol_type = other DNA
agaacggggtccttcctgtagaacctgggtgcccacggtgcggagccctcaggcctgcagaggaggggccggtgtgcgtc

SEQ ID NO: 28280 - DNA, 80 bp, synthetic construct
  misc_feature 1..80: note = Artificially Synthesized Probe
  source 1..80: mol_type = other DNA
cagggtcacagggctgggtggctcggggcgcaggctgccgctcactacagaattctttcaggggctggcgcctccctcta

SEQ ID NO: 28281 - DNA, 80 bp, synthetic construct
  misc_feature 1..80: note = Artificially Synthesized Probe
  source 1..80: mol_type = other DNA
tcccctccccgcctcccggctgtcctgcctgggccaccgccaccctgcacctggggacggagcctggactctcccagcca

SEQ ID NO: 28282 - DNA, 80 bp, synthetic construct
  misc_feature 1..80: note = Artificially Synthesized Probe
  source 1..80: mol_type = other DNA
gctaaaataaaatgtggcatgttttcttagctgttttgtattctgttataagatattttacaactatgaaagttgaaaaa

SEQ ID NO: 28283 - DNA, 80 bp, synthetic construct
  misc_feature 1..80: note = Artificially Synthesized Probe
  source 1..80: mol_type = other DNA
tggtaaaataaaaacaccttaaaagacacactgttacaatttcctcacagaggtaaagaggctgtgaccagtatcagcat

SEQ ID NO: 28284 - DNA, 80 bp, synthetic construct
  misc_feature 1..80: note = Artificially Synthesized Probe
  source 1..80: mol_type = other DNA
ttagcatgaaatgatccaaggcagggacaggagactcttacagcaatttgttttcttcaatgctttcccattttgggtgg

SEQ ID NO: 28285 - DNA, 80 bp, synthetic construct
  misc_feature 1..80: note = Artificially Synthesized Probe
  source 1..80: mol_type = other DNA
ggagtggaattgctgggttgcatggttatgtatgattaagtgtggatttatctttataagcaagttcaaaactcttttcc

SEQ ID NO: 28286 - DNA, 80 bp, synthetic construct
  misc_feature 1..80: note = Artificially Synthesized Probe
  source 1..80: mol_type = other DNA
gcatctttttgtgtgattatttgccatctgtccttttgtcctttttttttttttttctgagacaaggtcttgctctgtcg

SEQ ID NO: 28287 - DNA, 80 bp, synthetic construct
  misc_feature 1..80: note = Artificially Synthesized Probe
  source 1..80: mol_type = other DNA
aggtcattcataataaggtaatagatataagattttctatttcttaagtgagctttgattttgcatctttcaaggaactt

SEQ ID NO: 28288 - DNA, 80 bp, synthetic construct
  misc_feature 1..80: note = Artificially Synthesized Probe
  source 1..80: mol_type = other DNA
ttgtatttcatatttttgaagctctgttatctaagtgcataaatgttcagggttgctacatcctcttgaaatatagatcc

SEQ ID NO: 28289 - DNA, 80 bp, synthetic construct
  misc_feature 1..80: note = Artificially Synthesized Probe
  source 1..80: mol_type = other DNA
tgtgataattgatatggttagatttaagtctgtcatctcagtgttttctttgttccatctgatcttcatctcccttttcc

SEQ ID NO: 28290 - DNA, 80 bp, synthetic construct
  misc_feature 1..80: note = Artificially Synthesized Probe
  source 1..80: mol_type = other DNA
ggggattgtcttttcttcattcaaacaattctctggagattcatccaggatcttgagtgtatcaatagtttgaccctatt

SEQ ID NO: 28291 - DNA, 80 bp, synthetic construct
  misc_feature 1..80: note = Artificially Synthesized Probe
  source 1..80: mol_type = other DNA
ggtatcacctttgccttaaataatgtcttttaaagattttcagagaagaaaaacgtatagtgattaatatctgcatattt

SEQ ID NO: 28292 - DNA, 80 bp, synthetic construct
  misc_feature 1..80: note = Artificially Synthesized Probe
  source 1..80: mol_type = other DNA
tattctctcttgatctatcttcaaattcactgcattttctgttcaaatgttctgttttcatctcaaaattgttgttgagt

SEQ ID NO: 28293 - DNA, 80 bp, synthetic construct
  misc_feature 1..80: note = Artificially Synthesized Probe
  source 1..80: mol_type = other DNA
gaatagactaaaaaaatcttactagcaaattgaaatctcaatactcactggatggaacaccgatatacatgactcaaaac

SEQ ID NO: 28294 - DNA, 80 bp, synthetic construct
  misc_feature 1..80: note = Artificially Synthesized Probe
  source 1..80: mol_type = other DNA
gtgtctgactccaagccctggctcctagacagcagacctaaaacttttaaataatttaaacatttgcctctaacaatagg

SEQ ID NO: 28295 - DNA, 80 bp, synthetic construct
  misc_feature 1..80: note = Artificially Synthesized Probe
  source 1..80: mol_type = other DNA
ctacccccaattctgtggaaaaaatggtcttccacgaaactagtccctggtgccaaaaaggttgcagactgctgttgtag

SEQ ID NO: 28296 - DNA, 80 bp, synthetic construct
  misc_feature 1..80: note = Artificially Synthesized Probe
  source 1..80: mol_type = other DNA
gacattattcagatctactataaaaaactacattggagaggaggtggagcatgatgaccaagtagaagcctccactgttc

SEQ ID NO: 28297 - DNA, 80 bp, synthetic construct
  misc_feature 1..80: note = Artificially Synthesized Probe
  source 1..80: mol_type = other DNA
atggggtgcctcctagtgcagatacagctgcagcgaccagaaacttagatcacaacaccaaagtccctttgaatacctgg

SEQ ID NO: 28298 - DNA, 80 bp, synthetic construct
  misc_feature 1..80: note = Artificially Synthesized Probe
  source 1..80: mol_type = other DNA
tgtccttcaaacctaaaggagaagacttcccagtgaaacaaaagctgtgaaatttcattcacaccagacctacctataag

SEQ ID NO: 28299 - DNA, 80 bp, synthetic construct
  misc_feature 1..80: note = Artificially Synthesized Probe
  source 1..80: mol_type = other DNA
caaggatagaccacaaaacaaggataggccacaaaacaagccttaaaacattttttaaaaattgagacaatataatgtat

SEQ ID NO: 28300 - DNA, 80 bp, synthetic construct
  misc_feature 1..80: note = Artificially Synthesized Probe
  source 1..80: mol_type = other DNA
ctgaacagaccaatcacaggtaatgagatcaaatctctaatcaaaagtctctcagcaaagaaaagcccaggacctgatgg

SEQ ID NO: 28301 - DNA, 80 bp, synthetic construct
  misc_feature 1..80: note = Artificially Synthesized Probe
  source 1..80: mol_type = other DNA
cagagatagaaaaaactatccttatttattcgaaaacacaaaagacctagaatagccaaagctaccctgagcaagaagaa

SEQ ID NO: 28302 - DNA, 80 bp, synthetic construct
  misc_feature 1..80: note = Artificially Synthesized Probe
  source 1..80: mol_type = other DNA
gtttggaggttcctcaaaaaactaaaaatagagttacaaaatgatccagcaatcctactcttagatatataccccaaaga

SEQ ID NO: 28303 - DNA, 80 bp, synthetic construct
  misc_feature 1..80: note = Artificially Synthesized Probe
  source 1..80: mol_type = other DNA
acataaattaaaaactttaagaaccctgagtgtttaccttccagtataactaagcattctaagtgcaactttgaatgaaa

SEQ ID NO: 28304 - DNA, 80 bp, synthetic construct
  misc_feature 1..80: note = Artificially Synthesized Probe
  source 1..80: mol_type = other DNA
tagaaggataagttgccaaatgtaggctctctgtcaggaacccaatacaaacactggaacaaagaaagacacaagaaaag

SEQ ID NO: 28305 - DNA, 80 bp, synthetic construct
  misc_feature 1..80: note = Artificially Synthesized Probe
  source 1..80: mol_type = other DNA
atctgggaggggcttaaagggggtgcaaaattgccttttggaagggtttaattgattgacattgcaatagtctgctcaaa

SEQ ID NO: 28306 - DNA, 80 bp, synthetic construct
  misc_feature 1..80: note = Artificially Synthesized Probe
  source 1..80: mol_type = other DNA
cattatgatattttaaggctatacactcataataaaaacgaagtaaggtgtttgtagaagtaccttaggcccaatattct

SEQ ID NO: 28307 - DNA, 80 bp, synthetic construct
  misc_feature 1..80: note = Artificially Synthesized Probe
  source 1..80: mol_type = other DNA
tcccttacctgtcgagagcatatcaaggaagccataacacacatgtgcggtgtcaaaaacatctttagcctcataattaa

SEQ ID NO: 28308 - DNA, 80 bp, synthetic construct
  misc_feature 1..80: note = Artificially Synthesized Probe
  source 1..80: mol_type = other DNA
atgccacaaaataattttacaccatataaaatgttgtcttatttgtctcctttgtaaaattaccatactgaagggcagga

SEQ ID NO: 28309 - DNA, 80 bp, synthetic construct
  misc_feature 1..80: note = Artificially Synthesized Probe
  source 1..80: mol_type = other DNA
gttattttcatttttcacaattacaaataacatggacactcatgcataaaactttgtaagcatctctgaatatttcctta

SEQ ID NO: 28310 - DNA, 80 bp, synthetic construct
  misc_feature 1..80: note = Artificially Synthesized Probe
  source 1..80: mol_type = other DNA
ctgtgcagcatgaacagtatggatacaatacttatcttcatggagtttatattagagtaagacaagaggtaggagactgc

SEQ ID NO: 28311 - DNA, 80 bp, synthetic construct
  misc_feature 1..80: note = Artificially Synthesized Probe
  source 1..80: mol_type = other DNA
acacagctgaagttgacagtattaaagactcagtgatgatattctctgagaacacagaaagaaaagaaatagataatgtg

SEQ ID NO: 28312 - DNA, 80 bp, synthetic construct
  misc_feature 1..80: note = Artificially Synthesized Probe
  source 1..80: mol_type = other DNA
ttacagcaaaaaaccactaagtaaagcaaagaatatcctttataataaaagtacaatcctataataatcatgcaatgaac

SEQ ID NO: 28313 - DNA, 80 bp, synthetic construct
  misc_feature 1..80: note = Artificially Synthesized Probe
  source 1..80: mol_type = other DNA
agttagacattttaagacattcttctaagtgattttggattaaatgatcaaaactcaaatcacagactacacagaaatca

SEQ ID NO: 28314 - DNA, 80 bp, synthetic construct
  misc_feature 1..80: note = Artificially Synthesized Probe
  source 1..80: mol_type = other DNA
ccaccgcgcctggccaaggaaactttcttaatgaaataaaggctatctattatatactaacagtaaatgaaacagtgaga

SEQ ID NO: 28315 - DNA, 80 bp, synthetic construct
  misc_feature 1..80: note = Artificially Synthesized Probe
  source 1..80: mol_type = other DNA
agagaaattttgaagttctacaaagcagagaccataaatgaactataagttgacatcttggaagaaactatgtaatgcac

SEQ ID NO: 28316 - DNA, 80 bp, synthetic construct
  misc_feature 1..80: note = Artificially Synthesized Probe
  source 1..80: mol_type = other DNA
tatcttccatccattgacccctccgagtctgtcgcttccacattacaccctctgcaatatatgaagacagttgccacata

SEQ ID NO: 28317 - DNA, 80 bp, synthetic construct
  misc_feature 1..80: note = Artificially Synthesized Probe
  source 1..80: mol_type = other DNA
ctgggcatggtgatgcacacctgtagtcccagctgactggcagagctgagatgagatgatcgcgtgagtccgggatgtcc

SEQ ID NO: 28318 - DNA, 80 bp, synthetic construct
  misc_feature 1..80: note = Artificially Synthesized Probe
  source 1..80: mol_type = other DNA
gagaaaaagaagcaatggggaaaggattccctatttaataaatggtgctgggaaaactggctagccatatgtagaaagct

SEQ ID NO: 28319 - DNA, 80 bp, synthetic construct
  misc_feature 1..80: note = Artificially Synthesized Probe
  source 1..80: mol_type = other DNA
atgtcctttgtagggacatggatgaaattggaaatcatcattctcagtaaacgattgcaagaacaaaaaaccaaacaccg

SEQ ID NO: 28320 - DNA, 80 bp, synthetic construct
  misc_feature 1..80: note = Artificially Synthesized Probe
  source 1..80: mol_type = other DNA
gctgcagggatgagagagagagagatagtgtgtgtgtgtgtgtgtgtgtgtgtgtatgaaacttggccggctacagggat

SEQ ID NO: 28321 - DNA, 80 bp, synthetic construct
  misc_feature 1..80: note = Artificially Synthesized Probe
  source 1..80: mol_type = other DNA
atagatcaagacttcactgtgctttatatttgaaagatactaacattgttgtcactggacttttctttcatagcacctat

SEQ ID NO: 28322 - DNA, 80 bp, synthetic construct
  misc_feature 1..80: note = Artificially Synthesized Probe
  source 1..80: mol_type = other DNA
gggtcctacgttgtaactttctgtactacacagctccattattttcattagtgaaactagagctaacaagaaagaacgct

SEQ ID NO: 28323 - DNA, 80 bp, synthetic construct
  misc_feature 1..80: note = Artificially Synthesized Probe
  source 1..80: mol_type = other DNA
gtcatatagtatgttaaatactcttctcagattatctcatttaaccatcatcaataactctataagatagaggctatctt

SEQ ID NO: 28324 - DNA, 80 bp, synthetic construct
  misc_feature 1..80: note = Artificially Synthesized Probe
  source 1..80: mol_type = other DNA
aacatacattgtaggtcataagctttctgtgcactgtcattttcacaaagcctcgcagactgattacaatatttggtact

SEQ ID NO: 28325 - DNA, 80 bp, synthetic construct
  misc_feature 1..80: note = Artificially Synthesized Probe
  source 1..80: mol_type = other DNA
tgcatgttatattgcatagagatagcatttgaccttttagagaagtaatactataatcccttgccaaagtacataatttc

SEQ ID NO: 28326 - DNA, 80 bp, synthetic construct
  misc_feature 1..80: note = Artificially Synthesized Probe
  source 1..80: mol_type = other DNA
tttttagtgggttgcaaagatcactgaactgcaagactttattattgactctgccaataactcgtctagagaccttagag

SEQ ID NO: 28327 - DNA, 80 bp, synthetic construct
  misc_feature 1..80: note = Artificially Synthesized Probe
  source 1..80: mol_type = other DNA
cactaccttaaaagttcttctaccactcctgtggaaatatatgagcccatcatcaagaaataacagtttgaaatgtgaaa

SEQ ID NO: 28328 - DNA, 80 bp, synthetic construct
  misc_feature 1..80: note = Artificially Synthesized Probe
  source 1..80: mol_type = other DNA
aaaaagagaaaagttattcattgaaaaaaatcacactatgctacattttcagaagaggtttgcacttggactagaaaaca

SEQ ID NO: 28329 - DNA, 80 bp, synthetic construct
  misc_feature 1..80: note = Artificially Synthesized Probe
  source 1..80: mol_type = other DNA
tctgtcattcaagtatagacgttatttaaagaagttgaaaatatgcaacaattgaggaaataatagtaactttcctaaat

SEQ ID NO: 28330 - DNA, 80 bp, synthetic construct
  misc_feature 1..80: note = Artificially Synthesized Probe
  source 1..80: mol_type = other DNA
atgtccctgtcaaggacatgttctcatttctttttatgactgcataatattccatggtatatatgtatcacattttcttt

SEQ ID NO: 28331 - DNA, 80 bp, synthetic construct
  misc_feature 1..80: note = Artificially Synthesized Probe
  source 1..80: mol_type = other DNA
tgacatctgttgactgtcttttctcattcaagttgttattttcttcattcttgctatgatgagtggtttttctactgtgt

SEQ ID NO: 28332 - DNA, 80 bp, synthetic construct
  misc_feature 1..80: note = Artificially Synthesized Probe
  source 1..80: mol_type = other DNA
catctggtttttctcatatagatagactatcccagcatcatttagtgacatgtgacctttaagacaatcttgctgaaatt

SEQ ID NO: 28333 - DNA, 80 bp, synthetic construct
  misc_feature 1..80: note = Artificially Synthesized Probe
  source 1..80: mol_type = other DNA
gtgcgataatttacatttttggattttctagaaacatctttcgattcctagaataagccagatttatcacaagtggatta

SEQ ID NO: 28334 - DNA, 80 bp, synthetic construct
  misc_feature 1..80: note = Artificially Synthesized Probe
  source 1..80: mol_type = other DNA
accttccagggctcaagcgatcctcccacctcagcctcctgggtagttgggatcacaggctcatgccaccatgcccaact

SEQ ID NO: 28335 - DNA, 80 bp, synthetic construct
  misc_feature 1..80: note = Artificially Synthesized Probe
  source 1..80: mol_type = other DNA
cccagtttttgaatttcatttctctttagaattattgcctaaaatgcacataagggaaaatgaaacaattcaatacaatt

SEQ ID NO: 28336 - DNA, 80 bp, synthetic construct
  misc_feature 1..80: note = Artificially Synthesized Probe
  source 1..80: mol_type = other DNA
tcaaaactatacctgcagtgctatgaactgagtatttgtgtccacctcaaattcacagactgaatctttaatccccagtg

SEQ ID NO: 28337 - DNA, 80 bp, synthetic construct
  misc_feature 1..80: note = Artificially Synthesized Probe
  source 1..80: mol_type = other DNA
aaccagaaaactaatgagatttcttacctacagcgaataggcagtaacagggtgaaaagaaaggtagagtgaatgtgctg

SEQ ID NO: 28338 - DNA, 80 bp, synthetic construct
  misc_feature 1..80: note = Artificially Synthesized Probe
  source 1..80: mol_type = other DNA
agtaaacattgccaagcctgcaaacacttaagaaaacacagccccgatatgagaagaagaaacaattaattgaaaccgac

SEQ ID NO: 28339 - DNA, 80 bp, synthetic construct
  misc_feature 1..80: note = Artificially Synthesized Probe
  source 1..80: mol_type = other DNA
gtcaagcagcatcttttaaattcttaaataaaagggctgttaacctgcaattctacacccaggaaacatacctttcaaaa

SEQ ID NO: 28340 - DNA, 80 bp, synthetic construct
  misc_feature 1..80: note = Artificially Synthesized Probe
  source 1..80: mol_type = other DNA
tgaaatggaacttgtagttaaaaacattcctacaaagaaagtcctagatggtttcactggtaaattctaccaaatattta

SEQ ID NO: 28341 - DNA, 80 bp, synthetic construct
  misc_feature 1..80: note = Artificially Synthesized Probe
  source 1..80: mol_type = other DNA
tgtataacttttaatagcaacccttttggacagaagtaaaacaagttctcaaagcaaaaaataaaagagacagctgggcg

SEQ ID NO: 28342 - DNA, 80 bp, synthetic construct
  misc_feature 1..80: note = Artificially Synthesized Probe
  source 1..80: mol_type = other DNA
gaccacgagtgtcatgtcagagaacttagtagaaacctaaagaggctcccctggtcaacaaagaaacaatctgagaatga

SEQ ID NO: 28343 - DNA, 80 bp, synthetic construct
  misc_feature 1..80: note = Artificially Synthesized Probe
  source 1..80: mol_type = other DNA
aaagtacaaatgaaaaaacaatacagtatacaactatttgcatagtatttatattgcattagacgttataagtaacctag

SEQ ID NO: 28344 - DNA, 80 bp, synthetic construct
  misc_feature 1..80: note = Artificially Synthesized Probe
  source 1..80: mol_type = other DNA
catatccaaaagagtgtcattccatgtagttcccgtgaggagactgcacacttattctaattatcttgccatcactcaaa

SEQ ID NO: 28345 - DNA, 80 bp, synthetic construct
  misc_feature 1..80: note = Artificially Synthesized Probe
  source 1..80: mol_type = other DNA
aaatttatttgcataaagatgaatgactcttggccaaatgataacagaatttcaagtcactgctagattctaagtattaa

SEQ ID NO: 28346 - DNA, 80 bp, synthetic construct
  misc_feature 1..80: note = Artificially Synthesized Probe
  source 1..80: mol_type = other DNA
agactattaacaaagcaaatgcagaattaaaaagatggatggcaatctataccgatgagcatgacattttaggccacttt

SEQ ID NO: 28347 - DNA, 80 bp, synthetic construct
  misc_feature 1..80: note = Artificially Synthesized Probe
  source 1..80: mol_type = other DNA
ctggagtgcagtagtgcaatctcggctcactacaacctccacctcctgggttcaagcaattctctgcctcagcctcccaa

SEQ ID NO: 28348 - DNA, 80 bp, synthetic construct
  misc_feature 1..80: note = Artificially Synthesized Probe
  source 1..80: mol_type = other DNA
tcacatgccgagccttaaaatctgtcaaactaaccaatacagtaaaagaatgtggaattatattatttcataaaaatcat

SEQ ID NO: 28349 - DNA, 80 bp, synthetic construct
  misc_feature 1..80: note = Artificially Synthesized Probe
  source 1..80: mol_type = other DNA
caacatgcttctcctgtatgtgtagcaacaacttttatatgccacaacttttgtgcttcaaaaaactttgaagagaaata

SEQ ID NO: 28350 - DNA, 80 bp, synthetic construct
  misc_feature 1..80: note = Artificially Synthesized Probe
  source 1..80: mol_type = other DNA
ataattggccgggcacagtggctcacacctgtaatcccagcactttgggaggctgaagcaggcagatcacttgaggtcag

SEQ ID NO: 28351 - DNA, 80 bp, synthetic construct
  misc_feature 1..80: note = Artificially Synthesized Probe
  source 1..80: mol_type = other DNA
gcctacactcttaaatggagagcaatttttacatagcaattttgaattattttcttaactctatactcaatttactttta

SEQ ID NO: 28352 - DNA, 80 bp, synthetic construct
  misc_feature 1..80: note = Artificially Synthesized Probe
  source 1..80: mol_type = other DNA
taaacaaatgtcacctaggtcatttgcaagcaccaagagagtttctacataacaagtaggaatgaatataaatacacact

SEQ ID NO: 28353 - DNA, 80 bp, synthetic construct
  misc_feature 1..80: note = Artificially Synthesized Probe
  source 1..80: mol_type = other DNA
agaatctctctctttttcaatgccatatcctcagcatctagcagagcatggacatggtatgtactcaataatttgttgaa

SEQ ID NO: 28354 - DNA, 80 bp, synthetic construct
  misc_feature 1..80: note = Artificially Synthesized Probe
  source 1..80: mol_type = other DNA
aacatcatagtactaaaccatacccatgtggttgaagtttaaatcctgaatgtataattctaaaaagtgtacgtataaat

SEQ ID NO: 28355 - DNA, 80 bp, synthetic construct
  misc_feature 1..80: note = Artificially Synthesized Probe
  source 1..80: mol_type = other DNA
gaggacagggacaggttctttatctgtcttgttcattactatatccccagcttcacacttggaagattaataaatactgg

SEQ ID NO: 28356 - DNA, 80 bp, synthetic construct
  misc_feature 1..80: note = Artificially Synthesized Probe
  source 1..80: mol_type = other DNA
cagtctgagatccaactgcaaggcggcagcgaggatgggggaggggcacccaccatggccaaggcttgagtaggtaaaca

SEQ ID NO: 28357 - DNA, 80 bp, synthetic construct
  misc_feature 1..80: note = Artificially Synthesized Probe
  source 1..80: mol_type = other DNA
attcgatcaactggaagaaagggtatcagtgatggatgatcaaatgaatgaaatgaagcgagaggagaagtttagagtaa

SEQ ID NO: 28358 - DNA, 80 bp, synthetic construct
  misc_feature 1..80: note = Artificially Synthesized Probe
  source 1..80: mol_type = other DNA
ctaacgagcaaaataaccagctaacatcataatgacaggatcaaatttacacataacaatattaaccttaaatgtaaatg

SEQ ID NO: 28359 - DNA, 80 bp, synthetic construct
  misc_feature 1..80: note = Artificially Synthesized Probe
  source 1..80: mol_type = other DNA
gcaataaaaaatgataaaggggatatcaccaccgatcactcagaaatacaaactaccatcagagaatactataaacacct

SEQ ID NO: 28360 - DNA, 80 bp, synthetic construct
  misc_feature 1..80: note = Artificially Synthesized Probe
  source 1..80: mol_type = other DNA
ataaaataggatacaaacaaatggaagaaattccatgctcatgggtaggaagaatcaatatcgtgaaaatggccatactg

SEQ ID NO: 28361 - DNA, 80 bp, synthetic construct
  misc_feature 1..80: note = Artificially Synthesized Probe
  source 1..80: mol_type = other DNA
acctacagaatgggagaaatttttgcaatctactcatctgacaaagggctaatatccagaatctacaatgaactcaaaca

SEQ ID NO: 28362 - DNA, 80 bp, synthetic construct
  misc_feature 1..80: note = Artificially Synthesized Probe
  source 1..80: mol_type = other DNA
acaacagaaataataatgatggcagctgtgaggggtaacaggagtactaaatgatggtaataacatgtaagatatgaaag

SEQ ID NO: 28363 - DNA, 80 bp, synthetic construct
  misc_feature 1..80: note = Artificially Synthesized Probe
  source 1..80: mol_type = other DNA
gatctaacaacagacagactgcctgctcaagtgggtccctgacctccgagtagcataactgggaggcaccccccagtagg

SEQ ID NO: 28364 - DNA, 80 bp, synthetic construct
  misc_feature 1..80: note = Artificially Synthesized Probe
  source 1..80: mol_type = other DNA
ttagtctgatgggcttccctttgtgggtaacccgacctttctctctggctgccctttacattttttcctgcatttccacc

SEQ ID NO: 28365 - DNA, 80 bp, synthetic construct
  misc_feature 1..80: note = Artificially Synthesized Probe
  source 1..80: mol_type = other DNA
aggattaagaaactcactcaaaaccacacaactacatggaaattgaataacctgctcctgaatgactactgggtacataa

SEQ ID NO: 28366 - DNA, 80 bp, synthetic construct
  misc_feature 1..80: note = Artificially Synthesized Probe
  source 1..80: mol_type = other DNA
ctcctccctaactcattttaggaggccagcatcatcctgataccaaggcctggcagagacacaacaaaaaaagagaattt

SEQ ID NO: 28367 - DNA, 80 bp, synthetic construct
  misc_feature 1..80: note = Artificially Synthesized Probe
  source 1..80: mol_type = other DNA
gaaataatgctgcatatctacaaccatctgatctttgacaaacttgacaaaaacaagcaatgcggaaaggattccctatt

SEQ ID NO: 28368 - DNA, 80 bp, synthetic construct
  misc_feature 1..80: note = Artificially Synthesized Probe
  source 1..80: mol_type = other DNA
gtaaactagttcaaccactgtggaagacagtgtggcaattcctcaaagatctagaactagaaataccatttgacccagcc

SEQ ID NO: 28369 - DNA, 80 bp, synthetic construct
  misc_feature 1..80: note = Artificially Synthesized Probe
  source 1..80: mol_type = other DNA
aggactatataaccaatttagagagactagcacctcttcggtagccctcctaatgaaatatactgattttttaaatttta

SEQ ID NO: 28370 - DNA, 80 bp, synthetic construct
  misc_feature 1..80: note = Artificially Synthesized Probe
  source 1..80: mol_type = other DNA
tagttcattcattctcattattgtatactggtccaccatgttaataaaccaaaatgtattcatttctctgttaatggata

SEQ ID NO: 28371 - DNA, 80 bp, synthetic construct
  misc_feature 1..80: note = Artificially Synthesized Probe
  source 1..80: mol_type = other DNA
tgcctgtccttactcaccaatctgcgatacccactcttccatatatcaaatgcctttaaatgtacatttctgcttctggg

SEQ ID NO: 28372 - DNA, 80 bp, synthetic construct
  misc_feature 1..80: note = Artificially Synthesized Probe
  source 1..80: mol_type = other DNA
atttttatgacctttcccttatggtcacaagatgactgctacagctctgggcatgacatcctagtgtaataaaagcagga

SEQ ID NO: 28373 - DNA, 80 bp, synthetic construct
  misc_feature 1..80: note = Artificially Synthesized Probe
  source 1..80: mol_type = other DNA
tgtaaaagcccactgaaaggtctcttaattcagtagtagtcttacctcaggtatgctccatacatgaagaacaatcccat

SEQ ID NO: 28374 - DNA, 80 bp, synthetic construct
  misc_feature 1..80: note = Artificially Synthesized Probe
  source 1..80: mol_type = other DNA
tccccctgcctctctgatcgctcgtttcagtcagttctagtaacttctcttgttttatgtaccactctttaatattggac

SEQ ID NO: 28375 - DNA, 80 bp, synthetic construct
  misc_feature 1..80: note = Artificially Synthesized Probe
  source 1..80: mol_type = other DNA
ctagctggttcatctctgtgtcccaagtgccaaacactaacttatcacttattgggaatgtaactaataccatacttagg

SEQ ID NO: 28376 - DNA, 80 bp, synthetic construct
  misc_feature 1..80: note = Artificially Synthesized Probe
  source 1..80: mol_type = other DNA
ccttctcagaaaactattttaaaatgtaaaatactcattgatgtgagtcagttctaatgttttttaaatcaacaacagaa

SEQ ID NO: 28377 - DNA, 80 bp, synthetic construct
  misc_feature 1..80: note = Artificially Synthesized Probe
  source 1..80: mol_type = other DNA
ccatgaagactcccccctcatgagtgagattaaagctatcttactctcctactgtctgccgtgtgaggacacagtgttcc

SEQ ID NO: 28378 - DNA, 80 bp, synthetic construct
  misc_feature 1..80: note = Artificially Synthesized Probe
  source 1..80: mol_type = other DNA
attgctggaacacagctaaagcagtgttaagaggaaaatttacagagctaaatgcccgcttcaaagttagaaagatctca

SEQ ID NO: 28379 - DNA, 80 bp, synthetic construct
  misc_feature 1..80: note = Artificially Synthesized Probe
  source 1..80: mol_type = other DNA
atcctttcattttaaaagccttcaacaaagtaggcattgaaggaacatacctcaaaattgtaagagccatctatgaaaaa

SEQ ID NO: 28380 - DNA, 80 bp, synthetic construct
  misc_feature 1..80: note = Artificially Synthesized Probe
  source 1..80: mol_type = other DNA
agagagcccagaaataaagtcacacacctagaaccatctgattttcaacaaacctgacaacacaagtcaataggaaaaag

SEQ ID NO: 28381 - DNA, 80 bp, synthetic construct
  misc_feature 1..80: note = Artificially Synthesized Probe
  source 1..80: mol_type = other DNA
atacctaccacatcatgcaggccccacctgtggatagtaataatacaatgtcacttttttaaaacatgaaaaaaaaagta

SEQ ID NO: 28382 - DNA, 80 bp, synthetic construct
  misc_feature 1..80: note = Artificially Synthesized Probe
  source 1..80: mol_type = other DNA
cctacattcatgtcattggagtcttggaaggagacaggaaagaggcagggctgaaaaagaattcaaggaaataattactg

SEQ ID NO: 28383 - DNA, 80 bp, synthetic construct
  misc_feature 1..80: note = Artificially Synthesized Probe
  source 1..80: mol_type = other DNA
ggataaaataaaacaggctttcactttcttcctgagtttataaaatatgtgtaaaacgagtttaaaataagtttgatgat

SEQ ID NO: 28384 - DNA, 80 bp, synthetic construct
  misc_feature 1..80: note = Artificially Synthesized Probe
  source 1..80: mol_type = other DNA
gaaaaacagatagatgtcaacggagaaatgaacaaatacataattttactaggagacttcagaatccctctgtcaaaaaa

SEQ ID NO: 28385 - DNA, 80 bp, synthetic construct
  misc_feature 1..80: note = Artificially Synthesized Probe
  source 1..80: mol_type = other DNA
ctgtggcctatttttgtaccagtaatgtgaaaaggatattgtttacctttcccccagcagtttaagataagagagtgtaa

SEQ ID NO: 28386 - DNA, 80 bp, synthetic construct
  misc_feature 1..80: note = Artificially Synthesized Probe
  source 1..80: mol_type = other DNA
tctgctgtgctgtctgctgatgagctcatgtaaggcattttttacttcttttttttatatctagcatttccctttgattc

SEQ ID NO: 28387 - DNA, 80 bp, synthetic construct
  misc_feature 1..80: note = Artificially Synthesized Probe
  source 1..80: mol_type = other DNA
tgttccttcctcaaggaatatgactgttttttaacatttaggttttttttttcctgcctgttctctttcaccagcttcac

SEQ ID NO: 28388 - DNA, 80 bp, synthetic construct
  misc_feature 1..80: note = Artificially Synthesized Probe
  source 1..80: mol_type = other DNA
agtgagactctgtctcaaaacaaacaaaaagaaaccaaacaaatatcttctcccagtttgtcaactgtcttttgatttta

SEQ ID NO: 28389 - DNA, 80 bp, synthetic construct
  misc_feature 1..80: note = Artificially Synthesized Probe
  source 1..80: mol_type = other DNA
aaattcaatattgttaagatgtcaattcttcccagatacatgtacaaatccaacatattcccaaccaaaatcacagcagg

SEQ ID NO: 28390 - DNA, 80 bp, synthetic construct
  misc_feature 1..80: note = Artificially Synthesized Probe
  source 1..80: mol_type = other DNA
ctaatcacttctcgctattttgcattcttggtttttaaagaacacgtattttcaggtgatcactgtaatattctttcaaa

SEQ ID NO: 28391 - DNA, 80 bp, synthetic construct
  misc_feature 1..80: note = Artificially Synthesized Probe
  source 1..80: mol_type = other DNA
aaaaagggccacattgtttaaaatgcattctccctaaaaaatgctatatgctataatcatatctgcctcatccaacacga

SEQ ID NO: 28392 - DNA, 80 bp, synthetic construct
  misc_feature 1..80: note = Artificially Synthesized Probe
  source 1..80: mol_type = other DNA
tcattaaaaggcccaggtaaaacatggaatctaactgtagccaaagagaaggcaatttctgataacatctcatttcattc

SEQ ID NO: 28393 - DNA, 80 bp, synthetic construct
  misc_feature 1..80: note = Artificially Synthesized Probe
  source 1..80: mol_type = other DNA
ataatttgcttactaacttgtatgtttttcagcatttataatccagtatggcacacacctgaaattccttaactcagtgg

SEQ ID NO: 28394 - DNA, 80 bp, synthetic construct
  misc_feature 1..80: note = Artificially Synthesized Probe
  source 1..80: mol_type = other DNA
agttctaacatcaaaatctccctgcagactaaacgtctacagcagcactgtgtcaatagaacacaggggcagatctcata

SEQ ID NO: 28395 - DNA, 80 bp, synthetic construct
  misc_feature 1..80: note = Artificially Synthesized Probe
  source 1..80: mol_type = other DNA
gggagaaacttgagagggtttttttacttcaggtaattggtaagagtgatggaattatggatgattgtgaccttttttga

SEQ ID NO: 28396 - DNA, 80 bp, synthetic construct
  misc_feature 1..80: note = Artificially Synthesized Probe
  source 1..80: mol_type = other DNA
ttccttggctattccagaagtcccacctcccttctgagattttataatggtatttcttatggttatcctaaatatacttg

SEQ ID NO: 28397 - DNA, 80 bp, synthetic construct
  misc_feature 1..80: note = Artificially Synthesized Probe
  source 1..80: mol_type = other DNA
gccaacttctttctactcggaccttgctattatttcctactaggcacccacaaacccttgcttgttaaactgatctcctt

SEQ ID NO: 28398 - DNA, 80 bp, synthetic construct
  misc_feature 1..80: note = Artificially Synthesized Probe
  source 1..80: mol_type = other DNA
ccctcacgtgctccccagcgcgagcagcacccccgcctctgcgcttcccagagcgtgcagcttccggtgagggcagcccc

SEQ ID NO: 28399 - DNA, 80 bp, synthetic construct
  misc_feature 1..80: note = Artificially Synthesized Probe
  source 1..80: mol_type = other DNA
aaaagcagcttagggctgagctggagacgcggtgtccccgactgtgggggagggggactcgaggtttccccttgatggac

SEQ ID NO: 28400 - DNA, 80 bp, synthetic construct
  misc_feature 1..80: note = Artificially Synthesized Probe
  source 1..80: mol_type = other DNA
cctttgagcccgatgatatcaggcccgcccccagggaattccccaggccgttctcatgtttgtaacaaaagggagaccaa

SEQ ID NO: 28401 - DNA, 80 bp, synthetic construct
  misc_feature 1..80: note = Artificially Synthesized Probe
  source 1..80: mol_type = other DNA
agccgccggcagctgctgctcatcggcgccacgtggctgctgtccgcggcggtggcggcgcccgtactgtgcggcctcaa

SEQ ID NO: 28402 - DNA, 80 bp, synthetic construct
  misc_feature 1..80: note = Artificially Synthesized Probe
  source 1..80: mol_type = other DNA
cccggacgccccccggcctgatggccaggcctcagggaccaaggagatggggagggcgcttttgtacgttaattaaacaa

SEQ ID NO: 28403 - DNA, 80 bp, synthetic construct
  misc_feature 1..80: note = Artificially Synthesized Probe
  source 1..80: mol_type = other DNA
tcacctcagcctcacttgaatctatggcatttcagaaggagctctagctgttcttggctttctgttgaacagctataaga

SEQ ID NO: 28404 - DNA, 80 bp, synthetic construct; identical to SEQ ID NO: 28403
  misc_feature 1..80: note = Artificially Synthesized Probe
  source 1..80: mol_type = other DNA

SEQ ID NO: 28405 - DNA, 80 bp, synthetic construct
  misc_feature 1..80: note = Artificially Synthesized Probe
  source 1..80: mol_type = other DNA
aaaaaatctaggaagctacattagtgctgagcctggtgatgcccccataaccacaccaggtatgttctggaccatcgtat

SEQ ID NO: 28406 - DNA, 80 bp, synthetic construct
  misc_feature 1..80: note = Artificially Synthesized Probe
  source 1..80: mol_type = other DNA
ctcaagtatttcaaatgtgctcttgcagagcacagaagtatactagcgtaatacttgattttgcctctgtgcaggctctg

SEQ ID NO: 28407 - DNA, 80 bp, synthetic construct
  misc_feature 1..80: note = Artificially Synthesized Probe
  source 1..80: mol_type = other DNA
tttttcaggatgagttaaatgccagtggaaccatcaaagaaagtggtgtcctggtgcatgaaggtgatagaggaaggcaa

SEQ ID NO: 28408 - DNA, 80 bp, synthetic construct
  misc_feature 1..80: note = Artificially Synthesized Probe
  source 1..80: mol_type = other DNA
cagagacacatgctgttgggaagagccaagataaggttagtttgtaaagctgatttctttcaatggcagtttaaattctt

SEQ ID NO: 28409 - DNA, 80 bp, synthetic construct
  misc_feature 1..80: note = Artificially Synthesized Probe
  source 1..80: mol_type = other DNA
tgacagtaatggcaatggtaacaatgggaatgatgacaatgacaaatcagacagtggcaaaggtaaatcagatagcagtg

SEQ ID NO: 28410 - DNA, 80 bp, synthetic construct
  misc_feature 1..80: note = Artificially Synthesized Probe
  source 1..80: mol_type = other DNA
cagcgatagcagtgacggcagtgatagcgacagcagcaatagaagtgacagtagtaatagtagtgacagcagcgatagca

SEQ ID NO: 28411 - DNA, 80 bp, synthetic construct
  misc_feature 1..80: note = Artificially Synthesized Probe
  source 1..80: mol_type = other DNA
gacagcagcgacagcagtgacagcagcgacagcagtgacagcaatgaaagcagcgacagcagtgacagcagcgatagcag

SEQ ID NO: 28412 - DNA, 80 bp, synthetic construct
  misc_feature 1..80: note = Artificially Synthesized Probe
  source 1..80: mol_type = other DNA
accgccctgctcctccgagcctttgagaaggatcgctttccaggcatcgccgcccgggaggagctggccagagagacggg

SEQ ID NO: 28413 - DNA, 80 bp, synthetic construct
  misc_feature 1..80: note = Artificially Synthesized Probe
  source 1..80: mol_type = other DNA
ggaagaggccgcctcgctggaagcacccctcagcgaggaagaataccgggctctgctggaggagctttaggacgcggggt

SEQ ID NO: 28414 - DNA, 80 bp, synthetic construct; identical to SEQ ID NO: 28412
  misc_feature 1..80: note = Artificially Synthesized Probe
  source 1..80: mol_type = other DNA

SEQ ID NO: 28415 - DNA, 80 bp, synthetic construct; identical to SEQ ID NO: 28413
  misc_feature 1..80: note = Artificially Synthesized Probe
  source 1..80: mol_type = other DNA

SEQ ID NO: 28416 - DNA, 80 bp, synthetic construct
  misc_feature 1..80: note = Artificially Synthesized Probe
  source 1..80: mol_type = other DNA
agtgcagatgtgtttcagaactccatagtagactgaacctagagaatggttacatcacttaggtgatcagtgtagagata

SEQ ID NO: 28417 - DNA, 80 bp, synthetic construct
  misc_feature 1..80: note = Artificially Synthesized Probe
  source 1..80: mol_type = other DNA
atgtcccctgtaggcagagagtggacaagagttacatcacctagatgatctgtgcagagctatgtcaaaacgcccctgta

SEQ ID NO: 28418 - DNA, 80 bp, synthetic construct
  misc_feature 1..80: note = Artificially Synthesized Probe
  source 1..80: mol_type = other DNA
tgcagagatacgtcacaatgcccctgtaggcagagcctagacaagagttacataacccaggtgatccgtacagagtgatg

SEQ ID NO: 28419 - DNA, 80 bp, synthetic construct
  misc_feature 1..80: note = Artificially Synthesized Probe
  source 1..80: mol_type = other DNA
gagcctagacaaaagccccatcacctggatgattagtgcagagttatgtcacaaagtccctttaggcagatcctagaaaa

SEQ ID NO: 28420 - DNA, 80 bp, synthetic construct
  misc_feature 1..80: note = Artificially Synthesized Probe
  source 1..80: mol_type = other DNA
gcaagagttggatcacctcgggatcagtgcagagatatgtctcaatccccctgtgggcacagcctagacaagagttacat

SEQ ID NO: 28421 - DNA, 80 bp, synthetic construct
  misc_feature 1..80: note = Artificially Synthesized Probe
  source 1..80: mol_type = other DNA
atgtttcatcatcttggaaccttctgtcactttccacatccaccaccttgtgctaaactgtccacctgttcactgcaaaa

SEQ ID NO: 28422 - DNA, 80 bp, synthetic construct
  misc_feature 1..80: note = Artificially Synthesized Probe
  source 1..80: mol_type = other DNA
catcacctgggtgatcagtgcagagatatgtaacaatgcccccagtaggcagagcctagaggagagttacatcatctggg

SEQ ID NO: 28423 - DNA, 80 bp, synthetic construct
  misc_feature 1..80: note = Artificially Synthesized Probe
  source 1..80: mol_type = other DNA
gggctgggttaggtttagggttagggttagggttatgggttacagttggggttagggttaggttttagggttaaggttag

SEQ ID NO: 28424 - DNA, 80 bp, synthetic construct
  misc_feature 1..80: note = Artificially Synthesized Probe
  source 1..80: mol_type = other DNA
cagaagcagcttctcctctatgttcttcactgcctcatactgttgttgaccttgaaaccttcttttggtctagttttatc

SEQ ID NO: 28425 - DNA, 80 bp, synthetic construct
  misc_feature 1..80: note = Artificially Synthesized Probe
  source 1..80: mol_type = other DNA
ttgtggtaaagagttgtgattctatccagaaggcaataggtagcattctaaacagagatcctttttttttttgagatgga

SEQ ID NO: 28426 - DNA, 80 bp, synthetic construct
  misc_feature 1..80: note = Artificially Synthesized Probe
  source 1..80: mol_type = other DNA
caactgcctcttgtagccccttccttgaagtagtcatagctcagggtgtttgacttcttcctctgttttttgtttgtttg

SEQ ID NO: 28427 - DNA, 80 bp, synthetic construct
  misc_feature 1..80: note = Artificially Synthesized Probe
  source 1..80: mol_type = other DNA
cacgaccacgcagcaattggagaggaactgcacaccacggacactgctcttgaaaagaggatgatttacttgcttctaaa

SEQ ID NO: 28428 - DNA, 80 bp, synthetic construct
  misc_feature 1..80: note = Artificially Synthesized Probe
  source 1..80: mol_type = other DNA
atacatttgagcctattccaaataattggaatgatctaaaaaaacatgggtaaaatgagttacattttttttttcagaca

SEQ ID NO: 28429 - DNA, 80 bp, synthetic construct
  misc_feature 1..80: note = Artificially Synthesized Probe
  source 1..80: mol_type = other DNA
gtgtgactggaatttgcttgattctccggttgaacactgtttactcacagtggcaaaggttgaataaaagagtttcttct

SEQ ID NO: 28430 - DNA, 80 bp, synthetic construct
  misc_feature 1..80: note = Artificially Synthesized Probe
  source 1..80: mol_type = other DNA
tgggaacatctcagcggagttcctgagtgcgtgaccagaaaccacgactctacagacagcagaactgagacactgagaag

SEQ ID NO: 28431 - DNA, 80 bp, synthetic construct
  misc_feature 1..80: note = Artificially Synthesized Probe
  source 1..80: mol_type = other DNA
atacagtacttcaaaatgtagaaacaaaaggcagtcagtcttctcccaggtcctcaggacccaaaagctcatgcaaccac

SEQ ID NO: 28432 - DNA, 80 bp, synthetic construct
  misc_feature 1..80: note = Artificially Synthesized Probe
  source 1..80: mol_type = other DNA
attgtgagaagagacctagaaggcaagaggtgagccttctgtcacacctgcataagggccgcttgagggctccttggtca

SEQ ID NO: 28433 - DNA, 80 bp, synthetic construct
  misc_feature 1..80: note = Artificially Synthesized Probe
  source 1..80: mol_type = other DNA
ggacacgaatcacaagcaagaactgtcatggttagaagccagcgttacccaggaccagcctctcccaacaccatcagatg

SEQ ID NO: 28434 - DNA, 80 bp, synthetic construct
  misc_feature 1..80: note = Artificially Synthesized Probe
  source 1..80: mol_type = other DNA
ttcaaatagtcccaggacacagagctttcaaggggagcaaaagaagctagtttatagatgtagccaaagccaacacctct

SEQ ID NO: 28435 - DNA, 80 bp, synthetic construct
  misc_feature 1..80: note = Artificially Synthesized Probe
  source 1..80: mol_type = other DNA
taggcatatttgtcagggcataagcccttgacacacacaaagcctgactgccaaggacctaaacccctttgaagaagctg

SEQ ID NO: 28436 - DNA, 80 bp, synthetic construct
  misc_feature 1..80: note = Artificially Synthesized Probe
  source 1..80: mol_type = other DNA
caggacaccactctggagacagccctggactctgctgagacaaggcaccaggaaacaccttctttcaacaaatgccaaca

SEQ ID NO: 28437 - DNA, 80 bp, synthetic construct
  misc_feature 1..80: note = Artificially Synthesized Probe
  source 1..80: mol_type = other DNA
ccgtatcctgtgggtttctaggggtaactggaagatcacaggtgaagtgtctggcagcagtgcccgccatgcaagatcca

SEQ ID NO: 28438 - DNA, 80 bp, synthetic construct
  misc_feature 1..80: note = Artificially Synthesized Probe
  source 1..80: mol_type = other DNA
aagctctccacacacatgggctttcccggcaccatctccacgatggccgcgtctccagacttcagggacttggggttgtc

SEQ ID NO: 28439 - DNA, 80 bp, synthetic construct; identical to SEQ ID NO: 28438
  misc_feature 1..80: note = Artificially Synthesized Probe
  source 1..80: mol_type = other DNA

SEQ ID NO: 28440 - DNA, 80 bp, synthetic construct
  misc_feature 1..80: note = Artificially Synthesized Probe
  source 1..80: mol_type = other DNA
agttaacaaaagcgtttttctaggacgaatgtaggacctcaaaggctgggcatcccagcagtgcagcgtggaagacagac

SEQ ID NO: 28441 - DNA, 80 bp, synthetic construct
  misc_feature 1..80: note = Artificially Synthesized Probe
  source 1..80: mol_type = other DNA
cccatccttgcccccggagagcactttccctcaaaggaggcactatgggacccctcctttgtctgaggactcctccctgt

SEQ ID NO: 28442 - DNA, 80 bp, synthetic construct
  misc_feature 1..80: note = Artificially Synthesized Probe
  source 1..80: mol_type = other DNA
atggattggtggatggatggatggatggatggatgaggaggtagatgagtggatggacagaaggatggatgggtaggaag

SEQ ID NO: 28443 - DNA, 80 bp, synthetic construct
  misc_feature 1..80: note = Artificially Synthesized Probe
  source 1..80: mol_type = other DNA
aaggatggatgggtggggagatggatggatggatggagaggtggatggatggatggatggatggattgatggacagaagg

SEQ ID NO: 28444 - DNA, 80 bp, synthetic construct
  misc_feature 1..80: note = Artificially Synthesized Probe
  source 1..80: mol_type = other DNA
cccctgaccatcagctccaggcagggcagatgacttgactaggaggatgctgagtctggccaagggccaggccagggaca

SEQ ID NO: 28445 - DNA, 80 bp, synthetic construct
  misc_feature 1..80: note = Artificially Synthesized Probe
  source 1..80: mol_type = other DNA
gggcctggtgctggaggccgctgcccctgctgtgttgacatcgtagatgggccctggccccggccagccgcgtgggaggc

SEQ ID NO: 28446 - DNA, 80 bp, synthetic construct
  misc_feature 1..80: note = Artificially Synthesized Probe
  source 1..80: mol_type = other DNA
gtcctgctgtctgcagggtgctgtgtctggggtgtccgtgcgtctctgtgagtgccctgaaatgtcatacagtctacacc

SEQ ID NO: 28447 - DNA, 80 bp, synthetic construct
  misc_feature 1..80: note = Artificially Synthesized Probe
  source 1..80: mol_type = other DNA
agatcccttcctcaaccagaggccaataataccaccgtgtttggggctgtcagataaataaccctctgtgtgtgtgtgtt

SEQ ID NO: 28448 - DNA, 80 bp, synthetic construct
  misc_feature 1..80: note = Artificially Synthesized Probe
  source 1..80: mol_type = other DNA
tccagcgccctccagccccagctcaacatggcagagttccagagccttctgcagaccctcccaggtcacctccctcacca

SEQ ID NO: 28449 - DNA, 80 bp, synthetic construct
  misc_feature 1..80: note = Artificially Synthesized Probe
  source 1..80: mol_type = other DNA
aggtgggggtccctgttccagcctgaggaaggaggacccggccctgccgagcccagcaagtgccaggtggagatgccctc

SEQ ID NO: 28450 - DNA, 80 bp, synthetic construct
  misc_feature 1..80: note = Artificially Synthesized Probe
  source 1..80: mol_type = other DNA
ttcacattcttttgttaatggtctcggccttccccgtgctcattctcaaggatagtttgtttccttgcttaggaaaggaa

SEQ ID NO: 28451 - DNA, 80 bp, synthetic construct
  misc_feature 1..80: note = Artificially Synthesized Probe
  source 1..80: mol_type = other DNA
gccatagtgccagtgccttgcatgaattcaataatttgagcctagcagcaaccttaagaggtaggtactgttacctcccc

SEQ ID NO: 28452 - DNA, 80 bp, synthetic construct
  misc_feature 1..80: note = Artificially Synthesized Probe
  source 1..80: mol_type = other DNA
actgaggtagttgaatatatcctccattccccatttgtggattagttagtaaatggggcatcttagggtttaaatatgtc

SEQ ID NO: 28453 - DNA, 80 bp, synthetic construct
  misc_feature 1..80: note = Artificially Synthesized Probe
  source 1..80: mol_type = other DNA
ggtgaattagtgtaagatttagattagagaagatttttgttctcttatgttcatcctgccccaatcagaatgtatgttct

SEQ ID NO: 28454 - DNA, 80 bp, synthetic construct
  misc_feature 1..80: note = Artificially Synthesized Probe
  source 1..80: mol_type = other DNA
ttggctggtaggttggaaagtcattttgaagtcatagctccaatatctttcagttttcattgttgctcttgagaagtctg

SEQ ID NO: 28455 - DNA, 80 bp, synthetic construct
  misc_feature 1..80: note = Artificially Synthesized Probe
  source 1..80: mol_type = other DNA
ctcccaaagtgttgggattacaggcgtgagccactgttcccggcagtgatttttctgtttttgtagagacagggccttgc

SEQ ID NO: 28456 - DNA, 80 bp, synthetic construct
  misc_feature 1..80: note = Artificially Synthesized Probe
  source 1..80: mol_type = other DNA
cgacagtttattctttactgttttctctgtgttctccttttccgtttcctttagttgaatgttggacttcctgtatttag

SEQ ID NO: 28457 - DNA, 80 bp, synthetic construct
  misc_feature 1..80: note = Artificially Synthesized Probe
  source 1..80: mol_type = other DNA
gtcttatctcttagtctttcttctatgatgtaacctttcctttagtgtctcattgtctttggccattttgccgtgttgcg

SEQ ID NO: 28458 - DNA, 80 bp, synthetic construct
  misc_feature 1..80: note = Artificially Synthesized Probe
  source 1..80: mol_type = other DNA
gacccaccccccttgcctcccaaagtgctaggattgtaggcatgaaccaccatgcctggccatttttttttttttttttt

SEQ ID NO: 28459 - DNA, 80 bp, synthetic construct
  misc_feature 1..80: note = Artificially Synthesized Probe
  source 1..80: mol_type = other DNA
agttttgcccgcattcccctttgtagttgcaggcatcacccccattgtccccacccttctgtgttttctggggtcagtct

SEQ ID NO: 28460 - DNA, 80 bp, synthetic construct
  misc_feature 1..80: note = Artificially Synthesized Probe
  source 1..80: mol_type = other DNA
atggttgatggattactttatcctaaggtaagtgggcagtttgattttaagttgctcactcagcaaaccaggtagggaat

SEQ ID NO: 28461 - DNA, 80 bp, synthetic construct
  misc_feature 1..80: note = Artificially Synthesized Probe
  source 1..80: mol_type = other DNA
gttattagagcccagttaatttggcctatggcaggtatgatatagaaagcattacttccaggactgagaattctcctttc

SEQ ID NO: 28462 - DNA, 80 bp, synthetic construct
  misc_feature 1..80: note = Artificially Synthesized Probe
  source 1..80: mol_type = other DNA
gtgagcaggcttggcttgagtggtatgggttagtcatgatataggtgtttagatttaattttttgagcatataggacagt

SEQ ID NO: 28463 - DNA, 80 bp, synthetic construct
  misc_feature 1..80: note = Artificially Synthesized Probe
  source 1..80: mol_type = other DNA
caaaaaaagaaaaaaaagattataatagaggctagaaattcttactgcctaatcacgtcgtgggcattgctttgtagtag

SEQ ID NO: 28464 - DNA, 80 bp, synthetic construct
  misc_feature 1..80: note = Artificially Synthesized Probe
  source 1..80: mol_type = other DNA
cttcttcaagcatttaatgactgttcctttgatcatattcctgggtatagcatcacacggggcaggttgctaacctaggt

SEQ ID NO: 28465 - DNA, 80 bp, synthetic construct
  misc_feature 1..80: note = Artificially Synthesized Probe
  source 1..80: mol_type = other DNA
tacccattagcaggacttccctaatcctccctccccgacccccgacactgctctacttttttgcaaatattttttctcat

SEQ ID NO: 28466 - DNA, 80 bp, synthetic construct
  misc_feature 1..80: note = Artificially Synthesized Probe
  source 1..80: mol_type = other DNA
atgctttccccattgaattgcctggccatcgtttttgaaaatcagttgaacataaatgtgatggttaatttctgggttct

SEQ ID NO: 28467 - DNA, 80 bp, synthetic construct
  misc_feature 1..80: note = Artificially Synthesized Probe
  source 1..80: mol_type = other DNA
tcgccacgcccagctaattttttttttttaatgtatttttggtagagacggagtttcaccatgttggacaggctggtctt

SEQ ID NO: 28468 - DNA, 80 bp, synthetic construct
  misc_feature 1..80: note = Artificially Synthesized Probe
  source 1..80: mol_type = other DNA
tgaggaattcccttttatttctagcttgttgagtgttttcattataaaggggttttggattttgtcaaatgtttgtctct

SEQ ID NO: 28469 - DNA, 80 bp, synthetic construct
  misc_feature 1..80: note = Artificially Synthesized Probe
  source 1..80: mol_type = other DNA
ctgtggccctgctggagtgcagtggtgccatcatggctcacttcagtcttgaactcctgagctcaagtgatcctcctact

SEQ ID NO: 28470 - DNA, 80 bp, synthetic construct
  misc_feature 1..80: note = Artificially Synthesized Probe
  source 1..80: mol_type = other DNA
aatagttgggaatataggcgtgcgccaccatgcccagctaattttttgcatttttaggagacggagtttcaccatgttgg

SEQ ID NO: 28471 - DNA, 80 bp, synthetic construct
  misc_feature 1..80: note = Artificially Synthesized Probe
  source 1..80: mol_type = other DNA
attttacattttcactttcagttctgttggtttttgcctcgtgttttgagactatgttatcttgcgtgtgtttatagttg

SEQ ID NO: 28472 - DNA, 80 bp, synthetic construct
  misc_feature 1..80: note = Artificially Synthesized Probe
  source 1..80: mol_type = other DNA
ggcatgtgccactgtgcccggctaagttttatatttttagtagagatggggtttcgctgtgttggccaggctgttcttga

SEQ ID NO: 28473 - DNA, 80 bp, synthetic construct
  misc_feature 1..80: note = Artificially Synthesized Probe
  source 1..80: mol_type = other DNA
cttccagttcctcctcctcatcatcttcgtcttctccttctttatcatccatattgggaaccaaggagcactgtgatgaa

SEQ ID NO: 28474 - DNA, 80 bp, synthetic construct
  misc_feature 1..80: note = Artificially Synthesized Probe
  source 1..80: mol_type = other DNA
gtcgattttgtatttgctttctgcgtcttctgtcttttttgttactttctgcctcagttagtttttgttcttcatggaga

SEQ ID NO: 28475 - DNA, 80 bp, synthetic construct
  misc_feature 1..80: note = Artificially Synthesized Probe
  source 1..80: mol_type = other DNA
tgcaggcatgagccaccgtgcctggccttggtgctctctattcatgtgggcttgagttactgtctagtgtcctttcattt

SEQ ID NO: 28476 - DNA, 80 bp, synthetic construct
  misc_feature 1..80: note = Artificially Synthesized Probe
  source 1..80: mol_type = other DNA
tctcatttggatttgttgagcttcttaatttttttgacttgactgctgccttccagggatttgggaactttgtgatgagt

SEQ ID NO: 28477 - DNA, 80 bp, synthetic construct
  misc_feature 1..80: note = Artificially Synthesized Probe
  source 1..80: mol_type = other DNA
gtagtttgctggcccctgattgagatctagtcattgtttccaaagcaccttgtcttttgatgtaacatttattttgtgtt

SEQ ID NO: 28478 - DNA, 80 bp, synthetic construct
  misc_feature 1..80: note = Artificially Synthesized Probe
  source 1..80: mol_type = other DNA
ctgtaggtggttaaaggaaggctgtctgtgtttccatctctgctgcagactgatacacaagtgtctttttcactcgattc

SEQ ID NO: 28479 - DNA, 80 bp, synthetic construct
  misc_feature 1..80: note = Artificially Synthesized Probe
  source 1..80: mol_type = other DNA
cctcactgccgcaaatcttgtaacgttggatgtcttaactgattttcagctttaacattatctcctactgtctttgaaaa

SEQ ID NO: 28480 - DNA, 80 bp, synthetic construct
  misc_feature 1..80: note = Artificially Synthesized Probe
  source 1..80: mol_type = other DNA
atgacacagcttctgcactccatggctgtaatggggtcccagcttcttctccctgctttttggtggcccctgtgctctct

SEQ ID NO: 28481 - DNA, 80 bp, synthetic construct
  misc_feature 1..80: note = Artificially Synthesized Probe
  source 1..80: mol_type = other DNA
cacttggaacagaagacttgaactctggaaatacatttgttgttcttggacatcataaacatgttagttctcccaagtta

SEQ ID NO: 28482 - DNA, 80 bp, synthetic construct
  misc_feature 1..80: note = Artificially Synthesized Probe
  source 1..80: mol_type = other DNA
aacaaacaaacaaaaatgtcctcccaaattcagatccacccatgacttgagaatggggcctaatttggacgtaggatctt

SEQ ID NO: 28483 - DNA, 80 bp, synthetic construct
  misc_feature 1..80: note = Artificially Synthesized Probe
  source 1..80: mol_type = other DNA
ccaaagtgctgggattacagatgtgtaattacaggtgtaccttgcccagctgttgttcatttttaaaattatagccaaac

SEQ ID NO: 28484 - DNA, 80 bp, synthetic construct
  misc_feature 1..80: note = Artificially Synthesized Probe
  source 1..80: mol_type = other DNA
acaaaaccaccagtgttgacgatgatatggaaaaactggaaccctcccaaagtgccgggattacaggtgtgagccactgc

SEQ ID NO: 28485 - DNA, 80 bp, synthetic construct
  misc_feature 1..80: note = Artificially Synthesized Probe
  source 1..80: mol_type = other DNA
gagtgtactcctacttatttaaaaaaaagttaactgtaaaacagtctcaggcaggcccttcaggaggagtctagaagaca

SEQ ID NO: 28486 - DNA, 80 bp, synthetic construct
  misc_feature 1..80: note = Artificially Synthesized Probe
  source 1..80: mol_type = other DNA
attcatggtaagtgtcccatacaggtgtcccttttttattttttatactgtatttttattgtaccttttctatgcttaga

SEQ ID NO: 28487 - DNA, 80 bp, synthetic construct
  misc_feature 1..80: note = Artificially Synthesized Probe
  source 1..80: mol_type = other DNA
tcactggtgcataaaataagcaaagtgattttcaacaagtcagacaatgccagtactggaacttctcctccttgatgcat

SEQ ID NO: 28488 - DNA, 80 bp, synthetic construct
  misc_feature 1..80: note = Artificially Synthesized Probe
  source 1..80: mol_type = other DNA
gacagcagaggtggtgtcaaggaccttggtattcagggactgcagcaggaaggtaccaggtggttaactgttttttcctt

SEQ ID NO: 28489 - DNA, 80 bp, synthetic construct
  misc_feature 1..80: note = Artificially Synthesized Probe
  source 1..80: mol_type = other DNA
atgagttcacaataattaccatttacatgaagatgctaatagtgttttttatgcaggggtccccaaactccaggctgtgg

SEQ ID NO: 28490 - DNA, 80 bp, synthetic construct
  misc_feature 1..80: note = Artificially Synthesized Probe
  source 1..80: mol_type = other DNA
ggagattttgggttagagtgatgacacttagatttcgaagtttcctgttaactattgtcttcctaatcaacacaggctcc

SEQ ID NO: 28491 - DNA, 80 bp, synthetic construct
  misc_feature 1..80: note = Artificially Synthesized Probe
  source 1..80: mol_type = other DNA
catcacctcaagcgttgatcctgttttacagaccatgcagttctactcttgtagttattttaagatgtgcaatagaccat

SEQ ID NO: 28492 - DNA, 80 bp, synthetic construct
  misc_feature 1..80: note = Artificially Synthesized Probe
  source 1..80: mol_type = other DNA
gaattgctttccctggttcttgtatctaaggtagcttctcctgtgtttctgtccctttaccttggtttatttatcatcat

SEQ ID NO: 28493 - DNA, 80 bp, synthetic construct
  misc_feature 1..80: note = Artificially Synthesized Probe
  source 1..80: mol_type = other DNA
tcttcttttcttattaatgttgaacatctccaatgtggtacttggttggcttttctgtgaaatgtctatagatgtccttt

SEQ ID NO: 28494 - DNA, 80 bp, synthetic construct
  misc_feature 1..80: note = Artificially Synthesized Probe
  source 1..80: mol_type = other DNA
ttcttcatgtgtataatcatttttcctagctttaggtattgagcaagccctcctttcttcgtcagcctgtcataccgtat

SEQ ID NO: 28495 - DNA, 80 bp, synthetic construct
  misc_feature 1..80: note = Artificially Synthesized Probe
  source 1..80: mol_type = other DNA
tcagattccttgtctaattgtgctggttaggacacgatatgatgtcgaaaagaaacaatgctagtggatgtttttattct

SEQ ID NO: 28496 - DNA, 80 bp, synthetic construct
  misc_feature 1..80: note = Artificially Synthesized Probe
  source 1..80: mol_type = other DNA
ggggtgagttacccaacaatatctgctgatagtatatatatattttttacacattgttgaattcaaattgctgatatttt

SEQ ID NO: 28497 - DNA, 80 bp, synthetic construct
  misc_feature 1..80: note = Artificially Synthesized Probe
  source 1..80: mol_type = other DNA
gccaccgcgcccagtcctggcctggaatttttaacctatatttattgtatagatatccactcattttattatctctttcc

SEQ ID NO: 28498 - DNA, 80 bp, synthetic construct
  misc_feature 1..80: note = Artificially Synthesized Probe
  source 1..80: mol_type = other DNA
ctaccaatagagaattgctcaaccaagaggtatgtactttttttgtttcaagagatggagttctcattgtgtggcccagg

SEQ ID NO: 28499 - DNA, 80 bp, synthetic construct
  misc_feature 1..80: note = Artificially Synthesized Probe
  source 1..80: mol_type = other DNA
tttctgtgtgggttgcagataggtttgtaaatgaccacgctctgttgccttaagatggatctgttgacattgtgttttct

SEQ ID NO: 28500 - DNA, 80 bp, synthetic construct
  misc_feature 1..80: note = Artificially Synthesized Probe
  source 1..80: mol_type = other DNA
ggctactgtgatttctctgcagttggccgcagtcaacaattgcactaagacaggaggaaaaaagtgatggggtacaagca

SEQ ID NO: 28501 - DNA, 80 bp, synthetic construct
  misc_feature 1..80: note = Artificially Synthesized Probe
  source 1..80: mol_type = other DNA
tgctcaagcaagtgctgggcacatcttagggagagacctagtgaggagggctgtgttttaattaattaattaattgtaaa

SEQ ID NO: 28502 - DNA, 80 bp, synthetic construct
  misc_feature 1..80: note = Artificially Synthesized Probe
  source 1..80: mol_type = other DNA
gtgctgcttatcacacgggtctggcctttttgacatctgaaatcttataggaatttgtctttttgagagtgtatgctgct

SEQ ID NO: 28503 - DNA, 80 bp, synthetic construct
  misc_feature 1..80: note = Artificially Synthesized Probe
  source 1..80: mol_type = other DNA
actcatccattcacctgtccacatccatctattcaccaaccatcacatattaatgacttactatataccagaactactag

SEQ ID NO: 28504 - DNA, 80 bp, synthetic construct
  misc_feature 1..80: note = Artificially Synthesized Probe
  source 1..80: mol_type = other DNA
ctggtctcctgcttaaagagcagactgaggacccctggaaagacgcccccacagcacgtggaccccacaccacccaagac

SEQ ID NO: 28505 - DNA, 80 bp, synthetic construct
  misc_feature 1..80: note = Artificially Synthesized Probe
  source 1..80: mol_type = other DNA
aaagatttgtgtttttttcatggtgtgtgcatcctccctcattctcccttagatccttagtcagaccttgcacctccacc

SEQ ID NO: 28506 - DNA, 80 bp, synthetic construct
  misc_feature 1..80: note = Artificially Synthesized Probe
  source 1..80: mol_type = other DNA
gaagggaagatgaccctgaagttagataatgccctgtcaaaacaaagcgacccaaagacccgaagagttggatccttttc

SEQ ID NO: 28507 - DNA, 80 bp, synthetic construct
  misc_feature 1..80: note = Artificially Synthesized Probe
  source 1..80: mol_type = other DNA
tctggctctgctgactggaaaagataggtgcacaaatgtaaaaccgtatcacttttgtttctttttttaaaagaatactt

SEQ ID NO: 28508 - DNA, 80 bp, synthetic construct
  misc_feature 1..80: note = Artificially Synthesized Probe
  source 1..80: mol_type = other DNA
aaagaaccttaccttccttttgcatcagggttgtctcatcttagagtgacatcctagagtgtgtaggaacctcccagcag

SEQ ID NO: 28509 - DNA, 80 bp, synthetic construct
  misc_feature 1..80: note = Artificially Synthesized Probe
  source 1..80: mol_type = other DNA
aacaggattgtgctcttcactggcatctatcaaagagcaccaacatgatataaattaaaacccacagtaaaatctctcag

SEQ ID NO: 28510 - DNA, 80 bp, synthetic construct
  misc_feature 1..80: note = Artificially Synthesized Probe
  source 1..80: mol_type = other DNA
gtgaacttgattccatgggcagtgggaagccactgaatttttaaagaagatgatggtaaggtcacaattttagaaagata

SEQ ID NO: 28511 - DNA, 80 bp, synthetic construct
  misc_feature 1..80: note = Artificially Synthesized Probe
  source 1..80: mol_type = other DNA
ccgcgcccggcctatattttatttttttagacagggtctcactctgttgcccaggctggagtgcagtggcgcgatctctg

SEQ ID NO: 28512 - DNA, 80 bp, synthetic construct
  misc_feature 1..80: note = Artificially Synthesized Probe
  source 1..80: mol_type = other DNA
cctcgatctctcaaggtgctgggatcacggacatgagttgtcacagccagccactgactggagttttttttttttaagac

SEQ ID NO: 28513 - DNA, 80 bp, synthetic construct
  misc_feature 1..80: note = Artificially Synthesized Probe
  source 1..80: mol_type = other DNA
agattgtgctgttactatataacacaacactgttgtgtatcttaaaaaaatagtattgtcagccgagcacggtggctcac

SEQ ID NO: 28514 - DNA, 80 bp, synthetic construct
  misc_feature 1..80: note = Artificially Synthesized Probe
  source 1..80: mol_type = other DNA
gtgcagtgccagagttagcatgctactcagagcagtgtgcagctgaaaactgagaatttgtttatttatcttattttatt

SEQ ID NO: 28515 - DNA, 80 bp, synthetic construct
  misc_feature 1..80: note = Artificially Synthesized Probe
  source 1..80: mol_type = other DNA
ggcattgtgcctagagtcaggagttccttgtttcagggctgtcaggtattttttcctgctgtttttgtgatttattgttt

SEQ ID NO: 28516 - DNA, 80 bp, synthetic construct
  misc_feature 1..80: note = Artificially Synthesized Probe
  source 1..80: mol_type = other DNA
ggtagattgtactgttcacgttctgtgtgagataccagtgtttttcatcagtactgtttgtccattgtgagatggtcctg

SEQ ID NO: 28517 - DNA, 80 bp, synthetic construct
  misc_feature 1..80: note = Artificially Synthesized Probe
  source 1..80: mol_type = other DNA
tgttgttttttctctccagcaattcagaattgtccactgccttggtatttctaatttccctgcttgtccaggtgacatct

SEQ ID NO: 28518 - DNA, 80 bp, synthetic construct
  misc_feature 1..80: note = Artificially Synthesized Probe
  source 1..80: mol_type = other DNA
actgagaacttttatctttctcaaatcttagcctgaactagccaagttcaggctgctgtagcgagcgtctccctggcggc

SEQ ID NO: 28519 - DNA, 80 bp, synthetic construct
  misc_feature 1..80: note = Artificially Synthesized Probe
  source 1..80: mol_type = other DNA
ggctgggagggggagtaaaaactatacataagccagtgcctttaacattcatgtataaccttccaaacatttaacgactg

SEQ ID NO: 28520 - DNA, 80 bp, synthetic construct
  misc_feature 1..80: note = Artificially Synthesized Probe
  source 1..80: mol_type = other DNA
tcaactgaatagaaaagttgcaagtgtgataaatgagatgtttttcttgagccgtttgaaagttgcctagatgccccttc

SEQ ID NO: 28521 - DNA, 80 bp, synthetic construct
  misc_feature 1..80: note = Artificially Synthesized Probe
  source 1..80: mol_type = other DNA
atccattaaacagtaacttctcttatcttcctcctcccagctcctggtaacccctgatagactttttgtctctgaatttg

SEQ ID NO: 28522 - DNA, 80 bp, synthetic construct
  misc_feature 1..80: note = Artificially Synthesized Probe
  source 1..80: mol_type = other DNA
cagatacatgatttggaagtattttctctcgttccttaagttgtctttttatttcttgatggtgtcctttgcagcacaga

SEQ ID NO: 28523 - DNA, 80 bp, synthetic construct
  misc_feature 1..80: note = Artificially Synthesized Probe
  source 1..80: mol_type = other DNA
ttcttttgcatgtggtaatccagttgccccagcaacatagttgataggtcttccttatcaaattcatggtctgttcttgt

SEQ ID NO: 28524 - DNA, 80 bp, synthetic construct
  misc_feature 1..80: note = Artificially Synthesized Probe
  source 1..80: mol_type = other DNA
ccgtcttcacggtgtggtctctgatccttcaacatggggcgtctttctatttaattgaaacttctttgatttctttcaac

SEQ ID NO: 28525 - DNA, 80 bp, synthetic construct
  misc_feature 1..80: note = Artificially Synthesized Probe
  source 1..80: mol_type = other DNA
atcccccaggagtgactgattgtgactacttgttctccattcccctttttacactggaaaggattttattttcaattaca

SEQ ID NO: 28526 - DNA, 80 bp, synthetic construct
  misc_feature 1..80: note = Artificially Synthesized Probe
  source 1..80: mol_type = other DNA
cttgcctcttattccgagcaagatgggaagccactagaatgttttaaacagaggactggtgcatgatctgacttacattt

SEQ ID NO: 28527 - DNA, 80 bp, synthetic construct
  misc_feature 1..80: note = Artificially Synthesized Probe
  source 1..80: mol_type = other DNA
gtgccaccacacccagccctctcctttaaacattcccgtgttggtggtcattgtgatcatcacttgtgtatgttgctgtt

SEQ ID NO: 28528 - DNA, 80 bp, synthetic construct
  misc_feature 1..80: note = Artificially Synthesized Probe
  source 1..80: mol_type = other DNA
gtcatatggtaattctatttttgatgtgttgaggaaccgccatactgtttcccatagcaaccgcaccattttgcattctc

SEQ ID NO: 28529 - DNA, 80 bp, synthetic construct
  misc_feature 1..80: note = Artificially Synthesized Probe
  source 1..80: mol_type = other DNA
agcccggcctcagatggtgtttttccatcaactttttctttttacttagaaaggagtttttaaaaccataaaaagtgaga

SEQ ID NO: 28530 - DNA, 80 bp, synthetic construct
  misc_feature 1..80: note = Artificially Synthesized Probe
  source 1..80: mol_type = other DNA
actggttttgtagttagttgttcccattttactgcagaggaaacgggcacagagaggttaagaaaccaaggttacgcatc

SEQ ID NO: 28531 - DNA, 80 bp, synthetic construct
  misc_feature 1..80: note = Artificially Synthesized Probe
  source 1..80: mol_type = other DNA
ttccatgaattttcatcttaatttgctccatattaaactcagggaaggagtagatgttttccagtttcacttgggcgggt

SEQ ID NO: 28532 - DNA, 80 bp, synthetic construct
  misc_feature 1..80: note = Artificially Synthesized Probe
  source 1..80: mol_type = other DNA
gagcctaggccttggtggcaggtgagccccagagcttggattgctgtgagatctgtgtgtcgggcctgtgctgggagcat

SEQ ID NO: 28533 - DNA, 80 bp, synthetic construct
  misc_feature 1..80: note = Artificially Synthesized Probe
  source 1..80: mol_type = other DNA
tttttctctccacccctttcgataattagctggtgaaattggtatgtggaaaatggtttaaaattagggggcgggtagag

SEQ ID NO: 28534 - DNA, 80 bp, synthetic construct
  misc_feature 1..80: note = Artificially Synthesized Probe
  source 1..80: mol_type = other DNA
tcaaaacaaacaaacaaccagtgcagagtttgagatccatgtgcctgattgttttagcacttgacctccatgtttctgtg

SEQ ID NO: 28535 - DNA, 80 bp, synthetic construct
  misc_feature 1..80: note = Artificially Synthesized Probe
  source 1..80: mol_type = other DNA
ggattgccgtggaaactccacactttgactaggaaaagaaatgatcacttctgaggtaactgtgatgtagatgtattatt

SEQ ID NO: 28536 - DNA, 80 bp, synthetic construct
  misc_feature 1..80: note = Artificially Synthesized Probe
  source 1..80: mol_type = other DNA
cccactatacattgtttatttaaaaaaaaaaaagtcagtagtttggtagaaattgatggggcaggaggccacgcactggg

SEQ ID NO: 28537 - DNA, 80 bp, synthetic construct
  misc_feature 1..80: note = Artificially Synthesized Probe
  source 1..80: mol_type = other DNA
tcctgtgttgctaaagagaatttgtgaggtcactggcatgaatatagctacacaccagtatttacctataaaatacattt

SEQ ID NO: 28538 - DNA, 80 bp, synthetic construct
  misc_feature 1..80: note = Artificially Synthesized Probe
  source 1..80: mol_type = other DNA
taggagaagcaggcatattttcacatggctggcaggagagagaaagcatgaaggggaaagtgctgcacactttccaacaa

SEQ ID NO: 28539 - DNA, 80 bp, synthetic construct
  misc_feature 1..80: note = Artificially Synthesized Probe
  source 1..80: mol_type = other DNA
tcccaggttcaaggaattctcctgcctcagcctcctgaatagctgggattacaggcacgcgccaccatgcctggttaaat

SEQ ID NO: 28540 - DNA, 80 bp, synthetic construct
  misc_feature 1..80: note = Artificially Synthesized Probe
  source 1..80: mol_type = other DNA
gcatgcgccaccacagatgtatggatgatatccatacatcctgtgaaatctaggtggaggctcccaagccttaactcttg

SEQ ID NO: 28541 - DNA, 80 bp, synthetic construct
  misc_feature 1..80: note = Artificially Synthesized Probe
  source 1..80: mol_type = other DNA
actgctataaagatatacctaattctgggtaatttataaagaaaagaggtttgatcagctcatggttctgtgggctgtag

SEQ ID NO: 28542 - DNA, 80 bp, synthetic construct
  misc_feature 1..80: note = Artificially Synthesized Probe
  source 1..80: mol_type = other DNA
catcccttggccatttgtcttggtccttcaccccattcccctttagtttgcaagaatcttcattattgctgcttggtatc

SEQ ID NO: 28543 - DNA, 80 bp, synthetic construct
  misc_feature 1..80: note = Artificially Synthesized Probe
  source 1..80: mol_type = other DNA
atgcttcgtgttcatgctttgcacacactggttttgttctcttacccaccgtcctggtgtgtactctacattgtgcacaa

SEQ ID NO: 28544 - DNA, 80 bp, synthetic construct
  misc_feature 1..80: note = Artificially Synthesized Probe
  source 1..80: mol_type = other DNA
ttgcttagatcaaggagaaggaataatgtgctaggctgaatgattgagatgagacagcatttctgtcactgttatgaaca

SEQ ID NO: 28545 - DNA, 80 bp, synthetic construct
  misc_feature 1..80: note = Artificially Synthesized Probe
  source 1..80: mol_type = other DNA
gagtgcagttgaattggacacacagcagaatggtggatgattctagacattattcggtagtgtgttacatagcattctta

SEQ ID NO: 28546 - DNA, 80 bp, synthetic construct
  misc_feature 1..80: note = Artificially Synthesized Probe
  source 1..80: mol_type = other DNA
atatgacacgaaaactcaacaaggtgaaactgtgccaatgaccttcttcctctgtgacattaaagcccatcttggatgca

SEQ ID NO: 28547 - DNA, 80 bp, synthetic construct
  misc_feature 1..80: note = Artificially Synthesized Probe
  source 1..80: mol_type = other DNA
cctggtcgatgcaaaggggctgacaccaccgcttgggcaccgtctgtgcaaatatcagcacagtgaaaaaggcaattgag

SEQ ID NO: 28548 - DNA, 80 bp, synthetic construct
  misc_feature 1..80: note = Artificially Synthesized Probe
  source 1..80: mol_type = other DNA
tccttatggactccatggtcctgctgctgcgtcgggagaggcctggctaggagtgttttatgtgtttatgttcacttctc

SEQ ID NO: 28549 - DNA, 80 bp, synthetic construct
  misc_feature 1..80: note = Artificially Synthesized Probe
  source 1..80: mol_type = other DNA
tacgattttttgactttttccaaatgatgtccatttggaaaagcggcctcccactgaacccggctgacggctgttgtttc

SEQ ID NO: 28550 - DNA, 80 bp, synthetic construct
  misc_feature 1..80: note = Artificially Synthesized Probe
  source 1..80: mol_type = other DNA
ctgcgccatccacctcctgcagcctgactgggtgttttcttcctgtactttggccccttcctgttgccgtcctttctgtg

SEQ ID NO: 28551 - DNA, 80 bp, synthetic construct
  misc_feature 1..80: note = Artificially Synthesized Probe
  source 1..80: mol_type = other DNA
ataatcagttgtcccagcaacatttatgaaaaagacctttcttccctcattgaattgttcttgcaccctcgttgaaaatc

SEQ ID NO: 28552 - DNA, 80 bp, synthetic construct
  misc_feature 1..80: note = Artificially Synthesized Probe
  source 1..80: mol_type = other DNA
tcattgatactgtatagaaatacaagtgattggctgggcacactggctcatgcctgtaatcccagcactttgggaggcca

SEQ ID NO: 28553 - DNA, 80 bp, synthetic construct
  misc_feature 1..80: note = Artificially Synthesized Probe
  source 1..80: mol_type = other DNA
ccacacccagcttatagattcaatttgaggggacttgacagctttgtaatgtcatccatttaggagcatgaaatgccttc

SEQ ID NO: 28554 - DNA, 80 bp, synthetic construct
  misc_feature 1..80: note = Artificially Synthesized Probe
  source 1..80: mol_type = other DNA
tccaagtataagccctttttctgacccattttctctgttagttattgtgaagcctcttctgaagccttgttttctatctc

SEQ ID NO: 28555 - DNA, 80 bp, synthetic construct
  misc_feature 1..80: note = Artificially Synthesized Probe
  source 1..80: mol_type = other DNA
cccacatggctgcggacggtgagaccaatgggtcttgtgaaaacagcgatgccagcagtcatgcaaatgctgcaaagcac

SEQ ID NO: 28556 - DNA, 80 bp, synthetic construct
  misc_feature 1..80: note = Artificially Synthesized Probe
  source 1..80: mol_type = other DNA
gtttgagaccagcctgggcagcgtggcgaaactcaaatgcaaaattttgtaaaaaatgcaaaaattaactgggcatagtg

SEQ ID NO: 28557 - DNA, 80 bp, synthetic construct
  misc_feature 1..80: note = Artificially Synthesized Probe
  source 1..80: mol_type = other DNA
ttagtgtgctctctcagtttgatgtgaatttgggtgtaagttctaggtttgtgatcacattcccgtggaattttctctct

SEQ ID NO: 28558 - DNA, 80 bp, synthetic construct
  misc_feature 1..80: note = Artificially Synthesized Probe
  source 1..80: mol_type = other DNA
tggccggcctgacccgacctcaaccttttgcagtattcttctgtacatggcaaagctttagaaaatcttaaaaataatta

SEQ ID NO: 28559 - DNA, 80 bp, synthetic construct
  misc_feature 1..80: note = Artificially Synthesized Probe
  source 1..80: mol_type = other DNA
gtgtagccaccaaccagacctgaacctgtgccagcctctcatctgcagattccatttttataattttgtcatttcttttt

SEQ ID NO: 28560 - DNA, 80 bp, synthetic construct
  misc_feature 1..80: note = Artificially Synthesized Probe
  source 1..80: mol_type = other DNA
tttcctcgaggcttcagcgtgcgtatccctgtgactgctgatggggagcatcctctcccagacttctcacactcacccct

SEQ ID NO: 28561 - DNA, 80 bp, synthetic construct
  misc_feature 1..80: note = Artificially Synthesized Probe
  source 1..80: mol_type = other DNA
tgtttgtataaagtctgaggcttgggctgaggttgaatttatttttgcctgtggatggcgccccagtcacagttttaaaa

SEQ ID NO: 28562 - DNA, 80 bp, synthetic construct
  misc_feature 1..80: note = Artificially Synthesized Probe
  source 1..80: mol_type = other DNA
tgtgtctgtgtctgtggttctgggcctgagcccggggtgtgtctgtgtctgtggttctgggcctgagccgggggtgtgtc

SEQ ID NO: 28563 - DNA, 80 bp, synthetic construct
  misc_feature 1..80: note = Artificially Synthesized Probe
  source 1..80: mol_type = other DNA
gttagggcaaagaaagtggaagtcgccggaagggaacatttttttctacctggaaatgcttgttactgtgacctggttgg

SEQ ID NO: 28564 - DNA, 80 bp, synthetic construct
  misc_feature 1..80: note = Artificially Synthesized Probe
  source 1..80: mol_type = other DNA
aggttttgtttttgtaccttcatcaatatgtactttgaaagcgcattttgtgtttgtaagcaccagctgaaggggagagc

SEQ ID NO: 28565 - DNA, 80 bp, synthetic construct
  misc_feature 1..80: note = Artificially Synthesized Probe
  source 1..80: mol_type = other DNA
tctccacagggagaagcaacaaaaaactccagggagctgtggccactagaatgtgaatccagggtaggttccgcagtagg

SEQ ID NO: 28566 - DNA, 80 bp, synthetic construct
  misc_feature 1..80: note = Artificially Synthesized Probe
  source 1..80: mol_type = other DNA
ttgatagcagcatcaaccacagcagccaaaagggggaagccacccgagggtcggctgtcgggcgaacggatcagcaaagt

SEQ ID NO: 28567 - DNA, 80 bp, synthetic construct
  misc_feature 1..80: note = Artificially Synthesized Probe
  source 1..80: mol_type = other DNA
agaaaataactgccagatccaatgttgggaagcttccccggtttcctcctgagttttatacttttaggttttgcagttag

SEQ ID NO: 28568 - DNA, 80 bp, synthetic construct
  misc_feature 1..80: note = Artificially Synthesized Probe
  source 1..80: mol_type = other DNA
agttatagttattcactgtctttgttttgaagcatgcagccagtaaagatcccagagaagttcgagaagctagagatcat

SEQ ID NO: 28569 - DNA, 80 bp, synthetic construct
  misc_feature 1..80: note = Artificially Synthesized Probe
  source 1..80: mol_type = other DNA
gcttcacttggggatgatcacctggccacaggtgtctgtctttttctggactttaaaaatactttttattggccaggcac

SEQ ID NO: 28570 - DNA, 80 bp, synthetic construct
  misc_feature 1..80: note = Artificially Synthesized Probe
  source 1..80: mol_type = other DNA
tccttaggaattgaattgtggtggttttttgtccatcttcaagttactgctcaccagactgcaagcatgtcttgcaggga

SEQ ID NO: 28571 - DNA, 80 bp, synthetic construct
  misc_feature 1..80: note = Artificially Synthesized Probe
  source 1..80: mol_type = other DNA
ttaaaaagagctttctaaaaacaaactacccagcgtgtttagcaggctccagtttacccttccacagcccccttcctcca

SEQ ID NO: 28572 - DNA, 80 bp, synthetic construct
  misc_feature 1..80: note = Artificially Synthesized Probe
  source 1..80: mol_type = other DNA
tcttgctgtcaccacccacagtacgggctggggtgtgttcccagctcgttcagttctgccgctttcgccctggcctgcag

SEQ ID NO: 28573 - DNA, 80 bp, synthetic construct
  misc_feature 1..80: note = Artificially Synthesized Probe
  source 1..80: mol_type = other DNA
cccagcattgttttaggtgagcattccttctttttacagagtggactggcatctttgttagcagcttgttctgtatcttt

SEQ ID NO: 28574 - DNA, 80 bp, synthetic construct
  misc_feature 1..80: note = Artificially Synthesized Probe
  source 1..80: mol_type = other DNA
tcaccctcctcacagagacagcctacaactataaaaaatgacaacaacaaaaacaccccaaaaccagtaacagcaacaaa

SEQ ID NO: 28575 - DNA, 80 bp, synthetic construct
  misc_feature 1..80: note = Artificially Synthesized Probe
  source 1..80: mol_type = other DNA
atatggagaagtaaagacatgggcagttataaaagctagtattgtaacagtggtttgtacctccactttttgttttctgt

SEQ ID NO: 28576 - DNA, 80 bp, synthetic construct
  misc_feature 1..80: note = Artificially Synthesized Probe
  source 1..80: mol_type = other DNA
ggattcctcatgaatagatcagtgccctccctccaggtgagtgaattctcgctcttagttgccttgagagtgaggtgttt

SEQ ID NO: 28577 - DNA, 80 bp, synthetic construct
  misc_feature 1..80: note = Artificially Synthesized Probe
  source 1..80: mol_type = other DNA
atttggctgggtgtggtggctcaagcctgtcatccatgcactttgagaggccacggtgagctggtcacttgagctcagga

SEQ ID NO: 28578 - DNA, 80 bp, synthetic construct
  misc_feature 1..80: note = Artificially Synthesized Probe
  source 1..80: mol_type = other DNA
acaaaaaaaaaggagacacactgggtttgatgagacttggtgtcttttgatgcacaaagctttctatctccttgtttccc

SEQ ID NO: 28579 - DNA, 80 bp, synthetic construct; identical to SEQ ID NO: 28566
  misc_feature 1..80: note = Artificially Synthesized Probe
  source 1..80: mol_type = other DNA

SEQ ID NO: 28580 - DNA, 80 bp, synthetic construct
  misc_feature 1..80: note = Artificially Synthesized Probe
  source 1..80: mol_type = other DNA
ctgccttttgctttgtgagcttggagtgttcgtgccttctgcataggtgggtgggaacagtgccaaatactgatcctgaa

SEQ ID NO: 28581 - DNA, 80 bp, synthetic construct
  misc_feature 1..80: note = Artificially Synthesized Probe
  source 1..80: mol_type = other DNA
gtgtagcaaattttatacctaacatctgtttcacacatacaacctgtcactcagtaagaggcccttagacaccattcttc

SEQ ID NO: 28582 - DNA, 80 bp, synthetic construct
  misc_feature 1..80: note = Artificially Synthesized Probe
  source 1..80: mol_type = other DNA
cagacagtatgtagacagtgggcatgggtgtgcaccaataaagctttatttataaacaggtgccatgtccgatttatgat

SEQ ID NO: 28583 - DNA, 80 bp, synthetic construct
  misc_feature 1..80: note = Artificially Synthesized Probe
  source 1..80: mol_type = other DNA
gtgagctgctgtgcccagctttaaacagagtggattttccccatccctttaggagagtttcttttatgttaaagcagtgg

SEQ ID NO: 28584 - DNA, 80 bp, synthetic construct
  misc_feature 1..80: note = Artificially Synthesized Probe
  source 1..80: mol_type = other DNA
tgctccgtgttttgttgtgaatggaacagatgaacagatgatccaggacgtgtttctgattctctgtgaattgatcgtga

SEQ ID NO: 28585 - DNA, 80 bp, synthetic construct
  misc_feature 1..80: note = Artificially Synthesized Probe
  source 1..80: mol_type = other DNA
aattaacagtctggtcacttctagaccctgataaaatcccctgtttacaattggcttagatttttgtattttatttttct

SEQ ID NO: 28586 - DNA, 80 bp, synthetic construct
  misc_feature 1..80: note = Artificially Synthesized Probe
  source 1..80: mol_type = other DNA
cctgggccagtgtctcagggaaactgaggaagttcttagacatacagtttcggagttacattcatgctttttcagttctg

SEQ ID NO: 28587 - DNA, 80 bp, synthetic construct
  misc_feature 1..80: note = Artificially Synthesized Probe
  source 1..80: mol_type = other DNA
cctctgtaagccgcttgctaaatagcccctgctcatttttcttctggattttgcatcttttgaatgtagtctgacgatct

SEQ ID NO: 28588 - DNA, 80 bp, synthetic construct
  misc_feature 1..80: note = Artificially Synthesized Probe
  source 1..80: mol_type = other DNA
ttttaaaagaaaatgtgaggtaagggtcccagggcttcccttaaaatgcttaggtttcagctccacttactgactgacat

SEQ ID NO: 28589 - DNA, 80 bp, synthetic construct
  misc_feature 1..80: note = Artificially Synthesized Probe
  source 1..80: mol_type = other DNA
actctgtaggatggtcgtgtttgaagtgctaaccctgtaggatggtcatgtttgatttcgttctttctataaatggaatt

SEQ ID NO: 28590 - DNA, 80 bp, synthetic construct
  misc_feature 1..80: note = Artificially Synthesized Probe
  source 1..80: mol_type = other DNA
cacatacttactttgccatttggatgccttttgtgaagtgcctattcacatcccaaacatttatctactgggctgtttgt

SEQ ID NO: 28591 - DNA, 80 bp, synthetic construct
  misc_feature 1..80: note = Artificially Synthesized Probe
  source 1..80: mol_type = other DNA
ttctaatctccttgggttttcagcttccacttgattccttacagctgtcttatgcacagtgatcaagcagcctcttataa

SEQ ID NO: 28592 - DNA, 80 bp, synthetic construct
  misc_feature 1..80: note = Artificially Synthesized Probe
  source 1..80: mol_type = other DNA
tttggcctcgttctccacacgtgggttgtcttggagcagatatttcagtagggatctttaaaagataaggactctttgaa

SEQ ID NO: 28593 - DNA, 80 bp, synthetic construct
  misc_feature 1..80: note = Artificially Synthesized Probe
  source 1..80: mol_type = other DNA
aaaattcaaaagttttatgtgataagagatatcagaaatggagctttaaaaacttgacaggaaaaacaggggtctcgctg

SEQ ID NO: 28594 - DNA, 80 bp, synthetic construct
  misc_feature 1..80: note = Artificially Synthesized Probe
  source 1..80: mol_type = other DNA
cgaggtttgctttggatccgtcatctgccactaaaggatgtaattggtttctgttttctgtttgggttcccgcttcgact

SEQ ID NO: 28595 - DNA, 80 bp, synthetic construct
  misc_feature 1..80: note = Artificially Synthesized Probe
  source 1..80: mol_type = other DNA
atgctctgaaacaggagaagtggctcacggtgtgggctcattacaccagcgagtgggaggaggacacaggggccgagcag

SEQ ID NO: 28596 - DNA, 80 bp, synthetic construct
  misc_feature 1..80: note = Artificially Synthesized Probe
  source 1..80: mol_type = other DNA
gtttggttctccagagttcggaatccagcattaagaagaaatttctcaagaggaaaggaaagaccgacagtccctggatc

SEQ ID NO: 28597 - DNA, 80 bp, synthetic construct
  misc_feature 1..80: note = Artificially Synthesized Probe
  source 1..80: mol_type = other DNA
ccgaggtgcacctggcatccaataaaatgcacagaaataaattacacaatttgacaagttttaacatgcttatgaccttg

SEQ ID NO: 28598 - DNA, 80 bp, synthetic construct
  misc_feature 1..80: note = Artificially Synthesized Probe
  source 1..80: mol_type = other DNA
aggtggatgttttgcatgtatttgtacctagtctctgacctgccttttcattttcctaatgctgtatttagaagagcaaa

SEQ ID NO: 28599 - DNA, 80 bp, synthetic construct
  misc_feature 1..80: note = Artificially Synthesized Probe
  source 1..80: mol_type = other DNA
gtgtactcctgttcttcaagttgatgatggtgatttctcaaaggtggttgacttttcctgtctgtctaagatctaggtgg

SEQ ID NO: 28600 - DNA, 80 bp, synthetic construct
  misc_feature 1..80: note = Artificially Synthesized Probe
  source 1..80: mol_type = other DNA
aaactggaatggtctaaaccatagtgggtttcaacttgtggttttgaatggattaattagaagtagtccatttcctgggg

SEQ ID NO: 28601 - DNA, 80 bp, synthetic construct
  misc_feature 1..80: note = Artificially Synthesized Probe
  source 1..80: mol_type = other DNA
tcttactggtgtggcattgcagaccactgcagggggcttaatgggccatttaaaaatgacaaatagctagctttttaggg

SEQ ID NO: 28602 - DNA, 80 bp, synthetic construct
  misc_feature 1..80: note = Artificially Synthesized Probe
  source 1..80: mol_type = other DNA
ctgggtggtgtgtgtttcagatgggacaggcgccatcggcctgtggagtgtgctgagcgggtcagtgggggcaggtgatg

SEQ ID NO: 28603 - DNA, 80 bp, synthetic construct
  misc_feature 1..80: note = Artificially Synthesized Probe
  source 1..80: mol_type = other DNA
actctggctcagaaaaaataaaaagatgcactaaggcacagtgcagcttttaaagggtttccttgagcagcgattcatga

SEQ ID NO: 28604 - DNA, 80 bp, synthetic construct
  misc_feature 1..80: note = Artificially Synthesized Probe
  source 1..80: mol_type = other DNA
cttccctatggactatgctgtcattgtcagctgcatattgagctctaattctcctctagtttatctttccttgtttttct

SEQ ID NO: 28605 - DNA, 80 bp, synthetic construct
  misc_feature 1..80: note = Artificially Synthesized Probe
  source 1..80: mol_type = other DNA
tgaaacacaggtctagagcttgttaaaaaggaggactgtgtagacaaagtctttgaatgaaaatggcctgttgtatttct

SEQ ID NO: 28606 - DNA, 80 bp, synthetic construct
  misc_feature 1..80: note = Artificially Synthesized Probe
  source 1..80: mol_type = other DNA
tctgattcagcaggtctggcctggctgggattttgcttttctaaagtgttccccgtttctcctgatgcttctggtccagg

SEQ ID NO: 28607 - DNA, 80 bp, synthetic construct
  misc_feature 1..80: note = Artificially Synthesized Probe
  source 1..80: mol_type = other DNA
ctggacttagctcataactttcttgtgttgtttaagtcatttgccttagttcctatagcctgaaagttagattcaaagac

SEQ ID NO: 28608 - DNA, 80 bp, synthetic construct
  misc_feature 1..80: note = Artificially Synthesized Probe
  source 1..80: mol_type = other DNA
ttctcggtcccttctttttctttcaatgtgtctgttgaacaacccaggctgttggaagcttcgaggctcccatagtctgg

SEQ ID NO: 28609 - DNA, 80 bp, synthetic construct
  misc_feature 1..80: note = Artificially Synthesized Probe
  source 1..80: mol_type = other DNA
tggatttgctcttttaataaagaaaaattttgctttattttatttttcgagacaggttctcacttggacccccaggctgg

SEQ ID NO: 28610 - DNA, 80 bp, synthetic construct
  misc_feature 1..80: note = Artificially Synthesized Probe
  source 1..80: mol_type = other DNA
tggaatatttgcattatacttaccagttgtgcatcccaaattcaaaaatctgagagcagggtgaggtggctcacgcctat

SEQ ID NO: 28611 - DNA, 80 bp, synthetic construct
  misc_feature 1..80: note = Artificially Synthesized Probe
  source 1..80: mol_type = other DNA
gggttggagtgcagtggcaggatctcggctcactgcaatcgctgcctcccaggttcaagcgattcttttgcctcagcctc

SEQ ID NO: 28612 - DNA, 80 bp, synthetic construct
  misc_feature 1..80: note = Artificially Synthesized Probe
  source 1..80: mol_type = other DNA
cgagtgtggcttgcatggtttctaatgagacattggctgaacttgcctctgttcctttgcatactatatgtcatttttct

SEQ ID NO: 28613 - DNA, 80 bp, synthetic construct
  misc_feature 1..80: note = Artificially Synthesized Probe
  source 1..80: mol_type = other DNA
gtttgtttctagcgttttacgctgacgttcttgaaattcctcgtctgtagtacaacatttcagtcatctctgagtgtgct

SEQ ID NO: 28614 - DNA, 80 bp, synthetic construct
  misc_feature 1..80: note = Artificially Synthesized Probe
  source 1..80: mol_type = other DNA
taagacacattgctcagaagataactattttgagcctttgaattctgaagtgttctctctcatgtcacggacactgtggc

SEQ ID NO: 28615 - DNA, 80 bp, synthetic construct
  misc_feature 1..80: note = Artificially Synthesized Probe
  source 1..80: mol_type = other DNA
tttatggctaaaatggcatcattttacccctaggtactttgctaaatataccagcacacctctccaagcacaaaaggtta

SEQ ID NO: 28616 - DNA, 80 bp, synthetic construct
  misc_feature 1..80: note = Artificially Synthesized Probe
  source 1..80: mol_type = other DNA
tgacctcagtggggccaccccagtgcatctgtgtttttcccaccttgttaaaggattccttgttttatctcttttttccc

SEQ ID NO: 28617 - DNA, 80 bp, synthetic construct
  misc_feature 1..80: note = Artificially Synthesized Probe
  source 1..80: mol_type = other DNA
acttcttgttttcttattggctatcagagaactttccgtagcaaacctgtaaggctttgtctggtgtgctgcagagtgcc

SEQ ID NO: 28618 - DNA, 80 bp, synthetic construct
  misc_feature 1..80: note = Artificially Synthesized Probe
  source 1..80: mol_type = other DNA
cccactggacctgctcatgtgccgctgcctcctgcagtttgtgcagatgatgggcgtttccttctctgggctccctgttt

SEQ ID NO: 28619 - DNA, 80 bp, synthetic construct
  misc_feature 1..80: note = Artificially Synthesized Probe
  source 1..80: mol_type = other DNA
aggtgtctaaggcactggggctcgagagcagtggtgaggggcttgtgacgcactggagactccaggtggaggctgtactg

SEQ ID NO: 28620 - DNA, 80 bp, synthetic construct
  misc_feature 1..80: note = Artificially Synthesized Probe
  source 1..80: mol_type = other DNA
accgcccgatgtgggatgcggtgccagtttagtagtactttatttttctaaatattaaccccaattaaaacaaaaatttt

SEQ ID NO: 28621 - DNA, 80 bp, synthetic construct
  misc_feature 1..80: note = Artificially Synthesized Probe
  source 1..80: mol_type = other DNA
agccacttgccttcttccttagcagcagttccctgcctgagaataaaataacaaaagagaccctttcaaaacagcaacaa

SEQ ID NO: 28622 - DNA, 80 bp, synthetic construct
  misc_feature 1..80: note = Artificially Synthesized Probe
  source 1..80: mol_type = other DNA
tagtaagagcaacctctgacacctttgaagtcctaagtgaggaggcaggtcttggtgagctttgacaaacatttcctggt

SEQ ID NO: 28623 - DNA, 80 bp, synthetic construct
  misc_feature 1..80: note = Artificially Synthesized Probe
  source 1..80: mol_type = other DNA
gagggacagaggtccacaccatatcagttatcagcttagtcatcgagttaaggtttcagagcaaaagtgccagtgttccc

SEQ ID NO: 28624 - DNA, 80 bp, synthetic construct
  misc_feature 1..80: note = Artificially Synthesized Probe
  source 1..80: mol_type = other DNA
tctccgagttctctgatgagtgagaataggttgcccactggtgttgaggctttttatggtgttcatatccagttacgcaa

SEQ ID NO: 28625 - DNA, 80 bp, synthetic construct
  misc_feature 1..80: note = Artificially Synthesized Probe
  source 1..80: mol_type = other DNA
tgacggcatctcactgagatgtgtggtgatgacgccgagacgtgtggtgatgacgccgagacgtgtggtgatgacgccgg

SEQ ID NO: 28626 - DNA, 80 bp, synthetic construct
  misc_feature 1..80: note = Artificially Synthesized Probe
  source 1..80: mol_type = other DNA
ggccacacagaaacacagaaggaacctcagagttagagcagggtggtaaagggaagagcgtgccttgccgagttagttct

SEQ ID NO: 28627 - DNA, 80 bp, synthetic construct
  misc_feature 1..80: note = Artificially Synthesized Probe
  source 1..80: mol_type = other DNA
cctttgagaagagcatgccgccatttggctgtttcttgatttgctttctttggttttggttttggttcttcacactcatg

SEQ ID NO: 28628 - DNA, 80 bp, synthetic construct
  misc_feature 1..80: note = Artificially Synthesized Probe
  source 1..80: mol_type = other DNA
agtctgtcccccgtttccggagtcataactgatggtgttttgttactatttgcctggaatgatttttccctccttttatt

SEQ ID NO: 28629 - DNA, 80 bp, synthetic construct
  misc_feature 1..80: note = Artificially Synthesized Probe
  source 1..80: mol_type = other DNA
tgcgtcttttgaattggttttattttgattttgccatttctcttctctctgttagttacaaactttccagtttttgcccc

SEQ ID NO: 28630 - DNA, 80 bp, synthetic construct
  misc_feature 1..80: note = Artificially Synthesized Probe
  source 1..80: mol_type = other DNA
attaaaacccaaaaacatatggttgcatcatgcatacagaaaggtccttaaaatgtaaacatctggttaacaaatcatcc

SEQ ID NO: 28631 - DNA, 80 bp, synthetic construct
  misc_feature 1..80: note = Artificially Synthesized Probe
  source 1..80: mol_type = other DNA
gatttctattttttcttccccttagaatctaagcggttttcctgagattctccaggaagagagagagattggctttatct

SEQ ID NO: 28632 - DNA, 80 bp, synthetic construct
  misc_feature 1..80: note = Artificially Synthesized Probe
  source 1..80: mol_type = other DNA
tctgtcatctctcattaaaaaaaaatgttgtaaattcctttactgttatctcccccacgcccctaccaagaccacgtagg

SEQ ID NO: 28633 - DNA, 80 bp, synthetic construct
  misc_feature 1..80: note = Artificially Synthesized Probe
  source 1..80: mol_type = other DNA
caggtgtaaggaggttgcaggtttagggatcttgtaggtgaaaggaggttgcaggcgtacggaggttgcaggtgtaggga

SEQ ID NO: 28634 - DNA, 80 bp, synthetic construct
  misc_feature 1..80: note = Artificially Synthesized Probe
  source 1..80: mol_type = other DNA
cgttcggtgccaccctctccattgtgggcgcaccctctcttctttcaccaggatttttggggtctgggggagcagcctct

SEQ ID NO: 28635 - DNA, 80 bp, synthetic construct
  misc_feature 1..80: note = Artificially Synthesized Probe
  source 1..80: mol_type = other DNA
ccccttagccgttatgagttagcctcattttccatatagaccattctagggctgtttaaacattccttatttaattgtgt

SEQ ID NO: 28636 - DNA, 80 bp, synthetic construct
  misc_feature 1..80: note = Artificially Synthesized Probe
  source 1..80: mol_type = other DNA
tggtggatcccaaggtatgttcccctgtcagaatcaacgtcctagtgtgtgtgtagacgtttctcagaaagctgagcaag

SEQ ID NO: 28637 - DNA, 80 bp, synthetic construct
  misc_feature 1..80: note = Artificially Synthesized Probe
  source 1..80: mol_type = other DNA
gtgaaagaacagagttggagaactcacacttgctgatttcaaaacttactatatacggccacagtaatgaaaacagtgtg

SEQ ID NO: 28638 - DNA, 80 bp, synthetic construct
  misc_feature 1..80: note = Artificially Synthesized Probe
  source 1..80: mol_type = other DNA
aagcatgatcaaagaaatagacaaacttgattaaaattaaaaacgtttggccctgggaaatgatgtgcagccggaaagac

SEQ ID NO: 28639 - DNA, 80 bp, synthetic construct
  misc_feature 1..80: note = Artificially Synthesized Probe
  source 1..80: mol_type = other DNA
ggctgggggatggtattttgcctcatgattgtagagctttgttttgggtaatgaaaaagttttggaaatagtggtgattg

SEQ ID NO: 28640 - DNA, 80 bp, synthetic construct
  misc_feature 1..80: note = Artificially Synthesized Probe
  source 1..80: mol_type = other DNA
atcctacatccagtaaacgtacccttcagcgaatgatggtgaaatcaaacatgttcgggtaaaaaagcaaaaggcagata

SEQ ID NO: 28641 - DNA, 80 bp, synthetic construct
  misc_feature 1..80: note = Artificially Synthesized Probe
  source 1..80: mol_type = other DNA
ggataataactacccaaaggagggcagtgtgaaagtggaatcacactgttgtaaaggtattttattgtgggaggtggtac

SEQ ID NO: 28642 - DNA, 80 bp, synthetic construct
  misc_feature 1..80: note = Artificially Synthesized Probe
  source 1..80: mol_type = other DNA
tgggggaagattttgcaatgcatcggccaaagattaatatccaaaaatataaagaactacaaatgaggccaagtgcagtg

SEQ ID NO: 28643 - DNA, 80 bp, synthetic construct
  misc_feature 1..80: note = Artificially Synthesized Probe
  source 1..80: mol_type = other DNA
tgccagcagttaggagattgtcagctgcactattccagcgattaaagacacttgaaaattaaggcagacctttaacaacc

SEQ ID NO: 28644 - DNA, 80 bp, synthetic construct
  misc_feature 1..80: note = Artificially Synthesized Probe
  source 1..80: mol_type = other DNA
gtttccggagccgtggggtgggcctggcgctctttgtgttcccactttttgccatctattattttaagttctgtggtaca

SEQ ID NO: 28645 - DNA, 80 bp, synthetic construct
  misc_feature 1..80: note = Artificially Synthesized Probe
  source 1..80: mol_type = other DNA
gggtttgccatgcatgtgtgctgaaccgcggcgcctcacacacaggggccacctgcctcacgagtgaatgactggggaga

SEQ ID NO: 28646 - DNA, 80 bp, synthetic construct
  misc_feature 1..80: note = Artificially Synthesized Probe
  source 1..80: mol_type = other DNA
agaggctgagtcttctgccttcagagtaggaattggccatatgaccctcattttcagaaaagttgcctttttctggctta

SEQ ID NO: 28647 - DNA, 80 bp, synthetic construct
  misc_feature 1..80: note = Artificially Synthesized Probe
  source 1..80: mol_type = other DNA
gaccctggtgcgggtgccacagcacctctggctctccctttgtttttgtttttgtttcttttatggatggagtctcgctc

SEQ ID NO: 28648 - DNA, 80 bp, synthetic construct
  misc_feature 1..80: note = Artificially Synthesized Probe
  source 1..80: mol_type = other DNA
ttaagatgcttcagtgacaattagttttgtaaggcccatttgtttgctcagaaaatagagtttggagctgagataggagg

SEQ ID NO: 28649 - DNA, 80 bp, synthetic construct
  misc_feature 1..80: note = Artificially Synthesized Probe
  source 1..80: mol_type = other DNA
tcagagctgttagctctctgatgctggtggctgttcccccagaatggaagcattgattaaatttcaagtttgttatttat

SEQ ID NO: 28650 - DNA, 80 bp, synthetic construct
  misc_feature 1..80: note = Artificially Synthesized Probe
  source 1..80: mol_type = other DNA
gattgaggagcattgtaccacactttaaaaccagctcttgtgagaactcactcacatgagaacagcatgggagacccacc

SEQ ID NO: 28651 - DNA, 80 bp, synthetic construct
  misc_feature 1..80: note = Artificially Synthesized Probe
  source 1..80: mol_type = other DNA
tgcctagttcagtgccatttgttgagaaaaccattctttctacatagaattgactctgtaccattgccaaaagccagttg

SEQ ID NO: 28652 - DNA, 80 bp, synthetic construct
  misc_feature 1..80: note = Artificially Synthesized Probe
  source 1..80: mol_type = other DNA
ctgtcacccaggctggagtgcagtggtgcgatagctcactgcaacctccacctccctggttcaagcgattctcctgcctc

SEQ ID NO: 28653 - DNA, 80 bp, synthetic construct
  misc_feature 1..80: note = Artificially Synthesized Probe
  source 1..80: mol_type = other DNA
gcccctgtgcccagccctcttacagctctttaatgcctggaaagtccttattttgctttcatctttgaaagatattctta

SEQ ID NO: 28654 - DNA, 80 bp, synthetic construct
  misc_feature 1..80: note = Artificially Synthesized Probe
  source 1..80: mol_type = other DNA
ctcacccagcccaccaatggctttaatgaccttgtttgctaatccagcatctgtgtcaaagccgggctttttgattgact

SEQ ID NO: 28655 - DNA, 80 bp, synthetic construct
  misc_feature 1..80: note = Artificially Synthesized Probe
  source 1..80: mol_type = other DNA
ctggttcttttaggtgggaaggtaaacctgttctggtctgtatcaccccattgtttcaggagtgcggttgctcaccagtt

SEQ ID NO: 28656 - DNA, 80 bp, synthetic construct
  misc_feature 1..80: note = Artificially Synthesized Probe
  source 1..80: mol_type = other DNA
ccagcaatcctgcctctgaggatgcatccttgagaaataatgtagaaaatgaaaagcactaaaatatttgctggcattgt

SEQ ID NO: 28657 - DNA, 80 bp, synthetic construct
  misc_feature 1..80: note = Artificially Synthesized Probe
  source 1..80: mol_type = other DNA
cgtgggcgtgttcctcattccgtttatcgctgttttatccctggggcgatagagttagggatacttcattgttctgattt

SEQ ID NO: 28658 - DNA, 80 bp, synthetic construct
  misc_feature 1..80: note = Artificially Synthesized Probe
  source 1..80: mol_type = other DNA
atccacggagactcgccactgcacattgccgcccgggagaaccgctacgactgtgtcgtgtgagtgcagtgcttccccca

SEQ ID NO: 28659 - DNA, 80 bp, synthetic construct
  misc_feature 1..80: note = Artificially Synthesized Probe
  source 1..80: mol_type = other DNA
gtgccctcccacatgtggatctcacggtggctcagccaggttggtcatctggttgtgtgaagcccagctccacgtacgat

SEQ ID NO: 28660 - DNA, 80 bp, synthetic construct
  misc_feature 1..80: note = Artificially Synthesized Probe
  source 1..80: mol_type = other DNA
ggacagcgagccatgccccagcaactacaagtacgtctctcagaactgcgtgacgtcccccatgaacatcgacagaaata

SEQ ID NO: 28661 - DNA, 80 bp, synthetic construct
  misc_feature 1..80: note = Artificially Synthesized Probe
  source 1..80: mol_type = other DNA
gagaagcacttaccagaatcagggttaacagaactggaagacgtagttgtgactgggaggggaaatggaaggcctgtgcc

SEQ ID NO: 28662 - DNA, 80 bp, synthetic construct
  misc_feature 1..80: note = Artificially Synthesized Probe
  source 1..80: mol_type = other DNA
acgctcagaaagccaccaagctcatgtccgagtggtgtcttttcaggtggacagtgttgctgagggggcgcaggaaggaa

SEQ ID NO: 28663 - DNA, 80 bp, synthetic construct
  misc_feature 1..80: note = Artificially Synthesized Probe
  source 1..80: mol_type = other DNA
tggatgcacgcacatgtgtgtttgcagatagagccgacaagttacctgagccctttatcctctagaaatgtcacttgtgc

SEQ ID NO: 28664 - DNA, 80 bp, synthetic construct
  misc_feature 1..80: note = Artificially Synthesized Probe
  source 1..80: mol_type = other DNA
attagcacctctgcccctcacagtgcctagtggcccaggcccagctctgtccccatgttacagatggggacaccgagcca

SEQ ID NO: 28665 - DNA, 80 bp, synthetic construct
  misc_feature 1..80: note = Artificially Synthesized Probe
  source 1..80: mol_type = other DNA
tttcagactcagaagccgacgttcgagaggaagattcttacctctttgatctcgacaataaggtaatgtgttttgtgggg

SEQ ID NO: 28666 - DNA, 80 bp, synthetic construct
  misc_feature 1..80: note = Artificially Synthesized Probe
  source 1..80: mol_type = other DNA
ggggcgccatgtaccgagactgtagagaggccgactgaggggcgccgtgtaccgagaccgtagagaggccgattgagggg

SEQ ID NO: 28667 - DNA, 80 bp, synthetic construct
  misc_feature 1..80: note = Artificially Synthesized Probe
  source 1..80: mol_type = other DNA
ccaccttctaagaagtgactgttggtgaaatgacttgtgtttcatagaagagaagctgggctctggaaggtcacagtgta

SEQ ID NO: 28668 - DNA, 80 bp, synthetic construct
  misc_feature 1..80: note = Artificially Synthesized Probe
  source 1..80: mol_type = other DNA
ctgttcttggcctgggctgtgttaccttaattattttaattactgtagtttacatcttctcaccttagaggtttgttttg

SEQ ID NO: 28669 - DNA, 80 bp, synthetic construct
  misc_feature 1..80: note = Artificially Synthesized Probe
  source 1..80: mol_type = other DNA
tctgaagtcagcttaacaagttctacagaagctcctgtagggatttgattgggattgtattagacctgtcagtcaggtta

SEQ ID NO: 28670 - DNA, 80 bp, synthetic construct
  misc_feature 1..80: note = Artificially Synthesized Probe
  source 1..80: mol_type = other DNA
ttgctgtcctgatgcttgatgaagagcctcttttcatatgtgtgttgccatccttttacttcttttgtgaagtaattttt

SEQ ID NO: 28671 - DNA, 80 bp, synthetic construct
  misc_feature 1..80: note = Artificially Synthesized Probe
  source 1..80: mol_type = other DNA
ccggccaacgcctgggtaattttttttttttttgaaacggagtctggctctgtcacccaggctggagtgcagtgacacaa

SEQ ID NO: 28672 - DNA, 80 bp, synthetic construct
  misc_feature 1..80: note = Artificially Synthesized Probe
  source 1..80: mol_type = other DNA
ttataccagctgatggagatctacgtctggaccatgttttgttcctttgatctatttgctgatcctcaaacaatgacaca

SEQ ID NO: 28673 - DNA, 80 bp, synthetic construct
  misc_feature 1..80: note = Artificially Synthesized Probe
  source 1..80: mol_type = other DNA
cttgcttcctgcaatcctgccttttccacaatatcatgtaagtggaatcacatgccatctggcctttaccatttcctggc

SEQ ID NO: 28674 - DNA, 80 bp, synthetic construct
  misc_feature 1..80: note = Artificially Synthesized Probe
  source 1..80: mol_type = other DNA
tcttcttctttccctgtctcctcatgtttctggttagttttgtttgagtgccagacattgtattttcaaacctgcttgaa

SEQ ID NO: 28675 - DNA, 80 bp, synthetic construct
  misc_feature 1..80: note = Artificially Synthesized Probe
  source 1..80: mol_type = other DNA
cttgtcatgttggccggggggtccccgcctcctcccccacacgtctgtgctgtgccttcacacctgttccatggcatgga

SEQ ID NO: 28676 - DNA, 80 bp, synthetic construct
  misc_feature 1..80: note = Artificially Synthesized Probe
  source 1..80: mol_type = other DNA
atcagggaagtcccggtgacaaggggcatcagcaggggtcagaggggtgtgcccaggaggagcccctctgcattcttcag

SEQ ID NO: 28677 - DNA, 80 bp, synthetic construct
  misc_feature 1..80: note = Artificially Synthesized Probe
  source 1..80: mol_type = other DNA
cggcagcactttctccacacaggttcttctctgatgcctcttccctaattttaaaggcattcaggtctcttacttagtta

SEQ ID NO: 28678 - DNA, 80 bp, synthetic construct
  misc_feature 1..80: note = Artificially Synthesized Probe
  source 1..80: mol_type = other DNA
catttttacatgtgtgtttgatcagttatagccattcttatttaatggtcaaactgccccatctttggccatggggagcc

SEQ ID NO: 28679 - DNA, 80 bp, synthetic construct
  misc_feature 1..80: note = Artificially Synthesized Probe
  source 1..80: mol_type = other DNA
ttgtgtaaaatttttgcatgcttgggaagttcacacccagaaaagccttgcttctctccatgttctctgtattctgtttc

SEQ ID NO: 28680 - DNA, 80 bp, synthetic construct
  misc_feature 1..80: note = Artificially Synthesized Probe
  source 1..80: mol_type = other DNA
tgttggcccagtgtctggttcatctcaaggctggactcagttgagtgttctttcggacgtgttcgtttcctcagtgtttc

SEQ ID NO: 28681 - DNA, 80 bp, synthetic construct
  misc_feature 1..80: note = Artificially Synthesized Probe
  source 1..80: mol_type = other DNA
gccgtccttctctggactgttgtctttatctggttctggtcgggcagagatttgtgtcacagactttgacaccccaccca

SEQ ID NO: 28682 - DNA, 80 bp, synthetic construct
  misc_feature 1..80: note = Artificially Synthesized Probe
  source 1..80: mol_type = other DNA
ctccagagagaattgcttttaaaggggttgcgtggttaggtcaggcccacccacctcgtccccctctctatggtcaattc

SEQ ID NO: 28683 - DNA, 80 bp, synthetic construct
  misc_feature 1..80: note = Artificially Synthesized Probe
  source 1..80: mol_type = other DNA
tctgttccctccccaggtttgactatggagagcgcttctgggacatcaaaggcaagctcttcagctgccgctgcggctcc

SEQ ID NO: 28684 - DNA, 80 bp, synthetic construct
  misc_feature 1..80: note = Artificially Synthesized Probe
  source 1..80: mol_type = other DNA
tcaggagaccgaccccaccactaactttggagaaaatgtgggtttgctttttaaaggaatcctatatctagtcctatata

SEQ ID NO: 28685 - DNA, 80 bp, synthetic construct
  misc_feature 1..80: note = Artificially Synthesized Probe
  source 1..80: mol_type = other DNA
ctccacggtttaatacacagaattcacgcaggtgtttttgatgcttttccagcacagtcataactgccctgcactttgtg

SEQ ID NO: 28686 - DNA, 80 bp, synthetic construct
  misc_feature 1..80: note = Artificially Synthesized Probe
  source 1..80: mol_type = other DNA
cccctccctctttctcctctttggataaataaaaatggaaaacccatgcaggttggccctctggtcctgcagcagccaga

SEQ ID NO: 28687 - DNA, 80 bp, synthetic construct
  misc_feature 1..80: note = Artificially Synthesized Probe
  source 1..80: mol_type = other DNA
ctcgaggttgcacttgtttttgtgaaagtcacacctacttattaccaaaaactcaacgcacgagacctggaagaggaacg

SEQ ID NO: 28688 - DNA, 80 bp, synthetic construct
  misc_feature 1..80: note = Artificially Synthesized Probe
  source 1..80: mol_type = other DNA
gctccagtgcttgtcctagttctttgtttttaggtttcgctcttgaatccaggtggaatttatttggtgtatggtgtgaa

SEQ ID NO: 28689 - DNA, 80 bp, synthetic construct
  misc_feature 1..80: note = Artificially Synthesized Probe
  source 1..80: mol_type = other DNA
catttttgtgagtggagtgaggtagaggtcaagagagatttttttccctaggaaacccacttgctccagcctcatttctt

SEQ ID NO: 28690 - DNA, 80 bp, synthetic construct
  misc_feature 1..80: note = Artificially Synthesized Probe
  source 1..80: mol_type = other DNA
cagtcaactttatcgaggtatcatttagggattattgaaggcacctttcataagtgtttgatgcgtttggcaaatgtgta

SEQ ID NO: 28691 - DNA, 80 bp, synthetic construct
  misc_feature 1..80: note = Artificially Synthesized Probe
  source 1..80: mol_type = other DNA
ccaccgtccctccgtatcctccacgccaccgtccccctgtatcctccacgccaccgtccccctgtatcctccacgccacc

SEQ ID NO: 28692 - DNA, 80 bp, synthetic construct
  misc_feature 1..80: note = Artificially Synthesized Probe
  source 1..80: mol_type = other DNA
acggtgaaaccccgtctctactaaaaatacaaaaaaattagccaggcgtggtggtgggcgcctgtattcccagctactcg

SEQ ID NO: 28693 - DNA, 80 bp, synthetic construct
  misc_feature 1..80: note = Artificially Synthesized Probe
  source 1..80: mol_type = other DNA
gcctttttctctatcagacctttcccaaatcagccaacgtttaggctctttctcatcagaccccactaaatatatacagg

SEQ ID NO: 28694 - DNA, 80 bp, synthetic construct
  misc_feature 1..80: note = Artificially Synthesized Probe
  source 1..80: mol_type = other DNA
cgtgccctgtctgtgcgggcccccactggaggttgcattgtcccccaggattcctcctaagccgtgccctgtctgtgcgg

SEQ ID NO: 28695 - DNA, 80 bp, synthetic construct
  misc_feature 1..80: note = Artificially Synthesized Probe
  source 1..80: mol_type = other DNA
aggattcctcctaagccgtgccctgtctgtgcgcgcccccactggaggttgcattgtcccccaggattcctcctaagccg

SEQ ID NO: 28696 - DNA, 80 bp, synthetic construct
  misc_feature 1..80: note = Artificially Synthesized Probe
  source 1..80: mol_type = other DNA
aacaggctttaaggggatttaaggggattatcactcacctgctacagcataggcttctaaaacctataaactctccttac

SEQ ID NO: 28697 - DNA, 80 bp, synthetic construct
  misc_feature 1..80: note = Artificially Synthesized Probe
  source 1..80: mol_type = other DNA
cctttggaaacctggttttgccaccctaacaaaaccattatataaagtcacaaaaggaaacctagctgaccccatagatc

SEQ ID NO: 28698 - DNA, 80 bp, synthetic construct
  misc_feature 1..80: note = Artificially Synthesized Probe
  source 1..80: mol_type = other DNA
ccttcactgcaagggccaccaaaaggcatcagatcccatcgctcagggcaacgcttacactgataaggtagctaaagaag

SEQ ID NO: 28699 - DNA, 80 bp, synthetic construct
  misc_feature 1..80: note = Artificially Synthesized Probe
  source 1..80: mol_type = other DNA
ttctcaattcatacaaaaccacatccaggccatcaccaataattctatacagcaaatgctccttctaacaaccccacaat

SEQ ID NO: 28700 - DNA, 80 bp, synthetic construct
  misc_feature 1..80: note = Artificially Synthesized Probe
  source 1..80: mol_type = other DNA
tcgattagtgttagcatggtacgtctttctctataggtttagtttttaaattacctgtgtctttatatatttaaaatgga

SEQ ID NO: 28701 - DNA, 80 bp, synthetic construct
  misc_feature 1..80: note = Artificially Synthesized Probe
  source 1..80: mol_type = other DNA
tgtctcctctggctatgtttttctcttatcttttatcatgccttgtatctttttgttgaaagccccacatgaggtattgg

SEQ ID NO: 28702 - DNA, 80 bp, synthetic construct
  misc_feature 1..80: note = Artificially Synthesized Probe
  source 1..80: mol_type = other DNA
gcacctagcctgtagtgctgtttaaatacaatgtttctttgttgattttctgtctaattgatctgtccagagctgagagt

SEQ ID NO: 28703 - DNA, 80 bp, synthetic construct
  misc_feature 1..80: note = Artificially Synthesized Probe
  source 1..80: mol_type = other DNA
taactttgctgagtatagaattcttggctggcaggttttttttttttcttttagccctttgattatgtcatcccattctc

SEQ ID NO: 28704 - DNA, 80 bp, synthetic construct
  misc_feature 1..80: note = Artificially Synthesized Probe
  source 1..80: mol_type = other DNA
tttcttcttcttctttttcttctttttcttttttaatggagttttgcccttgttgtccaggctggagtgcaatggcatga

SEQ ID NO: 28705 - DNA, 80 bp, synthetic construct
  misc_feature 1..80: note = Artificially Synthesized Probe
  source 1..80: mol_type = other DNA
tgagatggaatttctccatgttgcctaggctggtcttgaacttctgtgctcagcctcctaagcagctgggtttacaggaa

SEQ ID NO: 28706 - DNA, 80 bp, synthetic construct
  misc_feature 1..80: note = Artificially Synthesized Probe
  source 1..80: mol_type = other DNA
catggcttttctagggatggaagtcactgggcaggctggattttaggccctagaggagcacatgcagggcacagcaggcc

SEQ ID NO: 28707 - DNA, 80 bp, synthetic construct
  misc_feature 1..80: note = Artificially Synthesized Probe
  source 1..80: mol_type = other DNA
tgatccaggtaagctgatctcaacagtgattctttgtacttgcctgtacttccagatttcatggtggcagtttgtcctgt

SEQ ID NO: 28708 - DNA, 80 bp, synthetic construct
  misc_feature 1..80: note = Artificially Synthesized Probe
  source 1..80: mol_type = other DNA
acctctgtgggtctagaattctaagttggctgattatttccccttttcagcacttgaaagatgtagttccactgcctttt

SEQ ID NO: 28709 - DNA, 80 bp, synthetic construct
  misc_feature 1..80: note = Artificially Synthesized Probe
  source 1..80: mol_type = other DNA
gacggagtcttgctctttcgcccaggccatggtgcagtggcactatctcggcttactgcaagctccgcctcctgggttca

SEQ ID NO: 28710 - DNA, 80 bp, synthetic construct
  misc_feature 1..80: note = Artificially Synthesized Probe
  source 1..80: mol_type = other DNA
ctgtcatctctgtcatacctggtttcatatatgtttactaatttatcttcatttatgtcatgtttctccacctctttgca

SEQ ID NO: 28711 - DNA, 80 bp, synthetic construct
  misc_feature 1..80: note = Artificially Synthesized Probe
  source 1..80: mol_type = other DNA
aaaacaaaaagacttgtttttctttcttcagggatcagtgtcatgtactttctgtttccaatatctgcaaacagttttat

SEQ ID NO: 28712 - DNA, 80 bp, synthetic construct
  misc_feature 1..80: note = Artificially Synthesized Probe
  source 1..80: mol_type = other DNA
ttacctaggatggagtgcagtgaagcaatcacagctcactgcagcctcaacctcctggtctcaagcaattcttcccattt

SEQ ID NO: 28713 - DNA, 80 bp, synthetic construct
  misc_feature 1..80: note = Artificially Synthesized Probe
  source 1..80: mol_type = other DNA
tacaaatatggactcctttacttctcataataaccctatatggtggggattaccctctccttaacagatgtggaaacaga

SEQ ID NO: 28714 - DNA, 80 bp, synthetic construct
  misc_feature 1..80: note = Artificially Synthesized Probe
  source 1..80: mol_type = other DNA
gatacggggtttcactatgttggccaggatggtttcgatttcctgacctcgtgtttttttgagatgaagttttgctcttg

SEQ ID NO: 28715 - DNA, 80 bp, synthetic construct
  misc_feature 1..80: note = Artificially Synthesized Probe
  source 1..80: mol_type = other DNA
caggcagggatgttgttaaacactgtacagtgcacaggacagccctccccaacagagttcctggaccgtacatgttaatg

SEQ ID NO: 28716 - DNA, 80 bp, synthetic construct
  misc_feature 1..80: note = Artificially Synthesized Probe
  source 1..80: mol_type = other DNA
gaatcctctcaatgttttgaaattgcaacttagtttcagtcgtctacaaaacctttgctcccccgtagcagcaccccctt

SEQ ID NO: 28717 - DNA, 80 bp, synthetic construct
  misc_feature 1..80: note = Artificially Synthesized Probe
  source 1..80: mol_type = other DNA
cttcctctaccagctgtcagagaacttgagggtttctgcttcactgtgagctggctaccacttttttcaaggcttttaag

SEQ ID NO: 28718 - DNA, 80 bp, synthetic construct
  misc_feature 1..80: note = Artificially Synthesized Probe
  source 1..80: mol_type = other DNA
cacttatgttagtccaggtcttccaagatgcagatgggataaaggtataaggatttggttagattttattagatgatgaa

SEQ ID NO: 28719 - DNA, 80 bp, synthetic construct
  misc_feature 1..80: note = Artificially Synthesized Probe
  source 1..80: mol_type = other DNA
aggccattggtcatgacattcccatagttggaggcctatgaagcacactttcaaggaaactgcaactgtttaaaataaca

SEQ ID NO: 28720 - DNA, 80 bp, synthetic construct
  misc_feature 1..80: note = Artificially Synthesized Probe
  source 1..80: mol_type = other DNA
taagactagaggggaactttgtgacctgatgaacggtatcttttgaacaaaaaaaaaaagaacaggcctggcgcagtggc

SEQ ID NO: 28721 - DNA, 80 bp, synthetic construct
  misc_feature 1..80: note = Artificially Synthesized Probe
  source 1..80: mol_type = other DNA
gatttgggcattcgtaatgctgtccacctcgggtttgaaaggaatgaagagagctaaatgtagaaacagcgcttgagaga

SEQ ID NO: 28722 - DNA, 80 bp, synthetic construct
  misc_feature 1..80: note = Artificially Synthesized Probe
  source 1..80: mol_type = other DNA
gtcttttgttgctggaaagctgctcaaatcaaagaacatttactgtaaggccctgcaacttttctttccatgtttcgcca

SEQ ID NO: 28723 - DNA, 80 bp, synthetic construct
  misc_feature 1..80: note = Artificially Synthesized Probe
  source 1..80: mol_type = other DNA
cctgagactgcttttttgcagttctgtccctcctgtcctttataggttgagacggaagctagaaaaaaatgtttctgtga

SEQ ID NO: 28724 - DNA, 80 bp, synthetic construct
  misc_feature 1..80: note = Artificially Synthesized Probe
  source 1..80: mol_type = other DNA
ctgcagcctcagcctcccaggttcaagggaacctcctgcctcagcctcctgagtagatggaaccacaggcatgcactacc

SEQ ID NO: 28725 - DNA, 80 bp, synthetic construct
  misc_feature 1..80: note = Artificially Synthesized Probe
  source 1..80: mol_type = other DNA
atgttcagctgtcatagggtttgctaggtctctgggggattatctgtgctcctagagaatagtacttaatcctggccaag

SEQ ID NO: 28726 - DNA, 80 bp, synthetic construct
  misc_feature 1..80: note = Artificially Synthesized Probe
  source 1..80: mol_type = other DNA
cttgcttaggtgacctccctttccttctcattcagatcctagggaaccagatccacatgcacgtaacagctaaggaatat

SEQ ID NO: 28727 - DNA, 80 bp, synthetic construct
  misc_feature 1..80: note = Artificially Synthesized Probe
  source 1..80: mol_type = other DNA
gagcccaggagttcaagaccagcctgggcaacatagcgacaccccttctccacaaatgatacaaaaattagctgggcatg

SEQ ID NO: 28728 - DNA, 80 bp, synthetic construct
  misc_feature 1..80: note = Artificially Synthesized Probe
  source 1..80: mol_type = other DNA
gaggaagatgaagatgatggcgagttcagtgatgattctggggctgaccaagaaaaggacaaagtgaagatgaaaggtgt

SEQ ID NO: 28729 - DNA, 80 bp, synthetic construct
  misc_feature 1..80: note = Artificially Synthesized Probe
  source 1..80: mol_type = other DNA
tcccaaatggaaagaccagtagtatttggagcaaggagagcattattaagttctagcctcagcatagactttctccttcc

SEQ ID NO: 28730 - DNA, 80 bp, synthetic construct
  misc_feature 1..80: note = Artificially Synthesized Probe
  source 1..80: mol_type = other DNA
ttcttcctagagcatgaagctcttggtatttccatggccaaggtgaatatgacctcaagccccattcttctgcacttgct

SEQ ID NO: 28731 - DNA, 80 bp, synthetic construct
  misc_feature 1..80: note = Artificially Synthesized Probe
  source 1..80: mol_type = other DNA
ttggtttgtctccatccctgactaatcagccagtgaagtatgtgaccagaatcacatgatagcctttccttaacacctgg

SEQ ID NO: 28732 - DNA, 80 bp, synthetic construct
  misc_feature 1..80: note = Artificially Synthesized Probe
  source 1..80: mol_type = other DNA
gtaactgacagagccaggtgtgatattggactcttgacctggagcttgttactttgctgtattgctttaaccttaaccaa

SEQ ID NO: 28733 - DNA, 80 bp, synthetic construct
  misc_feature 1..80: note = Artificially Synthesized Probe
  source 1..80: mol_type = other DNA
acttaacatagaaacaactcaattcagcaaccaagttttacaaccactgttgctaccaatcaaatggtgatgcatcagat

SEQ ID NO: 28734 - DNA, 80 bp, synthetic construct
  misc_feature 1..80: note = Artificially Synthesized Probe
  source 1..80: mol_type = other DNA
aaatctagcagccatcagcaagagtacagcaaagacaatgctgtaaaaagaaacaaagaaaattgctagaaaactgtatg

SEQ ID NO: 28735 - DNA, 80 bp, synthetic construct
  misc_feature 1..80: note = Artificially Synthesized Probe
  source 1..80: mol_type = other DNA
ctgcacaaacaaaaactaaacactttgagggagattaaacacttcgagggagtgaatgaaacacttcgagggagaatgta

SEQ ID NO: 28736 - DNA, 80 bp, synthetic construct
  misc_feature 1..80: note = Artificially Synthesized Probe
  source 1..80: mol_type = other DNA
aatgcattcctttcaattatacttaattattaaaaatgtcaaaaagcaagaccattgagtcatgcaaattggaaggttaa

SEQ ID NO: 28737 - DNA, 80 bp, synthetic construct
  misc_feature 1..80: note = Artificially Synthesized Probe
  source 1..80: mol_type = other DNA
aaaggctgaggtggcttgatcaagtccaggagttcatgaccagtctgggcaacatggcaaaacctcttctctacaaaaaa

SEQ ID NO: 28738 - DNA, 80 bp, synthetic construct
  misc_feature 1..80: note = Artificially Synthesized Probe
  source 1..80: mol_type = other DNA
gcgcaccaattgagccgttcaaaattataaaagtgttcacgaaaacaatacaaggaaaacaggatctacaaactgaagta

SEQ ID NO: 28739 - DNA, 80 bp, synthetic construct
  misc_feature 1..80: note = Artificially Synthesized Probe
  source 1..80: mol_type = other DNA
agtttaagtgaaatgcctgcctcagcctcctgaagtgttgagatcacaggtgtgagcccagccctaacagatttcttaat

SEQ ID NO: 28740 - DNA, 80 bp, synthetic construct
  misc_feature 1..80: note = Artificially Synthesized Probe
  source 1..80: mol_type = other DNA
gctacttaagaggctgaagtgggaggatcacttgaacccagagggtgaggctgaaatgagccatataaataaatatccgc

SEQ ID NO: 28741 - DNA, 80 bp, synthetic construct
  misc_feature 1..80: note = Artificially Synthesized Probe
  source 1..80: mol_type = other DNA
ttctacagctagaaaatacatgcaaaaactatgcaatttcagttaatgaatgtcccgtccctctaccaactgacaaagcc

SEQ ID NO: 28742 - DNA, 80 bp, synthetic construct
  misc_feature 1..80: note = Artificially Synthesized Probe
  source 1..80: mol_type = other DNA
tgaacttcctgaccatcaggattgcatgactgaaacagtcattatccttgaaggtatccaagagtagaatagatcaacgg

SEQ ID NO: 28743 - DNA, 80 bp, synthetic construct
  misc_feature 1..80: note = Artificially Synthesized Probe
  source 1..80: mol_type = other DNA
aatggtaactcccaactacatcatcaatgacagcctccactaggcaacaaaaaaagacgggatactaagtgactataaaa

SEQ ID NO: 28744 - DNA, 80 bp, synthetic construct
  misc_feature 1..80: note = Artificially Synthesized Probe
  source 1..80: mol_type = other DNA
tgtcaatgcttttaataaaaaataaatactctcaaagtttactctcaaatgaatgttctcaaatactctcaaagtttatg

SEQ ID NO: 28745 - DNA, 80 bp, synthetic construct
  misc_feature 1..80: note = Artificially Synthesized Probe
  source 1..80: mol_type = other DNA
aactagctgtcaaaagttctaagggcaataatggattcttgagctaaggatatctcaggacaagaaacaataattggggc

SEQ ID NO: 28746 - DNA, 80 bp, synthetic construct
  misc_feature 1..80: note = Artificially Synthesized Probe
  source 1..80: mol_type = other DNA
ctacagtgtgctaagtgctctgacagagataagcaagcacagttatttaagaaaaacacagcagagctgggcgcggtggt

SEQ ID NO: 28747 - DNA, 80 bp, synthetic construct
  misc_feature 1..80: note = Artificially Synthesized Probe
  source 1..80: mol_type = other DNA
ctgatatttctcagaggaacaaattagccaagaagaaatgagagtgccaggagtggggaaactattaaatgtgattctat

SEQ ID NO: 28748 - DNA, 80 bp, synthetic construct
  misc_feature 1..80: note = Artificially Synthesized Probe
  source 1..80: mol_type = other DNA
aataaggcttgaaagtcaaaattcctctttgctgctccatacgctgcagaaagtacactgtgttaagaggcatgaaaaca

SEQ ID NO: 28749 - DNA, 80 bp, synthetic construct
  misc_feature 1..80: note = Artificially Synthesized Probe
  source 1..80: mol_type = other DNA
ttaaagtgagagacatgcaactcttcctttcactataacatgtagaggccactgtagggctattaattggcttaatttca

SEQ ID NO: 28750 - DNA, 80 bp, synthetic construct
  misc_feature 1..80: note = Artificially Synthesized Probe
  source 1..80: mol_type = other DNA
aggagctcaagactagcctggacaacaaagtgagacctcatctctactagacatttaaaaaattagccaggcatgggctg

SEQ ID NO: 28751 - DNA, 80 bp, synthetic construct
  misc_feature 1..80: note = Artificially Synthesized Probe
  source 1..80: mol_type = other DNA
tgagtctacgagttcaaggccagcctgggaaatagcaaaactccaactctacaaaaaatactaaaatggtggtggtgcat

SEQ ID NO: 28752 - DNA, 80 bp, synthetic construct
  misc_feature 1..80: note = Artificially Synthesized Probe
  source 1..80: mol_type = other DNA
ggtgcctgcaatcccagctacttgggaggcagacgcatgagaatgaacccaggaggcggaggttgcagtgagccaagatc

SEQ ID NO: 28753 - DNA, 80 bp, synthetic construct
  misc_feature 1..80: note = Artificially Synthesized Probe
  source 1..80: mol_type = other DNA
ttttcattacaaaatgtcacttaggttaacatgtgatagattttctaaacgaataattttacatttctcaagtttttcag

SEQ ID NO: 28754 - DNA, 80 bp, synthetic construct
  misc_feature 1..80: note = Artificially Synthesized Probe
  source 1..80: mol_type = other DNA
tactgaaattgttttcccaaatcagactgggaccaatctgattggcaacaacttaaaagactaatcacatgagttagcaa

SEQ ID NO: 28755 - DNA, 80 bp, synthetic construct
  misc_feature 1..80: note = Artificially Synthesized Probe
  source 1..80: mol_type = other DNA
cctttatagactgtttgacctctgatgtcccactagctgagaatctccattgtctaaaaaactgatttgttcctcactgg

SEQ ID NO: 28756 - DNA, 80 bp, synthetic construct
  misc_feature 1..80: note = Artificially Synthesized Probe
  source 1..80: mol_type = other DNA
gtgttcaatccaatggatattttgacatcttgcttcatttgacctttttagcacatgtgctgtaaaccaccctatcttag

SEQ ID NO: 28757 - DNA, 80 bp, synthetic construct
  misc_feature 1..80: note = Artificially Synthesized Probe
  source 1..80: mol_type = other DNA
tcctgattagattccgttttctcctcttctgtagtcgggggattaggagtaggggtggtttcctagtggaaaataatata

SEQ ID NO: 28758 - DNA, 80 bp, synthetic construct
  misc_feature 1..80: note = Artificially Synthesized Probe
  source 1..80: mol_type = other DNA
aaaagctttgtaaagtgatcaagccaatgatgcgcaggtcttaccttcatggcatactgtttaccctatcgtaacctaaa

SEQ ID NO: 28759 - DNA, 80 bp, synthetic construct
  misc_feature 1..80: note = Artificially Synthesized Probe
  source 1..80: mol_type = other DNA
taaactggcactttcagagcgtaactctggttggcctaacagagaagaacagctaagccaaaacttgcaactgcccagta

SEQ ID NO: 28760 - DNA, 80 bp, synthetic construct
  misc_feature 1..80: note = Artificially Synthesized Probe
  source 1..80: mol_type = other DNA
tgtacttttccaacaacttaaaaaaggagctacacatttttaaatatgtgtgtatgtatgaatcagtaagtatactaatt

SEQ ID NO: 28761 - DNA, 80 bp, synthetic construct
  misc_feature 1..80: note = Artificially Synthesized Probe
  source 1..80: mol_type = other DNA
aactgtcatagcaacaagagaaagttgaaagcgaagaaaaaaagcaagcaagggtgagaaaagtctaacaactggctgca

SEQ ID NO: 28762 - DNA, 80 bp, synthetic construct
  misc_feature 1..80: note = Artificially Synthesized Probe
  source 1..80: mol_type = other DNA
aatgaaatgaaactttaaaaacaaacacaaaccagattgtcatcagaatatgagatgcactgcttctgatcacaccctct

SEQ ID NO: 28763 - DNA, 80 bp, synthetic construct
  misc_feature 1..80: note = Artificially Synthesized Probe
  source 1..80: mol_type = other DNA
aaaatgggtagctcaacaagacagcctggatccacctctaaccccaacttgatgagtcctttaagtcttaagatgagtat

SEQ ID NO: 28764 - DNA, 80 bp, synthetic construct
  misc_feature 1..80: note = Artificially Synthesized Probe
  source 1..80: mol_type = other DNA
ctccactcttcagacaaatctgaagtcctggaaaagtaaacatgtcatttaaatccaggactaccagggtttacggctaa

SEQ ID NO: 28765 - DNA, 80 bp, synthetic construct
  misc_feature 1..80: note = Artificially Synthesized Probe
  source 1..80: mol_type = other DNA
ggattctcgcagactttctgcctgctttttaatggcatcattttcaccatcttcagctctcattttttttctttccttct

SEQ ID NO: 28766 - DNA, 80 bp, synthetic construct
  misc_feature 1..80: note = Artificially Synthesized Probe
  source 1..80: mol_type = other DNA
taactcatgagtgaatagagctgattaagtttgttgggctatagctaaatatttacatttctggatactcagcaagctat

SEQ ID NO: 28767 - DNA, 80 bp, synthetic construct
  misc_feature 1..80: note = Artificially Synthesized Probe
  source 1..80: mol_type = other DNA
tggtggcacatacgcctgtaatcccagctactcgggaagctgaggcaggagaatcgcttgaacccgggaggcagaggttg

SEQ ID NO: 28768 - DNA, 80 bp, synthetic construct
  misc_feature 1..80: note = Artificially Synthesized Probe
  source 1..80: mol_type = other DNA
aaactccgtctcgaaaaaaaaaaagaagaaaaagaaaaagaaaaatttacatacggccaggcacggtggctcatgcctgt

SEQ ID NO: 28769 - DNA, 80 bp, synthetic construct
  misc_feature 1..80: note = Artificially Synthesized Probe
  source 1..80: mol_type = other DNA
ctgaatagctgggactacaggcatgagccaccatgcccagctaatttttagagacaggtctcactatattgctcagcctg

SEQ ID NO: 28770 - DNA, 80 bp, synthetic construct
  misc_feature 1..80: note = Artificially Synthesized Probe
  source 1..80: mol_type = other DNA
agacaaaaagatcagtggttggtggggagggtataaacaagcagaacagaggatttttagggcttagtaaaattattctg

SEQ ID NO: 28771 - DNA, 80 bp, synthetic construct
  misc_feature 1..80: note = Artificially Synthesized Probe
  source 1..80: mol_type = other DNA
tgtattccaataatctgcccatcccctcatgggccaacagccaatatcatatttttgtaaattactttttttttttttga

SEQ ID NO: 28772 - DNA, 80 bp, synthetic construct
  misc_feature 1..80: note = Artificially Synthesized Probe
  source 1..80: mol_type = other DNA
aaagagaaaaaagaggagaattaccaataaacctatgagaagtgatggacatgagtggccatattaaaaatgcccaatga

SEQ ID NO: 28773 - DNA, 80 bp, synthetic construct
  misc_feature 1..80: note = Artificially Synthesized Probe
  source 1..80: mol_type = other DNA
agcccagacttttatctctacttaattctgcttgaccatgtgttcatgaagttcctcttctctcctttatgccctgctaa

SEQ ID NO: 28774 - DNA, 80 bp, synthetic construct
  misc_feature 1..80: note = Artificially Synthesized Probe
  source 1..80: mol_type = other DNA
ctgggcaacagtgagaccctgtctcaaaaaaatttttttttgccaggtgtggtggctcacgcctgtaatcccagcacttt

SEQ ID NO: 28775 - DNA, 80 bp, synthetic construct
  misc_feature 1..80: note = Artificially Synthesized Probe
  source 1..80: mol_type = other DNA
ggatagggatcagcttcaggagactgtgtacttttgcataaaacttgagttttgaacactgtaaagtactgtctatttac

SEQ ID NO: 28776 - DNA, 80 bp, synthetic construct
  misc_feature 1..80: note = Artificially Synthesized Probe
  source 1..80: mol_type = other DNA
ggaatgaggtggttggggaagataggcaggagataggttttccacattagacagaacttagcctgtgccagataatgtcc

SEQ ID NO: 28777 - DNA, 80 bp, synthetic construct
  misc_feature 1..80: note = Artificially Synthesized Probe
  source 1..80: mol_type = other DNA
gcggcaccaaaactttgtatgtaacacttaaggaactatgtgaccgtggtagaaagttaaaaatcacttgaaatatgaat

SEQ ID NO: 28778 - DNA, 80 bp, synthetic construct
  misc_feature 1..80: note = Artificially Synthesized Probe
  source 1..80: mol_type = other DNA
ttatagctgtagcaaaacacatagtaagcttatcaaaacacatctccccttctgaagtcacccaagcaaagcacattaca

SEQ ID NO: 28779 - DNA, 80 bp, synthetic construct
  misc_feature 1..80: note = Artificially Synthesized Probe
  source 1..80: mol_type = other DNA
caaacaaggtatgtttataaggtttttttagttagttgcttacaactataaatccatatccttaattccatatccctata

SEQ ID NO: 28780 - DNA, 80 bp, synthetic construct
  misc_feature 1..80: note = Artificially Synthesized Probe
  source 1..80: mol_type = other DNA
aagcccagcccctttctttttctggagacatgattagggacttttgaaggaacactagtgatttttatggtagggatagg

SEQ ID NO: 28781 - DNA, 80 bp, synthetic construct
  misc_feature 1..80: note = Artificially Synthesized Probe
  source 1..80: mol_type = other DNA
ttatccctctgcaacttctgtgtataaactgtgtgtctacattgaatttctctaagtctaataatcatgctcattaactc

SEQ ID NO: 28782 - DNA, 80 bp, synthetic construct
  misc_feature 1..80: note = Artificially Synthesized Probe
  source 1..80: mol_type = other DNA
tgacccagccacaattcaaatgccgatagaataacatcagagtaccgtttgccctaacgttcaaatttttgccaaattat

SEQ ID NO: 28783 - DNA, 80 bp, synthetic construct
  misc_feature 1..80: note = Artificially Synthesized Probe
  source 1..80: mol_type = other DNA
ttttaggttcccctactccccaaatttaaacataacatccaaatctcccaaagtctgtaccagaacaaatactgtatcac

SEQ ID NO: 28784 - DNA, 80 bp, synthetic construct
  misc_feature 1..80: note = Artificially Synthesized Probe
  source 1..80: mol_type = other DNA
aaacaagtaagcaagcagagaagctgccttgaattttgacaaggtaaggatagtttacaccaacgcaatgaaaaataagc

SEQ ID NO: 28785 - DNA, 80 bp, synthetic construct
  misc_feature 1..80: note = Artificially Synthesized Probe
  source 1..80: mol_type = other DNA
atttccaataaactgcgtctcagaaatcttccaggagataaagactcggaagaacagagggattgagacccattcgcatt

SEQ ID NO: 28786 - DNA, 80 bp, synthetic construct
  misc_feature 1..80: note = Artificially Synthesized Probe
  source 1..80: mol_type = other DNA
aaggaagacggagcgcggggacccgtgggggtgggggccaaaggcaatactcaccggttcgacagtcgccatcttagatc

SEQ ID NO: 28787 - DNA, 80 bp, synthetic construct
  misc_feature 1..80: note = Artificially Synthesized Probe
  source 1..80: mol_type = other DNA
aaacacagcaacgctcggttaaatctgaatttcgggtaagtatatcctgggcctcatttggaagagacttagattaaaaa

SEQ ID NO: 28788 - DNA, 80 bp, synthetic construct
  misc_feature 1..80: note = Artificially Synthesized Probe
  source 1..80: mol_type = other DNA
taaaaaacccacattgattatctgacatttgaatgcgattgtgcatcctgaattttgtctggaggccccacccgagccaa

SEQ ID NO: 28789 - DNA, 80 bp, synthetic construct
  misc_feature 1..80: note = Artificially Synthesized Probe
  source 1..80: mol_type = other DNA
gggtggtcctgggagcccataacctctcgcggcgggagcccacccggcaggtgttcgccgtgcagcgcatcttcgaaaac

SEQ ID NO: 28790 - DNA, 80 bp, synthetic construct
  misc_feature 1..80: note = Artificially Synthesized Probe
  source 1..80: mol_type = other DNA
ccttgtcactaagttttctcatagctctcacccagtgcagtggcgcgatcgcagctcactacagcctccatctcctgggc

SEQ ID NO: 28791 - DNA, 80 bp, synthetic construct
  misc_feature 1..80: note = Artificially Synthesized Probe
  source 1..80: mol_type = other DNA
tatcctgccctgcaggatcccagaaccacagtggaacctgagatggggaaactgaggcccggagaggggagggtcatcat

SEQ ID NO: 28792 - DNA, 80 bp, synthetic construct
  misc_feature 1..80: note = Artificially Synthesized Probe
  source 1..80: mol_type = other DNA
cactgagaagggctgcccgggtcacctcagctgcccacacccacactctccagcatctggcacaataaacattctctgtt

SEQ ID NO: 28793 - DNA, 80 bp, synthetic construct
  misc_feature 1..80: note = Artificially Synthesized Probe
  source 1..80: mol_type = other DNA
gggcagggagtgagccagaagaaggaaggaaggagaaagcaggaggaattagcaagctgcaaatttagcaaattaaggag

SEQ ID NO: 28794 - DNA, 80 bp, synthetic construct
  misc_feature 1..80: note = Artificially Synthesized Probe
  source 1..80: mol_type = other DNA
caagaaggggaaagtcccacttcgggccctttgggtttcttcgcagtcagatgtgcgctcacagccacctggggagggcg

SEQ ID NO: 28795 - DNA, 80 bp, synthetic construct
  misc_feature 1..80: note = Artificially Synthesized Probe
  source 1..80: mol_type = other DNA
ctcttccaggccccctccccagccttgcagggctcaggttacccctggcctttcctaaaggtcactcattcctcttgacg

SEQ ID NO: 28796 - DNA, 80 bp, synthetic construct
  misc_feature 1..80: note = Artificially Synthesized Probe
  source 1..80: mol_type = other DNA
tttggtctgtgacctttttgtagggtatttttagctccagcacctgccttcttggagtggggaagaatcttaaagggcaa

SEQ ID NO: 28797 - DNA, 80 bp, synthetic construct
  misc_feature 1..80: note = Artificially Synthesized Probe
  source 1..80: mol_type = other DNA
cagctaattttttttttttttttttgagatggagtctcactctgtcgcccaggctggagtgcagtggcgcgatctaggct

SEQ ID NO: 28798 - DNA, 80 bp, synthetic construct
  misc_feature 1..80: note = Artificially Synthesized Probe
  source 1..80: mol_type = other DNA
gatcaagaaaaagttgacaaatttatgattgagctagatgggaccgagaataagtgtgagtgaagggctagcggtgggga

SEQ ID NO: 28799 - DNA, 80 bp, synthetic construct
  misc_feature 1..80: note = Artificially Synthesized Probe
  source 1..80: mol_type = other DNA
taataatgttaccatttcttgttacttactaggaggattgcataagagcatggtctctagagatagattgctgggtttga

SEQ ID NO: 28800 - DNA, 80 bp, synthetic construct
  misc_feature 1..80: note = Artificially Synthesized Probe
  source 1..80: mol_type = other DNA
cggctggttacccagacaaggtggtgatcggcatggatgtggcagcatctgagttctatcgcaatgggaagtacgatctt

SEQ ID NO: 28801 - DNA, 80 bp, synthetic construct
  misc_feature 1..80: note = Artificially Synthesized Probe
  source 1..80: mol_type = other DNA
ttccgctgttctcagcagcatctcaagagcccgaaatcaagataagtcttttcctctcctacttcccaaagaacttagtc

SEQ ID NO: 28802 - DNA, 80 bp, synthetic construct
  misc_feature 1..80: note = Artificially Synthesized Probe
  source 1..80: mol_type = other DNA
aggccaagtgagaagctggaggctccaggactccactggacagacccaggtcttccagacctgcttcctgaaataaacac

SEQ ID NO: 28803 - DNA, 80 bp, synthetic construct
  misc_feature 1..80: note = Artificially Synthesized Probe
  source 1..80: mol_type = other DNA
ctccgtggggcttgtggttactagtgtgtaccgggagaagcaaagcactgatcctgtagtcctggaagtgggtgggacgt

SEQ ID NO: 28804 - DNA, 80 bp, synthetic construct
  misc_feature 1..80: note = Artificially Synthesized Probe
  source 1..80: mol_type = other DNA
ccccaaggccaataggaagggagcgcctttctcaggagctggggcttaggtcacatttcaccatggttctgcctgggtgc

SEQ ID NO: 28805 - DNA, 80 bp, synthetic construct
  misc_feature 1..80: note = Artificially Synthesized Probe
  source 1..80: mol_type = other DNA
cagcccctttctcagcagacacacacaatggggtgtgcactgatgacacattcagcagttctgggcccagacctctggcc

SEQ ID NO: 28806 - DNA, 80 bp, synthetic construct
  misc_feature 1..80: note = Artificially Synthesized Probe
  source 1..80: mol_type = other DNA
tgaaattttcccctcctggaaaaccccttctggggctgcccccagagccctgcaagcaggtgctcccagcatcctcagct

SEQ ID NO: 28807 - DNA, 80 bp, synthetic construct
  misc_feature 1..80: note = Artificially Synthesized Probe
  source 1..80: mol_type = other DNA
tgggacatgtccccaccctcacggcggtgattctgatgcacctgtcccaccccctcacttcaagcagaggagaaggacag

SEQ ID NO: 28808 - DNA, 80 bp, synthetic construct
  misc_feature 1..80: note = Artificially Synthesized Probe
  source 1..80: mol_type = other DNA
tggcccagcttcatgctcttgtgagcctctggggcctgctgtgaatcgttgtgaattattcacaaggctcagctctctcg

SEQ ID NO: 28809 - DNA, 80 bp, synthetic construct
  misc_feature 1..80: note = Artificially Synthesized Probe
  source 1..80: mol_type = other DNA
agcttccaggctggggagtgaggaggctccaggctcttcccctgggctcgtgggtgctgccagtcacagcaagctggaaa

SEQ ID NO: 28810 - DNA, 80 bp, synthetic construct
  misc_feature 1..80: note = Artificially Synthesized Probe
  source 1..80: mol_type = other DNA
ttcaagtccaccggagacttccccttttcccttcctttgtgcaaggcttcatggagcctggctgctcccacggcccaggg

SEQ ID NO: 28811 - DNA, 80 bp, synthetic construct
  misc_feature 1..80: note = Artificially Synthesized Probe
  source 1..80: mol_type = other DNA
ggtgaaaccccatctctactaaaaaatacaaaaattagccgggcatggtggtgggtgtctgtaatcccagctacttagga

SEQ ID NO: 28812 - DNA, 80 bp, synthetic construct
  misc_feature 1..80: note = Artificially Synthesized Probe
  source 1..80: mol_type = other DNA
tgcctggctttgcgttctgtgtgcatcctgcgtgacaaccaaaagctaacccctaggagaaacccctgagacacattcca

SEQ ID NO: 28813 - DNA, 80 bp, synthetic construct
  misc_feature 1..80: note = Artificially Synthesized Probe
  source 1..80: mol_type = other DNA
ccaccataggctcggtgaatttcaattcaaagcagtcacaggccgcagctggactgatcctcggatggagagcctcttcc

SEQ ID NO: 28814 - DNA, 80 bp, synthetic construct
  misc_feature 1..80: note = Artificially Synthesized Probe
  source 1..80: mol_type = other DNA
gaggcagagggacagaccaaccaagagcagaaggggtgtagacgtggcacatttggagtcagaagcaggctctgcatgag

SEQ ID NO: 28815 - DNA, 80 bp, synthetic construct
  misc_feature 1..80: note = Artificially Synthesized Probe
  source 1..80: mol_type = other DNA
ccaggtgtgtgatgagaatttcattttggtccttatgctcatccatatctttgtaatactccccagtgactgtgagagtg

SEQ ID NO: 28816 - DNA, 80 bp, synthetic construct
  misc_feature 1..80: note = Artificially Synthesized Probe
  source 1..80: mol_type = other DNA
cccgcaccatcgtgaagtgccgggctcagcatcagccccagcaaatggcagccctgtgtctagggagtggggagggagga

SEQ ID NO: 28817 - DNA, 80 bp, synthetic construct
  misc_feature 1..80: note = Artificially Synthesized Probe
  source 1..80: mol_type = other DNA
taagggacagtgacagccgaaagctaggccctaggagaagcccctgagacacattccagctcttcagtccctgcatgccc

SEQ ID NO: 28818 - DNA, 80 bp, synthetic construct
  misc_feature 1..80: note = Artificially Synthesized Probe
  source 1..80: mol_type = other DNA
gtcttctgggggaggcaaaggtcaaaatcagttatggtcaaccaagcatgacaggtcatgctcaagtggccctgggcagt

SEQ ID NO: 28819 - DNA, 80 bp, synthetic construct
  misc_feature 1..80: note = Artificially Synthesized Probe
  source 1..80: mol_type = other DNA
ggcatgaccccgctgcacgccgcggcgcagatgggccacagcccagtcatcgtgtggttggtgagctccgggcccgggcg

SEQ ID NO: 28820 - DNA, 80 bp, synthetic construct
  misc_feature 1..80: note = Artificially Synthesized Probe
  source 1..80: mol_type = other DNA
tgctgacttcatggctgggtcataactggaaacccacgctactctttttaaattatgttattatggtgagacagccatga

SEQ ID NO: 28821 - DNA, 80 bp, synthetic construct
  misc_feature 1..80: note = Artificially Synthesized Probe
  source 1..80: mol_type = other DNA
aggcaccctgccgagtgccttaaaggtgtaatctccgttactcttcacagtacattaaaaaaatagttggccgggtgcag

SEQ ID NO: 28822 - DNA, 80 bp, synthetic construct
  misc_feature 1..80: note = Artificially Synthesized Probe
  source 1..80: mol_type = other DNA
tgcagataaagaaagttaggcacaaaaagcataggtgactctcccgaaatagctagtaagtcagggaggggaagtctgaa

SEQ ID NO: 28823 - DNA, 80 bp, synthetic construct
  misc_feature 1..80: note = Artificially Synthesized Probe
  source 1..80: mol_type = other DNA
atctctccaccctcctaatcagggaggagccaggggagggagtttcccaggaacctgggtcctgctgcctggcggggctg

SEQ ID NO: 28824 - DNA, 80 bp, synthetic construct
  misc_feature 1..80: note = Artificially Synthesized Probe
  source 1..80: mol_type = other DNA
cacacattcatcagtacaaagaagcatgtgcacaaatgcgtaccccctcaaacatacacaaatgcacgatcgcctcggca

SEQ ID NO: 28825 - DNA, 80 bp, synthetic construct
  misc_feature 1..80: note = Artificially Synthesized Probe
  source 1..80: mol_type = other DNA
ccacaggcagctgacatctacatgcagaccaagaacaaactccgccacgtggagacagaggccctcaagaaggaggtagt

SEQ ID NO: 28826 - DNA, 80 bp, synthetic construct
  misc_feature 1..80: note = Artificially Synthesized Probe
  source 1..80: mol_type = other DNA
cccaaggcaaagccaccccagggccaattcataaaaggtgactcgggtcacaaggccactgggcaagggaggcatgggag

SEQ ID NO: 28827 - DNA, 80 bp, synthetic construct
  misc_feature 1..80: note = Artificially Synthesized Probe
  source 1..80: mol_type = other DNA
tggctgtaacctgagaggaagtatcaggtaacgcaggtgtcgggtcctgccgcccccacagccaggtgcacagcgggggc

SEQ ID NO: 28828 - DNA, 80 bp, synthetic construct
  misc_feature 1..80: note = Artificially Synthesized Probe
  source 1..80: mol_type = other DNA
tctccctgactagaagtgcagagcagagctagtccccctacggttcctatggagccccagcccctgcagaccagagccca

SEQ ID NO: 28829 - DNA, 80 bp, synthetic construct
  misc_feature 1..80: note = Artificially Synthesized Probe
  source 1..80: mol_type = other DNA
gaaaatgcacactctgccctgggtgtttccatattatccgcctgcccttcctcctgggtgcctcccgtagccttagtaag

SEQ ID NO: 28830 - DNA, 80 bp, synthetic construct
  misc_feature 1..80: note = Artificially Synthesized Probe
  source 1..80: mol_type = other DNA
tgatgtccccgacgggcgacaactcggagctactggctgagattaaggcaggcaagagcctgaagccgacgccccagagc

SEQ ID NO: 28831 - DNA, 80 bp, synthetic construct
  misc_feature 1..80: note = Artificially Synthesized Probe
  source 1..80: mol_type = other DNA
agcacctgggatctggttaaaaggcctgttcggatttaggaggtctgggcggggctgaggctcgcatttctagccagctc

SEQ ID NO: 28832 - DNA, 80 bp, synthetic construct
  misc_feature 1..80: note = Artificially Synthesized Probe
  source 1..80: mol_type = other DNA
gtgatgtctaaggtgacacttggaagacgagtgaggggtggccaggaggagagtgggctgaagagccgcaggtgagacag

SEQ ID NO: 28833 - DNA, 80 bp, synthetic construct
  misc_feature 1..80: note = Artificially Synthesized Probe
  source 1..80: mol_type = other DNA
ttccccgccttagctgacggccgccagctcgtgctgctacccccgcgagggctggaggtactcccgcgagcacaacgcca

SEQ ID NO: 28834 - DNA, 80 bp, synthetic construct
  misc_feature 1..80: note = Artificially Synthesized Probe
  source 1..80: mol_type = other DNA
ctacgacagcctcacgctcgacctcttcatgctcggctacttccagctactcgagatgggcctgagccgcgaggagcgca

SEQ ID NO: 28835 - DNA, 80 bp, synthetic construct
  misc_feature 1..80: note = Artificially Synthesized Probe
  source 1..80: mol_type = other DNA
gtgccacgtgtgcagtgttctgtgtgaagtgtgccgtgtacagacccgttctcctctgtaacattcaggaaataaaactc

SEQ ID NO: 28836 - DNA, 80 bp, synthetic construct
  misc_feature 1..80: note = Artificially Synthesized Probe
  source 1..80: mol_type = other DNA
ccctataataccccagaatctctctctcatgctctaataactttgttcccggttactcagtccctgcctcctattaacct

SEQ ID NO: 28837 - DNA, 80 bp, synthetic construct
  misc_feature 1..80: note = Artificially Synthesized Probe
  source 1..80: mol_type = other DNA
gcccgccaccacgcccggctaatttttgtatttttagtagaggccgggttttgccatgttggtcaggctggtctcgaact

SEQ ID NO: 28838 - DNA, 80 bp, synthetic construct
  misc_feature 1..80: note = Artificially Synthesized Probe
  source 1..80: mol_type = other DNA
ttagtctttgaaatatcatgcacattttacacctgcaatccatcacaatttagaccagccacatttcaaatgttcagcag

SEQ ID NO: 28839 - DNA, 80 bp, synthetic construct
  misc_feature 1..80: note = Artificially Synthesized Probe
  source 1..80: mol_type = other DNA
caaatgctgcttatttgcatgccgacttacatatatttgcatgttcgttgactatcaaagagtgcagagctctccccagc

SEQ ID NO: 28840 - DNA, 80 bp, synthetic construct
  misc_feature 1..80: note = Artificially Synthesized Probe
  source 1..80: mol_type = other DNA
cttcgccttggctggagcgataggggcgagcaggggtggggccggctggtgctgctacgcagggccgtgccagcggctta

SEQ ID NO: 28841 - DNA, 80 bp, synthetic construct
  misc_feature 1..80: note = Artificially Synthesized Probe
  source 1..80: mol_type = other DNA
gtgtcaggtgtgaaaagctctggaggtgttttcatgagtccgtgcctgtgcgtgtggatgtggggagacctagtgagagt

SEQ ID NO: 28842 - DNA, 80 bp, synthetic construct; identical to SEQ ID NO: 28841
  misc_feature 1..80: note = Artificially Synthesized Probe
  source 1..80: mol_type = other DNA

SEQ ID NO: 28843 - DNA, 80 bp, synthetic construct
  misc_feature 1..80: note = Artificially Synthesized Probe
  source 1..80: mol_type = other DNA
gacctctccccagcatagaacatgtcccctttttgttaattttcccaaagcagcaccaacacaaggcagattttaatttt

SEQ ID NO: 28844 - DNA, 80 bp, synthetic construct
  misc_feature 1..80: note = Artificially Synthesized Probe
  source 1..80: mol_type = other DNA
caaaaaaaaaaaaaaaaggccgggcactgtggctcatgtaatcccagcactttgggaggccgaggcgggcggatcatgag

SEQ ID NO: 28845 - DNA, 80 bp, synthetic construct
  misc_feature 1..80: note = Artificially Synthesized Probe
  source 1..80: mol_type = other DNA
actaatttttttctcactcaggaaagcttatcagaatttgggggaatgagcaagatgctgacattaagcattgcctggga

SEQ ID NO: 28846 - DNA, 80 bp, synthetic construct
  misc_feature 1..80: note = Artificially Synthesized Probe
  source 1..80: mol_type = other DNA
gtcgtggttcactgcaacctctgcctcccgggttcaagccattcacctgcctcagcctcccaagtagctgggattacagg

SEQ ID NO: 28847 - DNA, 80 bp, synthetic construct
  misc_feature 1..80: note = Artificially Synthesized Probe
  source 1..80: mol_type = other DNA
tttctgccctcaggcagtttacatcctggcagaggggagagctgggcaacagtgagttgcacagacttgtcttattaccg

SEQ ID NO: 28848 - DNA, 80 bp, synthetic construct
  misc_feature 1..80: note = Artificially Synthesized Probe
  source 1..80: mol_type = other DNA
gcccggccgtggtgtcttgagctgagtgcagaagcgcaaatagggggtaggagaaaatgcaccgcgaggagaaatgtgct

SEQ ID NO: 28849 - DNA, 80 bp, synthetic construct
  misc_feature 1..80: note = Artificially Synthesized Probe
  source 1..80: mol_type = other DNA
ctggagctcacagcaagtccaggctagaggtagaaacgtgagagccccacggctggggaagattgccatgggattggaga

SEQ ID NO: 28850 - DNA, 80 bp, synthetic construct
  misc_feature 1..80: note = Artificially Synthesized Probe
  source 1..80: mol_type = other DNA
agaagtacaagcggcggccggaggtggacccactgcccttcccgggccccttccctgctgggcccctggcagtcgctgga

SEQ ID NO: 28851 - DNA, 80 bp, synthetic construct
  misc_feature 1..80: note = Artificially Synthesized Probe
  source 1..80: mol_type = other DNA
aggattttgagccctagtgccacactaatgcagaaaggtcatttagtgggagggaaggtggggagggtacaaggtggcca

SEQ ID NO: 28852 - DNA, 80 bp, synthetic construct
  misc_feature 1..80: note = Artificially Synthesized Probe
  source 1..80: mol_type = other DNA
cccccttcgctcctcctctcatcatttgcattgggcattagtgtccccccttgaagcaataactccaagcagactccagc

SEQ ID NO: 28853 - DNA, 80 bp, synthetic construct
  misc_feature 1..80: note = Artificially Synthesized Probe
  source 1..80: mol_type = other DNA
actggctgcaacagagtggcaaacccatccttttggtagtaatgactcagtggacttttggttgagatggcatgctgaag

SEQ ID NO: 28854 - DNA, 80 bp, synthetic construct
  misc_feature 1..80: note = Artificially Synthesized Probe
  source 1..80: mol_type = other DNA
ctgagatgatgtagtgaacactctgtaatggctgaaatgactcattgaaccctccccattagttgagatgatccagtgaa

SEQ ID NO: 28855 - DNA, 80 bp, synthetic construct
  misc_feature 1..80: note = Artificially Synthesized Probe
  source 1..80: mol_type = other DNA
ggtttagaatcgagcttgtacacctgggagagggtctttttcctttccctgagagccacggtgtatgtcctgatgtccca

SEQ ID NO: 28856 - DNA, 80 bp, synthetic construct
  misc_feature 1..80: note = Artificially Synthesized Probe
  source 1..80: mol_type = other DNA
aatttaaatactgataatttggccaggcgcagtggttcatgcctgtaatcccagcactttgaggggccaaggcgggtgga

SEQ ID NO: 28857 - DNA, 80 bp, synthetic construct
  misc_feature 1..80: note = Artificially Synthesized Probe
  source 1..80: mol_type = other DNA
ccatactgccagtgtccgtacaaccattccgtttttttagttccagtacagtatttgataaattacatgggatatttagc

SEQ ID NO: 28858 - DNA, 80 bp, synthetic construct
  misc_feature 1..80: note = Artificially Synthesized Probe
  source 1..80: mol_type = other DNA
tgaggcaatccgagggaacagtgttccaggaggagagaacagcaaatgcaaaggccttgaggcagaaatgaagtttgagg

SEQ ID NO: 28859 - DNA, 80 bp, synthetic construct
  misc_feature 1..80: note = Artificially Synthesized Probe
  source 1..80: mol_type = other DNA
ataaagctttatttacaaatcagaggtcgctctgggccatagttcactgacttttggtctagaacgatcccctcacttgg

SEQ ID NO: 28860 - DNA, 80 bp, synthetic construct
  misc_feature 1..80: note = Artificially Synthesized Probe
  source 1..80: mol_type = other DNA
ctctacctgagcctgctgtgctctgctgtctccgtgctctgcttgacataccttgcagtctttggccttccttctcagcc

SEQ ID NO: 28861 - DNA, 80 bp, synthetic construct
  misc_feature 1..80: note = Artificially Synthesized Probe
  source 1..80: mol_type = other DNA
cagcaaagtcccaagctgctcagcctggagtggtgaatgccctgggcctggccagctgctgtctcaccccgtatctccac

SEQ ID NO: 28862 - DNA, 80 bp, synthetic construct
  misc_feature 1..80: note = Artificially Synthesized Probe
  source 1..80: mol_type = other DNA
ccccatcccctccttcctcagacccaggaatccaggctatcagcccatcctccctcagacccaggggtccagacttccag

SEQ ID NO: 28863 - DNA, 80 bp, synthetic construct
  misc_feature 1..80: note = Artificially Synthesized Probe
  source 1..80: mol_type = other DNA
acagtatttatggtaacccacagtgagaggtacattttactgtatctccaagtgtatataaatacataatacactgatac

SEQ ID NO: 28864 - DNA, 80 bp, synthetic construct
  misc_feature 1..80: note = Artificially Synthesized Probe
  source 1..80: mol_type = other DNA
atgcagccataaacaatgatgagttcatgtcctttgtagggacatggatgaagctggaaaccatcattctcagcaaacta

SEQ ID NO: 28865 - DNA, 80 bp, synthetic construct
  misc_feature 1..80: note = Artificially Synthesized Probe
  source 1..80: mol_type = other DNA
ccactaaccactctcctattagtttctctcggctgccgtaacaaatcaccatatatttggtggcttagaatcttacagct

SEQ ID NO: 28866 - DNA, 80 bp, synthetic construct
  misc_feature 1..80: note = Artificially Synthesized Probe
  source 1..80: mol_type = other DNA
tgcaaagaccctgtttctaagtgatttccccttctcaggtgccagggattgaaacctggctgttttggagggctatttta

SEQ ID NO: 28867 - DNA, 80 bp, synthetic construct
  misc_feature 1..80: note = Artificially Synthesized Probe
  source 1..80: mol_type = other DNA
agaatccgagatgagaaggtgggacccataaggggcttcccactctggctgtgcctcatggagagggtaacattaaaaga

SEQ ID NO: 28868 - DNA, 80 bp, synthetic construct
  misc_feature 1..80: note = Artificially Synthesized Probe
  source 1..80: mol_type = other DNA
cttaaaaaaaaaaacacaacataggagttgcccctttaagacagaaaagaacctcatccacccatcagtaagaggcccca

SEQ ID NO: 28869 - DNA, 80 bp, synthetic construct
  misc_feature 1..80: note = Artificially Synthesized Probe
  source 1..80: mol_type = other DNA
atacaaaaattagtcgagcgttttagcacatgcctgtaattccagctagttgggaggctgagggaggagaatcacttgaa

SEQ ID NO: 28870 - DNA, 80 bp, synthetic construct
  misc_feature 1..80: note = Artificially Synthesized Probe
  source 1..80: mol_type = other DNA
agtgacagatcactaactcggcggggggcagacagagaactcgtccctgaggtgacatgtgagccccacgtgtgccctgt

SEQ ID NO: 28871 - DNA, 80 bp, synthetic construct
  misc_feature 1..80: note = Artificially Synthesized Probe
  source 1..80: mol_type = other DNA
tgccaaatacctattaaaatgttagatacacgcacatacccagaaacatacacacagccggacacacatacacacacaca

SEQ ID NO: 28872 - DNA, 80 bp, synthetic construct
  misc_feature 1..80: note = Artificially Synthesized Probe
  source 1..80: mol_type = other DNA
gttgctaagtataggggaaaacacagcaaaacacagggacctggggcctgtgattttaaggaggcaagcagggaagtcct

SEQ ID NO: 28873 - DNA, 80 bp, synthetic construct
  misc_feature 1..80: note = Artificially Synthesized Probe
  source 1..80: mol_type = other DNA
ttgggagaagggaaagagggtgggacagtacccaggtctaatctggtgtttaggaagctggcagggtctgaatcatttat

SEQ ID NO: 28874 - DNA, 80 bp, synthetic construct
  misc_feature 1..80: note = Artificially Synthesized Probe
  source 1..80: mol_type = other DNA
agactgcgccattgcactccagcctgggcaaaaagagcaaaactccgtctcaaaaaataaaaataaataataaataatac

SEQ ID NO: 28875 - DNA, 80 bp, synthetic construct
  misc_feature 1..80: note = Artificially Synthesized Probe
  source 1..80: mol_type = other DNA
gcacatttcgggtaatataagagtacaatggtaagtaatgcagcctagtgggtgaaagcagtcagaggaacctggataga

SEQ ID NO: 28876 - DNA, 80 bp, synthetic construct
  misc_feature 1..80: note = Artificially Synthesized Probe
  source 1..80: mol_type = other DNA
ttaaaaaaagttttatttagggagctccagggaatgcggtgggaaaggagaggtgcagtgtcattgccgccctctcctcc

SEQ ID NO: 28877 - DNA, 80 bp, synthetic construct
  misc_feature 1..80: note = Artificially Synthesized Probe
  source 1..80: mol_type = other DNA
ccaggagtccaggcccccagcccctactgcctcagacccaggagtccagtcccccagcccctcctcccttagacccagga

SEQ ID NO: 28878 - DNA, 80 bp, synthetic construct
  misc_feature 1..80: note = Artificially Synthesized Probe
  source 1..80: mol_type = other DNA
aggtcagtggatcaacaggacagaagactctaaccccttccttcaagaaaagggtaggaggataaaatcactatagctaa

SEQ ID NO: 28879 - DNA, 80 bp, synthetic construct
  misc_feature 1..80: note = Artificially Synthesized Probe
  source 1..80: mol_type = other DNA
gaagaagaagaagaaagaaactgcagacatgaggacatgaggcccaggaggagagtgtgaagccatggtccccacaagca

SEQ ID NO: 28880 - DNA, 80 bp, synthetic construct
  misc_feature 1..80: note = Artificially Synthesized Probe
  source 1..80: mol_type = other DNA
gctcaaataggtaactaacacacccctgaatctaactgtcccccaacagctaagcccctgaatctaactcttcccatact

SEQ ID NO: 28881 - DNA, 80 bp, synthetic construct
  misc_feature 1..80: note = Artificially Synthesized Probe
  source 1..80: mol_type = other DNA
ccccaccctaccccagggtcttatctagataaacattttggtaaaaaatgtagattcccaggctgtaatcttatattatc

SEQ ID NO: 28882 - DNA, 80 bp, synthetic construct
  misc_feature 1..80: note = Artificially Synthesized Probe
  source 1..80: mol_type = other DNA
ttcctagagacttgttgagtggctttgaccaatatgccgagagtgatatgaacaatgaagtccaggctgacatggtctta

SEQ ID NO: 28883 - DNA, 80 bp, synthetic construct
  misc_feature 1..80: note = Artificially Synthesized Probe
  source 1..80: mol_type = other DNA
acagagagttcccactggggcactgcccctagtggagctgtgagaagagggccatcgccctccagaacccagagtgttag

SEQ ID NO: 28884 - DNA, 80 bp, synthetic construct
  misc_feature 1..80: note = Artificially Synthesized Probe
  source 1..80: mol_type = other DNA
tccaccatgattgggaggcctcccaagccaggtggaactgtgagcccactaaacccctttttctttataaatgacccagt

SEQ ID NO: 28885 - DNA, 80 bp, synthetic construct
  misc_feature 1..80: note = Artificially Synthesized Probe
  source 1..80: mol_type = other DNA
caataccgttgaaataaaattcaatgttttacacttttaaaaataaaaaataggcagtggtggctgggcgctgtggctca

SEQ ID NO: 28886 - DNA, 80 bp, synthetic construct
  misc_feature 1..80: note = Artificially Synthesized Probe
  source 1..80: mol_type = other DNA
atctgataatcaagaaggctactaagtgattaacgaatgggtaacatactcctatacagcacagatacactggacgtagg

SEQ ID NO: 28887 - DNA, 80 bp, synthetic construct
  misc_feature 1..80: note = Artificially Synthesized Probe
  source 1..80: mol_type = other DNA
tctagctaatttttgtactgttatttagtagagacgaggtttcatcatgttgaccaggctggtcttgaactcctggcatc

SEQ ID NO: 28888 - DNA, 80 bp, synthetic construct
  misc_feature 1..80: note = Artificially Synthesized Probe
  source 1..80: mol_type = other DNA
agcaacactccgtctcaaaaaaaaaaaacaaaaaacaaaagtcaatatcctcagcttgggtgacagagcgagactgtctc

SEQ ID NO: 28889 - DNA, 80 bp, synthetic construct
  misc_feature 1..80: note = Artificially Synthesized Probe
  source 1..80: mol_type = other DNA
aaccctgacattctgcaaaatcaaaacgatttttggactttttgcccattttcactcgcattccccaaaaacatttgggg

SEQ ID NO: 28890 - DNA, 80 bp, synthetic construct
  misc_feature 1..80: note = Artificially Synthesized Probe
  source 1..80: mol_type = other DNA
cccaagttctttcccttcattactcaaaactatagtaaacacctcttatctgcctgggatacatttcaagacccggagtg

SEQ ID NO: 28891 - DNA, 80 bp, synthetic construct
  misc_feature 1..80: note = Artificially Synthesized Probe
  source 1..80: mol_type = other DNA
ctgtaaaaaaaaattttaagcctggtgcagtggctcactctaatcccagcactttgggaggccaaggagggaggattgcc

SEQ ID NO: 28892 - DNA, 80 bp, synthetic construct
  misc_feature 1..80: note = Artificially Synthesized Probe
  source 1..80: mol_type = other DNA
cagaaaaaaaagaattactcctgttttggcgatccactgccttgtagcgtcatcatgtattaaacagtcccctgctgtgt

SEQ ID NO: 28893 - DNA, 80 bp, synthetic construct
  misc_feature 1..80: note = Artificially Synthesized Probe
  source 1..80: mol_type = other DNA
tattttttttgaaatggagttttgctcttgtcactcatgctggagtgcaatggcaccatctgggctcactgcaacctcca

SEQ ID NO: 28894 - DNA, 80 bp, synthetic construct
  misc_feature 1..80: note = Artificially Synthesized Probe
  source 1..80: mol_type = other DNA
gatgggcaagttctgtatcgggatctgggtaagtactcatacacatgtataatatgtggactcctttcattccatgaatg

SEQ ID NO: 28895 - DNA, 80 bp, synthetic construct
  misc_feature 1..80: note = Artificially Synthesized Probe
  source 1..80: mol_type = other DNA
atttgggaggctgaaacaagagaatcacttgaacccgggaggtggaggttgcagtaaaccaagatcgcaccactgcactc

SEQ ID NO: 28896 - DNA, 80 bp, synthetic construct
  misc_feature 1..80: note = Artificially Synthesized Probe
  source 1..80: mol_type = other DNA
acccttcgttcatttcaagacatgtttgttagcacctattatgtacaatgtacatacatgtacaatgcatttttgcctgc

SEQ ID NO: 28897 - DNA, 80 bp, synthetic construct
  misc_feature 1..80: note = Artificially Synthesized Probe
  source 1..80: mol_type = other DNA
ctaatcaacttttatggagatgcatgccaggccaaagggctgcccctaagctttaggaaggaaactccttaaatgctgtt

SEQ ID NO: 28898 - DNA, 80 bp, synthetic construct
  misc_feature 1..80: note = Artificially Synthesized Probe
  source 1..80: mol_type = other DNA
cttcccctatcagaacaaaagagttccaacttcctaacatcccaaaatcagggtccccagcacgttctttcatagaggac

SEQ ID NO: 28899 - DNA, 80 bp, synthetic construct
  misc_feature 1..80: note = Artificially Synthesized Probe
  source 1..80: mol_type = other DNA
aaacacagacaatgggtgaaacacagacgctaattcacataacagagagtaggcaaccttaagaatgaattgatgcagac

SEQ ID NO: 28900 - DNA, 80 bp, synthetic construct
  misc_feature 1..80: note = Artificially Synthesized Probe
  source 1..80: mol_type = other DNA
aggagttatatccctggatgaaaactcttcataagaagacctaactggataagaccaacttcttggctttcaaaagtaat

SEQ ID NO: 28901 - DNA, 80 bp, synthetic construct
  misc_feature 1..80: note = Artificially Synthesized Probe
  source 1..80: mol_type = other DNA
atgtttacaggtcaaatggcatcacaacccaaacatctctgaaaacaaatattctacccttacaaatgttctcctaattc

SEQ ID NO: 28902 - DNA, 80 bp, synthetic construct
  misc_feature 1..80: note = Artificially Synthesized Probe
  source 1..80: mol_type = other DNA
attggctagagagggaaaagggaaaacactaaaagtggaggtaatgggcaaatacaaagacacagatgaatgtctactcg

SEQ ID NO: 28903 - DNA, 80 bp, synthetic construct
  misc_feature 1..80: note = Artificially Synthesized Probe
  source 1..80: mol_type = other DNA
aaataggcttatcatttgagacacatgtctgtggtctaggcaaaacatctcctcattctagtttttgctggaccacatca

SEQ ID NO: 28904 - DNA, 80 bp, synthetic construct
  misc_feature 1..80: note = Artificially Synthesized Probe
  source 1..80: mol_type = other DNA
ctggtgccttctctccaatattgttccataccacaatcactttgtgcagatttggtacagcctgataatgatttaaaagt

SEQ ID NO: 28905 - DNA, 80 bp, synthetic construct
  misc_feature 1..80: note = Artificially Synthesized Probe
  source 1..80: mol_type = other DNA
ctttttcccaaacaaaatcatacagagccataatacatgaggcagcaaacaattatggtaggtgtattacttaccagccc

SEQ ID NO: 28906 - DNA, 80 bp, synthetic construct
  misc_feature 1..80: note = Artificially Synthesized Probe
  source 1..80: mol_type = other DNA
ctgttggcattcaattatttctgtttttcaatcttctgctatttctgcttctgattccaggctacttactcttccacagg

SEQ ID NO: 28907 - DNA, 80 bp, synthetic construct
  misc_feature 1..80: note = Artificially Synthesized Probe
  source 1..80: mol_type = other DNA
tttcaacagtccagatttgaaaagtaatgtcacctttagagtaagcttttgagagtgatttcaagggtatctctcctgga

SEQ ID NO: 28908 - DNA, 80 bp, synthetic construct
  misc_feature 1..80: note = Artificially Synthesized Probe
  source 1..80: mol_type = other DNA
cctgtatccatcacagacatttcctttcagatagctcctaatcccccaattttacctgtatcagaaaggtttcaggagat

SEQ ID NO: 28909 - DNA, 80 bp, synthetic construct
  misc_feature 1..80: note = Artificially Synthesized Probe
  source 1..80: mol_type = other DNA
gacaccaagggttttcaactagagatgattttgtcttccaagggacagttggcaaagtctggagatatctctgattgtca

SEQ ID NO: 28910 - DNA, 80 bp, synthetic construct
  misc_feature 1..80: note = Artificially Synthesized Probe
  source 1..80: mol_type = other DNA
ccacaactctttccactatgctagggtaaattctgcaaggatgtgtcaaaaaattaataaggaagactgtcactaacctg

SEQ ID NO: 28911 - DNA, 80 bp, synthetic construct
  misc_feature 1..80: note = Artificially Synthesized Probe
  source 1..80: mol_type = other DNA
agaagaaacaccgttgaaggattctttcctcaaggctagttccttcagactggaaagcaataattatccagagagaagct

SEQ ID NO: 28912 - DNA, 80 bp, synthetic construct
  misc_feature 1..80: note = Artificially Synthesized Probe
  source 1..80: mol_type = other DNA
caccctgagtattccagtgaactctgattactgtgtttctagtccttgttttcaggtatttcaactatcgactgttcttt

SEQ ID NO: 28913 - DNA, 80 bp, synthetic construct
  misc_feature 1..80: note = Artificially Synthesized Probe
  source 1..80: mol_type = other DNA
gtaaggtttttacccacattcaggaaagtcattcttttcattgttgttttagaaatgccatacagcttttctcattttct

SEQ ID NO: 28914 - DNA, 80 bp, synthetic construct
  misc_feature 1..80: note = Artificially Synthesized Probe
  source 1..80: mol_type = other DNA
atgaccaattccatggacatatattagggcaggagtgagagaggccttattcctaagaggaacatatccatgactcatag

SEQ ID NO: 28915 - DNA, 80 bp, synthetic construct
  misc_feature 1..80: note = Artificially Synthesized Probe
  source 1..80: mol_type = other DNA
tgagaatacagtattaaaagatttttcctgagccacagaaagagtggcaagtctaaatcaaactctcgactctctcactt

SEQ ID NO: 28916 - DNA, 80 bp, synthetic construct
  misc_feature 1..80: note = Artificially Synthesized Probe
  source 1..80: mol_type = other DNA
atggcagttgccaggggctgggagtaggaagaaatggacagttgttgttcagtgggtataaagtttcagttttgcaagat

SEQ ID NO: 28917 - DNA, 80 bp, synthetic construct
  misc_feature 1..80: note = Artificially Synthesized Probe
  source 1..80: mol_type = other DNA
cccatgcaagtccgaaatccagtggggcggtcattaaatcttaaggttcttaaataatctcctttgactctgtgtctcac

SEQ ID NO: 28918 - DNA, 80 bp, synthetic construct
  misc_feature 1..80: note = Artificially Synthesized Probe
  source 1..80: mol_type = other DNA
tccacagatctctagggcaggagcaaaatgccaccagcctctttgctaaagtatagcaagagtgacctttgctgcagttc

SEQ ID NO: 28919 - DNA, 80 bp, synthetic construct
  misc_feature 1..80: note = Artificially Synthesized Probe
  source 1..80: mol_type = other DNA
gtattattgtttttatgtaagcatgcaatgggttcaccttgcctgctacctagaccgaacgaatttatcaagacagggga

SEQ ID NO: 28920 - DNA, 80 bp, synthetic construct
  misc_feature 1..80: note = Artificially Synthesized Probe
  source 1..80: mol_type = other DNA
gactctgattgagccactactggctttgttgctcctcaacttgcagatggcctattgtaggacttcacattgtgattgtt

SEQ ID NO: 28921 - DNA, 80 bp, synthetic construct
  misc_feature 1..80: note = Artificially Synthesized Probe
  source 1..80: mol_type = other DNA
tttgcctgtcacaacccccccctttcttcataactactcttttccataaaattcctccagggaaggaactttttatttat

SEQ ID NO: 28922 - DNA, 80 bp, synthetic construct
  misc_feature 1..80: note = Artificially Synthesized Probe
  source 1..80: mol_type = other DNA
attacttctcccgccttctcccaagttaaatcatattgaataagggcgttttggagaaaaatccaattaccatagaatta

SEQ ID NO: 28923 - DNA, 80 bp, synthetic construct
  misc_feature 1..80: note = Artificially Synthesized Probe
  source 1..80: mol_type = other DNA
tctcctccccgcgctccacacgccctcgcatcccaccgaggggccagcttctgcctgcacgttgctgaaactggcctgga

SEQ ID NO: 28924 - DNA, 80 bp, synthetic construct
  misc_feature 1..80: note = Artificially Synthesized Probe
  source 1..80: mol_type = other DNA
gttttctggcggctcctgttcaatttctttccttctagaaaccagcatccaggcacaggaggggaggcccttcttggtgg

SEQ ID NO: 28925 - DNA, 80 bp, synthetic construct
  misc_feature 1..80: note = Artificially Synthesized Probe
  source 1..80: mol_type = other DNA
ggcccagtgggggccaacatcacctccttcccctcccatggcaaagagccagcccgcggggtggctactgcagtgccccc

SEQ ID NO: 28926 - DNA, 80 bp, synthetic construct
  misc_feature 1..80: note = Artificially Synthesized Probe
  source 1..80: mol_type = other DNA
cccgggggcgtgggtgttccggaggcgagggtatcccagaagtgtgagtgtcccaggggcgtgggtgtcccgggggtgtg

SEQ ID NO: 28927 - DNA, 80 bp, synthetic construct; identical to SEQ ID NO: 28926
  misc_feature 1..80: note = Artificially Synthesized Probe
  source 1..80: mol_type = other DNA

SEQ ID NO: 28928 - DNA, 80 bp, synthetic construct
  misc_feature 1..80: note = Artificially Synthesized Probe
  source 1..80: mol_type = other DNA
cggttttcacatcagaaaatacgatttgcaaagcacacttagggtgtcccccttaacttcccaagggagtccccccagtc

SEQ ID NO: 28929 - DNA, 80 bp, synthetic construct
  misc_feature 1..80: note = Artificially Synthesized Probe
  source 1..80: mol_type = other DNA
aggtcacctcacacaggacacctcacaaaggtcacctcacacccacaggacacctcacactcataggtcacctcagtctt

SEQ ID NO: 28930 - DNA, 80 bp, synthetic construct
  misc_feature 1..80: note = Artificially Synthesized Probe
  source 1..80: mol_type = other DNA
cacaggaggtccagctgtctgaggcaaaggctaacatgaccctttccagacaaattgaggatggtcatgcctagcatttt

SEQ ID NO: 28931 - DNA, 80 bp, synthetic construct
  misc_feature 1..80: note = Artificially Synthesized Probe
  source 1..80: mol_type = other DNA
tggaaattggtctaggtgaccttgaaatcccttccagtctgaggtctttgacagggacccaaggttctgattatcagact

SEQ ID NO: 28932 - DNA, 80 bp, synthetic construct
  misc_feature 1..80: note = Artificially Synthesized Probe
  source 1..80: mol_type = other DNA
aggtaaacaccaacattccctcaggcaagaccttccaagggcttagcggtcatttcccaggagccaaggcaaaggctacc

SEQ ID NO: 28933 - DNA, 80 bp, synthetic construct
  misc_feature 1..80: note = Artificially Synthesized Probe
  source 1..80: mol_type = other DNA
tgcagtgaccacacgggcaccaagcgctcctgtcggtgccacgaggggtactctctgctggcagacggggtgtcctgcac

SEQ ID NO: 28934 - DNA, 80 bp, synthetic construct
  misc_feature 1..80: note = Artificially Synthesized Probe
  source 1..80: mol_type = other DNA
ttgtcacgtcgtcctcacggttactctttgaggtgggatctttgcctgatctttgcaaaatcaggagcattggatcaaag

SEQ ID NO: 28935 - DNA, 80 bp, synthetic construct
  misc_feature 1..80: note = Artificially Synthesized Probe
  source 1..80: mol_type = other DNA
ctctcaagtgtctcaggggctgtggctctgggcttcgtgctgtcacttccacagacagacagacatccccaaaaggggag

SEQ ID NO: 28936 - DNA, 80 bp, synthetic construct
  misc_feature 1..80: note = Artificially Synthesized Probe
  source 1..80: mol_type = other DNA
aaggtgggagactccccaaatatcacggagtacatgttctgtgccggctactcggatggcagcaaggactcctgcaaggg

SEQ ID NO: 28937 - DNA, 80 bp, synthetic construct
  misc_feature 1..80: note = Artificially Synthesized Probe
  source 1..80: mol_type = other DNA
acagagatatgcacacaccgatgtgcgcacacacagatatgcacacacatggatgagcacacacacaccaatgcgcacac

SEQ ID NO: 28938 - DNA, 80 bp, synthetic construct
  misc_feature 1..80: note = Artificially Synthesized Probe
  source 1..80: mol_type = other DNA
tacttcagagcagacagggtctatgaactacagccgtgggctgcttccaaggcaccctgctcttgtaaataaagttttat

SEQ ID NO: 28939 - DNA, 80 bp, synthetic construct
  misc_feature 1..80: note = Artificially Synthesized Probe
  source 1..80: mol_type = other DNA
acacgctccgcatcctgcaggacttcagctccgacccctcctccaacctctcgtcccactcgctggagaaactgccgccc

SEQ ID NO: 28940 - DNA, 80 bp, synthetic construct
  misc_feature 1..80: note = Artificially Synthesized Probe
  source 1..80: mol_type = other DNA
agggtgctctgggtgggcaccttggagaaggtctggatgtgcctattgagtcttttaaacccagtggctggagcagaatt

SEQ ID NO: 28941 - DNA, 80 bp, synthetic construct
  misc_feature 1..80: note = Artificially Synthesized Probe
  source 1..80: mol_type = other DNA
ccaaggctgctctcattaaaatcaaatttagcctcttgcatcattgtgcccctggttgttggaacaaaagcagagagctg

SEQ ID NO: 28942 - DNA, 80 bp, synthetic construct
  misc_feature 1..80: note = Artificially Synthesized Probe
  source 1..80: mol_type = other DNA
ttttgaagccgtccttcgtcagacctcagcaaggcgctgtgcagtttcatactgaggagacataggcagggctcaggacg

SEQ ID NO: 28943 - DNA, 80 bp, synthetic construct
  misc_feature 1..80: note = Artificially Synthesized Probe
  source 1..80: mol_type = other DNA
ccttctgcccctgagagtgagcatggccattaaggaaatatccgatgcattgatcaacatgtttgtccattcagcagatt

SEQ ID NO: 28944 - DNA, 80 bp, synthetic construct
  misc_feature 1..80: note = Artificially Synthesized Probe
  source 1..80: mol_type = other DNA
gtggcctccgcctgggtgtgtcctggttaattcctgtgcctactgaaggcctgccccagctgatctcgctcgctcgcctc

SEQ ID NO: 28945 - DNA, 80 bp, synthetic construct
  misc_feature 1..80: note = Artificially Synthesized Probe
  source 1..80: mol_type = other DNA
ccaaatacatctggcctcacagggttgttggggcttaaatgtgcaaatacgagtaaagaggtgagagcggagcctgacag

SEQ ID NO: 28946 - DNA, 80 bp, synthetic construct
  misc_feature 1..80: note = Artificially Synthesized Probe
  source 1..80: mol_type = other DNA
tgaaatcgggcatgcagtgccttgggctggggctggcgataattaaatttctatcatgcacaattatggatgcaaagaat

SEQ ID NO: 28947 - DNA, 80 bp, synthetic construct
  misc_feature 1..80: note = Artificially Synthesized Probe
  source 1..80: mol_type = other DNA
ttcaaaataaaaggggccttgaagaaaatcgtggaataaataacagtctggggtggaggcggttctggcgaaagtgtcct

SEQ ID NO: 28948 - DNA, 80 bp, synthetic construct
  misc_feature 1..80: note = Artificially Synthesized Probe
  source 1..80: mol_type = other DNA
ttaatttaaagtcaggttggggttgttgttagaaagggttcctgctcccacgagaaaccaaggatgagtggtggctgcac

SEQ ID NO: 28949 - DNA, 80 bp, synthetic construct
  misc_feature 1..80: note = Artificially Synthesized Probe
  source 1..80: mol_type = other DNA
ggggcccgtggacatcttcctgtgtgcatagagaggacgggtgactgctgggtgggattgtactggggaatgggggggcg

SEQ ID NO: 28950 - DNA, 80 bp, synthetic construct
  misc_feature 1..80: note = Artificially Synthesized Probe
  source 1..80: mol_type = other DNA
ctgggcttctcccaccaatgaggtgagctttccaagcatcgtgaactttggtctatcttcaagaaaacccaaaattgcac

SEQ ID NO: 28951 - DNA, 80 bp, synthetic construct
  misc_feature 1..80: note = Artificially Synthesized Probe
  source 1..80: mol_type = other DNA
ccgtttacggagcctcgagctgctggcccgcctgaggctggcgttcaggttctgtgcagtgttttggagagaaatgagat

SEQ ID NO: 28952 - DNA, 80 bp, synthetic construct
  misc_feature 1..80: note = Artificially Synthesized Probe
  source 1..80: mol_type = other DNA
tctcaaacactcggcctcgagcaagcctcctgcctcagcctccaaaagtgctgggatttcaggcatgagccgccgcactc

SEQ ID NO: 28953 - DNA, 80 bp, synthetic construct
  misc_feature 1..80: note = Artificially Synthesized Probe
  source 1..80: mol_type = other DNA
gtcactccaccagatacctctcagatcctcagatatttcttggatttttccatttttccatcttcctccaaaccaccacc

SEQ ID NO: 28954 - DNA, 80 bp, synthetic construct
  misc_feature 1..80: note = Artificially Synthesized Probe
  source 1..80: mol_type = other DNA
ccttggccccgcacacgtgctcactgtctccttcagggcccgagtttgctctgcttcctctgctgggtcatgccgtcctc

SEQ ID NO: 28955 - DNA, 80 bp, synthetic construct
  misc_feature 1..80: note = Artificially Synthesized Probe
  source 1..80: mol_type = other DNA
tgtgtgttgtgtgtactgtagggtgtggtgtgtgtaggtgtgtatgggtatgtacatgactgtggggtgtgtgctgatgt

SEQ ID NO: 28956 - DNA, 80 bp, synthetic construct
  misc_feature 1..80: note = Artificially Synthesized Probe
  source 1..80: mol_type = other DNA
cctcctccctttttataggacggaaaacctactgctggttattcttaccctgtgagaataagcatttgtattttaaacaa

SEQ ID NO: 28957 - DNA, 80 bp, synthetic construct
  misc_feature 1..80: note = Artificially Synthesized Probe
  source 1..80: mol_type = other DNA
ccgtttctgtgcgtggatgtgaaactcagcctccttgggcctctcgtggcctctgccccggttgaggaggctcagccagg

SEQ ID NO: 28958 - DNA, 80 bp, synthetic construct
  misc_feature 1..80: note = Artificially Synthesized Probe
  source 1..80: mol_type = other DNA
acagaagcctttatgtttgtccatcctcacatagccctgtgagttataggaggtgacgcttaccgctgcgtaaagacgag

SEQ ID NO: 28959 - DNA, 80 bp, synthetic construct
  misc_feature 1..80: note = Artificially Synthesized Probe
  source 1..80: mol_type = other DNA
ggctgtggtttgcatacgaaagcagctgtggttcatgaccatagcattaatgagttaaaatccatgattaatagttctct

SEQ ID NO: 28960 - DNA, 80 bp, synthetic construct
  misc_feature 1..80: note = Artificially Synthesized Probe
  source 1..80: mol_type = other DNA
tccagcccccgtcaagcactagcctactttctgcttcttgatattcataagttacttattctggattttcatacaaatgg

SEQ ID NO: 28961 - DNA, 80 bp, synthetic construct
  misc_feature 1..80: note = Artificially Synthesized Probe
  source 1..80: mol_type = other DNA
ttcagagcttttgccattttgttcagttggggtatttgtctttttgttactaagttttaagacgtcttggccaggcacag

SEQ ID NO: 28962 - DNA, 80 bp, synthetic construct
  misc_feature 1..80: note = Artificially Synthesized Probe
  source 1..80: mol_type = other DNA
cagtctcccaaagtggcccaggaggacagggcgtggttaacagtgggagttatgtacagagtgaaagagaaatgtacaaa

SEQ ID NO: 28963 - DNA, 80 bp, synthetic construct
  misc_feature 1..80: note = Artificially Synthesized Probe
  source 1..80: mol_type = other DNA
gtggggggagcagggcccctggtgtatggagaggatggagctgggtgaggggagcagggcccgtggtgtatggagaggat

SEQ ID NO: 28964 - DNA, 80 bp, synthetic construct
  misc_feature 1..80: note = Artificially Synthesized Probe
  source 1..80: mol_type = other DNA
cggcctcatcccaagcagcatcgtactggcgtgaagaggccctgtgtcatgtctgactggcttcctatgacccaggcaca

SEQ ID NO: 28965 - DNA, 80 bp, synthetic construct
  misc_feature 1..80: note = Artificially Synthesized Probe
  source 1..80: mol_type = other DNA
ctgggagaggaggtgcagctgctctttaattgatgttctattgatgttcctgttcgataagctacctggggtcctgtaca

SEQ ID NO: 28966 - DNA, 80 bp, synthetic construct
  misc_feature 1..80: note = Artificially Synthesized Probe
  source 1..80: mol_type = other DNA
tgggtggtggtggtgtttggaggcacggttgccttctgcggttcttgtcccttctccgtgatgcaggaagccaggctcca

SEQ ID NO: 28967 - DNA, 80 bp, synthetic construct
  misc_feature 1..80: note = Artificially Synthesized Probe
  source 1..80: mol_type = other DNA
gagggatcggtttggaatttcgaaggattttctgttctgctgataaaaattcatgtttctctccactgtggcctcaccgg

SEQ ID NO: 28968 - DNA, 80 bp, synthetic construct
  misc_feature 1..80: note = Artificially Synthesized Probe
  source 1..80: mol_type = other DNA
tgcacacaggaagctccacgtggtgggcaggtcatctggtgctcgagcataggaggcctggggcggtcagctgcattttc

SEQ ID NO: 28969 - DNA, 80 bp, synthetic construct
  misc_feature 1..80: note = Artificially Synthesized Probe
  source 1..80: mol_type = other DNA
ctgcaggagccgttcttagcatctgggcacagggcggagcctcgtctccagcagggcagggggctgcaggagccgttctt

SEQ ID NO: 28970 - DNA, 80 bp, synthetic construct
  misc_feature 1..80: note = Artificially Synthesized Probe
  source 1..80: mol_type = other DNA
cctcagtaagggagtggattgccctggcacaggctcaggaagcagatgcctggtgaagaacggcctgaaccccccaggcc

SEQ ID NO: 28971 - DNA, 80 bp, synthetic construct
  misc_feature 1..80: note = Artificially Synthesized Probe
  source 1..80: mol_type = other DNA
ggagacgtggggatttccgtgttgtcagatcgtccgctgggctgcaggctccacggcgggtgggtgctgagtcttagctc

SEQ ID NO: 28972 - DNA, 80 bp, synthetic construct
  misc_feature 1..80: note = Artificially Synthesized Probe
  source 1..80: mol_type = other DNA
ctgagccttctctcacggagcagaacggcactgtcacggggtcgcatggcggctgtcccctgagccttctctcacggagc

SEQ ID NO: 28973 - DNA, 80 bp, synthetic construct
  misc_feature 1..80: note = Artificially Synthesized Probe
  source 1..80: mol_type = other DNA
tctctcactgagcagaatggcaccgtcacggggtcgcacggcggctgtcccctgagccttctctcattgcgcagaatggc

SEQ ID NO: 28974 - DNA, 80 bp, synthetic construct
  misc_feature 1..80: note = Artificially Synthesized Probe
  source 1..80: mol_type = other DNA
gtgtctcctgcatgggctgactcagaggggcgtgccacaaggcctagtcaccctcacaagagtcccagcgcttaccagcc

SEQ ID NO: 28975 - DNA, 80 bp, synthetic construct
  misc_feature 1..80: note = Artificially Synthesized Probe
  source 1..80: mol_type = other DNA
attaaaaggacgggaaagaaaatatggccttcattttcctcgtactggggacgaaaatggaagccaggggatttcattca

SEQ ID NO: 28976 - DNA, 80 bp, synthetic construct
  misc_feature 1..80: note = Artificially Synthesized Probe
  source 1..80: mol_type = other DNA
accgtaagaggttgaagagcctcttctgagatgattttccagccaaagaaatgattctctccttcttctgtgtctcacgt

SEQ ID NO: 28977 - DNA, 80 bp, synthetic construct
  misc_feature 1..80: note = Artificially Synthesized Probe
  source 1..80: mol_type = other DNA
ctctcacggctcctgctgacggcatgagtggggtcccgggcagcctcctcaacgtgtttgtagtcctgacctgtaacaac

SEQ ID NO: 28978 - DNA, 80 bp, synthetic construct
  misc_feature 1..80: note = Artificially Synthesized Probe
  source 1..80: mol_type = other DNA
tgccttcatttagtgagtcagggatctagtgtgtttggaggaataagaaagtgtctgtcttatctagttttgggcctccc

SEQ ID NO: 28979 - DNA, 80 bp, synthetic construct
  misc_feature 1..80: note = Artificially Synthesized Probe
  source 1..80: mol_type = other DNA
caggtccttggtgtctccccgattcagtgttcccatctgtaaaatcggtggaaaaacgcctgccccatagagcctggtat

SEQ ID NO: 28980 - DNA, 80 bp, synthetic construct
  misc_feature 1..80: note = Artificially Synthesized Probe
  source 1..80: mol_type = other DNA
tttttctgcctgtctggcagggtttgggaggtggtggttttccataatgcatgaatggttggtgtttgacccacccctct

SEQ ID NO: 28981 - DNA, 80 bp, synthetic construct
  misc_feature 1..80: note = Artificially Synthesized Probe
  source 1..80: mol_type = other DNA
aaacgttttctattttcccacaaactgaagagcgttgaaatgtttgttagcagcaacagtgggaaccgttctatgagaag

SEQ ID NO: 28982 - DNA, 80 bp, synthetic construct
  misc_feature 1..80: note = Artificially Synthesized Probe
  source 1..80: mol_type = other DNA
caggtcgtaatttcacagcctttccagctgggactaaatcaccgtgtccatctgccctgccttcgtgtggctgggtatcc

SEQ ID NO: 28983 - DNA, 80 bp, synthetic construct
  misc_feature 1..80: note = Artificially Synthesized Probe
  source 1..80: mol_type = other DNA
caagggcgacaagcccagtcgggagttgtgaagtcagcctttaaaagtcttccttgctgcccacgactgaggctgggcgt

SEQ ID NO: 28984 - DNA, 80 bp, synthetic construct
  misc_feature 1..80: note = Artificially Synthesized Probe
  source 1..80: mol_type = other DNA
caacccccgggcaggtgaagttctattccaccctgcacatagtcagcttgtttgttttaataatttccttcttcgaatgt

SEQ ID NO: 28985 - DNA, 80 bp, synthetic construct
  misc_feature 1..80: note = Artificially Synthesized Probe
  source 1..80: mol_type = other DNA
ctaggccaggggattgaagccacagctgcctcctgctgtcaccagtagacccgatcttctcaggcgtttactggctgcaa

SEQ ID NO: 28986 - DNA, 80 bp, synthetic construct
  misc_feature 1..80: note = Artificially Synthesized Probe
  source 1..80: mol_type = other DNA
cagatagaaaagctcacattttagcatcacacaacgttgtcactgtacctcaggtgataatagtgcagtatgcgttcaca

SEQ ID NO: 28987 - DNA, 80 bp, synthetic construct
  misc_feature 1..80: note = Artificially Synthesized Probe
  source 1..80: mol_type = other DNA
tggtagatgatgataatgatgatgatggtgatggtgatgatgatgttgataaggatgataatgatggtggaggtgatgat

SEQ ID NO: 28988 - DNA, 80 bp, synthetic construct
  misc_feature 1..80: note = Artificially Synthesized Probe
  source 1..80: mol_type = other DNA
caagtcgttcgtcttctgcgtgagctttgagtctctttgcagggaggaaatcagactccgccttttcagggccactaaat

SEQ ID NO: 28989 - DNA, 80 bp, synthetic construct
  misc_feature 1..80: note = Artificially Synthesized Probe
  source 1..80: mol_type = other DNA
tgctactgagacgtccacatcaccacacggtgagctcctgcagtgtaccaggccctgtgtgtgcccgtcccgcaacagct

SEQ ID NO: 28990 - DNA, 80 bp, synthetic construct
  misc_feature 1..80: note = Artificially Synthesized Probe
  source 1..80: mol_type = other DNA
ccaccaggagacctgtgctaaccaggagacctgtgccacccgggagacctgtgccacccaagagacctgtgccacccggg

SEQ ID NO: 28991 - DNA, 80 bp, synthetic construct
  misc_feature 1..80: note = Artificially Synthesized Probe
  source 1..80: mol_type = other DNA
caggcctttgctccaggggcctacagtgaattctgactgcccaactgataagtagctgaggattttctaaagaaaataat

SEQ ID NO: 28992 - DNA, 80 bp, synthetic construct
  misc_feature 1..80: note = Artificially Synthesized Probe
  source 1..80: mol_type = other DNA
gttatgaagcaaatgtgaccttcaggcgccagcccaccatccgcattttatttttaagtagctcctggaatcctcatctg

SEQ ID NO: 28993 - DNA, 80 bp, synthetic construct
  misc_feature 1..80: note = Artificially Synthesized Probe
  source 1..80: mol_type = other DNA
acgcttacgcgcttacacacttatgctcagacacgaccttgacaattcctccacgtttccaccatgaccacatcggtcaa

SEQ ID NO: 28994 - DNA, 80 bp, synthetic construct
  misc_feature 1..80: note = Artificially Synthesized Probe
  source 1..80: mol_type = other DNA
tcatatccccctttacagatgagaaactgaggctctgtgagcggcgatttgcccaggttcccacgctcctaatcatccct

SEQ ID NO: 28995 - DNA, 80 bp, synthetic construct
  misc_feature 1..80: note = Artificially Synthesized Probe
  source 1..80: mol_type = other DNA
aagatccctagtgacgcgggcgtacattggagtttaaagggcttttttaaagatcaaagtcttctgtggtgactatagaa

SEQ ID NO: 28996 - DNA, 80 bp, synthetic construct
  misc_feature 1..80: note = Artificially Synthesized Probe
  source 1..80: mol_type = other DNA
gaccaaggagatccgggacgtcacacgggacaagaagctctggaggaccttcttcatctctccaggtagcctggcacggg

SEQ ID NO: 28997 - DNA, 80 bp, synthetic construct
  misc_feature 1..80: note = Artificially Synthesized Probe
  source 1..80: mol_type = other DNA
gcaggaatagatgtctttgttggtgctgaggtttataaaaccttcaagactctacgtgataagtacagcgcacacataaa

SEQ ID NO: 28998 - DNA, 80 bp, synthetic construct
  misc_feature 1..80: note = Artificially Synthesized Probe
  source 1..80: mol_type = other DNA
gccagggctcaccgagatcctcatttgctttcttcctctcaaagcccattaataagagaaaaataggacagaaagctcca

SEQ ID NO: 28999 - DNA, 80 bp, synthetic construct
  misc_feature 1..80: note = Artificially Synthesized Probe
  source 1..80: mol_type = other DNA
tactgggaggaccccttgagcccaggagttcaagatcagcctggacaacgtagcgagaccccatctctacaaaaaatgaa

SEQ ID NO: 29000 - DNA, 80 bp, synthetic construct
  misc_feature 1..80: note = Artificially Synthesized Probe
  source 1..80: mol_type = other DNA
ccaaccacggatgccaggtggtctcggaagccctgctggagcccagagcacattggagggctgagcccactgcagacacc

SEQ ID NO: 29001 - DNA, 80 bp, synthetic construct
  misc_feature 1..80: note = Artificially Synthesized Probe
  source 1..80: mol_type = other DNA
aggatctctcctgggtttgtccgctaccctggctttctccttgctgtttgtgtcttttattattactaaaatggaaaagg

SEQ ID NO: 29002 - DNA, 80 bp, synthetic construct
  misc_feature 1..80: note = Artificially Synthesized Probe
  source 1..80: mol_type = other DNA
taagaaagggcagccgggaccggccaccctcctgttcactccgctgggaagcgccctgccgaacctgccttctgatccca

SEQ ID NO: 29003 - DNA, 80 bp, synthetic construct
  misc_feature 1..80: note = Artificially Synthesized Probe
  source 1..80: mol_type = other DNA
cagggtcgtctttggagaatcagctgttcaagccctctgcccatttattagttttttttgtctttttgtgattgagtgat

SEQ ID NO: 29004 - DNA, 80 bp, synthetic construct
  misc_feature 1..80: note = Artificially Synthesized Probe
  source 1..80: mol_type = other DNA
tttgagctctgctctcgccccgtccctctcctcactcctgcgggagaaacggcccctgttctttccgccccacgttgtcc

SEQ ID NO: 29005 - DNA, 80 bp, synthetic construct
  misc_feature 1..80: note = Artificially Synthesized Probe
  source 1..80: mol_type = other DNA
tgggcggcgctgtgagaccctggttaccagggagggtgacccctaataagcaaagcatggaggcgagtaactcgggcagg

SEQ ID NO: 29006 - DNA, 80 bp, synthetic construct
  misc_feature 1..80: note = Artificially Synthesized Probe
  source 1..80: mol_type = other DNA
ggggtggacccactgactggggtgctggagataggcagggtggacccactgcctgaggtgctggagataggcagggtgga

SEQ ID NO: 29007 - DNA, 80 bp, synthetic construct
  misc_feature 1..80: note = Artificially Synthesized Probe
  source 1..80: mol_type = other DNA
ttcatggctggggacgcaggcttgcagggcaaacgctttgtacttctctaaggaggcatcacagcgcccgtgttgtgcgg

SEQ ID NO: 29008 - DNA, 80 bp, synthetic construct
  misc_feature 1..80: note = Artificially Synthesized Probe
  source 1..80: mol_type = other DNA
gaggcggccggcgccggaggcattccatcctttctgtagggaaaggagcctttatttactattttgtatttatatttgat

SEQ ID NO: 29009 - DNA, 80 bp, synthetic construct
  misc_feature 1..80: note = Artificially Synthesized Probe
  source 1..80: mol_type = other DNA
aatatacagacactataaaaactgtgtcatggtggttttggttctaaacaggtatgcagaaggtccccgttacactttcc

SEQ ID NO: 29010 - DNA, 80 bp, synthetic construct
  misc_feature 1..80: note = Artificially Synthesized Probe
  source 1..80: mol_type = other DNA
atttatgccttcattcaaagttcaccactggaaattcctcgtctttgctttgaagacatcccccaacccactccagttta

SEQ ID NO: 29011 - DNA, 80 bp, synthetic construct
  misc_feature 1..80: note = Artificially Synthesized Probe
  source 1..80: mol_type = other DNA
ccatacagcatgtccttacgccagtatctatgacaattccaaatggctgagaaatgtatgtaccacaaataaaatggaat

SEQ ID NO: 29012 - DNA, 80 bp, synthetic construct
  misc_feature 1..80: note = Artificially Synthesized Probe
  source 1..80: mol_type = other DNA
gacatcacagcagaaaaacggtcacatccgtgattttttaaacaaggctttctatgcattcaacagtgttataatttggg

SEQ ID NO: 29013 - DNA, 80 bp, synthetic construct
  misc_feature 1..80: note = Artificially Synthesized Probe
  source 1..80: mol_type = other DNA
aatttggggaaggtgctcaatgtcctttcttacaactctgagcagataaagcttcacattaaataattttcactaaacca

SEQ ID NO: 29014 - DNA, 80 bp, synthetic construct
  misc_feature 1..80: note = Artificially Synthesized Probe
  source 1..80: mol_type = other DNA
agattgttttaaaataactatgccaaggtaaatatgtacgcatgtggtaggcagaaggctggccctcaaatagtccacgt

SEQ ID NO: 29015 - DNA, 80 bp, synthetic construct
  misc_feature 1..80: note = Artificially Synthesized Probe
  source 1..80: mol_type = other DNA
gcagtggcgtgacctcagctcactgcaagctacaactcccgggctcaggccattctcctgcctcagcctccccagtagct

SEQ ID NO: 29016 - DNA, 80 bp, synthetic construct
  misc_feature 1..80: note = Artificially Synthesized Probe
  source 1..80: mol_type = other DNA
agttatcaatgcaatttaccctatagggaaaccagatcaacataactggtggcaaagatcccactgttaaactttcttca

SEQ ID NO: 29017 - DNA, 80 bp, synthetic construct
  misc_feature 1..80: note = Artificially Synthesized Probe
  source 1..80: mol_type = other DNA
acagaaacaccttacaaactcaaacgaagaaataaaaaacccctgcacagaaagacctccacatcatcttagagattatt

SEQ ID NO: 29018 - DNA, 80 bp, synthetic construct
  misc_feature 1..80: note = Artificially Synthesized Probe
  source 1..80: mol_type = other DNA
actaatcatcttacggcagagaacaaacaccaccaccagtaaaaatatccctgcaacaaacacaacgattccaattcctt

SEQ ID NO: 29019 - DNA, 80 bp, synthetic construct
  misc_feature 1..80: note = Artificially Synthesized Probe
  source 1..80: mol_type = other DNA
ctcacagtgggtccctatgtacaaggcactgcatttgcagtaataacctaaatcggcaaaaaggaacaaaaaagtcctat

SEQ ID NO: 29020 - DNA, 80 bp, synthetic construct
  misc_feature 1..80: note = Artificially Synthesized Probe
  source 1..80: mol_type = other DNA
aagaaaggagatcatcacatctgttcaaagcagtacgaagaatgtcgactccactttgtcaagtgacaggtggtgtggca

SEQ ID NO: 29021 - DNA, 80 bp, synthetic construct
  misc_feature 1..80: note = Artificially Synthesized Probe
  source 1..80: mol_type = other DNA
tcttcgatgtgtgcatagcttctgggtttgctgtttaaagggagctcctgcccattcaaataaatggagtccatacaacc

SEQ ID NO: 29022 - DNA, 80 bp, synthetic construct
  misc_feature 1..80: note = Artificially Synthesized Probe
  source 1..80: mol_type = other DNA
tgaataatgtttttaaaaaaggtgggcaagatacataacacttgaaacacatgtaggatgtctctataaactgtaacagt

SEQ ID NO: 29023 - DNA, 80 bp, synthetic construct
  misc_feature 1..80: note = Artificially Synthesized Probe
  source 1..80: mol_type = other DNA
gtgggaaaacgtctatttgcttaatgaaaagcccagcatgactggctctctgtttggaaagaataaatttgacgactgca

SEQ ID NO: 29024 - DNA, 80 bp, synthetic construct
  misc_feature 1..80: note = Artificially Synthesized Probe
  source 1..80: mol_type = other DNA
ctacataatggcactgcgttgttagctgtatgtctatataatcattgaagacacaggaggagggacaccaactatgaacc

SEQ ID NO: 29025 - DNA, 80 bp, synthetic construct
  misc_feature 1..80: note = Artificially Synthesized Probe
  source 1..80: mol_type = other DNA
ttctggaatacattcagtatcctaactccaatgatttcctcaatgtcagtcacggaagagttaatcttgtgcagaagttg

SEQ ID NO: 29026 - DNA, 80 bp, synthetic construct
  misc_feature 1..80: note = Artificially Synthesized Probe
  source 1..80: mol_type = other DNA
gaatcctcatctgttactaccagctgcagcacgctgaagcccactggcttattttcctgcacaagattagaaacaaaatt

SEQ ID NO: 29027 - DNA, 80 bp, synthetic construct
  misc_feature 1..80: note = Artificially Synthesized Probe
  source 1..80: mol_type = other DNA
gaagagaggaaggaagaggaggagtggggaggagaaagagaagaggttgacaagaggaggaaaagtgagaagggggagga

SEQ ID NO: 29028 - DNA, 80 bp, synthetic construct
  misc_feature 1..80: note = Artificially Synthesized Probe
  source 1..80: mol_type = other DNA
ctcctacaaacgagtgcatgcaagtaatacacatttcccaacagcaagaattaccaataatgattagattctctgatgcc

SEQ ID NO: 29029 - DNA, 80 bp, synthetic construct
  misc_feature 1..80: note = Artificially Synthesized Probe
  source 1..80: mol_type = other DNA
aatttcattcttaatcatcaccagtgtccttctcattcccaaatcgaaggcttcttttggttctccttcacaggcctacc

SEQ ID NO: 29030 - DNA, 80 bp, synthetic construct
  misc_feature 1..80: note = Artificially Synthesized Probe
  source 1..80: mol_type = other DNA
tcccatcccttacacgtttatacctcataacttttctttaatggtactacccagtcaaagcaagaccaaaaaatcaggct

SEQ ID NO: 29031 - DNA, 80 bp, synthetic construct
  misc_feature 1..80: note = Artificially Synthesized Probe
  source 1..80: mol_type = other DNA
tccaaacctctgctattatttaaaacccagcttctagctttaggaagtgtctcagaacactggaaccaacagtaattcct

SEQ ID NO: 29032 - DNA, 80 bp, synthetic construct
  misc_feature 1..80: note = Artificially Synthesized Probe
  source 1..80: mol_type = other DNA
tgactgtcgtgtaggtgtcttggctgaacacaggggtattatcgttgatatctgttacattaacgttcacagtggcaacg

SEQ ID NO: 29033 - DNA, 80 bp, synthetic construct
  misc_feature 1..80: note = Artificially Synthesized Probe
  source 1..80: mol_type = other DNA
atttgaatggagcaactttctacactgttttaagacttaggactattttaggccacaggttagcaagatgatgaagcatt

SEQ ID NO: 29034 - DNA, 80 bp, synthetic construct
  misc_feature 1..80: note = Artificially Synthesized Probe
  source 1..80: mol_type = other DNA
aaaggtttttctaactgaataattccagataattcgttaatggagaactgcccatcagcagagtcaatcagtgagtataa

SEQ ID NO: 29035 - DNA, 80 bp, synthetic construct
  misc_feature 1..80: note = Artificially Synthesized Probe
  source 1..80: mol_type = other DNA
ttaattcaatgggatgtgaagatcagttaatattcagtaaccagaattttagagacctcacagcagtaggttcactgggc

SEQ ID NO: 29036 - DNA, 80 bp, synthetic construct
  misc_feature 1..80: note = Artificially Synthesized Probe
  source 1..80: mol_type = other DNA
tctgaggccagggcctctcaccttgtgtataagattgcacaggtgaaacagctaccaaatttaccaaaatttaaaaaatg

SEQ ID NO: 29037 - DNA, 80 bp, synthetic construct
  misc_feature 1..80: note = Artificially Synthesized Probe
  source 1..80: mol_type = other DNA
tttgcaaatgttcctaacataaataactgcagttgagagagaagcaagtttcatgttatgggagaaaacgaagattctcg

SEQ ID NO: 29038 - DNA, 80 bp, synthetic construct
  misc_feature 1..80: note = Artificially Synthesized Probe
  source 1..80: mol_type = other DNA
ctcttccttccagctcagctcccttctccctttggaaatagctctctcttctttttcccttttgttagtatcctctcaaa

SEQ ID NO: 29039 - DNA, 80 bp, synthetic construct
  misc_feature 1..80: note = Artificially Synthesized Probe
  source 1..80: mol_type = other DNA
tcccgtcagatccttcccccaaaacagctgtatccccatattaagagaatcccctcatgaaaaggttacagagcattttc

SEQ ID NO: 29040 - DNA, 80 bp, synthetic construct
  misc_feature 1..80: note = Artificially Synthesized Probe
  source 1..80: mol_type = other DNA
agaatgagtcacaaaaatcaaaaacagtctaatgaaacaactggtagctttgctcaggtaacaagcttgaaatgaggctc

SEQ ID NO: 29041 - DNA, 80 bp, synthetic construct
  misc_feature 1..80: note = Artificially Synthesized Probe
  source 1..80: mol_type = other DNA
atgttctgctcggatgagatctatctctgttccaataggcacgtcctctgacactgtaaaggtatagaaaggttctgaaa

SEQ ID NO: 29042 - DNA, 80 bp, synthetic construct
  misc_feature 1..80: note = Artificially Synthesized Probe
  source 1..80: mol_type = other DNA
actgtgcaaattgcctccaattacagttacatgaacctgggtggaacttctaaaaactccatcagacactgacaggttaa

SEQ ID NO: 29043 - DNA, 80 bp, synthetic construct
  misc_feature 1..80: note = Artificially Synthesized Probe
  source 1..80: mol_type = other DNA
gataacttccgctgaaaaggccgggttccctccatcttttgcaaccactgtaacaagatattctttatttaaggtgtcaa

SEQ ID NO: 29044 - DNA, 80 bp, synthetic construct
  misc_feature 1..80: note = Artificially Synthesized Probe
  source 1..80: mol_type = other DNA
ctgcatactcagcaaataaacgtggggttcccatgtcatgcacttggacggtaaagtgaaaaatacttgtttcttcatag

SEQ ID NO: 29045 - DNA, 80 bp, synthetic construct
  misc_feature 1..80: note = Artificially Synthesized Probe
  source 1..80: mol_type = other DNA
ccaggagtccctcaaaacacttctggaccacatttgtattttcaacggttatgacttacaaattcttaagatatgtattc

SEQ ID NO: 29046 - DNA, 80 bp, synthetic construct
  misc_feature 1..80: note = Artificially Synthesized Probe
  source 1..80: mol_type = other DNA
cacttccttcctttcatacattttccaaaaatccacggccattttttagagaccagatccagcctgcttttcattaagtc

SEQ ID NO: 29047 - DNA, 80 bp, synthetic construct
  misc_feature 1..80: note = Artificially Synthesized Probe
  source 1..80: mol_type = other DNA
gatacatgaatcccacatccatatagattaaggcagaaatcatcagatttgcaggtgggaaagcagcatcgtgtttatgt

SEQ ID NO: 29048 - DNA, 80 bp, synthetic construct
  misc_feature 1..80: note = Artificially Synthesized Probe
  source 1..80: mol_type = other DNA
catttgtatgaacattttatagttcgtactattccaacagatgtccacctccatctccaacacatgcacacaccccttcc

SEQ ID NO: 29049 - DNA, 80 bp, synthetic construct
  misc_feature 1..80: note = Artificially Synthesized Probe
  source 1..80: mol_type = other DNA
cccaacatttcatcactttcagaggatctggcatgagcaggaacatcctaaagcaacgtgacttctgattgtacagactg

SEQ ID NO: 29050 - DNA, 80 bp, synthetic construct
  misc_feature 1..80: note = Artificially Synthesized Probe
  source 1..80: mol_type = other DNA
aatgaatgaatgaatgagggaccaacatggcacctcgcacataaactgagcttcatcagcctacagaatgaatgaatgaa

SEQ ID NO: 29051 - DNA, 80 bp, synthetic construct
  misc_feature 1..80: note = Artificially Synthesized Probe
  source 1..80: mol_type = other DNA
aatccaggtaaatgtggaaggggtgggaggggcacgacacctctttctgaggtttcagccaattacaatgagatgagtca

SEQ ID NO: 29052 - DNA, 80 bp, synthetic construct
  misc_feature 1..80: note = Artificially Synthesized Probe
  source 1..80: mol_type = other DNA
caggatcaagacgaaatttcttgagactcagtggatctctactgctctgcagagtgtagattagtttgtttttctcatcc

SEQ ID NO: 29053 - DNA, 80 bp, synthetic construct
  misc_feature 1..80: note = Artificially Synthesized Probe
  source 1..80: mol_type = other DNA
atggatttggcacagcggaaatcactgccaattataaaacatgctttagagtttaagaagaagaaaactgcgcttcgtgg

SEQ ID NO: 29054 - DNA, 80 bp, synthetic construct
  misc_feature 1..80: note = Artificially Synthesized Probe
  source 1..80: mol_type = other DNA
tgagatattcagaaagctcttaaggagataatgctttcttgggtacatttttggttggcaggtgagtaagtatgaggaag

SEQ ID NO: 29055 - DNA, 80 bp, synthetic construct
  misc_feature 1..80: note = Artificially Synthesized Probe
  source 1..80: mol_type = other DNA
ttgacttctgagtgttacttccaagccccaatccatccccgaggtatcctagtgtctcacctcccagctgacccctctgc

SEQ ID NO: 29056 - DNA, 80 bp, synthetic construct
  misc_feature 1..80: note = Artificially Synthesized Probe
  source 1..80: mol_type = other DNA
ttatgaagctccttttgttagatttctgggtagtcgattctgtgaattggtctacagttataccccttaaatccttctct

SEQ ID NO: 29057 - DNA, 80 bp, synthetic construct
  misc_feature 1..80: note = Artificially Synthesized Probe
  source 1..80: mol_type = other DNA
ctattcaccttccagaatggtgcctggcatgtaacaagtgttcaacaaatacttggtaaataaatgagtgaatgacactc

SEQ ID NO: 29058 - DNA, 80 bp, synthetic construct
  misc_feature 1..80: note = Artificially Synthesized Probe
  source 1..80: mol_type = other DNA
ggcaaagtgaaccctaattgtccaggaagcaactaactgaaagaaagcaagaaagcaactctgaaaacaaagacattgct

SEQ ID NO: 29059 - DNA, 80 bp, synthetic construct
  misc_feature 1..80: note = Artificially Synthesized Probe
  source 1..80: mol_type = other DNA
tgatctcagcagataccttctgctgtacaggtcgggtcacaagtcatctgaaagatgtaaaaaacttctctagcaagcgt

SEQ ID NO: 29060 - DNA, 80 bp, synthetic construct
  misc_feature 1..80: note = Artificially Synthesized Probe
  source 1..80: mol_type = other DNA
tattcccaattttaaatcctgacttgtgcccaaaactcatcaaaccgtatgcaggttctcctcagtgtaacccatacgga

SEQ ID NO: 29061 - DNA, 80 bp, synthetic construct
  misc_feature 1..80: note = Artificially Synthesized Probe
  source 1..80: mol_type = other DNA
ggcatttctttctcggtctggcttttcccgctcagggagtctgattttgtagaacttttgcagaaactgaggtttgttgt

SEQ ID NO: 29062 - DNA, 80 bp, synthetic construct
  misc_feature 1..80: note = Artificially Synthesized Probe
  source 1..80: mol_type = other DNA
aaaaaatatcagagagtcttgaggactgcactgatgactgtttctatgtccctaagagaccatttcacccttaaatcaaa

SEQ ID NO: 29063 - DNA, 80 bp, synthetic construct
  misc_feature 1..80: note = Artificially Synthesized Probe
  source 1..80: mol_type = other DNA
tagcctttgatattcacggagaaaagaggactctggagtgacgtatgcaattaatgtgaaatttgaaaggactggagcaa

SEQ ID NO: 29064 - DNA, 80 bp, synthetic construct
  misc_feature 1..80: note = Artificially Synthesized Probe
  source 1..80: mol_type = other DNA
agatctgaatccggcccatgacagtggctgtgtattctgggaatggtattgagggataaaggggacaagagctatattca

SEQ ID NO: 29065 - DNA, 80 bp, synthetic construct
  misc_feature 1..80: note = Artificially Synthesized Probe
  source 1..80: mol_type = other DNA
tcctttaactgctcaagagataactgagagttgacagaaatgacttctataactatattaataaggactattgaaaataa

SEQ ID NO: 29066 - DNA, 80 bp, synthetic construct
  misc_feature 1..80: note = Artificially Synthesized Probe
  source 1..80: mol_type = other DNA
tttccccaatcaaaaatgtaccatcctctcctaactgtggttgtaaatagttcaggaacgacaaggagccccttgattag

SEQ ID NO: 29067 - DNA, 80 bp, synthetic construct
  misc_feature 1..80: note = Artificially Synthesized Probe
  source 1..80: mol_type = other DNA
tcagatggagctttaatttcatcccaatgcaatgaatggtaatattagcccctttctttccacttcagcctgagtcactg

SEQ ID NO: 29068 - DNA, 80 bp, synthetic construct
  misc_feature 1..80: note = Artificially Synthesized Probe
  source 1..80: mol_type = other DNA
attgtctcacatgtaactgtaaactagagagaagacgaagatgtagacttccactaacaaatacagtcaccactagcctc

SEQ ID NO: 29069 - DNA, 80 bp, synthetic construct
  misc_feature 1..80: note = Artificially Synthesized Probe
  source 1..80: mol_type = other DNA
ctcttgaggctcagatgagcgtttttttctccctatcacacctgactgcgtaatttgctgtattatagtatttcaacact

SEQ ID NO: 29070 - DNA, 80 bp, synthetic construct
  misc_feature 1..80: note = Artificially Synthesized Probe
  source 1..80: mol_type = other DNA
cacacagctggagcgatgaatgcattcagtcaactgtgttgtactgtccactcagaaagtggagataagacagtcttgtt

SEQ ID NO: 29071 - DNA, 80 bp, synthetic construct
  misc_feature 1..80: note = Artificially Synthesized Probe
  source 1..80: mol_type = other DNA
acacacatgaaagatggcagctagaaaaggaaaaaaataggatttctgaataggattcaggtccaactgcaacaagagag

SEQ ID NO: 29072 - DNA, 80 bp, synthetic construct
  misc_feature 1..80: note = Artificially Synthesized Probe
  source 1..80: mol_type = other DNA
tgaacacgtaccaatcaagaggctctgtgcttagctgtgacttggagaatcatgactctactaatttgttttgtttttgc

SEQ ID NO: 29073 - DNA, 80 bp, synthetic construct
  misc_feature 1..80: note = Artificially Synthesized Probe
  source 1..80: mol_type = other DNA
attattcagtgatctcactttcttctaggattagaatgttctctccaccaagcccagctccttttgcaggaaggagtcct

SEQ ID NO: 29074 - DNA, 80 bp, synthetic construct
  misc_feature 1..80: note = Artificially Synthesized Probe
  source 1..80: mol_type = other DNA
cttaaaacatgaggaaatgaggtctaggcatgtggaataatttcctgaaggtctgagtcagcaggagaaactttcctacc

SEQ ID NO: 29075 - DNA, 80 bp, synthetic construct
  misc_feature 1..80: note = Artificially Synthesized Probe
  source 1..80: mol_type = other DNA
atttccattgaacagcatattttccgtcttcttggaaatacctttgtggtggattgaatggtggctcctgcccaaaagat

SEQ ID NO: 29076 - DNA, 80 bp, synthetic construct
  misc_feature 1..80: note = Artificially Synthesized Probe
  source 1..80: mol_type = other DNA
cctgtaacacacaaaagttccaactctaaagctgtttcaactaaggaccaagacagaacagactctttgattctgagtaa

SEQ ID NO: 29077 - DNA, 80 bp, synthetic construct
  misc_feature 1..80: note = Artificially Synthesized Probe
  source 1..80: mol_type = other DNA
gtccctttgtaaacatgtcatccatggaacattctagtctacggatctgtacccaaccagcttaaataaaatgaaacggc

SEQ ID NO: 29078 - DNA, 80 bp, synthetic construct
  misc_feature 1..80: note = Artificially Synthesized Probe
  source 1..80: mol_type = other DNA
actcaatttacagggaattgccttcagtgatcctataaatgtcagatatagcagggtcagaagaagaggatagggtacac

SEQ ID NO: 29079 - DNA, 80 bp, synthetic construct
  misc_feature 1..80: note = Artificially Synthesized Probe
  source 1..80: mol_type = other DNA
agtatacttagagccaactgtttgagctgaaattgggagctctgaaaacttaacaggacacatcaacacagaaaaagtag

SEQ ID NO: 29080 - DNA, 80 bp, synthetic construct
  misc_feature 1..80: note = Artificially Synthesized Probe
  source 1..80: mol_type = other DNA
gatggcaagacacagtagacgggtggaagagtggtataaaaaaagacttcagagaatgagacagaaaggggcaaaacaag

SEQ ID NO: 29081 - DNA, 80 bp, synthetic construct
  misc_feature 1..80: note = Artificially Synthesized Probe
  source 1..80: mol_type = other DNA
tgtatttgttctcaaagaggaagatgaatgagaagaggtaaaaagtaaacattggttagataaaatcagtagaccagtga

SEQ ID NO: 29082 - DNA, 80 bp, synthetic construct
  misc_feature 1..80: note = Artificially Synthesized Probe
  source 1..80: mol_type = other DNA
ctggctctgatatgacttgggcgtgacacagatggtggtgtggagtgggactctggactggtcagcttgcatatgaaaag

SEQ ID NO: 29083 - DNA, 80 bp, synthetic construct
  misc_feature 1..80: note = Artificially Synthesized Probe
  source 1..80: mol_type = other DNA
tgtgtccacagaaaggcttgtactcaatgttcacagcggatttacaaactgccaaaaactggcagcaatacaaatgccta

SEQ ID NO: 29084 - DNA, 80 bp, synthetic construct
  misc_feature 1..80: note = Artificially Synthesized Probe
  source 1..80: mol_type = other DNA
tgctcctgtctctcttccaccttgagcaagtgctcaacttaagttaaaagaagcacatttaccctgtaactgatgatgga

SEQ ID NO: 29085 - DNA, 80 bp, synthetic construct
  misc_feature 1..80: note = Artificially Synthesized Probe
  source 1..80: mol_type = other DNA
attccttcaaattgtcgccgacatgaaaacatctcctacctcctctccatcaatctattgttaccatcttcacaatcagc

SEQ ID NO: 29086 - DNA, 80 bp, synthetic construct
  misc_feature 1..80: note = Artificially Synthesized Probe
  source 1..80: mol_type = other DNA
gtttatcagtctactagattcttgattgtctgacattcattaacagagcaaccgtaacacccgcaagaggaagcggctgt

SEQ ID NO: 29087 - DNA, 80 bp, synthetic construct
  misc_feature 1..80: note = Artificially Synthesized Probe
  source 1..80: mol_type = other DNA
cacagacatctctgcaaacaccttttctttagagttgtcagaatagagagatttaaaagggagaggcaatgccatattaa

SEQ ID NO: 29088 - DNA, 80 bp, synthetic construct
  misc_feature 1..80: note = Artificially Synthesized Probe
  source 1..80: mol_type = other DNA
ctgtttatttgcatcctttaaaatatcctctgtaataaacaggtaaatgttaagtgtttccctgggttctgtgagccgct

SEQ ID NO: 29089 - DNA, 80 bp, synthetic construct
  misc_feature 1..80: note = Artificially Synthesized Probe
  source 1..80: mol_type = other DNA
caatctgaaaactgttcaatcccaatcccttaccacctgcagatacagcactgctctataggaaacacttaaaacattaa

SEQ ID NO: 29090 - DNA, 80 bp, synthetic construct
  misc_feature 1..80: note = Artificially Synthesized Probe
  source 1..80: mol_type = other DNA
cattgacatcctcaacctctatgtagatctctatgaacgatgaaagaggcacgacaccctgatcggttgcaaagactgtt

SEQ ID NO: 29091 - DNA, 80 bp, synthetic construct
  misc_feature 1..80: note = Artificially Synthesized Probe
  source 1..80: mol_type = other DNA
agtggctaaggaaagaaactgcaaccttcaaagtccacaataaggggctgctcagatctcctgagtgttgaggtcctttt

SEQ ID NO: 29092 - DNA, 80 bp, synthetic construct
  misc_feature 1..80: note = Artificially Synthesized Probe
  source 1..80: mol_type = other DNA
ttatttcatactgaaccttcagaaagggggtataatactgcttctagaaacatggaagaaacctcagaaccaaatggtat

SEQ ID NO: 29093 - DNA, 80 bp, synthetic construct
  misc_feature 1..80: note = Artificially Synthesized Probe
  source 1..80: mol_type = other DNA
tctgtctgtaggctcaaataataacctttcccagttcctctgattcatcacatctatccacagatacaaagacgtcaggg

SEQ ID NO: 29094 - DNA, 80 bp, synthetic construct
  misc_feature 1..80: note = Artificially Synthesized Probe
  source 1..80: mol_type = other DNA
tgtcggcctccccggtaatctacggatattactaaaggttaagactgaggcaacaaagcgactctattcaaatatcggag

SEQ ID NO: 29095 - DNA, 80 bp, synthetic construct
  misc_feature 1..80: note = Artificially Synthesized Probe
  source 1..80: mol_type = other DNA
agttattttgttttccgctttttaatctgtcagcccagttgcatgatacactcctcaagaaccctgggcagaaacttcca

SEQ ID NO: 29096 - DNA, 80 bp, synthetic construct
  misc_feature 1..80: note = Artificially Synthesized Probe
  source 1..80: mol_type = other DNA
taaaactaaagacatccagtcatcactggatgtgaatcaaactgtggtcactctcaaacctctatccctgtctatttctc

SEQ ID NO: 29097 - DNA, 80 bp, synthetic construct
  misc_feature 1..80: note = Artificially Synthesized Probe
  source 1..80: mol_type = other DNA
agcattccctcccgctgacacaggtggaacaggactcttgcaacacagtaatctttaaggcaaaaataaagttatagcta

SEQ ID NO: 29098 - DNA, 80 bp, synthetic construct
  misc_feature 1..80: note = Artificially Synthesized Probe
  source 1..80: mol_type = other DNA
agcttcctattagaatgcaaactttttaaggacaaagaattgttacgtgtttggttcaaggccgggtcaatagtgagtgc

SEQ ID NO: 29099 - DNA, 80 bp, synthetic construct
  misc_feature 1..80: note = Artificially Synthesized Probe
  source 1..80: mol_type = other DNA
gttatttactactgtggactaaaatagaacaagaaatgaaaaaggaggagtctattgggctgaaggcatttaagattcta

SEQ ID NO: 29100 - DNA, 80 bp, synthetic construct
  misc_feature 1..80: note = Artificially Synthesized Probe
  source 1..80: mol_type = other DNA
aacacaacctgcaaatttcaccagagaagttgtgacttgaatgcaatccagaaatgtagctgccagatgccgttttccca

SEQ ID NO: 29101 - DNA, 80 bp, synthetic construct
  misc_feature 1..80: note = Artificially Synthesized Probe
  source 1..80: mol_type = other DNA
ttaagtacataatcagattttaagcatcatgtttcaagcccagggatttctttagctctgcaaagagtcattcccagggt

SEQ ID NO: 29102 - DNA, 80 bp, synthetic construct
  misc_feature 1..80: note = Artificially Synthesized Probe
  source 1..80: mol_type = other DNA
taacaacttagcctgaaaagttaaggaagtcatcctcagttatccaactttggtagcagagaagccagaaccccaaacct

SEQ ID NO: 29103 - DNA, 80 bp, synthetic construct
  misc_feature 1..80: note = Artificially Synthesized Probe
  source 1..80: mol_type = other DNA
cctctttaggaaagaaatctcattaagaaaaaaaaaaaactagcctcagcatggtggtgtgccctgtagtaccagttact

SEQ ID NO: 29104 - DNA, 80 bp, synthetic construct
  misc_feature 1..80: note = Artificially Synthesized Probe
  source 1..80: mol_type = other DNA
ttcagaaatgtaaaagcaacctttaaaagttaagagtgacttacaggttttcataggctgaataacaactgcctaaagct

SEQ ID NO: 29105 - DNA, 80 bp, synthetic construct
  misc_feature 1..80: note = Artificially Synthesized Probe
  source 1..80: mol_type = other DNA
atcacaaaagagggcacacctgtatgtatcaggattctaaaattgagaggtaagcaatcaaaactcaacaaacctcctac

SEQ ID NO: 29106 - DNA, 80 bp, synthetic construct
  misc_feature 1..80: note = Artificially Synthesized Probe
  source 1..80: mol_type = other DNA
tactaaaatatacgtatcggagaagataaaaatataaataaatagctaggcgcagtggctcatgctggtaatcccagcac

SEQ ID NO: 29107 - DNA, 80 bp, synthetic construct
  misc_feature 1..80: note = Artificially Synthesized Probe
  source 1..80: mol_type = other DNA
aagcatgttctgagagtctaattcaggaaactgagtttgttttctatccataagcaggaagtatctcacatcttatttag

SEQ ID NO: 29108 - DNA, 80 bp, synthetic construct
  misc_feature 1..80: note = Artificially Synthesized Probe
  source 1..80: mol_type = other DNA
ttattgtccttaaaaaagaaatacaactcaacagactaacacaatctgttcaaaagagacacgcaaaggggtaccagtgt

SEQ ID NO: 29109 - DNA, 80 bp, synthetic construct
  misc_feature 1..80: note = Artificially Synthesized Probe
  source 1..80: mol_type = other DNA
gtatgacaccttaatccctaacctctgtatttccaaggatgctattattcaagacagaaactggctactaacagaaatca

SEQ ID NO: 29110 - DNA, 80 bp, synthetic construct
  misc_feature 1..80: note = Artificially Synthesized Probe
  source 1..80: mol_type = other DNA
ttatctaacagctgggaagaaaacctaggttgccacccagattcaggactaggaatcaggcacctcctaagatttctttc

SEQ ID NO: 29111 - DNA, 80 bp, synthetic construct
  misc_feature 1..80: note = Artificially Synthesized Probe
  source 1..80: mol_type = other DNA
cttccaccatacaagcttgtgtttcagggctattattccctctgattaaaaattgtcttcaaatagttggctcttcgttc

SEQ ID NO: 29112 - DNA, 80 bp, synthetic construct
  misc_feature 1..80: note = Artificially Synthesized Probe
  source 1..80: mol_type = other DNA
attctcttgttgtttaatcgtctcatctagactgaatctcctctccaattataactatatccaatcccagatgaaggtct

SEQ ID NO: 29113 - DNA, 80 bp, synthetic construct
  misc_feature 1..80: note = Artificially Synthesized Probe
  source 1..80: mol_type = other DNA
ggcattacactgagatcaaacaaagcattccagaaaggcaaaggctcttctcacagggaaaggaagaataagtcttacat

SEQ ID NO: 29114 - DNA, 80 bp, synthetic construct
  misc_feature 1..80: note = Artificially Synthesized Probe
  source 1..80: mol_type = other DNA
agattcctactctaaattcttggactctgactcacttatgacaatcctggaagctggaactcaaatatctatgggcagtc

SEQ ID NO: 29115 - DNA, 80 bp, synthetic construct
  misc_feature 1..80: note = Artificially Synthesized Probe
  source 1..80: mol_type = other DNA
acaagcctgatagcagcgaaaacgaaaaattcaactacttctgattttacgaagtagcatctggccaatgaaatgaagag

SEQ ID NO: 29116 - DNA, 80 bp, synthetic construct
  misc_feature 1..80: note = Artificially Synthesized Probe
  source 1..80: mol_type = other DNA
actacacgttcagtaaatgttttctgttcatcatttttacaaatcccgcacctggcactggaaaggcatctttgtgcagg

SEQ ID NO: 29117 - DNA, 80 bp, synthetic construct
  misc_feature 1..80: note = Artificially Synthesized Probe
  source 1..80: mol_type = other DNA
ttcagctgctacagtagactttccagccagcagccggcacaaaataaacatatttacttaagcttcagtcacaactcttg

SEQ ID NO: 29118 - DNA, 80 bp, synthetic construct
  misc_feature 1..80: note = Artificially Synthesized Probe
  source 1..80: mol_type = other DNA
catgccaggatctaggccaccagcctcttcaacaaataaattttcagcaacaccagtgtaataggcttttaacatcctca

SEQ ID NO: 29119 - DNA, 80 bp, synthetic construct
  misc_feature 1..80: note = Artificially Synthesized Probe
  source 1..80: mol_type = other DNA
tacataagtctctaaacttgcatttgaaatggggctagtcgaaactgaaatttgctgtaagggtggaatatacactgatt

SEQ ID NO: 29120 - DNA, 80 bp, synthetic construct
  misc_feature 1..80: note = Artificially Synthesized Probe
  source 1..80: mol_type = other DNA
tgtcaactaacttgttacagaatcttcatttcatttcatgagaaaattttttgttagaaacaaggccactgagccaggcg

SEQ ID NO: 29121 - DNA, 80 bp, synthetic construct
  misc_feature 1..80: note = Artificially Synthesized Probe
  source 1..80: mol_type = other DNA
taaaacttttccatttaagctgaaacttaagcagagatgtcagagggctgcatgaaacctaaagataccaaatcaacact

SEQ ID NO: 29122 - DNA, 80 bp, synthetic construct
  misc_feature 1..80: note = Artificially Synthesized Probe
  source 1..80: mol_type = other DNA
atttaacattcagaagggattccctcaaagggaaacgcaatcgggtaaaagtgcctctggaagtaggaacatgaacacag

SEQ ID NO: 29123 - DNA, 80 bp, synthetic construct
  misc_feature 1..80: note = Artificially Synthesized Probe
  source 1..80: mol_type = other DNA
tcaacctgcctctcacctaacctaaccaccatctccccatttctcataacgctcaacctctctcaaatgcaacttgctat

SEQ ID NO: 29124 - DNA, 80 bp, synthetic construct
  misc_feature 1..80: note = Artificially Synthesized Probe
  source 1..80: mol_type = other DNA
cattgctactaaactgctttgttgttcttattcttgtaattttggaaggtatgggagacagggtgtctcaagtggaagag

SEQ ID NO: 29125 - DNA, 80 bp, synthetic construct
  misc_feature 1..80: note = Artificially Synthesized Probe
  source 1..80: mol_type = other DNA
cagcgcccggccataggccctagaacacttattttaaaaattactgaccttaaactctaatcttgatactttgtagatat

SEQ ID NO: 29126 - DNA, 80 bp, synthetic construct
  misc_feature 1..80: note = Artificially Synthesized Probe
  source 1..80: mol_type = other DNA
taattaattaattaattaattctgtctgccaagggagctaactttatcattagaggcctgagtttcctgacagattgcct

SEQ ID NO: 29127 - DNA, 80 bp, synthetic construct
  misc_feature 1..80: note = Artificially Synthesized Probe
  source 1..80: mol_type = other DNA
cttggtattgaatcaaatcactgtctctctgaagaaagaatatacagctttccacagattctcaaagtttctgtgacgcc

SEQ ID NO: 29128 - DNA, 80 bp, synthetic construct
  misc_feature 1..80: note = Artificially Synthesized Probe
  source 1..80: mol_type = other DNA
aacgggttaaggaggattccgtgacagatgaacacctcagctcaagaatcacgtctgtattgtcagaatgcctcctaacg

SEQ ID NO: 29129 - DNA, 80 bp, synthetic construct
  misc_feature 1..80: note = Artificially Synthesized Probe
  source 1..80: mol_type = other DNA
caggtcactcaacaaattacgaacacccaatccttaaacatccttaggacaaaaaacagttccctggcaagggggacggt

SEQ ID NO: 29130 - DNA, 80 bp, synthetic construct
  misc_feature 1..80: note = Artificially Synthesized Probe
  source 1..80: mol_type = other DNA
agcatccgtagatcattcttcaaagagtaagaggagtaaaatgcggttctggcacttagcacccaagaagtcttgggcaa

SEQ ID NO: 29131 - DNA, 80 bp, synthetic construct
  misc_feature 1..80: note = Artificially Synthesized Probe
  source 1..80: mol_type = other DNA
tatgaggaaaagggtttctaacttgaatgaataataaatagctgaaacattcagagttctgcagaaccagacagaagctc

SEQ ID NO: 29132 - DNA, 80 bp, synthetic construct
  misc_feature 1..80: note = Artificially Synthesized Probe
  source 1..80: mol_type = other DNA
tttattccacacacccacaagagggatgctccagattttattctgcttaaattacaggaaaacctgttgaagcttacaac

SEQ ID NO: 29133 - DNA, 80 bp, synthetic construct
  misc_feature 1..80: note = Artificially Synthesized Probe
  source 1..80: mol_type = other DNA
cactcctgcacaggctcatattaattagcgcaatattaaatgcccccgagttaggcaaagaagaccctggtggacatggg

SEQ ID NO: 29134 - DNA, 80 bp, synthetic construct
  misc_feature 1..80: note = Artificially Synthesized Probe
  source 1..80: mol_type = other DNA
ggcactgccctttctggaaaataccataaatctattttgggacaccacctcgtttggctggttgtttccttatttttttt

SEQ ID NO: 29135 - DNA, 80 bp, synthetic construct
  misc_feature 1..80: note = Artificially Synthesized Probe
  source 1..80: mol_type = other DNA
cagcccaaaataatgtttttctaaacagcagttacatttttcatgtgctacacacctatcagatggcatggatcccaggg

SEQ ID NO: 29136 - DNA, 80 bp, synthetic construct
  misc_feature 1..80: note = Artificially Synthesized Probe
  source 1..80: mol_type = other DNA
cccttttgtttccatcttcatggcttactacgaataaacacatctacaatacagcagccgggccaaaaaaaatattcaca

SEQ ID NO: 29137 - DNA, 80 bp, synthetic construct
  misc_feature 1..80: note = Artificially Synthesized Probe
  source 1..80: mol_type = other DNA
tccttctggaagatcctctcggactttcacacgataattaggtggaataaatgtaggtgggttgtcattaacatcttcta

SEQ ID NO: 29138 - DNA, 80 bp, synthetic construct
  misc_feature 1..80: note = Artificially Synthesized Probe
  source 1..80: mol_type = other DNA
tacccccgagttggggtttaaactaaagaaatccagttcatttccagcttcaatctgatactgtaccaactgaagttcat

SEQ ID NO: 29139 - DNA, 80 bp, synthetic construct
  misc_feature 1..80: note = Artificially Synthesized Probe
  source 1..80: mol_type = other DNA
gaggatttccatctcatagagcttggtctctaggtaatcaagtctaccagttaacactatcacaccactggttgggtgaa

SEQ ID NO: 29140 - DNA, 80 bp, synthetic construct
  misc_feature 1..80: note = Artificially Synthesized Probe
  source 1..80: mol_type = other DNA
agcaggagcaaagccaaatgtctccccattgcttaactgtcgggaatctgaaacagaagaaatcagaatcgttaccttgg

SEQ ID NO: 29141 - DNA, 80 bp, synthetic construct
  misc_feature 1..80: note = Artificially Synthesized Probe
  source 1..80: mol_type = other DNA
aaagctaaatcttctaagctaacacacgtcaagggtcaaatcagtctattaatacatggtggcagactctgcaggacagt

SEQ ID NO: 29142 - DNA, 80 bp, synthetic construct
  misc_feature 1..80: note = Artificially Synthesized Probe
  source 1..80: mol_type = other DNA
ttagcaagcagtgtcttttgttttaggagtcacattatgttttaggagacatttttaccatcatccattgtacaacaaaa

SEQ ID NO: 29143 - DNA, 80 bp, synthetic construct
  misc_feature 1..80: note = Artificially Synthesized Probe
  source 1..80: mol_type = other DNA
agggcttacactagtgacatgctgggcaactcttagattctttggggaaacgtagagtgttcaatatgattcctggtccc

SEQ ID NO: 29144 - DNA, 80 bp, synthetic construct
  misc_feature 1..80: note = Artificially Synthesized Probe
  source 1..80: mol_type = other DNA
agatttagactgacagaattttacatactcaggaaccaccagcacgcctggctcatgtttgtattttttatagagacggg

SEQ ID NO: 29145 - DNA, 80 bp, synthetic construct
  misc_feature 1..80: note = Artificially Synthesized Probe
  source 1..80: mol_type = other DNA
gatatgtgggagactccagccggcagatagaaatttgagagttgtctaaatatgaaagacggtatttaaaaccacagaac

SEQ ID NO: 29146 - DNA, 80 bp, synthetic construct
  misc_feature 1..80: note = Artificially Synthesized Probe
  source 1..80: mol_type = other DNA
ggaccacattcctaactgaaatctttgaaaaacctgaatgtactctgcaaacttggctaacagaatgctactgtgagtag

SEQ ID NO: 29147 - DNA, 80 bp, synthetic construct
  misc_feature 1..80: note = Artificially Synthesized Probe
  source 1..80: mol_type = other DNA
tgttctccctcactgtgctcttctccactctcattttctatcaacatagtgaaagcgtcagtagaatttaactcatgatt

SEQ ID NO: 29148 - DNA, 80 bp, synthetic construct
  misc_feature 1..80: note = Artificially Synthesized Probe
  source 1..80: mol_type = other DNA
ctctagcaagacatactttaaatattgccttcacatgatcaaccaccggttccaatttaaccctgagaatggtctttact

SEQ ID NO: 29149 - DNA, 80 bp, synthetic construct
  misc_feature 1..80: note = Artificially Synthesized Probe
  source 1..80: mol_type = other DNA
acggaaatcttcagggagaaaagtccatcttccctcctcctcttaaaatgttctcttcacctgttctctcttcttacacc

SEQ ID NO: 29150 - DNA, 80 bp, synthetic construct
  misc_feature 1..80: note = Artificially Synthesized Probe
  source 1..80: mol_type = other DNA
atactctacactgactcacctacaactctggcattacaaacttgtcttccaactcttcctccacatgcatttattaccac

SEQ ID NO: 29151 - DNA, 80 bp, synthetic construct
  misc_feature 1..80: note = Artificially Synthesized Probe
  source 1..80: mol_type = other DNA
aatttcccaacactacttcttatttcaaaacaaaaaggcatacttcccagacttgcaacaagttcagtaaccaagctgtc

SEQ ID NO: 29152 - DNA, 80 bp, synthetic construct
  misc_feature 1..80: note = Artificially Synthesized Probe
  source 1..80: mol_type = other DNA
tagaggactcatttccaatagctcagaaagaggtcaccacccaccttacgctgcctcaaaattggctatagataatgcca

SEQ ID NO: 29153 - DNA, 80 bp, synthetic construct
  misc_feature 1..80: note = Artificially Synthesized Probe
  source 1..80: mol_type = other DNA
tgaggcactacgcccggccataatttttaaacatttttctgttggcacctgtccggaccatggatttaaatgatctacta

SEQ ID NO: 29154 - DNA, 80 bp, synthetic construct
  misc_feature 1..80: note = Artificially Synthesized Probe
  source 1..80: mol_type = other DNA
tctttcttttaaaaagatcttagaagttcctcctccagagaagacagaaaacactgacaaaccgcacattgtgcagatgt

SEQ ID NO: 29155 - DNA, 80 bp, synthetic construct
  misc_feature 1..80: note = Artificially Synthesized Probe
  source 1..80: mol_type = other DNA
gggaccgcgggctcggccacgcagtcccgcccggacccaaagagccccagtccctgcgaacaccaggtccgtgctgggag

SEQ ID NO: 29156 - DNA, 80 bp, synthetic construct
  misc_feature 1..80: note = Artificially Synthesized Probe
  source 1..80: mol_type = other DNA
tgaaagagaatttcctgggttcaaagttaacgcagtcaccttataagccatcttagaggtgaccggaaaaaataataata

SEQ ID NO: 29157 - DNA, 80 bp, synthetic construct
  misc_feature 1..80: note = Artificially Synthesized Probe
  source 1..80: mol_type = other DNA
ctcaagttctttttaacagtgctctatatgtattttatgaactcccaaagctatgcatacgaatctttcatcgccgatcc

SEQ ID NO: 29158 - DNA, 80 bp, synthetic construct
  misc_feature 1..80: note = Artificially Synthesized Probe
  source 1..80: mol_type = other DNA
ccaactgatatctttattctctgatctcttgcagttccagttgatgggcaagtgggtgagtgatctctaactcagcttct

SEQ ID NO: 29159 - DNA, 80 bp, synthetic construct
  misc_feature 1..80: note = Artificially Synthesized Probe
  source 1..80: mol_type = other DNA
ctgggagcagctctacacagtggtttctcaatggcacagccactcagacctcgacccccagctacagaatcacctctgcc

SEQ ID NO: 29160 - DNA, 80 bp, synthetic construct
  misc_feature 1..80: note = Artificially Synthesized Probe
  source 1..80: mol_type = other DNA
gttgctgttagaggaaatgtgttttagccaaggaaatgttgagaatgtctgagggaaggcttgatgttcctcatgtgtcc

SEQ ID NO: 29161 - DNA, 80 bp, synthetic construct
  misc_feature 1..80: note = Artificially Synthesized Probe
  source 1..80: mol_type = other DNA
cttattactgtatatttcatattttcccattctgctgaggggctcgggttgcttctggttttgaccacttacaaatagta

SEQ ID NO: 29162 - DNA, 80 bp, synthetic construct
  misc_feature 1..80: note = Artificially Synthesized Probe
  source 1..80: mol_type = other DNA
ctgctggctgtgggtgggaataagggagggaagagaattaattctatttggaagcattatatcagtatccatgactgtaa

SEQ ID NO: 29163 - DNA, 80 bp, synthetic construct
  misc_feature 1..80: note = Artificially Synthesized Probe
  source 1..80: mol_type = other DNA
attctgcctaccatgctgtatgaactgtttttgtttcaaccaacttctgagatctggaaagggaagataagaaagggctg

SEQ ID NO: 29164 - DNA, 80 bp, synthetic construct
  misc_feature 1..80: note = Artificially Synthesized Probe
  source 1..80: mol_type = other DNA
ctacctctcagggacaaagcagcctctgtggtgccacttcttcctgagcatctgcaggctaagcagtttgcatatggcct

SEQ ID NO: 29165 - DNA, 80 bp, synthetic construct
  misc_feature 1..80: note = Artificially Synthesized Probe
  source 1..80: mol_type = other DNA
ccaaaactgtccccacttcaccccccggctgtggaaaagttgccttccacaaaatccatccctagtgccaaaaaggttgg

SEQ ID NO: 29166 - DNA, 80 bp, synthetic construct
  misc_feature 1..80: note = Artificially Synthesized Probe
  source 1..80: mol_type = other DNA
ccctcctcctcaccaacaatctcaccaacaatttatcaagttcttcctatctgttgtcatacgtctggggatataaagac

SEQ ID NO: 29167 - DNA, 80 bp, synthetic construct
  misc_feature 1..80: note = Artificially Synthesized Probe
  source 1..80: mol_type = other DNA
acaaacatccaaaagttcaacaacaccagaactgtgtgtctcatggtatgtaactcttaaagcaaataaatgaactgact

SEQ ID NO: 29168 - DNA, 80 bp, synthetic construct
  misc_feature 1..80: note = Artificially Synthesized Probe
  source 1..80: mol_type = other DNA
cagaacccgctctgagaaaagtctagtaacctatacttgaatgataaatgaatggccagagtgtttgccttctttgaaat

SEQ ID NO: 29169 - DNA, 80 bp, synthetic construct
  misc_feature 1..80: note = Artificially Synthesized Probe
  source 1..80: mol_type = other DNA
accccattttttccattcttattggggctgccacatttacgtcttcatcacttgataactcaatttttatagcaccctct

SEQ ID NO: 29170 - DNA, 80 bp, synthetic construct
  misc_feature 1..80: note = Artificially Synthesized Probe
  source 1..80: mol_type = other DNA
gataagattagttgtggggaagagaagagagcagcccactttaaacaggatgttatgtaaagagttttctgagggggtga

SEQ ID NO: 29171 - DNA, 80 bp, synthetic construct
  misc_feature 1..80: note = Artificially Synthesized Probe
  source 1..80: mol_type = other DNA
tgacaacatgaagccattggtgattttgacaagaaaagttttagtggactgctgagggccgagtccaaattgcagagaat

SEQ ID NO: 29172 - DNA, 80 bp, synthetic construct
  misc_feature 1..80: note = Artificially Synthesized Probe
  source 1..80: mol_type = other DNA
aggtaaaggcaaacatgtgctcaaggataggcagtggtaagatggatgctttggggttcttgataaggtcaaagattatt

SEQ ID NO: 29173 - DNA, 80 bp, synthetic construct
  misc_feature 1..80: note = Artificially Synthesized Probe
  source 1..80: mol_type = other DNA
ccaaattcctctaatgtcatctcttttacatcagattacacatgtgcttatctccaccgttagattcttgccttcagtgg

SEQ ID NO: 29174 - DNA, 80 bp, synthetic construct
  misc_feature 1..80: note = Artificially Synthesized Probe
  source 1..80: mol_type = other DNA
aaataaatcacaggacagccaaatagtaggatatagtgtagccatttaaaatgacaacatgggcggggaacggtggctca

SEQ ID NO: 29175 - DNA, 80 bp, synthetic construct
  misc_feature 1..80: note = Artificially Synthesized Probe
  source 1..80: mol_type = other DNA
ggtaattgctcccgaaagatcccctctccctcttccactctcctccttccttttcctccttccacggaggcaagtggtag

SEQ ID NO: 29176 - DNA, 80 bp, synthetic construct
  misc_feature 1..80: note = Artificially Synthesized Probe
  source 1..80: mol_type = other DNA
gagagaaagaactggtgaggatatctcaggtaaagtatatgtatttcgagggtgtttctcttgcctgctccctccttctt

SEQ ID NO: 29177 - DNA, 80 bp, synthetic construct
  misc_feature 1..80: note = Artificially Synthesized Probe
  source 1..80: mol_type = other DNA
gatgatcttacaaagctcccattgaaaggtggctctctgtaaagcaaagttacaatgagattgtgatgaacattgtcctt

SEQ ID NO: 29178 - DNA, 80 bp, synthetic construct
  misc_feature 1..80: note = Artificially Synthesized Probe
  source 1..80: mol_type = other DNA
aacataggctacacgctgtactcatccaagcctgtgaccatcactgtccaaggtatgcggagtctgccaagatgtaagga

SEQ ID NO: 29179 - DNA, 80 bp, synthetic construct
  misc_feature 1..80: note = Artificially Synthesized Probe
  source 1..80: mol_type = other DNA
taaccccagacattgccagaatccctctctttgggctagatacacattcagatctaggcccgtattgtattatagtcatt

SEQ ID NO: 29180 - DNA, 80 bp, synthetic construct
  misc_feature 1..80: note = Artificially Synthesized Probe
  source 1..80: mol_type = other DNA
ctgcctctggaccagcccttttccaggcgggagcagcctctgagcaggggagctgggggtgggaggacaggaaacatctg

SEQ ID NO: 29181 - DNA, 80 bp, synthetic construct
  misc_feature 1..80: note = Artificially Synthesized Probe
  source 1..80: mol_type = other DNA
aaaccagtgctttctctgggggcttccatgacagtaagaacaggcagaaaaaagaggctgtcaaagaccccacctcagat

SEQ ID NO: 29182 - DNA, 80 bp, synthetic construct
  misc_feature 1..80: note = Artificially Synthesized Probe
  source 1..80: mol_type = other DNA
gaaaagaatgcagctcaagtgactgctccactttttcaccttggcctttgcggaaggctgtggctgggctaccctatgca

SEQ ID NO: 29183 - DNA, 80 bp, synthetic construct
  misc_feature 1..80: note = Artificially Synthesized Probe
  source 1..80: mol_type = other DNA
aaaacattataaaaacaacattctgtttaccttttcaaggctgtattggttggagtgtagactgaactgcctggggtctg

SEQ ID NO: 29184 - DNA, 80 bp, synthetic construct
  misc_feature 1..80: note = Artificially Synthesized Probe
  source 1..80: mol_type = other DNA
gggaacacctcccttagactatcctggactacctgctatttctcagccatgctttcattggtcccactgaattccctaga

SEQ ID NO: 29185 - DNA, 80 bp, synthetic construct
  misc_feature 1..80: note = Artificially Synthesized Probe
  source 1..80: mol_type = other DNA
agcctgtattgttgctttgctgtgagggaacggttgggacagaaaaagtgtttgtgtagctctgaaacttcaatttctag

SEQ ID NO: 29186 - DNA, 80 bp, synthetic construct
  misc_feature 1..80: note = Artificially Synthesized Probe
  source 1..80: mol_type = other DNA
aaccaggtgcatgtaaagaattgtttagcacagagtctagcacactgaaaggtgcccaataaatgtcagcttatttttgt

SEQ ID NO: 29187 - DNA, 80 bp, synthetic construct
  misc_feature 1..80: note = Artificially Synthesized Probe
  source 1..80: mol_type = other DNA
gaattatgatgaaaatacttcctgcctttgccattctgtaaatatgtgaccttatgcagagcagtgttcttccagctgtg

SEQ ID NO: 29188 - DNA, 80 bp, synthetic construct
  misc_feature 1..80: note = Artificially Synthesized Probe
  source 1..80: mol_type = other DNA
ggaaattcttgtatcgccagagcttattctcacgatcatgtcaccaagtaatttactgagcatggccttcaagagaggaa

SEQ ID NO: 29189 - DNA, 80 bp, synthetic construct
  misc_feature 1..80: note = Artificially Synthesized Probe
  source 1..80: mol_type = other DNA
aatacaatatgacaagtgctacaacaggctaagaataaaggactgcggggctgactagattggaataaagaaattctgcc

SEQ ID NO: 29190 - DNA, 80 bp, synthetic construct
  misc_feature 1..80: note = Artificially Synthesized Probe
  source 1..80: mol_type = other DNA
tttgggaggtggcttagggcattacatgtctgagagcgagaaggagattgaggtcctaacaccaaattcattaatttatt

SEQ ID NO: 29191 - DNA, 80 bp, synthetic construct
  misc_feature 1..80: note = Artificially Synthesized Probe
  source 1..80: mol_type = other DNA
caagtatttcaggaccctttgtttcaccctttattggtgattttcctcttccccttcatcaactcaccgatatggacttc

SEQ ID NO: 29192 - DNA, 80 bp, synthetic construct
  misc_feature 1..80: note = Artificially Synthesized Probe
  source 1..80: mol_type = other DNA
gcaaactcacaaattaagggtacaggttgaatttccctgaaccaagctacagaaagagcctcaacccatatccccacaag

SEQ ID NO: 29193 - DNA, 80 bp, synthetic construct
  misc_feature 1..80: note = Artificially Synthesized Probe
  source 1..80: mol_type = other DNA
agaagaaacccaggtagggtagagaaatgggccctggaagaacaagtcaccagcgaaaggctgaaaagatcacagaaaag

SEQ ID NO: 29194 - DNA, 80 bp, synthetic construct
  misc_feature 1..80: note = Artificially Synthesized Probe
  source 1..80: mol_type = other DNA
taaaatactttaatgttgtgatgacacaaagccccacactgccccgctgctcctgggaggctcctcagtctgccagggct

SEQ ID NO: 29195 - DNA, 80 bp, synthetic construct
  misc_feature 1..80: note = Artificially Synthesized Probe
  source 1..80: mol_type = other DNA
ctggtgaacttggccttctgcctaaaggtcaccttcactcaaagctgtgccagacaactcccagctcctgctctctgggt

SEQ ID NO: 29196 - DNA, 80 bp, synthetic construct
  misc_feature 1..80: note = Artificially Synthesized Probe
  source 1..80: mol_type = other DNA
gatgcttcaagcaccccatcctgtttttcagcgacatgaaagcccagagcagggaagggtggaaggcttgacctggtggt

SEQ ID NO: 29197 - DNA, 80 bp, synthetic construct
  misc_feature 1..80: note = Artificially Synthesized Probe
  source 1..80: mol_type = other DNA
agttgagggggcttccggaagccggaggaggctcaacctctggatgacagcccccctgggagcagatggcacctgggctg

SEQ ID NO: 29198 - DNA, 80 bp, synthetic construct
  misc_feature 1..80: note = Artificially Synthesized Probe
  source 1..80: mol_type = other DNA
atggacatgtgaatgggcagatggacagatgaacggttggaaggatggatggaaagaaggatgagagaaaggaaagaagg

SEQ ID NO: 29199 - DNA, 80 bp, synthetic construct
  misc_feature 1..80: note = Artificially Synthesized Probe
  source 1..80: mol_type = other DNA
gggcccctgctcccagacacagcttccaggacactgactgatgaatggactgaatgtcagatggataggtgtatggatgg

SEQ ID NO: 29200 - DNA, 80 bp, synthetic construct
  misc_feature 1..80: note = Artificially Synthesized Probe
  source 1..80: mol_type = other DNA
aggctccaggtcactcgcggagcagcctctaacagacacagccaaagatcactgggcgtggagccctgggccagggtctg

SEQ ID NO: 29201 - DNA, 80 bp, synthetic construct
  misc_feature 1..80: note = Artificially Synthesized Probe
  source 1..80: mol_type = other DNA
tggacgggtctcacccactccccagggataagaaagtttaaatctcccctcccgcctttccttctggatacacgagtgct

SEQ ID NO: 29202 - DNA, 80 bp, synthetic construct
  misc_feature 1..80: note = Artificially Synthesized Probe
  source 1..80: mol_type = other DNA
cagctgtggtcttgactgccctcccacgctccccacgcggtcctcccgggccctgagctccgctatcctgctcctcaaag

SEQ ID NO: 29203 - DNA, 80 bp, synthetic construct
  misc_feature 1..80: note = Artificially Synthesized Probe
  source 1..80: mol_type = other DNA
ccggcactcactgtaggcgctgttctccaggctgccgttgacgcggccgctcgggtgcagctggaggtggtacttcgtgg

SEQ ID NO: 29204 - DNA, 80 bp, synthetic construct
  misc_feature 1..80: note = Artificially Synthesized Probe
  source 1..80: mol_type = other DNA
gagattgaatcgcatgttgacgtctattacgatgattaatgttcttgtcattcccgtcactagcaggtgagaggctggga

SEQ ID NO: 29205 - DNA, 80 bp, synthetic construct
  misc_feature 1..80: note = Artificially Synthesized Probe
  source 1..80: mol_type = other DNA
ggccccctcacccatgggctgtccacagcacccaccggggctcccctagctggctggaggggttcccctcatgcgtgctt

SEQ ID NO: 29206 - DNA, 80 bp, synthetic construct
  misc_feature 1..80: note = Artificially Synthesized Probe
  source 1..80: mol_type = other DNA
gcattctctttgatctgtttggcctccccaatccctacacctgcctgtcctctggccactcggccagggaggctctggag

SEQ ID NO: 29207 - DNA, 80 bp, synthetic construct
  misc_feature 1..80: note = Artificially Synthesized Probe
  source 1..80: mol_type = other DNA
tttcacaaataactctgaaggaagtcgtttcagggctttctgagaagtgccacctttgaacttttgcaagcatggccttg

SEQ ID NO: 29208 - DNA, 80 bp, synthetic construct
  misc_feature 1..80: note = Artificially Synthesized Probe
  source 1..80: mol_type = other DNA
ggtaccagtccccttggagcaagtcagcgtgggtgggggtctccttccaggtcattgcccctgtgtggggcaggggggtg

SEQ ID NO: 29209 - DNA, 80 bp, synthetic construct
  misc_feature 1..80: note = Artificially Synthesized Probe
  source 1..80: mol_type = other DNA
ctcaggaaatgttcttgttgatgcttctgaagtggggaagggctgccaaggtctgcaggcagagcccctctggggagttc

SEQ ID NO: 29210 - DNA, 80 bp, synthetic construct
  misc_feature 1..80: note = Artificially Synthesized Probe
  source 1..80: mol_type = other DNA
ggacttggggcctggccacccccaccccgtggccaggtcctgggtcaggccagagaattcctccagctggaaactttggg

SEQ ID NO: 29211 - DNA, 80 bp, synthetic construct
  misc_feature 1..80: note = Artificially Synthesized Probe
  source 1..80: mol_type = other DNA
ctgctcctcctccttccctagttgtgttttttacagctgggcaggggtggggggggcggcgggaggatttggaggcatcc

SEQ ID NO: 29212 - DNA, 80 bp, synthetic construct
  misc_feature 1..80: note = Artificially Synthesized Probe
  source 1..80: mol_type = other DNA
gctccctccccagatgtggggggctgggtcagtgtgctcccacccaggacagggccaggcactcgctctcttgcttcttc

SEQ ID NO: 29213 - DNA, 80 bp, synthetic construct
  misc_feature 1..80: note = Artificially Synthesized Probe
  source 1..80: mol_type = other DNA
gccactgttaactgtgtattggaggaacacgcggccccaggccccatcgagatggcctggagcagctgctacctcttggt

SEQ ID NO: 29214 - DNA, 80 bp, synthetic construct
  misc_feature 1..80: note = Artificially Synthesized Probe
  source 1..80: mol_type = other DNA
gatggtgcaggtggccatgtggagccgcagcctttctgctcctgtgggtttcacaggtggtgggaggacatactggctgc

SEQ ID NO: 29215 - DNA, 80 bp, synthetic construct
  misc_feature 1..80: note = Artificially Synthesized Probe
  source 1..80: mol_type = other DNA
gctgggccagtgctcagggctttggtgcatgtgggcagctgaggcctgggtcaggggcactgcacctcggcccctctgct

SEQ ID NO: 29216 - DNA, 80 bp, synthetic construct
  misc_feature 1..80: note = Artificially Synthesized Probe
  source 1..80: mol_type = other DNA
tgaaggagcggctgtcacagggtggatggaggggacattccacagcacgccctgcccctcggcattgtgtggaatgggaa

SEQ ID NO: 29217 - DNA, 80 bp, synthetic construct
  misc_feature 1..80: note = Artificially Synthesized Probe
  source 1..80: mol_type = other DNA
acacagccctccaagatgaggcgccgggtgatcgcacggcccgtgggtagctccgtgcggctcaagtgcgtggccagcgg

SEQ ID NO: 29218 - DNA, 80 bp, synthetic construct
  misc_feature 1..80: note = Artificially Synthesized Probe
  source 1..80: mol_type = other DNA
cccagccggcgctgtcttcatcctgggcaccctgctcctgtggctttgccaggcccagaagaagccgtgcacccccgcgc

SEQ ID NO: 29219 - DNA, 80 bp, synthetic construct
  misc_feature 1..80: note = Artificially Synthesized Probe
  source 1..80: mol_type = other DNA
acaaggacatgctgcctgaacatacacacgcacacccatgcgcagatgtgctgcctggacacacacacacacacggatat

SEQ ID NO: 29220 - DNA, 80 bp, synthetic construct
  misc_feature 1..80: note = Artificially Synthesized Probe
  source 1..80: mol_type = other DNA
ggctcatccccactgcattctccccctgacacagagaaggggccttggtatttatatttaagaaatgaagataatattaa

SEQ ID NO: 29221 - DNA, 80 bp, synthetic construct
  misc_feature 1..80: note = Artificially Synthesized Probe
  source 1..80: mol_type = other DNA
caacagcagtcgccccaaacagccacttccatgggatggactgtggataaaaaggaggggagagaagggtggagggaggt

SEQ ID NO: 29222 - DNA, 80 bp, synthetic construct
  misc_feature 1..80: note = Artificially Synthesized Probe
  source 1..80: mol_type = other DNA
tacctactccgtgccactgcccaggtgggaacacaacagagagccacagcaagaaagacctggggcagaccgcaggaggg

SEQ ID NO: 29223 - DNA, 80 bp, synthetic construct
  misc_feature 1..80: note = Artificially Synthesized Probe
  source 1..80: mol_type = other DNA
gaggtcaaggcaggcggatcaagaggtcaggacgtcaagaccatcctggctaacatggtgaaactccgtctctactaaaa

SEQ ID NO: 29224 - DNA, 80 bp, synthetic construct
  misc_feature 1..80: note = Artificially Synthesized Probe
  source 1..80: mol_type = other DNA
tattttttaaatttttgtagcaatggggtctcactatgctgccaagactggtcttgaattcctgggctcaaatgatcctc

SEQ ID NO: 29225 - DNA, 80 bp, synthetic construct
  misc_feature 1..80: note = Artificially Synthesized Probe
  source 1..80: mol_type = other DNA
ctatcgatccctcctttctgcttgaacctgtttgagtgggtttctatcaccttcaaccagcaggtccaaacttgtatgaa

SEQ ID NO: 29226 - DNA, 80 bp, synthetic construct
  misc_feature 1..80: note = Artificially Synthesized Probe
  source 1..80: mol_type = other DNA
gaatgccacgtgggatggagagaagcagaaagtgaggtgggagaagtgatagcaggagggggaagaccagacaactcaag

SEQ ID NO: 29227 - DNA, 80 bp, synthetic construct
  misc_feature 1..80: note = Artificially Synthesized Probe
  source 1..80: mol_type = other DNA
atataccacgagtctgtaacaggccctagcttaggggcagttggggatctacccatattctgggctattctagaatattc

SEQ ID NO: 29228 - DNA, 80 bp, synthetic construct
  misc_feature 1..80: note = Artificially Synthesized Probe
  source 1..80: mol_type = other DNA
aacgtgggctcaagtgatcctcctgcctgagcctcctcagtagctgggactacaggtgtgcaccacacccagcttttttt

SEQ ID NO: 29229 - DNA, 80 bp, synthetic construct
  misc_feature 1..80: note = Artificially Synthesized Probe
  source 1..80: mol_type = other DNA
tgccaccagagtggggaaccccacgtgcaggacactgggcaggatgggacagacttcagggtgacagtgctggtgctaga

SEQ ID NO: 29230 - DNA, 80 bp, synthetic construct
  misc_feature 1..80: note = Artificially Synthesized Probe
  source 1..80: mol_type = other DNA
agaccctgtctccactaaaaatacaaaaattaggggccaggtgtgctggctcacacctgtaatctcagcactttaggagg

SEQ ID NO: 29231 - DNA, 80 bp, synthetic construct
  misc_feature 1..80: note = Artificially Synthesized Probe
  source 1..80: mol_type = other DNA
ccactgttagcagatctgggaaacggggacacagcacattgtgcatgtgtgtgagtcagtggatagagtacatcaatgtg

SEQ ID NO: 29232 - DNA, 80 bp, synthetic construct
  misc_feature 1..80: note = Artificially Synthesized Probe
  source 1..80: mol_type = other DNA
gtggctttgcctgattataagctgagcgaagggtgctgggatttttgtggagaggacagcctccgaggccttagggaagc

SEQ ID NO: 29233 - DNA, 80 bp, synthetic construct
  misc_feature 1..80: note = Artificially Synthesized Probe
  source 1..80: mol_type = other DNA
agagcagacacttgaggagaccagctcagcaaacggaagacacttaaagtggtaggttctcaagagagaagaagttttta

SEQ ID NO: 29234 - DNA, 80 bp, synthetic construct
  misc_feature 1..80: note = Artificially Synthesized Probe
  source 1..80: mol_type = other DNA
ctttttggaaatgactcaaggtactcagcgtagtggataagtgagctagaaggaaggtactagaagggatgaatcccctc

SEQ ID NO: 29235 - DNA, 80 bp, synthetic construct
  misc_feature 1..80: note = Artificially Synthesized Probe
  source 1..80: mol_type = other DNA
atcaattttggctcactgcaacctccacctcccaggttcaagcaattctcctgtctcagcctcccaagtggctgggacta

SEQ ID NO: 29236 - DNA, 80 bp, synthetic construct
  misc_feature 1..80: note = Artificially Synthesized Probe
  source 1..80: mol_type = other DNA
ggccaggctggtgacccctatattttaagtgcctactagagtctggtagtgtcctatacatcacatatatgtgattttac

SEQ ID NO: 29237 - DNA, 80 bp, synthetic construct
  misc_feature 1..80: note = Artificially Synthesized Probe
  source 1..80: mol_type = other DNA
ggggctggaaaagaagatagggtatacgccacagacagccccaaatactctgcaaaggaatttgaactttcttctgtata

SEQ ID NO: 29238 - DNA, 80 bp, synthetic construct
  misc_feature 1..80: note = Artificially Synthesized Probe
  source 1..80: mol_type = other DNA
tgctggaggggatgaagggactattccaaaacccagctgttcagttccactcaaaggagctatatgtggctgctgatgaa

SEQ ID NO: 29239 - DNA, 80 bp, synthetic construct
  misc_feature 1..80: note = Artificially Synthesized Probe
  source 1..80: mol_type = other DNA
tttatcctcagaacactgggaagatattgaagggtttaagcaagggcagcatgccttcactcccctttgatagccatatg

SEQ ID NO: 29240 - DNA, 80 bp, synthetic construct
  misc_feature 1..80: note = Artificially Synthesized Probe
  source 1..80: mol_type = other DNA
ttacctgatgttccaaaccccctccagatcctgtatatccgcagcatctcccctttccctgagctggaacagtttctaca

SEQ ID NO: 29241 - DNA, 80 bp, synthetic construct
  misc_feature 1..80: note = Artificially Synthesized Probe
  source 1..80: mol_type = other DNA
tcaggagatcgagaccagcctaaccaaaatgatgaaacccagtctctactaaaaatacaaaaattagcggagcgtggtgg

SEQ ID NO: 29242 - DNA, 80 bp, synthetic construct
  misc_feature 1..80: note = Artificially Synthesized Probe
  source 1..80: mol_type = other DNA
aatacaaaaaattagctgggcacagtggtgggcgcctgtagtgccagctactcgggaggctgaggcaggagaatggcatg

SEQ ID NO: 29243 - DNA, 80 bp, synthetic construct
  misc_feature 1..80: note = Artificially Synthesized Probe
  source 1..80: mol_type = other DNA
agaacgaagaagaggagcggaactcccgcacatgacctcccaccctaggagggagggaaggacaccgtcctagggtataa

SEQ ID NO: 29244 - DNA, 80 bp, synthetic construct
  misc_feature 1..80: note = Artificially Synthesized Probe
  source 1..80: mol_type = other DNA
tagctgccatgtctccaaactaaacctgattgacctttttgcctttcagtgccctcagattgataatgataagaactaga

SEQ ID NO: 29245 - DNA, 80 bp, synthetic construct
  misc_feature 1..80: note = Artificially Synthesized Probe
  source 1..80: mol_type = other DNA
gagtgcctggagctgtctcgtgcctgctcgtggcgggatccttgtcttcctccagtactgggcccagcccgtccatgggc

SEQ ID NO: 29246 - DNA, 80 bp, synthetic construct
  misc_feature 1..80: note = Artificially Synthesized Probe
  source 1..80: mol_type = other DNA
ttgtcttcgtccagtgctggtcctggtccgcccatgggcagactcagactgttcatgagtgctcacctggtagatgaaag

SEQ ID NO: 29247 - DNA, 80 bp, synthetic construct
  misc_feature 1..80: note = Artificially Synthesized Probe
  source 1..80: mol_type = other DNA
gaatgtccagacgtttcccctgaccggccacgtgcggactcttggtggctctgctgatgggacccagcctgtccgtgggc

SEQ ID NO: 29248 - DNA, 80 bp, synthetic construct
  misc_feature 1..80: note = Artificially Synthesized Probe
  source 1..80: mol_type = other DNA
cctgttcatgggatgatgcagtctgtccacgagaggaagtctctgcgtgacgagtgcctgattgtctggagctgtctgca

SEQ ID NO: 29249 - DNA, 80 bp, synthetic construct
  misc_feature 1..80: note = Artificially Synthesized Probe
  source 1..80: mol_type = other DNA
ctgggccctgatgattgtccctggcccacctgcgagtgtctagagctgtcggcccgagaggaagcttcatggtgacgcga

SEQ ID NO: 29250 - DNA, 80 bp, synthetic construct; identical to SEQ ID NO: 29249
  misc_feature 1..80: note = Artificially Synthesized Probe
  source 1..80: mol_type = other DNA

SEQ ID NO: 29251 - DNA, 80 bp, synthetic construct
  misc_feature 1..80: note = Artificially Synthesized Probe
  source 1..80: mol_type = other DNA
tctcctggacttgaccttgcctgttcctgggatgatgcagcctgtccaccagaggaagtctctgcatgacgagtgcctga

SEQ ID NO: 29252 - DNA, 80 bp, synthetic construct
  misc_feature 1..80: note = Artificially Synthesized Probe
  source 1..80: mol_type = other DNA
catgatggtttctggaagcagacccagacaacctctcggagtcgtctgagtgtctctcactgtcactgtcctggctaaca

SEQ ID NO: 29253 - DNA, 80 bp, synthetic construct
  misc_feature 1..80: note = Artificially Synthesized Probe
  source 1..80: mol_type = other DNA
tccctcactgtccctgtcctgactaacactggatccctggcgcctgcttgtcttggaccccgctgattctccctggccca

SEQ ID NO: 29254 - DNA, 80 bp, synthetic construct; identical to SEQ ID NO: 29252
  misc_feature 1..80: note = Artificially Synthesized Probe
  source 1..80: mol_type = other DNA

SEQ ID NO: 29255 - DNA, 80 bp, synthetic construct
  misc_feature 1..80: note = Artificially Synthesized Probe
  source 1..80: mol_type = other DNA
tggctaactctggatcccctacgctttcttgtcctggactcctgcaatggtacctggcttgtattttcatgtcttgacct

SEQ ID NO: 29256 - DNA, 80 bp, synthetic construct
  misc_feature 1..80: note = Artificially Synthesized Probe
  source 1..80: mol_type = other DNA
caaagatgtagactagtaaggtatcaagatttgatggggtaagtgactctttttcttattttaaaagtcagaagtgtata

SEQ ID NO: 29257 - DNA, 80 bp, synthetic construct
  misc_feature 1..80: note = Artificially Synthesized Probe
  source 1..80: mol_type = other DNA
aagctaacttaataaatgattaatttgctaagacacaattctctgaaagccagttagccatatgacaagatactcaatga

SEQ ID NO: 29258 - DNA, 80 bp, synthetic construct
  misc_feature 1..80: note = Artificially Synthesized Probe
  source 1..80: mol_type = other DNA
ctgctttatgtactcacttccctttttaccttggttagacattatgtttaatctccccaaatgccccttggatacatcca

SEQ ID NO: 29259 - DNA, 80 bp, synthetic construct
  misc_feature 1..80: note = Artificially Synthesized Probe
  source 1..80: mol_type = other DNA
tcacaagtttatacccccagtcactgactgtcccctaaacttgagatgtgtatgtctaaatgcctatccagtatttctac

SEQ ID NO: 29260 - DNA, 80 bp, synthetic construct
  misc_feature 1..80: note = Artificially Synthesized Probe
  source 1..80: mol_type = other DNA
cataactaaaataagagtgctattatacagaatatttgggggtactttaaggaaaggaggttttgtggtagaggggacat

SEQ ID NO: 29261 - DNA, 80 bp, synthetic construct
  misc_feature 1..80: note = Artificially Synthesized Probe
  source 1..80: mol_type = other DNA
aggcaatgaggaaatcctaagagcagacagagaaacacttgtattaccttcaaaggagcgacaataagattgatacttgt

SEQ ID NO: 29262 - DNA, 80 bp, synthetic construct
  misc_feature 1..80: note = Artificially Synthesized Probe
  source 1..80: mol_type = other DNA
aaaagatcaattctccaggaagcctcaaaatacataaataaaaatcgacagaagtataaggaggaccaggcaatctacaa

SEQ ID NO: 29263 - DNA, 80 bp, synthetic construct
  misc_feature 1..80: note = Artificially Synthesized Probe
  source 1..80: mol_type = other DNA
tgcattcatttccagtgggggagaaactgcaggtcagatggctttactgaattctattcaaagtgaaagaaagaaataac

SEQ ID NO: 29264 - DNA, 80 bp, synthetic construct
  misc_feature 1..80: note = Artificially Synthesized Probe
  source 1..80: mol_type = other DNA
ttgagattataagtgctgagaaaatgaaataggaaaggaggctattcataaaagcataaaaaaagaggaaatttttagga

SEQ ID NO: 29265 - DNA, 80 bp, synthetic construct
  misc_feature 1..80: note = Artificially Synthesized Probe
  source 1..80: mol_type = other DNA
aaaacttctcaaccttgttatgcactagggaaatgcaaattgaaataacgtgtgagacctcaatacacccaccaaagtga

SEQ ID NO: 29266 - DNA, 80 bp, synthetic construct
  misc_feature 1..80: note = Artificially Synthesized Probe
  source 1..80: mol_type = other DNA
ctgctcctgctcttgccttcctatattcctgttttccacgtagcagcccagagtggtcttttaaaaacatagattatctt

SEQ ID NO: 29267 - DNA, 80 bp, synthetic construct
  misc_feature 1..80: note = Artificially Synthesized Probe
  source 1..80: mol_type = other DNA
ccctaaacttccagaaccttttgccttacagtacacatacattcagatttccaccttggttaatagtaagtagacaaaat

SEQ ID NO: 29268 - DNA, 80 bp, synthetic construct
  misc_feature 1..80: note = Artificially Synthesized Probe
  source 1..80: mol_type = other DNA
tgttaaatattttcgatcttttctcagaacatggtctagaagggcatagtagtttttttcccggtacatgcgtgggtggg

SEQ ID NO: 29269 - DNA, 80 bp, synthetic construct
  misc_feature 1..80: note = Artificially Synthesized Probe
  source 1..80: mol_type = other DNA
cttctcagcagctctaacagtctgtgaagttctgttgaaaaagacttgcaggatggctctcaacacccaggcgcaggtgt

SEQ ID NO: 29270 - DNA, 80 bp, synthetic construct
  misc_feature 1..80: note = Artificially Synthesized Probe
  source 1..80: mol_type = other DNA
aaaaaaattgcttgagcccaggaggtggaggtttcagtgagccaagatcgtgccgctgcactccagcctgggtgacaaag

SEQ ID NO: 29271 - DNA, 80 bp, synthetic construct
  misc_feature 1..80: note = Artificially Synthesized Probe
  source 1..80: mol_type = other DNA
ctgtcactttctgatccttttgcctcttttcagttttgttttcctcttttcacgtccatcctctgtgtctggcactatca

SEQ ID NO: 29272 - DNA, 80 bp, synthetic construct
  misc_feature 1..80: note = Artificially Synthesized Probe
  source 1..80: mol_type = other DNA
ctctaatactgtcttattcctataactttgtatggagggtgcttttttgggggttcaggattattcatgttaggatttcc

SEQ ID NO: 29273 - DNA, 80 bp, synthetic construct
  misc_feature 1..80: note = Artificially Synthesized Probe
  source 1..80: mol_type = other DNA
aatgtcgaaatgctgtttggtgacgaaaaattagcccaaagctatttccgtaaatgtgaccaccattgattttccaaaac

SEQ ID NO: 29274 - DNA, 80 bp, synthetic construct
  misc_feature 1..80: note = Artificially Synthesized Probe
  source 1..80: mol_type = other DNA
agatcgcaccactgcactctagcctgggagacagagcgagactgtctcaaaaaaaaaaaaatacatacatacatatatat

SEQ ID NO: 29275 - DNA, 80 bp, synthetic construct
  misc_feature 1..80: note = Artificially Synthesized Probe
  source 1..80: mol_type = other DNA
atcatgtgacttgcttcaccttatcaatcacttgaacgactcaccctcctgaccctgcccccttgtcttgcatgcaataa

SEQ ID NO: 29276 - DNA, 80 bp, synthetic construct
  misc_feature 1..80: note = Artificially Synthesized Probe
  source 1..80: mol_type = other DNA
ggctttgttatccttcgactgtggcttggtgtggtttttattttgaattacacgggagggaaactgcgatcttttcagag

SEQ ID NO: 29277 - DNA, 80 bp, synthetic construct
  misc_feature 1..80: note = Artificially Synthesized Probe
  source 1..80: mol_type = other DNA
tgcactaaggcacacgttgaggggtttgtggaaggagcctggcagaatccagctaactgttgttgtcccccaggcctagc

SEQ ID NO: 29278 - DNA, 80 bp, synthetic construct
  misc_feature 1..80: note = Artificially Synthesized Probe
  source 1..80: mol_type = other DNA
ataaataaaaagtacccttgatgttggggtgaggggacactggtgggtggacaggactcaaaaacaagcacgcagccagg

SEQ ID NO: 29279 - DNA, 80 bp, synthetic construct
  misc_feature 1..80: note = Artificially Synthesized Probe
  source 1..80: mol_type = other DNA
taccttcttctttggatggaactagacccgcagcacccatcccagtccctaaggcctgggcaacaggccaccccctgctt

SEQ ID NO: 29280 - DNA, 80 bp, synthetic construct
  misc_feature 1..80: note = Artificially Synthesized Probe
  source 1..80: mol_type = other DNA
actggccctggcttccctgatgccaccttctcatggacacaacccccacgcccccgacgcttgctgtccccaaaacctgc

SEQ ID NO: 29281 - DNA, 80 bp, synthetic construct
  misc_feature 1..80: note = Artificially Synthesized Probe
  source 1..80: mol_type = other DNA
gagagaagatctcccagagaagcaccccaaaggaccacacgtcactctgcgtggtgtacaccttgtcgaagatgctttca

SEQ ID NO: 29282 - DNA, 80 bp, synthetic construct
  misc_feature 1..80: note = Artificially Synthesized Probe
  source 1..80: mol_type = other DNA
tacggcataagggaggtttttgtaactgcagacaacctgacacttccctccaaccagcggccatgctgggctggatggct

SEQ ID NO: 29283 - DNA, 80 bp, synthetic construct
  misc_feature 1..80: note = Artificially Synthesized Probe
  source 1..80: mol_type = other DNA
gcactgggcctgccggtcacctcccttctccacttccgaaatccacttcctttcggagcactgggcccgccggtcacctc

SEQ ID NO: 29284 - DNA, 80 bp, synthetic construct
  misc_feature 1..80: note = Artificially Synthesized Probe
  source 1..80: mol_type = other DNA
tccatctccaggactcatcatggagagagcttgtggaattgtggggacagcagagaaagttgtggagtcaaacagactct

SEQ ID NO: 29285 - DNA, 80 bp, synthetic construct
  misc_feature 1..80: note = Artificially Synthesized Probe
  source 1..80: mol_type = other DNA
gagcaccctctcctgcccctcaacctctgggacacccacgtcctattccagagcaccctctcctgccactcagcctctgg

SEQ ID NO: 29286 - DNA, 80 bp, synthetic construct
  misc_feature 1..80: note = Artificially Synthesized Probe
  source 1..80: mol_type = other DNA
tgtctgcagggcaatttcctattcagcctctgatgacccagtcaatcgtaaaacatctgtgtgaaaattgtccccgaggt

SEQ ID NO: 29287 - DNA, 80 bp, synthetic construct
  misc_feature 1..80: note = Artificially Synthesized Probe
  source 1..80: mol_type = other DNA
ccccgaggaggttgaccacgttgaggtggttgccgatgtgaatgaggatcttgagctccgacatcagcgcgcggtgctcg

SEQ ID NO: 29288 - DNA, 80 bp, synthetic construct
  misc_feature 1..80: note = Artificially Synthesized Probe
  source 1..80: mol_type = other DNA
cagaaaaaaagacagacaacctctgcggggttggagcccagcgtgaagggcagggaggcttcccaggaaacaaggctgcc

SEQ ID NO: 29289 - DNA, 80 bp, synthetic construct
  misc_feature 1..80: note = Artificially Synthesized Probe
  source 1..80: mol_type = other DNA
tgggcgcgtgcgctccggccaccaagcactgcatctccagcgagtcgctcacgttcaccaggaggtcggtcaagttctgc

SEQ ID NO: 29290 - DNA, 80 bp, synthetic construct
  misc_feature 1..80: note = Artificially Synthesized Probe
  source 1..80: mol_type = other DNA
tctcctgaggtcactaccacatttgaaaatctgagtaaaccacagagcttctccccagagcaaaattcacacgagtcaca

SEQ ID NO: 29291 - DNA, 80 bp, synthetic construct
  misc_feature 1..80: note = Artificially Synthesized Probe
  source 1..80: mol_type = other DNA
agggatagtgaggcagaggagagaaggcccctgggcagcagagagaggtagctgcccagaaaagtcaagggacagtgtat

SEQ ID NO: 29292 - DNA, 80 bp, synthetic construct
  misc_feature 1..80: note = Artificially Synthesized Probe
  source 1..80: mol_type = other DNA
acaaactcggtccaggtgtccaggctctcgatggggttcacggcatcctgcgtggtcaccgccctccagtcacggcactg

SEQ ID NO: 29293 - DNA, 80 bp, synthetic construct
  misc_feature 1..80: note = Artificially Synthesized Probe
  source 1..80: mol_type = other DNA
aggaatctcttgctaaaaggcaaacctgagccatgtctccacttctcaacacccttcactggctccctagtgccttcaag

SEQ ID NO: 29294 - DNA, 80 bp, synthetic construct
  misc_feature 1..80: note = Artificially Synthesized Probe
  source 1..80: mol_type = other DNA
tgctgtaaaggaggttcctcatggctgaggctgggggctgtggctgtgcaggggacctgaggctggagctgtactcacag

SEQ ID NO: 29295 - DNA, 80 bp, synthetic construct
  misc_feature 1..80: note = Artificially Synthesized Probe
  source 1..80: mol_type = other DNA
tttcttagacacctgaaggagtggaggtgcagtccctgcgagcacagtctagctccttgacatgtgcgtggcccctgcag

SEQ ID NO: 29296 - DNA, 80 bp, synthetic construct
  misc_feature 1..80: note = Artificially Synthesized Probe
  source 1..80: mol_type = other DNA
agccagtggaaagctgttctgagaggcagctgcctgaggactgggtagaccctggacgcaacagagctgccacctgccca

SEQ ID NO: 29297 - DNA, 80 bp, synthetic construct
  misc_feature 1..80: note = Artificially Synthesized Probe
  source 1..80: mol_type = other DNA
ccacacccacatgtaacagaaggctggtactgaaacctttcacagtgtggcaggaacagacagaccttccatctgaaata

SEQ ID NO: 29298 - DNA, 80 bp, synthetic construct
  misc_feature 1..80: note = Artificially Synthesized Probe
  source 1..80: mol_type = other DNA
ccagcgacttcctgggcaacagctggatgtcatagagctcgttgcctgttgacacgcacacagtgactcccacgccctca

SEQ ID NO: 29299 - DNA, 80 bp, synthetic construct
  misc_feature 1..80: note = Artificially Synthesized Probe
  source 1..80: mol_type = other DNA
ctgcccgggaccctgctccagcctggcccgcctccaagtctcacctctcacgaacacgtaggagctggcggccgtggtgc

SEQ ID NO: 29300 - DNA, 80 bp, synthetic construct
  misc_feature 1..80: note = Artificially Synthesized Probe
  source 1..80: mol_type = other DNA
tcagaaaaaaaaaaagaaatgctgatgggggtgtgtggttgaggctggggaggaccgaagtcacccacagcctgggagac

SEQ ID NO: 29301 - DNA, 80 bp, synthetic construct
  misc_feature 1..80: note = Artificially Synthesized Probe
  source 1..80: mol_type = other DNA
cctagacacccccaggtcttctcacagggctcttcctcagacatacaaataaacccgcctcatctggctgaaacccacca

SEQ ID NO: 29302 - DNA, 80 bp, synthetic construct
  misc_feature 1..80: note = Artificially Synthesized Probe
  source 1..80: mol_type = other DNA
tccctctgagctgggctttgaaggagggggattttttttccaggtagtggaaagtaagtccatgccaggaagacagctgg

SEQ ID NO: 29303 - DNA, 80 bp, synthetic construct
  misc_feature 1..80: note = Artificially Synthesized Probe
  source 1..80: mol_type = other DNA
gtggttttatgatcacatctgaacagaggctcaattttattcatcttcctaagcccaagacagagatgtgcaaaggagat

SEQ ID NO: 29304 - DNA, 80 bp, synthetic construct
  misc_feature 1..80: note = Artificially Synthesized Probe
  source 1..80: mol_type = other DNA
tgggtgggtggatggatggatggaagtatgggtggatgggtgggtgggtggatggatggatggaagtatgggtggatggg

SEQ ID NO: 29305 - DNA, 80 bp, synthetic construct
  misc_feature 1..80: note = Artificially Synthesized Probe
  source 1..80: mol_type = other DNA
gcttgccaacccttttgcccatccacgcaagctttttcatgacatgtctcctttttcatgacataccataacttattcca

SEQ ID NO: 29306 - DNA, 80 bp, synthetic construct
  misc_feature 1..80: note = Artificially Synthesized Probe
  source 1..80: mol_type = other DNA
agaaaaaagaaaaactccccatcttcctacatcccaaaacccacactgccagccagggcctcagaaatcctctgacatgc

SEQ ID NO: 29307 - DNA, 80 bp, synthetic construct
  misc_feature 1..80: note = Artificially Synthesized Probe
  source 1..80: mol_type = other DNA
gatgctaaactgcagacgtgcaccccctccagccccaccaaaggctcctccctcgatagctccctctccccagatcctct

SEQ ID NO: 29308 - DNA, 80 bp, synthetic construct
  misc_feature 1..80: note = Artificially Synthesized Probe
  source 1..80: mol_type = other DNA
cacagagtaaagtctcagtgaacactcgttgaatgaaaaaaatggagggatggaagaagtatggatggatgggtgggtgg

SEQ ID NO: 29309 - DNA, 80 bp, synthetic construct
  misc_feature 1..80: note = Artificially Synthesized Probe
  source 1..80: mol_type = other DNA
ccctgccttcctgttcctggcccgggaactggcttcttccttccctgaggccccgcaaagccctggctcccaagcctgca

SEQ ID NO: 29310 - DNA, 80 bp, synthetic construct
  misc_feature 1..80: note = Artificially Synthesized Probe
  source 1..80: mol_type = other DNA
gatgggctggctgtgccataccctggtgggacagggtcccggccctctctacggggcagtgtgggtgagcgctggcctta

SEQ ID NO: 29311 - DNA, 80 bp, synthetic construct
  misc_feature 1..80: note = Artificially Synthesized Probe
  source 1..80: mol_type = other DNA
ccgctctttgctgtatggtcttgggcaaatcacttcctctctccaagccccagtcttcccacttgtgagatgtggattgg

SEQ ID NO: 29312 - DNA, 80 bp, synthetic construct
  misc_feature 1..80: note = Artificially Synthesized Probe
  source 1..80: mol_type = other DNA
agctagcacacagaggttaacgcattccaaaacacatgaccgttaagatattgtcttgggaagacaggattaagggaagc

SEQ ID NO: 29313 - DNA, 80 bp, synthetic construct
  misc_feature 1..80: note = Artificially Synthesized Probe
  source 1..80: mol_type = other DNA
gaggctccccacccaggactcctgcacttttccatagctctgtggagcggccggctcattaccacttttaacaggttttt

SEQ ID NO: 29314 - DNA, 80 bp, synthetic construct
  misc_feature 1..80: note = Artificially Synthesized Probe
  source 1..80: mol_type = other DNA
tattaaccccctgaaatgagccatctattatctagagagccgtttcacccttgtggcctgaatttcctaatctccaaaat

SEQ ID NO: 29315 - DNA, 80 bp, synthetic construct
  misc_feature 1..80: note = Artificially Synthesized Probe
  source 1..80: mol_type = other DNA
ctctgcttgctggccggcaggacgagcggcgttatcagacaacccagctggcgcagaggtggccccccagtgctgctaaa

SEQ ID NO: 29316 - DNA, 80 bp, synthetic construct
  misc_feature 1..80: note = Artificially Synthesized Probe
  source 1..80: mol_type = other DNA
tctctggggcttcatggggttctttgctctgcttggaattccctgtcctggagttctgcagaccccaccaggaagccctt

SEQ ID NO: 29317 - DNA, 80 bp, synthetic construct
  misc_feature 1..80: note = Artificially Synthesized Probe
  source 1..80: mol_type = other DNA
ggtcacacagaaaggactttacggcagaggcaggacaagagtctggttctatgatcaatagcacacttttaaggggtcag

SEQ ID NO: 29318 - DNA, 80 bp, synthetic construct
  misc_feature 1..80: note = Artificially Synthesized Probe
  source 1..80: mol_type = other DNA
cacatgtccttggtctaagcttctccatgtgtaaaatgggtctgacactccctgtgagaattacaagcatgtaaagccag

SEQ ID NO: 29319 - DNA, 80 bp, synthetic construct
  misc_feature 1..80: note = Artificially Synthesized Probe
  source 1..80: mol_type = other DNA
tctaggttgtccaactttaatccctcttgctgtggtgtgggtctcattctggtgtgtgctggattttgtgtgtgtctctg

SEQ ID NO: 29320 - DNA, 80 bp, synthetic construct
  misc_feature 1..80: note = Artificially Synthesized Probe
  source 1..80: mol_type = other DNA
tgtttgcctcttctctcggcacctacaggcatgggggatatgtctggatgtgctttgtggcaatgcacaactggtcagtg

SEQ ID NO: 29321 - DNA, 80 bp, synthetic construct
  misc_feature 1..80: note = Artificially Synthesized Probe
  source 1..80: mol_type = other DNA
atcgcctctttccttggactcttcaccttctctagctaggaagtccttcctgatgtctaacctctccctttctggcttga

SEQ ID NO: 29322 - DNA, 80 bp, synthetic construct
  misc_feature 1..80: note = Artificially Synthesized Probe
  source 1..80: mol_type = other DNA
actcctatccccatctccacctcctgctccattcctcaggatggatctcctcctatgtcacaggttcccttggagtctaa

SEQ ID NO: 29323 - DNA, 80 bp, synthetic construct
  misc_feature 1..80: note = Artificially Synthesized Probe
  source 1..80: mol_type = other DNA
agacacacacagagacacacacagacacacgcgcacgcacacacacagaatgagaatggggtgcatccctggaaccagat

SEQ ID NO: 29324 - DNA, 80 bp, synthetic construct
  misc_feature 1..80: note = Artificially Synthesized Probe
  source 1..80: mol_type = other DNA
attaatatccttaataatagattggtattaatgagcagttctgataatgatatgtacagaatgtgagaggcccctggccc

SEQ ID NO: 29325 - DNA, 80 bp, synthetic construct
  misc_feature 1..80: note = Artificially Synthesized Probe
  source 1..80: mol_type = other DNA
ccaacatccctgttggtctcacagatcaaatcctctgctgccaatcactgccacagcccaacaactccaaagccaattac

SEQ ID NO: 29326 - DNA, 80 bp, synthetic construct
  misc_feature 1..80: note = Artificially Synthesized Probe
  source 1..80: mol_type = other DNA
aaagatccctggaggccgaggatgcttaggtgggaggtctctgtcaaggagcatctaaggagtaggaagaacccagtagg

SEQ ID NO: 29327 - DNA, 80 bp, synthetic construct
  misc_feature 1..80: note = Artificially Synthesized Probe
  source 1..80: mol_type = other DNA
gggtggcttggtgaatggcaggaaggacaggacaagaggactaagattacaataaatagggattagagatctggaagaac

SEQ ID NO: 29328 - DNA, 80 bp, synthetic construct
  misc_feature 1..80: note = Artificially Synthesized Probe
  source 1..80: mol_type = other DNA
accaaggtggggccgtgtagcgtaatggttcagcatgctggctttgaagcccgggttggaatcctggggagcataatata

SEQ ID NO: 29329 - DNA, 80 bp, synthetic construct
  misc_feature 1..80: note = Artificially Synthesized Probe
  source 1..80: mol_type = other DNA
aggtgtacacacctccacagggtatacagttccattggtgaatatacctccacaggtgtacactcctcaacaggtataca

SEQ ID NO: 29330 - DNA, 80 bp, synthetic construct
  misc_feature 1..80: note = Artificially Synthesized Probe
  source 1..80: mol_type = other DNA
acagggtacacacctccacaggatccatacctcaaaagggtacacatctccacagggtacacacctccacaggatccaca

SEQ ID NO: 29331 - DNA, 80 bp, synthetic construct
  misc_feature 1..80: note = Artificially Synthesized Probe
  source 1..80: mol_type = other DNA
tccacagggtacacaactccactgggtacacacctccacaggatccatacctccacaaggacacacctccacagggtaca

SEQ ID NO: 29332 - DNA, 80 bp, synthetic construct
  misc_feature 1..80: note = Artificially Synthesized Probe
  source 1..80: mol_type = other DNA
tttaaaaaggctctgatttgtaggatttgctaatttccatgggcaaatactcccactgtggctgatctccaccaatttca

SEQ ID NO: 29333 - DNA, 80 bp, synthetic construct
  misc_feature 1..80: note = Artificially Synthesized Probe
  source 1..80: mol_type = other DNA
cgatccccccacccccataactcaggccttaaacaaactctgtcccactgctaattattaataatagctatcatttattg

SEQ ID NO: 29334 - DNA, 80 bp, synthetic construct
  misc_feature 1..80: note = Artificially Synthesized Probe
  source 1..80: mol_type = other DNA
tttggccaagcaaggctatgaaagtcatggctgtgaactgaagcctctgttaaggcctctgacatacaggaacttggctg

SEQ ID NO: 29335 - DNA, 80 bp, synthetic construct
  misc_feature 1..80: note = Artificially Synthesized Probe
  source 1..80: mol_type = other DNA
tgggatctttgggcaaatcctatgggactttgggcaaattgcctcccctcattttccctgttaccctgtctgtcaaatga

SEQ ID NO: 29336 - DNA, 80 bp, synthetic construct
  misc_feature 1..80: note = Artificially Synthesized Probe
  source 1..80: mol_type = other DNA
ccgcactccagcctaggcaacagagggagactccgtctccaaaaaaacaaataaataaaaataaaaacaaaaatacaaaa

SEQ ID NO: 29337 - DNA, 80 bp, synthetic construct
  misc_feature 1..80: note = Artificially Synthesized Probe
  source 1..80: mol_type = other DNA
cttctctgtagacacaggagaccgatcttgaggagccagaggcagagcccagctgggagccggggtttcactggtcagtc

SEQ ID NO: 29338 - DNA, 80 bp, synthetic construct
  misc_feature 1..80: note = Artificially Synthesized Probe
  source 1..80: mol_type = other DNA
ctgtgagccccatcagatttggggtaccccaggtttcatggcagggtgccctcatgaaatcggggccaagggtaggctat

SEQ ID NO: 29339 - DNA, 80 bp, synthetic construct
  misc_feature 1..80: note = Artificially Synthesized Probe
  source 1..80: mol_type = other DNA
aatgtccagaaactccagccagacctacacacccatatgcaaatgtgacaagaaaaacacattccagaggccaagggaaa

SEQ ID NO: 29340 - DNA, 80 bp, synthetic construct
  misc_feature 1..80: note = Artificially Synthesized Probe
  source 1..80: mol_type = other DNA
ttgcttcccctctttgggctcagccccatcatctgtcaaatgaaggggttggacacaagtgctcttggcccttctaggcc

SEQ ID NO: 29341 - DNA, 80 bp, synthetic construct
  misc_feature 1..80: note = Artificially Synthesized Probe
  source 1..80: mol_type = other DNA
gcttttatgtaaggttcaagacacaggaaagaggaagggagaaaataaggcctaatctagtcatctgctttctcttccag

SEQ ID NO: 29342 - DNA, 80 bp, synthetic construct
  misc_feature 1..80: note = Artificially Synthesized Probe
  source 1..80: mol_type = other DNA
caccagaccttaaatgacctcaccatgcctggccctgctttgatggcctctgcagtctgcaccccctctcaagatggcca

SEQ ID NO: 29343 - DNA, 80 bp, synthetic construct
  misc_feature 1..80: note = Artificially Synthesized Probe
  source 1..80: mol_type = other DNA
aggcatggaatcctctgggtctaccagtaatggcagcaggtggaaatcataccagtgggcttccagaagatgctggagag

SEQ ID NO: 29344 - DNA, 80 bp, synthetic construct
  misc_feature 1..80: note = Artificially Synthesized Probe
  source 1..80: mol_type = other DNA
ttaagattcaaaagaaaaaaatgtcagggtttggggtagcagttcaggctgttggaaggattaagtaagagaatgtaggt

SEQ ID NO: 29345 - DNA, 80 bp, synthetic construct
  misc_feature 1..80: note = Artificially Synthesized Probe
  source 1..80: mol_type = other DNA
gcctcagggagcatccacctaccccaagtgggaagagaaagttggagaagaaataagacactattgctaccccgaccgct

SEQ ID NO: 29346 - DNA, 80 bp, synthetic construct
  misc_feature 1..80: note = Artificially Synthesized Probe
  source 1..80: mol_type = other DNA
tatggtcctgcctggggataatttgacgcttgatgttcaaataagtttatcctgctgggctgccatcagatgaggagtgg

SEQ ID NO: 29347 - DNA, 80 bp, synthetic construct
  misc_feature 1..80: note = Artificially Synthesized Probe
  source 1..80: mol_type = other DNA
cagccactggacataattgttagtgctgaccatccctcttccaaacaggaagtggctggggtgggggctgccctggcatc

SEQ ID NO: 29348 - DNA, 80 bp, synthetic construct
  misc_feature 1..80: note = Artificially Synthesized Probe
  source 1..80: mol_type = other DNA
tgtcccttcatataccaaacccacttagacacacaaacatatgtgcaatgcacacaccgcacacacccaaacactcacca

SEQ ID NO: 29349 - DNA, 80 bp, synthetic construct
  misc_feature 1..80: note = Artificially Synthesized Probe
  source 1..80: mol_type = other DNA
tggggaagactgtggaggagggaggtctcatggtgttctttctctcttgggcctttcagaagagctggacagcctcattg

SEQ ID NO: 29350 - DNA, 80 bp, synthetic construct
  misc_feature 1..80: note = Artificially Synthesized Probe
  source 1..80: mol_type = other DNA
tctatactcgattgtgagtgaccagtagtctgaacattctcagatgcatttgcattttatcagagttcatcttctaaagc

SEQ ID NO: 29351 - DNA, 80 bp, synthetic construct
  misc_feature 1..80: note = Artificially Synthesized Probe
  source 1..80: mol_type = other DNA
ctgccggaagctgcttgatctgggctgcaaatctaccttccttgggagactgggcatgagccagggttcactcccaagtg

SEQ ID NO: 29352 - DNA, 80 bp, synthetic construct
  misc_feature 1..80: note = Artificially Synthesized Probe
  source 1..80: mol_type = other DNA
gaggaaaatgccctgtccctagctcacactcatccacacttaagccctcgtgcacacacacaaattattcagatgtacac

SEQ ID NO: 29353 - DNA, 80 bp, synthetic construct
  misc_feature 1..80: note = Artificially Synthesized Probe
  source 1..80: mol_type = other DNA
tatgttcctcgacttaggatgcggttatgtccgataaacccattgtaaattgaaaccaccgaaagtcaaaaaccactttc

SEQ ID NO: 29354 - DNA, 80 bp, synthetic construct
  misc_feature 1..80: note = Artificially Synthesized Probe
  source 1..80: mol_type = other DNA
ctctttgatctggaggagagtcacccacaggtggtgctggtggctgccaaccaccgctacgtctctgtgcggcaaggtag

SEQ ID NO: 29355 - DNA, 80 bp, synthetic construct
  misc_feature 1..80: note = Artificially Synthesized Probe
  source 1..80: mol_type = other DNA
tgtgggcaggaggctgtggggggtccatatctccccttctttttctccaccccattttctggacttcatttatttattta

SEQ ID NO: 29356 - DNA, 80 bp, synthetic construct
  misc_feature 1..80: note = Artificially Synthesized Probe
  source 1..80: mol_type = other DNA
ccgggcagtcactacccacctgggctcctggctccatgcaccccagagtggctcggaggtggtctgaaaaggcgaggtgg

SEQ ID NO: 29357 - DNA, 80 bp, synthetic construct
  misc_feature 1..80: note = Artificially Synthesized Probe
  source 1..80: mol_type = other DNA
gatggtggtggtggtgatgatagtgatggtgatgatgatggtgatgatgatggtgatgatggtgatggtgatgatgatag

SEQ ID NO: 29358 - DNA, 80 bp, synthetic construct
  misc_feature 1..80: note = Artificially Synthesized Probe
  source 1..80: mol_type = other DNA
atggtgatgatgatgatagtgatggtggtgatggtgatggtgatgatagtgatggcgatgatggtgatgatagtgatggt

SEQ ID NO: 29359 - DNA, 80 bp, synthetic construct
  misc_feature 1..80: note = Artificially Synthesized Probe
  source 1..80: mol_type = other DNA
gcctcacatccaggcaggacaaagtccagaggaaaaagaggcactggctctgcttgtgtcttcataggagtaagaaaact

SEQ ID NO: 29360 - DNA, 80 bp, synthetic construct
  misc_feature 1..80: note = Artificially Synthesized Probe
  source 1..80: mol_type = other DNA
tgctgtccccatgctgggcatgggtgcccctccatcccctcgcaggaaccccagatggagcccggggcagtcttgtcctc

SEQ ID NO: 29361 - DNA, 80 bp, synthetic construct
  misc_feature 1..80: note = Artificially Synthesized Probe
  source 1..80: mol_type = other DNA
tggaccctggtcacccatgggggcattcacgccacagccacacaagtgtgagtgcacacatcccttcctcctccatcatc

SEQ ID NO: 29362 - DNA, 80 bp, synthetic construct
  misc_feature 1..80: note = Artificially Synthesized Probe
  source 1..80: mol_type = other DNA
tctccaccaagagctggaccctccccagcccacggaacgggtgctgtcatggagtcatacttgctagtcaagataactcg

SEQ ID NO: 29363 - DNA, 80 bp, synthetic construct
  misc_feature 1..80: note = Artificially Synthesized Probe
  source 1..80: mol_type = other DNA
gccgacgccccggccgggaccgcgctttgggagtactgaggccgcgcccagaccagcctgtcgcgcattaaaaccgtgtc

SEQ ID NO: 29364 - DNA, 80 bp, synthetic construct
  misc_feature 1..80: note = Artificially Synthesized Probe
  source 1..80: mol_type = other DNA
gtaatttgagagtatagtgatttgctaaattattttttaatggagaacttctctggagacaggaggctggctgggcaggg

SEQ ID NO: 29365 - DNA, 80 bp, synthetic construct
  misc_feature 1..80: note = Artificially Synthesized Probe
  source 1..80: mol_type = other DNA
gacacttctctgggaccagatgctgaaaagaggcgtctttcctataaagaacccgaagaccatgaggtcttagggcagct

SEQ ID NO: 29366 - DNA, 80 bp, synthetic construct
  misc_feature 1..80: note = Artificially Synthesized Probe
  source 1..80: mol_type = other DNA
ctcacctgtccttttcctcaggtgtgttcttggggagcctcattgcttcctgccataaagagacagaaccactgggcgag

SEQ ID NO: 29367 - DNA, 80 bp, synthetic construct
  misc_feature 1..80: note = Artificially Synthesized Probe
  source 1..80: mol_type = other DNA
atcttggaagattcagccaactctccaccagaaagtcatcatcaacagcccctaccctcgaccatggatgagagcaaatg

SEQ ID NO: 29368 - DNA, 80 bp, synthetic construct
  misc_feature 1..80: note = Artificially Synthesized Probe
  source 1..80: mol_type = other DNA
agggaatgtaaatcaacccagccctccccgtccaccttcgcattgctcagagggagtgtaaaccaacccagcactccccc

SEQ ID NO: 29369 - DNA, 80 bp, synthetic construct
  misc_feature 1..80: note = Artificially Synthesized Probe
  source 1..80: mol_type = other DNA
ttaaattcatgactgtcttcaaatgcctgtccgggtctaaagttcatcaacccattaaagtatagaaaagatcatcttgt

SEQ ID NO: 29370 - DNA, 80 bp, synthetic construct
  misc_feature 1..80: note = Artificially Synthesized Probe
  source 1..80: mol_type = other DNA
gcgaaggcccaaagagtaagcagcagcaagatttagttcgaagagcaaaagaacaaagcccccacagcttggaacagaac

SEQ ID NO: 29371 - DNA, 80 bp, synthetic construct
  misc_feature 1..80: note = Artificially Synthesized Probe
  source 1..80: mol_type = other DNA
tccctccctgtctctctccccacctccctctctccccactcccctccctctctccctaccccccctccccatctccctct

SEQ ID NO: 29372 - DNA, 80 bp, synthetic construct
  misc_feature 1..80: note = Artificially Synthesized Probe
  source 1..80: mol_type = other DNA
cccctctccctcccctttccctcctcccctctccctccctctctccccctctccctctctccccttttccccctccctct

SEQ ID NO: 29373 - DNA, 80 bp, synthetic construct
  misc_feature 1..80: note = Artificially Synthesized Probe
  source 1..80: mol_type = other DNA
catggcctgtgaatgtggggtcaccctggccgaaccctcaaaccctgctgggcccaagcacttgccggggtgagggcggt

SEQ ID NO: 29374 - DNA, 80 bp, synthetic construct
  misc_feature 1..80: note = Artificially Synthesized Probe
  source 1..80: mol_type = other DNA
cacctggaaaaggggcttggagtggaaacggcctcggcgcgtctccaccaccaggaaagcctcggaacccgcgggtccca

SEQ ID NO: 29375 - DNA, 80 bp, synthetic construct
  misc_feature 1..80: note = Artificially Synthesized Probe
  source 1..80: mol_type = other DNA
tgtccaagaattaccatagataaaattccacagagcatgcactggcaatcaaaaatcacacaacacaaagcaaagcagcc

SEQ ID NO: 29376 - DNA, 80 bp, synthetic construct
  misc_feature 1..80: note = Artificially Synthesized Probe
  source 1..80: mol_type = other DNA
tattaattgcaaaaggaaaaatagtaacattgcagtgaagggtccaggaggaagggggtcgccttggcaagtgacgggtc

SEQ ID NO: 29377 - DNA, 80 bp, synthetic construct
  misc_feature 1..80: note = Artificially Synthesized Probe
  source 1..80: mol_type = other DNA
atataatatgattatacacaaataaatggggcaaaatgcaagcacttggaaaatatgggtgggaggcaggagtggagggc

SEQ ID NO: 29378 - DNA, 80 bp, synthetic construct
  misc_feature 1..80: note = Artificially Synthesized Probe
  source 1..80: mol_type = other DNA
acctcaataaggtgtccaaaataaaaagtgaaatctcatcttctgaacacaagtcaataaaatgaagggggaggaggggg

SEQ ID NO: 29379 - DNA, 80 bp, synthetic construct
  misc_feature 1..80: note = Artificially Synthesized Probe
  source 1..80: mol_type = other DNA
tctatacccggagtgacgctcagaccgggtgaccactgctgtgcagacgtggagggaaaggcctgggggcacctgaaggt

SEQ ID NO: 29380 - DNA, 80 bp, synthetic construct
  misc_feature 1..80: note = Artificially Synthesized Probe
  source 1..80: mol_type = other DNA
tcctggaggacgcaggtggaggggctccctccagcctaacccaggaatgggcctctactgcaccctctcctggggagtgc

SEQ ID NO: 29381 - DNA, 80 bp, synthetic construct
  misc_feature 1..80: note = Artificially Synthesized Probe
  source 1..80: mol_type = other DNA
gccgcaggcgaggctgcgtttatttcggtattgagggagctgcgcttctgcatgttggctttttggaacactctgccctt

SEQ ID NO: 29382 - DNA, 80 bp, synthetic construct
  misc_feature 1..80: note = Artificially Synthesized Probe
  source 1..80: mol_type = other DNA
tcaggatcactgtggatccctggcctctcatgagcggcccacagcccagcccctggccagcgcccgtgtgtccacacacc

SEQ ID NO: 29383 - DNA, 80 bp, synthetic construct
  misc_feature 1..80: note = Artificially Synthesized Probe
  source 1..80: mol_type = other DNA
tgcaggtggtgcctccaggagagactcacgggctctgctccgacagacagatgccagagacgtggccggggatccaagaa

SEQ ID NO: 29384 - DNA, 80 bp, synthetic construct
  misc_feature 1..80: note = Artificially Synthesized Probe
  source 1..80: mol_type = other DNA
ctccgaaaagttggggacgcattccaccagctgggacatggccagcaccttgatccagatgctcctctctgggcagatgg

SEQ ID NO: 29385 - DNA, 80 bp, synthetic construct
  misc_feature 1..80: note = Artificially Synthesized Probe
  source 1..80: mol_type = other DNA
ggaacattcattagatgctacaattaggttgcacattcattagattcttcacttggcccggtgtgctggctcacatctat

SEQ ID NO: 29386 - DNA, 80 bp, synthetic construct
  misc_feature 1..80: note = Artificially Synthesized Probe
  source 1..80: mol_type = other DNA
cctctagaatcactccagaaacacagaaggggacttggtgaatgcttgctctggagcaatcatatgctccttcagtcttt

SEQ ID NO: 29387 - DNA, 80 bp, synthetic construct
  misc_feature 1..80: note = Artificially Synthesized Probe
  source 1..80: mol_type = other DNA
acatcgccctgggaggtgtcgatgttttctttacaccactccatgccgttgctggtgaccacgaaaacgggggcttcgtg

SEQ ID NO: 29388 - DNA, 80 bp, synthetic construct
  misc_feature 1..80: note = Artificially Synthesized Probe
  source 1..80: mol_type = other DNA
ttaaaggtttagactcctggggctgaggtagggagagcctgagtcctaggtttcagggatgagagccttggaatttcggg

SEQ ID NO: 29389 - DNA, 80 bp, synthetic construct
  misc_feature 1..80: note = Artificially Synthesized Probe
  source 1..80: mol_type = other DNA
aagacctggagaagaggttgggggtgcacctcctggttctgaaggagttgttcctgggtcccaggaacaactgagtgggg

SEQ ID NO: 29390 - DNA, 80 bp, synthetic construct
  misc_feature 1..80: note = Artificially Synthesized Probe
  source 1..80: mol_type = other DNA
tggagaccggagtggaacagggtctgtttcccacgccgtcagcgggggccgtggctgccggcgccagagacaaaggcctc

SEQ ID NO: 29391 - DNA, 80 bp, synthetic construct
  misc_feature 1..80: note = Artificially Synthesized Probe
  source 1..80: mol_type = other DNA
ctgaccctatacccaccggttgtttcctggttatattagttatacaacaaagaataaaagtaatagctaatgattaataa

SEQ ID NO: 29392 - DNA, 80 bp, synthetic construct
  misc_feature 1..80: note = Artificially Synthesized Probe
  source 1..80: mol_type = other DNA
cacagaaggcctacccttgcacccttaggggctccaggaaattagccaacctgtcttccctctgggtgcccactccaggg

SEQ ID NO: 29393 - DNA, 80 bp, synthetic construct
  misc_feature 1..80: note = Artificially Synthesized Probe
  source 1..80: mol_type = other DNA
acccttggcattttgtagacagcagcaatttccctcaaccccagaatatttggaatgttccagaagtcctcatttacagt

SEQ ID NO: 29394 - DNA, 80 bp, synthetic construct
  misc_feature 1..80: note = Artificially Synthesized Probe
  source 1..80: mol_type = other DNA
tctcgtagttgcttctgctggggcccagcaccacgggcacggcccaggcctccagggcgttcctccacagcttctcggtg

SEQ ID NO: 29395 - DNA, 80 bp, synthetic construct
  misc_feature 1..80: note = Artificially Synthesized Probe
  source 1..80: mol_type = other DNA
gccagagaaaggtacaatgggactgggttttgcaggtaatatatgagctgaccggccgagcagagtggctcacacctgta

SEQ ID NO: 29396 - DNA, 80 bp, synthetic construct
  misc_feature 1..80: note = Artificially Synthesized Probe
  source 1..80: mol_type = other DNA
aaatttgccgggcaaggtggcatgcgcctgtagtcccagctacttgggggaattgctttagtctggaagtttgaggctgc

SEQ ID NO: 29397 - DNA, 80 bp, synthetic construct
  misc_feature 1..80: note = Artificially Synthesized Probe
  source 1..80: mol_type = other DNA
cccaagcctgtaatcctagctctttgggaggccgaggcgggcagatcacgaggtcagaagatcaagaccatcctggctaa

SEQ ID NO: 29398 - DNA, 80 bp, synthetic construct
  misc_feature 1..80: note = Artificially Synthesized Probe
  source 1..80: mol_type = other DNA
tcacccacatcccttggtggcaagtcaattgcagggacgcctgctttggctgctcaccttaccccttctctccgtgtctc

SEQ ID NO: 29399 - DNA, 80 bp, synthetic construct
  misc_feature 1..80: note = Artificially Synthesized Probe
  source 1..80: mol_type = other DNA
caccctataatccttttattacctcccctcctcacacccagtccagcttacagtttctttccgtgactagccctcctcca

SEQ ID NO: 29400 - DNA, 80 bp, synthetic construct
  misc_feature 1..80: note = Artificially Synthesized Probe
  source 1..80: mol_type = other DNA
taattctccccacccttgagaatgtactttatgagattcaccctctgcctgcaaaacattgctcctaactccactgccta

SEQ ID NO: 29401 - DNA, 80 bp, synthetic construct
  misc_feature 1..80: note = Artificially Synthesized Probe
  source 1..80: mol_type = other DNA
aaaagaaaaaaaaaatgcatcttaagtccaccccaggcagggcagggccagagagaatccaaggccagaaaagatgagtg

SEQ ID NO: 29402 - DNA, 80 bp, synthetic construct
  misc_feature 1..80: note = Artificially Synthesized Probe
  source 1..80: mol_type = other DNA
agataaaggtgacgcccattttgcggacctggtgtgaggattaaatgggaataacatagataaagtcttcagaacttcaa

SEQ ID NO: 29403 - DNA, 80 bp, synthetic construct
  misc_feature 1..80: note = Artificially Synthesized Probe
  source 1..80: mol_type = other DNA
tctctggaaaaataggcaagtgtggccatgatggtccttagatctcctctaggaaagcagacatttattacttggcttct

SEQ ID NO: 29404 - DNA, 80 bp, synthetic construct
  misc_feature 1..80: note = Artificially Synthesized Probe
  source 1..80: mol_type = other DNA
tctccaccccttgcatctacttctaaagcagctgttcaacagaaacagaatgggagccacacacataattctacattttc

SEQ ID NO: 29405 - DNA, 80 bp, synthetic construct
  misc_feature 1..80: note = Artificially Synthesized Probe
  source 1..80: mol_type = other DNA
acagagcgagactccgtctcaaaaaaaaaaaaaaggctcctaataactttattactttattatcacctcaaataattaaa

SEQ ID NO: 29406 - DNA, 80 bp, synthetic construct
  misc_feature 1..80: note = Artificially Synthesized Probe
  source 1..80: mol_type = other DNA
tatggtaaggggctgagtgtgctacctcaggtgtctttttcttttcttataaagcctaactagtttcactcccatgataa

SEQ ID NO: 29407 - DNA, 80 bp, synthetic construct
  misc_feature 1..80: note = Artificially Synthesized Probe
  source 1..80: mol_type = other DNA
catcccagactaagacaaataacaaatacttgtatccctgacaccaggttaagagatagaatttgtttgttcctctggag

SEQ ID NO: 29408 - DNA, 80 bp, synthetic construct
  misc_feature 1..80: note = Artificially Synthesized Probe
  source 1..80: mol_type = other DNA
ccactgggcctgagacttcaggcccagaaactatctaatatttcctcaaatgcatcccatgagcaggcactgtgtgagtg

SEQ ID NO: 29409 - DNA, 80 bp, synthetic construct
  misc_feature 1..80: note = Artificially Synthesized Probe
  source 1..80: mol_type = other DNA
taccctttggtgcgtcagtttcctcatctgtaaaacacaactatagttgatcctcattcgttaagagtctgtacttgtta

SEQ ID NO: 29410 - DNA, 80 bp, synthetic construct
  misc_feature 1..80: note = Artificially Synthesized Probe
  source 1..80: mol_type = other DNA
cgcctcccaaactgcagagattataggcacgaaccacaatgcccggcctcatgttttttatttttcaagttgaaatgagg

SEQ ID NO: 29411 - DNA, 80 bp, synthetic construct
  misc_feature 1..80: note = Artificially Synthesized Probe
  source 1..80: mol_type = other DNA
gtaactaacagtctctcgcctcttctctccatggcaaccagtgacctttggagaatgtaaaccttatcaccaatctctta

SEQ ID NO: 29412 - DNA, 80 bp, synthetic construct
  misc_feature 1..80: note = Artificially Synthesized Probe
  source 1..80: mol_type = other DNA
agtccaattaacaagagcaaggcctggtaccaaaaaaagtgaatttactccgaaactagcttgggtgaggggtacaaagc

SEQ ID NO: 29413 - DNA, 80 bp, synthetic construct
  misc_feature 1..80: note = Artificially Synthesized Probe
  source 1..80: mol_type = other DNA
gtaacgtacttcttaactttggctttcagagttcgaaccaacgtggcctcaaccagatttggaatgtcaaaaagcagagt

SEQ ID NO: 29414 - DNA, 80 bp, synthetic construct
  misc_feature 1..80: note = Artificially Synthesized Probe
  source 1..80: mol_type = other DNA
ggtcaccacagccacctccgagtccaagatttccaggtgacatgcagtctcctctctcccagctttaggaatggcttctt

SEQ ID NO: 29415 - DNA, 80 bp, synthetic construct
  misc_feature 1..80: note = Artificially Synthesized Probe
  source 1..80: mol_type = other DNA
ccttgaagtcaagttaaacaataagattggagaccagcaatgccctcagcctggtttttgcagcaggactgagtcccttg

SEQ ID NO: 29416 - DNA, 80 bp, synthetic construct
  misc_feature 1..80: note = Artificially Synthesized Probe
  source 1..80: mol_type = other DNA
accctttctctccagctcactctcaaaacacaccctatcaggccaaccactctttttaaaggacagctcctcaccaatcc

SEQ ID NO: 29417 - DNA, 80 bp, synthetic construct
  misc_feature 1..80: note = Artificially Synthesized Probe
  source 1..80: mol_type = other DNA
tgcagcgtagtattccattgcatgactataccacaatttatctgtgatattacaaaggaatacttgggcagtttccagtt

SEQ ID NO: 29418 - DNA, 80 bp, synthetic construct
  misc_feature 1..80: note = Artificially Synthesized Probe
  source 1..80: mol_type = other DNA
cgggtgatccctcccacctcaggctcctgaggagctagaactacaggcatgggccatgcccagctaattttttaattttt

SEQ ID NO: 29419 - DNA, 80 bp, synthetic construct
  misc_feature 1..80: note = Artificially Synthesized Probe
  source 1..80: mol_type = other DNA
ttgctcttgttgcccaggctggagtgcagtggtgccacctcagctcactgcaacctccgccccctggattcaagagatta

SEQ ID NO: 29420 - DNA, 80 bp, synthetic construct
  misc_feature 1..80: note = Artificially Synthesized Probe
  source 1..80: mol_type = other DNA
atttgatattaataaaatggaagcatttggtaatcatgttttgggttttgtgcttcctctgcagctctctagatgagacc

SEQ ID NO: 29421 - DNA, 80 bp, synthetic construct
  misc_feature 1..80: note = Artificially Synthesized Probe
  source 1..80: mol_type = other DNA
tagggataagataactgcccaaaagttatttagattacaaagacttgagccctgctcctgtgagacagtgatggggtagg

SEQ ID NO: 29422 - DNA, 80 bp, synthetic construct
  misc_feature 1..80: note = Artificially Synthesized Probe
  source 1..80: mol_type = other DNA
attgactaataccagaaaatgtcacgaagcgtgcattttggattcaatcatggaattgttgaggacaatcagccatcaga

SEQ ID NO: 29423 - DNA, 80 bp, synthetic construct
  misc_feature 1..80: note = Artificially Synthesized Probe
  source 1..80: mol_type = other DNA
agtgctgggttaacaggcatgagccacggcacctggcaaaagtcatcttttggtttacttctattgaactgaaaaagtca

SEQ ID NO: 29424 - DNA, 80 bp, synthetic construct
  misc_feature 1..80: note = Artificially Synthesized Probe
  source 1..80: mol_type = other DNA
acacatgtggagtaagctaacgtgtgcagcatgtctcccatgttcaccttaggcagaaacttaacactaacatgtattac

SEQ ID NO: 29425 - DNA, 80 bp, synthetic construct
  misc_feature 1..80: note = Artificially Synthesized Probe
  source 1..80: mol_type = other DNA
tcctgccctgagattgtctctctgaagacaacattaggctagtaggctttccagattctgtaacccattctttcaaagga

SEQ ID NO: 29426 - DNA, 80 bp, synthetic construct
  misc_feature 1..80: note = Artificially Synthesized Probe
  source 1..80: mol_type = other DNA
tccgctctacttgacctagtaaaatctgcctggagactgttagagtcaccccactacctgaagttacctccaggctgacc

SEQ ID NO: 29427 - DNA, 80 bp, synthetic construct
  misc_feature 1..80: note = Artificially Synthesized Probe
  source 1..80: mol_type = other DNA
agctacacttaagttaacatactcaggagtaccattccagcttcaagctggaagtgtctgcagccccctgagaccactta

SEQ ID NO: 29428 - DNA, 80 bp, synthetic construct
  misc_feature 1..80: note = Artificially Synthesized Probe
  source 1..80: mol_type = other DNA
agggcatgcacactcccaaaatagactcagattgtctaaggaataatgatgatgatgaagagaaagccctctttatctgg

SEQ ID NO: 29429 - DNA, 80 bp, synthetic construct
  misc_feature 1..80: note = Artificially Synthesized Probe
  source 1..80: mol_type = other DNA
tatagggtgcaacacacaactggagcatttaagggccacaaagagaacaaattaccaatgattgtgtgttgattctttga

SEQ ID NO: 29430 - DNA, 80 bp, synthetic construct
  misc_feature 1..80: note = Artificially Synthesized Probe
  source 1..80: mol_type = other DNA
cctccttgggctcccgaagtgccaggatacaagcatgagtcaccacatgcagcctcagttttaagaaacttttaaataaa

SEQ ID NO: 29431 - DNA, 80 bp, synthetic construct
  misc_feature 1..80: note = Artificially Synthesized Probe
  source 1..80: mol_type = other DNA
gaaaccagcctggtcaatatagcgagacctcatctctacaaaagaaaaatgttaaaattagacaggtgtggtgtctgtag

SEQ ID NO: 29432 - DNA, 80 bp, synthetic construct
  misc_feature 1..80: note = Artificially Synthesized Probe
  source 1..80: mol_type = other DNA
tttcaggcatgagccatgcctggcctaaatagctctctgtgtttgcaaaagtgtgttataagaatcattcagagcctctc

SEQ ID NO: 29433 - DNA, 80 bp, synthetic construct
  misc_feature 1..80: note = Artificially Synthesized Probe
  source 1..80: mol_type = other DNA
tttgagaggctgaggtaggaggatcacttgaggacaggagttcagaaccatcctgggcaacatagtgagtccctgtctct

SEQ ID NO: 29434 - DNA, 80 bp, synthetic construct
  misc_feature 1..80: note = Artificially Synthesized Probe
  source 1..80: mol_type = other DNA
tttcaatctagaggaataaaagattgtgttggagacacaatgtggcctgcatagcatctgaaagcctgagaacatgcagg

SEQ ID NO: 29435 - DNA, 80 bp, synthetic construct
  misc_feature 1..80: note = Artificially Synthesized Probe
  source 1..80: mol_type = other DNA
ggctttgtagatatcgggcaggcacttaccccaaaagaactttccccatatctgaagactgaaaacgtccatatcgtatt

SEQ ID NO: 29436 - DNA, 80 bp, synthetic construct
  misc_feature 1..80: note = Artificially Synthesized Probe
  source 1..80: mol_type = other DNA
atgtgaatatgcaggtccagtggggaaagtgacatgtcctaagtcagaatagagtcaacaagaaaacagggcccaaaatg

SEQ ID NO: 29437 - DNA, 80 bp, synthetic construct
  misc_feature 1..80: note = Artificially Synthesized Probe
  source 1..80: mol_type = other DNA
tgaaatgagcaggtcctcgtgtcaggacctaggttagtttctgaaaaagcatgaaaagcaggcctcctgaacttccccga

SEQ ID NO: 29438 - DNA, 80 bp, synthetic construct
  misc_feature 1..80: note = Artificially Synthesized Probe
  source 1..80: mol_type = other DNA
tggtggtctccccgcttcctggctacaagtccctctgaagaaatccaaaggagtaaagagcttggagagtaggcctctgt

SEQ ID NO: 29439 - DNA, 80 bp, synthetic construct
  misc_feature 1..80: note = Artificially Synthesized Probe
  source 1..80: mol_type = other DNA
gggaaacaccagccagtgctgctgcctttaaagcacttttgactgatctcttgttaatttagcaactgttattggttgat

SEQ ID NO: 29440 - DNA, 80 bp, synthetic construct
  misc_feature 1..80: note = Artificially Synthesized Probe
  source 1..80: mol_type = other DNA
aggagaggaaggaatggggaataactgtttaatgggtatagttggccttgtgtatctgtgggttccacatctgattcaac

SEQ ID NO: 29441 - DNA, 80 bp, synthetic construct
  misc_feature 1..80: note = Artificially Synthesized Probe
  source 1..80: mol_type = other DNA
gatatacactagctcattttgtgttattttctagagctttactccagtcaatttcttgggggcagcatttgtggaatcag

SEQ ID NO: 29442 - DNA, 80 bp, synthetic construct
  misc_feature 1..80: note = Artificially Synthesized Probe
  source 1..80: mol_type = other DNA
tatggaatcagctgctacaagaatgcaaaaaatcttccaaagacaagaaaagaggaaaaaaagccgttttcatgagctga

SEQ ID NO: 29443 - DNA, 80 bp, synthetic construct
  misc_feature 1..80: note = Artificially Synthesized Probe
  source 1..80: mol_type = other DNA
ttgtattaatatgtagcaaaggcttttccaatgggtgaataaaaacacattccattaagtcaagctgggagcagtggcat

SEQ ID NO: 29444 - DNA, 80 bp, synthetic construct
  misc_feature 1..80: note = Artificially Synthesized Probe
  source 1..80: mol_type = other DNA
ggcaaaatcccgtctctactaaaaatattaaaaaattggctgggcgtggtggttcgtgcctataatttcagctactcagg

SEQ ID NO: 29445 - DNA, 80 bp, synthetic construct
  misc_feature 1..80: note = Artificially Synthesized Probe
  source 1..80: mol_type = other DNA
tataaaatggagatatctaacatgttgagcctgggcccacaggcaaagcacaatcctgatgtgagaagtactcagttcat

SEQ ID NO: 29446 - DNA, 80 bp, synthetic construct
  misc_feature 1..80: note = Artificially Synthesized Probe
  source 1..80: mol_type = other DNA
tgaagatttatttagacagttgaggaaaacatcagcacccagcagtaaaattggctctcaaagattttcttctcctgtgg

SEQ ID NO: 29447 - DNA, 80 bp, synthetic construct
  misc_feature 1..80: note = Artificially Synthesized Probe
  source 1..80: mol_type = other DNA
tcatttttcacctgcatttttgcaggagctttcttatatccaccttcctccttttctctcagcccatcatctagctacac

SEQ ID NO: 29448 - DNA, 80 bp, synthetic construct
  misc_feature 1..80: note = Artificially Synthesized Probe
  source 1..80: mol_type = other DNA
gctgttgccctagcatcttgcacagttccttgcacacaattagagctctataaatgtcaaataaatgtgttataattata

SEQ ID NO: 29449 - DNA, 80 bp, synthetic construct
  misc_feature 1..80: note = Artificially Synthesized Probe
  source 1..80: mol_type = other DNA
cagcttggactcaaacctcagagtccaaccatcctactcattagaccagtgttcttcaaactggtctgatggaaaaatca

SEQ ID NO: 29450 - DNA, 80 bp, synthetic construct
  misc_feature 1..80: note = Artificially Synthesized Probe
  source 1..80: mol_type = other DNA
tgtcccccaaagatcacaatctccttcagacactattaatgtcccccaagtggcaaagtccctattcattttcattttct

SEQ ID NO: 29451 - DNA, 80 bp, synthetic construct
  misc_feature 1..80: note = Artificially Synthesized Probe
  source 1..80: mol_type = other DNA
gacggctgagtatctcagagcacacacacggcttaccacaatctcttgcctctgtatcagttttattttttattttattc

SEQ ID NO: 29452 - DNA, 80 bp, synthetic construct
  misc_feature 1..80: note = Artificially Synthesized Probe
  source 1..80: mol_type = other DNA
gtgaacatttcagagtacttttcagcctgggtggcccaaccaaaggaccagcctctcaattactggcgcagagaacaaaa

SEQ ID NO: 29453 - DNA, 80 bp, synthetic construct
  misc_feature 1..80: note = Artificially Synthesized Probe
  source 1..80: mol_type = other DNA
gcttgtcgcgaatcttcatcttagcacatttccctcaccaggtgctggctggcctaataactggtgagcaactggggcaa

SEQ ID NO: 29454 - DNA, 80 bp, synthetic construct
  misc_feature 1..80: note = Artificially Synthesized Probe
  source 1..80: mol_type = other DNA
atgggccttctctctcccagataagttggtcctccctctgcctttcctctcaagcccccaaagagcaaaggcaacagcaa

SEQ ID NO: 29455 - DNA, 80 bp, synthetic construct
  misc_feature 1..80: note = Artificially Synthesized Probe
  source 1..80: mol_type = other DNA
gaaggaagagtcagccccctaggagccacttcccatctttggtttcctacaggctggatggcatcccctggaagccttgt

SEQ ID NO: 29456 - DNA, 80 bp, synthetic construct
  misc_feature 1..80: note = Artificially Synthesized Probe
  source 1..80: mol_type = other DNA
ggacgaaagaaggggaaagggtggagaatcgcagggtgggtgcccacctcccctccactctgcatcttaaagacagtagt

SEQ ID NO: 29457 - DNA, 80 bp, synthetic construct
  misc_feature 1..80: note = Artificially Synthesized Probe
  source 1..80: mol_type = other DNA
cctcacgcactctggatctcgatgactttctctagcgtggccactgcgttgatgttgggcttttgctgcaagactgcctc

SEQ ID NO: 29458 - DNA, 80 bp, synthetic construct
  misc_feature 1..80: note = Artificially Synthesized Probe
  source 1..80: mol_type = other DNA
taataaaatacagcatcagtgaactaaatgccctatcacagtcaaaacattaacagactggctgaagactccaatccaat

SEQ ID NO: 29459 - DNA, 80 bp, synthetic construct
  misc_feature 1..80: note = Artificially Synthesized Probe
  source 1..80: mol_type = other DNA
gtagaagcatcgggaaaatggcccgcgctctgacccaatggtcaaattccacctgtcagctgagcactgtagctcatgcc

SEQ ID NO: 29460 - DNA, 80 bp, synthetic construct
  misc_feature 1..80: note = Artificially Synthesized Probe
  source 1..80: mol_type = other DNA
acaggctttgagccattgtgcccaaccacaagcacgtaagattctgaaggaggatccaacatttacatgaatttttaagc

SEQ ID NO: 29461 - DNA, 80 bp, synthetic construct
  misc_feature 1..80: note = Artificially Synthesized Probe
  source 1..80: mol_type = other DNA
gaggagcatgaatcagctgttccttcgggaggagaaaaaggaaacaacaatcagaggctttggaatgctttctcttcatg

SEQ ID NO: 29462 - DNA, 80 bp, synthetic construct
  misc_feature 1..80: note = Artificially Synthesized Probe
  source 1..80: mol_type = other DNA
cgaggacacaaaccctggttctggtggtgcaaccccttggcccatcccaggccccagactccgagggagaaggggatggt

SEQ ID NO: 29463 - DNA, 80 bp, synthetic construct
  misc_feature 1..80: note = Artificially Synthesized Probe
  source 1..80: mol_type = other DNA
agtaaagaagagggaagacaagacagggttgcaaaggccatttgttaaaaacaggtcaagaaggtgtcactggaacaaga

SEQ ID NO: 29464 - DNA, 80 bp, synthetic construct
  misc_feature 1..80: note = Artificially Synthesized Probe
  source 1..80: mol_type = other DNA
cagacaccaggacagggcagctgtggaggcagcaccccacccccaggagccaaggcagacccagggcttgtccacggggg

SEQ ID NO: 29465 - DNA, 80 bp, synthetic construct
  misc_feature 1..80: note = Artificially Synthesized Probe
  source 1..80: mol_type = other DNA
ttccgtttctctgggataaatgtcccacggtagctcagtagctgtgtgtttagcttcgtaggaaaccgaccacctgttct

SEQ ID NO: 29466 - DNA, 80 bp, synthetic construct
  misc_feature 1..80: note = Artificially Synthesized Probe
  source 1..80: mol_type = other DNA
tctgtagatgagtcctttgtcaaataggtggtttggaaatatcttctcccagtccgcagctcagatgctcagagctctga

SEQ ID NO: 29467 - DNA, 80 bp, synthetic construct
  misc_feature 1..80: note = Artificially Synthesized Probe
  source 1..80: mol_type = other DNA
ctcaaaaaaataaactattccaggcatctagtccatctgtctttcaaatacactgtacagtaagctcatttgtatctagg

SEQ ID NO: 29468 - DNA, 80 bp, synthetic construct
  misc_feature 1..80: note = Artificially Synthesized Probe
  source 1..80: mol_type = other DNA
acagggtcttgctctgctgcccagactggagtgcagtgatgcaataatagctcaggccagccttgacctcctgggctcaa

SEQ ID NO: 29469 - DNA, 80 bp, synthetic construct
  misc_feature 1..80: note = Artificially Synthesized Probe
  source 1..80: mol_type = other DNA
taccgataaatcctatttgctgaagtttggttgaggatctgtgtgtatattcatggggaatatagtcccagtttcccttt

SEQ ID NO: 29470 - DNA, 80 bp, synthetic construct
  misc_feature 1..80: note = Artificially Synthesized Probe
  source 1..80: mol_type = other DNA
gtgtcgtttgaaagtgtgctgttttgttcccaagtgtgaagattcttccgttctatttcattgtggtcagacggcatgct

SEQ ID NO: 29471 - DNA, 80 bp, synthetic construct
  misc_feature 1..80: note = Artificially Synthesized Probe
  source 1..80: mol_type = other DNA
ccctagagatccaacgccgacacctgctcacaggaatttgaggcactcagggaaggacaggagaaacgatgaggagacgg

SEQ ID NO: 29472 - DNA, 80 bp, synthetic construct
  misc_feature 1..80: note = Artificially Synthesized Probe
  source 1..80: mol_type = other DNA
ccatgctcatatcattatgattatgattctgcagtaccactttctggaatctatctaaaatgtgaatgctcttcaggata

SEQ ID NO: 29473 - DNA, 80 bp, synthetic construct
  misc_feature 1..80: note = Artificially Synthesized Probe
  source 1..80: mol_type = other DNA
atgtgcactctgtgtccctgtgccccattttgggaactgtaatgatatttcaaacttcttcatgattgcatctgctttgg

SEQ ID NO: 29474 - DNA, 80 bp, synthetic construct
  misc_feature 1..80: note = Artificially Synthesized Probe
  source 1..80: mol_type = other DNA
gccaaattgtgaatgcaaaggaaaagttcctgaaggaaatgagaatgccactccagtgaacacacgaatgatacgaacac

SEQ ID NO: 29475 - DNA, 80 bp, synthetic construct
  misc_feature 1..80: note = Artificially Synthesized Probe
  source 1..80: mol_type = other DNA
tgcagctggtcacccaaaagctctgacagagacgtacgcagacagtcacgctgctttcatgcctgctaacacaacatctg

SEQ ID NO: 29476 - DNA, 80 bp, synthetic construct
  misc_feature 1..80: note = Artificially Synthesized Probe
  source 1..80: mol_type = other DNA
cactgcgtgccatagggaaccttttgtgaaagggagagacaatcacgtggcaaacttcatcgtcttattttcagaaatgg

SEQ ID NO: 29477 - DNA, 80 bp, synthetic construct
  misc_feature 1..80: note = Artificially Synthesized Probe
  source 1..80: mol_type = other DNA
ctttctaggggtgttcgctttgactgtggtctggaagcaaacccgcgacatcgctgaggccggcccaagacgcagctgca

SEQ ID NO: 29478 - DNA, 80 bp, synthetic construct
  misc_feature 1..80: note = Artificially Synthesized Probe
  source 1..80: mol_type = other DNA
cctgaggatgcatcccatcacacagaactgagcgagtggacgtaggggcaccagcaggcggagcagctcgcaggccaggc

SEQ ID NO: 29479 - DNA, 80 bp, synthetic construct
  misc_feature 1..80: note = Artificially Synthesized Probe
  source 1..80: mol_type = other DNA
tacccaggtgcaggaagtcggcgctgcaggatgggggcggagcactgtgggcagacgggaaggatggtgggacggtcaca

SEQ ID NO: 29480 - DNA, 80 bp, synthetic construct
  misc_feature 1..80: note = Artificially Synthesized Probe
  source 1..80: mol_type = other DNA
atcggggatcccccttcatctgacacctcactctcgtctctgtcctccatcagggcagactcgctctccttggaagaggc

SEQ ID NO: 29481 - DNA, 80 bp, synthetic construct
  misc_feature 1..80: note = Artificially Synthesized Probe
  source 1..80: mol_type = other DNA
gactgggatgaagagcgagggttgttatttcagactttgtgggcatgttctttttttttcacctttaaaaagatatgaaa

SEQ ID NO: 29482 - DNA, 80 bp, synthetic construct
  misc_feature 1..80: note = Artificially Synthesized Probe
  source 1..80: mol_type = other DNA
acacaggaatgcacacacagcacacacagatgcatggtacacaggaatgcacacacacagatgcacagtacacacgaatg

SEQ ID NO: 29483 - DNA, 80 bp, synthetic construct
  misc_feature 1..80: note = Artificially Synthesized Probe
  source 1..80: mol_type = other DNA
tctttcagggacgctgaagatgctcagaaagaaaaagcaaacactgcaaaccaagagccgagaacaagcgtggcatgagc

SEQ ID NO: 29484 - DNA, 80 bp, synthetic construct
  misc_feature 1..80: note = Artificially Synthesized Probe
  source 1..80: mol_type = other DNA
gcagctgtcccaggaacccacagggcaccagcacccccggtcacggccccagaagagcatcatttcactcgctcctcgga

SEQ ID NO: 29485 - DNA, 80 bp, synthetic construct
  misc_feature 1..80: note = Artificially Synthesized Probe
  source 1..80: mol_type = other DNA
ttacgccacctaaaatctctacatgttgaatgttatacacctaagaaaataaagaagaaacacaaaagagtggcggccag

SEQ ID NO: 29486 - DNA, 80 bp, synthetic construct
  misc_feature 1..80: note = Artificially Synthesized Probe
  source 1..80: mol_type = other DNA
cagctgtaagccactgtgcgcaaccaacctttcttccttttaatgtatgcatttgaagttacacatttcctctaaaccct

SEQ ID NO: 29487 - DNA, 80 bp, synthetic construct
  misc_feature 1..80: note = Artificially Synthesized Probe
  source 1..80: mol_type = other DNA
tctgcatggtaagcaatttccaattattccacttcagccttgctaggtcttcgtgtgcaagggttttgaagtatggctcc

SEQ ID NO: 29488 - DNA, 80 bp, synthetic construct
  misc_feature 1..80: note = Artificially Synthesized Probe
  source 1..80: mol_type = other DNA
ccatcctttcttctctgcgctgctgtcagaagatcttttctaccaattcagagtctgttctgctgtgcctattccactgt

SEQ ID NO: 29489 - DNA, 80 bp, synthetic construct
  misc_feature 1..80: note = Artificially Synthesized Probe
  source 1..80: mol_type = other DNA
acacagcaggccctgcagccacagcctctgtcttgggagcccccgtgggtgccccctctgactcctggaacaatgtttgt

SEQ ID NO: 29490 - DNA, 80 bp, synthetic construct
  misc_feature 1..80: note = Artificially Synthesized Probe
  source 1..80: mol_type = other DNA
ccaacgtacttggcaaatttcacagtggtggcgttccgaggcacaaaccccgtgtggaactgaatctggaacatcttcat

SEQ ID NO: 29491 - DNA, 80 bp, synthetic construct
  misc_feature 1..80: note = Artificially Synthesized Probe
  source 1..80: mol_type = other DNA
gcagctgcactcaccgcatcttgtcgtactcctgggaggtgctggccacacgctcgtcccccacgtagacctcgcagaag

SEQ ID NO: 29492 - DNA, 80 bp, synthetic construct
  misc_feature 1..80: note = Artificially Synthesized Probe
  source 1..80: mol_type = other DNA
catttgaaagaaataaatgtgtgtttttctattgttgggtggaacgtcctagaacgctctacagctgtgtcagccttcat

SEQ ID NO: 29493 - DNA, 80 bp, synthetic construct
  misc_feature 1..80: note = Artificially Synthesized Probe
  source 1..80: mol_type = other DNA
cttggtttcttttttcttcttttcgccttctcttgacaaggtttatgttttccttttacttcctgttgacttcttaatta

SEQ ID NO: 29494 - DNA, 80 bp, synthetic construct
  misc_feature 1..80: note = Artificially Synthesized Probe
  source 1..80: mol_type = other DNA
acatcaattagttacttcagtttcccccagagtcacagagtgcagctctttctctcgtctcctccatctggaggcagaag

SEQ ID NO: 29495 - DNA, 80 bp, synthetic construct
  misc_feature 1..80: note = Artificially Synthesized Probe
  source 1..80: mol_type = other DNA
atccacagcagcaggaatggcctcctgaccctcgccccgtccacaggctgtgcgccccatccagaggggataaagaatgg

SEQ ID NO: 29496 - DNA, 80 bp, synthetic construct
  misc_feature 1..80: note = Artificially Synthesized Probe
  source 1..80: mol_type = other DNA
gccccgtaccccgcaaaagacccctcatggaaacctcaactccatcacccacagtggcagctgccacaccctgggaggct

SEQ ID NO: 29497 - DNA, 80 bp, synthetic construct
  misc_feature 1..80: note = Artificially Synthesized Probe
  source 1..80: mol_type = other DNA
agctgttcctgggctttgggtccctttgcatactgacaagtgtcgtgtctggaaggaatgcctcggcctcgagcaccctc

SEQ ID NO: 29498 - DNA, 80 bp, synthetic construct
  misc_feature 1..80: note = Artificially Synthesized Probe
  source 1..80: mol_type = other DNA
tgtggccacagagaaggctggagcagaggcacctgtgccctgacacacaacagggactcactgggcacacagggaagggc

SEQ ID NO: 29499 - DNA, 80 bp, synthetic construct
  misc_feature 1..80: note = Artificially Synthesized Probe
  source 1..80: mol_type = other DNA
gaaagcctggataaaggtccagagagatgaatgacccaaatacacacgaccgaaccatcgcctgaaagtgaccatgcgtt

SEQ ID NO: 29500 - DNA, 80 bp, synthetic construct
  misc_feature 1..80: note = Artificially Synthesized Probe
  source 1..80: mol_type = other DNA
ccaaccagaactcactgttgcttctaagtcaactttacaaacacgaggttatgcagcttcatctgcctcaagcacgtgat

SEQ ID NO: 29501 - DNA, 80 bp, synthetic construct
  misc_feature 1..80: note = Artificially Synthesized Probe
  source 1..80: mol_type = other DNA
atgcacgcggcccacacgcactcacaggcacacagctcacacacacaggcgctcgcacagcactcctacacacgcttaca

SEQ ID NO: 29502 - DNA, 80 bp, synthetic construct
  misc_feature 1..80: note = Artificially Synthesized Probe
  source 1..80: mol_type = other DNA
gtgctcatacacgtgcctgcacacaatacgagcactcagctcacacaaggattcacaagcacaaggactcacaagcacca

SEQ ID NO: 29503 - DNA, 80 bp, synthetic construct
  misc_feature 1..80: note = Artificially Synthesized Probe
  source 1..80: mol_type = other DNA
agcgccaggcctgcagggagacacagtctcagcaggccccaggtgctcggtcccacctccccaggtgcgggttgctggct

SEQ ID NO: 29504 - DNA, 80 bp, synthetic construct
  misc_feature 1..80: note = Artificially Synthesized Probe
  source 1..80: mol_type = other DNA
cctcatgcggcagaaggggccacctcacactagcggcagaactgtcttcccccaccgccctccactgtccaatgcctgct

SEQ ID NO: 29505 - DNA, 80 bp, synthetic construct
  misc_feature 1..80: note = Artificially Synthesized Probe
  source 1..80: mol_type = other DNA
agactcttgggctacagcttctgttccttttccttttctctctcttcccagtctgtccaaccaacatttttttttttttt

SEQ ID NO: 29506 - DNA, 80 bp, synthetic construct
  misc_feature 1..80: note = Artificially Synthesized Probe
  source 1..80: mol_type = other DNA
ctgtgaggctcactacctcctgggggcagtattttatttcattgtgaactcagctccatcatggactgtgttttctgggg

SEQ ID NO: 29507 - DNA, 80 bp, synthetic construct
  misc_feature 1..80: note = Artificially Synthesized Probe
  source 1..80: mol_type = other DNA
cccagccctgacacaactgcaaccaggacgcccagagctgagctgagggtcagaaacacagacgcagagcaactcaggac

SEQ ID NO: 29508 - DNA, 80 bp, synthetic construct
  misc_feature 1..80: note = Artificially Synthesized Probe
  source 1..80: mol_type = other DNA
tgacgtcagaagcaagaagggagcggcaaagggaagaacaaaaaccgaacaaaatgatcaaaaatcaccactcagagcac

SEQ ID NO: 29509 - DNA, 80 bp, synthetic construct
  misc_feature 1..80: note = Artificially Synthesized Probe
  source 1..80: mol_type = other DNA
ttggggatcctaggggtatagtcggtggttacacaaacatcacttgactgtgcggagctggcggcgtgcttcccacggca

SEQ ID NO: 29510 - DNA, 80 bp, synthetic construct
  misc_feature 1..80: note = Artificially Synthesized Probe
  source 1..80: mol_type = other DNA
agaactggccttgaacaatcagcgacttctcgtcaatcacccaatatgtgagcccagagaagggactggtgattacttcg

SEQ ID NO: 29511 - DNA, 80 bp, synthetic construct
  misc_feature 1..80: note = Artificially Synthesized Probe
  source 1..80: mol_type = other DNA
aaaagaaaaggggacgggaggggaagagggggtggaggaggcaggccagttccgagtggcaggtgcccggcccacgccgc

SEQ ID NO: 29512 - DNA, 80 bp, synthetic construct
  misc_feature 1..80: note = Artificially Synthesized Probe
  source 1..80: mol_type = other DNA
cttaaagggaatgggaaaatgagagcttacggaaagcaggataaagcgccctccactcatgctgaaaagcacgaagacct

SEQ ID NO: 29513 - DNA, 80 bp, synthetic construct
  misc_feature 1..80: note = Artificially Synthesized Probe
  source 1..80: mol_type = other DNA
gtaaaattccacaagacagccccgtgaacttggcgtagacagagatgggacttcagggaaaacgaacgggtgtgagacac

SEQ ID NO: 29514 - DNA, 80 bp, synthetic construct
  misc_feature 1..80: note = Artificially Synthesized Probe
  source 1..80: mol_type = other DNA
agagacacaaagaactagaaagggccacacaattgtgaagcccacattacaccttctggcgcagctctgataacagggca

SEQ ID NO: 29515 - DNA, 80 bp, synthetic construct
  misc_feature 1..80: note = Artificially Synthesized Probe
  source 1..80: mol_type = other DNA
gaacaggctgtccacgtggtgcagacaggatggctcaccataaacaagggaaagaaacggacacacatgccacccatggc

SEQ ID NO: 29516 - DNA, 80 bp, synthetic construct
  misc_feature 1..80: note = Artificially Synthesized Probe
  source 1..80: mol_type = other DNA
tgcttgcaaccttgaagaagcttccctcaaaagcaaccctgtgtgctgggcagaatgtacttttagaaaagtaaaataca

SEQ ID NO: 29517 - DNA, 80 bp, synthetic construct
  misc_feature 1..80: note = Artificially Synthesized Probe
  source 1..80: mol_type = other DNA
tgagctgatgcacggggtgcagggccaggtagacacaaggatacagctcccacctcaggtcacacaaggtcaattccaga

SEQ ID NO: 29518 - DNA, 80 bp, synthetic construct
  misc_feature 1..80: note = Artificially Synthesized Probe
  source 1..80: mol_type = other DNA
acaggcttcacagataatggagaagcctcacaacgtcctaggttttttaaaaaacacaacagcaggagtgaaaactgggc

SEQ ID NO: 29519 - DNA, 80 bp, synthetic construct
  misc_feature 1..80: note = Artificially Synthesized Probe
  source 1..80: mol_type = other DNA
caggagagtctgccggtgaacggaaggggaggtgcagtggggggacagtcaggaagtgcaaagagctcccctcaagctga

SEQ ID NO: 29520 - DNA, 80 bp, synthetic construct
  misc_feature 1..80: note = Artificially Synthesized Probe
  source 1..80: mol_type = other DNA
ggcggctcctaaccgagcgggacccgcacacagaggccttggcagccgcgtgtggagggagccacgaccttgtggtccct

SEQ ID NO: 29521 - DNA, 80 bp, synthetic construct
  misc_feature 1..80: note = Artificially Synthesized Probe
  source 1..80: mol_type = other DNA
gccgctgcttgggccacccccacaccgtggagtgtacttttgttttcaataaattcccgctttcgttcttttgttgcttc

SEQ ID NO: 29522 - DNA, 80 bp, synthetic construct
  misc_feature 1..80: note = Artificially Synthesized Probe
  source 1..80: mol_type = other DNA
ctggcatctcagcagccgagccggcgagccgttaacgtgagaatcacatctgtgtcctggcaaccgagccaggcatgtca

SEQ ID NO: 29523 - DNA, 80 bp, synthetic construct
  misc_feature 1..80: note = Artificially Synthesized Probe
  source 1..80: mol_type = other DNA
accacagctccctcaaaagctttgtgctgaccctctgagaaacaggggggctctcaggaaaaatgaggggcacccataga

SEQ ID NO: 29524 - DNA, 80 bp, synthetic construct
  misc_feature 1..80: note = Artificially Synthesized Probe
  source 1..80: mol_type = other DNA
agcttcagttttcacacccgtcctgctcaagccttccaaagccggaatgtctagaaccaagatttacccctcgcaaaggc

SEQ ID NO: 29525 - DNA, 80 bp, synthetic construct
  misc_feature 1..80: note = Artificially Synthesized Probe
  source 1..80: mol_type = other DNA
ttgtattttgtcaatcagcatgtattcttttataatgaaaactgacaagtaacaccacgagcgggaggccccacggcgtg

SEQ ID NO: 29526 - DNA, 80 bp, synthetic construct
  misc_feature 1..80: note = Artificially Synthesized Probe
  source 1..80: mol_type = other DNA
tcaggtctcacccagctcctcccaggcacagctgcagagaagagaccctgcccaacagggcactgacaggtgcagccgct

SEQ ID NO: 29527 - DNA, 80 bp, synthetic construct
  misc_feature 1..80: note = Artificially Synthesized Probe
  source 1..80: mol_type = other DNA
ggcctctcttcctgtcctgacaaacggaccatggagtcgttgtgccatcttcctgggctcaaccctgatgaggctgggca

SEQ ID NO: 29528 - DNA, 80 bp, synthetic construct
  misc_feature 1..80: note = Artificially Synthesized Probe
  source 1..80: mol_type = other DNA
gttaaaggagaacgtacataaccatgtccacagttctgtgcacttcaaaataaatgtagacaatattaacacactgaagt

SEQ ID NO: 29529 - DNA, 80 bp, synthetic construct
  misc_feature 1..80: note = Artificially Synthesized Probe
  source 1..80: mol_type = other DNA
caggaaaaggataccatgaagcaaacttcttgaatgatggctctgttcttttcctcttcattggataatagcctctgtat

SEQ ID NO: 29530 - DNA, 80 bp, synthetic construct
  misc_feature 1..80: note = Artificially Synthesized Probe
  source 1..80: mol_type = other DNA
cattacctttaatgcatactctctgccactccccacatcttgagcttcatacacaaatgcaaaccctcctgaaaattaaa

SEQ ID NO: 29531 - DNA, 80 bp, synthetic construct
  misc_feature 1..80: note = Artificially Synthesized Probe
  source 1..80: mol_type = other DNA
gccccatacacacacagccccaacgtacacggcccccaacacagatagctccagcatgcacggccccacacacacacaca

SEQ ID NO: 29532 - DNA, 80 bp, synthetic construct
  misc_feature 1..80: note = Artificially Synthesized Probe
  source 1..80: mol_type = other DNA
taaaagagaatacacaccaacatcactcacgaatgtggacccaagaattcttcataaaacagcaaaccaagcccaccaag

SEQ ID NO: 29533 - DNA, 80 bp, synthetic construct
  misc_feature 1..80: note = Artificially Synthesized Probe
  source 1..80: mol_type = other DNA
cccaccactgcccattagagaaatgcagacttaaaccgcgaagataggaccccatacctagcagaatacttgacatttaa

SEQ ID NO: 29534 - DNA, 80 bp, synthetic construct
  misc_feature 1..80: note = Artificially Synthesized Probe
  source 1..80: mol_type = other DNA
agtacatacacatacatacagtcaatgtacagaaaactccagaaaacacaaacgaccaggccaaaaaaagagagtacata

SEQ ID NO: 29535 - DNA, 80 bp, synthetic construct
  misc_feature 1..80: note = Artificially Synthesized Probe
  source 1..80: mol_type = other DNA
agacaaaacttcagttagctaggaagaataagctcaagagatccactgtacaacacggtgactatacagttactaacgac

SEQ ID NO: 29536 - DNA, 80 bp, synthetic construct
  misc_feature 1..80: note = Artificially Synthesized Probe
  source 1..80: mol_type = other DNA
cttcagtgccgcatgaccttagcagggccacaggtctctgggtgcctccccagcctcctcctctccagccgcaccccgca

SEQ ID NO: 29537 - DNA, 80 bp, synthetic construct
  misc_feature 1..80: note = Artificially Synthesized Probe
  source 1..80: mol_type = other DNA
acttttaacacctctaacgcagtatcacacacagtgcagggaaagcggaaggaaaatgagcaggaaggatgtgcattgaa

SEQ ID NO: 29538 - DNA, 80 bp, synthetic construct
  misc_feature 1..80: note = Artificially Synthesized Probe
  source 1..80: mol_type = other DNA
tcaaggctatgtggtattggcagagggacagatacaaagatgactggaatggaaagaaaatcgcagaaacagccacacaa

SEQ ID NO: 29539 - DNA, 80 bp, synthetic construct
  misc_feature 1..80: note = Artificially Synthesized Probe
  source 1..80: mol_type = other DNA
gtatcgctacacatgtatcacaatgatcacagtaaaaaccacgacgccaaatgctggtgagtacaaagagaaactcgctg

SEQ ID NO: 29540 - DNA, 80 bp, synthetic construct
  misc_feature 1..80: note = Artificially Synthesized Probe
  source 1..80: mol_type = other DNA
ccacgggaaacaagctactgacacacaattacctgaagaattctgcacttccccttacactgcatccttcgaatgacaaa

SEQ ID NO: 29541 - DNA, 80 bp, synthetic construct
  misc_feature 1..80: note = Artificially Synthesized Probe
  source 1..80: mol_type = other DNA
gaggcagcctggcctgggacagcagagtgaccacagctaaggcttgccttctctttctcacataaattatataaatatat

SEQ ID NO: 29542 - DNA, 80 bp, synthetic construct
  misc_feature 1..80: note = Artificially Synthesized Probe
  source 1..80: mol_type = other DNA
gtgaccctcaatgttggaggaggggcctggtgggaggtgaccggattatggggcggagttccccatggcgtggctgctct

SEQ ID NO: 29543 - DNA, 80 bp, synthetic construct
  misc_feature 1..80: note = Artificially Synthesized Probe
  source 1..80: mol_type = other DNA
ataccaacattttcaatacacacataattcacaacactacagaatgaatctgtgtcccctccaaaattcctgtgtgaaat

SEQ ID NO: 29544 - DNA, 80 bp, synthetic construct
  misc_feature 1..80: note = Artificially Synthesized Probe
  source 1..80: mol_type = other DNA
caaacgtcacttttctcttctgcgagatggaagtaattatagtacccactttccagggctactgtgaggaccacacaatc

SEQ ID NO: 29545 - DNA, 80 bp, synthetic construct
  misc_feature 1..80: note = Artificially Synthesized Probe
  source 1..80: mol_type = other DNA
gcacccctccccgctcacctgccctccgcactgccccgcacccctccctgcttacctgcgctctgcactgccccgcaccc

SEQ ID NO: 29546 - DNA, 80 bp, synthetic construct
  misc_feature 1..80: note = Artificially Synthesized Probe
  source 1..80: mol_type = other DNA
ccacctgggagggtttctgaaacttgcaaccaagagtcttgcttgtaccacatgattctgcaactgtcagtcagtaccaa

SEQ ID NO: 29547 - DNA, 80 bp, synthetic construct
  misc_feature 1..80: note = Artificially Synthesized Probe
  source 1..80: mol_type = other DNA
tctgacatggttggtgctcctgataatctgccttttaaaaaagtgaagactagctaggtgcagcagcacatgcctgtaag

SEQ ID NO: 29548 - DNA, 80 bp, synthetic construct
  misc_feature 1..80: note = Artificially Synthesized Probe
  source 1..80: mol_type = other DNA
ttcagctttcacactctgtttcagttcaaagaggcttcaaagtacttaggaggctgcaggccacctattaagtttacaag

SEQ ID NO: 29549 - DNA, 80 bp, synthetic construct
  misc_feature 1..80: note = Artificially Synthesized Probe
  source 1..80: mol_type = other DNA
caactgtgtttagcccataaacttcacagccagtgaaatatgacacacctccaggcaccactggacaaaaaatgtaagga

SEQ ID NO: 29550 - DNA, 80 bp, synthetic construct
  misc_feature 1..80: note = Artificially Synthesized Probe
  source 1..80: mol_type = other DNA
cgctccctcgccgtccgggtcagctcagcaaccgccggcccggaggtgcaccatcttccgcctcgacgccgtgacgtagg

SEQ ID NO: 29551 - DNA, 80 bp, synthetic construct
  misc_feature 1..80: note = Artificially Synthesized Probe
  source 1..80: mol_type = other DNA
ctgggcgccaataaaactgtatttattaaaacaggcaaggggctgggctgcggcagggcccaggtgcctgggaaagaggt

SEQ ID NO: 29552 - DNA, 80 bp, synthetic construct
  misc_feature 1..80: note = Artificially Synthesized Probe
  source 1..80: mol_type = other DNA
ccctctctggctgtgtgaccctgaccagtcacctgccctctctgtgagcgtcggggcccataagggaacagctgatccaa

SEQ ID NO: 29553 - DNA, 80 bp, synthetic construct
  misc_feature 1..80: note = Artificially Synthesized Probe
  source 1..80: mol_type = other DNA
ccaatgcttcccacacttcgcttcaatcacgcgacagtcctgagcggtaagtgctgttgccgtctctcttgactgagggg

SEQ ID NO: 29554 - DNA, 80 bp, synthetic construct
  misc_feature 1..80: note = Artificially Synthesized Probe
  source 1..80: mol_type = other DNA
gggggatgtgttgtcatcgggcagccaacctccagcctccagaacaggcccatcggagatcagcacagcctggatcaggc

SEQ ID NO: 29555 - DNA, 80 bp, synthetic construct
  misc_feature 1..80: note = Artificially Synthesized Probe
  source 1..80: mol_type = other DNA
cgtgctcttgtacatatgagtgtttgcatggatttacgtacctgcctgtgaatgtctctgtacacacatctaggtgagtg

SEQ ID NO: 29556 - DNA, 80 bp, synthetic construct
  misc_feature 1..80: note = Artificially Synthesized Probe
  source 1..80: mol_type = other DNA
cccagtattcagatgctgaggccccatccagttgggaccccccagcctcctaatatccacagagggtctgaggcagctgc

SEQ ID NO: 29557 - DNA, 80 bp, synthetic construct
  misc_feature 1..80: note = Artificially Synthesized Probe
  source 1..80: mol_type = other DNA
gaagtagtaatattgtaaatgagaagggtcactttggtgctacgtacacaaagcgctgtatgtggacagatgtaaatgta

SEQ ID NO: 29558 - DNA, 80 bp, synthetic construct
  misc_feature 1..80: note = Artificially Synthesized Probe
  source 1..80: mol_type = other DNA
gggacttgaagtcatccatccacacctcggcggcgcgcagggcgttgcgcttggcatagtagtcaatgtcgttgttgtag

SEQ ID NO: 29559 - DNA, 80 bp, synthetic construct
  misc_feature 1..80: note = Artificially Synthesized Probe
  source 1..80: mol_type = other DNA
cacagctaagcccacgtccccaccatctgctattaatctgtttccctggagagccctgagccagccccgtcccatcctat

SEQ ID NO: 29560 - DNA, 80 bp, synthetic construct
  misc_feature 1..80: note = Artificially Synthesized Probe
  source 1..80: mol_type = other DNA
gaagttggcctttgcatcccgagggagcgaaccgcgtttctgcatcaggttcacatcgtggcaggtggtttctgggtttc

SEQ ID NO: 29561 - DNA, 80 bp, synthetic construct
  misc_feature 1..80: note = Artificially Synthesized Probe
  source 1..80: mol_type = other DNA
cagagagattagttaaaggcacaaaaccagccgggcacaggggcctcacacttgtaattccagcactttgggaggccgag

SEQ ID NO: 29562 - DNA, 80 bp, synthetic construct
  misc_feature 1..80: note = Artificially Synthesized Probe
  source 1..80: mol_type = other DNA
cacggcttgcgtgacctggcttttcagcagggccattagctcaggagtgataaagtcggagagtgaacccccatgccctc

SEQ ID NO: 29563 - DNA, 80 bp, synthetic construct
  misc_feature 1..80: note = Artificially Synthesized Probe
  source 1..80: mol_type = other DNA
gataagctggactcgccttctggcgtctgtgtgtgcagctctccccactgagagggggacgctatcaccctaggccttcg

SEQ ID NO: 29564 - DNA, 80 bp, synthetic construct
  misc_feature 1..80: note = Artificially Synthesized Probe
  source 1..80: mol_type = other DNA
agccgccaagtcccaccaaaaccaagatggcaacgagtgacttgtggtcatcctcacggctcattttatgctcattataa

SEQ ID NO: 29565 - DNA, 80 bp, synthetic construct
  misc_feature 1..80: note = Artificially Synthesized Probe
  source 1..80: mol_type = other DNA
ggcctggcaaagggcctgcgggcgaggccgtcccgtgaagtcggacctgttcttctggtcaaggcaagcaaagcaacagg

SEQ ID NO: 29566 - DNA, 80 bp, synthetic construct
  misc_feature 1..80: note = Artificially Synthesized Probe
  source 1..80: mol_type = other DNA
taattacttttgcaccgacctagtacgagaaaacacctcagacgctgtcaccacagcagtgaggaggcaacctcgtgtct

SEQ ID NO: 29567 - DNA, 80 bp, synthetic construct
  misc_feature 1..80: note = Artificially Synthesized Probe
  source 1..80: mol_type = other DNA
cgggtctacagccttcacaccacgacacggaaaccccacccgggtctgcagccttcagacctcgacacggaaaccccacc

SEQ ID NO: 29568 - DNA, 80 bp, synthetic construct
  misc_feature 1..80: note = Artificially Synthesized Probe
  source 1..80: mol_type = other DNA
aattgtgtgagccaattcttagaatcaatcaatttcttcacacacacacatgaaaatgcaccgcagatgcacacgtgtgc

SEQ ID NO: 29569 - DNA, 80 bp, synthetic construct
  misc_feature 1..80: note = Artificially Synthesized Probe
  source 1..80: mol_type = other DNA
tgaagggggcgagcaggagcggagcccgtgtattaatcatgctttcatattttctgtatctgatgctttgacatctggaa

SEQ ID NO: 29570 - DNA, 80 bp, synthetic construct
  misc_feature 1..80: note = Artificially Synthesized Probe
  source 1..80: mol_type = other DNA
tctttctcgtggtttgcaggtgacacagcccaggctctcagggacaaaagtacttcctcgcacaccgagctgcaatttac

SEQ ID NO: 29571 - DNA, 80 bp, synthetic construct
  misc_feature 1..80: note = Artificially Synthesized Probe
  source 1..80: mol_type = other DNA
agacataagacagagacatgagagacagacacggagagagagacaaaggaacagattatagagaagacagagatagagat

SEQ ID NO: 29572 - DNA, 80 bp, synthetic construct
  misc_feature 1..80: note = Artificially Synthesized Probe
  source 1..80: mol_type = other DNA
cacctctcttccattttgccaatattccttggatacagtaactgatagaatgacccactcatccacccatttacccatct

SEQ ID NO: 29573 - DNA, 80 bp, synthetic construct
  misc_feature 1..80: note = Artificially Synthesized Probe
  source 1..80: mol_type = other DNA
ctagccactatctatccattcatccacacgcactcatccatccatccatccactcatccatctatccacccatccatccc

SEQ ID NO: 29574 - DNA, 80 bp, synthetic construct
  misc_feature 1..80: note = Artificially Synthesized Probe
  source 1..80: mol_type = other DNA
ccaaacaagtggttctcaaagtgacccagtagcaccaatctcatctggaacccccaagaaccgcaaattcccagacccca

SEQ ID NO: 29575 - DNA, 80 bp, synthetic construct
  misc_feature 1..80: note = Artificially Synthesized Probe
  source 1..80: mol_type = other DNA
catgaactcagggtggggacgagctcaatgagcaggaacagacactgaaaccagctctgatggacccctggggctgccgc

SEQ ID NO: 29576 - DNA, 80 bp, synthetic construct
  misc_feature 1..80: note = Artificially Synthesized Probe
  source 1..80: mol_type = other DNA
agaaagtctcctaaatgtaagatgcagtcagtaacttgagaaaccaaggctaagcaagtggctcgaattgctgtctggat

SEQ ID NO: 29577 - DNA, 80 bp, synthetic construct
  misc_feature 1..80: note = Artificially Synthesized Probe
  source 1..80: mol_type = other DNA
gacaatgtatgcaacgccccataacggaaaagaaaggaatccgcaaacgtcagggctctgtgatcagaggaattcggggg

SEQ ID NO: 29578 - DNA, 80 bp, synthetic construct
  misc_feature 1..80: note = Artificially Synthesized Probe
  source 1..80: mol_type = other DNA
aaaaagtagatacagttcacagttactaattcctgtgtatcaaaaactcaacaccataaaatgaagccagaccaacaggg

SEQ ID NO: 29579 - DNA, 80 bp, synthetic construct
  misc_feature 1..80: note = Artificially Synthesized Probe
  source 1..80: mol_type = other DNA
ccacacacccatcctacacaacccacaccccacacagacaccccacacaacccacaccccacatacaccccacacaccca

SEQ ID NO: 29580 - DNA, 80 bp, synthetic construct
  misc_feature 1..80: note = Artificially Synthesized Probe
  source 1..80: mol_type = other DNA
caccacacaacccacaccctacacaacccgcacaccacacacacagacacgccacacaacacacatgcaccccacacaac

SEQ ID NO: 29581 - DNA, 80 bp, synthetic construct
  misc_feature 1..80: note = Artificially Synthesized Probe
  source 1..80: mol_type = other DNA
tatactccatatacacatcccatatactatacttatacaccccccacacaccacacaacccaccccacactacatacaca

SEQ ID NO: 29582 - DNA, 80 bp, synthetic construct
  misc_feature 1..80: note = Artificially Synthesized Probe
  source 1..80: mol_type = other DNA
acaccccacacacatacaccccacactgtacatacacaacccacacatacaccccatacacaacatatacacacacccca

SEQ ID NO: 29583 - DNA, 80 bp, synthetic construct
  misc_feature 1..80: note = Artificially Synthesized Probe
  source 1..80: mol_type = other DNA
taatttcgcttctagaaattcagcctgaggaaatggctagggcatgaggagagactcagatacaggaagaatcgtttctg

SEQ ID NO: 29584 - DNA, 80 bp, synthetic construct
  misc_feature 1..80: note = Artificially Synthesized Probe
  source 1..80: mol_type = other DNA
ggcgggggggcaccaaccacctgtggctggaacaagcccttggacaaagcagctctagagaacaagaacagggcttcagt

SEQ ID NO: 29585 - DNA, 80 bp, synthetic construct
  misc_feature 1..80: note = Artificially Synthesized Probe
  source 1..80: mol_type = other DNA
accgttccctggtcttctccccacttaggcctctccaccgcaggtggagcccacgccccatctcgccctgggtcaccaga

SEQ ID NO: 29586 - DNA, 80 bp, synthetic construct
  misc_feature 1..80: note = Artificially Synthesized Probe
  source 1..80: mol_type = other DNA
gagtcacaggctctcagccccaatctcagccacctcactctgctgaacaagcaaagaacagtgaaatacacaaagaatgc

SEQ ID NO: 29587 - DNA, 80 bp, synthetic construct
  misc_feature 1..80: note = Artificially Synthesized Probe
  source 1..80: mol_type = other DNA
acggggtaacagtccgggttaatggatcgatttattttgttggtgtttcagcctcccttgagctcattacaggcagacca

SEQ ID NO: 29588 - DNA, 80 bp, synthetic construct
  misc_feature 1..80: note = Artificially Synthesized Probe
  source 1..80: mol_type = other DNA
agtgccacacactcgatggggtgacagggacagcgtggagcccctagtgctacacactcgatggggcgacagaggagaca

SEQ ID NO: 29589 - DNA, 80 bp, synthetic construct
  misc_feature 1..80: note = Artificially Synthesized Probe
  source 1..80: mol_type = other DNA
gccacacactcgatggggcgacagaggagacagtgtggagtccctactgccacacactcgatggggcgacagaggagaca

SEQ ID NO: 29590 - DNA, 80 bp, synthetic construct
  misc_feature 1..80: note = Artificially Synthesized Probe
  source 1..80: mol_type = other DNA
cacactcgatggggcgacagaggagacagtgtggagcccctagtgccacacactcgatggggcgacagaggagacagcgt

SEQ ID NO: 29591 - DNA, 80 bp, synthetic construct; identical to SEQ ID NO: 29590
  misc_feature 1..80: note = Artificially Synthesized Probe
  source 1..80: mol_type = other DNA

SEQ ID NO: 29592 - DNA, 80 bp, synthetic construct
  misc_feature 1..80: note = Artificially Synthesized Probe
  source 1..80: mol_type = other DNA
ggtcccccgggctggagttcaaccctcgggacagggcaggagggtcccccgggctggagttcaaccctcgggacagggca

SEQ ID NO: 29593 - DNA, 80 bp, synthetic construct
  misc_feature 1..80: note = Artificially Synthesized Probe
  source 1..80: mol_type = other DNA
tttcaagctccaaacttgcactttgatttccttcaagagtccacccttatctgtacctggttaaaataatcagcgaaaac

SEQ ID NO: 29594 - DNA, 80 bp, synthetic construct
  misc_feature 1..80: note = Artificially Synthesized Probe
  source 1..80: mol_type = other DNA
cttataccgtacacaggtgctcacacctgcccaaacacctgcctacaccttctgacacctgcttttacctgttcactgct

SEQ ID NO: 29595 - DNA, 80 bp, synthetic construct
  misc_feature 1..80: note = Artificially Synthesized Probe
  source 1..80: mol_type = other DNA
ggactcctggcctggctgacctgcacctgggccagtggaaggcgaaggtgggcaggcctgagtgtgagtctcacatccat

SEQ ID NO: 29596 - DNA, 80 bp, synthetic construct
  misc_feature 1..80: note = Artificially Synthesized Probe
  source 1..80: mol_type = other DNA
gagagagacagagagacaaagagacagagatacagagagacagagagagacacacacactgagagactgagatacagaga

SEQ ID NO: 29597 - DNA, 80 bp, synthetic construct
  misc_feature 1..80: note = Artificially Synthesized Probe
  source 1..80: mol_type = other DNA
aggatgtgtggtcttaaatcattgctgtttaatattcaacagttgctccactgagaacaagcgtatttaggggacgttgc

SEQ ID NO: 29598 - DNA, 80 bp, synthetic construct
  misc_feature 1..80: note = Artificially Synthesized Probe
  source 1..80: mol_type = other DNA
cctatacccattacacacacgccacacacccttccaggggccctccctatacccattacacacacgccacacccccttcc

SEQ ID NO: 29599 - DNA, 80 bp, synthetic construct
  misc_feature 1..80: note = Artificially Synthesized Probe
  source 1..80: mol_type = other DNA
cctatacccattacacacacaacacacacccttcccggggccctccctatacccattacacacacgccacacccccttcc

SEQ ID NO: 29600 - DNA, 80 bp, synthetic construct; identical to SEQ ID NO: 29599
  misc_feature 1..80: note = Artificially Synthesized Probe
  source 1..80: mol_type = other DNA

SEQ ID NO: 29601 - DNA, 80 bp, synthetic construct
  misc_feature 1..80: note = Artificially Synthesized Probe
  source 1..80: mol_type = other DNA
acccgtcaatcaccgtctcttgccagctttgcatcctaaatattttttggaagagtcccgtgtccgccacaccccacaag

SEQ ID NO: 29602 - DNA, 80 bp, synthetic construct
  misc_feature 1..80: note = Artificially Synthesized Probe
  source 1..80: mol_type = other DNA
tggagttggacgggggcgtggtgatggggacaggtgagtctcctgtccctcaccaggagaactgggttctggttctcagc

SEQ ID NO: 29603 - DNA, 80 bp, synthetic construct
  misc_feature 1..80: note = Artificially Synthesized Probe
  source 1..80: mol_type = other DNA
acgacccagcctcctgggacctcctctcactgcagctgggtttggcccacgggagccgattttgtttggaggggaggtgg

SEQ ID NO: 29604 - DNA, 80 bp, synthetic construct
  misc_feature 1..80: note = Artificially Synthesized Probe
  source 1..80: mol_type = other DNA
ctgagttaaacaatcgcggccacggggaaggaggccgttttattgattgaatttgtgtccacgatagtacgatctttaaa

SEQ ID NO: 29605 - DNA, 80 bp, synthetic construct
  misc_feature 1..80: note = Artificially Synthesized Probe
  source 1..80: mol_type = other DNA
agcaggagccctggacctcaccctgtccctagaccatggctgcactcgccctcaccctgtccccggacactgcagccaca

SEQ ID NO: 29606 - DNA, 80 bp, synthetic construct
  misc_feature 1..80: note = Artificially Synthesized Probe
  source 1..80: mol_type = other DNA
agtgagatcctgtctcccctctcccctgaaaaaagatcagtttacctaaggagctctgtggttgccttgaacatcatttc

SEQ ID NO: 29607 - DNA, 80 bp, synthetic construct
  misc_feature 1..80: note = Artificially Synthesized Probe
  source 1..80: mol_type = other DNA
ctgatcctcctctgcgtatcaacgcgttcttccataaaaacaacagcaaaagttggcctctgtcataatttaaaggaagc

SEQ ID NO: 29608 - DNA, 80 bp, synthetic construct
  misc_feature 1..80: note = Artificially Synthesized Probe
  source 1..80: mol_type = other DNA
agtgtggttgatttgtgttatatgagtttcaccaatggcccattgagtgctttgatcttccacagaccctgataacaaga

SEQ ID NO: 29609 - DNA, 80 bp, synthetic construct
  misc_feature 1..80: note = Artificially Synthesized Probe
  source 1..80: mol_type = other DNA
gatgtgcgagccacaaacgcatggaaacatcacccgagagcttgattatttacatttctttcacattcatttgattttat

SEQ ID NO: 29610 - DNA, 80 bp, synthetic construct
  misc_feature 1..80: note = Artificially Synthesized Probe
  source 1..80: mol_type = other DNA
tcttgcggacgccgacactgacatttaatgttatttaaaaactgtttctgagaaggcagagaagcacgtgccacgtttta

SEQ ID NO: 29611 - DNA, 80 bp, synthetic construct
  misc_feature 1..80: note = Artificially Synthesized Probe
  source 1..80: mol_type = other DNA
tgactgcgggcaggcctggagaatatccagcctcccacaggaagctggtggagcagagtgttccctgactcctccaagga

SEQ ID NO: 29612 - DNA, 80 bp, synthetic construct
  misc_feature 1..80: note = Artificially Synthesized Probe
  source 1..80: mol_type = other DNA
ataaagctttatttacaaatacaggactgtgggccatgattccctgacccctgctgtacatccttgaaaatgcccttcac

SEQ ID NO: 29613 - DNA, 80 bp, synthetic construct
  misc_feature 1..80: note = Artificially Synthesized Probe
  source 1..80: mol_type = other DNA
ttcagttcatcatgactgagtaagaattggggcctagaatcttccaattttcaaaaagagtagaaatcattttcacataa

SEQ ID NO: 29614 - DNA, 80 bp, synthetic construct
  misc_feature 1..80: note = Artificially Synthesized Probe
  source 1..80: mol_type = other DNA
aaaatcaactttgaggggtgaaatttatataaaatgaaatgcatccatgtgatctttgcattttggcccattttgactga

SEQ ID NO: 29615 - DNA, 80 bp, synthetic construct
  misc_feature 1..80: note = Artificially Synthesized Probe
  source 1..80: mol_type = other DNA
ctggagtgggtttcgggccttcagaaggagctgccggttttccaaagtggctgcaccgattcacagtcctgccagccatg

SEQ ID NO: 29616 - DNA, 80 bp, synthetic construct
  misc_feature 1..80: note = Artificially Synthesized Probe
  source 1..80: mol_type = other DNA
acagctgtgaggaggggcggccccagcccaccgcattccctgaggagggtccactcgcccacagggaggggaggccagtc

SEQ ID NO: 29617 - DNA, 80 bp, synthetic construct
  misc_feature 1..80: note = Artificially Synthesized Probe
  source 1..80: mol_type = other DNA
catagagggagtctcagagggtgcggcagctgcaccgaagcccgggcgtgtgcctaatgggcctgcagggctggccagga

SEQ ID NO: 29618 - DNA, 80 bp, synthetic construct
  misc_feature 1..80: note = Artificially Synthesized Probe
  source 1..80: mol_type = other DNA
gactgcatggggtgacattgtggggggcagacagtggaacacaattcatgcacaacacgtcagaagctgataaacatcga

SEQ ID NO: 29619 - DNA, 80 bp, synthetic construct
  misc_feature 1..80: note = Artificially Synthesized Probe
  source 1..80: mol_type = other DNA
gtggccatctccagtgactgagcagggcctgagaggccggacttctgcaccttagccccaccccacctgatctgaggttc

SEQ ID NO: 29620 - DNA, 80 bp, synthetic construct
  misc_feature 1..80: note = Artificially Synthesized Probe
  source 1..80: mol_type = other DNA
atgggtgtattgtaaacattctcttaggacccactgaaccacatgtggttcagcgtggaggtcacagagagatgagaccc

SEQ ID NO: 29621 - DNA, 80 bp, synthetic construct
  misc_feature 1..80: note = Artificially Synthesized Probe
  source 1..80: mol_type = other DNA
ttgagatgaaatcctcctggatttggggtgagctctgtgtctagtctgggtcctcatgagaagaagagaggatgcagaca

SEQ ID NO: 29622 - DNA, 80 bp, synthetic construct
  misc_feature 1..80: note = Artificially Synthesized Probe
  source 1..80: mol_type = other DNA
tgtagaggaaaaagcttggattgcacagttttcatgaacttgcaaaatgtgtaaaacagaaagtcctgagaaaggaagta

SEQ ID NO: 29623 - DNA, 80 bp, synthetic construct
  misc_feature 1..80: note = Artificially Synthesized Probe
  source 1..80: mol_type = other DNA
tcacctacagcactcattctcaatgacctctcatttgatttagaatccatgttcggtacccacttcttgccccagaatat

SEQ ID NO: 29624 - DNA, 80 bp, synthetic construct
  misc_feature 1..80: note = Artificially Synthesized Probe
  source 1..80: mol_type = other DNA
aaaagataaaggagcgcaaagattttccaacaagtcccaaatgcccatcaatgaggaaggcaagtcgctcaccccgaagt

SEQ ID NO: 29625 - DNA, 80 bp, synthetic construct
  misc_feature 1..80: note = Artificially Synthesized Probe
  source 1..80: mol_type = other DNA
ctccaagttcagctcattttaatagtaagagacacacccccaggtgaggattctatatgtaatgatacatgcagtgtgtg

SEQ ID NO: 29626 - DNA, 80 bp, synthetic construct
  misc_feature 1..80: note = Artificially Synthesized Probe
  source 1..80: mol_type = other DNA
gccctccagaacgggggacagtgcattcacattgttggaagccacctgcttgtggctccttgttacagtgtccacaggag

SEQ ID NO: 29627 - DNA, 80 bp, synthetic construct
  misc_feature 1..80: note = Artificially Synthesized Probe
  source 1..80: mol_type = other DNA
attttagtaccacagccattggcagggcaacactggtgtgaagctagacaaagagaaagatgcattgaaatagataaagg

SEQ ID NO: 29628 - DNA, 80 bp, synthetic construct
  misc_feature 1..80: note = Artificially Synthesized Probe
  source 1..80: mol_type = other DNA
atgtccaatgaaaactggggaaaagaccagaacagacacgtcaccaccgaagacgcccaagcagccatcaagcacgtgcg

SEQ ID NO: 29629 - DNA, 80 bp, synthetic construct
  misc_feature 1..80: note = Artificially Synthesized Probe
  source 1..80: mol_type = other DNA
ctcaaataccagaagtgaccgtgaagaaagcaggaatttggctccatggattcggggccgagggcggaatcgtgaaatag

SEQ ID NO: 29630 - DNA, 80 bp, synthetic construct
  misc_feature 1..80: note = Artificially Synthesized Probe
  source 1..80: mol_type = other DNA
gctggcttcacgcgttagctcttgcgtacataatggttctgagtctacgactgtaatcaataggaactcaatttgacttc

SEQ ID NO: 29631 - DNA, 80 bp, synthetic construct
  misc_feature 1..80: note = Artificially Synthesized Probe
  source 1..80: mol_type = other DNA
tcccattttgaaccaattttatcacaccataaaattaagagattgtcctctttaaaacaatgaagccaggacagatccac

SEQ ID NO: 29632 - DNA, 80 bp, synthetic construct
  misc_feature 1..80: note = Artificially Synthesized Probe
  source 1..80: mol_type = other DNA
ccacacaggccctccacgatgcccctgcagcaaacttgtgcagaagaaaatatcacagcgccaccaccctactgccgggc

SEQ ID NO: 29633 - DNA, 80 bp, synthetic construct
  misc_feature 1..80: note = Artificially Synthesized Probe
  source 1..80: mol_type = other DNA
cctcctcctgacattgagttcctgagattccacctgagtggctgtgagcactgtggtcattctcgctgccaggctgtgtc

SEQ ID NO: 29634 - DNA, 80 bp, synthetic construct
  misc_feature 1..80: note = Artificially Synthesized Probe
  source 1..80: mol_type = other DNA
tggtgtgctccaaccagcattttcacattcacagtgaggccagctcgctcctgctcccaccagcccatcgcaggtcagag

SEQ ID NO: 29635 - DNA, 80 bp, synthetic construct
  misc_feature 1..80: note = Artificially Synthesized Probe
  source 1..80: mol_type = other DNA
gctcctggcagcaggggctgttcccatcactctggtgcttgcccctgctggggaaccgtccagttgtcaccaactcactt

SEQ ID NO: 29636 - DNA, 80 bp, synthetic construct
  misc_feature 1..80: note = Artificially Synthesized Probe
  source 1..80: mol_type = other DNA
agagctgcttcaaaggcaaagaccacccagtgggagtgcattcccctggtgctcacccaagggtcccactccccctgaga

SEQ ID NO: 29637 - DNA, 80 bp, synthetic construct
  misc_feature 1..80: note = Artificially Synthesized Probe
  source 1..80: mol_type = other DNA
aatcagtaatgcagctaatggagaaagtggtgaggagttgggtttgaaagtggatggaatcacctgttggtgccagaaca

SEQ ID NO: 29638 - DNA, 80 bp, synthetic construct
  misc_feature 1..80: note = Artificially Synthesized Probe
  source 1..80: mol_type = other DNA
acccaccctctctggtttttctaaactcctcctccccattctaacccctctctctggcccctgcgggctctggggaagcc

SEQ ID NO: 29639 - DNA, 80 bp, synthetic construct
  misc_feature 1..80: note = Artificially Synthesized Probe
  source 1..80: mol_type = other DNA
cagcccagcccatcccatcccaacaggactcagcctccagtggctaccatcagaccccacggcatggtgactgtcactgc

SEQ ID NO: 29640 - DNA, 80 bp, synthetic construct
  misc_feature 1..80: note = Artificially Synthesized Probe
  source 1..80: mol_type = other DNA
tcacttcctgaatgcccagtgtctgctaggtctcctggatccacttcctggatgcccagtgtctgccaaatctcctgaat

SEQ ID NO: 29641 - DNA, 80 bp, synthetic construct
  misc_feature 1..80: note = Artificially Synthesized Probe
  source 1..80: mol_type = other DNA
accccagagggagacaagaccccggggaagagacccctcagggtggccccccagcccctcccaggctcagctttcagcct

SEQ ID NO: 29642 - DNA, 80 bp, synthetic construct
  misc_feature 1..80: note = Artificially Synthesized Probe
  source 1..80: mol_type = other DNA
cccgatgtcgttctctgtgacgtaaaaacaaagctgggactggccacttctgccagactttatcttggcagacaggtttc

SEQ ID NO: 29643 - DNA, 80 bp, synthetic construct
  misc_feature 1..80: note = Artificially Synthesized Probe
  source 1..80: mol_type = other DNA
ccaagctctcccctcttgatgataaggttgctgcagctcccccagctcccagccttggtttcatcttgtgggaaaaggct

SEQ ID NO: 29644 - DNA, 80 bp, synthetic construct
  misc_feature 1..80: note = Artificially Synthesized Probe
  source 1..80: mol_type = other DNA
gctcgcacctggcctctcctgggccctgcctgggcatctcttccctctgctgactttaacccatgtcctctgctgtgaga

SEQ ID NO: 29645 - DNA, 80 bp, synthetic construct
  misc_feature 1..80: note = Artificially Synthesized Probe
  source 1..80: mol_type = other DNA
ttgaaagggaatcttcatttcaccgctgcaaatggaaagctggcatcacttgtgttaaatcatggtaaccatgaaaataa

SEQ ID NO: 29646 - DNA, 80 bp, synthetic construct
  misc_feature 1..80: note = Artificially Synthesized Probe
  source 1..80: mol_type = other DNA
tgctgcgtgagccatggtgcctcagcccagcttccgtgatccccagatgcagctatggcaggagtgccccaagcctgggg

SEQ ID NO: 29647 - DNA, 80 bp, synthetic construct
  misc_feature 1..80: note = Artificially Synthesized Probe
  source 1..80: mol_type = other DNA
tacatgaggcgttgaaggcagtggactctgtgtgatgctgcaatggtggatatctgttattattatgtattttttgattc

SEQ ID NO: 29648 - DNA, 80 bp, synthetic construct
  misc_feature 1..80: note = Artificially Synthesized Probe
  source 1..80: mol_type = other DNA
caacccgaaactgctctgatggtcaggcctactaatgttaaaaatattaacccgaaaattgcaacggctctaagattagg

SEQ ID NO: 29649 - DNA, 80 bp, synthetic construct
  misc_feature 1..80: note = Artificially Synthesized Probe
  source 1..80: mol_type = other DNA
agcctcccggaacctctggactttctggaatattccattttaaatgagtaaacaaagtgtccgtatttatgtaggactga

SEQ ID NO: 29650 - DNA, 80 bp, synthetic construct
  misc_feature 1..80: note = Artificially Synthesized Probe
  source 1..80: mol_type = other DNA
attgaattggttttgttgtcatatatttaatcccaaaagaggcttcttgctctccagtcgcccctgccttgcatgaatgg

SEQ ID NO: 29651 - DNA, 80 bp, synthetic construct
  misc_feature 1..80: note = Artificially Synthesized Probe
  source 1..80: mol_type = other DNA
gtcccatagctgctgagagaagctgctcgggggacaccagtgccagcagcacccacgttcctggccatggtgcttcactg

SEQ ID NO: 29652 - DNA, 80 bp, synthetic construct
  misc_feature 1..80: note = Artificially Synthesized Probe
  source 1..80: mol_type = other DNA
ggaagcagaggcagaaacagccacaagctcatgtccacagcacccacatccagagcacccacgtccacaccacccacatc

SEQ ID NO: 29653 - DNA, 80 bp, synthetic construct
  misc_feature 1..80: note = Artificially Synthesized Probe
  source 1..80: mol_type = other DNA
acatccatggcgcacacatccacagcacccacgtccacacctgtgctggcacccctggagaccagatgcgctcagtcctt

SEQ ID NO: 29654 - DNA, 80 bp, synthetic construct
  misc_feature 1..80: note = Artificially Synthesized Probe
  source 1..80: mol_type = other DNA
tcacggaaaatactagaaagagagactttcccaccaggaggagagtctgagatggcacaggcagagggagggtccagaac

SEQ ID NO: 29655 - DNA, 80 bp, synthetic construct
  misc_feature 1..80: note = Artificially Synthesized Probe
  source 1..80: mol_type = other DNA
ttgaaatcaccaaagcacaaaaagcacaaaaatgtagacaacgtgccacttaagcagtagtagggaccctgtgtacagtc

SEQ ID NO: 29656 - DNA, 80 bp, synthetic construct
  misc_feature 1..80: note = Artificially Synthesized Probe
  source 1..80: mol_type = other DNA
ggagggatctgttaatagctctgaaaagtgaaaatcccacggatctgattttgcctgtgcggaaggttgccgtgggcgcc

SEQ ID NO: 29657 - DNA, 80 bp, synthetic construct
  misc_feature 1..80: note = Artificially Synthesized Probe
  source 1..80: mol_type = other DNA
ggtgggctctgagccaaacatggtatgtccttcttagaagatgagacacagagacacacgcagagaaggggcacacacgt

SEQ ID NO: 29658 - DNA, 80 bp, synthetic construct
  misc_feature 1..80: note = Artificially Synthesized Probe
  source 1..80: mol_type = other DNA
agctgacctgtcacacaccaactttcagcaccattcctcaaatgtggcaattcacaagaaaagaccttatttctcacact

SEQ ID NO: 29659 - DNA, 80 bp, synthetic construct
  misc_feature 1..80: note = Artificially Synthesized Probe
  source 1..80: mol_type = other DNA
cactcccgagataaacaagccactcctgagatagccaactcactcctgagataaccaactcactcccatgataaccagct

SEQ ID NO: 29660 - DNA, 80 bp, synthetic construct
  misc_feature 1..80: note = Artificially Synthesized Probe
  source 1..80: mol_type = other DNA
actaacccattcccatgatgaccattgcacctcagagacaaccaagtcactcctgagataacccagtcccatgataacta

SEQ ID NO: 29661 - DNA, 80 bp, synthetic construct
  misc_feature 1..80: note = Artificially Synthesized Probe
  source 1..80: mol_type = other DNA
ccacacctaacccacccccaacacacctaacccacccctgagataaccaacccactcctgagatgactcactcccataac

SEQ ID NO: 29662 - DNA, 80 bp, synthetic construct
  misc_feature 1..80: note = Artificially Synthesized Probe
  source 1..80: mol_type = other DNA
aaccaagccactcctgagataactcactcccatgataactaacccactcccaccacacctaacccacccccaccacacct

SEQ ID NO: 29663 - DNA, 80 bp, synthetic construct
  misc_feature 1..80: note = Artificially Synthesized Probe
  source 1..80: mol_type = other DNA
caaagctctcaaagagggtgtccaaagggaccaagaaaggcaccacccctgtatggtggcaggcaaaggcgttaaatagc

SEQ ID NO: 29664 - DNA, 80 bp, synthetic construct
  misc_feature 1..80: note = Artificially Synthesized Probe
  source 1..80: mol_type = other DNA
ccacataaagttatggccacagatgccttctgtgccgtcagaggtagaattcaattgcagtcgtagcaatgaccttccaa

SEQ ID NO: 29665 - DNA, 80 bp, synthetic construct
  misc_feature 1..80: note = Artificially Synthesized Probe
  source 1..80: mol_type = other DNA
gagagggagagaggagggtgggcacagtggtcaggttttctatgcagagggaccactccggtgaccgtctaaggggggcg

SEQ ID NO: 29666 - DNA, 80 bp, synthetic construct
  misc_feature 1..80: note = Artificially Synthesized Probe
  source 1..80: mol_type = other DNA
tcgcctgggcacaccctcacccgggcacagcctcacccgggcacaccctcaccggggcacaccctcacccagacacgccc

SEQ ID NO: 29667 - DNA, 80 bp, synthetic construct
  misc_feature 1..80: note = Artificially Synthesized Probe
  source 1..80: mol_type = other DNA
tcgcccagacacaccctcacctgggcacaccctcacccgggcacagcctcacccagacacgccctcacccgggcacagcc

SEQ ID NO: 29668 - DNA, 80 bp, synthetic construct
  misc_feature 1..80: note = Artificially Synthesized Probe
  source 1..80: mol_type = other DNA
aagccagtgaggccctcgggtggagagcgcggcccgagtgcagatgtgagtgccaggcctggggtttccctactggctcc

SEQ ID NO: 29669 - DNA, 80 bp, synthetic construct
  misc_feature 1..80: note = Artificially Synthesized Probe
  source 1..80: mol_type = other DNA
gagattcagggctgaacacaaggctccctccccgccattcatcatcactgcggtaatggaaaagatggctcacttccgcg

SEQ ID NO: 29670 - DNA, 80 bp, synthetic construct
  misc_feature 1..80: note = Artificially Synthesized Probe
  source 1..80: mol_type = other DNA
gagtgagactccgtctcaaaacaaacaaacaacaacaaccacaaaaaacaagtgtcttatgagagagaagtgggctgggc

SEQ ID NO: 29671 - DNA, 80 bp, synthetic construct
  misc_feature 1..80: note = Artificially Synthesized Probe
  source 1..80: mol_type = other DNA
cactgcccacgatgtcagcaccatgctgtccccattgcatagacagtgaggctcaccgtggccatgcagacctaccaggc

SEQ ID NO: 29672 - DNA, 80 bp, synthetic construct
  misc_feature 1..80: note = Artificially Synthesized Probe
  source 1..80: mol_type = other DNA
aagctatctccactctgaacctgtggatgtgggagtaaggtctttccaggtataattaaggtaaggatttcaagatgagg

SEQ ID NO: 29673 - DNA, 80 bp, synthetic construct
  misc_feature 1..80: note = Artificially Synthesized Probe
  source 1..80: mol_type = other DNA
gtgggctttcaagctcccagcttctctttgagtcactgatttccatctgttacagtgactgaagccaatattctgagaga

SEQ ID NO: 29674 - DNA, 80 bp, synthetic construct
  misc_feature 1..80: note = Artificially Synthesized Probe
  source 1..80: mol_type = other DNA
actgtgactttgacatttcaaagagggagaaagggggaagaaatcagaggtgccaaatagaaaactctccctccgtaaac

SEQ ID NO: 29675 - DNA, 80 bp, synthetic construct
  misc_feature 1..80: note = Artificially Synthesized Probe
  source 1..80: mol_type = other DNA
tcattacagactggtcttttaagattacctggggacccaaactaataacatattgtcaatagtgaaaagactgactgccc

SEQ ID NO: 29676 - DNA, 80 bp, synthetic construct
  misc_feature 1..80: note = Artificially Synthesized Probe
  source 1..80: mol_type = other DNA
ctgtcttccctttctcaatgcttgtctgtcctcactctatagagtctcctactatatttattcaccctccactcatctac

SEQ ID NO: 29677 - DNA, 80 bp, synthetic construct
  misc_feature 1..80: note = Artificially Synthesized Probe
  source 1..80: mol_type = other DNA
tccacccacccacccatccatccgtacatacatacatacatacgtacatacacccaaccacctgcccatccacccactca

SEQ ID NO: 29678 - DNA, 80 bp, synthetic construct
  misc_feature 1..80: note = Artificially Synthesized Probe
  source 1..80: mol_type = other DNA
gaggagtagtgacttgcccgaggtcaccccattgggattaggactcagatccatccaactcccaatgtgcagctcaaaga

SEQ ID NO: 29679 - DNA, 80 bp, synthetic construct
  misc_feature 1..80: note = Artificially Synthesized Probe
  source 1..80: mol_type = other DNA
ttccaccattttctcaaaatagtgtgaaaatagccccttgcagaattcagaccccgtctgttcttttctgacttagaaat

SEQ ID NO: 29680 - DNA, 80 bp, synthetic construct
  misc_feature 1..80: note = Artificially Synthesized Probe
  source 1..80: mol_type = other DNA
ttatgcccctattctgggaggaaacagagatcccctataaccgagcatatacttcctttaaaaatctatttagtgctata

SEQ ID NO: 29681 - DNA, 80 bp, synthetic construct
  misc_feature 1..80: note = Artificially Synthesized Probe
  source 1..80: mol_type = other DNA
tgcggtttttatgaattccaggatcacctgcgaacagcacaattggatcacactccagtgagtctgttaaaagcattaat

SEQ ID NO: 29682 - DNA, 80 bp, synthetic construct
  misc_feature 1..80: note = Artificially Synthesized Probe
  source 1..80: mol_type = other DNA
gaggctgaggcaggagaaccacttgaccctgggtggtgggggtgaaaccctgcctcgaaaaaattaaaaaaataaaaata

SEQ ID NO: 29683 - DNA, 80 bp, synthetic construct
  misc_feature 1..80: note = Artificially Synthesized Probe
  source 1..80: mol_type = other DNA
tgccttcatgtgaggtgtgctccccatggttgaagctagttgtgatggtgaattctgcatccatagagagggccttggat

SEQ ID NO: 29684 - DNA, 80 bp, synthetic construct
  misc_feature 1..80: note = Artificially Synthesized Probe
  source 1..80: mol_type = other DNA
ctccccacagcacatccacacacgcgcttgttttatttttatttgttgttgtttaaactcacactgagaggcacagaacg

SEQ ID NO: 29685 - DNA, 80 bp, synthetic construct
  misc_feature 1..80: note = Artificially Synthesized Probe
  source 1..80: mol_type = other DNA
gactctcgctccaggggcctcctggcgtcccagcggggaggagggtgcctggcagtgggtggagccaaacgctgctcaac

SEQ ID NO: 29686 - DNA, 80 bp, synthetic construct
  misc_feature 1..80: note = Artificially Synthesized Probe
  source 1..80: mol_type = other DNA
ccacgtcactcaggcctcctcgtaggtttgtctgagaccatctggaccatgcaacttactcactccccgtcttcctccct

SEQ ID NO: 29687 - DNA, 80 bp, synthetic construct
  misc_feature 1..80: note = Artificially Synthesized Probe
  source 1..80: mol_type = other DNA
ccagccaatgaaggataaactgtcctttcagaaaatagttccaagactctgaaatatgcaggttgctgtgctgaattgta

SEQ ID NO: 29688 - DNA, 80 bp, synthetic construct
  misc_feature 1..80: note = Artificially Synthesized Probe
  source 1..80: mol_type = other DNA
tgggaaataaaactcacaaatgaataggaaaagctttctgctggaaaccgcacttcctagcaaggagaatttctcaaagc

SEQ ID NO: 29689 - DNA, 80 bp, synthetic construct
  misc_feature 1..80: note = Artificially Synthesized Probe
  source 1..80: mol_type = other DNA
tcttcactggtggtcactcatggtgcccggactcctggcagtgttttgcgtccggattaaaggtctgggaccccactgtg

SEQ ID NO: 29690 - DNA, 80 bp, synthetic construct
  misc_feature 1..80: note = Artificially Synthesized Probe
  source 1..80: mol_type = other DNA
gcaggtcagtgagagggaattcacacatgtgctctgaattttagaaacaacctccctcacaaccaaccaacaaaaggaaa

SEQ ID NO: 29691 - DNA, 80 bp, synthetic construct
  misc_feature 1..80: note = Artificially Synthesized Probe
  source 1..80: mol_type = other DNA
gggatcaatccattttgtttcggatttccccctctcctttctgaactcggatggattagtatcgagtgggagctcccagg

SEQ ID NO: 29692 - DNA, 80 bp, synthetic construct
  misc_feature 1..80: note = Artificially Synthesized Probe
  source 1..80: mol_type = other DNA
gcggctgcttgaactacttttctcccctcgtggctccagctgaatcagaaagatcagagaagccacagagctcaccaagc

SEQ ID NO: 29693 - DNA, 80 bp, synthetic construct
  misc_feature 1..80: note = Artificially Synthesized Probe
  source 1..80: mol_type = other DNA
ggggggaacccaggttgctgcccgctgctgaaggggcttccgcggcccttccctctcctctctcctgtatattccctccc

SEQ ID NO: 29694 - DNA, 80 bp, synthetic construct
  misc_feature 1..80: note = Artificially Synthesized Probe
  source 1..80: mol_type = other DNA
atccccttccaggccaccgtgtacgcgctgcccacctgggtgctgggcgccttcatctgcaagttcatccactacttctt

SEQ ID NO: 29695 - DNA, 80 bp, synthetic construct; identical to SEQ ID NO: 29694
  misc_feature 1..80: note = Artificially Synthesized Probe
  source 1..80: mol_type = other DNA

SEQ ID NO: 29696 - DNA, 80 bp, synthetic construct
  misc_feature 1..80: note = Artificially Synthesized Probe
  source 1..80: mol_type = other DNA
tttgtaaacccaagtgcaaaagggtgtttctttacagagtcttgaccgcaggctccaggaacttggaatggaatggactc

SEQ ID NO: 29697 - DNA, 80 bp, synthetic construct
  misc_feature 1..80: note = Artificially Synthesized Probe
  source 1..80: mol_type = other DNA
tagcttagctatttggaaaatggctggtttattaacgtggtcttccgcagatgctaaacaaaggctatcttacatagcac

SEQ ID NO: 29698 - DNA, 80 bp, synthetic construct
  misc_feature 1..80: note = Artificially Synthesized Probe
  source 1..80: mol_type = other DNA
cttcccttagagtgaattactgtccagaatctccttggtctaccatgaggataaactcaatgggcccactcgactaagtt

SEQ ID NO: 29699 - DNA, 80 bp, synthetic construct
  misc_feature 1..80: note = Artificially Synthesized Probe
  source 1..80: mol_type = other DNA
tgcattcaggttttgatactcccatttcggctggtagaacagtaaactaacaccttgtcaatgtattgagtgttttccca

SEQ ID NO: 29700 - DNA, 80 bp, synthetic construct
  misc_feature 1..80: note = Artificially Synthesized Probe
  source 1..80: mol_type = other DNA
tcagatggtgaattttggaagggcaaatctctagtttttcgatgcatccaggatctaactttgtgcctgacatgtagcag

SEQ ID NO: 29701 - DNA, 80 bp, synthetic construct
  misc_feature 1..80: note = Artificially Synthesized Probe
  source 1..80: mol_type = other DNA
caggaggtgagtgcacttaggttgactgagacagagtgcagagtgcagagttgctgacatgcatacttagagggaaagta

SEQ ID NO: 29702 - DNA, 80 bp, synthetic construct
  misc_feature 1..80: note = Artificially Synthesized Probe
  source 1..80: mol_type = other DNA
tagtttctgacttctcctaggacagttatttttagagcacctgctctgtgtaggaccaagccgatccaggggattctaag

SEQ ID NO: 29703 - DNA, 80 bp, synthetic construct
  misc_feature 1..80: note = Artificially Synthesized Probe
  source 1..80: mol_type = other DNA
taccatgaggatctagcatttgaagaagggatgaagattttctttttcgttttcacagcctctgacccttaacagctact

SEQ ID NO: 29704 - DNA, 80 bp, synthetic construct
  misc_feature 1..80: note = Artificially Synthesized Probe
  source 1..80: mol_type = other DNA
tggtggtggtgatggtggtgggtagtgatggtggtggtggtcataggggtggtggtgatggtggtgatgatggtggtcat

SEQ ID NO: 29705 - DNA, 80 bp, synthetic construct
  misc_feature 1..80: note = Artificially Synthesized Probe
  source 1..80: mol_type = other DNA
ggctcataaacaatggaagtttatttcttgcagtcctgaagcttggaagcctgaaatcaagctcctgcagattcagtgtt

SEQ ID NO: 29706 - DNA, 80 bp, synthetic construct
  misc_feature 1..80: note = Artificially Synthesized Probe
  source 1..80: mol_type = other DNA
tgcacacacaggggacatgcccgtctgacggagacggaggaccctgtaagagagtagaaagaatcacgtcataaataaat

SEQ ID NO: 29707 - DNA, 80 bp, synthetic construct
  misc_feature 1..80: note = Artificially Synthesized Probe
  source 1..80: mol_type = other DNA
actgctgcacccggctaagttatttgaaaacattttttaaaggtggggactcaggatgttgtccaagctggcctagaatg

SEQ ID NO: 29708 - DNA, 80 bp, synthetic construct
  misc_feature 1..80: note = Artificially Synthesized Probe
  source 1..80: mol_type = other DNA
agaacctgattcttatccatggctctaagagcaatgggactagtaaaaattaaaaggtaaacttggaatgagtcacagac

SEQ ID NO: 29709 - DNA, 80 bp, synthetic construct
  misc_feature 1..80: note = Artificially Synthesized Probe
  source 1..80: mol_type = other DNA
gcatctcatgcgttatagtctggttgtcatttctattgcagtgggactccagttcatgggaagtgataagaagagtcttt

SEQ ID NO: 29710 - DNA, 80 bp, synthetic construct
  misc_feature 1..80: note = Artificially Synthesized Probe
  source 1..80: mol_type = other DNA
ctgccaccacacatggggattataggaactacaattcaagataagatttgggtgggaacacagagccaaaccatgtctta

SEQ ID NO: 29711 - DNA, 80 bp, synthetic construct
  misc_feature 1..80: note = Artificially Synthesized Probe
  source 1..80: mol_type = other DNA
aagaagcaaggccctgggcttggacatgaaaccacttttcctcctaggcctctgggtgtgtgatgggaaaggctgccatg

SEQ ID NO: 29712 - DNA, 80 bp, synthetic construct
  misc_feature 1..80: note = Artificially Synthesized Probe
  source 1..80: mol_type = other DNA
tgattcaattacctctcactgggtccctcccattatgtgtggagattatgggaatgacaattcaagatgagagctgggtg

SEQ ID NO: 29713 - DNA, 80 bp, synthetic construct
  misc_feature 1..80: note = Artificially Synthesized Probe
  source 1..80: mol_type = other DNA
ctaagctatctagctcttgtctttcaacatgtgtggaacagacgaggttgccctgaggcttaattccagtcccataggtt

SEQ ID NO: 29714 - DNA, 80 bp, synthetic construct
  misc_feature 1..80: note = Artificially Synthesized Probe
  source 1..80: mol_type = other DNA
tccttcctcttcagaatcaccgcccactgcctggcgtacagcaattcctccgtgaatcctatcatttatgcatttctctc

SEQ ID NO: 29715 - DNA, 80 bp, synthetic construct
  misc_feature 1..80: note = Artificially Synthesized Probe
  source 1..80: mol_type = other DNA
tgatgaattttttggccatttacatagacatatctattaagtggaaagaaggctttctgaagtctgtttgcacaggtggc

SEQ ID NO: 29716 - DNA, 80 bp, synthetic construct
  misc_feature 1..80: note = Artificially Synthesized Probe
  source 1..80: mol_type = other DNA
ctgtgccaaatcagcactccacatgaaacatcaaattttagataaaaatgcaaacttgacataagcctttggcatgctaa

SEQ ID NO: 29717 - DNA, 80 bp, synthetic construct
  misc_feature 1..80: note = Artificially Synthesized Probe
  source 1..80: mol_type = other DNA
tttcagaagaactcgtaaacagaatgaaattaaccagagaagtataggagtgtgttgcgtttgccaagcatctgcttccc

SEQ ID NO: 29718 - DNA, 80 bp, synthetic construct
  misc_feature 1..80: note = Artificially Synthesized Probe
  source 1..80: mol_type = other DNA
caccaaaatgctcatgctgaagcagcattacattgaggaaaataacctattgggcagcttcatcatgttcttgctttaaa

SEQ ID NO: 29719 - DNA, 80 bp, synthetic construct
  misc_feature 1..80: note = Artificially Synthesized Probe
  source 1..80: mol_type = other DNA
atggtggtttcttttcttagtgtggcaggttcactcacattcatgtttttgactttagctgccatcctggggttctgagg

SEQ ID NO: 29720 - DNA, 80 bp, synthetic construct
  misc_feature 1..80: note = Artificially Synthesized Probe
  source 1..80: mol_type = other DNA
ctggtgtgaatgaagaatgacctgggcccaacatagaacttttccagtatggtgagcatcaaagtaggcagacatccaaa

SEQ ID NO: 29721 - DNA, 80 bp, synthetic construct
  misc_feature 1..80: note = Artificially Synthesized Probe
  source 1..80: mol_type = other DNA
gttgttctgtttggacttaggacttttttcctggctatcctgccaatacttttccatctaacagaaacgcaagcttcaag

SEQ ID NO: 29722 - DNA, 80 bp, synthetic construct
  misc_feature 1..80: note = Artificially Synthesized Probe
  source 1..80: mol_type = other DNA
aaaattttcttgggtacaattgaacaaatcttttaatctcttcagttctatctgcctaagtgaggagagtagttgtggag

SEQ ID NO: 29723 - DNA, 80 bp, synthetic construct
  misc_feature 1..80: note = Artificially Synthesized Probe
  source 1..80: mol_type = other DNA
ctttcagagattgttataatttttgcctcaaaaaaataaaataaaatagcttggtggaaaagagcacctatgcattcaat

SEQ ID NO: 29724 - DNA, 80 bp, synthetic construct
  misc_feature 1..80: note = Artificially Synthesized Probe
  source 1..80: mol_type = other DNA
tcctacctctgtgttctgcatgaaatataattggcctttgtgatggaaccagttttcttgcattgaaaataaaatttgtt

SEQ ID NO: 29725 - DNA, 80 bp, synthetic construct
  misc_feature 1..80: note = Artificially Synthesized Probe
  source 1..80: mol_type = other DNA
tctcttcttcctggaatactctttccccctttatcctatccccactttccccttatttggctaacatcctttgcatgtct

SEQ ID NO: 29726 - DNA, 80 bp, synthetic construct
  misc_feature 1..80: note = Artificially Synthesized Probe
  source 1..80: mol_type = other DNA
gcctgggaagtggaggttgcagttgagccaacagagggagactctgcctcaaaaaaaaaaaaaaaaaaaaaaaaaaaaag

SEQ ID NO: 29727 - DNA, 80 bp, synthetic construct
  misc_feature 1..80: note = Artificially Synthesized Probe
  source 1..80: mol_type = other DNA
gcgacagagtgagactctgtctcaaaaaagaaaaacacacaaacaaaaacaacagtgaggaaaaaaaaaagctgaggcaa

SEQ ID NO: 29728 - DNA, 80 bp, synthetic construct
  misc_feature 1..80: note = Artificially Synthesized Probe
  source 1..80: mol_type = other DNA
ggggtaattatttggctccatgggggtgggggaaggtgagatatgactgctgttacatgctgtcactttttttttttttt

SEQ ID NO: 29729 - DNA, 80 bp, synthetic construct
  misc_feature 1..80: note = Artificially Synthesized Probe
  source 1..80: mol_type = other DNA
ataattaaaagaggctggcatttctcagataaaaagtttcttttctttctcaagagtgatggaatgggccaggcacggtg

SEQ ID NO: 29730 - DNA, 80 bp, synthetic construct
  misc_feature 1..80: note = Artificially Synthesized Probe
  source 1..80: mol_type = other DNA
tgactgtagtgctaagccattgagttttgggagtgtttgttacagcaattaagattacttaccctgacaaatatagggca

SEQ ID NO: 29731 - DNA, 80 bp, synthetic construct
  misc_feature 1..80: note = Artificially Synthesized Probe
  source 1..80: mol_type = other DNA
cttgaattctttcttgtgtgagatccaagaatcctctcttggggtctggattgggatctctttactgtaacaacacctct

SEQ ID NO: 29732 - DNA, 80 bp, synthetic construct
  misc_feature 1..80: note = Artificially Synthesized Probe
  source 1..80: mol_type = other DNA
ggtgaccttgagtcctctgggctccaatgtgaaatggggaagaggtttagacaatatttagatggctctttaaaagtact

SEQ ID NO: 29733 - DNA, 80 bp, synthetic construct
  misc_feature 1..80: note = Artificially Synthesized Probe
  source 1..80: mol_type = other DNA
atggttacttagccctttttcccaaatctgtttttgcttttggggataggatatggttatggtgaagtactccacacaga

SEQ ID NO: 29734 - DNA, 80 bp, synthetic construct
  misc_feature 1..80: note = Artificially Synthesized Probe
  source 1..80: mol_type = other DNA
ccctcttagaactgtcctccacccacagggatagtgaacctccttctgggtcatatcccaccaagctttttggtccccta

SEQ ID NO: 29735 - DNA, 80 bp, synthetic construct
  misc_feature 1..80: note = Artificially Synthesized Probe
  source 1..80: mol_type = other DNA
taacatttctgtttccacagggtgtggtcaggagggagttgacttggtgtcttttggctaacagagctccgtatccctat

SEQ ID NO: 29736 - DNA, 80 bp, synthetic construct
  misc_feature 1..80: note = Artificially Synthesized Probe
  source 1..80: mol_type = other DNA
ggccagagtagagatgctgggactgagggtggagcagcaaacttggtgaaactacatctccaatgtgctttctaatctcc

SEQ ID NO: 29737 - DNA, 80 bp, synthetic construct
  misc_feature 1..80: note = Artificially Synthesized Probe
  source 1..80: mol_type = other DNA
aaaaaaatttaaaaagttagccaggtatggtggcatatacttgtggtcccagatacttgggaggctgagataggatcact

SEQ ID NO: 29738 - DNA, 80 bp, synthetic construct
  misc_feature 1..80: note = Artificially Synthesized Probe
  source 1..80: mol_type = other DNA
agtggccagatcctgggctgctggccagaaccctggctttgtgagtggctgcagcttggctctgctccagcccacagggg

SEQ ID NO: 29739 - DNA, 80 bp, synthetic construct
  misc_feature 1..80: note = Artificially Synthesized Probe
  source 1..80: mol_type = other DNA
ctgaccttccactaccttctctggtttcacaaaaacatcccggctcccatcccggagctcctcaaagcgtctgagaggcc

SEQ ID NO: 29740 - DNA, 80 bp, synthetic construct
  misc_feature 1..80: note = Artificially Synthesized Probe
  source 1..80: mol_type = other DNA
gtgttctgccagggaggacatgggacaggacacggggtgccagccctgcaaagcggccggggcagtggagctcaggtggc

SEQ ID NO: 29741 - DNA, 80 bp, synthetic construct
  misc_feature 1..80: note = Artificially Synthesized Probe
  source 1..80: mol_type = other DNA
aggacgctcacacttctgcacctcctgcctcactatcagagacccagtggagaattgcctcccacctcacctcttgtatt

SEQ ID NO: 29742 - DNA, 80 bp, synthetic construct
  misc_feature 1..80: note = Artificially Synthesized Probe
  source 1..80: mol_type = other DNA
cccccacccgcctgccgctgtctccgccagggagaggcccctactctgtgggtccttcgccccagcaccaagcctgcatg

SEQ ID NO: 29743 - DNA, 80 bp, synthetic construct
  misc_feature 1..80: note = Artificially Synthesized Probe
  source 1..80: mol_type = other DNA
agccgggggctgtcaactgagggaggaggtcaccatctggggaggctggtcccccacccaagagcattgggtcaacctgc

SEQ ID NO: 29744 - DNA, 80 bp, synthetic construct
  misc_feature 1..80: note = Artificially Synthesized Probe
  source 1..80: mol_type = other DNA
ctgcccagaggcatgcccccctgccagccacagcgacccctgctgctgttgctgctgctgctggcctgccaggtgaggac

SEQ ID NO: 29745 - DNA, 80 bp, synthetic construct
  misc_feature 1..80: note = Artificially Synthesized Probe
  source 1..80: mol_type = other DNA
agcacttcctgagttctcttcatgggaaggttcctgggtgcttatgcagcctttgaggaccccgccaaggggccctgtca

SEQ ID NO: 29746 - DNA, 80 bp, synthetic construct
  misc_feature 1..80: note = Artificially Synthesized Probe
  source 1..80: mol_type = other DNA
cggacacccccgccaataccacggccaacatctcctgcccctggtacctgccttggcaccacaaaggtacccatagaggg

SEQ ID NO: 29747 - DNA, 80 bp, synthetic construct
  misc_feature 1..80: note = Artificially Synthesized Probe
  source 1..80: mol_type = other DNA
ctggtgcctggggagggggtcatttgtgaccttctcccttccttttctgagacccgaattagatcctggcaaaatcggga

SEQ ID NO: 29748 - DNA, 80 bp, synthetic construct
  misc_feature 1..80: note = Artificially Synthesized Probe
  source 1..80: mol_type = other DNA
tgccacccctgaccaccctgtctctccagggcctgctggtggctgtcctctactgcttcctcaacaaggaggtaggtggg

SEQ ID NO: 29749 - DNA, 80 bp, synthetic construct
  misc_feature 1..80: note = Artificially Synthesized Probe
  source 1..80: mol_type = other DNA
gtgccgtgaactgcgtgccagtgtccccacgtatgtcggcacgtcccatgtgcatggaaatgtcctccaacaataaagag

SEQ ID NO: 29750 - DNA, 80 bp, synthetic construct
  misc_feature 1..80: note = Artificially Synthesized Probe
  source 1..80: mol_type = other DNA
gctcataaagcttcagtccttgtccacttttattcccatgacttaagtggaaacctgaacgtggtttaacaacttaaaaa

SEQ ID NO: 29751 - DNA, 80 bp, synthetic construct
  misc_feature 1..80: note = Artificially Synthesized Probe
  source 1..80: mol_type = other DNA
atctagttctgaagggttactcagtgtcatcttgatcagccaacctgcaaccaaaagacaaccttatattccacattaac

SEQ ID NO: 29752 - DNA, 80 bp, synthetic construct
  misc_feature 1..80: note = Artificially Synthesized Probe
  source 1..80: mol_type = other DNA
ccacctcagcctccctagtaactgagactacaggcacattccaccacagccagctaatttttgtatttctatagagacag

SEQ ID NO: 29753 - DNA, 80 bp, synthetic construct
  misc_feature 1..80: note = Artificially Synthesized Probe
  source 1..80: mol_type = other DNA
cgtcactgcaagctccacctcccaagggttcatgccattctcctgcctcagcctcccgagtagctgggactacaggcgcc

SEQ ID NO: 29754 - DNA, 80 bp, synthetic construct
  misc_feature 1..80: note = Artificially Synthesized Probe
  source 1..80: mol_type = other DNA
atacaaaaaaattagccgggcgtggtggtgggcgcctataatcccagctacttgggagactgaggcaggagaatcacttg

SEQ ID NO: 29755 - DNA, 80 bp, synthetic construct
  misc_feature 1..80: note = Artificially Synthesized Probe
  source 1..80: mol_type = other DNA
gaccctataggacaatatcaagtgatatgacgaacatgtctcaaatcagagaaggaaaaaggaatgaagtgggaagagaa

SEQ ID NO: 29756 - DNA, 80 bp, synthetic construct
  misc_feature 1..80: note = Artificially Synthesized Probe
  source 1..80: mol_type = other DNA
actggaggggctacattcttgagttttccttaaaatcctttaaacatgtaaaaactactctcagtcaggtgtggtagttc

SEQ ID NO: 29757 - DNA, 80 bp, synthetic construct
  misc_feature 1..80: note = Artificially Synthesized Probe
  source 1..80: mol_type = other DNA
agctcttctgggcatgaacatatttggtgttcttccacctctgtagttttatgtacaccattgcccccaaagcatttgct

SEQ ID NO: 29758 - DNA, 80 bp, synthetic construct
  misc_feature 1..80: note = Artificially Synthesized Probe
  source 1..80: mol_type = other DNA
atgccatatttttactgtaccttttctgtgttttgataggccaagtgtgttacgattgcctacagtattcagtacagtaa

SEQ ID NO: 29759 - DNA, 80 bp, synthetic construct
  misc_feature 1..80: note = Artificially Synthesized Probe
  source 1..80: mol_type = other DNA
gcaaatcatgcaagagcacactgggacaaatatttcaatataatccaatacctgtgcaaaattgctgattcccactgttc

SEQ ID NO: 29760 - DNA, 80 bp, synthetic construct
  misc_feature 1..80: note = Artificially Synthesized Probe
  source 1..80: mol_type = other DNA
cgattcagggaatcctgaaagaaggaccggccaatgttcaagagtaaaaagagttatttaggatataaagttaaaagtac

SEQ ID NO: 29761 - DNA, 80 bp, synthetic construct
  misc_feature 1..80: note = Artificially Synthesized Probe
  source 1..80: mol_type = other DNA
ccacatagcaagcactcaaaagctgaaggaatgaaataattttttttttccttaaattatcatgtcgcaggccaggcaca

SEQ ID NO: 29762 - DNA, 80 bp, synthetic construct
  misc_feature 1..80: note = Artificially Synthesized Probe
  source 1..80: mol_type = other DNA
ggacaactataaacaccacctgagactaccttctttgaccttgccatcttgcctacctgtgaagataattttaggagtaa

SEQ ID NO: 29763 - DNA, 80 bp, synthetic construct
  misc_feature 1..80: note = Artificially Synthesized Probe
  source 1..80: mol_type = other DNA
aggtggtttttggcctcggaaaattaggagttgtgagcaatttatgaaaattttgcattttcctttttcaatgtcactag

SEQ ID NO: 29764 - DNA, 80 bp, synthetic construct
  misc_feature 1..80: note = Artificially Synthesized Probe
  source 1..80: mol_type = other DNA
acattcatgggcaggtttcccagttatttcaagtccgtttgagttagggctcatttcagcaagcacacacatgaatgatc

SEQ ID NO: 29765 - DNA, 80 bp, synthetic construct
  misc_feature 1..80: note = Artificially Synthesized Probe
  source 1..80: mol_type = other DNA
gccacccccgcctcggtgtcccgcaggcctcccctcccggctgcatgcaatccctagggcaaaggctactcgcgggtcct

SEQ ID NO: 29766 - DNA, 80 bp, synthetic construct
  misc_feature 1..80: note = Artificially Synthesized Probe
  source 1..80: mol_type = other DNA
cttcatatccacctatataatagaaatgccagacacccacatatacaatataagggcagggaaagacacaagccctgtca

SEQ ID NO: 29767 - DNA, 80 bp, synthetic construct
  misc_feature 1..80: note = Artificially Synthesized Probe
  source 1..80: mol_type = other DNA
catccacaggttcccagagattcctggatgaaatgtagagggtgcacgaacttagatgggaaaaataattacatcattat

SEQ ID NO: 29768 - DNA, 80 bp, synthetic construct
  misc_feature 1..80: note = Artificially Synthesized Probe
  source 1..80: mol_type = other DNA
aaatcctaaatattttactttaggcacttaaaccattattctgagaaagagtcaatagactgggccgggacatggtggct

SEQ ID NO: 29769 - DNA, 80 bp, synthetic construct
  misc_feature 1..80: note = Artificially Synthesized Probe
  source 1..80: mol_type = other DNA
tttttttaagtttttgtagagatagggtctctctatgttgcctaggcttatcgagaactcctgagctcaaaggatcctcc

SEQ ID NO: 29770 - DNA, 80 bp, synthetic construct
  misc_feature 1..80: note = Artificially Synthesized Probe
  source 1..80: mol_type = other DNA
gtgagacctcatctctataaaaaagtacaaaaatcagcctggcgtggttgcgtgcacctgtagcctgtagttccaactac

SEQ ID NO: 29771 - DNA, 80 bp, synthetic construct
  misc_feature 1..80: note = Artificially Synthesized Probe
  source 1..80: mol_type = other DNA
ctctccagttgctgtaaaactaaccaaggctctaaattctgcatctgaaacacccgggaggttgtatagacatgcagatt

SEQ ID NO: 29772 - DNA, 80 bp, synthetic construct
  misc_feature 1..80: note = Artificially Synthesized Probe
  source 1..80: mol_type = other DNA
tattcttgaaattggactgcctggcccaaagccagaattaacaggaagctgaaagccaaatctggcaagaaacgaagcat

SEQ ID NO: 29773 - DNA, 80 bp, synthetic construct
  misc_feature 1..80: note = Artificially Synthesized Probe
  source 1..80: mol_type = other DNA
ggatgggaagtttgaggccgccgtggggttggggggttcctgggcgtttttccaatccgggttcgtttggtttgcagccc

SEQ ID NO: 29774 - DNA, 80 bp, synthetic construct
  misc_feature 1..80: note = Artificially Synthesized Probe
  source 1..80: mol_type = other DNA
tgcgtgccaaggagctcctggcagggtatcagaaactcgtaggtagtttctattaatagattgttatggagtcagcctgt

SEQ ID NO: 29775 - DNA, 80 bp, synthetic construct
  misc_feature 1..80: note = Artificially Synthesized Probe
  source 1..80: mol_type = other DNA
cccgagtagctgggactacaggcgcccgccaccacacccggctaattttttgtattttagtagagatgaggttttaccgt

SEQ ID NO: 29776 - DNA, 80 bp, synthetic construct
  misc_feature 1..80: note = Artificially Synthesized Probe
  source 1..80: mol_type = other DNA
aaaaaaaatcaagcttagtctgagactaaacccagctctagagcccaggccagctctcagaccaagccctgctcttaagc

SEQ ID NO: 29777 - DNA, 80 bp, synthetic construct
  misc_feature 1..80: note = Artificially Synthesized Probe
  source 1..80: mol_type = other DNA
gtttctctgcctgcaaaatgggtcctcattgaaaagtggggcaatgatgttggtaccagcactactgactcgtgtgaggg

SEQ ID NO: 29778 - DNA, 80 bp, synthetic construct
  misc_feature 1..80: note = Artificially Synthesized Probe
  source 1..80: mol_type = other DNA
cagctctagaactcagatgggctccgagaccaagcccagctctagaacccagatgagctctgagaccatgcccagctcta

SEQ ID NO: 29779 - DNA, 80 bp, synthetic construct
  misc_feature 1..80: note = Artificially Synthesized Probe
  source 1..80: mol_type = other DNA
cagctcaggattcagagacagctcccaaatcaaatcctattcaagaactcagaccagctcagaaacccaggtccacacgg

SEQ ID NO: 29780 - DNA, 80 bp, synthetic construct
  misc_feature 1..80: note = Artificially Synthesized Probe
  source 1..80: mol_type = other DNA
ccaccttagttctggaacccagcctgtttctggaacccaatccagttccagaactcacaccagttcaagaatctggctga

SEQ ID NO: 29781 - DNA, 80 bp, synthetic construct
  misc_feature 1..80: note = Artificially Synthesized Probe
  source 1..80: mol_type = other DNA
tccttggagggaaaaggagggcaggagacgggttgcaccgcatgtaccctgagggctcatggtgaataaaggcaccttcc

SEQ ID NO: 29782 - DNA, 80 bp, synthetic construct
  misc_feature 1..80: note = Artificially Synthesized Probe
  source 1..80: mol_type = other DNA
ttatatctacttttaatgacacacagattcaaaggtggtttgattgcaggttccagggctaacctgtagccctcccatta

SEQ ID NO: 29783 - DNA, 80 bp, synthetic construct
  misc_feature 1..80: note = Artificially Synthesized Probe
  source 1..80: mol_type = other DNA
gggttgggagggacgcagagaaggggtgggagctctggatgggaaaaaggggccgaggaagggagagtgcttggtaaaag

SEQ ID NO: 29784 - DNA, 80 bp, synthetic construct
  misc_feature 1..80: note = Artificially Synthesized Probe
  source 1..80: mol_type = other DNA
aaaagttacccaggcatggttgcactccagcctgggtgacagagcaagatcctgtctcaaaataaataaataaatacctt

SEQ ID NO: 29785 - DNA, 80 bp, synthetic construct
  misc_feature 1..80: note = Artificially Synthesized Probe
  source 1..80: mol_type = other DNA
ttagccgggtgtggtggtgcacacctgtagtcccagctactccggaggctgaagtgggaggatcccttgaacccaggagg

SEQ ID NO: 29786 - DNA, 80 bp, synthetic construct
  misc_feature 1..80: note = Artificially Synthesized Probe
  source 1..80: mol_type = other DNA
gattacagacatgagccaccgtggctggcctgtttttgtttgtttgtttgtttttgtttttgtttgaggcggagtctcgc

SEQ ID NO: 29787 - DNA, 80 bp, synthetic construct
  misc_feature 1..80: note = Artificially Synthesized Probe
  source 1..80: mol_type = other DNA
gtctggctaatttttttattttttatttttttttttgagacggagtctcgctctgtcgcccaggctggagtgcagtggcg

SEQ ID NO: 29788 - DNA, 80 bp, synthetic construct
  misc_feature 1..80: note = Artificially Synthesized Probe
  source 1..80: mol_type = other DNA
gaggccatggcggcccccagcagcagcggggacaggccgaagaagatcatgacgacgcccatgaagcgacagagacggca

SEQ ID NO: 29789 - DNA, 80 bp, synthetic construct
  misc_feature 1..80: note = Artificially Synthesized Probe
  source 1..80: mol_type = other DNA
ctacttgggaggctgaggttggaggattgcttgagccccagatgttgaggctgcagtgagctacaattgtgccactgcac

SEQ ID NO: 29790 - DNA, 80 bp, synthetic construct
  misc_feature 1..80: note = Artificially Synthesized Probe
  source 1..80: mol_type = other DNA
tgccctgacacacccccaagtcacctggagggactgggtgggcaaaggtgggcgaatgggactgtgtgcgagatggaggt

SEQ ID NO: 29791 - DNA, 80 bp, synthetic construct
  misc_feature 1..80: note = Artificially Synthesized Probe
  source 1..80: mol_type = other DNA
tctcaaaaaaaaaaaaaaagtcggggttgctgatgacgggagtgaagggatccacgcgcagcactcagcacagcacagcg

SEQ ID NO: 29792 - DNA, 80 bp, synthetic construct
  misc_feature 1..80: note = Artificially Synthesized Probe
  source 1..80: mol_type = other DNA
ttgggaaaattactgtccctccctgtgtctggggagaggtgtggacccaagatcgcttttcgatgttgaataactccaga

SEQ ID NO: 29793 - DNA, 80 bp, synthetic construct
  misc_feature 1..80: note = Artificially Synthesized Probe
  source 1..80: mol_type = other DNA
ctaagtcacatggccccctgtgagcctcgctttccccatctctctagtgggggctccccagggagcatgtacggagctcc

SEQ ID NO: 29794 - DNA, 80 bp, synthetic construct
  misc_feature 1..80: note = Artificially Synthesized Probe
  source 1..80: mol_type = other DNA
agcagaaacacaacagacacacagccacacacagacacatacaggcagaaacacgacagacatagacacacacagataca

SEQ ID NO: 29795 - DNA, 80 bp, synthetic construct
  misc_feature 1..80: note = Artificially Synthesized Probe
  source 1..80: mol_type = other DNA
ggagtcggccaagcacatttatcctgggacccaaccattgttgaacccctcctaccttcaaatcacctttttaaatattt

SEQ ID NO: 29796 - DNA, 80 bp, synthetic construct
  misc_feature 1..80: note = Artificially Synthesized Probe
  source 1..80: mol_type = other DNA
gtttcccatcaccaggaaggtgccatggcccaagggtacagagggaaagctgagaacaggatgggctcagctctgtgtgt

SEQ ID NO: 29797 - DNA, 80 bp, synthetic construct
  misc_feature 1..80: note = Artificially Synthesized Probe
  source 1..80: mol_type = other DNA
tactaaccttgctgagctcttattactcctcaaagatggccctcaggtctccacttgaattgtcttttttttcttttgtt

SEQ ID NO: 29798 - DNA, 80 bp, synthetic construct
  misc_feature 1..80: note = Artificially Synthesized Probe
  source 1..80: mol_type = other DNA
cgtttctccaaggcttcttccttaagcttgggctgacctccaggagtttgctcaatgaagacccctctttgaactctgag

SEQ ID NO: 29799 - DNA, 80 bp, synthetic construct
  misc_feature 1..80: note = Artificially Synthesized Probe
  source 1..80: mol_type = other DNA
gttttcaaagtctaaagtggccaccgccaagcaagcagtcattagaaggagctcgtctctcccttgcttcatcctcagac

SEQ ID NO: 29800 - DNA, 80 bp, synthetic construct
  misc_feature 1..80: note = Artificially Synthesized Probe
  source 1..80: mol_type = other DNA
aaattaggccaggcgcagtggcttatgcctgtaatcccagcactttgggaggctgaggtgggcggatcacgaggtcagga

SEQ ID NO: 29801 - DNA, 80 bp, synthetic construct
  misc_feature 1..80: note = Artificially Synthesized Probe
  source 1..80: mol_type = other DNA
gagaatcacaatgctagggtaaatgactgtcactaacaggaggcagacacttgaaaacaaaccagtccgtttttatggag

SEQ ID NO: 29802 - DNA, 80 bp, synthetic construct
  misc_feature 1..80: note = Artificially Synthesized Probe
  source 1..80: mol_type = other DNA
ctcctttattcctcctgccctggcccttcctgattcaattccttggttcacattccataacaatagtcaactcatacgaa

SEQ ID NO: 29803 - DNA, 80 bp, synthetic construct
  misc_feature 1..80: note = Artificially Synthesized Probe
  source 1..80: mol_type = other DNA
taagcctgggtaacatggcgaaacctcatctctacaaaaaattcaaaaactagccgagcgtggtggtacatgcctgtggt

SEQ ID NO: 29804 - DNA, 80 bp, synthetic construct
  misc_feature 1..80: note = Artificially Synthesized Probe
  source 1..80: mol_type = other DNA
aacaaatccagaacctgtcatcccctaacccctcctctgccccatccctttcctctcaccactcctacctgaagtgaccc

SEQ ID NO: 29805 - DNA, 80 bp, synthetic construct
  misc_feature 1..80: note = Artificially Synthesized Probe
  source 1..80: mol_type = other DNA
attttttaaattatgtgtagagatcgagtttccctccattgcccaggctggtcttgaactcctgtgctcaaatgatcctc

SEQ ID NO: 29806 - DNA, 80 bp, synthetic construct
  misc_feature 1..80: note = Artificially Synthesized Probe
  source 1..80: mol_type = other DNA
aggtgagcggtttcccagtgcaggattccagaagtggaattggtgggtcatgagtatatatatcatttaaacgctgaatg

SEQ ID NO: 29807 - DNA, 80 bp, synthetic construct
  misc_feature 1..80: note = Artificially Synthesized Probe
  source 1..80: mol_type = other DNA
gttgcagaaacgaacacagatataccaatgcttgtcctcatggagctgacagtctaatggggagggatggaggaacaggc

SEQ ID NO: 29808 - DNA, 80 bp, synthetic construct
  misc_feature 1..80: note = Artificially Synthesized Probe
  source 1..80: mol_type = other DNA
ttggctaatgggaccacgtctttttggaggtgagagtcctggaaagaaaacagaatatgctggtcgtggtggtgcgtgca

SEQ ID NO: 29809 - DNA, 80 bp, synthetic construct
  misc_feature 1..80: note = Artificially Synthesized Probe
  source 1..80: mol_type = other DNA
tgtggatcctctcctgcgtctgtggggtcgggtgtggatattctacttgttttttctgtctttgatgtagcgctccttca

SEQ ID NO: 29810 - DNA, 80 bp, synthetic construct
  misc_feature 1..80: note = Artificially Synthesized Probe
  source 1..80: mol_type = other DNA
aggggtggtggcatttgggggtggtggtatttgggggtagagactcccgctcaggtatggctgtgtctggcccaagaggc

SEQ ID NO: 29811 - DNA, 80 bp, synthetic construct
  misc_feature 1..80: note = Artificially Synthesized Probe
  source 1..80: mol_type = other DNA
gggacagccccaggggtgagtggaatgtcagggaacagaaggccaggccgggccagcaccccagaggtctcagtggcatt

SEQ ID NO: 29812 - DNA, 80 bp, synthetic construct
  misc_feature 1..80: note = Artificially Synthesized Probe
  source 1..80: mol_type = other DNA
ggtgacactgccctgcaaccgtcagcaccatcatctccacaacttgctctgtccccttcaaaccctgactcccagctgcc

SEQ ID NO: 29813 - DNA, 80 bp, synthetic construct
  misc_feature 1..80: note = Artificially Synthesized Probe
  source 1..80: mol_type = other DNA
gattcccggcttctctgcccatttttaacttgagtttattgttgggctgtagttctgtgttctggatgtgagtctcttac

SEQ ID NO: 29814 - DNA, 80 bp, synthetic construct
  misc_feature 1..80: note = Artificially Synthesized Probe
  source 1..80: mol_type = other DNA
ttgaatccatcaggctgggcgctggggctcacgcctgtaatcccagtactttaggaggctgaggcaggtggatcacctga

SEQ ID NO: 29815 - DNA, 80 bp, synthetic construct
  misc_feature 1..80: note = Artificially Synthesized Probe
  source 1..80: mol_type = other DNA
aaagattggggaccactggtttaagtcctgtagctttacagaccatagctagaaaggcaactggtattaattcaccctgc

SEQ ID NO: 29816 - DNA, 80 bp, synthetic construct
  misc_feature 1..80: note = Artificially Synthesized Probe
  source 1..80: mol_type = other DNA
actctgccagtctttgcagacaggttctgtgcttggaccctggggatcagtgtgaggtctcttccaggacccgtgcatct

SEQ ID NO: 29817 - DNA, 80 bp, synthetic construct
  misc_feature 1..80: note = Artificially Synthesized Probe
  source 1..80: mol_type = other DNA
atcctccaccttcagggccatgagaagttgctgaggacactttttgaggatgctggctacttaaagaccccagaagaaaa

SEQ ID NO: 29818 - DNA, 80 bp, synthetic construct
  misc_feature 1..80: note = Artificially Synthesized Probe
  source 1..80: mol_type = other DNA
attctttggtcttcccactgctcacctgtcctcagagccagtactgatctaggggagcaggtgccacctccatctcccag

SEQ ID NO: 29819 - DNA, 80 bp, synthetic construct
  misc_feature 1..80: note = Artificially Synthesized Probe
  source 1..80: mol_type = other DNA
cccagcgacatctccaaggagctacaaagcaccattgcctaggacagctctgagtaatcagaaaacagcttttttttttt

SEQ ID NO: 29820 - DNA, 80 bp, synthetic construct
  misc_feature 1..80: note = Artificially Synthesized Probe
  source 1..80: mol_type = other DNA
ggcaggcgggttctgtgggtttgcatttaaggtttttgaggaaaataccttgaaaccgtcggtaggactagataggtgac

SEQ ID NO: 29821 - DNA, 80 bp, synthetic construct
  misc_feature 1..80: note = Artificially Synthesized Probe
  source 1..80: mol_type = other DNA
gtgggctacgcaggaccctctgtcctatagcagcgagtccaagagcccacccttagcaggcgaggtgaggaggggcacgc

SEQ ID NO: 29822 - DNA, 80 bp, synthetic construct
  misc_feature 1..80: note = Artificially Synthesized Probe
  source 1..80: mol_type = other DNA
cgttcaaacctgagtgtgaaacggtcgatgacggcccagccctgctgtgctcgcggcctggtgggattggtgggtgctat

SEQ ID NO: 29823 - DNA, 80 bp, synthetic construct
  misc_feature 1..80: note = Artificially Synthesized Probe
  source 1..80: mol_type = other DNA
acaatcattttaacccggaaggcagaggctgcagtgagccaagattgctggagcctggacgacagagtgaaactttgttt

SEQ ID NO: 29824 - DNA, 80 bp, synthetic construct
  misc_feature 1..80: note = Artificially Synthesized Probe
  source 1..80: mol_type = other DNA
tttgagaccggcccggccagcgtgatgaaacgccatctctactaaaaatacaaaaactagctgggcgtggtggcgcccgc

SEQ ID NO: 29825 - DNA, 80 bp, synthetic construct
  misc_feature 1..80: note = Artificially Synthesized Probe
  source 1..80: mol_type = other DNA
gcacttgtccaggccccctgaaatggtttactttcttttaaaagaaagaaaagatacacttttaggctgaatgaaaagat

SEQ ID NO: 29826 - DNA, 80 bp, synthetic construct
  misc_feature 1..80: note = Artificially Synthesized Probe
  source 1..80: mol_type = other DNA
cgctgcagagctcaggaagcctagctgaggaggacgaccgtcccacctgggcttagagtgagaccaagggcagaaggcgt

SEQ ID NO: 29827 - DNA, 80 bp, synthetic construct
  misc_feature 1..80: note = Artificially Synthesized Probe
  source 1..80: mol_type = other DNA
aaaaactttctgtgagggtgatttcaaggagcaggtgttcacgtgcaatttcatgccaagcaccaagacctcaattccca

SEQ ID NO: 29828 - DNA, 80 bp, synthetic construct
  misc_feature 1..80: note = Artificially Synthesized Probe
  source 1..80: mol_type = other DNA
acaccgcacagagacctcagcagcgtggggcacaccacacagggactgttgcgcaggcgccctccccgctgcccaccttt

SEQ ID NO: 29829 - DNA, 80 bp, synthetic construct
  misc_feature 1..80: note = Artificially Synthesized Probe
  source 1..80: mol_type = other DNA
cctgaagggccctagacccccttcctcctgtcctcacctgggaccgatggtccctccatggccccaggcaaccgcacccc

SEQ ID NO: 29830 - DNA, 80 bp, synthetic construct
  misc_feature 1..80: note = Artificially Synthesized Probe
  source 1..80: mol_type = other DNA
acccccaccccactccaccgcacagcacgacccagactcaaccctcgtccacacgccagccgtgagggaatttccggggc

SEQ ID NO: 29831 - DNA, 80 bp, synthetic construct
  misc_feature 1..80: note = Artificially Synthesized Probe
  source 1..80: mol_type = other DNA
ttccctcctccctcactctagggctggggtgctcctcttccctcctccctccagggctggggcactcctcctccctcctc

SEQ ID NO: 29832 - DNA, 80 bp, synthetic construct
  misc_feature 1..80: note = Artificially Synthesized Probe
  source 1..80: mol_type = other DNA
caggttttctctatgttggtcaggctggtcatgaactccccacctcaggtgatctgcttgcctcatctcccaaagtgctg

SEQ ID NO: 29833 - DNA, 80 bp, synthetic construct
  misc_feature 1..80: note = Artificially Synthesized Probe
  source 1..80: mol_type = other DNA
cttcctaccaagaaaagcctcattgcatcctgaatcctgacctgcaagaaaggaggaagcttgtgcccttgcgcgtgccg

SEQ ID NO: 29834 - DNA, 80 bp, synthetic construct
  misc_feature 1..80: note = Artificially Synthesized Probe
  source 1..80: mol_type = other DNA
cccgcagcttctcccccacctcacctcactgtttcaaggttagacccagatcttctgaaacattctcaaagaaagagctg

SEQ ID NO: 29835 - DNA, 80 bp, synthetic construct
  misc_feature 1..80: note = Artificially Synthesized Probe
  source 1..80: mol_type = other DNA
gggtacggagctcgcaggtctctcttaatctgaaacctgttcctatgaagtgtaagatgaaggaaaatggaacctatcag

SEQ ID NO: 29836 - DNA, 80 bp, synthetic construct
  misc_feature 1..80: note = Artificially Synthesized Probe
  source 1..80: mol_type = other DNA
ttccacccgagtgagcacagtccaagatggtctctcttgtttgggatttaattttcctaaatatttttctgctatgctca

SEQ ID NO: 29837 - DNA, 80 bp, synthetic construct
  misc_feature 1..80: note = Artificially Synthesized Probe
  source 1..80: mol_type = other DNA
aagaccctgtcttaaaaaataaaaccccaaaatgaacaaaaacaaactcagggaaggccgtcacctgtggtgatctccaa

SEQ ID NO: 29838 - DNA, 80 bp, synthetic construct
  misc_feature 1..80: note = Artificially Synthesized Probe
  source 1..80: mol_type = other DNA
aggtcaggagttctagaccagcctggccaacgtggtgaaacctcatctctactaaaaacaggaaaattaacctggcatgg

SEQ ID NO: 29839 - DNA, 80 bp, synthetic construct
  misc_feature 1..80: note = Artificially Synthesized Probe
  source 1..80: mol_type = other DNA
tggccttccctgagtccctcactgtcactgtcaggacagagaggcaggtttgggtcccttgggcgctggtggccatggaa

SEQ ID NO: 29840 - DNA, 80 bp, synthetic construct
  misc_feature 1..80: note = Artificially Synthesized Probe
  source 1..80: mol_type = other DNA
cctctctgagtcagggcttgtttccacaaccacacgtgcaacacaaccaaagtgacagatgactgaaaatacgcgtctgg

SEQ ID NO: 29841 - DNA, 80 bp, synthetic construct
  misc_feature 1..80: note = Artificially Synthesized Probe
  source 1..80: mol_type = other DNA
tcaaaagaaaaagagcaacacacagagcagtgctgaataaaaacccagtaacggggagggtgctgctcacaagaaaacac

SEQ ID NO: 29842 - DNA, 80 bp, synthetic construct
  misc_feature 1..80: note = Artificially Synthesized Probe
  source 1..80: mol_type = other DNA
aatgaagaaattttaatgtgcatttcctaaagatcagaaatccccgacaagaacgcgcctggctcctggcttctgtgacc

SEQ ID NO: 29843 - DNA, 80 bp, synthetic construct
  misc_feature 1..80: note = Artificially Synthesized Probe
  source 1..80: mol_type = other DNA
ccagcagctatcactcagaaccaaaagctcaggatggcaacgcacggccctccggggacgtggacactgcacagccgcac

SEQ ID NO: 29844 - DNA, 80 bp, synthetic construct
  misc_feature 1..80: note = Artificially Synthesized Probe
  source 1..80: mol_type = other DNA
cccaagctaccaccagcactgcctgcctggtttttcttctctgtattatagtgaaatataatataaaatttgctacagtg

SEQ ID NO: 29845 - DNA, 80 bp, synthetic construct
  misc_feature 1..80: note = Artificially Synthesized Probe
  source 1..80: mol_type = other DNA
gcctcaaaaaatttaagaatctgtaaaaacacaacagcaacaatgaaatgaggtgtgggggcagggccctacgcagccac

SEQ ID NO: 29846 - DNA, 80 bp, synthetic construct
  misc_feature 1..80: note = Artificially Synthesized Probe
  source 1..80: mol_type = other DNA
ttggcctgcaacataaaaaacagtcatatgtggaaaaagcagggaggaaatgtaaattaaaaacatacaattcaggctgg

SEQ ID NO: 29847 - DNA, 80 bp, synthetic construct
  misc_feature 1..80: note = Artificially Synthesized Probe
  source 1..80: mol_type = other DNA
tctcagcctcccaagaagctgtgagcacaggcatttgccagtggacccagttaatttttcaaagctttctgtagagacag

SEQ ID NO: 29848 - DNA, 80 bp, synthetic construct
  misc_feature 1..80: note = Artificially Synthesized Probe
  source 1..80: mol_type = other DNA
agagactgcagattgaggctgcataaccaacctcactgaagttgctcttaccttccgccagtctcccccatagccttacc

SEQ ID NO: 29849 - DNA, 80 bp, synthetic construct
  misc_feature 1..80: note = Artificially Synthesized Probe
  source 1..80: mol_type = other DNA
acaagaatagctgccctccccactaaaataaaaaacaaaggaaaatttgagcttgtgaccacacacacaaaacctggaac

SEQ ID NO: 29850 - DNA, 80 bp, synthetic construct
  misc_feature 1..80: note = Artificially Synthesized Probe
  source 1..80: mol_type = other DNA
agtacccggtttggcgcatgtcgttgcattttgtagatttgtagatctggggaaaaaagtgaaataaagaggttggattg

SEQ ID NO: 29851 - DNA, 80 bp, synthetic construct
  misc_feature 1..80: note = Artificially Synthesized Probe
  source 1..80: mol_type = other DNA
caggctggagtacaatggtgccatcttggcccactgcaacctctgcctcctggattcaagcaattctcctgcctcagcct

SEQ ID NO: 29852 - DNA, 80 bp, synthetic construct
  misc_feature 1..80: note = Artificially Synthesized Probe
  source 1..80: mol_type = other DNA
gacctcaagtgatgtgcccacctcagccttccaaagtgctgggattacagtgtgagccaccgtgcctggcctgaacatgt

SEQ ID NO: 29853 - DNA, 80 bp, synthetic construct
  misc_feature 1..80: note = Artificially Synthesized Probe
  source 1..80: mol_type = other DNA
atgtatgtttttaattgacattttctctctgcttttttcccacatgactctttcttctgttacaggccaagtggagagac

SEQ ID NO: 29854 - DNA, 80 bp, synthetic construct
  misc_feature 1..80: note = Artificially Synthesized Probe
  source 1..80: mol_type = other DNA
accaggaggggcctcgggcatggggccctggagtgacaggcaacgcagctctgcgctcacggacacgcaggcccggccag

SEQ ID NO: 29855 - DNA, 80 bp, synthetic construct
  misc_feature 1..80: note = Artificially Synthesized Probe
  source 1..80: mol_type = other DNA
tggaggaaggtcctgtgtgcaccctgggcagggcgacccttgggttgttggccctgggactcagcctaaggacccggcgt

SEQ ID NO: 29856 - DNA, 80 bp, synthetic construct
  misc_feature 1..80: note = Artificially Synthesized Probe
  source 1..80: mol_type = other DNA
gtgcggcttccttgctgggggatgaaaatgttctccaactagagagaggtgatgtgtgcacagcttttgagaatatgcta

SEQ ID NO: 29857 - DNA, 80 bp, synthetic construct
  misc_feature 1..80: note = Artificially Synthesized Probe
  source 1..80: mol_type = other DNA
tcacagagatgggatgcaggccagtgagtgcagggaccagggaggggatggggaggaactgctcataagcaggggggttc

SEQ ID NO: 29858 - DNA, 80 bp, synthetic construct
  misc_feature 1..80: note = Artificially Synthesized Probe
  source 1..80: mol_type = other DNA
tccccatctgatcaccttgcacgtaaactgaaaggcacagggaaccaagtggcccgagctgttctcgcgctgtgcccgcc

SEQ ID NO: 29859 - DNA, 80 bp, synthetic construct
  misc_feature 1..80: note = Artificially Synthesized Probe
  source 1..80: mol_type = other DNA
gagattccatctcaaaaaacaaaaaaagaaaagaaaagaaagaaataacatccagaggccaggcgcagtggctcactgta

SEQ ID NO: 29860 - DNA, 80 bp, synthetic construct
  misc_feature 1..80: note = Artificially Synthesized Probe
  source 1..80: mol_type = other DNA
cctggttatcatggacccagaggcagccctaagctccctgggtccacgccctgtcagcacgtggcaagcagtgaattccc

SEQ ID NO: 29861 - DNA, 80 bp, synthetic construct
  misc_feature 1..80: note = Artificially Synthesized Probe
  source 1..80: mol_type = other DNA
tgggcgcctccaggtaggtcactccagaaggaggcaaagggacgcacagaggaccctgagtcatcaatggtgtcgagccc

SEQ ID NO: 29862 - DNA, 80 bp, synthetic construct
  misc_feature 1..80: note = Artificially Synthesized Probe
  source 1..80: mol_type = other DNA
aggaaggcaggcagccagccaggcagctgggtacagtggctcacgcctgtgatcccagaactttggaaggccaaggcggg

SEQ ID NO: 29863 - DNA, 80 bp, synthetic construct
  misc_feature 1..80: note = Artificially Synthesized Probe
  source 1..80: mol_type = other DNA
agctggtgtggacgaggcccgtggatctgcactgccggctggttcccagggaacgtgcgagaaccaccgggcttaggaga

SEQ ID NO: 29864 - DNA, 80 bp, synthetic construct
  misc_feature 1..80: note = Artificially Synthesized Probe
  source 1..80: mol_type = other DNA
aaaaaagatcagactccagacccgccagatacaagcagcaacagttaatcttagaaatggatacttggaaaagtttctcc

SEQ ID NO: 29865 - DNA, 80 bp, synthetic construct
  misc_feature 1..80: note = Artificially Synthesized Probe
  source 1..80: mol_type = other DNA
tgtatttttttttcccaatgaaaatgggcctagaggctgggcatggtgcctcaggcctgtaatctcaggactctgggaag

SEQ ID NO: 29866 - DNA, 80 bp, synthetic construct
  misc_feature 1..80: note = Artificially Synthesized Probe
  source 1..80: mol_type = other DNA
agggtctctgctctctgatacacattcatgtgtaaaataacaggttggtagtatcaacacccaaaatagaaatttctttt

SEQ ID NO: 29867 - DNA, 80 bp, synthetic construct
  misc_feature 1..80: note = Artificially Synthesized Probe
  source 1..80: mol_type = other DNA
gtctggtagataaagcgagagcgagactccatctccaaaaaaagaaacagttatgaaaagatgctttctcgccgggtgca

SEQ ID NO: 29868 - DNA, 80 bp, synthetic construct
  misc_feature 1..80: note = Artificially Synthesized Probe
  source 1..80: mol_type = other DNA
cccagacatcaactagacaaatacctgcctttgaaagccccatttgcggaaaacagtggcttaaaaaccaattcaattat

SEQ ID NO: 29869 - DNA, 80 bp, synthetic construct
  misc_feature 1..80: note = Artificially Synthesized Probe
  source 1..80: mol_type = other DNA
ctaagcactgttgaaaaaataaaggaaaacagacttcacaaggatctccgtgctgaaagcagccttcaacaggaaggtcc

SEQ ID NO: 29870 - DNA, 80 bp, synthetic construct
  misc_feature 1..80: note = Artificially Synthesized Probe
  source 1..80: mol_type = other DNA
tatagaaacacaaaacaaggcacttggccagaggttggttctcatgcaggaactgtgtcaaatcagagtgggaaacagct

SEQ ID NO: 29871 - DNA, 80 bp, synthetic construct
  misc_feature 1..80: note = Artificially Synthesized Probe
  source 1..80: mol_type = other DNA
aaaaacaaacaaaaaaaagtgggaggtgaagcaaaattggtttgagtcacacaagggttacccctaaaacacacataatc

SEQ ID NO: 29872 - DNA, 80 bp, synthetic construct
  misc_feature 1..80: note = Artificially Synthesized Probe
  source 1..80: mol_type = other DNA
cccgctcagcgccgctgccgccgctttcgaaaccgacggcattttcagtcaaaacaatgcagcgcgcatgcgccgcgccg

SEQ ID NO: 29873 - DNA, 80 bp, synthetic construct
  misc_feature 1..80: note = Artificially Synthesized Probe
  source 1..80: mol_type = other DNA
tcccctcctagaatcttcacgtacaacattctgtttttgtttttaaagacctcagggaactagaactcggttgtgggaac

SEQ ID NO: 29874 - DNA, 80 bp, synthetic construct
  misc_feature 1..80: note = Artificially Synthesized Probe
  source 1..80: mol_type = other DNA
tttcagaattagtctgtcctaagagaaaaaaaaatacatggtgaacatcactcacttgaggacttcccataagcaaggag

SEQ ID NO: 29875 - DNA, 80 bp, synthetic construct
  misc_feature 1..80: note = Artificially Synthesized Probe
  source 1..80: mol_type = other DNA
cagtcagccagtgtctgcagggtttcaggatttggggtaggaaacagaagatctcacacatgtcgtgctgattttaaata

SEQ ID NO: 29876 - DNA, 80 bp, synthetic construct
  misc_feature 1..80: note = Artificially Synthesized Probe
  source 1..80: mol_type = other DNA
tttcaaaaggcaatcaataataagtaggttcttcttcaataacatgagcatatgcttcttaaagactgggtgacaggccg

SEQ ID NO: 29877 - DNA, 80 bp, synthetic construct
  misc_feature 1..80: note = Artificially Synthesized Probe
  source 1..80: mol_type = other DNA
ctggcgctgcaggctgtccatctcctgcctgggacagaagaaggaggaagaaggcccagatcacacaagtgccaggcaga

SEQ ID NO: 29878 - DNA, 80 bp, synthetic construct
  misc_feature 1..80: note = Artificially Synthesized Probe
  source 1..80: mol_type = other DNA
tccttccccctttatataaacctcaaaggctgtgtgtgcaagtccctcccttatataaacctcagaggctatgtatgcga

SEQ ID NO: 29879 - DNA, 80 bp, synthetic construct
  misc_feature 1..80: note = Artificially Synthesized Probe
  source 1..80: mol_type = other DNA
gccgagtcacagaccaccgctcatctgctttacaaagcacattacaacaaagtggtatttgaattcacagaacgaggaaa

SEQ ID NO: 29880 - DNA, 80 bp, synthetic construct
  misc_feature 1..80: note = Artificially Synthesized Probe
  source 1..80: mol_type = other DNA
ggcctgtgtctataaataaattctcactgtaactcaagcccctcatttacaaggggaacttagcaattacactcctttcc

SEQ ID NO: 29881 - DNA, 80 bp, synthetic construct
  misc_feature 1..80: note = Artificially Synthesized Probe
  source 1..80: mol_type = other DNA
gactggatttctctttctttctgatccacctcccatttgagattttccatctaaagaggggaaagtcacatggccaaaag

SEQ ID NO: 29882 - DNA, 80 bp, synthetic construct
  misc_feature 1..80: note = Artificially Synthesized Probe
  source 1..80: mol_type = other DNA
ctcaagtactcggcaatttgcaaaatatagatgaccctcgctgtgctgaaggtgtgaattagaccccgcccattgccagg

SEQ ID NO: 29883 - DNA, 80 bp, synthetic construct
  misc_feature 1..80: note = Artificially Synthesized Probe
  source 1..80: mol_type = other DNA
tagccaggcatggtggtgcacgcctgtagttccagctactggggaggctgaggcaggagaatcacttgaacccgggaggc

SEQ ID NO: 29884 - DNA, 80 bp, synthetic construct
  misc_feature 1..80: note = Artificially Synthesized Probe
  source 1..80: mol_type = other DNA
ctcaattacattatcatagaaaagttcttaaaggttgtggcaaagccaggtcataggaacgaaagcagcttcactgttag

SEQ ID NO: 29885 - DNA, 80 bp, synthetic construct
  misc_feature 1..80: note = Artificially Synthesized Probe
  source 1..80: mol_type = other DNA
gctctctacacagagaagggtccacagaaccacccctcttatctgccgaacacaaatgggatcatatgctattctcaagt

SEQ ID NO: 29886 - DNA, 80 bp, synthetic construct
  misc_feature 1..80: note = Artificially Synthesized Probe
  source 1..80: mol_type = other DNA
gctgggaactcaaaaactacatacaaatcaggggctgcagccgggtacaaaaagaacagaagtggtgggaactagggcaa

SEQ ID NO: 29887 - DNA, 80 bp, synthetic construct
  misc_feature 1..80: note = Artificially Synthesized Probe
  source 1..80: mol_type = other DNA
cttcctaaagcctctggattcttgaagctgaaacataccaatgtcactgtaaaattacctgcactggtgagtggagttca

SEQ ID NO: 29888 - DNA, 80 bp, synthetic construct
  misc_feature 1..80: note = Artificially Synthesized Probe
  source 1..80: mol_type = other DNA
ctcaagacaacaaaaacaaagaacaatggacaccacacaaccctgcgatggacaccacaggaccgtgcttgcttcatgat

SEQ ID NO: 29889 - DNA, 80 bp, synthetic construct
  misc_feature 1..80: note = Artificially Synthesized Probe
  source 1..80: mol_type = other DNA
ggtgaagttttgttcttcgggtctcacgcgtggcggcatgtccagggctcacgtgacctgccccacgctgccgccacagc

SEQ ID NO: 29890 - DNA, 80 bp, synthetic construct
  misc_feature 1..80: note = Artificially Synthesized Probe
  source 1..80: mol_type = other DNA
ccccaacattttacaaagcaaccaggtgagaggaagcacttgatttatttattgaatttcagacacagagtctctatcgc

SEQ ID NO: 29891 - DNA, 80 bp, synthetic construct
  misc_feature 1..80: note = Artificially Synthesized Probe
  source 1..80: mol_type = other DNA
ctcccacgcgagctcggccccgctaggctttaggggacaactgctgatggagagcccttccctgcactgaggggctggtg

SEQ ID NO: 29892 - DNA, 80 bp, synthetic construct
  misc_feature 1..80: note = Artificially Synthesized Probe
  source 1..80: mol_type = other DNA
caaaccactcttttttttttttattgagatggagtctcactctgtcacccaggctggagtgcaggggcgtgatctcagct

SEQ ID NO: 29893 - DNA, 80 bp, synthetic construct
  misc_feature 1..80: note = Artificially Synthesized Probe
  source 1..80: mol_type = other DNA
cggcaccagcgctaatccatcagccctcactttccaacaatgatggtgccggccacaccgcctactcacaggcctcagcc

SEQ ID NO: 29894 - DNA, 80 bp, synthetic construct
  misc_feature 1..80: note = Artificially Synthesized Probe
  source 1..80: mol_type = other DNA
cctgggccacctctctgtgcaggcgcgagagctccgcctcggcagtccgcttctccccgtgcacttgcatcagctcctgc

SEQ ID NO: 29895 - DNA, 80 bp, synthetic construct
  misc_feature 1..80: note = Artificially Synthesized Probe
  source 1..80: mol_type = other DNA
gttcaaccagcctggccaacaaggtgaaaaccccatctctactaaaaatacaaaaaactagccaggcgtggtggtgcatg

SEQ ID NO: 29896 - DNA, 80 bp, synthetic construct
  misc_feature 1..80: note = Artificially Synthesized Probe
  source 1..80: mol_type = other DNA
tttaaaaaaagttaaagagggccgggcgcggtgactcatacctgtaatcccagcactttgggaggccgaggagggtggat

SEQ ID NO: 29897 - DNA, 80 bp, synthetic construct
  misc_feature 1..80: note = Artificially Synthesized Probe
  source 1..80: mol_type = other DNA
actataggaggggaatgtgtctgcacagatgttacactgagggctccaagagggggatgcatgtgcatgaatattacact

SEQ ID NO: 29898 - DNA, 80 bp, synthetic construct
  misc_feature 1..80: note = Artificially Synthesized Probe
  source 1..80: mol_type = other DNA
gggctccacacagacccaccacacgggatctgcactcggagggctccacacggaccgaccgcacgggacctgcactcgga

SEQ ID NO: 29899 - DNA, 80 bp, synthetic construct
  misc_feature 1..80: note = Artificially Synthesized Probe
  source 1..80: mol_type = other DNA
tggggcggccgactccagaaatagggaagagcttgtttagggcctaggttttctgtctgaatacagaacacactgcatgc

SEQ ID NO: 29900 - DNA, 80 bp, synthetic construct
  misc_feature 1..80: note = Artificially Synthesized Probe
  source 1..80: mol_type = other DNA
agtgacagcttccttcagaaaggagggaaaacaggctcatgatttcctcttgcccttgatccttatagagtgggatttaa

SEQ ID NO: 29901 - DNA, 80 bp, synthetic construct
  misc_feature 1..80: note = Artificially Synthesized Probe
  source 1..80: mol_type = other DNA
aataatcagcatcattcctgcaaggagggttctgattcaaaacaaaacacagcagaatgcattacctggccggatttgat

SEQ ID NO: 29902 - DNA, 80 bp, synthetic construct
  misc_feature 1..80: note = Artificially Synthesized Probe
  source 1..80: mol_type = other DNA
gcatgaaggctgcttcctgatccaacatgtcagcctgagcccaggaaacttgtttttaaaaaggcaggaaaccttaatag

SEQ ID NO: 29903 - DNA, 80 bp, synthetic construct
  misc_feature 1..80: note = Artificially Synthesized Probe
  source 1..80: mol_type = other DNA
catacactgccttggggttttacaccatttcttcttctttaatttttccacaaggctatcgagtaggtgacactatcccc

SEQ ID NO: 29904 - DNA, 80 bp, synthetic construct
  misc_feature 1..80: note = Artificially Synthesized Probe
  source 1..80: mol_type = other DNA
atgagaatatttaagagatacacacagagagacggaacatgtaagaaaacacacatggtatcgatgtctgcgtctgttct

SEQ ID NO: 29905 - DNA, 80 bp, synthetic construct
  misc_feature 1..80: note = Artificially Synthesized Probe
  source 1..80: mol_type = other DNA
caggagttcaaaacctgcttaggcaacatagcgagaccctgtccttacagaaaacttttaaacaattagccaggtgtgat

SEQ ID NO: 29906 - DNA, 80 bp, synthetic construct
  misc_feature 1..80: note = Artificially Synthesized Probe
  source 1..80: mol_type = other DNA
tccaagctatgttgtaagtagaacaaatgcttttccgtattgttctttggcttaaaaaatatgtaacagtcgagtgtggt

SEQ ID NO: 29907 - DNA, 80 bp, synthetic construct
  misc_feature 1..80: note = Artificially Synthesized Probe
  source 1..80: mol_type = other DNA
taattagtctaggtgctgagactcggatcgaggttcactcgaaccattcgcctgtcggtctgggcgtctccagcacacga

SEQ ID NO: 29908 - DNA, 80 bp, synthetic construct
  misc_feature 1..80: note = Artificially Synthesized Probe
  source 1..80: mol_type = other DNA
cataacctctgttcagtgtttccatttacgacaccgatctaatacatagcgtcgattcattcacaccgagctcacggcca

SEQ ID NO: 29909 - DNA, 80 bp, synthetic construct
  misc_feature 1..80: note = Artificially Synthesized Probe
  source 1..80: mol_type = other DNA
acagtgtttggggccatctttaactgcaaaattaccccccaaagcacaaacatgtaaacatggccctggaaagaactcct

SEQ ID NO: 29910 - DNA, 80 bp, synthetic construct
  misc_feature 1..80: note = Artificially Synthesized Probe
  source 1..80: mol_type = other DNA
tcccactcctgttcacgcttgctctgagcaggccaaccacagtcttctccgtgtctgctgggcactggagtgtgagctct

SEQ ID NO: 29911 - DNA, 80 bp, synthetic construct
  misc_feature 1..80: note = Artificially Synthesized Probe
  source 1..80: mol_type = other DNA
tcggccacctgcaagtcgttgttggacgacgccaggctggcattttttgcctccagcatgttctgcaggtcagtcatggc

SEQ ID NO: 29912 - DNA, 80 bp, synthetic construct
  misc_feature 1..80: note = Artificially Synthesized Probe
  source 1..80: mol_type = other DNA
gcgctagggcagggctggggaagcacccgtctcctgcgaggacactggaaacgtgttcaaaacaccaaacgtgtacacgg

SEQ ID NO: 29913 - DNA, 80 bp, synthetic construct
  misc_feature 1..80: note = Artificially Synthesized Probe
  source 1..80: mol_type = other DNA
gctttaggtgtcacaaactggttggtttgtgtccaaggaccatgttgtatgagaaaaccatcttcgacatgaggcgtgca

SEQ ID NO: 29914 - DNA, 80 bp, synthetic construct
  misc_feature 1..80: note = Artificially Synthesized Probe
  source 1..80: mol_type = other DNA
aattaaatgttcatgtcaagactaaggatagaatcaggaagaaaagctgtgtatcacctgttccagtgcggagagccgtg

SEQ ID NO: 29915 - DNA, 80 bp, synthetic construct
  misc_feature 1..80: note = Artificially Synthesized Probe
  source 1..80: mol_type = other DNA
tgaatcttcagttctgtaatcggccagagaccggattttgcttgatttggaagtttttttctccctaggatgtgccggaa

SEQ ID NO: 29916 - DNA, 80 bp, synthetic construct
  misc_feature 1..80: note = Artificially Synthesized Probe
  source 1..80: mol_type = other DNA
cccacccccgcccccccgccccccggttcccggtctgctaagtagtgggtgttgttccttgacaccttttgctaccgctg

SEQ ID NO: 29917 - DNA, 80 bp, synthetic construct
  misc_feature 1..80: note = Artificially Synthesized Probe
  source 1..80: mol_type = other DNA
ttcaaaaaggaagaacattctgttgaactataaccaccttaaatccataatttcctccgcctgcccacatctgcttgcac

SEQ ID NO: 29918 - DNA, 80 bp, synthetic construct
  misc_feature 1..80: note = Artificially Synthesized Probe
  source 1..80: mol_type = other DNA
cctgtacacgtggctctgccttttagataacagtagcaaaattagtgaaagtactaaaagtctctgatatgcagaaataa

SEQ ID NO: 29919 - DNA, 80 bp, synthetic construct
  misc_feature 1..80: note = Artificially Synthesized Probe
  source 1..80: mol_type = other DNA
cttaaaggtataagaagaacacgctggtcattttattgatcttcttctactgaagagatccttttgaaacatgacatagg

SEQ ID NO: 29920 - DNA, 80 bp, synthetic construct
  misc_feature 1..80: note = Artificially Synthesized Probe
  source 1..80: mol_type = other DNA
aaaacctgaatgggtaaaatgccatcaaatagcaccgcatgttacagagacatcttttctaagatatggtaaactttagt

SEQ ID NO: 29921 - DNA, 80 bp, synthetic construct
  misc_feature 1..80: note = Artificially Synthesized Probe
  source 1..80: mol_type = other DNA
agacacagtggccaggcactgggtctgtgatcccatgatgagtacaccccacctggggcattcccctggtaaaacaggaa

SEQ ID NO: 29922 - DNA, 80 bp, synthetic construct
  misc_feature 1..80: note = Artificially Synthesized Probe
  source 1..80: mol_type = other DNA
tccaatccgaggtcatgctccgggacaggaggggaaaatttacaactttttagccaaaaccagaatttaaaatatctaaa

SEQ ID NO: 29923 - DNA, 80 bp, synthetic construct
  misc_feature 1..80: note = Artificially Synthesized Probe
  source 1..80: mol_type = other DNA
ggccagagctcacacatctgtaacttcaggaccccaaagtaaataaactaagttgaaaaaaatcaggaatctagactttt

SEQ ID NO: 29924 - DNA, 80 bp, synthetic construct
  misc_feature 1..80: note = Artificially Synthesized Probe
  source 1..80: mol_type = other DNA
gcttcttttctaacactgccctcagcactagttccctgagacttccttaggttgtcatggaaaccagccacacctggaga

SEQ ID NO: 29925 - DNA, 80 bp, synthetic construct
  misc_feature 1..80: note = Artificially Synthesized Probe
  source 1..80: mol_type = other DNA
ctccacgctctaaggtgaacccgcactccacacctccacactctaacgtgaacccgccctccactcctccacgctctaag

SEQ ID NO: 29926 - DNA, 80 bp, synthetic construct
  misc_feature 1..80: note = Artificially Synthesized Probe
  source 1..80: mol_type = other DNA
cacaaacacttaaaacacagctgacaatctttctagcaggcactggtaacagcagtgttaatcagagtcacagcctcaca

SEQ ID NO: 29927 - DNA, 80 bp, synthetic construct
  misc_feature 1..80: note = Artificially Synthesized Probe
  source 1..80: mol_type = other DNA
tactgtcatgcctcccgaaagaaaaaccagaataaaagcaggggtgccagacaggaagccagaccacgggcacccgacca

SEQ ID NO: 29928 - DNA, 80 bp, synthetic construct
  misc_feature 1..80: note = Artificially Synthesized Probe
  source 1..80: mol_type = other DNA
tcagcctgctcaatggagcaacaccctgactctaaaaacagtaataaaatgtttaaaatagaaaaaggggcggaggctga

SEQ ID NO: 29929 - DNA, 80 bp, synthetic construct
  misc_feature 1..80: note = Artificially Synthesized Probe
  source 1..80: mol_type = other DNA
attttaggcagggaacatgataaagacccatagatcccttcagggaaacactgctgctgccccacacgtttaatggagtt

SEQ ID NO: 29930 - DNA, 80 bp, synthetic construct
  misc_feature 1..80: note = Artificially Synthesized Probe
  source 1..80: mol_type = other DNA
gatacctgacaggagagagagacaaaatgtattatgaaacttgtcagatttcaagtatcaattacaaaattagcatttgg

SEQ ID NO: 29931 - DNA, 80 bp, synthetic construct
  misc_feature 1..80: note = Artificially Synthesized Probe
  source 1..80: mol_type = other DNA
gttggacaactcagatccagagaaacaaaactttaaaaagcaggtgccatgggatgtggtaactctatacagggtgtaca

SEQ ID NO: 29932 - DNA, 80 bp, synthetic construct
  misc_feature 1..80: note = Artificially Synthesized Probe
  source 1..80: mol_type = other DNA
actgaccccgcagcaggacgtgcctgtctttctaggggtttttactctacctgccatctagactggtcacccgtaaaaga

SEQ ID NO: 29933 - DNA, 80 bp, synthetic construct
  misc_feature 1..80: note = Artificially Synthesized Probe
  source 1..80: mol_type = other DNA
aatactggtaccctgtacatctggtcctcttgaaaatttcctagcaaaagaaaacttgcgttttgctttgtgatgtcttt

SEQ ID NO: 29934 - DNA, 80 bp, synthetic construct
  misc_feature 1..80: note = Artificially Synthesized Probe
  source 1..80: mol_type = other DNA
tctttcaaaacaagaagagggtcctgctgggagaaactggcaaggagaagctcctgcggtactacaagaacattggtctg

SEQ ID NO: 29935 - DNA, 80 bp, synthetic construct
  misc_feature 1..80: note = Artificially Synthesized Probe
  source 1..80: mol_type = other DNA
tgatacttctccctgtagggcaataagctggcagtctcggtcgattcccagtcttgcttgatttttagttaaaatttgga

SEQ ID NO: 29936 - DNA, 80 bp, synthetic construct
  misc_feature 1..80: note = Artificially Synthesized Probe
  source 1..80: mol_type = other DNA
ttaaggcaatcgggggaaaaaaagctcctcttcaatctgagtgatgtcagatgatttatttccttcttgccatttaaggt

SEQ ID NO: 29937 - DNA, 80 bp, synthetic construct
  misc_feature 1..80: note = Artificially Synthesized Probe
  source 1..80: mol_type = other DNA
cgcagacaagcattcaggagggctcgcgggcaccggcatttacagagccagctccgccgcagctgaaggcgggcgcccag

SEQ ID NO: 29938 - DNA, 80 bp, synthetic construct
  misc_feature 1..80: note = Artificially Synthesized Probe
  source 1..80: mol_type = other DNA
ttctcctccaagagaactcgctgtatacaataccaaagggcttttttgggtcccacctcctgccttttgcttttctccac

SEQ ID NO: 29939 - DNA, 80 bp, synthetic construct
  misc_feature 1..80: note = Artificially Synthesized Probe
  source 1..80: mol_type = other DNA
acaaatacccaggaaaggggtgccccacccttggtgatgaaggtgacacagacctatatgattactacccagaagaggac

SEQ ID NO: 29940 - DNA, 80 bp, synthetic construct
  misc_feature 1..80: note = Artificially Synthesized Probe
  source 1..80: mol_type = other DNA
ctccagcctcttcctgtgggtacggcctaatggccgtgtggggcctctagtggcaggaaggaggccctcagctctgagtc

SEQ ID NO: 29941 - DNA, 80 bp, synthetic construct
  misc_feature 1..80: note = Artificially Synthesized Probe
  source 1..80: mol_type = other DNA
caccatgttgcacaggctgatcttgttttctaatgtgaagggaagcgggcaacgtgctagttttacactaaggaaaatga

SEQ ID NO: 29942 - DNA, 80 bp, synthetic construct
  misc_feature 1..80: note = Artificially Synthesized Probe
  source 1..80: mol_type = other DNA
ggcagcatggcctcgtttccacagctgtagcctctgccctcctgcttccacgctccacacacgccagtctttgagtcgcc

SEQ ID NO: 29943 - DNA, 80 bp, synthetic construct
  misc_feature 1..80: note = Artificially Synthesized Probe
  source 1..80: mol_type = other DNA
tggcggtgatactcctagaagtctctgggaaccaaacaaaggctaagtgtgaaatgaaaccatattcccgccccctgtca

SEQ ID NO: 29944 - DNA, 80 bp, synthetic construct
  misc_feature 1..80: note = Artificially Synthesized Probe
  source 1..80: mol_type = other DNA
ggcctccagctctcttattcctcaagtatctcctgagactcgccaggtactcagccatgtgctgggccatgggaacccaa

SEQ ID NO: 29945 - DNA, 80 bp, synthetic construct
  misc_feature 1..80: note = Artificially Synthesized Probe
  source 1..80: mol_type = other DNA
gcgtggaaggtatgcagacaaaattggagggatcaacaggggctggatatctaagctcacagaatagcaagctgaggaat

SEQ ID NO: 29946 - DNA, 80 bp, synthetic construct
  misc_feature 1..80: note = Artificially Synthesized Probe
  source 1..80: mol_type = other DNA
ctctagcctcacaccaaggactttcttggtaagagacggacagttcggtgaagtgattaaaagcctacaggcttagataa

SEQ ID NO: 29947 - DNA, 80 bp, synthetic construct
  misc_feature 1..80: note = Artificially Synthesized Probe
  source 1..80: mol_type = other DNA
cctcaccaatacttcttgtccgtttgttttgttttaaaaatcatagtcatcctagttggcatggtgaattttatggtatg

SEQ ID NO: 29948 - DNA, 80 bp, synthetic construct
  misc_feature 1..80: note = Artificially Synthesized Probe
  source 1..80: mol_type = other DNA
gccccagtgtgtggtgttcccctccctgtgtccatgtgatctcattgttcagctgccacttacaagtgagaacatgcagt

SEQ ID NO: 29949 - DNA, 80 bp, synthetic construct
  misc_feature 1..80: note = Artificially Synthesized Probe
  source 1..80: mol_type = other DNA
caatactacatctcaaaaaaaaaaaaaaggaaaaaggatttctggttctgggtctttgaggaatcaccacactgtcttcc

SEQ ID NO: 29950 - DNA, 80 bp, synthetic construct
  misc_feature 1..80: note = Artificially Synthesized Probe
  source 1..80: mol_type = other DNA
ttgagttaatttttgtacaaggtgtaaggaacgggtccagtttctattttctgcatatggctagccaattctcccagcac

SEQ ID NO: 29951 - DNA, 80 bp, synthetic construct
  misc_feature 1..80: note = Artificially Synthesized Probe
  source 1..80: mol_type = other DNA
aatacaccttgttttgattttgatttcaacacagcgtgtggtatttgcatgccatgtgatacagtttgaatatgtgttcc

SEQ ID NO: 29952 - DNA, 80 bp, synthetic construct
  misc_feature 1..80: note = Artificially Synthesized Probe
  source 1..80: mol_type = other DNA
ttgtagacttcctgtgactctagaaccatttcaaaagagaaagttcaaaaattcagtcagaagcacacgcacacatatgc

SEQ ID NO: 29953 - DNA, 80 bp, synthetic construct
  misc_feature 1..80: note = Artificially Synthesized Probe
  source 1..80: mol_type = other DNA
gagtttcctcaccggaaaaatgagcctaaagtagcttacatcactggactgttgtggatgttaataagcatttgagctgg

SEQ ID NO: 29954 - DNA, 80 bp, synthetic construct
  misc_feature 1..80: note = Artificially Synthesized Probe
  source 1..80: mol_type = other DNA
aattctgtgcccattaaacactaattccttctctctcctctttctggcccttaacaaccaccattgtactttgtgtttct

SEQ ID NO: 29955 - DNA, 80 bp, synthetic construct
  misc_feature 1..80: note = Artificially Synthesized Probe
  source 1..80: mol_type = other DNA
tgcagcccagggcttcctgccctcccacttccttcccacctacggccccgcccctgcagcccagggcttcctgccctccc

SEQ ID NO: 29956 - DNA, 80 bp, synthetic construct
  misc_feature 1..80: note = Artificially Synthesized Probe
  source 1..80: mol_type = other DNA
cccacccaagctcacagagaggtcgagtcacccagtggttgaggaaggaggctgtgctcacgtcctagtgcttgggtgca

SEQ ID NO: 29957 - DNA, 80 bp, synthetic construct
  misc_feature 1..80: note = Artificially Synthesized Probe
  source 1..80: mol_type = other DNA
gtctcaaaaaaagacagagagagaaagcaaaagaaaggaagtaaggaagataaaaatataagctgcctaataattatggc

SEQ ID NO: 29958 - DNA, 80 bp, synthetic construct
  misc_feature 1..80: note = Artificially Synthesized Probe
  source 1..80: mol_type = other DNA
gtgcagctggccaggaattagggtggcgtgagtgaggcactctcctgggatgtaaaatttaattattcccaaacaattaa

SEQ ID NO: 29959 - DNA, 80 bp, synthetic construct
  misc_feature 1..80: note = Artificially Synthesized Probe
  source 1..80: mol_type = other DNA
gacggggtctgggaacagaaataggatattagtggaaagactggtgaaattcaaatagcctggagtttacttgatataat

SEQ ID NO: 29960 - DNA, 80 bp, synthetic construct
  misc_feature 1..80: note = Artificially Synthesized Probe
  source 1..80: mol_type = other DNA
ctgcagtgagccaagatcgcgccactgctctccaccctgggtgacgcagcaagaccctgtgtccaaaaaacaaaatatta

SEQ ID NO: 29961 - DNA, 80 bp, synthetic construct
  misc_feature 1..80: note = Artificially Synthesized Probe
  source 1..80: mol_type = other DNA
tgctttactctgtcctaataatttcttcaaaagacacacaggaatgtaatttaagtgagagaaaccggtcagaaaaagcc

SEQ ID NO: 29962 - DNA, 80 bp, synthetic construct
  misc_feature 1..80: note = Artificially Synthesized Probe
  source 1..80: mol_type = other DNA
tgaggaatgggacctgagacattgctgtcccttcgtttcctcccttcagtctcccaatattaaataatatccaagtacat

SEQ ID NO: 29963 - DNA, 80 bp, synthetic construct
  misc_feature 1..80: note = Artificially Synthesized Probe
  source 1..80: mol_type = other DNA
catctcgaggaaaaaaaaaaatgatattgccccattgcactccagactgacaacagagcaagaccctgtctcagaaaacg

SEQ ID NO: 29964 - DNA, 80 bp, synthetic construct
  misc_feature 1..80: note = Artificially Synthesized Probe
  source 1..80: mol_type = other DNA
ttctcaccggccgggcgcgctggctcacacctgtaatcccattttgggaggccaaggtgggcggatcacctgaagtcagg

SEQ ID NO: 29965 - DNA, 80 bp, synthetic construct
  misc_feature 1..80: note = Artificially Synthesized Probe
  source 1..80: mol_type = other DNA
aaagctactgaagcaacaagccagatgcagtaacctgtacaggccacacctgtaaccccaacactttgggaggccgaggt

SEQ ID NO: 29966 - DNA, 80 bp, synthetic construct
  misc_feature 1..80: note = Artificially Synthesized Probe
  source 1..80: mol_type = other DNA
aaatgcattcgacctgccacccatccatcaggagactatttactccactactgtaggggatactgacaaattaaatccat

SEQ ID NO: 29967 - DNA, 80 bp, synthetic construct
  misc_feature 1..80: note = Artificially Synthesized Probe
  source 1..80: mol_type = other DNA
ggcagtccatgcctgtccttcagcatttcccagatctgaccctcaggactcaccaagacagaagagggcggtcggggatg

SEQ ID NO: 29968 - DNA, 80 bp, synthetic construct
  misc_feature 1..80: note = Artificially Synthesized Probe
  source 1..80: mol_type = other DNA
gaggttaaataggagttcaccaggcagagaagggctcagtgggggcctagggtggagacacaagcacagaggccccaggg

SEQ ID NO: 29969 - DNA, 80 bp, synthetic construct
  misc_feature 1..80: note = Artificially Synthesized Probe
  source 1..80: mol_type = other DNA
cctacacgtgggccaccctctgctctctcccatcccgagaaaagcagagcaaatcgccgcatccaacccgagggccggcc

SEQ ID NO: 29970 - DNA, 80 bp, synthetic construct
  misc_feature 1..80: note = Artificially Synthesized Probe
  source 1..80: mol_type = other DNA
ggagtgtcttgggcgatccagccagcgcaggccccccggcccggttgcttcctcagttcccggctgtgtccttggtgtcc

SEQ ID NO: 29971 - DNA, 80 bp, synthetic construct
  misc_feature 1..80: note = Artificially Synthesized Probe
  source 1..80: mol_type = other DNA
aagcaggctagagcagtggaggggtggagttgatgaaaggagaggagtagatgagatggaatttttccagcctcatcctg

SEQ ID NO: 29972 - DNA, 80 bp, synthetic construct
  misc_feature 1..80: note = Artificially Synthesized Probe
  source 1..80: mol_type = other DNA
ttaaatctttgctatccagagttaggactgtccccggacttcctaacttgcctctgctgtcaggtgtaccctctggtccg

SEQ ID NO: 29973 - DNA, 80 bp, synthetic construct
  misc_feature 1..80: note = Artificially Synthesized Probe
  source 1..80: mol_type = other DNA
actgtaagctctgcctcctgggttcactccattctcttgcctcagcctctcaagtagctgggattacaggtgcccgccac

SEQ ID NO: 29974 - DNA, 80 bp, synthetic construct
  misc_feature 1..80: note = Artificially Synthesized Probe
  source 1..80: mol_type = other DNA
ggcctggtgatagagggagactccatctcaaaaaaaaaaaaaaaaaaaaaaaattagcctggtgaggtggcgggtgcctg

SEQ ID NO: 29975 - DNA, 80 bp, synthetic construct
  misc_feature 1..80: note = Artificially Synthesized Probe
  source 1..80: mol_type = other DNA
agaggatggttttagacaaagaacaacagccgtccatctggtcaccaaaataacctactagaaaaaggcagtctcagttt

SEQ ID NO: 29976 - DNA, 80 bp, synthetic construct
  misc_feature 1..80: note = Artificially Synthesized Probe
  source 1..80: mol_type = other DNA
ctccagtagaacagatactgttcagcactaccagggttgtgctaggtgtggaagctcagtgaaatcttaagagttgacag

SEQ ID NO: 29977 - DNA, 80 bp, synthetic construct
  misc_feature 1..80: note = Artificially Synthesized Probe
  source 1..80: mol_type = other DNA
atcttggttttcctcaatagcccttaccaccagcagacacacatcatctgttgtacttgcttatttggcacatatgtatc

SEQ ID NO: 29978 - DNA, 80 bp, synthetic construct
  misc_feature 1..80: note = Artificially Synthesized Probe
  source 1..80: mol_type = other DNA
gagcaggggctcctttcgcagttgtgaagagaggccttggctgacgcagcaagcgggaaagggctgtccctttccatccg

SEQ ID NO: 29979 - DNA, 80 bp, synthetic construct
  misc_feature 1..80: note = Artificially Synthesized Probe
  source 1..80: mol_type = other DNA
ttccttccctttggggtttatctgactgttagccgcatcaccctgtgtcttcaccccttctcttgggcaatgcttttgct

SEQ ID NO: 29980 - DNA, 80 bp, synthetic construct
  misc_feature 1..80: note = Artificially Synthesized Probe
  source 1..80: mol_type = other DNA
cagcaaacaccatggacacacattgggaggatgaggttacttcaggcttcatgagcactcatcttcggaaagcgtttatt

SEQ ID NO: 29981 - DNA, 80 bp, synthetic construct
  misc_feature 1..80: note = Artificially Synthesized Probe
  source 1..80: mol_type = other DNA
atgaagtctttctgccaggtaagtggctactgggccggactcacccttggccgtgtgtgtgagttatttgggaatctggg

SEQ ID NO: 29982 - DNA, 80 bp, synthetic construct
  misc_feature 1..80: note = Artificially Synthesized Probe
  source 1..80: mol_type = other DNA
ctgcgcctggccggaaggagctttttctaatctcttttgtcatacgcccttatcacccagtctagaaacagataaaacat

SEQ ID NO: 29983 - DNA, 80 bp, synthetic construct
  misc_feature 1..80: note = Artificially Synthesized Probe
  source 1..80: mol_type = other DNA
gcagtggctcacgcctgtaatcccagcactctgggaggctgaggcaggtggatcatgtgaggtcgggagtttgagatcag

SEQ ID NO: 29984 - DNA, 80 bp, synthetic construct
  misc_feature 1..80: note = Artificially Synthesized Probe
  source 1..80: mol_type = other DNA
cttacaaagtagagtcagcacatattcatatactgtcatcctgggcaccaatagggattagggagctatagttggattga

SEQ ID NO: 29985 - DNA, 80 bp, synthetic construct
  misc_feature 1..80: note = Artificially Synthesized Probe
  source 1..80: mol_type = other DNA
cagcctgggcaacataacaagaccctgcctttaacaaaaatttaaaaattagccagctgtggtggtgtgtacctatagtc

SEQ ID NO: 29986 - DNA, 80 bp, synthetic construct
  misc_feature 1..80: note = Artificially Synthesized Probe
  source 1..80: mol_type = other DNA
tcacttcaggtcaggagtttgagaccagcctggcctacatggcaaaacccgtctctactaaaaatacaaacaaaattagc

SEQ ID NO: 29987 - DNA, 80 bp, synthetic construct
  misc_feature 1..80: note = Artificially Synthesized Probe
  source 1..80: mol_type = other DNA
actctttgatttctataataccccgttggtgttacagatcagctctggtcatcatgggaagggactgcatcagtgggtta

SEQ ID NO: 29988 - DNA, 80 bp, synthetic construct
  misc_feature 1..80: note = Artificially Synthesized Probe
  source 1..80: mol_type = other DNA
taggcatgagccactgagtccggcctgcatatttaggtttttattatgaccacactgtacttctgataccaaaatctgta

SEQ ID NO: 29989 - DNA, 80 bp, synthetic construct
  misc_feature 1..80: note = Artificially Synthesized Probe
  source 1..80: mol_type = other DNA
gttttcaacatttcacatctcttggtctctggcatagcagattctgccgagttatccctggttttgcaaattctgacagt

SEQ ID NO: 29990 - DNA, 80 bp, synthetic construct
  misc_feature 1..80: note = Artificially Synthesized Probe
  source 1..80: mol_type = other DNA
taaaaatacaaaaaaattagctaggcatgctggtggcgcaggcttgtagtcccagctactcaggagactgaggcatgaga

SEQ ID NO: 29991 - DNA, 80 bp, synthetic construct
  misc_feature 1..80: note = Artificially Synthesized Probe
  source 1..80: mol_type = other DNA
ctagcagcaaataaggttgactgatgaaatcctgaacacatcagtttgaacctttgtgtcctgaccacacccgctcgcct

SEQ ID NO: 29992 - DNA, 80 bp, synthetic construct
  misc_feature 1..80: note = Artificially Synthesized Probe
  source 1..80: mol_type = other DNA
tttaaagagctggaatctcaggaggttatgtggcgtcactgtcactgacctgcaaatactgctccatgggacagctgggc

SEQ ID NO: 29993 - DNA, 80 bp, synthetic construct
  misc_feature 1..80: note = Artificially Synthesized Probe
  source 1..80: mol_type = other DNA
acatgctaggtaggggtagaggatgcattccatttttcacttaaggacataaagccccaatgaagggaggtgacattttg

SEQ ID NO: 29994 - DNA, 80 bp, synthetic construct
  misc_feature 1..80: note = Artificially Synthesized Probe
  source 1..80: mol_type = other DNA
cgccataaggctggctaaccatagcactgttgcctgcctgcaactgactggtcagtagggcttctcctcctatgtggaat

SEQ ID NO: 29995 - DNA, 80 bp, synthetic construct
  misc_feature 1..80: note = Artificially Synthesized Probe
  source 1..80: mol_type = other DNA
cgctcacagagttgaggttgtgagttattctcagtgatgacctttctctgaactgcagccaccatctgtaaaggccaagg

SEQ ID NO: 29996 - DNA, 80 bp, synthetic construct
  misc_feature 1..80: note = Artificially Synthesized Probe
  source 1..80: mol_type = other DNA
ccttggaagaattgacgagaatcactcaagtcattttctgcatcctgtggctcagatgcggaacactggtcaagagagac

SEQ ID NO: 29997 - DNA, 80 bp, synthetic construct
  misc_feature 1..80: note = Artificially Synthesized Probe
  source 1..80: mol_type = other DNA
ctgggatctctggccggttccgaaaagtgaggatcaggtagtgggtggctgattgcacaagtttagaacccaggattagg

SEQ ID NO: 29998 - DNA, 80 bp, synthetic construct
  misc_feature 1..80: note = Artificially Synthesized Probe
  source 1..80: mol_type = other DNA
ggctctggtttgtatcccaagaccgagaagctgtgttaagcatggtgggtagagtttgtcaggtgacatctatgaaacca

SEQ ID NO: 29999 - DNA, 80 bp, synthetic construct
  misc_feature 1..80: note = Artificially Synthesized Probe
  source 1..80: mol_type = other DNA
aagctgagtgtgttcatgagacctaaaaagtcatagtcaagcccaggtaagaagaaccaagtgtgttggatgaggtgtaa

SEQ ID NO: 30000 - DNA, 80 bp, synthetic construct
  misc_feature 1..80: note = Artificially Synthesized Probe
  source 1..80: mol_type = other DNA
tagacaaaactggtctgccaggagtagtctcttgaaggagagctgaggagttaggttgaatgcaggtagatagagttggc

SEQ ID NO: 30001 - DNA, 80 bp, synthetic construct
  misc_feature 1..80: note = Artificially Synthesized Probe
  source 1..80: mol_type = other DNA
agatgtctggaacccatctttgacaggtatataactctgtagcctgaggcactggagttggacacaaataggcagaacta

SEQ ID NO: 30002 - DNA, 80 bp, synthetic construct
  misc_feature 1..80: note = Artificially Synthesized Probe
  source 1..80: mol_type = other DNA
gtgttggtctgcatccaagatggcattgtgctccagttgacacagggtctgagttaaaagtgaggaaagttgccaggcgc

SEQ ID NO: 30003 - DNA, 80 bp, synthetic construct
  misc_feature 1..80: note = Artificially Synthesized Probe
  source 1..80: mol_type = other DNA
ctgtctcttaaaaaaaaaagaaaaaaatagaactgcatctgttagatgagatgtgagagcctatgtcaagcatgatgtag

SEQ ID NO: 30004 - DNA, 80 bp, synthetic construct
  misc_feature 1..80: note = Artificially Synthesized Probe
  source 1..80: mol_type = other DNA
aatgtagctgtgggtttttaatatctgaggagacctagccaagtgtagcagagagctgctgggtctttcattgtccaagg

SEQ ID NO: 30005 - DNA, 80 bp, synthetic construct
  misc_feature 1..80: note = Artificially Synthesized Probe
  source 1..80: mol_type = other DNA
acaagtatgaggatctgtgtccatcagtatctgaggaggtgggatcgggtcctggtatgaggatctgggtctgtccatgt

SEQ ID NO: 30006 - DNA, 80 bp, synthetic construct
  misc_feature 1..80: note = Artificially Synthesized Probe
  source 1..80: mol_type = other DNA
ctgtcagtttctgaggaggtaggatctggccctagtaagaagatctcagtctgtcaatttctgaggaggttggatctggc

SEQ ID NO: 30007 - DNA, 80 bp, synthetic construct
  misc_feature 1..80: note = Artificially Synthesized Probe
  source 1..80: mol_type = other DNA
atctcagggaagaccacggtaagctcttcagtttgtcttgtggctgtggtcagtcatctgtagtctgccctgttggtctt

SEQ ID NO: 30008 - DNA, 80 bp, synthetic construct
  misc_feature 1..80: note = Artificially Synthesized Probe
  source 1..80: mol_type = other DNA
gccctgctgggtatctggtacatcaactgctttgggtgtgagacacacgccatgctgccctatgaccagtacctgcaccg

SEQ ID NO: 30009 - DNA, 80 bp, synthetic construct
  misc_feature 1..80: note = Artificially Synthesized Probe
  source 1..80: mol_type = other DNA
gagccccccgagaggcttagcaggccctctcctagtcacattatgtcccagaaagcttttccacacctgtccctgctttt

SEQ ID NO: 30010 - DNA, 80 bp, synthetic construct
  misc_feature 1..80: note = Artificially Synthesized Probe
  source 1..80: mol_type = other DNA
ggagcaggatttgcgtacagtgtgtgaaggatcaagacttgcaggaagagggttgggttttttttctttcttttcctttc

SEQ ID NO: 30011 - DNA, 80 bp, synthetic construct
  misc_feature 1..80: note = Artificially Synthesized Probe
  source 1..80: mol_type = other DNA
ggtgcattggttggcaatcacgttagttttctattcctgccgtaacaaatgataacaaacatggaggcttaaaacaacac

SEQ ID NO: 30012 - DNA, 80 bp, synthetic construct
  misc_feature 1..80: note = Artificially Synthesized Probe
  source 1..80: mol_type = other DNA
ccttctctgaagctttgattctgtcttgccacttctgttgcatctctctgacttgtttaccttcctcttctacattttgc

SEQ ID NO: 30013 - DNA, 80 bp, synthetic construct
  misc_feature 1..80: note = Artificially Synthesized Probe
  source 1..80: mol_type = other DNA
gggcgatgatgcctttcctccttaggatcttagtattatttttttttcgagacaccgtttcactttgttgccccggctgg

SEQ ID NO: 30014 - DNA, 80 bp, synthetic construct
  misc_feature 1..80: note = Artificially Synthesized Probe
  source 1..80: mol_type = other DNA
tgccacataaggtcagcacttctgcatttggctttggggtgcatgctggagttggaggtgtgaagctatggcaccaggca

SEQ ID NO: 30015 - DNA, 80 bp, synthetic construct
  misc_feature 1..80: note = Artificially Synthesized Probe
  source 1..80: mol_type = other DNA
gaagtgtttttgtgcagctgacttttctgacccatgttcacgttgttcacatcccatgtagaaaaataaagatgccacgg

SEQ ID NO: 30016 - DNA, 80 bp, synthetic construct
  misc_feature 1..80: note = Artificially Synthesized Probe
  source 1..80: mol_type = other DNA
agccagtaatcctcttgcctcagcctcccaagtagttgagactacaggttgtaccactatgccctgctagttttttcatt

SEQ ID NO: 30017 - DNA, 80 bp, synthetic construct
  misc_feature 1..80: note = Artificially Synthesized Probe
  source 1..80: mol_type = other DNA
aggcgtgagtcaccgcgcccggctcattttaaaatttttgtagatcagtgtactgttgtaaaaaaaaaaaaataagaaaa

SEQ ID NO: 30018 - DNA, 80 bp, synthetic construct
  misc_feature 1..80: note = Artificially Synthesized Probe
  source 1..80: mol_type = other DNA
cagctacatgcccgccctgcagagctttaaacaggacggggcctggggccatctttgtttctgcttccaggttctcctgc

SEQ ID NO: 30019 - DNA, 80 bp, synthetic construct
  misc_feature 1..80: note = Artificially Synthesized Probe
  source 1..80: mol_type = other DNA
gatgcatctgtagccagtggctgcagtcacatattccatctgggactggggagggacacggaaggtggactcaggaaatc

SEQ ID NO: 30020 - DNA, 80 bp, synthetic construct
  misc_feature 1..80: note = Artificially Synthesized Probe
  source 1..80: mol_type = other DNA
agcatgtacccgaatcatgcccccagccccccttagcctgctgggttcagcccctgctgcttccagatctcagcctctaa

SEQ ID NO: 30021 - DNA, 80 bp, synthetic construct
  misc_feature 1..80: note = Artificially Synthesized Probe
  source 1..80: mol_type = other DNA
tggattcgcacaaagtcacacacactcactggcacaggcaccagtgacaccccctcaggacgagagggcccgtgggctag

SEQ ID NO: 30022 - DNA, 80 bp, synthetic construct
  misc_feature 1..80: note = Artificially Synthesized Probe
  source 1..80: mol_type = other DNA
gccccaggccacaaagagggagcaggtgaaaaataacctggaagcctcagaggaccacaagatcagcaagagtccacagg

SEQ ID NO: 30023 - DNA, 80 bp, synthetic construct
  misc_feature 1..80: note = Artificially Synthesized Probe
  source 1..80: mol_type = other DNA
tgtccccaggggtgtggggacaggagtgagaggaagggggtcccagggtccagaaagtgtccccagggtggtagggacag

SEQ ID NO: 30024 - DNA, 80 bp, synthetic construct
  misc_feature 1..80: note = Artificially Synthesized Probe
  source 1..80: mol_type = other DNA
gagacacgagggggtcccagagtctagaaagtgtccccagcggggtggggacaggggtgggagacacgagggggtcccag

SEQ ID NO: 30025 - DNA, 80 bp, synthetic construct
  misc_feature 1..80: note = Artificially Synthesized Probe
  source 1..80: mol_type = other DNA
tggctcagcaaagccctgtccacagacacctgccccccagcctggaccgcccctgtgggctccactcccctccttgcccc

SEQ ID NO: 30026 - DNA, 80 bp, synthetic construct
  misc_feature 1..80: note = Artificially Synthesized Probe
  source 1..80: mol_type = other DNA
cggactcccatcacacactcacccctgcgcacccaactgcctgctttcactcacaggtgcatgcacacattcccatcaca

SEQ ID NO: 30027 - DNA, 80 bp, synthetic construct
  misc_feature 1..80: note = Artificially Synthesized Probe
  source 1..80: mol_type = other DNA
ctgcatattttctctgtgcacattattcatcagagtaaaaaaaggaactatgaaaacctcgaccaactgtcctatgacaa

SEQ ID NO: 30028 - DNA, 80 bp, synthetic construct
  misc_feature 1..80: note = Artificially Synthesized Probe
  source 1..80: mol_type = other DNA
tggaggcccgggtcatcatcctttctgccaggtgaggctgggcagggccctacacactccacacaggatggtacctgagc

SEQ ID NO: 30029 - DNA, 80 bp, synthetic construct
  misc_feature 1..80: note = Artificially Synthesized Probe
  source 1..80: mol_type = other DNA
gaatctccccagcccaaggtagggttgttgcttagagctgcccacggggccttacatgctcctcctgcagctgctataaa

SEQ ID NO: 30030 - DNA, 80 bp, synthetic construct
  misc_feature 1..80: note = Artificially Synthesized Probe
  source 1..80: mol_type = other DNA
ccagaaaaaagaccagcccagggaaagcccctcccagaaaaaaagacccgcccaggaaaaagctctggccagataaaagc

SEQ ID NO: 30031 - DNA, 80 bp, synthetic construct
  misc_feature 1..80: note = Artificially Synthesized Probe
  source 1..80: mol_type = other DNA
cccagccacttgtggcctcttctgttattttctgaattgtttacacttcccttactcatcacagagcttgagagaaattc

SEQ ID NO: 30032 - DNA, 80 bp, synthetic construct
  misc_feature 1..80: note = Artificially Synthesized Probe
  source 1..80: mol_type = other DNA
gcacaaatgtatgtacacacaccatagtcacaccatgcatcatctctacccacacatgcagaattgtgtataggtcatac

SEQ ID NO: 30033 - DNA, 80 bp, synthetic construct
  misc_feature 1..80: note = Artificially Synthesized Probe
  source 1..80: mol_type = other DNA
ctcagcctcccgagtagctggaattacaggtgcaggccaccatgcctggctaagttttgtatttttagtagagactgggt

SEQ ID NO: 30034 - DNA, 80 bp, synthetic construct
  misc_feature 1..80: note = Artificially Synthesized Probe
  source 1..80: mol_type = other DNA
ttacaactgttttgctcctaatcattccaccacatcacatgtcatggacctgaattgcgtcaagaagacgggcttgtctg

SEQ ID NO: 30035 - DNA, 80 bp, synthetic construct
  misc_feature 1..80: note = Artificially Synthesized Probe
  source 1..80: mol_type = other DNA
ttcccctcgggacacagagatattgtgaaagttaaacaacataatccccgtaaaacacttcgagcagtgcctggtatctg

SEQ ID NO: 30036 - DNA, 80 bp, synthetic construct
  misc_feature 1..80: note = Artificially Synthesized Probe
  source 1..80: mol_type = other DNA
gctctgagtcgcatgctcgcctaggcatcctcgggctgcagctcatcaacggcaagaacgagtcggcccacatcagcgac

SEQ ID NO: 30037 - DNA, 80 bp, synthetic construct
  misc_feature 1..80: note = Artificially Synthesized Probe
  source 1..80: mol_type = other DNA
gcacacacacgacacacatacacagaaccatgtgtgcacacagactcaggcacatgacacacatgtgacacaagcacatg

SEQ ID NO: 30038 - DNA, 80 bp, synthetic construct
  misc_feature 1..80: note = Artificially Synthesized Probe
  source 1..80: mol_type = other DNA
ccctctggcctgaaggaggagggtgcggtgaggtcaatgaaagccactaaaggaagtgggggtggggcctgcttcccctg

SEQ ID NO: 30039 - DNA, 80 bp, synthetic construct
  misc_feature 1..80: note = Artificially Synthesized Probe
  source 1..80: mol_type = other DNA
ggaaaatgtaatgaaagttttataaagcaaatcaacttcttcaatggctcctgattcccctggggataaaagacaaaatg

SEQ ID NO: 30040 - DNA, 80 bp, synthetic construct
  misc_feature 1..80: note = Artificially Synthesized Probe
  source 1..80: mol_type = other DNA
gacgatgctgacggtggctggggaggacgtgtcctgaacacttgggctcgtgaagaagctccagagaggggcagtggccg

SEQ ID NO: 30041 - DNA, 80 bp, synthetic construct
  misc_feature 1..80: note = Artificially Synthesized Probe
  source 1..80: mol_type = other DNA
gcgagctgggtagggtcttggggagaagacccccggagtgctctagggcggcttcagtcgggggtacctgtggcgggagc

SEQ ID NO: 30042 - DNA, 80 bp, synthetic construct
  misc_feature 1..80: note = Artificially Synthesized Probe
  source 1..80: mol_type = other DNA
ggggagggaatgcgaggtgagctggggtcggcctcggttaggggcctggggagccgccgccgcgatccctgccctccgac

SEQ ID NO: 30043 - DNA, 80 bp, synthetic construct
  misc_feature 1..80: note = Artificially Synthesized Probe
  source 1..80: mol_type = other DNA
tccctggccagcaactgaggctctgggtcccggcacacaggggtcttcatgctggtagctgggggcatcgtggccgggat

SEQ ID NO: 30044 - DNA, 80 bp, synthetic construct
  misc_feature 1..80: note = Artificially Synthesized Probe
  source 1..80: mol_type = other DNA
cgggcacaggccacctggccatcagacctgaggccagagtcccgggagctgcctctgtcactccaattccacctcgacac

SEQ ID NO: 30045 - DNA, 80 bp, synthetic construct
  misc_feature 1..80: note = Artificially Synthesized Probe
  source 1..80: mol_type = other DNA
ccagcgtggccccatcctggactcctcagctgccgggaggccacaccacttctctgttatgtccccgtttctctcgcctc

SEQ ID NO: 30046 - DNA, 80 bp, synthetic construct
  misc_feature 1..80: note = Artificially Synthesized Probe
  source 1..80: mol_type = other DNA
aggacttggcatcaagcaagccaaatcccgagatgaagccaccagggtgccccaagagggacccatgaggcctggctgct

SEQ ID NO: 30047 - DNA, 80 bp, synthetic construct
  misc_feature 1..80: note = Artificially Synthesized Probe
  source 1..80: mol_type = other DNA
atttctattttgcagcagtaccatcccactgatatcacgggcccgctcaacctctcagatccctcggtcagcaccgtggt

SEQ ID NO: 30048 - DNA, 80 bp, synthetic construct
  misc_feature 1..80: note = Artificially Synthesized Probe
  source 1..80: mol_type = other DNA
ctcctctcctcgtccggcctgcagcccagaacgggcctccccgggggtccccggacgctggctcgggactgtcttcaacc

SEQ ID NO: 30049 - DNA, 80 bp, synthetic construct
  misc_feature 1..80: note = Artificially Synthesized Probe
  source 1..80: mol_type = other DNA
ggagtttgagagtgtgtgcttggagcagcccatcggcaagaagctctttcagcagttcctacaatcggcagagaagcacc

SEQ ID NO: 30050 - DNA, 80 bp, synthetic construct
  misc_feature 1..80: note = Artificially Synthesized Probe
  source 1..80: mol_type = other DNA
atcgcagcgaatgcaggaggaactgaggcaggacggaggcagcctcgctctgatgacagtttctgtgaggcagagcctgg

SEQ ID NO: 30051 - DNA, 80 bp, synthetic construct
  misc_feature 1..80: note = Artificially Synthesized Probe
  source 1..80: mol_type = other DNA
tcacatgtctggttttctgaaatgggggtgcaggcatgttttgaagtcatttgcaattgctttgtgaaaggcgcatttaa

SEQ ID NO: 30052 - DNA, 80 bp, synthetic construct
  misc_feature 1..80: note = Artificially Synthesized Probe
  source 1..80: mol_type = other DNA
ctgtaaaatggggagagataatatctgagtccagagactgtccggagattaagacaatacgtgtgaaatacctgcagtgt

SEQ ID NO: 30053 - DNA, 80 bp, synthetic construct
  misc_feature 1..80: note = Artificially Synthesized Probe
  source 1..80: mol_type = other DNA
caaaacgaccagaacgctggccgagagacatggttctgaggccccagctctgtctttccatgattttactccccattaaa

SEQ ID NO: 30054 - DNA, 80 bp, synthetic construct
  misc_feature 1..80: note = Artificially Synthesized Probe
  source 1..80: mol_type = other DNA
gtgtgtggtatgtgtggtattgtgtgtggcgtatgtgtgtggtatctgtatggtgtggtacatggtatgtgtggtaaatt

SEQ ID NO: 30055 - DNA, 80 bp, synthetic construct
  misc_feature 1..80: note = Artificially Synthesized Probe
  source 1..80: mol_type = other DNA
gcgtctgtgtggttgtgcatttgtgtgcatgtgagtgttgtgaaccctgatatctgaggcaggtaccagttaatttagaa

SEQ ID NO: 30056 - DNA, 80 bp, synthetic construct
  misc_feature 1..80: note = Artificially Synthesized Probe
  source 1..80: mol_type = other DNA
gcagtgctgtcgcctgatggggtttgtgtgcggtggtgttttgggtcctcccatgctggtgtttaggcactgggcgtatt

SEQ ID NO: 30057 - DNA, 80 bp, synthetic construct
  misc_feature 1..80: note = Artificially Synthesized Probe
  source 1..80: mol_type = other DNA
caggctgggaggccggtgtcagttcagcaaagccgcagggtccgcatccttcttcctggcaccctcgcgccctcccacgc

SEQ ID NO: 30058 - DNA, 80 bp, synthetic construct
  misc_feature 1..80: note = Artificially Synthesized Probe
  source 1..80: mol_type = other DNA
gtgcacagggcggggccggttatgcgcggtcctagtttgaggtcaggggcgggatccaggggcgtgcacagggcggggcc

SEQ ID NO: 30059 - DNA, 80 bp, synthetic construct
  misc_feature 1..80: note = Artificially Synthesized Probe
  source 1..80: mol_type = other DNA
tcgtgtgagcagttcctccccggagtctgggcagaattctgacgtccgtgtaatcctggaccagtagggcatattcaggg

SEQ ID NO: 30060 - DNA, 80 bp, synthetic construct
  misc_feature 1..80: note = Artificially Synthesized Probe
  source 1..80: mol_type = other DNA
acccatggcgatgaggagtacccatggcgatgaggagtacccatggcgatgaggacccatggcgatgaggagtacccatg

SEQ ID NO: 30061 - DNA, 80 bp, synthetic construct
  misc_feature 1..80: note = Artificially Synthesized Probe
  source 1..80: mol_type = other DNA
acagcccggctggtggggtctgcagggaaccacaaaaggtggacaaggcccggcaggtgggcaagccttagccagaggtg

SEQ ID NO: 30062 - DNA, 80 bp, synthetic construct
  misc_feature 1..80: note = Artificially Synthesized Probe
  source 1..80: mol_type = other DNA
tggtgtccgtgcaaaggtgaccttggcagatgaatgactgcatgagagcagctgcacacagagctgtccctccgccctct

SEQ ID NO: 30063 - DNA, 80 bp, synthetic construct
  misc_feature 1..80: note = Artificially Synthesized Probe
  source 1..80: mol_type = other DNA
catgatctgaccagctcaagaggaaaattcaaaagagaatgatgttggattctccccagtaaaagagtccaggaaggctg

SEQ ID NO: 30064 - DNA, 80 bp, synthetic construct
  misc_feature 1..80: note = Artificially Synthesized Probe
  source 1..80: mol_type = other DNA
gccaccagaactgcaaatagggataacattgggaggtgccagtcccttattcaagacaagtggagaaaagctggcttttt

SEQ ID NO: 30065 - DNA, 80 bp, synthetic construct
  misc_feature 1..80: note = Artificially Synthesized Probe
  source 1..80: mol_type = other DNA
cttctgcgaggcgctgctggagaaggacccggagaagcgcctggggttcagagatgagacctgcgacaagctccgtgccc

SEQ ID NO: 30066 - DNA, 80 bp, synthetic construct
  misc_feature 1..80: note = Artificially Synthesized Probe
  source 1..80: mol_type = other DNA
tgtgtgcgtgtgtgtatgtgtgcatacagtgtgcgtgtgtgcatgtgtgcatacgtgtgtgcgtgtgtgtgcatacgtgt

SEQ ID NO: 30067 - DNA, 80 bp, synthetic construct
  misc_feature 1..80: note = Artificially Synthesized Probe
  source 1..80: mol_type = other DNA
gtctgtgttttctgtctcccacagggatgctgatgccccctttcatcccagactccaaaactgtctacgcaaaggatatt

SEQ ID NO: 30068 - DNA, 80 bp, synthetic construct
  misc_feature 1..80: note = Artificially Synthesized Probe
  source 1..80: mol_type = other DNA
aagttcccacccctgagctggggagctgaaaatgttttctgtcttgaccctgagtcccggaagcacctcagctgctcttg

SEQ ID NO: 30069 - DNA, 80 bp, synthetic construct
  misc_feature 1..80: note = Artificially Synthesized Probe
  source 1..80: mol_type = other DNA
ccacaattttggagatttgctggctgcagccaaaatggggacccaactccctcctatgtggttttagagcttctggaggg

SEQ ID NO: 30070 - DNA, 80 bp, synthetic construct
  misc_feature 1..80: note = Artificially Synthesized Probe
  source 1..80: mol_type = other DNA
tgggggtgtgggcgggtagaggaggcaacgggtacgtgcagtgtaaactgggggcttccctggtgcagacaaagtcaggg

SEQ ID NO: 30071 - DNA, 80 bp, synthetic construct
  misc_feature 1..80: note = Artificially Synthesized Probe
  source 1..80: mol_type = other DNA
ctctgctcttgcttatgggaaggggatgctggggagcctggtggcccaactgagcttcgccggtttcccatccatccagc

SEQ ID NO: 30072 - DNA, 80 bp, synthetic construct
  misc_feature 1..80: note = Artificially Synthesized Probe
  source 1..80: mol_type = other DNA
ctccttcctttcaacttgaacttctcatctccctggaaactagtcaatgttcattgttttcttctgccaccccattagaa

SEQ ID NO: 30073 - DNA, 80 bp, synthetic construct
  misc_feature 1..80: note = Artificially Synthesized Probe
  source 1..80: mol_type = other DNA
gaaccgtgcccagcacattatacctattgtgtgaaatttgaattttataacattccagtaaggtaacagaattatctcgc

SEQ ID NO: 30074 - DNA, 80 bp, synthetic construct
  misc_feature 1..80: note = Artificially Synthesized Probe
  source 1..80: mol_type = other DNA
ccaacgggcttctgagcctagaatctgtttccctttcccatcaagaaatctgcttgctcagctagttcccatcagctctg

SEQ ID NO: 30075 - DNA, 80 bp, synthetic construct
  misc_feature 1..80: note = Artificially Synthesized Probe
  source 1..80: mol_type = other DNA
attccactttcatccaggttttactgagacattgggtgagtgtgttcagagcccctttgttctgctggaggtcccttctg

SEQ ID NO: 30076 - DNA, 80 bp, synthetic construct
  misc_feature 1..80: note = Artificially Synthesized Probe
  source 1..80: mol_type = other DNA
gtaaagcctcaaccacatttgctgtgtgtcttgtcttatttgctcctggccatctacccagactgtctgtctgtctgtca

SEQ ID NO: 30077 - DNA, 80 bp, synthetic construct
  misc_feature 1..80: note = Artificially Synthesized Probe
  source 1..80: mol_type = other DNA
aaaccatatcagctggggatagaattctatgatgaaaaccttcagacctctaatagatttactcgctcttttctagaatt

SEQ ID NO: 30078 - DNA, 80 bp, synthetic construct
  misc_feature 1..80: note = Artificially Synthesized Probe
  source 1..80: mol_type = other DNA
gttaaaaacccctaagatcctactgtatccccactagaatggctgatattgaaaggaccgacaattgttggtgatttatg

SEQ ID NO: 30079 - DNA, 80 bp, synthetic construct
  misc_feature 1..80: note = Artificially Synthesized Probe
  source 1..80: mol_type = other DNA
tcatgcctacttctttggataggtgagactggtgtgcatgtatactcttagattgtaccattttttctctttaacatttt

SEQ ID NO: 30080 - DNA, 80 bp, synthetic construct
  misc_feature 1..80: note = Artificially Synthesized Probe
  source 1..80: mol_type = other DNA
gtaaagggtgagactggtttaatggtataacagataatttgattgctctccagagacaataacttaatttatggtgccac

SEQ ID NO: 30081 - DNA, 80 bp, synthetic construct
  misc_feature 1..80: note = Artificially Synthesized Probe
  source 1..80: mol_type = other DNA
aaactgtcaaggtctagagagaagaaaaaacagaggaagggtgaatttgacctctctgactgggacatccatctccacct

SEQ ID NO: 30082 - DNA, 80 bp, synthetic construct
  misc_feature 1..80: note = Artificially Synthesized Probe
  source 1..80: mol_type = other DNA
tattatatatttgacttttggccacccctctgggggtgttaaatgcagggagggtctagtcaagccattacaagttggca

SEQ ID NO: 30083 - DNA, 80 bp, synthetic construct
  misc_feature 1..80: note = Artificially Synthesized Probe
  source 1..80: mol_type = other DNA
agaaattgtagaaagattagaaacgactctgattaccctagatactaatgtttccacatgggctttctgccccccagagt

SEQ ID NO: 30084 - DNA, 80 bp, synthetic construct
  misc_feature 1..80: note = Artificially Synthesized Probe
  source 1..80: mol_type = other DNA
gattctttatatttcagatttcctaagtttacccaaacaatatttaagagactttaatacatttccatgaattaggatac

SEQ ID NO: 30085 - DNA, 80 bp, synthetic construct
  misc_feature 1..80: note = Artificially Synthesized Probe
  source 1..80: mol_type = other DNA
acgaagatgtgtcctgattttcaaaatctctcccctgaagttcccacctgatatgtagttggagatgggcaaatacagcg

SEQ ID NO: 30086 - DNA, 80 bp, synthetic construct
  misc_feature 1..80: note = Artificially Synthesized Probe
  source 1..80: mol_type = other DNA
aatactctgggaaaggaaagcattcctggggggaggtctataaatggtcgctttgggaatgaatgtctgtcctatgcagt

SEQ ID NO: 30087 - DNA, 80 bp, synthetic construct
  misc_feature 1..80: note = Artificially Synthesized Probe
  source 1..80: mol_type = other DNA
tccaggaactgatcccatcaggaaattatgttcccttcactgtttggggtgattgggccttggtatgtgccatcctaacg

SEQ ID NO: 30088 - DNA, 80 bp, synthetic construct
  misc_feature 1..80: note = Artificially Synthesized Probe
  source 1..80: mol_type = other DNA
taaaatggcattacagactctttgtactgaggtcattttgcttccttcagaatgggaccttttggcgaaagctgttctaa

SEQ ID NO: 30089 - DNA, 80 bp, synthetic construct
  misc_feature 1..80: note = Artificially Synthesized Probe
  source 1..80: mol_type = other DNA
caaacatggccaaatgctcctgctactgtttgccctcattgtcgtaaaggtaaacactgggcaagtacttgccactctaa

SEQ ID NO: 30090 - DNA, 80 bp, synthetic construct
  misc_feature 1..80: note = Artificially Synthesized Probe
  source 1..80: mol_type = other DNA
acatataatggaaaacgtggggactgttcctggactcagtctcggtccaaaacatgaaggaattactaaattcctttatg

SEQ ID NO: 30091 - DNA, 80 bp, synthetic construct
  misc_feature 1..80: note = Artificially Synthesized Probe
  source 1..80: mol_type = other DNA
catgcaactcgttgtatccatctagaaactcaagtctgggctgcttatcttctggagagattagctacaggaaaatgggg

SEQ ID NO: 30092 - DNA, 80 bp, synthetic construct
  misc_feature 1..80: note = Artificially Synthesized Probe
  source 1..80: mol_type = other DNA
tggagctcgagaaggaatctggatactgtgtgccggaccagccaaagaatcctgtgtcaaaaccgagagaacgaataagc

SEQ ID NO: 30093 - DNA, 80 bp, synthetic construct
  misc_feature 1..80: note = Artificially Synthesized Probe
  source 1..80: mol_type = other DNA
ttcttgatttttaatgaatagtgaggcatacaatgtaatataaacaagtatgatactgcagattatatttctgattcaaa

SEQ ID NO: 30094 - DNA, 80 bp, synthetic construct
  misc_feature 1..80: note = Artificially Synthesized Probe
  source 1..80: mol_type = other DNA
agctcagttgaggcaggggtttccctctggatgacatgaaggagtcgatttcttccaaggattcgaaaaatctctttagc

SEQ ID NO: 30095 - DNA, 80 bp, synthetic construct
  misc_feature 1..80: note = Artificially Synthesized Probe
  source 1..80: mol_type = other DNA
cagcaaaccgctgccaggatgccagctgtggccagatcttcaagttttctaaagaaaacctgaagactgaatttttgttg

SEQ ID NO: 30096 - DNA, 80 bp, synthetic construct
  misc_feature 1..80: note = Artificially Synthesized Probe
  source 1..80: mol_type = other DNA
aaaagtacatgagccaaacaaaagacacctttgatgaggttcagcatgtagctgtgcttgttatgtccagtttaaacagg

SEQ ID NO: 30097 - DNA, 80 bp, synthetic construct
  misc_feature 1..80: note = Artificially Synthesized Probe
  source 1..80: mol_type = other DNA
gattttcctgcctcagcctcccgagtagctgggattataggcacgcgccaccatgcccgactaatttttgtatttctagt

SEQ ID NO: 30098 - DNA, 80 bp, synthetic construct
  misc_feature 1..80: note = Artificially Synthesized Probe
  source 1..80: mol_type = other DNA
ggtcaagccacggtcggagggtactagggtgggactgcatggccaggcaggcactatttaccaactaacacagaggagat

SEQ ID NO: 30099 - DNA, 80 bp, synthetic construct
  misc_feature 1..80: note = Artificially Synthesized Probe
  source 1..80: mol_type = other DNA
gctgggattacaggcatgagccactgcgttgagccttttgtttttgttttttttgagacggagtctcactccatcaccca

SEQ ID NO: 30100 - DNA, 80 bp, synthetic construct
  misc_feature 1..80: note = Artificially Synthesized Probe
  source 1..80: mol_type = other DNA
ttccttctcttgactcacttacctgatgactgtgaatttgataaactcagctgcctccaagatcctcctcatggaactga

SEQ ID NO: 30101 - DNA, 80 bp, synthetic construct
  misc_feature 1..80: note = Artificially Synthesized Probe
  source 1..80: mol_type = other DNA
gcaaactcagttcctccatccattacacagggttatcatggcgcctacctgaaaggttttatgtgaggattaaatgatca

SEQ ID NO: 30102 - DNA, 80 bp, synthetic construct
  misc_feature 1..80: note = Artificially Synthesized Probe
  source 1..80: mol_type = other DNA
tgctttacctggattgttattcagtctacttttagcaataattaagcatcttggaaatttggaaatggaagccattacag

SEQ ID NO: 30103 - DNA, 80 bp, synthetic construct
  misc_feature 1..80: note = Artificially Synthesized Probe
  source 1..80: mol_type = other DNA
tctgtttttcttttctttttgttttttagagacagagtctcactgtgctgtgcaggctggtctcaaactcctgggctcaa

SEQ ID NO: 30104 - DNA, 80 bp, synthetic construct
  misc_feature 1..80: note = Artificially Synthesized Probe
  source 1..80: mol_type = other DNA
aatttaccaagaataagaccaattctcctttaaatatgtctaagtgctgctttgatcagaagcccagactgaattttttt

SEQ ID NO: 30105 - DNA, 80 bp, synthetic construct
  misc_feature 1..80: note = Artificially Synthesized Probe
  source 1..80: mol_type = other DNA
tacttgcacttcaactgagttcaccggctgcaggcctgcggagttacctttgatatttatctgtccactccagtagcaaa

SEQ ID NO: 30106 - DNA, 80 bp, synthetic construct
  misc_feature 1..80: note = Artificially Synthesized Probe
  source 1..80: mol_type = other DNA
tagagatttcaatctcttccccacaatttttttttttttttagatggaatctcgctctgtcacccaggctgcagtacagt

SEQ ID NO: 30107 - DNA, 80 bp, synthetic construct
  misc_feature 1..80: note = Artificially Synthesized Probe
  source 1..80: mol_type = other DNA
catgtgtcactatctctctaaggcagatatatacaactaaaagtaagatcacattgcctgtaaatggcaaagatgtccca

SEQ ID NO: 30108 - DNA, 80 bp, synthetic construct
  misc_feature 1..80: note = Artificially Synthesized Probe
  source 1..80: mol_type = other DNA
gcgccactgcactccagcctgggtgacagagcgagactctgtctcaaaaaagaaaaaaaaaagtatgttctttgtaaaat

SEQ ID NO: 30109 - DNA, 80 bp, synthetic construct
  misc_feature 1..80: note = Artificially Synthesized Probe
  source 1..80: mol_type = other DNA
ttttgtattttttgtagagacggcgtctcaccatgttgcccaggctggttttgaactcctgggctcaagtcatacacctg

SEQ ID NO: 30110 - DNA, 80 bp, synthetic construct
  misc_feature 1..80: note = Artificially Synthesized Probe
  source 1..80: mol_type = other DNA
gtaattaaaatcttccatcccaaataacttttggggaagaaaattattatcaaacagtattaccttgcatattatattga

SEQ ID NO: 30111 - DNA, 80 bp, synthetic construct
  misc_feature 1..80: note = Artificially Synthesized Probe
  source 1..80: mol_type = other DNA
aaagaaaggaaggagaggaggatgaaggaaggcatcgtgaaggcgggagagcttagttctgattctagtcctagttttgg

SEQ ID NO: 30112 - DNA, 80 bp, synthetic construct
  misc_feature 1..80: note = Artificially Synthesized Probe
  source 1..80: mol_type = other DNA
cttgctgagccagtccagccaacacacagaaatgtaggaaagactaaatattccattccattccattggagcccttcccc

SEQ ID NO: 30113 - DNA, 80 bp, synthetic construct
  misc_feature 1..80: note = Artificially Synthesized Probe
  source 1..80: mol_type = other DNA
tggtgggcacctgtaatcccagctactcggaaggctgaagcaggagaatcgcttgaacccgggggggcggaagttgcagt

SEQ ID NO: 30114 - DNA, 80 bp, synthetic construct
  misc_feature 1..80: note = Artificially Synthesized Probe
  source 1..80: mol_type = other DNA
ctgtggcttggggtattcttttaattctctgtgaccaggtaagacacaggcagaagatatctgagctctgaaaacatcca

SEQ ID NO: 30115 - DNA, 80 bp, synthetic construct
  misc_feature 1..80: note = Artificially Synthesized Probe
  source 1..80: mol_type = other DNA
gccggagtgcagtggtgcaatcatggctcactccagcctttatctcctgggcccaagtgatcctccaacctcagcctccc

SEQ ID NO: 30116 - DNA, 80 bp, synthetic construct
  misc_feature 1..80: note = Artificially Synthesized Probe
  source 1..80: mol_type = other DNA
tgtgagccactacacccggcctaagcttttttttttttaatcttaacctgttaacatttttcctctaattaatgctggtt

SEQ ID NO: 30117 - DNA, 80 bp, synthetic construct
  misc_feature 1..80: note = Artificially Synthesized Probe
  source 1..80: mol_type = other DNA
attacaagcgtgatccaccgtgcgcagccttgtttgtttttttgagacagggtcttgctctgtcacccaggctggagtgc

SEQ ID NO: 30118 - DNA, 80 bp, synthetic construct
  misc_feature 1..80: note = Artificially Synthesized Probe
  source 1..80: mol_type = other DNA
agaaaacggaactcccagatcgaagccaacgtggaaaagtcatcgagagagaaactgactcaaagcagccgctgtgttcc

SEQ ID NO: 30119 - DNA, 80 bp, synthetic construct
  misc_feature 1..80: note = Artificially Synthesized Probe
  source 1..80: mol_type = other DNA
agttattgctgttaatctcctactttgcttgatttattgatttatttactgagatggatcttgctctgttgcctgggctg

SEQ ID NO: 30120 - DNA, 80 bp, synthetic construct
  misc_feature 1..80: note = Artificially Synthesized Probe
  source 1..80: mol_type = other DNA
ttctaaaaaaaaaaagggggggatacatctgcagaatgtgcaggtttgtttcctaggcacatgtgtgccacaatggcttg

SEQ ID NO: 30121 - DNA, 80 bp, synthetic construct
  misc_feature 1..80: note = Artificially Synthesized Probe
  source 1..80: mol_type = other DNA
gaattaaaattaggctattggtttcatctttaaatgaactgaaggggcgggggtgcagagtgtgtcacctatttatgatg

SEQ ID NO: 30122 - DNA, 80 bp, synthetic construct
  misc_feature 1..80: note = Artificially Synthesized Probe
  source 1..80: mol_type = other DNA
gcagggctctctaaaatgggatcaaggaagaaagagtgatcaatacagaagtttccacagagcagaagatccaagatcca

SEQ ID NO: 30123 - DNA, 80 bp, synthetic construct
  misc_feature 1..80: note = Artificially Synthesized Probe
  source 1..80: mol_type = other DNA
aaaaaaaaaagaactagctcctcgcttgataagcatatgggttttgaaatgttcaaacattctaagtagtcatggcaata

SEQ ID NO: 30124 - DNA, 80 bp, synthetic construct
  misc_feature 1..80: note = Artificially Synthesized Probe
  source 1..80: mol_type = other DNA
caagaccagccccagaatcaattgctcctccaaaagttttaaaactgattgttttcatcagtctagtcagaagagagaaa

SEQ ID NO: 30125 - DNA, 80 bp, synthetic construct
  misc_feature 1..80: note = Artificially Synthesized Probe
  source 1..80: mol_type = other DNA
cctcttgtaagttaggacatgccgcatttgcctttttacgtcaaatgataaagacaatagcccccaatcccatccatgtt

SEQ ID NO: 30126 - DNA, 80 bp, synthetic construct
  misc_feature 1..80: note = Artificially Synthesized Probe
  source 1..80: mol_type = other DNA
cgtcaactggtaacatgggattagctgctagagggactgaggactctaaagagaacataagcagcaaattgcaagagcat

SEQ ID NO: 30127 - DNA, 80 bp, synthetic construct
  misc_feature 1..80: note = Artificially Synthesized Probe
  source 1..80: mol_type = other DNA
aactagaagtggtaggaaatgaccaatgtaataaaggccatttataaaaagtccatggctaatatcactcaacaatgaaa

SEQ ID NO: 30128 - DNA, 80 bp, synthetic construct
  misc_feature 1..80: note = Artificially Synthesized Probe
  source 1..80: mol_type = other DNA
caggcttaatattgctaagatatctgtactaccaaaagccatctacagaattattgcaatccccatcaaaatctcaaggg

SEQ ID NO: 30129 - DNA, 80 bp, synthetic construct
  misc_feature 1..80: note = Artificially Synthesized Probe
  source 1..80: mol_type = other DNA
gtctcaaaaaaaaaaaaaaaaaaaaagctgggcacgatgactcacgcctgtaatcccagcactttgggagccagaggcag

SEQ ID NO: 30130 - DNA, 80 bp, synthetic construct
  misc_feature 1..80: note = Artificially Synthesized Probe
  source 1..80: mol_type = other DNA
tctgtctttttgatagtggagaccttaatttgggatctcggaagtaaatttgaatcaatctatcactcaattctcccctc

SEQ ID NO: 30131 - DNA, 80 bp, synthetic construct
  misc_feature 1..80: note = Artificially Synthesized Probe
  source 1..80: mol_type = other DNA
actcactcacactggatgcttgcagcacaccgtggcatattgaaggctctgaaattgccatactaagaaaaggaaaaaac

SEQ ID NO: 30132 - DNA, 80 bp, synthetic construct
  misc_feature 1..80: note = Artificially Synthesized Probe
  source 1..80: mol_type = other DNA
caaaaagcgatgtattatctacaagggcagatccaagtttgtggggcctgggaggcctgatttaagaatacaaaattagg

SEQ ID NO: 30133 - DNA, 80 bp, synthetic construct
  misc_feature 1..80: note = Artificially Synthesized Probe
  source 1..80: mol_type = other DNA
tcctagaagagggccttggcttaggaagtgcttcatggatatttgtcaaatgaaaggaatgtgatcagttcttaaacaat

SEQ ID NO: 30134 - DNA, 80 bp, synthetic construct
  misc_feature 1..80: note = Artificially Synthesized Probe
  source 1..80: mol_type = other DNA
ctagctggaactatagcaccatcccctccagctaattttttaaaaatagtcttgtagagacaaggtctcactatgctgcc

SEQ ID NO: 30135 - DNA, 80 bp, synthetic construct
  misc_feature 1..80: note = Artificially Synthesized Probe
  source 1..80: mol_type = other DNA
gcagatcacctgagagtaaggagttcgagaccagcctggccaacgtggtgaaaccccgtctctattaaaaatacaaaaaa

SEQ ID NO: 30136 - DNA, 80 bp, synthetic construct
  misc_feature 1..80: note = Artificially Synthesized Probe
  source 1..80: mol_type = other DNA
gcttactgtaacctctgccccctggattcaatcagtcctcccatctcagcctccccagcagctgggactacaggtgagcg

SEQ ID NO: 30137 - DNA, 80 bp, synthetic construct
  misc_feature 1..80: note = Artificially Synthesized Probe
  source 1..80: mol_type = other DNA
agcgattctcctgcctcagcctcccaagtagctgggattataggctcccaccaccacgcctggttactttttgtattttt

SEQ ID NO: 30138 - DNA, 80 bp, synthetic construct
  misc_feature 1..80: note = Artificially Synthesized Probe
  source 1..80: mol_type = other DNA
cctcaccctcccgtgtagccccagctatgttttgcatatgggactgcaggcatgtattaccaggctcagctaatttttaa

SEQ ID NO: 30139 - DNA, 80 bp, synthetic construct
  misc_feature 1..80: note = Artificially Synthesized Probe
  source 1..80: mol_type = other DNA
cgtaggtcctagaaagtcttttcttgagcattctagattccactcaccaagcaaatgcacatcaaagaatatgtaacggc

SEQ ID NO: 30140 - DNA, 80 bp, synthetic construct
  misc_feature 1..80: note = Artificially Synthesized Probe
  source 1..80: mol_type = other DNA
gccttctctgtgcttcctgctctctggaaatgggtgcatccgggtcacatcagaagtttactgttctttgcttgtcccga

SEQ ID NO: 30141 - DNA, 80 bp, synthetic construct
  misc_feature 1..80: note = Artificially Synthesized Probe
  source 1..80: mol_type = other DNA
cgacctcaagtgatctacctgccttggcctcccgaagccctgtgattacagccatgagccactgagcctggtcagctttt

SEQ ID NO: 30142 - DNA, 80 bp, synthetic construct
  misc_feature 1..80: note = Artificially Synthesized Probe
  source 1..80: mol_type = other DNA
tccgtctcacaaaaaaaacaaaacaaaacaaaaattgactgtgatgatagttgtacaactctgtgaatctatttcaagaa

SEQ ID NO: 30143 - DNA, 80 bp, synthetic construct
  misc_feature 1..80: note = Artificially Synthesized Probe
  source 1..80: mol_type = other DNA
tgcttttacgatcacccaatttaaaacctacacaccctccaagggaaatattattttccgtgaaaggacacagagagcat

SEQ ID NO: 30144 - DNA, 80 bp, synthetic construct
  misc_feature 1..80: note = Artificially Synthesized Probe
  source 1..80: mol_type = other DNA
cctgacctcaggtgatccacctgcctcagcctcccaaagtgctgggtttacaggcatgatctaccacgcctggccgaaaa

SEQ ID NO: 30145 - DNA, 80 bp, synthetic construct
  misc_feature 1..80: note = Artificially Synthesized Probe
  source 1..80: mol_type = other DNA
tgttgggattacaggtgtcagtcacctgcctggcccctgtgaattctgacatatataaagttacataggtaaaattaagg

SEQ ID NO: 30146 - DNA, 80 bp, synthetic construct
  misc_feature 1..80: note = Artificially Synthesized Probe
  source 1..80: mol_type = other DNA
aaatctcccaaagccgatatagttattaaccctttttttactcacatctgaagtgccagcaccatttactgagatcacag

SEQ ID NO: 30147 - DNA, 80 bp, synthetic construct
  misc_feature 1..80: note = Artificially Synthesized Probe
  source 1..80: mol_type = other DNA
ctaattttgactttttttttttttttttttttttgtagagacaaagtttcactatgttgcccaggctgatcttgaactcc

SEQ ID NO: 30148 - DNA, 80 bp, synthetic construct
  misc_feature 1..80: note = Artificially Synthesized Probe
  source 1..80: mol_type = other DNA
caaaaaaaaacgtatactgatggcaaggagtggaggggaatcacaagcaatacagtaaaaggagccagacacccatgaaa

SEQ ID NO: 30149 - DNA, 80 bp, synthetic construct
  misc_feature 1..80: note = Artificially Synthesized Probe
  source 1..80: mol_type = other DNA
aaaaaaaataaaggcaaaggtgacaggtatggaattttcaacttgcatcaggtcagcggcattcaataagttttggattt

SEQ ID NO: 30150 - DNA, 80 bp, synthetic construct
  misc_feature 1..80: note = Artificially Synthesized Probe
  source 1..80: mol_type = other DNA
aaaggggacgattcactgcccaggctgcacagcgcgagatttcatcacagcgtgcaatttaaaacttacgaattgtttat

SEQ ID NO: 30151 - DNA, 80 bp, synthetic construct
  misc_feature 1..80: note = Artificially Synthesized Probe
  source 1..80: mol_type = other DNA
atggatggaaaatcaaaatgctgtgtattcatatcatggatttttattcagccataaagaaggaaagaagccagacacac

SEQ ID NO: 30152 - DNA, 80 bp, synthetic construct
  misc_feature 1..80: note = Artificially Synthesized Probe
  source 1..80: mol_type = other DNA
gccactcgccctcctttttctctttctttctttcccccccttttcccccctttttttgtttgcttcctggaaggcagcct

SEQ ID NO: 30153 - DNA, 80 bp, synthetic construct
  misc_feature 1..80: note = Artificially Synthesized Probe
  source 1..80: mol_type = other DNA
cttgggagccgtctgggttatcagatcaactgtctgcaagtattgcattgtttgtgttcaaatcacccttattttccatc

SEQ ID NO: 30154 - DNA, 80 bp, synthetic construct
  misc_feature 1..80: note = Artificially Synthesized Probe
  source 1..80: mol_type = other DNA
tatataggtaaacttgtgtcaccagcgtttgttgtatagattattttgccacctgggtactaagcctatctaatagttat

SEQ ID NO: 30155 - DNA, 80 bp, synthetic construct
  misc_feature 1..80: note = Artificially Synthesized Probe
  source 1..80: mol_type = other DNA
catgggagacggaggttgcagtgagccgagatcacgccactgctctccagcatgggatacagagtgaaactctgtcttaa

SEQ ID NO: 30156 - DNA, 80 bp, synthetic construct
  misc_feature 1..80: note = Artificially Synthesized Probe
  source 1..80: mol_type = other DNA
gattcaaaaaaacatctttaaaaagagcatatgatcccaacaacagagatctcaacaaagtggcataaccaccgttctgt

SEQ ID NO: 30157 - DNA, 80 bp, synthetic construct
  misc_feature 1..80: note = Artificially Synthesized Probe
  source 1..80: mol_type = other DNA
agctgagagccgcaaatctgctcttgctgaagccccaatccagtctgcatctcttggtatatgcatcctgtgattctagt

SEQ ID NO: 30158 - DNA, 80 bp, synthetic construct
  misc_feature 1..80: note = Artificially Synthesized Probe
  source 1..80: mol_type = other DNA
atgccactaagatgaaggagaaattggttgacaagtgttccaacaagccgcagtgagccagaccttaatgaagacagaac

SEQ ID NO: 30159 - DNA, 80 bp, synthetic construct
  misc_feature 1..80: note = Artificially Synthesized Probe
  source 1..80: mol_type = other DNA
tgcatctcgtaggctggctgctcttactagagtgagttataggcttctcaagagttaaatttgttcctaaatatatgcca

SEQ ID NO: 30160 - DNA, 80 bp, synthetic construct
  misc_feature 1..80: note = Artificially Synthesized Probe
  source 1..80: mol_type = other DNA
aagttttggagtttaacttaggtgaacagtaatgtctctccattttcaaaacccaccggctaattcaagttgagaagcaa

SEQ ID NO: 30161 - DNA, 80 bp, synthetic construct
  misc_feature 1..80: note = Artificially Synthesized Probe
  source 1..80: mol_type = other DNA
ccgcccgcctgccgcggtcaccccggcctctgcctctgtcccccagtgatcggatcaaggcgctgagcgaggccctgcct

SEQ ID NO: 30162 - DNA, 80 bp, synthetic construct
  misc_feature 1..80: note = Artificially Synthesized Probe
  source 1..80: mol_type = other DNA
cctgttctttgggggaaataaacacaatgaccggaaggaaaacttcagctttaggccatgaaaattaagccgtctgggtt

SEQ ID NO: 30163 - DNA, 80 bp, synthetic construct
  misc_feature 1..80: note = Artificially Synthesized Probe
  source 1..80: mol_type = other DNA
atggcttgatcagccaacagtgcagaggagaagtctccagtccttcagggaacaaaaggggaagttagtttgcaaatgag

SEQ ID NO: 30164 - DNA, 80 bp, synthetic construct
  misc_feature 1..80: note = Artificially Synthesized Probe
  source 1..80: mol_type = other DNA
tttactttcctctgcatctggcctagtcactgggtgttgagctcgtaggggcagggacaagaagccttttcctcctatgt

SEQ ID NO: 30165 - DNA, 80 bp, synthetic construct
  misc_feature 1..80: note = Artificially Synthesized Probe
  source 1..80: mol_type = other DNA
aaaataattcggacgactgacggtagattgctcagaaaactggctgagagttgagaattcctgttagccatgattagaaa

SEQ ID NO: 30166 - DNA, 80 bp, synthetic construct
  misc_feature 1..80: note = Artificially Synthesized Probe
  source 1..80: mol_type = other DNA
tctatcgcccaggcgggagtgtaggtgcgtggtctcggctcactgctacctctgcctcctgggttgaagtgattctcctg

SEQ ID NO: 30167 - DNA, 80 bp, synthetic construct
  misc_feature 1..80: note = Artificially Synthesized Probe
  source 1..80: mol_type = other DNA
taactggggtggtataattaacacgaaattgttttaccactggcttaaatagatggatgtcaaatcatttttatgtcagt

SEQ ID NO: 30168 - DNA, 80 bp, synthetic construct
  misc_feature 1..80: note = Artificially Synthesized Probe
  source 1..80: mol_type = other DNA
gtaagagaaagttcagtatagccaggaactgtcagagttgttggaggattgactcattctcctttggttgtaacttgttt

SEQ ID NO: 30169 - DNA, 80 bp, synthetic construct
  misc_feature 1..80: note = Artificially Synthesized Probe
  source 1..80: mol_type = other DNA
gtgtcttgctctgttacccaggctggaatgcagtggcatgatctcagctcactacaacccctgcctctcgggttcgagtg

SEQ ID NO: 30170 - DNA, 80 bp, synthetic construct
  misc_feature 1..80: note = Artificially Synthesized Probe
  source 1..80: mol_type = other DNA
ttgactataacacatacatgacgtgagtagaattttatctagattgagttttcagaccgtaattggtttcaagaaaataa

SEQ ID NO: 30171 - DNA, 80 bp, synthetic construct
  misc_feature 1..80: note = Artificially Synthesized Probe
  source 1..80: mol_type = other DNA
ggtgacagtgtgacactctgtctcaaaaaacaaaaacaaattagctaggcgtggtggtgcgcacctgtaatcccagacac

SEQ ID NO: 30172 - DNA, 80 bp, synthetic construct
  misc_feature 1..80: note = Artificially Synthesized Probe
  source 1..80: mol_type = other DNA
ctccatctcccgggttcaagtgattcttctgcctcagcctctcaagtagctgggactacaggtgcgcaccaccacgccca

SEQ ID NO: 30173 - DNA, 80 bp, synthetic construct
  misc_feature 1..80: note = Artificially Synthesized Probe
  source 1..80: mol_type = other DNA
tcagaacacagcatgtttcttggaaaatactggcatgggcaaatgacattgttgagagcttcaggataaagaatctttta

SEQ ID NO: 30174 - DNA, 80 bp, synthetic construct
  misc_feature 1..80: note = Artificially Synthesized Probe
  source 1..80: mol_type = other DNA
gactttttaaagttaaattttaaaacgatctttgaggagtaaatttgacataagcaggtgttcatgcacaaatgccttaa

SEQ ID NO: 30175 - DNA, 80 bp, synthetic construct
  misc_feature 1..80: note = Artificially Synthesized Probe
  source 1..80: mol_type = other DNA
gtttgttttttaaggatgttgttttggctactgtgaaactcagaactcagagctgaacttgtgatccactgattgggcag

SEQ ID NO: 30176 - DNA, 80 bp, synthetic construct
  misc_feature 1..80: note = Artificially Synthesized Probe
  source 1..80: mol_type = other DNA
tcacgcctgtaatctgagtactttgaaaggccacggtgggaggactgcttgagcacgggagtttgacaccagcctgggca

SEQ ID NO: 30177 - DNA, 80 bp, synthetic construct
  misc_feature 1..80: note = Artificially Synthesized Probe
  source 1..80: mol_type = other DNA
gcatacagaagtcctgcctattccaggtctagtgtagtctctggagaacttatcttttctaagatactatgtacagtaaa

SEQ ID NO: 30178 - DNA, 80 bp, synthetic construct
  misc_feature 1..80: note = Artificially Synthesized Probe
  source 1..80: mol_type = other DNA
gaattacaggcatgcgcagccatgcctggctaattttgtatttttagtagagacaaggtttctctgttagtcaggctggt

SEQ ID NO: 30179 - DNA, 80 bp, synthetic construct
  misc_feature 1..80: note = Artificially Synthesized Probe
  source 1..80: mol_type = other DNA
gatggatgtcctttattgcaagactgtaatccaggatcacatttccacccagtttccttgcctctctaatatactttttt

SEQ ID NO: 30180 - DNA, 80 bp, synthetic construct
  misc_feature 1..80: note = Artificially Synthesized Probe
  source 1..80: mol_type = other DNA
gtctgtctggagactagtgttaactttgatgacttggttacgatgggatgtgccatgttctccttttttttaaaagaatg

SEQ ID NO: 30181 - DNA, 80 bp, synthetic construct
  misc_feature 1..80: note = Artificially Synthesized Probe
  source 1..80: mol_type = other DNA
gtcagcaaactaccttaaacatgttctcattaaaacaaaaattaaaaacacagctcctatagccagacgtggtggcagat

SEQ ID NO: 30182 - DNA, 80 bp, synthetic construct
  misc_feature 1..80: note = Artificially Synthesized Probe
  source 1..80: mol_type = other DNA
atgtcactaatttttcccttggcattaagcgatacatgaattcattttattcttctgactgaggatgtttctgttagtgt

SEQ ID NO: 30183 - DNA, 80 bp, synthetic construct
  misc_feature 1..80: note = Artificially Synthesized Probe
  source 1..80: mol_type = other DNA
tgcagactcaccgctgtagtccattttttggaatagggggacaaaaacttaggtttggacggaaaatttctctggtaaaa

SEQ ID NO: 30184 - DNA, 80 bp, synthetic construct
  misc_feature 1..80: note = Artificially Synthesized Probe
  source 1..80: mol_type = other DNA
tgtgcgccaccatgcctggctaatttttgtatttttaatagagatggggttttagcatgttggccaggctggtctcgaac

SEQ ID NO: 30185 - DNA, 80 bp, synthetic construct
  misc_feature 1..80: note = Artificially Synthesized Probe
  source 1..80: mol_type = other DNA
atttagagagggattctagtcccttgttaaagaactaactctaggctgtgcacagtggctctcgcctgtaatcccagccc

SEQ ID NO: 30186 - DNA, 80 bp, synthetic construct
  misc_feature 1..80: note = Artificially Synthesized Probe
  source 1..80: mol_type = other DNA
gaacagcaaggacacggataaatctaatacctgaaatggatctccaacaggaaactcgaggatttcaaacaatggctaga

SEQ ID NO: 30187 - DNA, 80 bp, synthetic construct
  misc_feature 1..80: note = Artificially Synthesized Probe
  source 1..80: mol_type = other DNA
ctgtttaatcacagtatatcccgtgtcatcttgttctgaccagcccacagtaattgggtttgggtaggctcatgacacat

SEQ ID NO: 30188 - DNA, 80 bp, synthetic construct
  misc_feature 1..80: note = Artificially Synthesized Probe
  source 1..80: mol_type = other DNA
ccacttgaccttgagttttaaaagctttgtggggtgagagactcagaatagtctgcatccttacttgtggcctgggttaa

SEQ ID NO: 30189 - DNA, 80 bp, synthetic construct
  misc_feature 1..80: note = Artificially Synthesized Probe
  source 1..80: mol_type = other DNA
agaaaacctcttaaaaacagcaggagtaggaatgggaatcacctaaaaagagaccgtagattacttctcaatagcgacag

SEQ ID NO: 30190 - DNA, 80 bp, synthetic construct
  misc_feature 1..80: note = Artificially Synthesized Probe
  source 1..80: mol_type = other DNA
ccatgttgcctgctctcccacccagggttgctgtgcttattatacaagatggccaataaagcatgacatatattcaataa

SEQ ID NO: 30191 - DNA, 80 bp, synthetic construct
  misc_feature 1..80: note = Artificially Synthesized Probe
  source 1..80: mol_type = other DNA
acctggtgtacatcctttgtaaatacagtagtggcctgcaagcagtctgattggttgtgaaaagcaaccaattagaggct

SEQ ID NO: 30192 - DNA, 80 bp, synthetic construct
  misc_feature 1..80: note = Artificially Synthesized Probe
  source 1..80: mol_type = other DNA
acactcctgtgcaaacgtctgattggttgcagaaagcaaccaatcagagatactttgaattttccatctgggacacagaa

SEQ ID NO: 30193 - DNA, 80 bp, synthetic construct
  misc_feature 1..80: note = Artificially Synthesized Probe
  source 1..80: mol_type = other DNA
tttacttccgtctctagtcagggacccttgtgttgggaatcagatttgcttctgtttgttcaaatatatggggataagtg

SEQ ID NO: 30194 - DNA, 80 bp, synthetic construct
  misc_feature 1..80: note = Artificially Synthesized Probe
  source 1..80: mol_type = other DNA
gaaccctggggctttagttaaggaatactcgggtgttgtcagtaaattaatttgtttttacagttactattcttgtttcc

SEQ ID NO: 30195 - DNA, 80 bp, synthetic construct
  misc_feature 1..80: note = Artificially Synthesized Probe
  source 1..80: mol_type = other DNA
tcttatgagggtttgggcaagtcaaatacttagtttctgagccttattttgtctctagagcaagaaaactgtaaattagg

SEQ ID NO: 30196 - DNA, 80 bp, synthetic construct
  misc_feature 1..80: note = Artificially Synthesized Probe
  source 1..80: mol_type = other DNA
gaaccactgccccaaccaatgagtagtttttcttcttgaatagttatgggtttaagcctttcacatcacagtcattcatt

SEQ ID NO: 30197 - DNA, 80 bp, synthetic construct
  misc_feature 1..80: note = Artificially Synthesized Probe
  source 1..80: mol_type = other DNA
attgacagtgccccccagcaagcctgtgtaaactctcagtctactacttggagaatctgacctataagagattacaaggg

SEQ ID NO: 30198 - DNA, 80 bp, synthetic construct
  misc_feature 1..80: note = Artificially Synthesized Probe
  source 1..80: mol_type = other DNA
agaaaaatggtagtgtttgttgtacggtgttccttgcttggctttactctgggttaatgagatgcattagagagaaggta

SEQ ID NO: 30199 - DNA, 80 bp, synthetic construct
  misc_feature 1..80: note = Artificially Synthesized Probe
  source 1..80: mol_type = other DNA
caccacatccggccgggagttcttttctagataaaaagttggtgtgttgaaaaccagtgattcactgtgcaagtttgttt

SEQ ID NO: 30200 - DNA, 80 bp, synthetic construct
  misc_feature 1..80: note = Artificially Synthesized Probe
  source 1..80: mol_type = other DNA
gcacacatataatatggcaaacctaataggtaaatatgtgttctgactgcttcaccaatcgcctggtcccccatcattcc

SEQ ID NO: 30201 - DNA, 80 bp, synthetic construct
  misc_feature 1..80: note = Artificially Synthesized Probe
  source 1..80: mol_type = other DNA
ccacagcattcccttaagccacagcgtaatccagagtgaggccctaactctcttcaattctgtgaaggctgagatgggtg

SEQ ID NO: 30202 - DNA, 80 bp, synthetic construct
  misc_feature 1..80: note = Artificially Synthesized Probe
  source 1..80: mol_type = other DNA
cactacagagagacctttcatgaaagcaagagtcaatgtaacttttatatgcattgggaaaccaaaacatctgtgtgact

SEQ ID NO: 30203 - DNA, 80 bp, synthetic construct
  misc_feature 1..80: note = Artificially Synthesized Probe
  source 1..80: mol_type = other DNA
taagcattaagggcgctgtcctcagctgcaagctgtagtcactgtccatcagtattcatactttgtttttattgctaata

SEQ ID NO: 30204 - DNA, 80 bp, synthetic construct
  misc_feature 1..80: note = Artificially Synthesized Probe
  source 1..80: mol_type = other DNA
taggtttatgaggcaatcatagaaattcttcaggagaattctgagcgcttttctgggatttagaaaagcgttgttcagca

SEQ ID NO: 30205 - DNA, 80 bp, synthetic construct
  misc_feature 1..80: note = Artificially Synthesized Probe
  source 1..80: mol_type = other DNA
agacggtggtttcatcatgttgaccaggacgctctcaatctcttgaccttgtcatctgccagcctcagcctcccaaagtg

SEQ ID NO: 30206 - DNA, 80 bp, synthetic construct
  misc_feature 1..80: note = Artificially Synthesized Probe
  source 1..80: mol_type = other DNA
tacaggtgttgaagaagaagaaaaagctgcagagatgcataaaatgaaatctacaacccaggcaaatcggatgagtgtag

SEQ ID NO: 30207 - DNA, 80 bp, synthetic construct
  misc_feature 1..80: note = Artificially Synthesized Probe
  source 1..80: mol_type = other DNA
tctgtattctgaggccaaattgtacctgagaatatgccaggatgggaccatcttcaagaaagacaatagtgcaagaaacc

SEQ ID NO: 30208 - DNA, 80 bp, synthetic construct
  misc_feature 1..80: note = Artificially Synthesized Probe
  source 1..80: mol_type = other DNA
tatagttcaggaaagagttcatgaggaagagagcatttccaggaagggcgtttgaagaatgatgcggatttcagcttcct

SEQ ID NO: 30209 - DNA, 80 bp, synthetic construct
  misc_feature 1..80: note = Artificially Synthesized Probe
  source 1..80: mol_type = other DNA
atatgtagtatgtatcctattgaaatgagcttttttcactgagcatcactcactcgaggctcatcgagcttggtaggtgt

SEQ ID NO: 30210 - DNA, 80 bp, synthetic construct
  misc_feature 1..80: note = Artificially Synthesized Probe
  source 1..80: mol_type = other DNA
caaagtgctgggattacaggcttgtgttatcttcaattgtgcttattggtcatccatacatattttttggagaaatatct

SEQ ID NO: 30211 - DNA, 80 bp, synthetic construct
  misc_feature 1..80: note = Artificially Synthesized Probe
  source 1..80: mol_type = other DNA
ttgcgtaaacccaaaggcatgaagatatgacttctgtgttttcttccacaagtcttatagcttcaactctcacatttaga

SEQ ID NO: 30212 - DNA, 80 bp, synthetic construct
  misc_feature 1..80: note = Artificially Synthesized Probe
  source 1..80: mol_type = other DNA
ccaatttctacaaaaaatagaaaacaattagctgggagtggtaatgcatgcttctgtagtcccagctactcaggaggctg

SEQ ID NO: 30213 - DNA, 80 bp, synthetic construct
  misc_feature 1..80: note = Artificially Synthesized Probe
  source 1..80: mol_type = other DNA
atatgctactctgtagtattttattgtacttttttccccaaaagatagatagaaattgaagtactaagttcagttgataa

SEQ ID NO: 30214 - DNA, 80 bp, synthetic construct
  misc_feature 1..80: note = Artificially Synthesized Probe
  source 1..80: mol_type = other DNA
cccttcgtctccaccttccttctctgcactcctgttttccactctccaaggagaccattttcaattctcaaataaaattg

SEQ ID NO: 30215 - DNA, 80 bp, synthetic construct
  misc_feature 1..80: note = Artificially Synthesized Probe
  source 1..80: mol_type = other DNA
aatctcaaatttttgtgtggttttcagtagattgtgccaaaaaaaatcatcattttgcaaatgtttccccttaattcata

SEQ ID NO: 30216 - DNA, 80 bp, synthetic construct
  misc_feature 1..80: note = Artificially Synthesized Probe
  source 1..80: mol_type = other DNA
tgtaaccttaaggagaatactaaggttttttttaaggaacaattctaggcagtggctgccaccccatcagctttccatct

SEQ ID NO: 30217 - DNA, 80 bp, synthetic construct
  misc_feature 1..80: note = Artificially Synthesized Probe
  source 1..80: mol_type = other DNA
acctttttatttttatttatttatattttttgagacaaggtctcactctgtcgtccagactggagtgcagtcgtgcgatc

SEQ ID NO: 30218 - DNA, 80 bp, synthetic construct
  misc_feature 1..80: note = Artificially Synthesized Probe
  source 1..80: mol_type = other DNA
tctagagttgaaaatattctttacaaagttgcccaagtcagagctcacgatttcgtttgtgttagggttggtatgactgt

SEQ ID NO: 30219 - DNA, 80 bp, synthetic construct
  misc_feature 1..80: note = Artificially Synthesized Probe
  source 1..80: mol_type = other DNA
tcacatgcaatcatatcattgcatttgcttttctaggcatttccctggaaatggcagctgtgacagtaaaggaagaatca

SEQ ID NO: 30220 - DNA, 80 bp, synthetic construct
  misc_feature 1..80: note = Artificially Synthesized Probe
  source 1..80: mol_type = other DNA
ggggccattacaaatagaggtactatgaacattgtgtagaggcttttgtgtggacataggccttcatttctctctttttt

SEQ ID NO: 30221 - DNA, 80 bp, synthetic construct
  misc_feature 1..80: note = Artificially Synthesized Probe
  source 1..80: mol_type = other DNA
atgtgttgattttctcaatgagtggtaggcacctcaagcatttgagaggtggaggttaagtatgttttagggtgaataaa

SEQ ID NO: 30222 - DNA, 80 bp, synthetic construct
  misc_feature 1..80: note = Artificially Synthesized Probe
  source 1..80: mol_type = other DNA
gatgtgtcctttgcctgtaatgtgtagtgtggtgcatctttgtgaaatttcttaggctttagagaatgaagcctttcaaa

SEQ ID NO: 30223 - DNA, 80 bp, synthetic construct
  misc_feature 1..80: note = Artificially Synthesized Probe
  source 1..80: mol_type = other DNA
tgatgttgatgaaaaacagcccctatcgaagcctttgcaaggtataatcttttcacttccattctcccacatactgcttg

SEQ ID NO: 30224 - DNA, 80 bp, synthetic construct
  misc_feature 1..80: note = Artificially Synthesized Probe
  source 1..80: mol_type = other DNA
atccccagataattgtgacatgctaaagctagatactgagaaccaaaaagatgtgacctcagtatgggacttttaattca

SEQ ID NO: 30225 - DNA, 80 bp, synthetic construct
  misc_feature 1..80: note = Artificially Synthesized Probe
  source 1..80: mol_type = other DNA
tgaacttatttatagggagttaattaagtgtctgatcacagcaagcatttactctgatctgtttgtgtatgtgtgtcttt

SEQ ID NO: 30226 - DNA, 80 bp, synthetic construct
  misc_feature 1..80: note = Artificially Synthesized Probe
  source 1..80: mol_type = other DNA
tattttgtactcacaactactccataaatgactttgtcagtttaccagctctacagctttggttttagaattgaacgcct

SEQ ID NO: 30227 - DNA, 80 bp, synthetic construct
  misc_feature 1..80: note = Artificially Synthesized Probe
  source 1..80: mol_type = other DNA
gagcatcttctagctgtggcaggaaattcattgtgactttgtcatatcctcattcctccaagactatgggatttttttga

SEQ ID NO: 30228 - DNA, 80 bp, synthetic construct
  misc_feature 1..80: note = Artificially Synthesized Probe
  source 1..80: mol_type = other DNA
ttgcttcaaacctgtttttttctccaaagataagcttgaactcagctgagccagtttatcctgaattatttgaaaattca

SEQ ID NO: 30229 - DNA, 80 bp, synthetic construct
  misc_feature 1..80: note = Artificially Synthesized Probe
  source 1..80: mol_type = other DNA
tattccataggcctccccctcccataactgcacatcttggtactttattagtttttttttctagctgctgcgtaaccttt

SEQ ID NO: 30230 - DNA, 80 bp, synthetic construct
  misc_feature 1..80: note = Artificially Synthesized Probe
  source 1..80: mol_type = other DNA
ttgtgattaagtagtagaattttgctagtagacctctttcttttcagaagaccagtgaaataccaggtctgagtaaagta

SEQ ID NO: 30231 - DNA, 80 bp, synthetic construct
  misc_feature 1..80: note = Artificially Synthesized Probe
  source 1..80: mol_type = other DNA
accgtgactacatttctgggttaaggtgaattgccgtcaggtatgttatctctaatgtgtgcagagaaaaccttatcaga

SEQ ID NO: 30232 - DNA, 80 bp, synthetic construct
  misc_feature 1..80: note = Artificially Synthesized Probe
  source 1..80: mol_type = other DNA
cagcatataattagggactaaactattcatatgttcatttaatccctccacaaatactgagcacattgtatgtaccaggt

SEQ ID NO: 30233 - DNA, 80 bp, synthetic construct
  misc_feature 1..80: note = Artificially Synthesized Probe
  source 1..80: mol_type = other DNA
tctggggagattttgaagacaaagccaccaggctttgctgtttattgtttaattcttgtattttcttaaatgtctctgca

SEQ ID NO: 30234 - DNA, 80 bp, synthetic construct
  misc_feature 1..80: note = Artificially Synthesized Probe
  source 1..80: mol_type = other DNA
attggaagagcaatgcccagtatgtgagggcaggccctagagctttagttgatgttttatgcttcagagtaaaaagtaat

SEQ ID NO: 30235 - DNA, 80 bp, synthetic construct
  misc_feature 1..80: note = Artificially Synthesized Probe
  source 1..80: mol_type = other DNA
ctgtgaagtttggatttggactgagatccatgggatggagctccacaggtgtcccttccattccatctacagctgtgttt

SEQ ID NO: 30236 - DNA, 80 bp, synthetic construct
  misc_feature 1..80: note = Artificially Synthesized Probe
  source 1..80: mol_type = other DNA
cccagctatttgggaggctgaagcaggagaatcatttgaggccaggagctcgaggttgcagtgagctataatcatgccac

SEQ ID NO: 30237 - DNA, 80 bp, synthetic construct
  misc_feature 1..80: note = Artificially Synthesized Probe
  source 1..80: mol_type = other DNA
cacagcctctgtgctgactgaatcaacagtatctgtttcatcataatgcagccctatttctttaagcccatacattttgc

SEQ ID NO: 30238 - DNA, 80 bp, synthetic construct
  misc_feature 1..80: note = Artificially Synthesized Probe
  source 1..80: mol_type = other DNA
aagtgagggagttcaacttcggtaagttctcagcgaacgacgtgaccttttccttcatcttctggattctcagtgtgact

SEQ ID NO: 30239 - DNA, 80 bp, synthetic construct
  misc_feature 1..80: note = Artificially Synthesized Probe
  source 1..80: mol_type = other DNA
gttgcaactatatatccgtaaagtcttatttccacacaactgagacatgttttaggaagtttgctaaaagacccctggag

SEQ ID NO: 30240 - DNA, 80 bp, synthetic construct
  misc_feature 1..80: note = Artificially Synthesized Probe
  source 1..80: mol_type = other DNA
ttgtatttctgtagttatcagctaacatttcttttaaacttccagcatggatatttgggaatttatttacatatttatta

SEQ ID NO: 30241 - DNA, 80 bp, synthetic construct
  misc_feature 1..80: note = Artificially Synthesized Probe
  source 1..80: mol_type = other DNA
tctcttagtgtttctcccagtttttaatagcttacaccttttttgcccgtggttttttgttttttgttttgttgttgttt

SEQ ID NO: 30242 - DNA, 80 bp, synthetic construct
  misc_feature 1..80: note = Artificially Synthesized Probe
  source 1..80: mol_type = other DNA
aattgtgtttaaatgatatctctttctctttttgtccttatagctcaagccataaaagccaaaggtccggtgacgatccc

SEQ ID NO: 30243 - DNA, 80 bp, synthetic construct
  misc_feature 1..80: note = Artificially Synthesized Probe
  source 1..80: mol_type = other DNA
cctgtgggttgcaaagttacctctttacttgtgaggatacatgctccatgaagcaccttatgagacaacttgcaattatt

SEQ ID NO: 30244 - DNA, 80 bp, synthetic construct
  misc_feature 1..80: note = Artificially Synthesized Probe
  source 1..80: mol_type = other DNA
gaacaagcattcattgaatgtccatgatatgcaggacataagaaggtttccttttagagcatggagccatttatatcatc

SEQ ID NO: 30245 - DNA, 80 bp, synthetic construct
  misc_feature 1..80: note = Artificially Synthesized Probe
  source 1..80: mol_type = other DNA
gcctcggcttcccaaagtgttgggattacaggtgtgagccattgcacctggccacgaatcttagaaataattttggccat

SEQ ID NO: 30246 - DNA, 80 bp, synthetic construct
  misc_feature 1..80: note = Artificially Synthesized Probe
  source 1..80: mol_type = other DNA
gattgtactaaaatctgatttcaatacaaatgtagtctcccgaattgctttgatttttgtccagcggaagccttggggag

SEQ ID NO: 30247 - DNA, 80 bp, synthetic construct
  misc_feature 1..80: note = Artificially Synthesized Probe
  source 1..80: mol_type = other DNA
tcaagtgaaggaaatcatatgagtagggggaggaggtggcaaatatgcctgcgtatccacagaactcacccaccgtgtgt

SEQ ID NO: 30248 - DNA, 80 bp, synthetic construct
  misc_feature 1..80: note = Artificially Synthesized Probe
  source 1..80: mol_type = other DNA
ataactaattggcaatgaacagctgtgtgagaaaggcctgtgagttgcttctaaatgctttattactaatatcaactctg

SEQ ID NO: 30249 - DNA, 80 bp, synthetic construct
  misc_feature 1..80: note = Artificially Synthesized Probe
  source 1..80: mol_type = other DNA
cgcctcccgggttcaagcagctctcccgcctcagcctcccgagtagatgggactacagctgcacgccaccacacctgggc

SEQ ID NO: 30250 - DNA, 80 bp, synthetic construct
  misc_feature 1..80: note = Artificially Synthesized Probe
  source 1..80: mol_type = other DNA
gtccaggagtcctgtagtggagaagataaaagtcaatgcttaactcataggttaacctcagcatgcttttgatttggtca

SEQ ID NO: 30251 - DNA, 80 bp, synthetic construct
  misc_feature 1..80: note = Artificially Synthesized Probe
  source 1..80: mol_type = other DNA
gaaaaaacaactcacattcaacccttgagatgctaagttttcttttaaagtaaaggaaatgttataagattttctgaaac

SEQ ID NO: 30252 - DNA, 80 bp, synthetic construct
  misc_feature 1..80: note = Artificially Synthesized Probe
  source 1..80: mol_type = other DNA
ggtgcataatgtggtcaagagcagcagtcaaaaataattggtttcttttcccatgggatgagaaagtgcgttccttcccc

SEQ ID NO: 30253 - DNA, 80 bp, synthetic construct
  misc_feature 1..80: note = Artificially Synthesized Probe
  source 1..80: mol_type = other DNA
tgggactacaggtgcaagccaccacactcggctaatttttatatttttagtagagacagggtttcaccatgttggccaag

SEQ ID NO: 30254 - DNA, 80 bp, synthetic construct
  misc_feature 1..80: note = Artificially Synthesized Probe
  source 1..80: mol_type = other DNA
actgtttgtacttctcgtctggctaacacccatgtggcaaataggtttcatcatttgtttcagcttagatttgttgacag

SEQ ID NO: 30255 - DNA, 80 bp, synthetic construct
  misc_feature 1..80: note = Artificially Synthesized Probe
  source 1..80: mol_type = other DNA
ccactgtagtcgtttctggaatcaaaacaataaaatgacatttctgttaagatgtttttcaagctagaggtgacaggcgt

SEQ ID NO: 30256 - DNA, 80 bp, synthetic construct
  misc_feature 1..80: note = Artificially Synthesized Probe
  source 1..80: mol_type = other DNA
tcacttatttactcttcataaaatggcttaccagtcatgggaaggaaaagtcagggtcttttgtccacaacactaggaat

SEQ ID NO: 30257 - DNA, 80 bp, synthetic construct
  misc_feature 1..80: note = Artificially Synthesized Probe
  source 1..80: mol_type = other DNA
ccaagaaaagtcctaaaatgcttttcctttatcataacaaataagggtgcagagtcatgtggaatgttttatcttttttt

SEQ ID NO: 30258 - DNA, 80 bp, synthetic construct
  misc_feature 1..80: note = Artificially Synthesized Probe
  source 1..80: mol_type = other DNA
atgggtttctgtagaaatagaaaaatggtttctgtggaactcgccggaatgacaagaatacccatttcaatttgaaccta

SEQ ID NO: 30259 - DNA, 80 bp, synthetic construct
  misc_feature 1..80: note = Artificially Synthesized Probe
  source 1..80: mol_type = other DNA
tgggagtagttgtcaagtcatatcatggtaaaagattatgcattttttatttcttcttaaagatgcacaaataaggccag

SEQ ID NO: 30260 - DNA, 80 bp, synthetic construct
  misc_feature 1..80: note = Artificially Synthesized Probe
  source 1..80: mol_type = other DNA
tgtgggtttgtgtttgtggcagggctgaattagctctggagtcagaaaaactgctttttaagctgcactcttgtatatgt

SEQ ID NO: 30261 - DNA, 80 bp, synthetic construct
  misc_feature 1..80: note = Artificially Synthesized Probe
  source 1..80: mol_type = other DNA
tacatgctaatgcacatgaattatttgaaatcaattgaaatgaattttaggtttcatttgcttggtgtcaggcttaattt

SEQ ID NO: 30262 - DNA, 80 bp, synthetic construct
  misc_feature 1..80: note = Artificially Synthesized Probe
  source 1..80: mol_type = other DNA
ctataatcccagctactcaggaggctgagacagcagaatcacttgaacccgggaggcggaagttgcagtgagccgagatc

SEQ ID NO: 30263 - DNA, 80 bp, synthetic construct
  misc_feature 1..80: note = Artificially Synthesized Probe
  source 1..80: mol_type = other DNA
gtaatcccagctacttgggaggctgaggcaggagaagtgcttgaacccgggaggtggaggtcgcagtgagccgagatggg

SEQ ID NO: 30264 - DNA, 80 bp, synthetic construct
  misc_feature 1..80: note = Artificially Synthesized Probe
  source 1..80: mol_type = other DNA
gcggtgggttaatctgtgctgttgtgctgtttgtctcactgtccctgtaggtgaagctattggtatgggttttcctgtga

SEQ ID NO: 30265 - DNA, 80 bp, synthetic construct
  misc_feature 1..80: note = Artificially Synthesized Probe
  source 1..80: mol_type = other DNA
agacggattcaaccttgcatcagccatttgttagccaggtcactctgttctttgtctgtaaatgagattgatcgttgttc

SEQ ID NO: 30266 - DNA, 80 bp, synthetic construct
  misc_feature 1..80: note = Artificially Synthesized Probe
  source 1..80: mol_type = other DNA
caagcttcttaacttcctatcctcgatgcacttaatcataaaatggtaataatagcaccgattttgggggagtcgttcca

SEQ ID NO: 30267 - DNA, 80 bp, synthetic construct
  misc_feature 1..80: note = Artificially Synthesized Probe
  source 1..80: mol_type = other DNA
gaattagtgattctgagggacatatcagaactctgaggtttgtttccttctcatcttgagggaaacagcaaatgtatgtt

SEQ ID NO: 30268 - DNA, 80 bp, synthetic construct
  misc_feature 1..80: note = Artificially Synthesized Probe
  source 1..80: mol_type = other DNA
cttttattaaagggagtaaacagaaggataagggagaaagcataactaaggagcttgttttcatggtagagctatgttaa

SEQ ID NO: 30269 - DNA, 80 bp, synthetic construct
  misc_feature 1..80: note = Artificially Synthesized Probe
  source 1..80: mol_type = other DNA
atcaggacaaaggattgtgcatttaaactatttcactagaactgggtggtggttttgctctctttcttctgggtgaattg

SEQ ID NO: 30270 - DNA, 80 bp, synthetic construct
  misc_feature 1..80: note = Artificially Synthesized Probe
  source 1..80: mol_type = other DNA
gcagagtctcacagagctgcagatcttttgttcatcttgcagagttaacaagtctgatcctgttagtccagatttcttaa

SEQ ID NO: 30271 - DNA, 80 bp, synthetic construct
  misc_feature 1..80: note = Artificially Synthesized Probe
  source 1..80: mol_type = other DNA
acctaacagtcagaggtcagtatctcagcgtgtgaattatagaggaaatacagagagaacctcttccacttttacttttc

SEQ ID NO: 30272 - DNA, 80 bp, synthetic construct
  misc_feature 1..80: note = Artificially Synthesized Probe
  source 1..80: mol_type = other DNA
gccaccatgctcagccaaatgtcctcttacagtttcaggatgcttgctctgaagtgacaatttatgggttgaaatattta

SEQ ID NO: 30273 - DNA, 80 bp, synthetic construct
  misc_feature 1..80: note = Artificially Synthesized Probe
  source 1..80: mol_type = other DNA
gtggtcccagctactcaggaggctggggcaggagaatcgcttgaacccaggacgcagaggttgcagtgagctgagattgt

SEQ ID NO: 30274 - DNA, 80 bp, synthetic construct
  misc_feature 1..80: note = Artificially Synthesized Probe
  source 1..80: mol_type = other DNA
ttgcagtaggctgagatagcgccactgcactccagcctgggaaacgagcaaaactccgtctcaaaaaaaaaaaagagtct

SEQ ID NO: 30275 - DNA, 80 bp, synthetic construct
  misc_feature 1..80: note = Artificially Synthesized Probe
  source 1..80: mol_type = other DNA
ctttgtacccttctatggaataatgagtgtatcccaaaagtaaatccatgatgaggtcccgtttttcgttcctccttggc

SEQ ID NO: 30276 - DNA, 80 bp, synthetic construct
  misc_feature 1..80: note = Artificially Synthesized Probe
  source 1..80: mol_type = other DNA
ggggtaaagacagccagggaatgatgtaacccagaataaaaaaggaggtttaaaaaaaaaaacaaccttaatgagcagct

SEQ ID NO: 30277 - DNA, 80 bp, synthetic construct
  misc_feature 1..80: note = Artificially Synthesized Probe
  source 1..80: mol_type = other DNA
tcctgggctcaagagatcctctgaccttggcctcccaaagtgccagcattccaggtgtgagccaccatgcccagcactgc

SEQ ID NO: 30278 - DNA, 80 bp, synthetic construct
  misc_feature 1..80: note = Artificially Synthesized Probe
  source 1..80: mol_type = other DNA
cctcacaagacaaaccaacatatctttggtgaggaggacaaaaaaatgagatagattaaaaaaatgacgacaggctgggc

SEQ ID NO: 30279 - DNA, 80 bp, synthetic construct
  misc_feature 1..80: note = Artificially Synthesized Probe
  source 1..80: mol_type = other DNA
gacggggccgtgggaggagagcccaaagctgaagcgaggggagcagtgcagtgggcgcaggtcaggctggaggaggtgag

SEQ ID NO: 30280 - DNA, 80 bp, synthetic construct
  misc_feature 1..80: note = Artificially Synthesized Probe
  source 1..80: mol_type = other DNA
gtccaagtgtaccaatttagatcctgaaattaccctgccataggcaagaaacatggtcacaaagtggcccagaggaggta

SEQ ID NO: 30281 - DNA, 80 bp, synthetic construct
  misc_feature 1..80: note = Artificially Synthesized Probe
  source 1..80: mol_type = other DNA
aggccaaggcaggagatcacttgagctcaagactttgagaccagcctgggcaacatagagagatgccacctctacaaaaa

SEQ ID NO: 30282 - DNA, 80 bp, synthetic construct
  misc_feature 1..80: note = Artificially Synthesized Probe
  source 1..80: mol_type = other DNA
tttaagtaaaaaagaaaatgaaataaaacccagactggcagcgcatggttcttcctggctgttcccatgaccaggcttca

SEQ ID NO: 30283 - DNA, 80 bp, synthetic construct
  misc_feature 1..80: note = Artificially Synthesized Probe
  source 1..80: mol_type = other DNA
ctgaaacagctcttgaacacaggaggtggatggatgcagatttgggagggatatttattaatgcatcaagcaaacggagt

SEQ ID NO: 30284 - DNA, 80 bp, synthetic construct
  misc_feature 1..80: note = Artificially Synthesized Probe
  source 1..80: mol_type = other DNA
agcctcccaagtagctgggattacagacgcccacctctgtgttccgctaattgttttatttttagtagagacagggtttc

SEQ ID NO: 30285 - DNA, 80 bp, synthetic construct
  misc_feature 1..80: note = Artificially Synthesized Probe
  source 1..80: mol_type = other DNA
atttctaccacctctcctgcttctaccccaagtgaaaaatccaactctgaacgctgagttagaactgcacgattgtaagg

SEQ ID NO: 30286 - DNA, 80 bp, synthetic construct
  misc_feature 1..80: note = Artificially Synthesized Probe
  source 1..80: mol_type = other DNA
caaaactgcaccgctgcactccaacctgggcaaccagagtgagaacccattttgaaaaaaaaaaacagccccagcacagt

SEQ ID NO: 30287 - DNA, 80 bp, synthetic construct
  misc_feature 1..80: note = Artificially Synthesized Probe
  source 1..80: mol_type = other DNA
ctccatttggagccatttgcctcattgccctgagctgccctcaactgcaggacacagggaaggcgaaagtggagggtgac

SEQ ID NO: 30288 - DNA, 80 bp, synthetic construct
  misc_feature 1..80: note = Artificially Synthesized Probe
  source 1..80: mol_type = other DNA
gctgaagccagggtcaccacatgggggcaaaagacctcccttaggcatgtcccaaaccaccattacctccaatgaataca

SEQ ID NO: 30289 - DNA, 80 bp, synthetic construct
  misc_feature 1..80: note = Artificially Synthesized Probe
  source 1..80: mol_type = other DNA
ttggccaggtgcagtggtcacacctgtaatcccaacacttgaggaggctggggtgggaggatcgcttgagaccaggagtt

SEQ ID NO: 30290 - DNA, 80 bp, synthetic construct
  misc_feature 1..80: note = Artificially Synthesized Probe
  source 1..80: mol_type = other DNA
agggtctcagtatgttgcccaggctggtctcaaactttgcagctaaagcgatccatccaccttggactcccaaagtgctg

SEQ ID NO: 30291 - DNA, 80 bp, synthetic construct
  misc_feature 1..80: note = Artificially Synthesized Probe
  source 1..80: mol_type = other DNA
tgtaacccttgcattttggcaggccgaggagggtggatcacctgaggttaggagttcaagaccagtcaggccaatagagt

SEQ ID NO: 30292 - DNA, 80 bp, synthetic construct
  misc_feature 1..80: note = Artificially Synthesized Probe
  source 1..80: mol_type = other DNA
tgatgtcatcgatgtaggtggtgggtgtcgtgtacagaagtacagaccgctgcagtccagcgtagttgaaaaagtcaaaa

SEQ ID NO: 30293 - DNA, 80 bp, synthetic construct
  misc_feature 1..80: note = Artificially Synthesized Probe
  source 1..80: mol_type = other DNA
tgcacctgggccagtggggccaggagttcctcctcagagtggatggggcacaatatctcctgagacaggagcaagcccag

SEQ ID NO: 30294 - DNA, 80 bp, synthetic construct
  misc_feature 1..80: note = Artificially Synthesized Probe
  source 1..80: mol_type = other DNA
tgccttttttttttttttggagacgtagtctcactatgtcgcccaagttggagtgcagtggcatcctgatctcagctcac

SEQ ID NO: 30295 - DNA, 80 bp, synthetic construct
  misc_feature 1..80: note = Artificially Synthesized Probe
  source 1..80: mol_type = other DNA
ataacgccttatagagggaatgggcttctgatgaaaggatgtgtttggcttcatttcctctctcttcatcttacgctttt

SEQ ID NO: 30296 - DNA, 80 bp, synthetic construct
  misc_feature 1..80: note = Artificially Synthesized Probe
  source 1..80: mol_type = other DNA
tactctacttacacaaataactctttcagtggaatgcaagcttcagtgagtgctccgacacagttctactgttagacaaa

SEQ ID NO: 30297 - DNA, 80 bp, synthetic construct
  misc_feature 1..80: note = Artificially Synthesized Probe
  source 1..80: mol_type = other DNA
gtccagtccacatgttaatttttcacttgactgaagtcttatgtcttctttgtgttctttccacatttggtttggtgaac

SEQ ID NO: 30298 - DNA, 80 bp, synthetic construct
  misc_feature 1..80: note = Artificially Synthesized Probe
  source 1..80: mol_type = other DNA
aacttgtctcactaacatactaagacatttaataacttcacttgcacaaatgtggggaaataaagtgagcctaaagtttg

SEQ ID NO: 30299 - DNA, 80 bp, synthetic construct
  misc_feature 1..80: note = Artificially Synthesized Probe
  source 1..80: mol_type = other DNA
gtggaacaaggcagaatgcagataaaatgaatattttacagatacttgttccagctgccagtccaataacaagataacct

SEQ ID NO: 30300 - DNA, 80 bp, synthetic construct
  misc_feature 1..80: note = Artificially Synthesized Probe
  source 1..80: mol_type = other DNA
gaaagcatgtgccagatggcttgccagtgtgcacaggaggtcatttgggaatgacactatattgataacatgctatattg

SEQ ID NO: 30301 - DNA, 80 bp, synthetic construct
  misc_feature 1..80: note = Artificially Synthesized Probe
  source 1..80: mol_type = other DNA
tgacgaagagagaagacaacccactttgccatatatgcccatgtaagaagatgacttttctcttttatactccaggcaaa

SEQ ID NO: 30302 - DNA, 80 bp, synthetic construct
  misc_feature 1..80: note = Artificially Synthesized Probe
  source 1..80: mol_type = other DNA
accccatctctgctattaaaaaaatacaaaaattagtcaggcatggtagcccgcacctgtagtcccaattactgtggagg

SEQ ID NO: 30303 - DNA, 80 bp, synthetic construct
  misc_feature 1..80: note = Artificially Synthesized Probe
  source 1..80: mol_type = other DNA
tactattatgtagattttgtctttttttaaattgtgtgctttacagtaaccttgtgggaaactgggactgtgagtgatca

SEQ ID NO: 30304 - DNA, 80 bp, synthetic construct
  misc_feature 1..80: note = Artificially Synthesized Probe
  source 1..80: mol_type = other DNA
aggttgtcaagatggtccctaagtggttgcattgggccaaaaatgaatcaaggctgagatttacccttgaaatacagtac

SEQ ID NO: 30305 - DNA, 80 bp, synthetic construct
  misc_feature 1..80: note = Artificially Synthesized Probe
  source 1..80: mol_type = other DNA
agtttaaaatggaatgacttttattctttgtcaaatattaacatacctggttcagagaaatgatgggcaagttgtaccct

SEQ ID NO: 30306 - DNA, 80 bp, synthetic construct
  misc_feature 1..80: note = Artificially Synthesized Probe
  source 1..80: mol_type = other DNA
cttatttagcctttagagaaatgctgtgagataagtactgtgttattggccccattttaaaattaatgggatagaaaccc

SEQ ID NO: 30307 - DNA, 80 bp, synthetic construct
  misc_feature 1..80: note = Artificially Synthesized Probe
  source 1..80: mol_type = other DNA
gggtattattgttattatgcttataaaggggtaacttgaagttgcattttggaaactgtctatgctaagaaaggtggaag

SEQ ID NO: 30308 - DNA, 80 bp, synthetic construct
  misc_feature 1..80: note = Artificially Synthesized Probe
  source 1..80: mol_type = other DNA
caaagtttcctggagaacccacaaacaacagaaaacatcttctctgacacctctcattagtctacccaactgaagacttc

SEQ ID NO: 30309 - DNA, 80 bp, synthetic construct
  misc_feature 1..80: note = Artificially Synthesized Probe
  source 1..80: mol_type = other DNA
tccactccttctttacacctttcagttcagtgtaatccacttacatttagggtgcacatttcttagccctgtggatacca

SEQ ID NO: 30310 - DNA, 80 bp, synthetic construct
  misc_feature 1..80: note = Artificially Synthesized Probe
  source 1..80: mol_type = other DNA
gatttatagtcctttgggtatatacccagtaatgggatggctgggtcaaatggaacctcttttctttataaattacccag

SEQ ID NO: 30311 - DNA, 80 bp, synthetic construct
  misc_feature 1..80: note = Artificially Synthesized Probe
  source 1..80: mol_type = other DNA
ggccttgatgtttactgggggccttgggtgtttcttaatttgttcaattatttacaaaaggttttttttggggtgggagg

SEQ ID NO: 30312 - DNA, 80 bp, synthetic construct
  misc_feature 1..80: note = Artificially Synthesized Probe
  source 1..80: mol_type = other DNA
tagaccataatgcctctctttccagctggatctacatgcctccactctggcttttaacaaggctctgaactattgtcaga

SEQ ID NO: 30313 - DNA, 80 bp, synthetic construct
  misc_feature 1..80: note = Artificially Synthesized Probe
  source 1..80: mol_type = other DNA
accagctaatagacgtctgtggacatattcaattctgcaaagctgcaaaatatctgtgagaagctggtttttgaatagga

SEQ ID NO: 30314 - DNA, 80 bp, synthetic construct
  misc_feature 1..80: note = Artificially Synthesized Probe
  source 1..80: mol_type = other DNA
ggcttagggcacctagcaggcaagtgttggcaaatctctcagattgataagagtttaatgattaagtggcaaattagtgc

SEQ ID NO: 30315 - DNA, 80 bp, synthetic construct
  misc_feature 1..80: note = Artificially Synthesized Probe
  source 1..80: mol_type = other DNA
aactacaatttagaaaaattgaacttaaggataaagtgctttgtgtgatagcatctgagcctactgttttggatagccta

SEQ ID NO: 30316 - DNA, 80 bp, synthetic construct
  misc_feature 1..80: note = Artificially Synthesized Probe
  source 1..80: mol_type = other DNA
ctttgtggaggaggaaaagaaaacatcagaaacattgcctgacttgcttaagttcacacagccgccaagtggcagaactg

SEQ ID NO: 30317 - DNA, 80 bp, synthetic construct
  misc_feature 1..80: note = Artificially Synthesized Probe
  source 1..80: mol_type = other DNA
agtttttcagattgtctgttgagatcccttagcacaagtattagtaaacttcctatgtaaagggagagagagtaactact

SEQ ID NO: 30318 - DNA, 80 bp, synthetic construct
  misc_feature 1..80: note = Artificially Synthesized Probe
  source 1..80: mol_type = other DNA
aaagtacatcacacagaataagggaaggtattattttgtggaattttatttcagacaagtgtgtgtgtgagtctgtgtgc

SEQ ID NO: 30319 - DNA, 80 bp, synthetic construct
  misc_feature 1..80: note = Artificially Synthesized Probe
  source 1..80: mol_type = other DNA
ttgtgatagatcaagaaagcaaaaaacaaacacagaaaggatctgaaatatatctgcttgcaatcacaagctatggattt

SEQ ID NO: 30320 - DNA, 80 bp, synthetic construct
  misc_feature 1..80: note = Artificially Synthesized Probe
  source 1..80: mol_type = other DNA
acagctgcaaaataataaaggtggactcttatcatacatcatacagaaaaattaactgataataaaccaaagatctaaat

SEQ ID NO: 30321 - DNA, 80 bp, synthetic construct
  misc_feature 1..80: note = Artificially Synthesized Probe
  source 1..80: mol_type = other DNA
ttataaaaggaatgaaatactgatacatgctacaatatggatgaactttaaacacattattttaagtgaaagaggacata

SEQ ID NO: 30322 - DNA, 80 bp, synthetic construct
  misc_feature 1..80: note = Artificially Synthesized Probe
  source 1..80: mol_type = other DNA
aaatcactacgaagtaagtttgagataccatccctactttcccctctattcagaccttttctgcaaaggagttcacagtg

SEQ ID NO: 30323 - DNA, 80 bp, synthetic construct
  misc_feature 1..80: note = Artificially Synthesized Probe
  source 1..80: mol_type = other DNA
taaataccaatcgggaactgtgctagattctggggatacacggatgaataaagtaggcatgatgatatcataccagtgcc

SEQ ID NO: 30324 - DNA, 80 bp, synthetic construct
  misc_feature 1..80: note = Artificially Synthesized Probe
  source 1..80: mol_type = other DNA
agagttttcccaaatgctgggcacaccccccagtagagtatgcagtgtctaattttgtttgagttacatccagtttggtt

SEQ ID NO: 30325 - DNA, 80 bp, synthetic construct
  misc_feature 1..80: note = Artificially Synthesized Probe
  source 1..80: mol_type = other DNA
aggaaattataccttttgaaaactaaaagccatatagctaccaacatcttcgttaataactctttagtttggaaatgaat

SEQ ID NO: 30326 - DNA, 80 bp, synthetic construct; identical to SEQ ID NO: 30302
  misc_feature 1..80: note = Artificially Synthesized Probe
  source 1..80: mol_type = other DNA

SEQ ID NO: 30327 - DNA, 80 bp, synthetic construct; identical to SEQ ID NO: 30303
  misc_feature 1..80: note = Artificially Synthesized Probe
  source 1..80: mol_type = other DNA

SEQ ID NO: 30328 - DNA, 80 bp, synthetic construct; identical to SEQ ID NO: 30304
  misc_feature 1..80: note = Artificially Synthesized Probe
  source 1..80: mol_type = other DNA

SEQ ID NO: 30329 - DNA, 80 bp, synthetic construct; identical to SEQ ID NO: 30305
  misc_feature 1..80: note = Artificially Synthesized Probe
  source 1..80: mol_type = other DNA

SEQ ID NO: 30330 - DNA, 80 bp, synthetic construct
  misc_feature 1..80: note = Artificially Synthesized Probe
  source 1..80: mol_type = other DNA
aacttcattagcagtatgagctggacatgtgtcccgtttgtgcttatctgcatataagagaagttgagaaagggaacaag

SEQ ID NO: 30331 - DNA, 80 bp, synthetic construct
  misc_feature 1..80: note = Artificially Synthesized Probe
  source 1..80: mol_type = other DNA
gtattgtattattggccttattttaaaattaaggggccagaagcccctccagaatttctgcatggcagaggtttacagat

SEQ ID NO: 30332 - DNA, 80 bp, synthetic construct
  misc_feature 1..80: note = Artificially Synthesized Probe
  source 1..80: mol_type = other DNA
atgactgcagagtattccattgtatgaatgttctgtggtttatatttcagtctcctattctgtgcattcatgtgtttttc

SEQ ID NO: 30333 - DNA, 80 bp, synthetic construct
  misc_feature 1..80: note = Artificially Synthesized Probe
  source 1..80: mol_type = other DNA
ttcttaacattcctttggtggagaagccctatagcctgaggctttaaagggggcagaaaattacagcagattgtcaaaag

SEQ ID NO: 30334 - DNA, 80 bp, synthetic construct
  misc_feature 1..80: note = Artificially Synthesized Probe
  source 1..80: mol_type = other DNA
gcctttcagtaggaattaatacccatgcttgcttagtggtaagaggaaggcacagaggcttgctattggaagtctatagt

SEQ ID NO: 30335 - DNA, 80 bp, synthetic construct
  misc_feature 1..80: note = Artificially Synthesized Probe
  source 1..80: mol_type = other DNA
cttagattatatctcttacccctcagtgtccttataccatagccgctatgagaaattatattttgctctagcaatgctga

SEQ ID NO: 30336 - DNA, 80 bp, synthetic construct
  misc_feature 1..80: note = Artificially Synthesized Probe
  source 1..80: mol_type = other DNA
cctcctagctctctgctgcatgctttatctaccagaccctcagctttcccaaataattgacatttctaacctggaatgct

SEQ ID NO: 30337 - DNA, 80 bp, synthetic construct
  misc_feature 1..80: note = Artificially Synthesized Probe
  source 1..80: mol_type = other DNA
aacacttcttcctttcctaacttggtagagaagggtgctgtatttattctatctcgaaggtgttgtggcctaggaggact

SEQ ID NO: 30338 - DNA, 80 bp, synthetic construct; identical to SEQ ID NO: 30316
  misc_feature 1..80: note = Artificially Synthesized Probe
  source 1..80: mol_type = other DNA

SEQ ID NO: 30339 - DNA, 80 bp, synthetic construct
  misc_feature 1..80: note = Artificially Synthesized Probe
  source 1..80: mol_type = other DNA
agggttttgtttccctcacttccagtctccctcacttcctccctcaattcacatttaattttactttaatcactttccaa

SEQ ID NO: 30340 - DNA, 80 bp, synthetic construct
  misc_feature 1..80: note = Artificially Synthesized Probe
  source 1..80: mol_type = other DNA
ccctgggcaacataagaagaccccgtatttacaaattaaataacaaaaaaattagtcaggtgtggttgagcacacctgaa

SEQ ID NO: 30341 - DNA, 80 bp, synthetic construct
  misc_feature 1..80: note = Artificially Synthesized Probe
  source 1..80: mol_type = other DNA
acagtgaaaaagatttacttgtgtcattaagcaatatatttcacaatgattcttaagtaattatggaccattatagccca

SEQ ID NO: 30342 - DNA, 80 bp, synthetic construct
  misc_feature 1..80: note = Artificially Synthesized Probe
  source 1..80: mol_type = other DNA
attaagttaaaatgcgcataatttttttgcaagaatggaaaacctaatcctaaaatttctgtgaaattattagggatcta

SEQ ID NO: 30343 - DNA, 80 bp, synthetic construct
  misc_feature 1..80: note = Artificially Synthesized Probe
  source 1..80: mol_type = other DNA
taccatttgacccagccatccaattactgggtatatacccaaaggaccataaatcatgctgctataaaaacacatgcaca

SEQ ID NO: 30344 - DNA, 80 bp, synthetic construct
  misc_feature 1..80: note = Artificially Synthesized Probe
  source 1..80: mol_type = other DNA
agaggtagaaaacaaattagtggtttccaggggctggaggaattggaagtggctgctactgggtaagagggttccttctg

SEQ ID NO: 30345 - DNA, 80 bp, synthetic construct
  misc_feature 1..80: note = Artificially Synthesized Probe
  source 1..80: mol_type = other DNA
gtaaaaatgtaggtccagcctgattttgtcagcaccatataagaaggattgggttttttttttgagcaaaagatattaca

SEQ ID NO: 30346 - DNA, 80 bp, synthetic construct
  misc_feature 1..80: note = Artificially Synthesized Probe
  source 1..80: mol_type = other DNA
tggatgaataaagtaggcatgatgatatcataccagtccctttgtttcctcccattaaattagtatgttatgacctagaa

SEQ ID NO: 30347 - DNA, 80 bp, synthetic construct
  misc_feature 1..80: note = Artificially Synthesized Probe
  source 1..80: mol_type = other DNA
agtttggtttgccccatggagcaacacaaagaatacatctttttttctgtgtaatagcacttcaaatatatgaatacata

SEQ ID NO: 30348 - DNA, 80 bp, synthetic construct
  misc_feature 1..80: note = Artificially Synthesized Probe
  source 1..80: mol_type = other DNA
ttagaaaatgctgatctctcttccctgtatgctacagagtatgctcagtagatcctctcttccctgtatgctactgtatg

SEQ ID NO: 30349 - DNA, 80 bp, synthetic construct
  misc_feature 1..80: note = Artificially Synthesized Probe
  source 1..80: mol_type = other DNA
ccatacatcctgagatcatgagctggttcctgaagttagtgcaaaaaaactaccaaagacaactgcaagtgtcagtgtct

SEQ ID NO: 30350 - DNA, 80 bp, synthetic construct
  misc_feature 1..80: note = Artificially Synthesized Probe
  source 1..80: mol_type = other DNA
tttataaaggaaagaggttttattgatctacagttttgcatggctgggaaggtctcaggatacttacaatcatgaccaaa

SEQ ID NO: 30351 - DNA, 80 bp, synthetic construct
  misc_feature 1..80: note = Artificially Synthesized Probe
  source 1..80: mol_type = other DNA
ttggtgggtaaggacctcagagtattcaaagtatcaaatggaatgtgactgaagagttatcttgctgatcttacccagga

SEQ ID NO: 30352 - DNA, 80 bp, synthetic construct
  misc_feature 1..80: note = Artificially Synthesized Probe
  source 1..80: mol_type = other DNA
caaagttcctaagaaagagcaagcttagtaagttggagttttggggaaaagttcagtggttgcaaccaaatgacaggaga

SEQ ID NO: 30353 - DNA, 80 bp, synthetic construct
  misc_feature 1..80: note = Artificially Synthesized Probe
  source 1..80: mol_type = other DNA
aaagatctccagttttattcctaaacctatctgtgctgaagaactttttggatgcttcccacaggactgaaattcctgcc

SEQ ID NO: 30354 - DNA, 80 bp, synthetic construct
  misc_feature 1..80: note = Artificially Synthesized Probe
  source 1..80: mol_type = other DNA
tgagaggtaataacattcatttattcaaatgcagatgctgaacatagcagatttgtgacaatctcttactgctcacttag

SEQ ID NO: 30355 - DNA, 80 bp, synthetic construct
  misc_feature 1..80: note = Artificially Synthesized Probe
  source 1..80: mol_type = other DNA
agagaatacagtaataggcaggagaacagggagttaggatagccaagggttggggcataagcaaaggaatagcaggtgca

SEQ ID NO: 30356 - DNA, 80 bp, synthetic construct
  misc_feature 1..80: note = Artificially Synthesized Probe
  source 1..80: mol_type = other DNA
tctaattttcatattttttgtatagactaggtttcacctttttgctcaggctggtctcaaactgctgagctcaagcaatc

SEQ ID NO: 30357 - DNA, 80 bp, synthetic construct
  misc_feature 1..80: note = Artificially Synthesized Probe
  source 1..80: mol_type = other DNA
cagatatggggaaaaaaccacaaattctcccatagtttggaagttatgagagaaaataatgtcttaatgtataaaagagc

SEQ ID NO: 30358 - DNA, 80 bp, synthetic construct
  misc_feature 1..80: note = Artificially Synthesized Probe
  source 1..80: mol_type = other DNA
attaacatatctgcttcagggaaacgatggacaagttgtcccctttctcctataaagcgaaatttcaatgtaagtccaaa

SEQ ID NO: 30359 - DNA, 80 bp, synthetic construct; identical to SEQ ID NO: 30330
  misc_feature 1..80: note = Artificially Synthesized Probe
  source 1..80: mol_type = other DNA

SEQ ID NO: 30360 - DNA, 80 bp, synthetic construct
  misc_feature 1..80: note = Artificially Synthesized Probe
  source 1..80: mol_type = other DNA
gtgactgagcggaccataaagcatattgcaaaagacaaattccctcacatccctccagtccctgagctaagcgctttggt

SEQ ID NO: 30361 - DNA, 80 bp, synthetic construct; identical to SEQ ID NO: 30308
  misc_feature 1..80: note = Artificially Synthesized Probe
  source 1..80: mol_type = other DNA

SEQ ID NO: 30362 - DNA, 80 bp, synthetic construct; identical to SEQ ID NO: 30309
  misc_feature 1..80: note = Artificially Synthesized Probe
  source 1..80: mol_type = other DNA

SEQ ID NO: 30363 - DNA, 80 bp, synthetic construct
  misc_feature 1..80: note = Artificially Synthesized Probe
  source 1..80: mol_type = other DNA
atacatattcctccaagtttcctaactgttcagcaggatgttagggactacctgagtcagaattccaggggttcaggtag

SEQ ID NO: 30364 - DNA, 80 bp, synthetic construct
  misc_feature 1..80: note = Artificially Synthesized Probe
  source 1..80: mol_type = other DNA
agacagcggtcaactctacttggagaggtagaaagacctcatggaggtgtctttgaatttatcttgaaagaagtctagga

SEQ ID NO: 30365 - DNA, 80 bp, synthetic construct; identical to SEQ ID NO: 30312
  misc_feature 1..80: note = Artificially Synthesized Probe
  source 1..80: mol_type = other DNA

SEQ ID NO: 30366 - DNA, 80 bp, synthetic construct; identical to SEQ ID NO: 30313
  misc_feature 1..80: note = Artificially Synthesized Probe
  source 1..80: mol_type = other DNA

SEQ ID NO: 30367 - DNA, 80 bp, synthetic construct; identical to SEQ ID NO: 30314
  misc_feature 1..80: note = Artificially Synthesized Probe
  source 1..80: mol_type = other DNA

SEQ ID NO: 30368 - DNA, 80 bp, synthetic construct; identical to SEQ ID NO: 30315
  misc_feature 1..80: note = Artificially Synthesized Probe
  source 1..80: mol_type = other DNA

SEQ ID NO: 30369 - DNA, 80 bp, synthetic construct
  misc_feature 1..80: note = Artificially Synthesized Probe
  source 1..80: mol_type = other DNA
ttaattattctttgtggaggaggaaaaaaaaacatcagaaacattgcccgacttgcttaagttcacacagcagccaagtg

SEQ ID NO: 30370 - DNA, 80 bp, synthetic construct
  misc_feature 1..80: note = Artificially Synthesized Probe
  source 1..80: mol_type = other DNA
aacttaagtttttcaaattgtctgttgagagcccttagtacaagtattagtaaacttcttatgtaaagggagagggagta

SEQ ID NO: 30371 - DNA, 80 bp, synthetic construct
  misc_feature 1..80: note = Artificially Synthesized Probe
  source 1..80: mol_type = other DNA
tatcaattttgttgatcttttcaaaaaaccagctcctgggttcattaattttttgaagggttttttgtgtctctatttcc

SEQ ID NO: 30372 - DNA, 80 bp, synthetic construct
  misc_feature 1..80: note = Artificially Synthesized Probe
  source 1..80: mol_type = other DNA
tgagcctatgtgtgtctctgcacatgagatgggtttcctgaatacagcacactggtgggtcttgactctttatccaattt

SEQ ID NO: 30373 - DNA, 80 bp, synthetic construct
  misc_feature 1..80: note = Artificially Synthesized Probe
  source 1..80: mol_type = other DNA
tttcaactccatcagctcctttaagcacttctctgtattggttattctagttatacattcgtctaaacttttttcaaagt

SEQ ID NO: 30374 - DNA, 80 bp, synthetic construct
  misc_feature 1..80: note = Artificially Synthesized Probe
  source 1..80: mol_type = other DNA
ttatacaacaataacagacaaacagagagccaaatcatgagtgaaatcccattcacaattgcttcaaagagaatcaaata

SEQ ID NO: 30375 - DNA, 80 bp, synthetic construct
  misc_feature 1..80: note = Artificially Synthesized Probe
  source 1..80: mol_type = other DNA
aagaaaaaaacaaacaaccccatcaaaaagtgggcaaaggatatgaacagatacttctcaaaagaagacatttatgcagc

SEQ ID NO: 30376 - DNA, 80 bp, synthetic construct; identical to SEQ ID NO: 30340
  misc_feature 1..80: note = Artificially Synthesized Probe
  source 1..80: mol_type = other DNA

SEQ ID NO: 30377 - DNA, 80 bp, synthetic construct; identical to SEQ ID NO: 30341
  misc_feature 1..80: note = Artificially Synthesized Probe
  source 1..80: mol_type = other DNA

SEQ ID NO: 30378 - DNA, 80 bp, synthetic construct
  misc_feature 1..80: note = Artificially Synthesized Probe
  source 1..80: mol_type = other DNA
atagctaaaacaatctggaagaagaacaaagttcagtgaatcacacttcatgaattcaaaacttctaaccaagtaacagc

SEQ ID NO: 30379 - DNA, 80 bp, synthetic construct
  misc_feature 1..80: note = Artificially Synthesized Probe
  source 1..80: mol_type = other DNA
tcaaatgatggatcgataagcaaaatgtgatataccaacccaaattttcatcaaatgatggatggataaacaaaatgtga

SEQ ID NO: 30380 - DNA, 80 bp, synthetic construct; identical to SEQ ID NO: 30345
  misc_feature 1..80: note = Artificially Synthesized Probe
  source 1..80: mol_type = other DNA

SEQ ID NO: 30381 - DNA, 80 bp, synthetic construct; identical to SEQ ID NO: 30323
  misc_feature 1..80: note = Artificially Synthesized Probe
  source 1..80: mol_type = other DNA

SEQ ID NO: 30382 - DNA, 80 bp, synthetic construct; identical to SEQ ID NO: 30324
  misc_feature 1..80: note = Artificially Synthesized Probe
  source 1..80: mol_type = other DNA

SEQ ID NO: 30383 - DNA, 80 bp, synthetic construct
  misc_feature 1..80: note = Artificially Synthesized Probe
  source 1..80: mol_type = other DNA
gtgttcatgcttttggcttctcaccatttggcagaaataggaaattatacctttttaaaactaaaagccatataacacct

SEQ ID NO: 30384 - DNA, 80 bp, synthetic construct
  misc_feature 1..80: note = Artificially Synthesized Probe
  source 1..80: mol_type = other DNA
cctgagtcaggtagtgcagtggttgtaaagtgcagcatattcatttccaagctagagggttttgtgtccggattcaaagg

SEQ ID NO: 30385 - DNA, 80 bp, synthetic construct
  misc_feature 1..80: note = Artificially Synthesized Probe
  source 1..80: mol_type = other DNA
gtcacaccggaccatgtcatgtcctgcttgtcacgtccaccggacctggcgtcttggccttcggcagctggtgggcacgt

SEQ ID NO: 30386 - DNA, 80 bp, synthetic construct
  misc_feature 1..80: note = Artificially Synthesized Probe
  source 1..80: mol_type = other DNA
ccaaaagtgaccgggatgaatgcctggctcccccttctttccagccctagctcaggcccatcgtccccagctgatgtcgc

SEQ ID NO: 30387 - DNA, 80 bp, synthetic construct
  misc_feature 1..80: note = Artificially Synthesized Probe
  source 1..80: mol_type = other DNA
cttcctgccaccatcacggctcagacctcacgttcctggagagtaggggtggggtgctgaggggcagagggaagtgccgc

SEQ ID NO: 30388 - DNA, 80 bp, synthetic construct
  misc_feature 1..80: note = Artificially Synthesized Probe
  source 1..80: mol_type = other DNA
ataatggattatctccagcaacacaaggatcctggaccagagaataaagcagcagtggcgctcccagctctttagcatct

SEQ ID NO: 30389 - DNA, 80 bp, synthetic construct
  misc_feature 1..80: note = Artificially Synthesized Probe
  source 1..80: mol_type = other DNA
cacaactacaaccaattctgtgccatccgggcggtgagactgaaggggaagcctccagaaatacacatgtgctatgcaag

SEQ ID NO: 30390 - DNA, 80 bp, synthetic construct
  misc_feature 1..80: note = Artificially Synthesized Probe
  source 1..80: mol_type = other DNA
tttctgcaggcaaaccacaggtagccgggctcgggctatgacgcctgagcctgccctgctaccacgtggccacctgtgtt

SEQ ID NO: 30391 - DNA, 80 bp, synthetic construct
  misc_feature 1..80: note = Artificially Synthesized Probe
  source 1..80: mol_type = other DNA
aaatctactccagcccaaatgtttcaattgttcctcacccctggacatactttgcccccatctggaattaaaggatataa

SEQ ID NO: 30392 - DNA, 80 bp, synthetic construct
  misc_feature 1..80: note = Artificially Synthesized Probe
  source 1..80: mol_type = other DNA
agaggcagaggacaggttgccaaagctgtcaaagaacctctgggtccatgggtagacaaccaggagcctgtgagattgac

SEQ ID NO: 30393 - DNA, 80 bp, synthetic construct
  misc_feature 1..80: note = Artificially Synthesized Probe
  source 1..80: mol_type = other DNA
cagaacgatcaggacgaagaggggagggatgggcgtctgcgctcactcattccttcttccattcctcaatgaaacattta

SEQ ID NO: 30394 - DNA, 80 bp, synthetic construct
  misc_feature 1..80: note = Artificially Synthesized Probe
  source 1..80: mol_type = other DNA
gtgtgcacatatatgtgagcttatgcataactatgtatgaggctgcgtgtggacatgtgtgtttgtgcacaaccatgtat

SEQ ID NO: 30395 - DNA, 80 bp, synthetic construct
  misc_feature 1..80: note = Artificially Synthesized Probe
  source 1..80: mol_type = other DNA
caaaattaataagattaaaataaaaagaggggccttgccagtggctcaagcctctaatcctaccacttgggaggccaagg

SEQ ID NO: 30396 - DNA, 80 bp, synthetic construct
  misc_feature 1..80: note = Artificially Synthesized Probe
  source 1..80: mol_type = other DNA
agccaatgtaagaatgtggtgatataataatcagaaaaaaggattgttccaggtgacctctgaacacagaacctcggcta

SEQ ID NO: 30397 - DNA, 80 bp, synthetic construct
  misc_feature 1..80: note = Artificially Synthesized Probe
  source 1..80: mol_type = other DNA
taacaagaatatgaaaaactcttgaatactactcatccagactctccagctgttaacattctaccacatcggcttgctct

SEQ ID NO: 30398 - DNA, 80 bp, synthetic construct
  misc_feature 1..80: note = Artificially Synthesized Probe
  source 1..80: mol_type = other DNA
cagattttaaatgggttggccactgtaggtctattaacgtggtgacatttgagggagtggcaatactagggaaggggctt

SEQ ID NO: 30399 - DNA, 80 bp, synthetic construct
  misc_feature 1..80: note = Artificially Synthesized Probe
  source 1..80: mol_type = other DNA
ggacggcttgtggggcacaggctgtgagggtgcccgggacagctcgtggggcacaggttgtgagaggtgcccgggacggc

SEQ ID NO: 30400 - DNA, 80 bp, synthetic construct
  misc_feature 1..80: note = Artificially Synthesized Probe
  source 1..80: mol_type = other DNA
taccgttgctaacatcctatcgcacgcatccctctgcctcatgcacccaaccccaaggcctggtacactgcaggccccaa

SEQ ID NO: 30401 - DNA, 80 bp, synthetic construct
  misc_feature 1..80: note = Artificially Synthesized Probe
  source 1..80: mol_type = other DNA
tgcaagcacacgtactaactaaaaggaatatattcagcacatagaaatggttgtctaacggaggaggggggagttaataa

SEQ ID NO: 30402 - DNA, 80 bp, synthetic construct
  misc_feature 1..80: note = Artificially Synthesized Probe
  source 1..80: mol_type = other DNA
atctgataagaaacaccacccctgcagccccctcccctcacctgaccaatggccacagcctggctgggcccagctccctg

SEQ ID NO: 30403 - DNA, 80 bp, synthetic construct
  misc_feature 1..80: note = Artificially Synthesized Probe
  source 1..80: mol_type = other DNA
acaaccatctgggctcgctgagacctgggcaggcacaggcccaggttctgacaagcagagggtgaaaggtttcgttctag

SEQ ID NO: 30404 - DNA, 80 bp, synthetic construct
  misc_feature 1..80: note = Artificially Synthesized Probe
  source 1..80: mol_type = other DNA
tctgtgttctcagtattggagggaaggaggggagaagctgagtgatgggtccgggggcttcgcaggaactcggtcgtccc

SEQ ID NO: 30405 - DNA, 80 bp, synthetic construct
  misc_feature 1..80: note = Artificially Synthesized Probe
  source 1..80: mol_type = other DNA
tgaagccccacgcagccgccctcctccccggtcactgacctggtcctgcaggctcttcacggtgtaccccagcaccaagg

SEQ ID NO: 30406 - DNA, 80 bp, synthetic construct
  misc_feature 1..80: note = Artificially Synthesized Probe
  source 1..80: mol_type = other DNA
tgggccgcagggccagggtctgagcgcagaggggcagagaggacgaatagaggggaacgtgggccccagagaggcggcgg

SEQ ID NO: 30407 - DNA, 80 bp, synthetic construct
  misc_feature 1..80: note = Artificially Synthesized Probe
  source 1..80: mol_type = other DNA
ttctctcttcccctggattctctgcacccctagtgcttgactggagaaactgaggcctggggcacatgcgtcctggacag

SEQ ID NO: 30408 - DNA, 80 bp, synthetic construct
  misc_feature 1..80: note = Artificially Synthesized Probe
  source 1..80: mol_type = other DNA
tgtggaatcagtgtggaaaaagacccccaagaatatctcaaaagctccctaagcaggcggccggaccctgctgtggaggg

SEQ ID NO: 30409 - DNA, 80 bp, synthetic construct
  misc_feature 1..80: note = Artificially Synthesized Probe
  source 1..80: mol_type = other DNA
cagagcaaaattaggtcaaaaataagtatagttcattcctactcccttcaccccagccgccgctgattctaaaggccaca

SEQ ID NO: 30410 - DNA, 80 bp, synthetic construct
  misc_feature 1..80: note = Artificially Synthesized Probe
  source 1..80: mol_type = other DNA
gcgggagatcagcctgggggtgcagctctgcaaatccgcagtgatgaatcccagcattagggcgtgggaataaacccccc

SEQ ID NO: 30411 - DNA, 80 bp, synthetic construct
  misc_feature 1..80: note = Artificially Synthesized Probe
  source 1..80: mol_type = other DNA
gagtgccgtctcctaatcccccggcccgaggctctcccttaatcaccgacctccggcccctaatcctctcccggattgtc

SEQ ID NO: 30412 - DNA, 80 bp, synthetic construct
  misc_feature 1..80: note = Artificially Synthesized Probe
  source 1..80: mol_type = other DNA
ggccctcgtagaggcctcactgttacctgtcggggatgggttttaaatacaggatttaatgatggtcactgatgtttctg

SEQ ID NO: 30413 - DNA, 80 bp, synthetic construct
  misc_feature 1..80: note = Artificially Synthesized Probe
  source 1..80: mol_type = other DNA
caagaataaagggggagaatgtctgttaatcatcacctggaaaggaggccttcatgttatatggccgtttaaaaccaggt

SEQ ID NO: 30414 - DNA, 80 bp, synthetic construct
  misc_feature 1..80: note = Artificially Synthesized Probe
  source 1..80: mol_type = other DNA
ctagactcagggaaaggaaggccttaaatttctagtccttttagtcatttgatttcacccttcaagcttgtgaggggacc

SEQ ID NO: 30415 - DNA, 80 bp, synthetic construct
  misc_feature 1..80: note = Artificially Synthesized Probe
  source 1..80: mol_type = other DNA
cagcgtttggctcttgcagaccgagctgctgtgaacattttggtacaaatggctttttaatttttttctcttccttttgg

SEQ ID NO: 30416 - DNA, 80 bp, synthetic construct
  misc_feature 1..80: note = Artificially Synthesized Probe
  source 1..80: mol_type = other DNA
tgtgctggaaattcaagaccctcccttgtctgagtcaggcacacgcaggccatgtgggctcagaccccagtctggaacct

SEQ ID NO: 30417 - DNA, 80 bp, synthetic construct
  misc_feature 1..80: note = Artificially Synthesized Probe
  source 1..80: mol_type = other DNA
ggacatttcgtagaaatgggctcacacggccgggcgcagtggctcaggccggtaatccccacactttgcgaggcctaggc

SEQ ID NO: 30418 - DNA, 80 bp, synthetic construct
  misc_feature 1..80: note = Artificially Synthesized Probe
  source 1..80: mol_type = other DNA
tatttatcatacggaacgtccgaatggtgccaagtccggctcggccgttcctcccaccctctcggcctcccctgtggcgc

SEQ ID NO: 30419 - DNA, 80 bp, synthetic construct
  misc_feature 1..80: note = Artificially Synthesized Probe
  source 1..80: mol_type = other DNA
gaggtgtgggtgcccctcgtcccacagggaagagggcccggggctggtcccataggtgcctgggggaatgcaccagcctg

SEQ ID NO: 30420 - DNA, 80 bp, synthetic construct
  misc_feature 1..80: note = Artificially Synthesized Probe
  source 1..80: mol_type = other DNA
ccccaggggtggggctatgagggtgcaggggtggagctacaatggtgcagtggtagagccaagacagcaggggtggggct

SEQ ID NO: 30421 - DNA, 80 bp, synthetic construct
  misc_feature 1..80: note = Artificially Synthesized Probe
  source 1..80: mol_type = other DNA
ggcgccttcctgcagatcttccacatgacctatgacctggccagcgcggtgatgaggatctgcaatctcatcagcatgat

SEQ ID NO: 30422 - DNA, 80 bp, synthetic construct
  misc_feature 1..80: note = Artificially Synthesized Probe
  source 1..80: mol_type = other DNA
gtggttatgatgagtcctgtcacccagacatctgcttagcgcgttttccaatggatttcccttttaattaacccacatta

SEQ ID NO: 30423 - DNA, 80 bp, synthetic construct
  misc_feature 1..80: note = Artificially Synthesized Probe
  source 1..80: mol_type = other DNA
cgtcaaaaaagaaggaataataaatgaagttaggtcccagatactccttgcttcctagctgagatgtgctgactgttaag

SEQ ID NO: 30424 - DNA, 80 bp, synthetic construct
  misc_feature 1..80: note = Artificially Synthesized Probe
  source 1..80: mol_type = other DNA
ggccctcctgccaactcactgtgacaagtgtgcaaaccatgtcatctacctgggtctccatttctcttggttacctctga

SEQ ID NO: 30425 - DNA, 80 bp, synthetic construct
  misc_feature 1..80: note = Artificially Synthesized Probe
  source 1..80: mol_type = other DNA
tggcagcccctggagttgggcctcatgcaccactctgtgcctcagtttccccatgttaggcggctggctggtcctggctg

SEQ ID NO: 30426 - DNA, 80 bp, synthetic construct
  misc_feature 1..80: note = Artificially Synthesized Probe
  source 1..80: mol_type = other DNA
gaaacgaattcaactttgatttaaatagaagcatgtttatttgctcttgttgaatctggccgcccctgtgtgtggcggag

SEQ ID NO: 30427 - DNA, 80 bp, synthetic construct
  misc_feature 1..80: note = Artificially Synthesized Probe
  source 1..80: mol_type = other DNA
gcttcccgctgcccccttagcagaactgcctgggtctgtgcctgacagggcggggcagaagcagggcagggggtggggag

SEQ ID NO: 30428 - DNA, 80 bp, synthetic construct
  misc_feature 1..80: note = Artificially Synthesized Probe
  source 1..80: mol_type = other DNA
acttagtcattatttaggtgtttaggagttgcaaagtcaaatctttaaacccacatatggccaggcgtggtggctcacgc

SEQ ID NO: 30429 - DNA, 80 bp, synthetic construct
  misc_feature 1..80: note = Artificially Synthesized Probe
  source 1..80: mol_type = other DNA
catgccgctgttcgccaacgccgaccccaacttcgtcacggccatgctgaccaagctcaagttcgaggtcttccagccgg

SEQ ID NO: 30430 - DNA, 80 bp, synthetic construct
  misc_feature 1..80: note = Artificially Synthesized Probe
  source 1..80: mol_type = other DNA
ctgagttgggaatgcagagtggagaccagggtaagggatgccatgtggaaacggggaggaagatgtgttcgtggagtgga

SEQ ID NO: 30431 - DNA, 80 bp, synthetic construct
  misc_feature 1..80: note = Artificially Synthesized Probe
  source 1..80: mol_type = other DNA
ggtactcaatatccatactataggccagagatgctacatatgtgcttattgtatacagtaggtggtaaatgcatgcttgc

SEQ ID NO: 30432 - DNA, 80 bp, synthetic construct
  misc_feature 1..80: note = Artificially Synthesized Probe
  source 1..80: mol_type = other DNA
tccgcccagaagccatagacgagacgtaggtagccgtagttggacggacgggcagggccggcggggcagccccctccgcg

SEQ ID NO: 30433 - DNA, 80 bp, synthetic construct
  misc_feature 1..80: note = Artificially Synthesized Probe
  source 1..80: mol_type = other DNA
cggaccaaaggaactaccagagtttgggacccctgcctcctccagtcctgcttgctggagatctaggaaattatattcta

SEQ ID NO: 30434 - DNA, 80 bp, synthetic construct
  misc_feature 1..80: note = Artificially Synthesized Probe
  source 1..80: mol_type = other DNA
cttccctcagttcactcgcagacggatccccagaagcctggtatccctctgattgtgcttctccattctctatactacat

SEQ ID NO: 30435 - DNA, 80 bp, synthetic construct
  misc_feature 1..80: note = Artificially Synthesized Probe
  source 1..80: mol_type = other DNA
ctggggataaagagtgagtgagtcataataccaactagtgcctgtaccacactgtcacatctattgtctccatgtaaatg

SEQ ID NO: 30436 - DNA, 80 bp, synthetic construct
  misc_feature 1..80: note = Artificially Synthesized Probe
  source 1..80: mol_type = other DNA
tacaggtgcgcgccaccacacctggctaattttttttttttttttttgagacggagtctcgctctgtcgcccaggctgga

SEQ ID NO: 30437 - DNA, 80 bp, synthetic construct
  misc_feature 1..80: note = Artificially Synthesized Probe
  source 1..80: mol_type = other DNA
gaggttttgccatgttggccagattggtctcaaactcctgacctcaggtgatccgccagtctcagcctcccaaagtgctg

SEQ ID NO: 30438 - DNA, 80 bp, synthetic construct
  misc_feature 1..80: note = Artificially Synthesized Probe
  source 1..80: mol_type = other DNA
tttcccaaatggtggtcccaacttatactcccaacagctgtaaacagtcattctgttattgtgtatctttgcccattctt

SEQ ID NO: 30439 - DNA, 80 bp, synthetic construct
  misc_feature 1..80: note = Artificially Synthesized Probe
  source 1..80: mol_type = other DNA
gagcagcagagtttagtggttcagactgtgggctctgcagtctcattgtctttggtcagatcccagttttattgtttact

SEQ ID NO: 30440 - DNA, 80 bp, synthetic construct
  misc_feature 1..80: note = Artificially Synthesized Probe
  source 1..80: mol_type = other DNA
tgttggagggagcaggcaaaggaagggtacctacccggaagctgaggcccccaagttgcaatagaggacccttttgcctc

SEQ ID NO: 30441 - DNA, 80 bp, synthetic construct
  misc_feature 1..80: note = Artificially Synthesized Probe
  source 1..80: mol_type = other DNA
catcattatccgtattcctctgtggccctgtgtatccatgtctggttccacgtttcacccctttgagtttgacctgtgtc

SEQ ID NO: 30442 - DNA, 80 bp, synthetic construct
  misc_feature 1..80: note = Artificially Synthesized Probe
  source 1..80: mol_type = other DNA
agggagggtggcagggtcacgagcagacagtggagagggcaactgctcccaggctctgggtccctgcctcagtacgctgc

SEQ ID NO: 30443 - DNA, 80 bp, synthetic construct
  misc_feature 1..80: note = Artificially Synthesized Probe
  source 1..80: mol_type = other DNA
ttcatatggagagagtaggaaggacagggagcagtaacccagtaattgtgggggtctggagaaagacaatgcttggggtg

SEQ ID NO: 30444 - DNA, 80 bp, synthetic construct
  misc_feature 1..80: note = Artificially Synthesized Probe
  source 1..80: mol_type = other DNA
gagcacaggagctcagcttagtggaaagccagtactgtgggagccactggtacatgcgccccttcaggcagctgctgtga

SEQ ID NO: 30445 - DNA, 80 bp, synthetic construct
  misc_feature 1..80: note = Artificially Synthesized Probe
  source 1..80: mol_type = other DNA
gtgggaacatacttctaagttccctgcagtctctgtcctgtggtagaccatctttttgtaaactgcgagcttcctcttcc

SEQ ID NO: 30446 - DNA, 80 bp, synthetic construct
  misc_feature 1..80: note = Artificially Synthesized Probe
  source 1..80: mol_type = other DNA
tgggtggggagttctggggttcttggtgtgtgggagaagttttataattgcttccaaacagctgggtttaaatataaaat

SEQ ID NO: 30447 - DNA, 80 bp, synthetic construct
  misc_feature 1..80: note = Artificially Synthesized Probe
  source 1..80: mol_type = other DNA
tgacccctgttcctgcttggccctcactcacctcactcccctgtccccttgctccccgcctccaccctccacgccccaag

SEQ ID NO: 30448 - DNA, 80 bp, synthetic construct
  misc_feature 1..80: note = Artificially Synthesized Probe
  source 1..80: mol_type = other DNA
tataacgttccccatcttttttagagctctgatctgatccggtcgttccctttccttagctggccattcctgcagggtct

SEQ ID NO: 30449 - DNA, 80 bp, synthetic construct
  misc_feature 1..80: note = Artificially Synthesized Probe
  source 1..80: mol_type = other DNA
tctcccctgggtggggggcctcacctctggtctcggtcacactgggcaacggcagagaggttgaggcgctcacccaaagt

SEQ ID NO: 30450 - DNA, 80 bp, synthetic construct
  misc_feature 1..80: note = Artificially Synthesized Probe
  source 1..80: mol_type = other DNA
gctgtatgcaccaaatgtcctttcattattcctagtcacaggacgttcctgttcacatcttggaaaaactagaagagagc

SEQ ID NO: 30451 - DNA, 80 bp, synthetic construct
  misc_feature 1..80: note = Artificially Synthesized Probe
  source 1..80: mol_type = other DNA
tgacatagcacctgctcaggacacccctgctttgcctccatggccaggcttcattctccggctctctccctccagcagca

SEQ ID NO: 30452 - DNA, 80 bp, synthetic construct
  misc_feature 1..80: note = Artificially Synthesized Probe
  source 1..80: mol_type = other DNA
cctgcggcccgtgggccacatgcagcccgggacggctttgaatgctgcccaacaccaattcataaactttcttaaaatgt

SEQ ID NO: 30453 - DNA, 80 bp, synthetic construct
  misc_feature 1..80: note = Artificially Synthesized Probe
  source 1..80: mol_type = other DNA
cagatgggtatttgtgcagctgtttgctcccatcctgtgggttgtctcctcactattgattgttttatttgctgtgcaga

SEQ ID NO: 30454 - DNA, 80 bp, synthetic construct
  misc_feature 1..80: note = Artificially Synthesized Probe
  source 1..80: mol_type = other DNA
tgtcctcttcagttttctcatgtcagtggtttatagttttctttcttttttttgagacagtctcgctctgtcatccaggg

SEQ ID NO: 30455 - DNA, 80 bp, synthetic construct
  misc_feature 1..80: note = Artificially Synthesized Probe
  source 1..80: mol_type = other DNA
aaacgtttgataacatttggcagtgaaatattgcgacccgggcttttctttgctcagtggcttttcattgcggcttcaat

SEQ ID NO: 30456 - DNA, 80 bp, synthetic construct
  misc_feature 1..80: note = Artificially Synthesized Probe
  source 1..80: mol_type = other DNA
attgctcatggtgttgttcttcatggtgtagctgcttacaacgtcgctgctcacggtgtagttgttcatggtgtagctgc

SEQ ID NO: 30457 - DNA, 80 bp, synthetic construct
  misc_feature 1..80: note = Artificially Synthesized Probe
  source 1..80: mol_type = other DNA
cattgaagcctctagctgttactgtgttggagtctgtctctctctttagctctagtaatatttggtttatatatctggat

SEQ ID NO: 30458 - DNA, 80 bp, synthetic construct
  misc_feature 1..80: note = Artificially Synthesized Probe
  source 1..80: mol_type = other DNA
tgttaccactgagttttatccttttagatgatttcttattgctcctcagcatccttatttttcagattgaagaaccctct

SEQ ID NO: 30459 - DNA, 80 bp, synthetic construct
  misc_feature 1..80: note = Artificially Synthesized Probe
  source 1..80: mol_type = other DNA
cccgtcttcaagctgctcactaattctttcttccacatagtcagttctgctgttgagaggctccaatgcattcttcagta

SEQ ID NO: 30460 - DNA, 80 bp, synthetic construct
  misc_feature 1..80: note = Artificially Synthesized Probe
  source 1..80: mol_type = other DNA
tcagccacgccctctgcctgacaggctttgcagcatctcagcacatggcactgggtgagcttggagtttgccgctcacct

SEQ ID NO: 30461 - DNA, 80 bp, synthetic construct
  misc_feature 1..80: note = Artificially Synthesized Probe
  source 1..80: mol_type = other DNA
ctacgactggctgtgagcgctattgctaatggtgcatggctgggcagagacgcttcatccaaagtgtcaggagggatgag

SEQ ID NO: 30462 - DNA, 80 bp, synthetic construct
  misc_feature 1..80: note = Artificially Synthesized Probe
  source 1..80: mol_type = other DNA
gaagggatgtgccgtacagaagtcgtctcgttttgtaaatggcatttcccatctttttaacattggactgagtatatcga

SEQ ID NO: 30463 - DNA, 80 bp, synthetic construct
  misc_feature 1..80: note = Artificially Synthesized Probe
  source 1..80: mol_type = other DNA
gctttattttaaaaaggctgtgggcttctgaaagtgtccagcgcactgccagatggtgtccgcccccctccgttggctgt

SEQ ID NO: 30464 - DNA, 80 bp, synthetic construct
  misc_feature 1..80: note = Artificially Synthesized Probe
  source 1..80: mol_type = other DNA
aaatcaatcattcccagctcaaatcagatgcacagcccaaatcagatgccctgagagatttgcagtctcaacttacttcc

SEQ ID NO: 30465 - DNA, 80 bp, synthetic construct
  misc_feature 1..80: note = Artificially Synthesized Probe
  source 1..80: mol_type = other DNA
ttgctgtacagggaaagcacacatgtttggaaaaggcacagaaattagttgcaagcaaggtttgttctgatggagtgaag

SEQ ID NO: 30466 - DNA, 80 bp, synthetic construct
  misc_feature 1..80: note = Artificially Synthesized Probe
  source 1..80: mol_type = other DNA
gcatgatttatagtcctttgggtatatacccagtaatgggatggctgggtcaaatggtatgtgggcgaaggacatgaaca

SEQ ID NO: 30467 - DNA, 80 bp, synthetic construct
  misc_feature 1..80: note = Artificially Synthesized Probe
  source 1..80: mol_type = other DNA
cgtgtacatgtatatcctcacacacgtacacacttatcctcacacacgtgtacacacatatacacatctgcacacgtgtg

SEQ ID NO: 30468 - DNA, 80 bp, synthetic construct
  misc_feature 1..80: note = Artificially Synthesized Probe
  source 1..80: mol_type = other DNA
ctgctcatgggccctggcactgctgctgtgggctgcgtcctgtgtgtcccttccaggatgtcacttgcatgaggttgtgg

SEQ ID NO: 30469 - DNA, 80 bp, synthetic construct
  misc_feature 1..80: note = Artificially Synthesized Probe
  source 1..80: mol_type = other DNA
ttgctgtttttagtgtatccagctggtgtgcagtgttgtcacacagggttggtggggtttgctgtttttagtgtgtccag

SEQ ID NO: 30470 - DNA, 80 bp, synthetic construct
  misc_feature 1..80: note = Artificially Synthesized Probe
  source 1..80: mol_type = other DNA
cgtctttggtggccattcagaactgccatccattaaatcgagttctgtgtttctgagtgcggagtttgaggaccccttcc

SEQ ID NO: 30471 - DNA, 80 bp, synthetic construct
  misc_feature 1..80: note = Artificially Synthesized Probe
  source 1..80: mol_type = other DNA
ggagctcgcacccattctgctttgcttgtgtgtttcatccatgtgtttggaaagatggaagcttgaatggaaattgtcag

SEQ ID NO: 30472 - DNA, 80 bp, synthetic construct
  misc_feature 1..80: note = Artificially Synthesized Probe
  source 1..80: mol_type = other DNA
gggcagggagcagggtggtttcaggttgaaattgttctacctcagatcatgaggcattcaattctcataaggagcacgta

SEQ ID NO: 30473 - DNA, 80 bp, synthetic construct
  misc_feature 1..80: note = Artificially Synthesized Probe
  source 1..80: mol_type = other DNA
gcatttcaaaaaaaaacgaagagaggtgtgtttgcaccctggcttttttgttttttacaaaatgatgacaggatcattta

SEQ ID NO: 30474 - DNA, 80 bp, synthetic construct
  misc_feature 1..80: note = Artificially Synthesized Probe
  source 1..80: mol_type = other DNA
agaaacaggcgcccgcacgcggaccactgacttgatgaaggctcaaagaccatttaatggcatcttttaataaggatact

SEQ ID NO: 30475 - DNA, 80 bp, synthetic construct
  misc_feature 1..80: note = Artificially Synthesized Probe
  source 1..80: mol_type = other DNA
ctgagagtgggaaggagcgcggactggctcaaacactttggaaaatggttggacagtttctaaaacagttaaacgtgcac

SEQ ID NO: 30476 - DNA, 80 bp, synthetic construct
  misc_feature 1..80: note = Artificially Synthesized Probe
  source 1..80: mol_type = other DNA
acaggcatgcaccacggcacctggctaatcttcctgttttttatagagatggggtctttgccatgttgcccaggctggtc

SEQ ID NO: 30477 - DNA, 80 bp, synthetic construct
  misc_feature 1..80: note = Artificially Synthesized Probe
  source 1..80: mol_type = other DNA
ctcctttctgtgcccgtaggtaacagcgtgttgagggtgaacccttcatgctcattttcaagcacactcgggggtgcagt

SEQ ID NO: 30478 - DNA, 80 bp, synthetic construct
  misc_feature 1..80: note = Artificially Synthesized Probe
  source 1..80: mol_type = other DNA
tgcagaggggctggtgtgtgtgtgatccactgtggaatcccacagtgcagaggggctggtgtgtgtgatccggtgtgaaa

SEQ ID NO: 30479 - DNA, 80 bp, synthetic construct
  misc_feature 1..80: note = Artificially Synthesized Probe
  source 1..80: mol_type = other DNA
gccgccaggccgggccatcggaaacacctgcagtaaccggagtgccctcgctgatagcccttgttccggggcctcgtcct

SEQ ID NO: 30480 - DNA, 80 bp, synthetic construct
  misc_feature 1..80: note = Artificially Synthesized Probe
  source 1..80: mol_type = other DNA
catgcttcagcttttcccaaaacccgtttttaacacatcatcgaatgtgtgtcagttctccactttccttcacccacgag

SEQ ID NO: 30481 - DNA, 80 bp, synthetic construct
  misc_feature 1..80: note = Artificially Synthesized Probe
  source 1..80: mol_type = other DNA
cattttactccttaacagacttaaatttttggcaagaaagggtgaaggtactcaggtctcagtcagaatcaggcccgtgg

SEQ ID NO: 30482 - DNA, 80 bp, synthetic construct
  misc_feature 1..80: note = Artificially Synthesized Probe
  source 1..80: mol_type = other DNA
aagatgatcgctcctgaaatgtacatgacaggtcattctagaaactagccagatattgtcctcagaagtcagccagttag

SEQ ID NO: 30483 - DNA, 80 bp, synthetic construct
  misc_feature 1..80: note = Artificially Synthesized Probe
  source 1..80: mol_type = other DNA
gccatagaattttatttgtcttaaaacttggtgttatagaaaagctcaaaaatgcacagaagaggggcaggcagcagagc

SEQ ID NO: 30484 - DNA, 80 bp, synthetic construct
  misc_feature 1..80: note = Artificially Synthesized Probe
  source 1..80: mol_type = other DNA
ggccagcctgcagctcttggacgtgctgctgacaatagtggccctcgcaggtgctaccggcctgagggacaaggtaaggc

SEQ ID NO: 30485 - DNA, 80 bp, synthetic construct
  misc_feature 1..80: note = Artificially Synthesized Probe
  source 1..80: mol_type = other DNA
tgatttcccgctctcattgcagcacagcgttcagaagtacttctcgcccatgggctccctgtttatgcccaaaaatcatc

SEQ ID NO: 30486 - DNA, 80 bp, synthetic construct
  misc_feature 1..80: note = Artificially Synthesized Probe
  source 1..80: mol_type = other DNA
aggcaggcaggcttgagccctgagtgttggaattgtctcagtctctgacttgtaacctccaggcacaggagacgatggac

SEQ ID NO: 30487 - DNA, 80 bp, synthetic construct
  misc_feature 1..80: note = Artificially Synthesized Probe
  source 1..80: mol_type = other DNA
gttcttacacaatctctgtgcctggtagggactcaccttttttttcctgagacttggaaaaatacccaaaattgttcttt

SEQ ID NO: 30488 - DNA, 80 bp, synthetic construct
  misc_feature 1..80: note = Artificially Synthesized Probe
  source 1..80: mol_type = other DNA
tttactgaatgttactcctaacaacctcttgcaccaaattactccagccttcacctcacagtccagaaaattgggcacac

SEQ ID NO: 30489 - DNA, 80 bp, synthetic construct
  misc_feature 1..80: note = Artificially Synthesized Probe
  source 1..80: mol_type = other DNA
tagacttaggaaaatatttgcaataaggatgacagtgtgagatctttgttacataaagctgacacaaaatgagaacaaaa

SEQ ID NO: 30490 - DNA, 80 bp, synthetic construct
  misc_feature 1..80: note = Artificially Synthesized Probe
  source 1..80: mol_type = other DNA
tcttcactcctttcatccagcaatcacattcatgagaatctatccttccaattctaattatggaaaaagctatgcaccca

SEQ ID NO: 30491 - DNA, 80 bp, synthetic construct
  misc_feature 1..80: note = Artificially Synthesized Probe
  source 1..80: mol_type = other DNA
cgtgatcctggcggaagtgtctgtgctgtgagccgcagctcacactgggagggaagacacgtggtccgggcggaagtgtc

SEQ ID NO: 30492 - DNA, 80 bp, synthetic construct
  misc_feature 1..80: note = Artificially Synthesized Probe
  source 1..80: mol_type = other DNA
gagccagagcagcgagtacattgcgtctccgtgtggcaagggcaggtgcgggggtctcagtccactaccgagcagcctgc

SEQ ID NO: 30493 - DNA, 80 bp, synthetic construct
  misc_feature 1..80: note = Artificially Synthesized Probe
  source 1..80: mol_type = other DNA
atatggaaaaacgtgattttggggggttaaaattttctgctgcttttctgtgataatcaccttactgattgagaaagagg

SEQ ID NO: 30494 - DNA, 80 bp, synthetic construct
  misc_feature 1..80: note = Artificially Synthesized Probe
  source 1..80: mol_type = other DNA
gcacagagaagcactaagtcaaagtcatctccgtgtggtcattaaaattccagtgaatgaaaaagttttagggaacatta

SEQ ID NO: 30495 - DNA, 80 bp, synthetic construct
  misc_feature 1..80: note = Artificially Synthesized Probe
  source 1..80: mol_type = other DNA
gttctgcccaggaacagttaactctgcagagcacagtttccacatctgggctgagttcccaaagaaagtgcgcctaacaa

SEQ ID NO: 30496 - DNA, 80 bp, synthetic construct
  misc_feature 1..80: note = Artificially Synthesized Probe
  source 1..80: mol_type = other DNA
tccttcaccccaaaattaaaaaaaaaaaaaaaaaaatttaaaaaaacctaagcactcctaggtggcgcccgtgtggcacg

SEQ ID NO: 30497 - DNA, 80 bp, synthetic construct
  misc_feature 1..80: note = Artificially Synthesized Probe
  source 1..80: mol_type = other DNA
tgagaggaggaggggcctcgtgttttggggtcgagttcgttttcctgtttggctcccccctcagccccattcatccctag

SEQ ID NO: 30498 - DNA, 80 bp, synthetic construct
  misc_feature 1..80: note = Artificially Synthesized Probe
  source 1..80: mol_type = other DNA
tacaatgaagattcaagcctactttttaggtaaagctttcaagccccctaagtccttccaggcaggagtgcacggatggt

SEQ ID NO: 30499 - DNA, 80 bp, synthetic construct
  misc_feature 1..80: note = Artificially Synthesized Probe
  source 1..80: mol_type = other DNA
ccccacagataccaagggacgactgtatttaagtttgatggtggcttgttttatagaaaaaaagcagaaaacgtggccgg

SEQ ID NO: 30500 - DNA, 80 bp, synthetic construct
  misc_feature 1..80: note = Artificially Synthesized Probe
  source 1..80: mol_type = other DNA
ggggaatggggtggttggcttgaagcccccgaaaagcagcagcactgaacagagtcatgaattcagagagcccctcactc

SEQ ID NO: 30501 - DNA, 80 bp, synthetic construct
  misc_feature 1..80: note = Artificially Synthesized Probe
  source 1..80: mol_type = other DNA
aactctagactgaatgtggctgaaaacaaagttagtgacgtgaaagccaggaatgtggaattcctcaagatcacgagaca

SEQ ID NO: 30502 - DNA, 80 bp, synthetic construct
  misc_feature 1..80: note = Artificially Synthesized Probe
  source 1..80: mol_type = other DNA
ccttggtggggaaggaaggatgtcctgagttgggagcacagacatccaggcctcccaggacagacagacacaaacatgaa

SEQ ID NO: 30503 - DNA, 80 bp, synthetic construct
  misc_feature 1..80: note = Artificially Synthesized Probe
  source 1..80: mol_type = other DNA
tcagtcatctgcgaatttccggatgctgcacagaagggggtgccaaagtttttttaagatgatgtaaaaaaagcataaat

SEQ ID NO: 30504 - DNA, 80 bp, synthetic construct
  misc_feature 1..80: note = Artificially Synthesized Probe
  source 1..80: mol_type = other DNA
gcggctgtctttgtggtgatagctgctgacatttcctctaacagaaatcaaaactgagagtattctagaatacttgttag

SEQ ID NO: 30505 - DNA, 80 bp, synthetic construct
  misc_feature 1..80: note = Artificially Synthesized Probe
  source 1..80: mol_type = other DNA
atgactggatctcatttcttttgtggccggataatattccactgcgtgcgctccacgttttccttctcccttcatctgtc

SEQ ID NO: 30506 - DNA, 80 bp, synthetic construct
  misc_feature 1..80: note = Artificially Synthesized Probe
  source 1..80: mol_type = other DNA
gtccggtttcccggcgtggctacatccggttatgcgatgtcggatcttcctggtgtggccgcctcccgtcgcgcagcgtc

SEQ ID NO: 30507 - DNA, 80 bp, synthetic construct
  misc_feature 1..80: note = Artificially Synthesized Probe
  source 1..80: mol_type = other DNA
cttgtggtggcagggccaagctttggctcattgtgattttttgtgtgagagcttgacttgtatcctcggccacaaaccct

SEQ ID NO: 30508 - DNA, 80 bp, synthetic construct
  misc_feature 1..80: note = Artificially Synthesized Probe
  source 1..80: mol_type = other DNA
tttaaaaaaacaaaacacagatgccctgtacgccgcccccacctcccccacctcccccaccgcacatccgcctggcagca

SEQ ID NO: 30509 - DNA, 80 bp, synthetic construct
  misc_feature 1..80: note = Artificially Synthesized Probe
  source 1..80: mol_type = other DNA
tattcacatagtgaccatgcagcatcaggtcacttgtccacgttgtgactcaggtcattcgtatccacattctgactgcc

SEQ ID NO: 30510 - DNA, 80 bp, synthetic construct
  misc_feature 1..80: note = Artificially Synthesized Probe
  source 1..80: mol_type = other DNA
gctgcatcctgcttaggtgcccaccaagaaggtttttacctacttaacaaaaaagaaagaagccaaagtgattagaaaga

SEQ ID NO: 30511 - DNA, 80 bp, synthetic construct
  misc_feature 1..80: note = Artificially Synthesized Probe
  source 1..80: mol_type = other DNA
tatttcaatttttcctttttatccgtttttttcttaaaggcccccatcccttctccccctaccctatctctctctttcca

SEQ ID NO: 30512 - DNA, 80 bp, synthetic construct
  misc_feature 1..80: note = Artificially Synthesized Probe
  source 1..80: mol_type = other DNA
gcggagggactgacctggtcccgggtccgctccagcagcagcagcctcagctcttccaggctgcggttgatgcggtcccg

SEQ ID NO: 30513 - DNA, 80 bp, synthetic construct
  misc_feature 1..80: note = Artificially Synthesized Probe
  source 1..80: mol_type = other DNA
ctgctccctcccctcccgcctctcaccttggggccgtccctattctcagctcgatcccgggtgaccattgctcctccgga

SEQ ID NO: 30514 - DNA, 80 bp, synthetic construct
  misc_feature 1..80: note = Artificially Synthesized Probe
  source 1..80: mol_type = other DNA
cctaaggtctgtccttagcagggaccttcccctgactcatgaatgctggaatcaggaccccaacaccacaaccatcaagg

SEQ ID NO: 30515 - DNA, 80 bp, synthetic construct
  misc_feature 1..80: note = Artificially Synthesized Probe
  source 1..80: mol_type = other DNA
cccagaccccacccctcaccccttccctacctgaactcttcctcctacacatcacagcagcgaccacagctccgatgacc

SEQ ID NO: 30516 - DNA, 80 bp, synthetic construct
  misc_feature 1..80: note = Artificially Synthesized Probe
  source 1..80: mol_type = other DNA
aaactcaggaaaactcatgccattctccattcaacggagggcgacattctagcgctgatcccattttcctcctcttctcg

SEQ ID NO: 30517 - DNA, 80 bp, synthetic construct
  misc_feature 1..80: note = Artificially Synthesized Probe
  source 1..80: mol_type = other DNA
gctgattggcttctctagatatccaatacccaatgggagtgggaagtggggacgcgtcacgagtatcctggaagaaggac

SEQ ID NO: 30518 - DNA, 80 bp, synthetic construct
  misc_feature 1..80: note = Artificially Synthesized Probe
  source 1..80: mol_type = other DNA
aaggagccaattagtttttaggaagtccaacaaaatgtattaaataccgaatgcaaagaaccctctgccaggctcttcca

SEQ ID NO: 30519 - DNA, 80 bp, synthetic construct
  misc_feature 1..80: note = Artificially Synthesized Probe
  source 1..80: mol_type = other DNA
accagttttagctgcgcttttttggcgaatattggtaattatttatagtcatgtaactaccacactgcccagtagagaaa

SEQ ID NO: 30520 - DNA, 80 bp, synthetic construct
  misc_feature 1..80: note = Artificially Synthesized Probe
  source 1..80: mol_type = other DNA
ccaccatgcctggtccttctattggtttcttatttcattttcttgccatgttgcactgatttggatgcctcttaggtgtt

SEQ ID NO: 30521 - DNA, 80 bp, synthetic construct
  misc_feature 1..80: note = Artificially Synthesized Probe
  source 1..80: mol_type = other DNA
tctggaacttaaagcaaaataaaataaattaaataaaaagagaaagtgagtgacttacatgtacacatatgttcattgaa

SEQ ID NO: 30522 - DNA, 80 bp, synthetic construct
  misc_feature 1..80: note = Artificially Synthesized Probe
  source 1..80: mol_type = other DNA
cagcagatctgtacaattacaattggtaaagaaaattcttcagactagaggcaaatgataccaggtggaaaatgagatta

SEQ ID NO: 30523 - DNA, 80 bp, synthetic construct
  misc_feature 1..80: note = Artificially Synthesized Probe
  source 1..80: mol_type = other DNA
tgtgatcgcatcactggactccagcccagaccacagagtgggatcttgactcaaacaacaacaacaacaacaaacattgt

SEQ ID NO: 30524 - DNA, 80 bp, synthetic construct
  misc_feature 1..80: note = Artificially Synthesized Probe
  source 1..80: mol_type = other DNA
tcctgccttgtgcttccttctgccctagaattaatgattgcctaaccacccttcccccttgttttttttttttaactttt

SEQ ID NO: 30525 - DNA, 80 bp, synthetic construct
  misc_feature 1..80: note = Artificially Synthesized Probe
  source 1..80: mol_type = other DNA
aatatatcttaaatcacagtttcttactacatgcaaccctttggttcaaactaccatcatccctcacttgaacttagaat

SEQ ID NO: 30526 - DNA, 80 bp, synthetic construct
  misc_feature 1..80: note = Artificially Synthesized Probe
  source 1..80: mol_type = other DNA
ttttcaatttttcactgttacaaacaaggctgcaacatttgcgtgcaaacctctgggtatacacgtaaggagctttcggt

SEQ ID NO: 30527 - DNA, 80 bp, synthetic construct
  misc_feature 1..80: note = Artificially Synthesized Probe
  source 1..80: mol_type = other DNA
ggaaactggaggatgagccatgacatccctctctccacctcaaagctcgtcctgggcatccacctccagggagcagaagc

SEQ ID NO: 30528 - DNA, 80 bp, synthetic construct
  misc_feature 1..80: note = Artificially Synthesized Probe
  source 1..80: mol_type = other DNA
cgacaattgaattattttctacctcctctgcccacccttacttcacaccccaaaatgctttcagtgtcttttcaaggtac

SEQ ID NO: 30529 - DNA, 80 bp, synthetic construct
  misc_feature 1..80: note = Artificially Synthesized Probe
  source 1..80: mol_type = other DNA
agagaaaggtctcattacacaaacagccactctctcaccccaaaggaaaatgacacacatgacttagagttacattctct

SEQ ID NO: 30530 - DNA, 80 bp, synthetic construct
  misc_feature 1..80: note = Artificially Synthesized Probe
  source 1..80: mol_type = other DNA
taggtccttggatacagtgaataggtgagagagtggggaagcaaatctctgctcttcaagaactcatccataaccttaga

SEQ ID NO: 30531 - DNA, 80 bp, synthetic construct
  misc_feature 1..80: note = Artificially Synthesized Probe
  source 1..80: mol_type = other DNA
ttttctttttttccttaatttctttttaacgcacaagtgagtttaattactagctgtctaccctactccatttccttgct

SEQ ID NO: 30532 - DNA, 80 bp, synthetic construct
  misc_feature 1..80: note = Artificially Synthesized Probe
  source 1..80: mol_type = other DNA
tagtgaggaacataagaatgttgtgtactttgggaggcttaagatcttggtgagtaattgtgggctgattacttaaagtg

SEQ ID NO: 30533 - DNA, 80 bp, synthetic construct
  misc_feature 1..80: note = Artificially Synthesized Probe
  source 1..80: mol_type = other DNA
tcctttcccctggggtggaatgaactgggctcagatttcagagacctcgcccccatcgcccctcccggcacagaaactcg

SEQ ID NO: 30534 - DNA, 80 bp, synthetic construct
  misc_feature 1..80: note = Artificially Synthesized Probe
  source 1..80: mol_type = other DNA
gatcagggcgttctcgcatgaaatcccatttttcatgaagctcctggatacctcagagataaagttatccacataaatct

SEQ ID NO: 30535 - DNA, 80 bp, synthetic construct
  misc_feature 1..80: note = Artificially Synthesized Probe
  source 1..80: mol_type = other DNA
aggatggggattggattgtcctcatctcatcactaaaagataaatgggaatgcaacatagctttctttcccaagagagag

SEQ ID NO: 30536 - DNA, 80 bp, synthetic construct
  misc_feature 1..80: note = Artificially Synthesized Probe
  source 1..80: mol_type = other DNA
ggtaagttgcagttccaccactaatgtgctttagaagagtcaacaaattactgaatttatttttgccccaggcttctctt

SEQ ID NO: 30537 - DNA, 80 bp, synthetic construct
  misc_feature 1..80: note = Artificially Synthesized Probe
  source 1..80: mol_type = other DNA
agcaagacgtttgcaatagtggcacatgaaagcgttgagccactccaatattctgtattattcagtgcataattctagag

SEQ ID NO: 30538 - DNA, 80 bp, synthetic construct
  misc_feature 1..80: note = Artificially Synthesized Probe
  source 1..80: mol_type = other DNA
taatgtaatgtgtttgtcatacagggtgaatacagatgcacgggaggccatacggtttaggcaaaggggagcacaaaagt

SEQ ID NO: 30539 - DNA, 80 bp, synthetic construct
  misc_feature 1..80: note = Artificially Synthesized Probe
  source 1..80: mol_type = other DNA
atttattgtgaagatcaaaagaacaaaacttccacagcagggaagaggacctgagtgggttgccactgctggttggggtg

SEQ ID NO: 30540 - DNA, 80 bp, synthetic construct
  misc_feature 1..80: note = Artificially Synthesized Probe
  source 1..80: mol_type = other DNA
ggcttcacctctcactagggaaactgtgtctgtttctaaaagaggattaaaaggtattacctgttggctgaagtccagag

SEQ ID NO: 30541 - DNA, 80 bp, synthetic construct
  misc_feature 1..80: note = Artificially Synthesized Probe
  source 1..80: mol_type = other DNA
gggacagtctctcccgcctggcaggcgagactgcttctccaggaggtacaggtgtttctagaaacacctacagggctacc

SEQ ID NO: 30542 - DNA, 80 bp, synthetic construct
  misc_feature 1..80: note = Artificially Synthesized Probe
  source 1..80: mol_type = other DNA
taaatcggcatgcattgtcaaactgtttacaaatcttggaaagtacagagtgtagtaattaaaactgatatttgagccag

SEQ ID NO: 30543 - DNA, 80 bp, synthetic construct
  misc_feature 1..80: note = Artificially Synthesized Probe
  source 1..80: mol_type = other DNA
aaccacaaactggagcaaatgctggatcaaatatcaataaagtgttaataatcttatagtacaaagaacgcagaaagtca

SEQ ID NO: 30544 - DNA, 80 bp, synthetic construct
  misc_feature 1..80: note = Artificially Synthesized Probe
  source 1..80: mol_type = other DNA
aatgctcacagatggcgctctctctctctcttcctctctctgtctctctctgtctctctctcacacacacacacacacac

SEQ ID NO: 30545 - DNA, 80 bp, synthetic construct
  misc_feature 1..80: note = Artificially Synthesized Probe
  source 1..80: mol_type = other DNA
taaagagcagtgaaagcgatggccaaaaaccaaacacacaagagcttagacagcaatgagaaatatcagaagtgtggcgt

SEQ ID NO: 30546 - DNA, 80 bp, synthetic construct
  misc_feature 1..80: note = Artificially Synthesized Probe
  source 1..80: mol_type = other DNA
acctagagtaataactggtatatgctatgtcactaataaatattggctgtgtgaaatactggctgtgttaaatattggct

SEQ ID NO: 30547 - DNA, 80 bp, synthetic construct
  misc_feature 1..80: note = Artificially Synthesized Probe
  source 1..80: mol_type = other DNA
atctttttcaccatctttatcactaatgcactccatgaagccacaaacctgttttccctgaagaattccctgctgtgctc

SEQ ID NO: 30548 - DNA, 80 bp, synthetic construct
  misc_feature 1..80: note = Artificially Synthesized Probe
  source 1..80: mol_type = other DNA
attttgttgtctcagctgaatgtcactttctcaggtggagctccctaacatatgaactaaagtaggtgaatccatgtctc

SEQ ID NO: 30549 - DNA, 80 bp, synthetic construct
  misc_feature 1..80: note = Artificially Synthesized Probe
  source 1..80: mol_type = other DNA
attagttaaatctcttctgtcatgtctagttagagcacataggagatgcaagagaaacaagtacagaaaggttaaaaaag

SEQ ID NO: 30550 - DNA, 80 bp, synthetic construct
  misc_feature 1..80: note = Artificially Synthesized Probe
  source 1..80: mol_type = other DNA
caggaccaggggccagagaagcaggcaagtctcactcagggagaactatgaacccctccacccacattccaagttatagg

SEQ ID NO: 30551 - DNA, 80 bp, synthetic construct
  misc_feature 1..80: note = Artificially Synthesized Probe
  source 1..80: mol_type = other DNA
caacaccagggaaaacatcagcatggacagacaactgtgatactgaaaagtaaaggtgaagataaacaggctttttcctt

SEQ ID NO: 30552 - DNA, 80 bp, synthetic construct
  misc_feature 1..80: note = Artificially Synthesized Probe
  source 1..80: mol_type = other DNA
cccagcacagggcctggcccacagaggtaaaaaactgatattcaagtgacaattgtgaggcagagagggagggataaaaa

SEQ ID NO: 30553 - DNA, 80 bp, synthetic construct
  misc_feature 1..80: note = Artificially Synthesized Probe
  source 1..80: mol_type = other DNA
ccctggtgagctgtctaacgctactgtcctcattttacagagaacaaaacaaagccaagagagaactgactcatttcagg

SEQ ID NO: 30554 - DNA, 80 bp, synthetic construct
  misc_feature 1..80: note = Artificially Synthesized Probe
  source 1..80: mol_type = other DNA
agtatctttcctttcatggtgaactctcattctttaggttccagtctgaaagccacctgctcagggagaccttttctgat

SEQ ID NO: 30555 - DNA, 80 bp, synthetic construct
  misc_feature 1..80: note = Artificially Synthesized Probe
  source 1..80: mol_type = other DNA
ctccaaactggttcttctctctacagtgtattctctacacagcacccagaggagcctcttttttttttttgataagaagt

SEQ ID NO: 30556 - DNA, 80 bp, synthetic construct
  misc_feature 1..80: note = Artificially Synthesized Probe
  source 1..80: mol_type = other DNA
ggcctggcactgccttaacctgcttcattttttctccacagtgtttatgaacacctggcctgctgtatgtttgtttattt

SEQ ID NO: 30557 - DNA, 80 bp, synthetic construct
  misc_feature 1..80: note = Artificially Synthesized Probe
  source 1..80: mol_type = other DNA
atctttcctcttccctcaacagcagcttactttatgttcttcaagcttcactgaggcctcttttgcaaatcctcccagat

SEQ ID NO: 30558 - DNA, 80 bp, synthetic construct
  misc_feature 1..80: note = Artificially Synthesized Probe
  source 1..80: mol_type = other DNA
gaatcagtgaagttgattccttccatgtcgttttatcctcagcaataaaatccatgaaatcatgggtctgagatgctagt

SEQ ID NO: 30559 - DNA, 80 bp, synthetic construct
  misc_feature 1..80: note = Artificially Synthesized Probe
  source 1..80: mol_type = other DNA
tatttaaatttttggaagcccatttgcacatctctaaaaccactgcaaaatgggtccatattggaataggtccaatatgg

SEQ ID NO: 30560 - DNA, 80 bp, synthetic construct
  misc_feature 1..80: note = Artificially Synthesized Probe
  source 1..80: mol_type = other DNA
cagttttctcaactgtaaaagggaataataataccaaatttgcacagtggttttgaggactaaatgacataagttcttgg

SEQ ID NO: 30561 - DNA, 80 bp, synthetic construct
  misc_feature 1..80: note = Artificially Synthesized Probe
  source 1..80: mol_type = other DNA
agatggccaataaaaaagcaaccaagtaagtaatggagaaaatctcagaagtgatgtgccacagaggaaagatgggaaat

SEQ ID NO: 30562 - DNA, 80 bp, synthetic construct
  misc_feature 1..80: note = Artificially Synthesized Probe
  source 1..80: mol_type = other DNA
aactgactcccacaagaagacctgaaggatgagcaggagttatccccgagaagcatgatgtggaggaagtgttctttatt

SEQ ID NO: 30563 - DNA, 80 bp, synthetic construct
  misc_feature 1..80: note = Artificially Synthesized Probe
  source 1..80: mol_type = other DNA
tttgagatggagttttgctctgtcacccaggccggagtacagtggtgtgatctcggctcaccacaacctccgcctcccag

SEQ ID NO: 30564 - DNA, 80 bp, synthetic construct
  misc_feature 1..80: note = Artificially Synthesized Probe
  source 1..80: mol_type = other DNA
tcatggctagctggtaaactgacccaaaattcaggtttgagagaaagtacttcctaggatttcttctgaccacacttatt

SEQ ID NO: 30565 - DNA, 80 bp, synthetic construct
  misc_feature 1..80: note = Artificially Synthesized Probe
  source 1..80: mol_type = other DNA
atcccatacgactggtgaccttaaaaaaagatggccagccgggcgcagtggctcacgcttgtaatcacagcactttggga

SEQ ID NO: 30566 - DNA, 80 bp, synthetic construct
  misc_feature 1..80: note = Artificially Synthesized Probe
  source 1..80: mol_type = other DNA
aaaaaaaaaaaaactttgattttccccaaggaaaccaccaccactgccatcaccaccctggaagtcactcttgagaaaaa

SEQ ID NO: 30567 - DNA, 80 bp, synthetic construct
  misc_feature 1..80: note = Artificially Synthesized Probe
  source 1..80: mol_type = other DNA
tttcaaatttggggtcaggactgggtagttgatgccaggaaacttctgaatgcccttcaagacttcagtgtggtcaccca

SEQ ID NO: 30568 - DNA, 80 bp, synthetic construct
  misc_feature 1..80: note = Artificially Synthesized Probe
  source 1..80: mol_type = other DNA
aatttataatcccatcataaacaaactgagagcaatgtgtgatggcctgaaagggcagagatgactaaccctctggggag

SEQ ID NO: 30569 - DNA, 80 bp, synthetic construct
  misc_feature 1..80: note = Artificially Synthesized Probe
  source 1..80: mol_type = other DNA
taggtcctccccttgcctgccttctccagtttctctcccactgctctaacttaatctttccacaaaattttttttttttt

SEQ ID NO: 30570 - DNA, 80 bp, synthetic construct
  misc_feature 1..80: note = Artificially Synthesized Probe
  source 1..80: mol_type = other DNA
gtcctagtctagataaatgctcccatacatatataaacttttttcttacataaaagtgttaagattaaaaaatacatggc

SEQ ID NO: 30571 - DNA, 80 bp, synthetic construct
  misc_feature 1..80: note = Artificially Synthesized Probe
  source 1..80: mol_type = other DNA
agtgcccatagatgaggtgctgacctttggtttaaaagaggaaacaaaaagtatgaggaagagattgccacaattcccag

SEQ ID NO: 30572 - DNA, 80 bp, synthetic construct
  misc_feature 1..80: note = Artificially Synthesized Probe
  source 1..80: mol_type = other DNA
gttcgagatcagcctggccaacatgatgaagaaaccccgtctctactaaaaatagaaaaattagccaggtgtggtggaat

SEQ ID NO: 30573 - DNA, 80 bp, synthetic construct
  misc_feature 1..80: note = Artificially Synthesized Probe
  source 1..80: mol_type = other DNA
attaaaataacacataaaccatgaaggacacagctgtcccagaagagagcaattactgagtgtggggaggagtagtcagt

SEQ ID NO: 30574 - DNA, 80 bp, synthetic construct
  misc_feature 1..80: note = Artificially Synthesized Probe
  source 1..80: mol_type = other DNA
aacctgcttccaagctgcttttattagaacattataaactcaattccacttccttccttccccgtaacagctcttcacat

SEQ ID NO: 30575 - DNA, 80 bp, synthetic construct
  misc_feature 1..80: note = Artificially Synthesized Probe
  source 1..80: mol_type = other DNA
aaaagaaatctgagacccaaagagattaagtaatcttcccgaggtgacatggggagttactcactgaggcaatatctaaa

SEQ ID NO: 30576 - DNA, 80 bp, synthetic construct
  misc_feature 1..80: note = Artificially Synthesized Probe
  source 1..80: mol_type = other DNA
acagttggaaatggagacgaaggaaatggaagcgtgttcttgattttcactaatgaagagttggagaggtctgaagttca

SEQ ID NO: 30577 - DNA, 80 bp, synthetic construct
  misc_feature 1..80: note = Artificially Synthesized Probe
  source 1..80: mol_type = other DNA
accaaacaaacaaaaacatgaaaagaaattaaccaaattctgtggcttcttgtgtttagagtgtgggaggtgtgaggaga

SEQ ID NO: 30578 - DNA, 80 bp, synthetic construct
  misc_feature 1..80: note = Artificially Synthesized Probe
  source 1..80: mol_type = other DNA
cccggccagagcactgttttcaaactgtatgttgtaccccactaattggtcacagtatcaatttagtgggtacaaacttt

SEQ ID NO: 30579 - DNA, 80 bp, synthetic construct
  misc_feature 1..80: note = Artificially Synthesized Probe
  source 1..80: mol_type = other DNA
tgtcacagggctttggtgaacacactaataccagctgtcctaatagcagtgattttgaatgatttagagtagggaaatct

SEQ ID NO: 30580 - DNA, 80 bp, synthetic construct
  misc_feature 1..80: note = Artificially Synthesized Probe
  source 1..80: mol_type = other DNA
gggattacaggcacctgccactacgcccagctaatttttgtatttttagtacagacggggtttcaccatgttggccaggc

SEQ ID NO: 30581 - DNA, 80 bp, synthetic construct
  misc_feature 1..80: note = Artificially Synthesized Probe
  source 1..80: mol_type = other DNA
gttttatttatttatttttttgagactgagtctcactctatcaccctggctgcagtgcagtggtgcaatctcagctcgct

SEQ ID NO: 30582 - DNA, 80 bp, synthetic construct
  misc_feature 1..80: note = Artificially Synthesized Probe
  source 1..80: mol_type = other DNA
gaagaattctctcttctacattcagactgggacttacactacaccattggttcctctcattctcaggcccctgggcttca

SEQ ID NO: 30583 - DNA, 80 bp, synthetic construct
  misc_feature 1..80: note = Artificially Synthesized Probe
  source 1..80: mol_type = other DNA
gtgtctccaataccaggcacatttggtggcatgaagtaaatactgaaagagtaacactagcaactgttacagactttgct

SEQ ID NO: 30584 - DNA, 80 bp, synthetic construct
  misc_feature 1..80: note = Artificially Synthesized Probe
  source 1..80: mol_type = other DNA
tgcaagtgggaataataatgtttaaatccaacatctgcctttctgcaaatcctgtgagagcaatagcagactttttacag

SEQ ID NO: 30585 - DNA, 80 bp, synthetic construct
  misc_feature 1..80: note = Artificially Synthesized Probe
  source 1..80: mol_type = other DNA
aattctgatggaaaactcaagttagagcaattaagttagacataactttatgcttggaaagtatggggaaaaaaacccta

SEQ ID NO: 30586 - DNA, 80 bp, synthetic construct
  misc_feature 1..80: note = Artificially Synthesized Probe
  source 1..80: mol_type = other DNA
aaaaagtaagtaaaataaaagacaaaataaaagacagaaatttgtttgttttttgagacagcatcttgctctgttgccca

SEQ ID NO: 30587 - DNA, 80 bp, synthetic construct
  misc_feature 1..80: note = Artificially Synthesized Probe
  source 1..80: mol_type = other DNA
tgctttggccgcccaaagtgctgggattatgggcctgagccaccgtgcccggccgtttattgccctttatttttttattt

SEQ ID NO: 30588 - DNA, 80 bp, synthetic construct
  misc_feature 1..80: note = Artificially Synthesized Probe
  source 1..80: mol_type = other DNA
gaactgttgtggaaaacagtttggtggttcctcaaaacgctaaccacggactcaccatatgacttagcaattccactcct

SEQ ID NO: 30589 - DNA, 80 bp, synthetic construct
  misc_feature 1..80: note = Artificially Synthesized Probe
  source 1..80: mol_type = other DNA
cctataaatgatatggaaaggtgggaaggaagtgctgggaagggaagaagagcatggtccctataaatgacatggaaagg

SEQ ID NO: 30590 - DNA, 80 bp, synthetic construct
  misc_feature 1..80: note = Artificially Synthesized Probe
  source 1..80: mol_type = other DNA
ttccaacatctgctaagagctacctctactcaataaaaccttgcacccattctctaagcccaggtgtgatccaattcttc

SEQ ID NO: 30591 - DNA, 80 bp, synthetic construct
  misc_feature 1..80: note = Artificially Synthesized Probe
  source 1..80: mol_type = other DNA
gggaattccctgaccatttgcattgccacatcaagggctctaagaaagtctacaaataaaagtacaaagccattgagccg

SEQ ID NO: 30592 - DNA, 80 bp, synthetic construct
  misc_feature 1..80: note = Artificially Synthesized Probe
  source 1..80: mol_type = other DNA
cagcgaaccgaattttgaatctaaaactcgacactcgattcagttattggacaacactgaagtatgtttggaacaacttg

SEQ ID NO: 30593 - DNA, 80 bp, synthetic construct
  misc_feature 1..80: note = Artificially Synthesized Probe
  source 1..80: mol_type = other DNA
tcaaagcctcaccttccaactacaaagagaaaaatgttccctctgtgaaaaggtgggctgtatccagcagagggtaacct

SEQ ID NO: 30594 - DNA, 80 bp, synthetic construct
  misc_feature 1..80: note = Artificially Synthesized Probe
  source 1..80: mol_type = other DNA
ccgaagagtgtctcacgtggcaagcctggcacctgataggcacacggtgagtctgttgactgaatgagtgaaggtagaca

SEQ ID NO: 30595 - DNA, 80 bp, synthetic construct
  misc_feature 1..80: note = Artificially Synthesized Probe
  source 1..80: mol_type = other DNA
tcgtgcctagcacggggccctggcagacactctccaggcttctggaattctgaacggcattcccatttgcaaacacaaaa

SEQ ID NO: 30596 - DNA, 80 bp, synthetic construct
  misc_feature 1..80: note = Artificially Synthesized Probe
  source 1..80: mol_type = other DNA
tccatttctccatcataaaacaggagcctgaagtctaacccccaagtccaaggactcttcctcctgcttcccagtggggt

SEQ ID NO: 30597 - DNA, 80 bp, synthetic construct
  misc_feature 1..80: note = Artificially Synthesized Probe
  source 1..80: mol_type = other DNA
ggtgcagctgaagggctttacaagtcctggttttggtgctttgtggccaaaactgacagcattctcttttgtgaattttc

SEQ ID NO: 30598 - DNA, 80 bp, synthetic construct
  misc_feature 1..80: note = Artificially Synthesized Probe
  source 1..80: mol_type = other DNA
aaaattccatctcaaaaaaaaggggggcgggggaagaatggatccccctttcctcactctgagatcagataaaaatgtat

SEQ ID NO: 30599 - DNA, 80 bp, synthetic construct
  misc_feature 1..80: note = Artificially Synthesized Probe
  source 1..80: mol_type = other DNA
ccagaccacacgctcatgccagagaatttcttaaaattgcatatgtgctccctgtctctctgtctatctaactattctat

SEQ ID NO: 30600 - DNA, 80 bp, synthetic construct
  misc_feature 1..80: note = Artificially Synthesized Probe
  source 1..80: mol_type = other DNA
agattcattttacagacctggattcaagctgcagctaattggctgtgcaaggctgacctccactgtgtggctgcggtgag

SEQ ID NO: 30601 - DNA, 80 bp, synthetic construct
  misc_feature 1..80: note = Artificially Synthesized Probe
  source 1..80: mol_type = other DNA
ctgagtgcttttgagtggcatgtgagcaagtgaacttcccaccttccagacaagacatagacagttgatagattcctttt

SEQ ID NO: 30602 - DNA, 80 bp, synthetic construct
  misc_feature 1..80: note = Artificially Synthesized Probe
  source 1..80: mol_type = other DNA
aataacaaaccgaaactctggctatctccaggtagtcgaacttgggatgccttttgttttcagtgcttgtaattttctga

SEQ ID NO: 30603 - DNA, 80 bp, synthetic construct
  misc_feature 1..80: note = Artificially Synthesized Probe
  source 1..80: mol_type = other DNA
gagggggtgagaagccgaggcagagaggtccggagaagcagaaagagatgccgaccggcagagaaagagcgagacagaca

SEQ ID NO: 30604 - DNA, 80 bp, synthetic construct
  misc_feature 1..80: note = Artificially Synthesized Probe
  source 1..80: mol_type = other DNA
ggcaaatatgggggattcttgtctatataaacagttttagtcatcgcaaactcataatgtcagcaccatcccgttagcac

SEQ ID NO: 30605 - DNA, 80 bp, synthetic construct
  misc_feature 1..80: note = Artificially Synthesized Probe
  source 1..80: mol_type = other DNA
ggaagtgggggcgccccctggcctttcctatacccggggccaaaaccgctgggaccgatatactgcaggagtccgggcac

SEQ ID NO: 30606 - DNA, 80 bp, synthetic construct
  misc_feature 1..80: note = Artificially Synthesized Probe
  source 1..80: mol_type = other DNA
gtccgggcgccgctgccctcctctacctgctgggaagcgcaggccgagcagggatgaacctggctccagggccccagcgg

SEQ ID NO: 30607 - DNA, 80 bp, synthetic construct
  misc_feature 1..80: note = Artificially Synthesized Probe
  source 1..80: mol_type = other DNA
gagattcagccgctggggagcacaaacccctaatgtttcttggtagtcactttttgaaacattttattatggaagttttc

SEQ ID NO: 30608 - DNA, 80 bp, synthetic construct
  misc_feature 1..80: note = Artificially Synthesized Probe
  source 1..80: mol_type = other DNA
ttccctccagggcagtcattcattgggtgatccgccttggggacctggggatcggcgagtccaggaggcccagcgaacga

SEQ ID NO: 30609 - DNA, 80 bp, synthetic construct
  misc_feature 1..80: note = Artificially Synthesized Probe
  source 1..80: mol_type = other DNA
cactcaaatcacaggaggcccagcatttacaaattacagaccctagttctcaccataggtgtgcggtggggaaacggagg

SEQ ID NO: 30610 - DNA, 80 bp, synthetic construct
  misc_feature 1..80: note = Artificially Synthesized Probe
  source 1..80: mol_type = other DNA
ccagcccgatttttaattaattctatcgaaagacacatccactctctccaaatctaccctgcatttgaactgtgtagacc

SEQ ID NO: 30611 - DNA, 80 bp, synthetic construct
  misc_feature 1..80: note = Artificially Synthesized Probe
  source 1..80: mol_type = other DNA
gcttgctggaaccctggcctcacagtaaggaaccaactgatgggccggggcgggggctggggcttggaggacatgattct

SEQ ID NO: 30612 - DNA, 80 bp, synthetic construct
  misc_feature 1..80: note = Artificially Synthesized Probe
  source 1..80: mol_type = other DNA
gaaactgtccagaaaatgtccctttttattccatacgcaaataagtagattcatttaaaaaaacaacaacccggaggctg

SEQ ID NO: 30613 - DNA, 80 bp, synthetic construct
  misc_feature 1..80: note = Artificially Synthesized Probe
  source 1..80: mol_type = other DNA
cctgcgtctcggtgagctgcagggaggcggccaggccggcgcgctcggcgctgctcaggtagcgcttcaggtcgaaggtg

SEQ ID NO: 30614 - DNA, 80 bp, synthetic construct
  misc_feature 1..80: note = Artificially Synthesized Probe
  source 1..80: mol_type = other DNA
gaaaccagaagctcacaggcggtgtctgagttcatgttccaagtaccaagctcccctactcatctcctaggaacaagaag

SEQ ID NO: 30615 - DNA, 80 bp, synthetic construct
  misc_feature 1..80: note = Artificially Synthesized Probe
  source 1..80: mol_type = other DNA
gtggagaacaaatttcaccctgagaaaccctttccatagtctcccccagaagggcactagacagagtcgctcgatttctg

SEQ ID NO: 30616 - DNA, 80 bp, synthetic construct
  misc_feature 1..80: note = Artificially Synthesized Probe
  source 1..80: mol_type = other DNA
tcctccatcctcccattttctttctcagcctctttcgccttctcctgtatctttccctatcctctttcactctcctttct

SEQ ID NO: 30617 - DNA, 80 bp, synthetic construct
  misc_feature 1..80: note = Artificially Synthesized Probe
  source 1..80: mol_type = other DNA
gagttcacaactcaaatgcctggagaactgggaggtggtggaaatttttagccactctgatcatttatactctccagacc

SEQ ID NO: 30618 - DNA, 80 bp, synthetic construct
  misc_feature 1..80: note = Artificially Synthesized Probe
  source 1..80: mol_type = other DNA
cttcctgggcgctgtgctgaggtttcacaggaataatttcccttcatggtgaggagtcctgggcagaagctattggtgac

SEQ ID NO: 30619 - DNA, 80 bp, synthetic construct
  misc_feature 1..80: note = Artificially Synthesized Probe
  source 1..80: mol_type = other DNA
ctccttgttcctgcagagtttataactaactacctgggttacttattgttcaggtaacaaaagggatcggaaaacgccct

SEQ ID NO: 30620 - DNA, 80 bp, synthetic construct
  misc_feature 1..80: note = Artificially Synthesized Probe
  source 1..80: mol_type = other DNA
ggacccagagttccttcctgggtgtcctcccgggtcctttctgtccctgatcagctcaaaccccagcgtgtttctttttt

SEQ ID NO: 30621 - DNA, 80 bp, synthetic construct
  misc_feature 1..80: note = Artificially Synthesized Probe
  source 1..80: mol_type = other DNA
tttcccctccccagtcattcctgctgtttaagttgaccatcaactcacttccatacagtgctttggagttcacaaagggc

SEQ ID NO: 30622 - DNA, 80 bp, synthetic construct
  misc_feature 1..80: note = Artificially Synthesized Probe
  source 1..80: mol_type = other DNA
gtttgtgtaagagacacacagagagacagaagagagagagtgatagcaagggagtggggggtagggagagagagacatcg

SEQ ID NO: 30623 - DNA, 80 bp, synthetic construct
  misc_feature 1..80: note = Artificially Synthesized Probe
  source 1..80: mol_type = other DNA
gttataagatgtaagtggccagtcctcagcacggtgcctggctcacagtaaatcctcaagaaacatgagttctcagactt

SEQ ID NO: 30624 - DNA, 80 bp, synthetic construct
  misc_feature 1..80: note = Artificially Synthesized Probe
  source 1..80: mol_type = other DNA
tgtggtcccaagtacttgggagtccgaggtgggagaaccaattgagcccaggagtttgaggctacagtgagctatgatca

SEQ ID NO: 30625 - DNA, 80 bp, synthetic construct
  misc_feature 1..80: note = Artificially Synthesized Probe
  source 1..80: mol_type = other DNA
gacccaagttcaaatcccagtctgcctgtttcagtgctgctgtattgagctgtatttatctgtaactttttgtttgtttg

SEQ ID NO: 30626 - DNA, 80 bp, synthetic construct
  misc_feature 1..80: note = Artificially Synthesized Probe
  source 1..80: mol_type = other DNA
ttattccttgtccaaggtcacaggacaagcagagtcccacccacctgaaaggattcagttctaagacagcctttagggca

SEQ ID NO: 30627 - DNA, 80 bp, synthetic construct
  misc_feature 1..80: note = Artificially Synthesized Probe
  source 1..80: mol_type = other DNA
ccatgtgtctgtgtccctgtgtcctggcataaatgaccatacctcaccgtccctgagtctatgtgtaggcccctgggctc

SEQ ID NO: 30628 - DNA, 80 bp, synthetic construct
  misc_feature 1..80: note = Artificially Synthesized Probe
  source 1..80: mol_type = other DNA
ttaagtgggaaagtgggagaaaagctcattatgatccagcgagtcatgtattagaatgggacaacagcagccacaacaac

SEQ ID NO: 30629 - DNA, 80 bp, synthetic construct
  misc_feature 1..80: note = Artificially Synthesized Probe
  source 1..80: mol_type = other DNA
aaaaattagatgcctttaccctaaagcagccactggaattcccagactcttgtgtatccttccagagagattttctgcat

SEQ ID NO: 30630 - DNA, 80 bp, synthetic construct
  misc_feature 1..80: note = Artificially Synthesized Probe
  source 1..80: mol_type = other DNA
aactctagtccttactctatagctacccctcatcccaattattggggtgttcacactctactgtgctgtaatacacactt

SEQ ID NO: 30631 - DNA, 80 bp, synthetic construct
  misc_feature 1..80: note = Artificially Synthesized Probe
  source 1..80: mol_type = other DNA
agcttagcaaccttggaaggaaaagagctcttcttttcagctactttcagttgaatgactctttttatacttgataatgt

SEQ ID NO: 30632 - DNA, 80 bp, synthetic construct
  misc_feature 1..80: note = Artificially Synthesized Probe
  source 1..80: mol_type = other DNA
tagtgatgtttgccttgaacacaggttaagaaagtgatggcatgtgtgctgtgtgtttgtcatcagtagattagatgatt

SEQ ID NO: 30633 - DNA, 80 bp, synthetic construct
  misc_feature 1..80: note = Artificially Synthesized Probe
  source 1..80: mol_type = other DNA
gttccattccattcatgccactccttatcactctacttcactctgttcattcatccattccactctatctcattccattc

SEQ ID NO: 30634 - DNA, 80 bp, synthetic construct
  misc_feature 1..80: note = Artificially Synthesized Probe
  source 1..80: mol_type = other DNA
actccattcactccacatgactccacatttcatccattccactctacttcatccactcactccactctataccattccac

SEQ ID NO: 30635 - DNA, 80 bp, synthetic construct
  misc_feature 1..80: note = Artificially Synthesized Probe
  source 1..80: mol_type = other DNA
ttgtaaggaaaacccaacctcatctttccttggcagggagattctggagcagtccctagggaggccctgtggggaccccg

SEQ ID NO: 30636 - DNA, 80 bp, synthetic construct
  misc_feature 1..80: note = Artificially Synthesized Probe
  source 1..80: mol_type = other DNA
aggggagcagagaactgaccccatggcctttgcactgctgtggaaccccagggctccagggaaccgcagtttgacaactt

SEQ ID NO: 30637 - DNA, 80 bp, synthetic construct
  misc_feature 1..80: note = Artificially Synthesized Probe
  source 1..80: mol_type = other DNA
agggtttgagacagccccctgtgatcaaagcactgctatttctgcagccaaagataggatttccacaaggcagtttaaac

SEQ ID NO: 30638 - DNA, 80 bp, synthetic construct
  misc_feature 1..80: note = Artificially Synthesized Probe
  source 1..80: mol_type = other DNA
ctgagcagttccctgtaatggggagagggtctgtccctttatctggagcctccagttttgaaaatcagccctggatctcc

SEQ ID NO: 30639 - DNA, 80 bp, synthetic construct
  misc_feature 1..80: note = Artificially Synthesized Probe
  source 1..80: mol_type = other DNA
atccagatttctggcatcttttggaaaattggaaaaattcatattcccatataacagtgcaccaggcctcactgcatcca

SEQ ID NO: 30640 - DNA, 80 bp, synthetic construct
  misc_feature 1..80: note = Artificially Synthesized Probe
  source 1..80: mol_type = other DNA
gagtacccctagggacaggcaggtggggtgggtgtgggtgcctggtgggtggctagcagccttgtttgcctctgcagtgt

SEQ ID NO: 30641 - DNA, 80 bp, synthetic construct
  misc_feature 1..80: note = Artificially Synthesized Probe
  source 1..80: mol_type = other DNA
tggccaagctgaggtgcccaggagaagaaagaggtgaccccagggcacaggagctacctgtgtggacaggactaacactc

SEQ ID NO: 30642 - DNA, 80 bp, synthetic construct
  misc_feature 1..80: note = Artificially Synthesized Probe
  source 1..80: mol_type = other DNA
attattctgtctagtaaaaggagctttctagaatgaagatttccaggcccagaatgcaagggtcctcatccaggtttttt

SEQ ID NO: 30643 - DNA, 80 bp, synthetic construct
  misc_feature 1..80: note = Artificially Synthesized Probe
  source 1..80: mol_type = other DNA
gcggtagagtgaagagatgacatggcaagatggagaagcacaagactgtgtaacctactgtgcaataagcaagagaaagg

SEQ ID NO: 30644 - DNA, 80 bp, synthetic construct
  misc_feature 1..80: note = Artificially Synthesized Probe
  source 1..80: mol_type = other DNA
ttatgctttggttcaggagtagcctgcaaggacattagcctacttagggagatcaagaacttccaaagtatcttgtcaag

SEQ ID NO: 30645 - DNA, 80 bp, synthetic construct
  misc_feature 1..80: note = Artificially Synthesized Probe
  source 1..80: mol_type = other DNA
atgagaacaaaaagggaaagcacacgcaacatgggaatgaggaagcagaatactacaactccaggccaacaaatctgaaa

SEQ ID NO: 30646 - DNA, 80 bp, synthetic construct
  misc_feature 1..80: note = Artificially Synthesized Probe
  source 1..80: mol_type = other DNA
aaacgattcatctaaagtcataatagagaaaagccagttgatcatcttgacagatgtggaaaaaagccatttaataaaac

SEQ ID NO: 30647 - DNA, 80 bp, synthetic construct
  misc_feature 1..80: note = Artificially Synthesized Probe
  source 1..80: mol_type = other DNA
gccatgttatccaggctggtctcgaactcctgatctcaggtgatccatccaccttggcctcccaaagtgctgggattaca

SEQ ID NO: 30648 - DNA, 80 bp, synthetic construct
  misc_feature 1..80: note = Artificially Synthesized Probe
  source 1..80: mol_type = other DNA
caggagttcgagaccagcctaggcaacatggcgaaacccatctctactaaaaacaaaaagttacctgggcgtggtggcat

SEQ ID NO: 30649 - DNA, 80 bp, synthetic construct
  misc_feature 1..80: note = Artificially Synthesized Probe
  source 1..80: mol_type = other DNA
atttcagtgtctgtctggagcttcatgtgtcacctgtgctcacatttcattggccagaattagtcataggaccctgaatg

SEQ ID NO: 30650 - DNA, 80 bp, synthetic construct
  misc_feature 1..80: note = Artificially Synthesized Probe
  source 1..80: mol_type = other DNA
caaaattcttaccaaagccaccttcctgcctgggtagtgtttaaagccaactagaaaacccatattcttgagatcggtac

SEQ ID NO: 30651 - DNA, 80 bp, synthetic construct
  misc_feature 1..80: note = Artificially Synthesized Probe
  source 1..80: mol_type = other DNA
tttccatagaactggcctcacaggcagagacatcattttaaccaactttcttggaaagattcctgcaaaaccagaatcat

SEQ ID NO: 30652 - DNA, 80 bp, synthetic construct
  misc_feature 1..80: note = Artificially Synthesized Probe
  source 1..80: mol_type = other DNA
aaatgcatccagctgggtcttgactggaatgaaaggttatttttaaaggtcctcttggttaaagggttccaagttttagt

SEQ ID NO: 30653 - DNA, 80 bp, synthetic construct
  misc_feature 1..80: note = Artificially Synthesized Probe
  source 1..80: mol_type = other DNA
tcctcgggttgtttgctcattaatccaaattcagcagggagaaagtctaaccacgtccatgggagaaggtttctagaagg

SEQ ID NO: 30654 - DNA, 80 bp, synthetic construct
  misc_feature 1..80: note = Artificially Synthesized Probe
  source 1..80: mol_type = other DNA
gatggtgcatcattcgacagggtcccagctctgctgtggggtttgattaaaacactaaattctgtgtacacatttaattg

SEQ ID NO: 30655 - DNA, 80 bp, synthetic construct
  misc_feature 1..80: note = Artificially Synthesized Probe
  source 1..80: mol_type = other DNA
tcagaagggaagcagcaggcacttcagtgacctcctcctttcctgcctgctctcccacagagggaccaacacccagcctg

SEQ ID NO: 30656 - DNA, 80 bp, synthetic construct
  misc_feature 1..80: note = Artificially Synthesized Probe
  source 1..80: mol_type = other DNA
aatagaaaatctctccttcagcattctcagtgtgaaagtgataggaagcaggaaaatgagtaccatgacatttgtgcctt

SEQ ID NO: 30657 - DNA, 80 bp, synthetic construct
  misc_feature 1..80: note = Artificially Synthesized Probe
  source 1..80: mol_type = other DNA
gactccatcttaaataaaataaatacattttaaatttttttaaaaaagaaaataagtggttacatcatgggtctctagcg

SEQ ID NO: 30658 - DNA, 80 bp, synthetic construct
  misc_feature 1..80: note = Artificially Synthesized Probe
  source 1..80: mol_type = other DNA
aaaaatcaagcaacctcatggtacagtggctgccgaaaagggaagcaatgacatttcgaatattataaatcaaggtgacc

SEQ ID NO: 30659 - DNA, 80 bp, synthetic construct
  misc_feature 1..80: note = Artificially Synthesized Probe
  source 1..80: mol_type = other DNA
aaaccctgcactgacggagcatactccaaagcctatgtgtttctagtgggaggattaaccatgatcaaaacaaggttagc

SEQ ID NO: 30660 - DNA, 80 bp, synthetic construct
  misc_feature 1..80: note = Artificially Synthesized Probe
  source 1..80: mol_type = other DNA
agaggcagcaagtcttcctctggccatggggataagggcaaagttggggagggagaaaaagggttgtgggtgcccccatc

SEQ ID NO: 30661 - DNA, 80 bp, synthetic construct
  misc_feature 1..80: note = Artificially Synthesized Probe
  source 1..80: mol_type = other DNA
ggaccgggtgaccttcaagaatcgtatgaaagccatggacggacctccaggacgctgggtttaaacaagcaagaagccaa

SEQ ID NO: 30662 - DNA, 80 bp, synthetic construct
  misc_feature 1..80: note = Artificially Synthesized Probe
  source 1..80: mol_type = other DNA
catagcaagacctcatctctacaaaaataaaaataaaaatcagccaggtgtggtagcgtgcacctgtggtcccagctact

SEQ ID NO: 30663 - DNA, 80 bp, synthetic construct
  misc_feature 1..80: note = Artificially Synthesized Probe
  source 1..80: mol_type = other DNA
ctgagctaagacagcttctaagatgatacagcttttttttttttttttttttttttttgagacagagtcttgctctgtcg

SEQ ID NO: 30664 - DNA, 80 bp, synthetic construct
  misc_feature 1..80: note = Artificially Synthesized Probe
  source 1..80: mol_type = other DNA
tggccaagagtcaatgttatagataaataaatgataaatttgcctcctcaaaaacaaaacaaagcacaagcacaggggtg

SEQ ID NO: 30665 - DNA, 80 bp, synthetic construct
  misc_feature 1..80: note = Artificially Synthesized Probe
  source 1..80: mol_type = other DNA
acacgttattgcttgtctgcacatcggcagcaagttaggcataataagaaactttacgagtgtggacgaaccaactcatc

SEQ ID NO: 30666 - DNA, 80 bp, synthetic construct
  misc_feature 1..80: note = Artificially Synthesized Probe
  source 1..80: mol_type = other DNA
catttgctttaaaatatggtgggggggagcaaatgagtaggtgcacagattaaacaattggtcataatttcctaactgtt

SEQ ID NO: 30667 - DNA, 80 bp, synthetic construct
  misc_feature 1..80: note = Artificially Synthesized Probe
  source 1..80: mol_type = other DNA
acaaagctttgctgatgagggtgtggtaagaaaaagccttattcactgcaggtgggagttagaatggtgtatttctgcag

SEQ ID NO: 30668 - DNA, 80 bp, synthetic construct
  misc_feature 1..80: note = Artificially Synthesized Probe
  source 1..80: mol_type = other DNA
atcgcgccactgcactccagcctgggcaacagattgagtctctgtcttaaaaacaaaaacaaaaatagtctttctctctc

SEQ ID NO: 30669 - DNA, 80 bp, synthetic construct
  misc_feature 1..80: note = Artificially Synthesized Probe
  source 1..80: mol_type = other DNA
tcctctctgagcaccgacatattgggcatactccctcctggggctcagcgatgctggaatttctccctccctgtcatctt

SEQ ID NO: 30670 - DNA, 80 bp, synthetic construct
  misc_feature 1..80: note = Artificially Synthesized Probe
  source 1..80: mol_type = other DNA
caaagagtccctatcaccaaccccactgggatttacttcatagactaatgtcttacttgggaatgattacttgaggtctc

SEQ ID NO: 30671 - DNA, 80 bp, synthetic construct
  misc_feature 1..80: note = Artificially Synthesized Probe
  source 1..80: mol_type = other DNA
aggctatcctctgagtatcttcacaatgccgacaacagtggtctactttaggaaaccttgccagataacagatgtaggtg

SEQ ID NO: 30672 - DNA, 80 bp, synthetic construct
  misc_feature 1..80: note = Artificially Synthesized Probe
  source 1..80: mol_type = other DNA
gggccatggcttcaaagggtgcaagcccaaagccttggcagcttccacatggcgttgggcctgcaggtacacagaagtca

SEQ ID NO: 30673 - DNA, 80 bp, synthetic construct
  misc_feature 1..80: note = Artificially Synthesized Probe
  source 1..80: mol_type = other DNA
tgatggttttaaaaatgagagtttcctcccataagctcttttctctcatctcctgccatgtgagacatgctctccacctt

SEQ ID NO: 30674 - DNA, 80 bp, synthetic construct
  misc_feature 1..80: note = Artificially Synthesized Probe
  source 1..80: mol_type = other DNA
ccaagatgttaattccagcattgtctacaaatatggaacactggaaacaacccagtgggccctaggagaatgatagagag

SEQ ID NO: 30675 - DNA, 80 bp, synthetic construct
  misc_feature 1..80: note = Artificially Synthesized Probe
  source 1..80: mol_type = other DNA
ttcgcctgtcttggcctcccaaagtgctaggattagaggcatgagccactgcgctcagctatatatatatatatatattt

SEQ ID NO: 30676 - DNA, 80 bp, synthetic construct
  misc_feature 1..80: note = Artificially Synthesized Probe
  source 1..80: mol_type = other DNA
cccagcctctattacacatcttgatcgctacatattaccctgaaggatacactgcagtttaaccaatttcctagtactgg

SEQ ID NO: 30677 - DNA, 80 bp, synthetic construct
  misc_feature 1..80: note = Artificially Synthesized Probe
  source 1..80: mol_type = other DNA
gccatcttatcaccacaaaggaaaggccgataaaagaaaaaagaaacaaatgaaatccatgcagattgtcagacccaaca

SEQ ID NO: 30678 - DNA, 80 bp, synthetic construct
  misc_feature 1..80: note = Artificially Synthesized Probe
  source 1..80: mol_type = other DNA
agatgaaaatgtccacactggtgttcctttctctagcctagttatagtgcttgattaccatttccctacagggctgtggg

SEQ ID NO: 30679 - DNA, 80 bp, synthetic construct
  misc_feature 1..80: note = Artificially Synthesized Probe
  source 1..80: mol_type = other DNA
aaggaccacttcaggagggaaagacatacacccccattaccccctcagacagaggttccagctaattattctttcaacaa

SEQ ID NO: 30680 - DNA, 80 bp, synthetic construct
  misc_feature 1..80: note = Artificially Synthesized Probe
  source 1..80: mol_type = other DNA
tactttctgtcccacatgacactgcttcaaaccaagtgaggctgcagagaactcacttctctgcatatgaagtgaagcaa

SEQ ID NO: 30681 - DNA, 80 bp, synthetic construct
  misc_feature 1..80: note = Artificially Synthesized Probe
  source 1..80: mol_type = other DNA
tcaccctaatttccccctctttgaaaactgtcttcaatacacacaagtaacccaagcagtcaagtctgttctaggcaact

SEQ ID NO: 30682 - DNA, 80 bp, synthetic construct
  misc_feature 1..80: note = Artificially Synthesized Probe
  source 1..80: mol_type = other DNA
aacatgcttatttcatcaagatgcattcttggcagcaggaacacagtctcttccttggaagttctatagtaacaaccctc

SEQ ID NO: 30683 - DNA, 80 bp, synthetic construct
  misc_feature 1..80: note = Artificially Synthesized Probe
  source 1..80: mol_type = other DNA
aacaggaaggagcaggtacagtccaattaggataatttgtggagggttaattgacaaagaaactaattatacgggtgtga

SEQ ID NO: 30684 - DNA, 80 bp, synthetic construct
  misc_feature 1..80: note = Artificially Synthesized Probe
  source 1..80: mol_type = other DNA
agggtagcaataaccactggctgcttccccatcagatgatctgaacagggaataagagcaatctaagtaagtattctaaa

SEQ ID NO: 30685 - DNA, 80 bp, synthetic construct
  misc_feature 1..80: note = Artificially Synthesized Probe
  source 1..80: mol_type = other DNA
ttaaagctggccagtaggagactctagagataaaaacccagttgtctgactccaagacttgtcctataaacttccatatc

SEQ ID NO: 30686 - DNA, 80 bp, synthetic construct
  misc_feature 1..80: note = Artificially Synthesized Probe
  source 1..80: mol_type = other DNA
tgtatgtcttacttacaaagcaacaacggactgatttctagagctaagtctatttacgatggctggaggttcattcagct

SEQ ID NO: 30687 - DNA, 80 bp, synthetic construct
  misc_feature 1..80: note = Artificially Synthesized Probe
  source 1..80: mol_type = other DNA
tattttattgctaaaaaatgctaaggaccatctgaaccttcagcaaattgtaatctttttgctgatggagggacttgtgt

SEQ ID NO: 30688 - DNA, 80 bp, synthetic construct
  misc_feature 1..80: note = Artificially Synthesized Probe
  source 1..80: mol_type = other DNA
ttagggaaaggcccattgaaggacttctgaggtattaatgaaagacgtacttccactgggtggtgggtacatatgggttt

SEQ ID NO: 30689 - DNA, 80 bp, synthetic construct
  misc_feature 1..80: note = Artificially Synthesized Probe
  source 1..80: mol_type = other DNA
ctctgtgtacaccttcttcttgcgtgagtcatctctaaaactttcacagagaaagaagccaccctagtaaaagacccagt

SEQ ID NO: 30690 - DNA, 80 bp, synthetic construct
  misc_feature 1..80: note = Artificially Synthesized Probe
  source 1..80: mol_type = other DNA
tgctctgaaaatggagtttctttataatggagttggccgttctgcctaaaaactcaccataaatcacatgcctattggca

SEQ ID NO: 30691 - DNA, 80 bp, synthetic construct
  misc_feature 1..80: note = Artificially Synthesized Probe
  source 1..80: mol_type = other DNA
ccactaatgtgtcatctagcattaggtatatctcccaatgctatccctcccccatcccccgaccccaccacagtccccag

SEQ ID NO: 30692 - DNA, 80 bp, synthetic construct
  misc_feature 1..80: note = Artificially Synthesized Probe
  source 1..80: mol_type = other DNA
ccttatacaaaaatcaattcaagatggattaaagatttaaacgttaaacctaaaaccataaaaaccctagaagaaaacct

SEQ ID NO: 30693 - DNA, 80 bp, synthetic construct
  misc_feature 1..80: note = Artificially Synthesized Probe
  source 1..80: mol_type = other DNA
gacgacatgattgtttatctagaaaaccccatcgtctcagcccaaaatctccttaagctgataagcaacttcagcaaagt

SEQ ID NO: 30694 - DNA, 80 bp, synthetic construct
  misc_feature 1..80: note = Artificially Synthesized Probe
  source 1..80: mol_type = other DNA
ctaaatgcctacaagagaaagcaggaaagatccaaaattgacaccctaacatcacaattaaaagaactagaaaagcaaga

SEQ ID NO: 30695 - DNA, 80 bp, synthetic construct
  misc_feature 1..80: note = Artificially Synthesized Probe
  source 1..80: mol_type = other DNA
ctcttttagggcaggcctggtggtgacaaaatctctcaacatttgcttgtctataaagtattttatttctccttcactta

SEQ ID NO: 30696 - DNA, 80 bp, synthetic construct
  misc_feature 1..80: note = Artificially Synthesized Probe
  source 1..80: mol_type = other DNA
taatttgatcgtctgaagccttcttctctcagctcgtcaaaatcattctccatccagctttgttctgttgctagtgagga

SEQ ID NO: 30697 - DNA, 80 bp, synthetic construct
  misc_feature 1..80: note = Artificially Synthesized Probe
  source 1..80: mol_type = other DNA
ttcagatcaacatttgggatcaaaggcctaaaacaaagtggggctgacccagtgtggtagaacacaatgaggacatcagg

SEQ ID NO: 30698 - DNA, 80 bp, synthetic construct
  misc_feature 1..80: note = Artificially Synthesized Probe
  source 1..80: mol_type = other DNA
ggttctccagacaggatacgtgctcccatccccaatccctgaatgccaactgtagtaattaaacaactgaggtccaccct

SEQ ID NO: 30699 - DNA, 80 bp, synthetic construct
  misc_feature 1..80: note = Artificially Synthesized Probe
  source 1..80: mol_type = other DNA
ctggcagaatctatagataaaagaaagcaggtcagcttgattcaccactgctgtcagaacatcctggaaagagtccaggc

SEQ ID NO: 30700 - DNA, 80 bp, synthetic construct
  misc_feature 1..80: note = Artificially Synthesized Probe
  source 1..80: mol_type = other DNA
taaaagagcaggcacgagtgggtgacacttcaaaggcagattcacttgacaaacttaaagaaggactctatgtttcgctt

SEQ ID NO: 30701 - DNA, 80 bp, synthetic construct
  misc_feature 1..80: note = Artificially Synthesized Probe
  source 1..80: mol_type = other DNA
tgggctgttctctgcaataagagagtgggcgtgtgagttgagagaacatgacttaatgtataatttatgatttctaggcc

SEQ ID NO: 30702 - DNA, 80 bp, synthetic construct
  misc_feature 1..80: note = Artificially Synthesized Probe
  source 1..80: mol_type = other DNA
ctggagcgtagtgatgcaatcatagctcactgcagcctggatctctgaggctcaagcaattctgcctcagcctcccaagt

SEQ ID NO: 30703 - DNA, 80 bp, synthetic construct
  misc_feature 1..80: note = Artificially Synthesized Probe
  source 1..80: mol_type = other DNA
tctttacacagactggctcaaaaatcctttaagtgttcaaaataagatacaaatagaaaaaaagccatcaacgtgtaaaa

SEQ ID NO: 30704 - DNA, 80 bp, synthetic construct
  misc_feature 1..80: note = Artificially Synthesized Probe
  source 1..80: mol_type = other DNA
acaacaccataaaggaaaacacttccacacacagtattctcctacatacgtgaaaggaaggagcaatttaaagggcagca

SEQ ID NO: 30705 - DNA, 80 bp, synthetic construct
  misc_feature 1..80: note = Artificially Synthesized Probe
  source 1..80: mol_type = other DNA
agctctgtggatggactgaagtcatggtgagctgccctcgggacccccaagtagaaatgcaacgatgttggaagaacaca

SEQ ID NO: 30706 - DNA, 80 bp, synthetic construct
  misc_feature 1..80: note = Artificially Synthesized Probe
  source 1..80: mol_type = other DNA
aaaccctccctctcagccattatgttattctctcttcctataataatagctgtctgtagtaggcagcttcggatgtgact

SEQ ID NO: 30707 - DNA, 80 bp, synthetic construct
  misc_feature 1..80: note = Artificially Synthesized Probe
  source 1..80: mol_type = other DNA
gtgggcagggctcaccacacagaaaatcaaaggtcacaggatcacttcaggcaaactgaacaacaaatcttaacaccttt

SEQ ID NO: 30708 - DNA, 80 bp, synthetic construct
  misc_feature 1..80: note = Artificially Synthesized Probe
  source 1..80: mol_type = other DNA
ccctaattagtttgtatctgtcttgagtcttaaacccctccaaacaccatctactacaccaaccgacaggtcttcctcta

SEQ ID NO: 30709 - DNA, 80 bp, synthetic construct
  misc_feature 1..80: note = Artificially Synthesized Probe
  source 1..80: mol_type = other DNA
ggaagcatgcaagatctatgtttagaaaataaaagcaagccaggtacaattgtgtgcccctatagtcccagccactcagg

SEQ ID NO: 30710 - DNA, 80 bp, synthetic construct
  misc_feature 1..80: note = Artificially Synthesized Probe
  source 1..80: mol_type = other DNA
gagtgtctgacagtttttaaggagctttgaacatacattctcctattggccctcctgagatgtgagtttgactaagttct

SEQ ID NO: 30711 - DNA, 80 bp, synthetic construct
  misc_feature 1..80: note = Artificially Synthesized Probe
  source 1..80: mol_type = other DNA
cagtctttaactcggggccagcatctccctaatgtgctctgtggagctattttctcttccaaatacattccaaaaaacat

SEQ ID NO: 30712 - DNA, 80 bp, synthetic construct
  misc_feature 1..80: note = Artificially Synthesized Probe
  source 1..80: mol_type = other DNA
aatgatttctgagacagttgaattcaagagagcacaaaatcttcccgaaggaaccgtttgtgttcttccttttgctataa

SEQ ID NO: 30713 - DNA, 80 bp, synthetic construct
  misc_feature 1..80: note = Artificially Synthesized Probe
  source 1..80: mol_type = other DNA
agactgggcgcagtggctcacgccttgtaatcccagcactttgcgaggccagggcgggcagatggcttgaggccaggaat

SEQ ID NO: 30714 - DNA, 80 bp, synthetic construct
  misc_feature 1..80: note = Artificially Synthesized Probe
  source 1..80: mol_type = other DNA
tcctacttaagcggagagaaaataattgagaagcattggtaaacttcacagtccaggtgcacaaactcacctaaagactg

SEQ ID NO: 30715 - DNA, 80 bp, synthetic construct
  misc_feature 1..80: note = Artificially Synthesized Probe
  source 1..80: mol_type = other DNA
ccaagaactgtgggaaaactggaaaaggtataagataggcataataaaaatactagaaggagaagagggaaagaaaaatc

SEQ ID NO: 30716 - DNA, 80 bp, synthetic construct
  misc_feature 1..80: note = Artificially Synthesized Probe
  source 1..80: mol_type = other DNA
atgctaagaaaggagaagaaatagaatcatatgaaatgctcaattacaactacaaaaggcagaaaaagtgtagaagaaaa

SEQ ID NO: 30717 - DNA, 80 bp, synthetic construct
  misc_feature 1..80: note = Artificially Synthesized Probe
  source 1..80: mol_type = other DNA
gtataattggcacctacagactattgatccaagaagagtagattgcatgttctttttcaaagtgacatggaacattcaag

SEQ ID NO: 30718 - DNA, 80 bp, synthetic construct
  misc_feature 1..80: note = Artificially Synthesized Probe
  source 1..80: mol_type = other DNA
gcactcagtcccaacagaccaaaccaaaatggagtcacttatactaaagttccaggtgaccatgtcaaaactaagtggtt

SEQ ID NO: 30719 - DNA, 80 bp, synthetic construct
  misc_feature 1..80: note = Artificially Synthesized Probe
  source 1..80: mol_type = other DNA
ctcgacaagggaggggaaaggggtcttcttcctaacgcagttagtccctactgctgtgtctttcccctgttggctagggt

SEQ ID NO: 30720 - DNA, 80 bp, synthetic construct
  misc_feature 1..80: note = Artificially Synthesized Probe
  source 1..80: mol_type = other DNA
aaggtaaagaaagtgacggacatctcaaatacacattaaaaagatgatactgccaggtgaggtgtcaaagcccccacatt

SEQ ID NO: 30721 - DNA, 80 bp, synthetic construct
  misc_feature 1..80: note = Artificially Synthesized Probe
  source 1..80: mol_type = other DNA
gcaaagtgcctttttgctattaatagcagactgttaaaggaatgttatgttgattataggtgtaagacgccactgcaggg

SEQ ID NO: 30722 - DNA, 80 bp, synthetic construct
  misc_feature 1..80: note = Artificially Synthesized Probe
  source 1..80: mol_type = other DNA
tttcagggcattttcagagcacccctcaaaccccgtactcattagcaatcattctcctcttcccccagcccctagcaacc

SEQ ID NO: 30723 - DNA, 80 bp, synthetic construct
  misc_feature 1..80: note = Artificially Synthesized Probe
  source 1..80: mol_type = other DNA
aaagcaaatggtttttatgcggtgcagccttggaagttacaagcaaacctgcagatagtgggcaggccatatttcaaaga

SEQ ID NO: 30724 - DNA, 80 bp, synthetic construct
  misc_feature 1..80: note = Artificially Synthesized Probe
  source 1..80: mol_type = other DNA
ttaaaacgtgtacagggctgtggaaaactggtgcttcctcaaaaagttaaatacagcatttccacgtggccctgcaattc

SEQ ID NO: 30725 - DNA, 80 bp, synthetic construct
  misc_feature 1..80: note = Artificially Synthesized Probe
  source 1..80: mol_type = other DNA
agcaactcctggtgaggtcggggatggcttcacagagataatgacaggactgagtccttaggaggacaaagggaggaaga

SEQ ID NO: 30726 - DNA, 80 bp, synthetic construct
  misc_feature 1..80: note = Artificially Synthesized Probe
  source 1..80: mol_type = other DNA
catggaaagatggtcttcttttctttatgtattctgattgattctatacttcactgttacaaaataaagagaccacccag

SEQ ID NO: 30727 - DNA, 80 bp, synthetic construct
  misc_feature 1..80: note = Artificially Synthesized Probe
  source 1..80: mol_type = other DNA
ctctcaagagctttagatggcaaagggacaaagatgacacaagctggatggggacttggcactaagagagctgagccctg

SEQ ID NO: 30728 - DNA, 80 bp, synthetic construct
  misc_feature 1..80: note = Artificially Synthesized Probe
  source 1..80: mol_type = other DNA
gtgcccagcaaggcaaaactcatctctattatttcccacaatgtcaagggcaaaagtgaaatcaacctcatctggtctaa

SEQ ID NO: 30729 - DNA, 80 bp, synthetic construct
  misc_feature 1..80: note = Artificially Synthesized Probe
  source 1..80: mol_type = other DNA
ggtgggggctcattcccttagttcttctccatggggtttcccctccacactcacctccacagctttgaggacatgtctat

SEQ ID NO: 30730 - DNA, 80 bp, synthetic construct
  misc_feature 1..80: note = Artificially Synthesized Probe
  source 1..80: mol_type = other DNA
tccaattatccaactctcccaacaaagaggcttcacagatcaaactgacctcaggtttgagcattatttacaaaaaggtc

SEQ ID NO: 30731 - DNA, 80 bp, synthetic construct
  misc_feature 1..80: note = Artificially Synthesized Probe
  source 1..80: mol_type = other DNA
tcctcaagatgagcgggaggtcaactttaagtccttgcacatcaggaatggcctttactttcccccttatacttgattgg

SEQ ID NO: 30732 - DNA, 80 bp, synthetic construct
  misc_feature 1..80: note = Artificially Synthesized Probe
  source 1..80: mol_type = other DNA
cttccggactccttggtgctggagcacgtcacactttccccctttccccacgctgatctgagctgataccatgcttccaa

SEQ ID NO: 30733 - DNA, 80 bp, synthetic construct
  misc_feature 1..80: note = Artificially Synthesized Probe
  source 1..80: mol_type = other DNA
tttaaggaactggcaaacatatgtggggtttcctctttccaggatttgttttaaagcaaatgagttccatggccttccct

SEQ ID NO: 30734 - DNA, 80 bp, synthetic construct
  misc_feature 1..80: note = Artificially Synthesized Probe
  source 1..80: mol_type = other DNA
tgttccccccaaattgggctgcaagtccccttgggtagggatcaggttttcatttctggggcccctgtagtgccttgata

SEQ ID NO: 30735 - DNA, 80 bp, synthetic construct
  misc_feature 1..80: note = Artificially Synthesized Probe
  source 1..80: mol_type = other DNA
cagagaaagagagaacaagaggtgatgggagcaagcactcagtaaagttccttgtacacttctttgggtttggaaagaaa

SEQ ID NO: 30736 - DNA, 80 bp, synthetic construct
  misc_feature 1..80: note = Artificially Synthesized Probe
  source 1..80: mol_type = other DNA
tctcacccaattttcccaacaaccttgagaaatcggcatctatactttgtttcacagaggaaaacagaaaggaaaaaaag

SEQ ID NO: 30737 - DNA, 80 bp, synthetic construct
  misc_feature 1..80: note = Artificially Synthesized Probe
  source 1..80: mol_type = other DNA
aggttagatacctattatttgctttcatggcaccccataattctccttcagaacattttcacagctggaccactaggctc

SEQ ID NO: 30738 - DNA, 80 bp, synthetic construct
  misc_feature 1..80: note = Artificially Synthesized Probe
  source 1..80: mol_type = other DNA
ttgatgccattatacaagggtgagttccacccttttttctctctctttgccctttcattatgtgatgacaagcaagaccc

SEQ ID NO: 30739 - DNA, 80 bp, synthetic construct
  misc_feature 1..80: note = Artificially Synthesized Probe
  source 1..80: mol_type = other DNA
atactgtaagctctacaaggacaggggcaagtactcagtaaatattagttaactgcgtgaatggaggagcaaagttagga

SEQ ID NO: 30740 - DNA, 80 bp, synthetic construct
  misc_feature 1..80: note = Artificially Synthesized Probe
  source 1..80: mol_type = other DNA
catgagaggtctgagcacatagactggtttctgtttccgccatgcaaatatttaattgcatggatgtagggggaaatgga

SEQ ID NO: 30741 - DNA, 80 bp, synthetic construct
  misc_feature 1..80: note = Artificially Synthesized Probe
  source 1..80: mol_type = other DNA
caggatcaaagaactaaatcattctgagaaactctgctgaaacctgagaaaaaggaccagggagaagctgggagatagat

SEQ ID NO: 30742 - DNA, 80 bp, synthetic construct
  misc_feature 1..80: note = Artificially Synthesized Probe
  source 1..80: mol_type = other DNA
caaatgaaataccgtataaagggagtcaataagtattagttaccccggcagaactcactcttccacagaaaccatgtaag

SEQ ID NO: 30743 - DNA, 80 bp, synthetic construct
  misc_feature 1..80: note = Artificially Synthesized Probe
  source 1..80: mol_type = other DNA
ttttatgacatttccagggttatgccaatttcaccaaatgcctaaaaggcagtatttgaagctgtaccaatttttgctat

SEQ ID NO: 30744 - DNA, 80 bp, synthetic construct
  misc_feature 1..80: note = Artificially Synthesized Probe
  source 1..80: mol_type = other DNA
gacagaagaaaaagagaggacactctcacaaagtcaaactcaattaaccagcagttctgtctcacaggagtcactttaaa

SEQ ID NO: 30745 - DNA, 80 bp, synthetic construct
  misc_feature 1..80: note = Artificially Synthesized Probe
  source 1..80: mol_type = other DNA
cctttaaacaggtggtgctaatctcctttggatcaaggacccctttgaaaatctgataaaaaaaaaaaaaactatggaca

SEQ ID NO: 30746 - DNA, 80 bp, synthetic construct
  misc_feature 1..80: note = Artificially Synthesized Probe
  source 1..80: mol_type = other DNA
aaatcagcaggcctcagcatccctggccagaacactctcttcactttcatgccttactggaaaccagtgagtccctgaga

SEQ ID NO: 30747 - DNA, 80 bp, synthetic construct
  misc_feature 1..80: note = Artificially Synthesized Probe
  source 1..80: mol_type = other DNA
tggacaagtttcactttaaattcatgttctctgacctcaaactgtcactctgcagtggccgacaggcctgtgtttctctg

SEQ ID NO: 30748 - DNA, 80 bp, synthetic construct
  misc_feature 1..80: note = Artificially Synthesized Probe
  source 1..80: mol_type = other DNA
ccctgctaaaacctttcacttttattgaatcatactgcccatcaaataaaaccgccagtccatgcctcagctcaatttcg

SEQ ID NO: 30749 - DNA, 80 bp, synthetic construct
  misc_feature 1..80: note = Artificially Synthesized Probe
  source 1..80: mol_type = other DNA
agacagagctggtctggaaggcaagggtgggggagtcacagattataacagattataacttcatattataattaaatgtt

SEQ ID NO: 30750 - DNA, 80 bp, synthetic construct
  misc_feature 1..80: note = Artificially Synthesized Probe
  source 1..80: mol_type = other DNA
ttaatgttcgttccctccaagacattatccgctcccatggagcaagaaaatccacttctcacagaggttaataaacttac

SEQ ID NO: 30751 - DNA, 80 bp, synthetic construct
  misc_feature 1..80: note = Artificially Synthesized Probe
  source 1..80: mol_type = other DNA
cctgcaaatggatttgtgttttcacatttggctgaggctgctctcaaactccctcagtgccctaacactcccactcccac

SEQ ID NO: 30752 - DNA, 80 bp, synthetic construct
  misc_feature 1..80: note = Artificially Synthesized Probe
  source 1..80: mol_type = other DNA
acaacaacaaaaaaaagaacatgaattttgctctcagatatgctcaagcttggtttccaactctgccatgtcctgactga

SEQ ID NO: 30753 - DNA, 80 bp, synthetic construct
  misc_feature 1..80: note = Artificially Synthesized Probe
  source 1..80: mol_type = other DNA
gcatagacagcactctgcatagtgactccaacctaccaagttctcattaaatgatagcttaattgtgtcctcatttaaca

SEQ ID NO: 30754 - DNA, 80 bp, synthetic construct
  misc_feature 1..80: note = Artificially Synthesized Probe
  source 1..80: mol_type = other DNA
taaaacaagcattattcttctcttcaaaactgaaaatgttcccttactgcctacagactgaagtccatacagtatagtgc

SEQ ID NO: 30755 - DNA, 80 bp, synthetic construct
  misc_feature 1..80: note = Artificially Synthesized Probe
  source 1..80: mol_type = other DNA
agcatctatctacgttcatatttcaataacaggcttatttcattgccctaattacctgctcaccagccatctccctcagg

SEQ ID NO: 30756 - DNA, 80 bp, synthetic construct
  misc_feature 1..80: note = Artificially Synthesized Probe
  source 1..80: mol_type = other DNA
caacttcccacccaaagaagaaatgatggcagtggtaatgataatgatgataaacttggccatcatttactatttatgtg

SEQ ID NO: 30757 - DNA, 80 bp, synthetic construct
  misc_feature 1..80: note = Artificially Synthesized Probe
  source 1..80: mol_type = other DNA
atcctaagcttgtctgcacaggggtggggactctaccatctccaattcctcagaggaataataataagactatcaaccag

SEQ ID NO: 30758 - DNA, 80 bp, synthetic construct
  misc_feature 1..80: note = Artificially Synthesized Probe
  source 1..80: mol_type = other DNA
gcatgggtgcttcctgcttgcaaagagccttctcatccaagtcttaaagcagaattactcggccctgatatttccaaaca

SEQ ID NO: 30759 - DNA, 80 bp, synthetic construct
  misc_feature 1..80: note = Artificially Synthesized Probe
  source 1..80: mol_type = other DNA
gataaatctgctaagggtcaccacacatttaactctaagttcctcaggagccattccagaaaagaaacctaataatttac

SEQ ID NO: 30760 - DNA, 80 bp, synthetic construct
  misc_feature 1..80: note = Artificially Synthesized Probe
  source 1..80: mol_type = other DNA
cattccaaattctgtgtattcttccagttcggatactaagagggatggctgtgtaaccatcagtgtaccacagcatctgt

SEQ ID NO: 30761 - DNA, 80 bp, synthetic construct
  misc_feature 1..80: note = Artificially Synthesized Probe
  source 1..80: mol_type = other DNA
attataaataagtaaataacacctgcatgcttactggcatgctgtggtgagcaattataggaaacaaaggtagggctggg

SEQ ID NO: 30762 - DNA, 80 bp, synthetic construct
  misc_feature 1..80: note = Artificially Synthesized Probe
  source 1..80: mol_type = other DNA
taaaagctggtcacttaggcttctgtgtgaaaaatggactgcagacaacccagagtggatactggggggcctgttaggaa

SEQ ID NO: 30763 - DNA, 80 bp, synthetic construct
  misc_feature 1..80: note = Artificially Synthesized Probe
  source 1..80: mol_type = other DNA
gaaagtgaatggagccagtgggtttggatgtatcttctgaggtgttttcaggtgaagaagagcaaagaagtgaaacagga

SEQ ID NO: 30764 - DNA, 80 bp, synthetic construct
  misc_feature 1..80: note = Artificially Synthesized Probe
  source 1..80: mol_type = other DNA
tgtctgaattgcttccccagcccttagctgcatctcaatttacgaccatggcttgtattttcacataaataatagaagac

SEQ ID NO: 30765 - DNA, 80 bp, synthetic construct
  misc_feature 1..80: note = Artificially Synthesized Probe
  source 1..80: mol_type = other DNA
catctgtaaagtggacataagtgtcccctgaatacgtatggcaaaccgtcaacgtgtgcccaaatagagtgagcagatgt

SEQ ID NO: 30766 - DNA, 80 bp, synthetic construct
  misc_feature 1..80: note = Artificially Synthesized Probe
  source 1..80: mol_type = other DNA
aggatggcaaaagtagaacttgaagaagagcaggctctcttcgtcgcctttctacctatcaggtcctgagtttctaccaa

SEQ ID NO: 30767 - DNA, 80 bp, synthetic construct
  misc_feature 1..80: note = Artificially Synthesized Probe
  source 1..80: mol_type = other DNA
gtttttcatttttttaaactacaatccacagtaagaaatatattttacactacaacctgcaacctggtacatacttcagc

SEQ ID NO: 30768 - DNA, 80 bp, synthetic construct
  misc_feature 1..80: note = Artificially Synthesized Probe
  source 1..80: mol_type = other DNA
atgcataatgttgttattagtgtgctcagatttctggtatggctggtccagggacttcaaacatttttttttctaaccat

SEQ ID NO: 30769 - DNA, 80 bp, synthetic construct
  misc_feature 1..80: note = Artificially Synthesized Probe
  source 1..80: mol_type = other DNA
aatcatgctgttctgaagagctgggagaaggccagtgtggttagagtgcagtgagcttagcaaagcatgggtgaagtatg

SEQ ID NO: 30770 - DNA, 80 bp, synthetic construct
  misc_feature 1..80: note = Artificially Synthesized Probe
  source 1..80: mol_type = other DNA
atatctgtaaagtgcttagctcagtccctagtatagtacatcttcaatacattacaggtattattattattattactggc

SEQ ID NO: 30771 - DNA, 80 bp, synthetic construct
  misc_feature 1..80: note = Artificially Synthesized Probe
  source 1..80: mol_type = other DNA
atcttaactgagcacctattttgagccagtctgtgtccttaaacaataagctaaatataatgtaaccgaggtatgaataa

SEQ ID NO: 30772 - DNA, 80 bp, synthetic construct
  misc_feature 1..80: note = Artificially Synthesized Probe
  source 1..80: mol_type = other DNA
gctctcttctggactcccaactcacattcaagtctagcaaattcccaaacaggtcaagccaaagtctccgaactaagcct

SEQ ID NO: 30773 - DNA, 80 bp, synthetic construct
  misc_feature 1..80: note = Artificially Synthesized Probe
  source 1..80: mol_type = other DNA
cacctccagtaagaatgatttaattggtttgagtggtgcccaggcatcggcaatcctttaaactgattatgattccgatg

SEQ ID NO: 30774 - DNA, 80 bp, synthetic construct
  misc_feature 1..80: note = Artificially Synthesized Probe
  source 1..80: mol_type = other DNA
tcaattccccttcagcatgatttcactgaattaaatatcaactttttaaaaagcgagataactccttgccagtatactaa

SEQ ID NO: 30775 - DNA, 80 bp, synthetic construct
  misc_feature 1..80: note = Artificially Synthesized Probe
  source 1..80: mol_type = other DNA
taccttcttcaaaactatcacaaaagctgagtgttcaatctactttactcaagtatccctttaaattcctgtgcttcact

SEQ ID NO: 30776 - DNA, 80 bp, synthetic construct
  misc_feature 1..80: note = Artificially Synthesized Probe
  source 1..80: mol_type = other DNA
tgtctcaaaaaaaaaagtccgggaagtggggacatgcctagttcactttttgttcctaattctgaacatagtatatgcct

SEQ ID NO: 30777 - DNA, 80 bp, synthetic construct
  misc_feature 1..80: note = Artificially Synthesized Probe
  source 1..80: mol_type = other DNA
taataagcacctggagtgattcttacaaaaggcaaatttgggaaagaatgaactggagtgttccattagcaaagaggggc

SEQ ID NO: 30778 - DNA, 80 bp, synthetic construct
  misc_feature 1..80: note = Artificially Synthesized Probe
  source 1..80: mol_type = other DNA
aaacaggctggtgaatgccatttggctagagagtcagatgttttaattaagcaactgcttatttcttacaggtcaagctg

SEQ ID NO: 30779 - DNA, 80 bp, synthetic construct
  misc_feature 1..80: note = Artificially Synthesized Probe
  source 1..80: mol_type = other DNA
taaaaatcacttattggggttaaggggtagagcatagtggttaagtgagaaggttgtctggatttgtatttggcctccca

SEQ ID NO: 30780 - DNA, 80 bp, synthetic construct
  misc_feature 1..80: note = Artificially Synthesized Probe
  source 1..80: mol_type = other DNA
ggggtcactttagagggtataacaaagttggcattgggagtatggtagaattgaggggtgaatgcaaggagtaagcataa

SEQ ID NO: 30781 - DNA, 80 bp, synthetic construct
  misc_feature 1..80: note = Artificially Synthesized Probe
  source 1..80: mol_type = other DNA
gagaccctgtctctacaaaaataaaaattagctgggtatgatggcacacatctgtggtcccagctacttgggaggctgag

SEQ ID NO: 30782 - DNA, 80 bp, synthetic construct
  misc_feature 1..80: note = Artificially Synthesized Probe
  source 1..80: mol_type = other DNA
tattttatcgccccacaaggaaacctcaaacccagttagtcagtcagtcctcattcctcccctagcccttggctaccact

SEQ ID NO: 30783 - DNA, 80 bp, synthetic construct
  misc_feature 1..80: note = Artificially Synthesized Probe
  source 1..80: mol_type = other DNA
aaaggtgacagcaaactgctgcctctcttccaccttattctctaagacataattgatcacatcacttatgtcctctcatg

SEQ ID NO: 30784 - DNA, 80 bp, synthetic construct
  misc_feature 1..80: note = Artificially Synthesized Probe
  source 1..80: mol_type = other DNA
tgaagccataggaatagatacaattgcacatgcagagtatgcagaatgagaagaattttgagcaagacctcctcaacctg

SEQ ID NO: 30785 - DNA, 80 bp, synthetic construct
  misc_feature 1..80: note = Artificially Synthesized Probe
  source 1..80: mol_type = other DNA
agggaagatgtattcctcattgtaaattaatacacgggcacctgtttactgagaacatcatgagcttggttaacgtaacc

SEQ ID NO: 30786 - DNA, 80 bp, synthetic construct
  misc_feature 1..80: note = Artificially Synthesized Probe
  source 1..80: mol_type = other DNA
tagctatttctgccacagccaatagtaatattatgactgtcatctttccaagaggtacatcaggacacagactactcaaa

SEQ ID NO: 30787 - DNA, 80 bp, synthetic construct
  misc_feature 1..80: note = Artificially Synthesized Probe
  source 1..80: mol_type = other DNA
cttactctctgtgagttctcaagaatcattaaattcggagtatacctccatgaggtacaaaagaggcaggcaacagggag

SEQ ID NO: 30788 - DNA, 80 bp, synthetic construct
  misc_feature 1..80: note = Artificially Synthesized Probe
  source 1..80: mol_type = other DNA
aatgacaaaatgtttgtattagaacctctcccttctcaagccaagttagagtgttttattttggtttggaaaacagtgca

SEQ ID NO: 30789 - DNA, 80 bp, synthetic construct
  misc_feature 1..80: note = Artificially Synthesized Probe
  source 1..80: mol_type = other DNA
agacttctacctaccatggtgaaaacagagtcaatacacgacaatgtctaattagaatgaatatgctctaatctgaggag

SEQ ID NO: 30790 - DNA, 80 bp, synthetic construct
  misc_feature 1..80: note = Artificially Synthesized Probe
  source 1..80: mol_type = other DNA
tcagagatatctacactctcatgtttgctgcagcacggttcacaatagctaaaatttggaagcaatctaagtgtctatca

SEQ ID NO: 30791 - DNA, 80 bp, synthetic construct
  misc_feature 1..80: note = Artificially Synthesized Probe
  source 1..80: mol_type = other DNA
gcagtggtgcaatctcagctcattgcaacctccgcaccccgggttcaagcgatgctcctgccttagcctcccaagtagtt

SEQ ID NO: 30792 - DNA, 80 bp, synthetic construct
  misc_feature 1..80: note = Artificially Synthesized Probe
  source 1..80: mol_type = other DNA
tttagtcatagggaggttgttaaacacctttctgagaagctcccaaggcacatgtgttatctgagggaacatatggaacc

SEQ ID NO: 30793 - DNA, 80 bp, synthetic construct
  misc_feature 1..80: note = Artificially Synthesized Probe
  source 1..80: mol_type = other DNA
tgcatgactaggtatatgaaagacataaagaataatccgttctacttggaggtggggacaatagtgggatgattatggaa

SEQ ID NO: 30794 - DNA, 80 bp, synthetic construct
  misc_feature 1..80: note = Artificially Synthesized Probe
  source 1..80: mol_type = other DNA
acattccaaactaaggagcttggattgtatcctagaagaaattaggaatcactgaaaggtaaatggatccaggcctagat

SEQ ID NO: 30795 - DNA, 80 bp, synthetic construct
  misc_feature 1..80: note = Artificially Synthesized Probe
  source 1..80: mol_type = other DNA
tgatacacaaaccaaccaatcaagagccataccccctctatatggtccatacaccccacaagacaatattcctgtctcag

SEQ ID NO: 30796 - DNA, 80 bp, synthetic construct
  misc_feature 1..80: note = Artificially Synthesized Probe
  source 1..80: mol_type = other DNA
aaaggagatccgagatagtctgaagaggatacaggattgagggcagggtatcagttttgttttgagactgaagaaatttg

SEQ ID NO: 30797 - DNA, 80 bp, synthetic construct
  misc_feature 1..80: note = Artificially Synthesized Probe
  source 1..80: mol_type = other DNA
tcgagatggatggcggtgatagttgcacaacaatgtgaatgtacttactgtcaatgacctgtgcacttacaaatggttaa

SEQ ID NO: 30798 - DNA, 80 bp, synthetic construct
  misc_feature 1..80: note = Artificially Synthesized Probe
  source 1..80: mol_type = other DNA
ttgtcacactgcccctcttcaagttttctatttcctgttcttgtctcctaaatatgggtatttcctgagggataggcctt

SEQ ID NO: 30799 - DNA, 80 bp, synthetic construct
  misc_feature 1..80: note = Artificially Synthesized Probe
  source 1..80: mol_type = other DNA
agtaagccaccgcacccagctccttccctgatttctaccaatctttttctctcgtaatccactcagtaactaagtatagt

SEQ ID NO: 30800 - DNA, 80 bp, synthetic construct
  misc_feature 1..80: note = Artificially Synthesized Probe
  source 1..80: mol_type = other DNA
ggtggactgcttgagcccagagttcgagaccagactgggcaatactgcaaaattccatctctacaaaaaatacaaaaaat

SEQ ID NO: 30801 - DNA, 80 bp, synthetic construct
  misc_feature 1..80: note = Artificially Synthesized Probe
  source 1..80: mol_type = other DNA
tcaaagtttccaagttggttgtattaacaaaaacgggtgcatagcctgggaagtaatttgggagggaagaggccaagctt

SEQ ID NO: 30802 - DNA, 80 bp, synthetic construct
  misc_feature 1..80: note = Artificially Synthesized Probe
  source 1..80: mol_type = other DNA
gaaagaaaaagaaaaaaaaaggtttgaaagtaaaagaaaaagggggttgggagggtggggagagaaaggaagggtggagg

SEQ ID NO: 30803 - DNA, 80 bp, synthetic construct
  misc_feature 1..80: note = Artificially Synthesized Probe
  source 1..80: mol_type = other DNA
aactaaagtaacctcttttgagaaacacttaagacaaaattgtcaaaccaaagggggtgggtggaggaggaaaagagaga

SEQ ID NO: 30804 - DNA, 80 bp, synthetic construct
  misc_feature 1..80: note = Artificially Synthesized Probe
  source 1..80: mol_type = other DNA
gggaatgggggaaagggcgagacagaggggaggggagggtgggggagggggcagggacggagaaggttggaagattcgtg

SEQ ID NO: 30805 - DNA, 80 bp, synthetic construct
  misc_feature 1..80: note = Artificially Synthesized Probe
  source 1..80: mol_type = other DNA
cataataattggggcgcagggactccccggttttgtatttggagaacagtgagttgacgaaataagagctcattttattg

SEQ ID NO: 30806 - DNA, 80 bp, synthetic construct
  misc_feature 1..80: note = Artificially Synthesized Probe
  source 1..80: mol_type = other DNA
tccaaatatatccccaaactgtcctattactatccccctactacagttcctaaggcaccattcaagactgctgcccgctt

SEQ ID NO: 30807 - DNA, 80 bp, synthetic construct
  misc_feature 1..80: note = Artificially Synthesized Probe
  source 1..80: mol_type = other DNA
aaaaaaaaatacaaaaattaggctgggcaaggtggctcacgcctgtaatcccagcactctgggaggctgaggtgagtgaa

SEQ ID NO: 30808 - DNA, 80 bp, synthetic construct
  misc_feature 1..80: note = Artificially Synthesized Probe
  source 1..80: mol_type = other DNA
ttgggaggtgctggctaagaggctcaaggtttctttttggggtgacaaaaatgttctaaaattgattttttgcccaggct

SEQ ID NO: 30809 - DNA, 80 bp, synthetic construct
  misc_feature 1..80: note = Artificially Synthesized Probe
  source 1..80: mol_type = other DNA
tggattttgatgatagttgcacaacatagcaaatagctagaaatcatagaattgtacaccttaaaaaaatgacatgttat

SEQ ID NO: 30810 - DNA, 80 bp, synthetic construct
  misc_feature 1..80: note = Artificially Synthesized Probe
  source 1..80: mol_type = other DNA
ctttcttctctgtcatgggccccgttagaacaacaactgctagatttatagaacactcaccatgtgcctgccttgagcac

SEQ ID NO: 30811 - DNA, 80 bp, synthetic construct
  misc_feature 1..80: note = Artificially Synthesized Probe
  source 1..80: mol_type = other DNA
cagagcttgcagtgagccgagatcgcgtcactgcaatctagcctgagcaacagagcgagactctgtctcaaaataaaata

SEQ ID NO: 30812 - DNA, 80 bp, synthetic construct
  misc_feature 1..80: note = Artificially Synthesized Probe
  source 1..80: mol_type = other DNA
attcacccttgctgtcccaattccctgctttactttcttcctgggtgctctctaccatctagcatttatattttacttat

SEQ ID NO: 30813 - DNA, 80 bp, synthetic construct
  misc_feature 1..80: note = Artificially Synthesized Probe
  source 1..80: mol_type = other DNA
aaagcccaggggttctgtggagactgaactctctgggggtgggtgtggctgtgcctgcccatgagttgcaagaagcagtg

SEQ ID NO: 30814 - DNA, 80 bp, synthetic construct
  misc_feature 1..80: note = Artificially Synthesized Probe
  source 1..80: mol_type = other DNA
gggactacaggcatgtgctaccacacctggataattttggggtatttttattttttgttttttgagacggagtttcgctc

SEQ ID NO: 30815 - DNA, 80 bp, synthetic construct
  misc_feature 1..80: note = Artificially Synthesized Probe
  source 1..80: mol_type = other DNA
ccatgttgacagttttacagtgaataaatgcatcagtggcctcaggctaactcccaacatcttgtgctgtattttccact

SEQ ID NO: 30816 - DNA, 80 bp, synthetic construct
  misc_feature 1..80: note = Artificially Synthesized Probe
  source 1..80: mol_type = other DNA
gatgggggtgagaaggtggctaccccccagattgctcccttctccatgacccctcaataataataatagctcacacttct

SEQ ID NO: 30817 - DNA, 80 bp, synthetic construct
  misc_feature 1..80: note = Artificially Synthesized Probe
  source 1..80: mol_type = other DNA
actcaatgaagcacctacttcatttatttcagtaggtcaactagatgaagaacgcaggagggcattggattaaattatac

SEQ ID NO: 30818 - DNA, 80 bp, synthetic construct
  misc_feature 1..80: note = Artificially Synthesized Probe
  source 1..80: mol_type = other DNA
caccaccacgtccagccaattttgtatttttagtagagatggggtttctccatgttggtcaggctggtctcaaactccca

SEQ ID NO: 30819 - DNA, 80 bp, synthetic construct
  misc_feature 1..80: note = Artificially Synthesized Probe
  source 1..80: mol_type = other DNA
gtctcactttgttgcgcaggctggtctcaaattcctgggctcaagcagtcctcttgccttggcctcccaaattgctgaga

SEQ ID NO: 30820 - DNA, 80 bp, synthetic construct
  misc_feature 1..80: note = Artificially Synthesized Probe
  source 1..80: mol_type = other DNA
ctcattggatccttacgatgaccctatgaggagtcatagttgaagatactgaggcttgcagccataaaaaggaacaagat

SEQ ID NO: 30821 - DNA, 80 bp, synthetic construct
  misc_feature 1..80: note = Artificially Synthesized Probe
  source 1..80: mol_type = other DNA
acaaaaaagaaaaaattagccgggcatggtggcacgcacttgtggtcccaactactcgggaggctgaggcaggagagtca

SEQ ID NO: 30822 - DNA, 80 bp, synthetic construct
  misc_feature 1..80: note = Artificially Synthesized Probe
  source 1..80: mol_type = other DNA
taactccccctgtgatcagtccccttctctagtcctcaatttcaccatctgtaaaaagaatggttggatgagaataataa

SEQ ID NO: 30823 - DNA, 80 bp, synthetic construct
  misc_feature 1..80: note = Artificially Synthesized Probe
  source 1..80: mol_type = other DNA
gggcaacagagcaagactctgacacacacacacacacaaaagaaagaaaaagaaaatgaaaaaagaaaaaaaaggaaatg

SEQ ID NO: 30824 - DNA, 80 bp, synthetic construct
  misc_feature 1..80: note = Artificially Synthesized Probe
  source 1..80: mol_type = other DNA
ctgcttaaaattcctctcctctgatatcccaggttttctgagcacctgtggggtcagtgttgggccaggctgaggaggaa

SEQ ID NO: 30825 - DNA, 80 bp, synthetic construct
  misc_feature 1..80: note = Artificially Synthesized Probe
  source 1..80: mol_type = other DNA
cctgaaagtgagtctagaaaagtgcgggtggagtgatgtcccctagccaccctccttattccagcctcaaccacagaact

SEQ ID NO: 30826 - DNA, 80 bp, synthetic construct
  misc_feature 1..80: note = Artificially Synthesized Probe
  source 1..80: mol_type = other DNA
ggcacttaccatgattgatcttagtcaaacctcctactgggactagaggcctggggagtgctgggccggagtatttaacc

SEQ ID NO: 30827 - DNA, 80 bp, synthetic construct
  misc_feature 1..80: note = Artificially Synthesized Probe
  source 1..80: mol_type = other DNA
ctattctaactccaggacccacactttaaattgctagattgccctctatacaaatgggagatattgatatccccatcaga

SEQ ID NO: 30828 - DNA, 80 bp, synthetic construct
  misc_feature 1..80: note = Artificially Synthesized Probe
  source 1..80: mol_type = other DNA
catgcagaggtgggttccagaggccttgctcaagaagctcactgatcagatgggttcataggacgcatccttgaaaatac

SEQ ID NO: 30829 - DNA, 80 bp, synthetic construct
  misc_feature 1..80: note = Artificially Synthesized Probe
  source 1..80: mol_type = other DNA
aaaaagaggcaatctctaaatggagatacactttcagggttttaaaaagcagtttttagttgctaatgagcccttgtgaa

SEQ ID NO: 30830 - DNA, 80 bp, synthetic construct
  misc_feature 1..80: note = Artificially Synthesized Probe
  source 1..80: mol_type = other DNA
gtgtgggtcacttacagatgtccatgatgaaagagttcctctctaatgggaccatttacattgggctgctcttcagctct

SEQ ID NO: 30831 - DNA, 80 bp, synthetic construct
  misc_feature 1..80: note = Artificially Synthesized Probe
  source 1..80: mol_type = other DNA
ccccaccaaatgtttcactgcagttgatcgttgtgtctgactttctcaattcgttgcaatttgcaacaatggactaatag

SEQ ID NO: 30832 - DNA, 80 bp, synthetic construct
  misc_feature 1..80: note = Artificially Synthesized Probe
  source 1..80: mol_type = other DNA
ctctcccaagcaccgcccgcagccaggcggctcctcgagcgcagcaactttgggactttgttccggctttttccaaatcg

SEQ ID NO: 30833 - DNA, 80 bp, synthetic construct
  misc_feature 1..80: note = Artificially Synthesized Probe
  source 1..80: mol_type = other DNA
tgagagtttatgccattcccttccccaagagagcagtctcaggggacttcggaggccttgagaagggaggatcgttaccc

SEQ ID NO: 30834 - DNA, 80 bp, synthetic construct
  misc_feature 1..80: note = Artificially Synthesized Probe
  source 1..80: mol_type = other DNA
agctgggtagtctttcctgaggtctcacctcaggcctttgtgctgctgctgttgcttctggccttgagcctgagagagag

SEQ ID NO: 30835 - DNA, 80 bp, synthetic construct
  misc_feature 1..80: note = Artificially Synthesized Probe
  source 1..80: mol_type = other DNA
cacacacacacatatgcttgcctccctctccaaggcagacttgcctgggaagtacccctcctcagcaggagctcgaagac

SEQ ID NO: 30836 - DNA, 80 bp, synthetic construct
  misc_feature 1..80: note = Artificially Synthesized Probe
  source 1..80: mol_type = other DNA
tctctactaaaaatacaaaacttagccaggcctgtggtgatgcgcacctgtagtctcagctactcaggaggctgaggcag

SEQ ID NO: 30837 - DNA, 80 bp, synthetic construct
  misc_feature 1..80: note = Artificially Synthesized Probe
  source 1..80: mol_type = other DNA
ggtgattctggggttgtctcaggctaggctgggccacagtggaagttcactgactgccctggcctggccaggctgtgact

SEQ ID NO: 30838 - DNA, 80 bp, synthetic construct
  misc_feature 1..80: note = Artificially Synthesized Probe
  source 1..80: mol_type = other DNA
gggttaaacagtcctaattggctttggctcccctagctgatcccactctgaccttgccactccttccccagagtcagtga

SEQ ID NO: 30839 - DNA, 80 bp, synthetic construct
  misc_feature 1..80: note = Artificially Synthesized Probe
  source 1..80: mol_type = other DNA
tacacacccccaagccacagggaagcatgtactgtacttcccaattgccacattttaaataaagacaaatttttatttct

SEQ ID NO: 30840 - DNA, 80 bp, synthetic construct
  misc_feature 1..80: note = Artificially Synthesized Probe
  source 1..80: mol_type = other DNA
gaatgaataagtccacataaaacgcttagcacggggattggcaaagagtaggcactcagtgaatgtcagcctttgtgatt

SEQ ID NO: 30841 - DNA, 80 bp, synthetic construct
  misc_feature 1..80: note = Artificially Synthesized Probe
  source 1..80: mol_type = other DNA
atcattccaataaatgttgaattgcctgtgcctggcacagaacttggcaccaagtgcacactcaatggatgtgcccatgc

SEQ ID NO: 30842 - DNA, 80 bp, synthetic construct
  misc_feature 1..80: note = Artificially Synthesized Probe
  source 1..80: mol_type = other DNA
aaaaaaaaacgaagaaaatgtcccaaagctaaagtaccccaaggctggacctaatatctgacaaggcaggttgacaaggt

SEQ ID NO: 30843 - DNA, 80 bp, synthetic construct
  misc_feature 1..80: note = Artificially Synthesized Probe
  source 1..80: mol_type = other DNA
ctggagggcacatccgagttgcctctcagaccaggcctctgccatctcccacaggacttgctctagcctaagctcgccca

SEQ ID NO: 30844 - DNA, 80 bp, synthetic construct
  misc_feature 1..80: note = Artificially Synthesized Probe
  source 1..80: mol_type = other DNA
tctttgtccacgtggctgcatctgacattgatgggccctaggcactttactttcgtggatcttttcctccttaaaaaaaa

SEQ ID NO: 30845 - DNA, 80 bp, synthetic construct
  misc_feature 1..80: note = Artificially Synthesized Probe
  source 1..80: mol_type = other DNA
atccttttgcttacagacatagatgcatattatgattgcctccattgcctcttttggaaagactaccagaaactcaaaag

SEQ ID NO: 30846 - DNA, 80 bp, synthetic construct
  misc_feature 1..80: note = Artificially Synthesized Probe
  source 1..80: mol_type = other DNA
gttcacatttggtaactatggatggattctgtgtggagatgtccttgacttttgactaattgcctatctgtgcttggtac

SEQ ID NO: 30847 - DNA, 80 bp, synthetic construct
  misc_feature 1..80: note = Artificially Synthesized Probe
  source 1..80: mol_type = other DNA
attagccaggcttagtggtgtgtgcctataatcccagctacttgggaggctgaggcaggagaatcgcttgacctgggagg

SEQ ID NO: 30848 - DNA, 80 bp, synthetic construct
  misc_feature 1..80: note = Artificially Synthesized Probe
  source 1..80: mol_type = other DNA
ccatcatgcctggctaatttttttgtgtttttagtagagacagggtttcaccatgttagccaggatggtcttgatctcct

SEQ ID NO: 30849 - DNA, 80 bp, synthetic construct
  misc_feature 1..80: note = Artificially Synthesized Probe
  source 1..80: mol_type = other DNA
ggattacaggtgcacaccactacacctggctaatttttgtatttttagtagagacagagtttcagcatgttggtcaggat

SEQ ID NO: 30850 - DNA, 80 bp, synthetic construct
  misc_feature 1..80: note = Artificially Synthesized Probe
  source 1..80: mol_type = other DNA
gatgtcactttctgacaggcacagaggccccaggtttatgtttatcttggaacttgaaaggagaggaaattccatccaac

SEQ ID NO: 30851 - DNA, 80 bp, synthetic construct
  misc_feature 1..80: note = Artificially Synthesized Probe
  source 1..80: mol_type = other DNA
gggtaaggtcacagatcaacaggatcccaaggcagaagaatttttcttagtatagaacaaaatgaaaagtctcccacgtc

SEQ ID NO: 30852 - DNA, 80 bp, synthetic construct
  misc_feature 1..80: note = Artificially Synthesized Probe
  source 1..80: mol_type = other DNA
aggagtttagtcatatggccacaaaggaatgaattttgccaacacattgagggtccttggaagcagatctttccctagtt

SEQ ID NO: 30853 - DNA, 80 bp, synthetic construct
  misc_feature 1..80: note = Artificially Synthesized Probe
  source 1..80: mol_type = other DNA
gactaggggataactgatgtgcctgactgcatactagtcattatttcacagttacaattcatctgcatctgtgtgatgct

SEQ ID NO: 30854 - DNA, 80 bp, synthetic construct
  misc_feature 1..80: note = Artificially Synthesized Probe
  source 1..80: mol_type = other DNA
tattttgttattgtttgaggctaaggaagcacgagaaaaacctaaagggaagaaatgcacccaatctcaaaccagcctgg

SEQ ID NO: 30855 - DNA, 80 bp, synthetic construct
  misc_feature 1..80: note = Artificially Synthesized Probe
  source 1..80: mol_type = other DNA
gatttggtaagacttctcaggactgtaatgaaagagttatggctgtgggtttggcaaatgtcaagttttgccaggtacct

SEQ ID NO: 30856 - DNA, 80 bp, synthetic construct
  misc_feature 1..80: note = Artificially Synthesized Probe
  source 1..80: mol_type = other DNA
ctttttaaatggcatgctgttctgaataacttgaggaaatctcatgccatcccactccatcctgctcaggatgtgaatca

SEQ ID NO: 30857 - DNA, 80 bp, synthetic construct
  misc_feature 1..80: note = Artificially Synthesized Probe
  source 1..80: mol_type = other DNA
tacaagttaaatgtatataataaagatgcccacacccctctccagaccaattacatcagatggggactgggcacgttcag

SEQ ID NO: 30858 - DNA, 80 bp, synthetic construct
  misc_feature 1..80: note = Artificially Synthesized Probe
  source 1..80: mol_type = other DNA
tgggttatccacgatgatggagaaggtcaccatgtgatagaagacattcttgaaggggatgattatgctgtacccggctc

SEQ ID NO: 30859 - DNA, 80 bp, synthetic construct
  misc_feature 1..80: note = Artificially Synthesized Probe
  source 1..80: mol_type = other DNA
tggtgtcagcgagctgccattccagctcaaactgcttatgcccagactgttatttgtgagagaaaccaacacctaatttg

SEQ ID NO: 30860 - DNA, 80 bp, synthetic construct
  misc_feature 1..80: note = Artificially Synthesized Probe
  source 1..80: mol_type = other DNA
gctggcgtggctttcagatagagctcatattggtagtaacccaagtcagtgttgtgcaaagttagtcttccgaaggtttc

SEQ ID NO: 30861 - DNA, 80 bp, synthetic construct
  misc_feature 1..80: note = Artificially Synthesized Probe
  source 1..80: mol_type = other DNA
tgtagagcaatacacatcgaaatgaaaggtgttgatgttgatgatattttaagtggaagaaagcaggttccagaaatgca

SEQ ID NO: 30862 - DNA, 80 bp, synthetic construct
  misc_feature 1..80: note = Artificially Synthesized Probe
  source 1..80: mol_type = other DNA
agacatgtgtataaacaaatataacctataaaaacagacctcactttgggaggccaaggcaggcggatcacctgagattg

SEQ ID NO: 30863 - DNA, 80 bp, synthetic construct
  misc_feature 1..80: note = Artificially Synthesized Probe
  source 1..80: mol_type = other DNA
attaattctccttctgatagacaggcccaagatggtcctcaataatccccacctctggggattcccagcctcgtgtagtc

SEQ ID NO: 30864 - DNA, 80 bp, synthetic construct
  misc_feature 1..80: note = Artificially Synthesized Probe
  source 1..80: mol_type = other DNA
atagatgaacttgatttatttcataaacggccctgcagagcagtgggggaaaagatggccttttaagtaaaaacagtatg

SEQ ID NO: 30865 - DNA, 80 bp, synthetic construct
  misc_feature 1..80: note = Artificially Synthesized Probe
  source 1..80: mol_type = other DNA
ctaggggtaaaggaaagatagagctcagaaaaaggtggggatgagagcagagaaaataaatcttaaaagcataaggctgt

SEQ ID NO: 30866 - DNA, 80 bp, synthetic construct
  misc_feature 1..80: note = Artificially Synthesized Probe
  source 1..80: mol_type = other DNA
tgaagcaaaacatgacaaactacaagaagaaacaaacagatccacaatcatagtgatatactttaatgtattctcttaac

SEQ ID NO: 30867 - DNA, 80 bp, synthetic construct
  misc_feature 1..80: note = Artificially Synthesized Probe
  source 1..80: mol_type = other DNA
acctccacacatacaaaaacccaccaggcctaggtggcttcatctgtgagttcaagaaagacgtaatttcaatcttttgt

SEQ ID NO: 30868 - DNA, 80 bp, synthetic construct
  misc_feature 1..80: note = Artificially Synthesized Probe
  source 1..80: mol_type = other DNA
tccagccatgcactcctaaccactgtcaaagttttcttgtgctccttcctgaagtagtgtgtgtgtgcgcacactattac

SEQ ID NO: 30869 - DNA, 80 bp, synthetic construct
  misc_feature 1..80: note = Artificially Synthesized Probe
  source 1..80: mol_type = other DNA
ggttttgatgatgcctgaagggatgaccctgaaactcacattgtagtacaagaactcatttgtcacctcgtttcggaaga

SEQ ID NO: 30870 - DNA, 80 bp, synthetic construct
  misc_feature 1..80: note = Artificially Synthesized Probe
  source 1..80: mol_type = other DNA
tttttattttgtaaagatgagggaactgaggcttcgcaaactcaagtatcttgcccaaggtcacacataaagaagagtca

SEQ ID NO: 30871 - DNA, 80 bp, synthetic construct
  misc_feature 1..80: note = Artificially Synthesized Probe
  source 1..80: mol_type = other DNA
actttcctgctttcgtttggattgatacacaatcttttggcatatattttacttcctctactggcttcttagtcatattt

SEQ ID NO: 30872 - DNA, 80 bp, synthetic construct
  misc_feature 1..80: note = Artificially Synthesized Probe
  source 1..80: mol_type = other DNA
tattttgcatttccctaggtattgaccatttctagagcccctcttttcttcttgcagactggagttcccatctggtatca

SEQ ID NO: 30873 - DNA, 80 bp, synthetic construct
  misc_feature 1..80: note = Artificially Synthesized Probe
  source 1..80: mol_type = other DNA
taaaacttgaatgaatgttgagttgcttcttatggatgagcaaaggaagtggtttctcaagatgggatttattcatggtg

SEQ ID NO: 30874 - DNA, 80 bp, synthetic construct
  misc_feature 1..80: note = Artificially Synthesized Probe
  source 1..80: mol_type = other DNA
tggttttatgctttgttagagcacatccgtgtaaagctcaaggtatttatcaggaccttctgacttgctgggattcaatc

SEQ ID NO: 30875 - DNA, 80 bp, synthetic construct
  misc_feature 1..80: note = Artificially Synthesized Probe
  source 1..80: mol_type = other DNA
ttttccttccttttcgaggattgcagtattgtgctgcctgttgtccaatgcctgagaaaagttgcctcagagattttgtt

SEQ ID NO: 30876 - DNA, 80 bp, synthetic construct
  misc_feature 1..80: note = Artificially Synthesized Probe
  source 1..80: mol_type = other DNA
tgtgcctggccctgggtcagtcactttgagtccttgcatgtccaagttttgctgtcataagagttttgtctggaaaaaga

SEQ ID NO: 30877 - DNA, 80 bp, synthetic construct
  misc_feature 1..80: note = Artificially Synthesized Probe
  source 1..80: mol_type = other DNA
cagttcatcgaaatttgggttgtctctacgttttggctcttataaataatgctgctatgaatatttgtgtatagattttt

SEQ ID NO: 30878 - DNA, 80 bp, synthetic construct
  misc_feature 1..80: note = Artificially Synthesized Probe
  source 1..80: mol_type = other DNA
aaatgaaaaattcccaaatgttatctttagtcccgacctctcccatgagctacagatccacacatgctccttttcttcaa

SEQ ID NO: 30879 - DNA, 80 bp, synthetic construct
  misc_feature 1..80: note = Artificially Synthesized Probe
  source 1..80: mol_type = other DNA
aatacaggccaagagaaggaagataagatgctccaagagaaggaaggtaagatgactggttactggcagaaccaggattc

SEQ ID NO: 30880 - DNA, 80 bp, synthetic construct
  misc_feature 1..80: note = Artificially Synthesized Probe
  source 1..80: mol_type = other DNA
gccaggaatcctatcccagagagcctattgaagaaaaatccctccaaagaaaaaagttatgcatatatataagaaccatt

SEQ ID NO: 30881 - DNA, 80 bp, synthetic construct
  misc_feature 1..80: note = Artificially Synthesized Probe
  source 1..80: mol_type = other DNA
cagccccaaagtgtcttttaacctcattcacatagtgccaccttcaactatgccaggaaaccaatgggggtggggggacc

SEQ ID NO: 30882 - DNA, 80 bp, synthetic construct
  misc_feature 1..80: note = Artificially Synthesized Probe
  source 1..80: mol_type = other DNA
gtgatcaggaagggcctaactgagcatatgtatttgattaaagaccaagaaggatgaagtaggggagacctggggaagag

SEQ ID NO: 30883 - DNA, 80 bp, synthetic construct
  misc_feature 1..80: note = Artificially Synthesized Probe
  source 1..80: mol_type = other DNA
gcatgatggtgggggcctgtaattccagctacttaagagctgagttaggagaattgcttgaatctgggaggcagaggttg

SEQ ID NO: 30884 - DNA, 80 bp, synthetic construct
  misc_feature 1..80: note = Artificially Synthesized Probe
  source 1..80: mol_type = other DNA
gactatcaactgttgatgaggatgtgaagtaagtggagatgtcagacattgctggtggcattgtaaaaggacacaaccac

SEQ ID NO: 30885 - DNA, 80 bp, synthetic construct
  misc_feature 1..80: note = Artificially Synthesized Probe
  source 1..80: mol_type = other DNA
aagaaagagagtttatggatgttgtaagggtgtcctcaatgctactgagaacaagagactgcctaggctgaggttcacct

SEQ ID NO: 30886 - DNA, 80 bp, synthetic construct
  misc_feature 1..80: note = Artificially Synthesized Probe
  source 1..80: mol_type = other DNA
gatgtagaagggagaggacagaagtaaaaagtgattgcacttgcagaacaagtccagggcagatacagggacagcagcct

SEQ ID NO: 30887 - DNA, 80 bp, synthetic construct
  misc_feature 1..80: note = Artificially Synthesized Probe
  source 1..80: mol_type = other DNA
acagttagagctctggcacttctcaaggagtcttccctgcctcagtttccctgtgtggtttttaaaatgcagattccggt

SEQ ID NO: 30888 - DNA, 80 bp, synthetic construct
  misc_feature 1..80: note = Artificially Synthesized Probe
  source 1..80: mol_type = other DNA
agttctggaattgtgaacagaatggactgattaaatgtgagctgggccaggctgttgttcatgatggaaactgttctttt

SEQ ID NO: 30889 - DNA, 80 bp, synthetic construct
  misc_feature 1..80: note = Artificially Synthesized Probe
  source 1..80: mol_type = other DNA
aatgaacaagtgaaagaccaataggaaaatgaatgaatcaatggcatcagaagcgaccttgtctctagcttgggtccaga

SEQ ID NO: 30890 - DNA, 80 bp, synthetic construct
  misc_feature 1..80: note = Artificially Synthesized Probe
  source 1..80: mol_type = other DNA
ttaggaacatcatctcagtgggactcgctgacctacaacagagcagcctggggcagagaagcagaggggctggaagggtg

SEQ ID NO: 30891 - DNA, 80 bp, synthetic construct
  misc_feature 1..80: note = Artificially Synthesized Probe
  source 1..80: mol_type = other DNA
gataactatttcttagggctgttgtgaggattaaatgagattaagtgactgaaacagtcattaaatagggcacagaggaa

SEQ ID NO: 30892 - DNA, 80 bp, synthetic construct
  misc_feature 1..80: note = Artificially Synthesized Probe
  source 1..80: mol_type = other DNA
aagcttaggctcagtacaggtctgctatttactgcaaagccactggcctgagaaatttaccttttaactcttcaaacctc

SEQ ID NO: 30893 - DNA, 80 bp, synthetic construct
  misc_feature 1..80: note = Artificially Synthesized Probe
  source 1..80: mol_type = other DNA
aattcagtaggttagaagtttgtgtattgaagaaaagttcctctgtaatcaggccctacattgcctcccactttgctctt

SEQ ID NO: 30894 - DNA, 80 bp, synthetic construct
  misc_feature 1..80: note = Artificially Synthesized Probe
  source 1..80: mol_type = other DNA
tgtctcctccaaaactcatgctgaaatttaattgccattgtgatggtattgggaagtgggacttttaagaagtgattggt

SEQ ID NO: 30895 - DNA, 80 bp, synthetic construct
  misc_feature 1..80: note = Artificially Synthesized Probe
  source 1..80: mol_type = other DNA
ttcatagtgctattcaagtcttcttatttccttgctgaccttctgtctagttatatctattgtttaaaactaggtactgt

SEQ ID NO: 30896 - DNA, 80 bp, synthetic construct
  misc_feature 1..80: note = Artificially Synthesized Probe
  source 1..80: mol_type = other DNA
tgcgctgcacccactaactcgttatctagcattaggtatatctcccaatgctatccctcccccctccccccaccccacca

SEQ ID NO: 30897 - DNA, 80 bp, synthetic construct
  misc_feature 1..80: note = Artificially Synthesized Probe
  source 1..80: mol_type = other DNA
ggtttgtcaaagatcagatagttgtagatatgtggcgttatttctgagggctctgttctgttccattgatctatatctct

SEQ ID NO: 30898 - DNA, 80 bp, synthetic construct
  misc_feature 1..80: note = Artificially Synthesized Probe
  source 1..80: mol_type = other DNA
ttgagataatcatgtggtttttgtctttggctctgtttatatgctggattacatttattgatttgcgtatattgaaccag

SEQ ID NO: 30899 - DNA, 80 bp, synthetic construct
  misc_feature 1..80: note = Artificially Synthesized Probe
  source 1..80: mol_type = other DNA
ggtgtggtgctgaaaaaaatgtatattctgttgatttggggtggagagttctgtagatgtgtattaggtccgcttggtgc

SEQ ID NO: 30900 - DNA, 80 bp, synthetic construct
  misc_feature 1..80: note = Artificially Synthesized Probe
  source 1..80: mol_type = other DNA
tacttcctctttctttgtgctattaccacacaaattgcatctttatataaggcccactaatacagatttatagttattgc

SEQ ID NO: 30901 - DNA, 80 bp, synthetic construct
  misc_feature 1..80: note = Artificially Synthesized Probe
  source 1..80: mol_type = other DNA
tttcaacaattttatcccatctgccacagctgattttcttttaccataacaaatctgctattgagcccctgttgtgaaat

SEQ ID NO: 30902 - DNA, 80 bp, synthetic construct
  misc_feature 1..80: note = Artificially Synthesized Probe
  source 1..80: mol_type = other DNA
aattacaactgattgtttttgagcaagcctggagtcaggtcaaataaaagctatccctatgagggggggttccactgaac

SEQ ID NO: 30903 - DNA, 80 bp, synthetic construct
  misc_feature 1..80: note = Artificially Synthesized Probe
  source 1..80: mol_type = other DNA
gtgaactttccagtgttgataaagttgaattcacactggacacattcatttaactccacctaggagacagagaacagagc

SEQ ID NO: 30904 - DNA, 80 bp, synthetic construct
  misc_feature 1..80: note = Artificially Synthesized Probe
  source 1..80: mol_type = other DNA
gatttaaatgtaagacctcaaactatacgaaaactagaagaaaacgtagaaaacaccatcgtagacatcagccttggaaa

SEQ ID NO: 30905 - DNA, 80 bp, synthetic construct
  misc_feature 1..80: note = Artificially Synthesized Probe
  source 1..80: mol_type = other DNA
gaacagaaagtgaaatacctcatgttcttatttataagttgcagctaaacatcaggtacacatggacgtaaagatggcaa

SEQ ID NO: 30906 - DNA, 80 bp, synthetic construct
  misc_feature 1..80: note = Artificially Synthesized Probe
  source 1..80: mol_type = other DNA
aagagacatttcactgaggaggatccatagaaggaaaacaagcacatatgtgttgtatgaaaggagagaaggttagcact

SEQ ID NO: 30907 - DNA, 80 bp, synthetic construct
  misc_feature 1..80: note = Artificially Synthesized Probe
  source 1..80: mol_type = other DNA
cttgactcgtcaatgtcaataccaggttgtgacattttactgaagctttgcaagatgtcacccttgggagaaatttggta

SEQ ID NO: 30908 - DNA, 80 bp, synthetic construct
  misc_feature 1..80: note = Artificially Synthesized Probe
  source 1..80: mol_type = other DNA
ttgtcaccctggccagagtgcagtggtgcgatctcagctcattgcaacctatgcctcccgggttcaagcgattctgctgc

SEQ ID NO: 30909 - DNA, 80 bp, synthetic construct
  misc_feature 1..80: note = Artificially Synthesized Probe
  source 1..80: mol_type = other DNA
ttggttgacccccttaactgcccatgtatctgtaaataattcttgcatcgaattctttgaaaatagacctttggtattgg

SEQ ID NO: 30910 - DNA, 80 bp, synthetic construct
  misc_feature 1..80: note = Artificially Synthesized Probe
  source 1..80: mol_type = other DNA
ttttttccatcaatgtccattttgctattagagtttttgttgggaatgtctgctaaattttggcaatgccttttcagtgt

SEQ ID NO: 30911 - DNA, 80 bp, synthetic construct
  misc_feature 1..80: note = Artificially Synthesized Probe
  source 1..80: mol_type = other DNA
tggtagcctgtttcttatttctagaatgtaagcatcaggaaggtacggactttgggctttatccattagcgtaatcccag

SEQ ID NO: 30912 - DNA, 80 bp, synthetic construct
  misc_feature 1..80: note = Artificially Synthesized Probe
  source 1..80: mol_type = other DNA
tgaaaggtaccatgcaggtgagctgggccacggcatgccataaccaactagctaagtgatattacaaagtaactgaagaa

SEQ ID NO: 30913 - DNA, 80 bp, synthetic construct
  misc_feature 1..80: note = Artificially Synthesized Probe
  source 1..80: mol_type = other DNA
aactagctaccagcatgtaaaatagggcttcacatagaactttggaattttggtcaggcgcagtggctcacacctgtaat

SEQ ID NO: 30914 - DNA, 80 bp, synthetic construct
  misc_feature 1..80: note = Artificially Synthesized Probe
  source 1..80: mol_type = other DNA
cactaaatacttgttgattgatgcactacaccctcaggcagttcttcctaattccacttactgtctatggcacactttcc

SEQ ID NO: 30915 - DNA, 80 bp, synthetic construct
  misc_feature 1..80: note = Artificially Synthesized Probe
  source 1..80: mol_type = other DNA
tcggagctctgggttgcgctgatggccacttatgtagtccgagtctttcagatcaaaatggcagatgggcaaggtgctcc

SEQ ID NO: 30916 - DNA, 80 bp, synthetic construct
  misc_feature 1..80: note = Artificially Synthesized Probe
  source 1..80: mol_type = other DNA
gcaggacaaagaccatattctccttgttctctaaagggtggaccctttagatccttccaaagggaaaagggataatttgg

SEQ ID NO: 30917 - DNA, 80 bp, synthetic construct
  misc_feature 1..80: note = Artificially Synthesized Probe
  source 1..80: mol_type = other DNA
actgagaacttgggcatgggtgtgtatcttcctgggaaaatgattcataactttcaaaagtttctccaagggatctataa

SEQ ID NO: 30918 - DNA, 80 bp, synthetic construct
  misc_feature 1..80: note = Artificially Synthesized Probe
  source 1..80: mol_type = other DNA
gagctctcagcatgcatggcagtaatcctaaacccccaccatgagagaggaaacaaaatctatttcacaagacagcacct

SEQ ID NO: 30919 - DNA, 80 bp, synthetic construct
  misc_feature 1..80: note = Artificially Synthesized Probe
  source 1..80: mol_type = other DNA
atctagtttcacctgaaatcaagtgctttgaccacagtggcttgtgtttattttgtaaatttatgagcacttgtatttat

SEQ ID NO: 30920 - DNA, 80 bp, synthetic construct
  misc_feature 1..80: note = Artificially Synthesized Probe
  source 1..80: mol_type = other DNA
taaatacccctttgcttcatgcacatgacattatgctgtaatgaaaaattctcctgtttctatctgtcccccggctgcca

SEQ ID NO: 30921 - DNA, 80 bp, synthetic construct
  misc_feature 1..80: note = Artificially Synthesized Probe
  source 1..80: mol_type = other DNA
gcacatctcttgcttggcaatggtatgaagcgaaatccacattggcactgatttgaagctgcagttcttggtagttttct

SEQ ID NO: 30922 - DNA, 80 bp, synthetic construct
  misc_feature 1..80: note = Artificially Synthesized Probe
  source 1..80: mol_type = other DNA
ccattcattcaaatgataaaaatcaagaagtctgacaatgccaagtgtcggagaggacatggatcaataagctctctgct

SEQ ID NO: 30923 - DNA, 80 bp, synthetic construct
  misc_feature 1..80: note = Artificially Synthesized Probe
  source 1..80: mol_type = other DNA
gtgattctggacacctgagggaaaagggaaacaactaaaagattagcattgacatttttgaagaaggaaaaggtgggagg

SEQ ID NO: 30924 - DNA, 80 bp, synthetic construct
  misc_feature 1..80: note = Artificially Synthesized Probe
  source 1..80: mol_type = other DNA
aatgccatactcttaatcaatatgatctatacaaattatggacagaggaatacagtacactagcagttctccaaaggtgt

SEQ ID NO: 30925 - DNA, 80 bp, synthetic construct
  misc_feature 1..80: note = Artificially Synthesized Probe
  source 1..80: mol_type = other DNA
ctcccatcacagacccagaggcctgggaggaaaaaatggttttgtgggtggcccagggacccccctgctgtgtgcagcct

SEQ ID NO: 30926 - DNA, 80 bp, synthetic construct
  misc_feature 1..80: note = Artificially Synthesized Probe
  source 1..80: mol_type = other DNA
accatggtcttagaactatttttggcatatagtaagcactcaatttacaaataaagtggtataccagctctattcagggt

SEQ ID NO: 30927 - DNA, 80 bp, synthetic construct
  misc_feature 1..80: note = Artificially Synthesized Probe
  source 1..80: mol_type = other DNA
catagtgcttcactcacatgcagtccttccatccttggatggctatatttgagaaacctagaatctctgagtaacaagat

SEQ ID NO: 30928 - DNA, 80 bp, synthetic construct
  misc_feature 1..80: note = Artificially Synthesized Probe
  source 1..80: mol_type = other DNA
gccctcacctccatttgtacaagagaaaacataggtccccaactccatttgtttggtgagaaaatattataaaggattgg

SEQ ID NO: 30929 - DNA, 80 bp, synthetic construct
  misc_feature 1..80: note = Artificially Synthesized Probe
  source 1..80: mol_type = other DNA
attttgaaactccagggatcagcatgcctggaacatgtacttggtgatcaatacatattcatcgagtgaacacatgaata

SEQ ID NO: 30930 - DNA, 80 bp, synthetic construct
  misc_feature 1..80: note = Artificially Synthesized Probe
  source 1..80: mol_type = other DNA
ggctttgagtctggggtgagatactgtgctgtgtttggggcaggaccccaaaaaggtattatgcctagtattcacttttt

SEQ ID NO: 30931 - DNA, 80 bp, synthetic construct
  misc_feature 1..80: note = Artificially Synthesized Probe
  source 1..80: mol_type = other DNA
acaataatggaaacgatgcagggtaatggtaaactaggtaacctgagctcaaggcaacaacaattgctagactaaatata

SEQ ID NO: 30932 - DNA, 80 bp, synthetic construct
  misc_feature 1..80: note = Artificially Synthesized Probe
  source 1..80: mol_type = other DNA
tgagtcatctgggtaatccagaaaatctcaaaccctaacactggcttaaagtgatcctgaatttctagtgcccccaagtg

SEQ ID NO: 30933 - DNA, 80 bp, synthetic construct
  misc_feature 1..80: note = Artificially Synthesized Probe
  source 1..80: mol_type = other DNA
acaactcagcagttaacaacggaaaccggaatacagtggaataatatctcccatttgctgaaagaaaacaactgccaaac

SEQ ID NO: 30934 - DNA, 80 bp, synthetic construct
  misc_feature 1..80: note = Artificially Synthesized Probe
  source 1..80: mol_type = other DNA
agccttccacaagttgctccattactgtatcctttcatttttatcttccttgctcttctacctatacctatgctctcatg

SEQ ID NO: 30935 - DNA, 80 bp, synthetic construct
  misc_feature 1..80: note = Artificially Synthesized Probe
  source 1..80: mol_type = other DNA
tgggaatgactggcaatgcacatcttgctgggttccacttcaaaaatgtcgacgatgcgggcaaagggctggtgatgggg

SEQ ID NO: 30936 - DNA, 80 bp, synthetic construct
  misc_feature 1..80: note = Artificially Synthesized Probe
  source 1..80: mol_type = other DNA
tgcaagatgagaaagctggatgagagaatggagcagtggaaaccctgtgagagagacatgtggctcttgagagatggaca

SEQ ID NO: 30937 - DNA, 80 bp, synthetic construct
  misc_feature 1..80: note = Artificially Synthesized Probe
  source 1..80: mol_type = other DNA
tcttcctcactttttatgtttttagtacagaagaggaagaaagctgccccttagtatcccaaataagattagagaatagg

SEQ ID NO: 30938 - DNA, 80 bp, synthetic construct
  misc_feature 1..80: note = Artificially Synthesized Probe
  source 1..80: mol_type = other DNA
taatacaaagtcggaagagttgttgtgagggcaaaaggaggcagtaaatataaatcacttagcacagtgcttgtcacatg

SEQ ID NO: 30939 - DNA, 80 bp, synthetic construct
  misc_feature 1..80: note = Artificially Synthesized Probe
  source 1..80: mol_type = other DNA
catgattctcagataacactattcatctgggaatccaggaccagcctcctgggagtgtgaagctgcacctcctcccttag

SEQ ID NO: 30940 - DNA, 80 bp, synthetic construct
  misc_feature 1..80: note = Artificially Synthesized Probe
  source 1..80: mol_type = other DNA
cagtgcttccttctatgcaaattcatttagaccaatcatgtttgaactaagggtttaaaggaacagatagactccacatc

SEQ ID NO: 30941 - DNA, 80 bp, synthetic construct
  misc_feature 1..80: note = Artificially Synthesized Probe
  source 1..80: mol_type = other DNA
tagcattgtgcagtgtgactgcacagacatacacggaagctgctattaactgacttggtcactatttacagaatacctac

SEQ ID NO: 30942 - DNA, 80 bp, synthetic construct
  misc_feature 1..80: note = Artificially Synthesized Probe
  source 1..80: mol_type = other DNA
tcaatttttctagagtctatccatgtacatgcacctcagttatagtacacgcacctcaattatagtatttaccatcttgc

SEQ ID NO: 30943 - DNA, 80 bp, synthetic construct
  misc_feature 1..80: note = Artificially Synthesized Probe
  source 1..80: mol_type = other DNA
ttgactatgatgtgtgttggtaaggatttcttttggtttctcctatttgggtttgctcagattcttgagtctgtaggttt

SEQ ID NO: 30944 - DNA, 80 bp, synthetic construct
  misc_feature 1..80: note = Artificially Synthesized Probe
  source 1..80: mol_type = other DNA
tgtttatttatcttcaattccagaatctccatttgcttcttctctacatcttctgtctttgctgagacatactattttaa

SEQ ID NO: 30945 - DNA, 80 bp, synthetic construct
  misc_feature 1..80: note = Artificially Synthesized Probe
  source 1..80: mol_type = other DNA
agaaagtaggagtaggcttctgttggggctttctttttgtctgtgtctgttgatgttttagggttgctggctgcttcagc

SEQ ID NO: 30946 - DNA, 80 bp, synthetic construct
  misc_feature 1..80: note = Artificially Synthesized Probe
  source 1..80: mol_type = other DNA
tctgacgtggctggctctgattaaagaagcaagagtatacccttagattgtggggtcgggggtaacattagacaccacct

SEQ ID NO: 30947 - DNA, 80 bp, synthetic construct
  misc_feature 1..80: note = Artificially Synthesized Probe
  source 1..80: mol_type = other DNA
ttccacgcttccagagcagccccaccatgaagcactgctacgatttcttttgatttagcttcctatgataataatttctt

SEQ ID NO: 30948 - DNA, 80 bp, synthetic construct
  misc_feature 1..80: note = Artificially Synthesized Probe
  source 1..80: mol_type = other DNA
aagttgatgacagaggagggggtgatgttgtatttggaatatactgcattcgcggaaaacttaattgggatgctggcaat

SEQ ID NO: 30949 - DNA, 80 bp, synthetic construct
  misc_feature 1..80: note = Artificially Synthesized Probe
  source 1..80: mol_type = other DNA
ggcaaagacagccatactctatcccatggtcaagagaggccattgcaggagatctctgtccaacagggacattggatatt

SEQ ID NO: 30950 - DNA, 80 bp, synthetic construct
  misc_feature 1..80: note = Artificially Synthesized Probe
  source 1..80: mol_type = other DNA
cctcccgtgtgccaccctttccttgctgaggagcctccctgattttgtgttactttttcttttcttttcttttctttttt

SEQ ID NO: 30951 - DNA, 80 bp, synthetic construct
  misc_feature 1..80: note = Artificially Synthesized Probe
  source 1..80: mol_type = other DNA
gcggacttgatggccttacatctgatgggattccagttacctgaacgcgatctcatatttcccacggttcttcaattgca

SEQ ID NO: 30952 - DNA, 80 bp, synthetic construct
  misc_feature 1..80: note = Artificially Synthesized Probe
  source 1..80: mol_type = other DNA
cacttgtgacttccagaactgtagggcaatatgtttgtgttgttttaagccagaaagcttatggggacattttatggcag

SEQ ID NO: 30953 - DNA, 80 bp, synthetic construct
  misc_feature 1..80: note = Artificially Synthesized Probe
  source 1..80: mol_type = other DNA
ctctggggaatgctggtacaaagaatacaagaatggggaaaagggactgacttttttattgttgctacattactgaagtt

SEQ ID NO: 30954 - DNA, 80 bp, synthetic construct
  misc_feature 1..80: note = Artificially Synthesized Probe
  source 1..80: mol_type = other DNA
gccaatgtttcacagagcaaactggaccgacttgagtttcgccttctttctctgactgcttgccctctgacagatgacaa

SEQ ID NO: 30955 - DNA, 80 bp, synthetic construct
  misc_feature 1..80: note = Artificially Synthesized Probe
  source 1..80: mol_type = other DNA
agaggctggtgctaaaagcgttgaccagaacctctgggcttctacacattcatggagtgaatgaatctatcaatatctgt

SEQ ID NO: 30956 - DNA, 80 bp, synthetic construct
  misc_feature 1..80: note = Artificially Synthesized Probe
  source 1..80: mol_type = other DNA
tcaatggcattcattcattcattagattctgctgagtgcctacttcatccaatcccatgctagacactgggaatatgatg

SEQ ID NO: 30957 - DNA, 80 bp, synthetic construct
  misc_feature 1..80: note = Artificially Synthesized Probe
  source 1..80: mol_type = other DNA
ccaggagagtgcgttaggtggggcataacctgtctgaatgacattgtaaagatccctctggacactgtggcgaatgccaa

SEQ ID NO: 30958 - DNA, 80 bp, synthetic construct
  misc_feature 1..80: note = Artificially Synthesized Probe
  source 1..80: mol_type = other DNA
gacattgcggagaagaactaccctggattcctgtctgcagagacaaaaggaaagttgcaatttcatttcaaattttgtag

SEQ ID NO: 30959 - DNA, 80 bp, synthetic construct
  misc_feature 1..80: note = Artificially Synthesized Probe
  source 1..80: mol_type = other DNA
atgaagcgtcagtcatattgtatttcattttatcctggctgctttcaagattttctcttaatttctgcttttaagtagtt

SEQ ID NO: 30960 - DNA, 80 bp, synthetic construct
  misc_feature 1..80: note = Artificially Synthesized Probe
  source 1..80: mol_type = other DNA
gtatttatcaggaaatggggctggtggtggtgattaaagaatgcaggacacgtatcataacaatattctctcccagaagc

SEQ ID NO: 30961 - DNA, 80 bp, synthetic construct
  misc_feature 1..80: note = Artificially Synthesized Probe
  source 1..80: mol_type = other DNA
tcattctgaaaatagaaggatgcctccaccaccattaaggaagtgttcaggattgttagcgtctccatgttgcctgggaa

SEQ ID NO: 30962 - DNA, 80 bp, synthetic construct
  misc_feature 1..80: note = Artificially Synthesized Probe
  source 1..80: mol_type = other DNA
ctgacatgaattcatttggccttgttcactgttaggaggcagtttctgttccttagtaccttaaggagagatctgcagag

SEQ ID NO: 30963 - DNA, 80 bp, synthetic construct
  misc_feature 1..80: note = Artificially Synthesized Probe
  source 1..80: mol_type = other DNA
ttagcacaagaaacattgtattgaatgaagacatggtggagaccttggttccagttttggtttcactccctgcctatatg

SEQ ID NO: 30964 - DNA, 80 bp, synthetic construct
  misc_feature 1..80: note = Artificially Synthesized Probe
  source 1..80: mol_type = other DNA
ccttgaagagtgatctctcctttgagaaccaaagctgtataacctattctctgcttcatgtaactacagaaatatcttcc

SEQ ID NO: 30965 - DNA, 80 bp, synthetic construct
  misc_feature 1..80: note = Artificially Synthesized Probe
  source 1..80: mol_type = other DNA
gagtcagatattctgtcccagtgcacccagctgaaaacattcctgagaatccctatggaaaattggttctgggagatatg

SEQ ID NO: 30966 - DNA, 80 bp, synthetic construct
  misc_feature 1..80: note = Artificially Synthesized Probe
  source 1..80: mol_type = other DNA
ccacctggtgaatttctcctgggagtgctgcccgttgaagttgtccaggtctgtatctgacagctgggaaatggttccag

SEQ ID NO: 30967 - DNA, 80 bp, synthetic construct
  misc_feature 1..80: note = Artificially Synthesized Probe
  source 1..80: mol_type = other DNA
tgatgactccttgcctctaaatacacctcctcaagaaaggactttctcctgcaatcctgcacaatactgtcatcacacct

SEQ ID NO: 30968 - DNA, 80 bp, synthetic construct
  misc_feature 1..80: note = Artificially Synthesized Probe
  source 1..80: mol_type = other DNA
gatgcaccgcatccatgccaacagctactgtttttatttatttatttattttttattttttgattatggtcattcttgca

SEQ ID NO: 30969 - DNA, 80 bp, synthetic construct
  misc_feature 1..80: note = Artificially Synthesized Probe
  source 1..80: mol_type = other DNA
ctattctgttccattggtctatatgcctatttttatatcagtaacatgctgttttggtgactatggccttacagtatagt

SEQ ID NO: 30970 - DNA, 80 bp, synthetic construct
  misc_feature 1..80: note = Artificially Synthesized Probe
  source 1..80: mol_type = other DNA
tgaattagggagggttccctctttctctatcttgtggaatagtgtcaataggatgggtatccattcttctttgaatgtct

SEQ ID NO: 30971 - DNA, 80 bp, synthetic construct
  misc_feature 1..80: note = Artificially Synthesized Probe
  source 1..80: mol_type = other DNA
tggatggaatgttctgtatgtatctgttaagtccatttgttccaagttatagtttaaattcatgtttctttgttgacttt

SEQ ID NO: 30972 - DNA, 80 bp, synthetic construct
  misc_feature 1..80: note = Artificially Synthesized Probe
  source 1..80: mol_type = other DNA
tctttccttcgtcttaactttaaataagctgatgacaatgtgcctaggtgatgatctttctgtgatgaattttccaggtg

SEQ ID NO: 30973 - DNA, 80 bp, synthetic construct
  misc_feature 1..80: note = Artificially Synthesized Probe
  source 1..80: mol_type = other DNA
tggctgaaggctgttgttcagattcttttgtcccacagggtgttcccttgatgtagtatgctccccctttttctatggat

SEQ ID NO: 30974 - DNA, 80 bp, synthetic construct
  misc_feature 1..80: note = Artificially Synthesized Probe
  source 1..80: mol_type = other DNA
cctgaaagatccctgtgatgccagacaggaatggcctgcttggggacctagggagctcccagggcctttcctgctgcttc

SEQ ID NO: 30975 - DNA, 80 bp, synthetic construct
  misc_feature 1..80: note = Artificially Synthesized Probe
  source 1..80: mol_type = other DNA
gcatggtttatagaaggctgtgtgcagagattcaaattgtggaccacccttctcctctgggaataaaaaaaccttctata

SEQ ID NO: 30976 - DNA, 80 bp, synthetic construct
  misc_feature 1..80: note = Artificially Synthesized Probe
  source 1..80: mol_type = other DNA
aagtcctgccaaggttaggagaataaactgctcatgtgttacctttgtagtgtttgtggtggccaaaaagtctgattcta

SEQ ID NO: 30977 - DNA, 80 bp, synthetic construct
  misc_feature 1..80: note = Artificially Synthesized Probe
  source 1..80: mol_type = other DNA
aatgtctatgaggaaaggcaagaatgatttgtggcaattgttgaattaccagagccagggagttcttcaagcagcagtct

SEQ ID NO: 30978 - DNA, 80 bp, synthetic construct
  misc_feature 1..80: note = Artificially Synthesized Probe
  source 1..80: mol_type = other DNA
aggctataataagcctctcctccaaactgctagcaaaggtggcttttggatacacaatacttttgtttataggaaagaag

SEQ ID NO: 30979 - DNA, 80 bp, synthetic construct
  misc_feature 1..80: note = Artificially Synthesized Probe
  source 1..80: mol_type = other DNA
catgctgacatcgcccatgttccttttcttcttatttagctcttccttctcagacattgtttgttccctaacagatattt

SEQ ID NO: 30980 - DNA, 80 bp, synthetic construct
  misc_feature 1..80: note = Artificially Synthesized Probe
  source 1..80: mol_type = other DNA
gggctggcttttcccctcatcttgctgcccttcctccttctttgcttctccatctccaacacagcctggggaggcagcaa

SEQ ID NO: 30981 - DNA, 80 bp, synthetic construct
  misc_feature 1..80: note = Artificially Synthesized Probe
  source 1..80: mol_type = other DNA
ttgcaaaagaaaaacgattgaaaattaataagataagcatcacttcaagaagttagaaaaagaacggaataataacacaa

SEQ ID NO: 30982 - DNA, 80 bp, synthetic construct
  misc_feature 1..80: note = Artificially Synthesized Probe
  source 1..80: mol_type = other DNA
agactctgtctcaaaaaaaaaaaaaaaaagaacagaaactaatgaaacagaaaacataaaatgaagataatccacaaagg

SEQ ID NO: 30983 - DNA, 80 bp, synthetic construct
  misc_feature 1..80: note = Artificially Synthesized Probe
  source 1..80: mol_type = other DNA
gaaatagccccgccctcccagggactgaagctcagtttaaaatgatctcagtcctgattgagtcaaggtttctagtgctc

SEQ ID NO: 30984 - DNA, 80 bp, synthetic construct
  misc_feature 1..80: note = Artificially Synthesized Probe
  source 1..80: mol_type = other DNA
tggagaggatgtggagaaataggaacacttttacactgttggtgggactgtaaactagttcaaccattgtggaagtcggt

SEQ ID NO: 30985 - DNA, 80 bp, synthetic construct
  misc_feature 1..80: note = Artificially Synthesized Probe
  source 1..80: mol_type = other DNA
ggctaatggttcccagcccacatattcaagaatcactataaaccccaagtaggataaaatacaaagaaaaccacacctag

SEQ ID NO: 30986 - DNA, 80 bp, synthetic construct
  misc_feature 1..80: note = Artificially Synthesized Probe
  source 1..80: mol_type = other DNA
aaaacagacacaagagatgtagaaagcagttaaagagtgtttaggagggtgctgagaaatgcatattgataaatattgat

SEQ ID NO: 30987 - DNA, 80 bp, synthetic construct
  misc_feature 1..80: note = Artificially Synthesized Probe
  source 1..80: mol_type = other DNA
aaggacgatggccagatgcaaggctttcttcttcttcagtgagaaatcatcatccatttgtttaaaacaggattattttt

SEQ ID NO: 30988 - DNA, 80 bp, synthetic construct
  misc_feature 1..80: note = Artificially Synthesized Probe
  source 1..80: mol_type = other DNA
agctggttctgtgatgtttttttcttttccaacatccctttattttcccatccttgattcttgctctgtgcaatacctct

SEQ ID NO: 30989 - DNA, 80 bp, synthetic construct
  misc_feature 1..80: note = Artificially Synthesized Probe
  source 1..80: mol_type = other DNA
aaaaaaagaaagacccaccaatcttcattctagaggagccacagaaagaagtcctggagcattcagagcctccagagagt

SEQ ID NO: 30990 - DNA, 80 bp, synthetic construct
  misc_feature 1..80: note = Artificially Synthesized Probe
  source 1..80: mol_type = other DNA
gcatattaacaggatccctaggtgatttgcgtgcatattcagatttgaaaagctgatatagagaaaatcagaatcaccag

SEQ ID NO: 30991 - DNA, 80 bp, synthetic construct
  misc_feature 1..80: note = Artificially Synthesized Probe
  source 1..80: mol_type = other DNA
tctatggtatgtgagatggtgatgagtgctaagaagacagggaaggggctaagaagtgggtttttttttttgttggtttt

SEQ ID NO: 30992 - DNA, 80 bp, synthetic construct
  misc_feature 1..80: note = Artificially Synthesized Probe
  source 1..80: mol_type = other DNA
atggatggactaagggcttgggaggcagtgcaagaaccaggaaaaggagtgcctgctttggagttggacaaattgggcct

SEQ ID NO: 30993 - DNA, 80 bp, synthetic construct
  misc_feature 1..80: note = Artificially Synthesized Probe
  source 1..80: mol_type = other DNA
aacttttttttttttcattttaaaggtgggtgattcttgagaacatcttcaaagcctgtgagaagagctgaagccagagc

SEQ ID NO: 30994 - DNA, 80 bp, synthetic construct
  misc_feature 1..80: note = Artificially Synthesized Probe
  source 1..80: mol_type = other DNA
aataatggctgaaacacacaggtacacaaattctccctgctggcttcatgtacaaaatcaccggggagaggcagggatca

SEQ ID NO: 30995 - DNA, 80 bp, synthetic construct
  misc_feature 1..80: note = Artificially Synthesized Probe
  source 1..80: mol_type = other DNA
agctttcttgggcataaaaagaaagaacaaagtaagctggatatgtggaaggaaaggagaaaggaagagaaggaaagaaa

SEQ ID NO: 30996 - DNA, 80 bp, synthetic construct
  misc_feature 1..80: note = Artificially Synthesized Probe
  source 1..80: mol_type = other DNA
tttcatccaggaattcctaattgtttctggttgccatggctctctgcccactgaagcaaactcatttacttcatggtgtg

SEQ ID NO: 30997 - DNA, 80 bp, synthetic construct
  misc_feature 1..80: note = Artificially Synthesized Probe
  source 1..80: mol_type = other DNA
ttcaggtcagtgggagaagtgtggagctggaggagagaacagggtaaatagtaggtgagtatctaggctctgtacctcca

SEQ ID NO: 30998 - DNA, 80 bp, synthetic construct
  misc_feature 1..80: note = Artificially Synthesized Probe
  source 1..80: mol_type = other DNA
ctctgtctgcaggtggctgaacagtggcccccaaagatgcccatatcagattactcagaacctgtgactgtgttgtcttc

SEQ ID NO: 30999 - DNA, 80 bp, synthetic construct
  misc_feature 1..80: note = Artificially Synthesized Probe
  source 1..80: mol_type = other DNA
gcagggaaagatgttaggacttctgaccccggaagtgtaagacaatacatttctatgttgtgttaagtaaccaagtttgt

SEQ ID NO: 31000 - DNA, 80 bp, synthetic construct
  misc_feature 1..80: note = Artificially Synthesized Probe
  source 1..80: mol_type = other DNA
taggggagaggagcccacagttgaactgggagaaatttcattctgaagataagtgggaaaaggagaagtggtaattattt

SEQ ID NO: 31001 - DNA, 80 bp, synthetic construct
  misc_feature 1..80: note = Artificially Synthesized Probe
  source 1..80: mol_type = other DNA
gaggcgccaacggaatagcaaatgtcaaagtttcacttaagcccaatggaaaggtaggaggccttgccttcttgctcctt

SEQ ID NO: 31002 - DNA, 80 bp, synthetic construct
  misc_feature 1..80: note = Artificially Synthesized Probe
  source 1..80: mol_type = other DNA
aataaatgaacaaacaaaaatgttaaagggccgatctgggaagatccatgaggtacacaaaaatgagatggaaagggaaa

SEQ ID NO: 31003 - DNA, 80 bp, synthetic construct
  misc_feature 1..80: note = Artificially Synthesized Probe
  source 1..80: mol_type = other DNA
aaataattcagaaatgtataaagaagactaaaattctataatcctgctacccaaagataacaatggttaacatgtatttt

SEQ ID NO: 31004 - DNA, 80 bp, synthetic construct
  misc_feature 1..80: note = Artificially Synthesized Probe
  source 1..80: mol_type = other DNA
cacttaccagccacaggaccttgggaagatcacataatctgtcatttcctcatctgtacaatgggaactgcattataaaa

SEQ ID NO: 31005 - DNA, 80 bp, synthetic construct
  misc_feature 1..80: note = Artificially Synthesized Probe
  source 1..80: mol_type = other DNA
agcctgatttttatttttaaaagaccaccctactcgtcacatgaggtgacatgagtggaaacaggaagatgtcactgtgg

SEQ ID NO: 31006 - DNA, 80 bp, synthetic construct
  misc_feature 1..80: note = Artificially Synthesized Probe
  source 1..80: mol_type = other DNA
agatgaagacagaaaactgacctctgtatttgtccaggtgaagactgccaaggaccttgagaagaaagagcagccgtgga

SEQ ID NO: 31007 - DNA, 80 bp, synthetic construct
  misc_feature 1..80: note = Artificially Synthesized Probe
  source 1..80: mol_type = other DNA
attgtgatagagagatcttggagtttatgggtagcggtgaacaatgtctaggatgtggtcagggaggtaagtagctgagg

SEQ ID NO: 31008 - DNA, 80 bp, synthetic construct
  misc_feature 1..80: note = Artificially Synthesized Probe
  source 1..80: mol_type = other DNA
gtgaactcccattcacaattgcttcaaagagaataaaatacctaggaatccaccttacaagggacgtgaaggacctcttc

SEQ ID NO: 31009 - DNA, 80 bp, synthetic construct
  misc_feature 1..80: note = Artificially Synthesized Probe
  source 1..80: mol_type = other DNA
gatggtgagcattttttcatgtgttttttggctgcataaatgtcttcttttgagaagtgtctgttcatgtcctttgccca

SEQ ID NO: 31010 - DNA, 80 bp, synthetic construct
  misc_feature 1..80: note = Artificially Synthesized Probe
  source 1..80: mol_type = other DNA
acatgactgaaatatcagtcattggaaaactcatgctttatgagagcttcaagaagaccaatcgccatctccctgggtaa

SEQ ID NO: 31011 - DNA, 80 bp, synthetic construct
  misc_feature 1..80: note = Artificially Synthesized Probe
  source 1..80: mol_type = other DNA
atctttattccacccacctgctctatccaatacacaggtctcatttcccatgaagacctacaactcttctccatccatct

SEQ ID NO: 31012 - DNA, 80 bp, synthetic construct
  misc_feature 1..80: note = Artificially Synthesized Probe
  source 1..80: mol_type = other DNA
ctctactactctctcatttttttcccttcactttcaaacatcataaaagcctacactcacttgatttcacttctccacct

SEQ ID NO: 31013 - DNA, 80 bp, synthetic construct
  misc_feature 1..80: note = Artificially Synthesized Probe
  source 1..80: mol_type = other DNA
cgttttgacccacagctgcctcctgggctataaggagagggtgaatttttattaaaagtcaccttagaatcacaaaaaat

SEQ ID NO: 31014 - DNA, 80 bp, synthetic construct
  misc_feature 1..80: note = Artificially Synthesized Probe
  source 1..80: mol_type = other DNA
ctcctgaaatgtaggtgttccccatggtcctaacctgcctcgtccagcaaacattcctcctggctcattctgggcttttc

SEQ ID NO: 31015 - DNA, 80 bp, synthetic construct
  misc_feature 1..80: note = Artificially Synthesized Probe
  source 1..80: mol_type = other DNA
caacccccctcccccaaacccaacccaatttattttcttctccagcaaactttttcttcctcctgtgttccctatctagg

SEQ ID NO: 31016 - DNA, 80 bp, synthetic construct
  misc_feature 1..80: note = Artificially Synthesized Probe
  source 1..80: mol_type = other DNA
cttcgtgaagagaattctcctctgggctatgaagttggcagcatgctgtagggcagacttcaaccaggctgtgggaggag

SEQ ID NO: 31017 - DNA, 80 bp, synthetic construct
  misc_feature 1..80: note = Artificially Synthesized Probe
  source 1..80: mol_type = other DNA
tggtaggctgaataatggctcctccaaagatttccacctgcaaatatgttaccttttagggtaaaagagactttgcagat

SEQ ID NO: 31018 - DNA, 80 bp, synthetic construct
  misc_feature 1..80: note = Artificially Synthesized Probe
  source 1..80: mol_type = other DNA
atcttcccgaactgaaactctgtacccattaaactataactccccagtacccaccaccctcccagccccttggaaaccat

SEQ ID NO: 31019 - DNA, 80 bp, synthetic construct
  misc_feature 1..80: note = Artificially Synthesized Probe
  source 1..80: mol_type = other DNA
ggaaagaatacaattcaaacaattcagagatgtatacgttccaaatgaggtgtcttccctctccttcttaatcccctctc

SEQ ID NO: 31020 - DNA, 80 bp, synthetic construct
  misc_feature 1..80: note = Artificially Synthesized Probe
  source 1..80: mol_type = other DNA
tcttttctgagtggttacgaagtttagatagacaaatggatgggaaggagctctgtgaactgcaaattactatacaaata

SEQ ID NO: 31021 - DNA, 80 bp, synthetic construct
  misc_feature 1..80: note = Artificially Synthesized Probe
  source 1..80: mol_type = other DNA
cacatggcatgcatgctacacagccggaatttacatgggtactgatggaaatgggaatggatatttctttttaaatgctg

SEQ ID NO: 31022 - DNA, 80 bp, synthetic construct
  misc_feature 1..80: note = Artificially Synthesized Probe
  source 1..80: mol_type = other DNA
tagctgctaaataactcccactgtatggctttgtcacaatttcactagttccctactaatgggcatttagatggttttca

SEQ ID NO: 31023 - DNA, 80 bp, synthetic construct
  misc_feature 1..80: note = Artificially Synthesized Probe
  source 1..80: mol_type = other DNA
gattttttccaggctttcctcatcctcctcttcctctaggtaggttttggactcgaccaacagggcgtgccattcttcca

SEQ ID NO: 31024 - DNA, 80 bp, synthetic construct
  misc_feature 1..80: note = Artificially Synthesized Probe
  source 1..80: mol_type = other DNA
ccaacaccttcctcattgattgcccattgttctatagcatttcaggggtgcagtgggctgtgactgtatgaggtgatccc

SEQ ID NO: 31025 - DNA, 80 bp, synthetic construct
  misc_feature 1..80: note = Artificially Synthesized Probe
  source 1..80: mol_type = other DNA
tccaagggcaggaaaaataacttcattcaatccattaatgcattcactcacatagcacccatttattgggcactattggg

SEQ ID NO: 31026 - DNA, 80 bp, synthetic construct
  misc_feature 1..80: note = Artificially Synthesized Probe
  source 1..80: mol_type = other DNA
attctcctgtgccagattctccagatatttcgccctcatctgctcctcttttgacttctttatctctttgaagtactcgt

SEQ ID NO: 31027 - DNA, 80 bp, synthetic construct
  misc_feature 1..80: note = Artificially Synthesized Probe
  source 1..80: mol_type = other DNA
aaaatctgttttgttaggtaacccttcttcaggatccccatttttagttatttgaacaccactgctaataagctccatgt

SEQ ID NO: 31028 - DNA, 80 bp, synthetic construct
  misc_feature 1..80: note = Artificially Synthesized Probe
  source 1..80: mol_type = other DNA
caacccagaagtgattggagaagctccactgtaaggattggtgttgggcattcaatatgtcttagtgtaaaactaagact

SEQ ID NO: 31029 - DNA, 80 bp, synthetic construct
  misc_feature 1..80: note = Artificially Synthesized Probe
  source 1..80: mol_type = other DNA
ataagcatgtgtcaccatgtccagctaaattattttgtattttttttttttgagacagagtctcgctctgtcgcccaggc

SEQ ID NO: 31030 - DNA, 80 bp, synthetic construct
  misc_feature 1..80: note = Artificially Synthesized Probe
  source 1..80: mol_type = other DNA
tattacctgcatctggcagtaagaaggcagtgcccccttctccttgcccaagtcatttcagaaaaggccagttaaaacaa

SEQ ID NO: 31031 - DNA, 80 bp, synthetic construct
  misc_feature 1..80: note = Artificially Synthesized Probe
  source 1..80: mol_type = other DNA
acacattatagtcaaacttctgtaaactaagacacagaaaaattcctgaaagcagtgagagagagatgaaatcttcccta

SEQ ID NO: 31032 - DNA, 80 bp, synthetic construct
  misc_feature 1..80: note = Artificially Synthesized Probe
  source 1..80: mol_type = other DNA
agaaaaacagtttggtttgacctctgctcaccttttcttctatgagatactgctgatcaaattctaaggaataaaactca

SEQ ID NO: 31033 - DNA, 80 bp, synthetic construct
  misc_feature 1..80: note = Artificially Synthesized Probe
  source 1..80: mol_type = other DNA
cccaaatctacattgcatcccatagttcctagtctgatttcactggggaacctattaaacatgcagatcctcagattcca

SEQ ID NO: 31034 - DNA, 80 bp, synthetic construct
  misc_feature 1..80: note = Artificially Synthesized Probe
  source 1..80: mol_type = other DNA
tctctttctcactgaaggtgcttaagcatttcctcaaagcgattacaaggaaaatgggagttaaccatagctcttctata

SEQ ID NO: 31035 - DNA, 80 bp, synthetic construct
  misc_feature 1..80: note = Artificially Synthesized Probe
  source 1..80: mol_type = other DNA
tgagatgccatattcagaaaagcaaggcacaggtcactcgaagcttcccttgagacccaaacaagcatggactttgagta

SEQ ID NO: 31036 - DNA, 80 bp, synthetic construct
  misc_feature 1..80: note = Artificially Synthesized Probe
  source 1..80: mol_type = other DNA
gtaccttgatgggcagaatgacttctttgcttccaacaggaagattggccccctgtgggtcaaatctcacttcaaatatt

SEQ ID NO: 31037 - DNA, 80 bp, synthetic construct
  misc_feature 1..80: note = Artificially Synthesized Probe
  source 1..80: mol_type = other DNA
caagtcagcaaattctttaggaacatgcattctcaacagggacaataccacccctaaagaggcaaaaattagttcttgga

SEQ ID NO: 31038 - DNA, 80 bp, synthetic construct
  misc_feature 1..80: note = Artificially Synthesized Probe
  source 1..80: mol_type = other DNA
tctctttgacacgtaatcaacaagaaaggtgaagtccctactcccagtttctgtgagaggatgggagcctagcttccatg

SEQ ID NO: 31039 - DNA, 80 bp, synthetic construct
  misc_feature 1..80: note = Artificially Synthesized Probe
  source 1..80: mol_type = other DNA
aaaggttgagaaatactatttgaaaagggctaatccttaagtctaggcccagcagggaaggttaatgtgtgccatggccc

SEQ ID NO: 31040 - DNA, 80 bp, synthetic construct
  misc_feature 1..80: note = Artificially Synthesized Probe
  source 1..80: mol_type = other DNA
cttttaaaacaggactttcaggggtgatgagggaggatatattgggattttgtcttcctatcccagcctttatttacaag

SEQ ID NO: 31041 - DNA, 80 bp, synthetic construct
  misc_feature 1..80: note = Artificially Synthesized Probe
  source 1..80: mol_type = other DNA
aaaccttaatagatcagccatctgatacctcacctcctgggctcatcttgcctctcctagcttcctgattctttgcctta

SEQ ID NO: 31042 - DNA, 80 bp, synthetic construct
  misc_feature 1..80: note = Artificially Synthesized Probe
  source 1..80: mol_type = other DNA
tcaagttgttttaattaacactaaatatgccacattatcctgaatcagggagggtaggtaatcggtggagagattcccac

SEQ ID NO: 31043 - DNA, 80 bp, synthetic construct
  misc_feature 1..80: note = Artificially Synthesized Probe
  source 1..80: mol_type = other DNA
aagcgggaggatcccttgagcctaagagttaagattacagtgagctctgattgcaccactgtatttcagcctgggtaaca

SEQ ID NO: 31044 - DNA, 80 bp, synthetic construct
  misc_feature 1..80: note = Artificially Synthesized Probe
  source 1..80: mol_type = other DNA
aaactccttttaaagacctcaggtactccaggtaggtagtaaacttttaatacctgctcttgatgtgaactgataaagcc

SEQ ID NO: 31045 - DNA, 80 bp, synthetic construct
  misc_feature 1..80: note = Artificially Synthesized Probe
  source 1..80: mol_type = other DNA
gcaagttctgctattccttcaaaaacagataatcacttcagtttatgacccattcaggaaatagaagagagagaaatgcc

SEQ ID NO: 31046 - DNA, 80 bp, synthetic construct
  misc_feature 1..80: note = Artificially Synthesized Probe
  source 1..80: mol_type = other DNA
gcattcaaagggaacaagaaggcaattgaaggtagacagaacacacagtccatgatgaacacttaatagtcatgagatct

SEQ ID NO: 31047 - DNA, 80 bp, synthetic construct
  misc_feature 1..80: note = Artificially Synthesized Probe
  source 1..80: mol_type = other DNA
aaagccatagcagctaaaatagtacagtattaatgtagggacaaacagagcaatgaagaataaagagaccagcagtaaac

SEQ ID NO: 31048 - DNA, 80 bp, synthetic construct
  misc_feature 1..80: note = Artificially Synthesized Probe
  source 1..80: mol_type = other DNA
cccaccatttacttacagacacaggcaggattagtggcactccagggagaaggttgtctggagaagactggtggtcagtc

SEQ ID NO: 31049 - DNA, 80 bp, synthetic construct
  misc_feature 1..80: note = Artificially Synthesized Probe
  source 1..80: mol_type = other DNA
gtcatgttctttttcctggaattttgctaacataattcaccagctgggttagcaggcccaataaccacaaacaggccact

SEQ ID NO: 31050 - DNA, 80 bp, synthetic construct
  misc_feature 1..80: note = Artificially Synthesized Probe
  source 1..80: mol_type = other DNA
ccagttaatagagaggcttaggatagcctcacccaggtgaggaatgggctctgacccaaaggaactcatgacaattgaca

SEQ ID NO: 31051 - DNA, 80 bp, synthetic construct
  misc_feature 1..80: note = Artificially Synthesized Probe
  source 1..80: mol_type = other DNA
aacacctgcagagaaagtcattctgtaagagagcagctgttgggatgaatgcctgccaaggataagtgaaagttatgtca

SEQ ID NO: 31052 - DNA, 80 bp, synthetic construct
  misc_feature 1..80: note = Artificially Synthesized Probe
  source 1..80: mol_type = other DNA
aaattacatatgcctcatgtgtctgaaggtgtgtgtgtgtaaattccttcagagatttgcattggcaaatagaaatatct

SEQ ID NO: 31053 - DNA, 80 bp, synthetic construct
  misc_feature 1..80: note = Artificially Synthesized Probe
  source 1..80: mol_type = other DNA
ctgatatttactggggacttactaagaaccagttctatatcctgaggatatgacgatgaacaaaacagaaaaaaaattcc

SEQ ID NO: 31054 - DNA, 80 bp, synthetic construct
  misc_feature 1..80: note = Artificially Synthesized Probe
  source 1..80: mol_type = other DNA
atgcaagtgcagaggtgtatctggaggataatttctagaagggggacaatgcattttaaattttgatctacttgcaaagt

SEQ ID NO: 31055 - DNA, 80 bp, synthetic construct
  misc_feature 1..80: note = Artificially Synthesized Probe
  source 1..80: mol_type = other DNA
ccagcaattcttcagacaatgtgggtgttctatgtgctcaatgttgtttccctatttattggagcattttattgtgagga

SEQ ID NO: 31056 - DNA, 80 bp, synthetic construct
  misc_feature 1..80: note = Artificially Synthesized Probe
  source 1..80: mol_type = other DNA
tcccagttcaccagaaagcagggctaagactcagctgaggcctgggaagcactctctgttaggggcctggaagtgcaggc

SEQ ID NO: 31057 - DNA, 80 bp, synthetic construct
  misc_feature 1..80: note = Artificially Synthesized Probe
  source 1..80: mol_type = other DNA
tgtaccactttacactaccacctgcattgtatgagagttctcgttggtctgcattctcatccacacttggtatttagtct

SEQ ID NO: 31058 - DNA, 80 bp, synthetic construct
  misc_feature 1..80: note = Artificially Synthesized Probe
  source 1..80: mol_type = other DNA
gttagatttttaacagccttcccaggcaattctaatgggcagccagatttaggagctgccgtgggtaggaatggcagcat

SEQ ID NO: 31059 - DNA, 80 bp, synthetic construct
  misc_feature 1..80: note = Artificially Synthesized Probe
  source 1..80: mol_type = other DNA
cctttcttcactggaagcagtgtggcgctaaaataaaaccctgatgaacaagcttgtatttcagttaatgttctgtgttg

SEQ ID NO: 31060 - DNA, 80 bp, synthetic construct
  misc_feature 1..80: note = Artificially Synthesized Probe
  source 1..80: mol_type = other DNA
tccactacagtgttgtaggattctaaagatgagaaacccaacccttgcttcaaggagctaagaggccagtggatcagagt

SEQ ID NO: 31061 - DNA, 80 bp, synthetic construct
  misc_feature 1..80: note = Artificially Synthesized Probe
  source 1..80: mol_type = other DNA
agcagcgtatgtgtaggtgccaaacggaagcaggtgatggtgatgacaatgatgatgcagaatacagaagcaatgaggtg

SEQ ID NO: 31062 - DNA, 80 bp, synthetic construct
  misc_feature 1..80: note = Artificially Synthesized Probe
  source 1..80: mol_type = other DNA
acatttcaagtatatggaaagaaaatgtcaatattcttagtggtgcaagctggtcatcacccttataaatcactgatatc

SEQ ID NO: 31063 - DNA, 80 bp, synthetic construct
  misc_feature 1..80: note = Artificially Synthesized Probe
  source 1..80: mol_type = other DNA
gactgaagcctgaatcccaaccatagagattctgatttacttggcttcaatctatttgaaacttcccaaggtgattctaa

SEQ ID NO: 31064 - DNA, 80 bp, synthetic construct
  misc_feature 1..80: note = Artificially Synthesized Probe
  source 1..80: mol_type = other DNA
taacgctccagaaggtgtccccactgctacatgatcttagaaaggctgccaaacaggtaggctgtgaaatctcccttatc

SEQ ID NO: 31065 - DNA, 80 bp, synthetic construct
  misc_feature 1..80: note = Artificially Synthesized Probe
  source 1..80: mol_type = other DNA
aattaatgcaagaggattaagagaagggctttctaagaggtgaagcacttgtgctgtaggcaaaggaataggaagcttga

SEQ ID NO: 31066 - DNA, 80 bp, synthetic construct
  misc_feature 1..80: note = Artificially Synthesized Probe
  source 1..80: mol_type = other DNA
tgatgaaaggcaaggcagatccaggaaacactgtggaggaaatgctggtggaaacacttggtacgatcatatttaatttt

SEQ ID NO: 31067 - DNA, 80 bp, synthetic construct
  misc_feature 1..80: note = Artificially Synthesized Probe
  source 1..80: mol_type = other DNA
gtgagtttaaggatctgtttatgcctttttctatatagatgacatattgtttctggatcatttactgaataggccatccc

SEQ ID NO: 31068 - DNA, 80 bp, synthetic construct
  misc_feature 1..80: note = Artificially Synthesized Probe
  source 1..80: mol_type = other DNA
acttttgtttcttcctttccaaatctagtctcttttatttactttcctatcttcctacactggctaggatctttagtaaa

SEQ ID NO: 31069 - DNA, 80 bp, synthetic construct
  misc_feature 1..80: note = Artificially Synthesized Probe
  source 1..80: mol_type = other DNA
cagtttgttaatattttggtgaatgttttacatttatatttttgaattaatgagtgtgaaatggcctgaaatctttatgt

SEQ ID NO: 31070 - DNA, 80 bp, synthetic construct
  misc_feature 1..80: note = Artificially Synthesized Probe
  source 1..80: mol_type = other DNA
tcctttacactttctttcactcagcatgtctgttctgaagtgatttacataaaaagtgttctgctgtaaaaagcctgaac

SEQ ID NO: 31071 - DNA, 80 bp, synthetic construct
  misc_feature 1..80: note = Artificially Synthesized Probe
  source 1..80: mol_type = other DNA
cacccagttaaggcaaaaactaagaggatccctgaggttcctgataactctggtatggagccagccaggccaaggaaatc

SEQ ID NO: 31072 - DNA, 80 bp, synthetic construct
  misc_feature 1..80: note = Artificially Synthesized Probe
  source 1..80: mol_type = other DNA
agtcagtgcagaaatggggtcttggacttctcaaaagaagatatagcagtgaccaagaaatatgaaaaaacgttcattgt

SEQ ID NO: 31073 - DNA, 80 bp, synthetic construct
  misc_feature 1..80: note = Artificially Synthesized Probe
  source 1..80: mol_type = other DNA
aatgagttagaatgatgcctggcacatggtgggtactcaatcatagttactgctattggtcaagattacggcagcttcct

SEQ ID NO: 31074 - DNA, 80 bp, synthetic construct
  misc_feature 1..80: note = Artificially Synthesized Probe
  source 1..80: mol_type = other DNA
gtgcaggtgatgttattcaagtcctggatcaagctgtgcctgaagcctgaacctagactttccagatgcatgaaccaaca

SEQ ID NO: 31075 - DNA, 80 bp, synthetic construct
  misc_feature 1..80: note = Artificially Synthesized Probe
  source 1..80: mol_type = other DNA
tgttgttccaatacccccagcttgtggtgacctgttacagcagccacaggaagttgctagggggagggacccattcccac

SEQ ID NO: 31076 - DNA, 80 bp, synthetic construct
  misc_feature 1..80: note = Artificially Synthesized Probe
  source 1..80: mol_type = other DNA
ctgaaagaaaaaataatcacatttcccctaaacatttttattttcttattgggcccttgggcagaacaaggaactgcctc

SEQ ID NO: 31077 - DNA, 80 bp, synthetic construct
  misc_feature 1..80: note = Artificially Synthesized Probe
  source 1..80: mol_type = other DNA
tttaggcccttgtattcgatttatttataatctgattcacaaacgaagagccaaagctgtccgtggagaccacttggccc

SEQ ID NO: 31078 - DNA, 80 bp, synthetic construct
  misc_feature 1..80: note = Artificially Synthesized Probe
  source 1..80: mol_type = other DNA
ttttttttttttttttgtctattctaggtgacatttatgcctggaacctttctctttggcgggtgccaggaagctgagag

SEQ ID NO: 31079 - DNA, 80 bp, synthetic construct
  misc_feature 1..80: note = Artificially Synthesized Probe
  source 1..80: mol_type = other DNA
ttatgtggaacacgctaggcataaatcacctgggaggcatccaagggatgtccaagaggagacgtcaagaaggcaacaga

SEQ ID NO: 31080 - DNA, 80 bp, synthetic construct
  misc_feature 1..80: note = Artificially Synthesized Probe
  source 1..80: mol_type = other DNA
ctgggtgattaggagagaaaagctaatctgggaatgaggttaacacaagaaactgagcagagctgagagacagagaacct

SEQ ID NO: 31081 - DNA, 80 bp, synthetic construct
  misc_feature 1..80: note = Artificially Synthesized Probe
  source 1..80: mol_type = other DNA
taaatgaagcatgtccttgctcccagatggaataaactcatttagctatgttacatcagaatcacttcacaaaatctggc

SEQ ID NO: 31082 - DNA, 80 bp, synthetic construct
  misc_feature 1..80: note = Artificially Synthesized Probe
  source 1..80: mol_type = other DNA
ctaaagaaacaataaacaagtgttggtgaggatgcggagaaactgaaaccctggtgcactgttactgggaatgcaaaatg

SEQ ID NO: 31083 - DNA, 80 bp, synthetic construct
  misc_feature 1..80: note = Artificially Synthesized Probe
  source 1..80: mol_type = other DNA
tatcatgaaagatatgccttgcttccccttcactttctgccatgattgtaaatttcctgaggcctccccagctatgtaga

SEQ ID NO: 31084 - DNA, 80 bp, synthetic construct
  misc_feature 1..80: note = Artificially Synthesized Probe
  source 1..80: mol_type = other DNA
ttcagatcgtttctgtaggaagggtcaaacttgatcagcaggtttttttcttcatcaatttccagtttaataggctacaa

SEQ ID NO: 31085 - DNA, 80 bp, synthetic construct
  misc_feature 1..80: note = Artificially Synthesized Probe
  source 1..80: mol_type = other DNA
aatggacacaggaatgaatctgttttcagtgcacctcatctttccactgggcttaaacgattctggtatttaactgtgca

SEQ ID NO: 31086 - DNA, 80 bp, synthetic construct
  misc_feature 1..80: note = Artificially Synthesized Probe
  source 1..80: mol_type = other DNA
gagaccttgggcaaaatactgggcctcagtttctccatctgatttaccactcattttaaattttctgtagtcttccctgt

SEQ ID NO: 31087 - DNA, 80 bp, synthetic construct
  misc_feature 1..80: note = Artificially Synthesized Probe
  source 1..80: mol_type = other DNA
ctactgaaaagtggacctacataacccagacaacacagattagatttttttacccccttggtgcctaattgagaaaacct

SEQ ID NO: 31088 - DNA, 80 bp, synthetic construct
  misc_feature 1..80: note = Artificially Synthesized Probe
  source 1..80: mol_type = other DNA
tttgccttttctctttgtgccaatatcagttaagccctcctaatttcatactttgatatgactctgtcttccagttctat

SEQ ID NO: 31089 - DNA, 80 bp, synthetic construct
  misc_feature 1..80: note = Artificially Synthesized Probe
  source 1..80: mol_type = other DNA
aaagagcactacccacacatttttattagtgtttatgggcttagagaaatctaataagaaactaggctgcatatttaaca

SEQ ID NO: 31090 - DNA, 80 bp, synthetic construct
  misc_feature 1..80: note = Artificially Synthesized Probe
  source 1..80: mol_type = other DNA
ccaaaataaatggtcttgaacattcttctgcaaacctccaggtaatgaaaggaaccccagttgatacctcatgactggtt

SEQ ID NO: 31091 - DNA, 80 bp, synthetic construct
  misc_feature 1..80: note = Artificially Synthesized Probe
  source 1..80: mol_type = other DNA
ggttcactagatttccagtaccagctcaatccccaactcagaacagacattccttacatgtcttgaatggtaattaattc

SEQ ID NO: 31092 - DNA, 80 bp, synthetic construct
  misc_feature 1..80: note = Artificially Synthesized Probe
  source 1..80: mol_type = other DNA
gccagtgagataagccagcatttggggaacaactataacttaatacttactcagaatacttatttacccactgagagaaa

SEQ ID NO: 31093 - DNA, 80 bp, synthetic construct
  misc_feature 1..80: note = Artificially Synthesized Probe
  source 1..80: mol_type = other DNA
tcttgataaccacattataaatatgctcttccaacagctgtcagtgtcttgagataagggcctgtgttctattcatcttt

SEQ ID NO: 31094 - DNA, 80 bp, synthetic construct
  misc_feature 1..80: note = Artificially Synthesized Probe
  source 1..80: mol_type = other DNA
ggggctctgtggatccctgggctcctgagagccactgggctggggttggacatgagcatgtcccttcttaacccggccct

SEQ ID NO: 31095 - DNA, 80 bp, synthetic construct
  misc_feature 1..80: note = Artificially Synthesized Probe
  source 1..80: mol_type = other DNA
caccgggattggtcacccatctcagactaatgtgctttaaagatgttgcaatttcatgtattcatttgttcatcatgcat

SEQ ID NO: 31096 - DNA, 80 bp, synthetic construct
  misc_feature 1..80: note = Artificially Synthesized Probe
  source 1..80: mol_type = other DNA
caggcagagggttgtagtttacccagccctgcttttgacaattcttctggagactgcaggcatagtgattttatgtcaaa

SEQ ID NO: 31097 - DNA, 80 bp, synthetic construct
  misc_feature 1..80: note = Artificially Synthesized Probe
  source 1..80: mol_type = other DNA
gcctcccaagtaggtaggacaacaggcatgtgacatcatgcgaggctaatttttttatttcgtagagataggggggtctc

SEQ ID NO: 31098 - DNA, 80 bp, synthetic construct
  misc_feature 1..80: note = Artificially Synthesized Probe
  source 1..80: mol_type = other DNA
ttctgcttaggttaccactaagctgtatctgtattttctacatttgtggagagggattaacagtgtattggaatcaaaga

SEQ ID NO: 31099 - DNA, 80 bp, synthetic construct
  misc_feature 1..80: note = Artificially Synthesized Probe
  source 1..80: mol_type = other DNA
ctatagatgtcaaagccctctacacttcaaatgggtggcattgtggaattcaacatcagagacaaacattattttttgaa

SEQ ID NO: 31100 - DNA, 80 bp, synthetic construct
  misc_feature 1..80: note = Artificially Synthesized Probe
  source 1..80: mol_type = other DNA
cttactagctactacaactaataattagggaccactcctcctagcccctccaagtcttctacaaatttaatgagcaaatt

SEQ ID NO: 31101 - DNA, 80 bp, synthetic construct
  misc_feature 1..80: note = Artificially Synthesized Probe
  source 1..80: mol_type = other DNA
cactgagaaaaagctgcaaaagaagagatgtggagagtatttagatgcttccaggataataacggagaggaaaagccaca

SEQ ID NO: 31102 - DNA, 80 bp, synthetic construct
  misc_feature 1..80: note = Artificially Synthesized Probe
  source 1..80: mol_type = other DNA
tattcgtagtaacttggttctagtagagtactaaaataatcagaaaacagtaaacaaagtctctgtctctccagagcatt

SEQ ID NO: 31103 - DNA, 80 bp, synthetic construct
  misc_feature 1..80: note = Artificially Synthesized Probe
  source 1..80: mol_type = other DNA
cctaaccccagtggaggttaggaaatgtagtctagccctgggtctacagtaaagagagttgagtgtgccgagctgctagc

SEQ ID NO: 31104 - DNA, 80 bp, synthetic construct
  misc_feature 1..80: note = Artificially Synthesized Probe
  source 1..80: mol_type = other DNA
tgacacaggttggctcttctggaaagacctgaagttgttcttcagggctgaattggtgagttttctgatgaagcttatta

SEQ ID NO: 31105 - DNA, 80 bp, synthetic construct
  misc_feature 1..80: note = Artificially Synthesized Probe
  source 1..80: mol_type = other DNA
ccaaatcagctgactttcagatagggagattatcctcagcggtcgtgacttaaccagactatactcttcctggtgaaaag

SEQ ID NO: 31106 - DNA, 80 bp, synthetic construct
  misc_feature 1..80: note = Artificially Synthesized Probe
  source 1..80: mol_type = other DNA
gaagaaaatagcattgtgcacttttcttccaaataactcatttgccagttgaaatctgcaagaatctccttccatgaaat

SEQ ID NO: 31107 - DNA, 80 bp, synthetic construct
  misc_feature 1..80: note = Artificially Synthesized Probe
  source 1..80: mol_type = other DNA
gattacagaggggacactttgatggcataacttcagagaagaagctggctgcagatggccggacttcaggggaagatcac

SEQ ID NO: 31108 - DNA, 80 bp, synthetic construct
  misc_feature 1..80: note = Artificially Synthesized Probe
  source 1..80: mol_type = other DNA
tggactcactttttatatctggggaatccatgattttgtgtgaatctcggtaggaggcaggctctcactgccatttgaga

SEQ ID NO: 31109 - DNA, 80 bp, synthetic construct
  misc_feature 1..80: note = Artificially Synthesized Probe
  source 1..80: mol_type = other DNA
ctaggagtgatatttttcaacactgctagggggtaggacataaactgtacaagttctctgggacagaattcacaagatgt

SEQ ID NO: 31110 - DNA, 80 bp, synthetic construct
  misc_feature 1..80: note = Artificially Synthesized Probe
  source 1..80: mol_type = other DNA
acagttttctaaggatccttccagatatactttatgatcaatatttgcatacgttgtttcttacataaatggtgcaatac

SEQ ID NO: 31111 - DNA, 80 bp, synthetic construct
  misc_feature 1..80: note = Artificially Synthesized Probe
  source 1..80: mol_type = other DNA
cttcagcggcctcctgacaaaaggtatgtggagtgtaaattttttgagatttttttatatctgaaatgtattttatcccc

SEQ ID NO: 31112 - DNA, 80 bp, synthetic construct
  misc_feature 1..80: note = Artificially Synthesized Probe
  source 1..80: mol_type = other DNA
cccaactaacagtttatttctgcccttccttgtggctggtcaaattgcccacagaagaaccttccaattttctggccata

SEQ ID NO: 31113 - DNA, 80 bp, synthetic construct
  misc_feature 1..80: note = Artificially Synthesized Probe
  source 1..80: mol_type = other DNA
agacattttaccagagcccatcctcttctaatttttatctccctagcctgacttgactccaatttttatctccctggaca

SEQ ID NO: 31114 - DNA, 80 bp, synthetic construct
  misc_feature 1..80: note = Artificially Synthesized Probe
  source 1..80: mol_type = other DNA
agatggttaaataaaaggaaacaggacagctcctgagcacacaggcatgatttacacagtgctaggaagcatctttacaa

SEQ ID NO: 31115 - DNA, 80 bp, synthetic construct
  misc_feature 1..80: note = Artificially Synthesized Probe
  source 1..80: mol_type = other DNA
cacttcttcagtctctgtcctttcgtttgtgacagggaagagaaaacgaaacagaggtagaataaaattttttccttgat

SEQ ID NO: 31116 - DNA, 80 bp, synthetic construct
  misc_feature 1..80: note = Artificially Synthesized Probe
  source 1..80: mol_type = other DNA
tgcttctggaagtctcttaatactattattactggtatcactgttatcctctttggcactaaacgggtcacttcagatgg

SEQ ID NO: 31117 - DNA, 80 bp, synthetic construct
  misc_feature 1..80: note = Artificially Synthesized Probe
  source 1..80: mol_type = other DNA
aagggaacaaaagattctggaacctacttgaggtggagggtggaaggagagagaaggtcaaaaaactatctattgggtat

SEQ ID NO: 31118 - DNA, 80 bp, synthetic construct
  misc_feature 1..80: note = Artificially Synthesized Probe
  source 1..80: mol_type = other DNA
ctgcagtgactgaatctgtgatttctccaacatccccatgggaggagaagcccaaatttgattctggattagtggtcact

SEQ ID NO: 31119 - DNA, 80 bp, synthetic construct
  misc_feature 1..80: note = Artificially Synthesized Probe
  source 1..80: mol_type = other DNA
aaaccatcaaatagaatcatatgctcagctaaactaagcatcgtaaactacagatctctagcattagaaagacataattt

SEQ ID NO: 31120 - DNA, 80 bp, synthetic construct
  misc_feature 1..80: note = Artificially Synthesized Probe
  source 1..80: mol_type = other DNA
gattagaactttcttaatgtgacataggcgtttaccaaaaacctataagagatgttatgcttaaaatgaaacatttggcc

SEQ ID NO: 31121 - DNA, 80 bp, synthetic construct
  misc_feature 1..80: note = Artificially Synthesized Probe
  source 1..80: mol_type = other DNA
ttaaagacatgaaaaataggagtctaaacctattcaaatagaaggacagggattgatttcctaaaccatacacagaaaac

SEQ ID NO: 31122 - DNA, 80 bp, synthetic construct
  misc_feature 1..80: note = Artificially Synthesized Probe
  source 1..80: mol_type = other DNA
acctcaaacactcctggaagggcacattgatataatcactttggagagtaatttggcaacatctaatgaggttgaaaatg

SEQ ID NO: 31123 - DNA, 80 bp, synthetic construct
  misc_feature 1..80: note = Artificially Synthesized Probe
  source 1..80: mol_type = other DNA
tggaatagcttaatgatgtcatctgtcaaaaggccctggagtcatattgtttgtctattagaaatgtctgtagcatggaa

SEQ ID NO: 31124 - DNA, 80 bp, synthetic construct
  misc_feature 1..80: note = Artificially Synthesized Probe
  source 1..80: mol_type = other DNA
agatgttagtcagaattaacttagtgtcaccatattgccatcattataattgttaagccagctgctacgtgctggaaagt

SEQ ID NO: 31125 - DNA, 80 bp, synthetic construct
  misc_feature 1..80: note = Artificially Synthesized Probe
  source 1..80: mol_type = other DNA
gcaaaggagagtctactgttccaggtcacagaacattcttccttgtactaatcaactttttttacactgaaaataaattg

SEQ ID NO: 31126 - DNA, 80 bp, synthetic construct
  misc_feature 1..80: note = Artificially Synthesized Probe
  source 1..80: mol_type = other DNA
actgaaccaggaagcaacacttcctaagcagtaccctgtgctttctaccaaacacatcaattaactaattggataaagac

SEQ ID NO: 31127 - DNA, 80 bp, synthetic construct
  misc_feature 1..80: note = Artificially Synthesized Probe
  source 1..80: mol_type = other DNA
aaaagtgggcgaaggacatgaacagacacttctcaaaagaagacatttatgcagccaaaaaacacatgaaaaaatgctca

SEQ ID NO: 31128 - DNA, 80 bp, synthetic construct
  misc_feature 1..80: note = Artificially Synthesized Probe
  source 1..80: mol_type = other DNA
aaatgtcattatgaaatacagttgacccttgaacaacatgagtttgaacggcatcagtccacttttatgtggattttctt

SEQ ID NO: 31129 - DNA, 80 bp, synthetic construct
  misc_feature 1..80: note = Artificially Synthesized Probe
  source 1..80: mol_type = other DNA
gctgttcactttaatttctgtttttggtgaatactctcctgtatttcagacatcctcacaaactaccttaaaatattgct

SEQ ID NO: 31130 - DNA, 80 bp, synthetic construct
  misc_feature 1..80: note = Artificially Synthesized Probe
  source 1..80: mol_type = other DNA
tgacatacctgagttccgccagagagaaagaacacaggaacagctggaaatggctagccacttttagccattccttcaat

SEQ ID NO: 31131 - DNA, 80 bp, synthetic construct
  misc_feature 1..80: note = Artificially Synthesized Probe
  source 1..80: mol_type = other DNA
attagcttgagtaggctaatatgagccatgagtcaagttaatatacaagaaaagctcaggtgagcagtgaaggaaactga

SEQ ID NO: 31132 - DNA, 80 bp, synthetic construct
  misc_feature 1..80: note = Artificially Synthesized Probe
  source 1..80: mol_type = other DNA
aactcaaataagttcagggcaacagctttccactttccttaggaaaaggaaaaggtccactttccactttccaagttcct

SEQ ID NO: 31133 - DNA, 80 bp, synthetic construct
  misc_feature 1..80: note = Artificially Synthesized Probe
  source 1..80: mol_type = other DNA
gctgtgttatcctagctaattctattctgtttcagattaaacacacatatgattggatttgcagatgccatggattgcca

SEQ ID NO: 31134 - DNA, 80 bp, synthetic construct
  misc_feature 1..80: note = Artificially Synthesized Probe
  source 1..80: mol_type = other DNA
atcaagggaactcaatggaagaataattaatactgaagaaggagaaaggaactcacctgaggctggacctcatagaatcc

SEQ ID NO: 31135 - DNA, 80 bp, synthetic construct
  misc_feature 1..80: note = Artificially Synthesized Probe
  source 1..80: mol_type = other DNA
ggactagcgacagctcacatcatctaaataacaataataatgctaattcctatgcagaacagctgtcttggatgcagagg

SEQ ID NO: 31136 - DNA, 80 bp, synthetic construct
  misc_feature 1..80: note = Artificially Synthesized Probe
  source 1..80: mol_type = other DNA
cagcacatctgccccatctttaaagtgtatgtcttcctaagattcacaagagatcagaattccagagattgacatattag

SEQ ID NO: 31137 - DNA, 80 bp, synthetic construct
  misc_feature 1..80: note = Artificially Synthesized Probe
  source 1..80: mol_type = other DNA
cacacttcttcttatctccaccaaaggtgctttagaaacatttgctgctttgtcatttgaatgtcagattcaacttccct

SEQ ID NO: 31138 - DNA, 80 bp, synthetic construct
  misc_feature 1..80: note = Artificially Synthesized Probe
  source 1..80: mol_type = other DNA
aagttggagttaagcagtaatgaattgcacagacaattcatttaagaagtttagcagttgctaggagagattgagggtca

SEQ ID NO: 31139 - DNA, 80 bp, synthetic construct
  misc_feature 1..80: note = Artificially Synthesized Probe
  source 1..80: mol_type = other DNA
tttgcccaatgtatttgtgtctgatttatttccttataggcccacgtttccctgtaaattgacaggcaccccctcctgct

SEQ ID NO: 31140 - DNA, 80 bp, synthetic construct
  misc_feature 1..80: note = Artificially Synthesized Probe
  source 1..80: mol_type = other DNA
tcaaaaaatagcctttcccaagagagactttacaaactgctttagagccagccagagactaacacctggcttttacctct

SEQ ID NO: 31141 - DNA, 80 bp, synthetic construct
  misc_feature 1..80: note = Artificially Synthesized Probe
  source 1..80: mol_type = other DNA
tttctactggatggaaatgctactcttctaccttgaactctgctgtaataaaatgtacttggtctcttggagtaatgact

SEQ ID NO: 31142 - DNA, 80 bp, synthetic construct
  misc_feature 1..80: note = Artificially Synthesized Probe
  source 1..80: mol_type = other DNA
attttcacctgacctaaaaagctcctaagaagactagcagaaactagcagcggaagatcacaaggctgtaaaggaaaaat

SEQ ID NO: 31143 - DNA, 80 bp, synthetic construct
  misc_feature 1..80: note = Artificially Synthesized Probe
  source 1..80: mol_type = other DNA
tcatctataagtttaaaaagtcttccctaaaataccaccctcagaagccctcccctctttctaactgaagaatgagtacc

SEQ ID NO: 31144 - DNA, 80 bp, synthetic construct
  misc_feature 1..80: note = Artificially Synthesized Probe
  source 1..80: mol_type = other DNA
ttaacccatccaaggattcatctatgcctcaatgttccttcaaggacaatcaccacccaattctattatctgactctctc

SEQ ID NO: 31145 - DNA, 80 bp, synthetic construct
  misc_feature 1..80: note = Artificially Synthesized Probe
  source 1..80: mol_type = other DNA
gaaaagaaagtttcaaatgcctctccacatcctccagtgccaccatgcttctttgtgaaaagtctatttgatgagagacc

SEQ ID NO: 31146 - DNA, 80 bp, synthetic construct
  misc_feature 1..80: note = Artificially Synthesized Probe
  source 1..80: mol_type = other DNA
aggcgatgatatgagagttctggcaaacaggaagaggaagtggaaaggctactccttttgtctcagttgagtatgggaag

SEQ ID NO: 31147 - DNA, 80 bp, synthetic construct
  misc_feature 1..80: note = Artificially Synthesized Probe
  source 1..80: mol_type = other DNA
gccaagtcagtgttggctctgctggagctgaaaggacaagccatcagtgttcccacaatacctcagtggaaatgggcgcc

SEQ ID NO: 31148 - DNA, 80 bp, synthetic construct
  misc_feature 1..80: note = Artificially Synthesized Probe
  source 1..80: mol_type = other DNA
cactggtctttgtttcaaaaatttattggctctttctgtgaatttttccccagggaattaaccaattatcttcttcctgt

SEQ ID NO: 31149 - DNA, 80 bp, synthetic construct
  misc_feature 1..80: note = Artificially Synthesized Probe
  source 1..80: mol_type = other DNA
tttcttgtgttgttttactgtgaatatatttgtctcctaaaacgagttaatagctttctacatttttctgtgatgtgaga

SEQ ID NO: 31150 - DNA, 80 bp, synthetic construct
  misc_feature 1..80: note = Artificially Synthesized Probe
  source 1..80: mol_type = other DNA
ccatatgtggcgtgtacaacttctaggaagtgtccttaaaaggaaggggtgtactcttttcctgtctcttcctcctttct

SEQ ID NO: 31151 - DNA, 80 bp, synthetic construct
  misc_feature 1..80: note = Artificially Synthesized Probe
  source 1..80: mol_type = other DNA
ggaaacatcaccaaagtgcagagctggaacattaaaatggaaggtaggtccaatgacacagcctctggaaggaggaatac

SEQ ID NO: 31152 - DNA, 80 bp, synthetic construct
  misc_feature 1..80: note = Artificially Synthesized Probe
  source 1..80: mol_type = other DNA
cttcagaaggaaacacagccctgccaacactgattttagcctagctagacctgcattaagtctataaaactgtaaaatat

SEQ ID NO: 31153 - DNA, 80 bp, synthetic construct
  misc_feature 1..80: note = Artificially Synthesized Probe
  source 1..80: mol_type = other DNA
atggtcacattaattctcacagggattcagaatgttaggacaatctatgccaaggctgtgtcataaatcagtgcaggggt

SEQ ID NO: 31154 - DNA, 80 bp, synthetic construct
  misc_feature 1..80: note = Artificially Synthesized Probe
  source 1..80: mol_type = other DNA
gagtactaactagtcgaagttcacttgtgagcagattcctgggagatccctaaatcctattattcccaatggaaaaccca

SEQ ID NO: 31155 - DNA, 80 bp, synthetic construct
  misc_feature 1..80: note = Artificially Synthesized Probe
  source 1..80: mol_type = other DNA
ttacatgtttgaggtgctgataaatcattttctaaagtggctgccatgtcttacattcctaattaccagtgtatgggagt

SEQ ID NO: 31156 - DNA, 80 bp, synthetic construct
  misc_feature 1..80: note = Artificially Synthesized Probe
  source 1..80: mol_type = other DNA
ggatatttaaccctatctttttgtttgtttgtttttgagacagagtctcactctgtcacccaggctgcagtgcagtggca

SEQ ID NO: 31157 - DNA, 80 bp, synthetic construct
  misc_feature 1..80: note = Artificially Synthesized Probe
  source 1..80: mol_type = other DNA
ttcttcttgagtcagttttggtagttcgtgtctttctaggaatttgttcatatcatctacattatctaatttttggcata

SEQ ID NO: 31158 - DNA, 80 bp, synthetic construct
  misc_feature 1..80: note = Artificially Synthesized Probe
  source 1..80: mol_type = other DNA
tattaggcctgaacttaaaatggggaatggccaggtgaaattgggatgggctttcttattaaacttgaggggcagttagc

SEQ ID NO: 31159 - DNA, 80 bp, synthetic construct
  misc_feature 1..80: note = Artificially Synthesized Probe
  source 1..80: mol_type = other DNA
gctgtcagaagggttggtgattgcagggttatttttttctgagggtctctcgcttcagcttctctttattttttcacatg

SEQ ID NO: 31160 - DNA, 80 bp, synthetic construct
  misc_feature 1..80: note = Artificially Synthesized Probe
  source 1..80: mol_type = other DNA
aacatcctaagacatagagagtaactagaagctagtttaatgtctaaatccttattttataagactataacttgtagaaa

SEQ ID NO: 31161 - DNA, 80 bp, synthetic construct
  misc_feature 1..80: note = Artificially Synthesized Probe
  source 1..80: mol_type = other DNA
gcatgttattgcccataggtggttgcacactgggtttagtgtgtgcatgtaaagagctcatgcctgagctccttcatgca

SEQ ID NO: 31162 - DNA, 80 bp, synthetic construct
  misc_feature 1..80: note = Artificially Synthesized Probe
  source 1..80: mol_type = other DNA
aataaatgagataatgcatattcagtgctcagcctagaggaaacactcacccaagtgctgcctgttgttgttgtaagaga

SEQ ID NO: 31163 - DNA, 80 bp, synthetic construct
  misc_feature 1..80: note = Artificially Synthesized Probe
  source 1..80: mol_type = other DNA
catcattcttctcctcctgagaaataagcacctacttacgaatacagaaaccagcaatagttttgggacacaattcagag

SEQ ID NO: 31164 - DNA, 80 bp, synthetic construct
  misc_feature 1..80: note = Artificially Synthesized Probe
  source 1..80: mol_type = other DNA
tttttccttctccccaagtgacctctcaaatgcaatccaggacagtgtgggatatagctgtgtcacttgtcatttcacga

SEQ ID NO: 31165 - DNA, 80 bp, synthetic construct
  misc_feature 1..80: note = Artificially Synthesized Probe
  source 1..80: mol_type = other DNA
ggagatgtgtatgatattaactactacacgatccacatttctcatatgcaaaatagatgtaataaagcctaactttcaca

SEQ ID NO: 31166 - DNA, 80 bp, synthetic construct
  misc_feature 1..80: note = Artificially Synthesized Probe
  source 1..80: mol_type = other DNA
gtgcttacctcataacaatgtgcagatccagtgaaaactttcccaatatccagcaattcaaagttgaagtgaatcttagg

SEQ ID NO: 31167 - DNA, 80 bp, synthetic construct
  misc_feature 1..80: note = Artificially Synthesized Probe
  source 1..80: mol_type = other DNA
atatgaacaacttaagtcttttgagaagatagatcaaaaaccatgatgggtcacccccacttaggcagtttcccaaagag

SEQ ID NO: 31168 - DNA, 80 bp, synthetic construct
  misc_feature 1..80: note = Artificially Synthesized Probe
  source 1..80: mol_type = other DNA
aagtaattctaaatcagagaagggtgaccattgattgatgcttctcataaaatgagagccaacctggggctccaagggac

SEQ ID NO: 31169 - DNA, 80 bp, synthetic construct
  misc_feature 1..80: note = Artificially Synthesized Probe
  source 1..80: mol_type = other DNA
acaaaatctctctggctatacctaacaagcggttaaattcatccactgagtttttaatttgttattataacttcttagtt

SEQ ID NO: 31170 - DNA, 80 bp, synthetic construct
  misc_feature 1..80: note = Artificially Synthesized Probe
  source 1..80: mol_type = other DNA
ggatcttggccccatgttccagtagttctctcttgccttaaaaaacagactctaaaaaatattttgccttgctttcctag

SEQ ID NO: 31171 - DNA, 80 bp, synthetic construct
  misc_feature 1..80: note = Artificially Synthesized Probe
  source 1..80: mol_type = other DNA
cctggaaaagagggtcctctaaagatcaggtgttagttgtggcaatactctaaactatagataaaactttctttcttttt

SEQ ID NO: 31172 - DNA, 80 bp, synthetic construct
  misc_feature 1..80: note = Artificially Synthesized Probe
  source 1..80: mol_type = other DNA
ctcccaagatgatggcattaagacgtgaggcctttaggaggtgttatgatcatgagggtgtagcccttaagaatgggatt

SEQ ID NO: 31173 - DNA, 80 bp, synthetic construct
  misc_feature 1..80: note = Artificially Synthesized Probe
  source 1..80: mol_type = other DNA
ataaataaaataaaataaacaagagagtaagattcaggattagcaaacatttacgaaggtcaactgtatttctatatcca

SEQ ID NO: 31174 - DNA, 80 bp, synthetic construct
  misc_feature 1..80: note = Artificially Synthesized Probe
  source 1..80: mol_type = other DNA
atggaatgctggcaactttaaaagctggaaaaagtaaggaacaaatttttcccaggaatctccaaaaggaaccagccctg

SEQ ID NO: 31175 - DNA, 80 bp, synthetic construct
  misc_feature 1..80: note = Artificially Synthesized Probe
  source 1..80: mol_type = other DNA
ctaaaaagcagtatgaagaaaaccaaggaaatgattaactgactacacaaaattttaaatggatagttacctctctgcag

SEQ ID NO: 31176 - DNA, 80 bp, synthetic construct
  misc_feature 1..80: note = Artificially Synthesized Probe
  source 1..80: mol_type = other DNA
ttaaaatgttttagaaaaactggatagagtttctggatgggctgggaacctgactgtttctgagagttacaagaatggaa

SEQ ID NO: 31177 - DNA, 80 bp, synthetic construct
  misc_feature 1..80: note = Artificially Synthesized Probe
  source 1..80: mol_type = other DNA
caatttctacaaaaaaaccatcttggattttaattttgatttcaattaaatctatagatgaatttgggggagaaatggca

SEQ ID NO: 31178 - DNA, 80 bp, synthetic construct
  misc_feature 1..80: note = Artificially Synthesized Probe
  source 1..80: mol_type = other DNA
ttcaagccatctgaagaaacaatctagtaggaggaaaatcagtgattactacaaacatgtgagctggtatcctaagagtt

SEQ ID NO: 31179 - DNA, 80 bp, synthetic construct
  misc_feature 1..80: note = Artificially Synthesized Probe
  source 1..80: mol_type = other DNA
agcaaatggacaatgaggtttcatcttaattgggtctctgaaggaagtgggagcatctggaatcatttccaccatgctgc

SEQ ID NO: 31180 - DNA, 80 bp, synthetic construct
  misc_feature 1..80: note = Artificially Synthesized Probe
  source 1..80: mol_type = other DNA
tgaattctatgctttctcagggcaggaactatgcttttgtacctctttctactcatggtgcctagatatcaaaagctttc

SEQ ID NO: 31181 - DNA, 80 bp, synthetic construct
  misc_feature 1..80: note = Artificially Synthesized Probe
  source 1..80: mol_type = other DNA
gtaaagaaaagggaacacttatacactgttggtgggagtgtaaattagttcaaccattatggaaagcagtgtggtgattc

SEQ ID NO: 31182 - DNA, 80 bp, synthetic construct
  misc_feature 1..80: note = Artificially Synthesized Probe
  source 1..80: mol_type = other DNA
gtccatctttactgcctgggaatgactggttgagactttctcatatcacagacctctgacactgagaccaatccttctgc

SEQ ID NO: 31183 - DNA, 80 bp, synthetic construct
  misc_feature 1..80: note = Artificially Synthesized Probe
  source 1..80: mol_type = other DNA
gcattcattctggggacgtctggagaattctgcattcacatgcaagggagaggtcaaatcaaaacaggattcacttagtc

SEQ ID NO: 31184 - DNA, 80 bp, synthetic construct
  misc_feature 1..80: note = Artificially Synthesized Probe
  source 1..80: mol_type = other DNA
aatgaccatggaccagaaggcattggaaggaaccccatgaatgcatgaaagacaaacagctgaacattatgggcaattca

SEQ ID NO: 31185 - DNA, 80 bp, synthetic construct
  misc_feature 1..80: note = Artificially Synthesized Probe
  source 1..80: mol_type = other DNA
acacaataaaatttcttagagctgaagtgatgtgagtcatcagattcaaatggcccacagaaggctgaggaggatgaata

SEQ ID NO: 31186 - DNA, 80 bp, synthetic construct
  misc_feature 1..80: note = Artificially Synthesized Probe
  source 1..80: mol_type = other DNA
agtggttatcaataatgattatgtaaaaatggaatagctcacagaggttagagggagaaggctagtggactagtcgggga

SEQ ID NO: 31187 - DNA, 80 bp, synthetic construct
  misc_feature 1..80: note = Artificially Synthesized Probe
  source 1..80: mol_type = other DNA
taaatatctatcccatgcccaataatgtcctttatagcaaagggcccaatccaggatcacattctgcacccaattaccat

SEQ ID NO: 31188 - DNA, 80 bp, synthetic construct
  misc_feature 1..80: note = Artificially Synthesized Probe
  source 1..80: mol_type = other DNA
tattttgattcttgactcattccaaatgtggtcagtgggagtttctttgctgtcttctgtgtcatttcgacatgtgccta

SEQ ID NO: 31189 - DNA, 80 bp, synthetic construct
  misc_feature 1..80: note = Artificially Synthesized Probe
  source 1..80: mol_type = other DNA
aagcactttaaagtttgatctgttataggaagaagtgagaggggcatagcttggctccataattcccctaatcaatataa

SEQ ID NO: 31190 - DNA, 80 bp, synthetic construct
  misc_feature 1..80: note = Artificially Synthesized Probe
  source 1..80: mol_type = other DNA
cttccacagcttggccattgtgaataatgctgcaatgaacatgggggtgcagagctctcttcgagatcctgatttcattt

SEQ ID NO: 31191 - DNA, 80 bp, synthetic construct
  misc_feature 1..80: note = Artificially Synthesized Probe
  source 1..80: mol_type = other DNA
caatagcttggtcaaaccctgcttctactccagtgtggcatttctccctttaattggaactaccaaaaagtcataatcag

SEQ ID NO: 31192 - DNA, 80 bp, synthetic construct
  misc_feature 1..80: note = Artificially Synthesized Probe
  source 1..80: mol_type = other DNA
gtacattttaaaatgtcgtatacatcctagtttcctttagatctcacatccccagatcagcctgtgagaatgaaggctcc

SEQ ID NO: 31193 - DNA, 80 bp, synthetic construct
  misc_feature 1..80: note = Artificially Synthesized Probe
  source 1..80: mol_type = other DNA
gcagaagagggtaacacacttcagtttctcttagaacactcttggactgccatcatcaaagaggtctgattagcacaact

SEQ ID NO: 31194 - DNA, 80 bp, synthetic construct
  misc_feature 1..80: note = Artificially Synthesized Probe
  source 1..80: mol_type = other DNA
tttcctgctccaaatgagaggttgagtacataggattgaatctgtaagtgactatgaccttctttgttgaaaagaattgt

SEQ ID NO: 31195 - DNA, 80 bp, synthetic construct
  misc_feature 1..80: note = Artificially Synthesized Probe
  source 1..80: mol_type = other DNA
aaagatgagaaaatcaaggcaaaaagaagtatcttacccaaagccagaccaatagtttaagtagcagagctaagattctg

SEQ ID NO: 31196 - DNA, 80 bp, synthetic construct
  misc_feature 1..80: note = Artificially Synthesized Probe
  source 1..80: mol_type = other DNA
atagaagctataatccgtttcattacccacaactgctcgtctagatccttccagatcaataagagaaatcatggctctct

SEQ ID NO: 31197 - DNA, 80 bp, synthetic construct
  misc_feature 1..80: note = Artificially Synthesized Probe
  source 1..80: mol_type = other DNA
ccctgctcgctgatgtccgtcaatcagctaggagcagtttaggtaaatacctttaaattctcagacctttctttttggga

SEQ ID NO: 31198 - DNA, 80 bp, synthetic construct
  misc_feature 1..80: note = Artificially Synthesized Probe
  source 1..80: mol_type = other DNA
tatcaagtaaagatttttaaaaattcctcccagccctctgtactggactgtcttctgcctgtggtcactctgtgatatgg

SEQ ID NO: 31199 - DNA, 80 bp, synthetic construct
  misc_feature 1..80: note = Artificially Synthesized Probe
  source 1..80: mol_type = other DNA
gaacaatgcttccataaaatacttgatatgcagggaacacaaccaggactaaactaaccttttgttttctctgatgcatt

SEQ ID NO: 31200 - DNA, 80 bp, synthetic construct
  misc_feature 1..80: note = Artificially Synthesized Probe
  source 1..80: mol_type = other DNA
ctttggagaaacacaaatgaaattcctcacaatgtctcacctcaccatcaacagccagttgatcaaaaagcactttagtg

SEQ ID NO: 31201 - DNA, 80 bp, synthetic construct
  misc_feature 1..80: note = Artificially Synthesized Probe
  source 1..80: mol_type = other DNA
aaagggatctccacatacaatgggttagatcaagatgaggaccaaaaatgtaaataggtcaagaccagagacatggaaag

SEQ ID NO: 31202 - DNA, 80 bp, synthetic construct
  misc_feature 1..80: note = Artificially Synthesized Probe
  source 1..80: mol_type = other DNA
tggaagtgaatatttctgcctatttctggcatcacctcccccccgacaatacaaataaaattagtctcatttgcttaaaa

SEQ ID NO: 31203 - DNA, 80 bp, synthetic construct
  misc_feature 1..80: note = Artificially Synthesized Probe
  source 1..80: mol_type = other DNA
agccatggagctccttttccgtgttatatcctttaacaacaatttagaagtgcagatggaaggaaaatgagcctgcataa

SEQ ID NO: 31204 - DNA, 80 bp, synthetic construct
  misc_feature 1..80: note = Artificially Synthesized Probe
  source 1..80: mol_type = other DNA
acagagatagttttggctgtcccactagcatctagtgggtaaaagtaaggatgttttgcatgaaacatcctacaatgtat

SEQ ID NO: 31205 - DNA, 80 bp, synthetic construct
  misc_feature 1..80: note = Artificially Synthesized Probe
  source 1..80: mol_type = other DNA
gctcatcttcaaccaccttctttaagagatcctccctggattcctttcctattcaatactcattgctttactcctgagcc

SEQ ID NO: 31206 - DNA, 80 bp, synthetic construct
  misc_feature 1..80: note = Artificially Synthesized Probe
  source 1..80: mol_type = other DNA
ctgagtgggagcctaggatcactgaattcctgtcccagttccaactcctgtcagtattgtcaaataactctttttaaata

SEQ ID NO: 31207 - DNA, 80 bp, synthetic construct
  misc_feature 1..80: note = Artificially Synthesized Probe
  source 1..80: mol_type = other DNA
tctttggaggtttgaatcccctggtgctaaccaatatgcacactgcctcccaggaatccagggaatattagggaataata

SEQ ID NO: 31208 - DNA, 80 bp, synthetic construct
  misc_feature 1..80: note = Artificially Synthesized Probe
  source 1..80: mol_type = other DNA
agtgttttgccatctcgtcctgttgatagtcatggtttcttgcactcagaggtggttctcttttatagatgaggagacct

SEQ ID NO: 31209 - DNA, 80 bp, synthetic construct
  misc_feature 1..80: note = Artificially Synthesized Probe
  source 1..80: mol_type = other DNA
atctgcatattatagaataaatccatgctgaccactctgaggggctcctttgagaattgtaggagctcttgtacagagca

SEQ ID NO: 31210 - DNA, 80 bp, synthetic construct
  misc_feature 1..80: note = Artificially Synthesized Probe
  source 1..80: mol_type = other DNA
tcaccccattcgctaaagatctcgctgctgcttttcagggatgggcgggtctctgcccataagcaagctaccaaagaaca

SEQ ID NO: 31211 - DNA, 80 bp, synthetic construct
  misc_feature 1..80: note = Artificially Synthesized Probe
  source 1..80: mol_type = other DNA
agggcaaaggaagcagtactggatccttttccttgtgccttttaaaaccacagatatttctatgccataaagccagagga

SEQ ID NO: 31212 - DNA, 80 bp, synthetic construct
  misc_feature 1..80: note = Artificially Synthesized Probe
  source 1..80: mol_type = other DNA
tgaaaaaaattccacattgatgccaatccaaaatagattatttttaggaacgctttataaaagctgatcaacctggccgg

SEQ ID NO: 31213 - DNA, 80 bp, synthetic construct
  misc_feature 1..80: note = Artificially Synthesized Probe
  source 1..80: mol_type = other DNA
tacaaacacacttcaagatttattctaaaattacacacctaggctatctttttttcaagctgaagttaggcaaaatagca

SEQ ID NO: 31214 - DNA, 80 bp, synthetic construct
  misc_feature 1..80: note = Artificially Synthesized Probe
  source 1..80: mol_type = other DNA
ccccttcacctaactccaagtctgatttttagaggtaagaactgtcaatattttcatgcacatcctttccaaaaaaaagg

SEQ ID NO: 31215 - DNA, 80 bp, synthetic construct
  misc_feature 1..80: note = Artificially Synthesized Probe
  source 1..80: mol_type = other DNA
agaaacaaatggattgctgaagccatatgtaggaaatagaaaatcaataagatctttaaaaattttgaaaaaagccacac

SEQ ID NO: 31216 - DNA, 80 bp, synthetic construct
  misc_feature 1..80: note = Artificially Synthesized Probe
  source 1..80: mol_type = other DNA
ggttttctttgtacttgtaccaccacaggcttgctcagtgtttataaacctctggattaaggtcatgtatcatttctgga

SEQ ID NO: 31217 - DNA, 80 bp, synthetic construct
  misc_feature 1..80: note = Artificially Synthesized Probe
  source 1..80: mol_type = other DNA
tgcatgaagagacagatcagtggaatagaatgaagtcaaaacagacccaaatgcacactggaatttagtatattataaag

SEQ ID NO: 31218 - DNA, 80 bp, synthetic construct
  misc_feature 1..80: note = Artificially Synthesized Probe
  source 1..80: mol_type = other DNA
tggataagtaaatatgtaggaatagcattaaaatgcacccagtaaagctcctctgaggagcaagatatgggaattagatc

SEQ ID NO: 31219 - DNA, 80 bp, synthetic construct
  misc_feature 1..80: note = Artificially Synthesized Probe
  source 1..80: mol_type = other DNA
aagttgatggaaagtttttcatcacttggtgacaacagggtcaaattcactacggtagtgcattactgaaccgaacttct

SEQ ID NO: 31220 - DNA, 80 bp, synthetic construct
  misc_feature 1..80: note = Artificially Synthesized Probe
  source 1..80: mol_type = other DNA
acaccatcacacctttggggaaaaaggttacttgccaactgctgactcctaaagtatctcctcttcagtaagagacataa

SEQ ID NO: 31221 - DNA, 80 bp, synthetic construct
  misc_feature 1..80: note = Artificially Synthesized Probe
  source 1..80: mol_type = other DNA
aagaaatctcctaacttcatttaatcaagaatatattcagcggagggccagaaacggaaggaacaaatgccactgttagg

SEQ ID NO: 31222 - DNA, 80 bp, synthetic construct
  misc_feature 1..80: note = Artificially Synthesized Probe
  source 1..80: mol_type = other DNA
aaagtaaaattgatatccagggaggctggcaaaatgcagccgcatttcaaaggcagcacatcaagagagcacaaatgcac

SEQ ID NO: 31223 - DNA, 80 bp, synthetic construct
  misc_feature 1..80: note = Artificially Synthesized Probe
  source 1..80: mol_type = other DNA
cggatttaataatcagcctcattggtgatgcttccaaatgtcatactttaaatgtgaggaaggttgaaagtgaaaggata

SEQ ID NO: 31224 - DNA, 80 bp, synthetic construct
  misc_feature 1..80: note = Artificially Synthesized Probe
  source 1..80: mol_type = other DNA
aaaactgataaacccctaacaatatagttcaagaaaaaaaaaagaggaggatacaaattaccaataagaaaagaggagat

SEQ ID NO: 31225 - DNA, 80 bp, synthetic construct
  misc_feature 1..80: note = Artificially Synthesized Probe
  source 1..80: mol_type = other DNA
aagctcaatatacaaaacttaactgtagtttaataaagccacataaatttagaaaataagcttgggaaaaaataccacac

SEQ ID NO: 31226 - DNA, 80 bp, synthetic construct
  misc_feature 1..80: note = Artificially Synthesized Probe
  source 1..80: mol_type = other DNA
acacgatgtgtacaagaatggttattttattttttattttttattttttatttttggagatggagtcttgctctgttgcc

SEQ ID NO: 31227 - DNA, 80 bp, synthetic construct
  misc_feature 1..80: note = Artificially Synthesized Probe
  source 1..80: mol_type = other DNA
taatagagtattccatattccagaacaagacggaaaacagcaaataatgcatatggggaaacaatgacacacggcctcta

SEQ ID NO: 31228 - DNA, 80 bp, synthetic construct
  misc_feature 1..80: note = Artificially Synthesized Probe
  source 1..80: mol_type = other DNA
tacacgtccacaaagccagcaactctgaactacactctagatgccttgtgctgctccttctctgggtgtaccttcaagtt

SEQ ID NO: 31229 - DNA, 80 bp, synthetic construct
  misc_feature 1..80: note = Artificially Synthesized Probe
  source 1..80: mol_type = other DNA
tgtggatcttagcttactcgaatgcagccaaaataaccatttcctattcagctttatcatatttcccatctgaccttttt

SEQ ID NO: 31230 - DNA, 80 bp, synthetic construct
  misc_feature 1..80: note = Artificially Synthesized Probe
  source 1..80: mol_type = other DNA
catggtttttaaaaccgcaaggagaggcctaagagaaggctgccttatggggagcaaggagacgtagccaagggagacag

SEQ ID NO: 31231 - DNA, 80 bp, synthetic construct
  misc_feature 1..80: note = Artificially Synthesized Probe
  source 1..80: mol_type = other DNA
gtttcagaaaatctaagctttctgctataaggatacagagtttatgtcaggggtagcactgggtggcatctgagagtatt

SEQ ID NO: 31232 - DNA, 80 bp, synthetic construct
  misc_feature 1..80: note = Artificially Synthesized Probe
  source 1..80: mol_type = other DNA
ccagtaggtttttgcattttcattacacacatacatctgtccaaatatcctatacacctgtcatgttccaaggcagtgct

SEQ ID NO: 31233 - DNA, 80 bp, synthetic construct
  misc_feature 1..80: note = Artificially Synthesized Probe
  source 1..80: mol_type = other DNA
aagttccacggagtggtaagggttactttgcctttgtgctaatcgttgggtttaggttacacaaacttcttcagtagtta

SEQ ID NO: 31234 - DNA, 80 bp, synthetic construct
  misc_feature 1..80: note = Artificially Synthesized Probe
  source 1..80: mol_type = other DNA
aagttattctgatacctactagagttttaggtcaaatttaacaataattgcttatgttctctgtacattttacagcccat

SEQ ID NO: 31235 - DNA, 80 bp, synthetic construct
  misc_feature 1..80: note = Artificially Synthesized Probe
  source 1..80: mol_type = other DNA
cgagattcataacagcggtaagctttttccacccctggactggaagcaaaaggagaggaggaagtgttatcagatcctgg

SEQ ID NO: 31236 - DNA, 80 bp, synthetic construct
  misc_feature 1..80: note = Artificially Synthesized Probe
  source 1..80: mol_type = other DNA
ttcatgggaagccagctgaacaacctgtttccttctcctccatcaaaatatgtgaggtttgccatgagacgacaaacaag

SEQ ID NO: 31237 - DNA, 80 bp, synthetic construct
  misc_feature 1..80: note = Artificially Synthesized Probe
  source 1..80: mol_type = other DNA
agccaggagaaataggatatcagacagaaatgtggatctacacgaaatagttcagagagagtgattcacctagagtactt

SEQ ID NO: 31238 - DNA, 80 bp, synthetic construct
  misc_feature 1..80: note = Artificially Synthesized Probe
  source 1..80: mol_type = other DNA
aaatccttctttcccatcttataagagaggtccttgagagatggggttgtttcatcattcttataccagcagtccccaac

SEQ ID NO: 31239 - DNA, 80 bp, synthetic construct
  misc_feature 1..80: note = Artificially Synthesized Probe
  source 1..80: mol_type = other DNA
aagcccttgttggttacactgggctcatccagtgaatccaggattatctcccaattttaacattagctgatcagcaaatt

SEQ ID NO: 31240 - DNA, 80 bp, synthetic construct
  misc_feature 1..80: note = Artificially Synthesized Probe
  source 1..80: mol_type = other DNA
aatgtttcgtaccagcagaatcttctgggtgctgtatttgacaggacaagtggaaaaattcagcttgtcaggaaaatcga

SEQ ID NO: 31241 - DNA, 80 bp, synthetic construct
  misc_feature 1..80: note = Artificially Synthesized Probe
  source 1..80: mol_type = other DNA
aggtggccgaagttatgctatgccagtttcaagctgagacctcaagaagctttgggtctacccagtcttgttcttggaac

SEQ ID NO: 31242 - DNA, 80 bp, synthetic construct
  misc_feature 1..80: note = Artificially Synthesized Probe
  source 1..80: mol_type = other DNA
acggtcctcctccagctcacatcaggatggaggagacaatgaacagatgaataaaggatatgtaatgtacagtgcaactc

SEQ ID NO: 31243 - DNA, 80 bp, synthetic construct
  misc_feature 1..80: note = Artificially Synthesized Probe
  source 1..80: mol_type = other DNA
aatggaactctccctctcctgccccatcactcccttaccttctgtccagctttagtcttgcccagagccatctagtatat

SEQ ID NO: 31244 - DNA, 80 bp, synthetic construct
  misc_feature 1..80: note = Artificially Synthesized Probe
  source 1..80: mol_type = other DNA
aaagtgatgagggctttgaagaaaataaagcacaggaaagtgataatatcggatggggttgatttaggttagaataacta

SEQ ID NO: 31245 - DNA, 80 bp, synthetic construct
  misc_feature 1..80: note = Artificially Synthesized Probe
  source 1..80: mol_type = other DNA
ggtggctcacacctgtagtctcagctactcagtaagctgaggcagagaactgcttgaacccgggagatggaggctgcagt

SEQ ID NO: 31246 - DNA, 80 bp, synthetic construct
  misc_feature 1..80: note = Artificially Synthesized Probe
  source 1..80: mol_type = other DNA
tcctcctctgttccctatctctgtaaatgacaccaccatttgaccagttgttagccaaaatcctacagttcaaactaggt

SEQ ID NO: 31247 - DNA, 80 bp, synthetic construct
  misc_feature 1..80: note = Artificially Synthesized Probe
  source 1..80: mol_type = other DNA
atatccaaaggaaatgaaatcagtatgtggaagagctacctgaacccccatgttcactgcagcattattcacgatagcca

SEQ ID NO: 31248 - DNA, 80 bp, synthetic construct
  misc_feature 1..80: note = Artificially Synthesized Probe
  source 1..80: mol_type = other DNA
ttttttaaattgtggttctcttaccaatgaggaaagagaaaatgaatgtcaaggggaggctactagcggtgatgcctcac

SEQ ID NO: 31249 - DNA, 80 bp, synthetic construct
  misc_feature 1..80: note = Artificially Synthesized Probe
  source 1..80: mol_type = other DNA
tttacagatgaaattacatgctgtatgggacttgcttcaaaatctactgggggaaggggcaggacagatgaagccagact

SEQ ID NO: 31250 - DNA, 80 bp, synthetic construct
  misc_feature 1..80: note = Artificially Synthesized Probe
  source 1..80: mol_type = other DNA
aaagcttgttctattctccattggatctggctcagaaaactgggcctggcactgagtaaatgaaataatattattcattt

SEQ ID NO: 31251 - DNA, 80 bp, synthetic construct
  misc_feature 1..80: note = Artificially Synthesized Probe
  source 1..80: mol_type = other DNA
agggaaatgtaaattgcattatcatcttcgacatgctaatatacatgggtactgaaaatccaattgaaagagggctggct

SEQ ID NO: 31252 - DNA, 80 bp, synthetic construct
  misc_feature 1..80: note = Artificially Synthesized Probe
  source 1..80: mol_type = other DNA
tgcaatgctggataagtggaacggtaagaaggaataaaagagctgagagtaagataagcagctacaaaacacagtgaagc

SEQ ID NO: 31253 - DNA, 80 bp, synthetic construct
  misc_feature 1..80: note = Artificially Synthesized Probe
  source 1..80: mol_type = other DNA
cagataagcatgcctgctattaacatgatacacagcctgcattttgttctgcatatttaagacttgttctctgtcctcac

SEQ ID NO: 31254 - DNA, 80 bp, synthetic construct
  misc_feature 1..80: note = Artificially Synthesized Probe
  source 1..80: mol_type = other DNA
caacactactaatagtaacaacaccagtaccaacatcaataacactaccactaccatctataccatcaccaccatcaatg

SEQ ID NO: 31255 - DNA, 80 bp, synthetic construct
  misc_feature 1..80: note = Artificially Synthesized Probe
  source 1..80: mol_type = other DNA
tattattattacaagtctttgttcattttaaaattaaatcatttaaaagtgactatcagccaggcgcagtggctcacccg

SEQ ID NO: 31256 - DNA, 80 bp, synthetic construct
  misc_feature 1..80: note = Artificially Synthesized Probe
  source 1..80: mol_type = other DNA
gtgaggaagcaaataaaaggtgaaagcatttctcggggccccaaatctctccccatggttctttatgaaactgtgaacta

SEQ ID NO: 31257 - DNA, 80 bp, synthetic construct
  misc_feature 1..80: note = Artificially Synthesized Probe
  source 1..80: mol_type = other DNA
attacttttcacactcaagtatgcttcatgctgaacttctgcattactttctttcattattgttaagtgtcaagaaactc

SEQ ID NO: 31258 - DNA, 80 bp, synthetic construct
  misc_feature 1..80: note = Artificially Synthesized Probe
  source 1..80: mol_type = other DNA
cacagggagtgtagttctgaaatataatttctgatggaaagggctggaataatgcctgatccaggtcaattcctgaaaac

SEQ ID NO: 31259 - DNA, 80 bp, synthetic construct
  misc_feature 1..80: note = Artificially Synthesized Probe
  source 1..80: mol_type = other DNA
gcacaacagaaccaaattggacttggacccctcatttcctgttctattttgattttaacaaagtacttgctttttattta

SEQ ID NO: 31260 - DNA, 80 bp, synthetic construct
  misc_feature 1..80: note = Artificially Synthesized Probe
  source 1..80: mol_type = other DNA
agacagatagatgaaagaaagagaaaaaaaatttgcaaactgaaactgaaactggcactatataaaaacgataacacatc

SEQ ID NO: 31261 - DNA, 80 bp, synthetic construct
  misc_feature 1..80: note = Artificially Synthesized Probe
  source 1..80: mol_type = other DNA
gccctaacctcatgaagttgacattcttgaagctcaagcgatcatacaaaaaatatagaaatacagaacataaagtcagg

SEQ ID NO: 31262 - DNA, 80 bp, synthetic construct
  misc_feature 1..80: note = Artificially Synthesized Probe
  source 1..80: mol_type = other DNA
caaagtgtttggtctaggaaaacatataagtgggggtatgaaaagcaggaagaaagagacaaagaggaaagatcaggctt

SEQ ID NO: 31263 - DNA, 80 bp, synthetic construct
  misc_feature 1..80: note = Artificially Synthesized Probe
  source 1..80: mol_type = other DNA
aaataataacaaacaatctttgggcacatgggctaaaagattaacttatgagggagaaatcaggctggcttccgacttct

SEQ ID NO: 31264 - DNA, 80 bp, synthetic construct
  misc_feature 1..80: note = Artificially Synthesized Probe
  source 1..80: mol_type = other DNA
agccagaatagacaacgaatgcctactttaattaacaattccaactccttcttttctagtgggcagctcagataaggaga

SEQ ID NO: 31265 - DNA, 80 bp, synthetic construct
  misc_feature 1..80: note = Artificially Synthesized Probe
  source 1..80: mol_type = other DNA
aggaagtgtgactacatcacttaggaatgagtttgaactttagagacatcacaagggtgcatttagacctcgctttgaaa

SEQ ID NO: 31266 - DNA, 80 bp, synthetic construct
  misc_feature 1..80: note = Artificially Synthesized Probe
  source 1..80: mol_type = other DNA
attaggttgaatcctatgaaattctgatatttgactgtttttgaactaaacaaatgacagtttgtcatggtgctacctaa

SEQ ID NO: 31267 - DNA, 80 bp, synthetic construct
  misc_feature 1..80: note = Artificially Synthesized Probe
  source 1..80: mol_type = other DNA
aatcgacccttcaaacagaataaatacaaggttacagggcttcacagctggacagagattcgaaatagcatgagataaga

SEQ ID NO: 31268 - DNA, 80 bp, synthetic construct
  misc_feature 1..80: note = Artificially Synthesized Probe
  source 1..80: mol_type = other DNA
tttttttaaatacttcttcccaagaagaggatttctatctttttccccccgccctaggtttttgctatgttgaccaggct

SEQ ID NO: 31269 - DNA, 80 bp, synthetic construct
  misc_feature 1..80: note = Artificially Synthesized Probe
  source 1..80: mol_type = other DNA
ggaatatgtatcaaacactacatcctagtaatagaaaatatgcctcctcaatagcaaatagaatggtgacaaaaatttgg

SEQ ID NO: 31270 - DNA, 80 bp, synthetic construct
  misc_feature 1..80: note = Artificially Synthesized Probe
  source 1..80: mol_type = other DNA
tcaatgagatatgctgtcaaaacacagagaagagccgagaaatcttatcatttatccagtagtcttgctgttggtcatga

SEQ ID NO: 31271 - DNA, 80 bp, synthetic construct
  misc_feature 1..80: note = Artificially Synthesized Probe
  source 1..80: mol_type = other DNA
ttaacactaaaagagtaaaacacaggcattatgtgcctcctgatgtgacgcagtacacagcaccacttatgtagtgttat

SEQ ID NO: 31272 - DNA, 80 bp, synthetic construct
  misc_feature 1..80: note = Artificially Synthesized Probe
  source 1..80: mol_type = other DNA
cccaagtgtaggcatcacctatgacttctctttcctcaaattaaccatataacacatacttgtggactacttactatgtg

SEQ ID NO: 31273 - DNA, 80 bp, synthetic construct
  misc_feature 1..80: note = Artificially Synthesized Probe
  source 1..80: mol_type = other DNA
tttgtctttccagattcagctgtcacctctttcagaaagctgtgaatgactcccaaggctgccccttccttatgatctca

SEQ ID NO: 31274 - DNA, 80 bp, synthetic construct
  misc_feature 1..80: note = Artificially Synthesized Probe
  source 1..80: mol_type = other DNA
caaaattccttttctgtagggaattgagttctgttcacctctaggaactcataaggagctgagtctaaaagagttcaaat

SEQ ID NO: 31275 - DNA, 80 bp, synthetic construct
  misc_feature 1..80: note = Artificially Synthesized Probe
  source 1..80: mol_type = other DNA
ggcttggagtctctcatgagattgtagtcaaagatacagccaggtctacagtcatctgaagggttgactaaggttggaga

SEQ ID NO: 31276 - DNA, 80 bp, synthetic construct
  misc_feature 1..80: note = Artificially Synthesized Probe
  source 1..80: mol_type = other DNA
cttctgctacagtgagggcaagggctactatactctggaatgttgataaatattatttttacccccaaacaccattttca

SEQ ID NO: 31277 - DNA, 80 bp, synthetic construct
  misc_feature 1..80: note = Artificially Synthesized Probe
  source 1..80: mol_type = other DNA
caatgggctgtgtaaagttcattgccatccccaatatgagtgagcagcatccaattaactgagtgcctcaatagaacaaa

SEQ ID NO: 31278 - DNA, 80 bp, synthetic construct
  misc_feature 1..80: note = Artificially Synthesized Probe
  source 1..80: mol_type = other DNA
gaaatccaacagaattttgaccttgactctgcatatctgccaacattcaggcttggttcacatctctaagtgaaaagcat

SEQ ID NO: 31279 - DNA, 80 bp, synthetic construct
  misc_feature 1..80: note = Artificially Synthesized Probe
  source 1..80: mol_type = other DNA
ttgaggttgtttcctattattctatgatgctatgaacatttttgcaaatgtctttccatgcacaaaggtaatcagagtct

SEQ ID NO: 31280 - DNA, 80 bp, synthetic construct
  misc_feature 1..80: note = Artificially Synthesized Probe
  source 1..80: mol_type = other DNA
ttgccatccaaacttgcaagcacttgttattgacaatcttaattttagctatctggtggatgtgtcatgatagctcattg

SEQ ID NO: 31281 - DNA, 80 bp, synthetic construct
  misc_feature 1..80: note = Artificially Synthesized Probe
  source 1..80: mol_type = other DNA
aataatctgccccttgtttagcaaatcatcaaagaaataacccataaaaatgggcaaccagcagccctcggggctgctct

SEQ ID NO: 31282 - DNA, 80 bp, synthetic construct
  misc_feature 1..80: note = Artificially Synthesized Probe
  source 1..80: mol_type = other DNA
tctaagtccattaacccaattggtacactctctccctcctctgtctgggctctccctgtttcctttgatcaaactgttta

SEQ ID NO: 31283 - DNA, 80 bp, synthetic construct
  misc_feature 1..80: note = Artificially Synthesized Probe
  source 1..80: mol_type = other DNA
ctaaaatataataacttctatcttatatgcctttgattctgtcaacaccagagtctgaaagactggtaggatttcaggag

SEQ ID NO: 31284 - DNA, 80 bp, synthetic construct
  misc_feature 1..80: note = Artificially Synthesized Probe
  source 1..80: mol_type = other DNA
tttgggaaagagaagttatttctttgggcttgctgggccaaaaatgaatttaaaggtattggtagcctcatcacatggag

SEQ ID NO: 31285 - DNA, 80 bp, synthetic construct
  misc_feature 1..80: note = Artificially Synthesized Probe
  source 1..80: mol_type = other DNA
ttatgaatctcacatttgaatatgaccagcacataccaatgtctttgcagaggctcatatgggtccaaagaattccagtc

SEQ ID NO: 31286 - DNA, 80 bp, synthetic construct
  misc_feature 1..80: note = Artificially Synthesized Probe
  source 1..80: mol_type = other DNA
gaggaaattcttagtgtgctgctttcacagggtttggccagatcaattcccattaacagcatgaaaaatatctgtttcca

SEQ ID NO: 31287 - DNA, 80 bp, synthetic construct
  misc_feature 1..80: note = Artificially Synthesized Probe
  source 1..80: mol_type = other DNA
taccctgccattgatagccagctatgcaacacttgctggagcctccagctcagtggtttcatttttgcgtgaactcagct

SEQ ID NO: 31288 - DNA, 80 bp, synthetic construct
  misc_feature 1..80: note = Artificially Synthesized Probe
  source 1..80: mol_type = other DNA
ctaagacccagaagactagaatcgaagccagtcaatcaaacttgccttataccataatcaaacattcaaaggcatcaaag

SEQ ID NO: 31289 - DNA, 80 bp, synthetic construct
  misc_feature 1..80: note = Artificially Synthesized Probe
  source 1..80: mol_type = other DNA
taccagccattacaataacactcttagctacacaaaccagtgagactataaagcaaccacacaaacaagtcttcataata

SEQ ID NO: 31290 - DNA, 80 bp, synthetic construct
  misc_feature 1..80: note = Artificially Synthesized Probe
  source 1..80: mol_type = other DNA
ataaaacaatcctcagcaaacacacaaaaaaacgaaatcatactgaccacattctcagacaacagcacaatataaataga

SEQ ID NO: 31291 - DNA, 80 bp, synthetic construct
  misc_feature 1..80: note = Artificially Synthesized Probe
  source 1..80: mol_type = other DNA
agatgaaaaatcctcagcaaaatactagcaaactgaatccagtagcacatcaaaaaactaatccaccaccatctagtagg

SEQ ID NO: 31292 - DNA, 80 bp, synthetic construct
  misc_feature 1..80: note = Artificially Synthesized Probe
  source 1..80: mol_type = other DNA
atacttctggtgggagagtaaattagctcaaccattctagaaatcagtgtggcaattcctcaaagaactgaaaagagaac

SEQ ID NO: 31293 - DNA, 80 bp, synthetic construct
  misc_feature 1..80: note = Artificially Synthesized Probe
  source 1..80: mol_type = other DNA
agaaatattacacacacacacagagagatagaagtcaatgatcagagcctgcaaaagatgggaagtatgaggaaccttct

SEQ ID NO: 31294 - DNA, 80 bp, synthetic construct
  misc_feature 1..80: note = Artificially Synthesized Probe
  source 1..80: mol_type = other DNA
atttgtaggctgtgataacagtattgtggttatgcaagagaatgttcttggtcttaggagataccagctaatgtatataa

SEQ ID NO: 31295 - DNA, 80 bp, synthetic construct
  misc_feature 1..80: note = Artificially Synthesized Probe
  source 1..80: mol_type = other DNA
agaaaaatctaaaggatgcaattcaggcaaaacgaaagtgatcccaaatggaaaaatctaagaggcaagaagaaatggcg

SEQ ID NO: 31296 - DNA, 80 bp, synthetic construct
  misc_feature 1..80: note = Artificially Synthesized Probe
  source 1..80: mol_type = other DNA
attaatacccattatcaccattccaatcaacagaaatttaaggtcctatctaatgctggaagacaaaaaagactcaagga

SEQ ID NO: 31297 - DNA, 80 bp, synthetic construct
  misc_feature 1..80: note = Artificially Synthesized Probe
  source 1..80: mol_type = other DNA
ctgaaagcaaggaaactatcacagactgtacaatcaattcatcaatcaaataacatagaggccaacttgcagggttctcc

SEQ ID NO: 31298 - DNA, 80 bp, synthetic construct
  misc_feature 1..80: note = Artificially Synthesized Probe
  source 1..80: mol_type = other DNA
ctacacatgtactagataggcaaaatctgagtctgataattctgaatattggctcctctgtgttgtaatgggaaatgcca

SEQ ID NO: 31299 - DNA, 80 bp, synthetic construct
  misc_feature 1..80: note = Artificially Synthesized Probe
  source 1..80: mol_type = other DNA
taccctagagattctgattcagtcaatctatagtcggtcctggacatcggtattttcaaataggtcgcctaagtttggga

SEQ ID NO: 31300 - DNA, 80 bp, synthetic construct
  misc_feature 1..80: note = Artificially Synthesized Probe
  source 1..80: mol_type = other DNA
agtatacttgggactatttatgctcatggcaaacaaaacacatttccaaggtttcatctgcgaacagatcacagccagct

SEQ ID NO: 31301 - DNA, 80 bp, synthetic construct
  misc_feature 1..80: note = Artificially Synthesized Probe
  source 1..80: mol_type = other DNA
tttcttctgaagaacccactgggttacgtgattctattcagtttaattgtatactggggaggaggaaaagctatttgcca

SEQ ID NO: 31302 - DNA, 80 bp, synthetic construct
  misc_feature 1..80: note = Artificially Synthesized Probe
  source 1..80: mol_type = other DNA
tatcaagcacagaacaatttttaaaagtccacttttcctccataccacctcaagggataaatatgaccctttaaaaaaat

SEQ ID NO: 31303 - DNA, 80 bp, synthetic construct
  misc_feature 1..80: note = Artificially Synthesized Probe
  source 1..80: mol_type = other DNA
taagtcactagtctgcatgtatatattcttcagctggcatttgctaaacctgaatttttccatctttgtcacacatgtat

SEQ ID NO: 31304 - DNA, 80 bp, synthetic construct
  misc_feature 1..80: note = Artificially Synthesized Probe
  source 1..80: mol_type = other DNA
tcacctgtgagctccaaaagcctcaaagtatgatttttactttaaaataagcctggacaggtagttccctgaggtaccta

SEQ ID NO: 31305 - DNA, 80 bp, synthetic construct
  misc_feature 1..80: note = Artificially Synthesized Probe
  source 1..80: mol_type = other DNA
ctattttctgtacatcactttcttttttcaatccacaaatcatcttctaccacatggctccactggagtctttctgagcc

SEQ ID NO: 31306 - DNA, 80 bp, synthetic construct
  misc_feature 1..80: note = Artificially Synthesized Probe
  source 1..80: mol_type = other DNA
acaattctaaaattcacatggaaccaaaaaagagctcacaaagctaaagcaatactaagcaaaaagaacaaatctagagg

SEQ ID NO: 31307 - DNA, 80 bp, synthetic construct
  misc_feature 1..80: note = Artificially Synthesized Probe
  source 1..80: mol_type = other DNA
tattctaagtgaagtaacccaggagtgaaaaaccaaataccatacgttctcccttataagtgggagctaagctatgagat

SEQ ID NO: 31308 - DNA, 80 bp, synthetic construct
  misc_feature 1..80: note = Artificially Synthesized Probe
  source 1..80: mol_type = other DNA
aagtggaacagcatgagagctctgaagttgaatgagaaagagtgtagggttctccgttccccactactttctttctgtgt

SEQ ID NO: 31309 - DNA, 80 bp, synthetic construct
  misc_feature 1..80: note = Artificially Synthesized Probe
  source 1..80: mol_type = other DNA
accaatgttgccaattcaattttgaaaaataagaacaaagtagaaggactcaaactaccagatttcaaaattcactgtaa

SEQ ID NO: 31310 - DNA, 80 bp, synthetic construct
  misc_feature 1..80: note = Artificially Synthesized Probe
  source 1..80: mol_type = other DNA
ctgttttctacattctttccctggtatttaaatctccaattttagtcagttagtgagacaatttgagactatctcccatc

SEQ ID NO: 31311 - DNA, 80 bp, synthetic construct
  misc_feature 1..80: note = Artificially Synthesized Probe
  source 1..80: mol_type = other DNA
aagaaatggggaaaggattccctatttaataaatggtgctaggaaaactggctagccatatgtagaaagctgaaactgga

SEQ ID NO: 31312 - DNA, 80 bp, synthetic construct
  misc_feature 1..80: note = Artificially Synthesized Probe
  source 1..80: mol_type = other DNA
tacatatgtaacaaacctgcacgttgtgcacatataccctagaacttaaaggagaataaaaatatatacatataaaaaaa

SEQ ID NO: 31313 - DNA, 80 bp, synthetic construct
  misc_feature 1..80: note = Artificially Synthesized Probe
  source 1..80: mol_type = other DNA
ctcttggaactgtacacctaaaagaggtgaattttaccattttccccggtaagacgggaaatgattcgtccaaggcctgg

SEQ ID NO: 31314 - DNA, 80 bp, synthetic construct
  misc_feature 1..80: note = Artificially Synthesized Probe
  source 1..80: mol_type = other DNA
ccttctgccttgacctcagcacaggctgttctccccaccatggggtgaagtcacctgtgagttcccttctcactttctgg

SEQ ID NO: 31315 - DNA, 80 bp, synthetic construct
  misc_feature 1..80: note = Artificially Synthesized Probe
  source 1..80: mol_type = other DNA
ctggagacttcccctgtgttgggggtctccacaccccaggccagcagctgcaggaccccactgtcccggttcagggctcc

SEQ ID NO: 31316 - DNA, 80 bp, synthetic construct
  misc_feature 1..80: note = Artificially Synthesized Probe
  source 1..80: mol_type = other DNA
atcctggctgacacggtgaaaccccgtctcccataaccctcactgtggtgcccaggcagctggattatcccattaccttc

SEQ ID NO: 31317 - DNA, 80 bp, synthetic construct
  misc_feature 1..80: note = Artificially Synthesized Probe
  source 1..80: mol_type = other DNA
gccggattatcccattaccttcagtgtggtgcccaggcagctggattatcccataaccctcactgtggtgcccaggcagc

SEQ ID NO: 31318 - DNA, 80 bp, synthetic construct
  misc_feature 1..80: note = Artificially Synthesized Probe
  source 1..80: mol_type = other DNA
tgatgccttaataacgtctttagtgctggttttttgggttttttttccagtggaactgttttacaaatctgagggccacc

SEQ ID NO: 31319 - DNA, 80 bp, synthetic construct
  misc_feature 1..80: note = Artificially Synthesized Probe
  source 1..80: mol_type = other DNA
cggctggctgcgctgatatttattgaatacaagacaagggggcagggtacggacggtgagtcgtccaagtaattgataag

SEQ ID NO: 31320 - DNA, 80 bp, synthetic construct
  misc_feature 1..80: note = Artificially Synthesized Probe
  source 1..80: mol_type = other DNA
aagtttctgtttcctgctgtttggaaattcgtgaattgtgtgaggtctgaggaggggggtaacacatttctgaacgtgaa

SEQ ID NO: 31321 - DNA, 80 bp, synthetic construct
  misc_feature 1..80: note = Artificially Synthesized Probe
  source 1..80: mol_type = other DNA
tgggcagggctctagggccccactggccaaaagcttcctgagattacagcagtttcctcttcctgcctcagtgccccacg

SEQ ID NO: 31322 - DNA, 80 bp, synthetic construct
  misc_feature 1..80: note = Artificially Synthesized Probe
  source 1..80: mol_type = other DNA
cttttgcttttttagaaacattggtactggaagatttagcattgggtgtgcagggcccaccctcttcgctcatgtcactg

SEQ ID NO: 31323 - DNA, 80 bp, synthetic construct
  misc_feature 1..80: note = Artificially Synthesized Probe
  source 1..80: mol_type = other DNA
gcaattcccagcctcagcctcccaagtagatgagattacaggcatgagccaccacgcccggctaattttgtacttttggt

SEQ ID NO: 31324 - DNA, 80 bp, synthetic construct
  misc_feature 1..80: note = Artificially Synthesized Probe
  source 1..80: mol_type = other DNA
gaggagaggtgagaaagagcaggtgaggggggaggtgaggggaacaggttgggggaggaggatagagaggaacaagtgaa

SEQ ID NO: 31325 - DNA, 80 bp, synthetic construct
  misc_feature 1..80: note = Artificially Synthesized Probe
  source 1..80: mol_type = other DNA
catgagatagcccactgcagggagggtggaggctagcccagtgaaggaagctgggagtgggaaagcatggtgacccttgg

SEQ ID NO: 31326 - DNA, 80 bp, synthetic construct
  misc_feature 1..80: note = Artificially Synthesized Probe
  source 1..80: mol_type = other DNA
cttctgtctttgacattcttagggcacttcagggagagacttggcagggcagaaagtggacaccatctgcttctccaagg

SEQ ID NO: 31327 - DNA, 80 bp, synthetic construct
  misc_feature 1..80: note = Artificially Synthesized Probe
  source 1..80: mol_type = other DNA
tgccaaaggttgaatgggcaagaccagaggcctctgttgccttcccagggaatgtggctgaggggttacaagcgagggcc

SEQ ID NO: 31328 - DNA, 80 bp, synthetic construct
  misc_feature 1..80: note = Artificially Synthesized Probe
  source 1..80: mol_type = other DNA
ttaaaagcccctcccctgggccaggtcctgggtcccatgggctggagggcttctctgtggcagggcttccccgagtgacc

SEQ ID NO: 31329 - DNA, 80 bp, synthetic construct
  misc_feature 1..80: note = Artificially Synthesized Probe
  source 1..80: mol_type = other DNA
ccttggcagacctaagatctcacaccagcgaggcctcctgcaccacacactctcacactcacaactcacactcacaccag

SEQ ID NO: 31330 - DNA, 80 bp, synthetic construct
  misc_feature 1..80: note = Artificially Synthesized Probe
  source 1..80: mol_type = other DNA
gggtaggtggagttgagggagatggggtaggtggagttgagggaactggagtggagagatggcctgagctggtcagcaca

SEQ ID NO: 31331 - DNA, 80 bp, synthetic construct
  misc_feature 1..80: note = Artificially Synthesized Probe
  source 1..80: mol_type = other DNA
tccctgcgggtcgagttccacccgagaatccagcagtgtgggcaggcagccaaggggtggtgctggcactgagactgttc

SEQ ID NO: 31332 - DNA, 80 bp, synthetic construct
  misc_feature 1..80: note = Artificially Synthesized Probe
  source 1..80: mol_type = other DNA
ctcaccactgcctgctctgaggcttggtgatagagagcagagccagggcaccaacagcatgtggacagcacagaagacag

SEQ ID NO: 31333 - DNA, 80 bp, synthetic construct
  misc_feature 1..80: note = Artificially Synthesized Probe
  source 1..80: mol_type = other DNA
gtgggagacagtgtcagggacaggtggggacagcatggcggacagtgtcagggataggagggaacaggaggaaacagtgg

SEQ ID NO: 31334 - DNA, 80 bp, synthetic construct
  misc_feature 1..80: note = Artificially Synthesized Probe
  source 1..80: mol_type = other DNA
gcatgggggacagcgtcagggacaggtggggacagcctgtgggacagtgtcagagacagtttgtgacagcatgggggaca

SEQ ID NO: 31335 - DNA, 80 bp, synthetic construct
  misc_feature 1..80: note = Artificially Synthesized Probe
  source 1..80: mol_type = other DNA
gctggagggagggccacgctggcaaatcccccaccctgccgagggcagcccctggctgagccccaccctaggcggcccag

SEQ ID NO: 31336 - DNA, 80 bp, synthetic construct
  misc_feature 1..80: note = Artificially Synthesized Probe
  source 1..80: mol_type = other DNA
tcgtggctcacgtccaccaccacgcatgtgacctcaggggtccgggagatcatgagggtgtccttgggttttggggggaa

SEQ ID NO: 31337 - DNA, 80 bp, synthetic construct
  misc_feature 1..80: note = Artificially Synthesized Probe
  source 1..80: mol_type = other DNA
agtccttgaccaggcagcccagggctgctgtgcccccagaggtgctcttggaggagggtgccagggggaagaccgatggg

SEQ ID NO: 31338 - DNA, 80 bp, synthetic construct; identical to SEQ ID NO: 31331
  misc_feature 1..80: note = Artificially Synthesized Probe
  source 1..80: mol_type = other DNA

SEQ ID NO: 31339 - DNA, 80 bp, synthetic construct
  misc_feature 1..80: note = Artificially Synthesized Probe
  source 1..80: mol_type = other DNA
ggagagtgttggggacaggtgaggacagcttggaggaaagtgttgggacaggtgggggcagcatgggcgacagtgacagg

SEQ ID NO: 31340 - DNA, 80 bp, synthetic construct
  misc_feature 1..80: note = Artificially Synthesized Probe
  source 1..80: mol_type = other DNA
tggggctcgtgggggcctgtgtccgaggagtgttcacgtgtgcgaggaccttgctctggtctgggtgctgtgcggttcgc

SEQ ID NO: 31341 - DNA, 80 bp, synthetic construct
  misc_feature 1..80: note = Artificially Synthesized Probe
  source 1..80: mol_type = other DNA
ctgtagaggaagaaggagccgtcggagtccagcatgggaggtgtggtcttgtagttgttctccggctgcccattgctctc

SEQ ID NO: 31342 - DNA, 80 bp, synthetic construct
  misc_feature 1..80: note = Artificially Synthesized Probe
  source 1..80: mol_type = other DNA
caagcacctgcccctgtgtgtgaagggcctggggtaggggcacccagcctgtgcctgcctggagcctggtggaaaaagcc

SEQ ID NO: 31343 - DNA, 80 bp, synthetic construct
  misc_feature 1..80: note = Artificially Synthesized Probe
  source 1..80: mol_type = other DNA
tggataaaatgtgcatatttatttcagggcaacaagcgtatacacagcaaagcagtgtggggtagagcccacctcgtggc

SEQ ID NO: 31344 - DNA, 80 bp, synthetic construct
  misc_feature 1..80: note = Artificially Synthesized Probe
  source 1..80: mol_type = other DNA
ttgggagacacctggagcccaggactccaaagggccaagagtgtggcggggactcggaggtggccccagttagagacagc

SEQ ID NO: 31345 - DNA, 80 bp, synthetic construct
  misc_feature 1..80: note = Artificially Synthesized Probe
  source 1..80: mol_type = other DNA
tcagtgttctctttgtgtgcctgtgcatgtttgtacatgtgtgtccacatatgtttgtgtgtgggtccatgtctgtgtat

SEQ ID NO: 31346 - DNA, 80 bp, synthetic construct
  misc_feature 1..80: note = Artificially Synthesized Probe
  source 1..80: mol_type = other DNA
ttcagtggcgagggcaggtctgtgtgggtcacggtgcacgtgaacctctccccggaattccagtcatcctcgcagatgct

SEQ ID NO: 31347 - DNA, 80 bp, synthetic construct
  misc_feature 1..80: note = Artificially Synthesized Probe
  source 1..80: mol_type = other DNA
cctcacctggaagaggcacgttcttttctttgttgccgttggggtgctggactttgcacaccacgtgttcgtctgtgccc

SEQ ID NO: 31348 - DNA, 80 bp, synthetic construct
  misc_feature 1..80: note = Artificially Synthesized Probe
  source 1..80: mol_type = other DNA
gttccatggtgaatcctcggtgctcagtgctgatcaccaagtggataggccttggaatccagggctaaggctcctctctc

SEQ ID NO: 31349 - DNA, 80 bp, synthetic construct
  misc_feature 1..80: note = Artificially Synthesized Probe
  source 1..80: mol_type = other DNA
cacagtaatacacagccgtgtcctcggctctcaggctgttcatttgcagatacagtgagttcttggcgttgtctctggag

SEQ ID NO: 31350 - DNA, 80 bp, synthetic construct
  misc_feature 1..80: note = Artificially Synthesized Probe
  source 1..80: mol_type = other DNA
tgcaaagattcactttatttattcattctcctccaacattagcataattaaagccaaggaggaggaggggggtgaggtga

SEQ ID NO: 31351 - DNA, 80 bp, synthetic construct
  misc_feature 1..80: note = Artificially Synthesized Probe
  source 1..80: mol_type = other DNA
atagaagttattcagcaggcacacaacagaggcagttccagatttcaactgctcatcagatggcgggaagatgaagacag

SEQ ID NO: 31352 - DNA, 80 bp, synthetic construct
  misc_feature 1..80: note = Artificially Synthesized Probe
  source 1..80: mol_type = other DNA
catactattgatcatattataggaagacttccctgaataaccaggcagtactgagcacactgggctgagtaaattcctag

SEQ ID NO: 31353 - DNA, 80 bp, synthetic construct
  misc_feature 1..80: note = Artificially Synthesized Probe
  source 1..80: mol_type = other DNA
aactattatactgttggcagtaataagttgcaaaatcatcaggctgcaggctgctgatggtgagagtgaattctgtccca

SEQ ID NO: 31354 - DNA, 80 bp, synthetic construct
  misc_feature 1..80: note = Artificially Synthesized Probe
  source 1..80: mol_type = other DNA
gagctccatttttttcttaatcctaaccttttttccccatcccaaattgcttatagagttagcacgacatcagtatgagc

SEQ ID NO: 31355 - DNA, 80 bp, synthetic construct
  misc_feature 1..80: note = Artificially Synthesized Probe
  source 1..80: mol_type = other DNA
ctttctctgatcctgctgggccaagggctcacctttggctttggtcatcttgggacagtgaatagggggactgggaagag

SEQ ID NO: 31356 - DNA, 80 bp, synthetic construct
  misc_feature 1..80: note = Artificially Synthesized Probe
  source 1..80: mol_type = other DNA
tcccagtattgcttgcgatactgcacggcaaaaaataagcagatccacatgaaagtgagaattcatttagaatgatgatg

SEQ ID NO: 31357 - DNA, 80 bp, synthetic construct
  misc_feature 1..80: note = Artificially Synthesized Probe
  source 1..80: mol_type = other DNA
cagtctctccctatttccctccacaactccccccacccccaccaccctttcctgcctctggtgaccactattctactttc

SEQ ID NO: 31358 - DNA, 80 bp, synthetic construct
  misc_feature 1..80: note = Artificially Synthesized Probe
  source 1..80: mol_type = other DNA
gattacaggcatgagccactgtgcctggcatttttttttttttaatttttaatttctttggagatagggtctcaatctgt

SEQ ID NO: 31359 - DNA, 80 bp, synthetic construct
  misc_feature 1..80: note = Artificially Synthesized Probe
  source 1..80: mol_type = other DNA
ctgaaattacaggtgtgagccactgcgctagccttgtttgtagtttctcaaggaacctccatactattttccataatggc

SEQ ID NO: 31360 - DNA, 80 bp, synthetic construct
  misc_feature 1..80: note = Artificially Synthesized Probe
  source 1..80: mol_type = other DNA
caagtagctgggattacaggcacctgccaccatgcctggctagtttttatatttttagtagacacggggtttcaccatgc

SEQ ID NO: 31361 - DNA, 80 bp, synthetic construct
  misc_feature 1..80: note = Artificially Synthesized Probe
  source 1..80: mol_type = other DNA
tagtcaactaattataaatgtaagctcctaagtatggtaaagtgtgagttgggagaaggacccagtgcactgagaccttc

SEQ ID NO: 31362 - DNA, 80 bp, synthetic construct
  misc_feature 1..80: note = Artificially Synthesized Probe
  source 1..80: mol_type = other DNA
tagggctgctttgggtgctgaggagaagtctttgatcattgtccaagttcagaagatgagcgtgtatgttctctgttggg

SEQ ID NO: 31363 - DNA, 80 bp, synthetic construct
  misc_feature 1..80: note = Artificially Synthesized Probe
  source 1..80: mol_type = other DNA
tgaaaaacacttctttggaggacaaaacacttataagtcttccttgttagacagagaaccccacattgagtgtttcccag

SEQ ID NO: 31364 - DNA, 80 bp, synthetic construct
  misc_feature 1..80: note = Artificially Synthesized Probe
  source 1..80: mol_type = other DNA
gcattcagaaatgcattaagtgagtctaaatccaagcaccgaactgcatggataacagtggctgccatttttccagggca

SEQ ID NO: 31365 - DNA, 80 bp, synthetic construct
  misc_feature 1..80: note = Artificially Synthesized Probe
  source 1..80: mol_type = other DNA
tggtctgaggatgtgctccccctctgccttttttacaccttatgacacacatgcttatatataagttttatgtttacatg

SEQ ID NO: 31366 - DNA, 80 bp, synthetic construct
  misc_feature 1..80: note = Artificially Synthesized Probe
  source 1..80: mol_type = other DNA
gggtttccacagaactaagctaagactcagtagattccaggaaaaataaagtaagccatccttcttaccttacatgtgtt

SEQ ID NO: 31367 - DNA, 80 bp, synthetic construct
  misc_feature 1..80: note = Artificially Synthesized Probe
  source 1..80: mol_type = other DNA
cttctgtgtattgaagttacgttgctgcagatttttcagtatcttggtttagtctcagtcattctaaggtaacgaaccat

SEQ ID NO: 31368 - DNA, 80 bp, synthetic construct
  misc_feature 1..80: note = Artificially Synthesized Probe
  source 1..80: mol_type = other DNA
accacagaactgggcaaaaatgtgtctgagcactgtggggaagtgaaacctgaaagcaaattcacgtcagcctgagaaca

SEQ ID NO: 31369 - DNA, 80 bp, synthetic construct
  misc_feature 1..80: note = Artificially Synthesized Probe
  source 1..80: mol_type = other DNA
cctgtctctaaaaagaaaaaatagcaacaggttttacaattgttgagagaggtcagctcttgttcagagagcgcctcaga

SEQ ID NO: 31370 - DNA, 80 bp, synthetic construct
  misc_feature 1..80: note = Artificially Synthesized Probe
  source 1..80: mol_type = other DNA
ccatttccacctttttttctgaagcttttggttcttggtgtcggtgttaaggattggtttattggtcagtgactcagtgg

SEQ ID NO: 31371 - DNA, 80 bp, synthetic construct
  misc_feature 1..80: note = Artificially Synthesized Probe
  source 1..80: mol_type = other DNA
tctttggcatgtgcactgaaggaattacctgttacaggagtatagcagagggtgagaccctcttgagctcggcagaccgt

SEQ ID NO: 31372 - DNA, 80 bp, synthetic construct
  misc_feature 1..80: note = Artificially Synthesized Probe
  source 1..80: mol_type = other DNA
ctgggtgcggtggctcacgtctgtaatcccagcacattgagagtgcgaggcgggcagatcacttgaggtcaggaattcaa

SEQ ID NO: 31373 - DNA, 80 bp, synthetic construct
  misc_feature 1..80: note = Artificially Synthesized Probe
  source 1..80: mol_type = other DNA
agaggaagagcagctaaagtccacactgggccttgtcaagggctgttcatcaatttcattgtattaaataagttaacaca

SEQ ID NO: 31374 - DNA, 80 bp, synthetic construct
  misc_feature 1..80: note = Artificially Synthesized Probe
  source 1..80: mol_type = other DNA
tgcccctgctggccatggagtactgccaaggaggagatctccggaaggtgaggctcccacggctgccaggtgcacagcct

SEQ ID NO: 31375 - DNA, 80 bp, synthetic construct
  misc_feature 1..80: note = Artificially Synthesized Probe
  source 1..80: mol_type = other DNA
cagctgcaggccacctctccatctctgaggctgaataaggccatataacattatgaaaactggaagctctgaacaaaata

SEQ ID NO: 31376 - DNA, 80 bp, synthetic construct
  misc_feature 1..80: note = Artificially Synthesized Probe
  source 1..80: mol_type = other DNA
atgaacacagcccttggcatcacccacaatgagagatgggggaactcaacagcacttcgattttctccttatttttctaa

SEQ ID NO: 31377 - DNA, 80 bp, synthetic construct
  misc_feature 1..80: note = Artificially Synthesized Probe
  source 1..80: mol_type = other DNA
ctaatctgtgcagagctcttccggcccctggcacgtagtaagtgctcagtaactgttctctactgttaccatcacccaca

SEQ ID NO: 31378 - DNA, 80 bp, synthetic construct
  misc_feature 1..80: note = Artificially Synthesized Probe
  source 1..80: mol_type = other DNA
atttttccgctcccacgtaggcagttctttgccaatgagaggcgtaggaaaaactgtcctttttaatcccttgggtactg

SEQ ID NO: 31379 - DNA, 80 bp, synthetic construct
  misc_feature 1..80: note = Artificially Synthesized Probe
  source 1..80: mol_type = other DNA
tagagcataatccatcagttagaaattccacttgttttcttgacaccctgacccaaggctcacccatccatgttttgctt

SEQ ID NO: 31380 - DNA, 80 bp, synthetic construct
  misc_feature 1..80: note = Artificially Synthesized Probe
  source 1..80: mol_type = other DNA
acaagtgcacataactctcagcttcctcatatggttgtttattctgcaggtgttttgctgctgatattcacagaacctct

SEQ ID NO: 31381 - DNA, 80 bp, synthetic construct
  misc_feature 1..80: note = Artificially Synthesized Probe
  source 1..80: mol_type = other DNA
aatgctctgttcctgcagaatgtgcagtcagcaagtgttagttccttgctcatttccttcccgctctggattttgatttt

SEQ ID NO: 31382 - DNA, 80 bp, synthetic construct
  misc_feature 1..80: note = Artificially Synthesized Probe
  source 1..80: mol_type = other DNA
atttttccactgaatttcaaattgcccaagaagaggctgcagagtgcctgtgagaaatgagcagatggccaggcgcggtg

SEQ ID NO: 31383 - DNA, 80 bp, synthetic construct
  misc_feature 1..80: note = Artificially Synthesized Probe
  source 1..80: mol_type = other DNA
gtggatcttctgactggttccattgcatgcatccatctgactgaagtgtggattatagcaaaagatcatttgcacataaa

SEQ ID NO: 31384 - DNA, 80 bp, synthetic construct
  misc_feature 1..80: note = Artificially Synthesized Probe
  source 1..80: mol_type = other DNA
tacccgccagcctccgtgcgtgattccaaacccacctgtcccttgctggccttgcacgcgttgccccttgtggaagctgt

SEQ ID NO: 31385 - DNA, 80 bp, synthetic construct
  misc_feature 1..80: note = Artificially Synthesized Probe
  source 1..80: mol_type = other DNA
tcactcagtgatgacttggattaccagccagttgacaaccaaccatctttgtacccttctaacctctatctcagcctttt

SEQ ID NO: 31386 - DNA, 80 bp, synthetic construct
  misc_feature 1..80: note = Artificially Synthesized Probe
  source 1..80: mol_type = other DNA
ttgcaatgtggtgcttctcacagctcttctctgtaatgggaacatgaaaaattacctggtacagttttatgctttgtggt

SEQ ID NO: 31387 - DNA, 80 bp, synthetic construct
  misc_feature 1..80: note = Artificially Synthesized Probe
  source 1..80: mol_type = other DNA
gccagccagtagttcatattcaacagcagtgccatccctgtctgcaaggctgtgttagtgcagctattttttatacttca

SEQ ID NO: 31388 - DNA, 80 bp, synthetic construct
  misc_feature 1..80: note = Artificially Synthesized Probe
  source 1..80: mol_type = other DNA
aatatagacccaagagttgcctgttctaatgtggcactaccataatttgttctaacatttcctaatgactgtctgtttct

SEQ ID NO: 31389 - DNA, 80 bp, synthetic construct
  misc_feature 1..80: note = Artificially Synthesized Probe
  source 1..80: mol_type = other DNA
tgctacatgtatcccatggtgttttggagtttttgttgctaatgtgaatgggattttttttcctttccactgcaactgga

SEQ ID NO: 31390 - DNA, 80 bp, synthetic construct
  misc_feature 1..80: note = Artificially Synthesized Probe
  source 1..80: mol_type = other DNA
tttatcttttgcaggataggagattctgtcatgaaaagcattttttaggcctaagaaaaactcacccccctcttcctcag

SEQ ID NO: 31391 - DNA, 80 bp, synthetic construct
  misc_feature 1..80: note = Artificially Synthesized Probe
  source 1..80: mol_type = other DNA
ggtgagcacaggctcagctgagtggaatacagtgaatgagttcttagatcacctaatcccttcccatacagctgccctta

SEQ ID NO: 31392 - DNA, 80 bp, synthetic construct
  misc_feature 1..80: note = Artificially Synthesized Probe
  source 1..80: mol_type = other DNA
agcttagggtttagcaggaaagcaagcattactgtgatgcttacacagataactaagaaattacagttgtggtgagtgtt

SEQ ID NO: 31393 - DNA, 80 bp, synthetic construct
  misc_feature 1..80: note = Artificially Synthesized Probe
  source 1..80: mol_type = other DNA
tgctctaaccaggagctgagtcaagtcatgtactcacatgagctaaaacgtctgcccataaccagacatagaggttgacc

SEQ ID NO: 31394 - DNA, 80 bp, synthetic construct
  misc_feature 1..80: note = Artificially Synthesized Probe
  source 1..80: mol_type = other DNA
acatagaaaggtcttagaaatggtagcatgatatacccgctaaacatgcctggggtgccctcctcgccctgcatgcatgt

SEQ ID NO: 31395 - DNA, 80 bp, synthetic construct
  misc_feature 1..80: note = Artificially Synthesized Probe
  source 1..80: mol_type = other DNA
agaaataatgcattgtgcaggatatgtttatataaaagttaattatcaccaccaaaaatggtatgtgaggtaatgtatat

SEQ ID NO: 31396 - DNA, 80 bp, synthetic construct
  misc_feature 1..80: note = Artificially Synthesized Probe
  source 1..80: mol_type = other DNA
atttgtaatgtctgttatttcactgaatggctgtgctgtggttcatttaacttatcccccgtggttggaaggacgttgat

SEQ ID NO: 31397 - DNA, 80 bp, synthetic construct
  misc_feature 1..80: note = Artificially Synthesized Probe
  source 1..80: mol_type = other DNA
ttgagaagtggcaaagtatgccccactatggtgacttattttaaaacaggcattgctcctttagctacataggttctgga

SEQ ID NO: 31398 - DNA, 80 bp, synthetic construct
  misc_feature 1..80: note = Artificially Synthesized Probe
  source 1..80: mol_type = other DNA
tggaggaccaggtggccagtttcaagtagatttctctgaaacccaataaggagctgttttgtggactatctagtttttaa

SEQ ID NO: 31399 - DNA, 80 bp, synthetic construct
  misc_feature 1..80: note = Artificially Synthesized Probe
  source 1..80: mol_type = other DNA
ggcgacagaaaaaaaaaatttttttaccttcagatactacttcacataccccaagaagttccctaagttgggaaatgtat

SEQ ID NO: 31400 - DNA, 80 bp, synthetic construct
  misc_feature 1..80: note = Artificially Synthesized Probe
  source 1..80: mol_type = other DNA
gaggtggacattgttgttagcgaagacttgaatggaacggtgaagttttcaagctctttaccctaccccaataatcttaa

SEQ ID NO: 31401 - DNA, 80 bp, synthetic construct
  misc_feature 1..80: note = Artificially Synthesized Probe
  source 1..80: mol_type = other DNA
atggattagtgctatatggaatgacgtgggataagctagaactttttggaagggtctagacagatgtacaggacatggat

SEQ ID NO: 31402 - DNA, 80 bp, synthetic construct
  misc_feature 1..80: note = Artificially Synthesized Probe
  source 1..80: mol_type = other DNA
atttggaggtcagcaatctctgatttgggggtattttagaattcaggagagaggtgtgaacacctgaataattgattgga

SEQ ID NO: 31403 - DNA, 80 bp, synthetic construct
  misc_feature 1..80: note = Artificially Synthesized Probe
  source 1..80: mol_type = other DNA
cttccaaaccctccaagaccggtctcttgcctttattgcaaaaaatgatgctataacactcgaatctctcaagttgcctg

SEQ ID NO: 31404 - DNA, 80 bp, synthetic construct
  misc_feature 1..80: note = Artificially Synthesized Probe
  source 1..80: mol_type = other DNA
gttttgtttttctaaataatccgttataatatgtgggacaaggcagggaagggagactggactaaggaagggggagccac

SEQ ID NO: 31405 - DNA, 80 bp, synthetic construct
  misc_feature 1..80: note = Artificially Synthesized Probe
  source 1..80: mol_type = other DNA
agccgccatgtagcgtgccaggctttttttttaaacttaatttatttaaaattccttggtggctttggccacagggaggt

SEQ ID NO: 31406 - DNA, 80 bp, synthetic construct
  misc_feature 1..80: note = Artificially Synthesized Probe
  source 1..80: mol_type = other DNA
ttgttttgttttgtttttccttctcaattttttttcagcatcagataaactgctgctggcctggagggaaatggagcagg

SEQ ID NO: 31407 - DNA, 80 bp, synthetic construct
  misc_feature 1..80: note = Artificially Synthesized Probe
  source 1..80: mol_type = other DNA
gttgacattagcacagcttttccattaggagaacgaagtgaaactcctggtagaacggatgatggctctgcagaccgaca

SEQ ID NO: 31408 - DNA, 80 bp, synthetic construct
  misc_feature 1..80: note = Artificially Synthesized Probe
  source 1..80: mol_type = other DNA
gcatgccaccatgctcagctaatttaaaaaaaaaatgtttttggctgggcacagtggatcacatctgtaatcccagcacc

SEQ ID NO: 31409 - DNA, 80 bp, synthetic construct
  misc_feature 1..80: note = Artificially Synthesized Probe
  source 1..80: mol_type = other DNA
agcccaaatgccattagtttgccatgtttattctttgcagtaaaactgtggtttgcaagcagaaggcgctggaactgttg

SEQ ID NO: 31410 - DNA, 80 bp, synthetic construct
  misc_feature 1..80: note = Artificially Synthesized Probe
  source 1..80: mol_type = other DNA
tgagtcccacccaagtagtccagggtgatgtcatctcaggttctctaaagacgctttctccaagtacggtcacactcaca

SEQ ID NO: 31411 - DNA, 80 bp, synthetic construct
  misc_feature 1..80: note = Artificially Synthesized Probe
  source 1..80: mol_type = other DNA
agcaacaagaaggttcacaaggagctgttccagctgaagagtgaggatgttccaggacagagacactgctttatcaaagg

SEQ ID NO: 31412 - DNA, 80 bp, synthetic construct
  misc_feature 1..80: note = Artificially Synthesized Probe
  source 1..80: mol_type = other DNA
gtgtccttgtttcttctcagccaggtcatagaggatgcaagccacaggaattcccatagcctttgtgtgtgtgtctgtct

SEQ ID NO: 31413 - DNA, 80 bp, synthetic construct
  misc_feature 1..80: note = Artificially Synthesized Probe
  source 1..80: mol_type = other DNA
tggcgtgaatgcaaaatgtgattcatcacttggctcctaatttcttttgattttgtcccctagagcaaggtccgtggtcc

SEQ ID NO: 31414 - DNA, 80 bp, synthetic construct
  misc_feature 1..80: note = Artificially Synthesized Probe
  source 1..80: mol_type = other DNA
tttgttttgtttgacaccttctgtgtgcagggctctatgggttcctgcaggctaatctctaggcatgggaaacaccgatg

SEQ ID NO: 31415 - DNA, 80 bp, synthetic construct
  misc_feature 1..80: note = Artificially Synthesized Probe
  source 1..80: mol_type = other DNA
caggcctggctaattttgtatttttttttttttttgagacggagtctcgctctgttgcccaggccggactgcggactgca

SEQ ID NO: 31416 - DNA, 80 bp, synthetic construct
  misc_feature 1..80: note = Artificially Synthesized Probe
  source 1..80: mol_type = other DNA
ttgcattttggacagtaacgctcatatgtggaaagtgcataacaagatgaatgaaagtattagtcagtgggttggtgttt

SEQ ID NO: 31417 - DNA, 80 bp, synthetic construct
  misc_feature 1..80: note = Artificially Synthesized Probe
  source 1..80: mol_type = other DNA
atgcattatcttatttaatccttggaacacttaattccgatgatgaggaagaaggtagcattgttcccagaagcctgtcc

SEQ ID NO: 31418 - DNA, 80 bp, synthetic construct
  misc_feature 1..80: note = Artificially Synthesized Probe
  source 1..80: mol_type = other DNA
tgagccaccatacccagccaataaaggggtttcaatatatttctttttattttttattttttgagatggagtcttgctct

SEQ ID NO: 31419 - DNA, 80 bp, synthetic construct
  misc_feature 1..80: note = Artificially Synthesized Probe
  source 1..80: mol_type = other DNA
gtggtcctttctgccaagagcgactcatagtaaccaggatgggagagcagctgccttattctgaatcccaaaaattactt

SEQ ID NO: 31420 - DNA, 80 bp, synthetic construct
  misc_feature 1..80: note = Artificially Synthesized Probe
  source 1..80: mol_type = other DNA
caatgtcatttggctatagaaacattttctcctgctgattgtgtgtgtgaaacatgtattaacattccaatgaactagca

SEQ ID NO: 31421 - DNA, 80 bp, synthetic construct
  misc_feature 1..80: note = Artificially Synthesized Probe
  source 1..80: mol_type = other DNA
attttactctgtctcccaggctggagttgaagtggcatgatcttggctcactgcaacctccgcctcccgggttcaagcga

SEQ ID NO: 31422 - DNA, 80 bp, synthetic construct
  misc_feature 1..80: note = Artificially Synthesized Probe
  source 1..80: mol_type = other DNA
ctcaggtccgcctctcttttctgaggacagtgagagagttcacttctgtcaagcgtctgttgctctgcactgtgccagca

SEQ ID NO: 31423 - DNA, 80 bp, synthetic construct
  misc_feature 1..80: note = Artificially Synthesized Probe
  source 1..80: mol_type = other DNA
gggggggacccacatagaaatgtcctgggtcctcttgagtttatttctttgtttgaagatgtttgttcaatgagttttat

SEQ ID NO: 31424 - DNA, 80 bp, synthetic construct
  misc_feature 1..80: note = Artificially Synthesized Probe
  source 1..80: mol_type = other DNA
aggcatggggcagtgtggaagagttttaacatcaaacagacctgaaatgagtattaaaggccccctttatttttaaactt

SEQ ID NO: 31425 - DNA, 80 bp, synthetic construct
  misc_feature 1..80: note = Artificially Synthesized Probe
  source 1..80: mol_type = other DNA
actgtagtgctgactgaacactcatgctggtgtcttcatgtggaccatggctttcttgtatttctttgcagtttaataaa

SEQ ID NO: 31426 - DNA, 80 bp, synthetic construct
  misc_feature 1..80: note = Artificially Synthesized Probe
  source 1..80: mol_type = other DNA
cctgtctgtgttttcctaagagaaaacggtcttccctccttttttgcatatttggcaagtggttccacctttctctgcac

SEQ ID NO: 31427 - DNA, 80 bp, synthetic construct
  misc_feature 1..80: note = Artificially Synthesized Probe
  source 1..80: mol_type = other DNA
tctttctttctataattggtggggggtttgcacagactgccaaaacactaagaactgtgtaaagtgtttttgaatggcct

SEQ ID NO: 31428 - DNA, 80 bp, synthetic construct
  misc_feature 1..80: note = Artificially Synthesized Probe
  source 1..80: mol_type = other DNA
tgatacccacgtttcgcatggaccttacgatgtgatgaatggttttggcatgagtgtcttaagaatgcttccagattcgg

SEQ ID NO: 31429 - DNA, 80 bp, synthetic construct
  misc_feature 1..80: note = Artificially Synthesized Probe
  source 1..80: mol_type = other DNA
cccctaatgtgtttactctagaacacatgttctttctgtatttatatgtagattttgtagatcttgtcttaccacctgct

SEQ ID NO: 31430 - DNA, 80 bp, synthetic construct
  misc_feature 1..80: note = Artificially Synthesized Probe
  source 1..80: mol_type = other DNA
agagggcctgtaaaagcttctatcaattttgactgtgtatgcttctaccatggcggctcaataaacagcagtattagttt

SEQ ID NO: 31431 - DNA, 80 bp, synthetic construct
  misc_feature 1..80: note = Artificially Synthesized Probe
  source 1..80: mol_type = other DNA
ttttattaaagaggtctgtgacctaaggcattttaaataaattacaggcttggtccctgtctcccccatgtatctactcc

SEQ ID NO: 31432 - DNA, 80 bp, synthetic construct
  misc_feature 1..80: note = Artificially Synthesized Probe
  source 1..80: mol_type = other DNA
tagaattactgtgtgctaccaacagacaggctaattttgagtgaccctcagtactttgtacagttaatttggcacgctgt

SEQ ID NO: 31433 - DNA, 80 bp, synthetic construct
  misc_feature 1..80: note = Artificially Synthesized Probe
  source 1..80: mol_type = other DNA
tatggatatgctaatagtttccaactgagactaggaaagtaagtcctacttgacactgtttggtcagaaagagggagaga

SEQ ID NO: 31434 - DNA, 80 bp, synthetic construct
  misc_feature 1..80: note = Artificially Synthesized Probe
  source 1..80: mol_type = other DNA
actcataagcccatgaagccccctgctgtcagaaacaatgtggttgaaattgtgtatgcacttggaagtgagatggattg

SEQ ID NO: 31435 - DNA, 80 bp, synthetic construct
  misc_feature 1..80: note = Artificially Synthesized Probe
  source 1..80: mol_type = other DNA
gataggccgcgctaaaatactatacacatcttcagaaaactagagaactaacttctaacttcctatattagtgtggcacg

SEQ ID NO: 31436 - DNA, 80 bp, synthetic construct
  misc_feature 1..80: note = Artificially Synthesized Probe
  source 1..80: mol_type = other DNA
agcataaatgagcagatttccttgaggtcaccttctgctggccatagctttcttatctgtggagctgccagctgtcatcc

SEQ ID NO: 31437 - DNA, 80 bp, synthetic construct
  misc_feature 1..80: note = Artificially Synthesized Probe
  source 1..80: mol_type = other DNA
tttgcctgagtgtttccttcacctgttacaaattatctcactttgagctgaacagaaagcctccaagatgaaattagttt

SEQ ID NO: 31438 - DNA, 80 bp, synthetic construct
  misc_feature 1..80: note = Artificially Synthesized Probe
  source 1..80: mol_type = other DNA
gagcgccctcgtgttttgaagtttctatgggattctacaagttggtgctcctgatgaagaccaggacctatgtgtggctg

SEQ ID NO: 31439 - DNA, 80 bp, synthetic construct
  misc_feature 1..80: note = Artificially Synthesized Probe
  source 1..80: mol_type = other DNA
atattttctatatgcttgcccataacgtttaggaaaattcttgggtgatatttattaacctggacttcctcttggaagac

SEQ ID NO: 31440 - DNA, 80 bp, synthetic construct
  misc_feature 1..80: note = Artificially Synthesized Probe
  source 1..80: mol_type = other DNA
aggaatagcccctcagtattccgatctcgtatcttagtaacgaaactaacaaaagcctgattctcctctggtagttttct

SEQ ID NO: 31441 - DNA, 80 bp, synthetic construct
  misc_feature 1..80: note = Artificially Synthesized Probe
  source 1..80: mol_type = other DNA
cgtgttatacctatgcattattttttggtttggtttctaaagaaagagtcagccggtgggaaagtgaaggatgtgggaac

SEQ ID NO: 31442 - DNA, 80 bp, synthetic construct
  misc_feature 1..80: note = Artificially Synthesized Probe
  source 1..80: mol_type = other DNA
gtgtttgcatgtcattgtacatgttcttaggaaaagtgtgggagcttgacgcaatatataccttatgtttctatgtgcat

SEQ ID NO: 31443 - DNA, 80 bp, synthetic construct
  misc_feature 1..80: note = Artificially Synthesized Probe
  source 1..80: mol_type = other DNA
tttactagatgcccctgtacataccaagactgattttttattctcccttctccccatgtggtttcttctgcatagagagt

SEQ ID NO: 31444 - DNA, 80 bp, synthetic construct
  misc_feature 1..80: note = Artificially Synthesized Probe
  source 1..80: mol_type = other DNA
acctcctgcgttctcctatttggagtttttccccatttatgaaagaggtgaaaacgctaagatatttagcaattattact

SEQ ID NO: 31445 - DNA, 80 bp, synthetic construct
  misc_feature 1..80: note = Artificially Synthesized Probe
  source 1..80: mol_type = other DNA
gcttcccaaggaaggttagattcctcagagtaggagtgattccccaatgctagaacctttggtcaaatataattctaatc

SEQ ID NO: 31446 - DNA, 80 bp, synthetic construct
  misc_feature 1..80: note = Artificially Synthesized Probe
  source 1..80: mol_type = other DNA
gcagtgtctgggattataggtgattgtatttcttcccttttgcacatctatgttctctcatttgtattgtgtggggagaa

SEQ ID NO: 31447 - DNA, 80 bp, synthetic construct
  misc_feature 1..80: note = Artificially Synthesized Probe
  source 1..80: mol_type = other DNA
ttgtagatcgtgaaaattacacacttacgtgttttggcaacagtgcttttcagtgtttggggttagaacaagccacatct

SEQ ID NO: 31448 - DNA, 80 bp, synthetic construct
  misc_feature 1..80: note = Artificially Synthesized Probe
  source 1..80: mol_type = other DNA
aatggcacaaacagataaagatggtggctaaagccatttggtgtagatgaatccagaaaacaagtacatttatgaattat

SEQ ID NO: 31449 - DNA, 80 bp, synthetic construct
  misc_feature 1..80: note = Artificially Synthesized Probe
  source 1..80: mol_type = other DNA
catagcccatgggtcctggccctgccctttatcatgtttgacatgattttcagtctacttttccttcaggatgtaattta

SEQ ID NO: 31450 - DNA, 80 bp, synthetic construct
  misc_feature 1..80: note = Artificially Synthesized Probe
  source 1..80: mol_type = other DNA
ctttcctcttttgaaggtggcaatagtaactgaacctgcatcacagaatggccttgagggttagatggaacatatataga

SEQ ID NO: 31451 - DNA, 80 bp, synthetic construct
  misc_feature 1..80: note = Artificially Synthesized Probe
  source 1..80: mol_type = other DNA
gagtcactcccagaataaacaaataatggtttcacacctcattgcttcattcagtgtggaaggaacattctaggtttgtg

SEQ ID NO: 31452 - DNA, 80 bp, synthetic construct
  misc_feature 1..80: note = Artificially Synthesized Probe
  source 1..80: mol_type = other DNA
gaggacacatgagtttgaatatagggagataaggtatatttctatatgccctggtacattccagaatgtgcttctctggc

SEQ ID NO: 31453 - DNA, 80 bp, synthetic construct
  misc_feature 1..80: note = Artificially Synthesized Probe
  source 1..80: mol_type = other DNA
gcctgcttatctaatcagcagctagaggaagttgtttttatctgcgaaatgcatctcttctgaaccgataaaccccattt

SEQ ID NO: 31454 - DNA, 80 bp, synthetic construct
  misc_feature 1..80: note = Artificially Synthesized Probe
  source 1..80: mol_type = other DNA
gtatgggatgtgtggtgtgcatatgtagtgtgtatatgtgtgtgagatgtgtagtgtgtgtgtggtctgtatatgtgtat

SEQ ID NO: 31455 - DNA, 80 bp, synthetic construct
  misc_feature 1..80: note = Artificially Synthesized Probe
  source 1..80: mol_type = other DNA
tgggatgtgtggtgtgtatgtgtggtgtgtatgtgtgtatgggatgtgtggtgtgtgtgtggtgtgtatgtgtgtatggg

SEQ ID NO: 31456 - DNA, 80 bp, synthetic construct
  misc_feature 1..80: note = Artificially Synthesized Probe
  source 1..80: mol_type = other DNA
caggcacgcatgtgctggtgaaggggcgtgcgtggggaccatgggtcacatctcggctgtccccttctttaggaaggggt

SEQ ID NO: 31457 - DNA, 80 bp, synthetic construct
  misc_feature 1..80: note = Artificially Synthesized Probe
  source 1..80: mol_type = other DNA
tttacagggtagtctttttaggagaatgtttaaatgtgattgaagtccagtaagtgggagctagcagaatagaaaggatt

SEQ ID NO: 31458 - DNA, 80 bp, synthetic construct
  misc_feature 1..80: note = Artificially Synthesized Probe
  source 1..80: mol_type = other DNA
cagaaaggttgaaaaatgccaaaccttgcattttcaaccatgcttgcagtgatgactatgtgtcttcaaaggtgcagatt

SEQ ID NO: 31459 - DNA, 80 bp, synthetic construct
  misc_feature 1..80: note = Artificially Synthesized Probe
  source 1..80: mol_type = other DNA
aaatcggtgaacgctgcaaatcaaggctttttctttttgagagctggtttatctgtgcaccactagcttaaatacacttt

SEQ ID NO: 31460 - DNA, 80 bp, synthetic construct
  misc_feature 1..80: note = Artificially Synthesized Probe
  source 1..80: mol_type = other DNA
ttcctgtgattaagttggtcttctgcaaagaaatttctgttgacttccttagattaaatgcagccctgagataggtgtgc

SEQ ID NO: 31461 - DNA, 80 bp, synthetic construct
  misc_feature 1..80: note = Artificially Synthesized Probe
  source 1..80: mol_type = other DNA
agagaatgctgtgatctaagtgaagtgactttcatcctgagatgacaatggagttgtttttgtcactgtaaaggctgcat

SEQ ID NO: 31462 - DNA, 80 bp, synthetic construct
  misc_feature 1..80: note = Artificially Synthesized Probe
  source 1..80: mol_type = other DNA
ttttactctttttgaactatgtgtttgaaaccccggatgtattttttttttatcttcaccacacatttcaatttgggttg

SEQ ID NO: 31463 - DNA, 80 bp, synthetic construct
  misc_feature 1..80: note = Artificially Synthesized Probe
  source 1..80: mol_type = other DNA
aaaggcacagattcgtcatggaagctttgattgggccgttactgtcttttgacctttcttgtttgcttgcccttttgttt

SEQ ID NO: 31464 - DNA, 80 bp, synthetic construct
  misc_feature 1..80: note = Artificially Synthesized Probe
  source 1..80: mol_type = other DNA
caatgttactgtctctagctatggtcatttcatgtctttaactgagtgtacctagagtgtaatacagtgcagcagtgatg

SEQ ID NO: 31465 - DNA, 80 bp, synthetic construct
  misc_feature 1..80: note = Artificially Synthesized Probe
  source 1..80: mol_type = other DNA
ataagctgttatactcccgttattttgtacctcatgtgcaggtagattgcaagttccttgcaggcaggtactacatctac

SEQ ID NO: 31466 - DNA, 80 bp, synthetic construct
  misc_feature 1..80: note = Artificially Synthesized Probe
  source 1..80: mol_type = other DNA
atgagacagatgcatgttaaatgtctgttgtggcccaggcactctgctaggcagaggggtgaaccagaagaatgagattc

SEQ ID NO: 31467 - DNA, 80 bp, synthetic construct
  misc_feature 1..80: note = Artificially Synthesized Probe
  source 1..80: mol_type = other DNA
tcagcatatgatgaaataaacaccatgatgcctttgccttgctttttcttgctggtctcactcttccctggcattcttca

SEQ ID NO: 31468 - DNA, 80 bp, synthetic construct
  misc_feature 1..80: note = Artificially Synthesized Probe
  source 1..80: mol_type = other DNA
tgccattgtctccccaggagccctccttgacttctactttactttatccattgacactagtcttataagtagctttgtct

SEQ ID NO: 31469 - DNA, 80 bp, synthetic construct
  misc_feature 1..80: note = Artificially Synthesized Probe
  source 1..80: mol_type = other DNA
aaaacacctccttaagatgctgcttccttattgctatgggaccaagattagagcaagaacatagtggttttcagaccctg

SEQ ID NO: 31470 - DNA, 80 bp, synthetic construct
  misc_feature 1..80: note = Artificially Synthesized Probe
  source 1..80: mol_type = other DNA
tgtattatgtacctataagaatgggtaggattttagaagagatggatggggaaaaggaacagggagtgggaacaaaacgt

SEQ ID NO: 31471 - DNA, 80 bp, synthetic construct
  misc_feature 1..80: note = Artificially Synthesized Probe
  source 1..80: mol_type = other DNA
gtttgattttcagagcccatctgggaatttagtgaactgaacaggtagcatttctgaacccacccataacccatgccctc

SEQ ID NO: 31472 - DNA, 80 bp, synthetic construct
  misc_feature 1..80: note = Artificially Synthesized Probe
  source 1..80: mol_type = other DNA
atatttcatttcatcatttcccagaaggggcactgaattcacccatttcctgtttttcatctcagaatgttctgtgtttc

SEQ ID NO: 31473 - DNA, 80 bp, synthetic construct
  misc_feature 1..80: note = Artificially Synthesized Probe
  source 1..80: mol_type = other DNA
aacctcacttctgaaaagtcattgtgcatagagagctaatagctgtaccctaaatgatcctggctttgaattctcttatc

SEQ ID NO: 31474 - DNA, 80 bp, synthetic construct
  misc_feature 1..80: note = Artificially Synthesized Probe
  source 1..80: mol_type = other DNA
cctgcttacccttgcttagatcttatggtagaatcttttcatagaagacacagaaagacatgaaagaaagagctggagaa

SEQ ID NO: 31475 - DNA, 80 bp, synthetic construct
  misc_feature 1..80: note = Artificially Synthesized Probe
  source 1..80: mol_type = other DNA
gctctcttttcagcgaatctctagatgtactagtcacaaacactcgcatttattaaaatgtatccatgatcccacaatcc

SEQ ID NO: 31476 - DNA, 80 bp, synthetic construct
  misc_feature 1..80: note = Artificially Synthesized Probe
  source 1..80: mol_type = other DNA
tactatgcttcagcgtcaaaaacgtcactttgggtaggaacaatacataatgcgtggcaatgccttttgtgacacctgtt

SEQ ID NO: 31477 - DNA, 80 bp, synthetic construct
  misc_feature 1..80: note = Artificially Synthesized Probe
  source 1..80: mol_type = other DNA
tgtttctcttggaaaataaggaagagggaaagcggtgcattcatttaaaaacctgccctagggaggcagcgttccctgtg

SEQ ID NO: 31478 - DNA, 80 bp, synthetic construct
  misc_feature 1..80: note = Artificially Synthesized Probe
  source 1..80: mol_type = other DNA
tttcctgcattcctatatttcattatttgctcttgttcctcttctagggcttttacaatatagccaggaggatgtggaaa

SEQ ID NO: 31479 - DNA, 80 bp, synthetic construct
  misc_feature 1..80: note = Artificially Synthesized Probe
  source 1..80: mol_type = other DNA
tgtggaatgcccaagttggagatggtcctccctgatgtgtagtgtgggctattcagagggcctcatttcataaactcatt

SEQ ID NO: 31480 - DNA, 80 bp, synthetic construct
  misc_feature 1..80: note = Artificially Synthesized Probe
  source 1..80: mol_type = other DNA
tggaggcagggtgctgcagccaatgctgatcactcacaagccaaggctttattgtaagggctaaataaaataacatatgc

SEQ ID NO: 31481 - DNA, 80 bp, synthetic construct
  misc_feature 1..80: note = Artificially Synthesized Probe
  source 1..80: mol_type = other DNA
actctctacctgtgagtcgattttactgagctgcctttttaaatatatgtgtagaaagggcgatctctgtgtgtcatttg

SEQ ID NO: 31482 - DNA, 80 bp, synthetic construct
  misc_feature 1..80: note = Artificially Synthesized Probe
  source 1..80: mol_type = other DNA
cagaagtgatatgtcctacacctcaagaacgtgtgaaatgcacatacaataaccccatttcaggaagccaagtccagctt

SEQ ID NO: 31483 - DNA, 80 bp, synthetic construct
  misc_feature 1..80: note = Artificially Synthesized Probe
  source 1..80: mol_type = other DNA
ttcttgattgcctgaatgtccctttcccttctccttttaaagcatgaaccaagctttcttaccccgttctcattatcatt

SEQ ID NO: 31484 - DNA, 80 bp, synthetic construct
  misc_feature 1..80: note = Artificially Synthesized Probe
  source 1..80: mol_type = other DNA
gtttttcctaatcttctgtcaagttctccaaatcatctgctctggaaggtagctccaacagctgggatttgaagtaaagc

SEQ ID NO: 31485 - DNA, 80 bp, synthetic construct
  misc_feature 1..80: note = Artificially Synthesized Probe
  source 1..80: mol_type = other DNA
ttctgcaaacttttgtgtgcctgttgggtggaaggtactatgctggggccatccaggatccggagcagtgtaagacatca

SEQ ID NO: 31486 - DNA, 80 bp, synthetic construct
  misc_feature 1..80: note = Artificially Synthesized Probe
  source 1..80: mol_type = other DNA
cagagtgacaacggcacaagaagtttataattttatgcacagctaaatgcaaactgaaaagtgtggtttgtgggtatttc

SEQ ID NO: 31487 - DNA, 80 bp, synthetic construct
  misc_feature 1..80: note = Artificially Synthesized Probe
  source 1..80: mol_type = other DNA
ggctcccaaaagatactgaactttggcatggaacagagtgagtttccacatttgctgttgtacataattacctgtccagc

SEQ ID NO: 31488 - DNA, 80 bp, synthetic construct
  misc_feature 1..80: note = Artificially Synthesized Probe
  source 1..80: mol_type = other DNA
ggagggtgggagaaggaagagtatcagaaaaaataacaggtagtagatttaataccggatgacaaaacaatctgtataac

SEQ ID NO: 31489 - DNA, 80 bp, synthetic construct
  misc_feature 1..80: note = Artificially Synthesized Probe
  source 1..80: mol_type = other DNA
tatataaagggttggagctcaatgaagacaacaagaacagcaaaggttattgtaaaactggctgcttgcaggccaacaag

SEQ ID NO: 31490 - DNA, 80 bp, synthetic construct
  misc_feature 1..80: note = Artificially Synthesized Probe
  source 1..80: mol_type = other DNA
tagaatgtttggggctgcaccctctaagatgttgaacccatcagtaattgctccaaaccactttatgggatataatgctg

SEQ ID NO: 31491 - DNA, 80 bp, synthetic construct
  misc_feature 1..80: note = Artificially Synthesized Probe
  source 1..80: mol_type = other DNA
ctgcttggtgcccgcaggaccttctctgatctgagctgttaaaccaaaaacagatgtgaatttcatttttcttttttaga

SEQ ID NO: 31492 - DNA, 80 bp, synthetic construct
  misc_feature 1..80: note = Artificially Synthesized Probe
  source 1..80: mol_type = other DNA
cttgaaaattaaaaacaacccctttcaccccctctactgtccttattccagtttgtgtccgtagttgctggaggaaagaa

SEQ ID NO: 31493 - DNA, 80 bp, synthetic construct
  misc_feature 1..80: note = Artificially Synthesized Probe
  source 1..80: mol_type = other DNA
attaaaaaatgtttaattatccatgagcacatacagtgcctggcacagattcaggcctcttggctcctcttggcatctga

SEQ ID NO: 31494 - DNA, 80 bp, synthetic construct
  misc_feature 1..80: note = Artificially Synthesized Probe
  source 1..80: mol_type = other DNA
caacctcctccttcattagtggaagtatcagctggtgtcattgccttcttcaggaggatggatttcaaaatgaagggcca

SEQ ID NO: 31495 - DNA, 80 bp, synthetic construct
  misc_feature 1..80: note = Artificially Synthesized Probe
  source 1..80: mol_type = other DNA
aagttgtccgaatagtgctagaagctttcagccctggaatgctcagcatctgccatctaacttccatttaaaacgttttg

SEQ ID NO: 31496 - DNA, 80 bp, synthetic construct
  misc_feature 1..80: note = Artificially Synthesized Probe
  source 1..80: mol_type = other DNA
gcatgccaaagaatcccagaaatactcattcttaatgatccagaagaacaagtgatagcttctggcaagttctaataggc

SEQ ID NO: 31497 - DNA, 80 bp, synthetic construct
  misc_feature 1..80: note = Artificially Synthesized Probe
  source 1..80: mol_type = other DNA
ggatatagaaggcagatttttcgtatccataggttctatagggccattttagggacttgcacatctacagaccttcagga

SEQ ID NO: 31498 - DNA, 80 bp, synthetic construct
  misc_feature 1..80: note = Artificially Synthesized Probe
  source 1..80: mol_type = other DNA
caacatgacaagacccatctctacaaaaaacaccaaaaaaaaatggctggatgtggtggtgcacacctgtagtcacaact

SEQ ID NO: 31499 - DNA, 80 bp, synthetic construct
  misc_feature 1..80: note = Artificially Synthesized Probe
  source 1..80: mol_type = other DNA
ccactcctgacgtgaacctgcttaaagtgagggcccaattctaaagtgggaactatgtaaatacctttctagtgcatttt

SEQ ID NO: 31500 - DNA, 80 bp, synthetic construct
  misc_feature 1..80: note = Artificially Synthesized Probe
  source 1..80: mol_type = other DNA
tgttgcaagcgattggttccaagtggtaccgagtcatagagtccttgttctggtacagccttgtaaaggacttctcaaca

SEQ ID NO: 31501 - DNA, 80 bp, synthetic construct
  misc_feature 1..80: note = Artificially Synthesized Probe
  source 1..80: mol_type = other DNA
cattgttaggtcatcataaagctagcgtctcccactgcaaaacccaagaggaaaaaaatagttgaaaatcctattttaaa

SEQ ID NO: 31502 - DNA, 80 bp, synthetic construct
  misc_feature 1..80: note = Artificially Synthesized Probe
  source 1..80: mol_type = other DNA
agcaatgaactcatgaattgttttcatcatgcatttccacttgcctaaatataaagggtcccaggtagatacagaaatac

SEQ ID NO: 31503 - DNA, 80 bp, synthetic construct
  misc_feature 1..80: note = Artificially Synthesized Probe
  source 1..80: mol_type = other DNA
cactttcttctgaaatgccctcaaattctatgacatagtatccatgaagacttccctttttacccagtgaagttactaga

SEQ ID NO: 31504 - DNA, 80 bp, synthetic construct
  misc_feature 1..80: note = Artificially Synthesized Probe
  source 1..80: mol_type = other DNA
tctacttttcctttttatccacttggagttaaatgcacacatttatgcacaagtgcacagaaggcccagaactgttccta

SEQ ID NO: 31505 - DNA, 80 bp, synthetic construct
  misc_feature 1..80: note = Artificially Synthesized Probe
  source 1..80: mol_type = other DNA
tcatcctcacgctctctgtctgtctctctcctgatttgtctgcttagggacagacaggtaatggagaagaaattgaaagg

SEQ ID NO: 31506 - DNA, 80 bp, synthetic construct
  misc_feature 1..80: note = Artificially Synthesized Probe
  source 1..80: mol_type = other DNA
gctggctaaccctgagtccctcccagctcgcagtcctgcatcgggtgtgagctgttgcttctttgacattgccccatccc

SEQ ID NO: 31507 - DNA, 80 bp, synthetic construct
  misc_feature 1..80: note = Artificially Synthesized Probe
  source 1..80: mol_type = other DNA
gttcaaatccactaaagtttggttagatcctctgcctcctgagaaatggtcctgggtgtttcattatccagcagtcccat

SEQ ID NO: 31508 - DNA, 80 bp, synthetic construct
  misc_feature 1..80: note = Artificially Synthesized Probe
  source 1..80: mol_type = other DNA
tgcacatggagaaggatccccacatgctcgccatcagaaaattgtcatgatttgggtgatttgacttcctaaaaacttcc

SEQ ID NO: 31509 - DNA, 80 bp, synthetic construct
  misc_feature 1..80: note = Artificially Synthesized Probe
  source 1..80: mol_type = other DNA
ctgcctcatggcttcctttggaagttgcaagcttagaatttctttcccaaagaatattggactatgcttcaagagacact

SEQ ID NO: 31510 - DNA, 80 bp, synthetic construct
  misc_feature 1..80: note = Artificially Synthesized Probe
  source 1..80: mol_type = other DNA
tggacagcactaatagagagcatttctatcatcataggaagttctgttgaacaaggctgatctggaagctacaccatcct

SEQ ID NO: 31511 - DNA, 80 bp, synthetic construct
  misc_feature 1..80: note = Artificially Synthesized Probe
  source 1..80: mol_type = other DNA
ggtacaattaaagaaacccttggccaccaacgtttttaaattcaggaatttcaccaagtccgtaacagttttagctctca

SEQ ID NO: 31512 - DNA, 80 bp, synthetic construct
  misc_feature 1..80: note = Artificially Synthesized Probe
  source 1..80: mol_type = other DNA
atggttcaaaagggaaaattcaccagagtaccctcagattattaatggcagatgagagcaggaaaaaagaatgttgagaa

SEQ ID NO: 31513 - DNA, 80 bp, synthetic construct
  misc_feature 1..80: note = Artificially Synthesized Probe
  source 1..80: mol_type = other DNA
tactgacaccatcaagctaattcttctctattggtctctatgtcagtaaggctacgtgccagtaatgtgtattaaatatt

SEQ ID NO: 31514 - DNA, 80 bp, synthetic construct
  misc_feature 1..80: note = Artificially Synthesized Probe
  source 1..80: mol_type = other DNA
ctgtgggtgtggcttggcagagaaggatggacatgtcaggaagcatattagcttaatagatgaagtgtgtgaccagtgta

SEQ ID NO: 31515 - DNA, 80 bp, synthetic construct
  misc_feature 1..80: note = Artificially Synthesized Probe
  source 1..80: mol_type = other DNA
tgaaatatccgaggcaggaggaagcataaggcaggaacggtattggaagaattgatcaggcatttaagataatcagttta

SEQ ID NO: 31516 - DNA, 80 bp, synthetic construct
  misc_feature 1..80: note = Artificially Synthesized Probe
  source 1..80: mol_type = other DNA
tcttaaaaataacaaacctcccatcagtttttcctagatttgattttgcagcatctggggcctgccctgtgatctgcctg

SEQ ID NO: 31517 - DNA, 80 bp, synthetic construct
  misc_feature 1..80: note = Artificially Synthesized Probe
  source 1..80: mol_type = other DNA
gcactttggaagaggaatagagtttcagcacattctaggtgttggaggaatgggggaatctaggcagatgtttaaaatca

SEQ ID NO: 31518 - DNA, 80 bp, synthetic construct
  misc_feature 1..80: note = Artificially Synthesized Probe
  source 1..80: mol_type = other DNA
ttttagcttttggagacttgaaaccaaaggagagattcatctgtgaaactctactggagccactccccaacccccaccct

SEQ ID NO: 31519 - DNA, 80 bp, synthetic construct
  misc_feature 1..80: note = Artificially Synthesized Probe
  source 1..80: mol_type = other DNA
tgtgatggtgctcccaacactagaaagcatcttaagaatgtaagattttcatgatgactgttgctcagagtggctattat

SEQ ID NO: 31520 - DNA, 80 bp, synthetic construct
  misc_feature 1..80: note = Artificially Synthesized Probe
  source 1..80: mol_type = other DNA
tttttgaggatgttggcctgttgcctttgtatttgatgagcattttgacagagtctatggtcttgggccactctttcttt

SEQ ID NO: 31521 - DNA, 80 bp, synthetic construct
  misc_feature 1..80: note = Artificially Synthesized Probe
  source 1..80: mol_type = other DNA
aggagtttggtgaggcaaagtgcagcctttgttaaaatacttttcctttgctctctctccctcatctgaaatttagttaa

SEQ ID NO: 31522 - DNA, 80 bp, synthetic construct
  misc_feature 1..80: note = Artificially Synthesized Probe
  source 1..80: mol_type = other DNA
taatcagagtatgtgccacttctgaccaccagtagatgaaaacgaatggaaaccaggctattatatgatacatatccatt

SEQ ID NO: 31523 - DNA, 80 bp, synthetic construct
  misc_feature 1..80: note = Artificially Synthesized Probe
  source 1..80: mol_type = other DNA
atgtaccactgctgaaaacagaacacagccgcagtcttgccagtaagagtgcagttactgtaattaatgaatttgctaat

SEQ ID NO: 31524 - DNA, 80 bp, synthetic construct
  misc_feature 1..80: note = Artificially Synthesized Probe
  source 1..80: mol_type = other DNA
gccagttgtaaattactgagaacactctactgaaaaagcatcatttcaaatacactatttaaaatattaaatgaaataca

SEQ ID NO: 31525 - DNA, 80 bp, synthetic construct
  misc_feature 1..80: note = Artificially Synthesized Probe
  source 1..80: mol_type = other DNA
agactggactggaccagacaatgttgtgtttggatttgtaactgttttttgttttttgtttgagttggttgattggggtt

SEQ ID NO: 31526 - DNA, 80 bp, synthetic construct
  misc_feature 1..80: note = Artificially Synthesized Probe
  source 1..80: mol_type = other DNA
ttccccgctttttcactcccatacctttaatggcccccaaaatctgtcactacaatttaaacaccagtcccgaaatttgg

SEQ ID NO: 31527 - DNA, 80 bp, synthetic construct
  misc_feature 1..80: note = Artificially Synthesized Probe
  source 1..80: mol_type = other DNA
tgtacataagtacctcagcatttaatccaaacaggggttcttagtctcagcactatgacattttgggctgactacttatt

SEQ ID NO: 31528 - DNA, 80 bp, synthetic construct
  misc_feature 1..80: note = Artificially Synthesized Probe
  source 1..80: mol_type = other DNA
tactactgtgtgcctagattccatgcactctcgttgtgtttgaagtaaatattggagaccggagggtaacaggttggcct

SEQ ID NO: 31529 - DNA, 80 bp, synthetic construct
  misc_feature 1..80: note = Artificially Synthesized Probe
  source 1..80: mol_type = other DNA
tattagacttatttaagatgtacaggcatcagaaaaaagaagcacataatgcttttggtgcgatggcactcactgtgaac

SEQ ID NO: 31530 - DNA, 80 bp, synthetic construct
  misc_feature 1..80: note = Artificially Synthesized Probe
  source 1..80: mol_type = other DNA
cagaccctgggcaacagagcgagaccctgaatctaaaaataataataatgataatggtaataataataaaaatatcaatt

SEQ ID NO: 31531 - DNA, 80 bp, synthetic construct
  misc_feature 1..80: note = Artificially Synthesized Probe
  source 1..80: mol_type = other DNA
acaataataaaatcactccctaccttgaaaactttacagaagcatttttaattttacaacacaaagctcaaacgaaccta

SEQ ID NO: 31532 - DNA, 80 bp, synthetic construct
  misc_feature 1..80: note = Artificially Synthesized Probe
  source 1..80: mol_type = other DNA
aggggaccatagatatttagaaacacaaaattgctaattgactatttcagttgatgttatatttatcaactgtacttcct

SEQ ID NO: 31533 - DNA, 80 bp, synthetic construct
  misc_feature 1..80: note = Artificially Synthesized Probe
  source 1..80: mol_type = other DNA
acaaacttggtctaggctttttctacagcctttcaggagtacctgaaactcacactagaaaaggattagccatttatcat

SEQ ID NO: 31534 - DNA, 80 bp, synthetic construct
  misc_feature 1..80: note = Artificially Synthesized Probe
  source 1..80: mol_type = other DNA
aaaattactgcaggtttgccctctcatagcacctcttccttgaatacaagttaagttgaatataaatacacttgatagca

SEQ ID NO: 31535 - DNA, 80 bp, synthetic construct
  misc_feature 1..80: note = Artificially Synthesized Probe
  source 1..80: mol_type = other DNA
tctacaagttactttcaagtggtttttacacaaattccttctccaactgtttaaagcgatggtaataagggagtgagttc

SEQ ID NO: 31536 - DNA, 80 bp, synthetic construct
  misc_feature 1..80: note = Artificially Synthesized Probe
  source 1..80: mol_type = other DNA
aatcagctgaatgcaaaagatcataaaagcaatcagtaagtcagtacttcttagtaatattttcctggttatacttttga

SEQ ID NO: 31537 - DNA, 80 bp, synthetic construct
  misc_feature 1..80: note = Artificially Synthesized Probe
  source 1..80: mol_type = other DNA
attggactccagcctggcgacagagactccgtctcagaaaaaaaaataaatacataaaaaataaaataatatatagcatt

SEQ ID NO: 31538 - DNA, 80 bp, synthetic construct
  misc_feature 1..80: note = Artificially Synthesized Probe
  source 1..80: mol_type = other DNA
ctgtgattctgaaggagaatcaaataagatagcagagatggtactccttggaaacaagtgaaggaaaagtaggaactaag

SEQ ID NO: 31539 - DNA, 80 bp, synthetic construct
  misc_feature 1..80: note = Artificially Synthesized Probe
  source 1..80: mol_type = other DNA
gagagaaaatggctgaaatgaagacacaaaggagatggagcattcccactggtgtctttaaagaaaaaaataacagaagt

SEQ ID NO: 31540 - DNA, 80 bp, synthetic construct
  misc_feature 1..80: note = Artificially Synthesized Probe
  source 1..80: mol_type = other DNA
agtggttcaaaggactaaaaataaaagggtggacaaagatttatcaggcaaacaggaaaaataagaaagcaggggccagg

SEQ ID NO: 31541 - DNA, 80 bp, synthetic construct
  misc_feature 1..80: note = Artificially Synthesized Probe
  source 1..80: mol_type = other DNA
ttaagggtggggtgatgctgattaacaaacagaagcggctttgaaatgggtaataggtagaagacagaagaattcagagg

SEQ ID NO: 31542 - DNA, 80 bp, synthetic construct
  misc_feature 1..80: note = Artificially Synthesized Probe
  source 1..80: mol_type = other DNA
gctacttgggaggctgaagtaggaggactgcttgagcccaggaggttgaggctgcactgagctataattgcaccactgca

SEQ ID NO: 31543 - DNA, 80 bp, synthetic construct
  misc_feature 1..80: note = Artificially Synthesized Probe
  source 1..80: mol_type = other DNA
aatgagactgtggactttaaacttttaagttcatgatagaacaagtgaagactttgggaccctggggatggaatgagtgt

SEQ ID NO: 31544 - DNA, 80 bp, synthetic construct
  misc_feature 1..80: note = Artificially Synthesized Probe
  source 1..80: mol_type = other DNA
aagtaatttcataggctgtggaaatgttccagatcaaagaaggctaaggagacatgacacctaaaaataatgctgactct

SEQ ID NO: 31545 - DNA, 80 bp, synthetic construct
  misc_feature 1..80: note = Artificially Synthesized Probe
  source 1..80: mol_type = other DNA
cacctcctcccaccaatggagatgtatgttcaccagctgtgtttgatctgagcatttctgtaactgttgtactacattta

SEQ ID NO: 31546 - DNA, 80 bp, synthetic construct
  misc_feature 1..80: note = Artificially Synthesized Probe
  source 1..80: mol_type = other DNA
actcactgatgccaagcagccataaaatgccatgcaccctataattcaacagtgtatagccaatcactaagcaatgttat

SEQ ID NO: 31547 - DNA, 80 bp, synthetic construct
  misc_feature 1..80: note = Artificially Synthesized Probe
  source 1..80: mol_type = other DNA
atctttaccctaaaacagttctggctgaattttgccctggcaatgtagactgatagcttatcttcacaggtgtgggagag

SEQ ID NO: 31548 - DNA, 80 bp, synthetic construct
  misc_feature 1..80: note = Artificially Synthesized Probe
  source 1..80: mol_type = other DNA
ttaaaatgttaatttccagactaatcaagagaaagaggtcaccagaactgatatccttgactctcctcccatccaagtcc

SEQ ID NO: 31549 - DNA, 80 bp, synthetic construct
  misc_feature 1..80: note = Artificially Synthesized Probe
  source 1..80: mol_type = other DNA
catgaacatctcaccattccccacacgtataatggtcttcaatttctccaagctgttctttctgattaaaacgccttcct

SEQ ID NO: 31550 - DNA, 80 bp, synthetic construct
  misc_feature 1..80: note = Artificially Synthesized Probe
  source 1..80: mol_type = other DNA
ctactaaagcattcccagctcaaatctcacctcttccacgaagcatttaagatcacatataaacttctatcccatctgac

SEQ ID NO: 31551 - DNA, 80 bp, synthetic construct
  misc_feature 1..80: note = Artificially Synthesized Probe
  source 1..80: mol_type = other DNA
aaagcatatattttagtgattttttttttttttggagacgaagttaagctcttgttgcccaggctggagtgcaatggcac

SEQ ID NO: 31552 - DNA, 80 bp, synthetic construct
  misc_feature 1..80: note = Artificially Synthesized Probe
  source 1..80: mol_type = other DNA
accttagctttgtagatttcaaggattgtatatatagtacagatgtgtacaactacatgggaacttcaaatatgacatct

SEQ ID NO: 31553 - DNA, 80 bp, synthetic construct
  misc_feature 1..80: note = Artificially Synthesized Probe
  source 1..80: mol_type = other DNA
tctatggtacatgccactcaaagaatagaaaatggcatgcagtgcaaagtgcccttcccactctcaaagcagcaatgttg

SEQ ID NO: 31554 - DNA, 80 bp, synthetic construct
  misc_feature 1..80: note = Artificially Synthesized Probe
  source 1..80: mol_type = other DNA
tttccccatgaataaagcgatgtgaaaaatttcaaaattcaaattataagatgttatactagggtaaggtgtgtgcacac

SEQ ID NO: 31555 - DNA, 80 bp, synthetic construct
  misc_feature 1..80: note = Artificially Synthesized Probe
  source 1..80: mol_type = other DNA
accaaatcaactggagaacttttcagcataacattcatttcattttttatagcttcacaaactacctaaaaagaggtttt

SEQ ID NO: 31556 - DNA, 80 bp, synthetic construct
  misc_feature 1..80: note = Artificially Synthesized Probe
  source 1..80: mol_type = other DNA
attcaccccctgccctagagtttttcccaagatttatgcctatacccagtaaaaaacatttctcacctaaattacctaat

SEQ ID NO: 31557 - DNA, 80 bp, synthetic construct
  misc_feature 1..80: note = Artificially Synthesized Probe
  source 1..80: mol_type = other DNA
tatacactgcaccatggggaggaaaatcaggtcctgttcacactttctaggaggggactcaatatcaatcaaaaactaaa

SEQ ID NO: 31558 - DNA, 80 bp, synthetic construct
  misc_feature 1..80: note = Artificially Synthesized Probe
  source 1..80: mol_type = other DNA
ttgggatataggtaggagtttgagagatcaggagtttaattagcggaagatgagaggcctctgtaaaatcaaaagatgtc

SEQ ID NO: 31559 - DNA, 80 bp, synthetic construct
  misc_feature 1..80: note = Artificially Synthesized Probe
  source 1..80: mol_type = other DNA
tcactttcattttcccaaagccataaacacctgaactgtttcctgctgtttctgtcctggtcacagccttccagcgtagg

SEQ ID NO: 31560 - DNA, 80 bp, synthetic construct
  misc_feature 1..80: note = Artificially Synthesized Probe
  source 1..80: mol_type = other DNA
agaggggcttagagggggcccagctttgagatgggttgttcttatgtcacaggacagagtgatctgacatgcacacttcc

SEQ ID NO: 31561 - DNA, 80 bp, synthetic construct
  misc_feature 1..80: note = Artificially Synthesized Probe
  source 1..80: mol_type = other DNA
tgaatactgactcacagctgggacctgtcgtgctaagcatttgttagcccatttcatcctcaccacaacctaaagtgaag

SEQ ID NO: 31562 - DNA, 80 bp, synthetic construct
  misc_feature 1..80: note = Artificially Synthesized Probe
  source 1..80: mol_type = other DNA
gcagactttccatacatctgcaggcttcatatggctgccaccctggattttgccaattacggagattttaaaactaaaaa

SEQ ID NO: 31563 - DNA, 80 bp, synthetic construct
  misc_feature 1..80: note = Artificially Synthesized Probe
  source 1..80: mol_type = other DNA
tgactatgtaaatggacttgagcgggggttggacatcaaaagacagggctacagttcagtgccacccatgtgacttagga

SEQ ID NO: 31564 - DNA, 80 bp, synthetic construct
  misc_feature 1..80: note = Artificially Synthesized Probe
  source 1..80: mol_type = other DNA
aggttgttaccaacctgctccgcctaataacagcaggcaacttccaaagagctctgtgccaggcaccattctaggcttat

SEQ ID NO: 31565 - DNA, 80 bp, synthetic construct
  misc_feature 1..80: note = Artificially Synthesized Probe
  source 1..80: mol_type = other DNA
gattacaggcatgaaccactgcacccagcctttttctttctttctttccttctttctttctttctttctttctttctttc

SEQ ID NO: 31566 - DNA, 80 bp, synthetic construct
  misc_feature 1..80: note = Artificially Synthesized Probe
  source 1..80: mol_type = other DNA
agcatcttcacaggtggaatgaggatgacaaggccaaagcccactcgttgggttattttttcaaattgaggtataattca

SEQ ID NO: 31567 - DNA, 80 bp, synthetic construct
  misc_feature 1..80: note = Artificially Synthesized Probe
  source 1..80: mol_type = other DNA
ccctctccacccaaaccctggcagcaactaaatgactttttgtctatggatttatcttttccggatgtttcataactgga

SEQ ID NO: 31568 - DNA, 80 bp, synthetic construct
  misc_feature 1..80: note = Artificially Synthesized Probe
  source 1..80: mol_type = other DNA
gtgaaaccctgtctctactaaaaatacgaaaaatttagctgggcatggtggcgggtgcctgtaatcccagctacttggga

SEQ ID NO: 31569 - DNA, 80 bp, synthetic construct
  misc_feature 1..80: note = Artificially Synthesized Probe
  source 1..80: mol_type = other DNA
tcctgttgtcccctttcattaggaaaacacgatattaacaagtgcaggcccctaacagtttgggttcaatacttactgta

SEQ ID NO: 31570 - DNA, 80 bp, synthetic construct
  misc_feature 1..80: note = Artificially Synthesized Probe
  source 1..80: mol_type = other DNA
agtctctcagtcttttccttttttctcccttcgcttttcaatgcagagaatccctctgcacacagaaattcacttgtttc

SEQ ID NO: 31571 - DNA, 80 bp, synthetic construct
  misc_feature 1..80: note = Artificially Synthesized Probe
  source 1..80: mol_type = other DNA
tgatgcaggatacagatttaggctgggcacagtggctcacacctgtaattgcagcactttgggaggccgaggcggccgga

SEQ ID NO: 31572 - DNA, 80 bp, synthetic construct
  misc_feature 1..80: note = Artificially Synthesized Probe
  source 1..80: mol_type = other DNA
gcctctgtcacctagttaccacttgataaaaggtaattgttgctgtttgtcatgtccaagaagaagcagtcttcttctag

SEQ ID NO: 31573 - DNA, 80 bp, synthetic construct
  misc_feature 1..80: note = Artificially Synthesized Probe
  source 1..80: mol_type = other DNA
ctcatttctaactgtttgtggtgcccagggtcctggcaggaaatagatggcatgttcaacaggagtgataaagacaggaa

SEQ ID NO: 31574 - DNA, 80 bp, synthetic construct
  misc_feature 1..80: note = Artificially Synthesized Probe
  source 1..80: mol_type = other DNA
cactttcttgagtgtgtctttttcctcgttcactttctccaatccatagctgctatttcctgcctctgtcgtgtgttaaa

SEQ ID NO: 31575 - DNA, 80 bp, synthetic construct
  misc_feature 1..80: note = Artificially Synthesized Probe
  source 1..80: mol_type = other DNA
agaaatgctaagatttatctgaaagaatcaaacacgatgatgtttcttcctacttccacgggcttgtcctcccatattag

SEQ ID NO: 31576 - DNA, 80 bp, synthetic construct
  misc_feature 1..80: note = Artificially Synthesized Probe
  source 1..80: mol_type = other DNA
ttggctatgcagggtcattaacatctgctgagatgttactgtctaagggggaagtatcttcttcctgttatactagcttt

SEQ ID NO: 31577 - DNA, 80 bp, synthetic construct
  misc_feature 1..80: note = Artificially Synthesized Probe
  source 1..80: mol_type = other DNA
gccatggaagaaagacagaaaaatcaccttttctatgtgaagtgaagagacatgtggaagtgaaattactcaaaattctt

SEQ ID NO: 31578 - DNA, 80 bp, synthetic construct
  misc_feature 1..80: note = Artificially Synthesized Probe
  source 1..80: mol_type = other DNA
ttcattttttaaagttagtatatattttaaaaaatctagttaaacagggtcaagtgcagtggctcatgcctgtaatccca

SEQ ID NO: 31579 - DNA, 80 bp, synthetic construct
  misc_feature 1..80: note = Artificially Synthesized Probe
  source 1..80: mol_type = other DNA
tgaaaagtaccttctcctcctcacattagagatgactgtgccaaaggaaggtagagcttctagaaagagaagagaatctg

SEQ ID NO: 31580 - DNA, 80 bp, synthetic construct
  misc_feature 1..80: note = Artificially Synthesized Probe
  source 1..80: mol_type = other DNA
gtgtcaggaagtcttgtcttttcagttaagaggaaaccgggtcttcctgcatgggttctaataaagtctttgatctattt

SEQ ID NO: 31581 - DNA, 80 bp, synthetic construct
  misc_feature 1..80: note = Artificially Synthesized Probe
  source 1..80: mol_type = other DNA
cacggtttactaaagcctttgtttcgccacaaaatgtgacaactgagtgtgtggaagccaggaaagctattgttatctgg

SEQ ID NO: 31582 - DNA, 80 bp, synthetic construct
  misc_feature 1..80: note = Artificially Synthesized Probe
  source 1..80: mol_type = other DNA
caggcagttggcctcaatgacctctaccatttttttcaagtctaggagggcatgagcttttctggcagagttggcatctg

SEQ ID NO: 31583 - DNA, 80 bp, synthetic construct
  misc_feature 1..80: note = Artificially Synthesized Probe
  source 1..80: mol_type = other DNA
acagggagctgtggacctaggtggtctgaagaggttttccttcaaggtgaattaaaggggaattctcataggattctccc

SEQ ID NO: 31584 - DNA, 80 bp, synthetic construct
  misc_feature 1..80: note = Artificially Synthesized Probe
  source 1..80: mol_type = other DNA
gttatagataatatttgatcccaggtggcatctgtcccttgtggtaaatcagtgaggtgcccctagaatgaaagcagact

SEQ ID NO: 31585 - DNA, 80 bp, synthetic construct
  misc_feature 1..80: note = Artificially Synthesized Probe
  source 1..80: mol_type = other DNA
ctgtcttttcttgaggttgagattgtatctaggatattgattgtttcagtcaagatgggagcacccccaggtgtttttct

SEQ ID NO: 31586 - DNA, 80 bp, synthetic construct
  misc_feature 1..80: note = Artificially Synthesized Probe
  source 1..80: mol_type = other DNA
gtctactgcagaatatggacagatctattttccaagcctctgaatatctcaaaacatctttagttgtctacacattcaag

SEQ ID NO: 31587 - DNA, 80 bp, synthetic construct
  misc_feature 1..80: note = Artificially Synthesized Probe
  source 1..80: mol_type = other DNA
ttctgttaggtctttgagtaagtttttattccagctcttctggcatctttcttctaatcccctgagaaagccaagcctcc

SEQ ID NO: 31588 - DNA, 80 bp, synthetic construct
  misc_feature 1..80: note = Artificially Synthesized Probe
  source 1..80: mol_type = other DNA
actatcccaggggaatttcaaagcagaaaagtgaaaatttcaaattgaatatcgagtttcactgcaccaaatgcccatga

SEQ ID NO: 31589 - DNA, 80 bp, synthetic construct
  misc_feature 1..80: note = Artificially Synthesized Probe
  source 1..80: mol_type = other DNA
catgtagtgagtgcttgataaatacttattgaatgaattaactcttctgccaccattaagaagatagaaagtgctacagg

SEQ ID NO: 31590 - DNA, 80 bp, synthetic construct
  misc_feature 1..80: note = Artificially Synthesized Probe
  source 1..80: mol_type = other DNA
aggccagcagtacttctctcctgtggagattttgaggactaaaagagatggtttatgtaaacatgcagctcatgtctgac

SEQ ID NO: 31591 - DNA, 80 bp, synthetic construct
  misc_feature 1..80: note = Artificially Synthesized Probe
  source 1..80: mol_type = other DNA
tggaggttccccagctatgtatggaaccagctaagggctttgcagtatttgagtcatgatccttcctgaatgagacccaa

SEQ ID NO: 31592 - DNA, 80 bp, synthetic construct
  misc_feature 1..80: note = Artificially Synthesized Probe
  source 1..80: mol_type = other DNA
ttcattttgagcaaccccaggagaggaaaatccaaatttctctctcaaatattgaattaatccatacatgagcagttagt

SEQ ID NO: 31593 - DNA, 80 bp, synthetic construct
  misc_feature 1..80: note = Artificially Synthesized Probe
  source 1..80: mol_type = other DNA
ttcccatctaatatcatgccctgtcccatagccgctccttatagcactcctgttttttcttcatagcccttatcgctgtc

SEQ ID NO: 31594 - DNA, 80 bp, synthetic construct
  misc_feature 1..80: note = Artificially Synthesized Probe
  source 1..80: mol_type = other DNA
acttctgtcttccccagagtacctcaagagttttacgaaaagaaaagaagcaagctggaaagaagagcgtctcagggata

SEQ ID NO: 31595 - DNA, 80 bp, synthetic construct
  misc_feature 1..80: note = Artificially Synthesized Probe
  source 1..80: mol_type = other DNA
tcttagggcagtagtgagggtgaggaagttcaaattgaaaatacaaaacagaagtaaaatcccctgacatggaaataagc

SEQ ID NO: 31596 - DNA, 80 bp, synthetic construct
  misc_feature 1..80: note = Artificially Synthesized Probe
  source 1..80: mol_type = other DNA
ccctccccccccaaaaaagagaatgtcctatatctcatgataattttattgcacattgaaatcttaatattttggatata

SEQ ID NO: 31597 - DNA, 80 bp, synthetic construct
  misc_feature 1..80: note = Artificially Synthesized Probe
  source 1..80: mol_type = other DNA
accatgatgaagagggaactgcttaaatacactgtggtccagccaatggaagactatgcagctgcttaaaaaattaaagt

SEQ ID NO: 31598 - DNA, 80 bp, synthetic construct
  misc_feature 1..80: note = Artificially Synthesized Probe
  source 1..80: mol_type = other DNA
aaaggaaatacataggaaatagagatccccttctcctattggtaaccctaatgtcctgcaaatcccccaccctagtccca

SEQ ID NO: 31599 - DNA, 80 bp, synthetic construct
  misc_feature 1..80: note = Artificially Synthesized Probe
  source 1..80: mol_type = other DNA
aacattgtttatggtgcgttttgtcatgtggaagtttaaaaccattaggtagtcaaatgttttcatttacggattctgag

SEQ ID NO: 31600 - DNA, 80 bp, synthetic construct
  misc_feature 1..80: note = Artificially Synthesized Probe
  source 1..80: mol_type = other DNA
gtaaatgatcttgttttgtgcaaataatggcagacagtctgttccttccaatgcaactcatttagggacaggggagttgt

SEQ ID NO: 31601 - DNA, 80 bp, synthetic construct
  misc_feature 1..80: note = Artificially Synthesized Probe
  source 1..80: mol_type = other DNA
actctcaggccacaacctgtatatctctagatagttctggtcttctttaacgtgttccttgaatagagcagaaatcggcc

SEQ ID NO: 31602 - DNA, 80 bp, synthetic construct
  misc_feature 1..80: note = Artificially Synthesized Probe
  source 1..80: mol_type = other DNA
cctcagccaggcccatctctctccctgtgctcttcaacaacaacaaaatcacaaatgaaccccataaaatgctttatgga

SEQ ID NO: 31603 - DNA, 80 bp, synthetic construct
  misc_feature 1..80: note = Artificially Synthesized Probe
  source 1..80: mol_type = other DNA
ctcgcagcctgttccactcatttacatcacccgcctgactgctgtaggccactgagctatgatattcatcagacgcaact

SEQ ID NO: 31604 - DNA, 80 bp, synthetic construct
  misc_feature 1..80: note = Artificially Synthesized Probe
  source 1..80: mol_type = other DNA
ttctccagggaagaaaacaagcccgtgatttgtagtgtttgcctatttctaccgtggagacactctaaccacagctccca

SEQ ID NO: 31605 - DNA, 80 bp, synthetic construct
  misc_feature 1..80: note = Artificially Synthesized Probe
  source 1..80: mol_type = other DNA
accttctgaaaaatttaaaattctagcacccaaggcctgtgttaccccatgatgctgtaactggagctaactggaagctg

SEQ ID NO: 31606 - DNA, 80 bp, synthetic construct
  misc_feature 1..80: note = Artificially Synthesized Probe
  source 1..80: mol_type = other DNA
ctacaaagccatgactttacaaactgttttaatcccttctgtccccatattgcactttgtataacactccccttcctagg

SEQ ID NO: 31607 - DNA, 80 bp, synthetic construct
  misc_feature 1..80: note = Artificially Synthesized Probe
  source 1..80: mol_type = other DNA
tttttttttttttttttgagacatagtcttgctctgtcgcccaggctggagtgtagtggtgtaatcttggctcactgcaa

SEQ ID NO: 31608 - DNA, 80 bp, synthetic construct
  misc_feature 1..80: note = Artificially Synthesized Probe
  source 1..80: mol_type = other DNA
agctgttgaggacaggcttgagatggacaagtgcaaggattgattttgagagctgaccgccataggtcaggttcttccag

SEQ ID NO: 31609 - DNA, 80 bp, synthetic construct
  misc_feature 1..80: note = Artificially Synthesized Probe
  source 1..80: mol_type = other DNA
gcagtcgctatgggaatgagcatgtggaacttgacgatttgtccctattggcagatactgatgataaaacaagttgtgtg

SEQ ID NO: 31610 - DNA, 80 bp, synthetic construct
  misc_feature 1..80: note = Artificially Synthesized Probe
  source 1..80: mol_type = other DNA
gaaagtgcagaaacctttcccatagtgaactgaaaagctcactgtgatgccaggtatgaggcacagtttctagctgtcag

SEQ ID NO: 31611 - DNA, 80 bp, synthetic construct
  misc_feature 1..80: note = Artificially Synthesized Probe
  source 1..80: mol_type = other DNA
gctcaggtctttcacagcaaagagggtgttggctatgaactcagagaaaggggtgatttagaagggagtgcagagactgc

SEQ ID NO: 31612 - DNA, 80 bp, synthetic construct
  misc_feature 1..80: note = Artificially Synthesized Probe
  source 1..80: mol_type = other DNA
aagatatcaaacccacctgcactattagataaaatataaattgcatcacatatgtgggcgcatctggcccactttcttcc

SEQ ID NO: 31613 - DNA, 80 bp, synthetic construct
  misc_feature 1..80: note = Artificially Synthesized Probe
  source 1..80: mol_type = other DNA
ctatgcgcgttgctgtgtgactctggttctctgtaattgacctttttattattggcgtgggcattgttgcaactatttgg

SEQ ID NO: 31614 - DNA, 80 bp, synthetic construct
  misc_feature 1..80: note = Artificially Synthesized Probe
  source 1..80: mol_type = other DNA
tgagctaggttacataggctgattttcaacaaactattacagtgtttagctcaaaaagtggttatttaggccgggtgcag

SEQ ID NO: 31615 - DNA, 80 bp, synthetic construct
  misc_feature 1..80: note = Artificially Synthesized Probe
  source 1..80: mol_type = other DNA
tcatgaccttggcatttttcaatagaataggctaataattttgtagactgtccctgtccctcaattttgggttttcaggt

SEQ ID NO: 31616 - DNA, 80 bp, synthetic construct
  misc_feature 1..80: note = Artificially Synthesized Probe
  source 1..80: mol_type = other DNA
ttattttagcattttcttgctttctggggcaacaggtgttgcaggtacttgttagatcttcttggcctcgattcaaaggc

SEQ ID NO: 31617 - DNA, 80 bp, synthetic construct
  misc_feature 1..80: note = Artificially Synthesized Probe
  source 1..80: mol_type = other DNA
tgctggccctggacacttcaaaggaagggaaaggaaaggaaccaataaaatgtttttaaaaaaagagaagggagggaaga

SEQ ID NO: 31618 - DNA, 80 bp, synthetic construct
  misc_feature 1..80: note = Artificially Synthesized Probe
  source 1..80: mol_type = other DNA
ccccacttcttcacccacgtggggccctatgattcttaaatttgggggagaggaggtggttaaaggttgagaccatcctg

SEQ ID NO: 31619 - DNA, 80 bp, synthetic construct
  misc_feature 1..80: note = Artificially Synthesized Probe
  source 1..80: mol_type = other DNA
cccagttcttaatactgtcccgccactggtaaaatctccacaatcattctatatgctcttccatttaaaacgaagcctgg

SEQ ID NO: 31620 - DNA, 80 bp, synthetic construct
  misc_feature 1..80: note = Artificially Synthesized Probe
  source 1..80: mol_type = other DNA
agcacaaattcatgcccattctgctgatcctaaaagctctgaagggagggctactctgagcctgagatgtcagatatata

SEQ ID NO: 31621 - DNA, 80 bp, synthetic construct
  misc_feature 1..80: note = Artificially Synthesized Probe
  source 1..80: mol_type = other DNA
gcggggatcatgtcccggctgacttgggccttcatggtttccttctctgtttcaaaatgacttaacaactcttttcagga

SEQ ID NO: 31622 - DNA, 80 bp, synthetic construct
  misc_feature 1..80: note = Artificially Synthesized Probe
  source 1..80: mol_type = other DNA
tgccctgtcccctcggccatcgtaccctgatgcaggacctttctgggcccaggttcagaatgcaacaccatgtgtgggct

SEQ ID NO: 31623 - DNA, 80 bp, synthetic construct
  misc_feature 1..80: note = Artificially Synthesized Probe
  source 1..80: mol_type = other DNA
cctccagccgagaatccttttctggattcacacatgaggcgttcaacttcagctttctttggtattttcatattcctttt

SEQ ID NO: 31624 - DNA, 80 bp, synthetic construct
  misc_feature 1..80: note = Artificially Synthesized Probe
  source 1..80: mol_type = other DNA
gcagtgagatccttgacttctaactccaaggatggcgccttctcaactaattttaaaatgacctgaaagttgctgggtgt

SEQ ID NO: 31625 - DNA, 80 bp, synthetic construct
  misc_feature 1..80: note = Artificially Synthesized Probe
  source 1..80: mol_type = other DNA
agccagcacaattacccccaaggtcctctgctatcagcaacagatacaaaccagatagatcatttactgagttttgacaa

SEQ ID NO: 31626 - DNA, 80 bp, synthetic construct
  misc_feature 1..80: note = Artificially Synthesized Probe
  source 1..80: mol_type = other DNA
caccgtgcctggcccaaaaacacttttaaaaataaaagttttttaaaaacggaaagaaaaacagatcttaggaacgatcc

SEQ ID NO: 31627 - DNA, 80 bp, synthetic construct
  misc_feature 1..80: note = Artificially Synthesized Probe
  source 1..80: mol_type = other DNA
aggtgaccttggggaaattacctgacctctctgaatcacagacttctctttaaagagacagtaaaataaggctgggcttg

SEQ ID NO: 31628 - DNA, 80 bp, synthetic construct
  misc_feature 1..80: note = Artificially Synthesized Probe
  source 1..80: mol_type = other DNA
ggagcttacctggggatgccccacttttcccctcaaggatttactgagaatatacctaagggaatagaaatcattttgtt

SEQ ID NO: 31629 - DNA, 80 bp, synthetic construct
  misc_feature 1..80: note = Artificially Synthesized Probe
  source 1..80: mol_type = other DNA
ctggtctgagtgagcactgccctctggaatcaggaaggtcaggctgtggaagaactagggctgacctgtcccattgtgag

SEQ ID NO: 31630 - DNA, 80 bp, synthetic construct
  misc_feature 1..80: note = Artificially Synthesized Probe
  source 1..80: mol_type = other DNA
cccacctcccaggccaagttcaagtcatttgttgaatgtctctgagtgaagggaaccccctcgctttcttttatgtgttt

SEQ ID NO: 31631 - DNA, 80 bp, synthetic construct
  misc_feature 1..80: note = Artificially Synthesized Probe
  source 1..80: mol_type = other DNA
taaatataactttttgtttctttgtgagaaacgctccattgccccccaaagaaatcctaatgacagggctgaagccgcat

SEQ ID NO: 31632 - DNA, 80 bp, synthetic construct
  misc_feature 1..80: note = Artificially Synthesized Probe
  source 1..80: mol_type = other DNA
gagggttcatgggcagagagccctgctttttctatctttgcttatcatgtcagtggaaccttcctaaaacttctgttcgg

SEQ ID NO: 31633 - DNA, 80 bp, synthetic construct
  misc_feature 1..80: note = Artificially Synthesized Probe
  source 1..80: mol_type = other DNA
gccactgtgcccagcctaccacaaacattttaacaaatagaactgcctgtaatacagactcacggtatcaaagtcacaag

SEQ ID NO: 31634 - DNA, 80 bp, synthetic construct
  misc_feature 1..80: note = Artificially Synthesized Probe
  source 1..80: mol_type = other DNA
ttctttcacagattccacaggaaaagccttgtggcctttagtttcaatttgattacatatcaagcctggaataaaaatct

SEQ ID NO: 31635 - DNA, 80 bp, synthetic construct
  misc_feature 1..80: note = Artificially Synthesized Probe
  source 1..80: mol_type = other DNA
catttgttatctctagatcccatcatccttccagccctcagatcctatctttataagtagataaggtaggaaaacaattc

SEQ ID NO: 31636 - DNA, 80 bp, synthetic construct
  misc_feature 1..80: note = Artificially Synthesized Probe
  source 1..80: mol_type = other DNA
ctgctcttgctgtttgctgcagccattacacctgacaagcacagaaaggcatcaaaaggaaataaattaaagttagtcta

SEQ ID NO: 31637 - DNA, 80 bp, synthetic construct
  misc_feature 1..80: note = Artificially Synthesized Probe
  source 1..80: mol_type = other DNA
gttttgtagtctgtgctgttttgtgttttattacacatacagccgtttcaagattcctttgttgatttttctggggctgt

SEQ ID NO: 31638 - DNA, 80 bp, synthetic construct
  misc_feature 1..80: note = Artificially Synthesized Probe
  source 1..80: mol_type = other DNA
aaatgatgcttcccatttctcctgccagaatccctgcagattctcatccctcaaattgtaaacccataattttcaaactg

SEQ ID NO: 31639 - DNA, 80 bp, synthetic construct
  misc_feature 1..80: note = Artificially Synthesized Probe
  source 1..80: mol_type = other DNA
aacatgtaaaagctggtcaacaagtaaaagcacaggctgcccagagaggtggaattttaggtgaacagcaacttctttag

SEQ ID NO: 31640 - DNA, 80 bp, synthetic construct
  misc_feature 1..80: note = Artificially Synthesized Probe
  source 1..80: mol_type = other DNA
tatttgcttggacccaagtgtgaatgagaaggacattgagcactgaggagtaaggagaagtgccagagcctcctctgcag

SEQ ID NO: 31641 - DNA, 80 bp, synthetic construct
  misc_feature 1..80: note = Artificially Synthesized Probe
  source 1..80: mol_type = other DNA
aaacagcaacactgaaacatcttttttttttttttcttataaagagacagcatctcactctgtcactcaggctggaatgc

SEQ ID NO: 31642 - DNA, 80 bp, synthetic construct
  misc_feature 1..80: note = Artificially Synthesized Probe
  source 1..80: mol_type = other DNA
caaaccactgcatatcagaacactatgtgatgcagccaaagcaccacttagaggaaaaaccatagctttaaaagttctgc

SEQ ID NO: 31643 - DNA, 80 bp, synthetic construct
  misc_feature 1..80: note = Artificially Synthesized Probe
  source 1..80: mol_type = other DNA
ttcagtaacatcccagcaaatataatttagtgacatgaaaaatggaggctttatctaggtcactccaaagatgagtcaac

SEQ ID NO: 31644 - DNA, 80 bp, synthetic construct
  misc_feature 1..80: note = Artificially Synthesized Probe
  source 1..80: mol_type = other DNA
acctgaggtcaggagtttgagaccagcctgcaacatggcgaagccccgtctctactaaaaatacaaaaattagctgggcg

SEQ ID NO: 31645 - DNA, 80 bp, synthetic construct
  misc_feature 1..80: note = Artificially Synthesized Probe
  source 1..80: mol_type = other DNA
aaagatgagctgggaacaaagagcgcataaagcccgaggattggagttgtcaatggatgtgacaatgggaaaatccgtct

SEQ ID NO: 31646 - DNA, 80 bp, synthetic construct
  misc_feature 1..80: note = Artificially Synthesized Probe
  source 1..80: mol_type = other DNA
aaaacttatttgtgccaaataagggggtaagcagggcctgttcccatcatttcttatcagaaactgaaaggaaagaaaaa

SEQ ID NO: 31647 - DNA, 80 bp, synthetic construct
  misc_feature 1..80: note = Artificially Synthesized Probe
  source 1..80: mol_type = other DNA
ttgttagtaactgggaaatgacatttgacactaggcagcctcttcttgcctattagatggacaaagagttgatgctcaag

SEQ ID NO: 31648 - DNA, 80 bp, synthetic construct
  misc_feature 1..80: note = Artificially Synthesized Probe
  source 1..80: mol_type = other DNA
tctattctaaggtgtgaacactgctctggaaagatctccaagactactgttaggtggaaaagcaaatggcaggatgatat

SEQ ID NO: 31649 - DNA, 80 bp, synthetic construct
  misc_feature 1..80: note = Artificially Synthesized Probe
  source 1..80: mol_type = other DNA
aactgaaaagcaaagtgaaaaaactgggtcagctgatgtaaaccctcaggtagcagtcagaccagtctaccctttaacag

SEQ ID NO: 31650 - DNA, 80 bp, synthetic construct
  misc_feature 1..80: note = Artificially Synthesized Probe
  source 1..80: mol_type = other DNA
ttaccgtttcaattatttatgagataaataaccctaaaacaagggaatcctgaactatcccatctcctgaccagcttttc

SEQ ID NO: 31651 - DNA, 80 bp, synthetic construct
  misc_feature 1..80: note = Artificially Synthesized Probe
  source 1..80: mol_type = other DNA
gtaggggtggagattatggtagtgatgatgatagtggaggtcgtcatgattatggtaagagtgggaggggtggagatggt

SEQ ID NO: 31652 - DNA, 80 bp, synthetic construct
  misc_feature 1..80: note = Artificially Synthesized Probe
  source 1..80: mol_type = other DNA
tctgtgaataagtgcatgagaccatgtacttggcatcaggtagacaggatacatgtcttcctctgccatttactagctgt

SEQ ID NO: 31653 - DNA, 80 bp, synthetic construct
  misc_feature 1..80: note = Artificially Synthesized Probe
  source 1..80: mol_type = other DNA
tggttcaggttcagtgatgctgccctgatcctctttccctcctctcccaggttcctggtgaggccaatcccatcaacatg

SEQ ID NO: 31654 - DNA, 80 bp, synthetic construct
  misc_feature 1..80: note = Artificially Synthesized Probe
  source 1..80: mol_type = other DNA
cctacgcaactgttgtgggttttcttttctattattatcagtaaatgttcaatcagtggttgtaacaaggcctgggagtt

SEQ ID NO: 31655 - DNA, 80 bp, synthetic construct
  misc_feature 1..80: note = Artificially Synthesized Probe
  source 1..80: mol_type = other DNA
ggggatgataaaaattatgtgaataatatgctcaaggctctttaggctagagcccagcatgtagtggccactttgagagt

SEQ ID NO: 31656 - DNA, 80 bp, synthetic construct
  misc_feature 1..80: note = Artificially Synthesized Probe
  source 1..80: mol_type = other DNA
tttcagataaacaaccgatatactatatgtatgtcccatgcaatatttgggacatacttatatgcaacaatgattcacag

SEQ ID NO: 31657 - DNA, 80 bp, synthetic construct
  misc_feature 1..80: note = Artificially Synthesized Probe
  source 1..80: mol_type = other DNA
tgatttgaacagaaaggctgtgtggaaagtgagcttagagtgatggtttcctcttatctgttgatatgatttggctgtgt

SEQ ID NO: 31658 - DNA, 80 bp, synthetic construct
  misc_feature 1..80: note = Artificially Synthesized Probe
  source 1..80: mol_type = other DNA
aggtgtgaacagagcctagaatgcccaagtaaggattggagctgttgttgctgagaagttggtattctcctttgtggaaa

SEQ ID NO: 31659 - DNA, 80 bp, synthetic construct
  misc_feature 1..80: note = Artificially Synthesized Probe
  source 1..80: mol_type = other DNA
tcccctctttaatgtgggcttcacaaaggctgggatgtggattttttcgttgttgttaaccactaaatcccagagccaaa

SEQ ID NO: 31660 - DNA, 80 bp, synthetic construct
  misc_feature 1..80: note = Artificially Synthesized Probe
  source 1..80: mol_type = other DNA
ataaactctagacctggggatttaaatagaaaaatatgacagtaatggggaaaagcctttctgtggacatgctgtgccat

SEQ ID NO: 31661 - DNA, 80 bp, synthetic construct
  misc_feature 1..80: note = Artificially Synthesized Probe
  source 1..80: mol_type = other DNA
aaagccggaaaggagatggatagcgagagtcacttgtaggaaccaaaaaacgaaaccctaagcaggtggaagaaaaaaca

SEQ ID NO: 31662 - DNA, 80 bp, synthetic construct
  misc_feature 1..80: note = Artificially Synthesized Probe
  source 1..80: mol_type = other DNA
cttctaatctgtatgtctacgtgtgtgtattcattgaaagatataagtgattaacttcttttaatttataactaaggtct

SEQ ID NO: 31663 - DNA, 80 bp, synthetic construct
  misc_feature 1..80: note = Artificially Synthesized Probe
  source 1..80: mol_type = other DNA
caaaacaaaaggacaaagtgatggaaaataggagaggcaagatttttacaatttaaaagaccagatcagggctgggtgca

SEQ ID NO: 31664 - DNA, 80 bp, synthetic construct
  misc_feature 1..80: note = Artificially Synthesized Probe
  source 1..80: mol_type = other DNA
ccaagactgggcaggggccaggtgtgtgggtctgctgagccagagtgccaggttcacacttccttctttttttatttgag

SEQ ID NO: 31665 - DNA, 80 bp, synthetic construct
  misc_feature 1..80: note = Artificially Synthesized Probe
  source 1..80: mol_type = other DNA
tgtaaaccaagaagaggaagacctggggtccaagaaatgggatttaatacgagagagagaaacgtattcctggattatga

SEQ ID NO: 31666 - DNA, 80 bp, synthetic construct
  misc_feature 1..80: note = Artificially Synthesized Probe
  source 1..80: mol_type = other DNA
gtcctgcagctcattaagtcacagaaatttctgaataagttggtgatcttggtggaaacagagaaggagaagatcctgcg

SEQ ID NO: 31667 - DNA, 80 bp, synthetic construct
  misc_feature 1..80: note = Artificially Synthesized Probe
  source 1..80: mol_type = other DNA
aatttgaaccagggccaaaacctatcatcgtgaacctcattcattgttctctgccatgcagctcgtgtgaggcagtaaaa

SEQ ID NO: 31668 - DNA, 80 bp, synthetic construct
  misc_feature 1..80: note = Artificially Synthesized Probe
  source 1..80: mol_type = other DNA
gtctttgcaggttgaaacagtcaaacactggtcatgtcatatgttacaccctgaaatttgtgtactttgttaaagtccgc

SEQ ID NO: 31669 - DNA, 80 bp, synthetic construct
  misc_feature 1..80: note = Artificially Synthesized Probe
  source 1..80: mol_type = other DNA
atgcaatgatgctattcatatcatttgtcaactagcttttcatgcttaaaaatatatattgtggccacctgtccttgttg

SEQ ID NO: 31670 - DNA, 80 bp, synthetic construct
  misc_feature 1..80: note = Artificially Synthesized Probe
  source 1..80: mol_type = other DNA
actctgtatgtctaaattggaaagttttagggaaagagtctgaatatctaggtgaaggggctcatgggaaccctgccagc

SEQ ID NO: 31671 - DNA, 80 bp, synthetic construct
  misc_feature 1..80: note = Artificially Synthesized Probe
  source 1..80: mol_type = other DNA
ctcttgggggagcagaatttagccacagtccatttactccaatgcttggcttctttgcacttgtaaggcaagaagctcat

SEQ ID NO: 31672 - DNA, 80 bp, synthetic construct
  misc_feature 1..80: note = Artificially Synthesized Probe
  source 1..80: mol_type = other DNA
ctctgttttgaattctcctaatgctttgactcgatgtgcctttgactcacttggtgttgggttttgctgttgaaggtaac

SEQ ID NO: 31673 - DNA, 80 bp, synthetic construct
  misc_feature 1..80: note = Artificially Synthesized Probe
  source 1..80: mol_type = other DNA
tcaacactattcctctctgcctttctggtgggaaagcagccataggcaacccagaaagcgaatgggagtgactgtgttac

SEQ ID NO: 31674 - DNA, 80 bp, synthetic construct
  misc_feature 1..80: note = Artificially Synthesized Probe
  source 1..80: mol_type = other DNA
accaccccatatctatgagtgtgtgagtatctgtgagtccatgtgtctgtgtttgtgagtgtgtgtttatgagagtctag

SEQ ID NO: 31675 - DNA, 80 bp, synthetic construct
  misc_feature 1..80: note = Artificially Synthesized Probe
  source 1..80: mol_type = other DNA
taattagcacaggacagaaacagcaaatgctggtcggtgtggtaggctcacgcctgtaatcccagcactttggaaggccg

SEQ ID NO: 31676 - DNA, 80 bp, synthetic construct
  misc_feature 1..80: note = Artificially Synthesized Probe
  source 1..80: mol_type = other DNA
tcgggcagggactcttattattcccatttgcagatgaagaaacagagtctatggagatgatccataacttgcccaaggcc

SEQ ID NO: 31677 - DNA, 80 bp, synthetic construct
  misc_feature 1..80: note = Artificially Synthesized Probe
  source 1..80: mol_type = other DNA
tcttaccaaggccacaattccaatgtgtattttacactcacaacctgtctcattttgtaccagccacatttcaggtgttt

SEQ ID NO: 31678 - DNA, 80 bp, synthetic construct
  misc_feature 1..80: note = Artificially Synthesized Probe
  source 1..80: mol_type = other DNA
ttagggttcgtcaacagccacttgacttcaggaagtgaaaagaaactcaggtaatggaactccttccccccaagagtgtg

SEQ ID NO: 31679 - DNA, 80 bp, synthetic construct
  misc_feature 1..80: note = Artificially Synthesized Probe
  source 1..80: mol_type = other DNA
gacaagaagctgagtccctttaacatcactcaccgcttcacgcacctcttctggtttggggatcttaactaccgtgtgga

SEQ ID NO: 31680 - DNA, 80 bp, synthetic construct
  misc_feature 1..80: note = Artificially Synthesized Probe
  source 1..80: mol_type = other DNA
tcagaattaaaacgaaagtctctctgtttcagaggaggaagaaatcacgtttgccccaacctaccgttttgagagactga

SEQ ID NO: 31681 - DNA, 80 bp, synthetic construct
  misc_feature 1..80: note = Artificially Synthesized Probe
  source 1..80: mol_type = other DNA
tggtttgctttgatgtgagtttaagttgaggcagaggagggcctgagatgggagagtggccggtcctagatgccaggatg

SEQ ID NO: 31682 - DNA, 80 bp, synthetic construct
  misc_feature 1..80: note = Artificially Synthesized Probe
  source 1..80: mol_type = other DNA
gagcaagactgtgtctcaaaaaaaaaaaaaaaaaaagaaggtggtacacctgtatagggcacttaccatgaatgaagctt

SEQ ID NO: 31683 - DNA, 80 bp, synthetic construct
  misc_feature 1..80: note = Artificially Synthesized Probe
  source 1..80: mol_type = other DNA
caaggctccgtctcaaaaaaaaaaacaaaaacaaaaaccataaatgcacacattagcctaggctgaaacaggctcaggat

SEQ ID NO: 31684 - DNA, 80 bp, synthetic construct
  misc_feature 1..80: note = Artificially Synthesized Probe
  source 1..80: mol_type = other DNA
agtaattccgctttggtgtgtgttcaagagaaatttgtatatttgttcaccaaaaataggtataagaatgtttagccggg

SEQ ID NO: 31685 - DNA, 80 bp, synthetic construct
  misc_feature 1..80: note = Artificially Synthesized Probe
  source 1..80: mol_type = other DNA
aagtaattgaaggagatgacagagataagctctttcaggatgagttcctttatgtttgtagacagagaagaaagagctag

SEQ ID NO: 31686 - DNA, 80 bp, synthetic construct
  misc_feature 1..80: note = Artificially Synthesized Probe
  source 1..80: mol_type = other DNA
acaggtgggggttcatctgagtcagaaagaaagtaagagaaggtgaagatacaagggatactgaagtagtcaggaggata

SEQ ID NO: 31687 - DNA, 80 bp, synthetic construct
  misc_feature 1..80: note = Artificially Synthesized Probe
  source 1..80: mol_type = other DNA
acccggagcacttttttaaaaattcagttttatttcttttgaaaagaacatattaagtgtgaaccatatgaaagtgtttt

SEQ ID NO: 31688 - DNA, 80 bp, synthetic construct
  misc_feature 1..80: note = Artificially Synthesized Probe
  source 1..80: mol_type = other DNA
ttatttttaaaacactgcgaattcccacacaatggcctctaaaggatggccaccccagtccttggagcaaggagaggggt

SEQ ID NO: 31689 - DNA, 80 bp, synthetic construct
  misc_feature 1..80: note = Artificially Synthesized Probe
  source 1..80: mol_type = other DNA
agcctctgccgagagtcaggagatagtggaggcttgtagaattaccacttactgttttgcacctaaacttggcattcaaa

SEQ ID NO: 31690 - DNA, 80 bp, synthetic construct
  misc_feature 1..80: note = Artificially Synthesized Probe
  source 1..80: mol_type = other DNA
tgagaatgcttaaaaaaaaaaaccctgctcgtcaacccattaaattctccctggaacacccctcctccactgccacagca

SEQ ID NO: 31691 - DNA, 80 bp, synthetic construct
  misc_feature 1..80: note = Artificially Synthesized Probe
  source 1..80: mol_type = other DNA
aaatgctttctaaaaaggatgccaagtctgttttatcaccttcttggtctcctttgctggcggtttttcctttgcccgcc

SEQ ID NO: 31692 - DNA, 80 bp, synthetic construct
  misc_feature 1..80: note = Artificially Synthesized Probe
  source 1..80: mol_type = other DNA
gtcacttcccagtttgtctccaagaacggtaagcaaaggatggtgtctgtttctctgttttcctcaatgacaaggagtgt

SEQ ID NO: 31693 - DNA, 80 bp, synthetic construct
  misc_feature 1..80: note = Artificially Synthesized Probe
  source 1..80: mol_type = other DNA
tccacccaagccttgacccaccatcgtgtctccttcctaagtctggccactgtgcctttctagaatcttcctagtcctta

SEQ ID NO: 31694 - DNA, 80 bp, synthetic construct
  misc_feature 1..80: note = Artificially Synthesized Probe
  source 1..80: mol_type = other DNA
ctgagaaggagctcagtatgtggcatgagaactaatttgaaatgctccatctccaggcacattgtggaactgaatccgtg

SEQ ID NO: 31695 - DNA, 80 bp, synthetic construct
  misc_feature 1..80: note = Artificially Synthesized Probe
  source 1..80: mol_type = other DNA
agcacaaactgtgtttaggaaacaccctttccgggtgacatttctaggcagattgtctaaagctgtttcatggctaggga

SEQ ID NO: 31696 - DNA, 80 bp, synthetic construct
  misc_feature 1..80: note = Artificially Synthesized Probe
  source 1..80: mol_type = other DNA
aagctctcgctcaaggtggttcgtaacacactttacagcagtgggtatgtggccttattattcctaaatggtttcagttc

SEQ ID NO: 31697 - DNA, 80 bp, synthetic construct
  misc_feature 1..80: note = Artificially Synthesized Probe
  source 1..80: mol_type = other DNA
aaattagccagacatgatggcacatgcctggagtcctagctgctctggagactgaggcgggaggataacctgagcctagg

SEQ ID NO: 31698 - DNA, 80 bp, synthetic construct
  misc_feature 1..80: note = Artificially Synthesized Probe
  source 1..80: mol_type = other DNA
agtcctgctgttcctcttgcctctgtcccctccctcagtccccctgccccctcccagggggtccactcctcctgtctcct

SEQ ID NO: 31699 - DNA, 80 bp, synthetic construct
  misc_feature 1..80: note = Artificially Synthesized Probe
  source 1..80: mol_type = other DNA
aaaggaagggagggaatcgcctagaacaaagtatcacctttttatttggcccttctgtatgggagtcatcgtgagaaaca

SEQ ID NO: 31700 - DNA, 80 bp, synthetic construct
  misc_feature 1..80: note = Artificially Synthesized Probe
  source 1..80: mol_type = other DNA
ttgctggacagggtgtatgtgaaagctataccccacctgctctcttgggtatggacagcagagatttagatctgattact

SEQ ID NO: 31701 - DNA, 80 bp, synthetic construct
  misc_feature 1..80: note = Artificially Synthesized Probe
  source 1..80: mol_type = other DNA
tcaagcaaggaagtaacaggatcagattcacatcttggaaatccgcatctgcagtgatcaagacgacagatgagtgagcc

SEQ ID NO: 31702 - DNA, 80 bp, synthetic construct
  misc_feature 1..80: note = Artificially Synthesized Probe
  source 1..80: mol_type = other DNA
cacatttatccacgtgcttatttatttgaaatggaaaacctttgaatactgctcggtggaagtcactaaagaggaagagg

SEQ ID NO: 31703 - DNA, 80 bp, synthetic construct
  misc_feature 1..80: note = Artificially Synthesized Probe
  source 1..80: mol_type = other DNA
acatcacagaaacatcattttatactctgcttccctcacctggtattagatgaaacacattttccatgattctcctgccc

SEQ ID NO: 31704 - DNA, 80 bp, synthetic construct
  misc_feature 1..80: note = Artificially Synthesized Probe
  source 1..80: mol_type = other DNA
gtggtgttgttctgacggatttattaaataacccttgcctgggctatagtttcaaaggaccaactctccggccaagagtt

SEQ ID NO: 31705 - DNA, 80 bp, synthetic construct
  misc_feature 1..80: note = Artificially Synthesized Probe
  source 1..80: mol_type = other DNA
ccacatggtgcccactcccatatacaaacaggccctcgtacgtacctaaaccctgccctcatggtgcccacccaggtttc

SEQ ID NO: 31706 - DNA, 80 bp, synthetic construct
  misc_feature 1..80: note = Artificially Synthesized Probe
  source 1..80: mol_type = other DNA
atcccggcactttgggaggccaaggctggaggatcatttgagcctaggagtttgagaccagcctgagcaacatatcgaga

SEQ ID NO: 31707 - DNA, 80 bp, synthetic construct
  misc_feature 1..80: note = Artificially Synthesized Probe
  source 1..80: mol_type = other DNA
ttctaatgtgacggaaagttcagtttgactcagctaacatttgttgagtccctgtgatgtgtccagttctagagaaatca

SEQ ID NO: 31708 - DNA, 80 bp, synthetic construct
  misc_feature 1..80: note = Artificially Synthesized Probe
  source 1..80: mol_type = other DNA
cctccatagctttaagctgattgcccccaattccaggctccaaccttgatctctgtgacctcacactcatttttctaaat

SEQ ID NO: 31709 - DNA, 80 bp, synthetic construct
  misc_feature 1..80: note = Artificially Synthesized Probe
  source 1..80: mol_type = other DNA
acaatttgtgtccacttggctcatgacttatccctggggcctgaacacagcaggcccctgacatgtatgtggagtcttcc

SEQ ID NO: 31710 - DNA, 80 bp, synthetic construct
  misc_feature 1..80: note = Artificially Synthesized Probe
  source 1..80: mol_type = other DNA
tgcaccactgcactccagcctgggcaacagaacgagactccataaaaatgccaggtgtggtggtgcatgcctgtaatccc

SEQ ID NO: 31711 - DNA, 80 bp, synthetic construct
  misc_feature 1..80: note = Artificially Synthesized Probe
  source 1..80: mol_type = other DNA
ttaccaacgatttaagatgggcaagatagcttgagcactgtcttcccttgaggctctttgctggcttatcataacctcag

SEQ ID NO: 31712 - DNA, 80 bp, synthetic construct
  misc_feature 1..80: note = Artificially Synthesized Probe
  source 1..80: mol_type = other DNA
gcaaccagaaagaaaaaggagcatgattatttgtgtaagtgaatgcttttcagctcccaaagcgaatggatcttggtgca

SEQ ID NO: 31713 - DNA, 80 bp, synthetic construct
  misc_feature 1..80: note = Artificially Synthesized Probe
  source 1..80: mol_type = other DNA
tcggttcccttattcaacaactgtggcctgctataggagtcaatttcttgttacctttggtcaggggaataagacttact

SEQ ID NO: 31714 - DNA, 80 bp, synthetic construct
  misc_feature 1..80: note = Artificially Synthesized Probe
  source 1..80: mol_type = other DNA
cagtcagagcagtgataaatcagaacacaaacaagcaaaggcagcacttgcctactttgggtcacaacacaggagcttcc

SEQ ID NO: 31715 - DNA, 80 bp, synthetic construct
  misc_feature 1..80: note = Artificially Synthesized Probe
  source 1..80: mol_type = other DNA
gcaatgttacatgtctctatctagttcagaaacatttgtatcaccccaaagaaagacccagagccattaagcagccatgc

SEQ ID NO: 31716 - DNA, 80 bp, synthetic construct
  misc_feature 1..80: note = Artificially Synthesized Probe
  source 1..80: mol_type = other DNA
tgcattgcctctgcagcagttgttaaaaggaagaaaggcggggctgtggataaacttagtctagtgtcagtcccagagga

SEQ ID NO: 31717 - DNA, 80 bp, synthetic construct
  misc_feature 1..80: note = Artificially Synthesized Probe
  source 1..80: mol_type = other DNA
tattaagtcgcattcatacttgaaaatttcccaatattttggagaattcagcacactttccctctccttcatgtaaaata

SEQ ID NO: 31718 - DNA, 80 bp, synthetic construct
  misc_feature 1..80: note = Artificially Synthesized Probe
  source 1..80: mol_type = other DNA
aggaaagggcctagcttctgtgtggcccacagagttcactgcctgtgagacttagcaccaagtgctgaggctggaagaaa

SEQ ID NO: 31719 - DNA, 80 bp, synthetic construct
  misc_feature 1..80: note = Artificially Synthesized Probe
  source 1..80: mol_type = other DNA
gaattaatgtagggagctaaatccagtggtgtgtgtgaatgcagaagggaatgcaccccacattcccatgatggaagtct

SEQ ID NO: 31720 - DNA, 80 bp, synthetic construct
  misc_feature 1..80: note = Artificially Synthesized Probe
  source 1..80: mol_type = other DNA
aatgtcattccgcggctggagttaaagaagcaaacggtctacgtcaccaagaccatgagacggtttcaaaaatggtctac

SEQ ID NO: 31721 - DNA, 80 bp, synthetic construct
  misc_feature 1..80: note = Artificially Synthesized Probe
  source 1..80: mol_type = other DNA
tgcttaaggccttcgtccctccagctggccacacccagccccccagctgggcctctcttcactttccagagcctctcccc

SEQ ID NO: 31722 - DNA, 80 bp, synthetic construct
  misc_feature 1..80: note = Artificially Synthesized Probe
  source 1..80: mol_type = other DNA
gctgtgggagatgcctgccctggaagcactctgcaccgcagcggtgggcaggcctcaccgtgtatgagggcgtcctctgc

SEQ ID NO: 31723 - DNA, 80 bp, synthetic construct
  misc_feature 1..80: note = Artificially Synthesized Probe
  source 1..80: mol_type = other DNA
cgccggcacgtccaccaccaggccctggcacaggagggcgtccacgactgtgcgcccgccactcaggcggaagttgaagt

SEQ ID NO: 31724 - DNA, 80 bp, synthetic construct
  misc_feature 1..80: note = Artificially Synthesized Probe
  source 1..80: mol_type = other DNA
ccagcagccgctccgccaccttcccgtcacctgctgtgggaacagaaatggggtagggaccacagggttccggatgctcg

SEQ ID NO: 31725 - DNA, 80 bp, synthetic construct
  misc_feature 1..80: note = Artificially Synthesized Probe
  source 1..80: mol_type = other DNA
taccaaaatcaaatctcattgattttaaactctccgagttgccactggaaaaaaatctgacccatgcctcccacccaggc

SEQ ID NO: 31726 - DNA, 80 bp, synthetic construct
  misc_feature 1..80: note = Artificially Synthesized Probe
  source 1..80: mol_type = other DNA
cgtgctgcccaccctgtccctgagccacccctacgcgtgccccgctggccgccctcccgctcaccttgagcaggtgattc

SEQ ID NO: 31727 - DNA, 80 bp, synthetic construct
  misc_feature 1..80: note = Artificially Synthesized Probe
  source 1..80: mol_type = other DNA
ccaggctgatgctttcagattttaatacggcggtgcacacagatggttaaacaccgtgtggcacagcaacgtccctgccc

SEQ ID NO: 31728 - DNA, 80 bp, synthetic construct
  misc_feature 1..80: note = Artificially Synthesized Probe
  source 1..80: mol_type = other DNA
tccagggccaggacactgcacagcttctgcatgaggacgctcaggctggctgccacagcctgggccagctctccgagcaa

SEQ ID NO: 31729 - DNA, 80 bp, synthetic construct
  misc_feature 1..80: note = Artificially Synthesized Probe
  source 1..80: mol_type = other DNA
aaaagagaggggaacacagagagacagggaagaggccacataaagacagaggcagagactggagcatgcggccacaagcc

SEQ ID NO: 31730 - DNA, 80 bp, synthetic construct
  misc_feature 1..80: note = Artificially Synthesized Probe
  source 1..80: mol_type = other DNA
tacgtaattgtatgcaggatgccatcctgtctaccttaacacaacgtcacgcccacgaatggttctgaaacgcacaggaa

SEQ ID NO: 31731 - DNA, 80 bp, synthetic construct
  misc_feature 1..80: note = Artificially Synthesized Probe
  source 1..80: mol_type = other DNA
tcgctctgcactgagcccctggagggactggtcccattccgggcttccaggtcctcctggctgcctcgaaaacgcctcct

SEQ ID NO: 31732 - DNA, 80 bp, synthetic construct
  misc_feature 1..80: note = Artificially Synthesized Probe
  source 1..80: mol_type = other DNA
tttgggtcgtttatttactaagagacagcaagaaggggtgttacacatgcagggagcggagcgtctggggctcccctgga

SEQ ID NO: 31733 - DNA, 80 bp, synthetic construct
  misc_feature 1..80: note = Artificially Synthesized Probe
  source 1..80: mol_type = other DNA
cccaggaggtggaggttgcagggagctgggatcatgccattgcactccagcctaggtgacaagaatgaaactccatctca

SEQ ID NO: 31734 - DNA, 80 bp, synthetic construct
  misc_feature 1..80: note = Artificially Synthesized Probe
  source 1..80: mol_type = other DNA
tttacaattgacaccagtggttctcaaaccagggtgattttgtttccaggggatacttgtctggggacagttttagatgt

SEQ ID NO: 31735 - DNA, 80 bp, synthetic construct
  misc_feature 1..80: note = Artificially Synthesized Probe
  source 1..80: mol_type = other DNA
aaaacaaaacaaaacaaaacaagaccagactggccaacatggtgaaacctgttgtttcacctgttcacctgtctctacta

SEQ ID NO: 31736 - DNA, 80 bp, synthetic construct
  misc_feature 1..80: note = Artificially Synthesized Probe
  source 1..80: mol_type = other DNA
ctcactctgtttctggcccctcagggggactcatgctctgaggactttcttttttttttttttttgagacggagtttcac

SEQ ID NO: 31737 - DNA, 80 bp, synthetic construct
  misc_feature 1..80: note = Artificially Synthesized Probe
  source 1..80: mol_type = other DNA
gcgggcagacgggggtccatggtggtgggtggcgccggggccaagcggggaccccctttataggcgcctgggccgtccca

SEQ ID NO: 31738 - DNA, 80 bp, synthetic construct
  misc_feature 1..80: note = Artificially Synthesized Probe
  source 1..80: mol_type = other DNA
atttctcggggacccttaaggaaatattcaccttccattgcactccctgaaagtccaccatgttcttttgtatgttctag

SEQ ID NO: 31739 - DNA, 80 bp, synthetic construct
  misc_feature 1..80: note = Artificially Synthesized Probe
  source 1..80: mol_type = other DNA
ctgcttccaatgatgaaacagcacctaggacagctcctaaaacctgaacattttctgatgcgtatttgacatcactgatg

SEQ ID NO: 31740 - DNA, 80 bp, synthetic construct
  misc_feature 1..80: note = Artificially Synthesized Probe
  source 1..80: mol_type = other DNA
tgggttaccccatatatcagatacatcatgacagcctggaacttagtttatgtttggggaacatagtgacaatagatgga

SEQ ID NO: 31741 - DNA, 80 bp, synthetic construct
  misc_feature 1..80: note = Artificially Synthesized Probe
  source 1..80: mol_type = other DNA
ctctcagtgcacctctctcttacattgcttagatgttcccaaagtccatccaggttgttgtgctttgggatctgacgttc

SEQ ID NO: 31742 - DNA, 80 bp, synthetic construct
  misc_feature 1..80: note = Artificially Synthesized Probe
  source 1..80: mol_type = other DNA
ggagggtagaaacctgaggctagacttctgacacaagaagaatctgtcgagagcacagtctcccagtcaataagaaggaa

SEQ ID NO: 31743 - DNA, 80 bp, synthetic construct
  misc_feature 1..80: note = Artificially Synthesized Probe
  source 1..80: mol_type = other DNA
gaaggattggaccgaggcaaggtcagaatccgcccgtttttcttgcctccgttcatgtgtgtgtaagggatgtgttcctc

SEQ ID NO: 31744 - DNA, 80 bp, synthetic construct
  misc_feature 1..80: note = Artificially Synthesized Probe
  source 1..80: mol_type = other DNA
cctcaacctcccaaagtgctgaggttccaggcatgagccatcctgtccagcctgaaagatggttttgaaaagggattcct

SEQ ID NO: 31745 - DNA, 80 bp, synthetic construct
  misc_feature 1..80: note = Artificially Synthesized Probe
  source 1..80: mol_type = other DNA
aagcgtacatgtagcacatatgggaactcaagtgtgtgtaccacaatgcaatatgcaaatgcaagcatgcatgtaaagac

SEQ ID NO: 31746 - DNA, 80 bp, synthetic construct
  misc_feature 1..80: note = Artificially Synthesized Probe
  source 1..80: mol_type = other DNA
aacatggttagccacttaataaaacaattcatgctgcagttcataaatgctgtgaaaggaaaatcaatttggggctccca

SEQ ID NO: 31747 - DNA, 80 bp, synthetic construct
  misc_feature 1..80: note = Artificially Synthesized Probe
  source 1..80: mol_type = other DNA
tggattctgagggtacgcatggggaagtgaagggggaagatgggctactgtttaaagggagggaaaagaaggtaccaaat

SEQ ID NO: 31748 - DNA, 80 bp, synthetic construct
  misc_feature 1..80: note = Artificially Synthesized Probe
  source 1..80: mol_type = other DNA
agaagtgaatgggtaagtgagtttatcaatacatgcaattaaatgacagctggtggggggtccccatccaaaatcttgcc

SEQ ID NO: 31749 - DNA, 80 bp, synthetic construct
  misc_feature 1..80: note = Artificially Synthesized Probe
  source 1..80: mol_type = other DNA
gccatcccgtcagcaatctctgccgccatctgaatcatctcttgaagggtagggggagggcggccaggattattctaaaa

SEQ ID NO: 31750 - DNA, 80 bp, synthetic construct
  misc_feature 1..80: note = Artificially Synthesized Probe
  source 1..80: mol_type = other DNA
tttcctccctttcttcatgtttccatagcatttgctcctaatgtataaagggtttggagtcagctgggggtggtggctta

SEQ ID NO: 31751 - DNA, 80 bp, synthetic construct
  misc_feature 1..80: note = Artificially Synthesized Probe
  source 1..80: mol_type = other DNA
acataggactcaaagaggaacaaaggagcagaaaggcaggaagagttggtgctgccttcaaaggagagtaggaacgaggg

SEQ ID NO: 31752 - DNA, 80 bp, synthetic construct
  misc_feature 1..80: note = Artificially Synthesized Probe
  source 1..80: mol_type = other DNA
atggccttgtgagttattttggtcaatgggaatcaacaagaattgtccaagcagagatttggaatggactgttgccctgg

SEQ ID NO: 31753 - DNA, 80 bp, synthetic construct
  misc_feature 1..80: note = Artificially Synthesized Probe
  source 1..80: mol_type = other DNA
tgcagaaaggtgtttcatacaagactccccaaggcaaatggcagcccttaccagcagaatccccataatcctagatgcag

SEQ ID NO: 31754 - DNA, 80 bp, synthetic construct
  misc_feature 1..80: note = Artificially Synthesized Probe
  source 1..80: mol_type = other DNA
aactggcaaatgctataactcaggactggatttgttgttctgttgtttgtccaggcttgagaaagtgatgagaaaaatat

SEQ ID NO: 31755 - DNA, 80 bp, synthetic construct
  misc_feature 1..80: note = Artificially Synthesized Probe
  source 1..80: mol_type = other DNA
cactgtgcccagtcaagtcctactccttaatgtaaattttgaaaaattaatcaacattcacattggagctttacttgttt

SEQ ID NO: 31756 - DNA, 80 bp, synthetic construct
  misc_feature 1..80: note = Artificially Synthesized Probe
  source 1..80: mol_type = other DNA
ttttcattgttcactgggtcttgcaaattacatagctagtcccgatcccagcatgacttttgacagatgtaaacttcttt

SEQ ID NO: 31757 - DNA, 80 bp, synthetic construct
  misc_feature 1..80: note = Artificially Synthesized Probe
  source 1..80: mol_type = other DNA
taataagtgggttctcatgggatctggttgtttaagaagtgtgtagcaccatctccccgtcttaacaccttgctcccact

SEQ ID NO: 31758 - DNA, 80 bp, synthetic construct
  misc_feature 1..80: note = Artificially Synthesized Probe
  source 1..80: mol_type = other DNA
caaaaaacgacctatcaggtactatgctgattacatgggtgacaaaattatctgtacagcaaacccccaacaacacccaa

SEQ ID NO: 31759 - DNA, 80 bp, synthetic construct
  misc_feature 1..80: note = Artificially Synthesized Probe
  source 1..80: mol_type = other DNA
ctttgagaattgcagaattttataaccatagtgctatggataaagatatatgcagaggttatcattatcggtaagagcca

SEQ ID NO: 31760 - DNA, 80 bp, synthetic construct
  misc_feature 1..80: note = Artificially Synthesized Probe
  source 1..80: mol_type = other DNA
tattcttctagccattttgcaatatgtgttattagctatagtcaccattcatctacagagcagtggattcctagaacgta

SEQ ID NO: 31761 - DNA, 80 bp, synthetic construct
  misc_feature 1..80: note = Artificially Synthesized Probe
  source 1..80: mol_type = other DNA
gaactgtctggctctagaacttctccttaagaccactgcagaatatttttgccatgtatccagcaaaattagaaaagagt

SEQ ID NO: 31762 - DNA, 80 bp, synthetic construct
  misc_feature 1..80: note = Artificially Synthesized Probe
  source 1..80: mol_type = other DNA
gtaactagagataattccagaacttatgagaagagacaggaggctcttgggaataagaccatgaaacctgcaagcatcga

SEQ ID NO: 31763 - DNA, 80 bp, synthetic construct
  misc_feature 1..80: note = Artificially Synthesized Probe
  source 1..80: mol_type = other DNA
tgtgccattttatgttcccaccagcaatgtatgagggttccgatttctcctcatcctcaccgacacttgttattgtccgt

SEQ ID NO: 31764 - DNA, 80 bp, synthetic construct
  misc_feature 1..80: note = Artificially Synthesized Probe
  source 1..80: mol_type = other DNA
gagagaagcagagatgggggagaaaatgaaaggagaatgtgaggttacagtcaccttcttaagaaccttttcatagacac

SEQ ID NO: 31765 - DNA, 80 bp, synthetic construct
  misc_feature 1..80: note = Artificially Synthesized Probe
  source 1..80: mol_type = other DNA
atgtgagaagctcttcagttgttcaactctgggagctaagaagcttttcctctatcataagctagtctggatacaggggg

SEQ ID NO: 31766 - DNA, 80 bp, synthetic construct
  misc_feature 1..80: note = Artificially Synthesized Probe
  source 1..80: mol_type = other DNA
gtagatgggactacaggcatagaccaccacacctagctaattttgaaattttttttttgcagagatggggtctggctgtg

SEQ ID NO: 31767 - DNA, 80 bp, synthetic construct
  misc_feature 1..80: note = Artificially Synthesized Probe
  source 1..80: mol_type = other DNA
caactacaaatcataattccaaaggctattgtggacagagacatcaaaaggcagaggaaagtaactcatgaatatggatt

SEQ ID NO: 31768 - DNA, 80 bp, synthetic construct
  misc_feature 1..80: note = Artificially Synthesized Probe
  source 1..80: mol_type = other DNA
agacattttgctgtaatctctgttagttgttggcaaactctggcccaccaactaaacctggtccaccacgtgtttttgta

SEQ ID NO: 31769 - DNA, 80 bp, synthetic construct
  misc_feature 1..80: note = Artificially Synthesized Probe
  source 1..80: mol_type = other DNA
aatgtgagaaactaagaaaagtaacaagctggtagattggcatttctgacccatcttcctgcgaagtcaggtatcaaggc

SEQ ID NO: 31770 - DNA, 80 bp, synthetic construct
  misc_feature 1..80: note = Artificially Synthesized Probe
  source 1..80: mol_type = other DNA
gttcggtgctcatgcctgtaatcccagcactttgagaggccgatgtgggtggatcacttgagcccaggagttcaagacca

SEQ ID NO: 31771 - DNA, 80 bp, synthetic construct
  misc_feature 1..80: note = Artificially Synthesized Probe
  source 1..80: mol_type = other DNA
ttaaaaaagtgacactggagaataaaaggcttgattaagaagaaagatcagagcgcaggagggtgcagcaatggggaaca

SEQ ID NO: 31772 - DNA, 80 bp, synthetic construct
  misc_feature 1..80: note = Artificially Synthesized Probe
  source 1..80: mol_type = other DNA
cagcccactgcttcctttggacaattttttccctgtaaatattatgtgtgaacatgatgaggatcaagcctgttttataa

SEQ ID NO: 31773 - DNA, 80 bp, synthetic construct
  misc_feature 1..80: note = Artificially Synthesized Probe
  source 1..80: mol_type = other DNA
tctttaacccaagagattaaaaatatgctatcactcgactacgttatttgcggatctttatattactgagtgtgacttca

SEQ ID NO: 31774 - DNA, 80 bp, synthetic construct
  misc_feature 1..80: note = Artificially Synthesized Probe
  source 1..80: mol_type = other DNA
ggggcttccttgttttgttcctaactctgctaagaataattttaagaatgatgttagcttggctgttggtttaacctagg

SEQ ID NO: 31775 - DNA, 80 bp, synthetic construct
  misc_feature 1..80: note = Artificially Synthesized Probe
  source 1..80: mol_type = other DNA
ccatttagacaagttaaattttcccaccttactgaaactttcaaatttagcaagtgcaccattgtccaaagaacttaaca

SEQ ID NO: 31776 - DNA, 80 bp, synthetic construct
  misc_feature 1..80: note = Artificially Synthesized Probe
  source 1..80: mol_type = other DNA
tatgtccgtattagcaagattcagataatttctatacaggcacaaatgggtctcgtgaaaataaccaagacgttggtgct

SEQ ID NO: 31777 - DNA, 80 bp, synthetic construct
  misc_feature 1..80: note = Artificially Synthesized Probe
  source 1..80: mol_type = other DNA
ggcgtgtgtcaccatgcccggctaatttttatatttcttgtagtaacggggtttcaccatcttggtcaggctggtctcga

SEQ ID NO: 31778 - DNA, 80 bp, synthetic construct
  misc_feature 1..80: note = Artificially Synthesized Probe
  source 1..80: mol_type = other DNA
ccactgcactctagcctgggcaacaagagtgaaattccatccaaaaaaaaaagaagaaggaaagaaggaagggagggagg

SEQ ID NO: 31779 - DNA, 80 bp, synthetic construct
  misc_feature 1..80: note = Artificially Synthesized Probe
  source 1..80: mol_type = other DNA
gggtcctcggcaccagtgcctgaagaggtttttctgtggaaacaaaaccaacgcctttgaggacagagggaacttcatta

SEQ ID NO: 31780 - DNA, 80 bp, synthetic construct
  misc_feature 1..80: note = Artificially Synthesized Probe
  source 1..80: mol_type = other DNA
aaaagaaaaaaaaaaaagaggattcttacacactggtggttctgggagaaaagtctgctcggatgaatagcattggtaaa

SEQ ID NO: 31781 - DNA, 80 bp, synthetic construct
  misc_feature 1..80: note = Artificially Synthesized Probe
  source 1..80: mol_type = other DNA
taatcgtctaacggagtttgttttggaactcacgtggagaccagctcaggagaggtaagaaaggcaaatgctgagttttg

SEQ ID NO: 31782 - DNA, 80 bp, synthetic construct
  misc_feature 1..80: note = Artificially Synthesized Probe
  source 1..80: mol_type = other DNA
acacgcaccacacacacaccacatacacacttcacacacaccacacaccacacaaatcacacacaccaccacacccacgc

SEQ ID NO: 31783 - DNA, 80 bp, synthetic construct
  misc_feature 1..80: note = Artificially Synthesized Probe
  source 1..80: mol_type = other DNA
gcgtgagccactgcacccggcccacaattacttttgcaccaacctaatagaaactgccaggtggctgggcgcggtggctc

SEQ ID NO: 31784 - DNA, 80 bp, synthetic construct
  misc_feature 1..80: note = Artificially Synthesized Probe
  source 1..80: mol_type = other DNA
caaaaaaaaaaaaaaaaatctctggaaaccaatatagctggaagggggtgagagagagaatggtgggagggggttagaaa

SEQ ID NO: 31785 - DNA, 80 bp, synthetic construct
  misc_feature 1..80: note = Artificially Synthesized Probe
  source 1..80: mol_type = other DNA
ggtccattcatgagtccagaaatcagacttgatcagtgaatggttctcacccagggggtgattttgtctcctactaggga

SEQ ID NO: 31786 - DNA, 80 bp, synthetic construct
  misc_feature 1..80: note = Artificially Synthesized Probe
  source 1..80: mol_type = other DNA
cccgacctcaggtgatccacccgccttggcctcccaaagtgctgggattacaggcgtgagccactgcgcccagccgattt

SEQ ID NO: 31787 - DNA, 80 bp, synthetic construct
  misc_feature 1..80: note = Artificially Synthesized Probe
  source 1..80: mol_type = other DNA
aaatagacatagaataccctgcctgggttaactctgatgggagctagttacagcattacagatggaaaaaaaaatgtaga

SEQ ID NO: 31788 - DNA, 80 bp, synthetic construct
  misc_feature 1..80: note = Artificially Synthesized Probe
  source 1..80: mol_type = other DNA
caatttttgttttgttttgtttttggtggagtcttgctctgttgccaggctggagtgcaatggcgtgatctcggctcact

SEQ ID NO: 31789 - DNA, 80 bp, synthetic construct
  misc_feature 1..80: note = Artificially Synthesized Probe
  source 1..80: mol_type = other DNA
accaccctgggcaacatatcaagatccccacctctaaaaaattattattatttttattattattatttttcttagatgga

SEQ ID NO: 31790 - DNA, 80 bp, synthetic construct
  misc_feature 1..80: note = Artificially Synthesized Probe
  source 1..80: mol_type = other DNA
agactttaaatattattccattttccttcagatggatggaggtctattaagtaaacaagattaagaaaaatttgtcatta

SEQ ID NO: 31791 - DNA, 80 bp, synthetic construct
  misc_feature 1..80: note = Artificially Synthesized Probe
  source 1..80: mol_type = other DNA
aaggagagacaagaggagaaaatcccagagggaaatggtgccaagacatgggaaaaatctggttttgacacaagtcttca

SEQ ID NO: 31792 - DNA, 80 bp, synthetic construct
  misc_feature 1..80: note = Artificially Synthesized Probe
  source 1..80: mol_type = other DNA
gaagagatagctgcttccctagaggtgaagcaaagtgcatcagacacacgtgtgcaaaccccaccgatcctagcacagct

SEQ ID NO: 31793 - DNA, 80 bp, synthetic construct
  misc_feature 1..80: note = Artificially Synthesized Probe
  source 1..80: mol_type = other DNA
tggggagggagtccaaacacctgggagctagaagtttctgaaaactgtaagtcttttggtgtcactaaaagatacaggat

SEQ ID NO: 31794 - DNA, 80 bp, synthetic construct
  misc_feature 1..80: note = Artificially Synthesized Probe
  source 1..80: mol_type = other DNA
ggtggcttatgcctgtaatcccagcactttgggaggccaaggtgggcagattgcaggtcaagagattgagaccatcctgg

SEQ ID NO: 31795 - DNA, 80 bp, synthetic construct
  misc_feature 1..80: note = Artificially Synthesized Probe
  source 1..80: mol_type = other DNA
gccattgcactccagtccgggtgacagagtgagacttcatctcaaagaaaaaaaaaaaaaaaagccacacatggtggtat

SEQ ID NO: 31796 - DNA, 80 bp, synthetic construct
  misc_feature 1..80: note = Artificially Synthesized Probe
  source 1..80: mol_type = other DNA
cacatgttactcacccaacaatctaatgccacaagaaaaaataactcgggaacagccaaagagaaaggaactgtcaaccc

SEQ ID NO: 31797 - DNA, 80 bp, synthetic construct
  misc_feature 1..80: note = Artificially Synthesized Probe
  source 1..80: mol_type = other DNA
aatacatttgataacatccacttagtagactgagctcctgactactaaggatgtctgatgagacatacacaggcaaggca

SEQ ID NO: 31798 - DNA, 80 bp, synthetic construct
  misc_feature 1..80: note = Artificially Synthesized Probe
  source 1..80: mol_type = other DNA
acctatgccaagtgagtttagagaccctgcagatcattagacatcggagagacgcatctaagtaattctctctgcctaga

SEQ ID NO: 31799 - DNA, 80 bp, synthetic construct
  misc_feature 1..80: note = Artificially Synthesized Probe
  source 1..80: mol_type = other DNA
gcagacaaccgtggccttgatctctttctgggtttggccaagactcagggatgcatcaccatctgagactctcccagccc

SEQ ID NO: 31800 - DNA, 80 bp, synthetic construct
  misc_feature 1..80: note = Artificially Synthesized Probe
  source 1..80: mol_type = other DNA
gcttcatctgtatttacagtcactccccatcgcttgcatgaccacctgagttctgcctcctgtcagattagcggcggcat

SEQ ID NO: 31801 - DNA, 80 bp, synthetic construct
  misc_feature 1..80: note = Artificially Synthesized Probe
  source 1..80: mol_type = other DNA
ctctggtgcctaggctggagtacagataatatagtctaaactatattgtttagaccaccttctcaagtcacttaccagct

SEQ ID NO: 31802 - DNA, 80 bp, synthetic construct
  misc_feature 1..80: note = Artificially Synthesized Probe
  source 1..80: mol_type = other DNA
ccttaagttgttctaatacacgaacttcctagttagcactcaggccatacacacaatcaggcccacgtacccaatttcca

SEQ ID NO: 31803 - DNA, 80 bp, synthetic construct
  misc_feature 1..80: note = Artificially Synthesized Probe
  source 1..80: mol_type = other DNA
ctattaccctgctgcacttcccttcacagcacagaccacaacctgaccttacaatatctgtcgatttacttatgcgcaaa

SEQ ID NO: 31804 - DNA, 80 bp, synthetic construct
  misc_feature 1..80: note = Artificially Synthesized Probe
  source 1..80: mol_type = other DNA
aacacagcctgcagttctgcaatagggcatattgcttgattgttaaaaacgacgattccaaagccaggtggggtggctca

SEQ ID NO: 31805 - DNA, 80 bp, synthetic construct
  misc_feature 1..80: note = Artificially Synthesized Probe
  source 1..80: mol_type = other DNA
tcgatggtcttctcgccttctaggaggtggcacaccttgggacagggacccaggcatggggtgcacagcaagctaaggac

SEQ ID NO: 31806 - DNA, 80 bp, synthetic construct
  misc_feature 1..80: note = Artificially Synthesized Probe
  source 1..80: mol_type = other DNA
gccaaaagtcccctggggagggaggatgccagattgtccccagaaaagaaccactgccttaagtgagagaattatgccat

SEQ ID NO: 31807 - DNA, 80 bp, synthetic construct
  misc_feature 1..80: note = Artificially Synthesized Probe
  source 1..80: mol_type = other DNA
gacagagtgagaatctgtctcaaaacaaacaaacaaaactatgtagcaccttccccctttctctcttccttcagtcatgt

SEQ ID NO: 31808 - DNA, 80 bp, synthetic construct
  misc_feature 1..80: note = Artificially Synthesized Probe
  source 1..80: mol_type = other DNA
aagcttcttgatacagctatacctgaaccaactccctgaactttttggttatgggtaccaacaaactcctttaatcttgg

SEQ ID NO: 31809 - DNA, 80 bp, synthetic construct
  misc_feature 1..80: note = Artificially Synthesized Probe
  source 1..80: mol_type = other DNA
agatgagggggctggaaatggcagtgttgaatcacatggtcaatgatttcaatcaatcacgcctaaggaatgagactcca

SEQ ID NO: 31810 - DNA, 80 bp, synthetic construct
  misc_feature 1..80: note = Artificially Synthesized Probe
  source 1..80: mol_type = other DNA
tcagaacggtgttgcaagtacacccaggtagtggcagaacagctgaggcagaaacaaaatactgaccaaatgtttgactt

SEQ ID NO: 31811 - DNA, 80 bp, synthetic construct
  misc_feature 1..80: note = Artificially Synthesized Probe
  source 1..80: mol_type = other DNA
tcagtcaacacatgaaatcatcagagctcctaaaggagtgttttaagccactaagcactgaggtggttttgttacgcaac

SEQ ID NO: 31812 - DNA, 80 bp, synthetic construct
  misc_feature 1..80: note = Artificially Synthesized Probe
  source 1..80: mol_type = other DNA
gttcaaggggactgggtcagaccagacatgatggtgaaatagatggaggtgtagacaaatttgagacctcagcttaatag

SEQ ID NO: 31813 - DNA, 80 bp, synthetic construct
  misc_feature 1..80: note = Artificially Synthesized Probe
  source 1..80: mol_type = other DNA
tgatatcaaaccacattagaaaatgccacagtacgattaagtctttcataagataaaaagaaaagcttcaggccaggtgc

SEQ ID NO: 31814 - DNA, 80 bp, synthetic construct
  misc_feature 1..80: note = Artificially Synthesized Probe
  source 1..80: mol_type = other DNA
agaggaagatactttacgtaagcaggtcagctcaaggcctcttgatgtgtgtctgtttctgatttgtttttgtgttgttt

SEQ ID NO: 31815 - DNA, 80 bp, synthetic construct
  misc_feature 1..80: note = Artificially Synthesized Probe
  source 1..80: mol_type = other DNA
cccactcccaagcccaggaccaaaacagggtgcaaaagtagcatctgagagcagagacctcactcatagccaattaaccc

SEQ ID NO: 31816 - DNA, 80 bp, synthetic construct
  misc_feature 1..80: note = Artificially Synthesized Probe
  source 1..80: mol_type = other DNA
acatctattaactggtttaagcctccaaaccattggtgagcttgtaaatgtttaacagctgcctgagggaggggcccagg

SEQ ID NO: 31817 - DNA, 80 bp, synthetic construct
  misc_feature 1..80: note = Artificially Synthesized Probe
  source 1..80: mol_type = other DNA
ggctgaggcacgagaatcacttgaatctgggaggtggaggctgcagtgagccatgatcgtgccactatactccagcctgg

SEQ ID NO: 31818 - DNA, 80 bp, synthetic construct
  misc_feature 1..80: note = Artificially Synthesized Probe
  source 1..80: mol_type = other DNA
aaactctgcccccatgaaacagtcacactcatcctcctccccaactcctggcacctgccattttactttctttttctttt

SEQ ID NO: 31819 - DNA, 80 bp, synthetic construct
  misc_feature 1..80: note = Artificially Synthesized Probe
  source 1..80: mol_type = other DNA
gatattttgtcatatggataaaatgtgtaacgatttcttttttgggtgtgtgatggggtctggctctgtcacttaggttc

SEQ ID NO: 31820 - DNA, 80 bp, synthetic construct
  misc_feature 1..80: note = Artificially Synthesized Probe
  source 1..80: mol_type = other DNA
tcaggagttcaagacgaccagcctgaccaacatggtgaaacccgtctctactaaaaatacaaaaattagtcgggtgtggt

SEQ ID NO: 31821 - DNA, 80 bp, synthetic construct
  misc_feature 1..80: note = Artificially Synthesized Probe
  source 1..80: mol_type = other DNA
aatggcctaacacaaacctctcaaacacataagtccttccggcctagacaatgggaagaaaaattatccaaccattgcaa

SEQ ID NO: 31822 - DNA, 80 bp, synthetic construct
  misc_feature 1..80: note = Artificially Synthesized Probe
  source 1..80: mol_type = other DNA
ctccttgccgaaaaaaaaaagaaaaaaatcatccccaaagattacagttttattgtcctatgggacattaagcagcctca

SEQ ID NO: 31823 - DNA, 80 bp, synthetic construct
  misc_feature 1..80: note = Artificially Synthesized Probe
  source 1..80: mol_type = other DNA
agaaagaaaagccactcggggtggccactgcaccccctagctgagtgggagtcctctaaactggtgctggacgtttccac

SEQ ID NO: 31824 - DNA, 80 bp, synthetic construct
  misc_feature 1..80: note = Artificially Synthesized Probe
  source 1..80: mol_type = other DNA
gggcatgacacagatgaactagccacaaaacagcagcttcttctggtgagagagaccgcaaagtgaagacattatgaaag

SEQ ID NO: 31825 - DNA, 80 bp, synthetic construct
  misc_feature 1..80: note = Artificially Synthesized Probe
  source 1..80: mol_type = other DNA
aaaggaacgaatcttgcaccaagaggcaagtgcaatttgatgcagtatttcttttttttctttttttttttttccccaga

SEQ ID NO: 31826 - DNA, 80 bp, synthetic construct
  misc_feature 1..80: note = Artificially Synthesized Probe
  source 1..80: mol_type = other DNA
agccacaatgcccagccaggaaatacatttttcaaaagcctctgctagacagtaaacaatgttattgatcagttacatga

SEQ ID NO: 31827 - DNA, 80 bp, synthetic construct
  misc_feature 1..80: note = Artificially Synthesized Probe
  source 1..80: mol_type = other DNA
atcccacagtactagaaaatggcaagagtaaatcttgttgtgggaaacttttcattcaggtatatgcatgtcttgggtac

SEQ ID NO: 31828 - DNA, 80 bp, synthetic construct
  misc_feature 1..80: note = Artificially Synthesized Probe
  source 1..80: mol_type = other DNA
cattcaaatgcaaagtgtgatcctagattggaaccttcgcctaggaaaaaaaatctatatagggcaatattgagacaaca

SEQ ID NO: 31829 - DNA, 80 bp, synthetic construct
  misc_feature 1..80: note = Artificially Synthesized Probe
  source 1..80: mol_type = other DNA
ccctataagtgtgagttttataaactccttaaagtaatttattttgtttccattcaaggcctttctctcccacactggcc

SEQ ID NO: 31830 - DNA, 80 bp, synthetic construct
  misc_feature 1..80: note = Artificially Synthesized Probe
  source 1..80: mol_type = other DNA
gagagtgtgtgcgcgtgtgtgtctgtgcagccccaggattggtcggttccagagtgagagtgtgtgtgtgtgtgtgtgtg

SEQ ID NO: 31831 - DNA, 80 bp, synthetic construct
  misc_feature 1..80: note = Artificially Synthesized Probe
  source 1..80: mol_type = other DNA
ttgaatttgcagttccagtaaaccaaggcagcgagtggacattctcatttaacattcacccccataaatacacttttttt

SEQ ID NO: 31832 - DNA, 80 bp, synthetic construct
  misc_feature 1..80: note = Artificially Synthesized Probe
  source 1..80: mol_type = other DNA
taacacggcatcacactgtgagttatgtttacctgttccctacctcgacccacccagatctgacaccctcttggcattgg

SEQ ID NO: 31833 - DNA, 80 bp, synthetic construct
  misc_feature 1..80: note = Artificially Synthesized Probe
  source 1..80: mol_type = other DNA
ataaaaaattaaaaattagctgggcatgatgatacacaagtgtagttccagctaatggggaggctgaggcaggaggattg

SEQ ID NO: 31834 - DNA, 80 bp, synthetic construct
  misc_feature 1..80: note = Artificially Synthesized Probe
  source 1..80: mol_type = other DNA
ttcagagcctcaatttctggtaaagagaaacaattaagctaaataaaagtaacacttgaatcagtaaatgaagttatttt

SEQ ID NO: 31835 - DNA, 80 bp, synthetic construct
  misc_feature 1..80: note = Artificially Synthesized Probe
  source 1..80: mol_type = other DNA
atttaattttcacgtgggttgtggccaccctactgagcagcatctctctaaaagatccagctttttgattttgtcagttc

SEQ ID NO: 31836 - DNA, 80 bp, synthetic construct
  misc_feature 1..80: note = Artificially Synthesized Probe
  source 1..80: mol_type = other DNA
ctctctccctgaaaacgcctcgcgccttgaattctttgcttatttttctctgttcaaatttagccacacgttgaagtttt

SEQ ID NO: 31837 - DNA, 80 bp, synthetic construct
  misc_feature 1..80: note = Artificially Synthesized Probe
  source 1..80: mol_type = other DNA
ttacaggctcccggctcactgcaatctctgcctcccgggttcaagcaattctcctgcctcagcctcctgagtagctggga

SEQ ID NO: 31838 - DNA, 80 bp, synthetic construct
  misc_feature 1..80: note = Artificially Synthesized Probe
  source 1..80: mol_type = other DNA
caccatctgagctccagatacaagctaatggttagaacagacctttccacagcctagagggtagacagagagaaatcttt

SEQ ID NO: 31839 - DNA, 80 bp, synthetic construct
  misc_feature 1..80: note = Artificially Synthesized Probe
  source 1..80: mol_type = other DNA
aatagcactcacaacttcctttatttcatgggaagagagggttggatggattaaaccaggggtcccccacccctcaggga

SEQ ID NO: 31840 - DNA, 80 bp, synthetic construct
  misc_feature 1..80: note = Artificially Synthesized Probe
  source 1..80: mol_type = other DNA
cgctgtttttctaaagcccaaatatcacgttgtcaaccacacttcctgatgacatctaaatcccctttgaaactgcttgg

SEQ ID NO: 31841 - DNA, 80 bp, synthetic construct
  misc_feature 1..80: note = Artificially Synthesized Probe
  source 1..80: mol_type = other DNA
tttgtggttaagagctggcccctcttccagcccttgtaccccccagaaaaccacctcgtgtttggctcacgaacttctgc

SEQ ID NO: 31842 - DNA, 80 bp, synthetic construct
  misc_feature 1..80: note = Artificially Synthesized Probe
  source 1..80: mol_type = other DNA
caacagagcaagactccattaaaaaaaaaaattagctgggcatagtggcacatgcctgtgatcccagctactcaggaggc

SEQ ID NO: 31843 - DNA, 80 bp, synthetic construct
  misc_feature 1..80: note = Artificially Synthesized Probe
  source 1..80: mol_type = other DNA
acaaagggctggaaatgtctattggttgtgggttgaataagtaaattccaaatgaacgtgaccacagaagaaacagagat

SEQ ID NO: 31844 - DNA, 80 bp, synthetic construct
  misc_feature 1..80: note = Artificially Synthesized Probe
  source 1..80: mol_type = other DNA
tgacacaagcaaggcactggcctctggcataaaagttaaggcgtgccaaaaccgtcttcaagataagttatatatataaa

SEQ ID NO: 31845 - DNA, 80 bp, synthetic construct
  misc_feature 1..80: note = Artificially Synthesized Probe
  source 1..80: mol_type = other DNA
actaacaacaaaagaaaagtgcaccatcaatgacccctcaggaaccaaaacatgcacaatcccattgacacagggacaga

SEQ ID NO: 31846 - DNA, 80 bp, synthetic construct
  misc_feature 1..80: note = Artificially Synthesized Probe
  source 1..80: mol_type = other DNA
acaagacatcgtggaccttgacctcatggtgcttccagtctagcaggcaggcaggcagaatcagagagaaaatttttctt

SEQ ID NO: 31847 - DNA, 80 bp, synthetic construct
  misc_feature 1..80: note = Artificially Synthesized Probe
  source 1..80: mol_type = other DNA
tattatgcagcattcacttcccctttgcttctctcccccaaggaatgctcaagataaattctctcttgcaggtcctttat

SEQ ID NO: 31848 - DNA, 80 bp, synthetic construct
  misc_feature 1..80: note = Artificially Synthesized Probe
  source 1..80: mol_type = other DNA
gtttcttcacacgtcctcccagaactctagttcttattcccccctgtgctggccctccataaacatttgctgaacaaata

SEQ ID NO: 31849 - DNA, 80 bp, synthetic construct
  misc_feature 1..80: note = Artificially Synthesized Probe
  source 1..80: mol_type = other DNA
acaaaggtcatacagcaaagaagtggaagaactaggattcgaacccaggaccatgggctctgagtctgtgcttgttcatg

SEQ ID NO: 31850 - DNA, 80 bp, synthetic construct
  misc_feature 1..80: note = Artificially Synthesized Probe
  source 1..80: mol_type = other DNA
tggatgtaactgactgtgcctctgaaatcctaaacagaatattacatggcgtcttggacctccgtgatgttatgcggtac

SEQ ID NO: 31851 - DNA, 80 bp, synthetic construct
  misc_feature 1..80: note = Artificially Synthesized Probe
  source 1..80: mol_type = other DNA
aggctccagagagaatccagcttttaaggcagctcctttttcttggccgtagcatttcaatctcttgcctccctctttcc

SEQ ID NO: 31852 - DNA, 80 bp, synthetic construct
  misc_feature 1..80: note = Artificially Synthesized Probe
  source 1..80: mol_type = other DNA
agggtgacacagaaagttctcatgtacccatcactcagtaaagagataaattccccaggaatggaacagaatgtggcacc

SEQ ID NO: 31853 - DNA, 80 bp, synthetic construct
  misc_feature 1..80: note = Artificially Synthesized Probe
  source 1..80: mol_type = other DNA
cagcaaagaagaaggcatgaaccattcgctcttctgtgcagcagtcactctgtgtgtggttttcagacatatttaaagtg

SEQ ID NO: 31854 - DNA, 80 bp, synthetic construct
  misc_feature 1..80: note = Artificially Synthesized Probe
  source 1..80: mol_type = other DNA
agaacgattgctggctcatttaactaacaagtcataggacaaggacactttcaggtacagctagatccaggtgtcaaatg

SEQ ID NO: 31855 - DNA, 80 bp, synthetic construct
  misc_feature 1..80: note = Artificially Synthesized Probe
  source 1..80: mol_type = other DNA
ctaggtaggttcggtcttgttatgcccattcgaaaaactgggactaacagagcatatgttatgcagtgaccaagaaaatt

SEQ ID NO: 31856 - DNA, 80 bp, synthetic construct
  misc_feature 1..80: note = Artificially Synthesized Probe
  source 1..80: mol_type = other DNA
acttttcctttctagctatgtccccttctctaggcaattcagctactccaggccccccgtccacttaccaggacacagga

SEQ ID NO: 31857 - DNA, 80 bp, synthetic construct
  misc_feature 1..80: note = Artificially Synthesized Probe
  source 1..80: mol_type = other DNA
cctcctgcttcagcctctggagtagctgggactacagccatgggccaccacagctggctaatttttttatttgtttagag

SEQ ID NO: 31858 - DNA, 80 bp, synthetic construct
  misc_feature 1..80: note = Artificially Synthesized Probe
  source 1..80: mol_type = other DNA
agaaatggaagtatctagagaaagaagcccagcataaagacacaagggagcatttttggaggtaaccattgacagaaatg

SEQ ID NO: 31859 - DNA, 80 bp, synthetic construct
  misc_feature 1..80: note = Artificially Synthesized Probe
  source 1..80: mol_type = other DNA
tttaaagacaaagtcttgtgacatgctcaaaccagctcatgcaaatctccgtttcagtctttctccctcaacctcaagcc

SEQ ID NO: 31860 - DNA, 80 bp, synthetic construct
  misc_feature 1..80: note = Artificially Synthesized Probe
  source 1..80: mol_type = other DNA
gaggttgtggccacatgctgtgtaacacttagagtttcctatgcacccagcactattccaattattaaccatttatttcc

SEQ ID NO: 31861 - DNA, 80 bp, synthetic construct
  misc_feature 1..80: note = Artificially Synthesized Probe
  source 1..80: mol_type = other DNA
caagatgacaacgtctctgagtttgacacaaggttagggggaagtctcatttttcaaatggctggctgtaacactaaaaa

SEQ ID NO: 31862 - DNA, 80 bp, synthetic construct
  misc_feature 1..80: note = Artificially Synthesized Probe
  source 1..80: mol_type = other DNA
gtaaacagttcaaatcttgtcttggacaccaatgaaataagaaaagctagccacaggctgtgtggaattccttcctctta

SEQ ID NO: 31863 - DNA, 80 bp, synthetic construct
  misc_feature 1..80: note = Artificially Synthesized Probe
  source 1..80: mol_type = other DNA
atatttcaacacagaaaccagggtagcatcacccagaaaaaaaaaagggaggggaggtaaatcagactgtcccaaatcta

SEQ ID NO: 31864 - DNA, 80 bp, synthetic construct
  misc_feature 1..80: note = Artificially Synthesized Probe
  source 1..80: mol_type = other DNA
gactgaatgaatggatgggtgagtggatggatgatggatgaatgggtgagtggatgaatggatggatggatggatggata

SEQ ID NO: 31865 - DNA, 80 bp, synthetic construct
  misc_feature 1..80: note = Artificially Synthesized Probe
  source 1..80: mol_type = other DNA
gggtttacagacatgagtcagcgtacccggctcagaacttttatccatattgttctcggccacattctcagaggctcgca

SEQ ID NO: 31866 - DNA, 80 bp, synthetic construct
  misc_feature 1..80: note = Artificially Synthesized Probe
  source 1..80: mol_type = other DNA
agggacagatttcaacaaagccagtgccaaggaggcgcgtgtctacagcggagctgcggcctttagaagcctccagcctc

SEQ ID NO: 31867 - DNA, 80 bp, synthetic construct
  misc_feature 1..80: note = Artificially Synthesized Probe
  source 1..80: mol_type = other DNA
aacaacctgccatacatccttttaccctcaaatttttgctctttgaatcctaactgctcctggcagtaaaccccatctag

SEQ ID NO: 31868 - DNA, 80 bp, synthetic construct
  misc_feature 1..80: note = Artificially Synthesized Probe
  source 1..80: mol_type = other DNA
tacaataggtcacaatgtacagctgcaatataactacaatgctagcaacaatgtaactaccatgtttatcattcccgtat

SEQ ID NO: 31869 - DNA, 80 bp, synthetic construct
  misc_feature 1..80: note = Artificially Synthesized Probe
  source 1..80: mol_type = other DNA
atcctatgccttataccaaggatggccaatccctgcaacactgggtcacccaggaaagctaaacgtcttttgttttttct

SEQ ID NO: 31870 - DNA, 80 bp, synthetic construct
  misc_feature 1..80: note = Artificially Synthesized Probe
  source 1..80: mol_type = other DNA
gagaatcgacagttccgagtatcaggatctaaggaggagatttcaaaacactgcttttcatatcctcccatcatgaaaac

SEQ ID NO: 31871 - DNA, 80 bp, synthetic construct
  misc_feature 1..80: note = Artificially Synthesized Probe
  source 1..80: mol_type = other DNA
ctctcaactctctcacaggaaagaaaatttccaggactctagaaaataagattctgcaaatatccatgtgtctggcgcta

SEQ ID NO: 31872 - DNA, 80 bp, synthetic construct
  misc_feature 1..80: note = Artificially Synthesized Probe
  source 1..80: mol_type = other DNA
ccattctgctccaggatataacctcaagagatatgaaggcattggtccacataaaagactcctacacaattgtgtataac

SEQ ID NO: 31873 - DNA, 80 bp, synthetic construct
  misc_feature 1..80: note = Artificially Synthesized Probe
  source 1..80: mol_type = other DNA
tgagcagagaccatgccactgcactccaacctgggcaacacagggagactctgtctcaaaaaaataaataaataggctgg

SEQ ID NO: 31874 - DNA, 80 bp, synthetic construct
  misc_feature 1..80: note = Artificially Synthesized Probe
  source 1..80: mol_type = other DNA
gaagttctccatctctcaaaatccaaaagcaaatgaaataatagagggaaaaaaaaagcaccaagttcctggacaaatgc

SEQ ID NO: 31875 - DNA, 80 bp, synthetic construct
  misc_feature 1..80: note = Artificially Synthesized Probe
  source 1..80: mol_type = other DNA
aggaagacatggctaagaagcatacagagagattcccagtcttaccaggaatcagggagatgcaaaagaataccatagga

SEQ ID NO: 31876 - DNA, 80 bp, synthetic construct
  misc_feature 1..80: note = Artificially Synthesized Probe
  source 1..80: mol_type = other DNA
tcgcggagtatttttaaagactagatccattacagcaggaccagccacgtgtggccagtcagaactgaaatgtgctttac

SEQ ID NO: 31877 - DNA, 80 bp, synthetic construct
  misc_feature 1..80: note = Artificially Synthesized Probe
  source 1..80: mol_type = other DNA
acctgtatctggcattgacgtgtgtacaaggttatgtgtcaaaatacatgcagggctggaagtttatgtaccaaacctaa

SEQ ID NO: 31878 - DNA, 80 bp, synthetic construct
  misc_feature 1..80: note = Artificially Synthesized Probe
  source 1..80: mol_type = other DNA
gagactcttgtctcaaaaaaaaaaaaagaagaaggaggaggagaaggagaaggaaaaggagaaagagaaggagaaggagg

SEQ ID NO: 31879 - DNA, 80 bp, synthetic construct
  misc_feature 1..80: note = Artificially Synthesized Probe
  source 1..80: mol_type = other DNA
agaaagaaaaggaatccaaatcagaactcctctaaaaaagcagtaccctgttttcagtgttgggctactgctaaagcaga

SEQ ID NO: 31880 - DNA, 80 bp, synthetic construct
  misc_feature 1..80: note = Artificially Synthesized Probe
  source 1..80: mol_type = other DNA
tcgaattcaacgttatgctgaaagaataattcatcacaaccaagtaggttttaccacaggaaagcaaggatgattttata

SEQ ID NO: 31881 - DNA, 80 bp, synthetic construct
  misc_feature 1..80: note = Artificially Synthesized Probe
  source 1..80: mol_type = other DNA
ttaaaggagtgctggcagcgagctgcactttttttcctctgggaaatgggttatgtttttaattaaatttttaaatcaat

SEQ ID NO: 31882 - DNA, 80 bp, synthetic construct
  misc_feature 1..80: note = Artificially Synthesized Probe
  source 1..80: mol_type = other DNA
aaacaaaactaaaaaaacacatattctaaatctataaacagtatggtactgggataagattaagacacagaggacttgaa

SEQ ID NO: 31883 - DNA, 80 bp, synthetic construct
  misc_feature 1..80: note = Artificially Synthesized Probe
  source 1..80: mol_type = other DNA
gagagaaaagagcctgtgtttgtggtcagctggtgggtctaaacaagaaaacttgcccagcgacccaaagaatcatgagc

SEQ ID NO: 31884 - DNA, 80 bp, synthetic construct
  misc_feature 1..80: note = Artificially Synthesized Probe
  source 1..80: mol_type = other DNA
cccggtcaacacacctactccttccttgttcctcttctcgattagatgtacctataatagcctctttgttgtgatcaact

SEQ ID NO: 31885 - DNA, 80 bp, synthetic construct
  misc_feature 1..80: note = Artificially Synthesized Probe
  source 1..80: mol_type = other DNA
aaaaaaaaagcatgaccctcaacatacatacccacccacccagaagaagtggcaactgaaagatttcagaaagactttaa

SEQ ID NO: 31886 - DNA, 80 bp, synthetic construct
  misc_feature 1..80: note = Artificially Synthesized Probe
  source 1..80: mol_type = other DNA
tttaagaccatcctctaacttttttcctgcatcaaattcatccttccctgggaacctctttcctttcagaggttcagcta

SEQ ID NO: 31887 - DNA, 80 bp, synthetic construct
  misc_feature 1..80: note = Artificially Synthesized Probe
  source 1..80: mol_type = other DNA
gggaaggaggagaggggaaggaggggaggagaagaaggggaggggaggggagaaaaatgaaaggaagagagagaaaaaga

SEQ ID NO: 31888 - DNA, 80 bp, synthetic construct
  misc_feature 1..80: note = Artificially Synthesized Probe
  source 1..80: mol_type = other DNA
aatgtcccctgggagacaaaaaaaatcaccctcagttcaaaaccactgctagagacccaaacaaacacatcaatttattt

SEQ ID NO: 31889 - DNA, 80 bp, synthetic construct
  misc_feature 1..80: note = Artificially Synthesized Probe
  source 1..80: mol_type = other DNA
agtgttgacgttagagtgaaccattaggctattcatttgtttggtgtggcttttctgaacctgtggtttttttatgtaat

SEQ ID NO: 31890 - DNA, 80 bp, synthetic construct
  misc_feature 1..80: note = Artificially Synthesized Probe
  source 1..80: mol_type = other DNA
tcggtaataaagcctattaaacaaccattctttctgggctacactcaataagccatggagtcattaaagatccaagaccc

SEQ ID NO: 31891 - DNA, 80 bp, synthetic construct
  misc_feature 1..80: note = Artificially Synthesized Probe
  source 1..80: mol_type = other DNA
ccagggagcagaggagagcaatgctttcaacactttcttgtttgcttcccactcttgacatcatttatgtttaaaaatga

SEQ ID NO: 31892 - DNA, 80 bp, synthetic construct
  misc_feature 1..80: note = Artificially Synthesized Probe
  source 1..80: mol_type = other DNA
aaaagaaaaacttgtcaggccagtcaccaagttagcagacagccaaagggaaagccgcctttccattacgatggatttta

SEQ ID NO: 31893 - DNA, 80 bp, synthetic construct
  misc_feature 1..80: note = Artificially Synthesized Probe
  source 1..80: mol_type = other DNA
cttcactcttgcccacaaaacgcctcttggccttctctttgccatttcatccacccgaatacccttccctctcaccctgt

SEQ ID NO: 31894 - DNA, 80 bp, synthetic construct
  misc_feature 1..80: note = Artificially Synthesized Probe
  source 1..80: mol_type = other DNA
ccagcatggtggtgcgtgcctggaattccagctactcaggaggcggaagtaagccaagattgcgccactgcaccccagcc

SEQ ID NO: 31895 - DNA, 80 bp, synthetic construct
  misc_feature 1..80: note = Artificially Synthesized Probe
  source 1..80: mol_type = other DNA
cctgtcttctgtatggacgacagtgacatcgccacaagggaatttatcaatattccctgttatctagagaacatcatgat

SEQ ID NO: 31896 - DNA, 80 bp, synthetic construct
  misc_feature 1..80: note = Artificially Synthesized Probe
  source 1..80: mol_type = other DNA
ttgctgatcactgggcaaaggccttacgtcagacaagtctgaagtcaaaccattccccagctaggtctcctagagcaagt

SEQ ID NO: 31897 - DNA, 80 bp, synthetic construct
  misc_feature 1..80: note = Artificially Synthesized Probe
  source 1..80: mol_type = other DNA
aaataagattgttgggaagatgggatgcaatatcctaatcaaagcacccagaaccacggctggcatgaaatcagcatttg

SEQ ID NO: 31898 - DNA, 80 bp, synthetic construct
  misc_feature 1..80: note = Artificially Synthesized Probe
  source 1..80: mol_type = other DNA
tcaaaccctccaagagcatgcatttaaactcgtgcatttaaatacgtgatatttaatgtggtaggcacaataccacactt

SEQ ID NO: 31899 - DNA, 80 bp, synthetic construct
  misc_feature 1..80: note = Artificially Synthesized Probe
  source 1..80: mol_type = other DNA
ccccctcttctgagtgtacttggtttgatcgtgaacatctgcatttgccactagactggccgctctgaggaggcaaaggc

SEQ ID NO: 31900 - DNA, 80 bp, synthetic construct
  misc_feature 1..80: note = Artificially Synthesized Probe
  source 1..80: mol_type = other DNA
ttctgtcacctaagacaggggagtatcctctgaaggctcaatctattctgtattcaaaaatcccatcagacatcaaataa

SEQ ID NO: 31901 - DNA, 80 bp, synthetic construct
  misc_feature 1..80: note = Artificially Synthesized Probe
  source 1..80: mol_type = other DNA
caggcacaaaaggataaatcccgtctgattccactcacaggaggtccctacagtcatcacattcatagagacagaaaata

SEQ ID NO: 31902 - DNA, 80 bp, synthetic construct
  misc_feature 1..80: note = Artificially Synthesized Probe
  source 1..80: mol_type = other DNA
agtgcagcttcgacctcctggacacaaaagcctggttcttaatagcaaagcaatttttaattcactcaaaacatcaggca

SEQ ID NO: 31903 - DNA, 80 bp, synthetic construct
  misc_feature 1..80: note = Artificially Synthesized Probe
  source 1..80: mol_type = other DNA
cccactcctccaaaaaatcatagcttttattctggtgtatgtcttgcataaatttggcacaaaccccagttctgtctttt

SEQ ID NO: 31904 - DNA, 80 bp, synthetic construct
  misc_feature 1..80: note = Artificially Synthesized Probe
  source 1..80: mol_type = other DNA
agaagtggcacactgaaatccagctctgaactccataaacattttaagcttctccagcaaaacacttcccagagcattta

SEQ ID NO: 31905 - DNA, 80 bp, synthetic construct
  misc_feature 1..80: note = Artificially Synthesized Probe
  source 1..80: mol_type = other DNA
tgcccaataacaggaatggttaaggaaaccttcagtagacacgacagattcctgaagatcactagaaggaacaaccccca

SEQ ID NO: 31906 - DNA, 80 bp, synthetic construct
  misc_feature 1..80: note = Artificially Synthesized Probe
  source 1..80: mol_type = other DNA
gatgttcatcaggttgtagaggccgagttccttgaggtgaaccatctcgaagatgaccagcgcgtagttaaagaacagtc

SEQ ID NO: 31907 - DNA, 80 bp, synthetic construct
  misc_feature 1..80: note = Artificially Synthesized Probe
  source 1..80: mol_type = other DNA
aggagataatttacggggataaaggtgcccgcggtcagaaatggggcaaggaaagctaaatgtatttgttttgtcaatcc

SEQ ID NO: 31908 - DNA, 80 bp, synthetic construct
  misc_feature 1..80: note = Artificially Synthesized Probe
  source 1..80: mol_type = other DNA
cacacacttgcttgctaggaagttggaggaaagccccagtacacaactatggattaatctccaccctcccctcaacactg

SEQ ID NO: 31909 - DNA, 80 bp, synthetic construct
  misc_feature 1..80: note = Artificially Synthesized Probe
  source 1..80: mol_type = other DNA
ctgcaggtagaaagaacacttggccgccatcctccccaggctatggcagaaccaaaatcagacatgaatatgcattcaaa

SEQ ID NO: 31910 - DNA, 80 bp, synthetic construct
  misc_feature 1..80: note = Artificially Synthesized Probe
  source 1..80: mol_type = other DNA
ttggacattagagaaatacaaattcaaaccacagtgagataccactttatccccactaggatagctaaaaccaaaaagag

SEQ ID NO: 31911 - DNA, 80 bp, synthetic construct
  misc_feature 1..80: note = Artificially Synthesized Probe
  source 1..80: mol_type = other DNA
gtctctaaataaataaataaataaatgtaaataaaaggccagccacagtggctcactcctttaatcccagcgctttggga

SEQ ID NO: 31912 - DNA, 80 bp, synthetic construct
  misc_feature 1..80: note = Artificially Synthesized Probe
  source 1..80: mol_type = other DNA
taaagccgtatgtgtccctattagtgaaagacaatagagcagtttaccactgggacagaaaatacccagaggatgttaga

SEQ ID NO: 31913 - DNA, 80 bp, synthetic construct
  misc_feature 1..80: note = Artificially Synthesized Probe
  source 1..80: mol_type = other DNA
ggagaatcgcttgaacccaggagatggaagttgcagtgaactgagatcatcccgtcgcactccagcctaagtaacaaagc

SEQ ID NO: 31914 - DNA, 80 bp, synthetic construct
  misc_feature 1..80: note = Artificially Synthesized Probe
  source 1..80: mol_type = other DNA
gaaaatgtaggtttgatgtagaagaggcaagccccaaaattgagccttaccccgggagggtttttggcttcacccaggaa

SEQ ID NO: 31915 - DNA, 80 bp, synthetic construct
  misc_feature 1..80: note = Artificially Synthesized Probe
  source 1..80: mol_type = other DNA
cacaacttccagggctcaagagccacccgtggatggtggctgccatattggacagagcagatacagagtatttccatcaa

SEQ ID NO: 31916 - DNA, 80 bp, synthetic construct
  misc_feature 1..80: note = Artificially Synthesized Probe
  source 1..80: mol_type = other DNA
cgtgcctggcctcagtttcctttaaatgatgacaacagcataatgaaacctacaaagaagagatgagaactggggtctct

SEQ ID NO: 31917 - DNA, 80 bp, synthetic construct
  misc_feature 1..80: note = Artificially Synthesized Probe
  source 1..80: mol_type = other DNA
ggcaggagaattgcttgagcccaagaggttgaggctgcagtgagctatgactgcaccactgcactccagcctgggtgaca

SEQ ID NO: 31918 - DNA, 80 bp, synthetic construct
  misc_feature 1..80: note = Artificially Synthesized Probe
  source 1..80: mol_type = other DNA
ttgggagagaaaggcagatacccaactctggacattcataaggcagcaatttcaaaaggccggagaagaccaacaatttc

SEQ ID NO: 31919 - DNA, 80 bp, synthetic construct
  misc_feature 1..80: note = Artificially Synthesized Probe
  source 1..80: mol_type = other DNA
ggatgctggtggacgcagtgacaacaggtgatattgcaggaaaggtagcacggagacaactgagagaagaaaatgataga

SEQ ID NO: 31920 - DNA, 80 bp, synthetic construct
  misc_feature 1..80: note = Artificially Synthesized Probe
  source 1..80: mol_type = other DNA
aaggcagaggttgcaatcagccaagatcgtgccactgcactgcactccagcctgggtgacagagcgagactcgatctcca

SEQ ID NO: 31921 - DNA, 80 bp, synthetic construct
  misc_feature 1..80: note = Artificially Synthesized Probe
  source 1..80: mol_type = other DNA
gattttaaaatcaatttaaaaaagcagttgcatccctactctcgagtcccttcctgtctgactacttttgcctgcattga

SEQ ID NO: 31922 - DNA, 80 bp, synthetic construct
  misc_feature 1..80: note = Artificially Synthesized Probe
  source 1..80: mol_type = other DNA
tgcagtgagctgagatcgtgacactgcattccagcctgggcaacggagtaagactgctcaaaataataataataataggc

SEQ ID NO: 31923 - DNA, 80 bp, synthetic construct
  misc_feature 1..80: note = Artificially Synthesized Probe
  source 1..80: mol_type = other DNA
gtatcaacccagcggtttccacgcagatgaaaatacaacaaaaagggcatttgcattcaaaggattctaaacggaaaatg

SEQ ID NO: 31924 - DNA, 80 bp, synthetic construct
  misc_feature 1..80: note = Artificially Synthesized Probe
  source 1..80: mol_type = other DNA
cccatcaccaactgaaagcacaaaaatgctaaaaatgtggcaccaaataaccacaaaaaggactcaggtttttttgttgt

SEQ ID NO: 31925 - DNA, 80 bp, synthetic construct
  misc_feature 1..80: note = Artificially Synthesized Probe
  source 1..80: mol_type = other DNA
ggcctgggcaacagagttagtgagactccgtctcaaaaataaataaataaataaataacaataaaaactagctgagcatg

SEQ ID NO: 31926 - DNA, 80 bp, synthetic construct
  misc_feature 1..80: note = Artificially Synthesized Probe
  source 1..80: mol_type = other DNA
atcaaaaagatacataaaccaatggcacagttacctccctggacatgaatggaatgcttttggggacagggggacaagat

SEQ ID NO: 31927 - DNA, 80 bp, synthetic construct
  misc_feature 1..80: note = Artificially Synthesized Probe
  source 1..80: mol_type = other DNA
ttttattgttagtggagacagggtcttgctgtgttgtccaggctgatctgaaactcctggacacatgtaatcctcccacc

SEQ ID NO: 31928 - DNA, 80 bp, synthetic construct
  misc_feature 1..80: note = Artificially Synthesized Probe
  source 1..80: mol_type = other DNA
ccaaagtgtaaatattttggccatggaattcctgttttaactactcaacctgccgtgtcggggcatttttgcgcagtcat

SEQ ID NO: 31929 - DNA, 80 bp, synthetic construct
  misc_feature 1..80: note = Artificially Synthesized Probe
  source 1..80: mol_type = other DNA
gagaagattaaaggaaacactgaccctctgggaagagagagccaacatcttagcccaggtagaaggagaagagaacagta

SEQ ID NO: 31930 - DNA, 80 bp, synthetic construct
  misc_feature 1..80: note = Artificially Synthesized Probe
  source 1..80: mol_type = other DNA
ccggccgaggattattgaacaaagagaggagaaagagcaagagcccagatgggtaaatgtctcagacagggaaaaggtta

SEQ ID NO: 31931 - DNA, 80 bp, synthetic construct
  misc_feature 1..80: note = Artificially Synthesized Probe
  source 1..80: mol_type = other DNA
aggaggtcgagaccatcctggctaacacagcaaagccctgtctctactaaaaatacaaaaaataagccggtgttgtggaa

SEQ ID NO: 31932 - DNA, 80 bp, synthetic construct
  misc_feature 1..80: note = Artificially Synthesized Probe
  source 1..80: mol_type = other DNA
taaatccatttactgaccctgaaagcccaggcacagatccacaattaattaccaaagctacaaggaacagaagaacaggg

SEQ ID NO: 31933 - DNA, 80 bp, synthetic construct
  misc_feature 1..80: note = Artificially Synthesized Probe
  source 1..80: mol_type = other DNA
ccttcctcatcacgactgatttccttttatggagaaatctgaaacagtaacccaacagatatttttaaagcagggcctca

SEQ ID NO: 31934 - DNA, 80 bp, synthetic construct
  misc_feature 1..80: note = Artificially Synthesized Probe
  source 1..80: mol_type = other DNA
cggtgaggcactcagggcgcttggctctacctacaccatatgcgctcgggggacttggctgttcggggctgtccagaccc

SEQ ID NO: 31935 - DNA, 80 bp, synthetic construct
  misc_feature 1..80: note = Artificially Synthesized Probe
  source 1..80: mol_type = other DNA
ggacagcaccgaaagaacaagggaggccggaatggtggcattattcaatcaaatatacagagtgcttcctttaatatgta

SEQ ID NO: 31936 - DNA, 80 bp, synthetic construct
  misc_feature 1..80: note = Artificially Synthesized Probe
  source 1..80: mol_type = other DNA
agcaggaagggcacttctgaaagcacagtggagagatcgctggagcgggcgttctgggcaggaggaagcacagacggcag

SEQ ID NO: 31937 - DNA, 80 bp, synthetic construct
  misc_feature 1..80: note = Artificially Synthesized Probe
  source 1..80: mol_type = other DNA
cacacagcacaggcaccagcagacctggggaccggggagaagagccggtgggcaatgaggcctgggcacctgcggggcac

SEQ ID NO: 31938 - DNA, 80 bp, synthetic construct
  misc_feature 1..80: note = Artificially Synthesized Probe
  source 1..80: mol_type = other DNA
ggccccattcgctgacacctgctccgtgatggccatcccttcttgtcagttcccagcccccacccccacctatgggccac

SEQ ID NO: 31939 - DNA, 80 bp, synthetic construct
  misc_feature 1..80: note = Artificially Synthesized Probe
  source 1..80: mol_type = other DNA
cagagacaggcagtgcgtgggcagggcagggccgtgaacctgacacctacatccctggactggcgctgtgggtacacgtg

SEQ ID NO: 31940 - DNA, 80 bp, synthetic construct
  misc_feature 1..80: note = Artificially Synthesized Probe
  source 1..80: mol_type = other DNA
cacaggagggtcaggcgcaggcgcacaggagggtcagatgcaggcacacagatgagaacccacaggcaggcacgggcccc

SEQ ID NO: 31941 - DNA, 80 bp, synthetic construct
  misc_feature 1..80: note = Artificially Synthesized Probe
  source 1..80: mol_type = other DNA
aaactgaggctcagaagagaggcaggaagtagttgtggccacactgcccttcaagggacgtggacgttgatgtccccaga

SEQ ID NO: 31942 - DNA, 80 bp, synthetic construct
  misc_feature 1..80: note = Artificially Synthesized Probe
  source 1..80: mol_type = other DNA
ggggcaggcgcagcggaaggtgtcgccgctgtcgtagcaggtgccaccgttgctgcaggtgtaggcatcgcactggaact

SEQ ID NO: 31943 - DNA, 80 bp, synthetic construct
  misc_feature 1..80: note = Artificially Synthesized Probe
  source 1..80: mol_type = other DNA
gcgagcggggtgagccagggcctcaggccagcccagccccaccaccagcccgccgttcgtggccactcactctcatggca

SEQ ID NO: 31944 - DNA, 80 bp, synthetic construct
  misc_feature 1..80: note = Artificially Synthesized Probe
  source 1..80: mol_type = other DNA
aaaggggaagtaaggggagggggtggtagggaggcaggtaatggggaggcagggttgggggaggtggggaagggggtggt

SEQ ID NO: 31945 - DNA, 80 bp, synthetic construct
  misc_feature 1..80: note = Artificially Synthesized Probe
  source 1..80: mol_type = other DNA
aatcacagtaatagccgccaatcaggtttttgcaagaaaaagcgttaaggcatggcttcccttcacactcattggcgtct

SEQ ID NO: 31946 - DNA, 80 bp, synthetic construct
  misc_feature 1..80: note = Artificially Synthesized Probe
  source 1..80: mol_type = other DNA
catgcacgcagccggggtaggggacacactcatcgcagaacctcccttgccagccgtagctgcacctgggggaaggagga

SEQ ID NO: 31947 - DNA, 80 bp, synthetic construct
  misc_feature 1..80: note = Artificially Synthesized Probe
  source 1..80: mol_type = other DNA
ttttgtaaaaggaaagaaccacggcccttcctgagccgccctcaagccacacagccagcaccgaaggcctatcagcccag

SEQ ID NO: 31948 - DNA, 80 bp, synthetic construct
  misc_feature 1..80: note = Artificially Synthesized Probe
  source 1..80: mol_type = other DNA
cgactcccgtagatctacatctacatctgcccagaccaggtccaccttgttgcactttctgagctgacttgggactcgct

SEQ ID NO: 31949 - DNA, 80 bp, synthetic construct
  misc_feature 1..80: note = Artificially Synthesized Probe
  source 1..80: mol_type = other DNA
ttctccctgactccacacccttcctgcttgatcaaatccatccacaaacccctgggctccaccccaggatgtctgcagga

SEQ ID NO: 31950 - DNA, 80 bp, synthetic construct
  misc_feature 1..80: note = Artificially Synthesized Probe
  source 1..80: mol_type = other DNA
ggccggcagaacttgttgcaagtggcgctgtagtagttctcgtcgcagcgcacgcggatctgcagctccaggtgcgccac

SEQ ID NO: 31951 - DNA, 80 bp, synthetic construct
  misc_feature 1..80: note = Artificially Synthesized Probe
  source 1..80: mol_type = other DNA
cacgttgtcaagagccctgacgaccttgcttgggactcagcccacctgtctctctgccaccccctcaggaaacacccctg

SEQ ID NO: 31952 - DNA, 80 bp, synthetic construct
  misc_feature 1..80: note = Artificially Synthesized Probe
  source 1..80: mol_type = other DNA
atgagggtaaaggagcgctgcagacatggggaggcgggtcaggtacctgaggccacacctgcctgcctcgttcagggtgg

SEQ ID NO: 31953 - DNA, 80 bp, synthetic construct
  misc_feature 1..80: note = Artificially Synthesized Probe
  source 1..80: mol_type = other DNA
tggtgtgctcttgacccctgagcccagccctggctccttccaggtggggcccagaggagggggctggggctgagtcacct

SEQ ID NO: 31954 - DNA, 80 bp, synthetic construct
  misc_feature 1..80: note = Artificially Synthesized Probe
  source 1..80: mol_type = other DNA
tccatccacaccccccaacatgctccatccacacaccccaacatgctccatccacaccccccaacagggctccgtccaca

SEQ ID NO: 31955 - DNA, 80 bp, synthetic construct
  misc_feature 1..80: note = Artificially Synthesized Probe
  source 1..80: mol_type = other DNA
aaaaaaaaaaaaaggccaggccaggctttgaacaggtggcattgagattgaggctgcagggcatgaggaagtgaaggagc

SEQ ID NO: 31956 - DNA, 80 bp, synthetic construct
  misc_feature 1..80: note = Artificially Synthesized Probe
  source 1..80: mol_type = other DNA
ccagccactcaggtaagattactgccaccttcgcctgagcccagggctccggttacctgctcccgcagggacgtgtgcct

SEQ ID NO: 31957 - DNA, 80 bp, synthetic construct
  misc_feature 1..80: note = Artificially Synthesized Probe
  source 1..80: mol_type = other DNA
atggcccagcacaccccaaggtccagggcaccttaaagcccaggacacctcaggtccaaggcacccaaagtacagagtac

SEQ ID NO: 31958 - DNA, 80 bp, synthetic construct
  misc_feature 1..80: note = Artificially Synthesized Probe
  source 1..80: mol_type = other DNA
acacccatgctccacaccagagaccagccagggccttgcctgggtgtacccccactccccagcacaccccctctaggtcc

SEQ ID NO: 31959 - DNA, 80 bp, synthetic construct
  misc_feature 1..80: note = Artificially Synthesized Probe
  source 1..80: mol_type = other DNA
cagaaaaaacaggaagcagagtggtgctgaacctcacacctgccacgagcagcttaggtagctccaggcacagacctcag

SEQ ID NO: 31960 - DNA, 80 bp, synthetic construct
  misc_feature 1..80: note = Artificially Synthesized Probe
  source 1..80: mol_type = other DNA
ccacattcaagaccctgggcccacccactgagggaagctgagcccgagaccagcacagatccatgactaatagcacacag

SEQ ID NO: 31961 - DNA, 80 bp, synthetic construct
  misc_feature 1..80: note = Artificially Synthesized Probe
  source 1..80: mol_type = other DNA
gcgaagagccagggcggacacgcgatagcccgccacattcctccaagacctccctgcccccacacccactgctgccaact

SEQ ID NO: 31962 - DNA, 80 bp, synthetic construct
  misc_feature 1..80: note = Artificially Synthesized Probe
  source 1..80: mol_type = other DNA
aaaaacccacaaacagggcagtgccacagaaggtcactgcaccaggatccactatctctgtctctgaacgatcttgggtc

SEQ ID NO: 31963 - DNA, 80 bp, synthetic construct
  misc_feature 1..80: note = Artificially Synthesized Probe
  source 1..80: mol_type = other DNA
gcgctcagctgcagctcgaaatagcccatgggccgcgccgcctaaaaataaggcagcgggagagcggagggaggcgcggg

SEQ ID NO: 31964 - DNA, 80 bp, synthetic construct
  misc_feature 1..80: note = Artificially Synthesized Probe
  source 1..80: mol_type = other DNA
gaacctgagcagccacagccaggttactgcagtgaaagagtcaaaacagagaagaccaaatgcagatgaaacaaaaaatc

SEQ ID NO: 31965 - DNA, 80 bp, synthetic construct
  misc_feature 1..80: note = Artificially Synthesized Probe
  source 1..80: mol_type = other DNA
tgaatatcaaacgcagagatttctgaagctttaatgccaatagttagtgagtctgtttagatggctgtctcccgctcatc

SEQ ID NO: 31966 - DNA, 80 bp, synthetic construct
  misc_feature 1..80: note = Artificially Synthesized Probe
  source 1..80: mol_type = other DNA
aagtaaaagtaagagctcccaaaactttctacttgagaatcccgagggtttctgccactgttaacaataaatggagacag

SEQ ID NO: 31967 - DNA, 80 bp, synthetic construct
  misc_feature 1..80: note = Artificially Synthesized Probe
  source 1..80: mol_type = other DNA
aggccatttagggtgtgtgcactcatatgtatgtgtgcatgtgtacacacgtgttcttctaacagaagaaccaggccatt

SEQ ID NO: 31968 - DNA, 80 bp, synthetic construct
  misc_feature 1..80: note = Artificially Synthesized Probe
  source 1..80: mol_type = other DNA
aatatcaaatgagctctctccccttctcctccttactggctgctgctgtaagataaaaattaagtttaaaaggaaggtac

SEQ ID NO: 31969 - DNA, 80 bp, synthetic construct
  misc_feature 1..80: note = Artificially Synthesized Probe
  source 1..80: mol_type = other DNA
taagaagtcccctataactaacccctctatcctctgttcctggacggtgagataccctttattcatcctatcatcttagg

SEQ ID NO: 31970 - DNA, 80 bp, synthetic construct
  misc_feature 1..80: note = Artificially Synthesized Probe
  source 1..80: mol_type = other DNA
cagcaacaaatcagatctttagaagtgtctggttggttggttttgttttttaaagctgctgaggtgattctgatgcagct

SEQ ID NO: 31971 - DNA, 80 bp, synthetic construct
  misc_feature 1..80: note = Artificially Synthesized Probe
  source 1..80: mol_type = other DNA
aaatttcaagtgatccaggcctaagttaacattctccagacacagaaatattgaagtgctcaccaagtcctgaatctctg

SEQ ID NO: 31972 - DNA, 80 bp, synthetic construct
  misc_feature 1..80: note = Artificially Synthesized Probe
  source 1..80: mol_type = other DNA
tcttctggtaccctcacgcctagtgtttattcttagtacttcacctccactcacccagagagtaaaaccaaggaaatcaa

SEQ ID NO: 31973 - DNA, 80 bp, synthetic construct
  misc_feature 1..80: note = Artificially Synthesized Probe
  source 1..80: mol_type = other DNA
ggcagcaatacatactaaaggcaaaaatgttttctatgcctagaggataaaaaggtgaagcacactagctgtgggaagta

SEQ ID NO: 31974 - DNA, 80 bp, synthetic construct
  misc_feature 1..80: note = Artificially Synthesized Probe
  source 1..80: mol_type = other DNA
ctgagatttcagcatgctctggaaatgcaggcttgtgggaacatctgcaagaaacataaaatgctacaggttagtccaaa

SEQ ID NO: 31975 - DNA, 80 bp, synthetic construct
  misc_feature 1..80: note = Artificially Synthesized Probe
  source 1..80: mol_type = other DNA
cctctcaaacatttaaagctattcaattcttccgtgtattctaatatccagtgctatatttaagagggaatcggattctt

SEQ ID NO: 31976 - DNA, 80 bp, synthetic construct
  misc_feature 1..80: note = Artificially Synthesized Probe
  source 1..80: mol_type = other DNA
atcagttcccacctcacagcaacttactcctggcatgtgctttgggctatctttctatttatttcttcacagttatcttg

SEQ ID NO: 31977 - DNA, 80 bp, synthetic construct
  misc_feature 1..80: note = Artificially Synthesized Probe
  source 1..80: mol_type = other DNA
ccactcctgcctatggtatagatgatgaatttcatgacactgaatgttatgccttcgaggactgaatgttaggccttcca

SEQ ID NO: 31978 - DNA, 80 bp, synthetic construct
  misc_feature 1..80: note = Artificially Synthesized Probe
  source 1..80: mol_type = other DNA
tctcgagtagaaggagaaagcaagaacaaatcattcagctgggctttagttccacctgtgaaatgaggcagtggggctag

SEQ ID NO: 31979 - DNA, 80 bp, synthetic construct
  misc_feature 1..80: note = Artificially Synthesized Probe
  source 1..80: mol_type = other DNA
tccaactaaggattaactggatttgattacttgaggtgataaaacaaagcccccttcctgctggaatactaacaggttat

SEQ ID NO: 31980 - DNA, 80 bp, synthetic construct
  misc_feature 1..80: note = Artificially Synthesized Probe
  source 1..80: mol_type = other DNA
aggattagatgcaggaaaataaaaaccataaagaccagaaaagggggagtgttccctatctttctttccattccccctca

SEQ ID NO: 31981 - DNA, 80 bp, synthetic construct
  misc_feature 1..80: note = Artificially Synthesized Probe
  source 1..80: mol_type = other DNA
cccagcactttaggaagccaagatgggtagatcgcttgggcccaagagtttgagaccagcatgggcaacacggggaaacc

SEQ ID NO: 31982 - DNA, 80 bp, synthetic construct
  misc_feature 1..80: note = Artificially Synthesized Probe
  source 1..80: mol_type = other DNA
cagatgcagaacaggggattatagttatctaatgtttgatcaactgtcaattagaaggattctctctaggacaagggtta

SEQ ID NO: 31983 - DNA, 80 bp, synthetic construct
  misc_feature 1..80: note = Artificially Synthesized Probe
  source 1..80: mol_type = other DNA
cctggtccctaaaatttaaataacagaaagcaaatacacaaacagccataacataattcattaacatattgataaaacac

SEQ ID NO: 31984 - DNA, 80 bp, synthetic construct
  misc_feature 1..80: note = Artificially Synthesized Probe
  source 1..80: mol_type = other DNA
aatacctgggagattctccttcaggtgctgagaactcttagaaatgatctctttatttgttgtccccaccatccaagacc

SEQ ID NO: 31985 - DNA, 80 bp, synthetic construct
  misc_feature 1..80: note = Artificially Synthesized Probe
  source 1..80: mol_type = other DNA
aagtagctgggattacagacaggcacaaccacgactggctaattttttatatttagtagagacggtggtttcaccatgtt

SEQ ID NO: 31986 - DNA, 80 bp, synthetic construct
  misc_feature 1..80: note = Artificially Synthesized Probe
  source 1..80: mol_type = other DNA
aaagatactaaaactgtgctttctgagaacactttataaactctgcatgctttcacgaccttgatggtccgctaagacga

SEQ ID NO: 31987 - DNA, 80 bp, synthetic construct
  misc_feature 1..80: note = Artificially Synthesized Probe
  source 1..80: mol_type = other DNA
ataagaacaatgtggtctttatcaacattcccccgacattctattgtaaccacatagagaggtggcacgcaaataaagtc

SEQ ID NO: 31988 - DNA, 80 bp, synthetic construct
  misc_feature 1..80: note = Artificially Synthesized Probe
  source 1..80: mol_type = other DNA
aaaaaggctgcgcatggtggctcacgcctgtaatcccagtactttgggaggccaaggtgggtggataacctgaggtcagg

SEQ ID NO: 31989 - DNA, 80 bp, synthetic construct
  misc_feature 1..80: note = Artificially Synthesized Probe
  source 1..80: mol_type = other DNA
agaaaacaaatttttaaaaatatcacaacagatggtgtgcatgtgtagccctagctatttgggaggctgaggtggctcac

SEQ ID NO: 31990 - DNA, 80 bp, synthetic construct
  misc_feature 1..80: note = Artificially Synthesized Probe
  source 1..80: mol_type = other DNA
tatttagaaatacaagtgaaaggccaggcgcggtggctcacgcctgtattcccagcactttgggaagccaaggcaggtgg

SEQ ID NO: 31991 - DNA, 80 bp, synthetic construct
  misc_feature 1..80: note = Artificially Synthesized Probe
  source 1..80: mol_type = other DNA
aaggaggtattactttttcaacaaatgaatcaggaaaaccaagaggtcatacagaagaaaacggctgcatttctgcctca

SEQ ID NO: 31992 - DNA, 80 bp, synthetic construct
  misc_feature 1..80: note = Artificially Synthesized Probe
  source 1..80: mol_type = other DNA
tgaggttcaaattacggtcatcccgtctagaaaaattcaaagcacaggctcccattaaatattagtggtgagtcacagta

SEQ ID NO: 31993 - DNA, 80 bp, synthetic construct
  misc_feature 1..80: note = Artificially Synthesized Probe
  source 1..80: mol_type = other DNA
gaaaactggacaacaggcagtataacactgagaaataaatggggtggtctctaagactgccctggttttccgtctggaag

SEQ ID NO: 31994 - DNA, 80 bp, synthetic construct
  misc_feature 1..80: note = Artificially Synthesized Probe
  source 1..80: mol_type = other DNA
aaataaatcacctatatggatagcttgtatcaaaccaacactctcactaattggaaaagccagatttaaaacacacacac

SEQ ID NO: 31995 - DNA, 80 bp, synthetic construct
  misc_feature 1..80: note = Artificially Synthesized Probe
  source 1..80: mol_type = other DNA
gcctcccagcttcaaaccattcacctgcctcagccacctgtgtagctgccaccacagctggcttttttatttttgagatg

SEQ ID NO: 31996 - DNA, 80 bp, synthetic construct
  misc_feature 1..80: note = Artificially Synthesized Probe
  source 1..80: mol_type = other DNA
gttcattagtcctcaaccatggtgtcatgaaactggatttaaataggtggaatcaaaactaggaggcctagaatcatata

SEQ ID NO: 31997 - DNA, 80 bp, synthetic construct
  misc_feature 1..80: note = Artificially Synthesized Probe
  source 1..80: mol_type = other DNA
taggaagtactccatgttctccatgagccttactctgatattcacttaccacaccctagtggttattccttagattacat

SEQ ID NO: 31998 - DNA, 80 bp, synthetic construct
  misc_feature 1..80: note = Artificially Synthesized Probe
  source 1..80: mol_type = other DNA
ttatagactgaaacccaaatcatcagtttgggcattcaaggcttcctatttatttactgatagatctcatttctctttat

SEQ ID NO: 31999 - DNA, 80 bp, synthetic construct
  misc_feature 1..80: note = Artificially Synthesized Probe
  source 1..80: mol_type = other DNA
gaataaatctgtctggaaaaccgagcaattcaagatgacagaagacaagatgcttgctcatcagcaaataccactgaggt

SEQ ID NO: 32000 - DNA, 80 bp, synthetic construct
  misc_feature 1..80: note = Artificially Synthesized Probe
  source 1..80: mol_type = other DNA
caattctctcatctcccttatttgtcattagcaaatatgttgctagtggctctcttaagaaaaattcccattctctgctc

SEQ ID NO: 32001 - DNA, 80 bp, synthetic construct
  misc_feature 1..80: note = Artificially Synthesized Probe
  source 1..80: mol_type = other DNA
ttaatgctataggacacactgcagagttcatttattattttctttctcttaacaactagaatatttcatagggtaagcac

SEQ ID NO: 32002 - DNA, 80 bp, synthetic construct
  misc_feature 1..80: note = Artificially Synthesized Probe
  source 1..80: mol_type = other DNA
attcttttttagggcaaaggattctatactgccattttcagtgataacagtgaaggtgagagggcacactattctccttc

SEQ ID NO: 32003 - DNA, 80 bp, synthetic construct
  misc_feature 1..80: note = Artificially Synthesized Probe
  source 1..80: mol_type = other DNA
ttgctaatgttcagacacaaagaagcattctagagcagaagcaggtctcctcttgatgtctgttaatctacctgtgtgtg

SEQ ID NO: 32004 - DNA, 80 bp, synthetic construct
  misc_feature 1..80: note = Artificially Synthesized Probe
  source 1..80: mol_type = other DNA
gagagaggttgacagagagaaggagaatattatattagcttttgctttggggggaagagggatgaggaatccaaatgtac

SEQ ID NO: 32005 - DNA, 80 bp, synthetic construct
  misc_feature 1..80: note = Artificially Synthesized Probe
  source 1..80: mol_type = other DNA
gataggaacagtatgaatgccagtcatatagcacctctgaggtataggcaataaagcaacagatgcagctatccctcagt

SEQ ID NO: 32006 - DNA, 80 bp, synthetic construct
  misc_feature 1..80: note = Artificially Synthesized Probe
  source 1..80: mol_type = other DNA
taaaacaccaaaggactgaacctgaaagtagtcctagacaagcatcaaaaagaacagactgaggctgggtgtggtggctc

SEQ ID NO: 32007 - DNA, 80 bp, synthetic construct
  misc_feature 1..80: note = Artificially Synthesized Probe
  source 1..80: mol_type = other DNA
aacttcaggcatgttataggtattctagatttcagaagttctggtttagatgaaaaagtttcctttcaatagaaaaatgc

SEQ ID NO: 32008 - DNA, 80 bp, synthetic construct
  misc_feature 1..80: note = Artificially Synthesized Probe
  source 1..80: mol_type = other DNA
cattattaacatggaaatgttgtcaagaacatagaggtatacagaggtcaagagcataaacatcagaaagggactgtggc

SEQ ID NO: 32009 - DNA, 80 bp, synthetic construct
  misc_feature 1..80: note = Artificially Synthesized Probe
  source 1..80: mol_type = other DNA
tcattcattactccactctgggccagatcaagtaagcgtgacaaagaggccttgaatgaaaagctaaaactaaatagttt

SEQ ID NO: 32010 - DNA, 80 bp, synthetic construct
  misc_feature 1..80: note = Artificially Synthesized Probe
  source 1..80: mol_type = other DNA
aacttgtcagtgttttctaacactgtgggtcaaatatttcttggccaatatctgtccctttaccttctatcccaaaaccc

SEQ ID NO: 32011 - DNA, 80 bp, synthetic construct
  misc_feature 1..80: note = Artificially Synthesized Probe
  source 1..80: mol_type = other DNA
ggtactaggattaaacgagtatcaataaggaagggggaaggctgctgtgttgaactggtatgaacttacggttttttata

SEQ ID NO: 32012 - DNA, 80 bp, synthetic construct
  misc_feature 1..80: note = Artificially Synthesized Probe
  source 1..80: mol_type = other DNA
ttttacagaggagaaagctgtcaggcaccaccttaaccaagggaacaaacctatcatcactattagaaagacaagtcaaa

SEQ ID NO: 32013 - DNA, 80 bp, synthetic construct
  misc_feature 1..80: note = Artificially Synthesized Probe
  source 1..80: mol_type = other DNA
tttatgcttgttggaagaacaagaagcactcaagaaaagatagatacctggttctacttagtctttcagacacaaagtgc

SEQ ID NO: 32014 - DNA, 80 bp, synthetic construct
  misc_feature 1..80: note = Artificially Synthesized Probe
  source 1..80: mol_type = other DNA
caggtttagggaattccatggggtttctaagtatcatatcttcaaatacaagcagttttgccctaccttttccaatttcc

SEQ ID NO: 32015 - DNA, 80 bp, synthetic construct
  misc_feature 1..80: note = Artificially Synthesized Probe
  source 1..80: mol_type = other DNA
agccaccgtgctcggcctaaagtttcatacatttgtaaactgactgtttaaattcaaaaatccagtcattaagttcctca

SEQ ID NO: 32016 - DNA, 80 bp, synthetic construct
  misc_feature 1..80: note = Artificially Synthesized Probe
  source 1..80: mol_type = other DNA
acctacttggcagccctgaactccatcctctgataatatacaaacaagcccatgaagcagtgactattgaattctagaag

SEQ ID NO: 32017 - DNA, 80 bp, synthetic construct
  misc_feature 1..80: note = Artificially Synthesized Probe
  source 1..80: mol_type = other DNA
agggcccagaagtcttactggatgtttattttagaacgctgacaagttaaagttggtttgcatcttgttgaaaacaatgt

SEQ ID NO: 32018 - DNA, 80 bp, synthetic construct
  misc_feature 1..80: note = Artificially Synthesized Probe
  source 1..80: mol_type = other DNA
tgtgggtatgaaaacctacagttgccctctgtcccgggcaacctaatttttttttttaagcaaaactgagaaaagtcact

SEQ ID NO: 32019 - DNA, 80 bp, synthetic construct
  misc_feature 1..80: note = Artificially Synthesized Probe
  source 1..80: mol_type = other DNA
tctacatagaacttactcccctatcacatatgcctcatgtttcatgtttcctgtacccataccaccaatgtatctatgtt

SEQ ID NO: 32020 - DNA, 80 bp, synthetic construct
  misc_feature 1..80: note = Artificially Synthesized Probe
  source 1..80: mol_type = other DNA
tcctgattcccaatgatactccctaaagccttacttgctctggctgtagtgttttgagaattggagctgcttttaatcct

SEQ ID NO: 32021 - DNA, 80 bp, synthetic construct
  misc_feature 1..80: note = Artificially Synthesized Probe
  source 1..80: mol_type = other DNA
gtataccagaagaggtgacaaaaataaggctatgacactatataaccgaaagactgggatgcaagtgatcagggttccca

SEQ ID NO: 32022 - DNA, 80 bp, synthetic construct
  misc_feature 1..80: note = Artificially Synthesized Probe
  source 1..80: mol_type = other DNA
aagtatgtatctctttttctcttgaagcaaaagaagcactgcctccctattctggaatatgactacacttagcccgtatc

SEQ ID NO: 32023 - DNA, 80 bp, synthetic construct
  misc_feature 1..80: note = Artificially Synthesized Probe
  source 1..80: mol_type = other DNA
gatattccctacttaagggcccaaactgtcttcctgcttcctgtacaaagcatgccaaaaatcattttattattcaaatt

SEQ ID NO: 32024 - DNA, 80 bp, synthetic construct
  misc_feature 1..80: note = Artificially Synthesized Probe
  source 1..80: mol_type = other DNA
cccagcctttaattgttaactaatgttagtttattgaagatgtggacaaaatacaaatatatttaaatgacccatgtccc

SEQ ID NO: 32025 - DNA, 80 bp, synthetic construct
  misc_feature 1..80: note = Artificially Synthesized Probe
  source 1..80: mol_type = other DNA
gaagacagaatcaaccagctatgccaatgtgcttacaagataggagggaaaagagtcagagacactgccaaggtttctag

SEQ ID NO: 32026 - DNA, 80 bp, synthetic construct
  misc_feature 1..80: note = Artificially Synthesized Probe
  source 1..80: mol_type = other DNA
actatgaaatagcaaccggtagaagccgaagaaaaaggtcaagagtctccttttccttcgccatgtcccgagtcagagcc

SEQ ID NO: 32027 - DNA, 80 bp, synthetic construct
  misc_feature 1..80: note = Artificially Synthesized Probe
  source 1..80: mol_type = other DNA
aaccctttaacaattagctaagcatggtgggacttgcctatggtcccagctacttgtacttgcaaggctaaggtaggagg

SEQ ID NO: 32028 - DNA, 80 bp, synthetic construct
  misc_feature 1..80: note = Artificially Synthesized Probe
  source 1..80: mol_type = other DNA
attgggggaaaattccatggcttgttagagcaagttgaatattgtctcttccaaatttatgttcacccagaacctgtgaa

SEQ ID NO: 32029 - DNA, 80 bp, synthetic construct
  misc_feature 1..80: note = Artificially Synthesized Probe
  source 1..80: mol_type = other DNA
acttttcttctcaaggttcatgtaagcagctggtagcaaagccacgattagaaacaaaaatttaccaagtccaagtatgg

SEQ ID NO: 32030 - DNA, 80 bp, synthetic construct
  misc_feature 1..80: note = Artificially Synthesized Probe
  source 1..80: mol_type = other DNA
gtgtagcctcggtgtacagtatttataaagtttatagtagtgtacagtcatgtcccaggcttttcaatttcagttaccct

SEQ ID NO: 32031 - DNA, 80 bp, synthetic construct
  misc_feature 1..80: note = Artificially Synthesized Probe
  source 1..80: mol_type = other DNA
tcagggcacatacgtaacatgactgtatttgaacaaattacttatgtgctaggaaaatgtaccataatgttggtagcgag

SEQ ID NO: 32032 - DNA, 80 bp, synthetic construct
  misc_feature 1..80: note = Artificially Synthesized Probe
  source 1..80: mol_type = other DNA
cctttgtgaagacttgggaaagcaaaatatgcaccaaatctagaatgtttattagttttgttccagctaatttttaaata

SEQ ID NO: 32033 - DNA, 80 bp, synthetic construct
  misc_feature 1..80: note = Artificially Synthesized Probe
  source 1..80: mol_type = other DNA
atttactttgcaatagttaagaagagggttatgggggttacgaggtgggaggggatgtgagaaaagcgatattgatagtt

SEQ ID NO: 32034 - DNA, 80 bp, synthetic construct
  misc_feature 1..80: note = Artificially Synthesized Probe
  source 1..80: mol_type = other DNA
aatgatatattaaatatctttacagagaaaataacgcctgaaagcatgaagatctatacaaatggtaggacacatttttt

SEQ ID NO: 32035 - DNA, 80 bp, synthetic construct
  misc_feature 1..80: note = Artificially Synthesized Probe
  source 1..80: mol_type = other DNA
ggtaacagttaaaattggaaccaccatttttgaaaaataatttgaaaatacttagcgaggtgtaaaatgtgcatacccaa

SEQ ID NO: 32036 - DNA, 80 bp, synthetic construct
  misc_feature 1..80: note = Artificially Synthesized Probe
  source 1..80: mol_type = other DNA
gcctcccaaagacacgagccactatgcccagccatgaaattctgtttctgagaacataaactacacattcctctgcataa

SEQ ID NO: 32037 - DNA, 80 bp, synthetic construct
  misc_feature 1..80: note = Artificially Synthesized Probe
  source 1..80: mol_type = other DNA
ataataattaagaccaagggtagtaatggtattttaacttttgtatggaccaaacataaaccattcaaaccaaccactgt

SEQ ID NO: 32038 - DNA, 80 bp, synthetic construct
  misc_feature 1..80: note = Artificially Synthesized Probe
  source 1..80: mol_type = other DNA
tccagtggcagagcagagcaccactaaacagtaacacaagaataagagcttcacatcttttgttccttaacaaatacaag

SEQ ID NO: 32039 - DNA, 80 bp, synthetic construct
  misc_feature 1..80: note = Artificially Synthesized Probe
  source 1..80: mol_type = other DNA
actatgtgcctgagtaggacactagaatgccttagaacgtttgattttaccgtgtgctttatcctagtccatacaaaaac

SEQ ID NO: 32040 - DNA, 80 bp, synthetic construct
  misc_feature 1..80: note = Artificially Synthesized Probe
  source 1..80: mol_type = other DNA
acaccacatgttgactaccaggcctagtgcctctaattaagtcacctaattctattctaagatgggaaatttgtatgtca

SEQ ID NO: 32041 - DNA, 80 bp, synthetic construct
  misc_feature 1..80: note = Artificially Synthesized Probe
  source 1..80: mol_type = other DNA
ataaattcaggaaacaagtgttttcagttagcaacaagccatattctgagagtttcttgagctttgaactttagagtcat

SEQ ID NO: 32042 - DNA, 80 bp, synthetic construct
  misc_feature 1..80: note = Artificially Synthesized Probe
  source 1..80: mol_type = other DNA
agttaccaagaattagactaggttagggatgcaaaaacaagaactgtggctaaagtttacaatttaatggggcagataga

SEQ ID NO: 32043 - DNA, 80 bp, synthetic construct
  misc_feature 1..80: note = Artificially Synthesized Probe
  source 1..80: mol_type = other DNA
ccacacaattcatttacttaatacatcacaagctcgtaacacgctcctcctcattttctttcctcacaatctgtggaaga

SEQ ID NO: 32044 - DNA, 80 bp, synthetic construct
  misc_feature 1..80: note = Artificially Synthesized Probe
  source 1..80: mol_type = other DNA
ataactggtctccaactagattatccatgcctccttatgggaactaccatgtgttttaactgtaagacaatttttaatga

SEQ ID NO: 32045 - DNA, 80 bp, synthetic construct
  misc_feature 1..80: note = Artificially Synthesized Probe
  source 1..80: mol_type = other DNA
gtgaaaccctgtctcaaaaaaacaaaaacaaaaaaccccaaaatgatcactcgagctcaggacttcgagaccagcctggg

SEQ ID NO: 32046 - DNA, 80 bp, synthetic construct
  misc_feature 1..80: note = Artificially Synthesized Probe
  source 1..80: mol_type = other DNA
gaaatcaaacaagttccaacgcacaatctccaggaataatgctccaactttagtaagtctaagaattgcctgagagagtt

SEQ ID NO: 32047 - DNA, 80 bp, synthetic construct
  misc_feature 1..80: note = Artificially Synthesized Probe
  source 1..80: mol_type = other DNA
accagtatccaacaaaggtgagtactccctccttcaaatactttctccacttctctttcaagacatactaacctggcttt

SEQ ID NO: 32048 - DNA, 80 bp, synthetic construct
  misc_feature 1..80: note = Artificially Synthesized Probe
  source 1..80: mol_type = other DNA
gccagcctaatattgtataaaaggataagttcgatcatgtcactcctctacccaaaacctagcctagttgtttaccatct

SEQ ID NO: 32049 - DNA, 80 bp, synthetic construct
  misc_feature 1..80: note = Artificially Synthesized Probe
  source 1..80: mol_type = other DNA
tgctgagggtactatagatgttccagagtaaaaacgtttccgcttttacacatggtaaaatacaaaattctcacatctca

SEQ ID NO: 32050 - DNA, 80 bp, synthetic construct
  misc_feature 1..80: note = Artificially Synthesized Probe
  source 1..80: mol_type = other DNA
agggtgactagggagactgcttcaatgggagattattctgcagtagtgccttaactgtagaacagtgatgatgataaact

SEQ ID NO: 32051 - DNA, 80 bp, synthetic construct
  misc_feature 1..80: note = Artificially Synthesized Probe
  source 1..80: mol_type = other DNA
ttggagcagttattttacgtctgatgcatttcttaagcggttttaaagaagggcatagaatatgtgatgataaatttgac

SEQ ID NO: 32052 - DNA, 80 bp, synthetic construct
  misc_feature 1..80: note = Artificially Synthesized Probe
  source 1..80: mol_type = other DNA
attgtacacctctatagggagtgttatataatcattaagaatgaagacaggcacggtggctcacacctataatcccaggg

SEQ ID NO: 32053 - DNA, 80 bp, synthetic construct
  misc_feature 1..80: note = Artificially Synthesized Probe
  source 1..80: mol_type = other DNA
gtgagccaccaggcccggccgggacagataattttagacatcaatttaagtgggaagaagactacaaagaatacaaagaa

SEQ ID NO: 32054 - DNA, 80 bp, synthetic construct
  misc_feature 1..80: note = Artificially Synthesized Probe
  source 1..80: mol_type = other DNA
atgtacagatgtaacctacatgggagggggtacagtccttataggtagacacctgaaaggctcaattcatttcagatgtt

SEQ ID NO: 32055 - DNA, 80 bp, synthetic construct
  misc_feature 1..80: note = Artificially Synthesized Probe
  source 1..80: mol_type = other DNA
tgacaatatcttgtttaaagttattagactatgacagtcatctgagtggggaggtaactagttccccagcagaagcctta

SEQ ID NO: 32056 - DNA, 80 bp, synthetic construct
  misc_feature 1..80: note = Artificially Synthesized Probe
  source 1..80: mol_type = other DNA
atgtgacaaagcagaggataaggagcattcagagttggaaactacggtggaaacgtttccatttatggcacattttctga

SEQ ID NO: 32057 - DNA, 80 bp, synthetic construct
  misc_feature 1..80: note = Artificially Synthesized Probe
  source 1..80: mol_type = other DNA
taaaagtagatcaggaaggaataataagtcaattcattatcaaccttgtgactcttctgtccagcctcttccagaggttc

SEQ ID NO: 32058 - DNA, 80 bp, synthetic construct
  misc_feature 1..80: note = Artificially Synthesized Probe
  source 1..80: mol_type = other DNA
tcaataaaggtctgttaaatagatattagtgatggtggcagtggcaggtggagaaggggatatcctattcatgaatagtt

SEQ ID NO: 32059 - DNA, 80 bp, synthetic construct
  misc_feature 1..80: note = Artificially Synthesized Probe
  source 1..80: mol_type = other DNA
ttctaaagttatctcagttggaagccctacactagagatcaaactttaagcatgcagggcttgctaaacgctgattggtg

SEQ ID NO: 32060 - DNA, 80 bp, synthetic construct
  misc_feature 1..80: note = Artificially Synthesized Probe
  source 1..80: mol_type = other DNA
ccggcccagagtcctgaattttaaccactacacttcatctaaaattcaacttgtacaaattccaatctttcatctaaaac

SEQ ID NO: 32061 - DNA, 80 bp, synthetic construct
  misc_feature 1..80: note = Artificially Synthesized Probe
  source 1..80: mol_type = other DNA
catagacaaaatctgaatgccaaagtgagtttcactctaggatcaggttatctggcagctcctgaaacaggacagtttca

SEQ ID NO: 32062 - DNA, 80 bp, synthetic construct
  misc_feature 1..80: note = Artificially Synthesized Probe
  source 1..80: mol_type = other DNA
accactggaacccaagacaccattctctcactaggttattatagtagccccctaactcttttttttttttttgcttctgt

SEQ ID NO: 32063 - DNA, 80 bp, synthetic construct
  misc_feature 1..80: note = Artificially Synthesized Probe
  source 1..80: mol_type = other DNA
acagccacaaagcataccacacttaggaacagatctatgggtaggacacaagcatatttaggctgctatcataaagataa

SEQ ID NO: 32064 - DNA, 80 bp, synthetic construct
  misc_feature 1..80: note = Artificially Synthesized Probe
  source 1..80: mol_type = other DNA
accccctctctactaaaaatacaaaaattatgtgggtgtggcattgcgcacttgtagtcccagctactcaggaggctgag

SEQ ID NO: 32065 - DNA, 80 bp, synthetic construct
  misc_feature 1..80: note = Artificially Synthesized Probe
  source 1..80: mol_type = other DNA
gacacaatccaaaacttttgtggctagagagtagaaaggagaaatcctgtcttcaaagagaggagaatgcttgacttcaa

SEQ ID NO: 32066 - DNA, 80 bp, synthetic construct
  misc_feature 1..80: note = Artificially Synthesized Probe
  source 1..80: mol_type = other DNA
cgtgataaaactgaaacagatgcaaagttaagttgactctgactctcatggataactgagaggttcaagacacaggtcga

SEQ ID NO: 32067 - DNA, 80 bp, synthetic construct
  misc_feature 1..80: note = Artificially Synthesized Probe
  source 1..80: mol_type = other DNA
ttgttatttcaacactattacatattagagactgagcaatctggacaaagtcacacagcttatcagtaccagtaggaatt

SEQ ID NO: 32068 - DNA, 80 bp, synthetic construct
  misc_feature 1..80: note = Artificially Synthesized Probe
  source 1..80: mol_type = other DNA
agccaaactgtaaccagtaacatccagctggattatggagctaataaagaacaacagaggggatccacaggaaattcaac

SEQ ID NO: 32069 - DNA, 80 bp, synthetic construct
  misc_feature 1..80: note = Artificially Synthesized Probe
  source 1..80: mol_type = other DNA
ctaataagacttgagagcaacttaatacttcaccctcatgtatgtatgaatttaaaatagaacatcacaataactacgaa

SEQ ID NO: 32070 - DNA, 80 bp, synthetic construct
  misc_feature 1..80: note = Artificially Synthesized Probe
  source 1..80: mol_type = other DNA
aatgaggtaaataaaagcagacagaacttggatcctctagagcctgcagctcacgatatggagtttgaattttagtctac

SEQ ID NO: 32071 - DNA, 80 bp, synthetic construct
  misc_feature 1..80: note = Artificially Synthesized Probe
  source 1..80: mol_type = other DNA
gtaagattatatttctgtgcttttgaataagattcagattggacagtctcaactctcccttgtgggagagggtaggggtg

SEQ ID NO: 32072 - DNA, 80 bp, synthetic construct
  misc_feature 1..80: note = Artificially Synthesized Probe
  source 1..80: mol_type = other DNA
atctgtggttcactgtaccacttacaggggtacagaggaatgaaattaccagtcctcactgtaaaataaacacatttctt

SEQ ID NO: 32073 - DNA, 80 bp, synthetic construct
  misc_feature 1..80: note = Artificially Synthesized Probe
  source 1..80: mol_type = other DNA
gttcccagcttgcagtctcagacatagatagcaacaccaccaccaccacccttgccaagccaagtaagtaaaaagtaaaa

SEQ ID NO: 32074 - DNA, 80 bp, synthetic construct
  misc_feature 1..80: note = Artificially Synthesized Probe
  source 1..80: mol_type = other DNA
gagaaccacttgagtccaggagtttgagaccacgtaatatagttagaccctgtctctgaaaagaatacaagaattagcta

SEQ ID NO: 32075 - DNA, 80 bp, synthetic construct
  misc_feature 1..80: note = Artificially Synthesized Probe
  source 1..80: mol_type = other DNA
ttaaaagtttgattcgaaaaattttaaggaaacctttcaggtaactgaaagtggagggtaggggcgcgactcatgaagga

SEQ ID NO: 32076 - DNA, 80 bp, synthetic construct
  misc_feature 1..80: note = Artificially Synthesized Probe
  source 1..80: mol_type = other DNA
gagataggaaagaggaggatgttgagaactaaaccctgaggtacttttagtattcaaagtgtaggggggtctggaaatct

SEQ ID NO: 32077 - DNA, 80 bp, synthetic construct
  misc_feature 1..80: note = Artificially Synthesized Probe
  source 1..80: mol_type = other DNA
tcttaaaatgtctcagtgacccaacaatttgccaaagagcatgtagagcaaactaggctctattcagcatttccatttct

SEQ ID NO: 32078 - DNA, 80 bp, synthetic construct
  misc_feature 1..80: note = Artificially Synthesized Probe
  source 1..80: mol_type = other DNA
cactgacttcctcaacggtaacatacatgacataaacacattaggtagactggatgcccaaaggccaatccaacctcatg

SEQ ID NO: 32079 - DNA, 80 bp, synthetic construct
  misc_feature 1..80: note = Artificially Synthesized Probe
  source 1..80: mol_type = other DNA
gattctcgcagcccagcaaaaatccttactatagcagccaatcaatatctattgaaaaatacatgtaccccctcgataca

SEQ ID NO: 32080 - DNA, 80 bp, synthetic construct
  misc_feature 1..80: note = Artificially Synthesized Probe
  source 1..80: mol_type = other DNA
ctatcccatcttatatcagggatttgagcactgtcagatttggtatccacggaagttcgtggaacaagtcatccaagaat

SEQ ID NO: 32081 - DNA, 80 bp, synthetic construct
  misc_feature 1..80: note = Artificially Synthesized Probe
  source 1..80: mol_type = other DNA
tttctccaccagatttcctccacctgtgccactactcacccatctaaatgtgcacatgtgtactcaagcattcaatgaat

SEQ ID NO: 32082 - DNA, 80 bp, synthetic construct
  misc_feature 1..80: note = Artificially Synthesized Probe
  source 1..80: mol_type = other DNA
ttaaagtcgatcaaagccctacttaaatgtaagcattgaaactcctggaaaaaagcataggagtaaattcttcatgaact

SEQ ID NO: 32083 - DNA, 80 bp, synthetic construct
  misc_feature 1..80: note = Artificially Synthesized Probe
  source 1..80: mol_type = other DNA
ctgaagactaaatcatttcacagaaccctagatttagataaacttggagacaggagagcagctgaagagcccttctcttt

SEQ ID NO: 32084 - DNA, 80 bp, synthetic construct
  misc_feature 1..80: note = Artificially Synthesized Probe
  source 1..80: mol_type = other DNA
gcataagggtgcactcctgtggtcccagctacttgtgaggaccacttgagtcctggaggttgaagctgcagcaagctacg

SEQ ID NO: 32085 - DNA, 80 bp, synthetic construct
  misc_feature 1..80: note = Artificially Synthesized Probe
  source 1..80: mol_type = other DNA
ccagtgaaataaagggaaaagcagaagtcaggtgagaatatttacatatatgtacccattcagcagttctgtagaagtca

SEQ ID NO: 32086 - DNA, 80 bp, synthetic construct
  misc_feature 1..80: note = Artificially Synthesized Probe
  source 1..80: mol_type = other DNA
aaattccagatttcctcctcagtacaagaggcctgcaacaacaaacttctgaaataccagcagtctactaattgcatatt

SEQ ID NO: 32087 - DNA, 80 bp, synthetic construct
  misc_feature 1..80: note = Artificially Synthesized Probe
  source 1..80: mol_type = other DNA
atgttcaaccacttactatcattttccaactcactctctatgggcccatcccatatttcaactacaggtatacctcctgg

SEQ ID NO: 32088 - DNA, 80 bp, synthetic construct
  misc_feature 1..80: note = Artificially Synthesized Probe
  source 1..80: mol_type = other DNA
tgtgaaaagcactaaaataaatgcatcattcatctatgaccttctgagaataccaccacctcatatttgaatagacgtct

SEQ ID NO: 32089 - DNA, 80 bp, synthetic construct
  misc_feature 1..80: note = Artificially Synthesized Probe
  source 1..80: mol_type = other DNA
tcacatttagatgtttctttttttggaaaaggtgaagatctggctgggcacagtggtgcacatccttaggtagttccagc

SEQ ID NO: 32090 - DNA, 80 bp, synthetic construct
  misc_feature 1..80: note = Artificially Synthesized Probe
  source 1..80: mol_type = other DNA
ccaatggtaaaacagaggaggtagggacacaaacgtcctacttcatagaaaagttataagactttaaaggcgatggttta

SEQ ID NO: 32091 - DNA, 80 bp, synthetic construct
  misc_feature 1..80: note = Artificially Synthesized Probe
  source 1..80: mol_type = other DNA
tcccctctccctagactcctaacctaatcaagttaccaaattcaaaaaattattttatctcacccattcttgcctctttt

SEQ ID NO: 32092 - DNA, 80 bp, synthetic construct
  misc_feature 1..80: note = Artificially Synthesized Probe
  source 1..80: mol_type = other DNA
tgccttagactgcatttggcatacagggcatagtctgttgattgtgctaatccaaccaactaatatcaactttcctaaat

SEQ ID NO: 32093 - DNA, 80 bp, synthetic construct
  misc_feature 1..80: note = Artificially Synthesized Probe
  source 1..80: mol_type = other DNA
aacagatgttaccactgcctacctgggaaaactaggaataacgactacagtaaattattatgcattatggcttttataaa

SEQ ID NO: 32094 - DNA, 80 bp, synthetic construct
  misc_feature 1..80: note = Artificially Synthesized Probe
  source 1..80: mol_type = other DNA
taaatctagcatgttgaggctactcctagaacaggggttcttaatttggggctttagggaatcattaatacccatgtttc

SEQ ID NO: 32095 - DNA, 80 bp, synthetic construct
  misc_feature 1..80: note = Artificially Synthesized Probe
  source 1..80: mol_type = other DNA
gcaacacatttccaccaattaatgtcctcatttagcctcaactgttacacaggatgacaggccctgaatttaggtgaaac

SEQ ID NO: 32096 - DNA, 80 bp, synthetic construct
  misc_feature 1..80: note = Artificially Synthesized Probe
  source 1..80: mol_type = other DNA
tatataaataaagccacagaaacatattcccaaaatgtgggctggaaatgaaaacagaacagcatgggatacaaaacccc

SEQ ID NO: 32097 - DNA, 80 bp, synthetic construct
  misc_feature 1..80: note = Artificially Synthesized Probe
  source 1..80: mol_type = other DNA
cctaagccaccgtgcccgggctctcaccacaattataaaaagagagagaatgaagggaagggtagaatttcctctttaaa

SEQ ID NO: 32098 - DNA, 80 bp, synthetic construct
  misc_feature 1..80: note = Artificially Synthesized Probe
  source 1..80: mol_type = other DNA
ccaacccccaaaagggcacatataataaagtctggaaaaattttgttgtctcaactagggtgagggaaggtcctactggc

SEQ ID NO: 32099 - DNA, 80 bp, synthetic construct
  misc_feature 1..80: note = Artificially Synthesized Probe
  source 1..80: mol_type = other DNA
taaccctagatccatctcttctcaggtcttcctatcacctcagcctacagcagtcaatccttccctctaaccactccctc

SEQ ID NO: 32100 - DNA, 80 bp, synthetic construct
  misc_feature 1..80: note = Artificially Synthesized Probe
  source 1..80: mol_type = other DNA
tgactatcctcaatgatgacacattttagtttccattcagattaccaattatggtaactcccctgatcactgtttaagta

SEQ ID NO: 32101 - DNA, 80 bp, synthetic construct
  misc_feature 1..80: note = Artificially Synthesized Probe
  source 1..80: mol_type = other DNA
agcagtaactgaaattctgcctttgacatttgacggtgcaaaaagcactaagtaccttatttgttctacataaatgaact

SEQ ID NO: 32102 - DNA, 80 bp, synthetic construct
  misc_feature 1..80: note = Artificially Synthesized Probe
  source 1..80: mol_type = other DNA
aagtgaacacaacaaaaaattacagttactacagggacacactggtcccaggttgcctcatgagaaaagcaggtgagtag

SEQ ID NO: 32103 - DNA, 80 bp, synthetic construct
  misc_feature 1..80: note = Artificially Synthesized Probe
  source 1..80: mol_type = other DNA
gtactgtgtggtcagagagctgtctaaaggagttacagcaaacagcaaagctatgtgccttcaggttgctccatttctca

SEQ ID NO: 32104 - DNA, 80 bp, synthetic construct
  misc_feature 1..80: note = Artificially Synthesized Probe
  source 1..80: mol_type = other DNA
aacaattcaacaaatgtgggctattatttctctaccagaatgtctcaactctgttgtctgcttaggcaaagttggttaaa

SEQ ID NO: 32105 - DNA, 80 bp, synthetic construct
  misc_feature 1..80: note = Artificially Synthesized Probe
  source 1..80: mol_type = other DNA
aggcctaagtaaaacaacttataagaacatgattttaaatgaactatgacacctctctctagttgccattccccaatctc

SEQ ID NO: 32106 - DNA, 80 bp, synthetic construct
  misc_feature 1..80: note = Artificially Synthesized Probe
  source 1..80: mol_type = other DNA
ctcatcacccctacttccaataaccaattctcttaaatctttcctgccaaaggctgagtccaccattcagctaactggtt

SEQ ID NO: 32107 - DNA, 80 bp, synthetic construct
  misc_feature 1..80: note = Artificially Synthesized Probe
  source 1..80: mol_type = other DNA
ccgtcattgcccccacacatcacagttattaagtcccattcaatttacctctacatcatttctggaattatctctttttc

SEQ ID NO: 32108 - DNA, 80 bp, synthetic construct
  misc_feature 1..80: note = Artificially Synthesized Probe
  source 1..80: mol_type = other DNA
acaagtcaagaaacctgttttgtttcaacttataccagtgctttgctgggttctttgcctcagcttcccccaatgcaaaa

SEQ ID NO: 32109 - DNA, 80 bp, synthetic construct
  misc_feature 1..80: note = Artificially Synthesized Probe
  source 1..80: mol_type = other DNA
cctgggttcaagtgattctcgtgcttcaacctcccaagtagctgggattaaaggcgtgcaccaccacgcctggctaattt

SEQ ID NO: 32110 - DNA, 80 bp, synthetic construct
  misc_feature 1..80: note = Artificially Synthesized Probe
  source 1..80: mol_type = other DNA
accatccaaaattcaaataagcgctttagtgtcactgaactgcatccatagtctatttttacccaaccctgatctgaaac

SEQ ID NO: 32111 - DNA, 80 bp, synthetic construct
  misc_feature 1..80: note = Artificially Synthesized Probe
  source 1..80: mol_type = other DNA
caaacacaacgtactgcagaattttcaaagcagttatatttccactgtaccaagaaaggaagatatgtgaaatatttcat

SEQ ID NO: 32112 - DNA, 80 bp, synthetic construct
  misc_feature 1..80: note = Artificially Synthesized Probe
  source 1..80: mol_type = other DNA
tctggtcaactgctgaaaacctttaaaacactcagaagatcaacaaacacttggctaaataaataccagccttaagagtc

SEQ ID NO: 32113 - DNA, 80 bp, synthetic construct
  misc_feature 1..80: note = Artificially Synthesized Probe
  source 1..80: mol_type = other DNA
atttgctttaaatctaaatacagaagtggacttgagcacagtgaactaacaaatgataatagaactaggtctacaaggaa

SEQ ID NO: 32114 - DNA, 80 bp, synthetic construct
  misc_feature 1..80: note = Artificially Synthesized Probe
  source 1..80: mol_type = other DNA
cttaaaatgggcttttttttttttttaataggaagagagtcaggttgtgaaactagactgtgcttggaggcgatgtatta

SEQ ID NO: 32115 - DNA, 80 bp, synthetic construct
  misc_feature 1..80: note = Artificially Synthesized Probe
  source 1..80: mol_type = other DNA
cctgaactactgtcagtgacatctgaatcaaatgcctgttcactgcacctcaagttggctatgccactagctgtaaatct

SEQ ID NO: 32116 - DNA, 80 bp, synthetic construct
  misc_feature 1..80: note = Artificially Synthesized Probe
  source 1..80: mol_type = other DNA
ataagagaggatgagatttaaggactgtctgcttgctgaagaccccttgcaacttcaaagactcctttgagggaacagat

SEQ ID NO: 32117 - DNA, 80 bp, synthetic construct
  misc_feature 1..80: note = Artificially Synthesized Probe
  source 1..80: mol_type = other DNA
tctgtgcatttttctggccagggaatccagttttcatcagcttctcacttctctagaagtatagattatactacaaagct

SEQ ID NO: 32118 - DNA, 80 bp, synthetic construct
  misc_feature 1..80: note = Artificially Synthesized Probe
  source 1..80: mol_type = other DNA
gctgctttatgaattctcaggaaaaagcacagtacaactgagttgcaaaatgaactagagctttgttcatggaacacgat

SEQ ID NO: 32119 - DNA, 80 bp, synthetic construct
  misc_feature 1..80: note = Artificially Synthesized Probe
  source 1..80: mol_type = other DNA
ttttttgaatttttgtagagatggaatttcattttgttgcccaggctgctatcaaactcccagcttcagccttccaaact

SEQ ID NO: 32120 - DNA, 80 bp, synthetic construct
  misc_feature 1..80: note = Artificially Synthesized Probe
  source 1..80: mol_type = other DNA
attttcagggcttatgtagttttctcctgtgggctttctggcatatggcattctgtgtggcacaaattattctatgttgt

SEQ ID NO: 32121 - DNA, 80 bp, synthetic construct
  misc_feature 1..80: note = Artificially Synthesized Probe
  source 1..80: mol_type = other DNA
agattgcaccactgcactccagccggggcaacaagagcaagactccatcttaaaaaaaaaaaaaaaaatcccatctactc

SEQ ID NO: 32122 - DNA, 80 bp, synthetic construct
  misc_feature 1..80: note = Artificially Synthesized Probe
  source 1..80: mol_type = other DNA
aatgcacctagtttgcaattagctacaattgccataaaccaccacctaagtttagtactttaatcttttccctgttatgt

SEQ ID NO: 32123 - DNA, 80 bp, synthetic construct
  misc_feature 1..80: note = Artificially Synthesized Probe
  source 1..80: mol_type = other DNA
agttagtaaactataatctgacaaatacagatggagctgctacacctgctgtcactcacacaaattgagattctgcagta

SEQ ID NO: 32124 - DNA, 80 bp, synthetic construct
  misc_feature 1..80: note = Artificially Synthesized Probe
  source 1..80: mol_type = other DNA
aatatgggagctggggggttcaacatcacacctcccaacagagaaccatatcctaaagattatacacacacatatatata

SEQ ID NO: 32125 - DNA, 80 bp, synthetic construct
  misc_feature 1..80: note = Artificially Synthesized Probe
  source 1..80: mol_type = other DNA
aaatagtagaatgaaggtggaaaggcagtttgaagccagatccttaacggacagcctttaatagccttaattcagactta

SEQ ID NO: 32126 - DNA, 80 bp, synthetic construct
  misc_feature 1..80: note = Artificially Synthesized Probe
  source 1..80: mol_type = other DNA
atcagctcctgtctagattatcacaacagcttcctgactagtgcctcagtgccccaaactatcctttacctttttatcat

SEQ ID NO: 32127 - DNA, 80 bp, synthetic construct
  misc_feature 1..80: note = Artificially Synthesized Probe
  source 1..80: mol_type = other DNA
ggggcatgatccacaaaacaacttgcatgaatcaggtggtatatgtacagcttctcaagagaaagagaggaaaagaacag

SEQ ID NO: 32128 - DNA, 80 bp, synthetic construct
  misc_feature 1..80: note = Artificially Synthesized Probe
  source 1..80: mol_type = other DNA
gcccccatctaaaaaagccacccaaacaaaaacactaattttttttttttaaatgatggcctaccatggtagctcacact

SEQ ID NO: 32129 - DNA, 80 bp, synthetic construct
  misc_feature 1..80: note = Artificially Synthesized Probe
  source 1..80: mol_type = other DNA
cctagcttgataaagtactgtatttcacctgaaggggtcaaggaaggcttctagaaaagatgacatactgactgaatttt

SEQ ID NO: 32130 - DNA, 80 bp, synthetic construct
  misc_feature 1..80: note = Artificially Synthesized Probe
  source 1..80: mol_type = other DNA
ctggccaactatgtacttcttaaaaaaggagggttatagcttgttttatctctgtcccctacaagcagcacaatgcctgg

SEQ ID NO: 32131 - DNA, 80 bp, synthetic construct
  misc_feature 1..80: note = Artificially Synthesized Probe
  source 1..80: mol_type = other DNA
atctctttccaacaagccctaatggttggtgtaagtgctcctgaacaatcctaaaatcagcgacttctggaagattttaa

SEQ ID NO: 32132 - DNA, 80 bp, synthetic construct
  misc_feature 1..80: note = Artificially Synthesized Probe
  source 1..80: mol_type = other DNA
aaggtcttcaaagagcttcagttctccatggtaacatatggagagtttaatgaaactttcctgacagttcaacttatcag

SEQ ID NO: 32133 - DNA, 80 bp, synthetic construct
  misc_feature 1..80: note = Artificially Synthesized Probe
  source 1..80: mol_type = other DNA
actgcccaaactcatttgtttttgattcataaacatgagctgtgttttctactttggtcaagtcagtttccgcactctat

SEQ ID NO: 32134 - DNA, 80 bp, synthetic construct
  misc_feature 1..80: note = Artificially Synthesized Probe
  source 1..80: mol_type = other DNA
gtgtctggggccattttacttaagaacctgccctgtactcctttcttaaggtaagtaagtaaagaggcactaaggtaaaa

SEQ ID NO: 32135 - DNA, 80 bp, synthetic construct
  misc_feature 1..80: note = Artificially Synthesized Probe
  source 1..80: mol_type = other DNA
acatggcgtttactatgtttagaaaatccagtgtggattagtttggtgttttatagcacattttaaaaattgcttgtcta

SEQ ID NO: 32136 - DNA, 80 bp, synthetic construct
  misc_feature 1..80: note = Artificially Synthesized Probe
  source 1..80: mol_type = other DNA
caaattatgaggtactaacaaatacaccaaatatgctaaaggtcgaaggaacggcacactttgttgcataaacctagtgg

SEQ ID NO: 32137 - DNA, 80 bp, synthetic construct
  misc_feature 1..80: note = Artificially Synthesized Probe
  source 1..80: mol_type = other DNA
aagcctttgtaaatagtggtcctttaactgacccaaaaagcagagaaaacagaaattacagaccatcctgacaaatggaa

SEQ ID NO: 32138 - DNA, 80 bp, synthetic construct
  misc_feature 1..80: note = Artificially Synthesized Probe
  source 1..80: mol_type = other DNA
acctgaatttacaggcaacaaaaataataaatgaaacaatcagagttgtgatacaaaccgtgcaacgcgccaagatgtgt

SEQ ID NO: 32139 - DNA, 80 bp, synthetic construct
  misc_feature 1..80: note = Artificially Synthesized Probe
  source 1..80: mol_type = other DNA
cccccgcgggccgccaggaggcgcggccgccgccgcctcagtcatggctcctcgccgtggccgatgtttttgtacctcca

SEQ ID NO: 32140 - DNA, 80 bp, synthetic construct
  misc_feature 1..80: note = Artificially Synthesized Probe
  source 1..80: mol_type = other DNA
cttcctgccgccaccaaaaggaagttcactgccatgctaaaagtttaacaaagaactccataaagaaacacaagtctcac

SEQ ID NO: 32141 - DNA, 80 bp, synthetic construct
  misc_feature 1..80: note = Artificially Synthesized Probe
  source 1..80: mol_type = other DNA
gaactagagccccaatctgaggctcctgaaatctaaattagcagaatgaaaaataccaaataaggcaaagccctttgcag

SEQ ID NO: 32142 - DNA, 80 bp, synthetic construct
  misc_feature 1..80: note = Artificially Synthesized Probe
  source 1..80: mol_type = other DNA
ctattctgattagttttaacccattctctttgccaatgattggttaggaatggccatgagatgtgagtagaagccccctg

SEQ ID NO: 32143 - DNA, 80 bp, synthetic construct
  misc_feature 1..80: note = Artificially Synthesized Probe
  source 1..80: mol_type = other DNA
atctttgtctgtgttctctctacctagaaaaagaggaccatccctcattaccaccattccttgttaattcctctctccaa

SEQ ID NO: 32144 - DNA, 80 bp, synthetic construct
  misc_feature 1..80: note = Artificially Synthesized Probe
  source 1..80: mol_type = other DNA
ccagggcctggcacaaaagagacacatcataagaactgactgaataaatgaaaaaggtagagtgtagtacttaagcacac

SEQ ID NO: 32145 - DNA, 80 bp, synthetic construct
  misc_feature 1..80: note = Artificially Synthesized Probe
  source 1..80: mol_type = other DNA
gactctgtttcaaaaacaaaatccctgtctagactctagcaaacaatgttttcattcatgaacttagataacactatata

SEQ ID NO: 32146 - DNA, 80 bp, synthetic construct
  misc_feature 1..80: note = Artificially Synthesized Probe
  source 1..80: mol_type = other DNA
gattgttggtcttctccacagtggtggatttaatagcagctaccagcactcatttctagtgcaagcagtttaagcaggat

SEQ ID NO: 32147 - DNA, 80 bp, synthetic construct
  misc_feature 1..80: note = Artificially Synthesized Probe
  source 1..80: mol_type = other DNA
gggactttggaagatggcagacctgtttcctccaatgaagcagcataccattcttggaaagggaattacttttttttttt

SEQ ID NO: 32148 - DNA, 80 bp, synthetic construct
  misc_feature 1..80: note = Artificially Synthesized Probe
  source 1..80: mol_type = other DNA
ctcaaatggaaaattccacacgtgacacctttgcttctgatggttctctgaaccatcagaaacactgtttatttcaagaa

SEQ ID NO: 32149 - DNA, 80 bp, synthetic construct
  misc_feature 1..80: note = Artificially Synthesized Probe
  source 1..80: mol_type = other DNA
tcctgcttgtaacaaacagctccaaacagccctagaccctgaaaagtactttaaggaaagataaagaggtactggtttag

SEQ ID NO: 32150 - DNA, 80 bp, synthetic construct
  misc_feature 1..80: note = Artificially Synthesized Probe
  source 1..80: mol_type = other DNA
aaacaactactcacacttcccagaatacctaccgtggcaataccaaaatatgaccatgcttgttaatatttgggctacgg

SEQ ID NO: 32151 - DNA, 80 bp, synthetic construct
  misc_feature 1..80: note = Artificially Synthesized Probe
  source 1..80: mol_type = other DNA
gaggtcaggagttcgagaccagcctggccaacatgataaaatttttgtatctttagtctctactaaaaacaaaaattagc

SEQ ID NO: 32152 - DNA, 80 bp, synthetic construct
  misc_feature 1..80: note = Artificially Synthesized Probe
  source 1..80: mol_type = other DNA
tatatagaaaatcctaagaaaatcccacaaataaactattagagccaataaacacatccaacacagttacaggatacaag

SEQ ID NO: 32153 - DNA, 80 bp, synthetic construct
  misc_feature 1..80: note = Artificially Synthesized Probe
  source 1..80: mol_type = other DNA
gataaacatacagatcaatggaatataagtgtgggttcagaaataaacctttacactgacagtcaattgattttatgaca

SEQ ID NO: 32154 - DNA, 80 bp, synthetic construct
  misc_feature 1..80: note = Artificially Synthesized Probe
  source 1..80: mol_type = other DNA
tgaggcaaggattctgagacctgccagagcaatatagcaagaccctgtctctacaaaataaattaataataataaaaaaa

SEQ ID NO: 32155 - DNA, 80 bp, synthetic construct
  misc_feature 1..80: note = Artificially Synthesized Probe
  source 1..80: mol_type = other DNA
gtgttgagggtcttgtacccatgataaatgacatacacctgttctgggctgacttttgttccccaaaagagatatatagt

SEQ ID NO: 32156 - DNA, 80 bp, synthetic construct
  misc_feature 1..80: note = Artificially Synthesized Probe
  source 1..80: mol_type = other DNA
gcaaagtcacctaagagacagtttaaatacataaaaagctcgatgccaaataaaactggatgggtcacttgataagtggg

SEQ ID NO: 32157 - DNA, 80 bp, synthetic construct
  misc_feature 1..80: note = Artificially Synthesized Probe
  source 1..80: mol_type = other DNA
aacatggattctaaaagtggacatcacaccacaccagttcacccaaattctctgagaaaataaatatgtgtggctgggtg

SEQ ID NO: 32158 - DNA, 80 bp, synthetic construct
  misc_feature 1..80: note = Artificially Synthesized Probe
  source 1..80: mol_type = other DNA
ggcaagtataaaagctgtctaaatatgtgaagggttatctagcagaagacaaaccagacttgctctaagcagttcccgtg

SEQ ID NO: 32159 - DNA, 80 bp, synthetic construct
  misc_feature 1..80: note = Artificially Synthesized Probe
  source 1..80: mol_type = other DNA
aacttgtggattgtgttaccacaatctacaagttaaaaatagattcaagtgctcggataaatgtaggtatattaggtcca

SEQ ID NO: 32160 - DNA, 80 bp, synthetic construct
  misc_feature 1..80: note = Artificially Synthesized Probe
  source 1..80: mol_type = other DNA
tatgttgccaaaatatctttcaaaaaaactaggcccaatgcacactccactagcagtttcagagattgtcccctcaccac

SEQ ID NO: 32161 - DNA, 80 bp, synthetic construct
  misc_feature 1..80: note = Artificially Synthesized Probe
  source 1..80: mol_type = other DNA
aaaaaaaaactaatatgcaagaactaatgtcacaaacaattctaaaaatcaattccctgccaaatatactacctggcaca

SEQ ID NO: 32162 - DNA, 80 bp, synthetic construct
  misc_feature 1..80: note = Artificially Synthesized Probe
  source 1..80: mol_type = other DNA
aagaacctagacactagctgggttcaaagtggagcaaactagcaatcagtacaatagaagtgctaggtctgcatatgcac

SEQ ID NO: 32163 - DNA, 80 bp, synthetic construct
  misc_feature 1..80: note = Artificially Synthesized Probe
  source 1..80: mol_type = other DNA
accgctcactaagatacgaagataggaagaggttggactggggaagtggataagatcattttaaaatgcccataagatgg

SEQ ID NO: 32164 - DNA, 80 bp, synthetic construct
  misc_feature 1..80: note = Artificially Synthesized Probe
  source 1..80: mol_type = other DNA
tttttaggagcaaaagaggaaaaaagtctgcaaagaaaaccaagagtatgggccagacttggtgactcacacactttggg

SEQ ID NO: 32165 - DNA, 80 bp, synthetic construct
  misc_feature 1..80: note = Artificially Synthesized Probe
  source 1..80: mol_type = other DNA
aaagagataggatcttcaaagaggtcataaagttaaaatgaggtcatcagagaggactctaatcccaatatgacttgtcc

SEQ ID NO: 32166 - DNA, 80 bp, synthetic construct
  misc_feature 1..80: note = Artificially Synthesized Probe
  source 1..80: mol_type = other DNA
agtgaaaccccgtctctactaaaaatagaaaaataagccgggcatgctggcatgcgcctgtaatcccagctacttgagag

SEQ ID NO: 32167 - DNA, 80 bp, synthetic construct
  misc_feature 1..80: note = Artificially Synthesized Probe
  source 1..80: mol_type = other DNA
cctggctaattttcttttgtatttttagtagagatggggttttgccatgttgcccaggctgttctcaaactcgtgtgctc

SEQ ID NO: 32168 - DNA, 80 bp, synthetic construct
  misc_feature 1..80: note = Artificially Synthesized Probe
  source 1..80: mol_type = other DNA
ttcctactctgtcctctacctgaacaattcctagacctaacaggtaaccagtgccaccattttcttatttattcttctaa

SEQ ID NO: 32169 - DNA, 80 bp, synthetic construct
  misc_feature 1..80: note = Artificially Synthesized Probe
  source 1..80: mol_type = other DNA
gacattgcttagtcgtggctagaaatattcaggctttaaaaaggtacagacccctaacacagagaaaaagggataaataa

SEQ ID NO: 32170 - DNA, 80 bp, synthetic construct
  misc_feature 1..80: note = Artificially Synthesized Probe
  source 1..80: mol_type = other DNA
aaaacctaggaaactataaaatgaaatccaatgtattgatctcaatccccttgcctgcttcctaaagaggacagaggcca

SEQ ID NO: 32171 - DNA, 80 bp, synthetic construct
  misc_feature 1..80: note = Artificially Synthesized Probe
  source 1..80: mol_type = other DNA
tggagaaccacatcaatgggagctttttcatctaaaggtcatctgtccacactgtccaaatgaggtttaccctgtgaaat

SEQ ID NO: 32172 - DNA, 80 bp, synthetic construct
  misc_feature 1..80: note = Artificially Synthesized Probe
  source 1..80: mol_type = other DNA
tttgaagtactatttgcctcatcgcactaaaaaagtatagaaaatacagtcccctttagaaaagggcaaatgtgtgtctc

SEQ ID NO: 32173 - DNA, 80 bp, synthetic construct
  misc_feature 1..80: note = Artificially Synthesized Probe
  source 1..80: mol_type = other DNA
cacccctcacctccccgcagtggggcgcctccttctgccccattcccattgttagggagggcagagcgcggggtgggctc

SEQ ID NO: 32174 - DNA, 80 bp, synthetic construct
  misc_feature 1..80: note = Artificially Synthesized Probe
  source 1..80: mol_type = other DNA
cagagtagttgtggcggaataatctaaatatgggtgttgggtaagctattgttcccatctaatggtgaggttgtgtgaca

SEQ ID NO: 32175 - DNA, 80 bp, synthetic construct
  misc_feature 1..80: note = Artificially Synthesized Probe
  source 1..80: mol_type = other DNA
ttcaaattcccctgttatgacctctcctaggaccctgaactttttcttcctgagatgtctccatggtaattatgtaggta

SEQ ID NO: 32176 - DNA, 80 bp, synthetic construct
  misc_feature 1..80: note = Artificially Synthesized Probe
  source 1..80: mol_type = other DNA
tacacccataaagaggaccaacataaacacaaaacagtaagaaaagaaaagcaaagccccactgaaacttacgtgcagtg

SEQ ID NO: 32177 - DNA, 80 bp, synthetic construct
  misc_feature 1..80: note = Artificially Synthesized Probe
  source 1..80: mol_type = other DNA
aaaggaatggctgagtggtaaagggtagaaagggcatgtttctcttcactgttgtgatcatttctgctctggtctagatt

SEQ ID NO: 32178 - DNA, 80 bp, synthetic construct
  misc_feature 1..80: note = Artificially Synthesized Probe
  source 1..80: mol_type = other DNA
ttagcaaagagcattccaacctggttggaccaaccatgtaaccttgagtttagttccaagcacctgtcttcttaatcctt

SEQ ID NO: 32179 - DNA, 80 bp, synthetic construct
  misc_feature 1..80: note = Artificially Synthesized Probe
  source 1..80: mol_type = other DNA
tagcctgaccaacgtggtgaaacctcatgtctatccgctaaagaaataaaatgagccaagtgtggtggtgcatgcctgta

SEQ ID NO: 32180 - DNA, 80 bp, synthetic construct
  misc_feature 1..80: note = Artificially Synthesized Probe
  source 1..80: mol_type = other DNA
ttacagtcccaccaacattgtcaaagtgttccagctgctccacatcctctccagcacctattgtctcctgactttttaat

SEQ ID NO: 32181 - DNA, 80 bp, synthetic construct
  misc_feature 1..80: note = Artificially Synthesized Probe
  source 1..80: mol_type = other DNA
ccagctttgttcttttggcttaggattgatttgacaatgcaggctcttttttggttccatatgaactttaaagtagtttt

SEQ ID NO: 32182 - DNA, 80 bp, synthetic construct
  misc_feature 1..80: note = Artificially Synthesized Probe
  source 1..80: mol_type = other DNA
tggttctgtttatatgttggattacattcattgatttgcatatgttgaaccagccttgcatcccagggatgaagcccact

SEQ ID NO: 32183 - DNA, 80 bp, synthetic construct
  misc_feature 1..80: note = Artificially Synthesized Probe
  source 1..80: mol_type = other DNA
ttcctgctttctcttgtgggcatttagtactataaatttccctctacacactgctttgaatgtgtcccagagattctggt

SEQ ID NO: 32184 - DNA, 80 bp, synthetic construct
  misc_feature 1..80: note = Artificially Synthesized Probe
  source 1..80: mol_type = other DNA
taccattatgtaatggccttctttgtctcttttgatctttgttggtttaaagtttgttttatcagagactaggattgcaa

SEQ ID NO: 32185 - DNA, 80 bp, synthetic construct
  misc_feature 1..80: note = Artificially Synthesized Probe
  source 1..80: mol_type = other DNA
cggctactgagccttctgcattcgtcacgtagctcttgtgccttggttttcagctccatcaggtcctttaaggacttctc

SEQ ID NO: 32186 - DNA, 80 bp, synthetic construct
  misc_feature 1..80: note = Artificially Synthesized Probe
  source 1..80: mol_type = other DNA
aacattttcatcaaccccaggaagatccctattcccccttcccagtcaaacctcccaccagaaacaacttttgatctgat

SEQ ID NO: 32187 - DNA, 80 bp, synthetic construct
  misc_feature 1..80: note = Artificially Synthesized Probe
  source 1..80: mol_type = other DNA
atagaccccaacttatcctttctcttgctgatggacatttaagttgtttccaggttttgattattgtaaataaatgctat

SEQ ID NO: 32188 - DNA, 80 bp, synthetic construct
  misc_feature 1..80: note = Artificially Synthesized Probe
  source 1..80: mol_type = other DNA
tcagcccttctttgaaatgcttgttcttgacttcatgatagaactctgttgtcttctttctattttgccaagttatctct

SEQ ID NO: 32189 - DNA, 80 bp, synthetic construct
  misc_feature 1..80: note = Artificially Synthesized Probe
  source 1..80: mol_type = other DNA
aaaataaaaaatttaaaattaaatagaattcaaaatttaaaaaggcagggtgtggtggctcacacctgtaatcctagcac

SEQ ID NO: 32190 - DNA, 80 bp, synthetic construct
  misc_feature 1..80: note = Artificially Synthesized Probe
  source 1..80: mol_type = other DNA
caccacgcccgtcccactagcaagaattttcaagaaaagcattagaagacaataacaaaatttacatttaggagccaacc

SEQ ID NO: 32191 - DNA, 80 bp, synthetic construct
  misc_feature 1..80: note = Artificially Synthesized Probe
  source 1..80: mol_type = other DNA
aatttacctcaggaattcaaggacgatctcatgttaacatatatattttataacttggtaatttgatccaactcaccatc

SEQ ID NO: 32192 - DNA, 80 bp, synthetic construct
  misc_feature 1..80: note = Artificially Synthesized Probe
  source 1..80: mol_type = other DNA
attaggtatatcccctaatggctatccctcccccctccccccaccccataacagtccccgtccccagtgtgtgatgttcc

SEQ ID NO: 32193 - DNA, 80 bp, synthetic construct
  misc_feature 1..80: note = Artificially Synthesized Probe
  source 1..80: mol_type = other DNA
gtctagccagttttcccagcaccatttattaaatagggaatcctttccccattgcttgtttttgtcaggtttgtcaagat

SEQ ID NO: 32194 - DNA, 80 bp, synthetic construct
  misc_feature 1..80: note = Artificially Synthesized Probe
  source 1..80: mol_type = other DNA
aatcacttgaacctgggaggcagaggttgcagtgagctgagattgcaccactgccctccagcctgggcaacagagcaaga

SEQ ID NO: 32195 - DNA, 80 bp, synthetic construct
  misc_feature 1..80: note = Artificially Synthesized Probe
  source 1..80: mol_type = other DNA
ccatgaaaattttaaaactatttacctgaatgatgatgaaaatactacatatccaaatttatgggccagacacggtgact

SEQ ID NO: 32196 - DNA, 80 bp, synthetic construct
  misc_feature 1..80: note = Artificially Synthesized Probe
  source 1..80: mol_type = other DNA
ctgagttctatgacctgaaaaagtttaggaagcactgacctagagaaactctcatacatgtacatgtgcactaggagaca

SEQ ID NO: 32197 - DNA, 80 bp, synthetic construct
  misc_feature 1..80: note = Artificially Synthesized Probe
  source 1..80: mol_type = other DNA
actctaaaaataagaatcaaatgccttatcacattccgcagtcccttgtttcaactccctttatccctggttcacttagt

SEQ ID NO: 32198 - DNA, 80 bp, synthetic construct
  misc_feature 1..80: note = Artificially Synthesized Probe
  source 1..80: mol_type = other DNA
gatcttgcatgctagccacagttgatttgatttgaaagcaacactgattgagagaaaagtccatccattagtcagagaca

SEQ ID NO: 32199 - DNA, 80 bp, synthetic construct
  misc_feature 1..80: note = Artificially Synthesized Probe
  source 1..80: mol_type = other DNA
ctccctctcaatcttgcatgcctagagaagctctgctgaagacagtttgacatgaatgaggctatgaagacagaattcca

SEQ ID NO: 32200 - DNA, 80 bp, synthetic construct
  misc_feature 1..80: note = Artificially Synthesized Probe
  source 1..80: mol_type = other DNA
caactaaaattggattatattttttcaatactttaaaaaataatgtgccttggaggtggggaggggtggggaggaaaagc

SEQ ID NO: 32201 - DNA, 80 bp, synthetic construct
  misc_feature 1..80: note = Artificially Synthesized Probe
  source 1..80: mol_type = other DNA
tctaatacagccttttgttttgttctccatatatttcaccttgtatagtttctgctgttacattaccaagttcactaatc

SEQ ID NO: 32202 - DNA, 80 bp, synthetic construct
  misc_feature 1..80: note = Artificially Synthesized Probe
  source 1..80: mol_type = other DNA
catagactctcatccttggcacacacaagttagaatccatccaaagacccaaggagactcctatacaaatttctagaatt

SEQ ID NO: 32203 - DNA, 80 bp, synthetic construct
  misc_feature 1..80: note = Artificially Synthesized Probe
  source 1..80: mol_type = other DNA
aagttttgtatctaacctagcagtcttataaagttggccttctgtacccatgggtttggcatctggggattcaaccaaca

SEQ ID NO: 32204 - DNA, 80 bp, synthetic construct
  misc_feature 1..80: note = Artificially Synthesized Probe
  source 1..80: mol_type = other DNA
gatccccaactttggtatcagtgggaaccatagaaccagtttccagtagatgctaagggacactatactaacattgtttt

SEQ ID NO: 32205 - DNA, 80 bp, synthetic construct
  misc_feature 1..80: note = Artificially Synthesized Probe
  source 1..80: mol_type = other DNA
ttaaataatctgtaatcggatttcccaattaggaagttattgacgactctggaaagaactgcttcaaaggagcaggacca

SEQ ID NO: 32206 - DNA, 80 bp, synthetic construct
  misc_feature 1..80: note = Artificially Synthesized Probe
  source 1..80: mol_type = other DNA
ccagtgtcatgcaaacactctggattaaacatgcatggtctaacattgattggcatgttaaagaatccttctgtggccag

SEQ ID NO: 32207 - DNA, 80 bp, synthetic construct
  misc_feature 1..80: note = Artificially Synthesized Probe
  source 1..80: mol_type = other DNA
gcttcatacccattatggttaccagcctctgtttatttctctccatcttctagaaaaggttggctacacatgttgttgct

SEQ ID NO: 32208 - DNA, 80 bp, synthetic construct
  misc_feature 1..80: note = Artificially Synthesized Probe
  source 1..80: mol_type = other DNA
caaacttctaatactatctatataccaaaaactcccccaacctacctcaactggacttctttgttaagccccagaccaat

SEQ ID NO: 32209 - DNA, 80 bp, synthetic construct
  misc_feature 1..80: note = Artificially Synthesized Probe
  source 1..80: mol_type = other DNA
gtgtctggcttaatgcttaacttttgaatgtcctctctaaaacctgtacctttcccagtctttccccataggggaagcca

SEQ ID NO: 32210 - DNA, 80 bp, synthetic construct
  misc_feature 1..80: note = Artificially Synthesized Probe
  source 1..80: mol_type = other DNA
tggaggaggggatgtgatccagtgtgttagatataaagaggactgcacgtccacaagacattctgattacctacatcatc

SEQ ID NO: 32211 - DNA, 80 bp, synthetic construct
  misc_feature 1..80: note = Artificially Synthesized Probe
  source 1..80: mol_type = other DNA
gattctcctgctgtgtcaactcattgctctttgggcgtactatacagctttttttttttcctaggaaatcccttcctccc

SEQ ID NO: 32212 - DNA, 80 bp, synthetic construct
  misc_feature 1..80: note = Artificially Synthesized Probe
  source 1..80: mol_type = other DNA
tcttttttagagacagacaaagtctctcccaggctggagtgcattggcatgatttagctcattgcagccttgaattcttg

SEQ ID NO: 32213 - DNA, 80 bp, synthetic construct
  misc_feature 1..80: note = Artificially Synthesized Probe
  source 1..80: mol_type = other DNA
tacaggcgtgagccaccgctcccggcaccttcctccttttctttttctttctttcttctaacattttctctgtttcccct

SEQ ID NO: 32214 - DNA, 80 bp, synthetic construct
  misc_feature 1..80: note = Artificially Synthesized Probe
  source 1..80: mol_type = other DNA
attagaatttttgtgttttagaggaggcttgtctcacaaagacagtttttctgtaggataatcaggtaccagggcccttt

SEQ ID NO: 32215 - DNA, 80 bp, synthetic construct
  misc_feature 1..80: note = Artificially Synthesized Probe
  source 1..80: mol_type = other DNA
gccactgtgcctggcctctgcttcttattggcttctttccctgtaggtgttggttttctctatttttggttttctttgct

SEQ ID NO: 32216 - DNA, 80 bp, synthetic construct
  misc_feature 1..80: note = Artificially Synthesized Probe
  source 1..80: mol_type = other DNA
tctttggatattgtagggtctggtggctgagcatgagagtgggtattagatgcttttgaatttatatcttggttttcacc

SEQ ID NO: 32217 - DNA, 80 bp, synthetic construct
  misc_feature 1..80: note = Artificially Synthesized Probe
  source 1..80: mol_type = other DNA
agaactctggcaagtttcttttctgactagcaaattgatcttgcttttgcagagcttctcagtctttagtgtgcacatta

SEQ ID NO: 32218 - DNA, 80 bp, synthetic construct
  misc_feature 1..80: note = Artificially Synthesized Probe
  source 1..80: mol_type = other DNA
ctcccaaagtgctgagaatacaggcgtgagccaccgcgcccagcctaattattgtatttttagtagagacggggtttcac

SEQ ID NO: 32219 - DNA, 80 bp, synthetic construct
  misc_feature 1..80: note = Artificially Synthesized Probe
  source 1..80: mol_type = other DNA
tgttctgcctgtctggagagctgtgactaacacagatttgtatcacaagcttctatgttttatttctgatgctgctggtg

SEQ ID NO: 32220 - DNA, 80 bp, synthetic construct
  misc_feature 1..80: note = Artificially Synthesized Probe
  source 1..80: mol_type = other DNA
aaatgctgtggctgctattgaaccactttcttcttatacttggaccaaaaaggagagactaattagacaacctggaacat

SEQ ID NO: 32221 - DNA, 80 bp, synthetic construct
  misc_feature 1..80: note = Artificially Synthesized Probe
  source 1..80: mol_type = other DNA
ggaagactgagttgcttagaactgggagggaagagtttcagagaggaggagctatgcaaaaaaagagctccacaattatt

SEQ ID NO: 32222 - DNA, 80 bp, synthetic construct
  misc_feature 1..80: note = Artificially Synthesized Probe
  source 1..80: mol_type = other DNA
acacaggggaagagcaagcaacttcctattactagcaataaacttacaatgagggttttaaattctcccctagctgaaag

SEQ ID NO: 32223 - DNA, 80 bp, synthetic construct
  misc_feature 1..80: note = Artificially Synthesized Probe
  source 1..80: mol_type = other DNA
aagacgatcagtgaaccaccaaagtagaattgatccgaatgcgttcataatatcttctgaattctgaggtgtcctccaag

SEQ ID NO: 32224 - DNA, 80 bp, synthetic construct
  misc_feature 1..80: note = Artificially Synthesized Probe
  source 1..80: mol_type = other DNA
gcttttcttccttgaagtcctggaggcaatgaatcctccataattcatctgtctctcgagcgagtgcggcattgtctttc

SEQ ID NO: 32225 - DNA, 80 bp, synthetic construct
  misc_feature 1..80: note = Artificially Synthesized Probe
  source 1..80: mol_type = other DNA
gcaaggcggagagtttctgcaaatatttctctagctttttcggctccgtcttagtggccagacgcacctgcagcttcccc

SEQ ID NO: 32226 - DNA, 80 bp, synthetic construct
  misc_feature 1..80: note = Artificially Synthesized Probe
  source 1..80: mol_type = other DNA
gtctagcccatcccttaaagcccccagggtcctgggaatttaactatttccatgcaatcttttttccattgttaactgaa

SEQ ID NO: 32227 - DNA, 80 bp, synthetic construct
  misc_feature 1..80: note = Artificially Synthesized Probe
  source 1..80: mol_type = other DNA
gattcgggtgttaagccttttctgagaattaccctccgtgttgtgcagagaaataagtaaatttgctgtgtttccagact

SEQ ID NO: 32228 - DNA, 80 bp, synthetic construct
  misc_feature 1..80: note = Artificially Synthesized Probe
  source 1..80: mol_type = other DNA
acgaatgcttttctgtcttccttaagggtagtatctctgtggcaccctgttctggctccttacgtgttcttcaggcttga

SEQ ID NO: 32229 - DNA, 80 bp, synthetic construct
  misc_feature 1..80: note = Artificially Synthesized Probe
  source 1..80: mol_type = other DNA
tatcagtgtcaactggtggattgagagtttgtgtctaagaagtccttccttatgcactggatgatttcaaaagaaaggag

SEQ ID NO: 32230 - DNA, 80 bp, synthetic construct; identical to SEQ ID NO: 32224
  misc_feature 1..80: note = Artificially Synthesized Probe
  source 1..80: mol_type = other DNA

SEQ ID NO: 32231 - DNA, 80 bp, synthetic construct
  misc_feature 1..80: note = Artificially Synthesized Probe
  source 1..80: mol_type = other DNA
gttttgagatgcgtttgcttgtgtcatgtttgttttccattttggcaggggaaaggttttccaggaagaaaggttgttgc

SEQ ID NO: 32232 - DNA, 80 bp, synthetic construct
  misc_feature 1..80: note = Artificially Synthesized Probe
  source 1..80: mol_type = other DNA
cggcttaggtctttctatttctctctctatccctcactgtcggtaacgcctaagaaccaagtttacttaatggtgtgtgt

SEQ ID NO: 32233 - DNA, 80 bp, synthetic construct; identical to SEQ ID NO: 32223
  misc_feature 1..80: note = Artificially Synthesized Probe
  source 1..80: mol_type = other DNA

SEQ ID NO: 32234 - DNA, 80 bp, synthetic construct; identical to SEQ ID NO: 32224
  misc_feature 1..80: note = Artificially Synthesized Probe
  source 1..80: mol_type = other DNA

SEQ ID NO: 32235 - DNA, 80 bp, synthetic construct; identical to SEQ ID NO: 32225
  misc_feature 1..80: note = Artificially Synthesized Probe
  source 1..80: mol_type = other DNA

SEQ ID NO: 32236 - DNA, 80 bp, synthetic construct; identical to SEQ ID NO: 32226
  misc_feature 1..80: note = Artificially Synthesized Probe
  source 1..80: mol_type = other DNA

SEQ ID NO: 32237 - DNA, 80 bp, synthetic construct; identical to SEQ ID NO: 32227
  misc_feature 1..80: note = Artificially Synthesized Probe
  source 1..80: mol_type = other DNA

SEQ ID NO: 32238 - DNA, 80 bp, synthetic construct; identical to SEQ ID NO: 32228
  misc_feature 1..80: note = Artificially Synthesized Probe
  source 1..80: mol_type = other DNA

SEQ ID NO: 32239 - DNA, 80 bp, synthetic construct; identical to SEQ ID NO: 32229
  misc_feature 1..80: note = Artificially Synthesized Probe
  source 1..80: mol_type = other DNA

SEQ ID NO: 32240 - DNA, 80 bp, synthetic construct
  misc_feature 1..80: note = Artificially Synthesized Probe
  source 1..80: mol_type = other DNA
ggcatcttagcattcactctgcgtccagggaaagcagcttcctcccggaactttggtgaagagagtgcttctggctttgc

SEQ ID NO: 32241 - DNA, 80 bp, synthetic construct; identical to SEQ ID NO: 32225
  misc_feature 1..80: note = Artificially Synthesized Probe
  source 1..80: mol_type = other DNA

SEQ ID NO: 32242 - DNA, 80 bp, synthetic construct; identical to SEQ ID NO: 32226
  misc_feature 1..80: note = Artificially Synthesized Probe
  source 1..80: mol_type = other DNA

SEQ ID NO: 32243 - DNA, 80 bp, synthetic construct
  misc_feature 1..80: note = Artificially Synthesized Probe
  source 1..80: mol_type = other DNA
atttgctgtgtttccagacttccagctacttctccaggagaatcgtagtgtaatactggcaattcttcagagctagaatg

SEQ ID NO: 32244 - DNA, 80 bp, synthetic construct
  misc_feature 1..80: note = Artificially Synthesized Probe
  source 1..80: mol_type = other DNA
aaattatcagtgaacatccaaaatagaattgttcccaatgcgttcatatcttctgaattctgaggtgttctccaagctgg

SEQ ID NO: 32245 - DNA, 80 bp, synthetic construct
  misc_feature 1..80: note = Artificially Synthesized Probe
  source 1..80: mol_type = other DNA
aagtcctggaaacaatgattcctccgtaattcgtctgtctctctaacgagtgcgtgattgtctttctttctgcgatacag

SEQ ID NO: 32246 - DNA, 80 bp, synthetic construct
  misc_feature 1..80: note = Artificially Synthesized Probe
  source 1..80: mol_type = other DNA
ggggtttcctctcttaagcaggccccgcatgatttctccctgatcaaagtaggggagtgccaatctccctgggcacacaa

SEQ ID NO: 32247 - DNA, 80 bp, synthetic construct
  misc_feature 1..80: note = Artificially Synthesized Probe
  source 1..80: mol_type = other DNA
ttgctgtgcaacaaagaatgaagctctggtgccagagctgggccttatgtagcccatcccaggctgacactcacggctct

SEQ ID NO: 32248 - DNA, 80 bp, synthetic construct
  misc_feature 1..80: note = Artificially Synthesized Probe
  source 1..80: mol_type = other DNA
tggtagcctttgttttgtgctctttcttcaggactatccagtgtagccatgttttatccccgcttacaaatcttggaata

SEQ ID NO: 32249 - DNA, 80 bp, synthetic construct
  misc_feature 1..80: note = Artificially Synthesized Probe
  source 1..80: mol_type = other DNA
aaaacaaaaacagccagattattgaaacatgcaaatgagacacctagattagatgttcacttctgggcctcctttctttg

SEQ ID NO: 32250 - DNA, 80 bp, synthetic construct
  misc_feature 1..80: note = Artificially Synthesized Probe
  source 1..80: mol_type = other DNA
actcactatcctacctgtgggtagtagaaaataaactgtatttttctgcctctgtgtatgtgcatgtatgtgcacacatg

SEQ ID NO: 32251 - DNA, 80 bp, synthetic construct
  misc_feature 1..80: note = Artificially Synthesized Probe
  source 1..80: mol_type = other DNA
atctaatgagttttccctaatgagtttttcatcccactaatgagggtcttcctctgggtatatgcatgtctgtgcacaca

SEQ ID NO: 32252 - DNA, 80 bp, synthetic construct
  misc_feature 1..80: note = Artificially Synthesized Probe
  source 1..80: mol_type = other DNA
ttatctctggtctggagtgaatataaattggtgagagaatgatgaggaggagttgatgaaaggaagagcattggcctaga

SEQ ID NO: 32253 - DNA, 80 bp, synthetic construct
  misc_feature 1..80: note = Artificially Synthesized Probe
  source 1..80: mol_type = other DNA
gcctatcggttactataatctatcatatagaatggtttcgctgccctagaaatcttgtactctacctattcatcccttcc

SEQ ID NO: 32254 - DNA, 80 bp, synthetic construct
  misc_feature 1..80: note = Artificially Synthesized Probe
  source 1..80: mol_type = other DNA
ttgaatggcagagagcaaaatcgatcaaacaagtagtacttactatgctcccttcacaaacattttgaaacacaggttgc

SEQ ID NO: 32255 - DNA, 80 bp, synthetic construct
  misc_feature 1..80: note = Artificially Synthesized Probe
  source 1..80: mol_type = other DNA
gaatggaaaatgacctacaccaaagaaattgtgtaattttagaaccctagggttaaaaatgagatcgtaggctgggcgcg

SEQ ID NO: 32256 - DNA, 80 bp, synthetic construct
  misc_feature 1..80: note = Artificially Synthesized Probe
  source 1..80: mol_type = other DNA
taaaataattaaggttgtttcctctagggcaagggtgtccaaacttttgtgttccctgggccacagtggaagaagaattc

SEQ ID NO: 32257 - DNA, 80 bp, synthetic construct
  misc_feature 1..80: note = Artificially Synthesized Probe
  source 1..80: mol_type = other DNA
ggcaacaagagcaagattccttctcaaaaaaaaaacaaaaacaaaaacaaaaacagtttaaaatgggtccggtgtggtgg

SEQ ID NO: 32258 - DNA, 80 bp, synthetic construct
  misc_feature 1..80: note = Artificially Synthesized Probe
  source 1..80: mol_type = other DNA
gcacattaacactgtgaataagtgcacggattcatccagtttgagcaaagaccttatcatacaggagttgtccttttatg

SEQ ID NO: 32259 - DNA, 80 bp, synthetic construct
  misc_feature 1..80: note = Artificially Synthesized Probe
  source 1..80: mol_type = other DNA
agaaagtacagagttctgtatgccccttcccttttccagtttcctctcccagtgacatctgtattgatgtggtttattac

SEQ ID NO: 32260 - DNA, 80 bp, synthetic construct
  misc_feature 1..80: note = Artificially Synthesized Probe
  source 1..80: mol_type = other DNA
ggtttggccacctacctcattaaaaacacacaagcaattacagtaagggctgctgctactgtgctggatgatataagagt

SEQ ID NO: 32261 - DNA, 80 bp, synthetic construct
  misc_feature 1..80: note = Artificially Synthesized Probe
  source 1..80: mol_type = other DNA
ggcacttaagtaaagtaaccccaagggtagcatatgagaaagtgctaagtgttcaatctatgacagggctgtggggcttg

SEQ ID NO: 32262 - DNA, 80 bp, synthetic construct
  misc_feature 1..80: note = Artificially Synthesized Probe
  source 1..80: mol_type = other DNA
atccaaagaaccctgagttaaaatacctcaaggtgcttttctgagtgtgtgcagcacttggagcagtagttatacagaat

SEQ ID NO: 32263 - DNA, 80 bp, synthetic construct
  misc_feature 1..80: note = Artificially Synthesized Probe
  source 1..80: mol_type = other DNA
ccatgccaggtcccagcactgtgaacatagtaacagaatctcagtaaatgttatttgcatagccattgaggaacttacta

SEQ ID NO: 32264 - DNA, 80 bp, synthetic construct
  misc_feature 1..80: note = Artificially Synthesized Probe
  source 1..80: mol_type = other DNA
tttgtaaaaacagaggaaatgttagtcattttctctgaggggcagaattttcttttgatttaccagtattttctagtttt

SEQ ID NO: 32265 - DNA, 80 bp, synthetic construct
  misc_feature 1..80: note = Artificially Synthesized Probe
  source 1..80: mol_type = other DNA
ctttcagaggattttgagacacagcccttgcttccagtgctaaggccacttatattggacagttttacaactgaacaagt

SEQ ID NO: 32266 - DNA, 80 bp, synthetic construct
  misc_feature 1..80: note = Artificially Synthesized Probe
  source 1..80: mol_type = other DNA
tgtctcatctgtaagattagtgtttctttctcatcttattcccagatagatggagaccctcaccctgcaccaaaggagta

SEQ ID NO: 32267 - DNA, 80 bp, synthetic construct
  misc_feature 1..80: note = Artificially Synthesized Probe
  source 1..80: mol_type = other DNA
taatatctgagccctttgcaatcttcctctgtgaggagatgctggagaagctcaggcctctttctcttcgctggtaattt

SEQ ID NO: 32268 - DNA, 80 bp, synthetic construct
  misc_feature 1..80: note = Artificially Synthesized Probe
  source 1..80: mol_type = other DNA
ttccctcttttcatcatttagttaatttcaagcactcccagatcagatgtcctgacctgtctgaagatcaacaatgagcc

SEQ ID NO: 32269 - DNA, 80 bp, synthetic construct
  misc_feature 1..80: note = Artificially Synthesized Probe
  source 1..80: mol_type = other DNA
tagtcagactctgggtaataaatgataactgcttgtgcatagaaatcatgaggagcgtttgcagccagcttcggaaggct

SEQ ID NO: 32270 - DNA, 80 bp, synthetic construct
  misc_feature 1..80: note = Artificially Synthesized Probe
  source 1..80: mol_type = other DNA
agggtgcacctaggactaatggttaaagtcaaagcagagtgaatttggttccatgttcagaagaattttaccatcctcag

SEQ ID NO: 32271 - DNA, 80 bp, synthetic construct
  misc_feature 1..80: note = Artificially Synthesized Probe
  source 1..80: mol_type = other DNA
tctgggacaacattgatgaagggaagtttgttttccttctgcaatccccttttgatgtttattactcataacatgctgag

SEQ ID NO: 32272 - DNA, 80 bp, synthetic construct
  misc_feature 1..80: note = Artificially Synthesized Probe
  source 1..80: mol_type = other DNA
taaaaccatggacatatccctagatttcctaatgtttcttaacttgagtgggaggacttttttctcctccaagtttttcc

SEQ ID NO: 32273 - DNA, 80 bp, synthetic construct
  misc_feature 1..80: note = Artificially Synthesized Probe
  source 1..80: mol_type = other DNA
gtaaagacagtggagaggaaaatgcccacccacgaagagtaagtgaaactcatgaacctaacactgaaagtggtaatttc

SEQ ID NO: 32274 - DNA, 80 bp, synthetic construct
  misc_feature 1..80: note = Artificially Synthesized Probe
  source 1..80: mol_type = other DNA
attgctcttggtcatactctccaaggttgtagttctttaagcttcttctttcttcagccaagtgctcaaacctctggagt

SEQ ID NO: 32275 - DNA, 80 bp, synthetic construct
  misc_feature 1..80: note = Artificially Synthesized Probe
  source 1..80: mol_type = other DNA
gggaacaagaagggagggagatgacctgctcttataaacaaccaggtccctcgtgaactaatagagtgagaactcactca

SEQ ID NO: 32276 - DNA, 80 bp, synthetic construct
  misc_feature 1..80: note = Artificially Synthesized Probe
  source 1..80: mol_type = other DNA
ctcacaaagaacctttcacacttattttgtacccagcactctattgagtggtgaacgtgtatcacaatccatagacagga

SEQ ID NO: 32277 - DNA, 80 bp, synthetic construct
  misc_feature 1..80: note = Artificially Synthesized Probe
  source 1..80: mol_type = other DNA
atctgatattcaattcacaaatttatggaggcaggctggggcttctggagctttgtgggctgcttcttttattaataaca

SEQ ID NO: 32278 - DNA, 80 bp, synthetic construct
  misc_feature 1..80: note = Artificially Synthesized Probe
  source 1..80: mol_type = other DNA
tcatcccagggacaaagtgcactttaagagcatgaaggagggaggggtggggaaagtgttaggaaagaagacaggaaatc

SEQ ID NO: 32279 - DNA, 80 bp, synthetic construct
  misc_feature 1..80: note = Artificially Synthesized Probe
  source 1..80: mol_type = other DNA
atgagaccccatttctagagagcattagctggtatatgtgggtttcccaagatcgactgtgggacttgagtatgcacaga

SEQ ID NO: 32280 - DNA, 80 bp, synthetic construct
  misc_feature 1..80: note = Artificially Synthesized Probe
  source 1..80: mol_type = other DNA
tttcaggcttttttgaggaaacactctagatattcagtttgcctgaaacaactcctactgagaaaggccccttagtgact

SEQ ID NO: 32281 - DNA, 80 bp, synthetic construct
  misc_feature 1..80: note = Artificially Synthesized Probe
  source 1..80: mol_type = other DNA
atttctgttcactatccattggacaagctgtatgtcacacaactatcaggaagggaagggcaggatgattttctgtccac

SEQ ID NO: 32282 - DNA, 80 bp, synthetic construct
  misc_feature 1..80: note = Artificially Synthesized Probe
  source 1..80: mol_type = other DNA
aaaccactgagcccatgtggcccctgatttttggatgctttcctctaaggagacaaaaatcaatacatttggattctctt

SEQ ID NO: 32283 - DNA, 80 bp, synthetic construct
  misc_feature 1..80: note = Artificially Synthesized Probe
  source 1..80: mol_type = other DNA
accaaacctcatccttgttccttgtttccttagtatccacagctatttacaggaattctttctccctggaaaggactact

SEQ ID NO: 32284 - DNA, 80 bp, synthetic construct
  misc_feature 1..80: note = Artificially Synthesized Probe
  source 1..80: mol_type = other DNA
tctaagaaagaatcaagaaactttaaacttcattattctttcagatgttctgagcacctttgcttccatagtgcccatag

SEQ ID NO: 32285 - DNA, 80 bp, synthetic construct
  misc_feature 1..80: note = Artificially Synthesized Probe
  source 1..80: mol_type = other DNA
gttggcccttgaacaacagttggcccttcaactgcacgggtctacttatatggggaatttttttcaacaaaatacagtat

SEQ ID NO: 32286 - DNA, 80 bp, synthetic construct
  misc_feature 1..80: note = Artificially Synthesized Probe
  source 1..80: mol_type = other DNA
tcctctggttcagtattattttgttaggattctaagagtgaagaaaagtcccagtggagtgggagcaaaaaaaattaatt

SEQ ID NO: 32287 - DNA, 80 bp, synthetic construct
  misc_feature 1..80: note = Artificially Synthesized Probe
  source 1..80: mol_type = other DNA
tacacatttttgcccatatagtatgggacaatttgtacgaagtagaatcgccaagtcagagggaacagacatcaccgatt

SEQ ID NO: 32288 - DNA, 80 bp, synthetic construct
  misc_feature 1..80: note = Artificially Synthesized Probe
  source 1..80: mol_type = other DNA
atctgaaaggcattgtgatgaatgccccagcattgccattgttctctcagttcattaaactcagccagttgttcctataa

SEQ ID NO: 32289 - DNA, 80 bp, synthetic construct
  misc_feature 1..80: note = Artificially Synthesized Probe
  source 1..80: mol_type = other DNA
taatttggagaacacaaaggggctaaatttgtcagccttgttacccatgatgggaacccaatccttcccctgaaatcctt

SEQ ID NO: 32290 - DNA, 80 bp, synthetic construct
  misc_feature 1..80: note = Artificially Synthesized Probe
  source 1..80: mol_type = other DNA
ggaaaacaccacttctctgtggcatcaggttatggctcagcagggctgactttaaatatgttacatatattatctctaaa

SEQ ID NO: 32291 - DNA, 80 bp, synthetic construct
  misc_feature 1..80: note = Artificially Synthesized Probe
  source 1..80: mol_type = other DNA
acggtcttctctcttaggcaaaggtagttgagtattaaggggcatagatcctaaaaaaacatatacctagccaggcaggg

SEQ ID NO: 32292 - DNA, 80 bp, synthetic construct
  misc_feature 1..80: note = Artificially Synthesized Probe
  source 1..80: mol_type = other DNA
tcttagcagcttctaacctgccgtggtaagagaccaagagagtaaattttgaatacattttcaggagtcactaagtgcaa

SEQ ID NO: 32293 - DNA, 80 bp, synthetic construct
  misc_feature 1..80: note = Artificially Synthesized Probe
  source 1..80: mol_type = other DNA
aaactcttctgtagtgcatgctaattatctgggaccccccccaaaccagaagtcattgaaaaaaaccataatgttcattt

SEQ ID NO: 32294 - DNA, 80 bp, synthetic construct
  misc_feature 1..80: note = Artificially Synthesized Probe
  source 1..80: mol_type = other DNA
tctttaccattgacttactgaactggtatccaaacaaggtttgcactttgtaattggtcattcccttaagtctcttaatc

SEQ ID NO: 32295 - DNA, 80 bp, synthetic construct
  misc_feature 1..80: note = Artificially Synthesized Probe
  source 1..80: mol_type = other DNA
ccatcagcttctttctctttcactacaagctcatgacttgtttggtacaaccccattagtttcattttttccccctaaaa

SEQ ID NO: 32296 - DNA, 80 bp, synthetic construct
  misc_feature 1..80: note = Artificially Synthesized Probe
  source 1..80: mol_type = other DNA
cagatacaagccctctattggatatatgatttgtaaataatttctcccattctgtagcccttccttccttcctccctccc

SEQ ID NO: 32297 - DNA, 80 bp, synthetic construct
  misc_feature 1..80: note = Artificially Synthesized Probe
  source 1..80: mol_type = other DNA
gtcaaggccaagtttccttcttatatgtgcaggatgactcagctccattttgtacattttgctcctagaatcagccactt

SEQ ID NO: 32298 - DNA, 80 bp, synthetic construct
  misc_feature 1..80: note = Artificially Synthesized Probe
  source 1..80: mol_type = other DNA
cccgcagaggttgtaccactttgtattcccactagtgtcctgctttcattacttaacatgacagcaagaacatttccaat

SEQ ID NO: 32299 - DNA, 80 bp, synthetic construct
  misc_feature 1..80: note = Artificially Synthesized Probe
  source 1..80: mol_type = other DNA
gagcaccttccctagtctatagcatcacagagaggaccagaagaaagaacagctcttgtgtgtcaattgatgtataaaca

SEQ ID NO: 32300 - DNA, 80 bp, synthetic construct
  misc_feature 1..80: note = Artificially Synthesized Probe
  source 1..80: mol_type = other DNA
tgtgccttcactagatcaacatttttccaaaagcagtctgccacaggtcagcaagcattgtgcaaaaaatgagatctagt

SEQ ID NO: 32301 - DNA, 80 bp, synthetic construct
  misc_feature 1..80: note = Artificially Synthesized Probe
  source 1..80: mol_type = other DNA
tttaaatgataataaccctttttgaaaactatgtggccttcctaaagctaatgcaagaccaccaggttagaaggatgaga

SEQ ID NO: 32302 - DNA, 80 bp, synthetic construct
  misc_feature 1..80: note = Artificially Synthesized Probe
  source 1..80: mol_type = other DNA
ccctgatctgatgaatgcatttttcattgcaattgccttcagtcctgcctgtaggctttttttttatttggagacagagt

SEQ ID NO: 32303 - DNA, 80 bp, synthetic construct
  misc_feature 1..80: note = Artificially Synthesized Probe
  source 1..80: mol_type = other DNA
ggtgaaaatggtttagttatttatcatcttttgcttccatatccttctctggtaatgttttttgttcccaagagaaaaac

SEQ ID NO: 32304 - DNA, 80 bp, synthetic construct
  misc_feature 1..80: note = Artificially Synthesized Probe
  source 1..80: mol_type = other DNA
tttgaatctgtgcatgttagcagttctgaattgcaggcttctcctgcattctattgggatagatgggaagtaaagagaaa

SEQ ID NO: 32305 - DNA, 80 bp, synthetic construct
  misc_feature 1..80: note = Artificially Synthesized Probe
  source 1..80: mol_type = other DNA
gaattttttggaccatgccaataagaggagatctgtggtcctaacttatcagtgaacactttctcccaccccaaagtgca

SEQ ID NO: 32306 - DNA, 80 bp, synthetic construct
  misc_feature 1..80: note = Artificially Synthesized Probe
  source 1..80: mol_type = other DNA
ggatgttaaggaagcaggccatttaacatgaagtaagtagccctgcacctaaaggtcagtcatgtgttcaagtagtattt

SEQ ID NO: 32307 - DNA, 80 bp, synthetic construct
  misc_feature 1..80: note = Artificially Synthesized Probe
  source 1..80: mol_type = other DNA
tgctgggctcactgtggaagacaaagtacccttcaatgcttaatcattggctccctattatcaaccacagaatgttaata

SEQ ID NO: 32308 - DNA, 80 bp, synthetic construct
  misc_feature 1..80: note = Artificially Synthesized Probe
  source 1..80: mol_type = other DNA
ttagaagcaagtagctgatccaaagtaaaggccttggaagaaaatatagcaactgctcattaccctgtgctctgccattt

SEQ ID NO: 32309 - DNA, 80 bp, synthetic construct
  misc_feature 1..80: note = Artificially Synthesized Probe
  source 1..80: mol_type = other DNA
actgtctagatggactcttgatacattgagacattccaggcattctatgagtttcatctccttggagagaaggctggtaa

SEQ ID NO: 32310 - DNA, 80 bp, synthetic construct
  misc_feature 1..80: note = Artificially Synthesized Probe
  source 1..80: mol_type = other DNA
attgtctgttggctctcctgtaataatgttctcatttaaaaaaccatttctttctcatttcgaatttgtgtgtgtgtgtg

SEQ ID NO: 32311 - DNA, 80 bp, synthetic construct
  misc_feature 1..80: note = Artificially Synthesized Probe
  source 1..80: mol_type = other DNA
cacagatgtaggtcttcttggctgcctaatgtttatgagaggggtacattaacaaaacccacaggaagctctgtgcatgt

SEQ ID NO: 32312 - DNA, 80 bp, synthetic construct
  misc_feature 1..80: note = Artificially Synthesized Probe
  source 1..80: mol_type = other DNA
tgccattcaaaaactctttcagtggtgtttagtaggaggaagcagaggtgattgtgtttatccccaaatttaagtgcagt

SEQ ID NO: 32313 - DNA, 80 bp, synthetic construct
  misc_feature 1..80: note = Artificially Synthesized Probe
  source 1..80: mol_type = other DNA
tctcagctcagggttagacaaacaataggagaggaaaagacacactccttaaagaaatctggttgctgtgatttaggatt

SEQ ID NO: 32314 - DNA, 80 bp, synthetic construct
  misc_feature 1..80: note = Artificially Synthesized Probe
  source 1..80: mol_type = other DNA
attagttgaaagggcataaggaattgggtattcctatggtgtcaaagtattgtacacagaatacttactacttgctgaga

SEQ ID NO: 32315 - DNA, 80 bp, synthetic construct
  misc_feature 1..80: note = Artificially Synthesized Probe
  source 1..80: mol_type = other DNA
agacacatcacagaatcagttttgccaggtgtcataatgatattgtggctatgtaagcaaatgcccttctttggaaatgc

SEQ ID NO: 32316 - DNA, 80 bp, synthetic construct
  misc_feature 1..80: note = Artificially Synthesized Probe
  source 1..80: mol_type = other DNA
tcccttccttccctccctcagttctctttctcaccaattctttctccaaataatattaattgtcccatccactcaaggca

SEQ ID NO: 32317 - DNA, 80 bp, synthetic construct
  misc_feature 1..80: note = Artificially Synthesized Probe
  source 1..80: mol_type = other DNA
tatgatcttatttacaagaataaacgtgcctaccaaatttgaccatccttggatttgagcacaggggccctgataggcta

SEQ ID NO: 32318 - DNA, 80 bp, synthetic construct
  misc_feature 1..80: note = Artificially Synthesized Probe
  source 1..80: mol_type = other DNA
agagttcgagtctgtctgaaaccacatttaccctgacctggccacaaaggcaaccacaaagacctcctagtttattaatg

SEQ ID NO: 32319 - DNA, 80 bp, synthetic construct
  misc_feature 1..80: note = Artificially Synthesized Probe
  source 1..80: mol_type = other DNA
tccgaggcatctactttcaacccttgataaattttgaaggcttctactaagtaatgccacttcttttcccccactagaac

SEQ ID NO: 32320 - DNA, 80 bp, synthetic construct
  misc_feature 1..80: note = Artificially Synthesized Probe
  source 1..80: mol_type = other DNA
gaaatgctcctctggatagcaggcttcatgacaatacatttaggtcctttctgcttactgcccgttcctgaattcattca

SEQ ID NO: 32321 - DNA, 80 bp, synthetic construct
  misc_feature 1..80: note = Artificially Synthesized Probe
  source 1..80: mol_type = other DNA
tgaagccagattttaaaatatggtaacaagtgtctgaaaatatgtggctcaatttgtctcccggttacttttccctctcc

SEQ ID NO: 32322 - DNA, 80 bp, synthetic construct
  misc_feature 1..80: note = Artificially Synthesized Probe
  source 1..80: mol_type = other DNA
agtatcccaatactgtatggcagtaggctgccagagtatcctaagctgggtggcttcaacaacaggtactgactcacagt

SEQ ID NO: 32323 - DNA, 80 bp, synthetic construct
  misc_feature 1..80: note = Artificially Synthesized Probe
  source 1..80: mol_type = other DNA
ctataaggtaggtgtatcagtaagggcattgattctgcgaccttaacagagatcagaataacagtggcttaaggaagagt

SEQ ID NO: 32324 - DNA, 80 bp, synthetic construct
  misc_feature 1..80: note = Artificially Synthesized Probe
  source 1..80: mol_type = other DNA
aaaaatgcaaccccaaatcaaaaagtacgtattggccaaaacccacacgtacgcacacacacgtatacaattttaaaatc

SEQ ID NO: 32325 - DNA, 80 bp, synthetic construct
  misc_feature 1..80: note = Artificially Synthesized Probe
  source 1..80: mol_type = other DNA
gcaatggtacatggattgccttttatttccattcactactctctggctatgcagaaagtgacattttccctatcgtttaa

SEQ ID NO: 32326 - DNA, 80 bp, synthetic construct
  misc_feature 1..80: note = Artificially Synthesized Probe
  source 1..80: mol_type = other DNA
ccagcttagacccagagctatttcttcattgaattggtttaattgtaaaacataccctgaacccagcaccagctgaagac

SEQ ID NO: 32327 - DNA, 80 bp, synthetic construct
  misc_feature 1..80: note = Artificially Synthesized Probe
  source 1..80: mol_type = other DNA
ttgactctttataacctgcttactccaatgaacagatgccaatgagctgtctccgaagctctaactgactcccttttcca

SEQ ID NO: 32328 - DNA, 80 bp, synthetic construct
  misc_feature 1..80: note = Artificially Synthesized Probe
  source 1..80: mol_type = other DNA
ggtaacagatccaaactcaacgctcaaccatttctttttaaatgacccgaaaccacttatgaatgcataaaaccctgccc

SEQ ID NO: 32329 - DNA, 80 bp, synthetic construct
  misc_feature 1..80: note = Artificially Synthesized Probe
  source 1..80: mol_type = other DNA
aatcaccgggggagcttttagaaaataatggttcctggatctcacccctagagattttaatgtctttggtctgggttcct

SEQ ID NO: 32330 - DNA, 80 bp, synthetic construct
  misc_feature 1..80: note = Artificially Synthesized Probe
  source 1..80: mol_type = other DNA
ctcacatattattagtatagaaaagagcaattcccaggaccttgtacagaggaagcaggctcaaaacagctgaggaatag

SEQ ID NO: 32331 - DNA, 80 bp, synthetic construct
  misc_feature 1..80: note = Artificially Synthesized Probe
  source 1..80: mol_type = other DNA
aaatactacagccttcctcccaatattgagccctgtcccattgatcctgcaggggagatgtgtagggcatttgttcacgg

SEQ ID NO: 32332 - DNA, 80 bp, synthetic construct
  misc_feature 1..80: note = Artificially Synthesized Probe
  source 1..80: mol_type = other DNA
gtctggggtgtgaaggatggaaatataaacactgaatactcagagagtcaggccagcgagctggtgaggagactccatca

SEQ ID NO: 32333 - DNA, 80 bp, synthetic construct
  misc_feature 1..80: note = Artificially Synthesized Probe
  source 1..80: mol_type = other DNA
tccagaatcctctccccttctttgaccccttgtatatatctttcctacagtgctggtcatattctaacttctaatcattt

SEQ ID NO: 32334 - DNA, 80 bp, synthetic construct
  misc_feature 1..80: note = Artificially Synthesized Probe
  source 1..80: mol_type = other DNA
ctccttcttaatctaaatgtggactcaaatgaactgtcaattcacatagagcaatgtgacaaatccggggggcaaagcat

SEQ ID NO: 32335 - DNA, 80 bp, synthetic construct
  misc_feature 1..80: note = Artificially Synthesized Probe
  source 1..80: mol_type = other DNA
gttttagatcctgtcggagaggctcaaggccggcagaaggtttgcattaggatcgagaaagccgaccaacggacagatct

SEQ ID NO: 32336 - DNA, 80 bp, synthetic construct
  misc_feature 1..80: note = Artificially Synthesized Probe
  source 1..80: mol_type = other DNA
tgttctcatggggacgagggtgattggaggccctccaaggggtgcaccgatgtgtcctgtgcaccaggcagaaccagcat

SEQ ID NO: 32337 - DNA, 80 bp, synthetic construct
  misc_feature 1..80: note = Artificially Synthesized Probe
  source 1..80: mol_type = other DNA
agcctgggcgacaagagtgaagctctgactcaaaacaaacaaacaaacaaaaacccaacaggggagatctttatattatc

SEQ ID NO: 32338 - DNA, 80 bp, synthetic construct
  misc_feature 1..80: note = Artificially Synthesized Probe
  source 1..80: mol_type = other DNA
ggttatggtgaagacagtataaatggaagcactgtcagaaactaaaggcttatgtaagtgatgctgttcttatgtctcct

SEQ ID NO: 32339 - DNA, 80 bp, synthetic construct
  misc_feature 1..80: note = Artificially Synthesized Probe
  source 1..80: mol_type = other DNA
ccctaaaggcaaacaatctttctttagcagcagcagagcacaaacggagtgttgctgtatgctaaaagcatactatttcc

SEQ ID NO: 32340 - DNA, 80 bp, synthetic construct
  misc_feature 1..80: note = Artificially Synthesized Probe
  source 1..80: mol_type = other DNA
ctttttcaaatctcagatccccagcaaaggtatgacaatgggcaccctgaccagctctgagcctctaagcatagggtcta

SEQ ID NO: 32341 - DNA, 80 bp, synthetic construct
  misc_feature 1..80: note = Artificially Synthesized Probe
  source 1..80: mol_type = other DNA
gttggctgtagacccacagtttgggcattacagctgcccttgaagttgacaaataaccacaaccttcaaattgttatgaa

SEQ ID NO: 32342 - DNA, 80 bp, synthetic construct
  misc_feature 1..80: note = Artificially Synthesized Probe
  source 1..80: mol_type = other DNA
cattgctcttagaactattcctcttttttcatccttgaagcccccagcaaagctcagcctgaatcaactttttctaggaa

SEQ ID NO: 32343 - DNA, 80 bp, synthetic construct
  misc_feature 1..80: note = Artificially Synthesized Probe
  source 1..80: mol_type = other DNA
atgcccaaagaatcataagcaatgggtaactaggcaagggaattatctctgacaaatgccatgattgctcagtgtcccat

SEQ ID NO: 32344 - DNA, 80 bp, synthetic construct
  misc_feature 1..80: note = Artificially Synthesized Probe
  source 1..80: mol_type = other DNA
acccaggaattttacatactccagcccaaggaatcccagcaaggcaggagatccattcatctattcccccaggaaggggg

SEQ ID NO: 32345 - DNA, 80 bp, synthetic construct
  misc_feature 1..80: note = Artificially Synthesized Probe
  source 1..80: mol_type = other DNA
tgagcaacctcgaaaatcaaaggttgataagcccacacagatcagaatcaatacaaaaacgctgaaaactcaaaaagcca

SEQ ID NO: 32346 - DNA, 80 bp, synthetic construct
  misc_feature 1..80: note = Artificially Synthesized Probe
  source 1..80: mol_type = other DNA
ctggataaagaaaatgtggtacatatacaccatggaatactatgcagccataaaaaggaaagagattatgtcctttgcag

SEQ ID NO: 32347 - DNA, 80 bp, synthetic construct
  misc_feature 1..80: note = Artificially Synthesized Probe
  source 1..80: mol_type = other DNA
tggtttctcacaccaatgagaaataggagggaaaaatactttaagagaaaaagttgtgaaataaaaatcaaaatgtaaca

SEQ ID NO: 32348 - DNA, 80 bp, synthetic construct
  misc_feature 1..80: note = Artificially Synthesized Probe
  source 1..80: mol_type = other DNA
atagaaaatactatatatgaaagtttctgggatgcagctaatgtggttcttagaggtaaattgacagcattaaatgaatt

SEQ ID NO: 32349 - DNA, 80 bp, synthetic construct
  misc_feature 1..80: note = Artificially Synthesized Probe
  source 1..80: mol_type = other DNA
gatacagcatgctaaaaatcagtgcgaacatagttgaattcagcagcaccatcaatcaactggatctgattcatctaaaa

SEQ ID NO: 32350 - DNA, 80 bp, synthetic construct
  misc_feature 1..80: note = Artificially Synthesized Probe
  source 1..80: mol_type = other DNA
agtgatattaattctctgtagtctctttcagaaaatagaagcagaggaaacacttcctaattcattatatgaggctaaca

SEQ ID NO: 32351 - DNA, 80 bp, synthetic construct
  misc_feature 1..80: note = Artificially Synthesized Probe
  source 1..80: mol_type = other DNA
cttcttagagggacaccagtcagattgaattagggtccaccctagaggccttattttaacttaatcactttttaaagtcc

SEQ ID NO: 32352 - DNA, 80 bp, synthetic construct
  misc_feature 1..80: note = Artificially Synthesized Probe
  source 1..80: mol_type = other DNA
ccagaagaggactctcacaaatatactatagtcaattctctttgataaagaaccaaagacaattcaatggagtaagggca

SEQ ID NO: 32353 - DNA, 80 bp, synthetic construct
  misc_feature 1..80: note = Artificially Synthesized Probe
  source 1..80: mol_type = other DNA
gtacagaatccatctgctgtgctcctagatacttatccaattgatttgaaaacttatgttcgcataaaaaaatctgcatg

SEQ ID NO: 32354 - DNA, 80 bp, synthetic construct
  misc_feature 1..80: note = Artificially Synthesized Probe
  source 1..80: mol_type = other DNA
aacaattctgttattgctatgtatttatactggaatggaacaattacatgaatggatggcagatggtagaagccaggttt

SEQ ID NO: 32355 - DNA, 80 bp, synthetic construct
  misc_feature 1..80: note = Artificially Synthesized Probe
  source 1..80: mol_type = other DNA
aaagaattccatatattttacacaggtactctgtcttcaagaagaaggaatcaaactccccattccttcagtgtgagctg

SEQ ID NO: 32356 - DNA, 80 bp, synthetic construct
  misc_feature 1..80: note = Artificially Synthesized Probe
  source 1..80: mol_type = other DNA
cagacgttgactggatgatgtcacatgaggggcttctggggtactattaacattcgatctcaaatccaattggtggttat

SEQ ID NO: 32357 - DNA, 80 bp, synthetic construct
  misc_feature 1..80: note = Artificially Synthesized Probe
  source 1..80: mol_type = other DNA
cttcagcctgggtgacagagcaagactccatctcaaaataaataaatgaacaaataaataaacaaagcaatgttgaatgt

SEQ ID NO: 32358 - DNA, 80 bp, synthetic construct
  misc_feature 1..80: note = Artificially Synthesized Probe
  source 1..80: mol_type = other DNA
tggcttcttttaaaagtggttctaactcgaagactaatgacctttgcatttcaccagccccaccttgttaatctcatatc

SEQ ID NO: 32359 - DNA, 80 bp, synthetic construct
  misc_feature 1..80: note = Artificially Synthesized Probe
  source 1..80: mol_type = other DNA
cattaactagggtagaaagcatggtggagaaatggggctggctaagcaaagttgcgggttcaatcaagaagtttgccttt

SEQ ID NO: 32360 - DNA, 80 bp, synthetic construct
  misc_feature 1..80: note = Artificially Synthesized Probe
  source 1..80: mol_type = other DNA
ttgtcctcttacctgtgaagataaacttgtaattgacattgttagggtgagattgaacagaactcagtttcggggctagc

SEQ ID NO: 32361 - DNA, 80 bp, synthetic construct
  misc_feature 1..80: note = Artificially Synthesized Probe
  source 1..80: mol_type = other DNA
ttccggttgtttattgtagataaaggggttgggttcctggcaggtagctgcaagctgtgagtcatagttctatttatata

SEQ ID NO: 32362 - DNA, 80 bp, synthetic construct
  misc_feature 1..80: note = Artificially Synthesized Probe
  source 1..80: mol_type = other DNA
cccatcatatgatctagccatcccactgttggacatatacccaaaagaaaggaaatcaatatcttgaggagatatctgca

SEQ ID NO: 32363 - DNA, 80 bp, synthetic construct
  misc_feature 1..80: note = Artificially Synthesized Probe
  source 1..80: mol_type = other DNA
aaaaaaaaaagtggaaagcataaccttgcttgatggtgaggttgaatccccaccttcgcctttctcagatttattcccat

SEQ ID NO: 32364 - DNA, 80 bp, synthetic construct
  misc_feature 1..80: note = Artificially Synthesized Probe
  source 1..80: mol_type = other DNA
gagtctaggatgttgcttgctaagtgtactagaatatgccaccccaaatatgcctctttggcatataattattttgagct

SEQ ID NO: 32365 - DNA, 80 bp, synthetic construct
  misc_feature 1..80: note = Artificially Synthesized Probe
  source 1..80: mol_type = other DNA
tttaaaggcaggaggcagaggttacaggcaaaataagaaatcatggaggttatacattggtttaacctagaaaggtggaa

SEQ ID NO: 32366 - DNA, 80 bp, synthetic construct
  misc_feature 1..80: note = Artificially Synthesized Probe
  source 1..80: mol_type = other DNA
tgtccatgaagaatgagattatgctgacaactggagagtgagcaaggcagagaagagctttattgagcaacaaaacagct

SEQ ID NO: 32367 - DNA, 80 bp, synthetic construct
  misc_feature 1..80: note = Artificially Synthesized Probe
  source 1..80: mol_type = other DNA
aatcaaacaaacaaaaaaagatgttatctttagtttttacagggagccaaacatcccatgattctcacttccatgattat

SEQ ID NO: 32368 - DNA, 80 bp, synthetic construct
  misc_feature 1..80: note = Artificially Synthesized Probe
  source 1..80: mol_type = other DNA
acctgtcaggagggagagtatccagtctctagagatggaaatgtcaacctaaaaggaagaagcaaaggcagaattaatat

SEQ ID NO: 32369 - DNA, 80 bp, synthetic construct
  misc_feature 1..80: note = Artificially Synthesized Probe
  source 1..80: mol_type = other DNA
taacaagagccaacagtctctgttgagaccttcctacccttcaagagaacaccaaattggttgatgaacatagtggagag

SEQ ID NO: 32370 - DNA, 80 bp, synthetic construct
  misc_feature 1..80: note = Artificially Synthesized Probe
  source 1..80: mol_type = other DNA
accctaactaatacaacagatggatcccatcaggacacatgatgacagcccatccctgctggcattgctcactttgataa

SEQ ID NO: 32371 - DNA, 80 bp, synthetic construct
  misc_feature 1..80: note = Artificially Synthesized Probe
  source 1..80: mol_type = other DNA
gcatgaggtgtgcccattgctattacaatgttatgacttctaggctctttgactgaaattaattacagacacacacatac

SEQ ID NO: 32372 - DNA, 80 bp, synthetic construct
  misc_feature 1..80: note = Artificially Synthesized Probe
  source 1..80: mol_type = other DNA
agccaatgtctagaagagttttgccaatgttatcttctagaattgttatggtttcaggtcttagttttaagtctttgatc

SEQ ID NO: 32373 - DNA, 80 bp, synthetic construct
  misc_feature 1..80: note = Artificially Synthesized Probe
  source 1..80: mol_type = other DNA
gattctcagcttggtcattgttggtatatagcagtgttactgatttgtgtacattgattttgtattccgaaactttactg

SEQ ID NO: 32374 - DNA, 80 bp, synthetic construct
  misc_feature 1..80: note = Artificially Synthesized Probe
  source 1..80: mol_type = other DNA
cttttcaaagaatcatcttttttgtttcacttatctttttgttaatgttgttgtttacatttcatttagttctgctatga

SEQ ID NO: 32375 - DNA, 80 bp, synthetic construct
  misc_feature 1..80: note = Artificially Synthesized Probe
  source 1..80: mol_type = other DNA
ctattatcatgttgccatctatctaatttcttaggtctggtaataattgttttagaaatttgagagctccagtgttgggt

SEQ ID NO: 32376 - DNA, 80 bp, synthetic construct
  misc_feature 1..80: note = Artificially Synthesized Probe
  source 1..80: mol_type = other DNA
ccagggaagttttcctcaattgttccctcaaataagttccacacttttagatttctctttttactcaagaacaccaatta

SEQ ID NO: 32377 - DNA, 80 bp, synthetic construct
  misc_feature 1..80: note = Artificially Synthesized Probe
  source 1..80: mol_type = other DNA
cagtaattgtaattgttcttctgggtctagccacccagtggggttaccaggctctgggctggtgctgcggaatgtctgca

SEQ ID NO: 32378 - DNA, 80 bp, synthetic construct
  misc_feature 1..80: note = Artificially Synthesized Probe
  source 1..80: mol_type = other DNA
tttgccctccggattctgttcaagagaatttgcacccagttgaaattattacaaagctcacttggaagcttctttcaccc

SEQ ID NO: 32379 - DNA, 80 bp, synthetic construct
  misc_feature 1..80: note = Artificially Synthesized Probe
  source 1..80: mol_type = other DNA
cactttctgttcccagagagtatccaactaaggctgtgcagcccaagtgccacgtttgacagtttcttaaaatgattctt

SEQ ID NO: 32380 - DNA, 80 bp, synthetic construct
  misc_feature 1..80: note = Artificially Synthesized Probe
  source 1..80: mol_type = other DNA
gtatgatatcatccctattggttttaggacctagaaatagatttgcaggaccctaagggcaggatagaggtggatgagaa

SEQ ID NO: 32381 - DNA, 80 bp, synthetic construct
  misc_feature 1..80: note = Artificially Synthesized Probe
  source 1..80: mol_type = other DNA
atcaggaataaaagccaaaacctagattggcttttcatcccaagacatgtcctgtcctttatatgggtgtggacttacgt

SEQ ID NO: 32382 - DNA, 80 bp, synthetic construct
  misc_feature 1..80: note = Artificially Synthesized Probe
  source 1..80: mol_type = other DNA
ggcttagtcctataagactctccccaaccttgcacaccaattgcaagccctaggatgtgacctgtgcctttgaccaacca

SEQ ID NO: 32383 - DNA, 80 bp, synthetic construct
  misc_feature 1..80: note = Artificially Synthesized Probe
  source 1..80: mol_type = other DNA
gtaggatgttgcacaggatgagacccttcctctcaaaccaaacctaatagccaataagtacaggaaaagatccttgacat

SEQ ID NO: 32384 - DNA, 80 bp, synthetic construct
  misc_feature 1..80: note = Artificially Synthesized Probe
  source 1..80: mol_type = other DNA
cttgcgaggtgggggcaggggcaggaagatgggaggtgacagctaaagggtttggagttttgtttggaggtgatgaaaat

SEQ ID NO: 32385 - DNA, 80 bp, synthetic construct
  misc_feature 1..80: note = Artificially Synthesized Probe
  source 1..80: mol_type = other DNA
agataaagtgagtacaaacacccttatgcattactgtagctcaaacgaggccagactagatcctaaagaagacctggcgt

SEQ ID NO: 32386 - DNA, 80 bp, synthetic construct
  misc_feature 1..80: note = Artificially Synthesized Probe
  source 1..80: mol_type = other DNA
tttattgagtgactatttcattccaagcattctgctaggtgctgagaaatcagaaacaaatacattgaactcattggcaa

SEQ ID NO: 32387 - DNA, 80 bp, synthetic construct
  misc_feature 1..80: note = Artificially Synthesized Probe
  source 1..80: mol_type = other DNA
atgtcccttgcacaggaaaggacctagagaagagagactgttttttgagcaggtcacattcagcttactgcaatgtcttt

SEQ ID NO: 32388 - DNA, 80 bp, synthetic construct
  misc_feature 1..80: note = Artificially Synthesized Probe
  source 1..80: mol_type = other DNA
gagtcccttcttcaccctttttattgatatgttcacccaagtgttctcacacatagaagcaggtggttttctttactaca

SEQ ID NO: 32389 - DNA, 80 bp, synthetic construct
  misc_feature 1..80: note = Artificially Synthesized Probe
  source 1..80: mol_type = other DNA
aggcgtgagccaccacgcctggcccctttttcaacttttattttaggttcaggagtacatgtgcaggttcattattgggg

SEQ ID NO: 32390 - DNA, 80 bp, synthetic construct
  misc_feature 1..80: note = Artificially Synthesized Probe
  source 1..80: mol_type = other DNA
ggtgggtgcacacttgtctgacagcctctcttcttttccctttgcttggaatgctctcttcccagttaccaaagatactc

SEQ ID NO: 32391 - DNA, 80 bp, synthetic construct
  misc_feature 1..80: note = Artificially Synthesized Probe
  source 1..80: mol_type = other DNA
gtgggacctaatgggaggtgtttagtcatgagggctccacccttatgaatggattctctctctcttgttctctctctctc

SEQ ID NO: 32392 - DNA, 80 bp, synthetic construct
  misc_feature 1..80: note = Artificially Synthesized Probe
  source 1..80: mol_type = other DNA
gggccagcccggcctgttggccctcagtcgtggtcatggggaagcactgcccctgcagcccacctccccatccaggattg

SEQ ID NO: 32393 - DNA, 80 bp, synthetic construct
  misc_feature 1..80: note = Artificially Synthesized Probe
  source 1..80: mol_type = other DNA
tgggggacttggagggtgaagagggactgaagggccactagagaccaggcaggccatcccatttcagaacaagctgagag

SEQ ID NO: 32394 - DNA, 80 bp, synthetic construct
  misc_feature 1..80: note = Artificially Synthesized Probe
  source 1..80: mol_type = other DNA
cactcaaccatatacccacccatccacccagccatccctctatccattcacttcttcactcacccatccactcattcact

SEQ ID NO: 32395 - DNA, 80 bp, synthetic construct
  misc_feature 1..80: note = Artificially Synthesized Probe
  source 1..80: mol_type = other DNA
ggagtacaggctgagggcctgaattcctttgtgacagtgggagaattaccacattaactacttctctggaatagtaacaa

SEQ ID NO: 32396 - DNA, 80 bp, synthetic construct
  misc_feature 1..80: note = Artificially Synthesized Probe
  source 1..80: mol_type = other DNA
ccacatgttgattcaatcactcttccacccatctcctcatccatcccattcagctgcttagtccttcacccttcatctgg

SEQ ID NO: 32397 - DNA, 80 bp, synthetic construct
  misc_feature 1..80: note = Artificially Synthesized Probe
  source 1..80: mol_type = other DNA
cctggctgcctgtgcccagcctagccttgatgtggtcctacacccagggcagggcctggcatgagggagagcccctaacc

SEQ ID NO: 32398 - DNA, 80 bp, synthetic construct
  misc_feature 1..80: note = Artificially Synthesized Probe
  source 1..80: mol_type = other DNA
tggggataataatcacagtgtgatggaagggattaaatgaatcagtttattaaagctcttagaagagcacgtggcaggta

SEQ ID NO: 32399 - DNA, 80 bp, synthetic construct
  misc_feature 1..80: note = Artificially Synthesized Probe
  source 1..80: mol_type = other DNA
ctctcacacacacacacatgcacacacggcagagcagggctgtgtgaggctgaggactgacattctgggctccaactctc

SEQ ID NO: 32400 - DNA, 80 bp, synthetic construct
  misc_feature 1..80: note = Artificially Synthesized Probe
  source 1..80: mol_type = other DNA
gatggatctgtcccccaaggcgcccaggaccccgcctgctctccctgtgtctctctcaggcggcagttgctgtgtgctgc

SEQ ID NO: 32401 - DNA, 80 bp, synthetic construct
  misc_feature 1..80: note = Artificially Synthesized Probe
  source 1..80: mol_type = other DNA
ggcggtgccatagcccctagcttgcagatgccctagcctgtcactgacaggccggtgtggggcctttagtgggggcagca

SEQ ID NO: 32402 - DNA, 80 bp, synthetic construct
  misc_feature 1..80: note = Artificially Synthesized Probe
  source 1..80: mol_type = other DNA
ttattgttattgctgccgccattgtgcccttagaaagggcagtgctgtggatatagcagggatgggacatgggtcttcct

SEQ ID NO: 32403 - DNA, 80 bp, synthetic construct
  misc_feature 1..80: note = Artificially Synthesized Probe
  source 1..80: mol_type = other DNA
gatgcaggtgcacggcttcatggcggccttcctcttctccatcgagacgcagaccaccatcggctacgggctgcgctgtg

SEQ ID NO: 32404 - DNA, 80 bp, synthetic construct
  misc_feature 1..80: note = Artificially Synthesized Probe
  source 1..80: mol_type = other DNA
gccccgctgcagtgcgaaggatctggtagagaacaagttcctgctgcccagtgccaactccttctgctatgagaacgagc

SEQ ID NO: 32405 - DNA, 80 bp, synthetic construct
  misc_feature 1..80: note = Artificially Synthesized Probe
  source 1..80: mol_type = other DNA
ctgtccacgctgaatgtgaacgtgggtggccacagctaccagctggactactgcgagctggccggcttccccaagacgcg

SEQ ID NO: 32406 - DNA, 80 bp, synthetic construct
  misc_feature 1..80: note = Artificially Synthesized Probe
  source 1..80: mol_type = other DNA
ctcttcatcgccatgggcatcttcactttctctgcggctgtctactctgtggagcacgatgtgcccagcaccaacttcac

SEQ ID NO: 32407 - DNA, 80 bp, synthetic construct
  misc_feature 1..80: note = Artificially Synthesized Probe
  source 1..80: mol_type = other DNA
ctgtattttgagctgtggtagctgaatccctggaaataaatgttaatcaggtcttctcagatcgatgaataagtcggcat

SEQ ID NO: 32408 - DNA, 80 bp, synthetic construct
  misc_feature 1..80: note = Artificially Synthesized Probe
  source 1..80: mol_type = other DNA
tatgatacaacacttgagagtcaaatttctattcatctaaacatctttaaaggctagtgcatgaaggcactggagctagt

SEQ ID NO: 32409 - DNA, 80 bp, synthetic construct
  misc_feature 1..80: note = Artificially Synthesized Probe
  source 1..80: mol_type = other DNA
ccttattcattcattgaacagtaagtttttgagcacctccaatgtgcccagtagtattcttaacactagggatacagggt

SEQ ID NO: 32410 - DNA, 80 bp, synthetic construct
  misc_feature 1..80: note = Artificially Synthesized Probe
  source 1..80: mol_type = other DNA
gaatttaaaagtcagcgtatactctgatttcagctagaaggttcttctctttcatgaggctcttgttactcattcacatg

SEQ ID NO: 32411 - DNA, 80 bp, synthetic construct
  misc_feature 1..80: note = Artificially Synthesized Probe
  source 1..80: mol_type = other DNA
cagctaaacaagaacaatgggctctatgatgaagctgtaatcattggcctcctgtgtgggtatggtttttttcttttact

SEQ ID NO: 32412 - DNA, 80 bp, synthetic construct
  misc_feature 1..80: note = Artificially Synthesized Probe
  source 1..80: mol_type = other DNA
gtgggcaagagaatctgggaaatgtagtttgcagactcccagttctggaattataaaataaaatacagaagggtgtcagg

SEQ ID NO: 32413 - DNA, 80 bp, synthetic construct
  misc_feature 1..80: note = Artificially Synthesized Probe
  source 1..80: mol_type = other DNA
taggatcataaattcctgaatgcatggactactgggtgccaagattgattccattccttgttcattatgagggaaacaaa

SEQ ID NO: 32414 - DNA, 80 bp, synthetic construct
  misc_feature 1..80: note = Artificially Synthesized Probe
  source 1..80: mol_type = other DNA
ctctttgcttttgacttttcactcaaagttcagccaaaaaaaaaagaagtttggcttaagggtgaagcaaagccagtgtg

SEQ ID NO: 32415 - DNA, 80 bp, synthetic construct
  misc_feature 1..80: note = Artificially Synthesized Probe
  source 1..80: mol_type = other DNA
tctttgcctcttctcagtggaggccagcttcagcatgggggaccctgggattgcatacatgatatatatataataatatt

SEQ ID NO: 32416 - DNA, 80 bp, synthetic construct
  misc_feature 1..80: note = Artificially Synthesized Probe
  source 1..80: mol_type = other DNA
gagtaatgggaagtatttcatgcaggggtgaacatatttttggtgagtgatgtcttacaaaagtccctttacaaaataat

SEQ ID NO: 32417 - DNA, 80 bp, synthetic construct
  misc_feature 1..80: note = Artificially Synthesized Probe
  source 1..80: mol_type = other DNA
ttttgccttcctctgcattgcttttgggatcattctcaacgggatgcccatttccatcctctacaacaagttttctgatt

SEQ ID NO: 32418 - DNA, 80 bp, synthetic construct
  misc_feature 1..80: note = Artificially Synthesized Probe
  source 1..80: mol_type = other DNA
ctgggcacatttgtagatgggttgtgtcgatgaagtacacgttaaattctctcctaccttaaggaaatcaggaaaattgg

SEQ ID NO: 32419 - DNA, 80 bp, synthetic construct
  misc_feature 1..80: note = Artificially Synthesized Probe
  source 1..80: mol_type = other DNA
gaacagcttctcccttggaaagacttgcaaaatggaattgcgttgtggtctgttgtcccacgttccaaatggaaaataaa

SEQ ID NO: 32420 - DNA, 80 bp, synthetic construct
  misc_feature 1..80: note = Artificially Synthesized Probe
  source 1..80: mol_type = other DNA
ttttttttttttttttttttttgtagtaagtagaaactgggttccaccatgttgtccaggctggcctcaaactcctgacc

SEQ ID NO: 32421 - DNA, 80 bp, synthetic construct
  misc_feature 1..80: note = Artificially Synthesized Probe
  source 1..80: mol_type = other DNA
aataactcagtttttcaaagggtatcccttaatcttctaattaatccctcaagtagttccccctcaaatggctgaccctc

SEQ ID NO: 32422 - DNA, 80 bp, synthetic construct
  misc_feature 1..80: note = Artificially Synthesized Probe
  source 1..80: mol_type = other DNA
atttgggccctctttggaggctcattcatgcccagccagcattcttcctggcttgtggttcacatattccccaaaactgg

SEQ ID NO: 32423 - DNA, 80 bp, synthetic construct
  misc_feature 1..80: note = Artificially Synthesized Probe
  source 1..80: mol_type = other DNA
accacttgaacccaggagtatgattccagcctgagcaacacagtgagatcctgtctccaaataaaataaaatacataggc

SEQ ID NO: 32424 - DNA, 80 bp, synthetic construct
  misc_feature 1..80: note = Artificially Synthesized Probe
  source 1..80: mol_type = other DNA
tcacagccaacaaagggaaaaaaaaaaaaaaggccaggtgcagtggctcatgcctgtaattctaacattttgggaggctg

SEQ ID NO: 32425 - DNA, 80 bp, synthetic construct
  misc_feature 1..80: note = Artificially Synthesized Probe
  source 1..80: mol_type = other DNA
ccctacacccttaggagatcaaggagagtctttctggcaatcctgaccagcttaagagaaagatggaaagatgtgatgtc

SEQ ID NO: 32426 - DNA, 80 bp, synthetic construct
  misc_feature 1..80: note = Artificially Synthesized Probe
  source 1..80: mol_type = other DNA
tatgataaagtaagggaaaactcccagaaaatacagcaaaaagacattgacatggaaatgaggagggaagacaggaatca

SEQ ID NO: 32427 - DNA, 80 bp, synthetic construct
  misc_feature 1..80: note = Artificially Synthesized Probe
  source 1..80: mol_type = other DNA
gccttgagcacccagtaaattttccacgatggaattcggccagaacaatagctagaattgcaacttcccttgtcacgaga

SEQ ID NO: 32428 - DNA, 80 bp, synthetic construct
  misc_feature 1..80: note = Artificially Synthesized Probe
  source 1..80: mol_type = other DNA
gcaggggagggaatttatactgagatctctgctacgcatccataataactaaaccaggatataatgaagagatgtaataa

SEQ ID NO: 32429 - DNA, 80 bp, synthetic construct
  misc_feature 1..80: note = Artificially Synthesized Probe
  source 1..80: mol_type = other DNA
aggaaccactgctatgtgcttgtggctgctgctaactggcactattttggggtagcaattactacaactccaatggtaac

SEQ ID NO: 32430 - DNA, 80 bp, synthetic construct
  misc_feature 1..80: note = Artificially Synthesized Probe
  source 1..80: mol_type = other DNA
gacactctaaaaggcccaccagccagacagaacactcagatttcatttagttataaactgcttcctcccaaaatcataat

SEQ ID NO: 32431 - DNA, 80 bp, synthetic construct
  misc_feature 1..80: note = Artificially Synthesized Probe
  source 1..80: mol_type = other DNA
cttaactgtccccacctaacaacctctgggaggctccttaactcagcgctctggacccttctctatgtagcacctatcct

SEQ ID NO: 32432 - DNA, 80 bp, synthetic construct
  misc_feature 1..80: note = Artificially Synthesized Probe
  source 1..80: mol_type = other DNA
ggaacgctttgcggagcacaatgaagccatactggggtttggaaggaaagagcatcgccagcgactccacacaccacggg

SEQ ID NO: 32433 - DNA, 80 bp, synthetic construct
  misc_feature 1..80: note = Artificially Synthesized Probe
  source 1..80: mol_type = other DNA
gaagatggtacctttttcctgaaaagcttatcttctttgccaggtttgagctgtcacgaaaaagaaaggacgcagagctt

SEQ ID NO: 32434 - DNA, 80 bp, synthetic construct
  misc_feature 1..80: note = Artificially Synthesized Probe
  source 1..80: mol_type = other DNA
tgcccttccttgttgtcccggttcatcttctgctccttgagcagggagccgggcaggttggaggcgtacttaaagccagg

SEQ ID NO: 32435 - DNA, 80 bp, synthetic construct
  misc_feature 1..80: note = Artificially Synthesized Probe
  source 1..80: mol_type = other DNA
tgggggtgtgtttattcctttgatgacactgggtctctgaggtactccaggccctccttgccccgggcttatcccttgac

SEQ ID NO: 32436 - DNA, 80 bp, synthetic construct
  misc_feature 1..80: note = Artificially Synthesized Probe
  source 1..80: mol_type = other DNA
atccagagcttacattttagtggagggaggcagacaaaatggacagagcatgttagagacagagacatggggaaaaatta

SEQ ID NO: 32437 - DNA, 80 bp, synthetic construct
  misc_feature 1..80: note = Artificially Synthesized Probe
  source 1..80: mol_type = other DNA
ggtgaaatggccactttctccacagattatttttacttgaaggaatgactgatagaaaccccctggacactggtgtattt

SEQ ID NO: 32438 - DNA, 80 bp, synthetic construct
  misc_feature 1..80: note = Artificially Synthesized Probe
  source 1..80: mol_type = other DNA
tctcggactcctgacctcatgatccacccacatcggcctcccaaagtgccaggattacaggcgtaaaccaccgcacccgg

SEQ ID NO: 32439 - DNA, 80 bp, synthetic construct
  misc_feature 1..80: note = Artificially Synthesized Probe
  source 1..80: mol_type = other DNA
ggtaagtgaaaaagacttgattaaatggcgcaaatgtttgaattctaataaacaggacacagaaggcaaggcagtcatcg

SEQ ID NO: 32440 - DNA, 80 bp, synthetic construct
  misc_feature 1..80: note = Artificially Synthesized Probe
  source 1..80: mol_type = other DNA
ccagcacacgggggctgggagataataatgccaaagagaaaaagacagtcgcgggttcattactggcacacattgggttt

SEQ ID NO: 32441 - DNA, 80 bp, synthetic construct
  misc_feature 1..80: note = Artificially Synthesized Probe
  source 1..80: mol_type = other DNA
agtaaatcaaaactacagtgagacgtcacctcatacaaattaggatggccactaaaaacaaactgaaagcccataacata

SEQ ID NO: 32442 - DNA, 80 bp, synthetic construct
  misc_feature 1..80: note = Artificially Synthesized Probe
  source 1..80: mol_type = other DNA
agttacatgcagattttcaactgcacagaggtcagatggtgccccaacccttgtgttgttcaagggtcaattgtatatcc

SEQ ID NO: 32443 - DNA, 80 bp, synthetic construct
  misc_feature 1..80: note = Artificially Synthesized Probe
  source 1..80: mol_type = other DNA
ggctgagggaggggaaaggggagtagagcttcagtgggtatggagtttcagttttgcaaaatgaaaaagttctagggatc

SEQ ID NO: 32444 - DNA, 80 bp, synthetic construct
  misc_feature 1..80: note = Artificially Synthesized Probe
  source 1..80: mol_type = other DNA
ggttctgcaggggaacagacacgactggtcagatggggagactgcaggcacggccagacccccggaaagggtgttaggga

SEQ ID NO: 32445 - DNA, 80 bp, synthetic construct
  misc_feature 1..80: note = Artificially Synthesized Probe
  source 1..80: mol_type = other DNA
tgcagaatgcactcaacaaaccagagccaccccagggaggatgggatagtaacctttaggtccctgactactcagatctt

SEQ ID NO: 32446 - DNA, 80 bp, synthetic construct
  misc_feature 1..80: note = Artificially Synthesized Probe
  source 1..80: mol_type = other DNA
cttccaactgcataggaagaaaaacagcccccctttctcctcaaatacagcctcgccaccatcaactttcttctccagtg

SEQ ID NO: 32447 - DNA, 80 bp, synthetic construct
  misc_feature 1..80: note = Artificially Synthesized Probe
  source 1..80: mol_type = other DNA
attacctaactttcccaataacagcactgcagaggatgccttcctgaagccagtaatttgcctgtggtcatggaaccagc

SEQ ID NO: 32448 - DNA, 80 bp, synthetic construct
  misc_feature 1..80: note = Artificially Synthesized Probe
  source 1..80: mol_type = other DNA
aaacaacctgcctggacctcaacagcagttgagacatctgggaaaatcacagagcacataccagacaacatcctgaaaga

SEQ ID NO: 32449 - DNA, 80 bp, synthetic construct
  misc_feature 1..80: note = Artificially Synthesized Probe
  source 1..80: mol_type = other DNA
agcattgtcctttaagtgaatgctatcaaggtttattcattcatcccaccaatatttgagttcctctggtctaccagata

SEQ ID NO: 32450 - DNA, 80 bp, synthetic construct
  misc_feature 1..80: note = Artificially Synthesized Probe
  source 1..80: mol_type = other DNA
actgacttttctgcagaaatggacacactatcctaaaattcatgaaaatgcaaaagacctggaatggccaaaacaatctt

SEQ ID NO: 32451 - DNA, 80 bp, synthetic construct
  misc_feature 1..80: note = Artificially Synthesized Probe
  source 1..80: mol_type = other DNA
ggcaattcagttgggtaaagaatggtcttttcaacgtatggtgctgggacgaatagctatccacaagcaaaagaacaaag

SEQ ID NO: 32452 - DNA, 80 bp, synthetic construct
  misc_feature 1..80: note = Artificially Synthesized Probe
  source 1..80: mol_type = other DNA
aatgtgtcccctagtctgaaaggcattacactctggaaaaagaaagacatgcaaccacataaatgcaatgcaacatcatt

SEQ ID NO: 32453 - DNA, 80 bp, synthetic construct
  misc_feature 1..80: note = Artificially Synthesized Probe
  source 1..80: mol_type = other DNA
tagggaactggacccatcacagtaagttaaaggcttcacaacatgactgtattctggcaacagtgaggggagtggatatt

SEQ ID NO: 32454 - DNA, 80 bp, synthetic construct
  misc_feature 1..80: note = Artificially Synthesized Probe
  source 1..80: mol_type = other DNA
atctcagtattattcctgtcctcaaatctgcaagcataatggacagcccaggaaaagctggattttaccagagtgttgca

SEQ ID NO: 32455 - DNA, 80 bp, synthetic construct
  misc_feature 1..80: note = Artificially Synthesized Probe
  source 1..80: mol_type = other DNA
tgataggtacagcaaaccaccatgccacatgtatacctatataacaagcctgcacgttctgcacatgtatccgagaactt

SEQ ID NO: 32456 - DNA, 80 bp, synthetic construct
  misc_feature 1..80: note = Artificially Synthesized Probe
  source 1..80: mol_type = other DNA
tcttctaaaagccctcctttaggagacacctcttcaacttggaaagcaagctgaagaattttctgacacattttgtacta

SEQ ID NO: 32457 - DNA, 80 bp, synthetic construct
  misc_feature 1..80: note = Artificially Synthesized Probe
  source 1..80: mol_type = other DNA
ccacaagtgccacaatcggcttgaccaatgtgagaaggaggaagaaaaaatttggctacagtgaatacaggtttgtttgt

SEQ ID NO: 32458 - DNA, 80 bp, synthetic construct
  misc_feature 1..80: note = Artificially Synthesized Probe
  source 1..80: mol_type = other DNA
gtgatctatggaacaagactttgagagccattcacacgtagggctactgacttaataaaagttcaagccaaaagcacttg

SEQ ID NO: 32459 - DNA, 80 bp, synthetic construct
  misc_feature 1..80: note = Artificially Synthesized Probe
  source 1..80: mol_type = other DNA
gtgcaggcgggagttccactcgagtcgcctgacgggggctgtcagaacgccctgactctaccctgaggtgggcgccccct

SEQ ID NO: 32460 - DNA, 80 bp, synthetic construct
  misc_feature 1..80: note = Artificially Synthesized Probe
  source 1..80: mol_type = other DNA
caaaactcaggaggcttctagcagagtcggcaaaagtgaataagcagggatgtcagttttactgagtggattttaaagtc

SEQ ID NO: 32461 - DNA, 80 bp, synthetic construct
  misc_feature 1..80: note = Artificially Synthesized Probe
  source 1..80: mol_type = other DNA
aaaaaaaaaaaaggctaccttgttgtctgaagtttgtatctgacctcttgctggccactctactcagtaggagcctctaa

SEQ ID NO: 32462 - DNA, 80 bp, synthetic construct
  misc_feature 1..80: note = Artificially Synthesized Probe
  source 1..80: mol_type = other DNA
aataacagcagctttaagcatgttcaaagggccagaccagtggtaagtctgctgtagacatgatctcacttattccttta

SEQ ID NO: 32463 - DNA, 80 bp, synthetic construct
  misc_feature 1..80: note = Artificially Synthesized Probe
  source 1..80: mol_type = other DNA
catgtcacaaaggccacagctaaagcttgggaacatcattttccagaggctcagggcagagaaacagaatggatcctttt

SEQ ID NO: 32464 - DNA, 80 bp, synthetic construct
  misc_feature 1..80: note = Artificially Synthesized Probe
  source 1..80: mol_type = other DNA
ttcgaacagtgacagtaggacagaccaggggctgcagtgatttctcttaaggaaattcctaatgttacttaattgctttt

SEQ ID NO: 32465 - DNA, 80 bp, synthetic construct
  misc_feature 1..80: note = Artificially Synthesized Probe
  source 1..80: mol_type = other DNA
tctctattaaaactacaaaaaattagccgggtgtgatggtgggcatctgtaaccccagttacttgggaggctgaggcagt

SEQ ID NO: 32466 - DNA, 80 bp, synthetic construct
  misc_feature 1..80: note = Artificially Synthesized Probe
  source 1..80: mol_type = other DNA
cgggagatcaaaaccatcctggtgaacactgtgaaaaccccgtccctactaaaaaatacaaaaaaattagctgggcgcgg

SEQ ID NO: 32467 - DNA, 80 bp, synthetic construct
  misc_feature 1..80: note = Artificially Synthesized Probe
  source 1..80: mol_type = other DNA
atctggtcaaaaatggacacacaaaaaaactataccaaaacttggaggccaggtgtggaagctcatacccgtaatgccaa

SEQ ID NO: 32468 - DNA, 80 bp, synthetic construct
  misc_feature 1..80: note = Artificially Synthesized Probe
  source 1..80: mol_type = other DNA
attacttgagtccaggagtttgagaccagcctgagcaatagagtgagactctgtgtccaaaaaaaaaaaaaatgcccggc

SEQ ID NO: 32469 - DNA, 80 bp, synthetic construct
  misc_feature 1..80: note = Artificially Synthesized Probe
  source 1..80: mol_type = other DNA
caagacactcaaaatagaaaaagcctgacaaaatctattgtcaccatttgaaatagccattaaccaactccttactttga

SEQ ID NO: 32470 - DNA, 80 bp, synthetic construct
  misc_feature 1..80: note = Artificially Synthesized Probe
  source 1..80: mol_type = other DNA
ctaatttttatattgttagtagagacaaagtttcaccatgttggccaggctggtctcaaactcttgacctcgggtgatcc

SEQ ID NO: 32471 - DNA, 80 bp, synthetic construct
  misc_feature 1..80: note = Artificially Synthesized Probe
  source 1..80: mol_type = other DNA
ccccaattatttatactgggctcaggctctgtttttttctttttgaacacagggtctcactctgttgcccaggctggaag

SEQ ID NO: 32472 - DNA, 80 bp, synthetic construct
  misc_feature 1..80: note = Artificially Synthesized Probe
  source 1..80: mol_type = other DNA
tgcactgaagcctgggcgacaaactgtgactccatttttctctctctctccttttttttgagacggagtcttgctctgtt

SEQ ID NO: 32473 - DNA, 80 bp, synthetic construct
  misc_feature 1..80: note = Artificially Synthesized Probe
  source 1..80: mol_type = other DNA
aaaaaacaaaaaaacagatactccttcccatgctggccccacacccggccatcgcctgtcatcttgtctcataaacacta

SEQ ID NO: 32474 - DNA, 80 bp, synthetic construct
  misc_feature 1..80: note = Artificially Synthesized Probe
  source 1..80: mol_type = other DNA
gacagattatctgacaacatcgtttggttgagcatacatccatcttcctaacaaagccaaattcgagaaagaagtcgggg

SEQ ID NO: 32475 - DNA, 80 bp, synthetic construct
  misc_feature 1..80: note = Artificially Synthesized Probe
  source 1..80: mol_type = other DNA
gcattcatttaacatctggcggggactgggacacaggagttacataaagaacaagtgagtcacaaacaggactcagaagc

SEQ ID NO: 32476 - DNA, 80 bp, synthetic construct
  misc_feature 1..80: note = Artificially Synthesized Probe
  source 1..80: mol_type = other DNA
catctctactaaaaaaaatacgaaaatttaactgggcatggtagtgtgtatctgtagtcccaggtacctgggaggttgac

SEQ ID NO: 32477 - DNA, 80 bp, synthetic construct
  misc_feature 1..80: note = Artificially Synthesized Probe
  source 1..80: mol_type = other DNA
ggcacagcgacagatggcgacttgggcactcaaggccaggctgacaagccgggagaggcttttaacgaagatggaggccg

SEQ ID NO: 32478 - DNA, 80 bp, synthetic construct
  misc_feature 1..80: note = Artificially Synthesized Probe
  source 1..80: mol_type = other DNA
tttgaggatgttgaaaatcattctgtgatcgggtttccagaaagaggacactaacccgaagtcgccctgtaaattcaaca

SEQ ID NO: 32479 - DNA, 80 bp, synthetic construct
  misc_feature 1..80: note = Artificially Synthesized Probe
  source 1..80: mol_type = other DNA
gtagctcatgcctgtaatcccagcattttggtgggtggatcacttgagatcaggagttcgagatcagcctggccaacatg

SEQ ID NO: 32480 - DNA, 80 bp, synthetic construct
  misc_feature 1..80: note = Artificially Synthesized Probe
  source 1..80: mol_type = other DNA
gaaagaacgaaagaactggggcatccttttgccacccatatttttctctcaacgggatttttctgctgttgatgttgtct

SEQ ID NO: 32481 - DNA, 80 bp, synthetic construct
  misc_feature 1..80: note = Artificially Synthesized Probe
  source 1..80: mol_type = other DNA
cagcacagccataactattgcaaagaaattaagtcattcaggtccttgcttgagattaagttttgcacaagcaaatgata

SEQ ID NO: 32482 - DNA, 80 bp, synthetic construct
  misc_feature 1..80: note = Artificially Synthesized Probe
  source 1..80: mol_type = other DNA
ctggctaattttttttggttttttgtttgtttgtttgttttgagacggagtttcgctcttgttgcccaggctggagtgca

SEQ ID NO: 32483 - DNA, 80 bp, synthetic construct
  misc_feature 1..80: note = Artificially Synthesized Probe
  source 1..80: mol_type = other DNA
tgagcagctttcagaaagtgcagatcccaggcccaccccaagcctactcaatgtgctacgtcaagtgcgggggccaggaa

SEQ ID NO: 32484 - DNA, 80 bp, synthetic construct
  misc_feature 1..80: note = Artificially Synthesized Probe
  source 1..80: mol_type = other DNA
catttcttgctaatcatcacttagcattaattacttgttaggtaacccgacccagatcaaataccactccctacctcgca

SEQ ID NO: 32485 - DNA, 80 bp, synthetic construct
  misc_feature 1..80: note = Artificially Synthesized Probe
  source 1..80: mol_type = other DNA
gaagaagataatcaaagaattatgcagaagagcactgctcaatagaaataacagaaggtaagtcaggcactgtggctcac

SEQ ID NO: 32486 - DNA, 80 bp, synthetic construct
  misc_feature 1..80: note = Artificially Synthesized Probe
  source 1..80: mol_type = other DNA
aaatagctgggactacaggcatgcactatcatgcctggcttttttttttttttttttttttttttttggtagagatgagt

SEQ ID NO: 32487 - DNA, 80 bp, synthetic construct
  misc_feature 1..80: note = Artificially Synthesized Probe
  source 1..80: mol_type = other DNA
aactgtctaccccacagagttgctgaagcgtaaataagataagggctgtggaggtccagacaacaaactgctcctacaaa

SEQ ID NO: 32488 - DNA, 80 bp, synthetic construct
  misc_feature 1..80: note = Artificially Synthesized Probe
  source 1..80: mol_type = other DNA
ccctctgccctctacaaaatttctttaacaaagcaaatcacatacctccctgtgacttccacgtatgtatcacccatgat

SEQ ID NO: 32489 - DNA, 80 bp, synthetic construct
  misc_feature 1..80: note = Artificially Synthesized Probe
  source 1..80: mol_type = other DNA
acgacgtgtaaatgttttttgcaacatgggccctaaatacaagaagatgcttgatctggtctgactgaggatggagtcac

SEQ ID NO: 32490 - DNA, 80 bp, synthetic construct
  misc_feature 1..80: note = Artificially Synthesized Probe
  source 1..80: mol_type = other DNA
ccaaagtgctgggattgcgagtgtgagcctcccaaagtgctgggattgcaggtgtgagccccccaaagtgctgggattat

SEQ ID NO: 32491 - DNA, 80 bp, synthetic construct
  misc_feature 1..80: note = Artificially Synthesized Probe
  source 1..80: mol_type = other DNA
acaaggaaagtctaagaaactatggcagctaagagaagactgatgagactaaatgtaatattgtaccttgggtgggatcc

SEQ ID NO: 32492 - DNA, 80 bp, synthetic construct
  misc_feature 1..80: note = Artificially Synthesized Probe
  source 1..80: mol_type = other DNA
caccaatttgcaaagatggctctgcatatgactgaaagtaatgcccacccccctttgttttctttgagtttccttcttaa

SEQ ID NO: 32493 - DNA, 80 bp, synthetic construct
  misc_feature 1..80: note = Artificially Synthesized Probe
  source 1..80: mol_type = other DNA
attagctgggcatggtggtgtgcacctgtagtcctagcttcttggggagattgaggtgggaggattgcttgagcccagga

SEQ ID NO: 32494 - DNA, 80 bp, synthetic construct
  misc_feature 1..80: note = Artificially Synthesized Probe
  source 1..80: mol_type = other DNA
caacttctctcaaagagataattagttaacaatggattcgggtcccactgcttcctaggctggggctttaataatcagaa

SEQ ID NO: 32495 - DNA, 80 bp, synthetic construct
  misc_feature 1..80: note = Artificially Synthesized Probe
  source 1..80: mol_type = other DNA
agggtagaccctaaacccaatgtcaagtgtctttataataagagagatttggacagagacacaaagaagaaatctacaag

SEQ ID NO: 32496 - DNA, 80 bp, synthetic construct
  misc_feature 1..80: note = Artificially Synthesized Probe
  source 1..80: mol_type = other DNA
ttcctcaagagcattcggctggtttacagatggcacagggattcggtctaatgcagaacttttggtcttcaaagaacacc

SEQ ID NO: 32497 - DNA, 80 bp, synthetic construct
  misc_feature 1..80: note = Artificially Synthesized Probe
  source 1..80: mol_type = other DNA
tttttttttttttttgagcagagttttgctcttgtcacccaggctagggtgcaatggcgcaatctcagctcactgcaacc

SEQ ID NO: 32498 - DNA, 80 bp, synthetic construct
  misc_feature 1..80: note = Artificially Synthesized Probe
  source 1..80: mol_type = other DNA
catcctcattttccatacaggtgaacagaaaggcggactggcttgcccaaggccacacagcgagtagctaagagcagaaa

SEQ ID NO: 32499 - DNA, 80 bp, synthetic construct
  misc_feature 1..80: note = Artificially Synthesized Probe
  source 1..80: mol_type = other DNA
tatgggacgtggcagctcttaggtatgggactgtccacagtgataaaaaggttctggaataagatagtggtggtggttgc

SEQ ID NO: 32500 - DNA, 80 bp, synthetic construct
  misc_feature 1..80: note = Artificially Synthesized Probe
  source 1..80: mol_type = other DNA
gctatgaattgtctcagacccatattcctgagctgttttttatttcttggccaaagcaaaagaatcctcaacaacagaaa

SEQ ID NO: 32501 - DNA, 80 bp, synthetic construct
  misc_feature 1..80: note = Artificially Synthesized Probe
  source 1..80: mol_type = other DNA
aaaaaaattagcccggcgaggtggcgggcacctgtagtcccagctactcgggaggctgaggcaggagaatggtgtgaacc

SEQ ID NO: 32502 - DNA, 80 bp, synthetic construct
  misc_feature 1..80: note = Artificially Synthesized Probe
  source 1..80: mol_type = other DNA
agaaccagcgacaccacacagaaatagatcacagacacaaagatgcttttaaaggcaaaaataggctaggccaggcacag

SEQ ID NO: 32503 - DNA, 80 bp, synthetic construct
  misc_feature 1..80: note = Artificially Synthesized Probe
  source 1..80: mol_type = other DNA
gaactaccaatcctgagtactttacagccaccgaagaagaaacttaaattcagtttccaaccccaggaggcagctagctg

SEQ ID NO: 32504 - DNA, 80 bp, synthetic construct
  misc_feature 1..80: note = Artificially Synthesized Probe
  source 1..80: mol_type = other DNA
cttgttctccgggagggattccagtttctccaccagagctttcaggcccttcagttcaaactcagtgagatgggtccatt

SEQ ID NO: 32505 - DNA, 80 bp, synthetic construct
  misc_feature 1..80: note = Artificially Synthesized Probe
  source 1..80: mol_type = other DNA
ccaggagtttgagaccagactgagaaacacagtgaaaccccatctctacaaaaaatacacaaattagctgggtgtgatga

SEQ ID NO: 32506 - DNA, 80 bp, synthetic construct
  misc_feature 1..80: note = Artificially Synthesized Probe
  source 1..80: mol_type = other DNA
ggcctcccaaaatgctaggaatttttttttttttttttttttttgagacagagtctcactttgttggccagactggagtg

SEQ ID NO: 32507 - DNA, 80 bp, synthetic construct
  misc_feature 1..80: note = Artificially Synthesized Probe
  source 1..80: mol_type = other DNA
aaggggaaataaaaaaagaatctaaaaatcctagaggctgcaggaaaaattgtgcagaccctcaaggagacagaccagtc

SEQ ID NO: 32508 - DNA, 80 bp, synthetic construct
  misc_feature 1..80: note = Artificially Synthesized Probe
  source 1..80: mol_type = other DNA
tatctctccaggacataccagcacatctcatagtagaaggggtaacggaatttgggctgcacctgaaagcaaagacgcag

SEQ ID NO: 32509 - DNA, 80 bp, synthetic construct
  misc_feature 1..80: note = Artificially Synthesized Probe
  source 1..80: mol_type = other DNA
tagagatggggtttgccatgttgctggttggctgtttatcatagaagaggaagtaaaggtggagacagctttgtgtacta

SEQ ID NO: 32510 - DNA, 80 bp, synthetic construct
  misc_feature 1..80: note = Artificially Synthesized Probe
  source 1..80: mol_type = other DNA
acacttcccatcccccaatcacactccccatcccctgatcacactccccatccccctaatcacactccccaccccctaat

SEQ ID NO: 32511 - DNA, 80 bp, synthetic construct
  misc_feature 1..80: note = Artificially Synthesized Probe
  source 1..80: mol_type = other DNA
cagccccacctctattcaagagaaacggacaaaagattttggaacgaattaccagtacttaaaaagcaagctgaggacgg

SEQ ID NO: 32512 - DNA, 80 bp, synthetic construct
  misc_feature 1..80: note = Artificially Synthesized Probe
  source 1..80: mol_type = other DNA
gtatctagaactcccaggtctcaaggacttgaaaaagtcaaaatgtgagagtgggtggaagtgtcctacaatttgttttt

SEQ ID NO: 32513 - DNA, 80 bp, synthetic construct
  misc_feature 1..80: note = Artificially Synthesized Probe
  source 1..80: mol_type = other DNA
gattataggcgtcagccaccggcgcctggccaggcaaattctttttctaagacaaagccacaccatggagcttggagact

SEQ ID NO: 32514 - DNA, 80 bp, synthetic construct
  misc_feature 1..80: note = Artificially Synthesized Probe
  source 1..80: mol_type = other DNA
atccgctgagtttacaattgaattcccagggggacggggtggttgtccagcaagtagccacagcctttagaaatcccagc

SEQ ID NO: 32515 - DNA, 80 bp, synthetic construct
  misc_feature 1..80: note = Artificially Synthesized Probe
  source 1..80: mol_type = other DNA
tgtgttgaaaaaacaggaacaagtagaacaagaaatgggacttttttaccccaagtctctgggttttgtttgtttctttg

SEQ ID NO: 32516 - DNA, 80 bp, synthetic construct
  misc_feature 1..80: note = Artificially Synthesized Probe
  source 1..80: mol_type = other DNA
tctcacggtgctttctcagagacacttcctcttccacaagggggttttggctgcccccaacctggaggtgaacagaaact

SEQ ID NO: 32517 - DNA, 80 bp, synthetic construct
  misc_feature 1..80: note = Artificially Synthesized Probe
  source 1..80: mol_type = other DNA
acacaacgcctgcatgcccccctcagctctgccctccactctgccccacaggctgctggtaagtctctcctgcagcttct

SEQ ID NO: 32518 - DNA, 80 bp, synthetic construct
  misc_feature 1..80: note = Artificially Synthesized Probe
  source 1..80: mol_type = other DNA
ggtgcatgcctgtaatcccagctactcaggaggctgaggcaggggaatcgcttgaacccggaaggtgaggttgcagtgag

SEQ ID NO: 32519 - DNA, 80 bp, synthetic construct
  misc_feature 1..80: note = Artificially Synthesized Probe
  source 1..80: mol_type = other DNA
atacagaggggaggcaaaaggagaaacgcagagagaaataaggacaagggcggacagaggcggagcaactcacagtgaag

SEQ ID NO: 32520 - DNA, 80 bp, synthetic construct
  misc_feature 1..80: note = Artificially Synthesized Probe
  source 1..80: mol_type = other DNA
gaacttggtgagcaagtcctgaatccatataagcaattggcattggtatctgtggttgtctctgtcgatcacaagggctc

SEQ ID NO: 32521 - DNA, 80 bp, synthetic construct
  misc_feature 1..80: note = Artificially Synthesized Probe
  source 1..80: mol_type = other DNA
aaggacctcatagttgggaccaggggccaattacttcacgccaccccatgtttaaaaatggggatatttcttttgttgtt

SEQ ID NO: 32522 - DNA, 80 bp, synthetic construct
  misc_feature 1..80: note = Artificially Synthesized Probe
  source 1..80: mol_type = other DNA
atgagcaaatagttctcacatagtcaagagtcaagaaggaggaccagatcccaagtctcctgactcccaagctactggag

SEQ ID NO: 32523 - DNA, 80 bp, synthetic construct
  misc_feature 1..80: note = Artificially Synthesized Probe
  source 1..80: mol_type = other DNA
cccagcctaaaaaaaaattgtttaaaaaaaggtggggaggccgggcacggtggctcacacctgtaatcccagcactttgg

SEQ ID NO: 32524 - DNA, 80 bp, synthetic construct
  misc_feature 1..80: note = Artificially Synthesized Probe
  source 1..80: mol_type = other DNA
ctaggttacctaggaataaagcctgaagaatagcaccatttaaaatcttccttggcagccgggcgctatggcttatgcct

SEQ ID NO: 32525 - DNA, 80 bp, synthetic construct
  misc_feature 1..80: note = Artificially Synthesized Probe
  source 1..80: mol_type = other DNA
aaaactcaggtcagaggtgggaaatgccagaattcaattctctgcttcaatacagaaaaactcccatccagggagctgca

SEQ ID NO: 32526 - DNA, 80 bp, synthetic construct
  misc_feature 1..80: note = Artificially Synthesized Probe
  source 1..80: mol_type = other DNA
gtcagaatagaccatggggtttgttgatcttaacacccatctttagcaaaattataagttggcaactctgtatctgttcc

SEQ ID NO: 32527 - DNA, 80 bp, synthetic construct
  misc_feature 1..80: note = Artificially Synthesized Probe
  source 1..80: mol_type = other DNA
cgcactaaaccctgctacttccaaatgccaaatctccctaatagggaagtctccagtttctgcccaactttctagaagca

SEQ ID NO: 32528 - DNA, 80 bp, synthetic construct
  misc_feature 1..80: note = Artificially Synthesized Probe
  source 1..80: mol_type = other DNA
ggactatcacctctctcatcctaggtagaatgcttccattaatgcaacctaagagataattccctgacccctaggtcatc

SEQ ID NO: 32529 - DNA, 80 bp, synthetic construct
  misc_feature 1..80: note = Artificially Synthesized Probe
  source 1..80: mol_type = other DNA
atgtgtagccctgcttcagctcaattctttggcatcgttccacacggtctcccagaaagatgtcactctgtttgcctgac

SEQ ID NO: 32530 - DNA, 80 bp, synthetic construct
  misc_feature 1..80: note = Artificially Synthesized Probe
  source 1..80: mol_type = other DNA
cctgcatgggtgactagatgcgatgtaaaagggctgaacttgaccttgccctccagaaggaggaggtggttctagggaaa

SEQ ID NO: 32531 - DNA, 80 bp, synthetic construct
  misc_feature 1..80: note = Artificially Synthesized Probe
  source 1..80: mol_type = other DNA
agaggtcctgaactggtgcccttttataaacgctgacgctggggaattttctttttttcttctttaaaaatccaaatgta

SEQ ID NO: 32532 - DNA, 80 bp, synthetic construct
  misc_feature 1..80: note = Artificially Synthesized Probe
  source 1..80: mol_type = other DNA
tataaacaagtaaagaatttaagagaaattaaattgggggtggtggccatgcacagaggaagagaaggaggaggaagaac

SEQ ID NO: 32533 - DNA, 80 bp, synthetic construct
  misc_feature 1..80: note = Artificially Synthesized Probe
  source 1..80: mol_type = other DNA
aaagggggggtcctgaagccctcacccaccccacccccacggaccacactggcctcttctctctaagcaccacttcaaaa

SEQ ID NO: 32534 - DNA, 80 bp, synthetic construct
  misc_feature 1..80: note = Artificially Synthesized Probe
  source 1..80: mol_type = other DNA
aggggcgcgggaggtgccaagagcgcgccgcacactcgcacccgaccccgggagacacaaagagcggctccgcgacgccg

SEQ ID NO: 32535 - DNA, 80 bp, synthetic construct
  misc_feature 1..80: note = Artificially Synthesized Probe
  source 1..80: mol_type = other DNA
aaacttcacaacaaccctaaaaagtcattcccaggattcttcctgttttcagataagcacagggaggcttgtgactcaag

SEQ ID NO: 32536 - DNA, 80 bp, synthetic construct
  misc_feature 1..80: note = Artificially Synthesized Probe
  source 1..80: mol_type = other DNA
gtgggtcacaccaggccccagaagcacttggtttggccagcagtttttttttttaacttttaaaggaatttctgagttat

SEQ ID NO: 32537 - DNA, 80 bp, synthetic construct
  misc_feature 1..80: note = Artificially Synthesized Probe
  source 1..80: mol_type = other DNA
gaggatgccagaattccaatgcagccacatggacaaatatcttgcccacctgtgaacactcttccacatccactgtgggc

SEQ ID NO: 32538 - DNA, 80 bp, synthetic construct
  misc_feature 1..80: note = Artificially Synthesized Probe
  source 1..80: mol_type = other DNA
agaaaaaaaaagaaagccttgctggagtgagagagtagcagaagccccaaaatgtacacaaaatgtgccccaaaatgtgc

SEQ ID NO: 32539 - DNA, 80 bp, synthetic construct
  misc_feature 1..80: note = Artificially Synthesized Probe
  source 1..80: mol_type = other DNA
ttataagagaccctgagccagaaccacccagctcagttgttcccagattcctgaatcacagaaactgtgagataatgttt

SEQ ID NO: 32540 - DNA, 80 bp, synthetic construct
  misc_feature 1..80: note = Artificially Synthesized Probe
  source 1..80: mol_type = other DNA
tatttgtaactatctggatcacttgaggccaggagttcaagaccagcctgggtaacacagagacatccccctgctgccat

SEQ ID NO: 32541 - DNA, 80 bp, synthetic construct
  misc_feature 1..80: note = Artificially Synthesized Probe
  source 1..80: mol_type = other DNA
caggtgatcacctgaggtcaggagctcaagaccagcttggccaacatggtgaaaccccgtctctactaaaaatataaaca

SEQ ID NO: 32542 - DNA, 80 bp, synthetic construct
  misc_feature 1..80: note = Artificially Synthesized Probe
  source 1..80: mol_type = other DNA
tggtcctagaaaactggcagtgtgtgcacagtgacagacaacggttttaaaaaaagaaaaaaaaatgagtgtgtgagcct

SEQ ID NO: 32543 - DNA, 80 bp, synthetic construct
  misc_feature 1..80: note = Artificially Synthesized Probe
  source 1..80: mol_type = other DNA
atcatctcaatcaatcaatgagccatcatctgcctctaactaataatctctgagtcccacagccttttttcggggccctt

SEQ ID NO: 32544 - DNA, 80 bp, synthetic construct
  misc_feature 1..80: note = Artificially Synthesized Probe
  source 1..80: mol_type = other DNA
ctcactatgcactgaattaagggctgagtgaatgaaaagttcacagccttgaagctcctgggggcattcctggcagcagg

SEQ ID NO: 32545 - DNA, 80 bp, synthetic construct
  misc_feature 1..80: note = Artificially Synthesized Probe
  source 1..80: mol_type = other DNA
tcaacaccaaggaacaaaagaatgccaggtaggtatttccccattgctcaccaaaaccaaagcatccaatgtgggcaggt

SEQ ID NO: 32546 - DNA, 80 bp, synthetic construct
  misc_feature 1..80: note = Artificially Synthesized Probe
  source 1..80: mol_type = other DNA
cccacactttgtagaagggaaggagatgaaacagtcgctgggggtcgggcacggtagcttatacctctaatctaagtgct

SEQ ID NO: 32547 - DNA, 80 bp, synthetic construct
  misc_feature 1..80: note = Artificially Synthesized Probe
  source 1..80: mol_type = other DNA
ataaacatataaacaagaaaatcccaagaagccagtgaccacctttcttcacagccacctcaacaggttacaggttaaac

SEQ ID NO: 32548 - DNA, 80 bp, synthetic construct
  misc_feature 1..80: note = Artificially Synthesized Probe
  source 1..80: mol_type = other DNA
acagaccaaatggcctgaaaacccgtaagtatttactctctggcacttaacagagaaagtttgctggcccttgaactaga

SEQ ID NO: 32549 - DNA, 80 bp, synthetic construct
  misc_feature 1..80: note = Artificially Synthesized Probe
  source 1..80: mol_type = other DNA
aagagaacttgggtatttctatcttttgggttcaagatctaaatttcacagcaacctggaaaagcaaggtgagacagtct

SEQ ID NO: 32550 - DNA, 80 bp, synthetic construct
  misc_feature 1..80: note = Artificially Synthesized Probe
  source 1..80: mol_type = other DNA
ccttacccaggtgcctggaatacgtgggcgccactcagattttccaggaggcccacctggcagaaaccctgctgtcagaa

SEQ ID NO: 32551 - DNA, 80 bp, synthetic construct
  misc_feature 1..80: note = Artificially Synthesized Probe
  source 1..80: mol_type = other DNA
ttaggaccctacaacatattcaagatgcaaatgggtgtggggttcttctggggaatgatgaaaaagttctaaaatggact

SEQ ID NO: 32552 - DNA, 80 bp, synthetic construct
  misc_feature 1..80: note = Artificially Synthesized Probe
  source 1..80: mol_type = other DNA
gcacccggcctgtaacatactttaaattaacacttttatactctcatttaatcccaggtatatatacctctctcacatgc

SEQ ID NO: 32553 - DNA, 80 bp, synthetic construct
  misc_feature 1..80: note = Artificially Synthesized Probe
  source 1..80: mol_type = other DNA
aatctcatgttgaaacatgaatatctctcaaatatctccaatgttagaggtaggaattggtgtgtggtgtttgggacgtg

SEQ ID NO: 32554 - DNA, 80 bp, synthetic construct
  misc_feature 1..80: note = Artificially Synthesized Probe
  source 1..80: mol_type = other DNA
actggaagcttcctgaagtcctcaccagaagcagatgctggctccatgcttcctgtacagcctgcagagctgaatcaaat

SEQ ID NO: 32555 - DNA, 80 bp, synthetic construct
  misc_feature 1..80: note = Artificially Synthesized Probe
  source 1..80: mol_type = other DNA
tacaagccaaggcgcactaagcactgccagccaccaccagaagccagagaaggcaaggaaggacctgcccctagagactt

SEQ ID NO: 32556 - DNA, 80 bp, synthetic construct
  misc_feature 1..80: note = Artificially Synthesized Probe
  source 1..80: mol_type = other DNA
gttatttacttttatgttctgtgtggcatctgacacacgacttcacagacaaatggcaggtgaactaaagacctgacctg

SEQ ID NO: 32557 - DNA, 80 bp, synthetic construct
  misc_feature 1..80: note = Artificially Synthesized Probe
  source 1..80: mol_type = other DNA
agtcatagggggaagcgtataggcaagaggcctgggcaggccaagtgaccgtcttaggagcagaaggtcgggaggcttgg

SEQ ID NO: 32558 - DNA, 80 bp, synthetic construct
  misc_feature 1..80: note = Artificially Synthesized Probe
  source 1..80: mol_type = other DNA
tgtaaaggcaggaagaaactgactttatactttttctttccttcaccacagaaccccttcttcaaacagaagctttgatg

SEQ ID NO: 32559 - DNA, 80 bp, synthetic construct
  misc_feature 1..80: note = Artificially Synthesized Probe
  source 1..80: mol_type = other DNA
acatcacagttctggaaccttctccagcatcctcacatttctggactggttttgtattttgttcctcatccgtgtcacac

SEQ ID NO: 32560 - DNA, 80 bp, synthetic construct
  misc_feature 1..80: note = Artificially Synthesized Probe
  source 1..80: mol_type = other DNA
tcacctgaggccaggagtttgagaccagcctggccaacgtggcaaaaccccatctctactaaaaatacaaaaaattagcc

SEQ ID NO: 32561 - DNA, 80 bp, synthetic construct
  misc_feature 1..80: note = Artificially Synthesized Probe
  source 1..80: mol_type = other DNA
gactcatctctacaaaaaataaaaaataacaacaattagccgtgcatgcccatagtcccagctactagggaggctgaggc

SEQ ID NO: 32562 - DNA, 80 bp, synthetic construct
  misc_feature 1..80: note = Artificially Synthesized Probe
  source 1..80: mol_type = other DNA
cagaaccccccacaacaaagagtatactgtctaggtcccaatcagtgcaacaaaacaaggaaatatattaaaagaggtca

SEQ ID NO: 32563 - DNA, 80 bp, synthetic construct
  misc_feature 1..80: note = Artificially Synthesized Probe
  source 1..80: mol_type = other DNA
caccaccacacccagctgatttttgtatttttttctaaagaggggtttcatcatgttgcctaggctggtctcaaactcct

SEQ ID NO: 32564 - DNA, 80 bp, synthetic construct
  misc_feature 1..80: note = Artificially Synthesized Probe
  source 1..80: mol_type = other DNA
tttttttaataataataacagtgctgggtcaactggacatccatatgggaaaaaaggggagaccttgacctcatcttcca

SEQ ID NO: 32565 - DNA, 80 bp, synthetic construct
  misc_feature 1..80: note = Artificially Synthesized Probe
  source 1..80: mol_type = other DNA
agatggagtcttgttctgtcacccaggctggagggcagtggcgcaatctcagctcactgcaacctccgcctcccaggttc

SEQ ID NO: 32566 - DNA, 80 bp, synthetic construct
  misc_feature 1..80: note = Artificially Synthesized Probe
  source 1..80: mol_type = other DNA
aagaagagagaccttcaaataaaccacagctgctgccactttgatctcggattccttgcctccagaattgtcagaaaata

SEQ ID NO: 32567 - DNA, 80 bp, synthetic construct
  misc_feature 1..80: note = Artificially Synthesized Probe
  source 1..80: mol_type = other DNA
aaaaactaaagaagacatcctccacgatttcactggcataaaatgtgaaaacaggcgaaactcatccaaggggctagaag

SEQ ID NO: 32568 - DNA, 80 bp, synthetic construct
  misc_feature 1..80: note = Artificially Synthesized Probe
  source 1..80: mol_type = other DNA
cagacatagatgtccccggaggttacatgctgaacttacgacctaagtctatgaatttccttttgcttaggacagctaga

SEQ ID NO: 32569 - DNA, 80 bp, synthetic construct
  misc_feature 1..80: note = Artificially Synthesized Probe
  source 1..80: mol_type = other DNA
agacaataacaagtgttaacaaggatgtagggaaaccagaacccctacacactgcttatgggagtgtaaaatgacacagc

SEQ ID NO: 32570 - DNA, 80 bp, synthetic construct
  misc_feature 1..80: note = Artificially Synthesized Probe
  source 1..80: mol_type = other DNA
accgcgcccaaccaacttctacattttaaaatggttaagtggcaacttttatagtatgtgaatatgatctcaattttttt

SEQ ID NO: 32571 - DNA, 80 bp, synthetic construct
  misc_feature 1..80: note = Artificially Synthesized Probe
  source 1..80: mol_type = other DNA
cagagatactcccttcaccccactttaaagctccccagtggcttcccaacacactagaagtcaaacccaaattccctaca

SEQ ID NO: 32572 - DNA, 80 bp, synthetic construct
  misc_feature 1..80: note = Artificially Synthesized Probe
  source 1..80: mol_type = other DNA
agtgctaggattacaggcatgagccaccgtgctcagccagatatatcattgtaaacactgtttacttttttttttttttt

SEQ ID NO: 32573 - DNA, 80 bp, synthetic construct
  misc_feature 1..80: note = Artificially Synthesized Probe
  source 1..80: mol_type = other DNA
gcccctcgcctcgaaagccttaaagtctatgagggatcataaagcacccagtgtttacccggcaacccacaaacaaatgc

SEQ ID NO: 32574 - DNA, 80 bp, synthetic construct
  misc_feature 1..80: note = Artificially Synthesized Probe
  source 1..80: mol_type = other DNA
cagggatgtggtaatatgggctacaattcactattaattaacaatgatgcccaaggtttaaatcctactcacagggatgg

SEQ ID NO: 32575 - DNA, 80 bp, synthetic construct
  misc_feature 1..80: note = Artificially Synthesized Probe
  source 1..80: mol_type = other DNA
caccagctgtacagcaaaagctccttggaaaatgatcgggaaatggattaggcaaagcccaagagaagccatgccaacga

SEQ ID NO: 32576 - DNA, 80 bp, synthetic construct
  misc_feature 1..80: note = Artificially Synthesized Probe
  source 1..80: mol_type = other DNA
ggggctcacagtgaatggggattcctaaggatttaaaggaagagaagtttaagaagcttctattttgaatccaggctaag

SEQ ID NO: 32577 - DNA, 80 bp, synthetic construct
  misc_feature 1..80: note = Artificially Synthesized Probe
  source 1..80: mol_type = other DNA
aattcttggcttcaacctatcaaggctgtagcgctagacagctccggcccaggtaggggttcaggtcaacagcttcaggg

SEQ ID NO: 32578 - DNA, 80 bp, synthetic construct
  misc_feature 1..80: note = Artificially Synthesized Probe
  source 1..80: mol_type = other DNA
tccaggctgaagccgcggacgctgacgatctcctccacgtccgacaagtcctcgttctcgtcgtatcgctggcggtcaat

SEQ ID NO: 32579 - DNA, 80 bp, synthetic construct
  misc_feature 1..80: note = Artificially Synthesized Probe
  source 1..80: mol_type = other DNA
taagcctcacaaggggctggaggagtaagcagcttgcttccttttgcatgcaatttattatatttttttcccggtcctct

SEQ ID NO: 32580 - DNA, 80 bp, synthetic construct
  misc_feature 1..80: note = Artificially Synthesized Probe
  source 1..80: mol_type = other DNA
ctacccctcttcctcttctttcatccacccctcccccaacattacctgtgtggccgactcaaattcaaagcattttgtat

SEQ ID NO: 32581 - DNA, 80 bp, synthetic construct
  misc_feature 1..80: note = Artificially Synthesized Probe
  source 1..80: mol_type = other DNA
ggcctggaggtggagttatgggcctgcagtagagatatgggcctgaagtggagatatgggcctggagtggagatatgggc

SEQ ID NO: 32582 - DNA, 80 bp, synthetic construct
  misc_feature 1..80: note = Artificially Synthesized Probe
  source 1..80: mol_type = other DNA
tcaaagttctcagctgacacttttgttgtagggagacaccttgtgtttgcgggatgggtccttcctttagccctgggcac

SEQ ID NO: 32583 - DNA, 80 bp, synthetic construct
  misc_feature 1..80: note = Artificially Synthesized Probe
  source 1..80: mol_type = other DNA
agcataatgggagtctccatcagctttgaaggtggaggaagtccaggagccatgaatgcaggtggcctatagaggctgga

SEQ ID NO: 32584 - DNA, 80 bp, synthetic construct
  misc_feature 1..80: note = Artificially Synthesized Probe
  source 1..80: mol_type = other DNA
tgtcatgtttgaacacttccttctgcacagagaggggatgtttaacgacactttgcgcctcattggagaacaccatgatg

SEQ ID NO: 32585 - DNA, 80 bp, synthetic construct
  misc_feature 1..80: note = Artificially Synthesized Probe
  source 1..80: mol_type = other DNA
gatgaagacagatagatagataatacatagagatacagaggcagacatagagaaatcatagagagagagagatgatacat

SEQ ID NO: 32586 - DNA, 80 bp, synthetic construct
  misc_feature 1..80: note = Artificially Synthesized Probe
  source 1..80: mol_type = other DNA
ccacacagagatgtcatcaccagcaacccctacaccctttacttttctttgaagaaatatttattgaggataaatatacc

SEQ ID NO: 32587 - DNA, 80 bp, synthetic construct
  misc_feature 1..80: note = Artificially Synthesized Probe
  source 1..80: mol_type = other DNA
ctactgtgaacagtgctgcaccaatcatacgagtgcagatatcacttcgatatgttgatttactttcctttggatataaa

SEQ ID NO: 32588 - DNA, 80 bp, synthetic construct
  misc_feature 1..80: note = Artificially Synthesized Probe
  source 1..80: mol_type = other DNA
agtgatactgagcactttttcgtatgtggggaaatttcatgtcttttgctcctttttcaattaaatcatttgttttattg

SEQ ID NO: 32589 - DNA, 80 bp, synthetic construct
  misc_feature 1..80: note = Artificially Synthesized Probe
  source 1..80: mol_type = other DNA
tgtgatgctcctgttttctctttatatcttgaagtctcaagacagtgggtgtcatataaaaaaattatggaaaaaaggat

SEQ ID NO: 32590 - DNA, 80 bp, synthetic construct
  misc_feature 1..80: note = Artificially Synthesized Probe
  source 1..80: mol_type = other DNA
taaaatcaaggtgacagcaaggctgccttccctctgaggattccaggcacgaatctgcttctcacttgtcccagcttcta

SEQ ID NO: 32591 - DNA, 80 bp, synthetic construct
  misc_feature 1..80: note = Artificially Synthesized Probe
  source 1..80: mol_type = other DNA
tgcccagccagaattcaaaatcaataatagataatgctgagtgtatgatttcaggtgacaaagaaggtctcactattcag

SEQ ID NO: 32592 - DNA, 80 bp, synthetic construct
  misc_feature 1..80: note = Artificially Synthesized Probe
  source 1..80: mol_type = other DNA
caatgagcttaaaacctcttccctatttggctttctgtgagaatgagatcacatagaaaatgtgaaagccctcagaatcc

SEQ ID NO: 32593 - DNA, 80 bp, synthetic construct
  misc_feature 1..80: note = Artificially Synthesized Probe
  source 1..80: mol_type = other DNA
gttcctcctgatctcaggaagttgctgtcttaggccatttttgttgctctaaaggaacacttgagcctcggtaacttcta

SEQ ID NO: 32594 - DNA, 80 bp, synthetic construct
  misc_feature 1..80: note = Artificially Synthesized Probe
  source 1..80: mol_type = other DNA
ctgttttgttgacttccatcttctacagatgctgcggtaatggaccaagagtctgcaggaaacagaacagcgaatagcga

SEQ ID NO: 32595 - DNA, 80 bp, synthetic construct
  misc_feature 1..80: note = Artificially Synthesized Probe
  source 1..80: mol_type = other DNA
tccctcatgctgttccacctcccctcagactagctttcagtcttctgtcagcagtaaaacttatatattttttaaaataa

SEQ ID NO: 32596 - DNA, 80 bp, synthetic construct
  misc_feature 1..80: note = Artificially Synthesized Probe
  source 1..80: mol_type = other DNA
attggagataggggcctagggtggagatctgagcctggattggcgatatgggcctagggtggaaatatcagcctggagtg

SEQ ID NO: 32597 - DNA, 80 bp, synthetic construct
  misc_feature 1..80: note = Artificially Synthesized Probe
  source 1..80: mol_type = other DNA
caaccccttggcagagtcaagttctgtggggaccagggttagactggggtgctcaaagctggggtgtgtggttgggaagt

SEQ ID NO: 32598 - DNA, 80 bp, synthetic construct
  misc_feature 1..80: note = Artificially Synthesized Probe
  source 1..80: mol_type = other DNA
agcagtccagtggaagtcttcaccagctttgaaggtggaggaaggccaagatccatgaatgcaggtggcctatagaggct

SEQ ID NO: 32599 - DNA, 80 bp, synthetic construct
  misc_feature 1..80: note = Artificially Synthesized Probe
  source 1..80: mol_type = other DNA
ctgcaatgttggtcagatgtcaggtttcagcacttccttctgcacagagaagggaagtttaaggacactttgcacctcat

SEQ ID NO: 32600 - DNA, 80 bp, synthetic construct
  misc_feature 1..80: note = Artificially Synthesized Probe
  source 1..80: mol_type = other DNA
tagagatgatgatgatgaagacagataatacgtacagatagagaggcagacagaaatcatagagagagagatgatacata

SEQ ID NO: 32601 - DNA, 80 bp, synthetic construct
  misc_feature 1..80: note = Artificially Synthesized Probe
  source 1..80: mol_type = other DNA
agggagggatcagggcacaggatggcagacagggcacctccaaaccctcctacacggcctgcatgaaggcccgcggccag

SEQ ID NO: 32602 - DNA, 80 bp, synthetic construct
  misc_feature 1..80: note = Artificially Synthesized Probe
  source 1..80: mol_type = other DNA
tttcttcctgtcctccagtagccaccattctactctctaccttcatgagatccaccttttagctcctgtatatgggtgag

SEQ ID NO: 32603 - DNA, 80 bp, synthetic construct
  misc_feature 1..80: note = Artificially Synthesized Probe
  source 1..80: mol_type = other DNA
tcccaatctgtgggttgtctcttcactttgttggtttatttttagcggtgcagaagttgcttagtttgaggtaatcccaa

SEQ ID NO: 32604 - DNA, 80 bp, synthetic construct
  misc_feature 1..80: note = Artificially Synthesized Probe
  source 1..80: mol_type = other DNA
tggattatatctgtgttcttcattctgctccattgttctacgtgcctttctttatgccaatgtgatgctgttttgcttac

SEQ ID NO: 32605 - DNA, 80 bp, synthetic construct; identical to SEQ ID NO: 32590
  misc_feature 1..80: note = Artificially Synthesized Probe
  source 1..80: mol_type = other DNA

SEQ ID NO: 32606 - DNA, 80 bp, synthetic construct; identical to SEQ ID NO: 32591
  misc_feature 1..80: note = Artificially Synthesized Probe
  source 1..80: mol_type = other DNA

SEQ ID NO: 32607 - DNA, 80 bp, synthetic construct; identical to SEQ ID NO: 32592
  misc_feature 1..80: note = Artificially Synthesized Probe
  source 1..80: mol_type = other DNA

SEQ ID NO: 32608 - DNA, 80 bp, synthetic construct
  misc_feature 1..80: note = Artificially Synthesized Probe
  source 1..80: mol_type = other DNA
ccaggctgttctgagacgttcctcctgatctcaggacgttgctgtcttagtccatttttgttgctctaaaggaacacttg

SEQ ID NO: 32609 - DNA, 80 bp, synthetic construct
  misc_feature 1..80: note = Artificially Synthesized Probe
  source 1..80: mol_type = other DNA
tgtatgttggtatctgcttatgaaatgagggcccagaagtgccctctgagctgttttgttgacttccgtcttctacagat

SEQ ID NO: 32610 - DNA, 80 bp, synthetic construct
  misc_feature 1..80: note = Artificially Synthesized Probe
  source 1..80: mol_type = other DNA
tcttgcttacaaatgtctaggtccccactgcctgctggaaagaaaacacactcctttgcttagcccacagttctccattt

SEQ ID NO: 32611 - DNA, 80 bp, synthetic construct
  misc_feature 1..80: note = Artificially Synthesized Probe
  source 1..80: mol_type = other DNA
ggcctggaggctcagtctctgcacagccgagatccttgttcctgggggcaggtaggcagcgagggtgagtttaccttcag

SEQ ID NO: 32612 - DNA, 80 bp, synthetic construct
  misc_feature 1..80: note = Artificially Synthesized Probe
  source 1..80: mol_type = other DNA
cagcagagaaagagagggaagcagtgctaggaacagcaggtcctctgaggacaaaggtgtaactcacaccctccagcgtt

SEQ ID NO: 32613 - DNA, 80 bp, synthetic construct
  misc_feature 1..80: note = Artificially Synthesized Probe
  source 1..80: mol_type = other DNA
gcagtgtagtgggagggagacgctatcagccactgcgggctttgaaggtggaggaagaccactagtcacagaatgcaggt

SEQ ID NO: 32614 - DNA, 80 bp, synthetic construct
  misc_feature 1..80: note = Artificially Synthesized Probe
  source 1..80: mol_type = other DNA
tccaaggccaatttctccatcggtcccatgatgcttgcccttgcagggacctacagatgctacggttctgttactcacac

SEQ ID NO: 32615 - DNA, 80 bp, synthetic construct
  misc_feature 1..80: note = Artificially Synthesized Probe
  source 1..80: mol_type = other DNA
actggattctgaggctcatattccaaataatcccacatatgataggatcgctgagagacacagagaaaaatcagggacac

SEQ ID NO: 32616 - DNA, 80 bp, synthetic construct
  misc_feature 1..80: note = Artificially Synthesized Probe
  source 1..80: mol_type = other DNA
agtgcgcaaggtcaacagaacattccaggcagatttccctctgggccctgccacccacggagggacctacagatgcttcg

SEQ ID NO: 32617 - DNA, 80 bp, synthetic construct
  misc_feature 1..80: note = Artificially Synthesized Probe
  source 1..80: mol_type = other DNA
atctatattcttttttttgttaccctccacccttcccttcctggcctctggtgtccaccattgtattctccaccttcatg

SEQ ID NO: 32618 - DNA, 80 bp, synthetic construct
  misc_feature 1..80: note = Artificially Synthesized Probe
  source 1..80: mol_type = other DNA
atacttttctccataatagttgtactaatttacattcctaccaacagggtaccagggttctcctttctctaccatcttgc

SEQ ID NO: 32619 - DNA, 80 bp, synthetic construct
  misc_feature 1..80: note = Artificially Synthesized Probe
  source 1..80: mol_type = other DNA
agttttccccacaccatttattgaaaagactgtcctttcctgattgtaagttctcggcacctttgtcaaagtccattaaa

SEQ ID NO: 32620 - DNA, 80 bp, synthetic construct
  misc_feature 1..80: note = Artificially Synthesized Probe
  source 1..80: mol_type = other DNA
aagaatgattgccaatctgacatccttctcaggaaacatgcagtgttttttcttcctgcattcctaactggaggataaat

SEQ ID NO: 32621 - DNA, 80 bp, synthetic construct
  misc_feature 1..80: note = Artificially Synthesized Probe
  source 1..80: mol_type = other DNA
ctaatcagatatttgtgacattaatgaaaaacacggattgaacccctgaaagattggcggaaggattttccacacacagc

SEQ ID NO: 32622 - DNA, 80 bp, synthetic construct
  misc_feature 1..80: note = Artificially Synthesized Probe
  source 1..80: mol_type = other DNA
tcacccaaatcccccatctcacccctacttccaatcacctgtggaaatacagatagatcatggggaggtaaatgctaata

SEQ ID NO: 32623 - DNA, 80 bp, synthetic construct; identical to SEQ ID NO: 32593
  misc_feature 1..80: note = Artificially Synthesized Probe
  source 1..80: mol_type = other DNA

SEQ ID NO: 32624 - DNA, 80 bp, synthetic construct
  misc_feature 1..80: note = Artificially Synthesized Probe
  source 1..80: mol_type = other DNA
agcaggatgggagcacacagctgtgtgttcctcactggcaggatggtccctggcccaagacaggagccacagaggcagga

SEQ ID NO: 32625 - DNA, 80 bp, synthetic construct
  misc_feature 1..80: note = Artificially Synthesized Probe
  source 1..80: mol_type = other DNA
cctttcttcggactattttccagccttctgtcagcagtgaaacttataaaattttttgtgatttcaatgtagctgtctcc

SEQ ID NO: 32626 - DNA, 80 bp, synthetic construct
  misc_feature 1..80: note = Artificially Synthesized Probe
  source 1..80: mol_type = other DNA
ccgatttctgccggaatggccaggaaatccgagccggaggcgtaatgtttgagatgtaagggggaattactagaaggcgc

SEQ ID NO: 32627 - DNA, 80 bp, synthetic construct
  misc_feature 1..80: note = Artificially Synthesized Probe
  source 1..80: mol_type = other DNA
agggctccctcacttccccaatcctcctgccctcctctcccagtctccccaccttctgtcccctcaacccgcactggaca

SEQ ID NO: 32628 - DNA, 80 bp, synthetic construct
  misc_feature 1..80: note = Artificially Synthesized Probe
  source 1..80: mol_type = other DNA
ggagcggggactgctggaacagcggctattcttctgttattagtatttttcttactgtccaagatcaactgtggaaatat

SEQ ID NO: 32629 - DNA, 80 bp, synthetic construct
  misc_feature 1..80: note = Artificially Synthesized Probe
  source 1..80: mol_type = other DNA
cagaaatcgagaaagtggagctaagacattgtggccccacacacctgtgttccaacactcgtctttgataagaattgtga

SEQ ID NO: 32630 - DNA, 80 bp, synthetic construct
  misc_feature 1..80: note = Artificially Synthesized Probe
  source 1..80: mol_type = other DNA
gagctctgacacctgctgggtttccacagtgtttgagcgactctggggaaatctctttacctctgtgggtctcaaatttt

SEQ ID NO: 32631 - DNA, 80 bp, synthetic construct
  misc_feature 1..80: note = Artificially Synthesized Probe
  source 1..80: mol_type = other DNA
gacagtaaagttaggaaaaaaggaaagacccaatttggtggaaggggcaggactgcttgggtcagagaatggccaggatt

SEQ ID NO: 32632 - DNA, 80 bp, synthetic construct
  misc_feature 1..80: note = Artificially Synthesized Probe
  source 1..80: mol_type = other DNA
aggactcaggcatggagtaaagagtaagaaccctgaaatggaatgaggagtacttgaatcttgccccagctctgctttca

SEQ ID NO: 32633 - DNA, 80 bp, synthetic construct
  misc_feature 1..80: note = Artificially Synthesized Probe
  source 1..80: mol_type = other DNA
caaagggaacttcaggccctctagctagacaagaggatggagctttgcatggagagaaagctagtgacaaggctggggga

SEQ ID NO: 32634 - DNA, 80 bp, synthetic construct
  misc_feature 1..80: note = Artificially Synthesized Probe
  source 1..80: mol_type = other DNA
cacacacagattccactgcccagcccatcggggcacttaacatatatggtagaaatgaattatttggaaaggggccatga

SEQ ID NO: 32635 - DNA, 80 bp, synthetic construct
  misc_feature 1..80: note = Artificially Synthesized Probe
  source 1..80: mol_type = other DNA
ggcgtcagcgggacactcaggccaataagctctgactcccgctgtctgcaaaaatgaccggatgcaggaatgtcacctag

SEQ ID NO: 32636 - DNA, 80 bp, synthetic construct
  misc_feature 1..80: note = Artificially Synthesized Probe
  source 1..80: mol_type = other DNA
ttttcttttggaagagatcagctcattccagcctcttccctcctcccctccagattaaagagacggtgagggtctggtgc

SEQ ID NO: 32637 - DNA, 80 bp, synthetic construct
  misc_feature 1..80: note = Artificially Synthesized Probe
  source 1..80: mol_type = other DNA
aaaagccgaattgtcatgagcattccttgaatgtcttttactacacctcggtgtttgttgctatagactattgcatgtgc

SEQ ID NO: 32638 - DNA, 80 bp, synthetic construct
  misc_feature 1..80: note = Artificially Synthesized Probe
  source 1..80: mol_type = other DNA
aaaatgtgctctttctatggatggatcataccttgctagctacgtggttaatgtccgtgggatgaaacctacagattaat

SEQ ID NO: 32639 - DNA, 80 bp, synthetic construct
  misc_feature 1..80: note = Artificially Synthesized Probe
  source 1..80: mol_type = other DNA
aaacccactgggatgttgaaaacagggttaactgagtgtctagatgattctgtgtaaaggtattgggagcattgtgatga

SEQ ID NO: 32640 - DNA, 80 bp, synthetic construct
  misc_feature 1..80: note = Artificially Synthesized Probe
  source 1..80: mol_type = other DNA
ccagtgttcatcacctctagccaaaactgtgtccctcaggtagacttttcccgaaggaggaactatgtatgcagcttccc

SEQ ID NO: 32641 - DNA, 80 bp, synthetic construct
  misc_feature 1..80: note = Artificially Synthesized Probe
  source 1..80: mol_type = other DNA
ctctgcccatctctacttactgaaaccctctgagggccttcctaggattagttattagattgtttctttatcttccttct

SEQ ID NO: 32642 - DNA, 80 bp, synthetic construct
  misc_feature 1..80: note = Artificially Synthesized Probe
  source 1..80: mol_type = other DNA
ataatcctagctgctcaggaggctgaggcaggagaatcacttgaacctgggagatggaggttgcagtgaatggagattgc

SEQ ID NO: 32643 - DNA, 80 bp, synthetic construct
  misc_feature 1..80: note = Artificially Synthesized Probe
  source 1..80: mol_type = other DNA
tcttttttggacagtctcactctcacccaggctggaatgcaatggcgcgatctccgctcattgcaccctccgcctcccag

SEQ ID NO: 32644 - DNA, 80 bp, synthetic construct
  misc_feature 1..80: note = Artificially Synthesized Probe
  source 1..80: mol_type = other DNA
ataaggtgcttagcgtttcctttctctttaatatgtattttctcacctcacaggggagaagcctttcaactgcagctggg

SEQ ID NO: 32645 - DNA, 80 bp, synthetic construct
  misc_feature 1..80: note = Artificially Synthesized Probe
  source 1..80: mol_type = other DNA
ctaaaacaccaaaaaagaaacactcaaatccagctgctttgtcaattgtcagttctgactccttttgctgtggccttatc

SEQ ID NO: 32646 - DNA, 80 bp, synthetic construct
  misc_feature 1..80: note = Artificially Synthesized Probe
  source 1..80: mol_type = other DNA
cattgtgtgtgacttgatacctgttaacttgccccttagtatcagctgttacttgacacaaatgtgtgtgttattcagag

SEQ ID NO: 32647 - DNA, 80 bp, synthetic construct
  misc_feature 1..80: note = Artificially Synthesized Probe
  source 1..80: mol_type = other DNA
cattctcactttatgtccacatggtgtgaagggagggaacgtaaccagttaagaaaagggcttttgggtcaaacacaata

SEQ ID NO: 32648 - DNA, 80 bp, synthetic construct
  misc_feature 1..80: note = Artificially Synthesized Probe
  source 1..80: mol_type = other DNA
gtggtcagtgatttcatccacagcagcagagacacatatagaaaaaacaaatactgttgatgtctgattccttcttatcg

SEQ ID NO: 32649 - DNA, 80 bp, synthetic construct
  misc_feature 1..80: note = Artificially Synthesized Probe
  source 1..80: mol_type = other DNA
attccagtttcacatccctggttccagggaggggagaatcttcagtactctggagagtacgggagttcatcccttcttat

SEQ ID NO: 32650 - DNA, 80 bp, synthetic construct
  misc_feature 1..80: note = Artificially Synthesized Probe
  source 1..80: mol_type = other DNA
ttctcttagactttatttctggatctaggggaaagggacaaaaaatgaaaaaccaactggtaaggttgggtcaacgtgcc

SEQ ID NO: 32651 - DNA, 80 bp, synthetic construct
  misc_feature 1..80: note = Artificially Synthesized Probe
  source 1..80: mol_type = other DNA
ttctgtttgtctgtctctcctttgtctcctttgtggcttgtttatctgtctcagtgtctctgcatctctttgtaaagtct

SEQ ID NO: 32652 - DNA, 80 bp, synthetic construct
  misc_feature 1..80: note = Artificially Synthesized Probe
  source 1..80: mol_type = other DNA
tctctttattcctgtgtttatttctctgtttctctcagtttctctctctagttgtcactgtctccctgtgtgtctctcca

SEQ ID NO: 32653 - DNA, 80 bp, synthetic construct
  misc_feature 1..80: note = Artificially Synthesized Probe
  source 1..80: mol_type = other DNA
tccccctgagcaccccaagatgagcctgatattaggccccgcccccggacccaggccctgcccactccccctacctctgc

SEQ ID NO: 32654 - DNA, 80 bp, synthetic construct
  misc_feature 1..80: note = Artificially Synthesized Probe
  source 1..80: mol_type = other DNA
aagcacaatctcctgcaccctcggcttcccctgtccccatatcatcattacactgttgtcactccaccagatattcagag

SEQ ID NO: 32655 - DNA, 80 bp, synthetic construct
  misc_feature 1..80: note = Artificially Synthesized Probe
  source 1..80: mol_type = other DNA
agagaatcagagccggagagacagagtgcttgagagatatcctcagagacagtctgagagttagacatggagatatagat

SEQ ID NO: 32656 - DNA, 80 bp, synthetic construct
  misc_feature 1..80: note = Artificially Synthesized Probe
  source 1..80: mol_type = other DNA
ccgcataactgaagccactaagacggtgagtgaattgtgtttaaccttgaagtcacttgggatttgtactatcactagga

SEQ ID NO: 32657 - DNA, 80 bp, synthetic construct
  misc_feature 1..80: note = Artificially Synthesized Probe
  source 1..80: mol_type = other DNA
tttaggaatttagttagactgcagcaaaagaattcactgggtctctggccctaggctaaaaactatagaactccaaacct

SEQ ID NO: 32658 - DNA, 80 bp, synthetic construct
  misc_feature 1..80: note = Artificially Synthesized Probe
  source 1..80: mol_type = other DNA
gggggatcacgaagtcaggagatcgagaccatggtgaaactcagtctctactaaaaaatacaaaaaagtagccaggcgtg

SEQ ID NO: 32659 - DNA, 80 bp, synthetic construct
  misc_feature 1..80: note = Artificially Synthesized Probe
  source 1..80: mol_type = other DNA
tcttgggccttctgttttctccgttgaccctgccagatttttttactgatgcagaaatgatggctactggtgagcctgtt

SEQ ID NO: 32660 - DNA, 80 bp, synthetic construct
  misc_feature 1..80: note = Artificially Synthesized Probe
  source 1..80: mol_type = other DNA
caaaacaaaacaaaaacactgttcaacaataacaattaaacagctgcctattattaagtgcctgctgtgtggcgggcctc

SEQ ID NO: 32661 - DNA, 80 bp, synthetic construct
  misc_feature 1..80: note = Artificially Synthesized Probe
  source 1..80: mol_type = other DNA
catctgaaagattaagataaatgatctctttcttttctttttaggccactggagaatgcacggcaaccgtggggaagagg

SEQ ID NO: 32662 - DNA, 80 bp, synthetic construct
  misc_feature 1..80: note = Artificially Synthesized Probe
  source 1..80: mol_type = other DNA
agaacgtatttcttctatctaactataattcagtacctattcaccaacctcttcatttcccccttctacccgcttacccc

SEQ ID NO: 32663 - DNA, 80 bp, synthetic construct
  misc_feature 1..80: note = Artificially Synthesized Probe
  source 1..80: mol_type = other DNA
gtgtgccactcactctgcagctacgttccctttttatggactttgcctctattgaccagtaggttagggctatctgttat

SEQ ID NO: 32664 - DNA, 80 bp, synthetic construct
  misc_feature 1..80: note = Artificially Synthesized Probe
  source 1..80: mol_type = other DNA
gatgtcgaatcagacccccttcctttgatgtttgattttaacaaatgggtaatcgtcattacaggctcttcctagagaca

SEQ ID NO: 32665 - DNA, 80 bp, synthetic construct
  misc_feature 1..80: note = Artificially Synthesized Probe
  source 1..80: mol_type = other DNA
ccatcttggttcactgcaacttccacctcccaagtttaagagatctcctgcctcagtatcccaagtaactgggattacag

SEQ ID NO: 32666 - DNA, 80 bp, synthetic construct
  misc_feature 1..80: note = Artificially Synthesized Probe
  source 1..80: mol_type = other DNA
tcaggtggtggctggattgaactttcgaattacctactcaattgtgcaaacgaattgttccaaagagaattttctgttct

SEQ ID NO: 32667 - DNA, 80 bp, synthetic construct
  misc_feature 1..80: note = Artificially Synthesized Probe
  source 1..80: mol_type = other DNA
tccctacctttatctttaataaacagaccctgagtctctagcccttagtggtccttcttagcatcgtatcttgttatctg

SEQ ID NO: 32668 - DNA, 80 bp, synthetic construct
  misc_feature 1..80: note = Artificially Synthesized Probe
  source 1..80: mol_type = other DNA
tttcccgagttttctaattgagcatgcatttattttataattggagaaaaaagtaaaaaggacactatcaagagagtaaa

SEQ ID NO: 32669 - DNA, 80 bp, synthetic construct
  misc_feature 1..80: note = Artificially Synthesized Probe
  source 1..80: mol_type = other DNA
cctggctatgtttgtttattattcttttttcccctcacttctggagacctaggcataggtctttctatttgtttgttcta

SEQ ID NO: 32670 - DNA, 80 bp, synthetic construct
  misc_feature 1..80: note = Artificially Synthesized Probe
  source 1..80: mol_type = other DNA
ttcaaatcttctatgttcttgtttattttttattcacttgccctgtcttagatttgtaattgcatactaaattttcccac

SEQ ID NO: 32671 - DNA, 80 bp, synthetic construct
  misc_feature 1..80: note = Artificially Synthesized Probe
  source 1..80: mol_type = other DNA
gaaatggagatagtgtgagtttgtggtcaggtcagtgtttcttataacaagggtgtgcttttctcatagttggaaaacgt

SEQ ID NO: 32672 - DNA, 80 bp, synthetic construct
  misc_feature 1..80: note = Artificially Synthesized Probe
  source 1..80: mol_type = other DNA
aggtgtgtaaactatactacaaaagcagtaacactatagtctatgtgcaaattgctgactaattttgccactgatcttgg

SEQ ID NO: 32673 - DNA, 80 bp, synthetic construct
  misc_feature 1..80: note = Artificially Synthesized Probe
  source 1..80: mol_type = other DNA
acatcccagatcactctgggtggtcattcaaacgttctaagcctttgtggccccgtctgtaaaatgagtgactgtattag

SEQ ID NO: 32674 - DNA, 80 bp, synthetic construct
  misc_feature 1..80: note = Artificially Synthesized Probe
  source 1..80: mol_type = other DNA
gtgccactgcacttcagcctgggcgacagagtcagactccacctggaaacaaacaaaaaaacgaatgcctcatagtcata

SEQ ID NO: 32675 - DNA, 80 bp, synthetic construct
  misc_feature 1..80: note = Artificially Synthesized Probe
  source 1..80: mol_type = other DNA
gatcgtgccactgcactctagcctaggtgatagaacaagaccctttgggcaacagagcaaacaaaaagagagagagatgg

SEQ ID NO: 32676 - DNA, 80 bp, synthetic construct
  misc_feature 1..80: note = Artificially Synthesized Probe
  source 1..80: mol_type = other DNA
tatttgcaatgatgccaatttacattcacatcacctgggtataagacaccagttgaggccaggcgtggtagctcatgcct

SEQ ID NO: 32677 - DNA, 80 bp, synthetic construct
  misc_feature 1..80: note = Artificially Synthesized Probe
  source 1..80: mol_type = other DNA
cagcctcccaagtagccgggattagagatgcttgcaaccatgtccggctaatttttagtatttttaatagagacagggat

SEQ ID NO: 32678 - DNA, 80 bp, synthetic construct
  misc_feature 1..80: note = Artificially Synthesized Probe
  source 1..80: mol_type = other DNA
gcttgcttatttcttcccccacttagaaaaggaaatgggaccaaccgatagccaaatattttaaatatgcatgccaagct

SEQ ID NO: 32679 - DNA, 80 bp, synthetic construct
  misc_feature 1..80: note = Artificially Synthesized Probe
  source 1..80: mol_type = other DNA
cctcctgatcacttctcacacattgtcagtgtctcagtgaagcttctatagactctctcctagtgcactgcagtcctgct

SEQ ID NO: 32680 - DNA, 80 bp, synthetic construct
  misc_feature 1..80: note = Artificially Synthesized Probe
  source 1..80: mol_type = other DNA
tgtcctaatgtgcttcagcacaacaaagtgatcatggatacatgctccctatatattcagttcataaagccacttagggc

SEQ ID NO: 32681 - DNA, 80 bp, synthetic construct
  misc_feature 1..80: note = Artificially Synthesized Probe
  source 1..80: mol_type = other DNA
caagatgaagagcgggattcaggaaaagaacaagggcatactcgtagacatgactggggccatgaaaaacaaagaaaaca

SEQ ID NO: 32682 - DNA, 80 bp, synthetic construct
  misc_feature 1..80: note = Artificially Synthesized Probe
  source 1..80: mol_type = other DNA
ccagtggagacaccatcagtctccacggactgcataaaattgtgtgccacaattctaactcttttctgaatcttcttccc

SEQ ID NO: 32683 - DNA, 80 bp, synthetic construct
  misc_feature 1..80: note = Artificially Synthesized Probe
  source 1..80: mol_type = other DNA
ctagattgagtaattcttagtttacagaagctccgagcttaatgataaggatgaaaagcagagggagcaatatagaagca

SEQ ID NO: 32684 - DNA, 80 bp, synthetic construct
  misc_feature 1..80: note = Artificially Synthesized Probe
  source 1..80: mol_type = other DNA
aaggcagaagtccttaggcgggacttccttaccaccacgggtgctaaaagaagagttagtaggtcatgcttctaccagta

SEQ ID NO: 32685 - DNA, 80 bp, synthetic construct
  misc_feature 1..80: note = Artificially Synthesized Probe
  source 1..80: mol_type = other DNA
gaggttgcaagcccagttataggtactggagttcagaagattgttaggattctaatttggctagttttaaggtgccatct

SEQ ID NO: 32686 - DNA, 80 bp, synthetic construct
  misc_feature 1..80: note = Artificially Synthesized Probe
  source 1..80: mol_type = other DNA
gcagctgggaaatccacagaagctggtctgacagcaggccatggtgtcaggagttgatctgaaggttgggttgcttggag

SEQ ID NO: 32687 - DNA, 80 bp, synthetic construct
  misc_feature 1..80: note = Artificially Synthesized Probe
  source 1..80: mol_type = other DNA
agcttgctatttgcttgagctaaaagagtttttgcttcattttgtagcatttcggctttccttctggcatcagctgactc

SEQ ID NO: 32688 - DNA, 80 bp, synthetic construct
  misc_feature 1..80: note = Artificially Synthesized Probe
  source 1..80: mol_type = other DNA
atttttgaatagtagggagttaaatactgaaattaggtcagtaaatgcaggtgcccccaggcctacggaccagttaggaa

SEQ ID NO: 32689 - DNA, 80 bp, synthetic construct
  misc_feature 1..80: note = Artificially Synthesized Probe
  source 1..80: mol_type = other DNA
ggaattactatgagtacaagtttggaggaagatttaaaagtctgctgtgccattttgctctagaccaaaagaagtaatta

SEQ ID NO: 32690 - DNA, 80 bp, synthetic construct
  misc_feature 1..80: note = Artificially Synthesized Probe
  source 1..80: mol_type = other DNA
acagaaccccaattattaacttgcatcatcaagccacatctcacctataattcagtattttctaatttgcttttcagaac

SEQ ID NO: 32691 - DNA, 80 bp, synthetic construct
  misc_feature 1..80: note = Artificially Synthesized Probe
  source 1..80: mol_type = other DNA
ctgttctcccatagtttccaaaactactatatagtaaaatgtttgatgaccaaaatcttgagacattggccttcttaacc

SEQ ID NO: 32692 - DNA, 80 bp, synthetic construct
  misc_feature 1..80: note = Artificially Synthesized Probe
  source 1..80: mol_type = other DNA
catgaaaaaagtactctcagtgttcttttctttaaagaatagccttcctgaaatgacccagagagactcgcataggtcct

SEQ ID NO: 32693 - DNA, 80 bp, synthetic construct
  misc_feature 1..80: note = Artificially Synthesized Probe
  source 1..80: mol_type = other DNA
atgttacgggaaagtatagcagagtgaatctgaacattgtggaaaaccatagagggccagagcttaaagctgagacttaa

SEQ ID NO: 32694 - DNA, 80 bp, synthetic construct
  misc_feature 1..80: note = Artificially Synthesized Probe
  source 1..80: mol_type = other DNA
taagtccctttcacttgagagttttctgtaatttgcagccaaaaccatctttactggtaacacttgaactgtgactagca

SEQ ID NO: 32695 - DNA, 80 bp, synthetic construct
  misc_feature 1..80: note = Artificially Synthesized Probe
  source 1..80: mol_type = other DNA
atttagaattgatttctccctttcagatcctttagtccacagctgaaagcaaacatacataacaaaaactgaggccatcc

SEQ ID NO: 32696 - DNA, 80 bp, synthetic construct
  misc_feature 1..80: note = Artificially Synthesized Probe
  source 1..80: mol_type = other DNA
acattccacaggttaaagaaaacagtacaaacaaaggaacaaaggtagatgaagtgttcccaaattaccacccccgactg

SEQ ID NO: 32697 - DNA, 80 bp, synthetic construct
  misc_feature 1..80: note = Artificially Synthesized Probe
  source 1..80: mol_type = other DNA
gaaagaattctcacaggatcattaacaaagacaaaaacacagtaagagaactgaagcagctgctaatccctaggtagttt

SEQ ID NO: 32698 - DNA, 80 bp, synthetic construct
  misc_feature 1..80: note = Artificially Synthesized Probe
  source 1..80: mol_type = other DNA
ttcctacactgagatgggttttataattcaaatcagaacaaactaaaaaaggaatgtccaagctgggtgtggtggcacat

SEQ ID NO: 32699 - DNA, 80 bp, synthetic construct
  misc_feature 1..80: note = Artificially Synthesized Probe
  source 1..80: mol_type = other DNA
gttaacctcatcatactaggcttcctccccaagcagtgtctatatttggtgtcttcgggtcctaaatttactgtaaagtt

SEQ ID NO: 32700 - DNA, 80 bp, synthetic construct
  misc_feature 1..80: note = Artificially Synthesized Probe
  source 1..80: mol_type = other DNA
gacctttgctatgtctcttaggttctctgtgcccaagtcccacatttgtaaaatggggactttgatcctcatttgtgcca

SEQ ID NO: 32701 - DNA, 80 bp, synthetic construct
  misc_feature 1..80: note = Artificially Synthesized Probe
  source 1..80: mol_type = other DNA
acaggtcagagtgtggagttctggctctattcacaggcagcttcaagcccttacaattgtgaaaactgaagacataaatg

SEQ ID NO: 32702 - DNA, 80 bp, synthetic construct
  misc_feature 1..80: note = Artificially Synthesized Probe
  source 1..80: mol_type = other DNA
tgtgatctctgcacattaggaggcttagtcttttcagtgaggtaaaatgcctcactaaatgcattgtcactctacatcag

SEQ ID NO: 32703 - DNA, 80 bp, synthetic construct
  misc_feature 1..80: note = Artificially Synthesized Probe
  source 1..80: mol_type = other DNA
gcactggtctggtggactaatggcggagaagcagaaaaaacttgaagtaagcagtcttattttgaggtaatggaatttcc

SEQ ID NO: 32704 - DNA, 80 bp, synthetic construct
  misc_feature 1..80: note = Artificially Synthesized Probe
  source 1..80: mol_type = other DNA
agggaataagcaatgctagctgatctacttaatcatgaacctcagtgacaagatgtggcatttagaatactcacttcact

SEQ ID NO: 32705 - DNA, 80 bp, synthetic construct
  misc_feature 1..80: note = Artificially Synthesized Probe
  source 1..80: mol_type = other DNA
tgaattacgaaaggccttatgctaacatcttatcgctgggcttccacccattctgaggaaagacaggaataaataaagaa

SEQ ID NO: 32706 - DNA, 80 bp, synthetic construct
  misc_feature 1..80: note = Artificially Synthesized Probe
  source 1..80: mol_type = other DNA
ccggccttcctctgaaaaactttctaatggaacatctcccagaaccagttatactgagggtcctgagatctgctataaca

SEQ ID NO: 32707 - DNA, 80 bp, synthetic construct
  misc_feature 1..80: note = Artificially Synthesized Probe
  source 1..80: mol_type = other DNA
catttccattatcatttggtaaaatttagtcatcttccagaaagctaaaagttacccccgagtcacctgggtcctcacct

SEQ ID NO: 32708 - DNA, 80 bp, synthetic construct
  misc_feature 1..80: note = Artificially Synthesized Probe
  source 1..80: mol_type = other DNA
ctctctccagaagtcaacaaccagttcagccaaactgaccaacattcctttctcccacctgaaaagtaaaccatcaaatc

SEQ ID NO: 32709 - DNA, 80 bp, synthetic construct
  misc_feature 1..80: note = Artificially Synthesized Probe
  source 1..80: mol_type = other DNA
ttgtaccgattttaaagatactaaggtccagaggaaaacactagcaagtcaatgccacaatgggaaatagtctatgtacc

SEQ ID NO: 32710 - DNA, 80 bp, synthetic construct
  misc_feature 1..80: note = Artificially Synthesized Probe
  source 1..80: mol_type = other DNA
tctgctatcttgttacttcattttatgtaccccatgtccccaaatagcctgcaagtggcagaacagtatcagctgttctc

SEQ ID NO: 32711 - DNA, 80 bp, synthetic construct
  misc_feature 1..80: note = Artificially Synthesized Probe
  source 1..80: mol_type = other DNA
ggccccaaatggaaactttacccttcctttttgctatctatgaatcaacagaaagattcctcctgtgactctttgactcc

SEQ ID NO: 32712 - DNA, 80 bp, synthetic construct
  misc_feature 1..80: note = Artificially Synthesized Probe
  source 1..80: mol_type = other DNA
tgaatcaatcccccattgtccactcaaatcaattctcactctctctgggtgctttgtaggttatgagctttctccaaaga

SEQ ID NO: 32713 - DNA, 80 bp, synthetic construct
  misc_feature 1..80: note = Artificially Synthesized Probe
  source 1..80: mol_type = other DNA
ttagggtattttcacttatgctcacttggagcttccaatgcttccagagggcttgaaaaatactttttcttgctggtgtg

SEQ ID NO: 32714 - DNA, 80 bp, synthetic construct
  misc_feature 1..80: note = Artificially Synthesized Probe
  source 1..80: mol_type = other DNA
ggtatgtgcaacgatagagccattatctggaaaaaatcaagccttggggcattacaagtttgaggaatttaacagagtag

SEQ ID NO: 32715 - DNA, 80 bp, synthetic construct
  misc_feature 1..80: note = Artificially Synthesized Probe
  source 1..80: mol_type = other DNA
gtttaatcataagcttaggtgaaaatctgggttttattcacattaaactgacttggagcccctgaccttggagccctttg

SEQ ID NO: 32716 - DNA, 80 bp, synthetic construct
  misc_feature 1..80: note = Artificially Synthesized Probe
  source 1..80: mol_type = other DNA
cagaagccagttgtcatcttttttttctagctgccacttagaagtaggaatgaactgtttacctgagaaggtctccattg

SEQ ID NO: 32717 - DNA, 80 bp, synthetic construct
  misc_feature 1..80: note = Artificially Synthesized Probe
  source 1..80: mol_type = other DNA
ttagccacatctaaatgctaagatgttcccacttcacatcttgaccttgaaatgcaaagaaggaaagaaatggaggtgat

SEQ ID NO: 32718 - DNA, 80 bp, synthetic construct
  misc_feature 1..80: note = Artificially Synthesized Probe
  source 1..80: mol_type = other DNA
ggtggaagtcattctaagaagtgggcagaataaatgtgcatcttacttcgacagtcctgctggagggcatcaccatagta

SEQ ID NO: 32719 - DNA, 80 bp, synthetic construct
  misc_feature 1..80: note = Artificially Synthesized Probe
  source 1..80: mol_type = other DNA
ttgtaaaatttttttttttttttttttggagagatggtgtctcgccatcttgcccacgctggtctcttactcctgggctc

SEQ ID NO: 32720 - DNA, 80 bp, synthetic construct
  misc_feature 1..80: note = Artificially Synthesized Probe
  source 1..80: mol_type = other DNA
ttactttcctgctttgtgttataacgttcttatcagagactcaatatgaattgactccactccatgtgccaaataggaaa

SEQ ID NO: 32721 - DNA, 80 bp, synthetic construct
  misc_feature 1..80: note = Artificially Synthesized Probe
  source 1..80: mol_type = other DNA
caccacacctggctgtttttttgtttgtttttgagatggagtcgcgctctgttgcgcaggctggagtgcagtggcacgat

SEQ ID NO: 32722 - DNA, 80 bp, synthetic construct
  misc_feature 1..80: note = Artificially Synthesized Probe
  source 1..80: mol_type = other DNA
gaaggaactttggagacaatctcatccaacctagttattctacttatgaaaagctggatattccggccaggtgcggtggc

SEQ ID NO: 32723 - DNA, 80 bp, synthetic construct
  misc_feature 1..80: note = Artificially Synthesized Probe
  source 1..80: mol_type = other DNA
gaatgatgagaaactggctcaaactagatagtagaattccaaatacttaaaatcaagtgtttgccacccaaacctattgt

SEQ ID NO: 32724 - DNA, 80 bp, synthetic construct
  misc_feature 1..80: note = Artificially Synthesized Probe
  source 1..80: mol_type = other DNA
acatttgctaactggagaacagatctacttaggcatgttttatagagtctcctggaaactgtagttgcataaaacgttct

SEQ ID NO: 32725 - DNA, 80 bp, synthetic construct
  misc_feature 1..80: note = Artificially Synthesized Probe
  source 1..80: mol_type = other DNA
ctgagttaatctgaatgaatgcataacaatgcttttgaggaacctacgtttgcatccactggggccaaagccaaaagttc

SEQ ID NO: 32726 - DNA, 80 bp, synthetic construct
  misc_feature 1..80: note = Artificially Synthesized Probe
  source 1..80: mol_type = other DNA
tgatgtttctgcaaacatctgtcatcggtgttttcacaacgcttctgctgttctctagacatcggtatctctgaaaggtt

SEQ ID NO: 32727 - DNA, 80 bp, synthetic construct
  misc_feature 1..80: note = Artificially Synthesized Probe
  source 1..80: mol_type = other DNA
aagctctgcatcgataattccaaaggaaaaaagtcagcagtcaacgtctggctctgaaatggtgacttgaaaactcgcaa

SEQ ID NO: 32728 - DNA, 80 bp, synthetic construct
  misc_feature 1..80: note = Artificially Synthesized Probe
  source 1..80: mol_type = other DNA
gagaggatctcatacatcctcatcaccacctcagtcgtcagcaaggttgagtgcctcacaaaagatcactacgtttgaga

SEQ ID NO: 32729 - DNA, 80 bp, synthetic construct
  misc_feature 1..80: note = Artificially Synthesized Probe
  source 1..80: mol_type = other DNA
ctggatatagcactcaaaggcttgggatataccttatttgatatgaccaggagagtaagcataaaagaaaaaagagaaca

SEQ ID NO: 32730 - DNA, 80 bp, synthetic construct
  misc_feature 1..80: note = Artificially Synthesized Probe
  source 1..80: mol_type = other DNA
tgacaaagctataaaaatgcttctgaaatggggtctttacaaagcatgtatgttccactacaccccaaaacactgcttta

SEQ ID NO: 32731 - DNA, 80 bp, synthetic construct
  misc_feature 1..80: note = Artificially Synthesized Probe
  source 1..80: mol_type = other DNA
aatttagtccccgttcttctccagattctttcttcacactccatcaggaaccaaattctgtgatttttacttctgcatct

SEQ ID NO: 32732 - DNA, 80 bp, synthetic construct
  misc_feature 1..80: note = Artificially Synthesized Probe
  source 1..80: mol_type = other DNA
cctaaacgaccctgccgcagcatagctgaagtcctctttttgtgtatcatgttgttatcctacaggaataggaactcttt

SEQ ID NO: 32733 - DNA, 80 bp, synthetic construct
  misc_feature 1..80: note = Artificially Synthesized Probe
  source 1..80: mol_type = other DNA
ctctgcttctctatttccagccatcaatgggacatttccatggactggccagctgtcatctctaattcatcttgtcccaa

SEQ ID NO: 32734 - DNA, 80 bp, synthetic construct
  misc_feature 1..80: note = Artificially Synthesized Probe
  source 1..80: mol_type = other DNA
aagcactaagggagaagaagatatgattcatctgattgagaagactgagggaggcgtcatgaaagaggtgtccttaaagc

SEQ ID NO: 32735 - DNA, 80 bp, synthetic construct
  misc_feature 1..80: note = Artificially Synthesized Probe
  source 1..80: mol_type = other DNA
acccaaattagctggaaacagattctcctttagagccttagaaaacaatgcagccctaccaacatcgtgattttggtcca

SEQ ID NO: 32736 - DNA, 80 bp, synthetic construct
  misc_feature 1..80: note = Artificially Synthesized Probe
  source 1..80: mol_type = other DNA
ctactaacttccgttctggattcgaagtacaataaattttagtccctcatttattgagtacctgccaggtccaccgtgct

SEQ ID NO: 32737 - DNA, 80 bp, synthetic construct
  misc_feature 1..80: note = Artificially Synthesized Probe
  source 1..80: mol_type = other DNA
ggtttcaccatgttggcctggttggtcttgaactcctgacctcaggtgatctggcgcgccggcctcccaaagtgctagga

SEQ ID NO: 32738 - DNA, 80 bp, synthetic construct
  misc_feature 1..80: note = Artificially Synthesized Probe
  source 1..80: mol_type = other DNA
caacatgtgttctgggagtcacaaaggaaaagtcagaaaagtgattccacaagcagacagcattctgtctttcttccctg

SEQ ID NO: 32739 - DNA, 80 bp, synthetic construct
  misc_feature 1..80: note = Artificially Synthesized Probe
  source 1..80: mol_type = other DNA
agtccattttccatgtgcttagattgttgaaaaataaaatggttgatgataccaactgttgctggggatgggggaaaagg

SEQ ID NO: 32740 - DNA, 80 bp, synthetic construct
  misc_feature 1..80: note = Artificially Synthesized Probe
  source 1..80: mol_type = other DNA
gtgcacttcaaaaatgagtatataaaaacaggttcaccaatttattttatttatttttttgagatgaagtcttgctctgt

SEQ ID NO: 32741 - DNA, 80 bp, synthetic construct
  misc_feature 1..80: note = Artificially Synthesized Probe
  source 1..80: mol_type = other DNA
gaatagattcccagaggtggggttactgggtcaaagggtatgcccatttctacaagctactgatatgtatctccaaaatg

SEQ ID NO: 32742 - DNA, 80 bp, synthetic construct
  misc_feature 1..80: note = Artificially Synthesized Probe
  source 1..80: mol_type = other DNA
gcagcacaactaccaagtaaattccactcccagcgtcttcaactgcaattacaataacaatgctggctttactgctcata

SEQ ID NO: 32743 - DNA, 80 bp, synthetic construct
  misc_feature 1..80: note = Artificially Synthesized Probe
  source 1..80: mol_type = other DNA
aatacactggttgaagtgaaccttggagtaatccttcccagcatggactctgtgatggtttcaagaacatccttgcggcc

SEQ ID NO: 32744 - DNA, 80 bp, synthetic construct
  misc_feature 1..80: note = Artificially Synthesized Probe
  source 1..80: mol_type = other DNA
caaggccaaaaatgctactccatatctcttagaccttcatcagctaccctgccatatagttctttcatttttctctcacg

SEQ ID NO: 32745 - DNA, 80 bp, synthetic construct
  misc_feature 1..80: note = Artificially Synthesized Probe
  source 1..80: mol_type = other DNA
cagtgagttgtctgtcttgttgatggctacatgcctcatctctagaatgttcctattacatagtggatgcacaagaaata

SEQ ID NO: 32746 - DNA, 80 bp, synthetic construct
  misc_feature 1..80: note = Artificially Synthesized Probe
  source 1..80: mol_type = other DNA
ttctaactggagtaaagggaaggcagaagtttttaaagggctgaatacactcaatcctgtaccttctaaggactaacaat

SEQ ID NO: 32747 - DNA, 80 bp, synthetic construct
  misc_feature 1..80: note = Artificially Synthesized Probe
  source 1..80: mol_type = other DNA
aagagaaaatcaacaatcagctacctgtatggtgcaaagggctaaatgtaactctgtaaaactaaaacccccagaaaatg

SEQ ID NO: 32748 - DNA, 80 bp, synthetic construct
  misc_feature 1..80: note = Artificially Synthesized Probe
  source 1..80: mol_type = other DNA
caacatggcaaaaccccatctctaaaaaaatacaaaaattagaccgggcgcggtggctcacacctgtattcccagcattt

SEQ ID NO: 32749 - DNA, 80 bp, synthetic construct
  misc_feature 1..80: note = Artificially Synthesized Probe
  source 1..80: mol_type = other DNA
gattcatctgtctgcactctcaagctctgtagcctgaaacggttctttactgtcatttatgtctgtgcattcttataaat

SEQ ID NO: 32750 - DNA, 80 bp, synthetic construct
  misc_feature 1..80: note = Artificially Synthesized Probe
  source 1..80: mol_type = other DNA
gacaggctgggccacatgtaaaattaatttaaatggggaagcagcatttttctggcaatattccctggacttcttccact

SEQ ID NO: 32751 - DNA, 80 bp, synthetic construct
  misc_feature 1..80: note = Artificially Synthesized Probe
  source 1..80: mol_type = other DNA
ccaagagtgttagtagagcacatgaaacacctagagatgtttcccagtgtctcctgcagtatagccacgtgactaattct

SEQ ID NO: 32752 - DNA, 80 bp, synthetic construct
  misc_feature 1..80: note = Artificially Synthesized Probe
  source 1..80: mol_type = other DNA
tctctagaaaactctttggtgggttttgtaagagagaaagaaactttcaccttatttgaacaactagatttggggagact

SEQ ID NO: 32753 - DNA, 80 bp, synthetic construct
  misc_feature 1..80: note = Artificially Synthesized Probe
  source 1..80: mol_type = other DNA
aaacaaaacaaacaaacaaaaaattttatttgggtcaggcgtggtggctcatgcctgtaatcccagcactttgggaggct

SEQ ID NO: 32754 - DNA, 80 bp, synthetic construct
  misc_feature 1..80: note = Artificially Synthesized Probe
  source 1..80: mol_type = other DNA
cacagagactcttcttgcaaggaaaatgtctaacctctaaaatgtatacttttccccaccctactggataagtaaactgt

SEQ ID NO: 32755 - DNA, 80 bp, synthetic construct
  misc_feature 1..80: note = Artificially Synthesized Probe
  source 1..80: mol_type = other DNA
atggatattttactgccaagaaaaaaaaagctaggaatacttcacagagaagaaggcatcaaattggatctttttttgag

SEQ ID NO: 32756 - DNA, 80 bp, synthetic construct
  misc_feature 1..80: note = Artificially Synthesized Probe
  source 1..80: mol_type = other DNA
ctgcaagtttcatatgctgaagacctaactccatacttcaggtcactagatgtggagatgggctctttaaagaggtgatt

SEQ ID NO: 32757 - DNA, 80 bp, synthetic construct
  misc_feature 1..80: note = Artificially Synthesized Probe
  source 1..80: mol_type = other DNA
ctgacctagaaaacagaacctaaataaagacacttacttccgaattaaaaccaacgcttgacagaaatttgggtgagggt

SEQ ID NO: 32758 - DNA, 80 bp, synthetic construct
  misc_feature 1..80: note = Artificially Synthesized Probe
  source 1..80: mol_type = other DNA
cttttgctagtctaaatccacttagcaattagccatctctatggcgaacttgggggaaaaaaatcaacaacctcagttct

SEQ ID NO: 32759 - DNA, 80 bp, synthetic construct
  misc_feature 1..80: note = Artificially Synthesized Probe
  source 1..80: mol_type = other DNA
ttaaaaatacaaaaaagaggctgagcacagtggctcatgcctcttttgtatccctgcactttgggaggcagaggcaggtg

SEQ ID NO: 32760 - DNA, 80 bp, synthetic construct
  misc_feature 1..80: note = Artificially Synthesized Probe
  source 1..80: mol_type = other DNA
ctttgcatctaatctgcttttctactttcctttcctttccttctctcactaccccaaactcgaggcaaatctacatagca

SEQ ID NO: 32761 - DNA, 80 bp, synthetic construct
  misc_feature 1..80: note = Artificially Synthesized Probe
  source 1..80: mol_type = other DNA
gctaggacccgaaggatgagttgttttctcataaaccagtgtgataacttgtacctattctttttctcgagacagggtct

SEQ ID NO: 32762 - DNA, 80 bp, synthetic construct
  misc_feature 1..80: note = Artificially Synthesized Probe
  source 1..80: mol_type = other DNA
atcagtttaatcaccagattgtgtggtcaatgaagggacaagcggttggtgacaaggagtagttgacaatttatttagtg

SEQ ID NO: 32763 - DNA, 80 bp, synthetic construct
  misc_feature 1..80: note = Artificially Synthesized Probe
  source 1..80: mol_type = other DNA
taccttgaaagtcattatgagatgagtaaaatggaattctgcttccaaatccagttggatagttacattttccacaccta

SEQ ID NO: 32764 - DNA, 80 bp, synthetic construct
  misc_feature 1..80: note = Artificially Synthesized Probe
  source 1..80: mol_type = other DNA
aaataaactggctcagaacaaatactaacatcttctctttcaggggaaagcctgaacaaacaaatgagcctttgcaccct

SEQ ID NO: 32765 - DNA, 80 bp, synthetic construct
  misc_feature 1..80: note = Artificially Synthesized Probe
  source 1..80: mol_type = other DNA
agcacatgataaactgtttcactgtctgctgactaaaatggggacagtctccatcctaatgttgaggcatcttcttcaaa

SEQ ID NO: 32766 - DNA, 80 bp, synthetic construct
  misc_feature 1..80: note = Artificially Synthesized Probe
  source 1..80: mol_type = other DNA
ctttacagaatgatagatggctgcagcggcatccaaagcctgcccaggtgtactgcatagaataaagaaatctagtagtc

SEQ ID NO: 32767 - DNA, 80 bp, synthetic construct
  misc_feature 1..80: note = Artificially Synthesized Probe
  source 1..80: mol_type = other DNA
tctcatgataaggatcttgggaattgcatatgaagcattttttgtcctcctacaaacaaagttgagttcatcagtctaga

SEQ ID NO: 32768 - DNA, 80 bp, synthetic construct
  misc_feature 1..80: note = Artificially Synthesized Probe
  source 1..80: mol_type = other DNA
tgtactgtctaaaaaacagagacccaaagccagggatgcattaggagcctggataaaacaagcttcctgtctcaatcttg

SEQ ID NO: 32769 - DNA, 80 bp, synthetic construct
  misc_feature 1..80: note = Artificially Synthesized Probe
  source 1..80: mol_type = other DNA
aatcaggaggaagcagtctagacatctctgtataaacctggaagcaaatgaacggaatccactttaccacattcctttgg

SEQ ID NO: 32770 - DNA, 80 bp, synthetic construct
  misc_feature 1..80: note = Artificially Synthesized Probe
  source 1..80: mol_type = other DNA
acccaagggttttaaaaagaggataaatcacctttaatgcacacttccaaaactaaagttttaaaaaacacacacacaat

SEQ ID NO: 32771 - DNA, 80 bp, synthetic construct
  misc_feature 1..80: note = Artificially Synthesized Probe
  source 1..80: mol_type = other DNA
aacagagatggttaattaaagccacatggcccccatctgttcccagaatgaagcctccgctcagctcaggcactctcctg

SEQ ID NO: 32772 - DNA, 80 bp, synthetic construct
  misc_feature 1..80: note = Artificially Synthesized Probe
  source 1..80: mol_type = other DNA
ctctcgccctgctccgggagcccccgagcccaaagaagggaattagaaagtttagccttgggaggaacagagggaggcgc

SEQ ID NO: 32773 - DNA, 80 bp, synthetic construct
  misc_feature 1..80: note = Artificially Synthesized Probe
  source 1..80: mol_type = other DNA
gtacagaaaacgccaccactttctgatgccaggagaaaagcaaaataaaaaaactgcttgcacacattagcactgataaa

SEQ ID NO: 32774 - DNA, 80 bp, synthetic construct
  misc_feature 1..80: note = Artificially Synthesized Probe
  source 1..80: mol_type = other DNA
gaaaattctattctcttactgaataaaacataaatgtactttaaatggaacagtgttttcatttaagaaaagccaactgg

SEQ ID NO: 32775 - DNA, 80 bp, synthetic construct
  misc_feature 1..80: note = Artificially Synthesized Probe
  source 1..80: mol_type = other DNA
tgtcctcatagttaatacacatctcttcatttctcgcccttcttcccccagcaaagaagaaaaactgctgtcttccacca

SEQ ID NO: 32776 - DNA, 80 bp, synthetic construct
  misc_feature 1..80: note = Artificially Synthesized Probe
  source 1..80: mol_type = other DNA
gccatgatgagatcacccaagtaattggggtggcgaacaaagccccaccatccagaaactagaagattttttcccgttga

SEQ ID NO: 32777 - DNA, 80 bp, synthetic construct
  misc_feature 1..80: note = Artificially Synthesized Probe
  source 1..80: mol_type = other DNA
ttgccagattccagcaccatgctctttgacttcctggcctccagaaccatgagccaaataaatttcatgacaaattacct

SEQ ID NO: 32778 - DNA, 80 bp, synthetic construct
  misc_feature 1..80: note = Artificially Synthesized Probe
  source 1..80: mol_type = other DNA
aactgagctaatgctggccattcaaaatggcatgtttcaagtatgtagacagcagggcataaaagcctcagtacataata

SEQ ID NO: 32779 - DNA, 80 bp, synthetic construct
  misc_feature 1..80: note = Artificially Synthesized Probe
  source 1..80: mol_type = other DNA
tggcatttcatgtgcattttccacagaagaaattaagctgcctggcaacatggtgaactgacagcttcgcttctcatgta

SEQ ID NO: 32780 - DNA, 80 bp, synthetic construct
  misc_feature 1..80: note = Artificially Synthesized Probe
  source 1..80: mol_type = other DNA
tataagtgaggacacacggtgttttaactttctgtccccaagagtgtcttattcttctctctcaaggcctgtgatctgat

SEQ ID NO: 32781 - DNA, 80 bp, synthetic construct
  misc_feature 1..80: note = Artificially Synthesized Probe
  source 1..80: mol_type = other DNA
gaatttttaaagtcaatttgaagtgttatcaccaccttcacagcttcccaagctctgagccagggtctgtgaagtggtag

SEQ ID NO: 32782 - DNA, 80 bp, synthetic construct
  misc_feature 1..80: note = Artificially Synthesized Probe
  source 1..80: mol_type = other DNA
aagatggaaacttagccttatttcaactggtttcctcaatgcatcttgatttctgattttacattcatctaattagagct

SEQ ID NO: 32783 - DNA, 80 bp, synthetic construct
  misc_feature 1..80: note = Artificially Synthesized Probe
  source 1..80: mol_type = other DNA
taatgttgtgagaaacagaatgaagggtggaagggaactctttgctctctatctgcaactccaagcctaaaactaggtaa

SEQ ID NO: 32784 - DNA, 80 bp, synthetic construct
  misc_feature 1..80: note = Artificially Synthesized Probe
  source 1..80: mol_type = other DNA
ggtttcttaaaaaagttaaccaaaatcatgggggcccccccaaaggactttacactccattttttttagataggcgacat

SEQ ID NO: 32785 - DNA, 80 bp, synthetic construct
  misc_feature 1..80: note = Artificially Synthesized Probe
  source 1..80: mol_type = other DNA
tacgccctggaagagagatgttccgatgactgcagatgtcaggataaaagcatagaatcctttaaaaaaaaaaaaaaaag

SEQ ID NO: 32786 - DNA, 80 bp, synthetic construct
  misc_feature 1..80: note = Artificially Synthesized Probe
  source 1..80: mol_type = other DNA
acttgaaccagagtaattagatgaggaaatttttaaaaaggatcaagcaacttggccagccactcccccactggctccaa

SEQ ID NO: 32787 - DNA, 80 bp, synthetic construct
  misc_feature 1..80: note = Artificially Synthesized Probe
  source 1..80: mol_type = other DNA
ttctagtggagagaccctaatgaagagacaaatacactgatgtgtggaggcacaaatgtcagacagaaaaacaaaacaga

SEQ ID NO: 32788 - DNA, 80 bp, synthetic construct
  misc_feature 1..80: note = Artificially Synthesized Probe
  source 1..80: mol_type = other DNA
ggatccctagctcaaacatctaccaatggctaccatactcttacaaagtaacagtatgattccattgtcttccatttgtg

SEQ ID NO: 32789 - DNA, 80 bp, synthetic construct
  misc_feature 1..80: note = Artificially Synthesized Probe
  source 1..80: mol_type = other DNA
aagtccacttgctcaatgcagccacgttttaccccacaaaataactattcagaaatgtagcaattcatttcaaactgtaa

SEQ ID NO: 32790 - DNA, 80 bp, synthetic construct
  misc_feature 1..80: note = Artificially Synthesized Probe
  source 1..80: mol_type = other DNA
gagcccagtagcctatcaattaatcatttaaaatgctgcatctgaaatgacacatactaagagtgaattttttttccata

SEQ ID NO: 32791 - DNA, 80 bp, synthetic construct
  misc_feature 1..80: note = Artificially Synthesized Probe
  source 1..80: mol_type = other DNA
aaaatttcatcagttccacccacttagtaactccaaaactctgcacacttcagatctttgaccctcacaatcaacccgcc

SEQ ID NO: 32792 - DNA, 80 bp, synthetic construct
  misc_feature 1..80: note = Artificially Synthesized Probe
  source 1..80: mol_type = other DNA
tttcccacctgtgtatttttatgaggtgcgtcatttctctcaatatgctcaggctccccattatatctgctgatgctatt

SEQ ID NO: 32793 - DNA, 80 bp, synthetic construct
  misc_feature 1..80: note = Artificially Synthesized Probe
  source 1..80: mol_type = other DNA
atctgttcctggagtcccggggtggtaaagagagccactaatagttaaaatgttctaattcaaaatataagttagaacag

SEQ ID NO: 32794 - DNA, 80 bp, synthetic construct
  misc_feature 1..80: note = Artificially Synthesized Probe
  source 1..80: mol_type = other DNA
ctactatctaaaatactatttgtacaagatctacaggctccatgcaccctgatatttcaaagcttacatcttgaaagtaa

SEQ ID NO: 32795 - DNA, 80 bp, synthetic construct
  misc_feature 1..80: note = Artificially Synthesized Probe
  source 1..80: mol_type = other DNA
taccacaaatcataacacatacagacagacccacactagaagaggataacaaaggcaggaactgctaccattaactctaa

SEQ ID NO: 32796 - DNA, 80 bp, synthetic construct
  misc_feature 1..80: note = Artificially Synthesized Probe
  source 1..80: mol_type = other DNA
acggatcagatatcttaaaacccaggccctcaccagacaggttgaaaagccctgggctagactcgaatctaattaatgtc

SEQ ID NO: 32797 - DNA, 80 bp, synthetic construct
  misc_feature 1..80: note = Artificially Synthesized Probe
  source 1..80: mol_type = other DNA
tttttccacaggctgatcactaaaatacaactttccagaattgactggtcaggattttagggccagaaaggctacattca

SEQ ID NO: 32798 - DNA, 80 bp, synthetic construct
  misc_feature 1..80: note = Artificially Synthesized Probe
  source 1..80: mol_type = other DNA
ctactagtttacagagatggcagctaggttggtagatgaaagaaaacacaagtacttatctggtgattagaggatgtcag

SEQ ID NO: 32799 - DNA, 80 bp, synthetic construct
  misc_feature 1..80: note = Artificially Synthesized Probe
  source 1..80: mol_type = other DNA
acacaattgtcaaacgtgaggatacagtgcaatcacatcctaatatattcccccacaggagtgaaatagccaggatggca

SEQ ID NO: 32800 - DNA, 80 bp, synthetic construct
  misc_feature 1..80: note = Artificially Synthesized Probe
  source 1..80: mol_type = other DNA
tccctctgctcttctccgtagctccatcttctcccacacaccagttactacaatgcgtaactacagatctacacgtgttt

SEQ ID NO: 32801 - DNA, 80 bp, synthetic construct
  misc_feature 1..80: note = Artificially Synthesized Probe
  source 1..80: mol_type = other DNA
ggccgcccggggctcccattggctcctcgaccttttgaatcatccccggcgctgtcgattggtcgcgcgccgtggcgcgt

SEQ ID NO: 32802 - DNA, 80 bp, synthetic construct
  misc_feature 1..80: note = Artificially Synthesized Probe
  source 1..80: mol_type = other DNA
gcaacctacaagcctggttttaattgaaccccaaaatgctgagtcatgtcattgttgactccgaatctgttacggatcct

SEQ ID NO: 32803 - DNA, 80 bp, synthetic construct
  misc_feature 1..80: note = Artificially Synthesized Probe
  source 1..80: mol_type = other DNA
tgctgtgctccaagacctgggtgctgtggtggccccagctctgagggcggctgctgcctgagccaccacaggtgctgcag

SEQ ID NO: 32804 - DNA, 80 bp, synthetic construct
  misc_feature 1..80: note = Artificially Synthesized Probe
  source 1..80: mol_type = other DNA
ttcctttctacctcacttactatctgcaattccagcatcagatactcacccctttagttaaggtttccactcacgctgcc

SEQ ID NO: 32805 - DNA, 80 bp, synthetic construct; identical to SEQ ID NO: 32804
  misc_feature 1..80: note = Artificially Synthesized Probe
  source 1..80: mol_type = other DNA

SEQ ID NO: 32806 - DNA, 80 bp, synthetic construct
  misc_feature 1..80: note = Artificially Synthesized Probe
  source 1..80: mol_type = other DNA
tcagccaagcttgcaaagaaaaaaggctggagttttttccattacaaatgaagtgtagcaaagagaactttgacactgta

SEQ ID NO: 32807 - DNA, 80 bp, synthetic construct
  misc_feature 1..80: note = Artificially Synthesized Probe
  source 1..80: mol_type = other DNA
gagcactccgtagcttttatggcacctctacctgacaaagtttatgtaaaatggaaataacgtggtctttgtgcacattt

SEQ ID NO: 32808 - DNA, 80 bp, synthetic construct
  misc_feature 1..80: note = Artificially Synthesized Probe
  source 1..80: mol_type = other DNA
agaacaccagacttttcttggcgcaccttataatgtaaattttgctgtttgactttcatctgaactgtttcctttaatat

SEQ ID NO: 32809 - DNA, 80 bp, synthetic construct
  misc_feature 1..80: note = Artificially Synthesized Probe
  source 1..80: mol_type = other DNA
tgcactcaagcctgggcatcaagagcgaatcttcgtctcaataaaacgaaacaaaacaaaacaaaattaaacaaaacaac

SEQ ID NO: 32810 - DNA, 80 bp, synthetic construct
  misc_feature 1..80: note = Artificially Synthesized Probe
  source 1..80: mol_type = other DNA
gcactccagcttgggcaacaagagtgaaactctgtctcaagaaaagtaaaataaaaataaaataaaataaaataaaataa

SEQ ID NO: 32811 - DNA, 80 bp, synthetic construct
  misc_feature 1..80: note = Artificially Synthesized Probe
  source 1..80: mol_type = other DNA
gatggttacttagtaagtagctcattcaaatccaggcctgttgaaccccaaagtccatgtttttaagattgtcttgtctt

SEQ ID NO: 32812 - DNA, 80 bp, synthetic construct
  misc_feature 1..80: note = Artificially Synthesized Probe
  source 1..80: mol_type = other DNA
aaaaaccggtgaccagaaggcaaccaggaaaggctttgctgacctccggagtggtggagttggaggttctgggaaggcga

SEQ ID NO: 32813 - DNA, 80 bp, synthetic construct
  misc_feature 1..80: note = Artificially Synthesized Probe
  source 1..80: mol_type = other DNA
gccttaaatttagctgttctcctatagcccagtcctactcagtgctctgcagaagattctgaggagttgagaatcttaaa

SEQ ID NO: 32814 - DNA, 80 bp, synthetic construct
  misc_feature 1..80: note = Artificially Synthesized Probe
  source 1..80: mol_type = other DNA
ctgctgggctcaagtgatttgcctgcctcagtctcccaaagtgttgggatttcagatgtgatccacagcacctggcctag

SEQ ID NO: 32815 - DNA, 80 bp, synthetic construct
  misc_feature 1..80: note = Artificially Synthesized Probe
  source 1..80: mol_type = other DNA
caggaagaattaagcgggcaactgaggaccaaggaactagatgtattcctaagatgtttttactgagccacatatttaca

SEQ ID NO: 32816 - DNA, 80 bp, synthetic construct
  misc_feature 1..80: note = Artificially Synthesized Probe
  source 1..80: mol_type = other DNA
tatcagggttatgggatgctggagacacaaccatctctctcattctcagggctgtctgcaaaccccccttccctgaaaca

SEQ ID NO: 32817 - DNA, 80 bp, synthetic construct
  misc_feature 1..80: note = Artificially Synthesized Probe
  source 1..80: mol_type = other DNA
aaatccaggcagcctgatctaatgtttcctagcttttcctactgagaaaatgaaggtaattagcatatccatcacctcaa

SEQ ID NO: 32818 - DNA, 80 bp, synthetic construct
  misc_feature 1..80: note = Artificially Synthesized Probe
  source 1..80: mol_type = other DNA
ggcacagctgccctgtgggcaggggataatccccccaaaaaatacaaaaaaatacaaaaataaaaaattagctgggcttg

SEQ ID NO: 32819 - DNA, 80 bp, synthetic construct
  misc_feature 1..80: note = Artificially Synthesized Probe
  source 1..80: mol_type = other DNA
ctccctctcctccaccgtgggtatcttcctgaacacttagttttcactgaacacgtaggaagtctgaaatgtcaccgcta

SEQ ID NO: 32820 - DNA, 80 bp, synthetic construct
  misc_feature 1..80: note = Artificially Synthesized Probe
  source 1..80: mol_type = other DNA
gttctacactcttttccagtattaactcatttgaaccttgctgtaaccacaacaggaaggttagggttattattatgtcc

SEQ ID NO: 32821 - DNA, 80 bp, synthetic construct
  misc_feature 1..80: note = Artificially Synthesized Probe
  source 1..80: mol_type = other DNA
gaaacctgtttgcttgaatggaaggcttttgaaggaagcagccagggacagtctggaaagccttcctgtatacattaaat

SEQ ID NO: 32822 - DNA, 80 bp, synthetic construct
  misc_feature 1..80: note = Artificially Synthesized Probe
  source 1..80: mol_type = other DNA
tactgggtctcgggggccagttgctttaactctcagagcctcagttttctcacctgtgttctgcaagaaggatggtagag

SEQ ID NO: 32823 - DNA, 80 bp, synthetic construct
  misc_feature 1..80: note = Artificially Synthesized Probe
  source 1..80: mol_type = other DNA
tcctagggtgccttttgcttctgtttctcattgggctcttcccctgcctgtcttgggctaatttttcagagcataaattt

SEQ ID NO: 32824 - DNA, 80 bp, synthetic construct
  misc_feature 1..80: note = Artificially Synthesized Probe
  source 1..80: mol_type = other DNA
agaaaaagaaaacaaattactagaaagagctgggccaaggagagaaaagatttcttctcatcacagtagggtagattcct

SEQ ID NO: 32825 - DNA, 80 bp, synthetic construct
  misc_feature 1..80: note = Artificially Synthesized Probe
  source 1..80: mol_type = other DNA
gaggtgggtggatcatgaggacagatcgagaccatcctggctaacatagtgaaaccctgtctctactaaaaacacaaaaa

SEQ ID NO: 32826 - DNA, 80 bp, synthetic construct
  misc_feature 1..80: note = Artificially Synthesized Probe
  source 1..80: mol_type = other DNA
attgctaccatgtggatgaaccttgaaaacatgttaaatgaaaggaaccagacacaaaagactggtttccatttgtatat

SEQ ID NO: 32827 - DNA, 80 bp, synthetic construct
  misc_feature 1..80: note = Artificially Synthesized Probe
  source 1..80: mol_type = other DNA
tatggtctggtaagggagacaatcatgcgatacagttacaagctgataaatgatatgaacaaaaaagtgcaagctttctt

SEQ ID NO: 32828 - DNA, 80 bp, synthetic construct
  misc_feature 1..80: note = Artificially Synthesized Probe
  source 1..80: mol_type = other DNA
gcctggccttacttgtgtcttgaaaggcggaaaaagatcagggaaagaagaaataatttcaaacacaaattcatgtttta

SEQ ID NO: 32829 - DNA, 80 bp, synthetic construct
  misc_feature 1..80: note = Artificially Synthesized Probe
  source 1..80: mol_type = other DNA
ccttgaccacatatactttaaaaataatcatacataaaattgtcacctccacctcctgcacttattagagcatgattctc

SEQ ID NO: 32830 - DNA, 80 bp, synthetic construct
  misc_feature 1..80: note = Artificially Synthesized Probe
  source 1..80: mol_type = other DNA
gtgctcggctcccttttttatgtttttgcaatatttttaatttaggtttttcaaagccagaaactccacagcactggtgt

SEQ ID NO: 32831 - DNA, 80 bp, synthetic construct
  misc_feature 1..80: note = Artificially Synthesized Probe
  source 1..80: mol_type = other DNA
ttataccacaggtcatctatttcccagacacaggaaaactagggaatcaaattcttcagagataagaacttgttcttcca

SEQ ID NO: 32832 - DNA, 80 bp, synthetic construct
  misc_feature 1..80: note = Artificially Synthesized Probe
  source 1..80: mol_type = other DNA
ggccatcagaacttgaatcctttaacatccaccaggaagttttatgaagagtgggtgataggatctaaaatctctgcaga

SEQ ID NO: 32833 - DNA, 80 bp, synthetic construct
  misc_feature 1..80: note = Artificially Synthesized Probe
  source 1..80: mol_type = other DNA
gattgtctgcagtgaacaattctgaggaaaaggtgttttttctggtccttgtccagttagttagtaaagaaactacctgg

SEQ ID NO: 32834 - DNA, 80 bp, synthetic construct
  misc_feature 1..80: note = Artificially Synthesized Probe
  source 1..80: mol_type = other DNA
tgtaccaccacatccgcctaatctttaatttttgtagacacagggtatcatcatgttgcccagcctggacattcatattt

SEQ ID NO: 32835 - DNA, 80 bp, synthetic construct
  misc_feature 1..80: note = Artificially Synthesized Probe
  source 1..80: mol_type = other DNA
gttcaagactagcatgggcaacatggcaaaaacccatctctataaaaattacaaaaattagctgggtatggtggcgcatg

SEQ ID NO: 32836 - DNA, 80 bp, synthetic construct
  misc_feature 1..80: note = Artificially Synthesized Probe
  source 1..80: mol_type = other DNA
ttggatccacttccaagctcagtggtggtttgcaggattgtttttcacagtttgttgggatggagggtctcagttctttt

SEQ ID NO: 32837 - DNA, 80 bp, synthetic construct
  misc_feature 1..80: note = Artificially Synthesized Probe
  source 1..80: mol_type = other DNA
taaatttgtttgagttcattgtagattctggatattagccctttgtcagatgagtaggttgtgaaaattttctcccatgt

SEQ ID NO: 32838 - DNA, 80 bp, synthetic construct
  misc_feature 1..80: note = Artificially Synthesized Probe
  source 1..80: mol_type = other DNA
gccaccacacctggctatcagaatgctttatcaggacagagattagattctggtatccttatatgttgatggatacatgt

SEQ ID NO: 32839 - DNA, 80 bp, synthetic construct
  misc_feature 1..80: note = Artificially Synthesized Probe
  source 1..80: mol_type = other DNA
ttaacattatctcaagtgtcctggcctttaaactgggatatttctcttgtatcataaggacttagtgtggattaatattt

SEQ ID NO: 32840 - DNA, 80 bp, synthetic construct
  misc_feature 1..80: note = Artificially Synthesized Probe
  source 1..80: mol_type = other DNA
tgagccactgcacccggccataaggccttattttaaagcaaatgtaagttcgattatcagcaaatcaccaattttctgtg

SEQ ID NO: 32841 - DNA, 80 bp, synthetic construct
  misc_feature 1..80: note = Artificially Synthesized Probe
  source 1..80: mol_type = other DNA
tatgacctcaccagtaatccaatatgcaaattataacgatattcctgtggggagggggcagggcacaaactagcgattca

SEQ ID NO: 32842 - DNA, 80 bp, synthetic construct
  misc_feature 1..80: note = Artificially Synthesized Probe
  source 1..80: mol_type = other DNA
tcctccttttactcagggcagagcaatttggacaacaaatgaacagagatttttggaaacatgtaggttattaaataatt

SEQ ID NO: 32843 - DNA, 80 bp, synthetic construct
  misc_feature 1..80: note = Artificially Synthesized Probe
  source 1..80: mol_type = other DNA
tcctgcctctcttttgctcttcagtattacttactggaggaatatgtaatattctaggtcaagtctaggagaggctcatc

SEQ ID NO: 32844 - DNA, 80 bp, synthetic construct
  misc_feature 1..80: note = Artificially Synthesized Probe
  source 1..80: mol_type = other DNA
tcctcatccttatgctggcaataggatatgcactagaaaatttgactcttagagtcaatgaataaaaggatgggctcata

SEQ ID NO: 32845 - DNA, 80 bp, synthetic construct
  misc_feature 1..80: note = Artificially Synthesized Probe
  source 1..80: mol_type = other DNA
aaaaaaaccccaaatcctacacagttttcagatacaacagcttcatatactctataccaggggtccccaactctatacca

SEQ ID NO: 32846 - DNA, 80 bp, synthetic construct
  misc_feature 1..80: note = Artificially Synthesized Probe
  source 1..80: mol_type = other DNA
aagaggtttaagaaagggtaatgtttctgaggatggctcctgccaaggattgagaaaagtcatttttctcagcacttctg

SEQ ID NO: 32847 - DNA, 80 bp, synthetic construct
  misc_feature 1..80: note = Artificially Synthesized Probe
  source 1..80: mol_type = other DNA
gaccacaggtgtgtaccaccatgcccagttaattaaaaatttttttttgtagagacagggttttcctgtgctgcccaggc

SEQ ID NO: 32848 - DNA, 80 bp, synthetic construct
  misc_feature 1..80: note = Artificially Synthesized Probe
  source 1..80: mol_type = other DNA
gtcaaatttttgtggattcagtgataactaaaaacaatcttggtgtgaatgctctgcttcctgaagtatccctgggtcct

SEQ ID NO: 32849 - DNA, 80 bp, synthetic construct
  misc_feature 1..80: note = Artificially Synthesized Probe
  source 1..80: mol_type = other DNA
tttaaagtatagctgcttgatgatctgtaaacatcacagtatgaatatggaccatgagcacaaccagggaggcatgcagc

SEQ ID NO: 32850 - DNA, 80 bp, synthetic construct
  misc_feature 1..80: note = Artificially Synthesized Probe
  source 1..80: mol_type = other DNA
cctttgagcagttttgactgaatttatggtttggtaacaagtacctgcatgccaagaattttctgctggtttttggcagg

SEQ ID NO: 32851 - DNA, 80 bp, synthetic construct
  misc_feature 1..80: note = Artificially Synthesized Probe
  source 1..80: mol_type = other DNA
taatcctcattaatcctacaactaaaacataagctgcctcaactgtataaaacattttcttggctgagcgtgatggctca

SEQ ID NO: 32852 - DNA, 80 bp, synthetic construct
  misc_feature 1..80: note = Artificially Synthesized Probe
  source 1..80: mol_type = other DNA
tgacctctaaataaatttggaggcataattgagcaacaggttgatgagcaggtaaaaaactgggtaaagaatgaaccact

SEQ ID NO: 32853 - DNA, 80 bp, synthetic construct
  misc_feature 1..80: note = Artificially Synthesized Probe
  source 1..80: mol_type = other DNA
ctttagtgtttgacaagtacatcattaacttttgcataggaagtactccctagattgtcccagatgggaagttcctgatt

SEQ ID NO: 32854 - DNA, 80 bp, synthetic construct
  misc_feature 1..80: note = Artificially Synthesized Probe
  source 1..80: mol_type = other DNA
gatagggaagcacagttataaaataagcgctagtcataggtcaattttgattaaatcaatggtactaagcagtccaaaca

SEQ ID NO: 32855 - DNA, 80 bp, synthetic construct
  misc_feature 1..80: note = Artificially Synthesized Probe
  source 1..80: mol_type = other DNA
gtttgtaacaaatgtatcactctggagcagcagatcgacagttggggaggctctgtgtgtggggagcatataaaacttat

SEQ ID NO: 32856 - DNA, 80 bp, synthetic construct
  misc_feature 1..80: note = Artificially Synthesized Probe
  source 1..80: mol_type = other DNA
agctactaaaacacttgcctgaggttagacatcttcttctgtggtgaggctggatttcaaatttagaccatttgactgta

SEQ ID NO: 32857 - DNA, 80 bp, synthetic construct
  misc_feature 1..80: note = Artificially Synthesized Probe
  source 1..80: mol_type = other DNA
cataagcttttgtgtttggttaaagttttattgatccatttttcttgtttactttgtgggatactgggcttaactagggg

SEQ ID NO: 32858 - DNA, 80 bp, synthetic construct
  misc_feature 1..80: note = Artificially Synthesized Probe
  source 1..80: mol_type = other DNA
gcacacaacagatggtttgttttgattcctttttatatcctttggagaagttccactaacgactgtatttttactgggca

SEQ ID NO: 32859 - DNA, 80 bp, synthetic construct
  misc_feature 1..80: note = Artificially Synthesized Probe
  source 1..80: mol_type = other DNA
accacacatattaaggagcagctgaggtcatgtttgacattctctccctcttttatctccagtttcagaatgaaaaatga

SEQ ID NO: 32860 - DNA, 80 bp, synthetic construct
  misc_feature 1..80: note = Artificially Synthesized Probe
  source 1..80: mol_type = other DNA
tttgacataaaaagaactgggtttgagtccctgctctggccttcttatctgggtggccctctgggaaagttacttaacta

SEQ ID NO: 32861 - DNA, 80 bp, synthetic construct
  misc_feature 1..80: note = Artificially Synthesized Probe
  source 1..80: mol_type = other DNA
gccccgaacattcaaacagggaacagacaaactctctgacctcacaaagcttatgttcattttagtgataattttacaag

SEQ ID NO: 32862 - DNA, 80 bp, synthetic construct
  misc_feature 1..80: note = Artificially Synthesized Probe
  source 1..80: mol_type = other DNA
ttacaaaacccctgtttccaaagatgggtattaaatggtcctaacaattgtgaagcctcatgtgggagtcagaagtagag

SEQ ID NO: 32863 - DNA, 80 bp, synthetic construct
  misc_feature 1..80: note = Artificially Synthesized Probe
  source 1..80: mol_type = other DNA
agggaagggcttatacctatatttaaacaaactgaaaaggcatggttatatttgtttgtgagttggaacacacaagctta

SEQ ID NO: 32864 - DNA, 80 bp, synthetic construct
  misc_feature 1..80: note = Artificially Synthesized Probe
  source 1..80: mol_type = other DNA
catttaggacataaatatttttagtgactgttgtttgcattttggacagagcaatttctgttatgtaaggagcacccact

SEQ ID NO: 32865 - DNA, 80 bp, synthetic construct
  misc_feature 1..80: note = Artificially Synthesized Probe
  source 1..80: mol_type = other DNA
tggagacttgagagcagagaagactgaaggcagattatctttatagaataactcagaagacttccaattcatccccagta

SEQ ID NO: 32866 - DNA, 80 bp, synthetic construct
  misc_feature 1..80: note = Artificially Synthesized Probe
  source 1..80: mol_type = other DNA
tttgtttctctacaaaggtcattgccacaatgaacacagcatttaatcaaattccagattggcctttgaacttgggatga

SEQ ID NO: 32867 - DNA, 80 bp, synthetic construct
  misc_feature 1..80: note = Artificially Synthesized Probe
  source 1..80: mol_type = other DNA
ggcagaatacagggaagcttcactatggagaagtgaatttgggattgagggcctttattgcaatctccttgtaaataata

SEQ ID NO: 32868 - DNA, 80 bp, synthetic construct
  misc_feature 1..80: note = Artificially Synthesized Probe
  source 1..80: mol_type = other DNA
accaatgcctctttatccttccccctcccctactacctttcccagcctctggtaaccatcattcttctcactatctctat

SEQ ID NO: 32869 - DNA, 80 bp, synthetic construct
  misc_feature 1..80: note = Artificially Synthesized Probe
  source 1..80: mol_type = other DNA
gagggcttacctcaaattggcccagaccaatgtcccggagtgcttctgtaatgtttgttttttagtagtttcatagtttt

SEQ ID NO: 32870 - DNA, 80 bp, synthetic construct
  misc_feature 1..80: note = Artificially Synthesized Probe
  source 1..80: mol_type = other DNA
tttgttttgaagtaaaacctgcaaaataacaggacagggtggaagggagatgggatcccctctttatgaagaagcagcag

SEQ ID NO: 32871 - DNA, 80 bp, synthetic construct
  misc_feature 1..80: note = Artificially Synthesized Probe
  source 1..80: mol_type = other DNA
atgaccattactgttccttctacttcaaaataagcaaattatcctacagattcagagctggtacaggtgtgctgtcaagc

SEQ ID NO: 32872 - DNA, 80 bp, synthetic construct
  misc_feature 1..80: note = Artificially Synthesized Probe
  source 1..80: mol_type = other DNA
cttatgactggggaaatgacgctgataatatgaaacattacaatcaggtgagctatttacagtaaccccagcatgctgat

SEQ ID NO: 32873 - DNA, 80 bp, synthetic construct
  misc_feature 1..80: note = Artificially Synthesized Probe
  source 1..80: mol_type = other DNA
gacatgaaacagtaaaggaccctcattttggactttacatatgtctgttttcttccattattttgaataaacatgctata

SEQ ID NO: 32874 - DNA, 80 bp, synthetic construct
  misc_feature 1..80: note = Artificially Synthesized Probe
  source 1..80: mol_type = other DNA
tttgtgattgttccttttgtcccaggcactggctactccaccttccacctctctgaaatcattagcattccccaaggatt

SEQ ID NO: 32875 - DNA, 80 bp, synthetic construct
  misc_feature 1..80: note = Artificially Synthesized Probe
  source 1..80: mol_type = other DNA
tggggcctcgatgcccctcaacggatgtacagtgaaatcatagctttaatgaaggcatattcctaaatgcaatgcattta

SEQ ID NO: 32876 - DNA, 80 bp, synthetic construct
  misc_feature 1..80: note = Artificially Synthesized Probe
  source 1..80: mol_type = other DNA
atgagaagccaccaaaatattttacctaatggaaacctgattgccgcatttttgtaaccaccactttggctgctacatag

SEQ ID NO: 32877 - DNA, 80 bp, synthetic construct
  misc_feature 1..80: note = Artificially Synthesized Probe
  source 1..80: mol_type = other DNA
gaagtcattgtcaaaggctgctaatgcagtaaaggtgtgcctaactttcatcacatccagcatgggaaattgtggctttt

SEQ ID NO: 32878 - DNA, 80 bp, synthetic construct
  misc_feature 1..80: note = Artificially Synthesized Probe
  source 1..80: mol_type = other DNA
ataagggaataaagttctttcgtgggtgacatttagcctcattgtggagaggaatgtaacttttgttaaaataatatttt

SEQ ID NO: 32879 - DNA, 80 bp, synthetic construct
  misc_feature 1..80: note = Artificially Synthesized Probe
  source 1..80: mol_type = other DNA
ctagtattttcatactattactatttcaagatctttgatggtgggatgtccagataaaatccccactgtagtttgcagtg

SEQ ID NO: 32880 - DNA, 80 bp, synthetic construct
  misc_feature 1..80: note = Artificially Synthesized Probe
  source 1..80: mol_type = other DNA
cccacatccattagggttttatcaacaaccccatctctctcatgttcaaaaactgaaaccaaaacccactggtttacttc

SEQ ID NO: 32881 - DNA, 80 bp, synthetic construct
  misc_feature 1..80: note = Artificially Synthesized Probe
  source 1..80: mol_type = other DNA
ttcttcctcatacaaattcctattaggaaattctcagaaataaactaccatctttcacattctaacggtgggtagaggaa

SEQ ID NO: 32882 - DNA, 80 bp, synthetic construct
  misc_feature 1..80: note = Artificially Synthesized Probe
  source 1..80: mol_type = other DNA
ttgattagaaaatcttacctgtcgggaacactttgtttcacgaagggcttttaggcttccattccagtgcaatagttgga

SEQ ID NO: 32883 - DNA, 80 bp, synthetic construct
  misc_feature 1..80: note = Artificially Synthesized Probe
  source 1..80: mol_type = other DNA
tctagattgccgtgctgaaactaagctgtttatctgagcttcctagaaatcaggacaaagagagagataacagccaaatc

SEQ ID NO: 32884 - DNA, 80 bp, synthetic construct
  misc_feature 1..80: note = Artificially Synthesized Probe
  source 1..80: mol_type = other DNA
cacagacacctcagtaaaagcaaaaccacttgtgtctgctaattaaaacacacatgaataccagctgagctgctccttct

SEQ ID NO: 32885 - DNA, 80 bp, synthetic construct
  misc_feature 1..80: note = Artificially Synthesized Probe
  source 1..80: mol_type = other DNA
tgacccccacaaccctaaatctttatgtaaagttgagaactcagacacatatactggatttattttgtggcttcctatag

SEQ ID NO: 32886 - DNA, 80 bp, synthetic construct
  misc_feature 1..80: note = Artificially Synthesized Probe
  source 1..80: mol_type = other DNA
tcataagaccaaattcactctcttcacattttcccaaaactattagctcttggctcaactccaggaaatctttgcatgcc

SEQ ID NO: 32887 - DNA, 80 bp, synthetic construct
  misc_feature 1..80: note = Artificially Synthesized Probe
  source 1..80: mol_type = other DNA
actgggcctggcaaattatctagctggtcctgaccagcggagtaaatttaatatagaacgaagaatcaagctgtgtgttt

SEQ ID NO: 32888 - DNA, 80 bp, synthetic construct
  misc_feature 1..80: note = Artificially Synthesized Probe
  source 1..80: mol_type = other DNA
accacacagaaaacacatagcctatgcaaagcaattaaactattactaaaagaaggttgagtagagcctttcatagtact

SEQ ID NO: 32889 - DNA, 80 bp, synthetic construct
  misc_feature 1..80: note = Artificially Synthesized Probe
  source 1..80: mol_type = other DNA
cttaaaggatactttgttgcttcctaaccaagacaggctacgtcaaaggtcagtaagaccttggccacttaaggataaaa

SEQ ID NO: 32890 - DNA, 80 bp, synthetic construct
  misc_feature 1..80: note = Artificially Synthesized Probe
  source 1..80: mol_type = other DNA
tctgattcctaccagcattgcatgtttatggatgttcaactgcactggagttaagttttttgaagggaagcacatttcat

SEQ ID NO: 32891 - DNA, 80 bp, synthetic construct
  misc_feature 1..80: note = Artificially Synthesized Probe
  source 1..80: mol_type = other DNA
ctaactgttatatactcgctgatagaataattttccaaaagaagacatttctgtacgattgcacagggttttggtggtgg

SEQ ID NO: 32892 - DNA, 80 bp, synthetic construct
  misc_feature 1..80: note = Artificially Synthesized Probe
  source 1..80: mol_type = other DNA
aagaagatttatgaggggaaaagggtcacatctagtctgatagtgtttccttcatcatcatcagcttcgccagaatgaca

SEQ ID NO: 32893 - DNA, 80 bp, synthetic construct
  misc_feature 1..80: note = Artificially Synthesized Probe
  source 1..80: mol_type = other DNA
cactgtatgcgttctcaggccctaaaagaatcaacactcctcaataagtaaacattcacttaaacatatccaggtggatc

SEQ ID NO: 32894 - DNA, 80 bp, synthetic construct
  misc_feature 1..80: note = Artificially Synthesized Probe
  source 1..80: mol_type = other DNA
tatgagaacaggccagccagacatttttatctccaggttagtacaagggtgctgctgtcaatatctattgcttttgcatt

SEQ ID NO: 32895 - DNA, 80 bp, synthetic construct
  misc_feature 1..80: note = Artificially Synthesized Probe
  source 1..80: mol_type = other DNA
catgattctcagaatcagtagttcttggtgattgatgggaaagaaaaggaaaaatagcaaataccacgcttcattttaca

SEQ ID NO: 32896 - DNA, 80 bp, synthetic construct
  misc_feature 1..80: note = Artificially Synthesized Probe
  source 1..80: mol_type = other DNA
cacttaggttggttccatatttttgcaattgcaaattgtgctgctataaacatgagtgtgcacgtgtctttttcatataa

SEQ ID NO: 32897 - DNA, 80 bp, synthetic construct
  misc_feature 1..80: note = Artificially Synthesized Probe
  source 1..80: mol_type = other DNA
gaaattgcaggcataagccacagtgctgggcccaaagagtgattttctatatagctgttgaatgaagaatggagctaaag

SEQ ID NO: 32898 - DNA, 80 bp, synthetic construct
  misc_feature 1..80: note = Artificially Synthesized Probe
  source 1..80: mol_type = other DNA
agattcagatccaggcactcttcagaaacaacttctatctaaataatagcaatttaaaccatcttttatggagagagaga

SEQ ID NO: 32899 - DNA, 80 bp, synthetic construct
  misc_feature 1..80: note = Artificially Synthesized Probe
  source 1..80: mol_type = other DNA
cgaaagtgcagagctgggatatttaagtcaagattttactaaagtcagctgtgaatttctcaggcatgtggagccacatg

SEQ ID NO: 32900 - DNA, 80 bp, synthetic construct
  misc_feature 1..80: note = Artificially Synthesized Probe
  source 1..80: mol_type = other DNA
tattttgcaggtgaggaaatagaggcctaaagaggttatacatcccaaggtcatgcaccttaagatgtgaacaaaacaag

SEQ ID NO: 32901 - DNA, 80 bp, synthetic construct
  misc_feature 1..80: note = Artificially Synthesized Probe
  source 1..80: mol_type = other DNA
atatgatggtggggtctgcatataataagatttgcgggtgattctgacatgtggacccaggacaactcttagaggagtgt

SEQ ID NO: 32902 - DNA, 80 bp, synthetic construct
  misc_feature 1..80: note = Artificially Synthesized Probe
  source 1..80: mol_type = other DNA
tactgattatagaaccatcttctggccaagctgaagcaatttagacatgaaacagtaactttcctggtagccctcatttg

SEQ ID NO: 32903 - DNA, 80 bp, synthetic construct
  misc_feature 1..80: note = Artificially Synthesized Probe
  source 1..80: mol_type = other DNA
catgcacatggtgggtcagaatgttatttttataatataaaccacctggccttctcctcgtttacctctgccgcaatgct

SEQ ID NO: 32904 - DNA, 80 bp, synthetic construct
  misc_feature 1..80: note = Artificially Synthesized Probe
  source 1..80: mol_type = other DNA
tccctatttgggatgtggaatgtcaaggccaggccttatttaacgctcagcaaaaagagcattacaattccattgagtca

SEQ ID NO: 32905 - DNA, 80 bp, synthetic construct
  misc_feature 1..80: note = Artificially Synthesized Probe
  source 1..80: mol_type = other DNA
aattcaagtcattccagcaggctatatgtggaagaccacgtcactgacttgaaagcaaaacttgaatcacaaacccttta

SEQ ID NO: 32906 - DNA, 80 bp, synthetic construct
  misc_feature 1..80: note = Artificially Synthesized Probe
  source 1..80: mol_type = other DNA
tggctcagtaagaaggctactgctggcataatggtttctccatgtttcagcacatggtcttggcattaataatccatcgt

SEQ ID NO: 32907 - DNA, 80 bp, synthetic construct
  misc_feature 1..80: note = Artificially Synthesized Probe
  source 1..80: mol_type = other DNA
tatcagctgattttactgttactgacttttccttcctagcccactatcttgcagatttaggtgaatgatcttagctgact

SEQ ID NO: 32908 - DNA, 80 bp, synthetic construct
  misc_feature 1..80: note = Artificially Synthesized Probe
  source 1..80: mol_type = other DNA
ggagctaatgccccctgaagtttccctaaagctacgtatatgttcaatctaattttaaaaacagatagtgtacatatgca

SEQ ID NO: 32909 - DNA, 80 bp, synthetic construct
  misc_feature 1..80: note = Artificially Synthesized Probe
  source 1..80: mol_type = other DNA
tctgaggcttctatacccacattcaaatcatcctcctcagtcaattcactttcatttaccagtggtaaaaacacactgct

SEQ ID NO: 32910 - DNA, 80 bp, synthetic construct
  misc_feature 1..80: note = Artificially Synthesized Probe
  source 1..80: mol_type = other DNA
gtcacatctctcggtttccataaatcccctcttctggttctttgtctctttctgggcaatgggctttttagagaaatctt

SEQ ID NO: 32911 - DNA, 80 bp, synthetic construct
  misc_feature 1..80: note = Artificially Synthesized Probe
  source 1..80: mol_type = other DNA
gacttcccagaggcagcataggtttgtaggtctgtttattaaattatacccttccctcactcagtgaaggatttgaaacc

SEQ ID NO: 32912 - DNA, 80 bp, synthetic construct
  misc_feature 1..80: note = Artificially Synthesized Probe
  source 1..80: mol_type = other DNA
gctttcccaaaattcctgtaacattgacacaacgttcactgaaaaagacaagaaacaccatcagttattaaggatggaca

SEQ ID NO: 32913 - DNA, 80 bp, synthetic construct
  misc_feature 1..80: note = Artificially Synthesized Probe
  source 1..80: mol_type = other DNA
ggtgggaatttggccatagccaagccatttagggacaatgaatgtgttgaaaatgttgaaagtttcctgttttcagtggg

SEQ ID NO: 32914 - DNA, 80 bp, synthetic construct
  misc_feature 1..80: note = Artificially Synthesized Probe
  source 1..80: mol_type = other DNA
atgttaaaagtagtgaggggatacttgagttaatcaataaaatacatattgaatggtcaagttgagaattggtcattaca

SEQ ID NO: 32915 - DNA, 80 bp, synthetic construct
  misc_feature 1..80: note = Artificially Synthesized Probe
  source 1..80: mol_type = other DNA
atacagacacacaatccatctttctatctctatctattcttgtcgactcaaaaaccagacaaatgaagtgcagagggaag

SEQ ID NO: 32916 - DNA, 80 bp, synthetic construct
  misc_feature 1..80: note = Artificially Synthesized Probe
  source 1..80: mol_type = other DNA
tacttgacttcttagctgtgtttgataaagctgataactttcttctagaaaccttgtctccctaggcttttcctcctcag

SEQ ID NO: 32917 - DNA, 80 bp, synthetic construct
  misc_feature 1..80: note = Artificially Synthesized Probe
  source 1..80: mol_type = other DNA
gatgccttgctgtaggaagaagtgaccattcctatcctcctaatgtacctattatatgcattttcccatttcatccttac

SEQ ID NO: 32918 - DNA, 80 bp, synthetic construct
  misc_feature 1..80: note = Artificially Synthesized Probe
  source 1..80: mol_type = other DNA
agtttagtaaagttctttttgaaaagtttctactctctcccagtggacactaaagggaagggactttatccacagccagg

SEQ ID NO: 32919 - DNA, 80 bp, synthetic construct
  misc_feature 1..80: note = Artificially Synthesized Probe
  source 1..80: mol_type = other DNA
aagtctcttgtaagtgaggttttcattttccccttcctgaagcttcctttcttttattataaaggtcagcattgaggctt

SEQ ID NO: 32920 - DNA, 80 bp, synthetic construct
  misc_feature 1..80: note = Artificially Synthesized Probe
  source 1..80: mol_type = other DNA
ctagtgcttaggaaactcctgaacagggataataagtctgtttgtcttggatgccaacacgaattgatttatgttgactg

SEQ ID NO: 32921 - DNA, 80 bp, synthetic construct
  misc_feature 1..80: note = Artificially Synthesized Probe
  source 1..80: mol_type = other DNA
tgattaagcaaaagagtgttccttctgcagcctggaaggagatgaagccccttcagagaaggacatcagtaattggacac

SEQ ID NO: 32922 - DNA, 80 bp, synthetic construct
  misc_feature 1..80: note = Artificially Synthesized Probe
  source 1..80: mol_type = other DNA
gggtagaatttctcttgtcgaaaacaaagacaaattggaaaggctgccatttaaggataaatcattaagaggctttcaag

SEQ ID NO: 32923 - DNA, 80 bp, synthetic construct
  misc_feature 1..80: note = Artificially Synthesized Probe
  source 1..80: mol_type = other DNA
gctgtctagttgtttctaactatactcagcctttgccaagttttggccaggctaatggaatcttgtggacacacagggta

SEQ ID NO: 32924 - DNA, 80 bp, synthetic construct
  misc_feature 1..80: note = Artificially Synthesized Probe
  source 1..80: mol_type = other DNA
aagtgtaaatgtggctttgtgtaatgcatcttccttccctggaaacagtcattataagaatgctcaagatcctgccacag

SEQ ID NO: 32925 - DNA, 80 bp, synthetic construct
  misc_feature 1..80: note = Artificially Synthesized Probe
  source 1..80: mol_type = other DNA
aaatgatggtttctcacagctgcttaacgggatgagatcaaaatagggatcaactgattatcatcgcaggaggaaaaaaa

SEQ ID NO: 32926 - DNA, 80 bp, synthetic construct
  misc_feature 1..80: note = Artificially Synthesized Probe
  source 1..80: mol_type = other DNA
ataggcttcagtcaaacagacatccatagtttagatgctaaaattagcagagttcaaattactgtaattaagatgcactc

SEQ ID NO: 32927 - DNA, 80 bp, synthetic construct
  misc_feature 1..80: note = Artificially Synthesized Probe
  source 1..80: mol_type = other DNA
tgattatttaatgggctccctctatgctcctggtagagttcctttttctcccctctgttttcctaacagatataagtcga

SEQ ID NO: 32928 - DNA, 80 bp, synthetic construct
  misc_feature 1..80: note = Artificially Synthesized Probe
  source 1..80: mol_type = other DNA
aaagtacgcaaggaattgtcaaacagtggcaaatgaatagtaagttaacacacttcttcaaaagagtggacaggggctgc

SEQ ID NO: 32929 - DNA, 80 bp, synthetic construct
  misc_feature 1..80: note = Artificially Synthesized Probe
  source 1..80: mol_type = other DNA
cttgtaggaaagtaaggtagcaatttttcttaaggaattggcagtgatgtgctcaagtgctcagctctttccttctggca

SEQ ID NO: 32930 - DNA, 80 bp, synthetic construct
  misc_feature 1..80: note = Artificially Synthesized Probe
  source 1..80: mol_type = other DNA
ctccccttttcgcttaaaaaacataacaaacctgaatagactccaggctagagtagtggagagagtgatttttattagat

SEQ ID NO: 32931 - DNA, 80 bp, synthetic construct
  misc_feature 1..80: note = Artificially Synthesized Probe
  source 1..80: mol_type = other DNA
cagctttgctttacttaaaaagcatcagaaaaagttcattaagtcttaggcaggtcttggattgtagaagagacttctaa

SEQ ID NO: 32932 - DNA, 80 bp, synthetic construct
  misc_feature 1..80: note = Artificially Synthesized Probe
  source 1..80: mol_type = other DNA
gagtaagctggtaagtggtataataggaatagtagaagaatatgccatagctatggctcaagaataggaataagaaaaat

SEQ ID NO: 32933 - DNA, 80 bp, synthetic construct
  misc_feature 1..80: note = Artificially Synthesized Probe
  source 1..80: mol_type = other DNA
ccctgagcacaggtagacccccagcagaccccgggcagggcaactgttccagtcggcaccctcagcagtgaacagcgcag

SEQ ID NO: 32934 - DNA, 80 bp, synthetic construct
  misc_feature 1..80: note = Artificially Synthesized Probe
  source 1..80: mol_type = other DNA
ctgggctgctgtcattatttggggcttctggtgacctgcacacagctgtgctctgggggctgggggtggagaccttgggc

SEQ ID NO: 32935 - DNA, 80 bp, synthetic construct
  misc_feature 1..80: note = Artificially Synthesized Probe
  source 1..80: mol_type = other DNA
ccctccccgaccttcggcctccttgtgtgatttcaagaacgtatgatttcaagaatgagtggaaccctgcggcacgtacc

SEQ ID NO: 32936 - DNA, 80 bp, synthetic construct
  misc_feature 1..80: note = Artificially Synthesized Probe
  source 1..80: mol_type = other DNA
gatgtcacgggacgggtgtgagtggtgtcacgggacgggtgtgagtggtgtctcgggacgggtgtgcagtgatgtctcgg

SEQ ID NO: 32937 - DNA, 80 bp, synthetic construct; identical to SEQ ID NO: 32936
  misc_feature 1..80: note = Artificially Synthesized Probe
  source 1..80: mol_type = other DNA

SEQ ID NO: 32938 - DNA, 80 bp, synthetic construct
  misc_feature 1..80: note = Artificially Synthesized Probe
  source 1..80: mol_type = other DNA
ttgcttctctaatgacaggcatttctcctgagcttatctgtcatctgtgcaccttctttggtgaaacgtctctgtgctca

SEQ ID NO: 32939 - DNA, 80 bp, synthetic construct
  misc_feature 1..80: note = Artificially Synthesized Probe
  source 1..80: mol_type = other DNA
gtcgaagattttgtttttgtccatggaattgcttttgcgcttttgtaaaaaaaactcatccgggcatgtttgtttgggtc

SEQ ID NO: 32940 - DNA, 80 bp, synthetic construct
  misc_feature 1..80: note = Artificially Synthesized Probe
  source 1..80: mol_type = other DNA
ttttggtggataccttgggatttcctacaaagacaacggcgtcatctgtaaacaggcagtttcgtttcttcctttgtgat

SEQ ID NO: 32941 - DNA, 80 bp, synthetic construct
  misc_feature 1..80: note = Artificially Synthesized Probe
  source 1..80: mol_type = other DNA
cctgagcccaggagtttgggaccagccagggcaccatggcaagatcctgtctctacaaaaactaaaaaaattagtgaggc

SEQ ID NO: 32942 - DNA, 80 bp, synthetic construct
  misc_feature 1..80: note = Artificially Synthesized Probe
  source 1..80: mol_type = other DNA
tctcaggtctcttttctaatgtatgcatttggtgctttctctctcatcactagtttaactacatcccagaaaatgtgaca

SEQ ID NO: 32943 - DNA, 80 bp, synthetic construct
  misc_feature 1..80: note = Artificially Synthesized Probe
  source 1..80: mol_type = other DNA
cattgaatatacagtcggtcattttacttcttcccatctgttctgtttctgatttctttgtttttcccaacctgctttcc

SEQ ID NO: 32944 - DNA, 80 bp, synthetic construct
  misc_feature 1..80: note = Artificially Synthesized Probe
  source 1..80: mol_type = other DNA
ccgtctatgtcctctcacttgttcccactgggtactttctatgtttaagtttattgattctttcctctgtcctcaccatt

SEQ ID NO: 32945 - DNA, 80 bp, synthetic construct
  misc_feature 1..80: note = Artificially Synthesized Probe
  source 1..80: mol_type = other DNA
ttttatgtaaatttcctgtcttgctaggctgctcttttctggccctttagtcagagagagcagatttttgttgaggtgtt

SEQ ID NO: 32946 - DNA, 80 bp, synthetic construct
  misc_feature 1..80: note = Artificially Synthesized Probe
  source 1..80: mol_type = other DNA
ctccttggctggggtctccaggcagctgtgagcaactccagagggtgcagctgtcccagctcccgagtgttcttggaggg

SEQ ID NO: 32947 - DNA, 80 bp, synthetic construct
  misc_feature 1..80: note = Artificially Synthesized Probe
  source 1..80: mol_type = other DNA
cacctcaacaaagctgtgagccggggtcaccctgcccagagcagctgtcctgggctcctctcaccacggctggtttggtt

SEQ ID NO: 32948 - DNA, 80 bp, synthetic construct
  misc_feature 1..80: note = Artificially Synthesized Probe
  source 1..80: mol_type = other DNA
cgtagatacagggtctcgctatggcacccgggctgggattcctggcatgagacactacctggcagacccggggggacggt

SEQ ID NO: 32949 - DNA, 80 bp, synthetic construct
  misc_feature 1..80: note = Artificially Synthesized Probe
  source 1..80: mol_type = other DNA
tcagcaagttgaggaccacgggcacgctgagccaggccagcaggacgcccagcgagacgttggctgcacgccgcaccacg

SEQ ID NO: 32950 - DNA, 80 bp, synthetic construct
  misc_feature 1..80: note = Artificially Synthesized Probe
  source 1..80: mol_type = other DNA
cagatgcctcagaggtgccttccggcaggtgcttccagaacattcctcccatgactgcacatttctgtgcaggttctgtc

SEQ ID NO: 32951 - DNA, 80 bp, synthetic construct
  misc_feature 1..80: note = Artificially Synthesized Probe
  source 1..80: mol_type = other DNA
tagcttttctggttctgagccccaaaacagttatttcttattctccactgtctacaaggttactaaacccctgtgccaaa

SEQ ID NO: 32952 - DNA, 80 bp, synthetic construct
  misc_feature 1..80: note = Artificially Synthesized Probe
  source 1..80: mol_type = other DNA
gaggacacccctgcgctcgcggggaccctctgctgaggaaatgcattgtgttccaggtgggcactctggtgggcgtgaac

SEQ ID NO: 32953 - DNA, 80 bp, synthetic construct
  misc_feature 1..80: note = Artificially Synthesized Probe
  source 1..80: mol_type = other DNA
tgtgtaaactgcgtgggaggagggaggctgctcatgccgcaactccccaacggaaggatcacgggaaccaggacaggctc

SEQ ID NO: 32954 - DNA, 80 bp, synthetic construct
  misc_feature 1..80: note = Artificially Synthesized Probe
  source 1..80: mol_type = other DNA
tcaagtgactcccactttctccatttacttaagtaactcagcaccttgcttttcatgagagcttctcccaggcagcatca

SEQ ID NO: 32955 - DNA, 80 bp, synthetic construct
  misc_feature 1..80: note = Artificially Synthesized Probe
  source 1..80: mol_type = other DNA
gtccgtttgtcggagctcacagaatgagcaacactgcgaatggctctcctgtcagccgggactttagttggcaacagttt

SEQ ID NO: 32956 - DNA, 80 bp, synthetic construct
  misc_feature 1..80: note = Artificially Synthesized Probe
  source 1..80: mol_type = other DNA
taatactatgactttttttgccaaaagatttgaaaacagatgaacaaattcccagggaaatgttcaccacaaaaactgcc

SEQ ID NO: 32957 - DNA, 80 bp, synthetic construct
  misc_feature 1..80: note = Artificially Synthesized Probe
  source 1..80: mol_type = other DNA
cacacttagccaccaagaggaggaagtgtgacttaaaagggcaccatttacaacatcaacaaaaagaagtcacctcagag

SEQ ID NO: 32958 - DNA, 80 bp, synthetic construct
  misc_feature 1..80: note = Artificially Synthesized Probe
  source 1..80: mol_type = other DNA
ttttcctggctgtatgttacacctccattgaaacaatcgagagagagaaccacctttaaaatccccaccacattttcctt

SEQ ID NO: 32959 - DNA, 80 bp, synthetic construct
  misc_feature 1..80: note = Artificially Synthesized Probe
  source 1..80: mol_type = other DNA
taaaatctttaccatctaaaagcaaagaatacacaccccagctgaaggagagacgacacctgtaaaccccgtgcccaact

SEQ ID NO: 32960 - DNA, 80 bp, synthetic construct
  misc_feature 1..80: note = Artificially Synthesized Probe
  source 1..80: mol_type = other DNA
tccatcaatcaagtcagagtggttgtgcagacttgtctggagtgagaacaccccactggcaaatggggcccaggccccca

SEQ ID NO: 32961 - DNA, 80 bp, synthetic construct
  misc_feature 1..80: note = Artificially Synthesized Probe
  source 1..80: mol_type = other DNA
cctcaggaaacagcctgcaaacttctcctaaaaagacaattttaaataagaaaaacatgaggaaagagtgaaggggatga

SEQ ID NO: 32962 - DNA, 80 bp, synthetic construct
  misc_feature 1..80: note = Artificially Synthesized Probe
  source 1..80: mol_type = other DNA
gtgatgttctgaactttcaagctcagtccttgaagaggcagctccaaccccattaaaggtccctctactctgaggccacc

SEQ ID NO: 32963 - DNA, 80 bp, synthetic construct
  misc_feature 1..80: note = Artificially Synthesized Probe
  source 1..80: mol_type = other DNA
ccattttagagaaaccaaagtaaaagtctttctgagtctttgggtaacagatacttagtactgactcacacaccctccac

SEQ ID NO: 32964 - DNA, 80 bp, synthetic construct
  misc_feature 1..80: note = Artificially Synthesized Probe
  source 1..80: mol_type = other DNA
aaggtggccagtccagccttcttgtcactcattcacgtttttggtatgtttttccatcctttacctttcagcctgtgtgt

SEQ ID NO: 32965 - DNA, 80 bp, synthetic construct
  misc_feature 1..80: note = Artificially Synthesized Probe
  source 1..80: mol_type = other DNA
tctgaaagataactggactgtttaatcaaactgtttggcaataatagcaaaaggccaggagaggaaaatactgttgggag

SEQ ID NO: 32966 - DNA, 80 bp, synthetic construct
  misc_feature 1..80: note = Artificially Synthesized Probe
  source 1..80: mol_type = other DNA
cagaaagatatctggaaaatccccgtctctttggagcctttaaggaactttcattccagtgcatgttacgacatttgatt

SEQ ID NO: 32967 - DNA, 80 bp, synthetic construct
  misc_feature 1..80: note = Artificially Synthesized Probe
  source 1..80: mol_type = other DNA
cccccagcacacagagaaaacattctcttcttacaaaaaccaataaaacagccaggagacaaggcgagaagcctcggctc

SEQ ID NO: 32968 - DNA, 80 bp, synthetic construct
  misc_feature 1..80: note = Artificially Synthesized Probe
  source 1..80: mol_type = other DNA
ttcggcggacggaattgtagttctccacgacgtcggcccaagctcacagacaggcccggcctcggcccaagccttggggt

SEQ ID NO: 32969 - DNA, 80 bp, synthetic construct
  misc_feature 1..80: note = Artificially Synthesized Probe
  source 1..80: mol_type = other DNA
gtctcatgggagcgggcccttggcctgcggggtctgcactcaccctgggtagaggtcgtcagaactgagttagctgcagg

SEQ ID NO: 32970 - DNA, 80 bp, synthetic construct
  misc_feature 1..80: note = Artificially Synthesized Probe
  source 1..80: mol_type = other DNA
tggagagaggattcacgcagggccctgggctcgcagttgacaccctgacttcctgaaaccttcaccagtgcctcgtcatc

SEQ ID NO: 32971 - DNA, 80 bp, synthetic construct
  misc_feature 1..80: note = Artificially Synthesized Probe
  source 1..80: mol_type = other DNA
caccgtctcgggccatgtctgaactggtgttgacggctgacacagagcactcctcacaaacagcacagcagagagctctg

SEQ ID NO: 32972 - DNA, 80 bp, synthetic construct
  misc_feature 1..80: note = Artificially Synthesized Probe
  source 1..80: mol_type = other DNA
accatccagccaaagagctgagagtgtttactttctggtatttcacagaccgtcagctgaacctgctctcggacaaagag

SEQ ID NO: 32973 - DNA, 80 bp, synthetic construct
  misc_feature 1..80: note = Artificially Synthesized Probe
  source 1..80: mol_type = other DNA
cgtgtgaccacccaccccgtgaagggagggagaggacgtcctgaatcaatgggggtgaccctgtgatgcgacagctcacc

SEQ ID NO: 32974 - DNA, 80 bp, synthetic construct
  misc_feature 1..80: note = Artificially Synthesized Probe
  source 1..80: mol_type = other DNA
caaactgtcccctcttcccgctaaccctaaaatcaccgctgagacacagattcacatccagcgtctctcacacactggtg

SEQ ID NO: 32975 - DNA, 80 bp, synthetic construct
  misc_feature 1..80: note = Artificially Synthesized Probe
  source 1..80: mol_type = other DNA
gggacactttcgtaatggccgcctcccatcagcgagtgctcccctccgtgggcgtgctggggtgtcgggcctggctcctg

SEQ ID NO: 32976 - DNA, 80 bp, synthetic construct
  misc_feature 1..80: note = Artificially Synthesized Probe
  source 1..80: mol_type = other DNA
ggcaggggagtgggaccaagagcccagcccggccctacaggaacaccaagcaacaggcaccctgttcctcacgtcacgtg

SEQ ID NO: 32977 - DNA, 80 bp, synthetic construct
  misc_feature 1..80: note = Artificially Synthesized Probe
  source 1..80: mol_type = other DNA
cacggatttttttttctcccagagcaagtgtcaaaggaacaaagccttctttgaggcttttcagcccaaaattaattcta

SEQ ID NO: 32978 - DNA, 80 bp, synthetic construct
  misc_feature 1..80: note = Artificially Synthesized Probe
  source 1..80: mol_type = other DNA
tggggtcccgcctggctccgtggctttcctgtcttcctgggatggtttccgcactttcttgccctcatgcaagagagaac

SEQ ID NO: 32979 - DNA, 80 bp, synthetic construct
  misc_feature 1..80: note = Artificially Synthesized Probe
  source 1..80: mol_type = other DNA
gttgctgccctagtcaccataccatgtaaattcctcttgctgtgatcacggttttaacttagaaatcagacagagcagat

SEQ ID NO: 32980 - DNA, 80 bp, synthetic construct
  misc_feature 1..80: note = Artificially Synthesized Probe
  source 1..80: mol_type = other DNA
ctgaaagaagccccttttcctctgagctacccgagctgcccccacactgatgcaataaagcaattaggataattactctc

SEQ ID NO: 32981 - DNA, 80 bp, synthetic construct
  misc_feature 1..80: note = Artificially Synthesized Probe
  source 1..80: mol_type = other DNA
atcagaaggccctacctctgggtgctgtagccaggtgtgagccctccagagccatgagccacacaggtgtgagcctcgca

SEQ ID NO: 32982 - DNA, 80 bp, synthetic construct
  misc_feature 1..80: note = Artificially Synthesized Probe
  source 1..80: mol_type = other DNA
ttgatcacgtcctgagtgaaagagaccttcactttgacacgactgaaataaactcatttaaagcagaaaacctggccgaa

SEQ ID NO: 32983 - DNA, 80 bp, synthetic construct
  misc_feature 1..80: note = Artificially Synthesized Probe
  source 1..80: mol_type = other DNA
ggttttcatccggtgctcaacccagggaaggccgaggacagtctggctcagtgtggtgacctctgcactgcctgtgggga

SEQ ID NO: 32984 - DNA, 80 bp, synthetic construct
  misc_feature 1..80: note = Artificially Synthesized Probe
  source 1..80: mol_type = other DNA
gtggtggtgacctctgcactgcccacaggacgcctgtctctgctgtgtggtggtgacctttgcactgcccgtggggacgc

SEQ ID NO: 32985 - DNA, 80 bp, synthetic construct; identical to SEQ ID NO: 32984
  misc_feature 1..80: note = Artificially Synthesized Probe
  source 1..80: mol_type = other DNA

SEQ ID NO: 32986 - DNA, 80 bp, synthetic construct
  misc_feature 1..80: note = Artificially Synthesized Probe
  source 1..80: mol_type = other DNA
ctttatgtattccagatacaggttccttgtcaggcataatggcattgtgaatattttctcctgatctgtgccttgtcatt

SEQ ID NO: 32987 - DNA, 80 bp, synthetic construct
  misc_feature 1..80: note = Artificially Synthesized Probe
  source 1..80: mol_type = other DNA
cctcagcttgcgggcaacctatcgtggggacttgtgatcgtggagttaatactcaataaacccctttatatatatatttc

SEQ ID NO: 32988 - DNA, 80 bp, synthetic construct
  misc_feature 1..80: note = Artificially Synthesized Probe
  source 1..80: mol_type = other DNA
ccctcatcgggagggccacggggctccccctgagatggctctgaggaacccagtggttagggcatctgaaaccctccagg

SEQ ID NO: 32989 - DNA, 80 bp, synthetic construct
  misc_feature 1..80: note = Artificially Synthesized Probe
  source 1..80: mol_type = other DNA
gttccattaaaaggagccatggaaacatctctagtatttctaattaaatggaaaagtaaacccggagacagcatcccact

SEQ ID NO: 32990 - DNA, 80 bp, synthetic construct
  misc_feature 1..80: note = Artificially Synthesized Probe
  source 1..80: mol_type = other DNA
gaaccacgctatgcgctacagcgagccacgccacacagaaccacgctatgcgctatactgagccacgctacacagagcca

SEQ ID NO: 32991 - DNA, 80 bp, synthetic construct
  misc_feature 1..80: note = Artificially Synthesized Probe
  source 1..80: mol_type = other DNA
gtcgctcctgcttttaaagtgcacatcgtgtttttgtgaactcagaggtcacattactgaagctgaacagggggttggca

SEQ ID NO: 32992 - DNA, 80 bp, synthetic construct
  misc_feature 1..80: note = Artificially Synthesized Probe
  source 1..80: mol_type = other DNA
ccacacatttcacaaagaaatcatttcagaaactcagtttaatggaaacggtccttgagacagggctgatcttgctactg

SEQ ID NO: 32993 - DNA, 80 bp, synthetic construct
  misc_feature 1..80: note = Artificially Synthesized Probe
  source 1..80: mol_type = other DNA
gagaggacgggagagtgcagaggggaagcagacggaggctcgcggggagcttcctccaaccattggtgcaactcatctct

SEQ ID NO: 32994 - DNA, 80 bp, synthetic construct
  misc_feature 1..80: note = Artificially Synthesized Probe
  source 1..80: mol_type = other DNA
ctgggccttccgggagactgagcacaccctgtgaggagcctgacgcgttctgcctgggtaacggggcagtagctcttgtg

SEQ ID NO: 32995 - DNA, 80 bp, synthetic construct
  misc_feature 1..80: note = Artificially Synthesized Probe
  source 1..80: mol_type = other DNA
cctcggtttataatggaaatttaagatgaaatactcggaagagaaaatctgcagacaatggcgaatgccacatggcgcct

SEQ ID NO: 32996 - DNA, 80 bp, synthetic construct
  misc_feature 1..80: note = Artificially Synthesized Probe
  source 1..80: mol_type = other DNA
cttcctagatggcagggtcctgggctacttgttttaataccactgatttaaaaacagctaaagaaaaactcaccctagat

SEQ ID NO: 32997 - DNA, 80 bp, synthetic construct
  misc_feature 1..80: note = Artificially Synthesized Probe
  source 1..80: mol_type = other DNA
tccggcaaagggagggatgaggggccagtgggttgtgggctgagccgcctctgaccaaggaagaaacgtgatttaacaca

SEQ ID NO: 32998 - DNA, 80 bp, synthetic construct
  misc_feature 1..80: note = Artificially Synthesized Probe
  source 1..80: mol_type = other DNA
gaccccacttctccatgtctctggccacggggaaaacatcttttgtgaccatgtttgaaaaagcttcagagggacaagtg

SEQ ID NO: 32999 - DNA, 80 bp, synthetic construct
  misc_feature 1..80: note = Artificially Synthesized Probe
  source 1..80: mol_type = other DNA
tctgcacaggaacctccagaaccggcctgagcttcacagctgcgtctgcccgctggccatgtctcacgtcctgaggacgt

SEQ ID NO: 33000 - DNA, 80 bp, synthetic construct
  misc_feature 1..80: note = Artificially Synthesized Probe
  source 1..80: mol_type = other DNA
cgtggctgagaagcacattttaaatcacatttaactttggttcacttggatgtgaatttaagtgaccacgcggggccgac

SEQ ID NO: 33001 - DNA, 80 bp, synthetic construct
  misc_feature 1..80: note = Artificially Synthesized Probe
  source 1..80: mol_type = other DNA
cccacgtcctggaggtcttggggagaaagacaggaagtgttttcctagaaacactggtgtgcagagaggactgggtttca

SEQ ID NO: 33002 - DNA, 80 bp, synthetic construct
  misc_feature 1..80: note = Artificially Synthesized Probe
  source 1..80: mol_type = other DNA
ccgtggagccacaggagaggagaaagaacatggggcaacccccccaaatattggcaaaaattatccaaatttggtaaaaa

SEQ ID NO: 33003 - DNA, 80 bp, synthetic construct
  misc_feature 1..80: note = Artificially Synthesized Probe
  source 1..80: mol_type = other DNA
gccactccctataccttgatggggctcgtgcaagttctttatggagggaaagacgcagtgtgcggtgagttccagctaat

SEQ ID NO: 33004 - DNA, 80 bp, synthetic construct
  misc_feature 1..80: note = Artificially Synthesized Probe
  source 1..80: mol_type = other DNA
aacagctgagaaaaggcattactaacatggacgtgaagaaagtcgcctcggtttttgggtgtgatgtggtgttggtgtcg

SEQ ID NO: 33005 - DNA, 80 bp, synthetic construct
  misc_feature 1..80: note = Artificially Synthesized Probe
  source 1..80: mol_type = other DNA
tgtcttcaggtgtacgaggaggcatttccaaatgcaggaatgtgatgcctgggatctgcgtcatggcaaaacagcagggg

SEQ ID NO: 33006 - DNA, 80 bp, synthetic construct
  misc_feature 1..80: note = Artificially Synthesized Probe
  source 1..80: mol_type = other DNA
attatacttgtgacacagctatactgatgatgatgagaagaacattagggtgtgtgagggcaatccctgtcgttcataag

SEQ ID NO: 33007 - DNA, 80 bp, synthetic construct
  misc_feature 1..80: note = Artificially Synthesized Probe
  source 1..80: mol_type = other DNA
ccactaggaatgaagagcagatgccaccaaacatcctgcatccatacagttaaaaacaattaaaaagccacgttgaagat

SEQ ID NO: 33008 - DNA, 80 bp, synthetic construct
  misc_feature 1..80: note = Artificially Synthesized Probe
  source 1..80: mol_type = other DNA
tgcgcatgtgtgcacacgtttgcatataatctgcataggtgggtctgtatgcccatgtgtgcacgtttgcatatgatctg

SEQ ID NO: 33009 - DNA, 80 bp, synthetic construct
  misc_feature 1..80: note = Artificially Synthesized Probe
  source 1..80: mol_type = other DNA
gtgctggctgcatgcaggacccaagggaccctgcaggtcacagccaggatgtcagctgctccccgggtccccatttgcca

SEQ ID NO: 33010 - DNA, 80 bp, synthetic construct
  misc_feature 1..80: note = Artificially Synthesized Probe
  source 1..80: mol_type = other DNA
cagcactaatagggcttaataaaaacttccagttgggccagtgaacccctcattaagctgtttttaaagcacgaatttaa

SEQ ID NO: 33011 - DNA, 80 bp, synthetic construct
  misc_feature 1..80: note = Artificially Synthesized Probe
  source 1..80: mol_type = other DNA
cccaagtccatcaggctaaaatcacaaagaaattacaaaacgattttgggggcctaaaacactccaaaggccttgggaac

SEQ ID NO: 33012 - DNA, 80 bp, synthetic construct
  misc_feature 1..80: note = Artificially Synthesized Probe
  source 1..80: mol_type = other DNA
ctctatctaaactccagcagaaacacagacggcagaatggggtttaacaaatattgtggttttcctgcgtcctggaaagc

SEQ ID NO: 33013 - DNA, 80 bp, synthetic construct
  misc_feature 1..80: note = Artificially Synthesized Probe
  source 1..80: mol_type = other DNA
tagtcccagctaatcgggaggctgaggcgggaggatcgcctgagcccgggaggtcaaggagctgagattgcaccactgca

SEQ ID NO: 33014 - DNA, 80 bp, synthetic construct
  misc_feature 1..80: note = Artificially Synthesized Probe
  source 1..80: mol_type = other DNA
ctgaaccacctgatctccactaaagcccattgtgcaaaatgaagacaaggaatgtcactgagatggacacagacgcacac

SEQ ID NO: 33015 - DNA, 80 bp, synthetic construct
  misc_feature 1..80: note = Artificially Synthesized Probe
  source 1..80: mol_type = other DNA
aggacctaaagctttccctcctcataagaactgggaaaaaataatactgttgtgattgtacaattttaattaaaaaaatt

SEQ ID NO: 33016 - DNA, 80 bp, synthetic construct
  misc_feature 1..80: note = Artificially Synthesized Probe
  source 1..80: mol_type = other DNA
ggaacctgcctttcaaggtgattaaaatcaggaataaggttcctttgtatttacgttttaacagattctgatgttcttcc

SEQ ID NO: 33017 - DNA, 80 bp, synthetic construct
  misc_feature 1..80: note = Artificially Synthesized Probe
  source 1..80: mol_type = other DNA
aacgctcaactctcgcagagctttctctaaatgcatctcacttaccgaaagagtacctgaaaaacaaaagaagaaacgag

SEQ ID NO: 33018 - DNA, 80 bp, synthetic construct
  misc_feature 1..80: note = Artificially Synthesized Probe
  source 1..80: mol_type = other DNA
tgctgggatgacaggtgtgaactgccccagccagaatgttttcaacgtggtgctgatggcttcagagtccatgaatatgt

SEQ ID NO: 33019 - DNA, 80 bp, synthetic construct
  misc_feature 1..80: note = Artificially Synthesized Probe
  source 1..80: mol_type = other DNA
ttacccggtagaggtccacactatttataggtaaaagagtacgaagtctagatttgcttttcactccagaggaagaaggc

SEQ ID NO: 33020 - DNA, 80 bp, synthetic construct
  misc_feature 1..80: note = Artificially Synthesized Probe
  source 1..80: mol_type = other DNA
gcattcttctgtcacttcacctgctttgaattttgcatttcaaggctgcctgataaaagaatctttaaatagcaggtttt

SEQ ID NO: 33021 - DNA, 80 bp, synthetic construct
  misc_feature 1..80: note = Artificially Synthesized Probe
  source 1..80: mol_type = other DNA
ggtgaaggccaaacgtggatttatttacagaagttaccaaaaaaaaaataccacaaaaaaagaggggcgcctttgggtga

SEQ ID NO: 33022 - DNA, 80 bp, synthetic construct
  misc_feature 1..80: note = Artificially Synthesized Probe
  source 1..80: mol_type = other DNA
tgctcccattactgtgtgaaaaccgacctcagagtacatagtccattcactacaggtaagcaatttaaaacaggatgtaa

SEQ ID NO: 33023 - DNA, 80 bp, synthetic construct
  misc_feature 1..80: note = Artificially Synthesized Probe
  source 1..80: mol_type = other DNA
ataaggaccaggtaatgaaaattgtttaagaattaagtgaccagacagggaataaaacagggtgcgcagtctgagcccac

SEQ ID NO: 33024 - DNA, 80 bp, synthetic construct
  misc_feature 1..80: note = Artificially Synthesized Probe
  source 1..80: mol_type = other DNA
agctgatccctgcaggaatgaaaagaacactcttcttaggaaaaacacccggaagtactgcagggtaaagggattcatca

SEQ ID NO: 33025 - DNA, 80 bp, synthetic construct
  misc_feature 1..80: note = Artificially Synthesized Probe
  source 1..80: mol_type = other DNA
ttattttttgttttcagagtctcacctggtttttcgtcctgttcctctgttcctgccttcttactggaagcaaacatgtt

SEQ ID NO: 33026 - DNA, 80 bp, synthetic construct
  misc_feature 1..80: note = Artificially Synthesized Probe
  source 1..80: mol_type = other DNA
cacatgtatgttagaccacctggtgctatttgccccattctctgtgtcctctctctgtggggctccaatcacatgtatgt

SEQ ID NO: 33027 - DNA, 80 bp, synthetic construct
  misc_feature 1..80: note = Artificially Synthesized Probe
  source 1..80: mol_type = other DNA
ctctggtgatccaccctccttggcctctcaaagtgctgggattacaggcatgaactaccacacccagcctagaccttatt

SEQ ID NO: 33028 - DNA, 80 bp, synthetic construct
  misc_feature 1..80: note = Artificially Synthesized Probe
  source 1..80: mol_type = other DNA
taatgccttgccgcacaaatgcaagctgccctcaactctgatccctgcctcctgagcttggagacgccttgtgttctgct

SEQ ID NO: 33029 - DNA, 80 bp, synthetic construct
  misc_feature 1..80: note = Artificially Synthesized Probe
  source 1..80: mol_type = other DNA
gttcaagaccagcctgggcaacatagtgagacatccatctctacaaaaaataaaaatattagccaggtgtggtgctgggt

SEQ ID NO: 33030 - DNA, 80 bp, synthetic construct
  misc_feature 1..80: note = Artificially Synthesized Probe
  source 1..80: mol_type = other DNA
ggcagcggatgtagccacttgtgtgctttccgaattcactgtattgttgcaaatcccagaaacctcagatcccaactctg

SEQ ID NO: 33031 - DNA, 80 bp, synthetic construct
  misc_feature 1..80: note = Artificially Synthesized Probe
  source 1..80: mol_type = other DNA
tttaccatcaaatatgtctacgccttgtcaaatcccttcccatgcattaacacagagacagaggctgcagcccagccagg

SEQ ID NO: 33032 - DNA, 80 bp, synthetic construct
  misc_feature 1..80: note = Artificially Synthesized Probe
  source 1..80: mol_type = other DNA
ccaacgacagagtcagccaacgacagagtcagccaatgacagtcagccaacgacagagtcagccaacaacagagtcagag

SEQ ID NO: 33033 - DNA, 80 bp, synthetic construct; identical to SEQ ID NO: 33032
  misc_feature 1..80: note = Artificially Synthesized Probe
  source 1..80: mol_type = other DNA

SEQ ID NO: 33034 - DNA, 80 bp, synthetic construct
  misc_feature 1..80: note = Artificially Synthesized Probe
  source 1..80: mol_type = other DNA
caacgacagaatcagagacaacgacagagtcagccaacgacagagtcagagccaatgagagtcagagccaacgacagagt

SEQ ID NO: 33035 - DNA, 80 bp, synthetic construct
  misc_feature 1..80: note = Artificially Synthesized Probe
  source 1..80: mol_type = other DNA
gaaagactcagagccaatgacagagtcagagccaatgacagagtcagccaacgacagagtcagagccaacgacagagtca

SEQ ID NO: 33036 - DNA, 80 bp, synthetic construct
  misc_feature 1..80: note = Artificially Synthesized Probe
  source 1..80: mol_type = other DNA
catgggcgcctcggcaaagtcaggcatgtgtgcgtggaggggtcctggggcggagccacgttgtgggtgcccaaggcatc

SEQ ID NO: 33037 - DNA, 80 bp, synthetic construct
  misc_feature 1..80: note = Artificially Synthesized Probe
  source 1..80: mol_type = other DNA
accccaaaccagcctcctgcacgtccacacagacaccccaaaccagcctcctacatatccacacagacaccccaaaccag

SEQ ID NO: 33038 - DNA, 80 bp, synthetic construct
  misc_feature 1..80: note = Artificially Synthesized Probe
  source 1..80: mol_type = other DNA
ctggccgctctgccatggcctaagtaaaatgacaataccctcctgaaggaatttaagataaacgctcgtccagtctttcc

SEQ ID NO: 33039 - DNA, 80 bp, synthetic construct
  misc_feature 1..80: note = Artificially Synthesized Probe
  source 1..80: mol_type = other DNA
gtgcatacacgcatacacatctaagtgaactagacacgttacataaaatgcgtgcccgcagcagacgcggtgtgtgcatc

SEQ ID NO: 33040 - DNA, 80 bp, synthetic construct
  misc_feature 1..80: note = Artificially Synthesized Probe
  source 1..80: mol_type = other DNA
actcccagcacacgctgcagggcttgacacttactgcctataggtgagccacacttgccctctacgcagaccacaggtct

SEQ ID NO: 33041 - DNA, 80 bp, synthetic construct
  misc_feature 1..80: note = Artificially Synthesized Probe
  source 1..80: mol_type = other DNA
catctcaaaaaaaaaaaaaaaaagtagatttaagggtcgggcacggtggctcacgcctgtaattccagcactttgggagg

SEQ ID NO: 33042 - DNA, 80 bp, synthetic construct
  misc_feature 1..80: note = Artificially Synthesized Probe
  source 1..80: mol_type = other DNA
agaagagtctctgtaacaatcatgttggaacagatggatgtccacatgcaaaaagatggacctgaacacacttcacacct

SEQ ID NO: 33043 - DNA, 80 bp, synthetic construct
  misc_feature 1..80: note = Artificially Synthesized Probe
  source 1..80: mol_type = other DNA
tgtctcaaaaaaaaaaccaaaaaaacaaaacaaaaaaaacacgaacatggacagtgcccaatgctgcagaaggttcggga

SEQ ID NO: 33044 - DNA, 80 bp, synthetic construct
  misc_feature 1..80: note = Artificially Synthesized Probe
  source 1..80: mol_type = other DNA
ccacagcactgagcattacacgagatgaacttcaatgtgcacaaactattgggggaagacccgaccaggaggttggggga

SEQ ID NO: 33045 - DNA, 80 bp, synthetic construct
  misc_feature 1..80: note = Artificially Synthesized Probe
  source 1..80: mol_type = other DNA
acacagactcacggtgacagcacgggatcacgacccagacacagactcacggtgacaacactggatcacaacccagacac

SEQ ID NO: 33046 - DNA, 80 bp, synthetic construct
  misc_feature 1..80: note = Artificially Synthesized Probe
  source 1..80: mol_type = other DNA
acacagactcacggtgacagcacgggatcacgacccagacacagactcacggtgacagcacgggatcacgacccagacac

SEQ ID NO: 33047 - DNA, 80 bp, synthetic construct
  misc_feature 1..80: note = Artificially Synthesized Probe
  source 1..80: mol_type = other DNA
agagggaaaataaatgggcgtgggtccatagtgacaaaatcagtgaccacaaacaagtaagtaacaagatcttcctcaca

SEQ ID NO: 33048 - DNA, 80 bp, synthetic construct
  misc_feature 1..80: note = Artificially Synthesized Probe
  source 1..80: mol_type = other DNA
gcatgtctctgtacacgtgtgcacatgtacacatgtatgtgtgcgtgtgcagggatgcatgtgtgtatgtcctggcatgt

SEQ ID NO: 33049 - DNA, 80 bp, synthetic construct
  misc_feature 1..80: note = Artificially Synthesized Probe
  source 1..80: mol_type = other DNA
aaattgttgtaagattaaaacagtcatcccagaaatgccgttctctgttgatggttcttactggccgtggttaaattctg

SEQ ID NO: 33050 - DNA, 80 bp, synthetic construct
  misc_feature 1..80: note = Artificially Synthesized Probe
  source 1..80: mol_type = other DNA
gagatcccctagaggtcggattttcaacataatctcagtgagcccaggactccaatgtgacaatgtggaactggaaagac

SEQ ID NO: 33051 - DNA, 80 bp, synthetic construct
  misc_feature 1..80: note = Artificially Synthesized Probe
  source 1..80: mol_type = other DNA
ccctggtagagaccacctgctacgggtcagcacatttcactgagcaggagatgcccctagaagacaagggatagaggtat

SEQ ID NO: 33052 - DNA, 80 bp, synthetic construct
  misc_feature 1..80: note = Artificially Synthesized Probe
  source 1..80: mol_type = other DNA
attctgaggcagttaaaatgcattgtgtacatatactatgtgactctcatcaatagcaaaccaacgtcagttcagtccag

SEQ ID NO: 33053 - DNA, 80 bp, synthetic construct
  misc_feature 1..80: note = Artificially Synthesized Probe
  source 1..80: mol_type = other DNA
cggaaactcctgtcacataagcttttactcgtccagatttcagccattcctgggagtgacatctgtgctgaggggaagct

SEQ ID NO: 33054 - DNA, 80 bp, synthetic construct
  misc_feature 1..80: note = Artificially Synthesized Probe
  source 1..80: mol_type = other DNA
gaagaacgtgcatatgtcaaggagaaatgttcaatgctgggcaccaggcttaaaatatccgcttgacccagtggcttaaa

SEQ ID NO: 33055 - DNA, 80 bp, synthetic construct
  misc_feature 1..80: note = Artificially Synthesized Probe
  source 1..80: mol_type = other DNA
tcccacaggaaaccttgtagtgatgagcgcgtctcatcactttgcaccaggaggtggaaagtatcacacaaatgtcacac

SEQ ID NO: 33056 - DNA, 80 bp, synthetic construct
  misc_feature 1..80: note = Artificially Synthesized Probe
  source 1..80: mol_type = other DNA
ccagctcctgcctgcccttgggactggacttcaagctgtgggggaagagggggactcaggactcaggagggaagggctaa

SEQ ID NO: 33057 - DNA, 80 bp, synthetic construct
  misc_feature 1..80: note = Artificially Synthesized Probe
  source 1..80: mol_type = other DNA
cgtagcatacgtgtacatcttatggtttaattcatttttagtttccatttcttttctatgaaaccccccttaggagccca

SEQ ID NO: 33058 - DNA, 80 bp, synthetic construct
  misc_feature 1..80: note = Artificially Synthesized Probe
  source 1..80: mol_type = other DNA
cagatgaacctcagaacatcaagctcagtgggacaggacagacgcggaggtcatgagttgcgtgagcccatttacatgaa

SEQ ID NO: 33059 - DNA, 80 bp, synthetic construct
  misc_feature 1..80: note = Artificially Synthesized Probe
  source 1..80: mol_type = other DNA
tttacgctcaccttacttctttgtctatattaaggcgcatctagcagtttaaaaataacatttagatacaggtgtgtctt

SEQ ID NO: 33060 - DNA, 80 bp, synthetic construct
  misc_feature 1..80: note = Artificially Synthesized Probe
  source 1..80: mol_type = other DNA
tgttctccggttgcagggccctatgttaggaaacgaatgtgtaattttttttttttctctaggaatcatattctgcactg

SEQ ID NO: 33061 - DNA, 80 bp, synthetic construct
  misc_feature 1..80: note = Artificially Synthesized Probe
  source 1..80: mol_type = other DNA
tttcctttgtggcatgcttatttcaagcaccattttccctcctggttatacttgaaatggggctcggtgttgggaggttt

SEQ ID NO: 33062 - DNA, 80 bp, synthetic construct
  misc_feature 1..80: note = Artificially Synthesized Probe
  source 1..80: mol_type = other DNA
cagaaagcactgctcctgcaaggtgccaagaaagactcactgagtggttttccactgccctgtgagcgccaggaagctta

SEQ ID NO: 33063 - DNA, 80 bp, synthetic construct
  misc_feature 1..80: note = Artificially Synthesized Probe
  source 1..80: mol_type = other DNA
atcacacacacacaaacacacccacaccctgcacacatacaccacaccaaacacacacggacacacacacaccacacacc

SEQ ID NO: 33064 - DNA, 80 bp, synthetic construct
  misc_feature 1..80: note = Artificially Synthesized Probe
  source 1..80: mol_type = other DNA
tgcaggagatcagaagcttcagggctcagcttaaatgacaccaaagatgctttcccagaccatccttcctgaagtccccg

SEQ ID NO: 33065 - DNA, 80 bp, synthetic construct
  misc_feature 1..80: note = Artificially Synthesized Probe
  source 1..80: mol_type = other DNA
aacctcagtctcccttcctccaggggtgctggagttccccacctgtgtcccagggacttgaagcttccttggtggatggg

SEQ ID NO: 33066 - DNA, 80 bp, synthetic construct
  misc_feature 1..80: note = Artificially Synthesized Probe
  source 1..80: mol_type = other DNA
tgggggctttgagggcaccggcgcggtaggtcacccgggtttcgcgggccgcaagctcggagacgcgcgtgtcccgcgtt

SEQ ID NO: 33067 - DNA, 80 bp, synthetic construct
  misc_feature 1..80: note = Artificially Synthesized Probe
  source 1..80: mol_type = other DNA
ccggctcgagcttcccctcaggaataaactcagaggcagaacctaaaatcaaaatgtttattggagtgttgtacaaaaaa

SEQ ID NO: 33068 - DNA, 80 bp, synthetic construct
  misc_feature 1..80: note = Artificially Synthesized Probe
  source 1..80: mol_type = other DNA
cctgcaaggctgtcggcaaatcacagaccaactccaggatacagctttgctcctccagagccaaaatacataggatgtgg

SEQ ID NO: 33069 - DNA, 80 bp, synthetic construct
  misc_feature 1..80: note = Artificially Synthesized Probe
  source 1..80: mol_type = other DNA
gtctgagaaacatggtttcagcgagaaaatcacagataaaagcacagtatggatagacgcatgtgtatatataggcacag

SEQ ID NO: 33070 - DNA, 80 bp, synthetic construct
  misc_feature 1..80: note = Artificially Synthesized Probe
  source 1..80: mol_type = other DNA
gccaatgatataaaaatagttttcagtggctctgggtaaagaaaggtgtgtggatgaggagtgtgggttcacatcacgta

SEQ ID NO: 33071 - DNA, 80 bp, synthetic construct
  misc_feature 1..80: note = Artificially Synthesized Probe
  source 1..80: mol_type = other DNA
gcgttcagtccttccagcccgacgcaggcttatccagggtgatggtccccaggatacacaagaagagaccagggttcaca

SEQ ID NO: 33072 - DNA, 80 bp, synthetic construct
  misc_feature 1..80: note = Artificially Synthesized Probe
  source 1..80: mol_type = other DNA
cacccccatcagctaggtcactccattacccctgtgccccggtctttccagtcatcttgtcccctgcctcgcattggccg

SEQ ID NO: 33073 - DNA, 80 bp, synthetic construct
  misc_feature 1..80: note = Artificially Synthesized Probe
  source 1..80: mol_type = other DNA
aagccaccgctgccacccgtgcccgtgcccaggacgcttgggccgctgcccaagggctcctccacctccagccgcttccg

SEQ ID NO: 33074 - DNA, 80 bp, synthetic construct
  misc_feature 1..80: note = Artificially Synthesized Probe
  source 1..80: mol_type = other DNA
tcccgcatctccgtcatctcctgctccttggcgtccagcatcttccggaacttgtcccgctccccggccatggcctcctc

SEQ ID NO: 33075 - DNA, 80 bp, synthetic construct
  misc_feature 1..80: note = Artificially Synthesized Probe
  source 1..80: mol_type = other DNA
aggtggtggttgcacaaccctgtggagatcctgccaatgctgaactgtacactttaaaaaggtggacttaaaatagccag

SEQ ID NO: 33076 - DNA, 80 bp, synthetic construct
  misc_feature 1..80: note = Artificially Synthesized Probe
  source 1..80: mol_type = other DNA
aatcccagctactcgggaggctgggcccagtgtgggcaacagagcaagactccatctcaaaaacaaaacaaaacaaaaca

SEQ ID NO: 33077 - DNA, 80 bp, synthetic construct
  misc_feature 1..80: note = Artificially Synthesized Probe
  source 1..80: mol_type = other DNA
cagggtgggaacaccaagcttttagaaaggcaagaaatcaaaatagaccttccttgacactgaagagatatgttttggct

SEQ ID NO: 33078 - DNA, 80 bp, synthetic construct
  misc_feature 1..80: note = Artificially Synthesized Probe
  source 1..80: mol_type = other DNA
ctcctcgaacacactcttccggaagtccagctcctcctgcaggctctggcagcggttctccaggtccacacgcatcagcg

SEQ ID NO: 33079 - DNA, 80 bp, synthetic construct
  misc_feature 1..80: note = Artificially Synthesized Probe
  source 1..80: mol_type = other DNA
aactgctgacatttggggtggtcgagtgaggacatccagggttccgcagcgtcacaactgctgacatttggggtggtcct

SEQ ID NO: 33080 - DNA, 80 bp, synthetic construct
  misc_feature 1..80: note = Artificially Synthesized Probe
  source 1..80: mol_type = other DNA
ttcaaaagaccacctaggcatttgcccaagaaatgaaagtgacccatagctgaaagtgaccgtatgtctgtctaagtata

SEQ ID NO: 33081 - DNA, 80 bp, synthetic construct
  misc_feature 1..80: note = Artificially Synthesized Probe
  source 1..80: mol_type = other DNA
tccctgcctaggatccgtaataaatcttcaaacttgtttcctatcgctgtgctgaatttgcgccttctgtcagaagaacc

SEQ ID NO: 33082 - DNA, 80 bp, synthetic construct
  misc_feature 1..80: note = Artificially Synthesized Probe
  source 1..80: mol_type = other DNA
aggctctggcttgttaggtcctgcacgctgctcccagtgtttctctcattgtggggttttggagataaatttgttaggat

SEQ ID NO: 33083 - DNA, 80 bp, synthetic construct
  misc_feature 1..80: note = Artificially Synthesized Probe
  source 1..80: mol_type = other DNA
ctgggaattcctcaacacctagggcgggcactgtgtaccattttctttttttaatgttttaatttgaggtgaaattcaca

SEQ ID NO: 33084 - DNA, 80 bp, synthetic construct
  misc_feature 1..80: note = Artificially Synthesized Probe
  source 1..80: mol_type = other DNA
cagtgtttcattggcctcctggctcctctgaataaatattccttttgtcatcatcgttctgtttaaattgccgcccaacc

SEQ ID NO: 33085 - DNA, 80 bp, synthetic construct
  misc_feature 1..80: note = Artificially Synthesized Probe
  source 1..80: mol_type = other DNA
gcacgcagagagagaggatggcagcctggggacactgggacaccctgtgttgcccatctcacagacacagcaaagggagc

SEQ ID NO: 33086 - DNA, 80 bp, synthetic construct
  misc_feature 1..80: note = Artificially Synthesized Probe
  source 1..80: mol_type = other DNA
caccagcggcccccacctttcacccctcgatcacagcgatctgtagtcagagtccccaactccccaccccaccagccgcc

SEQ ID NO: 33087 - DNA, 80 bp, synthetic construct
  misc_feature 1..80: note = Artificially Synthesized Probe
  source 1..80: mol_type = other DNA
aggcttctagtggccttcctgcctcccctcctcccacagggccatgcactcagtgagtttaaaaatatgtggaagcaaac

SEQ ID NO: 33088 - DNA, 80 bp, synthetic construct
  misc_feature 1..80: note = Artificially Synthesized Probe
  source 1..80: mol_type = other DNA
gggacaggcttcttttagtggggatgaacgttctaaaattggacacattggtggtggcacagctgtggagatatgaaaac

SEQ ID NO: 33089 - DNA, 80 bp, synthetic construct
  misc_feature 1..80: note = Artificially Synthesized Probe
  source 1..80: mol_type = other DNA
caaaacagcagagtttccaacaaagacaagatcagcgccgggacacacaggagcccgttcaaggtgagaaaaaacagcaa

SEQ ID NO: 33090 - DNA, 80 bp, synthetic construct
  misc_feature 1..80: note = Artificially Synthesized Probe
  source 1..80: mol_type = other DNA
gtttgttcattgtagattttttgaattaattgatttttaaaagataatccattagggcccggtgcgctggtgcatgcctg

SEQ ID NO: 33091 - DNA, 80 bp, synthetic construct
  misc_feature 1..80: note = Artificially Synthesized Probe
  source 1..80: mol_type = other DNA
aatgtcacgtgagatagtggatggggtcttggggcaggaaaggacatcggggaaactgaggaagtctgaatacatgatgg

SEQ ID NO: 33092 - DNA, 80 bp, synthetic construct
  misc_feature 1..80: note = Artificially Synthesized Probe
  source 1..80: mol_type = other DNA
aaaacaaaaacgataaaggccaggggggaagatgaagagactttgtgacacaggcagattctatgcacttcacagttcca

SEQ ID NO: 33093 - DNA, 80 bp, synthetic construct
  misc_feature 1..80: note = Artificially Synthesized Probe
  source 1..80: mol_type = other DNA
atcctccttcaacaaatacccatctggccagcccccaccccaccctttcccaagccctccaacgatgcttgtatatggcg

SEQ ID NO: 33094 - DNA, 80 bp, synthetic construct
  misc_feature 1..80: note = Artificially Synthesized Probe
  source 1..80: mol_type = other DNA
ctggccaggtgagagaggccctgctgtccaggtgacctgcatgctcttaggcctgacaccccaggtccctcctcgttcag

SEQ ID NO: 33095 - DNA, 80 bp, synthetic construct
  misc_feature 1..80: note = Artificially Synthesized Probe
  source 1..80: mol_type = other DNA
agacacaggggcctgcccaaagccacactaattgaaaagcaggggactggccaggcacggcggctcacacctgtaatccc

SEQ ID NO: 33096 - DNA, 80 bp, synthetic construct
  misc_feature 1..80: note = Artificially Synthesized Probe
  source 1..80: mol_type = other DNA
taattcccaccccagtcaccaatctcttctggattcatcagggaactcgctaaagctccagggagaactgagaccacgtg

SEQ ID NO: 33097 - DNA, 80 bp, synthetic construct
  misc_feature 1..80: note = Artificially Synthesized Probe
  source 1..80: mol_type = other DNA
cctggccgagtagcacctttcactcagggactctccgaaacgcggcggagatccccgaggccggactgtccccgtctgca

SEQ ID NO: 33098 - DNA, 80 bp, synthetic construct
  misc_feature 1..80: note = Artificially Synthesized Probe
  source 1..80: mol_type = other DNA
agctgccaaccttttaatatgggatgccatccttctcttatccatatgtacattttcccagtaattcaaatcagaaagga

SEQ ID NO: 33099 - DNA, 80 bp, synthetic construct
  misc_feature 1..80: note = Artificially Synthesized Probe
  source 1..80: mol_type = other DNA
gtgactgcttaatgggcatgaggtttcctttggggatgagaaaaatgtcctggaaatatggtgacggttgcacaccattg

SEQ ID NO: 33100 - DNA, 80 bp, synthetic construct
  misc_feature 1..80: note = Artificially Synthesized Probe
  source 1..80: mol_type = other DNA
ttccccaaagcccttgactgcacttagatcattgtcttcggtgtcagaaaactgacaccgaatctggagtttacatgagc

SEQ ID NO: 33101 - DNA, 80 bp, synthetic construct
  misc_feature 1..80: note = Artificially Synthesized Probe
  source 1..80: mol_type = other DNA
tgtcattattaacatgtagaaagttgataagcaggcctgagttatgtatgtggctcctcctggtctagttggtgttctga

SEQ ID NO: 33102 - DNA, 80 bp, synthetic construct
  misc_feature 1..80: note = Artificially Synthesized Probe
  source 1..80: mol_type = other DNA
gtggtgatggtgatggtggtagtagtggtagtggtagtaatgatgatggtggtggtgatggtgatggtggtaatgatgtt

SEQ ID NO: 33103 - DNA, 80 bp, synthetic construct
  misc_feature 1..80: note = Artificially Synthesized Probe
  source 1..80: mol_type = other DNA
ttgtctgtaccaccctccaccttctctgagccccagcttcctcaatggtaaaataggaacaataatacctaactcacagt

SEQ ID NO: 33104 - DNA, 80 bp, synthetic construct
  misc_feature 1..80: note = Artificially Synthesized Probe
  source 1..80: mol_type = other DNA
gtagtacaggtgctgataccacatcatgcacaaaaatattccctctcttgctctcacccatcaaccaataccaaatgcca

SEQ ID NO: 33105 - DNA, 80 bp, synthetic construct
  misc_feature 1..80: note = Artificially Synthesized Probe
  source 1..80: mol_type = other DNA
ctccacttcctcctcgtgaatgttactaaaccgtggtggtaagaatgcagtaaaatgctagacatcaaatgaaagaggat

SEQ ID NO: 33106 - DNA, 80 bp, synthetic construct
  misc_feature 1..80: note = Artificially Synthesized Probe
  source 1..80: mol_type = other DNA
ccaaacctgcctctcctacaaatactgtttcttagctgattgtactgtcacctaggtccaaatagactaactttaagtga

SEQ ID NO: 33107 - DNA, 80 bp, synthetic construct
  misc_feature 1..80: note = Artificially Synthesized Probe
  source 1..80: mol_type = other DNA
gtaacagggtatctctttttccacgtgaggaaacgaatccttctgcctttttaaagagcacaactaacatgtggcagggc

SEQ ID NO: 33108 - DNA, 80 bp, synthetic construct
  misc_feature 1..80: note = Artificially Synthesized Probe
  source 1..80: mol_type = other DNA
cagcctcagatattgctctagagcaatgcaatacagattgatgcctctggtagtgaacagctctgtcctgcggtttatac

SEQ ID NO: 33109 - DNA, 80 bp, synthetic construct
  misc_feature 1..80: note = Artificially Synthesized Probe
  source 1..80: mol_type = other DNA
gtaggcagttgatagatcagaataatggtgtgagccacttggagccagattgcaacgaagaggaatagagataggaagtg

SEQ ID NO: 33110 - DNA, 80 bp, synthetic construct
  misc_feature 1..80: note = Artificially Synthesized Probe
  source 1..80: mol_type = other DNA
caagttagcaattgtgtcgtttaattcaggacgaattccaagcactagtttttcacatctcaaaggtgaaattaaatggt

SEQ ID NO: 33111 - DNA, 80 bp, synthetic construct
  misc_feature 1..80: note = Artificially Synthesized Probe
  source 1..80: mol_type = other DNA
atagttattaaactctttctccaaccagaggctctaactttctcaatcatgagtcaaacctgaatatcccaccaaccaca

SEQ ID NO: 33112 - DNA, 80 bp, synthetic construct
  misc_feature 1..80: note = Artificially Synthesized Probe
  source 1..80: mol_type = other DNA
cagtgtggctcccatgatcttcatcactgccctgtaccacctccccaggcaatctcaggatgctggtcttcagtggactt

SEQ ID NO: 33113 - DNA, 80 bp, synthetic construct
  misc_feature 1..80: note = Artificially Synthesized Probe
  source 1..80: mol_type = other DNA
ttctttctatgctgtaagccatcagtcatagtcaaaaggagttatgaggccacacccttaaccagggtgtggtgaccctg

SEQ ID NO: 33114 - DNA, 80 bp, synthetic construct
  misc_feature 1..80: note = Artificially Synthesized Probe
  source 1..80: mol_type = other DNA
cagctgggcagaagtacaggtcacagcctgcaacttgggattggcatctgcagtggggcagtcttgtaggactgagcctt

SEQ ID NO: 33115 - DNA, 80 bp, synthetic construct
  misc_feature 1..80: note = Artificially Synthesized Probe
  source 1..80: mol_type = other DNA
gcaatctagattcctcacatgtgcagttcacaatagggtttgtgctatgataatctaatgctgcctctgatctgacagct

SEQ ID NO: 33116 - DNA, 80 bp, synthetic construct
  misc_feature 1..80: note = Artificially Synthesized Probe
  source 1..80: mol_type = other DNA
tgtcttttcatcccgttgtccaagcacatagagaggtatgtgctagacaaggtaagacacagacttcttaccttgttcag

SEQ ID NO: 33117 - DNA, 80 bp, synthetic construct
  misc_feature 1..80: note = Artificially Synthesized Probe
  source 1..80: mol_type = other DNA
cctagaggaaccggtatacggattttgatgtgtgtcttatagattgttatgcatatacaaatgcgtctatacctgtctaa

SEQ ID NO: 33118 - DNA, 80 bp, synthetic construct
  misc_feature 1..80: note = Artificially Synthesized Probe
  source 1..80: mol_type = other DNA
ggcgcacatctgtagtcccagctactcatgaagctgaggcaggagaatctcttgaaccctggagttggaggctgcaatca

SEQ ID NO: 33119 - DNA, 80 bp, synthetic construct
  misc_feature 1..80: note = Artificially Synthesized Probe
  source 1..80: mol_type = other DNA
gatgtcttcgtggacttatgtttccatttctgtggggtaaatattcacaaacaggattgcaggtttgtagggtaaaagtg

SEQ ID NO: 33120 - DNA, 80 bp, synthetic construct
  misc_feature 1..80: note = Artificially Synthesized Probe
  source 1..80: mol_type = other DNA
gctttgccatctatacggaaaatccatttaccatatatgtatgtgggtctggtggtgggccatccctttttaggtttgca

SEQ ID NO: 33121 - DNA, 80 bp, synthetic construct
  misc_feature 1..80: note = Artificially Synthesized Probe
  source 1..80: mol_type = other DNA
taatatcccaccttaaactatcacattcaaccatctattaatattatataacttcatggataatgcaaaaaactcattaa

SEQ ID NO: 33122 - DNA, 80 bp, synthetic construct
  misc_feature 1..80: note = Artificially Synthesized Probe
  source 1..80: mol_type = other DNA
gtgtgcgtgtgtgtgtgtcttacagattgtatggctttcattgagttatcttctggttcactttttcttctgtaatgtat

SEQ ID NO: 33123 - DNA, 80 bp, synthetic construct
  misc_feature 1..80: note = Artificially Synthesized Probe
  source 1..80: mol_type = other DNA
tagtggttctctgtcccactttgtagaatttctccctgtgcatatgcagtttatattagacttccatgcatattccttca

SEQ ID NO: 33124 - DNA, 80 bp, synthetic construct
  misc_feature 1..80: note = Artificially Synthesized Probe
  source 1..80: mol_type = other DNA
atctcttgagctttatattaaaaagacctcatcagctccatgtagccttctgcttccatcagactattagaaaagatagc

SEQ ID NO: 33125 - DNA, 80 bp, synthetic construct
  misc_feature 1..80: note = Artificially Synthesized Probe
  source 1..80: mol_type = other DNA
tgcatctagtacttggaggcaaagacacattgcttcttagagaaggatggaggctaaaatcttattcccttacagtagag

SEQ ID NO: 33126 - DNA, 80 bp, synthetic construct
  misc_feature 1..80: note = Artificially Synthesized Probe
  source 1..80: mol_type = other DNA
ggccactgcaaattccaaaacaacacaggtcacaagaggcgggaaaaaattcaggggcacccagcgctgtctaaactttg

SEQ ID NO: 33127 - DNA, 80 bp, synthetic construct
  misc_feature 1..80: note = Artificially Synthesized Probe
  source 1..80: mol_type = other DNA
ctgcgcctggccttagatttttttaatgcacataaaaatgtattggtatctgtctcattctctgtgtctctctctaggac

SEQ ID NO: 33128 - DNA, 80 bp, synthetic construct
  misc_feature 1..80: note = Artificially Synthesized Probe
  source 1..80: mol_type = other DNA
tacccaattaatctgtgctacccccttaccactgccagaggcaaatacattggtttctttcaacagaaattagtttttcc

SEQ ID NO: 33129 - DNA, 80 bp, synthetic construct
  misc_feature 1..80: note = Artificially Synthesized Probe
  source 1..80: mol_type = other DNA
ttctgttcttgtgttagtttgctgagaatgatggtttccagcttcatccatgtccctgcaaaagacatgaactcatcctg

SEQ ID NO: 33130 - DNA, 80 bp, synthetic construct
  misc_feature 1..80: note = Artificially Synthesized Probe
  source 1..80: mol_type = other DNA
ggtgtaaggaagggatccagtttcagttttctgcatatggctagccagttttcccaacaccatttattaaatagggaatc

SEQ ID NO: 33131 - DNA, 80 bp, synthetic construct
  misc_feature 1..80: note = Artificially Synthesized Probe
  source 1..80: mol_type = other DNA
tcataagtagctcttattattttgagacatgctccatcaatacctagtttattaagagtttttagcatgattgggtattg

SEQ ID NO: 33132 - DNA, 80 bp, synthetic construct
  misc_feature 1..80: note = Artificially Synthesized Probe
  source 1..80: mol_type = other DNA
tctttattgtgtctatttgattcttctctattttcttctttattagtctggctaggcttctatgtattttgttaatcttt

SEQ ID NO: 33133 - DNA, 80 bp, synthetic construct
  misc_feature 1..80: note = Artificially Synthesized Probe
  source 1..80: mol_type = other DNA
tgcccattagttgatgcagtttctttatagtgttgatggtgtttacaatttggtatgtttttgcagtagctgttactggt

SEQ ID NO: 33134 - DNA, 80 bp, synthetic construct
  misc_feature 1..80: note = Artificially Synthesized Probe
  source 1..80: mol_type = other DNA
tatcctgcacatggctcagagggtcccatgcccacagagccttgctcactgctagtacagcagtctgagattgaactgct

SEQ ID NO: 33135 - DNA, 80 bp, synthetic construct
  misc_feature 1..80: note = Artificially Synthesized Probe
  source 1..80: mol_type = other DNA
aaataaacagcatagagaagaccttaaatgatctaatggagctgaaaaccatggcacgagaactacgtgacacatgaaca

SEQ ID NO: 33136 - DNA, 80 bp, synthetic construct
  misc_feature 1..80: note = Artificially Synthesized Probe
  source 1..80: mol_type = other DNA
cataggctcaaaataaagggatggaggaagatctaccaagcaaatggaaaacaacaaaaaaagcaggggttgcaatccta

SEQ ID NO: 33137 - DNA, 80 bp, synthetic construct
  misc_feature 1..80: note = Artificially Synthesized Probe
  source 1..80: mol_type = other DNA
ttaaagcagtgtgtagggggagatttacagcactaaatgcccacaagagaaagcaggaaagatctaaaattgacacccta

SEQ ID NO: 33138 - DNA, 80 bp, synthetic construct
  misc_feature 1..80: note = Artificially Synthesized Probe
  source 1..80: mol_type = other DNA
gctgaactctcaataaactatgtattgatgggacatatctcaaaataataagagctatttatgacaaacccatagccaat

SEQ ID NO: 33139 - DNA, 80 bp, synthetic construct
  misc_feature 1..80: note = Artificially Synthesized Probe
  source 1..80: mol_type = other DNA
taaagagcttctgcacagcaaaagaaactaccctcagaatgaacaggcaagctacagaatgggagaaaatttttacaatc

SEQ ID NO: 33140 - DNA, 80 bp, synthetic construct
  misc_feature 1..80: note = Artificially Synthesized Probe
  source 1..80: mol_type = other DNA
acatgtaccctagaacttaaagtataataatagtaaaaaagaatgttgaatattggcctcccactctcttctggcttgta

SEQ ID NO: 33141 - DNA, 80 bp, synthetic construct
  misc_feature 1..80: note = Artificially Synthesized Probe
  source 1..80: mol_type = other DNA
cctgcccagagaggaggaatctagagaggcactcttgctacaatggctttgccaagctgcagtgcaccctgcccagttca

SEQ ID NO: 33142 - DNA, 80 bp, synthetic construct
  misc_feature 1..80: note = Artificially Synthesized Probe
  source 1..80: mol_type = other DNA
acggggagcggcagactggagctgttcctattcagccatcttgccagccaccaactctttttgtatcctttaagtggagc

SEQ ID NO: 33143 - DNA, 80 bp, synthetic construct
  misc_feature 1..80: note = Artificially Synthesized Probe
  source 1..80: mol_type = other DNA
cacatttccaaaggtgtgtccaaagtctactgaattttttattgtttttttattaagctatctattttgttgaatatttc

SEQ ID NO: 33144 - DNA, 80 bp, synthetic construct
  misc_feature 1..80: note = Artificially Synthesized Probe
  source 1..80: mol_type = other DNA
aaagttcaggtagagcagtcctccatgtggagttttaccctctgttcctttggccacacttctgatggatctctgtggtg

SEQ ID NO: 33145 - DNA, 80 bp, synthetic construct
  misc_feature 1..80: note = Artificially Synthesized Probe
  source 1..80: mol_type = other DNA
ttggaaagttttcagccatcattgcttcaggcattttttctgttcaagtatctctttcttctcttgtgatatctgatcac

SEQ ID NO: 33146 - DNA, 80 bp, synthetic construct
  misc_feature 1..80: note = Artificially Synthesized Probe
  source 1..80: mol_type = other DNA
aaattctttctcattattaccaagtgtagaaaatcccagctgcctttgtaatcccaaactctggtgtctctcagttcatc

SEQ ID NO: 33147 - DNA, 80 bp, synthetic construct
  misc_feature 1..80: note = Artificially Synthesized Probe
  source 1..80: mol_type = other DNA
atatttgagttggctgttgctcctcttatggttttaatcaaatacatacgcatttgggtagttttctggggtcctctgat

SEQ ID NO: 33148 - DNA, 80 bp, synthetic construct
  misc_feature 1..80: note = Artificially Synthesized Probe
  source 1..80: mol_type = other DNA
catgagaagaagaggcaagaacacctagaaatttctaacttcaaagctgaggtgaacagagcctgtgaaagactgagata

SEQ ID NO: 33149 - DNA, 80 bp, synthetic construct
  misc_feature 1..80: note = Artificially Synthesized Probe
  source 1..80: mol_type = other DNA
agtatatgctctctatgaaaactgagataatacatgtctgtacaagaaaggatcagaatatcttcctttcaccttctgcc

SEQ ID NO: 33150 - DNA, 80 bp, synthetic construct
  misc_feature 1..80: note = Artificially Synthesized Probe
  source 1..80: mol_type = other DNA
aggcagtggtttttaacacaactggacgtatcaagtgatgtagcacctgaaacagatacctgctctgtttttcagttgag

SEQ ID NO: 33151 - DNA, 80 bp, synthetic construct
  misc_feature 1..80: note = Artificially Synthesized Probe
  source 1..80: mol_type = other DNA
attgttggctctgtgtgcatcttctcctaagaaatgactattcaagcctgttgcccattttgattaggttgtttgtcctc

SEQ ID NO: 33152 - DNA, 80 bp, synthetic construct
  misc_feature 1..80: note = Artificially Synthesized Probe
  source 1..80: mol_type = other DNA
gttaggattacagccaagcgtcccagccaataccacatgtcttgattactgtgtctttatgagaatttccatattaccat

SEQ ID NO: 33153 - DNA, 80 bp, synthetic construct
  misc_feature 1..80: note = Artificially Synthesized Probe
  source 1..80: mol_type = other DNA
gtttgctgtgcatagcgtttaagcttgctgggtttttttccttcttttcactctaaaggtgttattccattgtttctgac

SEQ ID NO: 33154 - DNA, 80 bp, synthetic construct
  misc_feature 1..80: note = Artificially Synthesized Probe
  source 1..80: mol_type = other DNA
taaggccatgtagtgattttctcattaaagagatgtcttttttttcagttcttgactctccatttggtccttttacaatt

SEQ ID NO: 33155 - DNA, 80 bp, synthetic construct
  misc_feature 1..80: note = Artificially Synthesized Probe
  source 1..80: mol_type = other DNA
aagggtaattatggggttgatcttatttgtttccctttctaaactatctcaggttgtactgtctgctgttcaacatgtgc

SEQ ID NO: 33156 - DNA, 80 bp, synthetic construct
  misc_feature 1..80: note = Artificially Synthesized Probe
  source 1..80: mol_type = other DNA
tctcagcatttggtcatttgatctccttagctttacattaatgagacttcaccacctccatatatcctgctgcttccatc

SEQ ID NO: 33157 - DNA, 80 bp, synthetic construct
  misc_feature 1..80: note = Artificially Synthesized Probe
  source 1..80: mol_type = other DNA
atgaaggtaggctggggagataaacaatttggtggctatgtactgcttcaaagtctcaggacaatacggatctaatgaag

SEQ ID NO: 33158 - DNA, 80 bp, synthetic construct
  misc_feature 1..80: note = Artificially Synthesized Probe
  source 1..80: mol_type = other DNA
ctgcagtagttcctggtcaggccactgcaaattccaaaacaatacaggtcaccagagattggagaagatacagcaccacc

SEQ ID NO: 33159 - DNA, 80 bp, synthetic construct
  misc_feature 1..80: note = Artificially Synthesized Probe
  source 1..80: mol_type = other DNA
ctgttggtctgtctgtctgtcctgtgatttgtgtagctcctattgaattattttctaggtcacctttcctaccgtaatgt

SEQ ID NO: 33160 - DNA, 80 bp, synthetic construct
  misc_feature 1..80: note = Artificially Synthesized Probe
  source 1..80: mol_type = other DNA
atctgcttgtccttcaatccaacactgtgtccaggaaggaagacaggttaatgatgaagttgatctcctttgattccctt

SEQ ID NO: 33161 - DNA, 80 bp, synthetic construct
  misc_feature 1..80: note = Artificially Synthesized Probe
  source 1..80: mol_type = other DNA
ggagaaaacaaactgagtaatttccagaacacagaagcatgagaaaaaaaatccatgatagaaacaggacatcatctctg

SEQ ID NO: 33162 - DNA, 80 bp, synthetic construct
  misc_feature 1..80: note = Artificially Synthesized Probe
  source 1..80: mol_type = other DNA
ttagaatatccattttcactaggacactgaaataatctattgaataaccaggggagtggtaaatccagtgccctagaagg

SEQ ID NO: 33163 - DNA, 80 bp, synthetic construct
  misc_feature 1..80: note = Artificially Synthesized Probe
  source 1..80: mol_type = other DNA
tgatatcttcttgtcagctttcagacctggagtatggtatagcaatggctcctctcccctgttacttcaaatggtgatgg

SEQ ID NO: 33164 - DNA, 80 bp, synthetic construct
  misc_feature 1..80: note = Artificially Synthesized Probe
  source 1..80: mol_type = other DNA
ctcgttcaccttttcctaccataatatctaaactggttataaggccatccagtgaattcctcattacagatataactttt

SEQ ID NO: 33165 - DNA, 80 bp, synthetic construct
  misc_feature 1..80: note = Artificially Synthesized Probe
  source 1..80: mol_type = other DNA
ctcctttgattccctttctgaattttctcaggcctgtcatgtctgttgtccaacctatgaaaacacttttcctatgtatt

SEQ ID NO: 33166 - DNA, 80 bp, synthetic construct
  misc_feature 1..80: note = Artificially Synthesized Probe
  source 1..80: mol_type = other DNA
aaaattgcactcatgtgcatgctctttaatatagacatcttctgggtgttcctgagaataaggcaggaaactagactgct

SEQ ID NO: 33167 - DNA, 80 bp, synthetic construct
  misc_feature 1..80: note = Artificially Synthesized Probe
  source 1..80: mol_type = other DNA
caaaatgttagaatattcttctggctaagacactaaaatgatcctttgaataaccaggggagtggtaagtccagtgccct

SEQ ID NO: 33168 - DNA, 80 bp, synthetic construct
  misc_feature 1..80: note = Artificially Synthesized Probe
  source 1..80: mol_type = other DNA
gcctctctgtatgtctctctacaggactacactaactattcagcatctggtttgctgatttgttgtcttcctcaggaatt

SEQ ID NO: 33169 - DNA, 80 bp, synthetic construct
  misc_feature 1..80: note = Artificially Synthesized Probe
  source 1..80: mol_type = other DNA
acactttaatgtgtactcggtagttcggtataatgttaaataggtcgacgtttttattgagaacaaagatactatgtcta

SEQ ID NO: 33170 - DNA, 80 bp, synthetic construct
  misc_feature 1..80: note = Artificially Synthesized Probe
  source 1..80: mol_type = other DNA
ttttcaatgaggtctcttctctctagctggtcaaaactccaatattccagagcactatgtgagctctgtcacctttatta

SEQ ID NO: 33171 - DNA, 80 bp, synthetic construct
  misc_feature 1..80: note = Artificially Synthesized Probe
  source 1..80: mol_type = other DNA
ccactggtgctcaggaccaagtgtgtttgtacccattgaaaaagaagtagatagaaaaagatttgcctctccatagatgt

SEQ ID NO: 33172 - DNA, 80 bp, synthetic construct
  misc_feature 1..80: note = Artificially Synthesized Probe
  source 1..80: mol_type = other DNA
agtggaaaagaaatatcagattgcttctcatcggaaactccactaacatggaagctcatttctaggaatctctacagagt

SEQ ID NO: 33173 - DNA, 80 bp, synthetic construct
  misc_feature 1..80: note = Artificially Synthesized Probe
  source 1..80: mol_type = other DNA
catctgacagcatattacaataagaattttgtctaggacaatgagatagccccttttacaatgaggggagtggtgaagtc

SEQ ID NO: 33174 - DNA, 80 bp, synthetic construct
  misc_feature 1..80: note = Artificially Synthesized Probe
  source 1..80: mol_type = other DNA
aaaaatggcatccagcatgatatccttcccaggccagcagtctcattcaatgtactcaaaatgtagccaaaaggctctat

SEQ ID NO: 33175 - DNA, 80 bp, synthetic construct
  misc_feature 1..80: note = Artificially Synthesized Probe
  source 1..80: mol_type = other DNA
tcctcttgaactattcttcttctagctaattttctttgggcaacatctcttgttacacaagcctgctgattccaaattat

SEQ ID NO: 33176 - DNA, 80 bp, synthetic construct
  misc_feature 1..80: note = Artificially Synthesized Probe
  source 1..80: mol_type = other DNA
gtagctggttctgtaggtggtataaaattgtttttcagttagtttttacttctgaaacatctcactccattgggaataca

SEQ ID NO: 33177 - DNA, 80 bp, synthetic construct
  misc_feature 1..80: note = Artificially Synthesized Probe
  source 1..80: mol_type = other DNA
aacaaccagtatcccttcagaccactggtggtcagaaccgactgtgtttctacatattggaatagacgtagatatagaaa

SEQ ID NO: 33178 - DNA, 80 bp, synthetic construct
  misc_feature 1..80: note = Artificially Synthesized Probe
  source 1..80: mol_type = other DNA
actcagcttgaagcatgactctactaacagaaatttccactgacccttccttcacttatggtaaagaaaatagacatacg

SEQ ID NO: 33179 - DNA, 80 bp, synthetic construct
  misc_feature 1..80: note = Artificially Synthesized Probe
  source 1..80: mol_type = other DNA
agggctgcagagcccacctatgactgaggaagtcctgaaacatagatcattgggagttcatgtactgctccatagaacca

SEQ ID NO: 33180 - DNA, 80 bp, synthetic construct
  misc_feature 1..80: note = Artificially Synthesized Probe
  source 1..80: mol_type = other DNA
ctaatgtgcaagttgcaactaacaggtagttcttcagaaaaaacatgggatccaggaggataacctttccaggtcaacct

SEQ ID NO: 33181 - DNA, 80 bp, synthetic construct
  misc_feature 1..80: note = Artificially Synthesized Probe
  source 1..80: mol_type = other DNA
ttcttcttctacctaattccttcgggtcacctctcttgttacataagcctgctgatttccaattcttacagtttccggtt

SEQ ID NO: 33182 - DNA, 80 bp, synthetic construct
  misc_feature 1..80: note = Artificially Synthesized Probe
  source 1..80: mol_type = other DNA
actgtactctaggaagacacagctcttttttctccagtttctcgtgagatgtttcttcttcttatatccttgccttgtta

SEQ ID NO: 33183 - DNA, 80 bp, synthetic construct
  misc_feature 1..80: note = Artificially Synthesized Probe
  source 1..80: mol_type = other DNA
aattctaattatcgatgtcatttctgagcctgtttgtattgcctgatttattttctggtcatggatcacacgaaattctt

SEQ ID NO: 33184 - DNA, 80 bp, synthetic construct
  misc_feature 1..80: note = Artificially Synthesized Probe
  source 1..80: mol_type = other DNA
acctctatcctttcaggccactggtacttaggaccaagagattttctccctattggaatacaggtagaaatagaaacaga

SEQ ID NO: 33185 - DNA, 80 bp, synthetic construct
  misc_feature 1..80: note = Artificially Synthesized Probe
  source 1..80: mol_type = other DNA
tttcacctgaaatccttagaaaaacagaacagaacagactccttctcactgcaaagtgcgctcacgaagtagcacctttc

SEQ ID NO: 33186 - DNA, 80 bp, synthetic construct
  misc_feature 1..80: note = Artificially Synthesized Probe
  source 1..80: mol_type = other DNA
tcccccagagagtgcacggaggcttcctcctacatggtagaactcaggcaacactcgagcatccgtttaccattgaaggc

SEQ ID NO: 33187 - DNA, 80 bp, synthetic construct
  misc_feature 1..80: note = Artificially Synthesized Probe
  source 1..80: mol_type = other DNA
tggttcaatgagcaactggatgtataagagcctgagctcttgaaagacttctagttcttccttggcttccctcttttgaa

SEQ ID NO: 33188 - DNA, 80 bp, synthetic construct
  misc_feature 1..80: note = Artificially Synthesized Probe
  source 1..80: mol_type = other DNA
attttatatttcactgtttcttcaggggtgcgcgtgtctgtgtgtgttagaacttgtgagtttctgcgtgtgtgtgagta

SEQ ID NO: 33189 - DNA, 80 bp, synthetic construct
  misc_feature 1..80: note = Artificially Synthesized Probe
  source 1..80: mol_type = other DNA
agagctcttttcctccacaaaccagttcttatttctagcagacctagaaaaatttcagctaccacagtcatcccaaactc

SEQ ID NO: 33190 - DNA, 80 bp, synthetic construct
  misc_feature 1..80: note = Artificially Synthesized Probe
  source 1..80: mol_type = other DNA
tgagaattacgaccgttctcttttccttatccataggcagatggatgtgagaaaaccgaccaacaaacaaacaccaaagc

SEQ ID NO: 33191 - DNA, 80 bp, synthetic construct; identical to SEQ ID NO: 33186
  misc_feature 1..80: note = Artificially Synthesized Probe
  source 1..80: mol_type = other DNA

SEQ ID NO: 33192 - DNA, 80 bp, synthetic construct
  misc_feature 1..80: note = Artificially Synthesized Probe
  source 1..80: mol_type = other DNA
agggtggactaagagatctgaagaggtcggacagctacggagcagcagagaaaaatgcattagggggcaaagcaggcgag

SEQ ID NO: 33193 - DNA, 80 bp, synthetic construct
  misc_feature 1..80: note = Artificially Synthesized Probe
  source 1..80: mol_type = other DNA
cacattggcaatttgtatcagtgtacttgtaggaagacacagctctttttcctccagtttctcgtgacaggtttcttctt

SEQ ID NO: 33194 - DNA, 80 bp, synthetic construct
  misc_feature 1..80: note = Artificially Synthesized Probe
  source 1..80: mol_type = other DNA
gagcttcctgtgctcttgtacttgctgtttctcagtaaatgttctttgccacactttctcgtggaaccatttcctgtgca

SEQ ID NO: 33195 - DNA, 80 bp, synthetic construct
  misc_feature 1..80: note = Artificially Synthesized Probe
  source 1..80: mol_type = other DNA
gcatctgtcacaagttgagttcggagaactcagcttgagacacatctcttgtaacagaaacttcacttggccctttcttc

SEQ ID NO: 33196 - DNA, 80 bp, synthetic construct
  misc_feature 1..80: note = Artificially Synthesized Probe
  source 1..80: mol_type = other DNA
tgcatcctgaattgtagtaaagtaggagtctactactctttctctctagacccctcacaggtacaagtgtcatcagaaag

SEQ ID NO: 33197 - DNA, 80 bp, synthetic construct
  misc_feature 1..80: note = Artificially Synthesized Probe
  source 1..80: mol_type = other DNA
taactggtatgggttttgacgtctgtattgtgggattgtgtattcacatgcaaatgcatctgtatctgtctagtctccgt

SEQ ID NO: 33198 - DNA, 80 bp, synthetic construct
  misc_feature 1..80: note = Artificially Synthesized Probe
  source 1..80: mol_type = other DNA
gcagaaagttcctttcttgttcaattcttcttctacctaattccttcgggtcacctctcttgttacataagcctgctgat

SEQ ID NO: 33199 - DNA, 80 bp, synthetic construct; identical to SEQ ID NO: 33188
  misc_feature 1..80: note = Artificially Synthesized Probe
  source 1..80: mol_type = other DNA

SEQ ID NO: 33200 - DNA, 80 bp, synthetic construct; identical to SEQ ID NO: 33189
  misc_feature 1..80: note = Artificially Synthesized Probe
  source 1..80: mol_type = other DNA

SEQ ID NO: 33201 - DNA, 80 bp, synthetic construct; identical to SEQ ID NO: 33190
  misc_feature 1..80: note = Artificially Synthesized Probe
  source 1..80: mol_type = other DNA

SEQ ID NO: 33202 - DNA, 80 bp, synthetic construct; identical to SEQ ID NO: 33186
  misc_feature 1..80: note = Artificially Synthesized Probe
  source 1..80: mol_type = other DNA

SEQ ID NO: 33203 - DNA, 80 bp, synthetic construct; identical to SEQ ID NO: 33192
  misc_feature 1..80: note = Artificially Synthesized Probe
  source 1..80: mol_type = other DNA

SEQ ID NO: 33204 - DNA, 80 bp, synthetic construct; identical to SEQ ID NO: 33193
  misc_feature 1..80: note = Artificially Synthesized Probe
  source 1..80: mol_type = other DNA

SEQ ID NO: 33205 - DNA, 80 bp, synthetic construct; identical to SEQ ID NO: 33194
  misc_feature 1..80: note = Artificially Synthesized Probe
  source 1..80: mol_type = other DNA

SEQ ID NO: 33206 - DNA, 80 bp, synthetic construct
  misc_feature 1..80: note = Artificially Synthesized Probe
  source 1..80: mol_type = other DNA
caccccaggcctctgctcagtcggtgctgaaatgaaaacacaagaaataaactgagtatctctgagaataacgaaatatg

SEQ ID NO: 33207 - DNA, 80 bp, synthetic construct
  misc_feature 1..80: note = Artificially Synthesized Probe
  source 1..80: mol_type = other DNA
ggtttaagaacactgagaaatcactcccttcaaagcctaggactgaagagccttagagcattgggagctcatatactgct

SEQ ID NO: 33208 - DNA, 80 bp, synthetic construct
  misc_feature 1..80: note = Artificially Synthesized Probe
  source 1..80: mol_type = other DNA
tagttcttcagaaaacacacgtcatccaggaggatagccgttccaggtcaaccctcacactctatgtactcaatacgtag

SEQ ID NO: 33209 - DNA, 80 bp, synthetic construct; identical to SEQ ID NO: 33198
  misc_feature 1..80: note = Artificially Synthesized Probe
  source 1..80: mol_type = other DNA

SEQ ID NO: 33210 - DNA, 80 bp, synthetic construct; identical to SEQ ID NO: 33188
  misc_feature 1..80: note = Artificially Synthesized Probe
  source 1..80: mol_type = other DNA

SEQ ID NO: 33211 - DNA, 80 bp, synthetic construct; identical to SEQ ID NO: 33189
  misc_feature 1..80: note = Artificially Synthesized Probe
  source 1..80: mol_type = other DNA

SEQ ID NO: 33212 - DNA, 80 bp, synthetic construct; identical to SEQ ID NO: 33190
  misc_feature 1..80: note = Artificially Synthesized Probe
  source 1..80: mol_type = other DNA

SEQ ID NO: 33213 - DNA, 80 bp, synthetic construct
  misc_feature 1..80: note = Artificially Synthesized Probe
  source 1..80: mol_type = other DNA
tcagtgggaatttccatggcttttcatcccagcatcgaaacgtgtaggtttctggccacaggctccttaccttgttcaga

SEQ ID NO: 33214 - DNA, 80 bp, synthetic construct; identical to SEQ ID NO: 33192
  misc_feature 1..80: note = Artificially Synthesized Probe
  source 1..80: mol_type = other DNA

SEQ ID NO: 33215 - DNA, 80 bp, synthetic construct; identical to SEQ ID NO: 33193
  misc_feature 1..80: note = Artificially Synthesized Probe
  source 1..80: mol_type = other DNA

SEQ ID NO: 33216 - DNA, 80 bp, synthetic construct; identical to SEQ ID NO: 33194
  misc_feature 1..80: note = Artificially Synthesized Probe
  source 1..80: mol_type = other DNA

SEQ ID NO: 33217 - DNA, 80 bp, synthetic construct; identical to SEQ ID NO: 33195
  misc_feature 1..80: note = Artificially Synthesized Probe
  source 1..80: mol_type = other DNA

SEQ ID NO: 33218 - DNA, 80 bp, synthetic construct; identical to SEQ ID NO: 33196
  misc_feature 1..80: note = Artificially Synthesized Probe
  source 1..80: mol_type = other DNA

SEQ ID NO: 33219 - DNA, 80 bp, synthetic construct; identical to SEQ ID NO: 33197
  misc_feature 1..80: note = Artificially Synthesized Probe
  source 1..80: mol_type = other DNA

SEQ ID NO: 33220 - DNA, 80 bp, synthetic construct
  misc_feature 1..80: note = Artificially Synthesized Probe
  source 1..80: mol_type = other DNA
ctgcagaaagttcccttcttgttctattcttcttctccttaattccttagggtcacctcttttgttacataagcctgctg

SEQ ID NO: 33221 - DNA, 80 bp, synthetic construct
  misc_feature 1..80: note = Artificially Synthesized Probe
  source 1..80: mol_type = other DNA
tcttctgggtctgtttgtattggctgattttcctcctgcttgtgggtcacactaaaaggtttctatgtgtagtcaagttt

SEQ ID NO: 33222 - DNA, 80 bp, synthetic construct
  misc_feature 1..80: note = Artificially Synthesized Probe
  source 1..80: mol_type = other DNA
ttgatctcattgttctctctctcgcaattcccttggtcctctaccatctattgtccaacaagcggaaatcattttttctt

SEQ ID NO: 33223 - DNA, 80 bp, synthetic construct
  misc_feature 1..80: note = Artificially Synthesized Probe
  source 1..80: mol_type = other DNA
ctcttttttagaaatctcttcttaatgttcatgaggaccacaggacaggagagatcagagggagatacatttggcactgc

SEQ ID NO: 33224 - DNA, 80 bp, synthetic construct
  misc_feature 1..80: note = Artificially Synthesized Probe
  source 1..80: mol_type = other DNA
caaaagatagcagcaacccatcactggaggaatttaaacctgtggtgcatttaagataaaagcaacaagcacaaatgcca

SEQ ID NO: 33225 - DNA, 80 bp, synthetic construct
  misc_feature 1..80: note = Artificially Synthesized Probe
  source 1..80: mol_type = other DNA
gacaaagaaaagctgaaagacaacagcaacagcagtcccgtgctataagaaatgctaaaggttgtttttcacagaaagaa

SEQ ID NO: 33226 - DNA, 80 bp, synthetic construct
  misc_feature 1..80: note = Artificially Synthesized Probe
  source 1..80: mol_type = other DNA
aaggctgtattcatatcagcacaaatagacttcagaacaacgaatacttccagagataagaagaaacattacataatgat

SEQ ID NO: 33227 - DNA, 80 bp, synthetic construct
  misc_feature 1..80: note = Artificially Synthesized Probe
  source 1..80: mol_type = other DNA
aagagcaggaagcatttggcacaggagaaagatgtaggctgggaagctaattcagtctagtcttttcacatttttctccc

SEQ ID NO: 33228 - DNA, 80 bp, synthetic construct
  misc_feature 1..80: note = Artificially Synthesized Probe
  source 1..80: mol_type = other DNA
caaagcccaataacagaccaatagctgtctctcaaaaggagagtagttatctgcagaagtggcagggccttgctccaaaa

SEQ ID NO: 33229 - DNA, 80 bp, synthetic construct
  misc_feature 1..80: note = Artificially Synthesized Probe
  source 1..80: mol_type = other DNA
ataatagccctcatcctaccagtcagggagccaatgtggcatttctgccagctaataagtatgtctatacaaattatgca

SEQ ID NO: 33230 - DNA, 80 bp, synthetic construct
  misc_feature 1..80: note = Artificially Synthesized Probe
  source 1..80: mol_type = other DNA
ctaagcctttggatcacttcctctacattaaaccaaggcatttccagctcactaacattggaccatcttttaatccatat

SEQ ID NO: 33231 - DNA, 80 bp, synthetic construct
  misc_feature 1..80: note = Artificially Synthesized Probe
  source 1..80: mol_type = other DNA
aggagaatcaacattatcttgcctggcagctgcctcagggaaggccatcactgttgcctcaagcagtgcagggtttacat

SEQ ID NO: 33232 - DNA, 80 bp, synthetic construct
  misc_feature 1..80: note = Artificially Synthesized Probe
  source 1..80: mol_type = other DNA
atatactcacacaaaggggagcttattaagtggtattaactcacaagattacaaggtcccataataggccacctgcaatc

SEQ ID NO: 33233 - DNA, 80 bp, synthetic construct
  misc_feature 1..80: note = Artificially Synthesized Probe
  source 1..80: mol_type = other DNA
tgcattgcttcttgccaccacccaaagaaggttgtatagcactcagatgtatactaactgcaaccgtgtatctcttagga

SEQ ID NO: 33234 - DNA, 80 bp, synthetic construct
  misc_feature 1..80: note = Artificially Synthesized Probe
  source 1..80: mol_type = other DNA
tggagatgccagctccatctctggcacaaaatgtagtgattttcacagggtgagaggccaaaagaggctaataaaatgaa

SEQ ID NO: 33235 - DNA, 80 bp, synthetic construct
  misc_feature 1..80: note = Artificially Synthesized Probe
  source 1..80: mol_type = other DNA
tttttctttttttaacctgatgatttttccacaatccttttgtttctctgattcacctccagggctcatatggcaatggg

SEQ ID NO: 33236 - DNA, 80 bp, synthetic construct
  misc_feature 1..80: note = Artificially Synthesized Probe
  source 1..80: mol_type = other DNA
tagcatggacccctgaatccttgctcgcctcctctgttgccttttaaaagtgccactttctgctcctaaagtgaagtagt

SEQ ID NO: 33237 - DNA, 80 bp, synthetic construct
  misc_feature 1..80: note = Artificially Synthesized Probe
  source 1..80: mol_type = other DNA
ttttagattagaaaaatcaaccattattttttctgcccattcattccagcaccgtgacagtcttcacggggaaattaaac

SEQ ID NO: 33238 - DNA, 80 bp, synthetic construct
  misc_feature 1..80: note = Artificially Synthesized Probe
  source 1..80: mol_type = other DNA
tgtgtacctcagacttagtggtcctcaggcacgtgattttataatcacaatcgccaaagacctatgaactgtctttagtc

SEQ ID NO: 33239 - DNA, 80 bp, synthetic construct
  misc_feature 1..80: note = Artificially Synthesized Probe
  source 1..80: mol_type = other DNA
aggttgggagttcgagaccaacctgaccaacatggagaaaccccatctctactaaaaatgcaaagttagctgggtgtggt

SEQ ID NO: 33240 - DNA, 80 bp, synthetic construct
  misc_feature 1..80: note = Artificially Synthesized Probe
  source 1..80: mol_type = other DNA
tggcctatacttttttttttttttttttttgagatggagtcgcgctcttgttgcccaggctggagtgcaatggtgtgacc

SEQ ID NO: 33241 - DNA, 80 bp, synthetic construct
  misc_feature 1..80: note = Artificially Synthesized Probe
  source 1..80: mol_type = other DNA
ttcagagcttgactgggttctctgtgggtatagagctctgtttcacattattctgattacacacacatacacagcattga

SEQ ID NO: 33242 - DNA, 80 bp, synthetic construct
  misc_feature 1..80: note = Artificially Synthesized Probe
  source 1..80: mol_type = other DNA
ttgtttaaaatttgtttgcatttgtttctttataatagttgtgaacagattcgttttttagcatagaggacataagctta

SEQ ID NO: 33243 - DNA, 80 bp, synthetic construct
  misc_feature 1..80: note = Artificially Synthesized Probe
  source 1..80: mol_type = other DNA
aagagtatgagctcactagcagtgacttgtgtgatgtcaagcaaaaacttcatagctttacctgtatttcatatttcctt

SEQ ID NO: 33244 - DNA, 80 bp, synthetic construct
  misc_feature 1..80: note = Artificially Synthesized Probe
  source 1..80: mol_type = other DNA
gggaaatcaggagaaatctttttttttttttttttttgaggcggagtcttgctctgttgcccaggctagagtggagtggc

SEQ ID NO: 33245 - DNA, 80 bp, synthetic construct
  misc_feature 1..80: note = Artificially Synthesized Probe
  source 1..80: mol_type = other DNA
ctggtcttttaactatcttactatatggtttcttttcaaggtacctcattatccatagtaaatgttgtgaatgaatcagg

SEQ ID NO: 33246 - DNA, 80 bp, synthetic construct
  misc_feature 1..80: note = Artificially Synthesized Probe
  source 1..80: mol_type = other DNA
catggagtgtcatgatggctgacagctgtagatggaggtgtttttagtggtctgaaactgtatactggtcacccatttct

SEQ ID NO: 33247 - DNA, 80 bp, synthetic construct
  misc_feature 1..80: note = Artificially Synthesized Probe
  source 1..80: mol_type = other DNA
tgaacaagaaaatctgcaacaagagagcctaaagaaatctgatctaatacagatctgatacagatcacctgggcttggtt

SEQ ID NO: 33248 - DNA, 80 bp, synthetic construct
  misc_feature 1..80: note = Artificially Synthesized Probe
  source 1..80: mol_type = other DNA
ggagtctcccaggtctggaactcctgaactctagtaatctgcccacctcagcctcccaaagagctgggattacaggcatg

SEQ ID NO: 33249 - DNA, 80 bp, synthetic construct
  misc_feature 1..80: note = Artificially Synthesized Probe
  source 1..80: mol_type = other DNA
ctaatgtgcagccgtgatggagaaccactgaaccataagcaatttttgcttattgaatgttagttgaggaaatctgtgct

SEQ ID NO: 33250 - DNA, 80 bp, synthetic construct
  misc_feature 1..80: note = Artificially Synthesized Probe
  source 1..80: mol_type = other DNA
ttgtattctctatctcttctccttttgccttcctcagcctttcccaaaaaagactgtaattacgttatttgtaacaaata

SEQ ID NO: 33251 - DNA, 80 bp, synthetic construct
  misc_feature 1..80: note = Artificially Synthesized Probe
  source 1..80: mol_type = other DNA
tttttttttttttttttttttttgagatagtttcactcttgttgctcaggctggtgtgcagtggcaccatcttggctcat

SEQ ID NO: 33252 - DNA, 80 bp, synthetic construct
  misc_feature 1..80: note = Artificially Synthesized Probe
  source 1..80: mol_type = other DNA
ttaagtttattaagcattaggtttacagcctgggcaacatagggagaccccatttctacaaaacagaataaattagctgg

SEQ ID NO: 33253 - DNA, 80 bp, synthetic construct
  misc_feature 1..80: note = Artificially Synthesized Probe
  source 1..80: mol_type = other DNA
gagaattgttaagtgttgcttttggaaaaagaaaaaggttactaaagttgacagtgcttacaaccctagcgcttagtcca

SEQ ID NO: 33254 - DNA, 80 bp, synthetic construct
  misc_feature 1..80: note = Artificially Synthesized Probe
  source 1..80: mol_type = other DNA
tggtgtaaattaagctcttaaatgaaagtggctagcttttactgataggccggcatgaatctagctgagaacaaattgtt

SEQ ID NO: 33255 - DNA, 80 bp, synthetic construct
  misc_feature 1..80: note = Artificially Synthesized Probe
  source 1..80: mol_type = other DNA
ttttaaaggaagaccacatccctatcaaggatgtggtcaacttcaattttaatttagaagctcaccattttgacttgtga

SEQ ID NO: 33256 - DNA, 80 bp, synthetic construct
  misc_feature 1..80: note = Artificially Synthesized Probe
  source 1..80: mol_type = other DNA
tgtggtgtctcacgcctgtatacccagcattttgagaggctgagatgggcagatcacgaggtcaggagatcgagaccatc

SEQ ID NO: 33257 - DNA, 80 bp, synthetic construct
  misc_feature 1..80: note = Artificially Synthesized Probe
  source 1..80: mol_type = other DNA
taaaatgttttctttggctttgttattatcagactgtcttggcattgggttggtgatttcaagttgcaggctgtggggga

SEQ ID NO: 33258 - DNA, 80 bp, synthetic construct
  misc_feature 1..80: note = Artificially Synthesized Probe
  source 1..80: mol_type = other DNA
gtcataggttccatctctgggtgggctgataaatttcatctgtggtctcaagtaacactctctaacatttgtatagcttt

SEQ ID NO: 33259 - DNA, 80 bp, synthetic construct
  misc_feature 1..80: note = Artificially Synthesized Probe
  source 1..80: mol_type = other DNA
taattaacatttttgtggcctggggtggatcagtggcagcagcttcattataatctttgttttacagagtccataatata

SEQ ID NO: 33260 - DNA, 80 bp, synthetic construct
  misc_feature 1..80: note = Artificially Synthesized Probe
  source 1..80: mol_type = other DNA
ttattagtggtaaagttaaaccgtaaccgaatgagcatgattccacctaagatcttcaagctgcctcacctccaattctt

SEQ ID NO: 33261 - DNA, 80 bp, synthetic construct
  misc_feature 1..80: note = Artificially Synthesized Probe
  source 1..80: mol_type = other DNA
caaacaggtatactataccacttggcctgttggttttgtagagctcctattttagacagtcttactaccttctagcacta

SEQ ID NO: 33262 - DNA, 80 bp, synthetic construct
  misc_feature 1..80: note = Artificially Synthesized Probe
  source 1..80: mol_type = other DNA
aagactatccgaactgtaagtgttggatagcatttcactggaggcagttaagactagagcagattggaataaatcattcc

SEQ ID NO: 33263 - DNA, 80 bp, synthetic construct
  misc_feature 1..80: note = Artificially Synthesized Probe
  source 1..80: mol_type = other DNA
ttttctcctttatacggtgaaggaaggatataggattagatggttgctaaaggcagtttccacgctaaaattctgtggtt

SEQ ID NO: 33264 - DNA, 80 bp, synthetic construct
  misc_feature 1..80: note = Artificially Synthesized Probe
  source 1..80: mol_type = other DNA
gttaggatcaaatctggggaattctggctttagcctcatgctcttgccagggtagatacagttcttaatttgttgaatgg

SEQ ID NO: 33265 - DNA, 80 bp, synthetic construct
  misc_feature 1..80: note = Artificially Synthesized Probe
  source 1..80: mol_type = other DNA
gaattagcatgtgtaccttgacatcaccataccaggatactgctcaatgttgtgatggttgtattgactaatagcacctg

SEQ ID NO: 33266 - DNA, 80 bp, synthetic construct
  misc_feature 1..80: note = Artificially Synthesized Probe
  source 1..80: mol_type = other DNA
aatttctccaaaggttcacacttgtctgaatttctttcatctgacaatcttttgctctgaatggagacatgaggaatata

SEQ ID NO: 33267 - DNA, 80 bp, synthetic construct
  misc_feature 1..80: note = Artificially Synthesized Probe
  source 1..80: mol_type = other DNA
agaactgtaagtaacttgtctttttaaaatcaccagttggatcattgttcctgcttgttgtgcttaaagtgtgatgggag

SEQ ID NO: 33268 - DNA, 80 bp, synthetic construct
  misc_feature 1..80: note = Artificially Synthesized Probe
  source 1..80: mol_type = other DNA
agtcaggggtaagaaccactagattatagaaattattttgccttgcctgggaagctactcaaaggatactctgtggagca

SEQ ID NO: 33269 - DNA, 80 bp, synthetic construct
  misc_feature 1..80: note = Artificially Synthesized Probe
  source 1..80: mol_type = other DNA
cctggcctgtcaagatattttttttttttaccccaaactgctttgttctaacttaccttttttgttgttcttgaaaagca

SEQ ID NO: 33270 - DNA, 80 bp, synthetic construct
  misc_feature 1..80: note = Artificially Synthesized Probe
  source 1..80: mol_type = other DNA
ctctggatgttattttttagtaatttcacatccactgagtgggatgaaagcaaacccaccttgctccttggctatacttg

SEQ ID NO: 33271 - DNA, 80 bp, synthetic construct
  misc_feature 1..80: note = Artificially Synthesized Probe
  source 1..80: mol_type = other DNA
aactatattgctccaccactggttctgtccacctcctccttgttggacctttattggcctgtttggaatacttaagatct

SEQ ID NO: 33272 - DNA, 80 bp, synthetic construct
  misc_feature 1..80: note = Artificially Synthesized Probe
  source 1..80: mol_type = other DNA
ataaataaagtatttagccccgtgcctggccacagacaaaacttaattcacagtagcttccttcacttctgtgtcttttg

SEQ ID NO: 33273 - DNA, 80 bp, synthetic construct
  misc_feature 1..80: note = Artificially Synthesized Probe
  source 1..80: mol_type = other DNA
agcatagtaatctttgccagtgcccctcttgtttaataacaatatgtcaactttgaacagttgaacaatgtaagtcaatt

SEQ ID NO: 33274 - DNA, 80 bp, synthetic construct
  misc_feature 1..80: note = Artificially Synthesized Probe
  source 1..80: mol_type = other DNA
tttgctgaatttgttctatttccctccctcctcctctctcattttatctcttgctctctctccacatacacacaaatata

SEQ ID NO: 33275 - DNA, 80 bp, synthetic construct
  misc_feature 1..80: note = Artificially Synthesized Probe
  source 1..80: mol_type = other DNA
cttcaatggttggttgataataactttcaacattctgtgaatgtaagctgtgcacaccctgaatggctagcagggcaaag

SEQ ID NO: 33276 - DNA, 80 bp, synthetic construct
  misc_feature 1..80: note = Artificially Synthesized Probe
  source 1..80: mol_type = other DNA
tccagtctgggcaacagagtgagactctgtctcaaaaaaacaattttttttttctttaaagtggaatgactgattcttag

SEQ ID NO: 33277 - DNA, 80 bp, synthetic construct
  misc_feature 1..80: note = Artificially Synthesized Probe
  source 1..80: mol_type = other DNA
gccaccgtgcctggccatatacatgtttatctatcacatacatatatacaaggggtaatagaagtagaacttgtcttgaa

SEQ ID NO: 33278 - DNA, 80 bp, synthetic construct
  misc_feature 1..80: note = Artificially Synthesized Probe
  source 1..80: mol_type = other DNA
tggttgaagggtaagtgctgtggccctaggagatgtgctactttcactgctgtttatgcttttgaagacattcttatgaa

SEQ ID NO: 33279 - DNA, 80 bp, synthetic construct
  misc_feature 1..80: note = Artificially Synthesized Probe
  source 1..80: mol_type = other DNA
atgttttgcttctgtgttttttaatgatacttttgaaggcataagtttttttagcatgcagtttccttgatagctttgta

SEQ ID NO: 33280 - DNA, 80 bp, synthetic construct
  misc_feature 1..80: note = Artificially Synthesized Probe
  source 1..80: mol_type = other DNA
cccgaggatgacgtcttctttattgccaatgtgaaaatagaagatatgggaatctatagctgcatggcacaaaatacagc

SEQ ID NO: 33281 - DNA, 80 bp, synthetic construct
  misc_feature 1..80: note = Artificially Synthesized Probe
  source 1..80: mol_type = other DNA
tttgttttttcttccttattacaatacttttcttcgtggaactcaaatccagggtaaattctactttccagttctctatt

SEQ ID NO: 33282 - DNA, 80 bp, synthetic construct
  misc_feature 1..80: note = Artificially Synthesized Probe
  source 1..80: mol_type = other DNA
gtctcaactggactaaagatgatgggcctttgctggtgacagaacgacatttctttgctgcagccaatcagcttctcatc

SEQ ID NO: 33283 - DNA, 80 bp, synthetic construct
  misc_feature 1..80: note = Artificially Synthesized Probe
  source 1..80: mol_type = other DNA
acctctttgaggaaagaattttgtttatttgagatagggtgttactgtaatgcccaggtcagagtgtatcggtacattca

SEQ ID NO: 33284 - DNA, 80 bp, synthetic construct
  misc_feature 1..80: note = Artificially Synthesized Probe
  source 1..80: mol_type = other DNA
gcggtcctaggtacgtacagtttttcttgctaatagtatcaaagtggaacacatttgcaaaatagtcttctgagtgttgg

SEQ ID NO: 33285 - DNA, 80 bp, synthetic construct
  misc_feature 1..80: note = Artificially Synthesized Probe
  source 1..80: mol_type = other DNA
gagagatgtaaagagttccctaattaaatgaacctgacatcccaacacgtagagatgcgtacccatacacagagttcttc

SEQ ID NO: 33286 - DNA, 80 bp, synthetic construct
  misc_feature 1..80: note = Artificially Synthesized Probe
  source 1..80: mol_type = other DNA
gccactgctcctggcctgttgcatgattttgaataagtaactcactctttatttctcactctctcttctctccttcatca

SEQ ID NO: 33287 - DNA, 80 bp, synthetic construct
  misc_feature 1..80: note = Artificially Synthesized Probe
  source 1..80: mol_type = other DNA
cacagaaatggcttgaaacttcacctactttataaagtaagtgctcaatacatgctagcaatgatgatgacaacttttga

SEQ ID NO: 33288 - DNA, 80 bp, synthetic construct
  misc_feature 1..80: note = Artificially Synthesized Probe
  source 1..80: mol_type = other DNA
ggaaacaacttttgtgggggtaacaggatcacactactgaaaattcagaggccatacacaaaaagcttttaaaaggtttc

SEQ ID NO: 33289 - DNA, 80 bp, synthetic construct
  misc_feature 1..80: note = Artificially Synthesized Probe
  source 1..80: mol_type = other DNA
attttcctgcctcagcctcctgagtagctgggattacaggcatgtgcaaccacaaccggctaattttttgtatctttata

SEQ ID NO: 33290 - DNA, 80 bp, synthetic construct
  misc_feature 1..80: note = Artificially Synthesized Probe
  source 1..80: mol_type = other DNA
ctacttcatgtcccacattagatcatttactcctgccagaaccatccctgcaagtatctgagttaggctcaccttttttt

SEQ ID NO: 33291 - DNA, 80 bp, synthetic construct
  misc_feature 1..80: note = Artificially Synthesized Probe
  source 1..80: mol_type = other DNA
ggggtatcctagcttcttcttactcgaagtctggtctgttgactatcagcatcaccgttacctaagagcttgttagaaat

SEQ ID NO: 33292 - DNA, 80 bp, synthetic construct
  misc_feature 1..80: note = Artificially Synthesized Probe
  source 1..80: mol_type = other DNA
cactactgataattcttgtctttcattctcagaaacattgcagcggcccgtgtggaacataaacagagaactaggcctgc

SEQ ID NO: 33293 - DNA, 80 bp, synthetic construct
  misc_feature 1..80: note = Artificially Synthesized Probe
  source 1..80: mol_type = other DNA
ttctgggaagtgtgcctgggattcttcagtggtttcaggcagatagttgagactggggctttgatattcaaggtctttgg

SEQ ID NO: 33294 - DNA, 80 bp, synthetic construct
  misc_feature 1..80: note = Artificially Synthesized Probe
  source 1..80: mol_type = other DNA
ccgctaggatacaaatcactatcactgtccatatttgagtctgcaaatcttgtcattgtctgctttaatgctctttgagt

SEQ ID NO: 33295 - DNA, 80 bp, synthetic construct
  misc_feature 1..80: note = Artificially Synthesized Probe
  source 1..80: mol_type = other DNA
atgttgactcagattgtggattttccactttcctctgttttccctattttctcccctgggaaatcttgcagatgatgcat

SEQ ID NO: 33296 - DNA, 80 bp, synthetic construct
  misc_feature 1..80: note = Artificially Synthesized Probe
  source 1..80: mol_type = other DNA
caacctctgcctcccgagttcaagcccttcttctgcctcagcctcccaagtacctgggattacaggcatgcaccaccatg

SEQ ID NO: 33297 - DNA, 80 bp, synthetic construct
  misc_feature 1..80: note = Artificially Synthesized Probe
  source 1..80: mol_type = other DNA
agaccttgtacgcttcctgagtctgcttattactggctttgtaatcaagggtgagtctttttacttctctaggctagatt

SEQ ID NO: 33298 - DNA, 80 bp, synthetic construct
  misc_feature 1..80: note = Artificially Synthesized Probe
  source 1..80: mol_type = other DNA
ggaattcctgaaacttttcattattgcatatgtttctgatcaagcaatatgttaaccctctaagtaggattagtgtccca

SEQ ID NO: 33299 - DNA, 80 bp, synthetic construct
  misc_feature 1..80: note = Artificially Synthesized Probe
  source 1..80: mol_type = other DNA
catgtttaaaaacagctgtcttcacattgcccattgtgaggttgtaaaaggaagttaagatgtcaagcaatttagattct

SEQ ID NO: 33300 - DNA, 80 bp, synthetic construct
  misc_feature 1..80: note = Artificially Synthesized Probe
  source 1..80: mol_type = other DNA
aatttttattcttgtttcttcttatctgtgggactccaattagaatggggttgagattgtggcattcagttttataccaa

SEQ ID NO: 33301 - DNA, 80 bp, synthetic construct
  misc_feature 1..80: note = Artificially Synthesized Probe
  source 1..80: mol_type = other DNA
attttgtcacacatcagaatgtatattttatagagcatgtgtttgtctacttgtttgtctactataatatgtctttaata

SEQ ID NO: 33302 - DNA, 80 bp, synthetic construct
  misc_feature 1..80: note = Artificially Synthesized Probe
  source 1..80: mol_type = other DNA
tgctgcagtaaatactgaatttctccttaagagctgtgggaatctgacaagccaggaaggtagaaacaagggagaagtga

SEQ ID NO: 33303 - DNA, 80 bp, synthetic construct
  misc_feature 1..80: note = Artificially Synthesized Probe
  source 1..80: mol_type = other DNA
acacacacacacacagaaaaattagctgggtatggtggcaggtgcccataatcccagctacttgggaggctgaggcaggg

SEQ ID NO: 33304 - DNA, 80 bp, synthetic construct
  misc_feature 1..80: note = Artificially Synthesized Probe
  source 1..80: mol_type = other DNA
ctgaacctagagatacctggaaacccagcttagggaagtaaaaaaaaaatcactgcatctcataattattgagatatttt

SEQ ID NO: 33305 - DNA, 80 bp, synthetic construct
  misc_feature 1..80: note = Artificially Synthesized Probe
  source 1..80: mol_type = other DNA
agaggatcggaaattattcacaacacatatctgaggaaggactcacacctagacctgggaataacgctaagaccaggctg

SEQ ID NO: 33306 - DNA, 80 bp, synthetic construct
  misc_feature 1..80: note = Artificially Synthesized Probe
  source 1..80: mol_type = other DNA
taaactcttagctagtctgatcagggggaaaagaaaacacaaatggcccagagcaggaatgagaatggacatcactgcac

SEQ ID NO: 33307 - DNA, 80 bp, synthetic construct
  misc_feature 1..80: note = Artificially Synthesized Probe
  source 1..80: mol_type = other DNA
ctatacaaactatggcagaacttgtttcaggaggcccacttaatgcaatatcaaaccatgacagacacatcacatgacaa

SEQ ID NO: 33308 - DNA, 80 bp, synthetic construct
  misc_feature 1..80: note = Artificially Synthesized Probe
  source 1..80: mol_type = other DNA
tggacaccggagactgttgagacgccgactggagtcacacacggcagtcaacgcgtggacaccggagactgttgagacgc

SEQ ID NO: 33309 - DNA, 80 bp, synthetic construct
  misc_feature 1..80: note = Artificially Synthesized Probe
  source 1..80: mol_type = other DNA
aaaaaagcctatgcagcaaataatctgaaagttaagggagaaatggatcctgactgcaacccacactggaaacgtacact

SEQ ID NO: 33310 - DNA, 80 bp, synthetic construct
  misc_feature 1..80: note = Artificially Synthesized Probe
  source 1..80: mol_type = other DNA
tgttcaccacagctatttccaagtgagtgttattaccccagaaaggaagcaactcaaatatccacccacaataaagtgca

SEQ ID NO: 33311 - DNA, 80 bp, synthetic construct
  misc_feature 1..80: note = Artificially Synthesized Probe
  source 1..80: mol_type = other DNA
ccaggccacagtctctgactgtccacagaaccacacgctccacatcttcccctcaaactcaactcaagcgctcttggctt

SEQ ID NO: 33312 - DNA, 80 bp, synthetic construct
  misc_feature 1..80: note = Artificially Synthesized Probe
  source 1..80: mol_type = other DNA
gagcagttcatgctgaagtggaaagctcagggtctctgtgataggcccatggtgttatttatttacttactgaaagggtc

SEQ ID NO: 33313 - DNA, 80 bp, synthetic construct
  misc_feature 1..80: note = Artificially Synthesized Probe
  source 1..80: mol_type = other DNA
ccttcatttattttttaggcctttgctatttttgaatcggtaacacatgcctgcagttcaaagtttaaaaggcacagatg

SEQ ID NO: 33314 - DNA, 80 bp, synthetic construct
  misc_feature 1..80: note = Artificially Synthesized Probe
  source 1..80: mol_type = other DNA
tcgattttggcttcgaagtgcttgagctcctcctggaacaaggtttccataggtgagtgttcccttcccgtgctcgccac

SEQ ID NO: 33315 - DNA, 80 bp, synthetic construct
  misc_feature 1..80: note = Artificially Synthesized Probe
  source 1..80: mol_type = other DNA
accaaggccacgctcagacgtgaacacggacaaaagaaccaaagcccctccctccagagcctggccccgcccctgaaaca

SEQ ID NO: 33316 - DNA, 80 bp, synthetic construct
  misc_feature 1..80: note = Artificially Synthesized Probe
  source 1..80: mol_type = other DNA
aactgcatcgcaggcctacaaggtggtccagcccccagcactacggccaaaagcctacggctgacagtcaccagcaccag

SEQ ID NO: 33317 - DNA, 80 bp, synthetic construct
  misc_feature 1..80: note = Artificially Synthesized Probe
  source 1..80: mol_type = other DNA
gctgctcccaggcccgctgccgccactgccctctgctagtctccaggtacaaggctggggacggcgagtgaccttcacgg

SEQ ID NO: 33318 - DNA, 80 bp, synthetic construct
  misc_feature 1..80: note = Artificially Synthesized Probe
  source 1..80: mol_type = other DNA
cccagaggtcttcgcctaagagggaaacaaggcctggagtgaacccgccgcgggctcgtgtggccagggccgctcttcag

SEQ ID NO: 33319 - DNA, 80 bp, synthetic construct
  misc_feature 1..80: note = Artificially Synthesized Probe
  source 1..80: mol_type = other DNA
gggcacctttctaatcacagaggcacgtccacggcaccactcactacattaaaaatccgacacggagtaaagaacgcagc

SEQ ID NO: 33320 - DNA, 80 bp, synthetic construct
  misc_feature 1..80: note = Artificially Synthesized Probe
  source 1..80: mol_type = other DNA
gcagactgtgcagggtggcagggctttctgacagcacacatcttatatttattgggaggaaaaacagtttctaaaggaga

SEQ ID NO: 33321 - DNA, 80 bp, synthetic construct
  misc_feature 1..80: note = Artificially Synthesized Probe
  source 1..80: mol_type = other DNA
atgcatgcttcaaagctcaaccacatgctgggcctgtcttccatggcagggaatttatacctgaaataactattttaggc

SEQ ID NO: 33322 - DNA, 80 bp, synthetic construct
  misc_feature 1..80: note = Artificially Synthesized Probe
  source 1..80: mol_type = other DNA
cccacactccctgcctggggagtgaagtggccctgggggcgcggtgggggtgaggacaggagcgaaccccagagcagagc

SEQ ID NO: 33323 - DNA, 80 bp, synthetic construct
  misc_feature 1..80: note = Artificially Synthesized Probe
  source 1..80: mol_type = other DNA
tctctgagcctgtcaaatgggacgacaacgagttttgaggagtaggtgttagagcatcaggcctaacgaaggaactccgt

SEQ ID NO: 33324 - DNA, 80 bp, synthetic construct
  misc_feature 1..80: note = Artificially Synthesized Probe
  source 1..80: mol_type = other DNA
gcgcatgacaaccaagtgtccattctgatgacatctggagtatgtccccaaaacttcaagatgctagggcagacctgctt

SEQ ID NO: 33325 - DNA, 80 bp, synthetic construct
  misc_feature 1..80: note = Artificially Synthesized Probe
  source 1..80: mol_type = other DNA
tcactgtcagcaggattcaaaccccacaggtttagacaagaactcaacatggacaccagtctctaggcctgtctgtatac

SEQ ID NO: 33326 - DNA, 80 bp, synthetic construct
  misc_feature 1..80: note = Artificially Synthesized Probe
  source 1..80: mol_type = other DNA
cctaacgcctgtctctgatcatgtgtgtttaaatatggagtctgttttcccttagacgtttgaaatattaatcttttatc

SEQ ID NO: 33327 - DNA, 80 bp, synthetic construct
  misc_feature 1..80: note = Artificially Synthesized Probe
  source 1..80: mol_type = other DNA
aattcagattactgagccaagatccccaatggtaaaaagatagcaaacggtaggcacaaaatgaatggcagggcctaggg

SEQ ID NO: 33328 - DNA, 80 bp, synthetic construct
  misc_feature 1..80: note = Artificially Synthesized Probe
  source 1..80: mol_type = other DNA
gattctttcacctctctcaagttaaatgttaacgcatcaagttagaagtaccctgtggaaaccaactgcagaaaagaacc

SEQ ID NO: 33329 - DNA, 80 bp, synthetic construct
  misc_feature 1..80: note = Artificially Synthesized Probe
  source 1..80: mol_type = other DNA
ccactggctggcccatcctcagaggcccttctcaagccaggggggacgcttgagagctggggtggggctctgagggctcc

SEQ ID NO: 33330 - DNA, 80 bp, synthetic construct
  misc_feature 1..80: note = Artificially Synthesized Probe
  source 1..80: mol_type = other DNA
tgacacactacgcaatcctatatgccaggatgtggctttacatgcagaaaacagggacacgatgttttcatgaagcaaac

SEQ ID NO: 33331 - DNA, 80 bp, synthetic construct
  misc_feature 1..80: note = Artificially Synthesized Probe
  source 1..80: mol_type = other DNA
aggggcagcctgagggcaggtgtattgctgcaggaggcctgggctgacaaagacagaggaccagctggaggtggctggag

SEQ ID NO: 33332 - DNA, 80 bp, synthetic construct
  misc_feature 1..80: note = Artificially Synthesized Probe
  source 1..80: mol_type = other DNA
gagcgccctgttaagactgactttcagcattcccaaggtcgcgttttatgtgctctaaaccgatcccatctcctcacctc

SEQ ID NO: 33333 - DNA, 80 bp, synthetic construct
  misc_feature 1..80: note = Artificially Synthesized Probe
  source 1..80: mol_type = other DNA
atggccatcaatgtacagactgcctgtctggcttagcacatcaaaagtctaatcaaggctcaaaccaccatccttagaaa

SEQ ID NO: 33334 - DNA, 80 bp, synthetic construct
  misc_feature 1..80: note = Artificially Synthesized Probe
  source 1..80: mol_type = other DNA
ctggtttcaaactgacaaaggtgtagggagaaaataattgaatggtttctgaaggccacactagccctttagccaagagt

SEQ ID NO: 33335 - DNA, 80 bp, synthetic construct
  misc_feature 1..80: note = Artificially Synthesized Probe
  source 1..80: mol_type = other DNA
actgccttacataactgtggatatgatgcccagtttctaatgatttgtccaaaatcgtctgagaaaaccaggccaataca

SEQ ID NO: 33336 - DNA, 80 bp, synthetic construct
  misc_feature 1..80: note = Artificially Synthesized Probe
  source 1..80: mol_type = other DNA
gactcagaggggatttttacatcaggtaggaggataggccagatcactgctaaggctccaagtctgtatatttggcattt

SEQ ID NO: 33337 - DNA, 80 bp, synthetic construct
  misc_feature 1..80: note = Artificially Synthesized Probe
  source 1..80: mol_type = other DNA
cctaaaaagaagccctggtgggcattatagataaggtcaggccagagctcctccactttcctcaaatgaaggcttctgga

SEQ ID NO: 33338 - DNA, 80 bp, synthetic construct
  misc_feature 1..80: note = Artificially Synthesized Probe
  source 1..80: mol_type = other DNA
aaagtatagaagtccttaaaaaaaacagtccctcatccctctgcaggctgtgggaagaaggagcagaagagcaacatggt

SEQ ID NO: 33339 - DNA, 80 bp, synthetic construct
  misc_feature 1..80: note = Artificially Synthesized Probe
  source 1..80: mol_type = other DNA
ggtctacaattggttaatatgtagatgaagaaatacttagtactttcaagtggctctcacgcctgtaattccaatacttt

SEQ ID NO: 33340 - DNA, 80 bp, synthetic construct
  misc_feature 1..80: note = Artificially Synthesized Probe
  source 1..80: mol_type = other DNA
gtactctatggtgccggcgggtacagacgcatctgcagattcataatcattttgtcacactcatcaaaggcaaacttaag

SEQ ID NO: 33341 - DNA, 80 bp, synthetic construct
  misc_feature 1..80: note = Artificially Synthesized Probe
  source 1..80: mol_type = other DNA
ttctcagacacatcttccctctttcagtcctctgttttctgttttcaaatttttttccaaagacccgcttccctgccaac

SEQ ID NO: 33342 - DNA, 80 bp, synthetic construct
  misc_feature 1..80: note = Artificially Synthesized Probe
  source 1..80: mol_type = other DNA
agcataatgttgagaatacaagggtcatgaaaaatagctgaaatctgaaatgcttcaacatcagaaactttctgagtgct

SEQ ID NO: 33343 - DNA, 80 bp, synthetic construct
  misc_feature 1..80: note = Artificially Synthesized Probe
  source 1..80: mol_type = other DNA
ttactcccagtgcctaggatatgcctgtcctacagtgccccatacatgttagagacaaaaataaaacctatcttccctgt

SEQ ID NO: 33344 - DNA, 80 bp, synthetic construct
  misc_feature 1..80: note = Artificially Synthesized Probe
  source 1..80: mol_type = other DNA
gttagttgcaaatggttgagaacctaaaccacatggactcaaatgtaatcatccacagtacctggcattttgtatctact

SEQ ID NO: 33345 - DNA, 80 bp, synthetic construct
  misc_feature 1..80: note = Artificially Synthesized Probe
  source 1..80: mol_type = other DNA
ttcagagatgtctgtctgtagcttaagataccacttctcagcttgtgcaaacagctgtcgcagaagtaacacattggtat

SEQ ID NO: 33346 - DNA, 80 bp, synthetic construct
  misc_feature 1..80: note = Artificially Synthesized Probe
  source 1..80: mol_type = other DNA
aataataaaaactagcttatcttaaagttctactgaacactccacaaaaatgaatatcatcatcaacaatagcattagaa

SEQ ID NO: 33347 - DNA, 80 bp, synthetic construct
  misc_feature 1..80: note = Artificially Synthesized Probe
  source 1..80: mol_type = other DNA
tcgccaattaaattgttgctttcatctgctgggggataggaaaccagattaccagatgagtttaatggactgaatggtct

SEQ ID NO: 33348 - DNA, 80 bp, synthetic construct
  misc_feature 1..80: note = Artificially Synthesized Probe
  source 1..80: mol_type = other DNA
agttttgaagatctgatcaaagagccaacaatgaaaatgcataagatatcctgtggtcgagactgctagatctccatcaa

SEQ ID NO: 33349 - DNA, 80 bp, synthetic construct
  misc_feature 1..80: note = Artificially Synthesized Probe
  source 1..80: mol_type = other DNA
tagtcacacattagtatgggcaagaatatcccacaatttagaaatatcacaaaacaatgtcacaatttgctaaaaacaaa

SEQ ID NO: 33350 - DNA, 80 bp, synthetic construct
  misc_feature 1..80: note = Artificially Synthesized Probe
  source 1..80: mol_type = other DNA
ggtaaatgacagaaaagttcctttaaaatggattggaatgaagaaagggggtaaaagtggacagctgagttcaaaaggaa

SEQ ID NO: 33351 - DNA, 80 bp, synthetic construct
  misc_feature 1..80: note = Artificially Synthesized Probe
  source 1..80: mol_type = other DNA
tagctcacaggtgtcttctcagctcccagacagcgcttggaacacagtgtggactaaatagaaattctggttgctgaagt

SEQ ID NO: 33352 - DNA, 80 bp, synthetic construct
  misc_feature 1..80: note = Artificially Synthesized Probe
  source 1..80: mol_type = other DNA
agaaaatggggaaggagggtaggttgtttagaagcctctggttgctaacggaaaccgaggcacgtggactgcaattatgc

SEQ ID NO: 33353 - DNA, 80 bp, synthetic construct
  misc_feature 1..80: note = Artificially Synthesized Probe
  source 1..80: mol_type = other DNA
aaattcctgggccttatctccagaaattctgattcacaagtctagcttgggtccttgggatctgcactttttaaccgatg

SEQ ID NO: 33354 - DNA, 80 bp, synthetic construct
  misc_feature 1..80: note = Artificially Synthesized Probe
  source 1..80: mol_type = other DNA
ttcgagccgtgagggagaacagctccatcctactttactagtgatcttcttaggctctgtttttatttattttaattgct

SEQ ID NO: 33355 - DNA, 80 bp, synthetic construct
  misc_feature 1..80: note = Artificially Synthesized Probe
  source 1..80: mol_type = other DNA
taggcaagaggctattttcagttgctttcaaaacaccctagtgaccagcagggtattggagagtgctgacaaactagatt

SEQ ID NO: 33356 - DNA, 80 bp, synthetic construct
  misc_feature 1..80: note = Artificially Synthesized Probe
  source 1..80: mol_type = other DNA
aggttttaacaggagtgtggaaaagttggggatgagtgtgatgattgtgaaattgagagttgtcttggacagggaaccag

SEQ ID NO: 33357 - DNA, 80 bp, synthetic construct
  misc_feature 1..80: note = Artificially Synthesized Probe
  source 1..80: mol_type = other DNA
attttgagcccaagcatttacagttgctccttgaacaacacaagggataatggtgctgaccccatgcacagtcaaaaatc

SEQ ID NO: 33358 - DNA, 80 bp, synthetic construct
  misc_feature 1..80: note = Artificially Synthesized Probe
  source 1..80: mol_type = other DNA
tgacttcatggacaaaagcattgatggaactaatccagaataagggtgcttgttgtccaggtcttcttgtacaaccaaaa

SEQ ID NO: 33359 - DNA, 80 bp, synthetic construct
  misc_feature 1..80: note = Artificially Synthesized Probe
  source 1..80: mol_type = other DNA
ttacaatggtccttatgctggagggcagctgcagctgcagacctaaatctatggtacatatcaagtaattcaactttttc

SEQ ID NO: 33360 - DNA, 80 bp, synthetic construct
  misc_feature 1..80: note = Artificially Synthesized Probe
  source 1..80: mol_type = other DNA
tgaattgaaccttcagggattagcaaatgttagcctgggagaagcaaggcagaaaggacagagggaacatagcaaacacg

SEQ ID NO: 33361 - DNA, 80 bp, synthetic construct
  misc_feature 1..80: note = Artificially Synthesized Probe
  source 1..80: mol_type = other DNA
tgtctaacatgctatgtttaatcctcaaacagcctcatgagatgcatactatgattactcttatttgtgaagagagaatg

SEQ ID NO: 33362 - DNA, 80 bp, synthetic construct
  misc_feature 1..80: note = Artificially Synthesized Probe
  source 1..80: mol_type = other DNA
tcatagccagcagctgttccacgccttgttgaaattttgaactcggaaatgcttctcgctaatcatcaccaactctctga

SEQ ID NO: 33363 - DNA, 80 bp, synthetic construct
  misc_feature 1..80: note = Artificially Synthesized Probe
  source 1..80: mol_type = other DNA
cctaaagcattcctagtcctgacacgttcatctccctcccttctcttaaatcttaacatatgatcctcctgctacttttc

SEQ ID NO: 33364 - DNA, 80 bp, synthetic construct
  misc_feature 1..80: note = Artificially Synthesized Probe
  source 1..80: mol_type = other DNA
atgagacctagattggaaaccactcaaaggaacatgccctttcctcttcaaacactgttaccaacatttagatactttca

SEQ ID NO: 33365 - DNA, 80 bp, synthetic construct
  misc_feature 1..80: note = Artificially Synthesized Probe
  source 1..80: mol_type = other DNA
ctgtcattcgctctgcattttggctttcttctcctcctccctactgaaacagacttctcaaaagccatcaaatgagctga

SEQ ID NO: 33366 - DNA, 80 bp, synthetic construct
  misc_feature 1..80: note = Artificially Synthesized Probe
  source 1..80: mol_type = other DNA
ctcctgctgcttccagcacatcctaggattacatctgaaataactcaaaatcatcaccattcccttctttatgctaagag

SEQ ID NO: 33367 - DNA, 80 bp, synthetic construct
  misc_feature 1..80: note = Artificially Synthesized Probe
  source 1..80: mol_type = other DNA
attcccattaaactacaattgacatgcttcacagaattagaaaaaaaattttttaattcatatagaaccaaaaaagagcc

SEQ ID NO: 33368 - DNA, 80 bp, synthetic construct
  misc_feature 1..80: note = Artificially Synthesized Probe
  source 1..80: mol_type = other DNA
acagacacgtctcaaaagaagacatttatgcagccaacaaacatgaaaaaaactcaacatcactgattggtagagaaatg

SEQ ID NO: 33369 - DNA, 80 bp, synthetic construct
  misc_feature 1..80: note = Artificially Synthesized Probe
  source 1..80: mol_type = other DNA
gttggacaaataggccaaaagacaatttttaaaagtagatcttatcctttggagaagttttgggtccaaaacaaaattga

SEQ ID NO: 33370 - DNA, 80 bp, synthetic construct
  misc_feature 1..80: note = Artificially Synthesized Probe
  source 1..80: mol_type = other DNA
tgagcaacctcaatgctttaaaaatggaaatcttgagaaaataagaagctatagacacaactgttttgaaagtgcctttg

SEQ ID NO: 33371 - DNA, 80 bp, synthetic construct
  misc_feature 1..80: note = Artificially Synthesized Probe
  source 1..80: mol_type = other DNA
gaagtagttttctcatttttaaatgacaaaaattaacgaatgaatgaaagtggatctttcacagagaacattacatggct

SEQ ID NO: 33372 - DNA, 80 bp, synthetic construct
  misc_feature 1..80: note = Artificially Synthesized Probe
  source 1..80: mol_type = other DNA
ctcacctagtctcttaaagggttgcctcagcaaggaaacccaacccaaggagtttaataagtacgaaatcgttgaccatt

SEQ ID NO: 33373 - DNA, 80 bp, synthetic construct
  misc_feature 1..80: note = Artificially Synthesized Probe
  source 1..80: mol_type = other DNA
tctacagctttaatgtgtgctgaggaggggtgggggaatgtttaaaagaagtcctatgagtaagtagaccttgcgatgat

SEQ ID NO: 33374 - DNA, 80 bp, synthetic construct
  misc_feature 1..80: note = Artificially Synthesized Probe
  source 1..80: mol_type = other DNA
atcttacttgctgtaagtaagaaaaaagaaagtaatggctttggaggcttagaagcatcttaaagtatgggccgatctac

SEQ ID NO: 33375 - DNA, 80 bp, synthetic construct
  misc_feature 1..80: note = Artificially Synthesized Probe
  source 1..80: mol_type = other DNA
atcccctgtgacgcagtctagccaaagatgtttaacttgggtctaatcaatatgtagatgtaacttccaggaaatacaag

SEQ ID NO: 33376 - DNA, 80 bp, synthetic construct
  misc_feature 1..80: note = Artificially Synthesized Probe
  source 1..80: mol_type = other DNA
cagtgcagaatatgcaactttattacaatatagtcctaattttatgtattaataagtgtaaaagatttagcccccaggtt

SEQ ID NO: 33377 - DNA, 80 bp, synthetic construct
  misc_feature 1..80: note = Artificially Synthesized Probe
  source 1..80: mol_type = other DNA
atgcacagactcttgcaaagaaaagatgaacacacaccaaacttttaatgataaatatgtatgacgaactaggaaaggga

SEQ ID NO: 33378 - DNA, 80 bp, synthetic construct
  misc_feature 1..80: note = Artificially Synthesized Probe
  source 1..80: mol_type = other DNA
tgagggctttttcatgtcactaaaagttctttgaaaacataccatggcttcacacccttccactgcctggatctacagta

SEQ ID NO: 33379 - DNA, 80 bp, synthetic construct
  misc_feature 1..80: note = Artificially Synthesized Probe
  source 1..80: mol_type = other DNA
tgctagtctgaacacatccatcaaccttgcttaaagaatctttggggtgaattggaattaaaaggcaaggctggaagttt

SEQ ID NO: 33380 - DNA, 80 bp, synthetic construct
  misc_feature 1..80: note = Artificially Synthesized Probe
  source 1..80: mol_type = other DNA
tttagagtggatttttagccaagttctggttctagattctcagcatttagcagaaatgtttagtgagttactcacataca

SEQ ID NO: 33381 - DNA, 80 bp, synthetic construct
  misc_feature 1..80: note = Artificially Synthesized Probe
  source 1..80: mol_type = other DNA
cacacctcccaaacgtggatataagactctcccttgacatccaaatgtggtcctggcccagcatcatgggcattgcctga

SEQ ID NO: 33382 - DNA, 80 bp, synthetic construct
  misc_feature 1..80: note = Artificially Synthesized Probe
  source 1..80: mol_type = other DNA
actagaaagttgtaatgaagatgtttcttgaaatgatttctgcagagcagcaaccttccaggcaacccactttctctcca

SEQ ID NO: 33383 - DNA, 80 bp, synthetic construct
  misc_feature 1..80: note = Artificially Synthesized Probe
  source 1..80: mol_type = other DNA
caatttattcttgaaaacactctcatagtaaagcactcgttgattacagacaaacgaaacgtctccttcaccaccttcca

SEQ ID NO: 33384 - DNA, 80 bp, synthetic construct
  misc_feature 1..80: note = Artificially Synthesized Probe
  source 1..80: mol_type = other DNA
caactatttcctgtagaaatcctttctatagtgggagcttgggatttggctggtgtttatcagttgcccacgtaaggaag

SEQ ID NO: 33385 - DNA, 80 bp, synthetic construct
  misc_feature 1..80: note = Artificially Synthesized Probe
  source 1..80: mol_type = other DNA
aagctgaaactctcactgaggagatgctaatttatgagcgtagtgagatttgcaacaaaccagcccaggaatagaacagg

SEQ ID NO: 33386 - DNA, 80 bp, synthetic construct
  misc_feature 1..80: note = Artificially Synthesized Probe
  source 1..80: mol_type = other DNA
ttttcttcttacaatgtcttgctcataataattctgtttcccctctcccctcgataaagctcaccataacagctcatcta

SEQ ID NO: 33387 - DNA, 80 bp, synthetic construct
  misc_feature 1..80: note = Artificially Synthesized Probe
  source 1..80: mol_type = other DNA
tattcccttcccttcccaccactcagccattctctatcacattaccctgtaggtacattaatttcattgatgtctccaat

SEQ ID NO: 33388 - DNA, 80 bp, synthetic construct
  misc_feature 1..80: note = Artificially Synthesized Probe
  source 1..80: mol_type = other DNA
gctctagcacttactagctatatgaccttggacaaatcccttgatctctctgagtttcaatttcattgtctgcaaagcat

SEQ ID NO: 33389 - DNA, 80 bp, synthetic construct
  misc_feature 1..80: note = Artificially Synthesized Probe
  source 1..80: mol_type = other DNA
tgggtgccaaactcacagattacagcaatcctagggaatagctattagtgtccctgttttacaaaagagaaatctgaggc

SEQ ID NO: 33390 - DNA, 80 bp, synthetic construct
  misc_feature 1..80: note = Artificially Synthesized Probe
  source 1..80: mol_type = other DNA
ggatcccaactcctgcagcccaagatatagcgaataaaatcgtgaaactattgaaaaataaactccaagtttaaaagata

SEQ ID NO: 33391 - DNA, 80 bp, synthetic construct
  misc_feature 1..80: note = Artificially Synthesized Probe
  source 1..80: mol_type = other DNA
tcccttgcaggggcctgaccttttgatgtgattgttttgatgtggccatttagaaactgaggctattttcatgtagctat

SEQ ID NO: 33392 - DNA, 80 bp, synthetic construct
  misc_feature 1..80: note = Artificially Synthesized Probe
  source 1..80: mol_type = other DNA
tactctcaccgtatgatctagcaatcgtgcttctcagtatgtacccaaatgagctgaaacttatggccacacaaagatct

SEQ ID NO: 33393 - DNA, 80 bp, synthetic construct
  misc_feature 1..80: note = Artificially Synthesized Probe
  source 1..80: mol_type = other DNA
tcatttagacgtttggttctggtgcctgcagaaccaaaggttttgctgtttttttgttgtttcccatgcagcaatcagtg

SEQ ID NO: 33394 - DNA, 80 bp, synthetic construct
  misc_feature 1..80: note = Artificially Synthesized Probe
  source 1..80: mol_type = other DNA
tcctctgactggtctcatgactcaggtgctgcaagcacaaaacctcaggagttgaggatgacacatatttcccttataaa

SEQ ID NO: 33395 - DNA, 80 bp, synthetic construct
  misc_feature 1..80: note = Artificially Synthesized Probe
  source 1..80: mol_type = other DNA
cactggacagatagctatagaatatttccacattgcagaaagtgctattagatggctctattctagatcctcaagactta

SEQ ID NO: 33396 - DNA, 80 bp, synthetic construct
  misc_feature 1..80: note = Artificially Synthesized Probe
  source 1..80: mol_type = other DNA
tttctagtccacagttattcctgaaatgctcttcagttgccaggtacagcacttggtccataacccaaaggggatactat

SEQ ID NO: 33397 - DNA, 80 bp, synthetic construct
  misc_feature 1..80: note = Artificially Synthesized Probe
  source 1..80: mol_type = other DNA
tgcattaattcttcaaagtataagtcaaaaaggtcagcgcttctacaatgtggcagtatctttgcagatgcccacatcat

SEQ ID NO: 33398 - DNA, 80 bp, synthetic construct
  misc_feature 1..80: note = Artificially Synthesized Probe
  source 1..80: mol_type = other DNA
ttccaaggacgcaatcaaacacgggggagaaacaaattcagccaagaaagtcaagtaagggaacatcttcttccctctag

SEQ ID NO: 33399 - DNA, 80 bp, synthetic construct
  misc_feature 1..80: note = Artificially Synthesized Probe
  source 1..80: mol_type = other DNA
ctgatgtgcaaaaccttactagatttgccccaatttgaaggtgtctgtggctttccagcactccatgtgttcctagctac

SEQ ID NO: 33400 - DNA, 80 bp, synthetic construct
  misc_feature 1..80: note = Artificially Synthesized Probe
  source 1..80: mol_type = other DNA
acagtttccccttatcccagcagttttcagctttttgtttctggttgcaaatgattgactccgctgattgctggaagcta

SEQ ID NO: 33401 - DNA, 80 bp, synthetic construct
  misc_feature 1..80: note = Artificially Synthesized Probe
  source 1..80: mol_type = other DNA
gtgttacagagaaaaagtcagaaaggaagtatctcagaaacttaacaatggctaaactaggaaagggtgcttcaggagtt

SEQ ID NO: 33402 - DNA, 80 bp, synthetic construct
  misc_feature 1..80: note = Artificially Synthesized Probe
  source 1..80: mol_type = other DNA
agacatgacctccttcttccaattcctaccacaactcatagcactttccctttgttgttatttgcagccatgacttactc

SEQ ID NO: 33403 - DNA, 80 bp, synthetic construct
  misc_feature 1..80: note = Artificially Synthesized Probe
  source 1..80: mol_type = other DNA
agaaacctttatagaaagctagtgtacaacttagttgcataaagtagcctcggtgaatgtaattactagacttgctcttt

SEQ ID NO: 33404 - DNA, 80 bp, synthetic construct
  misc_feature 1..80: note = Artificially Synthesized Probe
  source 1..80: mol_type = other DNA
tgagaataccagtagggcaaattccaagcagatgcgctgcagagtcagagatgttgtgctttgtaaattttgacagatat

SEQ ID NO: 33405 - DNA, 80 bp, synthetic construct
  misc_feature 1..80: note = Artificially Synthesized Probe
  source 1..80: mol_type = other DNA
tgtcggaatgccaggtagctgatgccttcacctgtctgaagaatgtttaatgatgaaagaaatgttcataatccgttagg

SEQ ID NO: 33406 - DNA, 80 bp, synthetic construct
  misc_feature 1..80: note = Artificially Synthesized Probe
  source 1..80: mol_type = other DNA
tctccaaggagccctggctgtttagtggagaaagatatttagattccaagatcagggcactaggtgctaattatgctgtg

SEQ ID NO: 33407 - DNA, 80 bp, synthetic construct
  misc_feature 1..80: note = Artificially Synthesized Probe
  source 1..80: mol_type = other DNA
aatattaaaatgcagaatgtaagttctgacgtacatacacccttgcgaagctctcacacaacccagacagtgaacatatt

SEQ ID NO: 33408 - DNA, 80 bp, synthetic construct
  misc_feature 1..80: note = Artificially Synthesized Probe
  source 1..80: mol_type = other DNA
gaaaagcagggtggggtcatgatgttgttatggaaaggaagccaacaggttggctttataggatttatgaaagaggctat

SEQ ID NO: 33409 - DNA, 80 bp, synthetic construct
  misc_feature 1..80: note = Artificially Synthesized Probe
  source 1..80: mol_type = other DNA
gtagaaagaaaacaaatgctagaatcaggtgaccctcagagtcaaagaagtgaatgataacttcaaaggagaggttcatt

SEQ ID NO: 33410 - DNA, 80 bp, synthetic construct
  misc_feature 1..80: note = Artificially Synthesized Probe
  source 1..80: mol_type = other DNA
tataaaattacctaagggctttgattttgctcttctccaagggaaagcctgggttttacatgtagataattgaaatccag

SEQ ID NO: 33411 - DNA, 80 bp, synthetic construct
  misc_feature 1..80: note = Artificially Synthesized Probe
  source 1..80: mol_type = other DNA
tcctttttacagatgaggagaccgagactggggaaggtggtttgagggttcaaggtctcatagaaatttggaggaatagc

SEQ ID NO: 33412 - DNA, 80 bp, synthetic construct
  misc_feature 1..80: note = Artificially Synthesized Probe
  source 1..80: mol_type = other DNA
tccttctgccaagcatgccctctttcctcccttgccttcttctttcttccttgtctgtcttcctcttaacatgtctttaa

SEQ ID NO: 33413 - DNA, 80 bp, synthetic construct
  misc_feature 1..80: note = Artificially Synthesized Probe
  source 1..80: mol_type = other DNA
ggcccaaataggactaacatctactgtcctttatcaatcaattcagtgagccctgatatctaagaagccctccacaaaca

SEQ ID NO: 33414 - DNA, 80 bp, synthetic construct
  misc_feature 1..80: note = Artificially Synthesized Probe
  source 1..80: mol_type = other DNA
ctagacagatctactagaaatagatggatattacaatgtatacagatagggagagcccagctaacaggaggtagagaata

SEQ ID NO: 33415 - DNA, 80 bp, synthetic construct
  misc_feature 1..80: note = Artificially Synthesized Probe
  source 1..80: mol_type = other DNA
ccctgtgcttagaagtgctgcttgtttgattgaatgctggatgtgttgaaattcctaataatttttggaccacgggtcct

SEQ ID NO: 33416 - DNA, 80 bp, synthetic construct
  misc_feature 1..80: note = Artificially Synthesized Probe
  source 1..80: mol_type = other DNA
tgtctactggtactgcacaagagtgaagaccatgaccgacatgttccttttgaatttggcaattgctgacctcctctttc

SEQ ID NO: 33417 - DNA, 80 bp, synthetic construct
  misc_feature 1..80: note = Artificially Synthesized Probe
  source 1..80: mol_type = other DNA
cactgatgggaccagagagagtgaaagagaaaagaaaactcagaaagggatgaatctgaactatatgattacttgtagtc

SEQ ID NO: 33418 - DNA, 80 bp, synthetic construct
  misc_feature 1..80: note = Artificially Synthesized Probe
  source 1..80: mol_type = other DNA
aggccttgctggaaggctatttacttccatgcttctccttttcttactctatagtggcaacattttaaaagcttttaact

SEQ ID NO: 33419 - DNA, 80 bp, synthetic construct
  misc_feature 1..80: note = Artificially Synthesized Probe
  source 1..80: mol_type = other DNA
cttatgaacacagccatccattgaccatttccaagaggagacccagatatttacccttataggaacttgagagaataaaa

SEQ ID NO: 33420 - DNA, 80 bp, synthetic construct
  misc_feature 1..80: note = Artificially Synthesized Probe
  source 1..80: mol_type = other DNA
catcaatgcaaagctgtctcacacttccagatggttcttttgtgcttgccatctttgagtgggtttgcttggctttccag

SEQ ID NO: 33421 - DNA, 80 bp, synthetic construct
  misc_feature 1..80: note = Artificially Synthesized Probe
  source 1..80: mol_type = other DNA
tggcagtttgagttctctctctgcccaatcatgcttcctctcacatccctccaaaggcattgattcctaataaacacctt

SEQ ID NO: 33422 - DNA, 80 bp, synthetic construct
  misc_feature 1..80: note = Artificially Synthesized Probe
  source 1..80: mol_type = other DNA
ctgctgactcccttcttcaaaagtgcaccatgaaggtgtgctggcaaaggacaatggtgtcatcttcacagaatcgagaa

SEQ ID NO: 33423 - DNA, 80 bp, synthetic construct
  misc_feature 1..80: note = Artificially Synthesized Probe
  source 1..80: mol_type = other DNA
ttcacagcactcctctcatttgtaattcgctagtattcttcttcctactgattgatcctctgactcctatgtttggaccc

SEQ ID NO: 33424 - DNA, 80 bp, synthetic construct
  misc_feature 1..80: note = Artificially Synthesized Probe
  source 1..80: mol_type = other DNA
atgaaactcacaatcacagacccaagtcacaccatcacaggaacaagctgatggttatcagtacaggaagctagagagtg

SEQ ID NO: 33425 - DNA, 80 bp, synthetic construct
  misc_feature 1..80: note = Artificially Synthesized Probe
  source 1..80: mol_type = other DNA
tgaagatgcacatacccctcacccaacttcaataatgattaacattctgtccatttttggtttcagctacacttcccact

SEQ ID NO: 33426 - DNA, 80 bp, synthetic construct
  misc_feature 1..80: note = Artificially Synthesized Probe
  source 1..80: mol_type = other DNA
acacaatggtgaagattagaattgaaagaaaggaaggcatcaaggatgacttgggttttgaatctgcacgtttgggtggt

SEQ ID NO: 33427 - DNA, 80 bp, synthetic construct
  misc_feature 1..80: note = Artificially Synthesized Probe
  source 1..80: mol_type = other DNA
taggagttggatccacgtctttctgattctagaacccaatctcttagaggctgttgtactttctccccagttgaagttca

SEQ ID NO: 33428 - DNA, 80 bp, synthetic construct
  misc_feature 1..80: note = Artificially Synthesized Probe
  source 1..80: mol_type = other DNA
cttcaatccaacccactttgaacaaatcctttcctgttttttgctatcacagacattgtggccatgaagattgttgcgtg

SEQ ID NO: 33429 - DNA, 80 bp, synthetic construct
  misc_feature 1..80: note = Artificially Synthesized Probe
  source 1..80: mol_type = other DNA
cagtagcagtaatatgttctgtaaatggttcagacttaccatcttccctgggtcttggttcctcatctgtaaaagtgggc

SEQ ID NO: 33430 - DNA, 80 bp, synthetic construct
  misc_feature 1..80: note = Artificially Synthesized Probe
  source 1..80: mol_type = other DNA
gagacagatcaattagttcatttcctcctttcctcaaattctaatcaaaacagtggtgacacagcaacgttcaccaggac

SEQ ID NO: 33431 - DNA, 80 bp, synthetic construct
  misc_feature 1..80: note = Artificially Synthesized Probe
  source 1..80: mol_type = other DNA
catcagcagtcactgcctttggtgtctgttccctcaatggtccaggcttccttacattaaagtgctgcctccaccagatg

SEQ ID NO: 33432 - DNA, 80 bp, synthetic construct
  misc_feature 1..80: note = Artificially Synthesized Probe
  source 1..80: mol_type = other DNA
attgctatgctttccccccgcccggcttttgaggcttcagcttcaactgctgtctcaaaaaaagtccgttttctcatctt

SEQ ID NO: 33433 - DNA, 80 bp, synthetic construct
  misc_feature 1..80: note = Artificially Synthesized Probe
  source 1..80: mol_type = other DNA
tgaattcctgcagaaataattctcttttggagaatgctgaacgtcataccttcctgatcgtaacctcaacgtggccctaa

SEQ ID NO: 33434 - DNA, 80 bp, synthetic construct
  misc_feature 1..80: note = Artificially Synthesized Probe
  source 1..80: mol_type = other DNA
ggtgaggaggagaccagagccttcctcccagactcgcagagccacccccgcgcgagccctccgcaccacccgcacctcct

SEQ ID NO: 33435 - DNA, 80 bp, synthetic construct
  misc_feature 1..80: note = Artificially Synthesized Probe
  source 1..80: mol_type = other DNA
gcggggcctaacgcttctgagacaggcgagccgtgctccgtgctccgtgctccgggacgaagggggctgtggggtcggca

SEQ ID NO: 33436 - DNA, 80 bp, synthetic construct
  misc_feature 1..80: note = Artificially Synthesized Probe
  source 1..80: mol_type = other DNA
ctaactcgggtgccaggggtcaagggcactggagtcccagaggccggcatggaagaggtggcaaggctcaggggaatgcc

SEQ ID NO: 33437 - DNA, 80 bp, synthetic construct
  misc_feature 1..80: note = Artificially Synthesized Probe
  source 1..80: mol_type = other DNA
cctcagggattacaccatcaaggtcgaacacagaacctgcatccacctcacgccccgactttccacgcgcctcccagctc

SEQ ID NO: 33438 - DNA, 80 bp, synthetic construct
  misc_feature 1..80: note = Artificially Synthesized Probe
  source 1..80: mol_type = other DNA
tgggccaggacccttggtgacgctgtgacctgcacaggcctatctgtcggacaggccccttcagggccctccagggctga

SEQ ID NO: 33439 - DNA, 80 bp, synthetic construct
  misc_feature 1..80: note = Artificially Synthesized Probe
  source 1..80: mol_type = other DNA
gcttaaggcaggagaccagtgaccatccaggtgggctgtcgggcccaggcgagcgtgtgtgtggggggtacagatgggct

SEQ ID NO: 33440 - DNA, 80 bp, synthetic construct
  misc_feature 1..80: note = Artificially Synthesized Probe
  source 1..80: mol_type = other DNA
tccagctctgctgccctccagggctccaggcccagtgaggaggagctgagggatctaattctccgattccttgctggcca

SEQ ID NO: 33441 - DNA, 80 bp, synthetic construct
  misc_feature 1..80: note = Artificially Synthesized Probe
  source 1..80: mol_type = other DNA
atggtgaaaactaaggtgtcccatgtcctctgctctttacaacttcggactatgaaaaacgagccagcagattcccgtcc

SEQ ID NO: 33442 - DNA, 80 bp, synthetic construct
  misc_feature 1..80: note = Artificially Synthesized Probe
  source 1..80: mol_type = other DNA
gcaaatgaaaaaagaactcaacgaaaaccaactacacaacaaaactttcaacgagtcggcgcgccttccactccgagtgc

SEQ ID NO: 33443 - DNA, 80 bp, synthetic construct
  misc_feature 1..80: note = Artificially Synthesized Probe
  source 1..80: mol_type = other DNA
aaccacgttcaacgtatgtacaagcggacgcttggaaagaagttagacctggctcaagtttccttagaaatcaccgttct

SEQ ID NO: 33444 - DNA, 80 bp, synthetic construct
  misc_feature 1..80: note = Artificially Synthesized Probe
  source 1..80: mol_type = other DNA
tggccgctgccgatgagcgcctccaccgcgtcctcgggcgtcaggttgagcgcctcggggttgaggtgatgctggtagcc

SEQ ID NO: 33445 - DNA, 80 bp, synthetic construct
  misc_feature 1..80: note = Artificially Synthesized Probe
  source 1..80: mol_type = other DNA
ttaacgacatctgtagtattgtcccagcaatgttcctactccctgctgagagggaacttctccccattcaaaataaatag

SEQ ID NO: 33446 - DNA, 80 bp, synthetic construct
  misc_feature 1..80: note = Artificially Synthesized Probe
  source 1..80: mol_type = other DNA
cacacaaatttcgtagcactcattagcgtgtgtttggaaaagaccaggcagagttctggtgaggatgtggagaatctctt

SEQ ID NO: 33447 - DNA, 80 bp, synthetic construct
  misc_feature 1..80: note = Artificially Synthesized Probe
  source 1..80: mol_type = other DNA
gaagattttggcgtggactggaggtctgagatgtttactgtgaaactgctctggctgggtggagacacagtggagggcag

SEQ ID NO: 33448 - DNA, 80 bp, synthetic construct
  misc_feature 1..80: note = Artificially Synthesized Probe
  source 1..80: mol_type = other DNA
cttccctgcagggctgtgacagggacagacagcgctttctaacagtggccttgggagtggtaacctgccgaggaacagct

SEQ ID NO: 33449 - DNA, 80 bp, synthetic construct
  misc_feature 1..80: note = Artificially Synthesized Probe
  source 1..80: mol_type = other DNA
aagtgacccataagccagcacctagtgtccaggagcagctggggtggtggatggtgaatatttctgtctttctcaagcat

SEQ ID NO: 33450 - DNA, 80 bp, synthetic construct
  misc_feature 1..80: note = Artificially Synthesized Probe
  source 1..80: mol_type = other DNA
gtatttggatacacacgtgtgtacgtaattgagggttaggggctggattggtccctgtttctttttttatgcacatgaga

SEQ ID NO: 33451 - DNA, 80 bp, synthetic construct
  misc_feature 1..80: note = Artificially Synthesized Probe
  source 1..80: mol_type = other DNA
tttagagaactttgctatatagtagcagtaatcaattagaaaatgttattgaaaagagatctcaggaggttgcagtggct

SEQ ID NO: 33452 - DNA, 80 bp, synthetic construct
  misc_feature 1..80: note = Artificially Synthesized Probe
  source 1..80: mol_type = other DNA
ttgggagtaaaactcagatgaacttccctacaagatcataaaactgtgatcattgaacccatggtgattttttttttttt

SEQ ID NO: 33453 - DNA, 80 bp, synthetic construct
  misc_feature 1..80: note = Artificially Synthesized Probe
  source 1..80: mol_type = other DNA
ctctgtctcaaaaaacaaacaaacaaaaaaaacaggctgggcatggtggctcatgcctgtaatcccagcactttgggagg

SEQ ID NO: 33454 - DNA, 80 bp, synthetic construct
  misc_feature 1..80: note = Artificially Synthesized Probe
  source 1..80: mol_type = other DNA
tcctaaggagctgtcttctgaagctgcctgtcgtattgaaaaacgaaagtaatttagtcagaggtcagaagctcagtctg

SEQ ID NO: 33455 - DNA, 80 bp, synthetic construct
  misc_feature 1..80: note = Artificially Synthesized Probe
  source 1..80: mol_type = other DNA
gctgtgcaggagtggcctgagacaagcgctgtccgccgtgagagatgggctccgaagaaacgggcccagaggccctgaac

SEQ ID NO: 33456 - DNA, 80 bp, synthetic construct
  misc_feature 1..80: note = Artificially Synthesized Probe
  source 1..80: mol_type = other DNA
ctgagaggtttgtgtctgggccaggctgccccacgggatccctggagactgctgcccgtgctgtgtcccctgtctcggcc

SEQ ID NO: 33457 - DNA, 80 bp, synthetic construct
  misc_feature 1..80: note = Artificially Synthesized Probe
  source 1..80: mol_type = other DNA
gcccagccaaaaaaatttaaaaaaagggaacgaagggactgtagcgcgtgtgcacagtgcgattcccgtggagcacctga

SEQ ID NO: 33458 - DNA, 80 bp, synthetic construct
  misc_feature 1..80: note = Artificially Synthesized Probe
  source 1..80: mol_type = other DNA
gcctcggtctcacactgatcgacgcgctggacaccatgtggatcttgggtctgaggaaaggtacctggtgctttctgggg

SEQ ID NO: 33459 - DNA, 80 bp, synthetic construct
  misc_feature 1..80: note = Artificially Synthesized Probe
  source 1..80: mol_type = other DNA
ttttatgtcatagaatttgaggaagccaggaagtgggtgtcgaagaagttacactttgaaaaggacgtggacgtcaacct

SEQ ID NO: 33460 - DNA, 80 bp, synthetic construct
  misc_feature 1..80: note = Artificially Synthesized Probe
  source 1..80: mol_type = other DNA
tgtgtatgtgcatgtgtgttttcaggttttttactgtgataaaacacacaaaacgcaccaccttaaccatttccaggcgt

SEQ ID NO: 33461 - DNA, 80 bp, synthetic construct
  misc_feature 1..80: note = Artificially Synthesized Probe
  source 1..80: mol_type = other DNA
gttgcaggcgtgcaggtcggtggtgttacacacattcattctgttgcaggcgtgcaggtcagtgttacacacattcacgc

SEQ ID NO: 33462 - DNA, 80 bp, synthetic construct
  misc_feature 1..80: note = Artificially Synthesized Probe
  source 1..80: mol_type = other DNA
cttgcaggtcggtggtgttacacacattcacacttgcaggcgtgcaggtcagtggtgttacacacattcatgctgttgca

SEQ ID NO: 33463 - DNA, 80 bp, synthetic construct
  misc_feature 1..80: note = Artificially Synthesized Probe
  source 1..80: mol_type = other DNA
ctgtgttttggccgttgtgagtgtgggtgcacacacctgcctgaggctctgctttgttgtgagtgcgggtgcacacacct

SEQ ID NO: 33464 - DNA, 80 bp, synthetic construct
  misc_feature 1..80: note = Artificially Synthesized Probe
  source 1..80: mol_type = other DNA
ggtggctgtgacttggaggatgagtaggagctcaccaggagggcgtggagccgaggcgtttaatatcatcaggagcaaca

SEQ ID NO: 33465 - DNA, 80 bp, synthetic construct
  misc_feature 1..80: note = Artificially Synthesized Probe
  source 1..80: mol_type = other DNA
ccaagatggtgagtgtgtctgcggggccttccggccgccgccccttttaccttggcttccaaggtgcctgagtcatgatg

SEQ ID NO: 33466 - DNA, 80 bp, synthetic construct
  misc_feature 1..80: note = Artificially Synthesized Probe
  source 1..80: mol_type = other DNA
gcagggctggccttgccctgagctctgctccgcccacagccagcagacaggcacaacctgctgcggccagagaccgtgga

SEQ ID NO: 33467 - DNA, 80 bp, synthetic construct
  misc_feature 1..80: note = Artificially Synthesized Probe
  source 1..80: mol_type = other DNA
atcaacaatgtccaggatcctcagaagcccgagcctagggacaagatggagagcttcttcctgggggagacgctcaagta

SEQ ID NO: 33468 - DNA, 80 bp, synthetic construct
  misc_feature 1..80: note = Artificially Synthesized Probe
  source 1..80: mol_type = other DNA
gggctgtatccaggttgggatttaacttgagtctccatctgggccccagagtgctcctgttgttgcggacctcactgtac

SEQ ID NO: 33469 - DNA, 80 bp, synthetic construct
  misc_feature 1..80: note = Artificially Synthesized Probe
  source 1..80: mol_type = other DNA
tccttttctgtaaattggaagtaatcgcacctgcttctgtggacgtgggagtgtggtgtggggtggtgaatagtaaagag

SEQ ID NO: 33470 - DNA, 80 bp, synthetic construct
  misc_feature 1..80: note = Artificially Synthesized Probe
  source 1..80: mol_type = other DNA
tgcccttcaccaaaaaccctatgagctccttctttttttccatgtgccatgcattttctcatttattcctcatagcccca

SEQ ID NO: 33471 - DNA, 80 bp, synthetic construct
  misc_feature 1..80: note = Artificially Synthesized Probe
  source 1..80: mol_type = other DNA
acttcatggctaatcttcacacagcttggactgtggctgtaggactcctgactgcccgatggtgacactgaggtttcata

SEQ ID NO: 33472 - DNA, 80 bp, synthetic construct
  misc_feature 1..80: note = Artificially Synthesized Probe
  source 1..80: mol_type = other DNA
gctcccttgcagggtagtggtcgagattgaagatagcatttgttaagtgaatggcacctgttattattttattattgtta

SEQ ID NO: 33473 - DNA, 80 bp, synthetic construct
  misc_feature 1..80: note = Artificially Synthesized Probe
  source 1..80: mol_type = other DNA
aacctcaaacagcctcttgccaggggcatgaaggccatacagggccaggggaggcagaagcagtttgttgggccccttgc

SEQ ID NO: 33474 - DNA, 80 bp, synthetic construct
  misc_feature 1..80: note = Artificially Synthesized Probe
  source 1..80: mol_type = other DNA
gtttttggtatgtctcatcatcaatcccatgctttgtaagattttaatagtaatgataaatcccagcctttgggaggccg

SEQ ID NO: 33475 - DNA, 80 bp, synthetic construct
  misc_feature 1..80: note = Artificially Synthesized Probe
  source 1..80: mol_type = other DNA
tgttgtcatcaaccccatcttaggagtgagtaaactgaggcctggtgggatagtgacctgctcaaggtcacgaaggactg

SEQ ID NO: 33476 - DNA, 80 bp, synthetic construct
  misc_feature 1..80: note = Artificially Synthesized Probe
  source 1..80: mol_type = other DNA
ctcccaggtaactgggactacaggcacgcaccaccacgcccactacatttttgttttgttttattttttgtagagacagg

SEQ ID NO: 33477 - DNA, 80 bp, synthetic construct
  misc_feature 1..80: note = Artificially Synthesized Probe
  source 1..80: mol_type = other DNA
gcgggccatggttgtctctgctgggctgttggcattgggcgggaggaccctctggcagccatggttgcccctgtgcagct

SEQ ID NO: 33478 - DNA, 80 bp, synthetic construct
  misc_feature 1..80: note = Artificially Synthesized Probe
  source 1..80: mol_type = other DNA
tgatgctcctgcatgtggcatggtgtggggctgactttatgagtggaggcggagcaggggctgcaaggaggggttgtcat

SEQ ID NO: 33479 - DNA, 80 bp, synthetic construct
  misc_feature 1..80: note = Artificially Synthesized Probe
  source 1..80: mol_type = other DNA
agtggctgaattctggtcagtttcagtttccttgcccctgcctgggggctgctatgaggctggagtatgtggaggacacc

SEQ ID NO: 33480 - DNA, 80 bp, synthetic construct
  misc_feature 1..80: note = Artificially Synthesized Probe
  source 1..80: mol_type = other DNA
caggggtgctgtgagccatggcctggcctgttggggtctgcgagtcaataaactcaggagtgactcctggccagacccct

SEQ ID NO: 33481 - DNA, 80 bp, synthetic construct
  misc_feature 1..80: note = Artificially Synthesized Probe
  source 1..80: mol_type = other DNA
tcactcccagccctgctgcctgatggtgccagagcaccaggtgaccctggcatctctgatccttgcttctcctgcctgtg

SEQ ID NO: 33482 - DNA, 80 bp, synthetic construct
  misc_feature 1..80: note = Artificially Synthesized Probe
  source 1..80: mol_type = other DNA
cttctctccattctaggaaaatccaagaggaagaaggatctacggatatcctgcatgtccaagccacccgcacccaaccc

SEQ ID NO: 33483 - DNA, 80 bp, synthetic construct
  misc_feature 1..80: note = Artificially Synthesized Probe
  source 1..80: mol_type = other DNA
atgaggaccatcggctgcctgactggagcttggcgagcccagagctggtaggaaggtttctgagctgagagcaaggccct

SEQ ID NO: 33484 - DNA, 80 bp, synthetic construct
  misc_feature 1..80: note = Artificially Synthesized Probe
  source 1..80: mol_type = other DNA
ctacttgcttactcctttttgtgtccctcccaagagagggaaacatctgtgaaggcaatacttttgttttgttgtcactg

SEQ ID NO: 33485 - DNA, 80 bp, synthetic construct
  misc_feature 1..80: note = Artificially Synthesized Probe
  source 1..80: mol_type = other DNA
catcagtcgcctgcaacccactgtcactcagtccctccagtacgccaggtgctggggacacctggcatactggcaggagg

SEQ ID NO: 33486 - DNA, 80 bp, synthetic construct
  misc_feature 1..80: note = Artificially Synthesized Probe
  source 1..80: mol_type = other DNA
tccttggggagattgctgtgtctgtgagtggcctgggtgggctggcggggggtcctaggtgcataggcagaggcccagcc

SEQ ID NO: 33487 - DNA, 80 bp, synthetic construct
  misc_feature 1..80: note = Artificially Synthesized Probe
  source 1..80: mol_type = other DNA
gggaggatgagaggaggcaggaggccgagtgtgtctgcaccaggattgttaggatgctggggcaaatgccaggacagggc

SEQ ID NO: 33488 - DNA, 80 bp, synthetic construct
  misc_feature 1..80: note = Artificially Synthesized Probe
  source 1..80: mol_type = other DNA
gagcacaagtctatttttccagatttactgcttttcaaaaaatgaattaggcttagttcccattgtccactgggtgccca

SEQ ID NO: 33489 - DNA, 80 bp, synthetic construct
  misc_feature 1..80: note = Artificially Synthesized Probe
  source 1..80: mol_type = other DNA
cccttctgtaccccgttgttaactgacccccacagtgccccagttgggtgataagctcatggaccacctctgcggaggac

SEQ ID NO: 33490 - DNA, 80 bp, synthetic construct
  misc_feature 1..80: note = Artificially Synthesized Probe
  source 1..80: mol_type = other DNA
ggcagaaccccatgccttccgtgttggggctcaggtcaaggtgtgggtgagcccgctctggctcccctgtggacagtgga

SEQ ID NO: 33491 - DNA, 80 bp, synthetic construct
  misc_feature 1..80: note = Artificially Synthesized Probe
  source 1..80: mol_type = other DNA
ccaggctcaagccatccccctacctcagtctcctgagtagctggaactacaggtgtgtgcccctatgcccagctactttt

SEQ ID NO: 33492 - DNA, 80 bp, synthetic construct
  misc_feature 1..80: note = Artificially Synthesized Probe
  source 1..80: mol_type = other DNA
cctcctgagtaactgggattacaggctcgtgccaccatgcccggctatcttttttttttttttttttttttttttttgag

SEQ ID NO: 33493 - DNA, 80 bp, synthetic construct
  misc_feature 1..80: note = Artificially Synthesized Probe
  source 1..80: mol_type = other DNA
tccaagtcctaagtttgatgcaaaggacaagttcttgctgtatttagactgcacagaactggttggatattagagaccct

SEQ ID NO: 33494 - DNA, 80 bp, synthetic construct
  misc_feature 1..80: note = Artificially Synthesized Probe
  source 1..80: mol_type = other DNA
agagcctcgctctgtcacccatgctggagcgcggtggtgcgatctcggcttactgcaacctccgcctcccaggttcaagt

SEQ ID NO: 33495 - DNA, 80 bp, synthetic construct
  misc_feature 1..80: note = Artificially Synthesized Probe
  source 1..80: mol_type = other DNA
taaattataatagactcctgtatgtatcccttccaaagactccataaccatctgccaccattcagtcaccctgtctgctg

SEQ ID NO: 33496 - DNA, 80 bp, synthetic construct
  misc_feature 1..80: note = Artificially Synthesized Probe
  source 1..80: mol_type = other DNA
tgctgaggtctcttccgttcatcatggtgatgacggccggcagtgagggcccttgtgctggagcctcggaattctctgtt

SEQ ID NO: 33497 - DNA, 80 bp, synthetic construct
  misc_feature 1..80: note = Artificially Synthesized Probe
  source 1..80: mol_type = other DNA
ccctccctggccagatccctgcaccttcctgggccctgttcctttattcctttggcaaataaacccccagatgacttggc

SEQ ID NO: 33498 - DNA, 80 bp, synthetic construct
  misc_feature 1..80: note = Artificially Synthesized Probe
  source 1..80: mol_type = other DNA
tgttaggcagagcattgcagccccattttggtgttgatatggaaattcctaggtcactatgcagacaagaaaaccaggac

SEQ ID NO: 33499 - DNA, 80 bp, synthetic construct
  misc_feature 1..80: note = Artificially Synthesized Probe
  source 1..80: mol_type = other DNA
gggggaaagggaggttagtgtggctggagagtgaccacaagagagctgaggaggagccacagatgccatctgtgacagtc

SEQ ID NO: 33500 - DNA, 80 bp, synthetic construct
  misc_feature 1..80: note = Artificially Synthesized Probe
  source 1..80: mol_type = other DNA
cctctgttgattttttcttttgctttatgggtttggcttgtttttcttgcatggtttggagctgatcgcttctcccccac

SEQ ID NO: 33501 - DNA, 80 bp, synthetic construct
  misc_feature 1..80: note = Artificially Synthesized Probe
  source 1..80: mol_type = other DNA
gcttgttttttctttaaaaatggatagggtggtttgattcaaataagccacttcacaggtgaagagttaaatccattaca

SEQ ID NO: 33502 - DNA, 80 bp, synthetic construct
  misc_feature 1..80: note = Artificially Synthesized Probe
  source 1..80: mol_type = other DNA
tcctagcaaaagacaaagtcctttctttccagtggttttcaaggccctacatgattcagatggcctcagttctactattc

SEQ ID NO: 33503 - DNA, 80 bp, synthetic construct
  misc_feature 1..80: note = Artificially Synthesized Probe
  source 1..80: mol_type = other DNA
gtggtggctcacacctgtaatcccagcactttgggaggccgaggcgggtggattatgaggtcaggagatcaagatcatcc

SEQ ID NO: 33504 - DNA, 80 bp, synthetic construct
  misc_feature 1..80: note = Artificially Synthesized Probe
  source 1..80: mol_type = other DNA
gcaagtcctctaaaatgactttgttgatttaggaaggggaagggctgtgcataccctgtgttttaacagactgcctctcc

SEQ ID NO: 33505 - DNA, 80 bp, synthetic construct
  misc_feature 1..80: note = Artificially Synthesized Probe
  source 1..80: mol_type = other DNA
ccagctatagcgccagatctcaaaccagtaaggcgctttgtccctgactcctggaagaactttttcagagggaagaaaaa

SEQ ID NO: 33506 - DNA, 80 bp, synthetic construct
  misc_feature 1..80: note = Artificially Synthesized Probe
  source 1..80: mol_type = other DNA
tgttggctgcattattatgtctgtctgaagcttaagggaaagatacagctaccgaatttttgcaaagaagaagagtgtac

SEQ ID NO: 33507 - DNA, 80 bp, synthetic construct
  misc_feature 1..80: note = Artificially Synthesized Probe
  source 1..80: mol_type = other DNA
tactatacaattgcacatggtatatattgggcaaaactataaataaaaattaaatcctgtccttataacagcacacactg

SEQ ID NO: 33508 - DNA, 80 bp, synthetic construct
  misc_feature 1..80: note = Artificially Synthesized Probe
  source 1..80: mol_type = other DNA
tacaatcatagataagggatgaaataagccctggtctcctgtagtgctcccaggcttattaggacgaggaaattcccgcc

SEQ ID NO: 33509 - DNA, 80 bp, synthetic construct
  misc_feature 1..80: note = Artificially Synthesized Probe
  source 1..80: mol_type = other DNA
tgcttgatggaaaaaaatagttttataacaagtacctacatgttatacaaaggactttgacatgtgtccatgtgatctct

SEQ ID NO: 33510 - DNA, 80 bp, synthetic construct
  misc_feature 1..80: note = Artificially Synthesized Probe
  source 1..80: mol_type = other DNA
agttctccactggcccttcaaaacctaggcaaaaaaaggatgagaaacacccgtcaagtagaggatcaacctcttaaaat

SEQ ID NO: 33511 - DNA, 80 bp, synthetic construct
  misc_feature 1..80: note = Artificially Synthesized Probe
  source 1..80: mol_type = other DNA
aaccaaacaccacatattctcactcataggtgggaattgaacaatgagatcacatggacacaggaaggggattatcacac

SEQ ID NO: 33512 - DNA, 80 bp, synthetic construct
  misc_feature 1..80: note = Artificially Synthesized Probe
  source 1..80: mol_type = other DNA
ttttgtagtgtcagggaatttctattccacaatttaccaactgtgtggcagcagacaaattatttaacctttctatgcct

SEQ ID NO: 33513 - DNA, 80 bp, synthetic construct
  misc_feature 1..80: note = Artificially Synthesized Probe
  source 1..80: mol_type = other DNA
tggaacgtgatggtatgggtttgaggtcaggggcctgtgcattattatattatacactcaaagggagagagaatcaagaa

SEQ ID NO: 33514 - DNA, 80 bp, synthetic construct
  misc_feature 1..80: note = Artificially Synthesized Probe
  source 1..80: mol_type = other DNA
tgatgatcgggaaggttcatccaaaaagagcagaaaaaaagttaagaccataaaaataaaaaaaaatttaggccgggcat

SEQ ID NO: 33515 - DNA, 80 bp, synthetic construct
  misc_feature 1..80: note = Artificially Synthesized Probe
  source 1..80: mol_type = other DNA
aaaatgtgttgcctaaaaatatcctggcttaatttcatttcctcggggtactctgctcgccactcatgtttttgcagatt

SEQ ID NO: 33516 - DNA, 80 bp, synthetic construct
  misc_feature 1..80: note = Artificially Synthesized Probe
  source 1..80: mol_type = other DNA
atatgaacaatatacatttaagctaacaggtttctttatgttattcatttaaagtatcaatgaaccaggtcaggcaccgt

SEQ ID NO: 33517 - DNA, 80 bp, synthetic construct
  misc_feature 1..80: note = Artificially Synthesized Probe
  source 1..80: mol_type = other DNA
ggcccagttctgggttttaattgtggcttttctacttaatagttatgtgaccttggagaattgacttgacctctctgaac

SEQ ID NO: 33518 - DNA, 80 bp, synthetic construct
  misc_feature 1..80: note = Artificially Synthesized Probe
  source 1..80: mol_type = other DNA
ttattcttttacgtttagttggggtgtaaattctaaataggtaagttcttaagactgcgtgtttggcattgcatcatcca

SEQ ID NO: 33519 - DNA, 80 bp, synthetic construct
  misc_feature 1..80: note = Artificially Synthesized Probe
  source 1..80: mol_type = other DNA
agttgaggggccccatttggtcctttcattttccagtttgtctccaagttaatactctgtgcttaaaatcgtgtatgtaa

SEQ ID NO: 33520 - DNA, 80 bp, synthetic construct
  misc_feature 1..80: note = Artificially Synthesized Probe
  source 1..80: mol_type = other DNA
atgccaccacacgtagctaatttttttctatttttagtggagacgcggttttgccatgttggccaagagtggcctcaagt

SEQ ID NO: 33521 - DNA, 80 bp, synthetic construct
  misc_feature 1..80: note = Artificially Synthesized Probe
  source 1..80: mol_type = other DNA
aaaaaagcaagcagatatgagatatgctacaaatgtgagctgctggacacacacatcagacaggtagctgtgattatgac

SEQ ID NO: 33522 - DNA, 80 bp, synthetic construct
  misc_feature 1..80: note = Artificially Synthesized Probe
  source 1..80: mol_type = other DNA
ggcccagatgtactctttttaattgagatctcattcacatataataaacccacccttttaaagtgtacaattcagtgaat

SEQ ID NO: 33523 - DNA, 80 bp, synthetic construct
  misc_feature 1..80: note = Artificially Synthesized Probe
  source 1..80: mol_type = other DNA
ttatcaagagatagacatttggtcatttccaaatgtctatatagtcatttccactcattggctgttacgaataatgctgg

SEQ ID NO: 33524 - DNA, 80 bp, synthetic construct
  misc_feature 1..80: note = Artificially Synthesized Probe
  source 1..80: mol_type = other DNA
aattagccgcacgtggtggtgcatgtgtgtaatcccagctactcgggaagtctgaggcaggagaatcgcttgacccagga

SEQ ID NO: 33525 - DNA, 80 bp, synthetic construct
  misc_feature 1..80: note = Artificially Synthesized Probe
  source 1..80: mol_type = other DNA
acagggcttgtaagtaacccaatggcaggcccacggttattattatcagtgtatcctccagtccttatctaaagtagaaa

SEQ ID NO: 33526 - DNA, 80 bp, synthetic construct
  misc_feature 1..80: note = Artificially Synthesized Probe
  source 1..80: mol_type = other DNA
aaaaaaaaaaaagaagaagaaaatatactgggaaaaggatatgggtcagtgatagaaaaagttctcaggccaagctttta

SEQ ID NO: 33527 - DNA, 80 bp, synthetic construct
  misc_feature 1..80: note = Artificially Synthesized Probe
  source 1..80: mol_type = other DNA
ttatttattaggtttgcattgtctgacaatctctatgcataggtttgcatggatgaacgagggcattgctatagtaatgt

SEQ ID NO: 33528 - DNA, 80 bp, synthetic construct
  misc_feature 1..80: note = Artificially Synthesized Probe
  source 1..80: mol_type = other DNA
gaactgattttacatctttccaactctaacttaatctcaaaatcagtagaggtggctggacactggctcaggcctgtaat

SEQ ID NO: 33529 - DNA, 80 bp, synthetic construct
  misc_feature 1..80: note = Artificially Synthesized Probe
  source 1..80: mol_type = other DNA
tgcctttttaatgctagcctctgtggtagagaagcaagcgcttcccaaatcagcttccaattggtttaaccagtatgcaa

SEQ ID NO: 33530 - DNA, 80 bp, synthetic construct
  misc_feature 1..80: note = Artificially Synthesized Probe
  source 1..80: mol_type = other DNA
tctcaagaaaaggtccttaatgagcaagcccaacctacttaaccaaaagcccaagtgtctggtgcctttctggtttgtgg

SEQ ID NO: 33531 - DNA, 80 bp, synthetic construct
  misc_feature 1..80: note = Artificially Synthesized Probe
  source 1..80: mol_type = other DNA
aaagcatgtggaaaagcagaagcttagaaagttgtggtcactgaatgcactccctggtttttatttgtcagtgaaatctt

SEQ ID NO: 33532 - DNA, 80 bp, synthetic construct
  misc_feature 1..80: note = Artificially Synthesized Probe
  source 1..80: mol_type = other DNA
tttcctctggctttagataaattaatgcttgtaatctaagttttgttgctactttaaatatatgaatcagtggtttaatc

SEQ ID NO: 33533 - DNA, 80 bp, synthetic construct
  misc_feature 1..80: note = Artificially Synthesized Probe
  source 1..80: mol_type = other DNA
atggaagaagcacttcattgaaagtagtgctgtaaatattctgccataggaatactgtctacatgctttctcattcaaga

SEQ ID NO: 33534 - DNA, 80 bp, synthetic construct
  misc_feature 1..80: note = Artificially Synthesized Probe
  source 1..80: mol_type = other DNA
ttgaaaagttgtctcaagtcaaatggattcatcacctgtcatgcattgacacctgatacccagacttaattggtatttgt

SEQ ID NO: 33535 - DNA, 80 bp, synthetic construct
  misc_feature 1..80: note = Artificially Synthesized Probe
  source 1..80: mol_type = other DNA
tgcatctgaatctgcatgatttccaaaccctgtaccatctgaattttgcattttagcacttgcactattactcagcagca

SEQ ID NO: 33536 - DNA, 80 bp, synthetic construct
  misc_feature 1..80: note = Artificially Synthesized Probe
  source 1..80: mol_type = other DNA
aaagattatgcatgctttttaagggcttttgaaatgtattgccagtctgtggcctgccaccctccctgaacatgcctggt

SEQ ID NO: 33537 - DNA, 80 bp, synthetic construct
  misc_feature 1..80: note = Artificially Synthesized Probe
  source 1..80: mol_type = other DNA
aaagcatgttagcagttacacttccccttggatagggtggcttttcatatgcagcagtacatttttgatggtcaacaatc

SEQ ID NO: 33538 - DNA, 80 bp, synthetic construct
  misc_feature 1..80: note = Artificially Synthesized Probe
  source 1..80: mol_type = other DNA
tgactacctatacaggcaagtgaggctattttaaaacatcacagttcaaacacctgataaaaccttttggtatttcttag

SEQ ID NO: 33539 - DNA, 80 bp, synthetic construct
  misc_feature 1..80: note = Artificially Synthesized Probe
  source 1..80: mol_type = other DNA
aagtgctgactttttttttctttttctctttttttttgagacagagtctcgctctgttgcccaggctggagtgcagtggc

SEQ ID NO: 33540 - DNA, 80 bp, synthetic construct
  misc_feature 1..80: note = Artificially Synthesized Probe
  source 1..80: mol_type = other DNA
attttttatgcttgcctagttataaggtcaaagagaatcaaatgactgatgcagtcagcacctaacaacctctgtatatg

SEQ ID NO: 33541 - DNA, 80 bp, synthetic construct
  misc_feature 1..80: note = Artificially Synthesized Probe
  source 1..80: mol_type = other DNA
tagatcatcaggagggccacagtcaacaactaagaaagaagcatgggagggaggaatccattgatcatttcagtgctaac

SEQ ID NO: 33542 - DNA, 80 bp, synthetic construct
  misc_feature 1..80: note = Artificially Synthesized Probe
  source 1..80: mol_type = other DNA
aaaaaaaaaaaaaggctgcagcggaacagcacatgacatggcacaggttcaatgtaaaaggttgcaatttagaaggcagt

SEQ ID NO: 33543 - DNA, 80 bp, synthetic construct
  misc_feature 1..80: note = Artificially Synthesized Probe
  source 1..80: mol_type = other DNA
cctcgtctctactaaaaatagaaaaattagctgggcttggtgggaagtgcttgtaatcccagctatttgggaggctgagg

SEQ ID NO: 33544 - DNA, 80 bp, synthetic construct
  misc_feature 1..80: note = Artificially Synthesized Probe
  source 1..80: mol_type = other DNA
aaaaaagaaaaaaatattgtcaaagaacacactttggaagcctgaggcgggcagatcacttgacgtcaggagtttgagac

SEQ ID NO: 33545 - DNA, 80 bp, synthetic construct
  misc_feature 1..80: note = Artificially Synthesized Probe
  source 1..80: mol_type = other DNA
tcaagggctgataaatggatcattaaaaaaaaaaaaccaaggatccgggcacagtggctcacgcctgtaatcttagcact

SEQ ID NO: 33546 - DNA, 80 bp, synthetic construct
  misc_feature 1..80: note = Artificially Synthesized Probe
  source 1..80: mol_type = other DNA
atctgatgttccaccatttctttatataaagtgacagaggaccaggcgcagtggttcacacctgtaatcccagcacattg

SEQ ID NO: 33547 - DNA, 80 bp, synthetic construct
  misc_feature 1..80: note = Artificially Synthesized Probe
  source 1..80: mol_type = other DNA
aaaacaaaaaaaaaagaaactaaagaagtctgtggtccgaggagctgtggaaaagagcctgcacaagaagtttgcaaggt

SEQ ID NO: 33548 - DNA, 80 bp, synthetic construct
  misc_feature 1..80: note = Artificially Synthesized Probe
  source 1..80: mol_type = other DNA
tttaaagttaagtataaagaaagaaagaaaaaagggcgggattcagaatcacattttccatagccatcctttttgtcctc

SEQ ID NO: 33549 - DNA, 80 bp, synthetic construct
  misc_feature 1..80: note = Artificially Synthesized Probe
  source 1..80: mol_type = other DNA
ttgcatgggactggagctgtgtttaaatcctagctctccatttccccatggttatgtgtaacctctctgagtctcagttt

SEQ ID NO: 33550 - DNA, 80 bp, synthetic construct
  misc_feature 1..80: note = Artificially Synthesized Probe
  source 1..80: mol_type = other DNA
acatactcttctgccacctagaactcttctgccacctagaactctgtccaacacccacttatcctttaaattcaatctca

SEQ ID NO: 33551 - DNA, 80 bp, synthetic construct
  misc_feature 1..80: note = Artificially Synthesized Probe
  source 1..80: mol_type = other DNA
ggatggatagatggatggatagatggataggatgggtgggtgggtgaatggctgtaagaatgggcggatgggtaaatgga

SEQ ID NO: 33552 - DNA, 80 bp, synthetic construct
  misc_feature 1..80: note = Artificially Synthesized Probe
  source 1..80: mol_type = other DNA
gtgggtggatggatggatggatggatgggtaggtaggtagaagaatgggtgcatggataggattggtaagtagaaggatg

SEQ ID NO: 33553 - DNA, 80 bp, synthetic construct
  misc_feature 1..80: note = Artificially Synthesized Probe
  source 1..80: mol_type = other DNA
aaggatgggtggatgggtagatgagtagaaggatgggttgatagaaggatgggtgggtggaaggatgggtggatgggtgg

SEQ ID NO: 33554 - DNA, 80 bp, synthetic construct
  misc_feature 1..80: note = Artificially Synthesized Probe
  source 1..80: mol_type = other DNA
gtgatggtcaccgtgttgctttttgtttcaatcctgtggggcaatgtcttcccacagaatgggccatgttcttctctgtc

SEQ ID NO: 33555 - DNA, 80 bp, synthetic construct
  misc_feature 1..80: note = Artificially Synthesized Probe
  source 1..80: mol_type = other DNA
ctctatcagccctcgcaccaacagcagggtggatgccttggggagcaggaaactgggacagggatgtggctgggacatct

SEQ ID NO: 33556 - DNA, 80 bp, synthetic construct
  misc_feature 1..80: note = Artificially Synthesized Probe
  source 1..80: mol_type = other DNA
ctcaatgaatatctcccagggtgtctcctctgtgggtcaggctcctccaggccagaccctgaatgggggtggttcaagat

SEQ ID NO: 33557 - DNA, 80 bp, synthetic construct
  misc_feature 1..80: note = Artificially Synthesized Probe
  source 1..80: mol_type = other DNA
aggcctagggtcgctgcaagctcccagcagcgctgggagaaagatgcaaacatcacctctgttaaaccagtgggagtttc

SEQ ID NO: 33558 - DNA, 80 bp, synthetic construct
  misc_feature 1..80: note = Artificially Synthesized Probe
  source 1..80: mol_type = other DNA
tgtggatgatgtcaggccagaggcctctcccctgccctgggaaaggtggggaaactgaaggcagggctgcctggcctaag

SEQ ID NO: 33559 - DNA, 80 bp, synthetic construct
  misc_feature 1..80: note = Artificially Synthesized Probe
  source 1..80: mol_type = other DNA
ttgtgcaacactttattgggaaagatttacacacggtgacctgtcataggccaagcgatgagaagagggcgccaggagtg

SEQ ID NO: 33560 - DNA, 80 bp, synthetic construct
  misc_feature 1..80: note = Artificially Synthesized Probe
  source 1..80: mol_type = other DNA
atggtcaggaagctcaggtagtagcccgggtggaggccgtgccagtaggcgctcagcagcatggtccaggcgctcctgag

SEQ ID NO: 33561 - DNA, 80 bp, synthetic construct
  misc_feature 1..80: note = Artificially Synthesized Probe
  source 1..80: mol_type = other DNA
ccttattctgggcccaggagatatgttcctcttcctccaaggcccagcaccatctttcctcactctttttatttttttgg

SEQ ID NO: 33562 - DNA, 80 bp, synthetic construct
  misc_feature 1..80: note = Artificially Synthesized Probe
  source 1..80: mol_type = other DNA
attgccatgtgtctcctgggggtgcagcagcagcacagttgcccccagttgagaagcacttgtctaaacactggggtgct

SEQ ID NO: 33563 - DNA, 80 bp, synthetic construct
  misc_feature 1..80: note = Artificially Synthesized Probe
  source 1..80: mol_type = other DNA
ttataggcatgagccaccgtgcccggcctattttattttattttgagacaaagtctctctctgttgcccaggtgaccttg

SEQ ID NO: 33564 - DNA, 80 bp, synthetic construct
  misc_feature 1..80: note = Artificially Synthesized Probe
  source 1..80: mol_type = other DNA
gtctccactcgagaaatattggaagaatgaaaaacaataaaaatgaatacacagcacgcacttacctgtcaggcctcaca

SEQ ID NO: 33565 - DNA, 80 bp, synthetic construct
  misc_feature 1..80: note = Artificially Synthesized Probe
  source 1..80: mol_type = other DNA
atctttgttgctaaggaaaaggcattccttagcaacaatgcctaggatgtttagaaaggcttttaggaaggggctttttt

SEQ ID NO: 33566 - DNA, 80 bp, synthetic construct
  misc_feature 1..80: note = Artificially Synthesized Probe
  source 1..80: mol_type = other DNA
ccttagcaacagtgtaactgtagttggtaggaatggcgtgccctctgctggggaacagcactggtcagggattggaaatt

SEQ ID NO: 33567 - DNA, 80 bp, synthetic construct
  misc_feature 1..80: note = Artificially Synthesized Probe
  source 1..80: mol_type = other DNA
agagactgggcgccggggagaccccaagggtagggactgagaccctgagagatggggataaggaacgagagacagggggg

SEQ ID NO: 33568 - DNA, 80 bp, synthetic construct
  misc_feature 1..80: note = Artificially Synthesized Probe
  source 1..80: mol_type = other DNA
ggtttctttgcagggtatgaaactgttctgaatataactacacagtggtcatgtctgcacaactcggtgaatatactaaa

SEQ ID NO: 33569 - DNA, 80 bp, synthetic construct
  misc_feature 1..80: note = Artificially Synthesized Probe
  source 1..80: mol_type = other DNA
cgcccagatgaaaaatatttccttaagctgaaagtggaccctaagccgtgaatatttgttgtctgggaagcaaaaacatc

SEQ ID NO: 33570 - DNA, 80 bp, synthetic construct
  misc_feature 1..80: note = Artificially Synthesized Probe
  source 1..80: mol_type = other DNA
aaacaacaggccaccaaattgttcaagccaaaaatctccctcactccccaaatccgatcctttaatctctctctcttttt

SEQ ID NO: 33571 - DNA, 80 bp, synthetic construct
  misc_feature 1..80: note = Artificially Synthesized Probe
  source 1..80: mol_type = other DNA
tgagaccagcccggccaacatggtgaaaccccatctctactaaaaatataaaaattagcaaggcgtggtggtgggcgcct

SEQ ID NO: 33572 - DNA, 80 bp, synthetic construct
  misc_feature 1..80: note = Artificially Synthesized Probe
  source 1..80: mol_type = other DNA
ggctcatttttgtatttttagtagagacggagttttaccatgttggccaggatggtctcaaactcctaacctcaggtgat

SEQ ID NO: 33573 - DNA, 80 bp, synthetic construct
  misc_feature 1..80: note = Artificially Synthesized Probe
  source 1..80: mol_type = other DNA
ttttgttcccttcaccaagtaccttctccccagagctggtttttctcctttgcaaaatagctggctacagagattcaagg

SEQ ID NO: 33574 - DNA, 80 bp, synthetic construct
  misc_feature 1..80: note = Artificially Synthesized Probe
  source 1..80: mol_type = other DNA
gtgagccaagatcgtgccactgaactgcagcctgggcaacaggagcgaaactccatctcagaaagaaagaaagaaagaaa

SEQ ID NO: 33575 - DNA, 80 bp, synthetic construct
  misc_feature 1..80: note = Artificially Synthesized Probe
  source 1..80: mol_type = other DNA
tcctttgagaacctagcaacccagactccagccccttcctccttggaggagacaggaatccacccccagcccctcctttg

SEQ ID NO: 33576 - DNA, 80 bp, synthetic construct
  misc_feature 1..80: note = Artificially Synthesized Probe
  source 1..80: mol_type = other DNA
ttcggcaatagtcgagaacggagagctgaggccactgtgggcggagccacatgtttcggctttcttcggaggtagtcgag

SEQ ID NO: 33577 - DNA, 80 bp, synthetic construct
  misc_feature 1..80: note = Artificially Synthesized Probe
  source 1..80: mol_type = other DNA
ccatcactgtgtaatcgtctaacctggggctcgccgaggcctgtgagttcatccttttggcagttcctggtgtctcctta

SEQ ID NO: 33578 - DNA, 80 bp, synthetic construct
  misc_feature 1..80: note = Artificially Synthesized Probe
  source 1..80: mol_type = other DNA
ttgggagataaccccagtctgctctaggtccccaccctccacagccagggtggtccgtggtgagcttcagccatcgagat

SEQ ID NO: 33579 - DNA, 80 bp, synthetic construct
  misc_feature 1..80: note = Artificially Synthesized Probe
  source 1..80: mol_type = other DNA
tgcctgtgtgtgtgggtgcacatttgtgtgtgtgggtgcacatttgtgtgtgtgtgcgcctgtgtgggtgcacatttgtg

SEQ ID NO: 33580 - DNA, 80 bp, synthetic construct
  misc_feature 1..80: note = Artificially Synthesized Probe
  source 1..80: mol_type = other DNA
tatgattagctgtaggatgtcatctaatcacagatcatcccgaggctaatttatctcccccatgaccataacacatcaaa

SEQ ID NO: 33581 - DNA, 80 bp, synthetic construct
  misc_feature 1..80: note = Artificially Synthesized Probe
  source 1..80: mol_type = other DNA
acgtgatgggccagatgggctggcagcggctcgctggagccgtccgggtgggaacgctgtgtctgttggtctggtgctgc

SEQ ID NO: 33582 - DNA, 80 bp, synthetic construct
  misc_feature 1..80: note = Artificially Synthesized Probe
  source 1..80: mol_type = other DNA
gctattatcctgactcagctgggattacaggcacccaccaccacacctggctgattttggtatttttagtagagacgggg

SEQ ID NO: 33583 - DNA, 80 bp, synthetic construct
  misc_feature 1..80: note = Artificially Synthesized Probe
  source 1..80: mol_type = other DNA
acaccaacctctccagggctcactagcattggacgctttcacgctctgccctggccggaagccccctcaccccgcgcgat

SEQ ID NO: 33584 - DNA, 80 bp, synthetic construct
  misc_feature 1..80: note = Artificially Synthesized Probe
  source 1..80: mol_type = other DNA
catgcctgggctgacctgtccagccagggagagggtgtgagggcagatctgggggtgcccagatggaaggaggcaggcat

SEQ ID NO: 33585 - DNA, 80 bp, synthetic construct
  misc_feature 1..80: note = Artificially Synthesized Probe
  source 1..80: mol_type = other DNA
gtgtggtctggttcctgtgtgaccctgggcagttccttacctccctggtccccgtttgtcaaagaggatggactaaatga

SEQ ID NO: 33586 - DNA, 80 bp, synthetic construct
  misc_feature 1..80: note = Artificially Synthesized Probe
  source 1..80: mol_type = other DNA
cagccctggcaaatgcctgactcagtgaccagtgcctgtgagcatggggccaggaaagtctggtaataaatgtgactcag

SEQ ID NO: 33587 - DNA, 80 bp, synthetic construct
  misc_feature 1..80: note = Artificially Synthesized Probe
  source 1..80: mol_type = other DNA
tcccgcttcccgcggagaacaacaatgaaagtgaaagaggggtggggcgggggcgagcccgggttctgtggcccatttgc

SEQ ID NO: 33588 - DNA, 80 bp, synthetic construct
  misc_feature 1..80: note = Artificially Synthesized Probe
  source 1..80: mol_type = other DNA
ccaaagcaaaggccaaaggtcagcgaaaggagaagggggtggggctgtcgcggggggctgcccccccccccccccgcctg

SEQ ID NO: 33589 - DNA, 80 bp, synthetic construct
  misc_feature 1..80: note = Artificially Synthesized Probe
  source 1..80: mol_type = other DNA
gcccgcttttgttcttccccacaattccattactaagaaacacatcaaataaactgactttttccccccaataaaagctc

SEQ ID NO: 33590 - DNA, 80 bp, synthetic construct
  misc_feature 1..80: note = Artificially Synthesized Probe
  source 1..80: mol_type = other DNA
attctggctggaggcataatctaatgtgggaaggtagtaacaggaaaaaaaaaaaaaagcgagaaagagcgactgtgcct

SEQ ID NO: 33591 - DNA, 80 bp, synthetic construct
  misc_feature 1..80: note = Artificially Synthesized Probe
  source 1..80: mol_type = other DNA
ttattcagttccactgcttccctcgtctgccactcatcttttgagctttttacagccaaacacttttactcaaaaatggg

SEQ ID NO: 33592 - DNA, 80 bp, synthetic construct
  misc_feature 1..80: note = Artificially Synthesized Probe
  source 1..80: mol_type = other DNA
tgtcttactgattcagtaagtttctcaaccaaaaccccttcgttaacatgtgctcctgttcaaccaagtttctcccatta

SEQ ID NO: 33593 - DNA, 80 bp, synthetic construct
  misc_feature 1..80: note = Artificially Synthesized Probe
  source 1..80: mol_type = other DNA
tgtgggtagacatgttccatggccttcagaataagatcttttgtggggtactcagtccataaacagaaaattgccttcat

SEQ ID NO: 33594 - DNA, 80 bp, synthetic construct
  misc_feature 1..80: note = Artificially Synthesized Probe
  source 1..80: mol_type = other DNA
cgttagggaggagtgggtcaactgccacaaacgtcgctaggaaattaaaaggaaaattttacaaagtggcagttcttgtc

SEQ ID NO: 33595 - DNA, 80 bp, synthetic construct
  misc_feature 1..80: note = Artificially Synthesized Probe
  source 1..80: mol_type = other DNA
aagagttggggcactcaggggtctgctgtttttgcccgtggccttaactcatcaggggagggtttctgcagcagaatctc

SEQ ID NO: 33596 - DNA, 80 bp, synthetic construct
  misc_feature 1..80: note = Artificially Synthesized Probe
  source 1..80: mol_type = other DNA
tttagatcctggcatcaccctggtgcgatttaggatttttatactcagtcattgctgcagcatgatttaggatttctaac

SEQ ID NO: 33597 - DNA, 80 bp, synthetic construct
  misc_feature 1..80: note = Artificially Synthesized Probe
  source 1..80: mol_type = other DNA
ttgcttattgtctccgctcatggctcatcaaatagttgggattttggccaaaaaatgtttgcttaacccattttgcctac

SEQ ID NO: 33598 - DNA, 80 bp, synthetic construct
  misc_feature 1..80: note = Artificially Synthesized Probe
  source 1..80: mol_type = other DNA
ggagggtattatttccattctggctgttttgagagaacttccattctactgacaattcttgatctgttgaccatcagaag

SEQ ID NO: 33599 - DNA, 80 bp, synthetic construct
  misc_feature 1..80: note = Artificially Synthesized Probe
  source 1..80: mol_type = other DNA
tgcctatgtgaagggcaatgtaatcattgcatggtaacagcaatctcccaccccatcttaccaggttttggtttgtagat

SEQ ID NO: 33600 - DNA, 80 bp, synthetic construct
  misc_feature 1..80: note = Artificially Synthesized Probe
  source 1..80: mol_type = other DNA
tcctgacctcctctcatttgctatattcaattaagtaagtatacaatttttattatgttggcttgggttacttccagttt

SEQ ID NO: 33601 - DNA, 80 bp, synthetic construct
  misc_feature 1..80: note = Artificially Synthesized Probe
  source 1..80: mol_type = other DNA
ttatttttatagggatttggcataattgattgtactttccttcttcctagactctgtgggtgtggttggaagtccagaga

SEQ ID NO: 33602 - DNA, 80 bp, synthetic construct
  misc_feature 1..80: note = Artificially Synthesized Probe
  source 1..80: mol_type = other DNA
cttcagacttcagcttatgatgctaggaaagtacattgtttctggactgtttgtatcctttttctctcgttttcagcggt

SEQ ID NO: 33603 - DNA, 80 bp, synthetic construct
  misc_feature 1..80: note = Artificially Synthesized Probe
  source 1..80: mol_type = other DNA
tgcaagttcatgaatatccaaatgtctcctgaacgccttaagagcagactgggagagaaatccgtctctccctttatcac

SEQ ID NO: 33604 - DNA, 80 bp, synthetic construct
  misc_feature 1..80: note = Artificially Synthesized Probe
  source 1..80: mol_type = other DNA
gttggtacttcactgatagacctttagttttaggatttgtactgacgtaaataatgctgggaccttttaagggccatagc

SEQ ID NO: 33605 - DNA, 80 bp, synthetic construct
  misc_feature 1..80: note = Artificially Synthesized Probe
  source 1..80: mol_type = other DNA
atccgcaacaatgacgggaacttagtcattgacaggtaagaagttaccctttgctttggtttccagagacgtgtttttgt

SEQ ID NO: 33606 - DNA, 80 bp, synthetic construct
  misc_feature 1..80: note = Artificially Synthesized Probe
  source 1..80: mol_type = other DNA
aaaaaagaagtagatgtcaacacagaagatcatgtgttacaatcctcttattttaaaaatgaggaggctagccaggtcct

SEQ ID NO: 33607 - DNA, 80 bp, synthetic construct
  misc_feature 1..80: note = Artificially Synthesized Probe
  source 1..80: mol_type = other DNA
tcacctgaaattcaaattttctgggtatcctttattttactggcaactgtactcatgacatctggaacagtgatgtgtgt

SEQ ID NO: 33608 - DNA, 80 bp, synthetic construct
  misc_feature 1..80: note = Artificially Synthesized Probe
  source 1..80: mol_type = other DNA
tttcttttcggagaggagttaattttagggtgggagtagaacagatgtgagagctgttaagtatttcattccttttctct

SEQ ID NO: 33609 - DNA, 80 bp, synthetic construct
  misc_feature 1..80: note = Artificially Synthesized Probe
  source 1..80: mol_type = other DNA
aattggcaagtttatctgcctaagatacaatttcagagtagaaggtgaataagctctttggtggctccttccagtgtggt

SEQ ID NO: 33610 - DNA, 80 bp, synthetic construct
  misc_feature 1..80: note = Artificially Synthesized Probe
  source 1..80: mol_type = other DNA
gaggaggagaaggggggctccttccctctcctcgaatgacgttatgggcacatgccttttaaaagttctttaagcaacac

SEQ ID NO: 33611 - DNA, 80 bp, synthetic construct
  misc_feature 1..80: note = Artificially Synthesized Probe
  source 1..80: mol_type = other DNA
cattaaagaataaaatgaagttaagcagctggagtataggatagtatttgattttcaagatcacccaaagctgcactatc

SEQ ID NO: 33612 - DNA, 80 bp, synthetic construct
  misc_feature 1..80: note = Artificially Synthesized Probe
  source 1..80: mol_type = other DNA
aatacaccccacggcggtgaagagaaaacgttcatgtcttctcagatcagaaggaaagaaacaaaaccattgtgaaggaa

SEQ ID NO: 33613 - DNA, 80 bp, synthetic construct
  misc_feature 1..80: note = Artificially Synthesized Probe
  source 1..80: mol_type = other DNA
ctggggcaggtgcaccttgcagggaagtgggtaagatcccactgggctgactgagtacccgggacagaccctaagcgtgg

SEQ ID NO: 33614 - DNA, 80 bp, synthetic construct
  misc_feature 1..80: note = Artificially Synthesized Probe
  source 1..80: mol_type = other DNA
cagaagttttcttcgaatgtgaaggaagtggggaaactaacccctgggcctctgtggaaagagataaaagccttcacttc

SEQ ID NO: 33615 - DNA, 80 bp, synthetic construct
  misc_feature 1..80: note = Artificially Synthesized Probe
  source 1..80: mol_type = other DNA
ctgcctttcagatgtgggggcagcaagacagtaggcagggcccgggggaacattgttcaggcagtgacagccagaagttg

SEQ ID NO: 33616 - DNA, 80 bp, synthetic construct
  misc_feature 1..80: note = Artificially Synthesized Probe
  source 1..80: mol_type = other DNA
cctcaccaggacaggagcccccaccgcaggcctctcacctccccagcgggtgctcctgtgggccactcacctccccagca

SEQ ID NO: 33617 - DNA, 80 bp, synthetic construct
  misc_feature 1..80: note = Artificially Synthesized Probe
  source 1..80: mol_type = other DNA
atagctttcccgtgttggctcaagaaaaacaaagcaactaaatgttaacacacaaaagagccaaacatctatccaatgtc

SEQ ID NO: 33618 - DNA, 80 bp, synthetic construct
  misc_feature 1..80: note = Artificially Synthesized Probe
  source 1..80: mol_type = other DNA
gaggaggtcgccgagatttatcagcatgacagctgcacctaccctctacccagcagtctctctcctagctggatatccta

SEQ ID NO: 33619 - DNA, 80 bp, synthetic construct
  misc_feature 1..80: note = Artificially Synthesized Probe
  source 1..80: mol_type = other DNA
taagaaagaaaaaaaaattatcatctggttgcccataagaggagcaggtcagtcaggcatgagaccacagcttttctgag

SEQ ID NO: 33620 - DNA, 80 bp, synthetic construct
  misc_feature 1..80: note = Artificially Synthesized Probe
  source 1..80: mol_type = other DNA
tcccccgtcagacagtgactccatcccccgtcagacagtgactccatcccccgtcaggcagtgactctatcccctgtcag

SEQ ID NO: 33621 - DNA, 80 bp, synthetic construct
  misc_feature 1..80: note = Artificially Synthesized Probe
  source 1..80: mol_type = other DNA
acatgtctggggggctctgaaataaaatacaactcacttttatggctggcgggtaatccttaaacatctccacgattctc

SEQ ID NO: 33622 - DNA, 80 bp, synthetic construct; identical to SEQ ID NO: 23798
  misc_feature 1..80: note = Artificially Synthesized Probe
  source 1..80: mol_type = other DNA

SEQ ID NO: 33623 - DNA, 80 bp, synthetic construct
  misc_feature 1..80: note = Artificially Synthesized Probe
  source 1..80: mol_type = other DNA
ttcaggtctgcctgtccctgagaacagtccctgctgagcgggccagcctccacctcccacaaccccaccttcctcattgt

SEQ ID NO: 33624 - DNA, 80 bp, synthetic construct
  misc_feature 1..80: note = Artificially Synthesized Probe
  source 1..80: mol_type = other DNA
gtccatgcccagattcttccagttgtcctcatcatgttctttctttttaattttttaataatttttctttcttcttctcc

SEQ ID NO: 33625 - DNA, 80 bp, synthetic construct
  misc_feature 1..80: note = Artificially Synthesized Probe
  source 1..80: mol_type = other DNA
caggacagagatgggctccgagcaggggagcctgggcagcagggagaagactggggagctgaggggctgccagtgcaaag

SEQ ID NO: 33626 - DNA, 80 bp, synthetic construct
  misc_feature 1..80: note = Artificially Synthesized Probe
  source 1..80: mol_type = other DNA
ctctttccctctctgagcgcctcagcagcccactaggtcgggcactggtgccctgggggcattgctctgtgcctactcgc

SEQ ID NO: 33627 - DNA, 80 bp, synthetic construct
  misc_feature 1..80: note = Artificially Synthesized Probe
  source 1..80: mol_type = other DNA
gttaatactttgactcatttaatccttaactccccagttcttctgaagttgggggccagcgaggaccctctgtggtgact

SEQ ID NO: 33628 - DNA, 80 bp, synthetic construct
  misc_feature 1..80: note = Artificially Synthesized Probe
  source 1..80: mol_type = other DNA
gctgctgtctgtcacctccagctcgcccttgaattctttcctggacaaagccaagaaccctgctggcctaagccctggtt

SEQ ID NO: 33629 - DNA, 80 bp, synthetic construct
  misc_feature 1..80: note = Artificially Synthesized Probe
  source 1..80: mol_type = other DNA
cagaccccgcatggtctgtttatcaaggagcgtattagaatatgaagggcaacccccaaaagaatactgaaaaatttccc

SEQ ID NO: 33630 - DNA, 80 bp, synthetic construct
  misc_feature 1..80: note = Artificially Synthesized Probe
  source 1..80: mol_type = other DNA
ccgacagagtatgagagaaaagagaaagaagggaagttttcttactgagtaagatttcaggacccgagcaggaaatggca

SEQ ID NO: 33631 - DNA, 80 bp, synthetic construct
  misc_feature 1..80: note = Artificially Synthesized Probe
  source 1..80: mol_type = other DNA
acatgggcctttggggtcttttagtttttaaaaccattcttagtgcaaaggctgtacaaacacaggccagggctggattt

SEQ ID NO: 33632 - DNA, 80 bp, synthetic construct
  misc_feature 1..80: note = Artificially Synthesized Probe
  source 1..80: mol_type = other DNA
ctcgaaatatatgatgtcataacagagccacaggaagatgtagatatatcagtagaggtggggaaggacttgaaacactt

SEQ ID NO: 33633 - DNA, 80 bp, synthetic construct
  misc_feature 1..80: note = Artificially Synthesized Probe
  source 1..80: mol_type = other DNA
atggcgccactacactccagcctgggcgacagagcgagattccttctcaaaaacaaaacaaaacaaaacaaaaaggcagt

SEQ ID NO: 33634 - DNA, 80 bp, synthetic construct
  misc_feature 1..80: note = Artificially Synthesized Probe
  source 1..80: mol_type = other DNA
ctgagcaactgagactctgaaatactctaacatttgcgcttccagaaggatctgaatcatattcacaaaacagtgttgcc

SEQ ID NO: 33635 - DNA, 80 bp, synthetic construct
  misc_feature 1..80: note = Artificially Synthesized Probe
  source 1..80: mol_type = other DNA
aagtagcaagactctgcatgtgagggaggcagaaaggagtcccacagccttcttgtcctcagccttcttgtccccacagg

SEQ ID NO: 33636 - DNA, 80 bp, synthetic construct
  misc_feature 1..80: note = Artificially Synthesized Probe
  source 1..80: mol_type = other DNA
ggaccaggggacagcggttgtctgtcctcccttgctctgaggatcagtgggtgcctccaccggccttggcactgtgtaag

SEQ ID NO: 33637 - DNA, 80 bp, synthetic construct
  misc_feature 1..80: note = Artificially Synthesized Probe
  source 1..80: mol_type = other DNA
ctgcttacagagcctgcagcacagcgcaagtaatccatctcagccgggaacacgttccccaggtacagcgaaaaccccga

SEQ ID NO: 33638 - DNA, 80 bp, synthetic construct
  misc_feature 1..80: note = Artificially Synthesized Probe
  source 1..80: mol_type = other DNA
gccagggcacagggaggggagaaatcacagcctggatctcattctcagcccaagctacacggaaccgggggtccctgcat

SEQ ID NO: 33639 - DNA, 80 bp, synthetic construct
  misc_feature 1..80: note = Artificially Synthesized Probe
  source 1..80: mol_type = other DNA
ataactttcctagaaaaacggacctgaatagtctgggttcagggtgagattctacactttaaatgcctcattgatccatc

SEQ ID NO: 33640 - DNA, 80 bp, synthetic construct
  misc_feature 1..80: note = Artificially Synthesized Probe
  source 1..80: mol_type = other DNA
tcacctacagtgttcccctgggctcagcaggcaacaacattcttttttgttcttttgcagccttttgaaagctgtttaca

SEQ ID NO: 33641 - DNA, 80 bp, synthetic construct
  misc_feature 1..80: note = Artificially Synthesized Probe
  source 1..80: mol_type = other DNA
ccgtgcccaaggcaggaccgcggcgcgatgtcacctatgcaaagtcgccgcaactcacgggaatcgcagctgtgtgctca

SEQ ID NO: 33642 - DNA, 80 bp, synthetic construct
  misc_feature 1..80: note = Artificially Synthesized Probe
  source 1..80: mol_type = other DNA
gggacaggtccttttttagatggtgtgactggtatcttcttcacttatttctttctgagggagtgaaatgacagtcgggg

SEQ ID NO: 33643 - DNA, 80 bp, synthetic construct
  misc_feature 1..80: note = Artificially Synthesized Probe
  source 1..80: mol_type = other DNA
caaccacaatgcaataacggctcaaataagccccagtctcagtggttggggcagccttctagggccaactgtcttgttct

SEQ ID NO: 33644 - DNA, 80 bp, synthetic construct
  misc_feature 1..80: note = Artificially Synthesized Probe
  source 1..80: mol_type = other DNA
gctggctgtctccaatgtttaaaatatgatcgaatctgagcagtggaacaggcagtaagtggaagtgttttgttcaggaa

SEQ ID NO: 33645 - DNA, 80 bp, synthetic construct
  misc_feature 1..80: note = Artificially Synthesized Probe
  source 1..80: mol_type = other DNA
gagggaatgataatgcctcagctgatggtcacactgtccatccattctgaaaatagaatgtcggtgaatgctcttcttat

SEQ ID NO: 33646 - DNA, 80 bp, synthetic construct
  misc_feature 1..80: note = Artificially Synthesized Probe
  source 1..80: mol_type = other DNA
gtaatgtccacatcaatataagctgtgaggcctgtgtgatattgccatatgaaaagccagcaagtggatctgtcattctc

SEQ ID NO: 33647 - DNA, 80 bp, synthetic construct
  misc_feature 1..80: note = Artificially Synthesized Probe
  source 1..80: mol_type = other DNA
aaaaaaattaagtaaaattttaaaaaatttaattagatttgctgagggtgaggcctggccaccagtagtgttaggtgatc

SEQ ID NO: 33648 - DNA, 80 bp, synthetic construct
  misc_feature 1..80: note = Artificially Synthesized Probe
  source 1..80: mol_type = other DNA
cagctcttctttctggccttggttttctcaatgagaggatctgacttgccaaactgacattcacttgttctctgaatagt

SEQ ID NO: 33649 - DNA, 80 bp, synthetic construct
  misc_feature 1..80: note = Artificially Synthesized Probe
  source 1..80: mol_type = other DNA
tgcactttgcaggcagagccagcaagcttgaccagagatcagatggggggtctccagggtgagagggatcaagggcaact

SEQ ID NO: 33650 - DNA, 80 bp, synthetic construct
  misc_feature 1..80: note = Artificially Synthesized Probe
  source 1..80: mol_type = other DNA
aggaactgcccgtatcatccaggaccctcttcccatctcaggatccttaatgtcattccatcggcaaagtcccttttgct

SEQ ID NO: 33651 - DNA, 80 bp, synthetic construct
  misc_feature 1..80: note = Artificially Synthesized Probe
  source 1..80: mol_type = other DNA
gtctttccttatttcatgctcttttcatcatttcacattgcaaagaagggacacacccaggtcacctcccagaactctta

SEQ ID NO: 33652 - DNA, 80 bp, synthetic construct
  misc_feature 1..80: note = Artificially Synthesized Probe
  source 1..80: mol_type = other DNA
agaggaaacaagcatagaaaaaaggctctggttcttggcaccaaaattggttctgcagaggagctggcgaaaataccaga

SEQ ID NO: 33653 - DNA, 80 bp, synthetic construct
  misc_feature 1..80: note = Artificially Synthesized Probe
  source 1..80: mol_type = other DNA
tcttaaaattagcagatgtgtgtcagatggattcctgctcagtatttctctccagatgtgagcatcaatcacgttgaagg

SEQ ID NO: 33654 - DNA, 80 bp, synthetic construct
  misc_feature 1..80: note = Artificially Synthesized Probe
  source 1..80: mol_type = other DNA
gccctgttaaatcatcatataaatagacctaaggctgcactgtccaggacagaagttactagccactagtggctattaaa

SEQ ID NO: 33655 - DNA, 80 bp, synthetic construct
  misc_feature 1..80: note = Artificially Synthesized Probe
  source 1..80: mol_type = other DNA
tcaactctcttctctgctctgtgtcactcacttctccagtgaccttgtccagccccaaggttttaaatgagttctagacc

SEQ ID NO: 33656 - DNA, 80 bp, synthetic construct
  misc_feature 1..80: note = Artificially Synthesized Probe
  source 1..80: mol_type = other DNA
gaatatctggtaaatgtttacttttagcattcgcgggtctatctgcagtgagtgagagcttgctgtgtattggtgtattg

SEQ ID NO: 33657 - DNA, 80 bp, synthetic construct
  misc_feature 1..80: note = Artificially Synthesized Probe
  source 1..80: mol_type = other DNA
aaagtaaaccttcttgaagggaacattggttaatagtcacagcttttaactccttctgtccccagaagagcccagaactt

SEQ ID NO: 33658 - DNA, 80 bp, synthetic construct
  misc_feature 1..80: note = Artificially Synthesized Probe
  source 1..80: mol_type = other DNA
tttttttgatcataaggaatttgaaatcacccttagccggactagttggaatcacggacacaggcaactctagagatgaa

SEQ ID NO: 33659 - DNA, 80 bp, synthetic construct
  misc_feature 1..80: note = Artificially Synthesized Probe
  source 1..80: mol_type = other DNA
aaaagatgtctacttcccaaccccaagaacctctgaattcgtgaggctatacagaaatgggattatgcattttaggctgc

SEQ ID NO: 33660 - DNA, 80 bp, synthetic construct
  misc_feature 1..80: note = Artificially Synthesized Probe
  source 1..80: mol_type = other DNA
cagtggcatggcaaaaactcatggtcgaaaacttcacccaaccaagccgtgcaaaggaaatacaggtcttttatttccca

SEQ ID NO: 33661 - DNA, 80 bp, synthetic construct
  misc_feature 1..80: note = Artificially Synthesized Probe
  source 1..80: mol_type = other DNA
ttttctccacattctgggagggagagcaaacttgacttcgaaatcagcagttctcaaacctttgggcctcaggacccctt

SEQ ID NO: 33662 - DNA, 80 bp, synthetic construct
  misc_feature 1..80: note = Artificially Synthesized Probe
  source 1..80: mol_type = other DNA
aaggagtacttgaatagcctttgtagacaataattaacatcatgtgttgttacaacatgaaaacccggcagttggagttg

SEQ ID NO: 33663 - DNA, 80 bp, synthetic construct
  misc_feature 1..80: note = Artificially Synthesized Probe
  source 1..80: mol_type = other DNA
gttgcaaactgtcaagctcacagcaggcgatatatgttttccagaattctactttgtgcttgaaagcttccgttttatta

SEQ ID NO: 33664 - DNA, 80 bp, synthetic construct
  misc_feature 1..80: note = Artificially Synthesized Probe
  source 1..80: mol_type = other DNA
cgtgctaaagcctcagcagtttatccaccattgtttttacaccttcagtgcaggcatcaaagagcaaagaaaaggcaaat

SEQ ID NO: 33665 - DNA, 80 bp, synthetic construct
  misc_feature 1..80: note = Artificially Synthesized Probe
  source 1..80: mol_type = other DNA
ttctcttggtttttgaagctatgacaagagcctgatttcgtgtccatctcagtgaacatttttgtaaatagtggagagag

SEQ ID NO: 33666 - DNA, 80 bp, synthetic construct
  misc_feature 1..80: note = Artificially Synthesized Probe
  source 1..80: mol_type = other DNA
aatgcaatatcatttctatgaaattaacgtgtttccattccattccagccaccaaaattgcccgtttgagctcagccctc

SEQ ID NO: 33667 - DNA, 80 bp, synthetic construct
  misc_feature 1..80: note = Artificially Synthesized Probe
  source 1..80: mol_type = other DNA
aattatattgttttcaaatcttcaaagtaagttgagaactcaaagccaagtttctgaaacccagctgctgattgaatcac

SEQ ID NO: 33668 - DNA, 80 bp, synthetic construct
  misc_feature 1..80: note = Artificially Synthesized Probe
  source 1..80: mol_type = other DNA
tttaagagtaaaaggaggctctactgataacatgctgcaacaacagatgtgactaggaacggccggtgacatggggaggg

SEQ ID NO: 33669 - DNA, 80 bp, synthetic construct
  misc_feature 1..80: note = Artificially Synthesized Probe
  source 1..80: mol_type = other DNA
cctcgcctgacgtcaacactaggttctttatgctcatgtggttttatttttgttttctcctatcaagagtggtcagaaaa

SEQ ID NO: 33670 - DNA, 80 bp, synthetic construct
  misc_feature 1..80: note = Artificially Synthesized Probe
  source 1..80: mol_type = other DNA
tgcgtgtggaaagaagattatataacaaggccggacctgctgctaataggctgagtggggaacctagcaaggtctgtctg

SEQ ID NO: 33671 - DNA, 80 bp, synthetic construct
  misc_feature 1..80: note = Artificially Synthesized Probe
  source 1..80: mol_type = other DNA
gttataaagtccgtcgttcagatttccagttttgccaactggttgactatttctatctctgtattataaatggaaaactg

SEQ ID NO: 33672 - DNA, 80 bp, synthetic construct
  misc_feature 1..80: note = Artificially Synthesized Probe
  source 1..80: mol_type = other DNA
tcagcccctggagtagaaaggtggatggtccacggggcctgctggctctaaaccctggggtccctttcctaaatcacttg

SEQ ID NO: 33673 - DNA, 80 bp, synthetic construct
  misc_feature 1..80: note = Artificially Synthesized Probe
  source 1..80: mol_type = other DNA
gtggatggatggtaggatggatggtaggatggatggatggtaggatggatggatggatggatggatggataggtggatag

SEQ ID NO: 33674 - DNA, 80 bp, synthetic construct
  misc_feature 1..80: note = Artificially Synthesized Probe
  source 1..80: mol_type = other DNA
gatggatgtatagatggattgatgatgagtgggtggatgaaggagggatggagggatggatggatggatgggtgggtagg

SEQ ID NO: 33675 - DNA, 80 bp, synthetic construct
  misc_feature 1..80: note = Artificially Synthesized Probe
  source 1..80: mol_type = other DNA
gttctgatttcctgaaaaccttgatggcctctccacaactccactagtttctactgcatgagcaccaagaatctgctgcc

SEQ ID NO: 33676 - DNA, 80 bp, synthetic construct
  misc_feature 1..80: note = Artificially Synthesized Probe
  source 1..80: mol_type = other DNA
ggggaggtgcagggtatttggtcctctccctcaagctagccctgacttgagtcttgccctgtcttgtgcctgctaagaaa

SEQ ID NO: 33677 - DNA, 80 bp, synthetic construct
  misc_feature 1..80: note = Artificially Synthesized Probe
  source 1..80: mol_type = other DNA
cgccttactcattagctgtgtggcctttgtccctggaacctcttcaagggctgattagtggtagttgctggttgattatt

SEQ ID NO: 33678 - DNA, 80 bp, synthetic construct
  misc_feature 1..80: note = Artificially Synthesized Probe
  source 1..80: mol_type = other DNA
agtcttgaatagccctcctatttttcaggtgtcttgttcatccatcattgatgttatggatgatggaccctgaacctata

SEQ ID NO: 33679 - DNA, 80 bp, synthetic construct
  misc_feature 1..80: note = Artificially Synthesized Probe
  source 1..80: mol_type = other DNA
gctggagtggagtagaactgaaactggggttgggccttcaaacacctgctgcaactatagtgctggagcggagcagggct

SEQ ID NO: 33680 - DNA, 80 bp, synthetic construct
  misc_feature 1..80: note = Artificially Synthesized Probe
  source 1..80: mol_type = other DNA
atgtaatttgggtatgaaccttttttgcaggggttggctaaggtaacagtaattggtaagattaaggggattagggctgt

SEQ ID NO: 33681 - DNA, 80 bp, synthetic construct
  misc_feature 1..80: note = Artificially Synthesized Probe
  source 1..80: mol_type = other DNA
ctagtaaggtgtcggttactagggccagtgtcaagttgattatttccgccctacaggatcatttcaaggatgctgtatta

SEQ ID NO: 33682 - DNA, 80 bp, synthetic construct
  misc_feature 1..80: note = Artificially Synthesized Probe
  source 1..80: mol_type = other DNA
tgccaggaagccccaacccacttttctgatcttcaaagattaaggtgtacatagttagtaacagtgcacccttctcccaa

SEQ ID NO: 33683 - DNA, 80 bp, synthetic construct
  misc_feature 1..80: note = Artificially Synthesized Probe
  source 1..80: mol_type = other DNA
ggcttaactttgtcgtcagttttgctttgaaatgaaatccccaaagctctgtcttttctggtaccccaagggtgtatgta

SEQ ID NO: 33684 - DNA, 80 bp, synthetic construct
  misc_feature 1..80: note = Artificially Synthesized Probe
  source 1..80: mol_type = other DNA
gcacctcagtttcctcattgtacaaaaggggttaacaacgtctaactcatcccattgtcatagggattaaatgagatggc

SEQ ID NO: 33685 - DNA, 80 bp, synthetic construct
  misc_feature 1..80: note = Artificially Synthesized Probe
  source 1..80: mol_type = other DNA
tggagaacactgtgctaagtgaaataaaccagtcactctggacacatgctatatggttccacttaacctgaggttcttag

SEQ ID NO: 33686 - DNA, 80 bp, synthetic construct
  misc_feature 1..80: note = Artificially Synthesized Probe
  source 1..80: mol_type = other DNA
ttcaccccccaaaaaaatcccatacccatgaagcagttacttcccagtctcccttgtccccggcctctgacaactaccag

SEQ ID NO: 33687 - DNA, 80 bp, synthetic construct
  misc_feature 1..80: note = Artificially Synthesized Probe
  source 1..80: mol_type = other DNA
atagagccttgactccagcaacgtaatcacaggatgggggactgttctgtaactgatgactcttgaggcatgaaacccag

SEQ ID NO: 33688 - DNA, 80 bp, synthetic construct
  misc_feature 1..80: note = Artificially Synthesized Probe
  source 1..80: mol_type = other DNA
gggcagaagcatgcagtttctgaattcagcatctctctggactcagtgtcctcagctgactttttactgtagtgtcatct

SEQ ID NO: 33689 - DNA, 80 bp, synthetic construct
  misc_feature 1..80: note = Artificially Synthesized Probe
  source 1..80: mol_type = other DNA
ctcctagtctcctagcctgaagacaacaggatgaagaggagaatcaagttgtctattttcagtaaacctgtagtttagca

SEQ ID NO: 33690 - DNA, 80 bp, synthetic construct
  misc_feature 1..80: note = Artificially Synthesized Probe
  source 1..80: mol_type = other DNA
gggctacagacactgacggtttcccataaaagtgtcaccagtgacatattttgttggtttgctttaatccctagctagtg

SEQ ID NO: 33691 - DNA, 80 bp, synthetic construct
  misc_feature 1..80: note = Artificially Synthesized Probe
  source 1..80: mol_type = other DNA
gatgtttccatttcaaaaacacagttcccaggtggagttttgagactgcagagaggctttttagccattttaaagattta

SEQ ID NO: 33692 - DNA, 80 bp, synthetic construct
  misc_feature 1..80: note = Artificially Synthesized Probe
  source 1..80: mol_type = other DNA
gttccgctccaagattttgcttggtgttccagaactcttggtgttagaaatgggtttcacaattaaccttcccaggccat

SEQ ID NO: 33693 - DNA, 80 bp, synthetic construct
  misc_feature 1..80: note = Artificially Synthesized Probe
  source 1..80: mol_type = other DNA
gaatctccttccgcaccatgtttgtgaatgtatcatcagcacagcttagtctgctatatgctgctatagcaaaataccac

SEQ ID NO: 33694 - DNA, 80 bp, synthetic construct
  misc_feature 1..80: note = Artificially Synthesized Probe
  source 1..80: mol_type = other DNA
gttacagcttactaattccgaggaagattgctttaacactccatgagtaggggtaatgatcttgagaggggtctcatctc

SEQ ID NO: 33695 - DNA, 80 bp, synthetic construct
  misc_feature 1..80: note = Artificially Synthesized Probe
  source 1..80: mol_type = other DNA
acccgctgtcctgtagcctgcccggccctggctccagcccacccagaaacagattaaccttgtggagggaaagggcagcc

SEQ ID NO: 33696 - DNA, 80 bp, synthetic construct
  misc_feature 1..80: note = Artificially Synthesized Probe
  source 1..80: mol_type = other DNA
tgcacgggcagacaagtgaatgggcgtcgtcttcctggccatcttgctaacttgtgtgacttcgtcacctgggaagagtc

SEQ ID NO: 33697 - DNA, 80 bp, synthetic construct
  misc_feature 1..80: note = Artificially Synthesized Probe
  source 1..80: mol_type = other DNA
cagcttctctgaataaacagctggaaataagtcccagaagtctattctggggtggtgtattttggtttccttcacaaccc

SEQ ID NO: 33698 - DNA, 80 bp, synthetic construct
  misc_feature 1..80: note = Artificially Synthesized Probe
  source 1..80: mol_type = other DNA
gactttacagagattattgaactgagttcttataacttgcaggttggatactgctatcaccaccattttaaagctgaggg

SEQ ID NO: 33699 - DNA, 80 bp, synthetic construct
  misc_feature 1..80: note = Artificially Synthesized Probe
  source 1..80: mol_type = other DNA
caacaggaccacagatgaggagctgtcagagctggaggacagagtggcagtgacggcctcagaagtccagcaggcagaga

SEQ ID NO: 33700 - DNA, 80 bp, synthetic construct
  misc_feature 1..80: note = Artificially Synthesized Probe
  source 1..80: mol_type = other DNA
tagagctgttcaaggggagcgagtcaggctctggactttcccttcatgtattccttcttgctttgcaaataagctttaaa

SEQ ID NO: 33701 - DNA, 80 bp, synthetic construct
  misc_feature 1..80: note = Artificially Synthesized Probe
  source 1..80: mol_type = other DNA
ggcgggatctcgagcgtctgtctgacgggccttctgtctgctgtcctctcgcaggtttcagacattgaatccaggattgc

SEQ ID NO: 33702 - DNA, 80 bp, synthetic construct
  misc_feature 1..80: note = Artificially Synthesized Probe
  source 1..80: mol_type = other DNA
ggcacagtggtgagtggagacagtggtgagttgggggacagtagtgagtggggggacagtggtgagtgggcacggtagtg

SEQ ID NO: 33703 - DNA, 80 bp, synthetic construct
  misc_feature 1..80: note = Artificially Synthesized Probe
  source 1..80: mol_type = other DNA
atgggcacggtagtgagtggggggacagtagtgagtggggacagtggtgagtgggggggacagtggtgagtggggggaca

SEQ ID NO: 33704 - DNA, 80 bp, synthetic construct
  misc_feature 1..80: note = Artificially Synthesized Probe
  source 1..80: mol_type = other DNA
tagccagctgtgcctttgttggggttcatttttgtttattatttgttgtttctaccctaaaaaggctctttatgagggga

SEQ ID NO: 33705 - DNA, 80 bp, synthetic construct
  misc_feature 1..80: note = Artificially Synthesized Probe
  source 1..80: mol_type = other DNA
agtctcaagatttgttttcttttcacaatctgaaattcaaagttccctgggtatcctgtattttcatttgcacactttgg

SEQ ID NO: 33706 - DNA, 80 bp, synthetic construct
  misc_feature 1..80: note = Artificially Synthesized Probe
  source 1..80: mol_type = other DNA
tccccgtgttcaggtggagtggttaggagtaggagcagtgcacagagggcagagccagcctgggagggagttgctccccg

SEQ ID NO: 33707 - DNA, 80 bp, synthetic construct
  misc_feature 1..80: note = Artificially Synthesized Probe
  source 1..80: mol_type = other DNA
aatggatttcttatcacactgtagcaaggcaatcaactggaaaagagacaggaggagaagtgtgaggaccaacagtcaca

SEQ ID NO: 33708 - DNA, 80 bp, synthetic construct
  misc_feature 1..80: note = Artificially Synthesized Probe
  source 1..80: mol_type = other DNA
tctgtgtgtttcttcattatctgtgggacatatctcatgtcctgactcccaaaaaacattcccagtgccgctcgggccac

SEQ ID NO: 33709 - DNA, 80 bp, synthetic construct
  misc_feature 1..80: note = Artificially Synthesized Probe
  source 1..80: mol_type = other DNA
agctcgctctttgcatgccctgagctcccagcacacattctggtcaatcctgggatacagctggtgcccagggccctttg

SEQ ID NO: 33710 - DNA, 80 bp, synthetic construct
  misc_feature 1..80: note = Artificially Synthesized Probe
  source 1..80: mol_type = other DNA
ccacatgaccctgcagagaggggaacagcacaacaggagcacgctgctgagccaactcccagaaaaggaaaaggacaaag

SEQ ID NO: 33711 - DNA, 80 bp, synthetic construct
  misc_feature 1..80: note = Artificially Synthesized Probe
  source 1..80: mol_type = other DNA
aaagaacaaaaaagaaaagaaagtcaaggaaatgcgaagaccacacaccagtgcagtgtgatgggcctttctgctgcttc

SEQ ID NO: 33712 - DNA, 80 bp, synthetic construct
  misc_feature 1..80: note = Artificially Synthesized Probe
  source 1..80: mol_type = other DNA
gagcaggctagagccagtggctcaggagcctggttacagcattttctggagtttaagtgccctccagagttttcccattg

SEQ ID NO: 33713 - DNA, 80 bp, synthetic construct
  misc_feature 1..80: note = Artificially Synthesized Probe
  source 1..80: mol_type = other DNA
gtaaatctttgaaggacacaccgaagacctttatactgtgatcttttacccctttcactcttggctttcttatgttgctt

SEQ ID NO: 33714 - DNA, 80 bp, synthetic construct
  misc_feature 1..80: note = Artificially Synthesized Probe
  source 1..80: mol_type = other DNA
ccttccctctctcaataagacacttccaggagctttccaatctctcacttaaaactaaggtttgaatctcaaagtgttgc

SEQ ID NO: 33715 - DNA, 80 bp, synthetic construct
  misc_feature 1..80: note = Artificially Synthesized Probe
  source 1..80: mol_type = other DNA
tttttccaatttatttagaaaaatagactctggattcacattcaccccagggctatgtgggatgacagcaaggagacacc

SEQ ID NO: 33716 - DNA, 80 bp, synthetic construct
  misc_feature 1..80: note = Artificially Synthesized Probe
  source 1..80: mol_type = other DNA
cgttgtactaggaattctggaggcacccgggctcgggcctcatcccccagtatctgctccctcccaatccagccatcagc

SEQ ID NO: 33717 - DNA, 80 bp, synthetic construct
  misc_feature 1..80: note = Artificially Synthesized Probe
  source 1..80: mol_type = other DNA
tgaccaacgaggacagaaaagaacagtgttagattggcattctctcttgaattccctcttgagaatcagccttagtgagg

SEQ ID NO: 33718 - DNA, 80 bp, synthetic construct
  misc_feature 1..80: note = Artificially Synthesized Probe
  source 1..80: mol_type = other DNA
ggtaaatagaaatggttatacaggcagttgtttaaggcaggatttaagccaggcagccagagcccacttcatgctgcatt

SEQ ID NO: 33719 - DNA, 80 bp, synthetic construct
  misc_feature 1..80: note = Artificially Synthesized Probe
  source 1..80: mol_type = other DNA
cccgacatacccagggccaaagacaggaccacgacggccagagccactcctccagccgtgctacgcggcccgccgccccg

SEQ ID NO: 33720 - DNA, 80 bp, synthetic construct
  misc_feature 1..80: note = Artificially Synthesized Probe
  source 1..80: mol_type = other DNA
accaggtgtcacactcatctgagggctccagacacatggcctgtgcgtctgtcctgcccagcgtctcccacctgacgcgg

SEQ ID NO: 33721 - DNA, 80 bp, synthetic construct
  misc_feature 1..80: note = Artificially Synthesized Probe
  source 1..80: mol_type = other DNA
gaagcagaggacagttagggaccctgagcacgcggtggtcaccccggtgctcacccctccctgtgtgtccgaccttggcc

SEQ ID NO: 33722 - DNA, 80 bp, synthetic construct
  misc_feature 1..80: note = Artificially Synthesized Probe
  source 1..80: mol_type = other DNA
cttcccagggcccctgcagcttaatgtaggtcaaggatctgggctctgccaatcagacttggagtaagaagcagggactg

SEQ ID NO: 33723 - DNA, 80 bp, synthetic construct
  misc_feature 1..80: note = Artificially Synthesized Probe
  source 1..80: mol_type = other DNA
aataaaaaaaaaatacaatgggcatttgtgatacaacaaaacagcacgtgtggcaggtgcgtcgtaggaacagggcaagg

SEQ ID NO: 33724 - DNA, 80 bp, synthetic construct
  misc_feature 1..80: note = Artificially Synthesized Probe
  source 1..80: mol_type = other DNA
ccctatctccgggaagccctcctgaatgctccccacgctggccccttcttcccaccaccctacctccgggaaggcctcct

SEQ ID NO: 33725 - DNA, 80 bp, synthetic construct
  misc_feature 1..80: note = Artificially Synthesized Probe
  source 1..80: mol_type = other DNA
tctcaagggcacttgggaaaggaggaatctggggaatggagggtcctgctgagaggacttgacctgcaaggtgaatccat

SEQ ID NO: 33726 - DNA, 80 bp, synthetic construct
  misc_feature 1..80: note = Artificially Synthesized Probe
  source 1..80: mol_type = other DNA
tgaggatgagaagctgattggagaagaggatgactgcagtgctaagagcagcgtggtcaggttgccaaggatggagcagt

SEQ ID NO: 33727 - DNA, 80 bp, synthetic construct
  misc_feature 1..80: note = Artificially Synthesized Probe
  source 1..80: mol_type = other DNA
tccccagccaggaatccaaggggcctttccaaacctgcagggcagagggaattcgggtatctgtgcttgagtgagcccct

SEQ ID NO: 33728 - DNA, 80 bp, synthetic construct
  misc_feature 1..80: note = Artificially Synthesized Probe
  source 1..80: mol_type = other DNA
ggacacacaggcctgagcaaagggcctgcccagacaagattttttaattgtttaaaaaccgaataaatgttttatttcta

SEQ ID NO: 33729 - DNA, 80 bp, synthetic construct
  misc_feature 1..80: note = Artificially Synthesized Probe
  source 1..80: mol_type = other DNA
tactcagttgcttaaacttcaggatgggagtgcctcgggggattttcattcctggttctatttggagatgatttagaaga

SEQ ID NO: 33730 - DNA, 80 bp, synthetic construct
  misc_feature 1..80: note = Artificially Synthesized Probe
  source 1..80: mol_type = other DNA
tgccttataagtgttagctattaaaatcagtggcagaaaagaagtacataaaaggccaaataaaaaggatagatgaaatt

SEQ ID NO: 33731 - DNA, 80 bp, synthetic construct
  misc_feature 1..80: note = Artificially Synthesized Probe
  source 1..80: mol_type = other DNA
actgcacccagcctgtaacttttattttatcttttcttggcccgagaagcatgtgattggaggaatttgtgtaaaggcag

SEQ ID NO: 33732 - DNA, 80 bp, synthetic construct
  misc_feature 1..80: note = Artificially Synthesized Probe
  source 1..80: mol_type = other DNA
agtgctgacattacaggcatgagccaccacacctggccaacaataggctcttgctagctgctgctattggtcccagggca

SEQ ID NO: 33733 - DNA, 80 bp, synthetic construct
  misc_feature 1..80: note = Artificially Synthesized Probe
  source 1..80: mol_type = other DNA
atttgttctccatctttctcagtgtttgtatctagaaggctgagctaacttttatgctttggaacatagggctagatttt

SEQ ID NO: 33734 - DNA, 80 bp, synthetic construct
  misc_feature 1..80: note = Artificially Synthesized Probe
  source 1..80: mol_type = other DNA
aagtagaggctagaatggctaatagcactaaggcatcacagctaaaaaatggtggaaccaggatttgattgcaagcctat

SEQ ID NO: 33735 - DNA, 80 bp, synthetic construct
  misc_feature 1..80: note = Artificially Synthesized Probe
  source 1..80: mol_type = other DNA
gagtttcttggcctctgttttgtccttgtggtcagacccatactgggttcatattatgtacttttccaaatggccagttg

SEQ ID NO: 33736 - DNA, 80 bp, synthetic construct
  misc_feature 1..80: note = Artificially Synthesized Probe
  source 1..80: mol_type = other DNA
ctgaggctggtgaacatatttcttagtttggattccccaagaagctgtcctcagacaattgcactctggtttgagggcaa

SEQ ID NO: 33737 - DNA, 80 bp, synthetic construct
  misc_feature 1..80: note = Artificially Synthesized Probe
  source 1..80: mol_type = other DNA
atccttgatctttttgcctttgagttaaccacagcagagagtgtgctcaacatggcaggaaacttatgtcttttgtttgt

SEQ ID NO: 33738 - DNA, 80 bp, synthetic construct
  misc_feature 1..80: note = Artificially Synthesized Probe
  source 1..80: mol_type = other DNA
agattatttatgctccccaaaaagagactgcagcactaaatcagaaagatcaagtacctcgtctcatgaaatttacattc

SEQ ID NO: 33739 - DNA, 80 bp, synthetic construct
  misc_feature 1..80: note = Artificially Synthesized Probe
  source 1..80: mol_type = other DNA
gtttaagttgttgagaacttgtagttagaaacccagtctccttcccacccagaaaacctctccataaaggtagatgagaa

SEQ ID NO: 33740 - DNA, 80 bp, synthetic construct
  misc_feature 1..80: note = Artificially Synthesized Probe
  source 1..80: mol_type = other DNA
aattcattctttggggaattccccctttttgttcttcttcagcttgtttctcttaagatcttcgcctgactggatgaggc

SEQ ID NO: 33741 - DNA, 80 bp, synthetic construct
  misc_feature 1..80: note = Artificially Synthesized Probe
  source 1..80: mol_type = other DNA
agagaactaggaacccaggtggcatagaggcagcgagagtaagtcttactcactctaagtaagacagcatttaatgcgta

SEQ ID NO: 33742 - DNA, 80 bp, synthetic construct
  misc_feature 1..80: note = Artificially Synthesized Probe
  source 1..80: mol_type = other DNA
gctcatttagtcagaacctcaaacatctgcactactaccagctcattttgaaagaacaaggtgaatgcatggaatttagg

SEQ ID NO: 33743 - DNA, 80 bp, synthetic construct
  misc_feature 1..80: note = Artificially Synthesized Probe
  source 1..80: mol_type = other DNA
cccagttgatattattcctttctgttttctgccttgtatgttccactcctggacaatccttgggcatgtaaggtgggact

SEQ ID NO: 33744 - DNA, 80 bp, synthetic construct
  misc_feature 1..80: note = Artificially Synthesized Probe
  source 1..80: mol_type = other DNA
aaaaatgatccatagaacattctttcccaatttagattgcctaagatgaaatctcggcagatcccttggcgacatgggat

SEQ ID NO: 33745 - DNA, 80 bp, synthetic construct
  misc_feature 1..80: note = Artificially Synthesized Probe
  source 1..80: mol_type = other DNA
gtcaaattccacaggtgggacaattgtgctaattgaggagtttaacttgaggaagattggcgctaagaaatcggattttt

SEQ ID NO: 33746 - DNA, 80 bp, synthetic construct
  misc_feature 1..80: note = Artificially Synthesized Probe
  source 1..80: mol_type = other DNA
tggcctcatcagtgttgggtgtatagaatggctcagtagttattaaacagagttagttaataaagctggcaggcgtggtg

SEQ ID NO: 33747 - DNA, 80 bp, synthetic construct
  misc_feature 1..80: note = Artificially Synthesized Probe
  source 1..80: mol_type = other DNA
agaatctgcaaaatgtaatgaattcctacctaggataaattctgaatgtcagttggtggcaagaggtcaaatactttaat

SEQ ID NO: 33748 - DNA, 80 bp, synthetic construct
  misc_feature 1..80: note = Artificially Synthesized Probe
  source 1..80: mol_type = other DNA
aacttaacaaattagtctcgtttgaaaatgtcccaaaacgcagtggaaatgaagtggtactaagagttatttgctaagta

SEQ ID NO: 33749 - DNA, 80 bp, synthetic construct
  misc_feature 1..80: note = Artificially Synthesized Probe
  source 1..80: mol_type = other DNA
ccaactatcagttactcagcgaaaattatcctgtacacaatatagtatatacttaacacgggaggtaggtaggcatgcta

SEQ ID NO: 33750 - DNA, 80 bp, synthetic construct
  misc_feature 1..80: note = Artificially Synthesized Probe
  source 1..80: mol_type = other DNA
tgggcagagcaaagagcattcgatatggtctgggatgattgtgacaccacctgagtaacaatagaatcacgactatcaca

SEQ ID NO: 33751 - DNA, 80 bp, synthetic construct
  misc_feature 1..80: note = Artificially Synthesized Probe
  source 1..80: mol_type = other DNA
aaatcacgttttgtacatttaatatctttcttaaagggctttatagtcttccagtctgtttcattttgtgttcttttcaa

SEQ ID NO: 33752 - DNA, 80 bp, synthetic construct
  misc_feature 1..80: note = Artificially Synthesized Probe
  source 1..80: mol_type = other DNA
ctaaaacgagttgtttaaaacatctctatcttcaaatataccccaaattagtcttatttgaatggtctcaccgacataca

SEQ ID NO: 33753 - DNA, 80 bp, synthetic construct
  misc_feature 1..80: note = Artificially Synthesized Probe
  source 1..80: mol_type = other DNA
aggcaaaatatccacctgctgagaagatgtacgtttattttctttgcttcccctgccttactttactagatcaaggaatt

SEQ ID NO: 33754 - DNA, 80 bp, synthetic construct
  misc_feature 1..80: note = Artificially Synthesized Probe
  source 1..80: mol_type = other DNA
ggtatatgtgcagatgtcttgcatgcatatattgcatcatggcaaagtctgggtacccgaactgtgaacattgtacccaa

SEQ ID NO: 33755 - DNA, 80 bp, synthetic construct
  misc_feature 1..80: note = Artificially Synthesized Probe
  source 1..80: mol_type = other DNA
tgagctcctgagcatcacagagattcatgagcaaacatacctgacaggtaaggacatgaaaagtctcaagtaaaatcatg

SEQ ID NO: 33756 - DNA, 80 bp, synthetic construct
  misc_feature 1..80: note = Artificially Synthesized Probe
  source 1..80: mol_type = other DNA
ggacacggctatattaatattagtctgtctctgctcctatgactgccatgttcaaaaaaccccttgtggcttctcatttc

SEQ ID NO: 33757 - DNA, 80 bp, synthetic construct
  misc_feature 1..80: note = Artificially Synthesized Probe
  source 1..80: mol_type = other DNA
ggaagggtctcaccaaacatttgctgactgacatgttaacatgcaacaaaataaaaatacttagaaattcagtctcctgt

SEQ ID NO: 33758 - DNA, 80 bp, synthetic construct
  misc_feature 1..80: note = Artificially Synthesized Probe
  source 1..80: mol_type = other DNA
gggaggccgaggtgggtggatcacctgaggtcaggagtttgagacctgcttggccaacatggtgaaatcccatctctact

SEQ ID NO: 33759 - DNA, 80 bp, synthetic construct
  misc_feature 1..80: note = Artificially Synthesized Probe
  source 1..80: mol_type = other DNA
accaagcctggctaattttttgtattttagtagacacagggtttcaccatgttgcccaggatggttttgaactcctgagc

SEQ ID NO: 33760 - DNA, 80 bp, synthetic construct
  misc_feature 1..80: note = Artificially Synthesized Probe
  source 1..80: mol_type = other DNA
ttatttgtggacaacacccatctgctttaagagatatattttaacccaagatttgaattttgcttctaagtcacaccttt

SEQ ID NO: 33761 - DNA, 80 bp, synthetic construct
  misc_feature 1..80: note = Artificially Synthesized Probe
  source 1..80: mol_type = other DNA
acatagtgaaatgtcatccctcctaaaaatacaaaaaaaaaaaattagccaggcgtggtggcggtcacctgtaatcccag

SEQ ID NO: 33762 - DNA, 80 bp, synthetic construct
  misc_feature 1..80: note = Artificially Synthesized Probe
  source 1..80: mol_type = other DNA
gcttcctgggatagggatttgtctgccaggattctcacacaaaacaataaaggtctctgtttaaagtttcagttctcaga

SEQ ID NO: 33763 - DNA, 80 bp, synthetic construct
  misc_feature 1..80: note = Artificially Synthesized Probe
  source 1..80: mol_type = other DNA
gtgttcttcagacagtcagacttctcttttaaagccattgagtggttttcgcatttggcttagaaaactaaactctccat

SEQ ID NO: 33764 - DNA, 80 bp, synthetic construct
  misc_feature 1..80: note = Artificially Synthesized Probe
  source 1..80: mol_type = other DNA
acctattcagccagatgcaattagagaatactagttggcctcaatcagattattagacaataaaacttattaggggacta

SEQ ID NO: 33765 - DNA, 80 bp, synthetic construct
  misc_feature 1..80: note = Artificially Synthesized Probe
  source 1..80: mol_type = other DNA
atttaggttattacctgctccagactttgtggagcaggtaatatgatttccgtcttgcaggaaaggaagtgacattcagg

SEQ ID NO: 33766 - DNA, 80 bp, synthetic construct
  misc_feature 1..80: note = Artificially Synthesized Probe
  source 1..80: mol_type = other DNA
ccagtttctgttgttgccatctttgtgtccatgagtactcggtatttagctcccacttagaagtgagaacatggctattt

SEQ ID NO: 33767 - DNA, 80 bp, synthetic construct
  misc_feature 1..80: note = Artificially Synthesized Probe
  source 1..80: mol_type = other DNA
agaattgaaagataagtaacattacagcttaggtgtaactgttggaatgccgccagaggttttgtggatagttgatgggg

SEQ ID NO: 33768 - DNA, 80 bp, synthetic construct
  misc_feature 1..80: note = Artificially Synthesized Probe
  source 1..80: mol_type = other DNA
tggcattcttgtttttttcttcccattggctttgaaagcaatttcatgtattttaaaatacgcttgacatagctagagat

SEQ ID NO: 33769 - DNA, 80 bp, synthetic construct
  misc_feature 1..80: note = Artificially Synthesized Probe
  source 1..80: mol_type = other DNA
cttattcctccatgatgccttcttcactcgctaaccacttgatgtcagtttctgaacatctctatactccctggattaat

SEQ ID NO: 33770 - DNA, 80 bp, synthetic construct
  misc_feature 1..80: note = Artificially Synthesized Probe
  source 1..80: mol_type = other DNA
tgatcctattagtagcgaggctgaggatgttgacagctggtttaattaaataatgattgtgtggtgcttgtgatttacaa

SEQ ID NO: 33771 - DNA, 80 bp, synthetic construct
  misc_feature 1..80: note = Artificially Synthesized Probe
  source 1..80: mol_type = other DNA
gtcttgttgtagatataactttttaaaaagagatttcccatagccaagtacagtggcttatgccctgtagtagcagctac

SEQ ID NO: 33772 - DNA, 80 bp, synthetic construct
  misc_feature 1..80: note = Artificially Synthesized Probe
  source 1..80: mol_type = other DNA
atggttagatgtcagcctaaaccttttaaaggaatatatttcttggccaagctacggtggctcatgcctgtaatcccacc

SEQ ID NO: 33773 - DNA, 80 bp, synthetic construct
  misc_feature 1..80: note = Artificially Synthesized Probe
  source 1..80: mol_type = other DNA
atttcttggttattctgtgtctacttatcctggaaaattcacaatagaagataataatggaatcagaactggtatgtctg

SEQ ID NO: 33774 - DNA, 80 bp, synthetic construct
  misc_feature 1..80: note = Artificially Synthesized Probe
  source 1..80: mol_type = other DNA
ctttcaggaggaagagactaaaccgcttagggagaatcttatacattgtgatgttttcctcattttctaccacaacatca

SEQ ID NO: 33775 - DNA, 80 bp, synthetic construct
  misc_feature 1..80: note = Artificially Synthesized Probe
  source 1..80: mol_type = other DNA
cacagcctaaaactaacaaggtaaaatgtagttggcatctaagtcgacagcatgtaggtcagatgagcactcatgaggac

SEQ ID NO: 33776 - DNA, 80 bp, synthetic construct
  misc_feature 1..80: note = Artificially Synthesized Probe
  source 1..80: mol_type = other DNA
ccccgtatatatgtgagagatatatatacaccaagtagatgcagatctacttacagctacggtggattaggtctggaagc

SEQ ID NO: 33777 - DNA, 80 bp, synthetic construct
  misc_feature 1..80: note = Artificially Synthesized Probe
  source 1..80: mol_type = other DNA
ccggaagggtgggtaggaactgaggttcaagaaacatgagttgtctcggaggggtaaaaccaaagtggcaatttataaat

SEQ ID NO: 33778 - DNA, 80 bp, synthetic construct
  misc_feature 1..80: note = Artificially Synthesized Probe
  source 1..80: mol_type = other DNA
tgcggctccaatcactttttacatgtttgtagctagagtcaaaattactgtttacatatgaacatgtcaattacctttcc

SEQ ID NO: 33779 - DNA, 80 bp, synthetic construct
  misc_feature 1..80: note = Artificially Synthesized Probe
  source 1..80: mol_type = other DNA
gccttgttattgcagtagccaagggtttctgctgtctcagtcttcaatagtttattgttagtgttgatctcactgttctc

SEQ ID NO: 33780 - DNA, 80 bp, synthetic construct
  misc_feature 1..80: note = Artificially Synthesized Probe
  source 1..80: mol_type = other DNA
acaacttgaccactttaaaaacacctgtttgaggcagtgctttccttaccgggctgggaagactaggaaagaaaaaatcc

SEQ ID NO: 33781 - DNA, 80 bp, synthetic construct
  misc_feature 1..80: note = Artificially Synthesized Probe
  source 1..80: mol_type = other DNA
ttgaggtttcacagccatctttcagttcttgaaagtgacccatcattagttttattcgctgcttctgaaacttctgaaac

SEQ ID NO: 33782 - DNA, 80 bp, synthetic construct
  misc_feature 1..80: note = Artificially Synthesized Probe
  source 1..80: mol_type = other DNA
ttggctgtgggttcccatacaatgtggatagcataaacttggaactgtcactcatctgcagcacaaacttggtatttgtt

SEQ ID NO: 33783 - DNA, 80 bp, synthetic construct
  misc_feature 1..80: note = Artificially Synthesized Probe
  source 1..80: mol_type = other DNA
tgaagtttgaaaagtgctctcctatgaccaaatgatgtagctttatacccaccttctagtattgtcttccataggcaact

SEQ ID NO: 33784 - DNA, 80 bp, synthetic construct
  misc_feature 1..80: note = Artificially Synthesized Probe
  source 1..80: mol_type = other DNA
ttcagaaaagcccaagtatcaacatgctctaaatttctgagtatgtgtgatcttgaggtatgatttgtaaagatagaagc

SEQ ID NO: 33785 - DNA, 80 bp, synthetic construct
  misc_feature 1..80: note = Artificially Synthesized Probe
  source 1..80: mol_type = other DNA
aatgctaacatctgaaactcagaacgtaggtactttttatcttctgtgagggaggtaaactgctcacctttaagtaccat

SEQ ID NO: 33786 - DNA, 80 bp, synthetic construct
  misc_feature 1..80: note = Artificially Synthesized Probe
  source 1..80: mol_type = other DNA
tgagggctagagggagatggtttgagtatctccgaatgattttatatactcagctatatggtatttttccatcataagct

SEQ ID NO: 33787 - DNA, 80 bp, synthetic construct
  misc_feature 1..80: note = Artificially Synthesized Probe
  source 1..80: mol_type = other DNA
gtggggcagcaaaggacattgctcatgcggaactcattatttccatatcttccatgtgctaccatgtttagtcttttatt

SEQ ID NO: 33788 - DNA, 80 bp, synthetic construct
  misc_feature 1..80: note = Artificially Synthesized Probe
  source 1..80: mol_type = other DNA
tgtaataaaagctgagtgcatactttaaaaacacatcttggcagtagtgataagtcttactctgtaagtgaagctgctga

SEQ ID NO: 33789 - DNA, 80 bp, synthetic construct
  misc_feature 1..80: note = Artificially Synthesized Probe
  source 1..80: mol_type = other DNA
gttcgttaaagctggcattccttacagttctatgaggcaggtcttggtatttgcatttggagaggagaaagcaagttcag

SEQ ID NO: 33790 - DNA, 80 bp, synthetic construct
  misc_feature 1..80: note = Artificially Synthesized Probe
  source 1..80: mol_type = other DNA
tcctctctcccccttccccctttccccttcctcctcctcctcttcttcttccttctttcttcgttccttcttccttcttc

SEQ ID NO: 33791 - DNA, 80 bp, synthetic construct
  misc_feature 1..80: note = Artificially Synthesized Probe
  source 1..80: mol_type = other DNA
aggaaaggaaatgataggttggggcacatggcttttcagtgcccattaaatgacaattcaatattctaccactatttaat

SEQ ID NO: 33792 - DNA, 80 bp, synthetic construct
  misc_feature 1..80: note = Artificially Synthesized Probe
  source 1..80: mol_type = other DNA
ggggcttcagtagggagaattttcgggtggatgttcaacaaatcaaaatatgtgcttgactagaaattaggtggttttac

SEQ ID NO: 33793 - DNA, 80 bp, synthetic construct
  misc_feature 1..80: note = Artificially Synthesized Probe
  source 1..80: mol_type = other DNA
ttctaaggttttctcaataaaagaatcccccaagttttgttacccaactattcactcataaactgattttaaagcaaaag

SEQ ID NO: 33794 - DNA, 80 bp, synthetic construct
  misc_feature 1..80: note = Artificially Synthesized Probe
  source 1..80: mol_type = other DNA
ttttggttgggattgacatatggaagcccttcagaaggttttacttggagtgatggttctcctgtgagtaattttactta

SEQ ID NO: 33795 - DNA, 80 bp, synthetic construct
  misc_feature 1..80: note = Artificially Synthesized Probe
  source 1..80: mol_type = other DNA
aaacttccaataacgcactgaaatattatcctttccattgggttgtaaatttaggaactcccaacactgagaagtggaac

SEQ ID NO: 33796 - DNA, 80 bp, synthetic construct
  misc_feature 1..80: note = Artificially Synthesized Probe
  source 1..80: mol_type = other DNA
ttcaccttctgacctacgttaatcatcaaatagttgaacatttccccaagtctgaatattctgagtattgatttctcaga

SEQ ID NO: 33797 - DNA, 80 bp, synthetic construct
  misc_feature 1..80: note = Artificially Synthesized Probe
  source 1..80: mol_type = other DNA
acttcttattctcttttccttcattctgccctccacaacatgacgtgcaaataggagaaagaaagggaagggaaaaaaga

SEQ ID NO: 33798 - DNA, 80 bp, synthetic construct
  misc_feature 1..80: note = Artificially Synthesized Probe
  source 1..80: mol_type = other DNA
cagcatctagagctacattctatgaactcatcagctcatgacccattcctccttcaaaaccagcaatgtagcatcttctt

SEQ ID NO: 33799 - DNA, 80 bp, synthetic construct
  misc_feature 1..80: note = Artificially Synthesized Probe
  source 1..80: mol_type = other DNA
gaattttggtgatcttgtttctattcaaagtgaaagtgaaaagaagtttctatggaaatatgtaaggacatcaatcattt

SEQ ID NO: 33800 - DNA, 80 bp, synthetic construct
  misc_feature 1..80: note = Artificially Synthesized Probe
  source 1..80: mol_type = other DNA
ggtaaagatgggaatgcaggagaaggaggaggtcataacacaagttatgccctattgtttaaatatttagtgcagaattg

SEQ ID NO: 33801 - DNA, 80 bp, synthetic construct
  misc_feature 1..80: note = Artificially Synthesized Probe
  source 1..80: mol_type = other DNA
tatagtgaaatggtacattataatgaaattaatacattttggggttcctttccttgttcatgaatacacatgttctccca

SEQ ID NO: 33802 - DNA, 80 bp, synthetic construct
  misc_feature 1..80: note = Artificially Synthesized Probe
  source 1..80: mol_type = other DNA
actgaatttatttaaaaaattataatcccatctgggatgataaccttgctaaccttgctgctgggaaccacagtatcctt

SEQ ID NO: 33803 - DNA, 80 bp, synthetic construct
  misc_feature 1..80: note = Artificially Synthesized Probe
  source 1..80: mol_type = other DNA
cacctacattacaagaaactagagtaaacacgagaatcagagaatgagtctaatgagaaattctatacactctgcctctc

SEQ ID NO: 33804 - DNA, 80 bp, synthetic construct
  misc_feature 1..80: note = Artificially Synthesized Probe
  source 1..80: mol_type = other DNA
ccacatccctagactaaaagtagcaagttgtgtgcttacatcagacaagataagaagagagaataaaggagaattctaat

SEQ ID NO: 33805 - DNA, 80 bp, synthetic construct
  misc_feature 1..80: note = Artificially Synthesized Probe
  source 1..80: mol_type = other DNA
tgtagagcaaagttgatcatctttagttaacccctgcagtttttctttttttctctgcccctcttccatcccagtgtttc

SEQ ID NO: 33806 - DNA, 80 bp, synthetic construct
  misc_feature 1..80: note = Artificially Synthesized Probe
  source 1..80: mol_type = other DNA
gttgcccaggattataactcactgcagcctcgaactcctaagctcaagcaatcctcttgcctcagcttcctcagtagcta

SEQ ID NO: 33807 - DNA, 80 bp, synthetic construct
  misc_feature 1..80: note = Artificially Synthesized Probe
  source 1..80: mol_type = other DNA
aaaggcactagaaacatgtagggtgctctctcaaaagtttatttggctttgtgaatgccaccatgtgctctctgagaaca

SEQ ID NO: 33808 - DNA, 80 bp, synthetic construct
  misc_feature 1..80: note = Artificially Synthesized Probe
  source 1..80: mol_type = other DNA
gtgtaaatgtttgcaaagtgttgttcagtagagtaggtacttgttggtctaggagttaatgactcaggtggtggtgttgg

SEQ ID NO: 33809 - DNA, 80 bp, synthetic construct
  misc_feature 1..80: note = Artificially Synthesized Probe
  source 1..80: mol_type = other DNA
ccccacctccccaggaggaatctcaattgggaaacttttggtttggcaatctgagatactgataatttgatagctgtgtt

SEQ ID NO: 33810 - DNA, 80 bp, synthetic construct
  misc_feature 1..80: note = Artificially Synthesized Probe
  source 1..80: mol_type = other DNA
tcttacctatcacatgaaggactccactttcagtgcctggactgggctgaatgatgtcaattcagaacacacgttccttt

SEQ ID NO: 33811 - DNA, 80 bp, synthetic construct
  misc_feature 1..80: note = Artificially Synthesized Probe
  source 1..80: mol_type = other DNA
tagtgacagcatcagctataaacactgtagcagctaagaggaaagaaactcactgtgggatggggtgatttaatcagttg

SEQ ID NO: 33812 - DNA, 80 bp, synthetic construct
  misc_feature 1..80: note = Artificially Synthesized Probe
  source 1..80: mol_type = other DNA
cctattcaaaatggcatttttatgaccattaataatttggtagctatttgccgggtgaatacattctggtgatggagcca

SEQ ID NO: 33813 - DNA, 80 bp, synthetic construct
  misc_feature 1..80: note = Artificially Synthesized Probe
  source 1..80: mol_type = other DNA
gttttgtggtggaaatatgcttggattgtaacaggttttctggatcagagactctgagccaggataatggggggtaaaaa

SEQ ID NO: 33814 - DNA, 80 bp, synthetic construct
  misc_feature 1..80: note = Artificially Synthesized Probe
  source 1..80: mol_type = other DNA
tatcagttctcactttacatatgttgatgctctattgttagccacatacacagtagagactgttatgtcttggtggagaa

SEQ ID NO: 33815 - DNA, 80 bp, synthetic construct
  misc_feature 1..80: note = Artificially Synthesized Probe
  source 1..80: mol_type = other DNA
catttcacttatccataagctattatcaccaaatacgttatcaccaaatacattgctgtccactttttacattagagtcc

SEQ ID NO: 33816 - DNA, 80 bp, synthetic construct
  misc_feature 1..80: note = Artificially Synthesized Probe
  source 1..80: mol_type = other DNA
ttcgcttcaaactgtgtgtgtgtttttaaaaaatcttttagtgtgtcttatatttttatgttgaaagctgggtatatatt

SEQ ID NO: 33817 - DNA, 80 bp, synthetic construct
  misc_feature 1..80: note = Artificially Synthesized Probe
  source 1..80: mol_type = other DNA
gtggataaagggaacagaggtaaatagacatttagtgtgaggtttcatgtttacttagctacgaattaggctgtgtttgc

SEQ ID NO: 33818 - DNA, 80 bp, synthetic construct
  misc_feature 1..80: note = Artificially Synthesized Probe
  source 1..80: mol_type = other DNA
caactagagacttaagttctcagcattttctttaagtgtgctccttttttttgttttgcttaaatttactttaaaagaaa

SEQ ID NO: 33819 - DNA, 80 bp, synthetic construct
  misc_feature 1..80: note = Artificially Synthesized Probe
  source 1..80: mol_type = other DNA
gagcaaaatgccatatttcaaattaaagtgtagatagtacattgaaatggggcaggcagcatgtgtttctcttacctcta

SEQ ID NO: 33820 - DNA, 80 bp, synthetic construct
  misc_feature 1..80: note = Artificially Synthesized Probe
  source 1..80: mol_type = other DNA
tctttttttttttttttttttttttgaggcagagtctcgctctgtcgcccaggctgaagtgcagtggtgtgatctcagat

SEQ ID NO: 33821 - DNA, 80 bp, synthetic construct
  misc_feature 1..80: note = Artificially Synthesized Probe
  source 1..80: mol_type = other DNA
tgtgtgccttaaacatgtggatatatgatctgagtttcttttttcatcttaggaagccagaatatggttaaatgaaaaca

SEQ ID NO: 33822 - DNA, 80 bp, synthetic construct
  misc_feature 1..80: note = Artificially Synthesized Probe
  source 1..80: mol_type = other DNA
aaatcagggaactaatgtcaactcatgacaatgactgaaaaccatctaagatactttcagatggttgagaagtactcctg

SEQ ID NO: 33823 - DNA, 80 bp, synthetic construct
  misc_feature 1..80: note = Artificially Synthesized Probe
  source 1..80: mol_type = other DNA
cccataggcgaagggcatagaaaatcatcaagagtaaagcttgatcttgagatcaaggttaaacgaaccagggacttgtg

SEQ ID NO: 33824 - DNA, 80 bp, synthetic construct
  misc_feature 1..80: note = Artificially Synthesized Probe
  source 1..80: mol_type = other DNA
actaacatcaacaagatccaatctttcagggacgtgatgcctttaaggatctggcaagctagtgatatgtgtcagaaatc

SEQ ID NO: 33825 - DNA, 80 bp, synthetic construct
  misc_feature 1..80: note = Artificially Synthesized Probe
  source 1..80: mol_type = other DNA
aaaaaaaggagataaactggagagtagatgagtgtcagatgttatgaagcttccaaggccatgatgcagagatagaaatt

SEQ ID NO: 33826 - DNA, 80 bp, synthetic construct
  misc_feature 1..80: note = Artificially Synthesized Probe
  source 1..80: mol_type = other DNA
gtttaccattggtgctgtttcaacaacagaataatgagaagatatgaagagatgagcatttctctcaggtgtccatgaat

SEQ ID NO: 33827 - DNA, 80 bp, synthetic construct
  misc_feature 1..80: note = Artificially Synthesized Probe
  source 1..80: mol_type = other DNA
gttaatcccaggtgctattaatagctaagaaagggttgtaggaattaggatcccagaaaaggaaaacagtgacttaaaaa

SEQ ID NO: 33828 - DNA, 80 bp, synthetic construct
  misc_feature 1..80: note = Artificially Synthesized Probe
  source 1..80: mol_type = other DNA
atgctacacactacagaaacttcaggttttgctttatttaaaatgtgtttttattaacagaaatccctgctactgaaccc

SEQ ID NO: 33829 - DNA, 80 bp, synthetic construct
  misc_feature 1..80: note = Artificially Synthesized Probe
  source 1..80: mol_type = other DNA
ctttgtcagtttttgattcatgtactttggggccctgttgttaggtacatattcgtctacactcattacatcttcttgat

SEQ ID NO: 33830 - DNA, 80 bp, synthetic construct
  misc_feature 1..80: note = Artificially Synthesized Probe
  source 1..80: mol_type = other DNA
ggttgccctagggattacaactaacatgttaatttacaaaaatctagttcaaaattagccaagcatggtggtgggtgcct

SEQ ID NO: 33831 - DNA, 80 bp, synthetic construct
  misc_feature 1..80: note = Artificially Synthesized Probe
  source 1..80: mol_type = other DNA
acttcctgcttgtgtagtgcatcttcagccagatgcaagaacttaggaccttctcaggtctttctcagacatgcacatag

SEQ ID NO: 33832 - DNA, 80 bp, synthetic construct
  misc_feature 1..80: note = Artificially Synthesized Probe
  source 1..80: mol_type = other DNA
aatggattatgtagtcatgcagtgaaaacaaggcgataattcagaactcagtaatatgggatacaggcatatggttaggt

SEQ ID NO: 33833 - DNA, 80 bp, synthetic construct
  misc_feature 1..80: note = Artificially Synthesized Probe
  source 1..80: mol_type = other DNA
ttacgctttctaggttcctctctggtttccattgaaagtgctgcagaatccagttttctgtcatatcgggttgagccact

SEQ ID NO: 33834 - DNA, 80 bp, synthetic construct
  misc_feature 1..80: note = Artificially Synthesized Probe
  source 1..80: mol_type = other DNA
ccctctggtgaacggaatgattgtgtagctttacatgcgtcttctgggttttggagtaatattcactgttcatcctacaa

SEQ ID NO: 33835 - DNA, 80 bp, synthetic construct
  misc_feature 1..80: note = Artificially Synthesized Probe
  source 1..80: mol_type = other DNA
tttaccattttagaatttggcgggtctttaggcttctctaactgttctaagacacaccacatcctctggtacaatgttgg

SEQ ID NO: 33836 - DNA, 80 bp, synthetic construct
  misc_feature 1..80: note = Artificially Synthesized Probe
  source 1..80: mol_type = other DNA
gtactgtttgttttaaaaggcataatcataatcccttccaactcccctgctctctcagtagaatttgcttaagctaaact

SEQ ID NO: 33837 - DNA, 80 bp, synthetic construct
  misc_feature 1..80: note = Artificially Synthesized Probe
  source 1..80: mol_type = other DNA
gtcaagcccaggaactagtgatatgaaagatctcgtgggcaatattgaacagaatgaacactcggtcatctagtacctca

SEQ ID NO: 33838 - DNA, 80 bp, synthetic construct
  misc_feature 1..80: note = Artificially Synthesized Probe
  source 1..80: mol_type = other DNA
caaggatgtgaaataaaactgtaaatttgcataactggatgtacttagataatgtgaaataaacattaaagacaaggtct

SEQ ID NO: 33839 - DNA, 80 bp, synthetic construct
  misc_feature 1..80: note = Artificially Synthesized Probe
  source 1..80: mol_type = other DNA
gctttaatagtcatttgttcctttattggttcaagggtcagtgttggtgtggtcactgctgagtccactgtgcccagaag

SEQ ID NO: 33840 - DNA, 80 bp, synthetic construct
  misc_feature 1..80: note = Artificially Synthesized Probe
  source 1..80: mol_type = other DNA
gctcacgaggtacaatggtcatcatcacagttcttccaggaaggaagcctgggtccagcaaagcaggaattaaaaatcct

SEQ ID NO: 33841 - DNA, 80 bp, synthetic construct
  misc_feature 1..80: note = Artificially Synthesized Probe
  source 1..80: mol_type = other DNA
tgactagtaactgattaatgcctggtacaaagacctggcctgttggtctcaatttcagaaaactgtggtgggtcatccca

SEQ ID NO: 33842 - DNA, 80 bp, synthetic construct
  misc_feature 1..80: note = Artificially Synthesized Probe
  source 1..80: mol_type = other DNA
tacatcacctgtgtctttcctctgtctcctcccactacctcatcctacccagagttggggctgggcaggccctggattat

SEQ ID NO: 33843 - DNA, 80 bp, synthetic construct
  misc_feature 1..80: note = Artificially Synthesized Probe
  source 1..80: mol_type = other DNA
ggcggccttgagcaccgcacaccctcatgccctgtccttttgcttcaccccagctactctggactctcacatgcagttcc

SEQ ID NO: 33844 - DNA, 80 bp, synthetic construct
  misc_feature 1..80: note = Artificially Synthesized Probe
  source 1..80: mol_type = other DNA
ctccaaagtggcctggtgtgaggtgcataatgagtcgatgagaggggatccagggcccaaggctcacaccacacattctc

SEQ ID NO: 33845 - DNA, 80 bp, synthetic construct
  misc_feature 1..80: note = Artificially Synthesized Probe
  source 1..80: mol_type = other DNA
taaataagtaaataaagcagggtcgggtgcgatggctcacgcctgtaatcccagcacttcgggaggccgaggcgggcgga

SEQ ID NO: 33846 - DNA, 80 bp, synthetic construct
  misc_feature 1..80: note = Artificially Synthesized Probe
  source 1..80: mol_type = other DNA
tcaaaaaaaaaaaaaaaataaaataaaataaaataggctgggggcagtggctcatgcctgtaatcctagcactttgggag

SEQ ID NO: 33847 - DNA, 80 bp, synthetic construct
  misc_feature 1..80: note = Artificially Synthesized Probe
  source 1..80: mol_type = other DNA
taaataaaaccaaaaacaaacagcagccacttgatggcagaggctacaatcttcctatgcctgattgatccacaccagaa

SEQ ID NO: 33848 - DNA, 80 bp, synthetic construct
  misc_feature 1..80: note = Artificially Synthesized Probe
  source 1..80: mol_type = other DNA
tctggtccagggatgccaggtcattcaggttgggaggaagaactgtggaaagagaatccttggtggcttggctttccaag

SEQ ID NO: 33849 - DNA, 80 bp, synthetic construct
  misc_feature 1..80: note = Artificially Synthesized Probe
  source 1..80: mol_type = other DNA
ggctttgggtgttctccaaagctggctctctcattccccagaggccagagtgggcaaagaggcagtgcttacatgtagcc

SEQ ID NO: 33850 - DNA, 80 bp, synthetic construct
  misc_feature 1..80: note = Artificially Synthesized Probe
  source 1..80: mol_type = other DNA
gtgggccaaagaggggttgcactgctatcagcactggctcctaagaggacatagaggtggcttaggcaggtcctccactc

SEQ ID NO: 33851 - DNA, 80 bp, synthetic construct
  misc_feature 1..80: note = Artificially Synthesized Probe
  source 1..80: mol_type = other DNA
attcaagcactttcctgcctccaagtctttgcatgtggcatcccctctgacaagaatgccctccttgtagatatgaagga

SEQ ID NO: 33852 - DNA, 80 bp, synthetic construct
  misc_feature 1..80: note = Artificially Synthesized Probe
  source 1..80: mol_type = other DNA
ccctgccatgcccatcctgatggtgagttacccccattccatcctcacaaccaccccgtacatctttttttttttttttt

SEQ ID NO: 33853 - DNA, 80 bp, synthetic construct
  misc_feature 1..80: note = Artificially Synthesized Probe
  source 1..80: mol_type = other DNA
cagggtacaaaagggataaaccaaacccctacagcctgggtgccagaactaagttctggaagctagggggtactaacctc

SEQ ID NO: 33854 - DNA, 80 bp, synthetic construct
  misc_feature 1..80: note = Artificially Synthesized Probe
  source 1..80: mol_type = other DNA
cccattccttggtccaatcttactgctgttgcctacacgatggctggagagaacctagatagagtctgtggaaggagccc

SEQ ID NO: 33855 - DNA, 80 bp, synthetic construct
  misc_feature 1..80: note = Artificially Synthesized Probe
  source 1..80: mol_type = other DNA
gtaaccctatcctcacatagccagggaaactacctaaaaaaccagaggccatgatgggcaggtaggggaaagagcaagat

SEQ ID NO: 33856 - DNA, 80 bp, synthetic construct
  misc_feature 1..80: note = Artificially Synthesized Probe
  source 1..80: mol_type = other DNA
gggtgcccaatgggctggccacacagtcggggcagtcatcgggccggttatggtgggctgagaagaggcaggctggcgct

SEQ ID NO: 33857 - DNA, 80 bp, synthetic construct
  misc_feature 1..80: note = Artificially Synthesized Probe
  source 1..80: mol_type = other DNA
ctatcagctatccaccaatcatctgtcaactatcaatcatctatcgcctgtcttctgtctaaataccatttctctctcat

SEQ ID NO: 33858 - DNA, 80 bp, synthetic construct
  misc_feature 1..80: note = Artificially Synthesized Probe
  source 1..80: mol_type = other DNA
cattcttgtgaaaagtggcctctcattgtgacttccgtgtacatttccctaacgactaattttgttacatttttccctct

SEQ ID NO: 33859 - DNA, 80 bp, synthetic construct
  misc_feature 1..80: note = Artificially Synthesized Probe
  source 1..80: mol_type = other DNA
gttaagggctcatttctgttgggagaataccctagaaatgaaagaaatggagggtgcatgtgagtgtgtctttttttttt

SEQ ID NO: 33860 - DNA, 80 bp, synthetic construct
  misc_feature 1..80: note = Artificially Synthesized Probe
  source 1..80: mol_type = other DNA
aaaatgacacatggctacataagcccaaagccattattccaccacaagagtgtcataagttaaattcatgcctctgggca

SEQ ID NO: 33861 - DNA, 80 bp, synthetic construct
  misc_feature 1..80: note = Artificially Synthesized Probe
  source 1..80: mol_type = other DNA
accttacgccagtcagaatggctgttactaaaaagacaaaaaataacagatgttaaaaaggatgcaagaaaagtgaaccg

SEQ ID NO: 33862 - DNA, 80 bp, synthetic construct
  misc_feature 1..80: note = Artificially Synthesized Probe
  source 1..80: mol_type = other DNA
tacagcgatgctgggtccatggcctgtttttagaaagcttgtgagctgacaacaattttaattaaaaaaaaaattggggc

SEQ ID NO: 33863 - DNA, 80 bp, synthetic construct
  misc_feature 1..80: note = Artificially Synthesized Probe
  source 1..80: mol_type = other DNA
ttgaagccatctctggagttggaaaataggtccatcctaccacatttgttgaggatgaatcacatacaacttgaaactgg

SEQ ID NO: 33864 - DNA, 80 bp, synthetic construct
  misc_feature 1..80: note = Artificially Synthesized Probe
  source 1..80: mol_type = other DNA
ttggggacagacctggaaggggacagggataagcaaagatatctgcaattttatcatgattctaggctttctccttctag

SEQ ID NO: 33865 - DNA, 80 bp, synthetic construct
  misc_feature 1..80: note = Artificially Synthesized Probe
  source 1..80: mol_type = other DNA
attggccaaaatagtccaaatcaatttttccagaagtctagaagtgaaccaaaggcttgcaaaaattcgaggggtgttta

SEQ ID NO: 33866 - DNA, 80 bp, synthetic construct
  misc_feature 1..80: note = Artificially Synthesized Probe
  source 1..80: mol_type = other DNA
tatgtctgctgagatttacaccagctctcttgagtgttgaagccagttgggctccagctttaggaaaaagctagttttta

SEQ ID NO: 33867 - DNA, 80 bp, synthetic construct
  misc_feature 1..80: note = Artificially Synthesized Probe
  source 1..80: mol_type = other DNA
gacagtttcactctctttgcccaggctggagtgtaatggcgtgatcttggctcaccacaacctccacctcctgggtgcaa

SEQ ID NO: 33868 - DNA, 80 bp, synthetic construct
  misc_feature 1..80: note = Artificially Synthesized Probe
  source 1..80: mol_type = other DNA
cattctctgtcagatctcagcttcttcaccccttcctacataaaactttccaagacaaggttgtgtgttcctccttgggg

SEQ ID NO: 33869 - DNA, 80 bp, synthetic construct
  misc_feature 1..80: note = Artificially Synthesized Probe
  source 1..80: mol_type = other DNA
tcaacacaattctttttacatgtaaaaatagctattctcttagatgcaatggctggtgttctgttcctgcctcgttggat

SEQ ID NO: 33870 - DNA, 80 bp, synthetic construct
  misc_feature 1..80: note = Artificially Synthesized Probe
  source 1..80: mol_type = other DNA
catcatcactctggtggaaggtattgttaaaattatcccaatttctcccacattttccctcttgatttctactttttatt

SEQ ID NO: 33871 - DNA, 80 bp, synthetic construct
  misc_feature 1..80: note = Artificially Synthesized Probe
  source 1..80: mol_type = other DNA
tattttcccaagtgtccagaaaaaaaagaaggtgtatgctgggagttggtggccccatgaggttaatcctcactccctac

SEQ ID NO: 33872 - DNA, 80 bp, synthetic construct
  misc_feature 1..80: note = Artificially Synthesized Probe
  source 1..80: mol_type = other DNA
tacacagattcttctgagctgagctttcctgcatgtgctatgcagttcccacttctaggaatgcatccttttcatttcct

SEQ ID NO: 33873 - DNA, 80 bp, synthetic construct
  misc_feature 1..80: note = Artificially Synthesized Probe
  source 1..80: mol_type = other DNA
cagaagtgcagaattgtcccctggtaataaccactgacacagaggatccttatatagaagggacctgctatcctgtccca

SEQ ID NO: 33874 - DNA, 80 bp, synthetic construct
  misc_feature 1..80: note = Artificially Synthesized Probe
  source 1..80: mol_type = other DNA
aaagaaaccaactccccaaaagtcactgtaaatccaagttcagcctgacactcaccattgatgaagaggctatccctgtc

SEQ ID NO: 33875 - DNA, 80 bp, synthetic construct
  misc_feature 1..80: note = Artificially Synthesized Probe
  source 1..80: mol_type = other DNA
cattattaactagtgtggccatccaagtcagaagctatgtgtcttctcccctccaagtaacaccaattctctttactgaa

SEQ ID NO: 33876 - DNA, 80 bp, synthetic construct
  misc_feature 1..80: note = Artificially Synthesized Probe
  source 1..80: mol_type = other DNA
gtggtccaagccaggacaaccattcacaggtgggccataaatgagactgagggaaggagtgattgtgtgagtggaggagt

SEQ ID NO: 33877 - DNA, 80 bp, synthetic construct
  misc_feature 1..80: note = Artificially Synthesized Probe
  source 1..80: mol_type = other DNA
tacagactaacaaggtcatcatctgacctcaacctctatccctgtagggaatgcttgttcaaacttcttcctccaaccca

SEQ ID NO: 33878 - DNA, 80 bp, synthetic construct
  misc_feature 1..80: note = Artificially Synthesized Probe
  source 1..80: mol_type = other DNA
tcctccaatctattcctccacccaatgaatgtttattaagggcttagtatgtgcaaggctccctttacatttggggaata

SEQ ID NO: 33879 - DNA, 80 bp, synthetic construct
  misc_feature 1..80: note = Artificially Synthesized Probe
  source 1..80: mol_type = other DNA
tgagtttaaccatatagaaaatctgcacgtgtatgtctgaacttaaaagttagaaaaaaagaatgaatccatgtcttttg

SEQ ID NO: 33880 - DNA, 80 bp, synthetic construct
  misc_feature 1..80: note = Artificially Synthesized Probe
  source 1..80: mol_type = other DNA
ccttcttaaatgctatcttatcctgagttctagaccaatgctgaggcccagtgtgcctgaagattagatcccatagatct

SEQ ID NO: 33881 - DNA, 80 bp, synthetic construct
  misc_feature 1..80: note = Artificially Synthesized Probe
  source 1..80: mol_type = other DNA
ctgttacttttgtctggaagcttctccccatttctccttacctggataacttcctggtcatcctccaggtctcagcttag

SEQ ID NO: 33882 - DNA, 80 bp, synthetic construct
  misc_feature 1..80: note = Artificially Synthesized Probe
  source 1..80: mol_type = other DNA
tgaacgggaaatatagctaaaatgatcaatttaatgtgatgtgtatgttaccacaatatagaaaaaaaaaatccaagcca

SEQ ID NO: 33883 - DNA, 80 bp, synthetic construct
  misc_feature 1..80: note = Artificially Synthesized Probe
  source 1..80: mol_type = other DNA
ggaatggtagaggagtggtgttatgggcatgggttgagtaaaaatataaatggagaagtatctagtaaataccatgagag

SEQ ID NO: 33884 - DNA, 80 bp, synthetic construct
  misc_feature 1..80: note = Artificially Synthesized Probe
  source 1..80: mol_type = other DNA
cgacagagtcagactctgtctcagaaaaaaaaaaaagagaagaaagaaagaaatgaaaccagtatcttaaagagatatct

SEQ ID NO: 33885 - DNA, 80 bp, synthetic construct
  misc_feature 1..80: note = Artificially Synthesized Probe
  source 1..80: mol_type = other DNA
tatatatataccacgaaatactattcagccataaaaagagtgaaatcatgtattttgcagcaacatggatggaatgggag

SEQ ID NO: 33886 - DNA, 80 bp, synthetic construct
  misc_feature 1..80: note = Artificially Synthesized Probe
  source 1..80: mol_type = other DNA
aaaaaaaaaggaaagataaaaagatttaaaaaaatatgtagcccaccccaacccaagagggacctcccagtcagaactct

SEQ ID NO: 33887 - DNA, 80 bp, synthetic construct
  misc_feature 1..80: note = Artificially Synthesized Probe
  source 1..80: mol_type = other DNA
tctctctctcctgcactcacaaccaggtatgctaatcttctatgcattggttaacatggccaacaatctttgcagccata

SEQ ID NO: 33888 - DNA, 80 bp, synthetic construct
  misc_feature 1..80: note = Artificially Synthesized Probe
  source 1..80: mol_type = other DNA
ctccttttttctttcatccatttttttctttcttcaatccactcatccatcctctctcccttcctccttccatttatcac

SEQ ID NO: 33889 - DNA, 80 bp, synthetic construct
  misc_feature 1..80: note = Artificially Synthesized Probe
  source 1..80: mol_type = other DNA
gctcagaggctcacattgaaaaaaactgtaataagtgtgtgatccttcctggcaaccaaaatgtccaggttccctcatca

SEQ ID NO: 33890 - DNA, 80 bp, synthetic construct
  misc_feature 1..80: note = Artificially Synthesized Probe
  source 1..80: mol_type = other DNA
gactccctgggcttgggcccctagtgggagggatggctgtagtctctgtggaccagcagacttagcctctcctctggtag

SEQ ID NO: 33891 - DNA, 80 bp, synthetic construct
  misc_feature 1..80: note = Artificially Synthesized Probe
  source 1..80: mol_type = other DNA
gagccaactacacatcatcaaggaacctaactctcttgaattctgtcccataatcctgagtcagctccaattgaattggt

SEQ ID NO: 33892 - DNA, 80 bp, synthetic construct
  misc_feature 1..80: note = Artificially Synthesized Probe
  source 1..80: mol_type = other DNA
tatcatcataaaaatagctctctgagaggagagattattaattgtttcatgatccatgccatatccccaggatttggcag

SEQ ID NO: 33893 - DNA, 80 bp, synthetic construct
  misc_feature 1..80: note = Artificially Synthesized Probe
  source 1..80: mol_type = other DNA
agaatcctggtagacaggtgagaagccatactaagattctctgaatgcaccaacttccaggcagcctgggaatgtgagta

SEQ ID NO: 33894 - DNA, 80 bp, synthetic construct
  misc_feature 1..80: note = Artificially Synthesized Probe
  source 1..80: mol_type = other DNA
tgggtgagatcttcttccatgccttggaatgggtgacgtaggtggaacaagacaaggtgggcagggcagagtgaggtggg

SEQ ID NO: 33895 - DNA, 80 bp, synthetic construct
  misc_feature 1..80: note = Artificially Synthesized Probe
  source 1..80: mol_type = other DNA
ctggcagagagtgggtactcaaagaagtttgttgggtgactcatcatcagtaaatttgctatgatttttaatcttatttg

SEQ ID NO: 33896 - DNA, 80 bp, synthetic construct
  misc_feature 1..80: note = Artificially Synthesized Probe
  source 1..80: mol_type = other DNA
cagatcagggaagaaggtcctgaggatgaaggtctccagtacaagatgaagaagaaacggtgaagttcatatcaatcatc

SEQ ID NO: 33897 - DNA, 80 bp, synthetic construct
  misc_feature 1..80: note = Artificially Synthesized Probe
  source 1..80: mol_type = other DNA
agaaaaaagaagtccacactcatggagactgggaacaattggggcagacaggttggcaattctaaggtctcacctgagca

SEQ ID NO: 33898 - DNA, 80 bp, synthetic construct
  misc_feature 1..80: note = Artificially Synthesized Probe
  source 1..80: mol_type = other DNA
agcaccatgattaccaacaccattgtcgtatcatcattattctcatcaccacaaccaccatcacaaccatcatcattata

SEQ ID NO: 33899 - DNA, 80 bp, synthetic construct
  misc_feature 1..80: note = Artificially Synthesized Probe
  source 1..80: mol_type = other DNA
tgaggagaaggcctcattagtgaaagtgttgaaccctctcatggcagaaatgccagcaggtaggagtatttatggacctt

SEQ ID NO: 33900 - DNA, 80 bp, synthetic construct
  misc_feature 1..80: note = Artificially Synthesized Probe
  source 1..80: mol_type = other DNA
agccatacttccattctctgagtgcactgactcttagcaactatgagcagaatcatggatgcaaggatttttataaaatt

SEQ ID NO: 33901 - DNA, 80 bp, synthetic construct
  misc_feature 1..80: note = Artificially Synthesized Probe
  source 1..80: mol_type = other DNA
actgtgaccatcgctatcattattgtcatcaccaccagcatcagcaccaaaaccatgaccatcataatccctatgatccc

SEQ ID NO: 33902 - DNA, 80 bp, synthetic construct
  misc_feature 1..80: note = Artificially Synthesized Probe
  source 1..80: mol_type = other DNA
aaaatggcagagatgttgacactcctcaggcatgctgtaatagagatgacactgaatagtactcactcatgggtccagac

SEQ ID NO: 33903 - DNA, 80 bp, synthetic construct
  misc_feature 1..80: note = Artificially Synthesized Probe
  source 1..80: mol_type = other DNA
gttctgagatttcctggggccagacaggaaggggccagaggaaatgagaagcctgggaaagaggtaataagtcacattta

SEQ ID NO: 33904 - DNA, 80 bp, synthetic construct
  misc_feature 1..80: note = Artificially Synthesized Probe
  source 1..80: mol_type = other DNA
cagtggctgtagtaaaaggtgtggaaacaaacactattgtgtttgtttgtatttttaatctgttgcatatagttaaaaat

SEQ ID NO: 33905 - DNA, 80 bp, synthetic construct
  misc_feature 1..80: note = Artificially Synthesized Probe
  source 1..80: mol_type = other DNA
catcatcacaataatataagctcactgagggcagtgttttttctttttttgttccctgatgtatatccaggtcctgatac

SEQ ID NO: 33906 - DNA, 80 bp, synthetic construct
  misc_feature 1..80: note = Artificially Synthesized Probe
  source 1..80: mol_type = other DNA
caaaaaaaagtcagggctaccctggtggaatgaaaggagtttcatggaacaggggcctttggagattctctgtcagaatc

SEQ ID NO: 33907 - DNA, 80 bp, synthetic construct
  misc_feature 1..80: note = Artificially Synthesized Probe
  source 1..80: mol_type = other DNA
tgataagaataatcacaaagaggacaggaaaaaagaagtccaaactcattgagactaggaataatcggggcagccacact

SEQ ID NO: 33908 - DNA, 80 bp, synthetic construct
  misc_feature 1..80: note = Artificially Synthesized Probe
  source 1..80: mol_type = other DNA
catgattgccaccatcagtagtattattgtcatcatcaccaccaccatcatcatcatcatcatcacataaacagaagctc

SEQ ID NO: 33909 - DNA, 80 bp, synthetic construct
  misc_feature 1..80: note = Artificially Synthesized Probe
  source 1..80: mol_type = other DNA
agaatgacaatgaaaagattacctaggatgggtcttgagattgctgagagaaggacggcaaggaaccagaggatatgaga

SEQ ID NO: 33910 - DNA, 80 bp, synthetic construct
  misc_feature 1..80: note = Artificially Synthesized Probe
  source 1..80: mol_type = other DNA
aaggacgaagtgggtacattcttctcccattaccctggcttggatgttgtaggagggactgagtatcttggtcagggcag

SEQ ID NO: 33911 - DNA, 80 bp, synthetic construct
  misc_feature 1..80: note = Artificially Synthesized Probe
  source 1..80: mol_type = other DNA
tcactaacatcataaccgtcactgacatcatcttcatatccatcatcatcatggtcggcaacatcaacaccattatcatc

SEQ ID NO: 33912 - DNA, 80 bp, synthetic construct
  misc_feature 1..80: note = Artificially Synthesized Probe
  source 1..80: mol_type = other DNA
acgatgacgaagaaaccatgaagtccagaacttagtcatcccatgtagagcacataacagaattttcaatggccaggcag

SEQ ID NO: 33913 - DNA, 80 bp, synthetic construct
  misc_feature 1..80: note = Artificially Synthesized Probe
  source 1..80: mol_type = other DNA
ctggaaatgggcatgaaagcctgtggatgaggcacgatcatcttgagagaaatcctggggacagaatttaagacctaaag

SEQ ID NO: 33914 - DNA, 80 bp, synthetic construct
  misc_feature 1..80: note = Artificially Synthesized Probe
  source 1..80: mol_type = other DNA
aacataaccacgaccaacatcaatatcatcggtaccacggtcagcatcctaaacagcatcaccacagtcatcatcatcat

SEQ ID NO: 33915 - DNA, 80 bp, synthetic construct
  misc_feature 1..80: note = Artificially Synthesized Probe
  source 1..80: mol_type = other DNA
gagatgtgggagatgcaatagggttcagggctaccctggtgcaattaaatgagtttcatgggatggggccattaagattt

SEQ ID NO: 33916 - DNA, 80 bp, synthetic construct
  misc_feature 1..80: note = Artificially Synthesized Probe
  source 1..80: mol_type = other DNA
ctgaattccctttttggtgatgatatccctaggaagtgcagcaaggagacagtgcaaagtcttttaaagtgagaacaatt

SEQ ID NO: 33917 - DNA, 80 bp, synthetic construct
  misc_feature 1..80: note = Artificially Synthesized Probe
  source 1..80: mol_type = other DNA
tgaccatcactggcatcatcctcatcaccattattgttattgtcatcaacgtcaccactaccatcatcaacaccatcagt

SEQ ID NO: 33918 - DNA, 80 bp, synthetic construct
  misc_feature 1..80: note = Artificially Synthesized Probe
  source 1..80: mol_type = other DNA
gtcattaaagatttcctatcagcatcctcacaacagggaagagtgcccagagggaatgcctctcatgataacaaagaaac

SEQ ID NO: 33919 - DNA, 80 bp, synthetic construct
  misc_feature 1..80: note = Artificially Synthesized Probe
  source 1..80: mol_type = other DNA
agagtgggaacaagttgggcacccaggctggctcttctaaagtctcacctgagcaaggtcagtctgcagccagagtacag

SEQ ID NO: 33920 - DNA, 80 bp, synthetic construct
  misc_feature 1..80: note = Artificially Synthesized Probe
  source 1..80: mol_type = other DNA
ccaccatcatcacatgaacacaagctcactgagggcagaggtgcttttattagttttcttttccttgtatctctaaggtc

SEQ ID NO: 33921 - DNA, 80 bp, synthetic construct
  misc_feature 1..80: note = Artificially Synthesized Probe
  source 1..80: mol_type = other DNA
gggacacaataagggtcatggcaatcccaatgcaattaaatgagtttcatgggacaatgagtttcatgggactggggcca

SEQ ID NO: 33922 - DNA, 80 bp, synthetic construct
  misc_feature 1..80: note = Artificially Synthesized Probe
  source 1..80: mol_type = other DNA
gggagtgttactatcaggaaacacattggtccagaagccagtgactcctgaattcccctttgggtgaggatatccctagg

SEQ ID NO: 33923 - DNA, 80 bp, synthetic construct
  misc_feature 1..80: note = Artificially Synthesized Probe
  source 1..80: mol_type = other DNA
gataatccccatcatgaccaccacaaacatcatcactctcaacacatcatcattaccatcataaccccaccaccatcact

SEQ ID NO: 33924 - DNA, 80 bp, synthetic construct
  misc_feature 1..80: note = Artificially Synthesized Probe
  source 1..80: mol_type = other DNA
gcccagggtaatttatagattcaatgccatccccatcaagataccgatgactttcttcacaaaattggaaaaaactactt

SEQ ID NO: 33925 - DNA, 80 bp, synthetic construct
  misc_feature 1..80: note = Artificially Synthesized Probe
  source 1..80: mol_type = other DNA
gaaaatgtggcacatacacaccatggaatactatgcagccataaaaaatgatgagttcatgtctctgtagggacatggat

SEQ ID NO: 33926 - DNA, 80 bp, synthetic construct
  misc_feature 1..80: note = Artificially Synthesized Probe
  source 1..80: mol_type = other DNA
tgctaccctggtgcaatgaaccgagtttcatggtacagggacaattgaagattttctatcagcatcctcacatcaggaaa

SEQ ID NO: 33927 - DNA, 80 bp, synthetic construct
  misc_feature 1..80: note = Artificially Synthesized Probe
  source 1..80: mol_type = other DNA
gagctcgaaatgaggatgaaatcacgtggataaggcatgattgtcctgaaagaaatcctggggacagaatttaacatgta

SEQ ID NO: 33928 - DNA, 80 bp, synthetic construct
  misc_feature 1..80: note = Artificially Synthesized Probe
  source 1..80: mol_type = other DNA
ggcaaaagtgagttgggtttgatattcttccattgccctggcatggatgatgtaagagggactgggtatcatgagcaggg

SEQ ID NO: 33929 - DNA, 80 bp, synthetic construct
  misc_feature 1..80: note = Artificially Synthesized Probe
  source 1..80: mol_type = other DNA
attggttttgttttccctcctgtatctctaggatctggtacacactaggtggccaacaaatttcgttggtccactcacta

SEQ ID NO: 33930 - DNA, 80 bp, synthetic construct
  misc_feature 1..80: note = Artificially Synthesized Probe
  source 1..80: mol_type = other DNA
agattagattctttccagactctagaaggaaaagactccaaccacatcacagctgctcaccattgacatagagactgttc

SEQ ID NO: 33931 - DNA, 80 bp, synthetic construct
  misc_feature 1..80: note = Artificially Synthesized Probe
  source 1..80: mol_type = other DNA
ctagatcctatggaccagcagggctaggagatttgttatgagactcaagggagctaaatggcttggggaaaatgcccttt

SEQ ID NO: 33932 - DNA, 80 bp, synthetic construct
  misc_feature 1..80: note = Artificially Synthesized Probe
  source 1..80: mol_type = other DNA
taactaccatgtacatttagatgcttcttgactcatgatggtattatgtcctgataaacacaggttttttattttatttt

SEQ ID NO: 33933 - DNA, 80 bp, synthetic construct
  misc_feature 1..80: note = Artificially Synthesized Probe
  source 1..80: mol_type = other DNA
tattgtactgaaagtgaatgacagaatggttgcatgggtgttgaaggtatgctttctactgaatgcatattgctatggca

SEQ ID NO: 33934 - DNA, 80 bp, synthetic construct
  misc_feature 1..80: note = Artificially Synthesized Probe
  source 1..80: mol_type = other DNA
agtatccatgggcaatagttgttccaagtatgaacagagtcagggagcccagagactagggtcatattcacctgttgggc

SEQ ID NO: 33935 - DNA, 80 bp, synthetic construct
  misc_feature 1..80: note = Artificially Synthesized Probe
  source 1..80: mol_type = other DNA
ggaacagtctcatgctttggggaacaagaagggaaaaaagagtcaactcaatcccattgaacactgaacaacaacaataa

SEQ ID NO: 33936 - DNA, 80 bp, synthetic construct
  misc_feature 1..80: note = Artificially Synthesized Probe
  source 1..80: mol_type = other DNA
ctttgggggaatggaacagttctgaatcttgatggtggtggtgattatagggctatgcccatgtgataaaaattgcatag

SEQ ID NO: 33937 - DNA, 80 bp, synthetic construct
  misc_feature 1..80: note = Artificially Synthesized Probe
  source 1..80: mol_type = other DNA
ccagaataggtgcctgataaatatttgttaaaccaaattccctggtagcccctgtgctaggtgttcttacgtagagttgc

SEQ ID NO: 33938 - DNA, 80 bp, synthetic construct
  misc_feature 1..80: note = Artificially Synthesized Probe
  source 1..80: mol_type = other DNA
atttcattggaggtccgaaggggagaaagaatcagagcagaaaataaacactttgagactcaagaagctgagaacacttt

SEQ ID NO: 33939 - DNA, 80 bp, synthetic construct
  misc_feature 1..80: note = Artificially Synthesized Probe
  source 1..80: mol_type = other DNA
aaaaaattagaaagttgagaagataccaaccatagctggtccccaggaatcgctagtgcaaagctctcgaggttagacag

SEQ ID NO: 33940 - DNA, 80 bp, synthetic construct
  misc_feature 1..80: note = Artificially Synthesized Probe
  source 1..80: mol_type = other DNA
acggttataacctgcagatagggaggaaagagtaaagaaggacaattatgatgggtgagaggtaggggaggggaagatgg

SEQ ID NO: 33941 - DNA, 80 bp, synthetic construct
  misc_feature 1..80: note = Artificially Synthesized Probe
  source 1..80: mol_type = other DNA
gaatattggagaaaatttggcaaaataggtgtggtggtaaaaacaagagacttcaggatgagaggggtggtgttgccatt

SEQ ID NO: 33942 - DNA, 80 bp, synthetic construct
  misc_feature 1..80: note = Artificially Synthesized Probe
  source 1..80: mol_type = other DNA
actgagtaattctgggctaattacttcctccctggatgcataaatgctctctgtagaaatgagtatagtaactcacggag

SEQ ID NO: 33943 - DNA, 80 bp, synthetic construct
  misc_feature 1..80: note = Artificially Synthesized Probe
  source 1..80: mol_type = other DNA
ctcagccctattgacattttggtctggataatgtgttttgataggaggctgctttgtgcattgttggatgttttgcaaca

SEQ ID NO: 33944 - DNA, 80 bp, synthetic construct
  misc_feature 1..80: note = Artificially Synthesized Probe
  source 1..80: mol_type = other DNA
atatatatatatatatttttttttttgagacagagtcgctctctgttgcccaggctggagtgcagcggtgcgatctccgc

SEQ ID NO: 33945 - DNA, 80 bp, synthetic construct
  misc_feature 1..80: note = Artificially Synthesized Probe
  source 1..80: mol_type = other DNA
aggacatcattaaacaagcattagcttaaattgttggatgagattggacagaggggaacacgctgagacttggtgggcat

SEQ ID NO: 33946 - DNA, 80 bp, synthetic construct
  misc_feature 1..80: note = Artificially Synthesized Probe
  source 1..80: mol_type = other DNA
ataatcaatcgccagaggccccttcttattgtgggggttcactatgtggctggaatactgccaccttcattaaataaatg

SEQ ID NO: 33947 - DNA, 80 bp, synthetic construct
  misc_feature 1..80: note = Artificially Synthesized Probe
  source 1..80: mol_type = other DNA
tgtctcacacttgtaatcccagcactttgggaggccaaggcgtgtggaccacctgaggtcaggagtttgagaccagcctg

SEQ ID NO: 33948 - DNA, 80 bp, synthetic construct
  misc_feature 1..80: note = Artificially Synthesized Probe
  source 1..80: mol_type = other DNA
ctgtagtctctagtaaaccaagggaaagagttgaagttggaatcattgtgctggtttctgtccctggatgggtggaaagt

SEQ ID NO: 33949 - DNA, 80 bp, synthetic construct
  misc_feature 1..80: note = Artificially Synthesized Probe
  source 1..80: mol_type = other DNA
tgatgaggctgtggtctctggttcaccaggagaaggagtcaaagttggaatagctgtactagtgtctgttgcagaactag

SEQ ID NO: 33950 - DNA, 80 bp, synthetic construct
  misc_feature 1..80: note = Artificially Synthesized Probe
  source 1..80: mol_type = other DNA
ttgagctactctctgcaggatgggtgaccaatgagatatttgtaaacggctcaccagtggagacagtcaaagttggaaca

SEQ ID NO: 33951 - DNA, 80 bp, synthetic construct
  misc_feature 1..80: note = Artificially Synthesized Probe
  source 1..80: mol_type = other DNA
aagaatcagagttggaatacttgtactgtttactccactagaactagtgaccagagaggtcaccactcctggtacctcag

SEQ ID NO: 33952 - DNA, 80 bp, synthetic construct
  misc_feature 1..80: note = Artificially Synthesized Probe
  source 1..80: mol_type = other DNA
actaatgaggctatcgtctttggttcaccaggagaaagagtcaaagttggaatagtcatatttctgtctgtcccagaact

SEQ ID NO: 33953 - DNA, 80 bp, synthetic construct
  misc_feature 1..80: note = Artificially Synthesized Probe
  source 1..80: mol_type = other DNA
tggtggtctccattctttttgtccctcctgtgtgtagtcctgtaaattggggaatgggcacacaatttgaacaaaatgat

SEQ ID NO: 33954 - DNA, 80 bp, synthetic construct
  misc_feature 1..80: note = Artificially Synthesized Probe
  source 1..80: mol_type = other DNA
gacctgctattgctactgttattactatcacttctccacctaccattactgctgttattgctactgttactactacctat

SEQ ID NO: 33955 - DNA, 80 bp, synthetic construct
  misc_feature 1..80: note = Artificially Synthesized Probe
  source 1..80: mol_type = other DNA
aagggattttgactctgattatggagcagtgtccctgtgttgctggatatcctctaaaaacaatatgtctgagaatgcac

SEQ ID NO: 33956 - DNA, 80 bp, synthetic construct
  misc_feature 1..80: note = Artificially Synthesized Probe
  source 1..80: mol_type = other DNA
agcccccatcgcagagaagtatctgccccaaatgacaatagtgtcaaagttgagaaacccagatttttatttatttatgt

SEQ ID NO: 33957 - DNA, 80 bp, synthetic construct
  misc_feature 1..80: note = Artificially Synthesized Probe
  source 1..80: mol_type = other DNA
tgacaaccacacacaattctctctctaaagaatacaaacattttgtctctctggaggaggaaatatggtcacgagtggca

SEQ ID NO: 33958 - DNA, 80 bp, synthetic construct
  misc_feature 1..80: note = Artificially Synthesized Probe
  source 1..80: mol_type = other DNA
ctttacttcatttcatccttctacctttctttccttcaatctatatccccttcaatcctgtcttccatcatctttctttc

SEQ ID NO: 33959 - DNA, 80 bp, synthetic construct
  misc_feature 1..80: note = Artificially Synthesized Probe
  source 1..80: mol_type = other DNA
tctccaattccttaacccagtgcctaggagtgaaattagataaacacatgtttgctaagagaatttctggtacaggaata

SEQ ID NO: 33960 - DNA, 80 bp, synthetic construct
  misc_feature 1..80: note = Artificially Synthesized Probe
  source 1..80: mol_type = other DNA
cagcaaatctgtactcagatgatgagtactttctgttacagacatagtaaacctggattctgggaaggaggttatcccag

SEQ ID NO: 33961 - DNA, 80 bp, synthetic construct
  misc_feature 1..80: note = Artificially Synthesized Probe
  source 1..80: mol_type = other DNA
ttttttgggtggtgatggtcatttgtgttgattctgacatcatggatgaggaagagagcctggtgatcacttcagtgatg

SEQ ID NO: 33962 - DNA, 80 bp, synthetic construct
  misc_feature 1..80: note = Artificially Synthesized Probe
  source 1..80: mol_type = other DNA
aaaccatgttgtctcttatagaggaagaggtgaccactggagatatcacttttgttggctctgagaagcctggggaagag

SEQ ID NO: 33963 - DNA, 80 bp, synthetic construct
  misc_feature 1..80: note = Artificially Synthesized Probe
  source 1..80: mol_type = other DNA
cagaggaaggagattcatgtgtataacctgaggttaccacattggtcatctccagtttctctgtatctgtagtgacttca

SEQ ID NO: 33964 - DNA, 80 bp, synthetic construct
  misc_feature 1..80: note = Artificially Synthesized Probe
  source 1..80: mol_type = other DNA
atgacacatcctcaggacctctgctcataggagtggtcatccctgagtgtggagatctgtgagttgcagctgagtgagtt

SEQ ID NO: 33965 - DNA, 80 bp, synthetic construct
  misc_feature 1..80: note = Artificially Synthesized Probe
  source 1..80: mol_type = other DNA
gatgaattttctctctatctttggtgacttcagacgtggctaatatttcagctgaggtgctgctcaaatttggaggtgaa

SEQ ID NO: 33966 - DNA, 80 bp, synthetic construct
  misc_feature 1..80: note = Artificially Synthesized Probe
  source 1..80: mol_type = other DNA
aggctgcatgtcttctgtatctacagtgtcttccaaagtggtcagtctctcatgggaggtgctgctcaaatttgaagtgg

SEQ ID NO: 33967 - DNA, 80 bp, synthetic construct
  misc_feature 1..80: note = Artificially Synthesized Probe
  source 1..80: mol_type = other DNA
tcatccatgatacatcctcaggacccctcctcataagagtgctcatctgtgagtgtgaaaatccttgagatatagttgag

SEQ ID NO: 33968 - DNA, 80 bp, synthetic construct
  misc_feature 1..80: note = Artificially Synthesized Probe
  source 1..80: mol_type = other DNA
ctgtgttcaaattaagggtactttctagtgtagactccgaaggacctgtttgggttgtgatggtcatttttgcagattct

SEQ ID NO: 33969 - DNA, 80 bp, synthetic construct
  misc_feature 1..80: note = Artificially Synthesized Probe
  source 1..80: mol_type = other DNA
ccaggaggacttgtttgggtcttgatggtcatttctgatgattctgccaggatgggggaagtagggaacttaatgatttt

SEQ ID NO: 33970 - DNA, 80 bp, synthetic construct
  misc_feature 1..80: note = Artificially Synthesized Probe
  source 1..80: mol_type = other DNA
ttctgctgattctgtcatggtgggcgaggcaaagagccttgtcattgttcttgtggatatttctggcaaaactgtggact

SEQ ID NO: 33971 - DNA, 80 bp, synthetic construct
  misc_feature 1..80: note = Artificially Synthesized Probe
  source 1..80: mol_type = other DNA
agctggttttctctatagaaggagggattgtccatgatagaatctcagggtccttgttcatgacagtggtcatttctgag

SEQ ID NO: 33972 - DNA, 80 bp, synthetic construct
  misc_feature 1..80: note = Artificially Synthesized Probe
  source 1..80: mol_type = other DNA
tttttccacagagggtgggcttgtccctgatatgtactcaggaactctactcgtaagagtggacaaatctaattgtgaaa

SEQ ID NO: 33973 - DNA, 80 bp, synthetic construct
  misc_feature 1..80: note = Artificially Synthesized Probe
  source 1..80: mol_type = other DNA
gagaaagggcttgtcttcaacacatcattgagatcattgttcatgacactggttgtttctgaatctacaaaatcctgagt

SEQ ID NO: 33974 - DNA, 80 bp, synthetic construct
  misc_feature 1..80: note = Artificially Synthesized Probe
  source 1..80: mol_type = other DNA
tggagatgtagggtgacattttggaatgatcaggccctgagatggttgttctgctggaagtgataacttctgtcctggag

SEQ ID NO: 33975 - DNA, 80 bp, synthetic construct
  misc_feature 1..80: note = Artificially Synthesized Probe
  source 1..80: mol_type = other DNA
tggaggcctgagtaatagcacctgtgggcacataagaaaaggcagtatttgtctctgttgttgagctggtcttctcagac

SEQ ID NO: 33976 - DNA, 80 bp, synthetic construct
  misc_feature 1..80: note = Artificially Synthesized Probe
  source 1..80: mol_type = other DNA
actcctgagaggtactggtctctctcagtctaggagtcaagaaatatgttggctctctcttaatgtttgtagtctcagag

SEQ ID NO: 33977 - DNA, 80 bp, synthetic construct
  misc_feature 1..80: note = Artificially Synthesized Probe
  source 1..80: mol_type = other DNA
gtcagggaggaagttgtctcagtctcagttcttgtagtcttagaggatttaggtattgatctggaaattgtggtgtcttc

SEQ ID NO: 33978 - DNA, 80 bp, synthetic construct
  misc_feature 1..80: note = Artificially Synthesized Probe
  source 1..80: mol_type = other DNA
tgaaagtctactgctggctactgagaaaatatctgggaactttgttgactgagcaggagttggtatgaatgttgcatcaa

SEQ ID NO: 33979 - DNA, 80 bp, synthetic construct
  misc_feature 1..80: note = Artificially Synthesized Probe
  source 1..80: mol_type = other DNA
ctttgtatggcctgggataggagaatattcagaactggttgcctccatattcgtcactgctgtgtctgcagaatgatgaa

SEQ ID NO: 33980 - DNA, 80 bp, synthetic construct
  misc_feature 1..80: note = Artificially Synthesized Probe
  source 1..80: mol_type = other DNA
gctggtgtccatgtaagggctgacgtccctcagttcaatagtcaagaaggaattaggctctgttctagcccttgtagact

SEQ ID NO: 33981 - DNA, 80 bp, synthetic construct
  misc_feature 1..80: note = Artificially Synthesized Probe
  source 1..80: mol_type = other DNA
aacaggcacatcttctgcttctgtactactgggagtccaacttgtacttaaaatgtcaggaactgagatgctcatcctct

SEQ ID NO: 33982 - DNA, 80 bp, synthetic construct
  misc_feature 1..80: note = Artificially Synthesized Probe
  source 1..80: mol_type = other DNA
tttggatttatctgtcaatgagctcacagagtttgggctggttacagggtcttcaaggatattggaagatgtgctcagag

SEQ ID NO: 33983 - DNA, 80 bp, synthetic construct
  misc_feature 1..80: note = Artificially Synthesized Probe
  source 1..80: mol_type = other DNA
ctacctgtcaaaggagtgagaaaaatgtgacatcccaagagcactcctagggaccatatttcacatttttctaagcaatt

SEQ ID NO: 33984 - DNA, 80 bp, synthetic construct
  misc_feature 1..80: note = Artificially Synthesized Probe
  source 1..80: mol_type = other DNA
gcttgagactgaggaggctgaggctgcagtgaaccatgaacacgccattgcactccagcctgggcaacagagggagaccc

SEQ ID NO: 33985 - DNA, 80 bp, synthetic construct
  misc_feature 1..80: note = Artificially Synthesized Probe
  source 1..80: mol_type = other DNA
cttggcctctcgagtagcagggactacaggcctgcacgatgcccaacttattttttttaaaaaaaatttttttatagagg

SEQ ID NO: 33986 - DNA, 80 bp, synthetic construct
  misc_feature 1..80: note = Artificially Synthesized Probe
  source 1..80: mol_type = other DNA
tttaaaactagctgggcatggtgatgtgcacctgtagtcccagctcctctggaggatgaagcaggagaattgcttgtgcc

SEQ ID NO: 33987 - DNA, 80 bp, synthetic construct
  misc_feature 1..80: note = Artificially Synthesized Probe
  source 1..80: mol_type = other DNA
tactgatcaggtactaggcttattacctggctgatgatgtaatctgtaccccaagcccccatgacatgcaatttacctat

SEQ ID NO: 33988 - DNA, 80 bp, synthetic construct
  misc_feature 1..80: note = Artificially Synthesized Probe
  source 1..80: mol_type = other DNA
aggagttggtaaagaagcggacttagtatccaaacttgggacctcagaaaactcaaatgtcaaggtagactgtgggatcc

SEQ ID NO: 33989 - DNA, 80 bp, synthetic construct
  misc_feature 1..80: note = Artificially Synthesized Probe
  source 1..80: mol_type = other DNA
tctctgggactgtgccaagactatccgaagctatagtcaccagtggggtggaatcaaaggatgtagctaatgaacttgtt

SEQ ID NO: 33990 - DNA, 80 bp, synthetic construct
  misc_feature 1..80: note = Artificially Synthesized Probe
  source 1..80: mol_type = other DNA
ggagctcatttgttttccgtgcgtcaaggatatctgaggtttttactgtagtttcattatccagtgaaactgtgctggtc

SEQ ID NO: 33991 - DNA, 80 bp, synthetic construct
  misc_feature 1..80: note = Artificially Synthesized Probe
  source 1..80: mol_type = other DNA
gtgtcatgggtgctgagttgatgtctggtcctgaggttatgcctgtagaaatgacttcttccactggaatggatgaaaaa

SEQ ID NO: 33992 - DNA, 80 bp, synthetic construct
  misc_feature 1..80: note = Artificially Synthesized Probe
  source 1..80: mol_type = other DNA
ggttcaagagaggaggagagagctgtatttccctgtgtgttcagccttgggctgcttcccttactagaatctgtgactcc

SEQ ID NO: 33993 - DNA, 80 bp, synthetic construct
  misc_feature 1..80: note = Artificially Synthesized Probe
  source 1..80: mol_type = other DNA
acaggtcctggagctgactgtgtctcaaatccagatgatttttctgccaattttgtgtaatgtaattgagtggagtgttc

SEQ ID NO: 33994 - DNA, 80 bp, synthetic construct
  misc_feature 1..80: note = Artificially Synthesized Probe
  source 1..80: mol_type = other DNA
catctctaggtattgtaatttctctggatgttaaatgatagacatcatcagaaaatgtgtcaacgaattggcttgtcctt

SEQ ID NO: 33995 - DNA, 80 bp, synthetic construct
  misc_feature 1..80: note = Artificially Synthesized Probe
  source 1..80: mol_type = other DNA
tgctggtgcttatcttggtgtgtcctgcagagtctggttcaggggaagagaagggatgtctagtgtttaatggagtcagt

SEQ ID NO: 33996 - DNA, 80 bp, synthetic construct
  misc_feature 1..80: note = Artificially Synthesized Probe
  source 1..80: mol_type = other DNA
tgagctctcttgttgggtgggatgaagagacctgagatggacttctgatcttgctgtcaagagttgtaaaacctagagtg

SEQ ID NO: 33997 - DNA, 80 bp, synthetic construct
  misc_feature 1..80: note = Artificially Synthesized Probe
  source 1..80: mol_type = other DNA
ccttggatgcagttgaatctgcaaatgttttcattggagatgtgatttttacaggaatatatcttgtgtcccagggggtc

SEQ ID NO: 33998 - DNA, 80 bp, synthetic construct
  misc_feature 1..80: note = Artificially Synthesized Probe
  source 1..80: mol_type = other DNA
ataggagcaagaaaactaaactctctcctcccccacctggagtggttttccagcctcaggtggctgcagtaattatttac

SEQ ID NO: 33999 - DNA, 80 bp, synthetic construct
  misc_feature 1..80: note = Artificially Synthesized Probe
  source 1..80: mol_type = other DNA
ccccagcctggcaccccagccccagactgggcagagaaaggaaatggcacatcactcactaaaaggaaaagcagtggtca

SEQ ID NO: 34000 - DNA, 80 bp, synthetic construct
  misc_feature 1..80: note = Artificially Synthesized Probe
  source 1..80: mol_type = other DNA
ggatcttccagagaggaattaaactggaggtttgaaatgtgaaaagacaggaaaaagaaagagaccccagtagacaactg

SEQ ID NO: 34001 - DNA, 80 bp, synthetic construct
  misc_feature 1..80: note = Artificially Synthesized Probe
  source 1..80: mol_type = other DNA
ccgaggtgacactgtgagctgggctgcgggcgcggtggagcccggggccggcctgctctctgttttaaatatacaccgtg

SEQ ID NO: 34002 - DNA, 80 bp, synthetic construct; identical to SEQ ID NO: 34001
  misc_feature 1..80: note = Artificially Synthesized Probe
  source 1..80: mol_type = other DNA

SEQ ID NO: 34003 - DNA, 80 bp, synthetic construct
  misc_feature 1..80: note = Artificially Synthesized Probe
  source 1..80: mol_type = other DNA
aggaaaaataagagcaagaagaaaatataagctctggccaccagagaaataataccaggaggactggggagtgggcagcc

SEQ ID NO: 34004 - DNA, 80 bp, synthetic construct
  misc_feature 1..80: note = Artificially Synthesized Probe
  source 1..80: mol_type = other DNA
cattacgtgcacgccccagggccacgtccctgccgctgtcttggtcctgaagcctgttctgccccagccccctgcccgct

SEQ ID NO: 34005 - DNA, 80 bp, synthetic construct
  misc_feature 1..80: note = Artificially Synthesized Probe
  source 1..80: mol_type = other DNA
ctcagtcacctccagggccacatcctggagccaagggctgtagcctggggattctcataatccctgaccccacttccctg

SEQ ID NO: 34006 - DNA, 80 bp, synthetic construct
  misc_feature 1..80: note = Artificially Synthesized Probe
  source 1..80: mol_type = other DNA
aggaactttatccacggccacatccatctctcaagtgcctttccccagagcagaagcagccagcgctgtgctcagcaatt

SEQ ID NO: 34007 - DNA, 80 bp, synthetic construct
  misc_feature 1..80: note = Artificially Synthesized Probe
  source 1..80: mol_type = other DNA
aacagcagtgacttccacttcccccatcacttcttcaatcacttccacaaatacagtgacttctatgacaacgaccgcct

SEQ ID NO: 34008 - DNA, 80 bp, synthetic construct
  misc_feature 1..80: note = Artificially Synthesized Probe
  source 1..80: mol_type = other DNA
atcacttcatcagtcacttccacaaatacagtgacttctatgacaactacgacctctcctcccacaaccaccaattcttt

SEQ ID NO: 34009 - DNA, 80 bp, synthetic construct
  misc_feature 1..80: note = Artificially Synthesized Probe
  source 1..80: mol_type = other DNA
agttgaatccaccccatcacccactaccaccacctcatttaccacatccacaatgatggaaccaccttcatccactgtat

SEQ ID NO: 34010 - DNA, 80 bp, synthetic construct
  misc_feature 1..80: note = Artificially Synthesized Probe
  source 1..80: mol_type = other DNA
cgccctggcacccactaccaccacctcattcaccacatccccaacgatggaaccaccttcaaccactgtagcgactacag

SEQ ID NO: 34011 - DNA, 80 bp, synthetic construct
  misc_feature 1..80: note = Artificially Synthesized Probe
  source 1..80: mol_type = other DNA
ttgttagcatgatgtctgctaccactcccagtggaggaccaactttcacaagtactgagaacactccaacaaggtccctc

SEQ ID NO: 34012 - DNA, 80 bp, synthetic construct
  misc_feature 1..80: note = Artificially Synthesized Probe
  source 1..80: mol_type = other DNA
cctattccaccaatatgacaggtacattgtccactgtgacctctcttcgacccacctcttcctctctcctcaccacagta

SEQ ID NO: 34013 - DNA, 80 bp, synthetic construct
  misc_feature 1..80: note = Artificially Synthesized Probe
  source 1..80: mol_type = other DNA
ttgatcaccaccacggagaccacctcacacaggtgggggaccaccgagaccacatcctacagtactcccagcttcacttc

SEQ ID NO: 34014 - DNA, 80 bp, synthetic construct
  misc_feature 1..80: note = Artificially Synthesized Probe
  source 1..80: mol_type = other DNA
ccatgtccactgtgagaatgaccctcagaattactgagaacaccccaatcagttcctttagcacaagtattgttgttata

SEQ ID NO: 34015 - DNA, 80 bp, synthetic construct
  misc_feature 1..80: note = Artificially Synthesized Probe
  source 1..80: mol_type = other DNA
aggaactataacaattaccatagtccctgcctcccccactgatccatgtgttgaaatggatcccagcactgaagctactt

SEQ ID NO: 34016 - DNA, 80 bp, synthetic construct
  misc_feature 1..80: note = Artificially Synthesized Probe
  source 1..80: mol_type = other DNA
ggaacaacacgacattatcatgttagaattctgtagattagaagtctgatgtgggtgtcactgggctgaaatcaaggcgt

SEQ ID NO: 34017 - DNA, 80 bp, synthetic construct
  misc_feature 1..80: note = Artificially Synthesized Probe
  source 1..80: mol_type = other DNA
tccagcctgggcgacagagcgagactccgtctcaaaaaaaaaaaaaaaaaaaaaaaaaaaaaaaaaaaacttacctgggc

SEQ ID NO: 34018 - DNA, 80 bp, synthetic construct
  misc_feature 1..80: note = Artificially Synthesized Probe
  source 1..80: mol_type = other DNA
gaagtgactggggacatgcatgctctgtgtagatgtagtggagaccgaggtgggcatggaagtgtctgtggatcagcagt

SEQ ID NO: 34019 - DNA, 80 bp, synthetic construct
  misc_feature 1..80: note = Artificially Synthesized Probe
  source 1..80: mol_type = other DNA
gattagccaggcatggtagtgcacacctgtagtccctgatacttgggaggctgaggagaaaggatcactttagcccagga

SEQ ID NO: 34020 - DNA, 80 bp, synthetic construct
  misc_feature 1..80: note = Artificially Synthesized Probe
  source 1..80: mol_type = other DNA
catctgtgcctgtgtttccgcagccctgtgttttaagcctgactccatcaaggtgaacaacaacagcaagacagagctga

SEQ ID NO: 34021 - DNA, 80 bp, synthetic construct
  misc_feature 1..80: note = Artificially Synthesized Probe
  source 1..80: mol_type = other DNA
ctccgcgccctgggcctacagtggagcctcgtccccagagtgccgctccaagcccatccccgttgccctacagtggagcc

SEQ ID NO: 34022 - DNA, 80 bp, synthetic construct
  misc_feature 1..80: note = Artificially Synthesized Probe
  source 1..80: mol_type = other DNA
ttctctttctccgctcctctctctctctagacaaggatacaaatttctatgtggccttggagaacgtggacaccactatg

SEQ ID NO: 34023 - DNA, 80 bp, synthetic construct
  misc_feature 1..80: note = Artificially Synthesized Probe
  source 1..80: mol_type = other DNA
cctctcctcacatcctggtccctagcaaggtatagatagcctctgtgtcttaggatacccaggtgctgttctccccgtca

SEQ ID NO: 34024 - DNA, 80 bp, synthetic construct
  misc_feature 1..80: note = Artificially Synthesized Probe
  source 1..80: mol_type = other DNA
atggataaggtatagtcttgtcttgattcccagtattcattctccttgaagaatcctgacagccttcagtcaccttccct

SEQ ID NO: 34025 - DNA, 80 bp, synthetic construct
  misc_feature 1..80: note = Artificially Synthesized Probe
  source 1..80: mol_type = other DNA
cactctccggagagactgagtcagccctgaggccgtgctgaagtgagaccactgggcaaaggaggcaggtgtgggcttta

SEQ ID NO: 34026 - DNA, 80 bp, synthetic construct
  misc_feature 1..80: note = Artificially Synthesized Probe
  source 1..80: mol_type = other DNA
ctctaagctgcagttttctcatcttcgaaatagttctaagcccccctatggctcttttgggtttcagagtttgtaatata

SEQ ID NO: 34027 - DNA, 80 bp, synthetic construct
  misc_feature 1..80: note = Artificially Synthesized Probe
  source 1..80: mol_type = other DNA
tgagatttaaatgagataatgtgtccacagtactcagtacagtgccggacacacagtaagcactcaaacaatggtaatga

SEQ ID NO: 34028 - DNA, 80 bp, synthetic construct
  misc_feature 1..80: note = Artificially Synthesized Probe
  source 1..80: mol_type = other DNA
ctctcgaatctaaaaagcagctggacaaaatgttcacgttttcgctcaaaaccaaacaaacagaaaaactcaattagctt

SEQ ID NO: 34029 - DNA, 80 bp, synthetic construct
  misc_feature 1..80: note = Artificially Synthesized Probe
  source 1..80: mol_type = other DNA
acttaggtggagtctaaactcaaagagtgcattgtctggcgcaggtgacaaatgtcaacagattttaccgtgtggagtgt

SEQ ID NO: 34030 - DNA, 80 bp, synthetic construct
  misc_feature 1..80: note = Artificially Synthesized Probe
  source 1..80: mol_type = other DNA
tcactgagcaagagctggatgactcttaagggaagttctggagatgggagaagcaaatgtatcatcaccccacggtttac

SEQ ID NO: 34031 - DNA, 80 bp, synthetic construct
  misc_feature 1..80: note = Artificially Synthesized Probe
  source 1..80: mol_type = other DNA
acagtgatctgtagattttatttgggtgccttagggggcttggtaaaggcctcgctgtgatctccctcatcagactctgg

SEQ ID NO: 34032 - DNA, 80 bp, synthetic construct
  misc_feature 1..80: note = Artificially Synthesized Probe
  source 1..80: mol_type = other DNA
cagctggcctccctgggtcattgtttaccctgaccccctgcctggccctgcaccaggatctcagcctcttccctctcaca

SEQ ID NO: 34033 - DNA, 80 bp, synthetic construct
  misc_feature 1..80: note = Artificially Synthesized Probe
  source 1..80: mol_type = other DNA
gctcctatgtggcctgcaaactggatttcatataagctgaaattgacctcccttgctgactcccaaaccaagaagacaga

SEQ ID NO: 34034 - DNA, 80 bp, synthetic construct
  misc_feature 1..80: note = Artificially Synthesized Probe
  source 1..80: mol_type = other DNA
agaaagacggaggtggaagtttcctgccaacctggcagaaggggaggtgggagataaaaatccagttgaactataagcaa

SEQ ID NO: 34035 - DNA, 80 bp, synthetic construct
  misc_feature 1..80: note = Artificially Synthesized Probe
  source 1..80: mol_type = other DNA
cacctcccaacactcacctccagggaggagttgcccaccctgctggtctgattgtacaaacactggctctctgcattgca

SEQ ID NO: 34036 - DNA, 80 bp, synthetic construct
  misc_feature 1..80: note = Artificially Synthesized Probe
  source 1..80: mol_type = other DNA
aaggagagacacggctaggtaaacatggttgccagacaaaaagagcaagaaaggtaccaaacgaaagtatttttcatatt

SEQ ID NO: 34037 - DNA, 80 bp, synthetic construct
  misc_feature 1..80: note = Artificially Synthesized Probe
  source 1..80: mol_type = other DNA
cgaggcaggacagtctcctgctttatcagcctcctctctttctcaactctaatatgtgtgaggcattcccaggactgtga

SEQ ID NO: 34038 - DNA, 80 bp, synthetic construct
  misc_feature 1..80: note = Artificially Synthesized Probe
  source 1..80: mol_type = other DNA
cgggtctgtttctcggagccctgccatttccatttcatagttgcttcacacattcattcagtcagtcatttaacaaacat

SEQ ID NO: 34039 - DNA, 80 bp, synthetic construct
  misc_feature 1..80: note = Artificially Synthesized Probe
  source 1..80: mol_type = other DNA
tagatgcatgagctatctccgtcacagttggagatcaaatgttcagcccaggagctgtttttttgcagttgtgagtagaa

SEQ ID NO: 34040 - DNA, 80 bp, synthetic construct
  misc_feature 1..80: note = Artificially Synthesized Probe
  source 1..80: mol_type = other DNA
acggtggcccagccgtcgaagctggccgagacctcagagccgttgcggctcaggaggactccggtggcgttgaacgtctc

SEQ ID NO: 34041 - DNA, 80 bp, synthetic construct
  misc_feature 1..80: note = Artificially Synthesized Probe
  source 1..80: mol_type = other DNA
tcggattatgccctttagctcttacaacagcccgtgaggcaggtaatgtcatccccattcttactaggagaaaaccaaat

SEQ ID NO: 34042 - DNA, 80 bp, synthetic construct
  misc_feature 1..80: note = Artificially Synthesized Probe
  source 1..80: mol_type = other DNA
cccctccactgaccatccacccatcactggcgtcatctccatcttcccttgtggccacagctctgcccctactccttatc

SEQ ID NO: 34043 - DNA, 80 bp, synthetic construct
  misc_feature 1..80: note = Artificially Synthesized Probe
  source 1..80: mol_type = other DNA
gatgttggaagcttcctaacgttacccgatcaggaagtggaggcccagagaggggaagggtctgggaaggaatgaggacg

SEQ ID NO: 34044 - DNA, 80 bp, synthetic construct
  misc_feature 1..80: note = Artificially Synthesized Probe
  source 1..80: mol_type = other DNA
tgacgcttgtctttctacccgcatgaaagctctttgagagaaaacacagttggtctttttcctttgtttctggctgttag

SEQ ID NO: 34045 - DNA, 80 bp, synthetic construct
  misc_feature 1..80: note = Artificially Synthesized Probe
  source 1..80: mol_type = other DNA
gtcatgagacaggggcgtgaaaacaacagagttcaggcctcatttctgtttgtttcccttcaacaagcagagggtttgga

SEQ ID NO: 34046 - DNA, 80 bp, synthetic construct
  misc_feature 1..80: note = Artificially Synthesized Probe
  source 1..80: mol_type = other DNA
tcgccatcaccgtccccaggtgtggggtccgagcatggcccgggaaggaggaaagcctggagcagccgcctgcagcccca

SEQ ID NO: 34047 - DNA, 80 bp, synthetic construct
  misc_feature 1..80: note = Artificially Synthesized Probe
  source 1..80: mol_type = other DNA
tagtgtcatcagtcttggctgttattatcacgatatttgagaaggtaagagaggccagctaatgtcagtggaaatcaggg

SEQ ID NO: 34048 - DNA, 80 bp, synthetic construct
  misc_feature 1..80: note = Artificially Synthesized Probe
  source 1..80: mol_type = other DNA
gcataataccagactgagccacgtgaaattgtgaatagccagacatttttgacttacaaaaatgccacttgctatgtttc

SEQ ID NO: 34049 - DNA, 80 bp, synthetic construct
  misc_feature 1..80: note = Artificially Synthesized Probe
  source 1..80: mol_type = other DNA
tgtcccaggcctgcatttttgccgtgagcttttctgaggtgaagttcaattcaaacttgggctgcaggaaggcctgcagt

SEQ ID NO: 34050 - DNA, 80 bp, synthetic construct
  misc_feature 1..80: note = Artificially Synthesized Probe
  source 1..80: mol_type = other DNA
tggtcagtctcgtggttgggttggggtactcctgagtcagcttaatgtcccttgactgcttcctcccacacccatattta

SEQ ID NO: 34051 - DNA, 80 bp, synthetic construct
  misc_feature 1..80: note = Artificially Synthesized Probe
  source 1..80: mol_type = other DNA
accctcccttcatcgctcaggggtgctcagggctatagacaccctcccttcatcgctcaggggtgtagacaccctctctc

SEQ ID NO: 34052 - DNA, 80 bp, synthetic construct
  misc_feature 1..80: note = Artificially Synthesized Probe
  source 1..80: mol_type = other DNA
tcctccctcagggccacaggagccaggactgtccctccaactctgctccaggaggcagggaccagggggccagagacaaa

SEQ ID NO: 34053 - DNA, 80 bp, synthetic construct
  misc_feature 1..80: note = Artificially Synthesized Probe
  source 1..80: mol_type = other DNA
gagaaaaacaggtcctgctgtcagaataccagcaaacgattctcaatctcttagtctcaatccttttcagggttaaaaga

SEQ ID NO: 34054 - DNA, 80 bp, synthetic construct
  misc_feature 1..80: note = Artificially Synthesized Probe
  source 1..80: mol_type = other DNA
ccataccttccacacccataccttccacacccataccttccacacccataccttccacagtcataccttccacacccata

SEQ ID NO: 34055 - DNA, 80 bp, synthetic construct
  misc_feature 1..80: note = Artificially Synthesized Probe
  source 1..80: mol_type = other DNA
ccataccttccacacccataccttccacacccataccttccacacccttaccttccacacccataccttccacagtcata

SEQ ID NO: 34056 - DNA, 80 bp, synthetic construct
  misc_feature 1..80: note = Artificially Synthesized Probe
  source 1..80: mol_type = other DNA
ccataccttccacacccttaccttccacacccataccttccacacccataccttccacacccataccttccacaccctta

SEQ ID NO: 34057 - DNA, 80 bp, synthetic construct
  misc_feature 1..80: note = Artificially Synthesized Probe
  source 1..80: mol_type = other DNA
tacagtaacaaaacaggagagtcaaagagattcaaagaaatcaggagctggaagagggagctggaaactccttgtctctc

SEQ ID NO: 34058 - DNA, 80 bp, synthetic construct
  misc_feature 1..80: note = Artificially Synthesized Probe
  source 1..80: mol_type = other DNA
ctgtggatgcagaggaagtgtcggtgacaggaagaggcgtggtgtcacctgtggatactgaggaaaggctggtgagagga

SEQ ID NO: 34059 - DNA, 80 bp, synthetic construct
  misc_feature 1..80: note = Artificially Synthesized Probe
  source 1..80: mol_type = other DNA
ctgtagatactgaggaagtgctggtgacaggaagaggggtggtgtgacctgaggatgatgaggaagggatggtgacagga

SEQ ID NO: 34060 - DNA, 80 bp, synthetic construct
  misc_feature 1..80: note = Artificially Synthesized Probe
  source 1..80: mol_type = other DNA
ctgtggaagctgaggaaaggccggtaacaggaagaggggtggcgtgacctgtggatgctgaggaagggctagtgacagga

SEQ ID NO: 34061 - DNA, 80 bp, synthetic construct
  misc_feature 1..80: note = Artificially Synthesized Probe
  source 1..80: mol_type = other DNA
ctgtggatgctgaggaagtgtcggtgacaggaagaggcgtggtgtcacctgtggatactgaggaaaggctggtgagagga

SEQ ID NO: 34062 - DNA, 80 bp, synthetic construct
  misc_feature 1..80: note = Artificially Synthesized Probe
  source 1..80: mol_type = other DNA
ctgtggatactgaggaagtgttggtgacaggaagaggggtggcctgacctgtggatgccgaggaaatgtcggtgacagga

SEQ ID NO: 34063 - DNA, 80 bp, synthetic construct
  misc_feature 1..80: note = Artificially Synthesized Probe
  source 1..80: mol_type = other DNA
ctgtgggtactgaggaagcgtcggtgacaggaagaggggtggtgtgacctgaggatgctgaggaagggctagtgacagga

SEQ ID NO: 34064 - DNA, 80 bp, synthetic construct
  misc_feature 1..80: note = Artificially Synthesized Probe
  source 1..80: mol_type = other DNA
ctgtggatgctgaggaagtatcggtgacaggaagcggcgtggtgtcaccagtggatgctgaggaaaggctggtgacagga

SEQ ID NO: 34065 - DNA, 80 bp, synthetic construct
  misc_feature 1..80: note = Artificially Synthesized Probe
  source 1..80: mol_type = other DNA
ctgtggatgccgaggaaacgtcggtgacaggaagacgggtggtgtcatctgtggaagctgaagaaaggccggtgacagga

SEQ ID NO: 34066 - DNA, 80 bp, synthetic construct
  misc_feature 1..80: note = Artificially Synthesized Probe
  source 1..80: mol_type = other DNA
ctgtggatgctgaggaagcatcagtgacatgaagaggggtggtgtgacctgtggatactgaggaagtgtcggtgacagga

SEQ ID NO: 34067 - DNA, 80 bp, synthetic construct
  misc_feature 1..80: note = Artificially Synthesized Probe
  source 1..80: mol_type = other DNA
ctgtggatactgaggaagcatcggtgacatgaagaggggtggtgtgacctgtggatgccgaggaagcgtaggtgacagga

SEQ ID NO: 34068 - DNA, 80 bp, synthetic construct
  misc_feature 1..80: note = Artificially Synthesized Probe
  source 1..80: mol_type = other DNA
ttgactgggttgtgtgactgtccctggaggggtttgatgaaaaccttgtcgtctctcctgaggtggatattccttcgctt

SEQ ID NO: 34069 - DNA, 80 bp, synthetic construct
  misc_feature 1..80: note = Artificially Synthesized Probe
  source 1..80: mol_type = other DNA
gtagagaactgggggagagtgctgttgacagagtgtctgaccaccatatggttgaaactttggaagtgattgcagaaatg

SEQ ID NO: 34070 - DNA, 80 bp, synthetic construct
  misc_feature 1..80: note = Artificially Synthesized Probe
  source 1..80: mol_type = other DNA
gggtagaactttcagttcctgctgttgatgtctcttctgtgtttccaagagtggagtctgtggaggttgtcattgttata

SEQ ID NO: 34071 - DNA, 80 bp, synthetic construct
  misc_feature 1..80: note = Artificially Synthesized Probe
  source 1..80: mol_type = other DNA
gcaataccattcaggacatagacataggcaaagattttatgatgaaatctccaaaagcacttgcaacaaaagctaaaatt

SEQ ID NO: 34072 - DNA, 80 bp, synthetic construct
  misc_feature 1..80: note = Artificially Synthesized Probe
  source 1..80: mol_type = other DNA
tggcgcctgtcagggacgggacaaggggaggaagagcgtcaggataaatagctaatacatgcaggtgatgggttgatagg

SEQ ID NO: 34073 - DNA, 80 bp, synthetic construct
  misc_feature 1..80: note = Artificially Synthesized Probe
  source 1..80: mol_type = other DNA
gcctgtcttccttgtgaggaggaaggtgaggttagactagaatggtgaattaactgtgttaaactccatgggaagaggca

SEQ ID NO: 34074 - DNA, 80 bp, synthetic construct
  misc_feature 1..80: note = Artificially Synthesized Probe
  source 1..80: mol_type = other DNA
gaattcagcttcaagtccactttctggaattgactgtaattcgccaccttctcttcttcagacagtaacttagactctca

SEQ ID NO: 34075 - DNA, 80 bp, synthetic construct
  misc_feature 1..80: note = Artificially Synthesized Probe
  source 1..80: mol_type = other DNA
ctcaggagtgaagaagttaacaactaagatggtgagtcaatgcccttggaaatgtgctgactgaaaggctgaaaaaggaa

SEQ ID NO: 34076 - DNA, 80 bp, synthetic construct
  misc_feature 1..80: note = Artificially Synthesized Probe
  source 1..80: mol_type = other DNA
cgcctgtaatcctaacacgttgggagggtgaggcaggcggatcatgaggtcaggagattgagaccatcctggctaacacg

SEQ ID NO: 34077 - DNA, 80 bp, synthetic construct
  misc_feature 1..80: note = Artificially Synthesized Probe
  source 1..80: mol_type = other DNA
accatataaacagaacggaggggagacacaatcaccacagcagatacaggaaagttatttgataaaagtcaacacttact

SEQ ID NO: 34078 - DNA, 80 bp, synthetic construct
  misc_feature 1..80: note = Artificially Synthesized Probe
  source 1..80: mol_type = other DNA
gccaaagaaaacacacatactggttacgtgcatttgggaacatttatagttgaaagatcaaaacccataatcttgctacc

SEQ ID NO: 34079 - DNA, 80 bp, synthetic construct
  misc_feature 1..80: note = Artificially Synthesized Probe
  source 1..80: mol_type = other DNA
ttggagtcctacaagagctggctcagggggactgggagagctcagctccatagtaaaatctagggtgctgtataaaaact

SEQ ID NO: 34080 - DNA, 80 bp, synthetic construct
  misc_feature 1..80: note = Artificially Synthesized Probe
  source 1..80: mol_type = other DNA
tcatgttattaatacagactgccaaatttctttgcagaaagcttatgccaatttacagacctgttggcagtgtgcaagag

SEQ ID NO: 34081 - DNA, 80 bp, synthetic construct
  misc_feature 1..80: note = Artificially Synthesized Probe
  source 1..80: mol_type = other DNA
acggacaggcagaggcgggaggattccttgaggccaggagtttgagaccagcctgggcaatagctcaagaccccttctct

SEQ ID NO: 34082 - DNA, 80 bp, synthetic construct
  misc_feature 1..80: note = Artificially Synthesized Probe
  source 1..80: mol_type = other DNA
gattttctccagtcctcacgcgtctcatcagttcggccccatccattcattcattcatgaatctgacagatgtgtattgc

SEQ ID NO: 34083 - DNA, 80 bp, synthetic construct
  misc_feature 1..80: note = Artificially Synthesized Probe
  source 1..80: mol_type = other DNA
acatgttttcccctttctcttgggtttccaaatacaaccttgaggcagctgcaaaggccgttttcctcagcctaaaaata

SEQ ID NO: 34084 - DNA, 80 bp, synthetic construct
  misc_feature 1..80: note = Artificially Synthesized Probe
  source 1..80: mol_type = other DNA
ggggcttctttttacttctctcgtaggcacgttatgactctatgaataatacaaatgttcacagctcatgttcatgtggt

SEQ ID NO: 34085 - DNA, 80 bp, synthetic construct
  misc_feature 1..80: note = Artificially Synthesized Probe
  source 1..80: mol_type = other DNA
gctttctaagtgctgtgggttgaggcttattcctagcatctggtctgtttgtcttgggtttttcctggaactggaggtga

SEQ ID NO: 34086 - DNA, 80 bp, synthetic construct
  misc_feature 1..80: note = Artificially Synthesized Probe
  source 1..80: mol_type = other DNA
cttctcggaggtgccatctccagtctccaccatcttggtgttgccacccatctctcctggctcccactggggcaggcaca

SEQ ID NO: 34087 - DNA, 80 bp, synthetic construct
  misc_feature 1..80: note = Artificially Synthesized Probe
  source 1..80: mol_type = other DNA
aggaacttaaggcaggcgtttcctaaatggtggtttaattaacaaatgaatgaatgaatggctgtctcagcagggtgtgt

SEQ ID NO: 34088 - DNA, 80 bp, synthetic construct
  misc_feature 1..80: note = Artificially Synthesized Probe
  source 1..80: mol_type = other DNA
tgactcaatttctcagaacatgctggggcgggaactcagcctagcagtaagaaagacgtatatttaaggtaaaaggctga

SEQ ID NO: 34089 - DNA, 80 bp, synthetic construct
  misc_feature 1..80: note = Artificially Synthesized Probe
  source 1..80: mol_type = other DNA
agatgctgtctcgtttcatcctcatgacaaccctacgtagtagccccttccccctgggctcagtttgccgatgaagagcc

SEQ ID NO: 34090 - DNA, 80 bp, synthetic construct
  misc_feature 1..80: note = Artificially Synthesized Probe
  source 1..80: mol_type = other DNA
tttttcctctggcctgggcttcagtgtgacccagcctgggtgagggtcctgccggcaagtgtgcaaacagaccctagact

SEQ ID NO: 34091 - DNA, 80 bp, synthetic construct
  misc_feature 1..80: note = Artificially Synthesized Probe
  source 1..80: mol_type = other DNA
gcttcaccagcatggcttctcttgcagcctttaaacggcactcgccttctgactcactcccaggaagctcctcaaatatg

SEQ ID NO: 34092 - DNA, 80 bp, synthetic construct
  misc_feature 1..80: note = Artificially Synthesized Probe
  source 1..80: mol_type = other DNA
gaagctccacggcccagcagctgcagtgtgaggagcagacgtgagcccgtcccctcaggcggctggcccgaaccaagtgc

SEQ ID NO: 34093 - DNA, 80 bp, synthetic construct
  misc_feature 1..80: note = Artificially Synthesized Probe
  source 1..80: mol_type = other DNA
ctgtctcttggccagagccgcagcattaatacttactgtcaatagagaaagatgcagccccaggggccaccgggagacac

SEQ ID NO: 34094 - DNA, 80 bp, synthetic construct
  misc_feature 1..80: note = Artificially Synthesized Probe
  source 1..80: mol_type = other DNA
agatcaagcccttggcagggactgtgctttagtcaccagatgcacgtcctgtggccggggaaggcagccctgcacagagc

SEQ ID NO: 34095 - DNA, 80 bp, synthetic construct
  misc_feature 1..80: note = Artificially Synthesized Probe
  source 1..80: mol_type = other DNA
tgacttaggatctagttcgaaactggttctgtgtttaggtttctgctaagtcacgcctggaaggctccaagtgtgtcctc

SEQ ID NO: 34096 - DNA, 80 bp, synthetic construct
  misc_feature 1..80: note = Artificially Synthesized Probe
  source 1..80: mol_type = other DNA
tctctgcttccccttcctggccacgttcctggggtgaccagccttcacccacaggtgccccgacgtcctcgcccacccgg

SEQ ID NO: 34097 - DNA, 80 bp, synthetic construct
  misc_feature 1..80: note = Artificially Synthesized Probe
  source 1..80: mol_type = other DNA
tgacattcctgtggaacggagaggacagtgccctggtgaggaagccccctcgccccttgccccttcaggcctggccacaa

SEQ ID NO: 34098 - DNA, 80 bp, synthetic construct
  misc_feature 1..80: note = Artificially Synthesized Probe
  source 1..80: mol_type = other DNA
accagcaggtggactcagaaggggcctggaggctccaggatccccaaaccagcaggatctctgagccttaagttgtgctg

SEQ ID NO: 34099 - DNA, 80 bp, synthetic construct
  misc_feature 1..80: note = Artificially Synthesized Probe
  source 1..80: mol_type = other DNA
gtggacggctgcttctgccccccaggcaggtcttgtgtgccctgaacccctcagggggctttcaggtccctgctcccaac

SEQ ID NO: 34100 - DNA, 80 bp, synthetic construct
  misc_feature 1..80: note = Artificially Synthesized Probe
  source 1..80: mol_type = other DNA
catagaggggtggatgtccctgctgaggggggagccctgggtccccatgatggtcatagagggatggctctccctgctga

SEQ ID NO: 34101 - DNA, 80 bp, synthetic construct
  misc_feature 1..80: note = Artificially Synthesized Probe
  source 1..80: mol_type = other DNA
gcggacggcggcgtgttcctcaactccatctacacgcagctgcccctgtcggcaggtatgtggctctcccaggacggccg

SEQ ID NO: 34102 - DNA, 80 bp, synthetic construct
  misc_feature 1..80: note = Artificially Synthesized Probe
  source 1..80: mol_type = other DNA
gtggagaatggtactcctcgcccccacccccacagtcaccccaggctcaagtcccacccagcaccttcctgtcccctggg

SEQ ID NO: 34103 - DNA, 80 bp, synthetic construct
  misc_feature 1..80: note = Artificially Synthesized Probe
  source 1..80: mol_type = other DNA
ctttgcacttcctcatcccagcctcgcaagaacctcatgcccttgcgatccccacgtcacagacggggatgctgagttga

SEQ ID NO: 34104 - DNA, 80 bp, synthetic construct
  misc_feature 1..80: note = Artificially Synthesized Probe
  source 1..80: mol_type = other DNA
gctgcaggtgtcatggaagctttggctcgggggctgttaacttgatcagcaggacaggctcagggctgcctggggtcagt

SEQ ID NO: 34105 - DNA, 80 bp, synthetic construct
  misc_feature 1..80: note = Artificially Synthesized Probe
  source 1..80: mol_type = other DNA
cgcggccagcagcttgtctctttctggcccaggactactgtggggacaacaccacccacgggaccttccgcatcgtcacc

SEQ ID NO: 34106 - DNA, 80 bp, synthetic construct
  misc_feature 1..80: note = Artificially Synthesized Probe
  source 1..80: mol_type = other DNA
tgagggtctcacggacccagctcacccctaacgccagccgcttgtgctaagagcccgtgcgcacctgcagagcactgggt

SEQ ID NO: 34107 - DNA, 80 bp, synthetic construct
  misc_feature 1..80: note = Artificially Synthesized Probe
  source 1..80: mol_type = other DNA
cttcgacgacaatgccatcaatgactttgccacgcgtagccggtccgtggtgggggacgcactggagtttgggaacagct

SEQ ID NO: 34108 - DNA, 80 bp, synthetic construct
  misc_feature 1..80: note = Artificially Synthesized Probe
  source 1..80: mol_type = other DNA
aaacaaaacaacaaaaaaccaaaaagcagtttcgtgtcatcttaaggaagacttgagtgcccacttaggcacacagcatg

SEQ ID NO: 34109 - DNA, 80 bp, synthetic construct
  misc_feature 1..80: note = Artificially Synthesized Probe
  source 1..80: mol_type = other DNA
tttggggcacgctctgaggtattccaggccccaggagctcagagagctgccatggggggtgttgaaatacagatggttcc

SEQ ID NO: 34110 - DNA, 80 bp, synthetic construct
  misc_feature 1..80: note = Artificially Synthesized Probe
  source 1..80: mol_type = other DNA
ttcttcaatgaggaccagatgaagtgcgtggcccagtgtggctgctacgacaaggacggaaactactatgacgtcggtgc

SEQ ID NO: 34111 - DNA, 80 bp, synthetic construct
  misc_feature 1..80: note = Artificially Synthesized Probe
  source 1..80: mol_type = other DNA
acgaagcctcagcacaatgattgatgggataccccaaggagacaataaagctttcctggactccgtcccatccctcagca

SEQ ID NO: 34112 - DNA, 80 bp, synthetic construct
  misc_feature 1..80: note = Artificially Synthesized Probe
  source 1..80: mol_type = other DNA
ctaaggacatagagtgccaggccgagagcttccccaactggaccctggcacaggtggggcagaaggtgcactgtgacgtc

SEQ ID NO: 34113 - DNA, 80 bp, synthetic construct
  misc_feature 1..80: note = Artificially Synthesized Probe
  source 1..80: mol_type = other DNA
ctggagacggggctgacctgcaagaacgaagaccagacaggcaggttcaacatgtgcttcaactacaacgtgcgtgtgct

SEQ ID NO: 34114 - DNA, 80 bp, synthetic construct
  misc_feature 1..80: note = Artificially Synthesized Probe
  source 1..80: mol_type = other DNA
catcttgggcaccacccacatcacagagccttccacggtgacttcccacaccccagcagcaaccaccagtaccacccagc

SEQ ID NO: 34115 - DNA, 80 bp, synthetic construct
  misc_feature 1..80: note = Artificially Synthesized Probe
  source 1..80: mol_type = other DNA
tcctcacagagccgagcactacagccaccgtgacggtgcccaccggatccacggccaccgcctcctccacccaggcaact

SEQ ID NO: 34116 - DNA, 80 bp, synthetic construct
  misc_feature 1..80: note = Artificially Synthesized Probe
  source 1..80: mol_type = other DNA
ccacggtggtgaccatgggctgtgagccccagtgtgcctggtcagagtggctggactacagctaccccatgccggggccc

SEQ ID NO: 34117 - DNA, 80 bp, synthetic construct
  misc_feature 1..80: note = Artificially Synthesized Probe
  source 1..80: mol_type = other DNA
agaacagctccccctcccaaagtgctgaccaccacggccaccacacccacagtcaccagctccaaagccactccctcctc

SEQ ID NO: 34118 - DNA, 80 bp, synthetic construct; identical to SEQ ID NO: 34114
  misc_feature 1..80: note = Artificially Synthesized Probe
  source 1..80: mol_type = other DNA

SEQ ID NO: 34119 - DNA, 80 bp, synthetic construct
  misc_feature 1..80: note = Artificially Synthesized Probe
  source 1..80: mol_type = other DNA
ccaacccctcctcaactccagggacaacacctatccccccagtgctgaccaccaccgccaccacacctgcagccaccagc

SEQ ID NO: 34120 - DNA, 80 bp, synthetic construct
  misc_feature 1..80: note = Artificially Synthesized Probe
  source 1..80: mol_type = other DNA
atgtccacaatccacccctcctccactccggagaccacccacacctccacagtgctgaccacgaaggccaccacgacaag

SEQ ID NO: 34121 - DNA, 80 bp, synthetic construct
  misc_feature 1..80: note = Artificially Synthesized Probe
  source 1..80: mol_type = other DNA
tgctgaccagcacggccaccacacccacagccaccagttccaaagccacttcctcctccagtccaaggactgcaaccacc

SEQ ID NO: 34122 - DNA, 80 bp, synthetic construct
  misc_feature 1..80: note = Artificially Synthesized Probe
  source 1..80: mol_type = other DNA
tccccactggccacactgggtctcctctggccacaatccgtccgcactggccacaatcagtccccactggccacactcgg

SEQ ID NO: 34123 - DNA, 80 bp, synthetic construct
  misc_feature 1..80: note = Artificially Synthesized Probe
  source 1..80: mol_type = other DNA
agaactgcacggtggccaggtgcgtgggtgacaaccgtgtcgtcctgctggacccaaagcctgtggccaacgtcacctgc

SEQ ID NO: 34124 - DNA, 80 bp, synthetic construct
  misc_feature 1..80: note = Artificially Synthesized Probe
  source 1..80: mol_type = other DNA
tggattgagggcccacccagctagtccacgatgatgtcatttcaagatgcttcccttaatcccatctgcaaagacacttt

SEQ ID NO: 34125 - DNA, 80 bp, synthetic construct
  misc_feature 1..80: note = Artificially Synthesized Probe
  source 1..80: mol_type = other DNA
ccctgggcgtgagcgtcaccttcaatggccaagtcttccaggcccggctgccctacagcctcttccacaacaacaccgag

SEQ ID NO: 34126 - DNA, 80 bp, synthetic construct
  misc_feature 1..80: note = Artificially Synthesized Probe
  source 1..80: mol_type = other DNA
ttctgccctgaggaccagatcctcttcaacgcacacatgggcatctgcgtgcaggcctgccgtaagctccgccacctgtg

SEQ ID NO: 34127 - DNA, 80 bp, synthetic construct
  misc_feature 1..80: note = Artificially Synthesized Probe
  source 1..80: mol_type = other DNA
ccgcggcaggaccactcggcagagatggcctccaggtgcttcattctcctcctaacgatgaggctggtgacctctggcct

SEQ ID NO: 34128 - DNA, 80 bp, synthetic construct
  misc_feature 1..80: note = Artificially Synthesized Probe
  source 1..80: mol_type = other DNA
tgggacatgcttgggactcaggggcaccttacgtcgacagccatgagctccacaactgctgcctctgagaggtcccttca

SEQ ID NO: 34129 - DNA, 80 bp, synthetic construct
  misc_feature 1..80: note = Artificially Synthesized Probe
  source 1..80: mol_type = other DNA
tggggtcttgtttgtttccaaagggagggtatgaagtaggaggataactgagggggtctgggggtgggacaggacctgca

SEQ ID NO: 34130 - DNA, 80 bp, synthetic construct
  misc_feature 1..80: note = Artificially Synthesized Probe
  source 1..80: mol_type = other DNA
tgtcaagtccgcatcaacacgaccatcctgtggcaccagggctgcgagaccgaggtcaacatcaccttctgcgagggctc

SEQ ID NO: 34131 - DNA, 80 bp, synthetic construct
  misc_feature 1..80: note = Artificially Synthesized Probe
  source 1..80: mol_type = other DNA
gaggccactgctgtctgagaacgttctgcctccatccccatgctctgtccacctggagccaggatgtgcattgtctgatc

SEQ ID NO: 34132 - DNA, 80 bp, synthetic construct
  misc_feature 1..80: note = Artificially Synthesized Probe
  source 1..80: mol_type = other DNA
aacaaacccggaagacaatggattttaaataactttgaggctggagtcatgatttggcttggcaagagactgcaaaagtt

SEQ ID NO: 34133 - DNA, 80 bp, synthetic construct
  misc_feature 1..80: note = Artificially Synthesized Probe
  source 1..80: mol_type = other DNA
cagtcttataaagagcaggacaattgattttgatgattcaaataaggatttgttgtacacacacacaaaacccccaaaat

SEQ ID NO: 34134 - DNA, 80 bp, synthetic construct
  misc_feature 1..80: note = Artificially Synthesized Probe
  source 1..80: mol_type = other DNA
attcttggcagacggtaataacaaaaagagttttttagataatatacttcttcctaagtcctttatcatgaatgcataaa

SEQ ID NO: 34135 - DNA, 80 bp, synthetic construct
  misc_feature 1..80: note = Artificially Synthesized Probe
  source 1..80: mol_type = other DNA
taaatgaagtaggcagcttctcagtgaaataaaacctgatgtcgttgaaggagagtaacaagtgaggggtggaaagaggg

SEQ ID NO: 34136 - DNA, 80 bp, synthetic construct
  misc_feature 1..80: note = Artificially Synthesized Probe
  source 1..80: mol_type = other DNA
tgattgtgtcagtgaaaaccggaaagcagatttggataactggaaatatggacaatgtggacttggcattctgtgtgtag

SEQ ID NO: 34137 - DNA, 80 bp, synthetic construct
  misc_feature 1..80: note = Artificially Synthesized Probe
  source 1..80: mol_type = other DNA
gtaagtctattacctctgccacttctgcatctgtgtattgagtgaaaataacactagtgcataaagtttctctcttataa

SEQ ID NO: 34138 - DNA, 80 bp, synthetic construct
  misc_feature 1..80: note = Artificially Synthesized Probe
  source 1..80: mol_type = other DNA
agaggtgcaatcacagctcactgaaactttgaactcctaggctcagttgatcctcccacctcagcttcttcccaagtagc

SEQ ID NO: 34139 - DNA, 80 bp, synthetic construct
  misc_feature 1..80: note = Artificially Synthesized Probe
  source 1..80: mol_type = other DNA
tctttctttttaaacagtaaaagcattcaacatcatcaattaacctttgggctcattgttaaccacactccacaagctta

SEQ ID NO: 34140 - DNA, 80 bp, synthetic construct
  misc_feature 1..80: note = Artificially Synthesized Probe
  source 1..80: mol_type = other DNA
ccatggtggtttgctgcacctgtcacccatcacctaaataactgggctcagcatgtattagctatttttcataatgctct

SEQ ID NO: 34141 - DNA, 80 bp, synthetic construct
  misc_feature 1..80: note = Artificially Synthesized Probe
  source 1..80: mol_type = other DNA
ccaaaatcaacatgacctcctcatcaggaaactcagtgggcacttttaggtccttatttaacttaacgtctcggcagcat

SEQ ID NO: 34142 - DNA, 80 bp, synthetic construct
  misc_feature 1..80: note = Artificially Synthesized Probe
  source 1..80: mol_type = other DNA
ctgaaaaactttggggcattatatttttttcagaagtgttctttgctaatctaatctttttcttctgtgagtattgttga

SEQ ID NO: 34143 - DNA, 80 bp, synthetic construct
  misc_feature 1..80: note = Artificially Synthesized Probe
  source 1..80: mol_type = other DNA
ttttatttaagtgtgtcttttgtgtttgatagcatctgtcatttcataggtcagcttataccattggcacttactgtgat

SEQ ID NO: 34144 - DNA, 80 bp, synthetic construct
  misc_feature 1..80: note = Artificially Synthesized Probe
  source 1..80: mol_type = other DNA
tttacgcagtcatgtaaaggtattagcctattgccttttggtatcaattgttgttgctgaataatctcaggttacccaaa

SEQ ID NO: 34145 - DNA, 80 bp, synthetic construct
  misc_feature 1..80: note = Artificially Synthesized Probe
  source 1..80: mol_type = other DNA
tcactgtgctcaccctgggaattaaatgatgtctaaaacatgatccctgacctaaagctcaaggttttaataattgagtg

SEQ ID NO: 34146 - DNA, 80 bp, synthetic construct
  misc_feature 1..80: note = Artificially Synthesized Probe
  source 1..80: mol_type = other DNA
aattttttaaattattatccttttccaccctgacttcccttcagactcacttccctttatgctgatgatattggggtgga

SEQ ID NO: 34147 - DNA, 80 bp, synthetic construct
  misc_feature 1..80: note = Artificially Synthesized Probe
  source 1..80: mol_type = other DNA
atactgatttcctttcatttgcttatatatgcagcagtggggttgctggatcatatggtagctcaatttttagttttttg

SEQ ID NO: 34148 - DNA, 80 bp, synthetic construct
  misc_feature 1..80: note = Artificially Synthesized Probe
  source 1..80: mol_type = other DNA
cctccagtttttttcttttttcttttggctattctgggcctttcgtggtttcacataaattttaggattttttttttcta

SEQ ID NO: 34149 - DNA, 80 bp, synthetic construct
  misc_feature 1..80: note = Artificially Synthesized Probe
  source 1..80: mol_type = other DNA
ggccaataatcccaaatcatcaagtcctggttccttttttgcttagcagtttttcccacttatcttttcctcttgaattt

SEQ ID NO: 34150 - DNA, 80 bp, synthetic construct
  misc_feature 1..80: note = Artificially Synthesized Probe
  source 1..80: mol_type = other DNA
taaacgtactatgttacagttctggagttcacacgtatgaaataaatctctctgggctaaaatcaaagtgttggcagggc

SEQ ID NO: 34151 - DNA, 80 bp, synthetic construct
  misc_feature 1..80: note = Artificially Synthesized Probe
  source 1..80: mol_type = other DNA
tgggaggagctgtggagagttgtggagccctgcaagtgaagatgagtgagtgggaaacagattcgtctattgatttgaaa

SEQ ID NO: 34152 - DNA, 80 bp, synthetic construct
  misc_feature 1..80: note = Artificially Synthesized Probe
  source 1..80: mol_type = other DNA
cttctaggcacttccccatatttattaaaaactttgattccaggcttactatctttctatccatctctactcctgcaatt

SEQ ID NO: 34153 - DNA, 80 bp, synthetic construct
  misc_feature 1..80: note = Artificially Synthesized Probe
  source 1..80: mol_type = other DNA
cctgctaatttttgtatttttggtagagtcagagtttcgccaagttggccaggccagtctcaaactcctaaccttgagta

SEQ ID NO: 34154 - DNA, 80 bp, synthetic construct
  misc_feature 1..80: note = Artificially Synthesized Probe
  source 1..80: mol_type = other DNA
accatggctcactgcagccttgactgcttgggctaaagcaatcctcctgcttcagcctcccaagtagctaggactacagg

SEQ ID NO: 34155 - DNA, 80 bp, synthetic construct
  misc_feature 1..80: note = Artificially Synthesized Probe
  source 1..80: mol_type = other DNA
attgctaaaattttggaatgcttccatacttcttggaaagatccgttttataaggctcccgagatcccccaacccctatc

SEQ ID NO: 34156 - DNA, 80 bp, synthetic construct
  misc_feature 1..80: note = Artificially Synthesized Probe
  source 1..80: mol_type = other DNA
agcctttcttgtatttttgctataacacagggccgcaggaactctaaatgacagtgaatgcttagattaaaaaccaacag

SEQ ID NO: 34157 - DNA, 80 bp, synthetic construct
  misc_feature 1..80: note = Artificially Synthesized Probe
  source 1..80: mol_type = other DNA
agtaagattctaataaagcagagacaaccaagtgtttctaaactgatttctgtttgagatctactgaggaaaactgtctt

SEQ ID NO: 34158 - DNA, 80 bp, synthetic construct
  misc_feature 1..80: note = Artificially Synthesized Probe
  source 1..80: mol_type = other DNA
gggagggagacaaggttcggaagaaaagaaatgagatctctggagagaagttaggcgaaaagactcaagactcatacaca

SEQ ID NO: 34159 - DNA, 80 bp, synthetic construct
  misc_feature 1..80: note = Artificially Synthesized Probe
  source 1..80: mol_type = other DNA
gccaagtctgagattttagcgtgcctattacctgagtgctgtacattatacccagtatatagttttgtatgtctcaccac

SEQ ID NO: 34160 - DNA, 80 bp, synthetic construct
  misc_feature 1..80: note = Artificially Synthesized Probe
  source 1..80: mol_type = other DNA
ataacttggtgtgaaaggtcttcactgagaaatcagaatccaaataggtctaggtgttctatttgcttgttagtcgggtc

SEQ ID NO: 34161 - DNA, 80 bp, synthetic construct
  misc_feature 1..80: note = Artificially Synthesized Probe
  source 1..80: mol_type = other DNA
cagacacacattcagactcactgaatatctgtctgcctagatccagtgttttcttgttctgtctaaggaatgatgcagaa

SEQ ID NO: 34162 - DNA, 80 bp, synthetic construct
  misc_feature 1..80: note = Artificially Synthesized Probe
  source 1..80: mol_type = other DNA
aaattagttatgcagtgactatatcgaatcagaactctatggtgccatttgatgctgggctacatgtaacacagatgggc

SEQ ID NO: 34163 - DNA, 80 bp, synthetic construct
  misc_feature 1..80: note = Artificially Synthesized Probe
  source 1..80: mol_type = other DNA
gtatctagatgaaaatgaggggaaaaccagaattctgcaaatgaaggagaggatgggagctgaaaaaaaatagacaggag

SEQ ID NO: 34164 - DNA, 80 bp, synthetic construct
  misc_feature 1..80: note = Artificially Synthesized Probe
  source 1..80: mol_type = other DNA
tggcacaatcatagcttactatagcctcaaactcctaggcttaagtgattctcccacctcagcttcttgattagctgggg

SEQ ID NO: 34165 - DNA, 80 bp, synthetic construct
  misc_feature 1..80: note = Artificially Synthesized Probe
  source 1..80: mol_type = other DNA
tggcttgtctgtctttagtcgtgagggagaaaaaaccaggtcatcttaggagtgaatattcaacactcaggactatagct

SEQ ID NO: 34166 - DNA, 80 bp, synthetic construct
  misc_feature 1..80: note = Artificially Synthesized Probe
  source 1..80: mol_type = other DNA
attataaaataagtatgcttaaagtaattaaaaatgcaaaaggaggaataaggaaaacaaaaatacattagggccaggca

SEQ ID NO: 34167 - DNA, 80 bp, synthetic construct
  misc_feature 1..80: note = Artificially Synthesized Probe
  source 1..80: mol_type = other DNA
agatggatttatatacattaacttctaaaattatctaccgtatatgtgacttgggtctgctttccatctctgagcctcag

SEQ ID NO: 34168 - DNA, 80 bp, synthetic construct
  misc_feature 1..80: note = Artificially Synthesized Probe
  source 1..80: mol_type = other DNA
ggtaattgattcctatgttgcttaggttttcacaactcttggatattggctgaagaattttgaaggtggaggttctgatg

SEQ ID NO: 34169 - DNA, 80 bp, synthetic construct
  misc_feature 1..80: note = Artificially Synthesized Probe
  source 1..80: mol_type = other DNA
ggcttctgccctccagctaagatcgttccttagctgtccccaaatatgagaatgaatatacaatgataaaacaaaaataa

SEQ ID NO: 34170 - DNA, 80 bp, synthetic construct
  misc_feature 1..80: note = Artificially Synthesized Probe
  source 1..80: mol_type = other DNA
acagattgagaccctgtctcaaaaaaatagagagagagagagagaaacaaataaagagagagagagagagagaattaact

SEQ ID NO: 34171 - DNA, 80 bp, synthetic construct
  misc_feature 1..80: note = Artificially Synthesized Probe
  source 1..80: mol_type = other DNA
agcccagtttctttgcaatctgaaaggctgcactatctacccttaaggccaacaaatctattcagaaactttttatctga

SEQ ID NO: 34172 - DNA, 80 bp, synthetic construct
  misc_feature 1..80: note = Artificially Synthesized Probe
  source 1..80: mol_type = other DNA
gcaaagatatcatggaaagctattagaattctatggcaagaaggagttcaagtaattttatattcagttattttcttcag

SEQ ID NO: 34173 - DNA, 80 bp, synthetic construct
  misc_feature 1..80: note = Artificially Synthesized Probe
  source 1..80: mol_type = other DNA
acttgagtgtcttattcctagtctaggacatgttccactacctattccgattctttcctctttttaatatttatgttgtg

SEQ ID NO: 34174 - DNA, 80 bp, synthetic construct
  misc_feature 1..80: note = Artificially Synthesized Probe
  source 1..80: mol_type = other DNA
tttgccaaaaatcttgttgaaaatactgatccattctagcactcactgctcccaagtaaatcccaagtgagaaatcactt

SEQ ID NO: 34175 - DNA, 80 bp, synthetic construct
  misc_feature 1..80: note = Artificially Synthesized Probe
  source 1..80: mol_type = other DNA
caatgctaaatcgttctcctccatagacttgcaaatgaattctgtccagtggaaaagcaaccaaaaaacccaatctggct

SEQ ID NO: 34176 - DNA, 80 bp, synthetic construct
  misc_feature 1..80: note = Artificially Synthesized Probe
  source 1..80: mol_type = other DNA
gtgacccatgaaccacactttgaaaaacactgacttcaggttttctacttagagggactttattccagatgaatctaaac

SEQ ID NO: 34177 - DNA, 80 bp, synthetic construct
  misc_feature 1..80: note = Artificially Synthesized Probe
  source 1..80: mol_type = other DNA
gccaccatgcctagccctctcttagacataattttaaacgggtagatacctaacatcctgacaatgtgggaacctatggt

SEQ ID NO: 34178 - DNA, 80 bp, synthetic construct
  misc_feature 1..80: note = Artificially Synthesized Probe
  source 1..80: mol_type = other DNA
ttcagaaacaaagtatcacagagcctcaataggattactttttcaaccacccagggccacgtgttttttaagtcaaatat

SEQ ID NO: 34179 - DNA, 80 bp, synthetic construct
  misc_feature 1..80: note = Artificially Synthesized Probe
  source 1..80: mol_type = other DNA
taccacctggattgctgttagggtattgtacatgagtgtaaggaaagtatcctactactaagattttgacttcccaacct

SEQ ID NO: 34180 - DNA, 80 bp, synthetic construct
  misc_feature 1..80: note = Artificially Synthesized Probe
  source 1..80: mol_type = other DNA
accttccttttgaatgctgccctcataatttaaaattggccttctccttcacaggggacattcacgataaactctcaata

SEQ ID NO: 34181 - DNA, 80 bp, synthetic construct
  misc_feature 1..80: note = Artificially Synthesized Probe
  source 1..80: mol_type = other DNA
tttatggtccataaatagttctatcaatatatgccaccaattgctgtgttcatcattcaattttcatgtgccttttttct

SEQ ID NO: 34182 - DNA, 80 bp, synthetic construct
  misc_feature 1..80: note = Artificially Synthesized Probe
  source 1..80: mol_type = other DNA
gtagatgatctaatagagaacaaggaggagttagtaatgtttttcatggtctagcttcaaaagccacacacagtcacttc

SEQ ID NO: 34183 - DNA, 80 bp, synthetic construct
  misc_feature 1..80: note = Artificially Synthesized Probe
  source 1..80: mol_type = other DNA
gagcaggagtcgctattcttatatcagacaaaacaaactatagagcaatagcagttaagaaagacaaagagggagattat

SEQ ID NO: 34184 - DNA, 80 bp, synthetic construct
  misc_feature 1..80: note = Artificially Synthesized Probe
  source 1..80: mol_type = other DNA
tatagacaatccaaggccacacctccaattctccatgcaattggtgaaacaagaacaatctaaacacaaatgcagaagaa

SEQ ID NO: 34185 - DNA, 80 bp, synthetic construct
  misc_feature 1..80: note = Artificially Synthesized Probe
  source 1..80: mol_type = other DNA
ccatctatgacaaacccacagccaacgttatactgaatggggaaaagctgaaagtgttacccctgagaactgaaacaaga

SEQ ID NO: 34186 - DNA, 80 bp, synthetic construct
  misc_feature 1..80: note = Artificially Synthesized Probe
  source 1..80: mol_type = other DNA
cacctctcaccttttacaaaaatcaactcaagatagatcaaggacttaaattgaagacctggaaccataaaaattctaga

SEQ ID NO: 34187 - DNA, 80 bp, synthetic construct
  misc_feature 1..80: note = Artificially Synthesized Probe
  source 1..80: mol_type = other DNA
tactaggcatgtacccagaggaaaagaagtgattatacaaaaaagatacctgcacatgcatgttcatagcagcacaattt

SEQ ID NO: 34188 - DNA, 80 bp, synthetic construct
  misc_feature 1..80: note = Artificially Synthesized Probe
  source 1..80: mol_type = other DNA
ttcccatcttttagttaatctttcacatttctgtccatctttctctctggcctcagggctgtatgatggcttaagtgcca

SEQ ID NO: 34189 - DNA, 80 bp, synthetic construct
  misc_feature 1..80: note = Artificially Synthesized Probe
  source 1..80: mol_type = other DNA
aataacgcattagaaattaattgaaataatggcattcacagcaacctggttggaattggagatcattattctaagtgaag

SEQ ID NO: 34190 - DNA, 80 bp, synthetic construct
  misc_feature 1..80: note = Artificially Synthesized Probe
  source 1..80: mol_type = other DNA
ggaaaaactaggactactgtttgagctcgaaatgaccaaaaaagtcatacagcgaataactatacctgagcttaaatagg

SEQ ID NO: 34191 - DNA, 80 bp, synthetic construct
  misc_feature 1..80: note = Artificially Synthesized Probe
  source 1..80: mol_type = other DNA
aaacaaaaaccaagaatgtaccactgagttgatggaggtagggaaagttcagacagtagaatctaaatgaggaatcacaa

SEQ ID NO: 34192 - DNA, 80 bp, synthetic construct
  misc_feature 1..80: note = Artificially Synthesized Probe
  source 1..80: mol_type = other DNA
aaggtaatgatttgctcctttctgctctccaagcagcttctgtgttggtgcagagttgcagatctctgttggtggtaggt

SEQ ID NO: 34193 - DNA, 80 bp, synthetic construct
  misc_feature 1..80: note = Artificially Synthesized Probe
  source 1..80: mol_type = other DNA
agattggaaaagaaagataccctttgactaaaagacttttggtgggggttggggggctttacagtctttggataaatgtt

SEQ ID NO: 34194 - DNA, 80 bp, synthetic construct
  misc_feature 1..80: note = Artificially Synthesized Probe
  source 1..80: mol_type = other DNA
atttcaggacttaacatggatgccctgtcccttgggctttttattacactccagtgcaatttcagagtgaattatgcctt

SEQ ID NO: 34195 - DNA, 80 bp, synthetic construct
  misc_feature 1..80: note = Artificially Synthesized Probe
  source 1..80: mol_type = other DNA
cattttcagattgtgactaccactgaaataatgggatttactgttgacttgtgtccaagtttgttattgccggtgtatta

SEQ ID NO: 34196 - DNA, 80 bp, synthetic construct
  misc_feature 1..80: note = Artificially Synthesized Probe
  source 1..80: mol_type = other DNA
atagcctatctgcccccttcagggagaagtttatcagcagtctcatattcatgaagctacctataatgtcagcagtactc

SEQ ID NO: 34197 - DNA, 80 bp, synthetic construct
  misc_feature 1..80: note = Artificially Synthesized Probe
  source 1..80: mol_type = other DNA
gccagatgatgcacatggactctaagtctccattattgtaaccagaaaacattagaagagtacctggacgcaccctcact

SEQ ID NO: 34198 - DNA, 80 bp, synthetic construct
  misc_feature 1..80: note = Artificially Synthesized Probe
  source 1..80: mol_type = other DNA
aacaaacactgaatttgaagtcagaagacttgagtccaggtttctcactcatcattcttgttaccttgggaaaccaactt

SEQ ID NO: 34199 - DNA, 80 bp, synthetic construct
  misc_feature 1..80: note = Artificially Synthesized Probe
  source 1..80: mol_type = other DNA
tgaacttcaggatagaccatatagttgtagttacccagatctctgtcattggtctcacctacaccacttttcaaagcctc

SEQ ID NO: 34200 - DNA, 80 bp, synthetic construct
  misc_feature 1..80: note = Artificially Synthesized Probe
  source 1..80: mol_type = other DNA
gtatggcggttactcaaaaagctaaaaatggaattgccatatgatccaccaatccactactgggtatacagtcaaaagaa

SEQ ID NO: 34201 - DNA, 80 bp, synthetic construct
  misc_feature 1..80: note = Artificially Synthesized Probe
  source 1..80: mol_type = other DNA
tttaaacagaaagttagacctcaggaggaagattatatttttaaaagaatgatcagtgaaggctcatttggacaaagaca

SEQ ID NO: 34202 - DNA, 80 bp, synthetic construct
  misc_feature 1..80: note = Artificially Synthesized Probe
  source 1..80: mol_type = other DNA
tcaacatctgagacagaaacctaccatggatttttattgtcattatatagactttaaccactttggtttgcaccgagtct

SEQ ID NO: 34203 - DNA, 80 bp, synthetic construct
  misc_feature 1..80: note = Artificially Synthesized Probe
  source 1..80: mol_type = other DNA
agctctagtgtccaccatgattgtcaactataggaacccacaacagaaaatctcattcgcaatctctatctcacaggtag

SEQ ID NO: 34204 - DNA, 80 bp, synthetic construct
  misc_feature 1..80: note = Artificially Synthesized Probe
  source 1..80: mol_type = other DNA
aaatgactcccaatcagatcttctataaaacctttttattgacaaactctggaagcccagaccattggactctgtcttct

SEQ ID NO: 34205 - DNA, 80 bp, synthetic construct
  misc_feature 1..80: note = Artificially Synthesized Probe
  source 1..80: mol_type = other DNA
tactgcacagcagtaaaacacatttataactctccgggtggtcccatggaggatacttttatcccttaaggagatgggtg

SEQ ID NO: 34206 - DNA, 80 bp, synthetic construct
  misc_feature 1..80: note = Artificially Synthesized Probe
  source 1..80: mol_type = other DNA
cccttattcaaaggcgtctcgacatggataacctcgagaacattatgctaagtgaaataagccagatacagaaaggcaaa

SEQ ID NO: 34207 - DNA, 80 bp, synthetic construct
  misc_feature 1..80: note = Artificially Synthesized Probe
  source 1..80: mol_type = other DNA
aacttgaggcatggtagaatgagaattagatggggagttggaagactgaggttgtaaatgcccctctttagttaatgtga

SEQ ID NO: 34208 - DNA, 80 bp, synthetic construct
  misc_feature 1..80: note = Artificially Synthesized Probe
  source 1..80: mol_type = other DNA
gattctaaaacaggaataaaacaaacaaagtgactttcatccaggaagaaagcaaaagtacatccgcagttcttacggtc

SEQ ID NO: 34209 - DNA, 80 bp, synthetic construct
  misc_feature 1..80: note = Artificially Synthesized Probe
  source 1..80: mol_type = other DNA
aggcagtagttttgctttaaaatatatgacctgtgaagtccttttatcttactagctgtgtaaaccaaaataattacatg

SEQ ID NO: 34210 - DNA, 80 bp, synthetic construct
  misc_feature 1..80: note = Artificially Synthesized Probe
  source 1..80: mol_type = other DNA
cataccttggtaaaagctcacagtactaatctggacccacccctttgatctttgaaacctgaggtgcgaaaaaatatcaa

SEQ ID NO: 34211 - DNA, 80 bp, synthetic construct
  misc_feature 1..80: note = Artificially Synthesized Probe
  source 1..80: mol_type = other DNA
catctggggaaaatgccacaatacttgatctgacctggaaagattcccagtgaaggtaaattgatactcacataagccag

SEQ ID NO: 34212 - DNA, 80 bp, synthetic construct
  misc_feature 1..80: note = Artificially Synthesized Probe
  source 1..80: mol_type = other DNA
ttaaaagcataggctttggtgtcagacacgctaggatgcaaattctaactatgcaaccttgtaaaatgtgctgggcagct

SEQ ID NO: 34213 - DNA, 80 bp, synthetic construct
  misc_feature 1..80: note = Artificially Synthesized Probe
  source 1..80: mol_type = other DNA
acatagtatagtgggaaatccttgactgagttcttttattttcctttactctgtcaggtttcttctgggtccattcaaga

SEQ ID NO: 34214 - DNA, 80 bp, synthetic construct
  misc_feature 1..80: note = Artificially Synthesized Probe
  source 1..80: mol_type = other DNA
tctctcttttggttgatcaaactttccaagtctctcatggagaaagttggcagacattcaacatggtcatgccaatttct

SEQ ID NO: 34215 - DNA, 80 bp, synthetic construct
  misc_feature 1..80: note = Artificially Synthesized Probe
  source 1..80: mol_type = other DNA
atactctagatgacgcccattgtgttgggtagagtaagagatgaaaagttaatttaaaaatgggtcctgccttccaggga

SEQ ID NO: 34216 - DNA, 80 bp, synthetic construct
  misc_feature 1..80: note = Artificially Synthesized Probe
  source 1..80: mol_type = other DNA
actaatgttactaatcttaggagagtctcatttcaggtcattattcagtcactcaaagatacccgtgccagagctctttc

SEQ ID NO: 34217 - DNA, 80 bp, synthetic construct
  misc_feature 1..80: note = Artificially Synthesized Probe
  source 1..80: mol_type = other DNA
ctataaccactgaggggaacctaataaaatgggtatatctactccacacaagggaagattcatcccatggacacaatctt

SEQ ID NO: 34218 - DNA, 80 bp, synthetic construct
  misc_feature 1..80: note = Artificially Synthesized Probe
  source 1..80: mol_type = other DNA
gctacacatctagtgttattccctggaataagacccttttgtccaacccctgatttgtttgtctggttgattctcactga

SEQ ID NO: 34219 - DNA, 80 bp, synthetic construct
  misc_feature 1..80: note = Artificially Synthesized Probe
  source 1..80: mol_type = other DNA
agcctatgataccaatagtgagcatagtcctaaaacagccggagaccatgaaaatggacacagggattcagaagagaaaa

SEQ ID NO: 34220 - DNA, 80 bp, synthetic construct
  misc_feature 1..80: note = Artificially Synthesized Probe
  source 1..80: mol_type = other DNA
ctgagcaggagggaaaaatctgatgtggtaatactggagtctcccaaactccccagatgaaccacatggttttatttttc

SEQ ID NO: 34221 - DNA, 80 bp, synthetic construct
  misc_feature 1..80: note = Artificially Synthesized Probe
  source 1..80: mol_type = other DNA
tcatttacataaccttggcccccttgcttttcaatagatcttcctgctcagctgctattagaatctgcctttgtatttcc

SEQ ID NO: 34222 - DNA, 80 bp, synthetic construct
  misc_feature 1..80: note = Artificially Synthesized Probe
  source 1..80: mol_type = other DNA
cctcctgttcctcttcatctctggcatatttaaggagaagaggatttacaaggaaggcggcaaatgtgttttcctaaatg

SEQ ID NO: 34223 - DNA, 80 bp, synthetic construct
  misc_feature 1..80: note = Artificially Synthesized Probe
  source 1..80: mol_type = other DNA
atatttgctgagatgcccttcatctttacttgaaggctgagaaccaaagctatttgtctggttatagggcctacaaattg

SEQ ID NO: 34224 - DNA, 80 bp, synthetic construct
  misc_feature 1..80: note = Artificially Synthesized Probe
  source 1..80: mol_type = other DNA
gctccagcctgggcaacagagtgagactctgtcttgaaaaaaaaaaaaaagaaaaagaaagaaagaaacatttaccaaat

SEQ ID NO: 34225 - DNA, 80 bp, synthetic construct
  misc_feature 1..80: note = Artificially Synthesized Probe
  source 1..80: mol_type = other DNA
catctgtgatgacttttccattctgccaaaacctgataaagctctgctgaagtaaagaaattggtttcacagagccagca

SEQ ID NO: 34226 - DNA, 80 bp, synthetic construct
  misc_feature 1..80: note = Artificially Synthesized Probe
  source 1..80: mol_type = other DNA
agacctaataaaacctaaaacagtaaacctgaaagataacttaggaaatacattttggccataggaactggcaaaaattt

SEQ ID NO: 34227 - DNA, 80 bp, synthetic construct
  misc_feature 1..80: note = Artificially Synthesized Probe
  source 1..80: mol_type = other DNA
acactgggatctacctgagggtagagggttggagaaaggagaggattaggaaaaaaaaaaatagaacaactttcgggcac

SEQ ID NO: 34228 - DNA, 80 bp, synthetic construct
  misc_feature 1..80: note = Artificially Synthesized Probe
  source 1..80: mol_type = other DNA
agccaggtctatgagaacaaccattgcctactttctcttctaccctctctcctctgcatgttcttttcttttctccttct

SEQ ID NO: 34229 - DNA, 80 bp, synthetic construct
  misc_feature 1..80: note = Artificially Synthesized Probe
  source 1..80: mol_type = other DNA
aaacaatctcagccaaagcataagatgaaaatgtactaacgttctttcttttctcctttaatttgacttcctgtgggaac

SEQ ID NO: 34230 - DNA, 80 bp, synthetic construct
  misc_feature 1..80: note = Artificially Synthesized Probe
  source 1..80: mol_type = other DNA
acaagaaagggaacttttctgaaagagaagtcaactgagtttatattgtaaggaggcaagagagggactgtttccatgtg

SEQ ID NO: 34231 - DNA, 80 bp, synthetic construct
  misc_feature 1..80: note = Artificially Synthesized Probe
  source 1..80: mol_type = other DNA
ttaacacatgacagcaaaacctgaatgaataattctcagctcggagacactgagaaatatttaatttttacatggtggag

SEQ ID NO: 34232 - DNA, 80 bp, synthetic construct
  misc_feature 1..80: note = Artificially Synthesized Probe
  source 1..80: mol_type = other DNA
tgaagtatgaacagctgtgtagaaatatgattagacacaaagggtatgatctaatgctaacaggctgagtggggaaacta

SEQ ID NO: 34233 - DNA, 80 bp, synthetic construct
  misc_feature 1..80: note = Artificially Synthesized Probe
  source 1..80: mol_type = other DNA
ctccctgatatatggcccattaacacacaataatccgagttcagagtaattacttacatcattcaacagaatagatcact

SEQ ID NO: 34234 - DNA, 80 bp, synthetic construct
  misc_feature 1..80: note = Artificially Synthesized Probe
  source 1..80: mol_type = other DNA
taaccacatcttccaggagtgcagtcctggagtagtgcctactcctattcccatttgcaggtaaaatctcaaaaataagt

SEQ ID NO: 34235 - DNA, 80 bp, synthetic construct
  misc_feature 1..80: note = Artificially Synthesized Probe
  source 1..80: mol_type = other DNA
tttgagctaaatagaacaaagttcaaatactgttagttctgctttctcgatgtgtgtggtcttggctaaacttcagtttc

SEQ ID NO: 34236 - DNA, 80 bp, synthetic construct
  misc_feature 1..80: note = Artificially Synthesized Probe
  source 1..80: mol_type = other DNA
ccatggatagatgcttgagagaaataataattagattagaaaaattctctgtgtgtgtgacagccattgtggttttctga

SEQ ID NO: 34237 - DNA, 80 bp, synthetic construct
  misc_feature 1..80: note = Artificially Synthesized Probe
  source 1..80: mol_type = other DNA
cagagtttgacaaacgtatacaacaatgtaaccactaccccaatcaagacatagaatgttttcaccacccataaatttct

SEQ ID NO: 34238 - DNA, 80 bp, synthetic construct
  misc_feature 1..80: note = Artificially Synthesized Probe
  source 1..80: mol_type = other DNA
ccactcaagatgacagactcatcagccacaacaaaaaagtcagataccagctttagacacaaaggatcaaccaaataatt

SEQ ID NO: 34239 - DNA, 80 bp, synthetic construct
  misc_feature 1..80: note = Artificially Synthesized Probe
  source 1..80: mol_type = other DNA
atcaaactagttcagaagttgtcaaccattttatattctacttctacttgcttgtgatatttttaaaagcgtgctatcac

SEQ ID NO: 34240 - DNA, 80 bp, synthetic construct
  misc_feature 1..80: note = Artificially Synthesized Probe
  source 1..80: mol_type = other DNA
cttgttcattcatctcatctttactcatctctcattcagctggagtaggtgtttttcacatgtaaaaaaaaattctgtca

SEQ ID NO: 34241 - DNA, 80 bp, synthetic construct
  misc_feature 1..80: note = Artificially Synthesized Probe
  source 1..80: mol_type = other DNA
tattgatttacactttaactatgctgtctgcgtgcaaaaaaatgtgcttatacaacccaggggtggaaccaagctaagca

SEQ ID NO: 34242 - DNA, 80 bp, synthetic construct
  misc_feature 1..80: note = Artificially Synthesized Probe
  source 1..80: mol_type = other DNA
gagccctacccattagccccaagatcatagaaaaatcttccaagctggaaactggttgacaatgatcctgactttcagta

SEQ ID NO: 34243 - DNA, 80 bp, synthetic construct
  misc_feature 1..80: note = Artificially Synthesized Probe
  source 1..80: mol_type = other DNA
tttgtttgtaaggaactatgttgttatccctaacagctggtttaatttcaaagacccaattctttcacattcgaatgcaa

SEQ ID NO: 34244 - DNA, 80 bp, synthetic construct
  misc_feature 1..80: note = Artificially Synthesized Probe
  source 1..80: mol_type = other DNA
actaggtgccaggacttgattttaccagcttgcttaaaggaccaacacttaaaagtattaaaagcaagaatgctactggt

SEQ ID NO: 34245 - DNA, 80 bp, synthetic construct
  misc_feature 1..80: note = Artificially Synthesized Probe
  source 1..80: mol_type = other DNA
ggcaatgcctttgtgctatttacattatttgtaagcaaggattacactattcctctcttccgtgagacttcacatacttt

SEQ ID NO: 34246 - DNA, 80 bp, synthetic construct
  misc_feature 1..80: note = Artificially Synthesized Probe
  source 1..80: mol_type = other DNA
gtaactttaacagttatttaatctaaagtctcccacaatgaaagaatcttttctagagcatctctgacagaaacattcca

SEQ ID NO: 34247 - DNA, 80 bp, synthetic construct
  misc_feature 1..80: note = Artificially Synthesized Probe
  source 1..80: mol_type = other DNA
ttttcttttcttataaacaacatatacctgggtttactccaatcagatagccattttctattaataggaggatttagcct

SEQ ID NO: 34248 - DNA, 80 bp, synthetic construct
  misc_feature 1..80: note = Artificially Synthesized Probe
  source 1..80: mol_type = other DNA
catgttgggagcttgagataagctatgatgggaatctttatcccattgaaatcaggatggtagacagacctttctaatgc

SEQ ID NO: 34249 - DNA, 80 bp, synthetic construct
  misc_feature 1..80: note = Artificially Synthesized Probe
  source 1..80: mol_type = other DNA
caggactctacccttattcatttcaacacatgaatgtgggggaaagacacaaagactcagatcatcataaccttcaactg

SEQ ID NO: 34250 - DNA, 80 bp, synthetic construct
  misc_feature 1..80: note = Artificially Synthesized Probe
  source 1..80: mol_type = other DNA
ctaccaccaccacccacccatcttagatcgagaaaacttgggatgactcagtccaaagagaatcagactagctttcaagt

SEQ ID NO: 34251 - DNA, 80 bp, synthetic construct
  misc_feature 1..80: note = Artificially Synthesized Probe
  source 1..80: mol_type = other DNA
ccaactattgatcttttaattctatcatttgtgttacgtgtattctaacttattaacttctgcttgtgtatggctgttac

SEQ ID NO: 34252 - DNA, 80 bp, synthetic construct
  misc_feature 1..80: note = Artificially Synthesized Probe
  source 1..80: mol_type = other DNA
cagtataaatggcaccagcccaagatctacatttatctcagaaaaaaaaaacctatttcctctctctgagtctcatcttt

SEQ ID NO: 34253 - DNA, 80 bp, synthetic construct
  misc_feature 1..80: note = Artificially Synthesized Probe
  source 1..80: mol_type = other DNA
tctaagtacaaagatctaacctgcttctgagctcattcctgatcttgcctgtcttgcctgcagagaatcagcagcagtaa

SEQ ID NO: 34254 - DNA, 80 bp, synthetic construct
  misc_feature 1..80: note = Artificially Synthesized Probe
  source 1..80: mol_type = other DNA
agcctatatggagataatatattttactgcacttaaaataggtaatttattggagatgtaaatgtgtcttcacttctacg

SEQ ID NO: 34255 - DNA, 80 bp, synthetic construct
  misc_feature 1..80: note = Artificially Synthesized Probe
  source 1..80: mol_type = other DNA
gttaggatggcaatgataatcctattgggggtgtatacttcagaattcctataatttgtaaataatgcatctttcaaact

SEQ ID NO: 34256 - DNA, 80 bp, synthetic construct
  misc_feature 1..80: note = Artificially Synthesized Probe
  source 1..80: mol_type = other DNA
ctttcttccctaactagaatgtcatgagcagcgatttgtatcttttctgttcattgttgagttccagtttattcccagat

SEQ ID NO: 34257 - DNA, 80 bp, synthetic construct
  misc_feature 1..80: note = Artificially Synthesized Probe
  source 1..80: mol_type = other DNA
gatatcttgggaaagaacattccaaaaagaatgagaagcatttgcaaaggtactgtggcaagagcagatgtggcatgctt

SEQ ID NO: 34258 - DNA, 80 bp, synthetic construct
  misc_feature 1..80: note = Artificially Synthesized Probe
  source 1..80: mol_type = other DNA
acatgatccacatgaagttaaggatgcatgtggatatggaggcctagagttctggtaaggatgatctggttagacatgaa

SEQ ID NO: 34259 - DNA, 80 bp, synthetic construct
  misc_feature 1..80: note = Artificially Synthesized Probe
  source 1..80: mol_type = other DNA
taaggaaggaagacaaaacgtgaagaaagtagggatcattaaaagggggtaggatcaatagattaaaagtttcaggggga

SEQ ID NO: 34260 - DNA, 80 bp, synthetic construct
  misc_feature 1..80: note = Artificially Synthesized Probe
  source 1..80: mol_type = other DNA
tacttttggtctttgatgatggtgatgtacagatgggttttcggtgtagatgtcctttctggttgttagttttccttcta

SEQ ID NO: 34261 - DNA, 80 bp, synthetic construct
  misc_feature 1..80: note = Artificially Synthesized Probe
  source 1..80: mol_type = other DNA
aagagctcctgaaggaagcactaaacatggaaaggaacaaccggtaccagccgctgcaaaatcatgccaaaatgtaaaga

SEQ ID NO: 34262 - DNA, 80 bp, synthetic construct; identical to SEQ ID NO: 30694
  misc_feature 1..80: note = Artificially Synthesized Probe
  source 1..80: mol_type = other DNA

SEQ ID NO: 34263 - DNA, 80 bp, synthetic construct
  misc_feature 1..80: note = Artificially Synthesized Probe
  source 1..80: mol_type = other DNA
tgagtgaacttccattcacaattgcttcaaagagaataaaatacctaggaatccaacttacaagggatgtgaaggacctc

SEQ ID NO: 34264 - DNA, 80 bp, synthetic construct
  misc_feature 1..80: note = Artificially Synthesized Probe
  source 1..80: mol_type = other DNA
tcatgtccaaaacaccaaaagcaatggcaacaaaagccaaaattgacaaatgggatctaattaaactcaagagcttctgc

SEQ ID NO: 34265 - DNA, 80 bp, synthetic construct
  misc_feature 1..80: note = Artificially Synthesized Probe
  source 1..80: mol_type = other DNA
aataattcacaaataaaaaacaaacaaacaaaaaaaaagtttcagtggggtcaaaggatttttagagttagggcagtcga

SEQ ID NO: 34266 - DNA, 80 bp, synthetic construct
  misc_feature 1..80: note = Artificially Synthesized Probe
  source 1..80: mol_type = other DNA
ccaatttaaccacagtagcatgcttatacatcactacttggagttttctctcatttttattgtccaacaagaactgaaac

SEQ ID NO: 34267 - DNA, 80 bp, synthetic construct
  misc_feature 1..80: note = Artificially Synthesized Probe
  source 1..80: mol_type = other DNA
aaaggatcccacagaagaaacttctaagtattatccagttggtatttctttattttttccctttagtttacagaaatgtg

SEQ ID NO: 34268 - DNA, 80 bp, synthetic construct
  misc_feature 1..80: note = Artificially Synthesized Probe
  source 1..80: mol_type = other DNA
catggtcgtttgcttttggagtgctctttccattgtttcattgtagaaactgagactaacagggatggtcttttggttcc

SEQ ID NO: 34269 - DNA, 80 bp, synthetic construct
  misc_feature 1..80: note = Artificially Synthesized Probe
  source 1..80: mol_type = other DNA
ttggaaacacaggctaggaaatgtgtcagataatggagacaactattcttcttcatgaaggtttgtaatacacactgcac

SEQ ID NO: 34270 - DNA, 80 bp, synthetic construct
  misc_feature 1..80: note = Artificially Synthesized Probe
  source 1..80: mol_type = other DNA
ctgtgcattctgacattttattccttttagaaacaaattcagttggctgtagaattaatatcgttctgcttaacaacttt

SEQ ID NO: 34271 - DNA, 80 bp, synthetic construct
  misc_feature 1..80: note = Artificially Synthesized Probe
  source 1..80: mol_type = other DNA
ctggttcataaatagcgaggtcagcatttaggactgagacctaaagaagtgcttcagataaaaatcatgagtctaagtcc

SEQ ID NO: 34272 - DNA, 80 bp, synthetic construct
  misc_feature 1..80: note = Artificially Synthesized Probe
  source 1..80: mol_type = other DNA
tgttaccaagtgccaggacagatatcagtaaggcaccagcagtcatttttagtgatcaaataccaaacatggtaagatac

SEQ ID NO: 34273 - DNA, 80 bp, synthetic construct
  misc_feature 1..80: note = Artificially Synthesized Probe
  source 1..80: mol_type = other DNA
tttggcaattgtctacagcccatttttctgctgtgttcattttctaatcgaattatgggatttatcttgtaaaaagccta

SEQ ID NO: 34274 - DNA, 80 bp, synthetic construct
  misc_feature 1..80: note = Artificially Synthesized Probe
  source 1..80: mol_type = other DNA
attgtaggttttatcaatcagaaaagaatgttgacttttccgtccattcagatgattgtggcttttttccctaatggatt

SEQ ID NO: 34275 - DNA, 80 bp, synthetic construct
  misc_feature 1..80: note = Artificially Synthesized Probe
  source 1..80: mol_type = other DNA
gttacctactgattctggattgtgctacataaaattagagcttccaaatttccctccatcacttctccctgctctctact

SEQ ID NO: 34276 - DNA, 80 bp, synthetic construct
  misc_feature 1..80: note = Artificially Synthesized Probe
  source 1..80: mol_type = other DNA
ccggagaggagggaagagaaggaaggggttagagtggccccgtgcagatagatgttgagatgcagcccctggagattccg

SEQ ID NO: 34277 - DNA, 80 bp, synthetic construct
  misc_feature 1..80: note = Artificially Synthesized Probe
  source 1..80: mol_type = other DNA
ttctgacctctcacctgcaaaatgaatgaattgacctccatcagcgtttttcaaccttgaaacccaactcttctcatcac

SEQ ID NO: 34278 - DNA, 80 bp, synthetic construct
  misc_feature 1..80: note = Artificially Synthesized Probe
  source 1..80: mol_type = other DNA
ataataataattaaaaaaaagaatggaattcagatcaggtcatcagtacggtgacagaggggccacaagatattatgggg

SEQ ID NO: 34279 - DNA, 80 bp, synthetic construct
  misc_feature 1..80: note = Artificially Synthesized Probe
  source 1..80: mol_type = other DNA
tctgttgcttttcttctgagattagaggtattagattctctcccaagagctactttggaggttgccccggataaacgtcg

SEQ ID NO: 34280 - DNA, 80 bp, synthetic construct
  misc_feature 1..80: note = Artificially Synthesized Probe
  source 1..80: mol_type = other DNA
ttggctcatacatagccgtcttcccctgggtcttcacatcgtcctccctctgtgcctgtctctgtgtccaaatttcctct

SEQ ID NO: 34281 - DNA, 80 bp, synthetic construct
  misc_feature 1..80: note = Artificially Synthesized Probe
  source 1..80: mol_type = other DNA
gagaataggtccattttgtctcttctcactcctttaaataaacactttaagggtgagcaggttggttggccacatcaatt

SEQ ID NO: 34282 - DNA, 80 bp, synthetic construct
  misc_feature 1..80: note = Artificially Synthesized Probe
  source 1..80: mol_type = other DNA
tcacaagtgattgaacaaaagaagtttctggaaggtcttaaaatccttcagcaaaaaggaagtattggctgggagccagg

SEQ ID NO: 34283 - DNA, 80 bp, synthetic construct
  misc_feature 1..80: note = Artificially Synthesized Probe
  source 1..80: mol_type = other DNA
gtcctacctcattctccctagtagcttgggactacaggctgtcaccaccacgccaggctaatttttgtattgtttataga

SEQ ID NO: 34284 - DNA, 80 bp, synthetic construct
  misc_feature 1..80: note = Artificially Synthesized Probe
  source 1..80: mol_type = other DNA
aggagagaggagagaaatcagagaggctaggtggattctcctggttaataaccctttgggttaataaccctttgggggcc

SEQ ID NO: 34285 - DNA, 80 bp, synthetic construct
  misc_feature 1..80: note = Artificially Synthesized Probe
  source 1..80: mol_type = other DNA
agtgtccctgaggacagagtcagctccaggggagaaacaatgatatagaagaacaccaagcttttgaggggcaagcagag

SEQ ID NO: 34286 - DNA, 80 bp, synthetic construct
  misc_feature 1..80: note = Artificially Synthesized Probe
  source 1..80: mol_type = other DNA
cctggctgccctccctatcttcgttacaagcccacaggtcacccgagaaggacctgcagcccagccaccacccagtggct

SEQ ID NO: 34287 - DNA, 80 bp, synthetic construct
  misc_feature 1..80: note = Artificially Synthesized Probe
  source 1..80: mol_type = other DNA
agagcaagacttcgtctcaaaaaaaaaaaaagtctccagacattgtcagatgtctgtcccagcagggacagactcactgc

SEQ ID NO: 34288 - DNA, 80 bp, synthetic construct
  misc_feature 1..80: note = Artificially Synthesized Probe
  source 1..80: mol_type = other DNA
tagccaggtgtggtggtgcatgcctgtaatctgagctacttgggaggcggagacaggagaatcacttgtacctgggaggc

SEQ ID NO: 34289 - DNA, 80 bp, synthetic construct
  misc_feature 1..80: note = Artificially Synthesized Probe
  source 1..80: mol_type = other DNA
ccccactttctgaaatgccccaaaagagcttagttcctccctcctgtcacctgcagtgggccatctcttggagttttctt

SEQ ID NO: 34290 - DNA, 80 bp, synthetic construct
  misc_feature 1..80: note = Artificially Synthesized Probe
  source 1..80: mol_type = other DNA
agtaacattcagtgcattcacagtgttgtgccaacaccagctctatctgattccagaacactttcattccccaaaaggaa

SEQ ID NO: 34291 - DNA, 80 bp, synthetic construct
  misc_feature 1..80: note = Artificially Synthesized Probe
  source 1..80: mol_type = other DNA
ttatggccaaataatattctgttggatgaatgggccacgttgtgtttttccatttatccgttgacaggcactttgttacc

SEQ ID NO: 34292 - DNA, 80 bp, synthetic construct
  misc_feature 1..80: note = Artificially Synthesized Probe
  source 1..80: mol_type = other DNA
gacaggcccatggtcccacctgtgggagcaggagaggaccaggccgatgagccttgcagggggcacgccagcttgtggtc

SEQ ID NO: 34293 - DNA, 80 bp, synthetic construct
  misc_feature 1..80: note = Artificially Synthesized Probe
  source 1..80: mol_type = other DNA
atggcaaagccctgtctctattaaaagtacaaaaattagccagacgtggtgatgcacgcctatatcccagctacatggga

SEQ ID NO: 34294 - DNA, 80 bp, synthetic construct
  misc_feature 1..80: note = Artificially Synthesized Probe
  source 1..80: mol_type = other DNA
tccttacctggattagaagtgcgtaaacctctgtccatcttccttggccctgtggagctgcctgggaacattccatgatt

SEQ ID NO: 34295 - DNA, 80 bp, synthetic construct
  misc_feature 1..80: note = Artificially Synthesized Probe
  source 1..80: mol_type = other DNA
tggcctttttaagcagttttatccaggtgaaattgttgcataataggctgcacttactcagtgtgccaacagccatgagc

SEQ ID NO: 34296 - DNA, 80 bp, synthetic construct
  misc_feature 1..80: note = Artificially Synthesized Probe
  source 1..80: mol_type = other DNA
ctgtgtctcaaaaaagaaaaaaaaattaagtgtgctagtcagtgcattcaccgtgttgtgcaacgaccagctctatctga

SEQ ID NO: 34297 - DNA, 80 bp, synthetic construct
  misc_feature 1..80: note = Artificially Synthesized Probe
  source 1..80: mol_type = other DNA
tctgaattggtttcctatcactgtgagcatcaggaaccagccatcctgaactcgttggttccttctcattgttgaaccat

SEQ ID NO: 34298 - DNA, 80 bp, synthetic construct
  misc_feature 1..80: note = Artificially Synthesized Probe
  source 1..80: mol_type = other DNA
tgcttcccaaaatgctgggattacaggcgtgagccaccacgcccggcctgttgttgctgtttttaagaaatagagtctct

SEQ ID NO: 34299 - DNA, 80 bp, synthetic construct
  misc_feature 1..80: note = Artificially Synthesized Probe
  source 1..80: mol_type = other DNA
agtctgtgcctgaactatttcactctgctcttgtagcaaaagcagccacagacaataaggaaaggagtgtgggcaaggct

SEQ ID NO: 34300 - DNA, 80 bp, synthetic construct
  misc_feature 1..80: note = Artificially Synthesized Probe
  source 1..80: mol_type = other DNA
gctggcaccagcatttctttttcttgcaaccttcagaagcaaatgcactttttaggaataaacttggccgggcacagtca

SEQ ID NO: 34301 - DNA, 80 bp, synthetic construct
  misc_feature 1..80: note = Artificially Synthesized Probe
  source 1..80: mol_type = other DNA
aggagggtgagggtgaacaaatttcccgttgggtacgatgttcactattcaggcaatgtgtatcccaaaagcccagattg

SEQ ID NO: 34302 - DNA, 80 bp, synthetic construct
  misc_feature 1..80: note = Artificially Synthesized Probe
  source 1..80: mol_type = other DNA
ggtagaggatcctttccagggagtcctatcgcattgagaatctcctgtggtcttggacagctagctcctcagtctttcct

SEQ ID NO: 34303 - DNA, 80 bp, synthetic construct
  misc_feature 1..80: note = Artificially Synthesized Probe
  source 1..80: mol_type = other DNA
gtcgggtggggaactccagcatcgggtcaggtgctatctgcccaggagtgggactccacatgccccttaaacttcctccc

SEQ ID NO: 34304 - DNA, 80 bp, synthetic construct
  misc_feature 1..80: note = Artificially Synthesized Probe
  source 1..80: mol_type = other DNA
tcctggtggccatcaacccctttaagttcctgcccatctacaaccccaagtacgtgaagatgtatgagaaccagcagctg

SEQ ID NO: 34305 - DNA, 80 bp, synthetic construct
  misc_feature 1..80: note = Artificially Synthesized Probe
  source 1..80: mol_type = other DNA
aaagtggaggttttctgattgttgttattattcaggtactgcgaagccaactggtcaggatgcaactgcctcttggaaag

SEQ ID NO: 34306 - DNA, 80 bp, synthetic construct
  misc_feature 1..80: note = Artificially Synthesized Probe
  source 1..80: mol_type = other DNA
gaacatggccattcattctcaaggtgcctgaaagaaaaggctggtgtattcaaaccagtttgaggagtgcttcacaacgg

SEQ ID NO: 34307 - DNA, 80 bp, synthetic construct
  misc_feature 1..80: note = Artificially Synthesized Probe
  source 1..80: mol_type = other DNA
tgacctttggcagccacagctcttctcactgcctccacagttctgtcttttccaggctgtctgtagttggagtcccagtg

SEQ ID NO: 34308 - DNA, 80 bp, synthetic construct
  misc_feature 1..80: note = Artificially Synthesized Probe
  source 1..80: mol_type = other DNA
tcaagcgatcctcccacccaagtagctggaattccaggtgtgcaccaccatgcccggctaatttttaaattttctgtaga

SEQ ID NO: 34309 - DNA, 80 bp, synthetic construct
  misc_feature 1..80: note = Artificially Synthesized Probe
  source 1..80: mol_type = other DNA
caaaattaaaaataaaaataaaaaattagccaggcatggcagtgcatgcctgtggtctcagctctcaggagcttgaagtg

SEQ ID NO: 34310 - DNA, 80 bp, synthetic construct
  misc_feature 1..80: note = Artificially Synthesized Probe
  source 1..80: mol_type = other DNA
ctctgcctctgtcgtcaggggcgttcttcctgtgtgtccatgtcttcacgtggctttcttataacaaggacaccactcat

SEQ ID NO: 34311 - DNA, 80 bp, synthetic construct
  misc_feature 1..80: note = Artificially Synthesized Probe
  source 1..80: mol_type = other DNA
cttcccataagacccaatcactgttcattgcagccactgagcttttagaaattatctgtgagttctttctgttctgtgct

SEQ ID NO: 34312 - DNA, 80 bp, synthetic construct
  misc_feature 1..80: note = Artificially Synthesized Probe
  source 1..80: mol_type = other DNA
tcaaaatacttaccttcatgacatctgccaagaccccgtttccagataaagccacagtcacaggttctgggggtaaggac

SEQ ID NO: 34313 - DNA, 80 bp, synthetic construct
  misc_feature 1..80: note = Artificially Synthesized Probe
  source 1..80: mol_type = other DNA
caagctcacccgaagttgtgccgatgcccaggacattccagtgagggactgaggaagggtcctgaacgtgccactgcccc

SEQ ID NO: 34314 - DNA, 80 bp, synthetic construct
  misc_feature 1..80: note = Artificially Synthesized Probe
  source 1..80: mol_type = other DNA
tccccctgaaaggagaccccgtccccatcagcattcactccccacttccctctcccaggccctggcagccactaacctgc

SEQ ID NO: 34315 - DNA, 80 bp, synthetic construct
  misc_feature 1..80: note = Artificially Synthesized Probe
  source 1..80: mol_type = other DNA
gaattgtgcaccagccacacaaagaatcccgcagccccagggctcatcaggcctcagaggccatcctgtcgcatgaccca

SEQ ID NO: 34316 - DNA, 80 bp, synthetic construct
  misc_feature 1..80: note = Artificially Synthesized Probe
  source 1..80: mol_type = other DNA
cacaggaagcgaagatagaatcaatctctggctgcctctcctgtgtggcctccccgggatgtttgcacaaaggtaggggg

SEQ ID NO: 34317 - DNA, 80 bp, synthetic construct
  misc_feature 1..80: note = Artificially Synthesized Probe
  source 1..80: mol_type = other DNA
cctgattttaggacttccgcctgcactgagaagtaacatgctccctgctggggttttttgcaaaggaatgtaatcaaaga

SEQ ID NO: 34318 - DNA, 80 bp, synthetic construct
  misc_feature 1..80: note = Artificially Synthesized Probe
  source 1..80: mol_type = other DNA
gaattttttttcctttgtctaccccagtacatccaccgcttcgtagaatgttccagaaccccataaaggtgaccatttca

SEQ ID NO: 34319 - DNA, 80 bp, synthetic construct
  misc_feature 1..80: note = Artificially Synthesized Probe
  source 1..80: mol_type = other DNA
ccagaggtgcatgcccaaggccgcaaaccccctaggaggaagctggcatctggggtgtcagaagtgtgactaggagctca

SEQ ID NO: 34320 - DNA, 80 bp, synthetic construct
  misc_feature 1..80: note = Artificially Synthesized Probe
  source 1..80: mol_type = other DNA
accataaaaaggtctccttggaatttggagaaagttgattaaaagctgaagtgtaaggtctgggacacccctgccacagc

SEQ ID NO: 34321 - DNA, 80 bp, synthetic construct
  misc_feature 1..80: note = Artificially Synthesized Probe
  source 1..80: mol_type = other DNA
caaatgtcagtagtgctgaggcagagagacctgctttagtttagaggcctttagagagtacaattgaaaatctggtctgg

SEQ ID NO: 34322 - DNA, 80 bp, synthetic construct
  misc_feature 1..80: note = Artificially Synthesized Probe
  source 1..80: mol_type = other DNA
gggcctgtttttttaatttaaattttcttttaaatgaagccaccacctgtgtggagggagctgtttgtggaaggtgtaat

SEQ ID NO: 34323 - DNA, 80 bp, synthetic construct
  misc_feature 1..80: note = Artificially Synthesized Probe
  source 1..80: mol_type = other DNA
ggcaaaaccccgttgctacgaaaaatacaaaaattagccaggcgtgctggcgcatgcctgtagtcccagctactcaggag

SEQ ID NO: 34324 - DNA, 80 bp, synthetic construct
  misc_feature 1..80: note = Artificially Synthesized Probe
  source 1..80: mol_type = other DNA
ctaattggtaacagtcctcatggtgagtattgaataaactggctggagtgggtttgtggcggcagctcttggagtatatg

SEQ ID NO: 34325 - DNA, 80 bp, synthetic construct
  misc_feature 1..80: note = Artificially Synthesized Probe
  source 1..80: mol_type = other DNA
cagaccctccttccagccctccctaaggagattacctttctttacatgtgcaaatgttcacttttgccgcattaaaagta

SEQ ID NO: 34326 - DNA, 80 bp, synthetic construct
  misc_feature 1..80: note = Artificially Synthesized Probe
  source 1..80: mol_type = other DNA
tcaaccatggtggacagagccttaggagctaatgaggccatgatgctggtaactttaaatgacatcattcagggccagtt

SEQ ID NO: 34327 - DNA, 80 bp, synthetic construct
  misc_feature 1..80: note = Artificially Synthesized Probe
  source 1..80: mol_type = other DNA
gcctcactttgcaataaaggtataacacttgtgaatatctatgcaccaaacaacatagccactgcctttatacagtagaa

SEQ ID NO: 34328 - DNA, 80 bp, synthetic construct
  misc_feature 1..80: note = Artificially Synthesized Probe
  source 1..80: mol_type = other DNA
cctggactcaaaaatcatttctatatcagagtcaggtgtggtggtacacacttgtaatcccagctgttgaggaggctgag

SEQ ID NO: 34329 - DNA, 80 bp, synthetic construct
  misc_feature 1..80: note = Artificially Synthesized Probe
  source 1..80: mol_type = other DNA
aacaggaccttcccccatcaaagcctggtttgttctgtattctttctgtgacctagtacgtggtttcgtgataacctaaa

SEQ ID NO: 34330 - DNA, 80 bp, synthetic construct
  misc_feature 1..80: note = Artificially Synthesized Probe
  source 1..80: mol_type = other DNA
tcattccctcggccccgccttcaccacagctctgagctctgttgaaagcatcagctaaacttctcatttcctcgcctcca

SEQ ID NO: 34331 - DNA, 80 bp, synthetic construct
  misc_feature 1..80: note = Artificially Synthesized Probe
  source 1..80: mol_type = other DNA
ccaaagtgctggaattacaggcatgatccaccatgcccggccaattttttgactttttttctcccctaagcatttttttt

SEQ ID NO: 34332 - DNA, 80 bp, synthetic construct
  misc_feature 1..80: note = Artificially Synthesized Probe
  source 1..80: mol_type = other DNA
cgcttaatcctccatctgctaaggcagagatttttccaaaaccttaccttacaggagagaaatctgaaatccaagagccg

SEQ ID NO: 34333 - DNA, 80 bp, synthetic construct
  misc_feature 1..80: note = Artificially Synthesized Probe
  source 1..80: mol_type = other DNA
aaaccaaaaagcaaggggacaatctccctctttcagcccctttctttaggctctgtggtggctcgatatttgcagatgtt

SEQ ID NO: 34334 - DNA, 80 bp, synthetic construct
  misc_feature 1..80: note = Artificially Synthesized Probe
  source 1..80: mol_type = other DNA
agtagctgggactacaagtgtgtaccaccagacctggtgaacttttcagttatttttctttaagagacagagtcttgcta

SEQ ID NO: 34335 - DNA, 80 bp, synthetic construct
  misc_feature 1..80: note = Artificially Synthesized Probe
  source 1..80: mol_type = other DNA
ctttataaaatccagtttcagctgagaccctgctaagtcagtttaacaggaaccctctgcccttgagagctgatcaccct

SEQ ID NO: 34336 - DNA, 80 bp, synthetic construct
  misc_feature 1..80: note = Artificially Synthesized Probe
  source 1..80: mol_type = other DNA
gaaaccgtgactggggggaagctgaattatgaccaatagctttatggatttctttcttctgtgcttttcacgaggttttt

SEQ ID NO: 34337 - DNA, 80 bp, synthetic construct
  misc_feature 1..80: note = Artificially Synthesized Probe
  source 1..80: mol_type = other DNA
agtgatccatccaccttggcttccaaagtggtggaattacaggtgtgaacgacagtgccaggccttattttatttcttat

SEQ ID NO: 34338 - DNA, 80 bp, synthetic construct
  misc_feature 1..80: note = Artificially Synthesized Probe
  source 1..80: mol_type = other DNA
gagtatctaggacaacaggtgtgtcccaccacacctagctttttattttttgtaaagatggggtgtcactatgttgccca

SEQ ID NO: 34339 - DNA, 80 bp, synthetic construct
  misc_feature 1..80: note = Artificially Synthesized Probe
  source 1..80: mol_type = other DNA
ccaacatgcccagctgatttttctgttctagtagagatgagattttaccacgttaaccaggttggtgtcgaactgacctc

SEQ ID NO: 34340 - DNA, 80 bp, synthetic construct
  misc_feature 1..80: note = Artificially Synthesized Probe
  source 1..80: mol_type = other DNA
taaaagaaaaaaaaatgtgtttctgttaaaggagaggcgttttttggttttgagtgagtccagcgctgtgggttttatag

SEQ ID NO: 34341 - DNA, 80 bp, synthetic construct
  misc_feature 1..80: note = Artificially Synthesized Probe
  source 1..80: mol_type = other DNA
catagttaagcagggaagctttctgagccccttcctgggacgttattttagggtttccctgacagatctctttgaattga

SEQ ID NO: 34342 - DNA, 80 bp, synthetic construct
  misc_feature 1..80: note = Artificially Synthesized Probe
  source 1..80: mol_type = other DNA
tctcaaaaaaaaaaaaaaaaaagccaggtgcggtgatacatacctgtggtctcagctccttaagagacagaaatgggagg

SEQ ID NO: 34343 - DNA, 80 bp, synthetic construct
  misc_feature 1..80: note = Artificially Synthesized Probe
  source 1..80: mol_type = other DNA
catgtggtgtttggttttctgatcttgtgatagtttggtgagaatgatggtttccagcttcatccatgtccctgcaaagg

SEQ ID NO: 34344 - DNA, 80 bp, synthetic construct
  misc_feature 1..80: note = Artificially Synthesized Probe
  source 1..80: mol_type = other DNA
atatactactaataggtgtgttaatatgtaaccactaataggctatacctatacaaatagatgtagctggccaggtgcgg

SEQ ID NO: 34345 - DNA, 80 bp, synthetic construct
  misc_feature 1..80: note = Artificially Synthesized Probe
  source 1..80: mol_type = other DNA
aaaacattggatgaatggggctgggcacattggctcaggactgtgatctcagcactttgggaggccaaggcaggcggatc

SEQ ID NO: 34346 - DNA, 80 bp, synthetic construct
  misc_feature 1..80: note = Artificially Synthesized Probe
  source 1..80: mol_type = other DNA
gggattacaggcatgtaccaccatgcccggctaattttgtatttttagtagagacagggtttctccatattggtcaggct

SEQ ID NO: 34347 - DNA, 80 bp, synthetic construct
  misc_feature 1..80: note = Artificially Synthesized Probe
  source 1..80: mol_type = other DNA
cacacttccctgtatgtgtggactcctcagtacagagcaaaaagattgtcctgtgaaaaaggaatgaaacattgattaca

SEQ ID NO: 34348 - DNA, 80 bp, synthetic construct
  misc_feature 1..80: note = Artificially Synthesized Probe
  source 1..80: mol_type = other DNA
atttgcaccttcgcagactagatggtagtctctgttgcaacacaattgaatgagcctggcatgtaccgataaaacttcat

SEQ ID NO: 34349 - DNA, 80 bp, synthetic construct
  misc_feature 1..80: note = Artificially Synthesized Probe
  source 1..80: mol_type = other DNA
gttggaatgggccttggctatacacctctgtatttttcaggtcttatctgggcttctaagtgacttatagcctactgtct

SEQ ID NO: 34350 - DNA, 80 bp, synthetic construct
  misc_feature 1..80: note = Artificially Synthesized Probe
  source 1..80: mol_type = other DNA
gataaaatgatgtttttgcaaattatgtcacaatctggaaaatattaattaaataaaccgagtctgggcatgatggttca

SEQ ID NO: 34351 - DNA, 80 bp, synthetic construct
  misc_feature 1..80: note = Artificially Synthesized Probe
  source 1..80: mol_type = other DNA
aagaaaaagaaattccaccctcctgatctgaaacctgcttttgatttccttgcaggcttttggaaatgccaagacagccc

SEQ ID NO: 34352 - DNA, 80 bp, synthetic construct
  misc_feature 1..80: note = Artificially Synthesized Probe
  source 1..80: mol_type = other DNA
catgagtggatctacccatacactcatgaatccatccatcacaggtggatgggtagattcatgggtaggtgaatgaataa

SEQ ID NO: 34353 - DNA, 80 bp, synthetic construct
  misc_feature 1..80: note = Artificially Synthesized Probe
  source 1..80: mol_type = other DNA
tgtcttccaggccctgacctctccatgaagaccccacctttttcacttcatattttgggggttaaaatacacaacataag

SEQ ID NO: 34354 - DNA, 80 bp, synthetic construct
  misc_feature 1..80: note = Artificially Synthesized Probe
  source 1..80: mol_type = other DNA
gtccatcttttgcacgatcctatctgccacattgcagagattttgacccacaggaagcattcagggtaccttgttgggaa

SEQ ID NO: 34355 - DNA, 80 bp, synthetic construct
  misc_feature 1..80: note = Artificially Synthesized Probe
  source 1..80: mol_type = other DNA
actcctggagtcaagcgatcctcctgcctcagcctcctgagtagctgggactacaggtgcacacccccacacctggctaa

SEQ ID NO: 34356 - DNA, 80 bp, synthetic construct
  misc_feature 1..80: note = Artificially Synthesized Probe
  source 1..80: mol_type = other DNA
tttttctcctatttgaaagaagagaggacccaggctgggccatcagaagccacctgtgcatcgtgtgtgtccctgtgtga

SEQ ID NO: 34357 - DNA, 80 bp, synthetic construct
  misc_feature 1..80: note = Artificially Synthesized Probe
  source 1..80: mol_type = other DNA
cctgccccagtatggaagaggagtccctgagaaatacatcaaatgatgcctagaacatatttttcctcgaaaaaacattc

SEQ ID NO: 34358 - DNA, 80 bp, synthetic construct
  misc_feature 1..80: note = Artificially Synthesized Probe
  source 1..80: mol_type = other DNA
tcccatctctacaaaaactacaaaaactagcctgtagtcccagccactcgggaggttgaggtgggaagatcacttgagcc

SEQ ID NO: 34359 - DNA, 80 bp, synthetic construct
  misc_feature 1..80: note = Artificially Synthesized Probe
  source 1..80: mol_type = other DNA
tccccagtatgtgctcagatgtctgcacaaaatatacttagattggaaacatttctcaagcatggtagcacgtgcctgta

SEQ ID NO: 34360 - DNA, 80 bp, synthetic construct
  misc_feature 1..80: note = Artificially Synthesized Probe
  source 1..80: mol_type = other DNA
gttcgcagagtagctattacttggcctccaaaaacaactattttcctcccaattttgacctgtaggaactaccatgtgtt

SEQ ID NO: 34361 - DNA, 80 bp, synthetic construct
  misc_feature 1..80: note = Artificially Synthesized Probe
  source 1..80: mol_type = other DNA
aaggggctcaagacattggtcattaggcgatgccaattaaaggtaacgtgaacatacttaacactgctgaattgtaccct

SEQ ID NO: 34362 - DNA, 80 bp, synthetic construct
  misc_feature 1..80: note = Artificially Synthesized Probe
  source 1..80: mol_type = other DNA
ccaaggcaggaagatcgcttgagaccaggagttggagaccagcctgggtaacatagcaagaccccatcaattttttttta

SEQ ID NO: 34363 - DNA, 80 bp, synthetic construct
  misc_feature 1..80: note = Artificially Synthesized Probe
  source 1..80: mol_type = other DNA
cacattccacagaggccatcctcaacagaggccttagacatttttcaaatttcatgcgttccgaccagaatttgctggtt

SEQ ID NO: 34364 - DNA, 80 bp, synthetic construct
  misc_feature 1..80: note = Artificially Synthesized Probe
  source 1..80: mol_type = other DNA
tctgtcgatctctacaaaaaatacaaaaattagccaggtattggtggtgtactcctgtaatccaagctacccagggggcc

SEQ ID NO: 34365 - DNA, 80 bp, synthetic construct
  misc_feature 1..80: note = Artificially Synthesized Probe
  source 1..80: mol_type = other DNA
gctctgaaagggagcttggcagtgcggggagggatgagcgtgtcggctgtctgggtaaggtctaagcccaggccctgtgc

SEQ ID NO: 34366 - DNA, 80 bp, synthetic construct
  misc_feature 1..80: note = Artificially Synthesized Probe
  source 1..80: mol_type = other DNA
gacctccaaacaggtgaagcgagaaatcttggtggaggttctgaccaaaagaaaaacggtgaccgtcaacgacaagctta

SEQ ID NO: 34367 - DNA, 80 bp, synthetic construct
  misc_feature 1..80: note = Artificially Synthesized Probe
  source 1..80: mol_type = other DNA
cattctgtgtggctccatttccttgacacccaagaaatgcaaaacgagggggacacattctagatcttgtctgtagctga

SEQ ID NO: 34368 - DNA, 80 bp, synthetic construct
  misc_feature 1..80: note = Artificially Synthesized Probe
  source 1..80: mol_type = other DNA
actgggtctgttaacgcctcagtgtgcaggcacatcctccaggacagggtgaaatatgggtgttggatgagtcgagtgtt

SEQ ID NO: 34369 - DNA, 80 bp, synthetic construct
  misc_feature 1..80: note = Artificially Synthesized Probe
  source 1..80: mol_type = other DNA
tctgtacagcgccctgttcgactggattgtgctgcggatcaaccacgcactcctcaacaagaaggacgtggaagaggcag

SEQ ID NO: 34370 - DNA, 80 bp, synthetic construct
  misc_feature 1..80: note = Artificially Synthesized Probe
  source 1..80: mol_type = other DNA
cacatcttcaagctggagcaggtgcggaaagggcttttttgtcaattttttgaacttggtaaatcagacatcacgtgaaa

SEQ ID NO: 34371 - DNA, 80 bp, synthetic construct
  misc_feature 1..80: note = Artificially Synthesized Probe
  source 1..80: mol_type = other DNA
ttgagccacagttcatgtgggggcttctgtgtccaaacagaaaatctttttgttagttgagaaacagggttgccttttaa

SEQ ID NO: 34372 - DNA, 80 bp, synthetic construct
  misc_feature 1..80: note = Artificially Synthesized Probe
  source 1..80: mol_type = other DNA
acatgagaaaaaagaacatacacggtctcagtaccttactgcagcctcaaacgctgaggtttaggcgatcctaccaccac

SEQ ID NO: 34373 - DNA, 80 bp, synthetic construct
  misc_feature 1..80: note = Artificially Synthesized Probe
  source 1..80: mol_type = other DNA
acctctaaatgattttaagtgtgattttttttttttcttgaggcagagtcttgccctgtcattcaggccggagtgcaatg

SEQ ID NO: 34374 - DNA, 80 bp, synthetic construct
  misc_feature 1..80: note = Artificially Synthesized Probe
  source 1..80: mol_type = other DNA
aaagaacacacacatgcagatacatttatatgtaaacatgcctattgatacataaatatgttcctacagtgtggggatcc

SEQ ID NO: 34375 - DNA, 80 bp, synthetic construct
  misc_feature 1..80: note = Artificially Synthesized Probe
  source 1..80: mol_type = other DNA
ggcttgtgcaaccacgcctggctaattttgtatctttagtagagatgggattttgctatgttggtcaggctggtctcaaa

SEQ ID NO: 34376 - DNA, 80 bp, synthetic construct
  misc_feature 1..80: note = Artificially Synthesized Probe
  source 1..80: mol_type = other DNA
ctcattgtgaaaacatcaacacgtgtgattaattcgtgcacttgaggcacatccgccaggagttttcagcaaaggattat

SEQ ID NO: 34377 - DNA, 80 bp, synthetic construct
  misc_feature 1..80: note = Artificially Synthesized Probe
  source 1..80: mol_type = other DNA
cctcttcacatggacttcttccctctgtgtctgcatcattcatctcaatcctgtctcctccttttttttttttttttttt

SEQ ID NO: 34378 - DNA, 80 bp, synthetic construct
  misc_feature 1..80: note = Artificially Synthesized Probe
  source 1..80: mol_type = other DNA
gtcacattcaaaagttggtggtatggggttaagatatggacatattgtcttatcagcagctctatcagacccatcccttg

SEQ ID NO: 34379 - DNA, 80 bp, synthetic construct
  misc_feature 1..80: note = Artificially Synthesized Probe
  source 1..80: mol_type = other DNA
ttttcaaaagtggggccgggctcaggcagcatttgccaaaccaacaacatcatttccctcctgggaggcagactcagtca

SEQ ID NO: 34380 - DNA, 80 bp, synthetic construct
  misc_feature 1..80: note = Artificially Synthesized Probe
  source 1..80: mol_type = other DNA
tggagccagctttcatcatccagcacttcgcagggaaggtgaaatatcagatcaaggtaggtgtctgcccatcaccactg

SEQ ID NO: 34381 - DNA, 80 bp, synthetic construct
  misc_feature 1..80: note = Artificially Synthesized Probe
  source 1..80: mol_type = other DNA
ttcattatgttgtgcaaacgccacctgtctacctgaagtgttcctgtcaccctgaacagaaactcgacctgcgtgtgtaa

SEQ ID NO: 34382 - DNA, 80 bp, synthetic construct
  misc_feature 1..80: note = Artificially Synthesized Probe
  source 1..80: mol_type = other DNA
cttcatgaaaaggaggaaggataaagctttcctgagaaataggaaatagtgctctgttttggggatccaaaacttcacag

SEQ ID NO: 34383 - DNA, 80 bp, synthetic construct
  misc_feature 1..80: note = Artificially Synthesized Probe
  source 1..80: mol_type = other DNA
atctctccagaaaagttgaaacttagtcatgtgtgtcagcatgtgcctgtagccccagctacttgggaggctgaagtagg

SEQ ID NO: 34384 - DNA, 80 bp, synthetic construct
  misc_feature 1..80: note = Artificially Synthesized Probe
  source 1..80: mol_type = other DNA
ctctgttgcccaggctggagtgcagtggcgtgatctcggctcactgcaggctccgcctcgcaggttcatgccattctcct

SEQ ID NO: 34385 - DNA, 80 bp, synthetic construct
  misc_feature 1..80: note = Artificially Synthesized Probe
  source 1..80: mol_type = other DNA
ctgcctggagtggcccaaaagtagttctgccaagttacttcattcacagtcagaaacacatacactttgatattgcacat

SEQ ID NO: 34386 - DNA, 80 bp, synthetic construct
  misc_feature 1..80: note = Artificially Synthesized Probe
  source 1..80: mol_type = other DNA
gacggctctgaggagttcgatattaacgcttttgaggacatcattgctttctatgaaagcaagaagtaagtgcagaaagg

SEQ ID NO: 34387 - DNA, 80 bp, synthetic construct
  misc_feature 1..80: note = Artificially Synthesized Probe
  source 1..80: mol_type = other DNA
catttgtcatttagacattcctcactaatatttagtttgaaagcatccagttttcatctctaaggcattctaattcacac

SEQ ID NO: 34388 - DNA, 80 bp, synthetic construct
  misc_feature 1..80: note = Artificially Synthesized Probe
  source 1..80: mol_type = other DNA
tcagcctccggagtgactgggactacaggcatgcgccaccatgcccagctaatttttgtgtgtttagtagagacggggtt

SEQ ID NO: 34389 - DNA, 80 bp, synthetic construct
  misc_feature 1..80: note = Artificially Synthesized Probe
  source 1..80: mol_type = other DNA
cccagtccccatttctggcaaaagagagaggggcagcattgagcacagtgtctttcccccagctgcatgttttggcttca

SEQ ID NO: 34390 - DNA, 80 bp, synthetic construct
  misc_feature 1..80: note = Artificially Synthesized Probe
  source 1..80: mol_type = other DNA
cttgcacctgcatgggagccaatgagagccagtttctttctttctttctttctttcgttcgttctttatttcgttctttc

SEQ ID NO: 34391 - DNA, 80 bp, synthetic construct
  misc_feature 1..80: note = Artificially Synthesized Probe
  source 1..80: mol_type = other DNA
tcaaacttttgtccttgttgtgccttattttaccccacagggattcaggtgaaactgaatgcaaccacggatggctaggc

SEQ ID NO: 34392 - DNA, 80 bp, synthetic construct
  misc_feature 1..80: note = Artificially Synthesized Probe
  source 1..80: mol_type = other DNA
accctgtagattcctagccagcccctcctacttctcagacatccgaatggcccccagactaaacactttactcagctttg

SEQ ID NO: 34393 - DNA, 80 bp, synthetic construct
  misc_feature 1..80: note = Artificially Synthesized Probe
  source 1..80: mol_type = other DNA
gtggcctgtccgatgagctcatgcggatggcacagaaaggacctggcccttcttgactcaagtaatgtaaactgtaggag

SEQ ID NO: 34394 - DNA, 80 bp, synthetic construct
  misc_feature 1..80: note = Artificially Synthesized Probe
  source 1..80: mol_type = other DNA
caccatgcccagctaatttttgtatctttttttttttttttagtagagacaggtttcaccatgttggccaggctggtctt

SEQ ID NO: 34395 - DNA, 80 bp, synthetic construct
  misc_feature 1..80: note = Artificially Synthesized Probe
  source 1..80: mol_type = other DNA
cccccgtgggaccaccagcaggggctccaggctcagcactggcacaggcttcctttaccccagaggtccactccatccct

SEQ ID NO: 34396 - DNA, 80 bp, synthetic construct
  misc_feature 1..80: note = Artificially Synthesized Probe
  source 1..80: mol_type = other DNA
ccaagctctcctctccaccgaatccccagcacttaccccagtgcctggcagagaacaggcccggaacactgggctttgtc

SEQ ID NO: 34397 - DNA, 80 bp, synthetic construct
  misc_feature 1..80: note = Artificially Synthesized Probe
  source 1..80: mol_type = other DNA
tcccttcatagccccagggactagaatgtaatgtgcctcttttctcatccactgaatagaaatagtgtctttctaatcct

SEQ ID NO: 34398 - DNA, 80 bp, synthetic construct
  misc_feature 1..80: note = Artificially Synthesized Probe
  source 1..80: mol_type = other DNA
ggctacagtgagttatgactgagccactgcattccagcctggatggcagagcaagaccctgtcttaaaacaaaacaaaac

SEQ ID NO: 34399 - DNA, 80 bp, synthetic construct
  misc_feature 1..80: note = Artificially Synthesized Probe
  source 1..80: mol_type = other DNA
tacaaaaatatttttttaattagctgggcatggtggctacaggactatgtgccgtagtcccagcttccagggagactgag

SEQ ID NO: 34400 - DNA, 80 bp, synthetic construct
  misc_feature 1..80: note = Artificially Synthesized Probe
  source 1..80: mol_type = other DNA
ctcagcgactccctccgcgtcacctgtttattgctgcctcacaggtaggaaagggacgatcgtgctaactggcaggattt

SEQ ID NO: 34401 - DNA, 80 bp, synthetic construct
  misc_feature 1..80: note = Artificially Synthesized Probe
  source 1..80: mol_type = other DNA
gacagggttttattacaggcacacacctgtagtcccagctactcgggaggcttaggcagaagaatcgcttgaaaccggga

SEQ ID NO: 34402 - DNA, 80 bp, synthetic construct
  misc_feature 1..80: note = Artificially Synthesized Probe
  source 1..80: mol_type = other DNA
agccaaaaaggtcactcaccaaattgctgcccgtgatataccatctggcctgtggcactaaggggatgtcattctggaca

SEQ ID NO: 34403 - DNA, 80 bp, synthetic construct
  misc_feature 1..80: note = Artificially Synthesized Probe
  source 1..80: mol_type = other DNA
aacaagggtcctctcccctaacaaggcagccaggcagacgcagggcaggggtatctgtgacactgagggggcaccaccct

SEQ ID NO: 34404 - DNA, 80 bp, synthetic construct
  misc_feature 1..80: note = Artificially Synthesized Probe
  source 1..80: mol_type = other DNA
gaagatgaaacccttctagtcgtagagacggaggctgagaacacatctcaaaagcagcccacagagcaaccccaggccat

SEQ ID NO: 34405 - DNA, 80 bp, synthetic construct
  misc_feature 1..80: note = Artificially Synthesized Probe
  source 1..80: mol_type = other DNA
agggatggatggatggaaaatgatagaggtgatgaatggaagacagatatagatgatggatggatggaagatacacatga

SEQ ID NO: 34406 - DNA, 80 bp, synthetic construct
  misc_feature 1..80: note = Artificially Synthesized Probe
  source 1..80: mol_type = other DNA
ttgatggatggagggatggatagatgataggtagattatggatgggaggaagatagagatgatggagggacggatgggta

SEQ ID NO: 34407 - DNA, 80 bp, synthetic construct
  misc_feature 1..80: note = Artificially Synthesized Probe
  source 1..80: mol_type = other DNA
tgcccaagtgagaacccaagaaccactaagacaagaaaatgccactgactcactctagtcagtaaaagccatgtttctgt

SEQ ID NO: 34408 - DNA, 80 bp, synthetic construct
  misc_feature 1..80: note = Artificially Synthesized Probe
  source 1..80: mol_type = other DNA
taaaaggacacgtggctgaatggatgcagtaggtcacgcctgtaatctcaacactttgggaggccaaggtgggatgatca

SEQ ID NO: 34409 - DNA, 80 bp, synthetic construct
  misc_feature 1..80: note = Artificially Synthesized Probe
  source 1..80: mol_type = other DNA
aggcgtgagccaccatacccagccagatccatttttgtttttgttttttgtttttttttttgagacagagtctcactctg

SEQ ID NO: 34410 - DNA, 80 bp, synthetic construct
  misc_feature 1..80: note = Artificially Synthesized Probe
  source 1..80: mol_type = other DNA
agtgtcagagaagtggcgggaatcggtgttccgccagatcaccaacgccaatgagctcaagtacctggacgagttcctgc

SEQ ID NO: 34411 - DNA, 80 bp, synthetic construct
  misc_feature 1..80: note = Artificially Synthesized Probe
  source 1..80: mol_type = other DNA
cacagggcaggccccaatgtggagagtagtcctgccctcaatgtcagtggctttaactctgggttgacaagatgagagac

SEQ ID NO: 34412 - DNA, 80 bp, synthetic construct
  misc_feature 1..80: note = Artificially Synthesized Probe
  source 1..80: mol_type = other DNA
cccataccacagccactgtgccatgacttgatccacttatgccatgcttacctgtgcctcaccatgatcacttatgccac

SEQ ID NO: 34413 - DNA, 80 bp, synthetic construct
  misc_feature 1..80: note = Artificially Synthesized Probe
  source 1..80: mol_type = other DNA
caccacccctcactgctcaagaggtcttcagggccaggcggggtggctcacacctgtaatcccagcactttgggaggccg

SEQ ID NO: 34414 - DNA, 80 bp, synthetic construct
  misc_feature 1..80: note = Artificially Synthesized Probe
  source 1..80: mol_type = other DNA
gattcagtgtggttggaagaaggaaaagcagcattgtctttgccccgtgacatcttcgtcccaagtccccaaggccacct

SEQ ID NO: 34415 - DNA, 80 bp, synthetic construct
  misc_feature 1..80: note = Artificially Synthesized Probe
  source 1..80: mol_type = other DNA
tctggttctgcagaacacaccattgtccccggttctgtacaaactccttgaggccctcaggcagggcccaggcctgtgtg

SEQ ID NO: 34416 - DNA, 80 bp, synthetic construct
  misc_feature 1..80: note = Artificially Synthesized Probe
  source 1..80: mol_type = other DNA
gatacagcgttcgctgtgaccagcccaggaggcaggaccacccagttcacaaactgagaaactgaggcccaaagcagtcg

SEQ ID NO: 34417 - DNA, 80 bp, synthetic construct
  misc_feature 1..80: note = Artificially Synthesized Probe
  source 1..80: mol_type = other DNA
tgtcacctggggcgctggccattatcttcgcaccctgcctcctgcgctgccctgacaactcggacccgctgaccagcatg

SEQ ID NO: 34418 - DNA, 80 bp, synthetic construct
  misc_feature 1..80: note = Artificially Synthesized Probe
  source 1..80: mol_type = other DNA
aaaaaaaaaaaaatccagatggcagtggccccagcagttgtgtctttttgaatgtgctttaatgagcacaccccattgta

SEQ ID NO: 34419 - DNA, 80 bp, synthetic construct
  misc_feature 1..80: note = Artificially Synthesized Probe
  source 1..80: mol_type = other DNA
tctgcgaggcaggataattcccaccctactggtgactaaggggttcagttcactctgaccctccttcaaacaaggaggcg

SEQ ID NO: 34420 - DNA, 80 bp, synthetic construct
  misc_feature 1..80: note = Artificially Synthesized Probe
  source 1..80: mol_type = other DNA
tcctcgctcagcctcactccaattatgttcctctaggtggggcaggtagggggaccagcttcctgcttgctggtggttca

SEQ ID NO: 34421 - DNA, 80 bp, synthetic construct
  misc_feature 1..80: note = Artificially Synthesized Probe
  source 1..80: mol_type = other DNA
tcaggagttccagaccagcctggctcatgtggtgaaaccctgtctctattaaaaacacaaaattagccggacatggtggc

SEQ ID NO: 34422 - DNA, 80 bp, synthetic construct
  misc_feature 1..80: note = Artificially Synthesized Probe
  source 1..80: mol_type = other DNA
gcagacctgccagtgcagggcgccctggagcccctagaagaggatggccagccacctggggccaagcggaggtactcgga

SEQ ID NO: 34423 - DNA, 80 bp, synthetic construct
  misc_feature 1..80: note = Artificially Synthesized Probe
  source 1..80: mol_type = other DNA
tttttgcacatgctggaaccttccatgggggtctgggctattggctggagccaggacatgagtcaggggcaccatggacc

SEQ ID NO: 34424 - DNA, 80 bp, synthetic construct
  misc_feature 1..80: note = Artificially Synthesized Probe
  source 1..80: mol_type = other DNA
ccatgttggccaggctgctctccaaactcctgacctccagtgatccatccacctcaccctcccaaagtgctgggattaca

SEQ ID NO: 34425 - DNA, 80 bp, synthetic construct
  misc_feature 1..80: note = Artificially Synthesized Probe
  source 1..80: mol_type = other DNA
aaagagaaagcgactcattcatttcattgagactggaaggcattatacaaatgatagaaggaaagatagctgtgtgtcat

SEQ ID NO: 34426 - DNA, 80 bp, synthetic construct
  misc_feature 1..80: note = Artificially Synthesized Probe
  source 1..80: mol_type = other DNA
atttaactctaaactacataggcaactttgaaatactattttttgaaggtatcctattatttaggatgaaactctttggt

SEQ ID NO: 34427 - DNA, 80 bp, synthetic construct
  misc_feature 1..80: note = Artificially Synthesized Probe
  source 1..80: mol_type = other DNA
gtcaatttggaatcaaggagagaaaaagaagcagtgaattgtaaggttaaaaagcaatccactcagctgggtgcgggggc

SEQ ID NO: 34428 - DNA, 80 bp, synthetic construct
  misc_feature 1..80: note = Artificially Synthesized Probe
  source 1..80: mol_type = other DNA
agttcattctttactatctaaaaaggcaatgtgaccttacagtctcattccatagttctactagaacatgctgaaccagg

SEQ ID NO: 34429 - DNA, 80 bp, synthetic construct
  misc_feature 1..80: note = Artificially Synthesized Probe
  source 1..80: mol_type = other DNA
gctttttttaaaacatgaactgaataccttgtgcttatgcaaactattggctatcagctttcctgttccttggctggctg

SEQ ID NO: 34430 - DNA, 80 bp, synthetic construct
  misc_feature 1..80: note = Artificially Synthesized Probe
  source 1..80: mol_type = other DNA
gtgtgcaaacgtactattagtttgtaaatgggagcatttatcaagtcgtaacacttaatccacctaaactgggaataatg

SEQ ID NO: 34431 - DNA, 80 bp, synthetic construct
  misc_feature 1..80: note = Artificially Synthesized Probe
  source 1..80: mol_type = other DNA
tgataacaaataagacatattttttctccagaatgtttacaatctaatgattactaaccaagttcccaaagccagtaaaa

SEQ ID NO: 34432 - DNA, 80 bp, synthetic construct
  misc_feature 1..80: note = Artificially Synthesized Probe
  source 1..80: mol_type = other DNA
acatgaaatcataggaagctgggaaaagatgctaaaaatcagcccatatgaaccagctccagaataccaccacttaatat

SEQ ID NO: 34433 - DNA, 80 bp, synthetic construct
  misc_feature 1..80: note = Artificially Synthesized Probe
  source 1..80: mol_type = other DNA
agctgaaatgcaaggacacccttcttcataatggaaatcaagtgggcaagatgtctattttgtacaaaaggccaattaaa

SEQ ID NO: 34434 - DNA, 80 bp, synthetic construct
  misc_feature 1..80: note = Artificially Synthesized Probe
  source 1..80: mol_type = other DNA
actggaacatgcagaacaacggaggaaagggttgaatttccctttacttaggagatccttatttaagagtgattatgctt

SEQ ID NO: 34435 - DNA, 80 bp, synthetic construct
  misc_feature 1..80: note = Artificially Synthesized Probe
  source 1..80: mol_type = other DNA
agctgctgtgtttcaagctcaggatgacagtggtgcacaagactcgcaggtaagttaaaatgctctaagtggagtatttt

SEQ ID NO: 34436 - DNA, 80 bp, synthetic construct
  misc_feature 1..80: note = Artificially Synthesized Probe
  source 1..80: mol_type = other DNA
agccaccacgcctggcctcaacttgattttaacaagtaaacttaaccccaaagaaaaatgtacagttggtggctgggcac

SEQ ID NO: 34437 - DNA, 80 bp, synthetic construct
  misc_feature 1..80: note = Artificially Synthesized Probe
  source 1..80: mol_type = other DNA
actaatttacatggagaacctacttgtatgttgggctctgcacttggtatggaagattatagcaaaaatgagacacaaac

SEQ ID NO: 34438 - DNA, 80 bp, synthetic construct
  misc_feature 1..80: note = Artificially Synthesized Probe
  source 1..80: mol_type = other DNA
gtggagtccatcaggattttgtgccacgagctaaaaagagaagaattttccagtctaatatgtgtttactgctgttggtg

SEQ ID NO: 34439 - DNA, 80 bp, synthetic construct
  misc_feature 1..80: note = Artificially Synthesized Probe
  source 1..80: mol_type = other DNA
gtaccagatgtttctaaattgctaccatttctaatagtcatcaaatatgccacaggtaaatacagccctaaggcctctct

SEQ ID NO: 34440 - DNA, 80 bp, synthetic construct
  misc_feature 1..80: note = Artificially Synthesized Probe
  source 1..80: mol_type = other DNA
ttttcctacttcatagcttgcaaagcagtacgtacaatggacaagaacacaaattctgaagtcaaactgatgtgggtttg

SEQ ID NO: 34441 - DNA, 80 bp, synthetic construct
  misc_feature 1..80: note = Artificially Synthesized Probe
  source 1..80: mol_type = other DNA
agtgatgcaatactttaaaattctgccatctccttgtgtttttctttctaggtgagtggactgccagctcctgatgtgtc

SEQ ID NO: 34442 - DNA, 80 bp, synthetic construct
  misc_feature 1..80: note = Artificially Synthesized Probe
  source 1..80: mol_type = other DNA
tagtcccagctactagagaggctaaggcaggaggataacttgagcctggagtttgaggtttcagtgagctatgattgcac

SEQ ID NO: 34443 - DNA, 80 bp, synthetic construct
  misc_feature 1..80: note = Artificially Synthesized Probe
  source 1..80: mol_type = other DNA
tgtctcccctcaggtagctgaaaataaggtcataataattactgatattcccacattccttcagagtttacaaagtatct

SEQ ID NO: 34444 - DNA, 80 bp, synthetic construct
  misc_feature 1..80: note = Artificially Synthesized Probe
  source 1..80: mol_type = other DNA
tttagagggagattcagtgaaactagaatgccagatctcggctatacctccaccaaagcttttctggaaaagaaataatg

SEQ ID NO: 34445 - DNA, 80 bp, synthetic construct
  misc_feature 1..80: note = Artificially Synthesized Probe
  source 1..80: mol_type = other DNA
aatcccagcagagtataaaatttgagatattttccccatatataatcagttttggttcttttttcttttcctgtctgata

SEQ ID NO: 34446 - DNA, 80 bp, synthetic construct
  misc_feature 1..80: note = Artificially Synthesized Probe
  source 1..80: mol_type = other DNA
caattaaaaaaaaaaaaattgaagcaaaagaaaaataaaccgtctacagcccccgagtgtgggctggacatgtgacttgc

SEQ ID NO: 34447 - DNA, 80 bp, synthetic construct
  misc_feature 1..80: note = Artificially Synthesized Probe
  source 1..80: mol_type = other DNA
ggctaagttttggagaaatttgttattcagcaacagatatctaatacaatgttgtcagggaggataagtggatggagatg

SEQ ID NO: 34448 - DNA, 80 bp, synthetic construct
  misc_feature 1..80: note = Artificially Synthesized Probe
  source 1..80: mol_type = other DNA
gggctgggcctcctgctggaactccacttgggcttcaggccacgagagtggatttctgggtctcatgcggtgcaggtgtc

SEQ ID NO: 34449 - DNA, 80 bp, synthetic construct
  misc_feature 1..80: note = Artificially Synthesized Probe
  source 1..80: mol_type = other DNA
tgaggctggtgatgacgtaggacatactgatgaccagtggggtctggggcaggtccgtggtcagggccacgacagaggcc

SEQ ID NO: 34450 - DNA, 80 bp, synthetic construct
  misc_feature 1..80: note = Artificially Synthesized Probe
  source 1..80: mol_type = other DNA
ccttggagttgggtatctggttgggggcctccttgggctggattctaggaaagaaaaacaaccagagactttgagatccg

SEQ ID NO: 34451 - DNA, 80 bp, synthetic construct
  misc_feature 1..80: note = Artificially Synthesized Probe
  source 1..80: mol_type = other DNA
gcacccttatctgtgaacatgggtgtcttggtgggtctcctgccccaccctgtgtgtgtacatggtgtgttcctgtgtgt

SEQ ID NO: 34452 - DNA, 80 bp, synthetic construct
  misc_feature 1..80: note = Artificially Synthesized Probe
  source 1..80: mol_type = other DNA
gtcaccgcacactcatggtcggccttctttcctgagagttgctctgtcaagtctattggttaggacaggagcctgggcag

SEQ ID NO: 34453 - DNA, 80 bp, synthetic construct
  misc_feature 1..80: note = Artificially Synthesized Probe
  source 1..80: mol_type = other DNA
gcatccctcagagcacagaatcttcccatgcaaagatcccactgtgtgtctggcttcctctgaagccaaccacgagtctg

SEQ ID NO: 34454 - DNA, 80 bp, synthetic construct
  misc_feature 1..80: note = Artificially Synthesized Probe
  source 1..80: mol_type = other DNA
gatcttcacacgggcatgcatatgtgtagcaggcatacagacccagagattcatacagactccagtgtgcttgttgacca

SEQ ID NO: 34455 - DNA, 80 bp, synthetic construct
  misc_feature 1..80: note = Artificially Synthesized Probe
  source 1..80: mol_type = other DNA
gtgggaggtgaattctccagggaagctgggagaaaacacactttatttataaaactgggaaggggccatttctcatttaa

SEQ ID NO: 34456 - DNA, 80 bp, synthetic construct
  misc_feature 1..80: note = Artificially Synthesized Probe
  source 1..80: mol_type = other DNA
cctgtctcctcttggggctgggagggttgcttaaatcaattatcaaagcgcttgcagcctcctgctcactcacaaagacc

SEQ ID NO: 34457 - DNA, 80 bp, synthetic construct
  misc_feature 1..80: note = Artificially Synthesized Probe
  source 1..80: mol_type = other DNA
ccctttctggatctctcaccttggggacatccagacaggagagaacagatccaggctggcagctggtagggtcggaatga

SEQ ID NO: 34458 - DNA, 80 bp, synthetic construct
  misc_feature 1..80: note = Artificially Synthesized Probe
  source 1..80: mol_type = other DNA
tgttcacatgccctgtctcatttgctcatgcaaggctaacatcgttgtacccacacacgtctgcatgcatgactcgatgc

SEQ ID NO: 34459 - DNA, 80 bp, synthetic construct
  misc_feature 1..80: note = Artificially Synthesized Probe
  source 1..80: mol_type = other DNA
gagaagcagataaacctttataagtcagaaggggcctcagtttctccatttgtcctggccctgtttgtcacatgcccttc

SEQ ID NO: 34460 - DNA, 80 bp, synthetic construct
  misc_feature 1..80: note = Artificially Synthesized Probe
  source 1..80: mol_type = other DNA
gatttaaaagaacacggcagtcttggaagagtggtgatggcgtttagcttaatggcttttgatgcagaagccaaaagcgt

SEQ ID NO: 34461 - DNA, 80 bp, synthetic construct
  misc_feature 1..80: note = Artificially Synthesized Probe
  source 1..80: mol_type = other DNA
tgtgagcacaggacttggtgtccatcttggctgtgccctctcaggagcatcagcctggtgaccttgtgacctcttatgtc

SEQ ID NO: 34462 - DNA, 80 bp, synthetic construct
  misc_feature 1..80: note = Artificially Synthesized Probe
  source 1..80: mol_type = other DNA
tgaggtcaccctgatgttgggggggtgtctgggcaaagctgcgcggggcatgaggacaccctgatgtggggggggtgtcg

SEQ ID NO: 34463 - DNA, 80 bp, synthetic construct
  misc_feature 1..80: note = Artificially Synthesized Probe
  source 1..80: mol_type = other DNA
aaagatacatccgtgtttcattttgtctccacaatggccaggggcagtactactgtcatcccatctagcagatgggaaca

SEQ ID NO: 34464 - DNA, 80 bp, synthetic construct
  misc_feature 1..80: note = Artificially Synthesized Probe
  source 1..80: mol_type = other DNA
cctcacttgtcaaatggggatcgtaattttcctgcctcaggctggaggcttgcacgtgttgggccagccccatctgaggt

SEQ ID NO: 34465 - DNA, 80 bp, synthetic construct
  misc_feature 1..80: note = Artificially Synthesized Probe
  source 1..80: mol_type = other DNA
cttggacttcccagcccgcagaactgtaagaaatacattttgtttcttttaaattacccagtttctgttataagcagcag

SEQ ID NO: 34466 - DNA, 80 bp, synthetic construct
  misc_feature 1..80: note = Artificially Synthesized Probe
  source 1..80: mol_type = other DNA
gaggttcggggacaaacgtccaaactatagcaggtatttctgaagaacacccaggtgtttcaaagctggggtgaagccgt

SEQ ID NO: 34467 - DNA, 80 bp, synthetic construct
  misc_feature 1..80: note = Artificially Synthesized Probe
  source 1..80: mol_type = other DNA
aaatcacatatttgataaaggacttgtatccagagtatatcaagaactctcaaaactcaataacgttaatggaaaaaaac

SEQ ID NO: 34468 - DNA, 80 bp, synthetic construct
  misc_feature 1..80: note = Artificially Synthesized Probe
  source 1..80: mol_type = other DNA
aaagcctggagaacacagtttcgagaggtcctgggaaagcctggagaacacagtttcaagaggtcctgggaaagcctgga

SEQ ID NO: 34469 - DNA, 80 bp, synthetic construct
  misc_feature 1..80: note = Artificially Synthesized Probe
  source 1..80: mol_type = other DNA
agggggtctgttgagttggtgggggccttaggatttcattttttttttttttgaaacagagtctccctctattgcccagg

SEQ ID NO: 34470 - DNA, 80 bp, synthetic construct
  misc_feature 1..80: note = Artificially Synthesized Probe
  source 1..80: mol_type = other DNA
tgtcttgattaccacagctttatactcaaataccacaccgtcttgattaccacagctgtatactcaaatactactgtcct

SEQ ID NO: 34471 - DNA, 80 bp, synthetic construct
  misc_feature 1..80: note = Artificially Synthesized Probe
  source 1..80: mol_type = other DNA
tcaaataccacactgtcttgattaccacagctttatactcaaatactacactgtcttgattcctatagctttatactcaa

SEQ ID NO: 34472 - DNA, 80 bp, synthetic construct
  misc_feature 1..80: note = Artificially Synthesized Probe
  source 1..80: mol_type = other DNA
aaataccacactgtcttgattactatagctttatactcaaataccacactgtcttgattactacagctttatactcaaat

SEQ ID NO: 34473 - DNA, 80 bp, synthetic construct
  misc_feature 1..80: note = Artificially Synthesized Probe
  source 1..80: mol_type = other DNA
gagtagaattgaacatccttgcctccgtcttgctctgaggagagacatggattaagatttaacttgggtttttcatatca

SEQ ID NO: 34474 - DNA, 80 bp, synthetic construct
  misc_feature 1..80: note = Artificially Synthesized Probe
  source 1..80: mol_type = other DNA
tccaccgtctcccctcctgtctgagatgcagggcatgaccacgggtgctgctcttagagcttcatgctccgtctgcccca

SEQ ID NO: 34475 - DNA, 80 bp, synthetic construct
  misc_feature 1..80: note = Artificially Synthesized Probe
  source 1..80: mol_type = other DNA
tgggtgtccttacaagaagagggaaatttggacacagaagatgcagaggacagtgctgtgtgaagacagaagtggtggag

SEQ ID NO: 34476 - DNA, 80 bp, synthetic construct
  misc_feature 1..80: note = Artificially Synthesized Probe
  source 1..80: mol_type = other DNA
gcgtgttcatgtgtgtgagtagacacactggagtatccaggcatgttcatgtgtgtgcatagaggcactggagtatccag

SEQ ID NO: 34477 - DNA, 80 bp, synthetic construct
  misc_feature 1..80: note = Artificially Synthesized Probe
  source 1..80: mol_type = other DNA
tagagaccccctcactgtccactctcatggcctatagagaccccctcactgtccaccctcatggcctgtagagaccccct

SEQ ID NO: 34478 - DNA, 80 bp, synthetic construct; identical to SEQ ID NO: 34477
  misc_feature 1..80: note = Artificially Synthesized Probe
  source 1..80: mol_type = other DNA

SEQ ID NO: 34479 - DNA, 80 bp, synthetic construct
  misc_feature 1..80: note = Artificially Synthesized Probe
  source 1..80: mol_type = other DNA
tcactctgggaccatcctaggattaggaattttaaaacgtttaaaaaaaattattttcctttttttgggggaaattggtt

SEQ ID NO: 34480 - DNA, 80 bp, synthetic construct
  misc_feature 1..80: note = Artificially Synthesized Probe
  source 1..80: mol_type = other DNA
ctccctcagttttgtgcatcacaaacgcacatgctccctcagttttgggcatcacaaacacattccctcagttttgtgca

SEQ ID NO: 34481 - DNA, 80 bp, synthetic construct
  misc_feature 1..80: note = Artificially Synthesized Probe
  source 1..80: mol_type = other DNA
cgttattgagagacagccaggttgctttcaacgttttctttttcacagacagtggtgccaaaggcgtccttggacatgag

SEQ ID NO: 34482 - DNA, 80 bp, synthetic construct
  misc_feature 1..80: note = Artificially Synthesized Probe
  source 1..80: mol_type = other DNA
cagatgtcaccctcaacttgggaaatttgaggagagatgaataaagggactaagatgtggttggcatgtagagaaaccac

SEQ ID NO: 34483 - DNA, 80 bp, synthetic construct
  misc_feature 1..80: note = Artificially Synthesized Probe
  source 1..80: mol_type = other DNA
ttgaccttcaggagctcatttactactcacaacaaccctgccgtctaagtgaggagactgagtttcagaaaggttaagta

SEQ ID NO: 34484 - DNA, 80 bp, synthetic construct
  misc_feature 1..80: note = Artificially Synthesized Probe
  source 1..80: mol_type = other DNA
cgggatccataggaacccctcgaccaccaacagggccttgagcaccctggccagggcggaggtagtccaggacagaggac

SEQ ID NO: 34485 - DNA, 80 bp, synthetic construct
  misc_feature 1..80: note = Artificially Synthesized Probe
  source 1..80: mol_type = other DNA
cagagaaaatgcatttgctccatcaccttccctgaggtgacaagtcctataaaacctgttaaagcctttaatgaaatccc

SEQ ID NO: 34486 - DNA, 80 bp, synthetic construct
  misc_feature 1..80: note = Artificially Synthesized Probe
  source 1..80: mol_type = other DNA
ccttcactgcggggcgagacacagctgtgtggaaccggcccaggccctgagaggtgctttcctctcctgttttccaagtt

SEQ ID NO: 34487 - DNA, 80 bp, synthetic construct
  misc_feature 1..80: note = Artificially Synthesized Probe
  source 1..80: mol_type = other DNA
ggaggagggcacaggacaagcattcttcattgtctgtctgacagtgtgttttgaatgcgtgtttgaatattttcatgctt

SEQ ID NO: 34488 - DNA, 80 bp, synthetic construct
  misc_feature 1..80: note = Artificially Synthesized Probe
  source 1..80: mol_type = other DNA
gccccactcagcatgcccagaggtctccccacccatctctctcctagaccaggggttacataaaacttaagccagtgttc

SEQ ID NO: 34489 - DNA, 80 bp, synthetic construct
  misc_feature 1..80: note = Artificially Synthesized Probe
  source 1..80: mol_type = other DNA
ttcacatgtgtatatgtgcatgcgtgtgcacatgcgaggggtgcatgtatatatgtgcatgtactcacgtgtgtatatgc

SEQ ID NO: 34490 - DNA, 80 bp, synthetic construct
  misc_feature 1..80: note = Artificially Synthesized Probe
  source 1..80: mol_type = other DNA
gagtctgagctcagacttgactttctgcctgggtcagcctagattttctacatggaagtgaggtgaaagggagaggaata

SEQ ID NO: 34491 - DNA, 80 bp, synthetic construct
  misc_feature 1..80: note = Artificially Synthesized Probe
  source 1..80: mol_type = other DNA
acttgagaaggaaataatgggctgggtgctaatagaggatttggaggctcacacactaaatggggaaggactcattcata

SEQ ID NO: 34492 - DNA, 80 bp, synthetic construct
  misc_feature 1..80: note = Artificially Synthesized Probe
  source 1..80: mol_type = other DNA
gtggcagcgaggccctgcttctgagccagtgctggagccacaccaccttctctgcctggtagtgaaggaggtggccccgt

SEQ ID NO: 34493 - DNA, 80 bp, synthetic construct
  misc_feature 1..80: note = Artificially Synthesized Probe
  source 1..80: mol_type = other DNA
ggagcagagaggctgattagaggctgagtctttatacggaagtgatggtgccctagaggcacaggagggagtgagtgctg

SEQ ID NO: 34494 - DNA, 80 bp, synthetic construct
  misc_feature 1..80: note = Artificially Synthesized Probe
  source 1..80: mol_type = other DNA
ccaagtacttattacaaagtagcaggcttcaaacttggagatctcacaaccccaagtaacattctgttagaaaccatggg

SEQ ID NO: 34495 - DNA, 80 bp, synthetic construct
  misc_feature 1..80: note = Artificially Synthesized Probe
  source 1..80: mol_type = other DNA
acacacacgtacacacagatgtgtacgcagagaggcacgcacattcacacacagatgtgtacacagagaggcacacgcac

SEQ ID NO: 34496 - DNA, 80 bp, synthetic construct
  misc_feature 1..80: note = Artificially Synthesized Probe
  source 1..80: mol_type = other DNA
gtgggttcaaatcttggctcttctctgggcctcaggtttctggtctgtagactaggatattggagttttactcacgttac

SEQ ID NO: 34497 - DNA, 80 bp, synthetic construct
  misc_feature 1..80: note = Artificially Synthesized Probe
  source 1..80: mol_type = other DNA
acagaggtggcaattccaacctaaaagcacaaattacagacaagtctccctcctgcaggtttccatttgcatctggcttt

SEQ ID NO: 34498 - DNA, 80 bp, synthetic construct
  misc_feature 1..80: note = Artificially Synthesized Probe
  source 1..80: mol_type = other DNA
aaagatctatcatttctttgatcctgtaaaacaagtaaattcagtcttcctgtgaggcacggtgatgattcactggaatc

SEQ ID NO: 34499 - DNA, 80 bp, synthetic construct
  misc_feature 1..80: note = Artificially Synthesized Probe
  source 1..80: mol_type = other DNA
gtgtgtatgtgtgtttgtgttgtgtgtatgtgtgtggtgtgtttgaggtgtgcgtgtatttgtgtgtctgtgtgtgtgtg

SEQ ID NO: 34500 - DNA, 80 bp, synthetic construct
  misc_feature 1..80: note = Artificially Synthesized Probe
  source 1..80: mol_type = other DNA
ggtctgtccctcctgagctctcatttgaggaaggcaccagtgaggcccttctttggctcagatccagcctttggtgccag

SEQ ID NO: 34501 - DNA, 80 bp, synthetic construct
  misc_feature 1..80: note = Artificially Synthesized Probe
  source 1..80: mol_type = other DNA
catctgttctgggagcacaattccaaagccatttaaacagagcctggagcagggcaaggcgctgggccctctgtcctcac

SEQ ID NO: 34502 - DNA, 80 bp, synthetic construct
  misc_feature 1..80: note = Artificially Synthesized Probe
  source 1..80: mol_type = other DNA
ctcgtactgctcttagcttcctgggcccagtgcccagggtagtgccttcagcctgagcttcttactctccaagcccttca

SEQ ID NO: 34503 - DNA, 80 bp, synthetic construct
  misc_feature 1..80: note = Artificially Synthesized Probe
  source 1..80: mol_type = other DNA
tggtgggtgatgtccagacggcttcccttgggtcagctgcagcccggcttcctgttgagggcagggaggtacagtggcta

SEQ ID NO: 34504 - DNA, 80 bp, synthetic construct
  misc_feature 1..80: note = Artificially Synthesized Probe
  source 1..80: mol_type = other DNA
cctgtccccacctgtctttgtctccacctgccccatccccacctgccccacctgcccctgtcctcacctgtcccacctgc

SEQ ID NO: 34505 - DNA, 80 bp, synthetic construct
  misc_feature 1..80: note = Artificially Synthesized Probe
  source 1..80: mol_type = other DNA
cctcgatgttctctcctctaaacaagatgactcaccatttatttccagcctaatctctgcccccagcctcagcctccata

SEQ ID NO: 34506 - DNA, 80 bp, synthetic construct
  misc_feature 1..80: note = Artificially Synthesized Probe
  source 1..80: mol_type = other DNA
aagggatgcatcttcaggaagggccccctcccctcactcactgtgagtccattactgtgtgggaagggctgtgtctctgc

SEQ ID NO: 34507 - DNA, 80 bp, synthetic construct
  misc_feature 1..80: note = Artificially Synthesized Probe
  source 1..80: mol_type = other DNA
tgtgagtgtgcatatgtatgtgagggtctcacaaactggatgccaaatgtttgtgagcgtctgcgtgagtgtgagacaga

SEQ ID NO: 34508 - DNA, 80 bp, synthetic construct
  misc_feature 1..80: note = Artificially Synthesized Probe
  source 1..80: mol_type = other DNA
cacatgtgactttcccacagacttttatgaaataaaacccaaaggaacagcgtgcaacatgctcagttatggaagagaaa

SEQ ID NO: 34509 - DNA, 80 bp, synthetic construct
  misc_feature 1..80: note = Artificially Synthesized Probe
  source 1..80: mol_type = other DNA
tcgaactgttctcatttgactaattaatatttcatcctcagtttgaccagtgcaggcttgcatttatgtccttgtgctca

SEQ ID NO: 34510 - DNA, 80 bp, synthetic construct
  misc_feature 1..80: note = Artificially Synthesized Probe
  source 1..80: mol_type = other DNA
gcatagagagtgggtgagcacttctattgtgtgtgttatggatttttctcttcttgattttcactggatagctcctttca

SEQ ID NO: 34511 - DNA, 80 bp, synthetic construct
  misc_feature 1..80: note = Artificially Synthesized Probe
  source 1..80: mol_type = other DNA
tttcatgattgctttccgtgatgtcattttgaaagaggacagacaatagctgtggggaaaggtaagtcaacgttacgttc

SEQ ID NO: 34512 - DNA, 80 bp, synthetic construct
  misc_feature 1..80: note = Artificially Synthesized Probe
  source 1..80: mol_type = other DNA
acgtgtccgtgcagctgtggagtgtggttgtttatggtggtagtgtaactggatttttgtatttaaaactaaaaatcagg

SEQ ID NO: 34513 - DNA, 80 bp, synthetic construct
  misc_feature 1..80: note = Artificially Synthesized Probe
  source 1..80: mol_type = other DNA
gtcagggcttagagggcagtttgttttcaaagagaaggaggcagtcttatggattcttctgtcccgtagagactgagact

SEQ ID NO: 34514 - DNA, 80 bp, synthetic construct
  misc_feature 1..80: note = Artificially Synthesized Probe
  source 1..80: mol_type = other DNA
gaatgccagtttgcacaacccagtactgtgcagagagagcaggagaggttcctgaagactgacaaagtgccagagagaaa

SEQ ID NO: 34515 - DNA, 80 bp, synthetic construct
  misc_feature 1..80: note = Artificially Synthesized Probe
  source 1..80: mol_type = other DNA
ttcacggcctcttgaggttcccggcatttttctgtctttcagaccaaatttccccaaacatcactttaaaaaactcaaaa

SEQ ID NO: 34516 - DNA, 80 bp, synthetic construct
  misc_feature 1..80: note = Artificially Synthesized Probe
  source 1..80: mol_type = other DNA
ccctccatgtctccctcagggacccacagagctgccagtggctgacctgtcctgcctgagtgggaggagagtgggagttt

SEQ ID NO: 34517 - DNA, 80 bp, synthetic construct
  misc_feature 1..80: note = Artificially Synthesized Probe
  source 1..80: mol_type = other DNA
tttgacgctgttattttaatcgttgagaccgtgctaacttgttcagttctcatgaacgtgttctgtactggacactgagg

SEQ ID NO: 34518 - DNA, 80 bp, synthetic construct
  misc_feature 1..80: note = Artificially Synthesized Probe
  source 1..80: mol_type = other DNA
tgttttggctggcttatttagagttttgtgcttcctcattttatttccacgaaggctgtgcccaaccttagcctcggtga

SEQ ID NO: 34519 - DNA, 80 bp, synthetic construct
  misc_feature 1..80: note = Artificially Synthesized Probe
  source 1..80: mol_type = other DNA
accctaaccccctacacctctggcatctggaggaacccaaacccacttcaatataagagttagagtccaattcctcttcc

SEQ ID NO: 34520 - DNA, 80 bp, synthetic construct
  misc_feature 1..80: note = Artificially Synthesized Probe
  source 1..80: mol_type = other DNA
ttgggctggaaagctgaacggttctaagaaaaatttctgggaccaaggaacgaaaatgctggagcagaattccagagcag

SEQ ID NO: 34521 - DNA, 80 bp, synthetic construct
  misc_feature 1..80: note = Artificially Synthesized Probe
  source 1..80: mol_type = other DNA
cttctcctcctgcagcatccttccctttagttgtgtccatttcccctccctgacttctcctcctgcagcatctttcctag

SEQ ID NO: 34522 - DNA, 80 bp, synthetic construct
  misc_feature 1..80: note = Artificially Synthesized Probe
  source 1..80: mol_type = other DNA
ttccctgtagttgtgtccattccccctccctgacttctcctcctgcagcatctttccctgtagttgtgtccatttcccct

SEQ ID NO: 34523 - DNA, 80 bp, synthetic construct
  misc_feature 1..80: note = Artificially Synthesized Probe
  source 1..80: mol_type = other DNA
tggcttctcctgcagcatctttcctagttgtgtccatttcccctccctggcttctcctgcagcatctttccctgtagttg

SEQ ID NO: 34524 - DNA, 80 bp, synthetic construct
  misc_feature 1..80: note = Artificially Synthesized Probe
  source 1..80: mol_type = other DNA
gcccgtcctgtgatttggtttggaaagtcattattactgcagagcagtttagctgttgtttttacagcgttggtaaggtt

SEQ ID NO: 34525 - DNA, 80 bp, synthetic construct
  misc_feature 1..80: note = Artificially Synthesized Probe
  source 1..80: mol_type = other DNA
ggacccgcagtttctagggcatgggttccaccttcttcatggaaatttccaagcttgtcagactttctcaggtgcctggt

SEQ ID NO: 34526 - DNA, 80 bp, synthetic construct
  misc_feature 1..80: note = Artificially Synthesized Probe
  source 1..80: mol_type = other DNA
ctggtgtctcgttcgtctgaagtcgtttttagcactcctcgcctttcgtgaccttgtgcttttggaagagcgctgagccg

SEQ ID NO: 34527 - DNA, 80 bp, synthetic construct
  misc_feature 1..80: note = Artificially Synthesized Probe
  source 1..80: mol_type = other DNA
acttaactttgatggatatctctatagactcgttgtttcctgttttaccccatgggctgaaagccttctttggatgctca

SEQ ID NO: 34528 - DNA, 80 bp, synthetic construct
  misc_feature 1..80: note = Artificially Synthesized Probe
  source 1..80: mol_type = other DNA
cctttccgtaggcataacgtcctcttccaacagtgagaaagctggtttccattatctttaatgtgtttacttctttgatc

SEQ ID NO: 34529 - DNA, 80 bp, synthetic construct
  misc_feature 1..80: note = Artificially Synthesized Probe
  source 1..80: mol_type = other DNA
ttgggaagaggctttctctactgtctgtgaatgctgctctggagcaatgtgatcctattctagttatcggttttgtttgt

SEQ ID NO: 34530 - DNA, 80 bp, synthetic construct
  misc_feature 1..80: note = Artificially Synthesized Probe
  source 1..80: mol_type = other DNA
tttgttttttgttttttttcctttcgaatggcaagatgtaagtttatactcaaccctgggcccagcttttcagtttcact

SEQ ID NO: 34531 - DNA, 80 bp, synthetic construct
  misc_feature 1..80: note = Artificially Synthesized Probe
  source 1..80: mol_type = other DNA
tgtctcactgaccatccacatgccactgtttaaaaacagcgttattggaatgtaatgtgcacatcacagaattcacctat

SEQ ID NO: 34532 - DNA, 80 bp, synthetic construct
  misc_feature 1..80: note = Artificially Synthesized Probe
  source 1..80: mol_type = other DNA
cgaacccctgacctcaagtgatctgcttgcctcagtctcccaaagtgttgggattacagccgtgagccactgctcccggc

SEQ ID NO: 34533 - DNA, 80 bp, synthetic construct
  misc_feature 1..80: note = Artificially Synthesized Probe
  source 1..80: mol_type = other DNA
agtttgtcagtttttgcaaacagaacaaaacaacacagccagagaggtcagaaatggtcagattctggtgagatttagaa

SEQ ID NO: 34534 - DNA, 80 bp, synthetic construct
  misc_feature 1..80: note = Artificially Synthesized Probe
  source 1..80: mol_type = other DNA
gttaccagagatgcaaaacctagtgaagactgaaaacatgtggctttccacacttaccacctggcctctcactcagtctt

SEQ ID NO: 34535 - DNA, 80 bp, synthetic construct
  misc_feature 1..80: note = Artificially Synthesized Probe
  source 1..80: mol_type = other DNA
actagaaactcaataacccaagagaacaggctcgtctggatgaaaacctccacttcacttcagattcctgacaagaaagg

SEQ ID NO: 34536 - DNA, 80 bp, synthetic construct
  misc_feature 1..80: note = Artificially Synthesized Probe
  source 1..80: mol_type = other DNA
cctacagacaggagagctttgtctggggtggagcctactgagcccatggggcagggtttggccatacacaggccccagta

SEQ ID NO: 34537 - DNA, 80 bp, synthetic construct
  misc_feature 1..80: note = Artificially Synthesized Probe
  source 1..80: mol_type = other DNA
agtgtgaagcacactccccggctgatacgattcttgtcgattcacttacggaatcttccaatatgcttttcctccctata

SEQ ID NO: 34538 - DNA, 80 bp, synthetic construct
  misc_feature 1..80: note = Artificially Synthesized Probe
  source 1..80: mol_type = other DNA
tccaaactcacttccaaggcaaagccagggcccaacacgagaatattcatttcctgtttcattgttggttacttaatgac

SEQ ID NO: 34539 - DNA, 80 bp, synthetic construct
  misc_feature 1..80: note = Artificially Synthesized Probe
  source 1..80: mol_type = other DNA
caatgatccggtcactttaaaattaagggaagaaaaatgactctgagtagatcaaaactaaaatgtgaccccaggctggg

SEQ ID NO: 34540 - DNA, 80 bp, synthetic construct
  misc_feature 1..80: note = Artificially Synthesized Probe
  source 1..80: mol_type = other DNA
gaactgtgacatcacatgtgcttacagccactgttctccaccaccaaccctctaattctagaacttcccaccaatactct

SEQ ID NO: 34541 - DNA, 80 bp, synthetic construct
  misc_feature 1..80: note = Artificially Synthesized Probe
  source 1..80: mol_type = other DNA
tcatcactgctctgtttgagggtcatttcccttcttttcttgcagatagggccgagtgactgctctgaatagagaagcta

SEQ ID NO: 34542 - DNA, 80 bp, synthetic construct
  misc_feature 1..80: note = Artificially Synthesized Probe
  source 1..80: mol_type = other DNA
ttgcagatatggctgcttcatcagggtatccattatgtagctctaatttttgatttgggaatgaagtgagccagtatccc

SEQ ID NO: 34543 - DNA, 80 bp, synthetic construct
  misc_feature 1..80: note = Artificially Synthesized Probe
  source 1..80: mol_type = other DNA
aaatgacatgcactaagcagctgtctggaggagagacaatgaccttacaaccatgaatgaatgagctcatttcagattga

SEQ ID NO: 34544 - DNA, 80 bp, synthetic construct
  misc_feature 1..80: note = Artificially Synthesized Probe
  source 1..80: mol_type = other DNA
aatctccaaccctgatatctttggaagctgagtctaccatttccccttagaggttagacacgagtggtttgttactggct

SEQ ID NO: 34545 - DNA, 80 bp, synthetic construct
  misc_feature 1..80: note = Artificially Synthesized Probe
  source 1..80: mol_type = other DNA
tggttttcctatcgaaggcagaactattgaaatattaattagagcctcaagacatgctcgcagtggcagaatgaagctgg

SEQ ID NO: 34546 - DNA, 80 bp, synthetic construct
  misc_feature 1..80: note = Artificially Synthesized Probe
  source 1..80: mol_type = other DNA
gaataatttatctgcaggaaatccaaattgccaaggcacgctttaacctagcagaatgcttgccaatatccttgggaaaa

SEQ ID NO: 34547 - DNA, 80 bp, synthetic construct
  misc_feature 1..80: note = Artificially Synthesized Probe
  source 1..80: mol_type = other DNA
ctccccgggaaggatgttttgcatagcatggagtgtgtaggatttacttgcctgcccagatttgtcatgagtgacacagg

SEQ ID NO: 34548 - DNA, 80 bp, synthetic construct
  misc_feature 1..80: note = Artificially Synthesized Probe
  source 1..80: mol_type = other DNA
actgtaccctccttgccaaggccggggacatgctgatgggacacttccaagccttgtagaaggtcctttctctacaccct

SEQ ID NO: 34549 - DNA, 80 bp, synthetic construct
  misc_feature 1..80: note = Artificially Synthesized Probe
  source 1..80: mol_type = other DNA
ttgtgtttcctgccaaaagctgacttctatctgcaattagagaaagagataccatccctggccctgaggtcccagagatc

SEQ ID NO: 34550 - DNA, 80 bp, synthetic construct
  misc_feature 1..80: note = Artificially Synthesized Probe
  source 1..80: mol_type = other DNA
ggaccatcttactgttcagcatacaattgaagagtggatggcttctgccaatcaggaaaatgagaggactgcaaagttca

SEQ ID NO: 34551 - DNA, 80 bp, synthetic construct
  misc_feature 1..80: note = Artificially Synthesized Probe
  source 1..80: mol_type = other DNA
acaggagttgaggaaactccaggcttttttggtaacagatggagtgtggaggaagtcgaaaaggcaaatacaaatggcag

SEQ ID NO: 34552 - DNA, 80 bp, synthetic construct
  misc_feature 1..80: note = Artificially Synthesized Probe
  source 1..80: mol_type = other DNA
ctttcaccccatcgggagaactgatgacgtttcagcttgtatttttgcctgggtccatctgttgtcacatggcctcagac

SEQ ID NO: 34553 - DNA, 80 bp, synthetic construct
  misc_feature 1..80: note = Artificially Synthesized Probe
  source 1..80: mol_type = other DNA
ctcagtgatgtcatcggctaattgggaccttagcttcaaatccccattaacaaggagcttttttgtgaaaagtcccaaag

SEQ ID NO: 34554 - DNA, 80 bp, synthetic construct
  misc_feature 1..80: note = Artificially Synthesized Probe
  source 1..80: mol_type = other DNA
cacgttggttggcatagtcagtactcatgctcagaagtttccagagcttcctgctggtttggttatatagggagacagat

SEQ ID NO: 34555 - DNA, 80 bp, synthetic construct
  misc_feature 1..80: note = Artificially Synthesized Probe
  source 1..80: mol_type = other DNA
attgaacactcgtaaaactgtaatgagccatttatttatttgaatggggcgagttattaattttcagcaaactgcaggca

SEQ ID NO: 34556 - DNA, 80 bp, synthetic construct
  misc_feature 1..80: note = Artificially Synthesized Probe
  source 1..80: mol_type = other DNA
agagacacggggctggtgtgtgtgtgtgcagttgtagtgtgttttggcaggtgtgtctgcatgtatatgagagagacaga

SEQ ID NO: 34557 - DNA, 80 bp, synthetic construct
  misc_feature 1..80: note = Artificially Synthesized Probe
  source 1..80: mol_type = other DNA
ccgtggaatcaacatagtcctagatcccaggtagaaaagacacacattttcctgctttcttatcaagaagggcgtctggg

SEQ ID NO: 34558 - DNA, 80 bp, synthetic construct
  misc_feature 1..80: note = Artificially Synthesized Probe
  source 1..80: mol_type = other DNA
gcgccactgcctcctccaagggcagctacagcagctaccagggaatcatcgcaacttctctcctgaacttgggtcaaatt

SEQ ID NO: 34559 - DNA, 80 bp, synthetic construct
  misc_feature 1..80: note = Artificially Synthesized Probe
  source 1..80: mol_type = other DNA
aagcagacaaaaggacaaatacatgacacagactgtggtcagatactgagcaaatgggttcccacactgctttacataga

SEQ ID NO: 34560 - DNA, 80 bp, synthetic construct
  misc_feature 1..80: note = Artificially Synthesized Probe
  source 1..80: mol_type = other DNA
agctcaggggaaagatgctaaggggacacaggtggggacatggtttcagggtgagatggacccaaagaatggctttgcgg

SEQ ID NO: 34561 - DNA, 80 bp, synthetic construct
  misc_feature 1..80: note = Artificially Synthesized Probe
  source 1..80: mol_type = other DNA
gaggtcgataactgagatttgggtttacatttctgcccaggcatagattagtcatgcagccttggataagttactcaact

SEQ ID NO: 34562 - DNA, 80 bp, synthetic construct
  misc_feature 1..80: note = Artificially Synthesized Probe
  source 1..80: mol_type = other DNA
tgggaagggagaggtcttcttgcagcaacctctgtgccctgaaagcttaggaagcaaatacttgttcttatgtttaggct

SEQ ID NO: 34563 - DNA, 80 bp, synthetic construct
  misc_feature 1..80: note = Artificially Synthesized Probe
  source 1..80: mol_type = other DNA
tgtgaagagaggtacaacaaccatgtgagagccaggtgaatactttgtgtcctacccacattcagaaaacctctgcacac

SEQ ID NO: 34564 - DNA, 80 bp, synthetic construct
  misc_feature 1..80: note = Artificially Synthesized Probe
  source 1..80: mol_type = other DNA
cagagctttcaaggcctttaggatatatttcatctttgtgtgtccttggcatagaatgttccaaaacagaaactgactgg

SEQ ID NO: 34565 - DNA, 80 bp, synthetic construct
  misc_feature 1..80: note = Artificially Synthesized Probe
  source 1..80: mol_type = other DNA
gcatgtgtaaatttggctctaatcaataaggatctttcagaatgtgtcccattagtgtcccctccttccatgtggctcta

SEQ ID NO: 34566 - DNA, 80 bp, synthetic construct
  misc_feature 1..80: note = Artificially Synthesized Probe
  source 1..80: mol_type = other DNA
gctccaactttggagactgcactccctgggactatgacctcagtttgttcacttataaaagtaggacaacaaactaagtc

SEQ ID NO: 34567 - DNA, 80 bp, synthetic construct
  misc_feature 1..80: note = Artificially Synthesized Probe
  source 1..80: mol_type = other DNA
gccaccatacctgacccaatgttaagtttaaagttagttttttccctcctggcctcactcttgcaacttttctatctgcc

SEQ ID NO: 34568 - DNA, 80 bp, synthetic construct
  misc_feature 1..80: note = Artificially Synthesized Probe
  source 1..80: mol_type = other DNA
tggggaaaatcttaggccctcctctatctgatgctgtcagcaggacaggccattgattatttgagggtcctattgcttcc

SEQ ID NO: 34569 - DNA, 80 bp, synthetic construct
  misc_feature 1..80: note = Artificially Synthesized Probe
  source 1..80: mol_type = other DNA
tgggtaattgtactgacaaaaatcattcctacaaatctttaagaacaatcctttctgtcttgtcttgtcacttactgccc

SEQ ID NO: 34570 - DNA, 80 bp, synthetic construct
  misc_feature 1..80: note = Artificially Synthesized Probe
  source 1..80: mol_type = other DNA
cccactgacttgtctgcattgctgcctcttttcaagttgtatatcagcctggtgttgttccctttttgcagccaaacctt

SEQ ID NO: 34571 - DNA, 80 bp, synthetic construct
  misc_feature 1..80: note = Artificially Synthesized Probe
  source 1..80: mol_type = other DNA
ttgattcaaatggaccagaaggcacacatgggaagggatggaatcgctaacagatctcacctttgccattgcagtctgtg

SEQ ID NO: 34572 - DNA, 80 bp, synthetic construct
  misc_feature 1..80: note = Artificially Synthesized Probe
  source 1..80: mol_type = other DNA
atccttccctttttagttccttaaaacatgtgaaagaagaatcctccgaggccacagccggttctgggctttttcccaag

SEQ ID NO: 34573 - DNA, 80 bp, synthetic construct
  misc_feature 1..80: note = Artificially Synthesized Probe
  source 1..80: mol_type = other DNA
ccatctcatcttcatggcatttcggtaacacttatttagtgcctactgtctattgagtgccatccctggctctgaaggga

SEQ ID NO: 34574 - DNA, 80 bp, synthetic construct
  misc_feature 1..80: note = Artificially Synthesized Probe
  source 1..80: mol_type = other DNA
cagggtattcagaggtttcccaacacctttgtgttgtgctgggctttactgcaatcttctaaaagtgattaagaacaaag

SEQ ID NO: 34575 - DNA, 80 bp, synthetic construct
  misc_feature 1..80: note = Artificially Synthesized Probe
  source 1..80: mol_type = other DNA
agcctcagaaacctcatggctgcccactctgctgacctcaagtatgtttgcgctccctgacctcctgtctcttgggcggc

SEQ ID NO: 34576 - DNA, 80 bp, synthetic construct
  misc_feature 1..80: note = Artificially Synthesized Probe
  source 1..80: mol_type = other DNA
acacaccctggcttattccattctggggccagacaggatcctgggcactggtgcctctaagatgaggaaatgaacttgct

SEQ ID NO: 34577 - DNA, 80 bp, synthetic construct
  misc_feature 1..80: note = Artificially Synthesized Probe
  source 1..80: mol_type = other DNA
tttaagactaagagcctgtgaagaaccttaacgccaaacttctttagaaataacgaccaaaagcctcccctgtgtgaaag

SEQ ID NO: 34578 - DNA, 80 bp, synthetic construct
  misc_feature 1..80: note = Artificially Synthesized Probe
  source 1..80: mol_type = other DNA
acacctgctcctctgactatgtgagtactttcctctctgggacacaactcttgagaaaagccattgaatcgggccttagt

SEQ ID NO: 34579 - DNA, 80 bp, synthetic construct
  misc_feature 1..80: note = Artificially Synthesized Probe
  source 1..80: mol_type = other DNA
caccttatgtgatacattcgtcaaatagttttgggtgtgtaaagttggacttttgtgtttctcctccttactctctgctg

SEQ ID NO: 34580 - DNA, 80 bp, synthetic construct
  misc_feature 1..80: note = Artificially Synthesized Probe
  source 1..80: mol_type = other DNA
tgaattgttgccatttccagaacctgattaagttgtcctctgcagtaagataaaaagacaaggggtcagggctaggggct

SEQ ID NO: 34581 - DNA, 80 bp, synthetic construct
  misc_feature 1..80: note = Artificially Synthesized Probe
  source 1..80: mol_type = other DNA
ttataggtgaaccctgactctgtgtgttatcctacttggtgggggtttgtgtccttacaagcttattctcccaataggga

SEQ ID NO: 34582 - DNA, 80 bp, synthetic construct
  misc_feature 1..80: note = Artificially Synthesized Probe
  source 1..80: mol_type = other DNA
tgaaccctccgttttacagggttccttcccagccataaactttaactgcacttgtaattgcctagcatatttaaacagat

SEQ ID NO: 34583 - DNA, 80 bp, synthetic construct
  misc_feature 1..80: note = Artificially Synthesized Probe
  source 1..80: mol_type = other DNA
tactactactactactaataataattcagattcgactgtgtagagtagctgaagagccagccaccccccatttggccaca

SEQ ID NO: 34584 - DNA, 80 bp, synthetic construct
  misc_feature 1..80: note = Artificially Synthesized Probe
  source 1..80: mol_type = other DNA
cacactgagcccaaggcatttgccaatctgaatttatgttattttcataagggcctctatccctctcctggaacacccag

SEQ ID NO: 34585 - DNA, 80 bp, synthetic construct
  misc_feature 1..80: note = Artificially Synthesized Probe
  source 1..80: mol_type = other DNA
cccactggccgcccgcaggcagaaggaagggtccctcaatggctcgtcattctcctggaagtccctgaagaatgaaggac

SEQ ID NO: 34586 - DNA, 80 bp, synthetic construct
  misc_feature 1..80: note = Artificially Synthesized Probe
  source 1..80: mol_type = other DNA
accttccccttcccttcccccaccttcctccccttctcttctttttcttcccctcccctcccttttcccttccttcctcc

SEQ ID NO: 34587 - DNA, 80 bp, synthetic construct
  misc_feature 1..80: note = Artificially Synthesized Probe
  source 1..80: mol_type = other DNA
cttgcctcaatcaacctttacttatggtgtggatacaatcacttcataaatgaaatcatgcttgagaatgcacaattgta

SEQ ID NO: 34588 - DNA, 80 bp, synthetic construct
  misc_feature 1..80: note = Artificially Synthesized Probe
  source 1..80: mol_type = other DNA
ccgggatggtcatggtgtgtgacccggggctggccatggtgggtgaccccgagctggctgtggtgggtgaccctgggctg

SEQ ID NO: 34589 - DNA, 80 bp, synthetic construct
  misc_feature 1..80: note = Artificially Synthesized Probe
  source 1..80: mol_type = other DNA
ctgggctggtgaatgatatgtggcctctgcttccagtttgtcaggctgtcccagagcaacctttgctggaaagaagggaa

SEQ ID NO: 34590 - DNA, 80 bp, synthetic construct
  misc_feature 1..80: note = Artificially Synthesized Probe
  source 1..80: mol_type = other DNA
cccccttaggtgaggaaattcagcattgcctgaacaaacttccatctttaatgtagcatttaatacctcccaaagagatt

SEQ ID NO: 34591 - DNA, 80 bp, synthetic construct
  misc_feature 1..80: note = Artificially Synthesized Probe
  source 1..80: mol_type = other DNA
tcagcctcttcctcagtcaattcctccataaaatggaggtaagaataggattctactccagccagttattgtacaatgaa

SEQ ID NO: 34592 - DNA, 80 bp, synthetic construct
  misc_feature 1..80: note = Artificially Synthesized Probe
  source 1..80: mol_type = other DNA
ctttttaaagacagattattaccttttactagcatccctttggaaggactcagaaacccctgtccatctgagggagtttg

SEQ ID NO: 34593 - DNA, 80 bp, synthetic construct
  misc_feature 1..80: note = Artificially Synthesized Probe
  source 1..80: mol_type = other DNA
gatctcctccatggagaagaacctgaagaacatcgaggaggagaacaagctcattgaggagcagaatgaagccctgtttc

SEQ ID NO: 34594 - DNA, 80 bp, synthetic construct
  misc_feature 1..80: note = Artificially Synthesized Probe
  source 1..80: mol_type = other DNA
aagtgatttatttttgttttctgaaagaaatctgaagagcagctcaaagtctccagtggaagctcatggacaaggttctc

SEQ ID NO: 34595 - DNA, 80 bp, synthetic construct
  misc_feature 1..80: note = Artificially Synthesized Probe
  source 1..80: mol_type = other DNA
ttttcccttggtctaatggagagaaagacattttggttttctttttccattttgggttccttttgtttcaggcacggata

SEQ ID NO: 34596 - DNA, 80 bp, synthetic construct
  misc_feature 1..80: note = Artificially Synthesized Probe
  source 1..80: mol_type = other DNA
gggaggccttaggagtaattaataaattactagaacctttttaagttttttttttttttggtgtgggggggtggcgggga

SEQ ID NO: 34597 - DNA, 80 bp, synthetic construct
  misc_feature 1..80: note = Artificially Synthesized Probe
  source 1..80: mol_type = other DNA
gttgagaaaccctggtctggaacaatgcccaagaaaagtttactcaccttggcttccccaaaaactatgtaagtatctga

SEQ ID NO: 34598 - DNA, 80 bp, synthetic construct
  misc_feature 1..80: note = Artificially Synthesized Probe
  source 1..80: mol_type = other DNA
atttcagctgctgccgccagctaagaagataaaacagctattagttaaccagaatctaagatctggatagcacaatctcc

SEQ ID NO: 34599 - DNA, 80 bp, synthetic construct
  misc_feature 1..80: note = Artificially Synthesized Probe
  source 1..80: mol_type = other DNA
gttttcaatgtcagatcaattaggtaaaatagatggcatggcaggctcagggtagtccgggccacattacacaaaaatga

SEQ ID NO: 34600 - DNA, 80 bp, synthetic construct
  misc_feature 1..80: note = Artificially Synthesized Probe
  source 1..80: mol_type = other DNA
gaatgagaagcatctttgccttttgctgtctttgaagagtctttctgaacagggagtagaggggctggagccactgtgga

SEQ ID NO: 34601 - DNA, 80 bp, synthetic construct
  misc_feature 1..80: note = Artificially Synthesized Probe
  source 1..80: mol_type = other DNA
ctttgggggctgaagttgctggggcctttttgagggagacaggagtcactgctgggggagtgagatctcctttggatggg

SEQ ID NO: 34602 - DNA, 80 bp, synthetic construct
  misc_feature 1..80: note = Artificially Synthesized Probe
  source 1..80: mol_type = other DNA
acctccttttggggagggaagagttgcagctggggttgtgggggcccctttggggagtggggtagctgctggacttcctt

SEQ ID NO: 34603 - DNA, 80 bp, synthetic construct
  misc_feature 1..80: note = Artificially Synthesized Probe
  source 1..80: mol_type = other DNA
ttagagccttggaaagaaagactattctctggaagaaatgaagcttcaactggagaaacaggggatgagagatttccaat

SEQ ID NO: 34604 - DNA, 80 bp, synthetic construct
  misc_feature 1..80: note = Artificially Synthesized Probe
  source 1..80: mol_type = other DNA
tacttatgggacctgatgacattggaggagaaacacaagtagctacctcaaaggtagtagtaggtgctgcagcaattgta

SEQ ID NO: 34605 - DNA, 80 bp, synthetic construct
  misc_feature 1..80: note = Artificially Synthesized Probe
  source 1..80: mol_type = other DNA
cagagggaactttattaagattagtctttggttctgagggagcaatgggagctgacagagttatcactgaccctgactca

SEQ ID NO: 34606 - DNA, 80 bp, synthetic construct
  misc_feature 1..80: note = Artificially Synthesized Probe
  source 1..80: mol_type = other DNA
gccaacagaattcccacgagaagaacagctgtgctactctgtccacccaaatatcatgaacagaaaagatactgaaaact

SEQ ID NO: 34607 - DNA, 80 bp, synthetic construct
  misc_feature 1..80: note = Artificially Synthesized Probe
  source 1..80: mol_type = other DNA
gtttcattatgtcaaaatacaccaatgtttggcatgacagtaagacagtatctctggcattcaggaggtaacacagaatt

SEQ ID NO: 34608 - DNA, 80 bp, synthetic construct
  misc_feature 1..80: note = Artificially Synthesized Probe
  source 1..80: mol_type = other DNA
ttcccttccttaagccccttgtacttcaagaatttcatattgtttatactccagcttagagccccctattgtccttccta

SEQ ID NO: 34609 - DNA, 80 bp, synthetic construct
  misc_feature 1..80: note = Artificially Synthesized Probe
  source 1..80: mol_type = other DNA
cttggtcattttgcccaccaaatggctttagggttaattttaattaatggcaaggagggtagggaaacctacctgtctca

SEQ ID NO: 34610 - DNA, 80 bp, synthetic construct
  misc_feature 1..80: note = Artificially Synthesized Probe
  source 1..80: mol_type = other DNA
gattccgggtcaagagctgccggcagccacttcctttgacgagtgactgtcaggccgttcccacggcgggggtggtgaca

SEQ ID NO: 34611 - DNA, 80 bp, synthetic construct
  misc_feature 1..80: note = Artificially Synthesized Probe
  source 1..80: mol_type = other DNA
gcctcccaaactactgggattacaggcgtgagccaccatgcccagcctgtttgttttgtttttgggacagtctcactttt

SEQ ID NO: 34612 - DNA, 80 bp, synthetic construct
  misc_feature 1..80: note = Artificially Synthesized Probe
  source 1..80: mol_type = other DNA
ccgtgttgcccaggctggtctcgaactcctgagctcaggcaatccacccgcttcggcctcccatagtgctaggattacag

SEQ ID NO: 34613 - DNA, 80 bp, synthetic construct
  misc_feature 1..80: note = Artificially Synthesized Probe
  source 1..80: mol_type = other DNA
tcacaatttttctttcttccccagcaagcccacttactttttcctctctctgtagtaatgactagccaaggaaggatgta

SEQ ID NO: 34614 - DNA, 80 bp, synthetic construct
  misc_feature 1..80: note = Artificially Synthesized Probe
  source 1..80: mol_type = other DNA
tctccttctgagttctttactgattagttctggaataatgagtctctagtaattttgtattcaggagttttaatcgaccc

SEQ ID NO: 34615 - DNA, 80 bp, synthetic construct
  misc_feature 1..80: note = Artificially Synthesized Probe
  source 1..80: mol_type = other DNA
agccactgcacccagcaggaattttcttaaaatataggtcaaggaatcaatgtgttgactgcattatagagtctgtttca

SEQ ID NO: 34616 - DNA, 80 bp, synthetic construct
  misc_feature 1..80: note = Artificially Synthesized Probe
  source 1..80: mol_type = other DNA
tgagccactgtgcctggccctctagatataattaaatgtctaaaacttaaggacaaaaccatcattcacccaaacatatg

SEQ ID NO: 34617 - DNA, 80 bp, synthetic construct
  misc_feature 1..80: note = Artificially Synthesized Probe
  source 1..80: mol_type = other DNA
ggttttctaaacaaatgagaccacaccatacatactgtccctatatttcatacttgggcaaggggaggggagttgacttt

SEQ ID NO: 34618 - DNA, 80 bp, synthetic construct
  misc_feature 1..80: note = Artificially Synthesized Probe
  source 1..80: mol_type = other DNA
taatactatgaaatactatgatatggaaataatatgcaatcactagagataaaatattttctacccaagtagagtggatt

SEQ ID NO: 34619 - DNA, 80 bp, synthetic construct
  misc_feature 1..80: note = Artificially Synthesized Probe
  source 1..80: mol_type = other DNA
agatgtccaactcctgcaagtttggcatgttgtccagtgcttgaaagaaatttctgtatccttcctctgtaatcttgtga

SEQ ID NO: 34620 - DNA, 80 bp, synthetic construct
  misc_feature 1..80: note = Artificially Synthesized Probe
  source 1..80: mol_type = other DNA
ctggacaaatatgagcttctcttttggtctcacaggaggtcacatgccaaggcacatcatgcctacaaaccagactaaat

SEQ ID NO: 34621 - DNA, 80 bp, synthetic construct
  misc_feature 1..80: note = Artificially Synthesized Probe
  source 1..80: mol_type = other DNA
ttttcaattttttatggagacaaggtcttgctatgttgcccaatcttgtctcaaactcctggcctcaagcagtccttcta

SEQ ID NO: 34622 - DNA, 80 bp, synthetic construct
  misc_feature 1..80: note = Artificially Synthesized Probe
  source 1..80: mol_type = other DNA
cgtaaaataacagtgctgagcagtaagaaaatgagatccagcccttgtaacacacccgacaaagcctctccaattgggct

SEQ ID NO: 34623 - DNA, 80 bp, synthetic construct
  misc_feature 1..80: note = Artificially Synthesized Probe
  source 1..80: mol_type = other DNA
agtgaaaatgaggaagcgggttgaaaatttctagaggggcaaatgtttacatagacatgttgcagcagaaagcttggcta

SEQ ID NO: 34624 - DNA, 80 bp, synthetic construct
  misc_feature 1..80: note = Artificially Synthesized Probe
  source 1..80: mol_type = other DNA
atcagtatctaggcacttggtgtgttcattattactgcagtgccttctagtctctccattgagctgagaaatatgtatgt

SEQ ID NO: 34625 - DNA, 80 bp, synthetic construct
  misc_feature 1..80: note = Artificially Synthesized Probe
  source 1..80: mol_type = other DNA
tttatgtacgcttatgtttgagaagcactttgaatagcacagctctacagtccctatctccactgcctccctttattttt

SEQ ID NO: 34626 - DNA, 80 bp, synthetic construct
  misc_feature 1..80: note = Artificially Synthesized Probe
  source 1..80: mol_type = other DNA
gggactataggtaccactgtgcccgactgatttttttaaagctttttagaggtggagggcttgttatgttgcccagactg

SEQ ID NO: 34627 - DNA, 80 bp, synthetic construct
  misc_feature 1..80: note = Artificially Synthesized Probe
  source 1..80: mol_type = other DNA
tacaagcattgactcagtagcatcaccttcagctttaacacctaataactctaagtttgtacatgacatttacacaataa

SEQ ID NO: 34628 - DNA, 80 bp, synthetic construct
  misc_feature 1..80: note = Artificially Synthesized Probe
  source 1..80: mol_type = other DNA
caatgaagcttttgcatgcaagtctttatgtcaattccatagagttgtatatttcttcaatctttagtgttcagtgttta

SEQ ID NO: 34629 - DNA, 80 bp, synthetic construct
  misc_feature 1..80: note = Artificially Synthesized Probe
  source 1..80: mol_type = other DNA
aggcccggcctatattagggattaagaactcagattttggagtcaaaattcctgtatttgagtcacagatatacatttcc

SEQ ID NO: 34630 - DNA, 80 bp, synthetic construct
  misc_feature 1..80: note = Artificially Synthesized Probe
  source 1..80: mol_type = other DNA
ttaaaactgtcattttgattcatccagctattttcacatgcaaaccttccacataccataaaacattctttttttttttt

SEQ ID NO: 34631 - DNA, 80 bp, synthetic construct
  misc_feature 1..80: note = Artificially Synthesized Probe
  source 1..80: mol_type = other DNA
aaatgagcaaacatattttttcaaaaagtgaaaagatacttaacatcattttcatgatttgcattagagaaatgcaaatc

SEQ ID NO: 34632 - DNA, 80 bp, synthetic construct
  misc_feature 1..80: note = Artificially Synthesized Probe
  source 1..80: mol_type = other DNA
ttctgcttctaggtatatacccaaaatgattaaaagcaagaacttaaaccgatacttataatgccagtgttcattgcagc

SEQ ID NO: 34633 - DNA, 80 bp, synthetic construct
  misc_feature 1..80: note = Artificially Synthesized Probe
  source 1..80: mol_type = other DNA
tacaaagcaaagcacacctaggcatataacagtcaaactgcttaagaccaaagcaatactagcaacaattagaaaatgaa

SEQ ID NO: 34634 - DNA, 80 bp, synthetic construct
  misc_feature 1..80: note = Artificially Synthesized Probe
  source 1..80: mol_type = other DNA
ctctttacattatcctctttttcagctaaatttcgctcccattcattcataggttcaaaggcagaagcatagtcctgatc

SEQ ID NO: 34635 - DNA, 80 bp, synthetic construct
  misc_feature 1..80: note = Artificially Synthesized Probe
  source 1..80: mol_type = other DNA
aaccaatgagcacagatcgccgccacaaagagaggagttttctgtatcttctgcaaactttggttctttccaaagtaaac

SEQ ID NO: 34636 - DNA, 80 bp, synthetic construct
  misc_feature 1..80: note = Artificially Synthesized Probe
  source 1..80: mol_type = other DNA
ggaagagatatcaagcaaagacatgtggcggaaactggcgctggtataagctgctctcagctgctcattcagattctttg

SEQ ID NO: 34637 - DNA, 80 bp, synthetic construct
  misc_feature 1..80: note = Artificially Synthesized Probe
  source 1..80: mol_type = other DNA
atctgcaggaatgtgtgttcctcagtggttcatatatgatacaatccatgggtgatactatccaggtaacgagaatcata

SEQ ID NO: 34638 - DNA, 80 bp, synthetic construct
  misc_feature 1..80: note = Artificially Synthesized Probe
  source 1..80: mol_type = other DNA
accacggctctgaaggtctggagtcacttccgcagaggacttcatattttggagaaatggacaactaagtgtaaaagtta

SEQ ID NO: 34639 - DNA, 80 bp, synthetic construct
  misc_feature 1..80: note = Artificially Synthesized Probe
  source 1..80: mol_type = other DNA
gctagtgtaagatgttagcattagggtaaattgggtatggcaatatataggaactctttgtattactttgcactttctgc

SEQ ID NO: 34640 - DNA, 80 bp, synthetic construct
  misc_feature 1..80: note = Artificially Synthesized Probe
  source 1..80: mol_type = other DNA
gagagacctcctctaaaaattagctagcagggtggcatgcatgtatagtcccagctacttgggggtgctgaggcaagaag

SEQ ID NO: 34641 - DNA, 80 bp, synthetic construct
  misc_feature 1..80: note = Artificially Synthesized Probe
  source 1..80: mol_type = other DNA
tgaaggaaggtaaaatataaacttattcatacaaacaaatgccaaataaagtcagttgccagcataactgcactacaaaa

SEQ ID NO: 34642 - DNA, 80 bp, synthetic construct
  misc_feature 1..80: note = Artificially Synthesized Probe
  source 1..80: mol_type = other DNA
gagccactgcacccagctgttataatatttttgaagattactatgatatgttaaataggcatatggtaaactctagagca

SEQ ID NO: 34643 - DNA, 80 bp, synthetic construct
  misc_feature 1..80: note = Artificially Synthesized Probe
  source 1..80: mol_type = other DNA
acatagtgagaccccgttacccacaaaaaggaaaaggaaaaaacaagaattgactttaaatatagtcacagatagattaa

SEQ ID NO: 34644 - DNA, 80 bp, synthetic construct
  misc_feature 1..80: note = Artificially Synthesized Probe
  source 1..80: mol_type = other DNA
caaaaattaaaatttgggcaataccaagttagtgaggaagcaaatcaatagaaacgcatctaggccaatgggaatgtaaa

SEQ ID NO: 34645 - DNA, 80 bp, synthetic construct
  misc_feature 1..80: note = Artificially Synthesized Probe
  source 1..80: mol_type = other DNA
ttactaggaggttcataggttgctttttattcattctttaaagcatacataaaaattttaggtaatcatttggagacata

SEQ ID NO: 34646 - DNA, 80 bp, synthetic construct
  misc_feature 1..80: note = Artificially Synthesized Probe
  source 1..80: mol_type = other DNA
ttagatagaagtattcattttgttttatttttgtttttaccactatacaaatgagcaggaagcattcattttaaaatctg

SEQ ID NO: 34647 - DNA, 80 bp, synthetic construct
  misc_feature 1..80: note = Artificially Synthesized Probe
  source 1..80: mol_type = other DNA
gttgttcataatccagcaggccagaagacttccagggaaactcatttcaagatgaaaatggaccagccgcagtggctcac

SEQ ID NO: 34648 - DNA, 80 bp, synthetic construct
  misc_feature 1..80: note = Artificially Synthesized Probe
  source 1..80: mol_type = other DNA
aactgtatgcttccatttagaggaaatagtcagaacaaataaatccatagacaccaattaggttggtgtatcccaggggc

SEQ ID NO: 34649 - DNA, 80 bp, synthetic construct
  misc_feature 1..80: note = Artificially Synthesized Probe
  source 1..80: mol_type = other DNA
tgggcaacatagagagaccctgtctcttaaaaaaaaaaaaaaaaaaattagctgggtgtgaagacatgtgcctgtagtcc

SEQ ID NO: 34650 - DNA, 80 bp, synthetic construct
  misc_feature 1..80: note = Artificially Synthesized Probe
  source 1..80: mol_type = other DNA
atgtcctttatacctaaaagtaaggaaacttgatcagtgccactggcatgggcatctgtccattaacatgcagataataa

SEQ ID NO: 34651 - DNA, 80 bp, synthetic construct
  misc_feature 1..80: note = Artificially Synthesized Probe
  source 1..80: mol_type = other DNA
aaggatcaaactagaaacagagcatttctcatcttccttccactctgggaaagctggggcagaggaaagcctcccagaaa

SEQ ID NO: 34652 - DNA, 80 bp, synthetic construct
  misc_feature 1..80: note = Artificially Synthesized Probe
  source 1..80: mol_type = other DNA
caaatccttccatactaatagaaatcccaatatttagctgggcacattgtcacccaggaaaaagattaggtttcccagct

SEQ ID NO: 34653 - DNA, 80 bp, synthetic construct
  misc_feature 1..80: note = Artificially Synthesized Probe
  source 1..80: mol_type = other DNA
agtgtagctaaacgtaagcccaggagcataaagtctatgtgggaattaaaggtcaagcaagcaagtgggcacaacctact

SEQ ID NO: 34654 - DNA, 80 bp, synthetic construct
  misc_feature 1..80: note = Artificially Synthesized Probe
  source 1..80: mol_type = other DNA
tgccaccacacccggctaattttttttttttttttgtatttttagtagagacagacacgatgttggaggtcttttttttt

SEQ ID NO: 34655 - DNA, 80 bp, synthetic construct
  misc_feature 1..80: note = Artificially Synthesized Probe
  source 1..80: mol_type = other DNA
ctatagagttctggtctcctgagtcatgttaatcaataaattctcatttttgtttaagccagtttggattcgatttccca

SEQ ID NO: 34656 - DNA, 80 bp, synthetic construct
  misc_feature 1..80: note = Artificially Synthesized Probe
  source 1..80: mol_type = other DNA
atgaaagctactggcagtaaagagaactatatttaaaataataggccagacgcagtggctcacatccaggagttcaagac

SEQ ID NO: 34657 - DNA, 80 bp, synthetic construct
  misc_feature 1..80: note = Artificially Synthesized Probe
  source 1..80: mol_type = other DNA
caccagtggggatgtgaccaaccttgccatgttctcttataatcacaggagaacatggatgccatcagatgatctgcata

SEQ ID NO: 34658 - DNA, 80 bp, synthetic construct
  misc_feature 1..80: note = Artificially Synthesized Probe
  source 1..80: mol_type = other DNA
aggctttcatgtccaagacaggaacggttccaaagactttctaagaatcccataagaaatcccttcacgcctgtcacgca

SEQ ID NO: 34659 - DNA, 80 bp, synthetic construct
  misc_feature 1..80: note = Artificially Synthesized Probe
  source 1..80: mol_type = other DNA
cggctctagtaggtgctagtcacatgataatgtgatcatgtgtgagtggtgccactggtacttgtccagtgtataaccca

SEQ ID NO: 34660 - DNA, 80 bp, synthetic construct
  misc_feature 1..80: note = Artificially Synthesized Probe
  source 1..80: mol_type = other DNA
aggtgcctgccaccacgcctggccaatttttgtatttttaatagagacagggttttaccatgttagccaggctggtcttg

SEQ ID NO: 34661 - DNA, 80 bp, synthetic construct
  misc_feature 1..80: note = Artificially Synthesized Probe
  source 1..80: mol_type = other DNA
tgaaaccttgtcgctataaaagatatgaaaattagctgggcatggtggtaggcacctgtggtcccagctactcaggacgc

SEQ ID NO: 34662 - DNA, 80 bp, synthetic construct
  misc_feature 1..80: note = Artificially Synthesized Probe
  source 1..80: mol_type = other DNA
gtaaatatagcattaaaaataattaaaatgtacttccttttctaagccaggaactaaagaccactgcagtaataaaaact

SEQ ID NO: 34663 - DNA, 80 bp, synthetic construct
  misc_feature 1..80: note = Artificially Synthesized Probe
  source 1..80: mol_type = other DNA
tggtccaattttgaatagggaaagatcaaaactgaaggtgctactccagaaaggtggctcttttgtctttcattttgtct

SEQ ID NO: 34664 - DNA, 80 bp, synthetic construct
  misc_feature 1..80: note = Artificially Synthesized Probe
  source 1..80: mol_type = other DNA
cataaagtaggtacagtactcagtaaatgatcgttgttattgttagaactctgatttatatatcataacccctatggcgg

SEQ ID NO: 34665 - DNA, 80 bp, synthetic construct
  misc_feature 1..80: note = Artificially Synthesized Probe
  source 1..80: mol_type = other DNA
tgagctgtacggctcataagtcacaaaagtctttaacctttttgcttcactgcgcatttgagagttgtagcctttctgca

SEQ ID NO: 34666 - DNA, 80 bp, synthetic construct
  misc_feature 1..80: note = Artificially Synthesized Probe
  source 1..80: mol_type = other DNA
ggctttggtaagaagctccatcagcgtgagtcggttgctgacattgctaacatcatttgaacactgaggtgctatggccc

SEQ ID NO: 34667 - DNA, 80 bp, synthetic construct
  misc_feature 1..80: note = Artificially Synthesized Probe
  source 1..80: mol_type = other DNA
tgcattttagccagttaatcatccctccctggtggttatatgattaacaagcacttccaattcagtcttagctggatatt

SEQ ID NO: 34668 - DNA, 80 bp, synthetic construct
  misc_feature 1..80: note = Artificially Synthesized Probe
  source 1..80: mol_type = other DNA
cacctataatcccagcactttggggggctgaggccaggagttcaagactagccttgccaacatggtgaaaccccatctct

SEQ ID NO: 34669 - DNA, 80 bp, synthetic construct
  misc_feature 1..80: note = Artificially Synthesized Probe
  source 1..80: mol_type = other DNA
ccattagcagttgctttccatgtcccccattaccctcctagccctaggcaactactatgttactttctgtctctatagat

SEQ ID NO: 34670 - DNA, 80 bp, synthetic construct
  misc_feature 1..80: note = Artificially Synthesized Probe
  source 1..80: mol_type = other DNA
caagagactctgccacccttttctttacatcacactgctttaaagtgactgtagattctgcttttgcatcatcctaaagg

SEQ ID NO: 34671 - DNA, 80 bp, synthetic construct
  misc_feature 1..80: note = Artificially Synthesized Probe
  source 1..80: mol_type = other DNA
tatttcttctaacaattatgggtggaattgggcagttcccctttacaagatatgttttatgtactgccacctttgtgcag

SEQ ID NO: 34672 - DNA, 80 bp, synthetic construct
  misc_feature 1..80: note = Artificially Synthesized Probe
  source 1..80: mol_type = other DNA
cttgagcccaggagttcgagaccagcctgggcaacatggtaagactccagctctacaaaataatttttttaaaagttagg

SEQ ID NO: 34673 - DNA, 80 bp, synthetic construct
  misc_feature 1..80: note = Artificially Synthesized Probe
  source 1..80: mol_type = other DNA
gggaggagaagtaatttccaaggccctttccaggtctaatattctttgactacagtgctaagagtgccattgaggcaact

SEQ ID NO: 34674 - DNA, 80 bp, synthetic construct
  misc_feature 1..80: note = Artificially Synthesized Probe
  source 1..80: mol_type = other DNA
ccaaagtgctaggattataggcatgaaccaccacatccggcctttattctagtttgttaagattggttaatagttaaggt

SEQ ID NO: 34675 - DNA, 80 bp, synthetic construct
  misc_feature 1..80: note = Artificially Synthesized Probe
  source 1..80: mol_type = other DNA
taatcattaaaaaatcaggagccacaggagtgggacttgaacctgagcctttccctctatggagaacaagaattacccta

SEQ ID NO: 34676 - DNA, 80 bp, synthetic construct
  misc_feature 1..80: note = Artificially Synthesized Probe
  source 1..80: mol_type = other DNA
aaggaaaaaccatttctctactcacatttctgacatcaaatatatgggttttccaccaaccaattctccaattctccaca

SEQ ID NO: 34677 - DNA, 80 bp, synthetic construct
  misc_feature 1..80: note = Artificially Synthesized Probe
  source 1..80: mol_type = other DNA
actgtaaaactccctcagtactgcatacagagagaggttaggagacatggtggtcgtggataggaaatgagggaattatg

SEQ ID NO: 34678 - DNA, 80 bp, synthetic construct
  misc_feature 1..80: note = Artificially Synthesized Probe
  source 1..80: mol_type = other DNA
tttttaatggaggtgccatcacttaggcatgattggttaaatcactggcaactggtggttaatcaatctccagccctttt

SEQ ID NO: 34679 - DNA, 80 bp, synthetic construct
  misc_feature 1..80: note = Artificially Synthesized Probe
  source 1..80: mol_type = other DNA
ggaaaagtgagtgattcgtgttgtttccagtcagccccgctccgagtctcagggggactgccccgcacacagactgttca

SEQ ID NO: 34680 - DNA, 80 bp, synthetic construct
  misc_feature 1..80: note = Artificially Synthesized Probe
  source 1..80: mol_type = other DNA
gaaggaggtggcaatgagcccagccagaacctgcaggggcccccagagccccccagccaccctccgcctacccactcatc

SEQ ID NO: 34681 - DNA, 80 bp, synthetic construct
  misc_feature 1..80: note = Artificially Synthesized Probe
  source 1..80: mol_type = other DNA
tgcaggatgaggcctgggagcagccagggacaccctagtttgagagcaaaggtaatgcagcccgtgccagcttcctggga

SEQ ID NO: 34682 - DNA, 80 bp, synthetic construct
  misc_feature 1..80: note = Artificially Synthesized Probe
  source 1..80: mol_type = other DNA
gggcagggctcgcaccgtcacctcggagcagtcgagggcccgaaggtgctcgaagaacgcaggatccgtgtctgggggca

SEQ ID NO: 34683 - DNA, 80 bp, synthetic construct
  misc_feature 1..80: note = Artificially Synthesized Probe
  source 1..80: mol_type = other DNA
ctcttgtcttggtatgactgattagataataggtaggcacctgcctagttagtgctcttttttgagaatttggaatgagg

SEQ ID NO: 34684 - DNA, 80 bp, synthetic construct
  misc_feature 1..80: note = Artificially Synthesized Probe
  source 1..80: mol_type = other DNA
ccaagatcagtaatgaaaaaagacaagtttgagaatagcaaagtcagacatgtcaaaaaaatacattcaagaaatcataa

SEQ ID NO: 34685 - DNA, 80 bp, synthetic construct
  misc_feature 1..80: note = Artificially Synthesized Probe
  source 1..80: mol_type = other DNA
aacagaccagaattttcctcccaaaatacttcatatacaactgttagcctttaatggctattttctagaataaagacata

SEQ ID NO: 34686 - DNA, 80 bp, synthetic construct
  misc_feature 1..80: note = Artificially Synthesized Probe
  source 1..80: mol_type = other DNA
gaaattcactgagttatacatggcataaccttgatatcctgctcatcccactaattaaaactccagaaaaataaaaagga

SEQ ID NO: 34687 - DNA, 80 bp, synthetic construct
  misc_feature 1..80: note = Artificially Synthesized Probe
  source 1..80: mol_type = other DNA
attccatttctttgattaaatactggtatcattgaggctgggtgttctgacattaaagccaccagtaactgtagcacatc

SEQ ID NO: 34688 - DNA, 80 bp, synthetic construct
  misc_feature 1..80: note = Artificially Synthesized Probe
  source 1..80: mol_type = other DNA
aaattattttacttttagtatgagctgtttcagaaaaagtagcataaatgccctcagtgatataatttctttttgtgatg

SEQ ID NO: 34689 - DNA, 80 bp, synthetic construct
  misc_feature 1..80: note = Artificially Synthesized Probe
  source 1..80: mol_type = other DNA
ccaaaaaatccatcctgcctattataataaaagaaatattttccctatttcccagactgctctccaccttttattgcccc

SEQ ID NO: 34690 - DNA, 80 bp, synthetic construct
  misc_feature 1..80: note = Artificially Synthesized Probe
  source 1..80: mol_type = other DNA
tgttgcaaagaaatatatatatttgtgtgctttgtgtatgatataaatccatttctgcaaaataaaatacaaaccgattt

SEQ ID NO: 34691 - DNA, 80 bp, synthetic construct
  misc_feature 1..80: note = Artificially Synthesized Probe
  source 1..80: mol_type = other DNA
ggggctgaagagacaacaaggaccattcagagtcaaatctgagggtatgattagagatgactagcaatgttaaagctgag

SEQ ID NO: 34692 - DNA, 80 bp, synthetic construct
  misc_feature 1..80: note = Artificially Synthesized Probe
  source 1..80: mol_type = other DNA
cacacctattcatttacatacagtctgtggttatttctgcaatacaatgtcagagctgactatgtgcaacagagacctta

SEQ ID NO: 34693 - DNA, 80 bp, synthetic construct
  misc_feature 1..80: note = Artificially Synthesized Probe
  source 1..80: mol_type = other DNA
tatcctctggttatttaacaaagtgcctttacctttcaggaaatacacaataaagtatttagaggtgagagggtatcatg

SEQ ID NO: 34694 - DNA, 80 bp, synthetic construct
  misc_feature 1..80: note = Artificially Synthesized Probe
  source 1..80: mol_type = other DNA
aggaagtactctaacatactactggtaaaactaaaataatatgacattcctgaaaaaaatttaaaatatttgtcattagc

SEQ ID NO: 34695 - DNA, 80 bp, synthetic construct
  misc_feature 1..80: note = Artificially Synthesized Probe
  source 1..80: mol_type = other DNA
tctgcatatggtggtgtagatggtagcagttccaataaattcagcagacaaatatgtatatagggaaagttgaacctaat

SEQ ID NO: 34696 - DNA, 80 bp, synthetic construct
  misc_feature 1..80: note = Artificially Synthesized Probe
  source 1..80: mol_type = other DNA
gagcacagagatggcatgtcagacatcttgcttaaaagagttctcaaaattaagatttgggcttaggcaataataaataa

SEQ ID NO: 34697 - DNA, 80 bp, synthetic construct
  misc_feature 1..80: note = Artificially Synthesized Probe
  source 1..80: mol_type = other DNA
tatttccttggtctgctcttcataaataccgtatccctggatgatatattatgctttcacagcttcatataacactatgt

SEQ ID NO: 34698 - DNA, 80 bp, synthetic construct
  misc_feature 1..80: note = Artificially Synthesized Probe
  source 1..80: mol_type = other DNA
aaccagtgtaggagacaaaaaagagtggtgaggaacaaaactaaacctttttgttgagtcccacagaatattactgtggg

SEQ ID NO: 34699 - DNA, 80 bp, synthetic construct
  misc_feature 1..80: note = Artificially Synthesized Probe
  source 1..80: mol_type = other DNA
ctaaataaatagctgagttaataaaggaggggaaccaaaacaaacatttgagtttaaaaagtaaagattgagtattcata

SEQ ID NO: 34700 - DNA, 80 bp, synthetic construct
  misc_feature 1..80: note = Artificially Synthesized Probe
  source 1..80: mol_type = other DNA
taatgtcaaattcaaaaatggagtaagaatagaataggtaggaaaaaacaaagcctgggaagagaagaaagaagattcta

SEQ ID NO: 34701 - DNA, 80 bp, synthetic construct
  misc_feature 1..80: note = Artificially Synthesized Probe
  source 1..80: mol_type = other DNA
ttgggacgctcccttgcctactggtttccagttgagtttgactaattgaagacattagcaagaaattaagggacagaaag

SEQ ID NO: 34702 - DNA, 80 bp, synthetic construct
  misc_feature 1..80: note = Artificially Synthesized Probe
  source 1..80: mol_type = other DNA
agcctacattctagcaggaggaggcagaaaattggtaaaaaatataaaacacgccagaatggtgctgtaaaattagcaga

SEQ ID NO: 34703 - DNA, 80 bp, synthetic construct
  misc_feature 1..80: note = Artificially Synthesized Probe
  source 1..80: mol_type = other DNA
tttcaactacttgttgaatggtaatgccactaaataagacaaacaactctgaaggatgaaaaatttgagagaaaaatcag

SEQ ID NO: 34704 - DNA, 80 bp, synthetic construct
  misc_feature 1..80: note = Artificially Synthesized Probe
  source 1..80: mol_type = other DNA
gaaatgctaccaatgatcaatcttaacaatctaccactcttcaatgcttaatccttaaggaaaggtcagcactagtttca

SEQ ID NO: 34705 - DNA, 80 bp, synthetic construct
  misc_feature 1..80: note = Artificially Synthesized Probe
  source 1..80: mol_type = other DNA
taaactcttgtgagatcataatcagaaattcagcactcataaaagcacagctgtgactaaagcaaaagaggtcataaaac

SEQ ID NO: 34706 - DNA, 80 bp, synthetic construct
  misc_feature 1..80: note = Artificially Synthesized Probe
  source 1..80: mol_type = other DNA
caagacccctagtggatgatatatacgattttcagtctgagaactgagatagctactaaatgactaataggaagacagtg

SEQ ID NO: 34707 - DNA, 80 bp, synthetic construct
  misc_feature 1..80: note = Artificially Synthesized Probe
  source 1..80: mol_type = other DNA
tttatcgctacatatatttataggtctggcttcaagtaaacctaagaaacatacacatatcattttccataataaagact

SEQ ID NO: 34708 - DNA, 80 bp, synthetic construct
  misc_feature 1..80: note = Artificially Synthesized Probe
  source 1..80: mol_type = other DNA
caagaaaactacaactaccaatgagtctcttgggattttaaaaaacgtttctgtaaagaagcacagctattaagcaatct

SEQ ID NO: 34709 - DNA, 80 bp, synthetic construct
  misc_feature 1..80: note = Artificially Synthesized Probe
  source 1..80: mol_type = other DNA
atgttctataagtagcaattctacttcaggaatggatgagagtttgtaatcctgtatctttttaaggaaaatgatgctaa

SEQ ID NO: 34710 - DNA, 80 bp, synthetic construct
  misc_feature 1..80: note = Artificially Synthesized Probe
  source 1..80: mol_type = other DNA
agaagactggaaataacttacgtaaaaagtaaagattccccccctaaaatccaatacctcctccacttttaaaagaatgt

SEQ ID NO: 34711 - DNA, 80 bp, synthetic construct
  misc_feature 1..80: note = Artificially Synthesized Probe
  source 1..80: mol_type = other DNA
actgtaaacttatctggcagtaaattttactatactagacaaatctacagtgagattttctgttattttaaatattttct

SEQ ID NO: 34712 - DNA, 80 bp, synthetic construct
  misc_feature 1..80: note = Artificially Synthesized Probe
  source 1..80: mol_type = other DNA
tgcctgtcatggtgcaattgtacttatactatttacaaattgaggaaatgcatgtacctgtggctttatcaacccccact

SEQ ID NO: 34713 - DNA, 80 bp, synthetic construct
  misc_feature 1..80: note = Artificially Synthesized Probe
  source 1..80: mol_type = other DNA
gtatatatatgtatatatatatatgacaaaaataaaaacagaaataccaatgcaaaaatacagaggccaaagagggaatt

SEQ ID NO: 34714 - DNA, 80 bp, synthetic construct
  misc_feature 1..80: note = Artificially Synthesized Probe
  source 1..80: mol_type = other DNA
aacggcaacaagttgagcacagaatacgctatttgcatcagcagtttctgatgaaccacgaaagcacttgtcatagctct

SEQ ID NO: 34715 - DNA, 80 bp, synthetic construct
  misc_feature 1..80: note = Artificially Synthesized Probe
  source 1..80: mol_type = other DNA
atacgtgttctatagagcctggcgtctggacgccgagggcagccccgacccctgtccagcgcggctcccgccaccctcaa

SEQ ID NO: 34716 - DNA, 80 bp, synthetic construct
  misc_feature 1..80: note = Artificially Synthesized Probe
  source 1..80: mol_type = other DNA
tggcacgggggcggaaggaaagcggcgatgcccgggggctttggggatgggcagtccagggggggtccccggagaggggg

SEQ ID NO: 34717 - DNA, 80 bp, synthetic construct
  misc_feature 1..80: note = Artificially Synthesized Probe
  source 1..80: mol_type = other DNA
tagaccccttcctcacactgtacacatatgtttacttcagatggatcacaggtttatcccagagtaaaacctgaaactaa

SEQ ID NO: 34718 - DNA, 80 bp, synthetic construct
  misc_feature 1..80: note = Artificially Synthesized Probe
  source 1..80: mol_type = other DNA
aaaaaaaaagattactttctttttatcattcctttatcttttaaagctttcttgcagtcaggtgcagtgtctcatgcctg

SEQ ID NO: 34719 - DNA, 80 bp, synthetic construct
  misc_feature 1..80: note = Artificially Synthesized Probe
  source 1..80: mol_type = other DNA
gagatcccataacgatgaaggtctgtccagacacttcactatgacaagagatcagccatgagtaggtgggtggagcatcc

SEQ ID NO: 34720 - DNA, 80 bp, synthetic construct
  misc_feature 1..80: note = Artificially Synthesized Probe
  source 1..80: mol_type = other DNA
tggtcagtgatgatgcccccacttccaggcagccctccttcctgagcctaaggtctgctcatccttcagcttcccactga

SEQ ID NO: 34721 - DNA, 80 bp, synthetic construct
  misc_feature 1..80: note = Artificially Synthesized Probe
  source 1..80: mol_type = other DNA
cgctatgcgcccaggaaatgcagggcagcagagactcaagatgccagcgcctgttctggaggcccagatgggccctgcaa

SEQ ID NO: 34722 - DNA, 80 bp, synthetic construct
  misc_feature 1..80: note = Artificially Synthesized Probe
  source 1..80: mol_type = other DNA
gggattacaggtgtgtgccaccatgtccagctaatttttaattttctggtagagatggggtctcactacattgcccaagc

SEQ ID NO: 34723 - DNA, 80 bp, synthetic construct
  misc_feature 1..80: note = Artificially Synthesized Probe
  source 1..80: mol_type = other DNA
aaaaagaaaagaagaaagaagatggcctgggagcccgcaagagcattttccaggcttagggcatcctttgggtctgcaga

SEQ ID NO: 34724 - DNA, 80 bp, synthetic construct
  misc_feature 1..80: note = Artificially Synthesized Probe
  source 1..80: mol_type = other DNA
acacagccagaaagaggaggcaaattccacctccggcccctgtgaccccgccaagcctccaccttaatctttcacacctc

SEQ ID NO: 34725 - DNA, 80 bp, synthetic construct
  misc_feature 1..80: note = Artificially Synthesized Probe
  source 1..80: mol_type = other DNA
tgctaggattacaggtttgagcccctgcacctggtcaacctgagttttaagaggatccctttggcgactggattgaggac

SEQ ID NO: 34726 - DNA, 80 bp, synthetic construct
  misc_feature 1..80: note = Artificially Synthesized Probe
  source 1..80: mol_type = other DNA
ctgtcacaaaaatttatataaataaataaatcccctttaactgtggtctgggaggggattctgggttctgcagtttcccc

SEQ ID NO: 34727 - DNA, 80 bp, synthetic construct
  misc_feature 1..80: note = Artificially Synthesized Probe
  source 1..80: mol_type = other DNA
tgtcccttagtttgggtttatcttcattagattcagtttgtgtatccagggcagtggatcttagatgcaattctgtcttc

SEQ ID NO: 34728 - DNA, 80 bp, synthetic construct
  misc_feature 1..80: note = Artificially Synthesized Probe
  source 1..80: mol_type = other DNA
ctttcactcaccttcatccacacctctctttctggggatattttctgaattatttgagagtgagttgaagacgtgtttct

SEQ ID NO: 34729 - DNA, 80 bp, synthetic construct
  misc_feature 1..80: note = Artificially Synthesized Probe
  source 1..80: mol_type = other DNA
gatcagaggggtagatccaggctcaaagaccagggaccaggtgcccaagaccctgccccgttagtcctcactggagctgg

SEQ ID NO: 34730 - DNA, 80 bp, synthetic construct
  misc_feature 1..80: note = Artificially Synthesized Probe
  source 1..80: mol_type = other DNA
agaaaggtcttggcacataggactaaatgttccatacaagcttcaatttcctaaatgtagttcctccctggccttcctat

SEQ ID NO: 34731 - DNA, 80 bp, synthetic construct
  misc_feature 1..80: note = Artificially Synthesized Probe
  source 1..80: mol_type = other DNA
tgggaatacaggtgcgcgccaccatgcccagctcgcattttttggtagagacagggttttgccatattgattctggatca

SEQ ID NO: 34732 - DNA, 80 bp, synthetic construct
  misc_feature 1..80: note = Artificially Synthesized Probe
  source 1..80: mol_type = other DNA
ccagcctaggtcctacttttatctccaatttacagatgagtccatttgagagaagctgaccctcttgccctgggtctcaa

SEQ ID NO: 34733 - DNA, 80 bp, synthetic construct
  misc_feature 1..80: note = Artificially Synthesized Probe
  source 1..80: mol_type = other DNA
ctataggtgcgcatcaccatgtgtggctaatttttgtattttttataaagatggggatctcactatgttgcccaggctgg

SEQ ID NO: 34734 - DNA, 80 bp, synthetic construct
  misc_feature 1..80: note = Artificially Synthesized Probe
  source 1..80: mol_type = other DNA
atgggagggagagaggtcagtgcctctgctaatcaaggaatccagattgccaccgaaatttctaggcccgagatatttag

SEQ ID NO: 34735 - DNA, 80 bp, synthetic construct
  misc_feature 1..80: note = Artificially Synthesized Probe
  source 1..80: mol_type = other DNA
atcaaccccacatccttctggggggctccgcaagacacccaatgcttcatctgatcctcactgcccattatagaaatgga

SEQ ID NO: 34736 - DNA, 80 bp, synthetic construct
  misc_feature 1..80: note = Artificially Synthesized Probe
  source 1..80: mol_type = other DNA
tctgcaggtctacccagtgcctcttcttcctccatgggaagccaagggtctcacccagactgttctctcctcaggacaaa

SEQ ID NO: 34737 - DNA, 80 bp, synthetic construct; identical to SEQ ID NO: 34722
  misc_feature 1..80: note = Artificially Synthesized Probe
  source 1..80: mol_type = other DNA

SEQ ID NO: 34738 - DNA, 80 bp, synthetic construct
  misc_feature 1..80: note = Artificially Synthesized Probe
  source 1..80: mol_type = other DNA
ttttgtaaagacaaggtcttgggacaatgcccaggctggtctcgaactcctgggctcaaaggattctcccacctcagcct

SEQ ID NO: 34739 - DNA, 80 bp, synthetic construct
  misc_feature 1..80: note = Artificially Synthesized Probe
  source 1..80: mol_type = other DNA
ctggcagtgccagggctggatggggcctgcattgagcttgaaaaaaactataatagaattggttaccattttattttatt

SEQ ID NO: 34740 - DNA, 80 bp, synthetic construct; identical to SEQ ID NO: 34719
  misc_feature 1..80: note = Artificially Synthesized Probe
  source 1..80: mol_type = other DNA

SEQ ID NO: 34741 - DNA, 80 bp, synthetic construct
  misc_feature 1..80: note = Artificially Synthesized Probe
  source 1..80: mol_type = other DNA
ggagccatttccctggagccatggggcctcccaggtcctttcctgtgtcttcattttttacgaattttttcattttttga

SEQ ID NO: 34742 - DNA, 80 bp, synthetic construct; identical to SEQ ID NO: 34717
  misc_feature 1..80: note = Artificially Synthesized Probe
  source 1..80: mol_type = other DNA

SEQ ID NO: 34743 - DNA, 80 bp, synthetic construct; identical to SEQ ID NO: 34716
  misc_feature 1..80: note = Artificially Synthesized Probe
  source 1..80: mol_type = other DNA

SEQ ID NO: 34744 - DNA, 80 bp, synthetic construct; identical to SEQ ID NO: 34715
  misc_feature 1..80: note = Artificially Synthesized Probe
  source 1..80: mol_type = other DNA

SEQ ID NO: 34745 - DNA, 80 bp, synthetic construct
  misc_feature 1..80: note = Artificially Synthesized Probe
  source 1..80: mol_type = other DNA
aaatagtaatttattgggtgaatgacagtgttcagggacccaagctcccctaacagccagaagagggtatgtgtgggcct

SEQ ID NO: 34746 - DNA, 80 bp, synthetic construct
  misc_feature 1..80: note = Artificially Synthesized Probe
  source 1..80: mol_type = other DNA
ctggtggtcatggaggaaacgggaagaagcaagtggggccaggcggcccctgaactctggggttccattcctcacctcct

SEQ ID NO: 34747 - DNA, 80 bp, synthetic construct
  misc_feature 1..80: note = Artificially Synthesized Probe
  source 1..80: mol_type = other DNA
cagctgcctagttaactaatatcactcattatattatccaggtattattttagtacaaatggcattgtacagtaagccat

SEQ ID NO: 34748 - DNA, 80 bp, synthetic construct
  misc_feature 1..80: note = Artificially Synthesized Probe
  source 1..80: mol_type = other DNA
ggaggctgagacaggagaatcatttttacccaggaggtggaggctgcagtgagctgagataccgccactgtactctagac

SEQ ID NO: 34749 - DNA, 80 bp, synthetic construct
  misc_feature 1..80: note = Artificially Synthesized Probe
  source 1..80: mol_type = other DNA
tggatggaccatgatcaagatgagcaacagcatccaggccatgtcggaagatgtcccagttggcgaaggggatctgagca

SEQ ID NO: 34750 - DNA, 80 bp, synthetic construct
  misc_feature 1..80: note = Artificially Synthesized Probe
  source 1..80: mol_type = other DNA
tcttgaacctgtgttgatgtttattctgccactgagaggtacaccagggtttccaaagacagtaggaatatttctgttct

SEQ ID NO: 34751 - DNA, 80 bp, synthetic construct
  misc_feature 1..80: note = Artificially Synthesized Probe
  source 1..80: mol_type = other DNA
ttttcagattctttaactctgtggttaactggtaccaagaggagaaacatacaggttaacaggctcctatcccatgacta

SEQ ID NO: 34752 - DNA, 80 bp, synthetic construct
  misc_feature 1..80: note = Artificially Synthesized Probe
  source 1..80: mol_type = other DNA
gttagctatatgatcccgtgtaagttaactttcttgtgcctgagtgtattttttaaaaaattattttatgggctgggcgc

SEQ ID NO: 34753 - DNA, 80 bp, synthetic construct
  misc_feature 1..80: note = Artificially Synthesized Probe
  source 1..80: mol_type = other DNA
ctcaaaaaaaataattattattttattagctgggcgcggtggctcacgcctgtaatcccagcactttgggaggccaaggc

SEQ ID NO: 34754 - DNA, 80 bp, synthetic construct
  misc_feature 1..80: note = Artificially Synthesized Probe
  source 1..80: mol_type = other DNA
ccacacacatcttttatctgcctgcccctgaaggcatctgaatttgcagtccctgaaccagcagatcactcaagtttctc

SEQ ID NO: 34755 - DNA, 80 bp, synthetic construct
  misc_feature 1..80: note = Artificially Synthesized Probe
  source 1..80: mol_type = other DNA
aagtgagtgtgtcactgacagtcatcgtcctcccgccaattgcgaaggacaaaagagaccaaagctccgatagcacgtac

SEQ ID NO: 34756 - DNA, 80 bp, synthetic construct
  misc_feature 1..80: note = Artificially Synthesized Probe
  source 1..80: mol_type = other DNA
actaattctcccatagcatactgtaagaggaaatacaagactgcttttctttcctcattcaacttcctcccctctcctca

SEQ ID NO: 34757 - DNA, 80 bp, synthetic construct
  misc_feature 1..80: note = Artificially Synthesized Probe
  source 1..80: mol_type = other DNA
gttaccttatcaagcggaagctcatgctgaacatcccggattcttcctcgattagagaagaaaaatttggaaaaaggaat

SEQ ID NO: 34758 - DNA, 80 bp, synthetic construct
  misc_feature 1..80: note = Artificially Synthesized Probe
  source 1..80: mol_type = other DNA
tctagtaaaaaaacaaaaaacttatccagccatggtggtgcatccttgtagtcctggctattcaggaggctaaggtggga

SEQ ID NO: 34759 - DNA, 80 bp, synthetic construct
  misc_feature 1..80: note = Artificially Synthesized Probe
  source 1..80: mol_type = other DNA
gaagagaaagttgtaaacaatagttcagtgaaaatactgtatatatgttataaaacaccactggaagggaaaagtgtgac

SEQ ID NO: 34760 - DNA, 80 bp, synthetic construct
  misc_feature 1..80: note = Artificially Synthesized Probe
  source 1..80: mol_type = other DNA
actaggacaaaattctaggtacaggggaaactggtaggaacaatataagcaagatctctgctctcacagaatttacagaa

SEQ ID NO: 34761 - DNA, 80 bp, synthetic construct
  misc_feature 1..80: note = Artificially Synthesized Probe
  source 1..80: mol_type = other DNA
catgagccacctagcccagcctggactttattcgaattgtaatgggaaaccactgaagggtcctgatatggtttggctgt

SEQ ID NO: 34762 - DNA, 80 bp, synthetic construct
  misc_feature 1..80: note = Artificially Synthesized Probe
  source 1..80: mol_type = other DNA
tggatgtggggcaaaggagaagaattcaggatgaccctcaagtatatgacatgagcaaaatggggactttcttgttgagt

SEQ ID NO: 34763 - DNA, 80 bp, synthetic construct
  misc_feature 1..80: note = Artificially Synthesized Probe
  source 1..80: mol_type = other DNA
taattttgtattttttttagtagagacaacagggtttctccatgttggtcaggctggtgtcgaactcccaacctcaagtg

SEQ ID NO: 34764 - DNA, 80 bp, synthetic construct
  misc_feature 1..80: note = Artificially Synthesized Probe
  source 1..80: mol_type = other DNA
aacatgaagtaactatacatctgattcgtcctctggaagaaatctgtgtcctccttgatattcaccatccaaggccgacc

SEQ ID NO: 34765 - DNA, 80 bp, synthetic construct
  misc_feature 1..80: note = Artificially Synthesized Probe
  source 1..80: mol_type = other DNA
gtttcaaaaaaaaaaaaagaaagccacaggctaaccctacatccactctacaaaacccctggtcattacagaggttgtgg

SEQ ID NO: 34766 - DNA, 80 bp, synthetic construct
  misc_feature 1..80: note = Artificially Synthesized Probe
  source 1..80: mol_type = other DNA
attgctttatcgaaactaacatcaggcttctcctcagaagaagttatatccaaagcaacttctttctggtgatctccttg

SEQ ID NO: 34767 - DNA, 80 bp, synthetic construct
  misc_feature 1..80: note = Artificially Synthesized Probe
  source 1..80: mol_type = other DNA
gagcggagatcccgccactacactccagcctgggcgacagagcgagactctgtctcgggaaaaaaaaaaaaaaaaaaatt

SEQ ID NO: 34768 - DNA, 80 bp, synthetic construct
  misc_feature 1..80: note = Artificially Synthesized Probe
  source 1..80: mol_type = other DNA
tccagcctgggtgacaaaagtgaaattccatctcaaaaaaaataaaaaaaccaaaaattgtagcccgccacagtggctca

SEQ ID NO: 34769 - DNA, 80 bp, synthetic construct
  misc_feature 1..80: note = Artificially Synthesized Probe
  source 1..80: mol_type = other DNA
aaaaaaaaatacaaaaattagctgggtgtggtgacgggcacctatagggtggtggcaagcacctataatcccagctactc

SEQ ID NO: 34770 - DNA, 80 bp, synthetic construct
  misc_feature 1..80: note = Artificially Synthesized Probe
  source 1..80: mol_type = other DNA
agcctactcctaacactttcatatcaccctgatatatattatctcatgccatccacacacaaatcctatgaaacaagtca

SEQ ID NO: 34771 - DNA, 80 bp, synthetic construct
  misc_feature 1..80: note = Artificially Synthesized Probe
  source 1..80: mol_type = other DNA
tgtaaacagtatgttttcacatgtattataaacgttaagggaaccaggaaaaattaacagttgatctgaggtcccggaat

SEQ ID NO: 34772 - DNA, 80 bp, synthetic construct
  misc_feature 1..80: note = Artificially Synthesized Probe
  source 1..80: mol_type = other DNA
aattcagataagtttttcgcctctccttcctgtatcctttcaggcggcaaactccatccctgcgtctttttttttttttt

SEQ ID NO: 34773 - DNA, 80 bp, synthetic construct
  misc_feature 1..80: note = Artificially Synthesized Probe
  source 1..80: mol_type = other DNA
tttttgtttttttttcttactgccagggaagacagaatcaacattgtatctttcactcacttctcacttcctttgccacg

SEQ ID NO: 34774 - DNA, 80 bp, synthetic construct
  misc_feature 1..80: note = Artificially Synthesized Probe
  source 1..80: mol_type = other DNA
cctgttgcattctcttgctgtttttgatctttgatcttttcacaccttctttccaagcccactgacacgtttcttgtttt

SEQ ID NO: 34775 - DNA, 80 bp, synthetic construct
  misc_feature 1..80: note = Artificially Synthesized Probe
  source 1..80: mol_type = other DNA
caccttcttccttggcctcccagacagtggtagtgggctccaccaaatcttaactatacctttgttcacaacaaaactga

SEQ ID NO: 34776 - DNA, 80 bp, synthetic construct
  misc_feature 1..80: note = Artificially Synthesized Probe
  source 1..80: mol_type = other DNA
tgcctgcctaatttttgtatttttagtagagacgaggtttcataatattggtcaggctagtctgcaactcctgacctcag

SEQ ID NO: 34777 - DNA, 80 bp, synthetic construct
  misc_feature 1..80: note = Artificially Synthesized Probe
  source 1..80: mol_type = other DNA
acagtgttcaacaggtacacagtccaatagagggcatgtcatcaaacaaataactgcagcacagttagaaactatagcag

SEQ ID NO: 34778 - DNA, 80 bp, synthetic construct
  misc_feature 1..80: note = Artificially Synthesized Probe
  source 1..80: mol_type = other DNA
tgatttgggtgggattgactctaaatccatccttaagggttgtactaactggttttatccaatcagcatatctcacctct

SEQ ID NO: 34779 - DNA, 80 bp, synthetic construct
  misc_feature 1..80: note = Artificially Synthesized Probe
  source 1..80: mol_type = other DNA
tggcacaatctcagctcaccgcaacctctgcctcccgggttcaaacgattctcctgcctcagcctctgagtagctgggat

SEQ ID NO: 34780 - DNA, 80 bp, synthetic construct
  misc_feature 1..80: note = Artificially Synthesized Probe
  source 1..80: mol_type = other DNA
cttattttctttcttgaaatccctgatttgtgaatcacttctaccatctctccatacccactgtggatgctgctcagttc

SEQ ID NO: 34781 - DNA, 80 bp, synthetic construct
  misc_feature 1..80: note = Artificially Synthesized Probe
  source 1..80: mol_type = other DNA
atctgaaacaagaagatgatagacatagatgtaatagatgttaaaagcctaatacgcctctttgtttgcctggcatcaga

SEQ ID NO: 34782 - DNA, 80 bp, synthetic construct
  misc_feature 1..80: note = Artificially Synthesized Probe
  source 1..80: mol_type = other DNA
tggacgacaacaaggtcaggagttcgagaccagcctggccaacatggtgaaactccatctctactaaaaatacaaaaatt

SEQ ID NO: 34783 - DNA, 80 bp, synthetic construct
  misc_feature 1..80: note = Artificially Synthesized Probe
  source 1..80: mol_type = other DNA
tataccttatacacatagcctgaaggtaatcttatatgaaacttttttttttttttaaatagtctcgctctgtcacctag

SEQ ID NO: 34784 - DNA, 80 bp, synthetic construct
  misc_feature 1..80: note = Artificially Synthesized Probe
  source 1..80: mol_type = other DNA
tgaggcgggtggatcacgagatcaggagttcgagaccagcctggccaacatagtgaaaccctcgtctctactaaatatac

SEQ ID NO: 34785 - DNA, 80 bp, synthetic construct
  misc_feature 1..80: note = Artificially Synthesized Probe
  source 1..80: mol_type = other DNA
tttttttttagcttccaaacattaccaataatttctgaataaaatttcgctccagacagacgaggcgtgcaggcgtgacc

SEQ ID NO: 34786 - DNA, 80 bp, synthetic construct
  misc_feature 1..80: note = Artificially Synthesized Probe
  source 1..80: mol_type = other DNA
cacggtctgttttagattggcttgtccggtgcagctcctcttgatccagagacttacaaactaaaaagattaattttctc

SEQ ID NO: 34787 - DNA, 80 bp, synthetic construct
  misc_feature 1..80: note = Artificially Synthesized Probe
  source 1..80: mol_type = other DNA
tgatctttggcccaggttatgacttactttgagaacttgttaccaactattgggtctaataatactttccccagcttcaa

SEQ ID NO: 34788 - DNA, 80 bp, synthetic construct
  misc_feature 1..80: note = Artificially Synthesized Probe
  source 1..80: mol_type = other DNA
tttataaatcattgattacattagcctagagtgagtgtgggctttctttttcaattaagaaacttatggattggccgggt

SEQ ID NO: 34789 - DNA, 80 bp, synthetic construct
  misc_feature 1..80: note = Artificially Synthesized Probe
  source 1..80: mol_type = other DNA
actccgtctcaaaaaaaaaaaaaaaaaaatagaaaaatcagctgggagtggtggtgcgtgcctgtagtcccagatactca

SEQ ID NO: 34790 - DNA, 80 bp, synthetic construct
  misc_feature 1..80: note = Artificially Synthesized Probe
  source 1..80: mol_type = other DNA
gacttcagacttctggcctccagaactgtgagaataaattcttactgttgtaatccacctgatatgtggtaatgtgtaca

SEQ ID NO: 34791 - DNA, 80 bp, synthetic construct
  misc_feature 1..80: note = Artificially Synthesized Probe
  source 1..80: mol_type = other DNA
aaaaaaaaaagtccttttcagggaccgccaagctgattcacaaagtggctacagcactttatagtcccaccagcactaca

SEQ ID NO: 34792 - DNA, 80 bp, synthetic construct
  misc_feature 1..80: note = Artificially Synthesized Probe
  source 1..80: mol_type = other DNA
actgcagccttgacctcctcggctcaagtggattgtcccatcttggtctcctgagtggctgggactacaggtgtacatga

SEQ ID NO: 34793 - DNA, 80 bp, synthetic construct
  misc_feature 1..80: note = Artificially Synthesized Probe
  source 1..80: mol_type = other DNA
tcacacgtccagcagttttgctgaattcttgaattcatttcaatgatgtttctagatgttccatgggctttgctagcaaa

SEQ ID NO: 34794 - DNA, 80 bp, synthetic construct
  misc_feature 1..80: note = Artificially Synthesized Probe
  source 1..80: mol_type = other DNA
cttgttactgcaatatgcaatttggagcgacttaactgctcacgaggaaatgtctcgtgtcacacggcattttaagtaga

SEQ ID NO: 34795 - DNA, 80 bp, synthetic construct
  misc_feature 1..80: note = Artificially Synthesized Probe
  source 1..80: mol_type = other DNA
tttttttttttctggaaaaccctatctatcacactggccaaattttgaagtatttgagctcacaataaatatacagtata

SEQ ID NO: 34796 - DNA, 80 bp, synthetic construct
  misc_feature 1..80: note = Artificially Synthesized Probe
  source 1..80: mol_type = other DNA
atatgtgttttttaacttcaaacttaagtaagaataggccttgagacatttttccccactcaaaacccaggctggctcta

SEQ ID NO: 34797 - DNA, 80 bp, synthetic construct
  misc_feature 1..80: note = Artificially Synthesized Probe
  source 1..80: mol_type = other DNA
catgcgaatggtgtgatatttgagtatttttattttcctctttggcccaaacaccttggagttaaatgttcagagtatgg

SEQ ID NO: 34798 - DNA, 80 bp, synthetic construct
  misc_feature 1..80: note = Artificially Synthesized Probe
  source 1..80: mol_type = other DNA
aaaaaaaaaaaaaaatcaagatggttcatgccccctcaaccataggtaccccacctttaccaacctggccggtgaccacg

SEQ ID NO: 34799 - DNA, 80 bp, synthetic construct
  misc_feature 1..80: note = Artificially Synthesized Probe
  source 1..80: mol_type = other DNA
ttttggcatttttttttctccctttagggacaaaggatcccttctcatgattatcctaagatctaaggttattctttttg

SEQ ID NO: 34800 - DNA, 80 bp, synthetic construct
  misc_feature 1..80: note = Artificially Synthesized Probe
  source 1..80: mol_type = other DNA
tgctgcctgtgattggtggtcccgatccggggcgtggccccaagggaggcacttagccctactggggatgcgcgcgcaga

SEQ ID NO: 34801 - DNA, 80 bp, synthetic construct
  misc_feature 1..80: note = Artificially Synthesized Probe
  source 1..80: mol_type = other DNA
cctgtaatcccagctactcgggaggctgaggtgggaggatcccatgaacccgggacgcggaggttgcagtgagccgagat

SEQ ID NO: 34802 - DNA, 80 bp, synthetic construct
  misc_feature 1..80: note = Artificially Synthesized Probe
  source 1..80: mol_type = other DNA
tggccagatagtatttcttctactctattttctaaggataagaaaacattttacagaaagaaacatagggcctggcaggt

SEQ ID NO: 34803 - DNA, 80 bp, synthetic construct
  misc_feature 1..80: note = Artificially Synthesized Probe
  source 1..80: mol_type = other DNA
tgcagtggcacgatcttggctcactgcaagcttcacctcctgggtccacgccattctcctgcctcagcctcccaagtagc

SEQ ID NO: 34804 - DNA, 80 bp, synthetic construct
  misc_feature 1..80: note = Artificially Synthesized Probe
  source 1..80: mol_type = other DNA
ttactctaaacatccatattcattaattcttttgtcagactatgctccaggaagcccaggtgtttcgaggacttgcttct

SEQ ID NO: 34805 - DNA, 80 bp, synthetic construct
  misc_feature 1..80: note = Artificially Synthesized Probe
  source 1..80: mol_type = other DNA
tcctcagtttgaatgtttgaaagtatttagattcttttgttttcttcctccttggtctgtgcacagaacactggtaagtt

SEQ ID NO: 34806 - DNA, 80 bp, synthetic construct
  misc_feature 1..80: note = Artificially Synthesized Probe
  source 1..80: mol_type = other DNA
ccatagtattgggattacaggtgtgagccactgtgtccagcctacctggcatgtttttgacattctctaaatgtttactg

SEQ ID NO: 34807 - DNA, 80 bp, synthetic construct
  misc_feature 1..80: note = Artificially Synthesized Probe
  source 1..80: mol_type = other DNA
ggttcacgcctataatcccagaactttgggaagctgaggcgggaggatcagttgagttcagcagtttgagacaagcctga

SEQ ID NO: 34808 - DNA, 80 bp, synthetic construct
  misc_feature 1..80: note = Artificially Synthesized Probe
  source 1..80: mol_type = other DNA
cagatcaaacctttctcagccagaagtggctttggaagctctaacagaagtttcctgcatgcaagtgaggtacccaaagc

SEQ ID NO: 34809 - DNA, 80 bp, synthetic construct
  misc_feature 1..80: note = Artificially Synthesized Probe
  source 1..80: mol_type = other DNA
aaaaaaagaaaacgaaattttacgtatcaaattataacaagcagtgccaggcactgttctaagcactcttcccatatctc

SEQ ID NO: 34810 - DNA, 80 bp, synthetic construct
  misc_feature 1..80: note = Artificially Synthesized Probe
  source 1..80: mol_type = other DNA
ttttattatacagtcatccttcagtatctgaggggaattggttctaggccacccctcccaccaggattccaaaatgtgca

SEQ ID NO: 34811 - DNA, 80 bp, synthetic construct
  misc_feature 1..80: note = Artificially Synthesized Probe
  source 1..80: mol_type = other DNA
tattcacagatgaaggggttccgaaatttttgtcaagaaagactttggtagagtttccacagaaagttctgtctccattc

SEQ ID NO: 34812 - DNA, 80 bp, synthetic construct
  misc_feature 1..80: note = Artificially Synthesized Probe
  source 1..80: mol_type = other DNA
gatcagataccaccaagcaatttggagacagttcctgttgagaataaccacggtttccatgaaaagacagcagcgctgaa

SEQ ID NO: 34813 - DNA, 80 bp, synthetic construct
  misc_feature 1..80: note = Artificially Synthesized Probe
  source 1..80: mol_type = other DNA
cccaaccttcatcttaaagagtatgtccttggcactcttcactatttcttaaccggtataatttttgaaaactggcagct

SEQ ID NO: 34814 - DNA, 80 bp, synthetic construct
  misc_feature 1..80: note = Artificially Synthesized Probe
  source 1..80: mol_type = other DNA
tgcatgatccctaacaagcgcggctccgtcctgtgtctgctctccatcctctgtaccgccgccccttgccttatgtgcct

SEQ ID NO: 34815 - DNA, 80 bp, synthetic construct
  misc_feature 1..80: note = Artificially Synthesized Probe
  source 1..80: mol_type = other DNA
gcatgaatggaagttaagacagacctaatgacctgatttacagaaattgagtcagtacaaatcttaacccaaatatcagc

SEQ ID NO: 34816 - DNA, 80 bp, synthetic construct
  misc_feature 1..80: note = Artificially Synthesized Probe
  source 1..80: mol_type = other DNA
aagttacctgaaagtcctgctataattgttctaggcattttcaaacttttgagaagcctagaagtatacaaactaagatg

SEQ ID NO: 34817 - DNA, 80 bp, synthetic construct
  misc_feature 1..80: note = Artificially Synthesized Probe
  source 1..80: mol_type = other DNA
gtttgacaacactacctacaagaacctgcagcatcatgactacagcacgtacaccttcttagacctcaacctcgaactct

SEQ ID NO: 34818 - DNA, 80 bp, synthetic construct
  misc_feature 1..80: note = Artificially Synthesized Probe
  source 1..80: mol_type = other DNA
ggcgaggcgggtggagcacctgaggtcaggagttgagaccggcctggccaacatagtgaaaccccatctctactaaaaat

SEQ ID NO: 34819 - DNA, 80 bp, synthetic construct
  misc_feature 1..80: note = Artificially Synthesized Probe
  source 1..80: mol_type = other DNA
taacctcccatcccttgtgatagataactttaagtcacacctttgggggcaatgtggggggctcctgtgcatcacatgga

SEQ ID NO: 34820 - DNA, 80 bp, synthetic construct
  misc_feature 1..80: note = Artificially Synthesized Probe
  source 1..80: mol_type = other DNA
tttctatcctgctatttgcattttttggtttttcatttaatagttctcaagctgggatccgtggaactactgtgatgggc

SEQ ID NO: 34821 - DNA, 80 bp, synthetic construct
  misc_feature 1..80: note = Artificially Synthesized Probe
  source 1..80: mol_type = other DNA
tgcctcacgcctgtaatcccagcactttgggaggctgaggtgggcagatcacgaggtcaggagatcgagaccgtcctggc

SEQ ID NO: 34822 - DNA, 80 bp, synthetic construct
  misc_feature 1..80: note = Artificially Synthesized Probe
  source 1..80: mol_type = other DNA
cccgttgttaacatctccatctttttctacatatttctcaagtccaaatttttgcatctcacttgccccatcctacgata

SEQ ID NO: 34823 - DNA, 80 bp, synthetic construct
  misc_feature 1..80: note = Artificially Synthesized Probe
  source 1..80: mol_type = other DNA
atctgataaaggatcagggttaggttaggcctcatctcttgctgaagatattaaaaaaagacggaaccaaagggagaaac

SEQ ID NO: 34824 - DNA, 80 bp, synthetic construct
  misc_feature 1..80: note = Artificially Synthesized Probe
  source 1..80: mol_type = other DNA
tgcccatgttcagagtacccatgttgtgccatatatgttttgagaatcaactgacatagtacataattagagtacctggc

SEQ ID NO: 34825 - DNA, 80 bp, synthetic construct
  misc_feature 1..80: note = Artificially Synthesized Probe
  source 1..80: mol_type = other DNA
agtgagtgtacttttaggtcagccctatcaagtcccaaaaacatttgaattctgcaaaacctttggcactgaaggattca

SEQ ID NO: 34826 - DNA, 80 bp, synthetic construct
  misc_feature 1..80: note = Artificially Synthesized Probe
  source 1..80: mol_type = other DNA
ggattacaggcgtgagccaccgcgctcagccaaaatgcccctgatagtgtggtagggatttcctttattgtttgtttgct

SEQ ID NO: 34827 - DNA, 80 bp, synthetic construct
  misc_feature 1..80: note = Artificially Synthesized Probe
  source 1..80: mol_type = other DNA
agtgcagtggcatgatctcggctcactataacttctgcttcctgggttcaagcgattctcctgcttcagcctcccaagta

SEQ ID NO: 34828 - DNA, 80 bp, synthetic construct
  misc_feature 1..80: note = Artificially Synthesized Probe
  source 1..80: mol_type = other DNA
cagcgcctggccaaaatgtttttatgtttatttttcttagtatgaaactccagcgtattaaagagcattgagaacggttg

SEQ ID NO: 34829 - DNA, 80 bp, synthetic construct
  misc_feature 1..80: note = Artificially Synthesized Probe
  source 1..80: mol_type = other DNA
gatggcctggggaggaatgaaacttggaaggcggtatcacggtaaactacctttatctgtgatgattttatttccttaaa

SEQ ID NO: 34830 - DNA, 80 bp, synthetic construct
  misc_feature 1..80: note = Artificially Synthesized Probe
  source 1..80: mol_type = other DNA
tggtaaaggaagacataggcacacttgtatattggcacaaacttattgagagcagtttgaccaaattgcgcatgtccttt

SEQ ID NO: 34831 - DNA, 80 bp, synthetic construct
  misc_feature 1..80: note = Artificially Synthesized Probe
  source 1..80: mol_type = other DNA
gtagctgggattacaggcacatgctaccacgcctggctaatttttgtatttttagtagagacaggatttcaccatgttgg

SEQ ID NO: 34832 - DNA, 80 bp, synthetic construct
  misc_feature 1..80: note = Artificially Synthesized Probe
  source 1..80: mol_type = other DNA
cttgccttcctggccttgccttcccctattccagctttctgccaggtaaacagtactttccagcactaccaaataaagat

SEQ ID NO: 34833 - DNA, 80 bp, synthetic construct
  misc_feature 1..80: note = Artificially Synthesized Probe
  source 1..80: mol_type = other DNA
agtctgtatttatcagtgatggttatttcctaatacccaggaggcatccatgtgagccacccttccattgctttaagacc

SEQ ID NO: 34834 - DNA, 80 bp, synthetic construct
  misc_feature 1..80: note = Artificially Synthesized Probe
  source 1..80: mol_type = other DNA
cagagctggcgacagcaggaggaggagcagcggctcttcagggagcgagcccgggccaaggaggaagagctgcgtgagag

SEQ ID NO: 34835 - DNA, 80 bp, synthetic construct
  misc_feature 1..80: note = Artificially Synthesized Probe
  source 1..80: mol_type = other DNA
ctgggattacaggtgtgagccaccacacctggccaattcataatttatcatagccttatgaagatgcaactatgttctcc

SEQ ID NO: 34836 - DNA, 80 bp, synthetic construct
  misc_feature 1..80: note = Artificially Synthesized Probe
  source 1..80: mol_type = other DNA
agattctcactcgaatcacagtgacctccaatgcaattggtgagccacgatggtccccttcaacagacaaggaaattttt

SEQ ID NO: 34837 - DNA, 80 bp, synthetic construct
  misc_feature 1..80: note = Artificially Synthesized Probe
  source 1..80: mol_type = other DNA
cagcctggtgaagataaggagttggttaaggtaacaccaggggctacttatgttattcggaggcagtgtctcaccctgtc

SEQ ID NO: 34838 - DNA, 80 bp, synthetic construct
  misc_feature 1..80: note = Artificially Synthesized Probe
  source 1..80: mol_type = other DNA
aaaaaaaaaaaaaatcccaaataaactagatgatgcctcatcccattctaagtccttcagattagggctacagctggcct

SEQ ID NO: 34839 - DNA, 80 bp, synthetic construct
  misc_feature 1..80: note = Artificially Synthesized Probe
  source 1..80: mol_type = other DNA
gaagcaggatagttcataaatagaaaaatgaaggatgagaaggcgcttccactgtccaaacgtgaccactgccaccccgt

SEQ ID NO: 34840 - DNA, 80 bp, synthetic construct
  misc_feature 1..80: note = Artificially Synthesized Probe
  source 1..80: mol_type = other DNA
caagtagatgggattacaggcatgtggcaacatgcccggctaatttttgtatttttagtacaagcggggtttcaccatgt

SEQ ID NO: 34841 - DNA, 80 bp, synthetic construct
  misc_feature 1..80: note = Artificially Synthesized Probe
  source 1..80: mol_type = other DNA
acccgggaggtggagctcgcagtaagctgagatcgcgccaccgcactccagcctgggcgacagggcaagactcgtctcaa

SEQ ID NO: 34842 - DNA, 80 bp, synthetic construct
  misc_feature 1..80: note = Artificially Synthesized Probe
  source 1..80: mol_type = other DNA
aacctggcctccgtggtcccaggtgagagggctgcgttcatggattgggactcctagcgtggtgagcaaaacgggactca

SEQ ID NO: 34843 - DNA, 80 bp, synthetic construct
  misc_feature 1..80: note = Artificially Synthesized Probe
  source 1..80: mol_type = other DNA
gcagatcacctgaggtcgggagtttgagaccagcctgaccaacatggagaaaccccctctctactaataatacaaaatta

SEQ ID NO: 34844 - DNA, 80 bp, synthetic construct
  misc_feature 1..80: note = Artificially Synthesized Probe
  source 1..80: mol_type = other DNA
tccatggttgatgaaattcacgaatgcagaacccgtggacacagagggctgactgtggctcagtggcatgaagtagtttc

SEQ ID NO: 34845 - DNA, 80 bp, synthetic construct
  misc_feature 1..80: note = Artificially Synthesized Probe
  source 1..80: mol_type = other DNA
gtccctggcatagtaacctcaggcccaaatcctccagtgcatttcctgtcaggtccaactcaaccagatgtgggttggtg

SEQ ID NO: 34846 - DNA, 80 bp, synthetic construct
  misc_feature 1..80: note = Artificially Synthesized Probe
  source 1..80: mol_type = other DNA
tggcccatacctggctaattaaaaaaaaaaaatttttgtaggtcgagtgcagtggctcacacctgtaattccagcacttt

SEQ ID NO: 34847 - DNA, 80 bp, synthetic construct
  misc_feature 1..80: note = Artificially Synthesized Probe
  source 1..80: mol_type = other DNA
tcaagaaaagcaacaagaacaatataaaatgttttgatgctttgtagtcaaatacattcacaaaggttgcccttaaagaa

SEQ ID NO: 34848 - DNA, 80 bp, synthetic construct
  misc_feature 1..80: note = Artificially Synthesized Probe
  source 1..80: mol_type = other DNA
ccagcctgggtgacagagcatatcagtgtctcaaaaatttaaaaaaaaaaaaagtaaaaaaaagaaaaaaatttggagac

SEQ ID NO: 34849 - DNA, 80 bp, synthetic construct
  misc_feature 1..80: note = Artificially Synthesized Probe
  source 1..80: mol_type = other DNA
ttcaccccccggctgcccagggcatttcggtacagagacagctctatcaggtttggattggtgcacagggccgctgccag

SEQ ID NO: 34850 - DNA, 80 bp, synthetic construct
  misc_feature 1..80: note = Artificially Synthesized Probe
  source 1..80: mol_type = other DNA
ccttggtgacagagccacactctctcaagaaaaagggacttagtaatatttgttgattgaataaattctcccagacatcg

SEQ ID NO: 34851 - DNA, 80 bp, synthetic construct
  misc_feature 1..80: note = Artificially Synthesized Probe
  source 1..80: mol_type = other DNA
cagctgcaccaacagcgtgtgcgctcctgcggagcacctcgcgcggtcttccccgtccgcgctgtaggtggcgccataca

SEQ ID NO: 34852 - DNA, 80 bp, synthetic construct
  misc_feature 1..80: note = Artificially Synthesized Probe
  source 1..80: mol_type = other DNA
aagagaggctcgttgtccctcacgtaattgaagacttggcccgcctgctctgcattgtggaaatacttgtagaagtattc

SEQ ID NO: 34853 - DNA, 80 bp, synthetic construct
  misc_feature 1..80: note = Artificially Synthesized Probe
  source 1..80: mol_type = other DNA
ctgcatggggtttgagtgctccttcaccagcaggagccgggtgtaccggtggctgaggttgacacattcccctaggcgcg

SEQ ID NO: 34854 - DNA, 80 bp, synthetic construct
  misc_feature 1..80: note = Artificially Synthesized Probe
  source 1..80: mol_type = other DNA
ggctgtgcttctccaactttaagacgcatacatatcatgcagcaatcttgttagaaatgcagtccctgggctaagtgcag

SEQ ID NO: 34855 - DNA, 80 bp, synthetic construct
  misc_feature 1..80: note = Artificially Synthesized Probe
  source 1..80: mol_type = other DNA
tgtctatttccagaatgctttcagcattctaaacagaaactccatatccattaaatattaactcataatttctcctctcc

SEQ ID NO: 34856 - DNA, 80 bp, synthetic construct
  misc_feature 1..80: note = Artificially Synthesized Probe
  source 1..80: mol_type = other DNA
atgctgattcatgactcgagtgagtggtgaatcctgccccttcacaagcctcagaggatgaattatggttttgctaaatc

SEQ ID NO: 34857 - DNA, 80 bp, synthetic construct
  misc_feature 1..80: note = Artificially Synthesized Probe
  source 1..80: mol_type = other DNA
ctgtgtagatgaatacatgtaggtacatggcttgaggctcaccttttcttggagtgacaagagagacttccagaaggcat

SEQ ID NO: 34858 - DNA, 80 bp, synthetic construct
  misc_feature 1..80: note = Artificially Synthesized Probe
  source 1..80: mol_type = other DNA
cctcttgaagtgttggaaatagtggtatgggccatcgtgcccagcccaaaaaaggccttcgtttggatatatcataagat

SEQ ID NO: 34859 - DNA, 80 bp, synthetic construct
  misc_feature 1..80: note = Artificially Synthesized Probe
  source 1..80: mol_type = other DNA
ggttatcattgagaggaaaggggaaaatagggaattgtttaatgggtatcgagtttgttttgcaagatgaagagttctgc

SEQ ID NO: 34860 - DNA, 80 bp, synthetic construct
  misc_feature 1..80: note = Artificially Synthesized Probe
  source 1..80: mol_type = other DNA
gccactgcagctggttggcaatttttttttttttttgagagagggtcttgctctgttgctcaggctggagtagtgtggca

SEQ ID NO: 34861 - DNA, 80 bp, synthetic construct
  misc_feature 1..80: note = Artificially Synthesized Probe
  source 1..80: mol_type = other DNA
ctctcagtagactaaacggatgcagtccggggaagaacgctcggcaaatggttatgcattgtcaatgctgggagagattt

SEQ ID NO: 34862 - DNA, 80 bp, synthetic construct
  misc_feature 1..80: note = Artificially Synthesized Probe
  source 1..80: mol_type = other DNA
gttttttcagtcattaaagactttgttttttacagagatgtttcccagcacactactactggcacacctcattaacgacg

SEQ ID NO: 34863 - DNA, 80 bp, synthetic construct
  misc_feature 1..80: note = Artificially Synthesized Probe
  source 1..80: mol_type = other DNA
tgccatctctgccacttcagcaatagcctatatttgctgagcacttgctacctgctctgaattgtgttaagcactttgca

SEQ ID NO: 34864 - DNA, 80 bp, synthetic construct
  misc_feature 1..80: note = Artificially Synthesized Probe
  source 1..80: mol_type = other DNA
taatacttttccaggcaaagaagatggagaatattccaggcagaacacagcatgaacaaagaccaaagggatgaaattag

SEQ ID NO: 34865 - DNA, 80 bp, synthetic construct
  misc_feature 1..80: note = Artificially Synthesized Probe
  source 1..80: mol_type = other DNA
aaaaaaaaaggatacctcatctctttcttaatttatttttgagatggggtttcactctgttacccagcctggagtacagt

SEQ ID NO: 34866 - DNA, 80 bp, synthetic construct
  misc_feature 1..80: note = Artificially Synthesized Probe
  source 1..80: mol_type = other DNA
agcctcctgagaagctgggatcacagacgtataccaccacacctggctaattttttttatttttggtagagacagagcct

SEQ ID NO: 34867 - DNA, 80 bp, synthetic construct
  misc_feature 1..80: note = Artificially Synthesized Probe
  source 1..80: mol_type = other DNA
tttttagtagagacagggtttcattgtgttcgtcaggctggtctcgaactcctgacctcaggtgatccacccgcctcagc

SEQ ID NO: 34868 - DNA, 80 bp, synthetic construct
  misc_feature 1..80: note = Artificially Synthesized Probe
  source 1..80: mol_type = other DNA
aatagtcagcttgggattcttttctttcacttcctccaacagcttcttgatttccaaattagtttcataggtcttcaacc

SEQ ID NO: 34869 - DNA, 80 bp, synthetic construct
  misc_feature 1..80: note = Artificially Synthesized Probe
  source 1..80: mol_type = other DNA
aatagtggcaaatcaaaccttcagtagaactaagagaatgccagagtgaaccccagggttaatgatagcaaacttggctc

SEQ ID NO: 34870 - DNA, 80 bp, synthetic construct
  misc_feature 1..80: note = Artificially Synthesized Probe
  source 1..80: mol_type = other DNA
agcagagcaaaacgttgtctcagaaaagaaaagacaaaggcaagaagaaactaaaggtagattacgttaaaataagtcac

SEQ ID NO: 34871 - DNA, 80 bp, synthetic construct
  misc_feature 1..80: note = Artificially Synthesized Probe
  source 1..80: mol_type = other DNA
ggccaggtgcagtggctcatgcctgtaatcccagcactttgggaggccaaggcgagaagatcacctgaggtcaggagctc

SEQ ID NO: 34872 - DNA, 80 bp, synthetic construct
  misc_feature 1..80: note = Artificially Synthesized Probe
  source 1..80: mol_type = other DNA
aaaacccatacctgagtatcttcaaggatccagttctttgtcttagaaccccaaagagcttaattatgccactcttccac

SEQ ID NO: 34873 - DNA, 80 bp, synthetic construct
  misc_feature 1..80: note = Artificially Synthesized Probe
  source 1..80: mol_type = other DNA
tactgagctagtgagaaagtagaatgatttatggctcataacttacacgaggatcccccataaggccctgtaggccactg

SEQ ID NO: 34874 - DNA, 80 bp, synthetic construct
  misc_feature 1..80: note = Artificially Synthesized Probe
  source 1..80: mol_type = other DNA
tgacgtgcagattctctttgcattaggattgcagattctagttggaaaataggttgcatccaagagatgcaactgacaaa

SEQ ID NO: 34875 - DNA, 80 bp, synthetic construct
  misc_feature 1..80: note = Artificially Synthesized Probe
  source 1..80: mol_type = other DNA
aaagaagaaaaagaaaatcgcctaccgtaggtgttttaggttacagtttggattctctaatgcctgacagagaatccaca

SEQ ID NO: 34876 - DNA, 80 bp, synthetic construct
  misc_feature 1..80: note = Artificially Synthesized Probe
  source 1..80: mol_type = other DNA
gtaggaattgacccatgaactggagctatatacttccaggtgggcttgcacataaaagcatgcaaatgggccgggcacag

SEQ ID NO: 34877 - DNA, 80 bp, synthetic construct
  misc_feature 1..80: note = Artificially Synthesized Probe
  source 1..80: mol_type = other DNA
gtctttaactgacacattctacatatataggggtatagtgtgatgttttggtgcaggtacacttcgtataacgatcaggt

SEQ ID NO: 34878 - DNA, 80 bp, synthetic construct
  misc_feature 1..80: note = Artificially Synthesized Probe
  source 1..80: mol_type = other DNA
ggcagtactatgtcataggaatttgaaagaacacacacaaagcatcagatccgagaaccaactactcatctcaaatcttc

SEQ ID NO: 34879 - DNA, 80 bp, synthetic construct
  misc_feature 1..80: note = Artificially Synthesized Probe
  source 1..80: mol_type = other DNA
ctcttctatagccccagaactaaaccagagctgcccatgggaagaggagacttacgacaacatctgcaggaagtgttttg

SEQ ID NO: 34880 - DNA, 80 bp, synthetic construct
  misc_feature 1..80: note = Artificially Synthesized Probe
  source 1..80: mol_type = other DNA
tgtagctgggactagaaggggcaaattgatgcttaatactcaaaataaaaattttatcctggccaggcgcagtggttcat

SEQ ID NO: 34881 - DNA, 80 bp, synthetic construct
  misc_feature 1..80: note = Artificially Synthesized Probe
  source 1..80: mol_type = other DNA
aaaggctgggggccactgctctcaatcccaacaattaggcaaggtgcagtcaggaatagcatgtccctaaagctggaacc

SEQ ID NO: 34882 - DNA, 80 bp, synthetic construct
  misc_feature 1..80: note = Artificially Synthesized Probe
  source 1..80: mol_type = other DNA
cttgcagtgagccgagattgctgcactgcactccagcctggggaacatagcgagactgtctcaaaaaaaaaaaaaaaagt

SEQ ID NO: 34883 - DNA, 80 bp, synthetic construct
  misc_feature 1..80: note = Artificially Synthesized Probe
  source 1..80: mol_type = other DNA
ggaagctttgtttcacttccagaaacttgaggttgctgtttgagctgaagagagagcagaaatctgtccagaggcgaaga

SEQ ID NO: 34884 - DNA, 80 bp, synthetic construct
  misc_feature 1..80: note = Artificially Synthesized Probe
  source 1..80: mol_type = other DNA
aaaacagttcttacctttcaaattcaatgtccagttcaaaatccatgtaattctccaggaacaccccctttgctacctgc

SEQ ID NO: 34885 - DNA, 80 bp, synthetic construct
  misc_feature 1..80: note = Artificially Synthesized Probe
  source 1..80: mol_type = other DNA
tgtcctcctccaggaagccctccacccttacgtagatcggctgctgcgccaggagctggaggtccctcagtgccctgggc

SEQ ID NO: 34886 - DNA, 80 bp, synthetic construct
  misc_feature 1..80: note = Artificially Synthesized Probe
  source 1..80: mol_type = other DNA
tcttctgcatctcccagctcaggattatctatttcttgcacctgtccgtcctctgtaaaatacttagatgtaagcctgac

SEQ ID NO: 34887 - DNA, 80 bp, synthetic construct
  misc_feature 1..80: note = Artificially Synthesized Probe
  source 1..80: mol_type = other DNA
aaatgaaaccacagtttcctgtgtgccaagaacaagactgttcctgctgtacagtgagtggtaaaatattccaaagactg

SEQ ID NO: 34888 - DNA, 80 bp, synthetic construct
  misc_feature 1..80: note = Artificially Synthesized Probe
  source 1..80: mol_type = other DNA
tcaaacaaacaaaaaaacaaatcagcaaacactacaaaccaagacttcctcgccaccaaccctcagagccacttgtttaa

SEQ ID NO: 34889 - DNA, 80 bp, synthetic construct
  misc_feature 1..80: note = Artificially Synthesized Probe
  source 1..80: mol_type = other DNA
tgatagaggtggacagctttacccttggagggaacagcaaatctttttccccagctgtgacgtgtggggaaaaggaggac

SEQ ID NO: 34890 - DNA, 80 bp, synthetic construct
  misc_feature 1..80: note = Artificially Synthesized Probe
  source 1..80: mol_type = other DNA
cacaggtgtggaggggcaggccaccccttcagtgaggtataattacatatatcctattttaggatggagcaggaagagca

SEQ ID NO: 34891 - DNA, 80 bp, synthetic construct
  misc_feature 1..80: note = Artificially Synthesized Probe
  source 1..80: mol_type = other DNA
gccaccaggcctggccaagtattttttttcccaagtacatttttttctttttttcttttttttgagatggagtctccctc

SEQ ID NO: 34892 - DNA, 80 bp, synthetic construct
  misc_feature 1..80: note = Artificially Synthesized Probe
  source 1..80: mol_type = other DNA
cgtgagccaccgcgcccagcctacttttttttttttttaaacagggtcttcatctcatccaggctggagtgcagtggctc

SEQ ID NO: 34893 - DNA, 80 bp, synthetic construct
  misc_feature 1..80: note = Artificially Synthesized Probe
  source 1..80: mol_type = other DNA
aagacaaagaaatcgatgcaagaaccagcactcacctccctcaggtcaggtcttgcttccagcctgtgtttcctgcaaag

SEQ ID NO: 34894 - DNA, 80 bp, synthetic construct
  misc_feature 1..80: note = Artificially Synthesized Probe
  source 1..80: mol_type = other DNA
cgggtggatcacctgaggtcaggagttggagaccagactggccaacgtggtgaaactctgtctctactaaacatacaaaa

SEQ ID NO: 34895 - DNA, 80 bp, synthetic construct
  misc_feature 1..80: note = Artificially Synthesized Probe
  source 1..80: mol_type = other DNA
taaaaaaaaaaaaaaaagatggccaggcgcagtggttcatgaatgtaatcccagcactttgggaggctgaggcgggagga

SEQ ID NO: 34896 - DNA, 80 bp, synthetic construct
  misc_feature 1..80: note = Artificially Synthesized Probe
  source 1..80: mol_type = other DNA
ctccccctacgcatctcttccttggctgttcatttgtatcctttaaaatatgaaagggcgggttgcccctccacacctgt

SEQ ID NO: 34897 - DNA, 80 bp, synthetic construct
  misc_feature 1..80: note = Artificially Synthesized Probe
  source 1..80: mol_type = other DNA
ctacttctttctacacagacacagttacaatctgatctctctttcttttccccacaaaaatatcctttgtagaccaggca

SEQ ID NO: 34898 - DNA, 80 bp, synthetic construct
  misc_feature 1..80: note = Artificially Synthesized Probe
  source 1..80: mol_type = other DNA
aggcttttgtttaaggatggtttcagatgtttttcagaccttgaattccagccaaatagctgacactaaccagtttgaag

SEQ ID NO: 34899 - DNA, 80 bp, synthetic construct
  misc_feature 1..80: note = Artificially Synthesized Probe
  source 1..80: mol_type = other DNA
tgcagtaaaaagaaaaaaaaaagcattctaagtcacaggatgagataagtcagcacaagatacaggtcataaggaccttg

SEQ ID NO: 34900 - DNA, 80 bp, synthetic construct
  misc_feature 1..80: note = Artificially Synthesized Probe
  source 1..80: mol_type = other DNA
ataaagcatccagtcaaactccatcaaaaccaagatagtgacgagagtaacctctggttgtcctcaccgctccactccca

SEQ ID NO: 34901 - DNA, 80 bp, synthetic construct
  misc_feature 1..80: note = Artificially Synthesized Probe
  source 1..80: mol_type = other DNA
tttctggtatgagattcaagaacccaccatgcccagctcgtccttacttgcttttaaaaaatatcattggtggccgggcg

SEQ ID NO: 34902 - DNA, 80 bp, synthetic construct
  misc_feature 1..80: note = Artificially Synthesized Probe
  source 1..80: mol_type = other DNA
aagactgtgtctcaaaaataaataaataaataaataaatagccaactgtgatcgtgcatgcctgtagtcccagctactca

SEQ ID NO: 34903 - DNA, 80 bp, synthetic construct
  misc_feature 1..80: note = Artificially Synthesized Probe
  source 1..80: mol_type = other DNA
ttatcataccttaatttgcctccaccacccccagaagctccaagtctctacgccttttcatttatgtatgtatgtattta

SEQ ID NO: 34904 - DNA, 80 bp, synthetic construct
  misc_feature 1..80: note = Artificially Synthesized Probe
  source 1..80: mol_type = other DNA
ctagggcaggagaatcgcttggtttgggattttctccctgaggcacttgctatctccaggattatgggtctcaggtgaaa

SEQ ID NO: 34905 - DNA, 80 bp, synthetic construct
  misc_feature 1..80: note = Artificially Synthesized Probe
  source 1..80: mol_type = other DNA
gttttgggtctggtgcctggcgccgggctacctgcctttggtttcacttccttgtttttttctttttctttttttttttt

SEQ ID NO: 34906 - DNA, 80 bp, synthetic construct
  misc_feature 1..80: note = Artificially Synthesized Probe
  source 1..80: mol_type = other DNA
gtttttgaattgtggtttcttatcagttcatccgatactctgttctaaccacgtagttcctcttttggatctccaaaccc

SEQ ID NO: 34907 - DNA, 80 bp, synthetic construct
  misc_feature 1..80: note = Artificially Synthesized Probe
  source 1..80: mol_type = other DNA
caaggtcaaagaagaaataacaaagggcatttttaaaaatgctagaactgagtggtggtgaaattgctgttgaaatgtgt

SEQ ID NO: 34908 - DNA, 80 bp, synthetic construct
  misc_feature 1..80: note = Artificially Synthesized Probe
  source 1..80: mol_type = other DNA
tacctccaaattatggtagggtgtccatattaagaaggtagaaaaaggtcgggggaagtggatgcctgtaatcccagaac

SEQ ID NO: 34909 - DNA, 80 bp, synthetic construct
  misc_feature 1..80: note = Artificially Synthesized Probe
  source 1..80: mol_type = other DNA
tgccttgccttcattttctcaaggaaagtgaaaaatgggtaggatcatggcaatcactactgtgtagcaatgtttagagg

SEQ ID NO: 34910 - DNA, 80 bp, synthetic construct
  misc_feature 1..80: note = Artificially Synthesized Probe
  source 1..80: mol_type = other DNA
cactgcaacctccgcctcctgggttcaagcaattctctgcttcagcctcccaagtagctgggattacaggcacccgccac

SEQ ID NO: 34911 - DNA, 80 bp, synthetic construct
  misc_feature 1..80: note = Artificially Synthesized Probe
  source 1..80: mol_type = other DNA
taaccaatcaagcagaatctctaggcgttcgtgctttgaaatgaggctccacataggtaagtttaacaggcagtcaagat

SEQ ID NO: 34912 - DNA, 80 bp, synthetic construct; identical to SEQ ID NO: 34911
  misc_feature 1..80: note = Artificially Synthesized Probe
  source 1..80: mol_type = other DNA

SEQ ID NO: 34913 - DNA, 80 bp, synthetic construct
  misc_feature 1..80: note = Artificially Synthesized Probe
  source 1..80: mol_type = other DNA
ttcttctgttagaaattaagtggttctgcctgtctcagtggctcacgcctgtaatcgcagcgctttgggaggccgaggcg

SEQ ID NO: 34914 - DNA, 80 bp, synthetic construct
  misc_feature 1..80: note = Artificially Synthesized Probe
  source 1..80: mol_type = other DNA
actacagccgcctgtcaccaacctggctaattttcgtatttttagtcgatatagggtttcactatgttggccaggctggt

SEQ ID NO: 34915 - DNA, 80 bp, synthetic construct
  misc_feature 1..80: note = Artificially Synthesized Probe
  source 1..80: mol_type = other DNA
tcatattcagcccagttttcacgaagtttcttgtctcctgggtgatccacgtagctccccacttccttatctgatctatg

SEQ ID NO: 34916 - DNA, 80 bp, synthetic construct
  misc_feature 1..80: note = Artificially Synthesized Probe
  source 1..80: mol_type = other DNA
caactggtagaaatcctcaccacccattgtgacagctactgggtggagatggcgagcctccaggtctttgaaaagatgca

SEQ ID NO: 34917 - DNA, 80 bp, synthetic construct
  misc_feature 1..80: note = Artificially Synthesized Probe
  source 1..80: mol_type = other DNA
tacaaaggacatgaactcatcattttttatggctgcattgtattccatggtatatatgtgccacattttcttaatccagt

SEQ ID NO: 34918 - DNA, 80 bp, synthetic construct
  misc_feature 1..80: note = Artificially Synthesized Probe
  source 1..80: mol_type = other DNA
cactgtgcctggctaaattttgtattttaatagagatggggtttcactatgttggccaggctggtcttgaactcctgacc

SEQ ID NO: 34919 - DNA, 80 bp, synthetic construct
  misc_feature 1..80: note = Artificially Synthesized Probe
  source 1..80: mol_type = other DNA
cctatctttttatttaaaaattgccagttttatttcagctagagatcactttttagcataatgtttcctgtctttaacaa

SEQ ID NO: 34920 - DNA, 80 bp, synthetic construct
  misc_feature 1..80: note = Artificially Synthesized Probe
  source 1..80: mol_type = other DNA
ccggaaaaaggctaaaactacaaagaagattgtgctaaggcttgagtgccttgagcccaactgcagatctaagaatgctg

SEQ ID NO: 34921 - DNA, 80 bp, synthetic construct
  misc_feature 1..80: note = Artificially Synthesized Probe
  source 1..80: mol_type = other DNA
gattacaggtacctgccaccaggcccggctaattttttgtggtgtttgtagagatggggtttcaccatgatggccaggct

SEQ ID NO: 34922 - DNA, 80 bp, synthetic construct
  misc_feature 1..80: note = Artificially Synthesized Probe
  source 1..80: mol_type = other DNA
tgtgcactgccacacctgactaatatttgtatttttggtagggacagtttcactatgttgccagatatggtgtcaaactc

SEQ ID NO: 34923 - DNA, 80 bp, synthetic construct
  misc_feature 1..80: note = Artificially Synthesized Probe
  source 1..80: mol_type = other DNA
agccaccatgcccggctgattccaccttgttcttacattctttcccagttcattttaaatttatctacctcatcagaaac

SEQ ID NO: 34924 - DNA, 80 bp, synthetic construct
  misc_feature 1..80: note = Artificially Synthesized Probe
  source 1..80: mol_type = other DNA
ccttccgtaagaatagagggaagaacgaacgttgcagagaattagaactcagtttgtagaaagttaggagcacagcgcag

SEQ ID NO: 34925 - DNA, 80 bp, synthetic construct
  misc_feature 1..80: note = Artificially Synthesized Probe
  source 1..80: mol_type = other DNA
gagtcttttgggtaggtgacttgcctgagctgactttgtgataggttttttctgttttttttgtttttgaaatagagtct

SEQ ID NO: 34926 - DNA, 80 bp, synthetic construct
  misc_feature 1..80: note = Artificially Synthesized Probe
  source 1..80: mol_type = other DNA
ttgacttttgatacagcaagtatttcttgctatggctctgtataatagaggtgagtaacttggttgaaggaattgtttgc

SEQ ID NO: 34927 - DNA, 80 bp, synthetic construct
  misc_feature 1..80: note = Artificially Synthesized Probe
  source 1..80: mol_type = other DNA
aggagaccaaagcttcctgcagattttatagaatagggcttgggctgattgataatgtcaacagggggtttaacttgcgg

SEQ ID NO: 34928 - DNA, 80 bp, synthetic construct
  misc_feature 1..80: note = Artificially Synthesized Probe
  source 1..80: mol_type = other DNA
agcgtttacagaaacgaaaggaaatgtcatctgcctgggtaaagaagtctttaaaggaaaaaagccaggtctgtaccata

SEQ ID NO: 34929 - DNA, 80 bp, synthetic construct
  misc_feature 1..80: note = Artificially Synthesized Probe
  source 1..80: mol_type = other DNA
ggcctgaattgcaggatgacattccacacatcctagcccaagcacggaaaatcttgttcgtgattgacggctttgatgag

SEQ ID NO: 34930 - DNA, 80 bp, synthetic construct
  misc_feature 1..80: note = Artificially Synthesized Probe
  source 1..80: mol_type = other DNA
tcactgcgtctgaatcagacgccgaggttgagaggtgagaaccgtttcactctaccagtcgttccatctttagcctcatc

SEQ ID NO: 34931 - DNA, 80 bp, synthetic construct
  misc_feature 1..80: note = Artificially Synthesized Probe
  source 1..80: mol_type = other DNA
caggcatgagttaccacacgccctgcctgaatatttcttattgatatgtatagatatgtatattcccaatcttttttttt

SEQ ID NO: 34932 - DNA, 80 bp, synthetic construct
  misc_feature 1..80: note = Artificially Synthesized Probe
  source 1..80: mol_type = other DNA
attgagagagtcctgtccttaaatttattttgtgggataatcgtataaagtaatttctaggggctgggcatggtggttca

SEQ ID NO: 34933 - DNA, 80 bp, synthetic construct
  misc_feature 1..80: note = Artificially Synthesized Probe
  source 1..80: mol_type = other DNA
atatgtttcccgcattgtgtgaggtcttgagacatccagaatgtaacctgcgatatctcgggtatatctcttaatcatta

SEQ ID NO: 34934 - DNA, 80 bp, synthetic construct
  misc_feature 1..80: note = Artificially Synthesized Probe
  source 1..80: mol_type = other DNA
cagagatcattcactcatggttcatgcttctcctgtatgatgattcagaataccagctattgacatttttcaagcaagaa

SEQ ID NO: 34935 - DNA, 80 bp, synthetic construct
  misc_feature 1..80: note = Artificially Synthesized Probe
  source 1..80: mol_type = other DNA
tgcttaatgggatcttagttgaataggatgctgtacatcttacaggtattggaaggttgaatgaaaccaagcccatgcat

SEQ ID NO: 34936 - DNA, 80 bp, synthetic construct
  misc_feature 1..80: note = Artificially Synthesized Probe
  source 1..80: mol_type = other DNA
tcaagtgattctcttgcctcagcctcctgagtagctgggactacaggcacgtgtcgccacgcccatctaacttttgtatg

SEQ ID NO: 34937 - DNA, 80 bp, synthetic construct
  misc_feature 1..80: note = Artificially Synthesized Probe
  source 1..80: mol_type = other DNA
acgtgcgtaaacctctccgacaatgagcttctggatgagggtgctaagttgctgtacacaactttgagacaccccaagtg

SEQ ID NO: 34938 - DNA, 80 bp, synthetic construct
  misc_feature 1..80: note = Artificially Synthesized Probe
  source 1..80: mol_type = other DNA
ttgagtagggtggttatgagaacacttaattcctctaaaagttccaagcatgatgctaatgacaactggtaagacctggg

SEQ ID NO: 34939 - DNA, 80 bp, synthetic construct
  misc_feature 1..80: note = Artificially Synthesized Probe
  source 1..80: mol_type = other DNA
agattcgattttatgttaacatctctggtattttttttttttttttttaagatggagttttactcttgcccacgctggca

SEQ ID NO: 34940 - DNA, 80 bp, synthetic construct
  misc_feature 1..80: note = Artificially Synthesized Probe
  source 1..80: mol_type = other DNA
gccccctcaattcaactttttgatccatgcccctattttgctaagttgtcaacttccctttagtcttatgtgggttttcc

SEQ ID NO: 34941 - DNA, 80 bp, synthetic construct
  misc_feature 1..80: note = Artificially Synthesized Probe
  source 1..80: mol_type = other DNA
tctgcctgtaagacactacctctctagcaactgaatttagcaaatacaatcgtaatcccagcatgttagggaggccaggg

SEQ ID NO: 34942 - DNA, 80 bp, synthetic construct
  misc_feature 1..80: note = Artificially Synthesized Probe
  source 1..80: mol_type = other DNA
cactgtgcaacttgagatgtctgtggtgagttaacttataagttcaacttcctatacttacaccttactgaatctgtggc

SEQ ID NO: 34943 - DNA, 80 bp, synthetic construct
  misc_feature 1..80: note = Artificially Synthesized Probe
  source 1..80: mol_type = other DNA
atatcgtgccagaaaatgctggctctatcagcaggtgagtggtctcaacttggctatcttacaaataccttgtgagttag

SEQ ID NO: 34944 - DNA, 80 bp, synthetic construct
  misc_feature 1..80: note = Artificially Synthesized Probe
  source 1..80: mol_type = other DNA
tctctgctcaaaagcctcagtgcttccctatgtcaatccaggtaaaatcctatattgacgatggcttcagggtcttctgt

SEQ ID NO: 34945 - DNA, 80 bp, synthetic construct
  misc_feature 1..80: note = Artificially Synthesized Probe
  source 1..80: mol_type = other DNA
ccatttacttccccatcaggctttctccagagtggtaggtttaggggaagcataatgacatggacctgctgtaggagact

SEQ ID NO: 34946 - DNA, 80 bp, synthetic construct
  misc_feature 1..80: note = Artificially Synthesized Probe
  source 1..80: mol_type = other DNA
ccatggcatcaaagaaccaagaagccccttcctaggaatgtgggaacttcagaaattctcacaagcaatatactctactg

SEQ ID NO: 34947 - DNA, 80 bp, synthetic construct
  misc_feature 1..80: note = Artificially Synthesized Probe
  source 1..80: mol_type = other DNA
gtgccaccacacctggctaatcttgtatttttaatagagacagggtttctccatattggtcaggctggtctcgaactcct

SEQ ID NO: 34948 - DNA, 80 bp, synthetic construct
  misc_feature 1..80: note = Artificially Synthesized Probe
  source 1..80: mol_type = other DNA
gcatgacccaccacatctggcctcattttatatttaaaaataaaaaataagcaaatcaagccaggtacagtttaggcaac

SEQ ID NO: 34949 - DNA, 80 bp, synthetic construct
  misc_feature 1..80: note = Artificially Synthesized Probe
  source 1..80: mol_type = other DNA
gaaaaaaacccacaactgattattgatactgagaaacatcatccctgggcagaaaggccttcttctcatgacttcatgat

SEQ ID NO: 34950 - DNA, 80 bp, synthetic construct
  misc_feature 1..80: note = Artificially Synthesized Probe
  source 1..80: mol_type = other DNA
gtgttttcagtattttattaacaaatgagctggcaagaggacaagtgatctagtagtatcacccccaccctcatggagca

SEQ ID NO: 34951 - DNA, 80 bp, synthetic construct
  misc_feature 1..80: note = Artificially Synthesized Probe
  source 1..80: mol_type = other DNA
aaccccatgaacaggaaagcatcctctcagaaacagataatccgcttctcatcttcatagactttggcctcctctggttt

SEQ ID NO: 34952 - DNA, 80 bp, synthetic construct
  misc_feature 1..80: note = Artificially Synthesized Probe
  source 1..80: mol_type = other DNA
attggtctttttgcattgcagatctgatcacatgcctctcctgcttcaaactgttcactgactttccatcacttttagga

SEQ ID NO: 34953 - DNA, 80 bp, synthetic construct
  misc_feature 1..80: note = Artificially Synthesized Probe
  source 1..80: mol_type = other DNA
ggtgaccctcaagagggaagcaatgcagattttgaaacttgacagaattaaagcaactgtaggtctttactacccgcctg

SEQ ID NO: 34954 - DNA, 80 bp, synthetic construct
  misc_feature 1..80: note = Artificially Synthesized Probe
  source 1..80: mol_type = other DNA
acccactcacatgcaagcatgaactaagatgaatgaaatgatactttcataccatgcacattgcatcctgatattttgtt

SEQ ID NO: 34955 - DNA, 80 bp, synthetic construct
  misc_feature 1..80: note = Artificially Synthesized Probe
  source 1..80: mol_type = other DNA
cagtcactggtgttattactgtgacaaacgctgggatcttaccaaatctctgttatgccagtgttgctctgtaacgcatc

SEQ ID NO: 34956 - DNA, 80 bp, synthetic construct
  misc_feature 1..80: note = Artificially Synthesized Probe
  source 1..80: mol_type = other DNA
ggactctgagaatgcaccccattgttctgggtagcagtgattcaaatgaaacaaagttttcagctatcgctaggaagcca

SEQ ID NO: 34957 - DNA, 80 bp, synthetic construct
  misc_feature 1..80: note = Artificially Synthesized Probe
  source 1..80: mol_type = other DNA
acaaagctacagcaatggtcctggcataggagagacatataaatcaatggaccagaacagagaattcagaaataaaccca

SEQ ID NO: 34958 - DNA, 80 bp, synthetic construct
  misc_feature 1..80: note = Artificially Synthesized Probe
  source 1..80: mol_type = other DNA
gtcctttaaaggtcactatcaagaaagaggaaaaactccacagaaagaaagaaaatacttgcaaaacctgtatctagtaa

SEQ ID NO: 34959 - DNA, 80 bp, synthetic construct
  misc_feature 1..80: note = Artificially Synthesized Probe
  source 1..80: mol_type = other DNA
ttaccataaatgctttaacgtctggttgactttcaacatttctgccaaactctctgccacttcatcgttgagttcatttt

SEQ ID NO: 34960 - DNA, 80 bp, synthetic construct
  misc_feature 1..80: note = Artificially Synthesized Probe
  source 1..80: mol_type = other DNA
agagatcgtatagagtggttgtgaggctgagtgagttaacacagggaaaaagtgtagaataacacatggcatgcagtcag

SEQ ID NO: 34961 - DNA, 80 bp, synthetic construct
  misc_feature 1..80: note = Artificially Synthesized Probe
  source 1..80: mol_type = other DNA
aatttagcaagatcaaatgagcactgggctctgagtagatgatagggagggttgtaatacaactccctcacttaacctgt

SEQ ID NO: 34962 - DNA, 80 bp, synthetic construct
  misc_feature 1..80: note = Artificially Synthesized Probe
  source 1..80: mol_type = other DNA
aacatagcaaaaccccatctctacaaaaaattttaaaattaactgggtgtggtggtgcatgcctatagtctcaggactcg

SEQ ID NO: 34963 - DNA, 80 bp, synthetic construct
  misc_feature 1..80: note = Artificially Synthesized Probe
  source 1..80: mol_type = other DNA
ctctaccagcaagggacatgcagggatggctgaggggctggaaatgtcctctgtcttgatgggggtggtggttggctggt

SEQ ID NO: 34964 - DNA, 80 bp, synthetic construct
  misc_feature 1..80: note = Artificially Synthesized Probe
  source 1..80: mol_type = other DNA
acatcctgagggaggagacaagatagtgaatgttagctccccaagaaacagccatgctcacccctccttttttgccaatg

SEQ ID NO: 34965 - DNA, 80 bp, synthetic construct
  misc_feature 1..80: note = Artificially Synthesized Probe
  source 1..80: mol_type = other DNA
gcttacaccattccaggtatggcttgctggaacccagaataagagttttcagtgttttgcttacatatatgtatttacta

SEQ ID NO: 34966 - DNA, 80 bp, synthetic construct
  misc_feature 1..80: note = Artificially Synthesized Probe
  source 1..80: mol_type = other DNA
attgcgcttttcagaccggcttaagaaacggcgcaccacgagactatatcccacacctggctcagagggtcctacgccca

SEQ ID NO: 34967 - DNA, 80 bp, synthetic construct
  misc_feature 1..80: note = Artificially Synthesized Probe
  source 1..80: mol_type = other DNA
aaagaccaaatctacgtctgattggtgtacctgaaagtgatgtggagaatggaaccaagttggaaaacactctgcaggat

SEQ ID NO: 34968 - DNA, 80 bp, synthetic construct
  misc_feature 1..80: note = Artificially Synthesized Probe
  source 1..80: mol_type = other DNA
gtcttgactctttatccaacttgccagtctgtgtcttttaattgcagaatttagtccatttatatttaaagttaatattg

SEQ ID NO: 34969 - DNA, 80 bp, synthetic construct
  misc_feature 1..80: note = Artificially Synthesized Probe
  source 1..80: mol_type = other DNA
acacatacactctcccaagactaaaccaggaagaagttgaatctctgaatagaccaataacaggctctgaaattgtggca

SEQ ID NO: 34970 - DNA, 80 bp, synthetic construct; identical to SEQ ID NO: 30693
  misc_feature 1..80: note = Artificially Synthesized Probe
  source 1..80: mol_type = other DNA

SEQ ID NO: 34971 - DNA, 80 bp, synthetic construct
  misc_feature 1..80: note = Artificially Synthesized Probe
  source 1..80: mol_type = other DNA
aggacatgaacagacacttctcaaaagaagacatttatgcagccaaaaaacacatgaagaaatgctcatcatcactggcc

SEQ ID NO: 34972 - DNA, 80 bp, synthetic construct
  misc_feature 1..80: note = Artificially Synthesized Probe
  source 1..80: mol_type = other DNA
ctcacgcctataatcctgacactttgggagaccgaggtgggtggatcatttgaggtcaggagtttgagaccagcctggcc

SEQ ID NO: 34973 - DNA, 80 bp, synthetic construct
  misc_feature 1..80: note = Artificially Synthesized Probe
  source 1..80: mol_type = other DNA
aaaaagaccaccagaaagggtgagagttagtcctttcttcggcctagtagttaatgaaatcaaaatgccaacctttcccc

SEQ ID NO: 34974 - DNA, 80 bp, synthetic construct
  misc_feature 1..80: note = Artificially Synthesized Probe
  source 1..80: mol_type = other DNA
ctgtaatacagaggtaatgatgatagtccccttgcagggtggttatgaggatcttaggacataacgcaaagccctggtgc

SEQ ID NO: 34975 - DNA, 80 bp, synthetic construct
  misc_feature 1..80: note = Artificially Synthesized Probe
  source 1..80: mol_type = other DNA
gtattattactaggtagttggcccagtgttctggagaaagacataccccaaataggtcacaattttgtatttggtcagct

SEQ ID NO: 34976 - DNA, 80 bp, synthetic construct
  misc_feature 1..80: note = Artificially Synthesized Probe
  source 1..80: mol_type = other DNA
aggctgaacaattaaaagcttgatttttaggccacatcaaaatgatcaagtcagacactctggaccctttccctcagagt

SEQ ID NO: 34977 - DNA, 80 bp, synthetic construct
  misc_feature 1..80: note = Artificially Synthesized Probe
  source 1..80: mol_type = other DNA
cactggtgtgacaggcactgggagtcagttccaaatccctactgctttttagaaatgcatgagtcaagtaatggcaaatt

SEQ ID NO: 34978 - DNA, 80 bp, synthetic construct
  misc_feature 1..80: note = Artificially Synthesized Probe
  source 1..80: mol_type = other DNA
tctggacattccaagggccatggtcatgagtcctgggggatcctggtccatgatgccattcccgatgccctccgagcctg

SEQ ID NO: 34979 - DNA, 80 bp, synthetic construct
  misc_feature 1..80: note = Artificially Synthesized Probe
  source 1..80: mol_type = other DNA
ggcgtggagggtctccactgggctgcgtgtgttccgctgcaccaggctgctgggctgcatcctgttcagatggacctcag

SEQ ID NO: 34980 - DNA, 80 bp, synthetic construct
  misc_feature 1..80: note = Artificially Synthesized Probe
  source 1..80: mol_type = other DNA
tctgcttgacctcagatttgccagaaagaaggtgacaaacttcagctgggatcagtgtctgagacaggccacccttattc

SEQ ID NO: 34981 - DNA, 80 bp, synthetic construct
  misc_feature 1..80: note = Artificially Synthesized Probe
  source 1..80: mol_type = other DNA
cacctgtcttgtgcttctgtttccaacaacatattggattctttaaaaggcaggacttaggtccttggtgctggtatgtt

SEQ ID NO: 34982 - DNA, 80 bp, synthetic construct
  misc_feature 1..80: note = Artificially Synthesized Probe
  source 1..80: mol_type = other DNA
aagaaaaaaaaatacaaccttgaatttgtgcaaccattaaaatgtctacatatgtcagaataggaagaaagcaaggggtc

SEQ ID NO: 34983 - DNA, 80 bp, synthetic construct
  misc_feature 1..80: note = Artificially Synthesized Probe
  source 1..80: mol_type = other DNA
ttgggcataatgaggtaggcacctgggccacacagtaggagggcgataggccatatattaaaaacggctttttttcttgt

SEQ ID NO: 34984 - DNA, 80 bp, synthetic construct
  misc_feature 1..80: note = Artificially Synthesized Probe
  source 1..80: mol_type = other DNA
ttccatctcactgtggccctgctcttccatagttaaagtagcaagcggctacttttcccaaattcatcttcagctgcgtg

SEQ ID NO: 34985 - DNA, 80 bp, synthetic construct
  misc_feature 1..80: note = Artificially Synthesized Probe
  source 1..80: mol_type = other DNA
tgatcctatactgggatagagatggaaaggtgtttattttacataataaggttaacagggcttggaggtttctgcattcc

SEQ ID NO: 34986 - DNA, 80 bp, synthetic construct
  misc_feature 1..80: note = Artificially Synthesized Probe
  source 1..80: mol_type = other DNA
ccccacacaatagctttctttttagaatccaaatgatagagcaggaaagagtaaaatttaaaattatcagcaacagaagg

SEQ ID NO: 34987 - DNA, 80 bp, synthetic construct
  misc_feature 1..80: note = Artificially Synthesized Probe
  source 1..80: mol_type = other DNA
gggcctgttttctctcggaagcatttgagagatgttaaagacacagtagcacagaattgagactttctctttaagatcat

SEQ ID NO: 34988 - DNA, 80 bp, synthetic construct
  misc_feature 1..80: note = Artificially Synthesized Probe
  source 1..80: mol_type = other DNA
tccagggatacccaaaggaaaaaaccaagctaatggaggcagccagaaaacaggacacaccgcagaacaaaagatggatc

SEQ ID NO: 34989 - DNA, 80 bp, synthetic construct
  misc_feature 1..80: note = Artificially Synthesized Probe
  source 1..80: mol_type = other DNA
tttatttattattattttttgagatgaagtctcactcactctgtcgcccaggctggagtgcggtggcgcaatctcggctc

SEQ ID NO: 34990 - DNA, 80 bp, synthetic construct
  misc_feature 1..80: note = Artificially Synthesized Probe
  source 1..80: mol_type = other DNA
agaggttaaagacgtgaggtcactgaaaattctgcaaactcaggaagaaaatacacactggacctactggtttatactca

SEQ ID NO: 34991 - DNA, 80 bp, synthetic construct
  misc_feature 1..80: note = Artificially Synthesized Probe
  source 1..80: mol_type = other DNA
aattgactgcaaagaggaataaggaaaatttctggggagatagaaatgttctgtgtcttgattgcatgcttgctctctcc

SEQ ID NO: 34992 - DNA, 80 bp, synthetic construct
  misc_feature 1..80: note = Artificially Synthesized Probe
  source 1..80: mol_type = other DNA
tccctattatccacatgcaataaccactattctcattttggagcacttcctttcagcttttctctgcatgcatttgcgcc

SEQ ID NO: 34993 - DNA, 80 bp, synthetic construct
  misc_feature 1..80: note = Artificially Synthesized Probe
  source 1..80: mol_type = other DNA
ctttctgtgccgtgattgcctcaaggtaagagttccacctcaaaatgttgctgtaaggattaagtgagttaatatgcaca

SEQ ID NO: 34994 - DNA, 80 bp, synthetic construct
  misc_feature 1..80: note = Artificially Synthesized Probe
  source 1..80: mol_type = other DNA
gcgtttttcaacagtgagctctgtgtagtcaggccattctgtaagtttttctactgtgatacttgctatataggttggta

SEQ ID NO: 34995 - DNA, 80 bp, synthetic construct
  misc_feature 1..80: note = Artificially Synthesized Probe
  source 1..80: mol_type = other DNA
cttcgttgtctgagcccactacattaaaggatccctcttagcacagaaaagtcactacaacctttttcagatactataac

SEQ ID NO: 34996 - DNA, 80 bp, synthetic construct
  misc_feature 1..80: note = Artificially Synthesized Probe
  source 1..80: mol_type = other DNA
cttgcatgattgaaatattttagggccttttcctcattagggcatctcaggacatcttgaggcaggccagcacaacattc

SEQ ID NO: 34997 - DNA, 80 bp, synthetic construct
  misc_feature 1..80: note = Artificially Synthesized Probe
  source 1..80: mol_type = other DNA
ttttgatttctcagcagcaaatggatgatgtcaaaggggcctcacattttcctaaccagtatcagctccccaacccaaat

SEQ ID NO: 34998 - DNA, 80 bp, synthetic construct
  misc_feature 1..80: note = Artificially Synthesized Probe
  source 1..80: mol_type = other DNA
cactcactgactttaagtatctgaaagcacttaatccctcagaatttgaaagcagatggaagtcagtccctcccggaatc

SEQ ID NO: 34999 - DNA, 80 bp, synthetic construct
  misc_feature 1..80: note = Artificially Synthesized Probe
  source 1..80: mol_type = other DNA
tccatgtagggatctctgtgagcatgcagtgagttaatacacgtacatacggtatttagaacagcactggtcacatagta

SEQ ID NO: 35000 - DNA, 80 bp, synthetic construct
  misc_feature 1..80: note = Artificially Synthesized Probe
  source 1..80: mol_type = other DNA
cttagctgaagacgtttattaaccccattgaacatgtatacagagtcagcaagcatctaggacacaaacctgtcacagag

SEQ ID NO: 35001 - DNA, 80 bp, synthetic construct
  misc_feature 1..80: note = Artificially Synthesized Probe
  source 1..80: mol_type = other DNA
ttgagcctcagttccctcatctggagattgaaaactagacactccagaattgtttcacacactaagacaaggtttatata

SEQ ID NO: 35002 - DNA, 80 bp, synthetic construct
  misc_feature 1..80: note = Artificially Synthesized Probe
  source 1..80: mol_type = other DNA
agcacttcacacacacagaaagccagaaaagcaattactacctcattatcaggaatgctaaagaagccacacctcactca

SEQ ID NO: 35003 - DNA, 80 bp, synthetic construct
  misc_feature 1..80: note = Artificially Synthesized Probe
  source 1..80: mol_type = other DNA
tggttaagaacagggactctgcttcaagtcctgggatagactttgggctagttatttaatcttgttgagcctcagttgtc

SEQ ID NO: 35004 - DNA, 80 bp, synthetic construct
  misc_feature 1..80: note = Artificially Synthesized Probe
  source 1..80: mol_type = other DNA
ttggatcctggttctgactccaaaacccattgtttcttccatttcagccctgcatgtctggtatactttatagacccaac

SEQ ID NO: 35005 - DNA, 80 bp, synthetic construct
  misc_feature 1..80: note = Artificially Synthesized Probe
  source 1..80: mol_type = other DNA
catgcaactgactgtccctagaagataaaagaaaatgggacttctgaaaacttgcaaaatacctagagcctctgcatgac

SEQ ID NO: 35006 - DNA, 80 bp, synthetic construct
  misc_feature 1..80: note = Artificially Synthesized Probe
  source 1..80: mol_type = other DNA
caacagagaggaggaagtctcaagattaagaacagcttttgagtgtgtgtgtgtcaaaatattcattcctatcacatgca

SEQ ID NO: 35007 - DNA, 80 bp, synthetic construct
  misc_feature 1..80: note = Artificially Synthesized Probe
  source 1..80: mol_type = other DNA
agtcatcaaggccatgggtttactagcttagcttccccagacttaatttcaaacaccaacaaccgaaatgtttcctagaa

SEQ ID NO: 35008 - DNA, 80 bp, synthetic construct
  misc_feature 1..80: note = Artificially Synthesized Probe
  source 1..80: mol_type = other DNA
cgggtttctccgcttggttccacccagagctcctccagagccgcgctgcgttccgcccgcacgcaaatcccgcctccctg

SEQ ID NO: 35009 - DNA, 80 bp, synthetic construct
  misc_feature 1..80: note = Artificially Synthesized Probe
  source 1..80: mol_type = other DNA
aaccatctgtttgtcaccagctatggctagtgcacagaagagtgctcagttttgtgatgtttcctatttgacagatgctt

SEQ ID NO: 35010 - DNA, 80 bp, synthetic construct
  misc_feature 1..80: note = Artificially Synthesized Probe
  source 1..80: mol_type = other DNA
tgacattgtgcttaaggaaaagggaggatataaaatatccagtggctggatcagtagctgatactttcagaagtggggct

SEQ ID NO: 35011 - DNA, 80 bp, synthetic construct
  misc_feature 1..80: note = Artificially Synthesized Probe
  source 1..80: mol_type = other DNA
aaattgccaagagcatgaatacagagagtggattcaggtgaggggcaatcagtctgaacaatgagcaagtctatagttgt

SEQ ID NO: 35012 - DNA, 80 bp, synthetic construct
  misc_feature 1..80: note = Artificially Synthesized Probe
  source 1..80: mol_type = other DNA
agaatgatcaaaagcacaaaggtcttgccctataacatgctggtagggctacaatcacggagaggtgcaaaaccaaaagc

SEQ ID NO: 35013 - DNA, 80 bp, synthetic construct
  misc_feature 1..80: note = Artificially Synthesized Probe
  source 1..80: mol_type = other DNA
aggtagggatgctcaccctggaggtgaccactgtgactgggtgttcgctcagcagcatttgaggaagcataactgtgctg

SEQ ID NO: 35014 - DNA, 80 bp, synthetic construct
  misc_feature 1..80: note = Artificially Synthesized Probe
  source 1..80: mol_type = other DNA
aacagaggtgtctcttcctacagaaaaggcccatcacagaacacatgttaataacactcttgagaatatagcagtttttc

SEQ ID NO: 35015 - DNA, 80 bp, synthetic construct
  misc_feature 1..80: note = Artificially Synthesized Probe
  source 1..80: mol_type = other DNA
tctttgtctatacatataacaagagaagctgtaaggagaaacgggaatgggcttataactgaggcactgctatgagcctc

SEQ ID NO: 35016 - DNA, 80 bp, synthetic construct
  misc_feature 1..80: note = Artificially Synthesized Probe
  source 1..80: mol_type = other DNA
aagaggagaaagtacagaaaagagagtcacctggatgaaggaaaataatgaaactcagtgaagaaacaagggcatcagag

SEQ ID NO: 35017 - DNA, 80 bp, synthetic construct
  misc_feature 1..80: note = Artificially Synthesized Probe
  source 1..80: mol_type = other DNA
ttattattcaagtgactcttctcatgttctttacctggaagacaccttgggcatcagctgccactgcagcatggagtgga

SEQ ID NO: 35018 - DNA, 80 bp, synthetic construct
  misc_feature 1..80: note = Artificially Synthesized Probe
  source 1..80: mol_type = other DNA
accagaaactgctaatcagaaggtgtccagagcctccaccaccgctgcttatctcccattgttttctctcttcctactcc

SEQ ID NO: 35019 - DNA, 80 bp, synthetic construct
  misc_feature 1..80: note = Artificially Synthesized Probe
  source 1..80: mol_type = other DNA
tcttctcttatagaagaagtgcccataaaggataaggaagagatgtggccatgaaggaattgccatctacacacaccatt

SEQ ID NO: 35020 - DNA, 80 bp, synthetic construct
  misc_feature 1..80: note = Artificially Synthesized Probe
  source 1..80: mol_type = other DNA
gccagagagagccatgcttacgctttcgttttgccatgattacccccagcagaataataaacagaatgatgacaacagca

SEQ ID NO: 35021 - DNA, 80 bp, synthetic construct
  misc_feature 1..80: note = Artificially Synthesized Probe
  source 1..80: mol_type = other DNA
tgccttaagacatatctcaggaattagaatactgtcccttgagatcttaaacactaattcccacatagaggatgtcccac

SEQ ID NO: 35022 - DNA, 80 bp, synthetic construct
  misc_feature 1..80: note = Artificially Synthesized Probe
  source 1..80: mol_type = other DNA
agcagagaacaggcaaaagagctcagattagactggagctctatttgctttttcatttggaactactgtggattttccta

SEQ ID NO: 35023 - DNA, 80 bp, synthetic construct
  misc_feature 1..80: note = Artificially Synthesized Probe
  source 1..80: mol_type = other DNA
gagggttcacagacttaatctaattcatgcttcctgataaatctagatggggaaaaacagtcttagggaaaggaatgggg

SEQ ID NO: 35024 - DNA, 80 bp, synthetic construct
  misc_feature 1..80: note = Artificially Synthesized Probe
  source 1..80: mol_type = other DNA
ccccggaaaatccctgtggaaatcagtgaggaaataaaaatggcattggtaggaaaacagtcatattggaagtttgaggt

SEQ ID NO: 35025 - DNA, 80 bp, synthetic construct
  misc_feature 1..80: note = Artificially Synthesized Probe
  source 1..80: mol_type = other DNA
tttaaaaggcagaagtagtcactgcaagttactcaacaaactttgctgggatgggaactagccataggtgaagcaagtgt

SEQ ID NO: 35026 - DNA, 80 bp, synthetic construct
  misc_feature 1..80: note = Artificially Synthesized Probe
  source 1..80: mol_type = other DNA
taggccccatttggccggtggtcacttgggaaagaagaggtagctttaaaaatgaaataaaaatagtaatgtttttggcc

SEQ ID NO: 35027 - DNA, 80 bp, synthetic construct
  misc_feature 1..80: note = Artificially Synthesized Probe
  source 1..80: mol_type = other DNA
atacccacatcaactgatctttggttaaacacacttgaatttggacctgccccctttaagtatctaagcagggtcctaag

SEQ ID NO: 35028 - DNA, 80 bp, synthetic construct
  misc_feature 1..80: note = Artificially Synthesized Probe
  source 1..80: mol_type = other DNA
attatgaaaatccttttaacctgctttccagcaagggataaccacccttgttggcattttcacaatgaatcagagtatac

SEQ ID NO: 35029 - DNA, 80 bp, synthetic construct
  misc_feature 1..80: note = Artificially Synthesized Probe
  source 1..80: mol_type = other DNA
gttaagtgacccatgactatacataggttatgtaaaaatattggtaacaactggaactgaattttgaatgaaatacattt

SEQ ID NO: 35030 - DNA, 80 bp, synthetic construct
  misc_feature 1..80: note = Artificially Synthesized Probe
  source 1..80: mol_type = other DNA
aaaggtacaaaagaaaacagttctgtatgtattcctgccacttgcattgtagcatacactaacaaaagcaagattttttt

SEQ ID NO: 35031 - DNA, 80 bp, synthetic construct
  misc_feature 1..80: note = Artificially Synthesized Probe
  source 1..80: mol_type = other DNA
ttacgatcttcaagtgtatatgatgttgctaactacaactcaaaatccagaagccattttaaaagtgataaattcaactt

SEQ ID NO: 35032 - DNA, 80 bp, synthetic construct
  misc_feature 1..80: note = Artificially Synthesized Probe
  source 1..80: mol_type = other DNA
tgtttgcaggagagggaaaatttgcccaccagaagagagatgggaatgagaagtattttcactgtatacttttctatgtg

SEQ ID NO: 35033 - DNA, 80 bp, synthetic construct
  misc_feature 1..80: note = Artificially Synthesized Probe
  source 1..80: mol_type = other DNA
cctcccttgaagtcacagagaccatttaataattccggtcaatatactgcgagggatagtgatatgtgttgcttccagac

SEQ ID NO: 35034 - DNA, 80 bp, synthetic construct
  misc_feature 1..80: note = Artificially Synthesized Probe
  source 1..80: mol_type = other DNA
catttttttcacagccttctcagagtaggccccagcataactacatcccttctaacaaacaatactcaaagctctttcca

SEQ ID NO: 35035 - DNA, 80 bp, synthetic construct
  misc_feature 1..80: note = Artificially Synthesized Probe
  source 1..80: mol_type = other DNA
ggacacactgccatgaggaaacaaaaaggacaagaaatattggaccattactggaaacagaccatgagagctagtgagat

SEQ ID NO: 35036 - DNA, 80 bp, synthetic construct
  misc_feature 1..80: note = Artificially Synthesized Probe
  source 1..80: mol_type = other DNA
ctaaaaatctgcttatttgggggctatgtttaaaacaactagatgtgtcaaaatttgggtttggcactggtaggcttttg

SEQ ID NO: 35037 - DNA, 80 bp, synthetic construct
  misc_feature 1..80: note = Artificially Synthesized Probe
  source 1..80: mol_type = other DNA
cctataaaaatatcatactagggacctgttaacttattgcacagagaggctgaaagaaacagtggtaaacattatgacgg

SEQ ID NO: 35038 - DNA, 80 bp, synthetic construct
  misc_feature 1..80: note = Artificially Synthesized Probe
  source 1..80: mol_type = other DNA
agaaaaagagccttcatctagtaaaagagcccttaaactagattcagtgttccgaggtacacctaaccatttttacgtac

SEQ ID NO: 35039 - DNA, 80 bp, synthetic construct
  misc_feature 1..80: note = Artificially Synthesized Probe
  source 1..80: mol_type = other DNA
tattctggcacaatgggacaatgtagacatgtccacttcacccaacatacatgactttgagttgtggaaagaaactggag

SEQ ID NO: 35040 - DNA, 80 bp, synthetic construct
  misc_feature 1..80: note = Artificially Synthesized Probe
  source 1..80: mol_type = other DNA
aaccaaaaatgctctcgtgatccatggaatcagcaacaagctgcttaattttgtggaggtgggtgctcacatgtctaata

SEQ ID NO: 35041 - DNA, 80 bp, synthetic construct
  misc_feature 1..80: note = Artificially Synthesized Probe
  source 1..80: mol_type = other DNA
ttaatcccatcaacacatgtgccaccattgaaacaggagctaagaagcaaacagagcaacatcagctatgtatctggtgc

SEQ ID NO: 35042 - DNA, 80 bp, synthetic construct
  misc_feature 1..80: note = Artificially Synthesized Probe
  source 1..80: mol_type = other DNA
ctgttgacgtagtcagagcaggtccctccattcttacagggttcactcagacactcattcatgtctgtctggcacttatc

SEQ ID NO: 35043 - DNA, 80 bp, synthetic construct
  misc_feature 1..80: note = Artificially Synthesized Probe
  source 1..80: mol_type = other DNA
atgtgagaaaggaatacaaacagcttgatctcactccctaaagttctccatcaattgtgccttggatactttttcactat

SEQ ID NO: 35044 - DNA, 80 bp, synthetic construct
  misc_feature 1..80: note = Artificially Synthesized Probe
  source 1..80: mol_type = other DNA
gaagtaggcagaataatccctagaggtttcactgggctgagaacagctcatgtttattcaataagaatgaaaaaaaccac

SEQ ID NO: 35045 - DNA, 80 bp, synthetic construct
  misc_feature 1..80: note = Artificially Synthesized Probe
  source 1..80: mol_type = other DNA
ccaccacaccaacaggcattataatcaagttggtaaaaatcagtggaaagaggatatcttaaaagcagccacaggagaga

SEQ ID NO: 35046 - DNA, 80 bp, synthetic construct
  misc_feature 1..80: note = Artificially Synthesized Probe
  source 1..80: mol_type = other DNA
aacaatacacagaagaacaaagataaagcaaacagcaagatggcatattttgaagccagccatataaaaactacattaaa

SEQ ID NO: 35047 - DNA, 80 bp, synthetic construct
  misc_feature 1..80: note = Artificially Synthesized Probe
  source 1..80: mol_type = other DNA
aagaaaacacaccagttctacacaaactctcccagaaagtagaaagaaaaacacttcctgatatgttctatgaggacagc

SEQ ID NO: 35048 - DNA, 80 bp, synthetic construct
  misc_feature 1..80: note = Artificially Synthesized Probe
  source 1..80: mol_type = other DNA
acttttagaagaaaccacagtagataaacctcaaatttggattaggtgaagatttgttaaacaagatacatgaagcatga

SEQ ID NO: 35049 - DNA, 80 bp, synthetic construct
  misc_feature 1..80: note = Artificially Synthesized Probe
  source 1..80: mol_type = other DNA
gtaaaactgtgactccacaggcaagaaagagagaaggttaaattgcaatgggatgaagatagttttagggtgacaaatat

SEQ ID NO: 35050 - DNA, 80 bp, synthetic construct
  misc_feature 1..80: note = Artificially Synthesized Probe
  source 1..80: mol_type = other DNA
tcacaagggtttggggaacagggagccaatactgtctgacaattcttgcctagaaagtaaatgacagagtttatgacaga

SEQ ID NO: 35051 - DNA, 80 bp, synthetic construct
  misc_feature 1..80: note = Artificially Synthesized Probe
  source 1..80: mol_type = other DNA
gtgctatcaagtctttcaggtaacacagtcatgctatggctattctgctactctacacaacttagagtcactattaacag

SEQ ID NO: 35052 - DNA, 80 bp, synthetic construct
  misc_feature 1..80: note = Artificially Synthesized Probe
  source 1..80: mol_type = other DNA
acttatgtcatcaaagcaggttccttggttcaggcatggatttgaggcacattcatcaatattcacctggcagttatagc

SEQ ID NO: 35053 - DNA, 80 bp, synthetic construct
  misc_feature 1..80: note = Artificially Synthesized Probe
  source 1..80: mol_type = other DNA
catcgcacccagccaatagcttgttgcatgataaacataagctctttgtatataacatttctggtcaggaaaagggatga

SEQ ID NO: 35054 - DNA, 80 bp, synthetic construct
  misc_feature 1..80: note = Artificially Synthesized Probe
  source 1..80: mol_type = other DNA
ttcttataaggagcgcacaatctacatccttcacatgtggagttcacaatagggttcgcagtcctatgagaatctaaggc

SEQ ID NO: 35055 - DNA, 80 bp, synthetic construct
  misc_feature 1..80: note = Artificially Synthesized Probe
  source 1..80: mol_type = other DNA
cacgaatgaatgaaaaagagaaaaggaaactaagaagtgagtcaagcagtatgcaacaacaagaagacaaagagcagacg

SEQ ID NO: 35056 - DNA, 80 bp, synthetic construct
  misc_feature 1..80: note = Artificially Synthesized Probe
  source 1..80: mol_type = other DNA
tcactgtcagggaccctgagccactctaagatgctcctgggatatttcatatctaagtcatgctttgtcttgacctaaca

SEQ ID NO: 35057 - DNA, 80 bp, synthetic construct
  misc_feature 1..80: note = Artificially Synthesized Probe
  source 1..80: mol_type = other DNA
caaatcttcagcaaagtttcagctcaaagccccatttgacaacttcaggctgtcaccagtactacaagccaactggctta

SEQ ID NO: 35058 - DNA, 80 bp, synthetic construct
  misc_feature 1..80: note = Artificially Synthesized Probe
  source 1..80: mol_type = other DNA
tattacttatcatcatcatacaatgtggatactgggagtaagtgaaattgaagtgaatatgttgctcctccaagacatag

SEQ ID NO: 35059 - DNA, 80 bp, synthetic construct
  misc_feature 1..80: note = Artificially Synthesized Probe
  source 1..80: mol_type = other DNA
gtccagtggaaggccaagaaattttttgggctaggtaactaaaatgagaagttacccagtgtttcttctgacttaggcac

SEQ ID NO: 35060 - DNA, 80 bp, synthetic construct
  misc_feature 1..80: note = Artificially Synthesized Probe
  source 1..80: mol_type = other DNA
ttagcctatgttctcccttcttggccttcctggtttgctgaatattaaaaagagaaagaatatgattcattggcattctg

SEQ ID NO: 35061 - DNA, 80 bp, synthetic construct
  misc_feature 1..80: note = Artificially Synthesized Probe
  source 1..80: mol_type = other DNA
caaatgaatggtggacattcacttcactttgctctggctgctttctgcagactctatcaaaaactctgaagggtgtttct

SEQ ID NO: 35062 - DNA, 80 bp, synthetic construct
  misc_feature 1..80: note = Artificially Synthesized Probe
  source 1..80: mol_type = other DNA
tttctgcttgtgatgcagcaacgtggtaagaaatctaaggtgaattccagccaaccctggacagaataaagcagaagttc

SEQ ID NO: 35063 - DNA, 80 bp, synthetic construct
  misc_feature 1..80: note = Artificially Synthesized Probe
  source 1..80: mol_type = other DNA
gcttgacactgcctgtcagtattgtaggctaaatttcaggataaatcttgagtctagtaacttcctcctgaggtaagctg

SEQ ID NO: 35064 - DNA, 80 bp, synthetic construct
  misc_feature 1..80: note = Artificially Synthesized Probe
  source 1..80: mol_type = other DNA
atactgcctaattagccataaatgagggaaagatttccatattccctgcagaggagtggatacctttaggagatgtttct

SEQ ID NO: 35065 - DNA, 80 bp, synthetic construct
  misc_feature 1..80: note = Artificially Synthesized Probe
  source 1..80: mol_type = other DNA
ccctctctgtcctccccagaaaacacctgatatatcctggtataatgatataatgccagagaaaacaaagtgcttgccaa

SEQ ID NO: 35066 - DNA, 80 bp, synthetic construct
  misc_feature 1..80: note = Artificially Synthesized Probe
  source 1..80: mol_type = other DNA
tcagagaacaatgatgaactccgaggataggaaatgacagctctgcgttctactttagttactgtggtgtgttgtaaggt

SEQ ID NO: 35067 - DNA, 80 bp, synthetic construct
  misc_feature 1..80: note = Artificially Synthesized Probe
  source 1..80: mol_type = other DNA
aatactgcaggtcttgagcagtagaaaacgacgatctgcattgatttagaaagtatgcctggagagaggtgcttaaaata

SEQ ID NO: 35068 - DNA, 80 bp, synthetic construct
  misc_feature 1..80: note = Artificially Synthesized Probe
  source 1..80: mol_type = other DNA
ccagaaatgcagaatatttgtgcacagatcgtttttgactctagttgcagaagtcagcaaagaggacccaaactttccca

SEQ ID NO: 35069 - DNA, 80 bp, synthetic construct
  misc_feature 1..80: note = Artificially Synthesized Probe
  source 1..80: mol_type = other DNA
taccattgcttcttcacagacagacttcacttctaaatgaaggatgtaggaagtgaaatttataggtggaacctcaaaca

SEQ ID NO: 35070 - DNA, 80 bp, synthetic construct
  misc_feature 1..80: note = Artificially Synthesized Probe
  source 1..80: mol_type = other DNA
agacattggcaagacctagcatataaacaaggactgctccacattttctgtgataaatccatactttctggactgtggaa

SEQ ID NO: 35071 - DNA, 80 bp, synthetic construct
  misc_feature 1..80: note = Artificially Synthesized Probe
  source 1..80: mol_type = other DNA
ccaattactgggatcaaagcagttgagtttccacaaatgtgaacaatagaagagcatctgatggttatagcatcagggcc

SEQ ID NO: 35072 - DNA, 80 bp, synthetic construct
  misc_feature 1..80: note = Artificially Synthesized Probe
  source 1..80: mol_type = other DNA
atgatcatggggccacctgaacaccatcagcctctactagagtaatcttttaatagcatcaacattcctgattcaggtgg

SEQ ID NO: 35073 - DNA, 80 bp, synthetic construct
  misc_feature 1..80: note = Artificially Synthesized Probe
  source 1..80: mol_type = other DNA
gcctaaagtcctaaagaggaagattatcttcatagcactttggctagcaggttacatttctggaacagtcctgagtgata

SEQ ID NO: 35074 - DNA, 80 bp, synthetic construct
  misc_feature 1..80: note = Artificially Synthesized Probe
  source 1..80: mol_type = other DNA
tgtgctcagcctgaggcacccatacttaaaggatggggatttgtggaagaagacaaagaaagtccacccaatgtactagg

SEQ ID NO: 35075 - DNA, 80 bp, synthetic construct
  misc_feature 1..80: note = Artificially Synthesized Probe
  source 1..80: mol_type = other DNA
tcctaactccagccatataattcttgaaggagcaaccatgtctttacatgatcaaaccctcctggccatggctgactgac

SEQ ID NO: 35076 - DNA, 80 bp, synthetic construct
  misc_feature 1..80: note = Artificially Synthesized Probe
  source 1..80: mol_type = other DNA
tgagctcaccggcaataatctccctcagggtagatgatgtcatttattacagaaactttgctgtcttatagtgctagcag

SEQ ID NO: 35077 - DNA, 80 bp, synthetic construct
  misc_feature 1..80: note = Artificially Synthesized Probe
  source 1..80: mol_type = other DNA
ctggaaacacttgtgactgcaaactcctgtctaaaagggaaatgtatttttaggtacagtccactgatttttgaatgaga

SEQ ID NO: 35078 - DNA, 80 bp, synthetic construct
  misc_feature 1..80: note = Artificially Synthesized Probe
  source 1..80: mol_type = other DNA
ttagaaaggaataaaggcagaaggtcactagatatttgagtgggaaaagttcttggcgatcacctagaggtcttaacgtg

SEQ ID NO: 35079 - DNA, 80 bp, synthetic construct
  misc_feature 1..80: note = Artificially Synthesized Probe
  source 1..80: mol_type = other DNA
gtttatactaaccacaataacttttgttgattcctcaaacattaagttctctcctgcctcagtgctgctgcataagctgc

SEQ ID NO: 35080 - DNA, 80 bp, synthetic construct
  misc_feature 1..80: note = Artificially Synthesized Probe
  source 1..80: mol_type = other DNA
acgcttcagccaagtgagccaaagaccatgaaacagtcagcatttatgagctgtaacacgcagggacacaaacagctcat

SEQ ID NO: 35081 - DNA, 80 bp, synthetic construct
  misc_feature 1..80: note = Artificially Synthesized Probe
  source 1..80: mol_type = other DNA
aggatggtctgggagtatagatgtggctaaggggataatgtagttgtggaaaggatattcatacacagaataaatgcaag

SEQ ID NO: 35082 - DNA, 80 bp, synthetic construct
  misc_feature 1..80: note = Artificially Synthesized Probe
  source 1..80: mol_type = other DNA
taggggagaaagagcgggttttctttttattccccaacgtcactactaacctcagcagtaaaaacatatgcactgagtta

SEQ ID NO: 35083 - DNA, 80 bp, synthetic construct
  misc_feature 1..80: note = Artificially Synthesized Probe
  source 1..80: mol_type = other DNA
tgcggcaatgaaaaaaaattcttgtggttgaattataagaaatgcattaggggagtgaagagaggtgtggctggagaggg

SEQ ID NO: 35084 - DNA, 80 bp, synthetic construct
  misc_feature 1..80: note = Artificially Synthesized Probe
  source 1..80: mol_type = other DNA
aggcaggcagaagaagctataaaggactgacctgacaatgaagaaatataagtcagtgttataaagaagaaccttaagag

SEQ ID NO: 35085 - DNA, 80 bp, synthetic construct
  misc_feature 1..80: note = Artificially Synthesized Probe
  source 1..80: mol_type = other DNA
atttcctcttcctagaatgacaagcatgtggcttatgttctcgctctttcctctcctgtctcgcatgatatcaacatctg

SEQ ID NO: 35086 - DNA, 80 bp, synthetic construct
  misc_feature 1..80: note = Artificially Synthesized Probe
  source 1..80: mol_type = other DNA
ttcacttggaaaactcatctccaacttaccatcatttctaccctatttctccttctctgtcaacagttcccatccattac

SEQ ID NO: 35087 - DNA, 80 bp, synthetic construct
  misc_feature 1..80: note = Artificially Synthesized Probe
  source 1..80: mol_type = other DNA
agaaaaatggttgtgagaaaagccttactctagagaataattcatcaccagctagaggctagactgagacaggaagatct

SEQ ID NO: 35088 - DNA, 80 bp, synthetic construct
  misc_feature 1..80: note = Artificially Synthesized Probe
  source 1..80: mol_type = other DNA
aattttgggccctttaaaacccttttttccttaaatggatatctgccagagcagaacttctctgataagatggcctgagg

SEQ ID NO: 35089 - DNA, 80 bp, synthetic construct
  misc_feature 1..80: note = Artificially Synthesized Probe
  source 1..80: mol_type = other DNA
aaggcttctgagaaaaggaggctgacaaatttaccctaaatcaaaccatgaatagagctggaatttatgctcatcttgaa

SEQ ID NO: 35090 - DNA, 80 bp, synthetic construct
  misc_feature 1..80: note = Artificially Synthesized Probe
  source 1..80: mol_type = other DNA
gagttcaacaagcctagattcaaaccctaacccaaccactacgggtcttgggcaaattatttaacccttttgaatacgca

SEQ ID NO: 35091 - DNA, 80 bp, synthetic construct
  misc_feature 1..80: note = Artificially Synthesized Probe
  source 1..80: mol_type = other DNA
tttctcctgttgatgatgggcagggcaaaaacaaggcttctcactgggaatcaaagaattggcatgagtgaagaaaacct

SEQ ID NO: 35092 - DNA, 80 bp, synthetic construct
  misc_feature 1..80: note = Artificially Synthesized Probe
  source 1..80: mol_type = other DNA
ctaaagaataccaggtagtaatggctgcacttcaacattaagattctttgtaggagatagcccactactggtactgtaat

SEQ ID NO: 35093 - DNA, 80 bp, synthetic construct
  misc_feature 1..80: note = Artificially Synthesized Probe
  source 1..80: mol_type = other DNA
tcatacagaagaaacgacctgctctgttcccacagaacatggttattagaatagacccgcttcatgacttcagttcaaca

SEQ ID NO: 35094 - DNA, 80 bp, synthetic construct
  misc_feature 1..80: note = Artificially Synthesized Probe
  source 1..80: mol_type = other DNA
agcattgcttccttcctcttgactttttcttttatgaaaaatgaaactagtacaccaaacttcactctaactgcccacag

SEQ ID NO: 35095 - DNA, 80 bp, synthetic construct
  misc_feature 1..80: note = Artificially Synthesized Probe
  source 1..80: mol_type = other DNA
gtctggtgctcttgatgaagatattctttggaaaatttaaagacatagttttagattgttggggaaaatggggcccctgg

SEQ ID NO: 35096 - DNA, 80 bp, synthetic construct
  misc_feature 1..80: note = Artificially Synthesized Probe
  source 1..80: mol_type = other DNA
gtggagaaactggaattctcatacactgctggttggaatgtaaaataatgtacccacttcagaacagtctgacagttcct

SEQ ID NO: 35097 - DNA, 80 bp, synthetic construct
  misc_feature 1..80: note = Artificially Synthesized Probe
  source 1..80: mol_type = other DNA
tgccgtactaaagggagtctactgcttaaagccaattcacatccttaaaaggtcaaatggagagaaattaaacttgggag

SEQ ID NO: 35098 - DNA, 80 bp, synthetic construct
  misc_feature 1..80: note = Artificially Synthesized Probe
  source 1..80: mol_type = other DNA
cccactccatcacccgcccaggctcactgcttccacctgcgtcccttcatatctccctactgacctccacttttttctaa

SEQ ID NO: 35099 - DNA, 80 bp, synthetic construct
  misc_feature 1..80: note = Artificially Synthesized Probe
  source 1..80: mol_type = other DNA
gaaagtacattgaggacagtccaatctaactgtgaactcataagggacagccagtaaattcaaaacagcctactgttttt

SEQ ID NO: 35100 - DNA, 80 bp, synthetic construct
  misc_feature 1..80: note = Artificially Synthesized Probe
  source 1..80: mol_type = other DNA
agggttagtaattaagggggtgggggacagttacaattttaaatagggtggttagagtaaccctcaattagaagtgccaa

SEQ ID NO: 35101 - DNA, 80 bp, synthetic construct
  misc_feature 1..80: note = Artificially Synthesized Probe
  source 1..80: mol_type = other DNA
ataatacctggtcccaagatttttgtgtaattgagctaataagcatggaagtacctggcacagttcctgagtcaccaaaa

SEQ ID NO: 35102 - DNA, 80 bp, synthetic construct
  misc_feature 1..80: note = Artificially Synthesized Probe
  source 1..80: mol_type = other DNA
tacatttctatttctgtctttaacccttaaaatgcaaacaaatgcaggagtgaagacagacgtattttagttatttcttc

SEQ ID NO: 35103 - DNA, 80 bp, synthetic construct
  misc_feature 1..80: note = Artificially Synthesized Probe
  source 1..80: mol_type = other DNA
gagagggttgtgaaggccagtagcccagagaaaatcaagggcagctgggtgcatttaggtggataagaaaacaatgaatt

SEQ ID NO: 35104 - DNA, 80 bp, synthetic construct
  misc_feature 1..80: note = Artificially Synthesized Probe
  source 1..80: mol_type = other DNA
ctcattgacatcagcgagctcttgcgtggagaagacctcaactctttgcattttacaaaaggctaaatcagagcctcctc

SEQ ID NO: 35105 - DNA, 80 bp, synthetic construct
  misc_feature 1..80: note = Artificially Synthesized Probe
  source 1..80: mol_type = other DNA
tctgttgatgtgtttgaaaatgatgaaggaactctgggtccctatataacaaatgaaatagaagccatcaggaggacaga

SEQ ID NO: 35106 - DNA, 80 bp, synthetic construct
  misc_feature 1..80: note = Artificially Synthesized Probe
  source 1..80: mol_type = other DNA
ctataagggaaaaagatgcgagatgtgacatatgagcacagaaaagtgctctctgcctatcaaggaatgtcaaatcaaag

SEQ ID NO: 35107 - DNA, 80 bp, synthetic construct
  misc_feature 1..80: note = Artificially Synthesized Probe
  source 1..80: mol_type = other DNA
gcaatactccatctcaaaaaaaaaaaaaaaaaaaaggtgatcagaatcttgcagaacacaccaagaagagatccttctta

SEQ ID NO: 35108 - DNA, 80 bp, synthetic construct
  misc_feature 1..80: note = Artificially Synthesized Probe
  source 1..80: mol_type = other DNA
aaattggtaccaagagtggggtttttgccagagtgccaactatcccgagggaaactttggagggaaccagctactagatg

SEQ ID NO: 35109 - DNA, 80 bp, synthetic construct
  misc_feature 1..80: note = Artificially Synthesized Probe
  source 1..80: mol_type = other DNA
ccggtgtcaatcttaatttccagtttaatggaatcgtggttgtgtcttctggtggcagcattcctccctctggaactaag

SEQ ID NO: 35110 - DNA, 80 bp, synthetic construct
  misc_feature 1..80: note = Artificially Synthesized Probe
  source 1..80: mol_type = other DNA
caagacactttgggttggaatatatatacatacatatatattccattagttccatccctctagagaaccctaatacaatg

SEQ ID NO: 35111 - DNA, 80 bp, synthetic construct
  misc_feature 1..80: note = Artificially Synthesized Probe
  source 1..80: mol_type = other DNA
ggggagagaataaaggcaagaaaacgtattcagaaactatttcagaagtccaggtgagagataacatggccctcaactac

SEQ ID NO: 35112 - DNA, 80 bp, synthetic construct
  misc_feature 1..80: note = Artificially Synthesized Probe
  source 1..80: mol_type = other DNA
ttccttatcataatgttaaatgtgcaccagagctgggggacatttaagagccagacaccatgatctaaaagatgctaaat

SEQ ID NO: 35113 - DNA, 80 bp, synthetic construct
  misc_feature 1..80: note = Artificially Synthesized Probe
  source 1..80: mol_type = other DNA
cagctttttttcatgtgtgtacaggttgggatggtgtaacagcaccttttttagagcactgttcgtacttgtctgcttaa

SEQ ID NO: 35114 - DNA, 80 bp, synthetic construct
  misc_feature 1..80: note = Artificially Synthesized Probe
  source 1..80: mol_type = other DNA
cctaatcattgtgacctgaaacactggggtcatgagtgcttttgtctttgacagtcatatccaagacctttcattaacca

SEQ ID NO: 35115 - DNA, 80 bp, synthetic construct
  misc_feature 1..80: note = Artificially Synthesized Probe
  source 1..80: mol_type = other DNA
ttatgcaccttctaaataatggcaaatttttaaacgtgggtgggctttgctcagctttgctcctgaactattacaccacc

SEQ ID NO: 35116 - DNA, 80 bp, synthetic construct
  misc_feature 1..80: note = Artificially Synthesized Probe
  source 1..80: mol_type = other DNA
gaaatcaaccttattagtttccacaaagaatattaaacttataatcattcattcacacaacaattagtaaatgcctatta

SEQ ID NO: 35117 - DNA, 80 bp, synthetic construct
  misc_feature 1..80: note = Artificially Synthesized Probe
  source 1..80: mol_type = other DNA
aacttccttcctgtaactgactccaaaatacactgttccagtcccatatgttcagttttctagaagtcatctctctatcc

SEQ ID NO: 35118 - DNA, 80 bp, synthetic construct
  misc_feature 1..80: note = Artificially Synthesized Probe
  source 1..80: mol_type = other DNA
gcacatagtaaacactatgcatttgttaagtgaaattactggctgactacttcaacaaaagaacagtcttcaatgtgggt

SEQ ID NO: 35119 - DNA, 80 bp, synthetic construct
  misc_feature 1..80: note = Artificially Synthesized Probe
  source 1..80: mol_type = other DNA
tcttcacctttttagtggtgcttctatgcttaatagtagtcataataatcagaatgaccaaaattttctgcctcccttcc

SEQ ID NO: 35120 - DNA, 80 bp, synthetic construct
  misc_feature 1..80: note = Artificially Synthesized Probe
  source 1..80: mol_type = other DNA
gtctggaaattccttgctgaacctaagcatatgactaaaagaataatctttcctaagcataattttcatgtcattcttct

SEQ ID NO: 35121 - DNA, 80 bp, synthetic construct
  misc_feature 1..80: note = Artificially Synthesized Probe
  source 1..80: mol_type = other DNA
aaagtaaggttctctgcttgaaaacaagggcttaaatagctgtcttcttgagatggctaaagttgaatttggttagagag

SEQ ID NO: 35122 - DNA, 80 bp, synthetic construct
  misc_feature 1..80: note = Artificially Synthesized Probe
  source 1..80: mol_type = other DNA
gaaaaacaagggattcctcctaatggaactagaaaacattccatttgaaggatacccctacagtttcctctcacttaagc

SEQ ID NO: 35123 - DNA, 80 bp, synthetic construct
  misc_feature 1..80: note = Artificially Synthesized Probe
  source 1..80: mol_type = other DNA
ttctttcctgtgaccataatgccagcttagtttcctgcccccctactctgtcccccctgttaaagtagataaaaataatt

SEQ ID NO: 35124 - DNA, 80 bp, synthetic construct
  misc_feature 1..80: note = Artificially Synthesized Probe
  source 1..80: mol_type = other DNA
cttatcttccagtttacagtctgggctcatttatcagaactcaaaggctgagctgagcacctagtctcttcaatcatcac

SEQ ID NO: 35125 - DNA, 80 bp, synthetic construct
  misc_feature 1..80: note = Artificially Synthesized Probe
  source 1..80: mol_type = other DNA
caactgggttgagctatttacctaaaggattttcaaaactaattaagattcctgatatatagactacttcttaaccccca

SEQ ID NO: 35126 - DNA, 80 bp, synthetic construct
  misc_feature 1..80: note = Artificially Synthesized Probe
  source 1..80: mol_type = other DNA
caaaatgagtgacaaaggtgctttccaaagtccctttgacctcctaagtgtgatgactctataatcttggcctttgaagt

SEQ ID NO: 35127 - DNA, 80 bp, synthetic construct
  misc_feature 1..80: note = Artificially Synthesized Probe
  source 1..80: mol_type = other DNA
gaattaagacagaaaaattaaagtcaaggaggtacagagttacttttcaggatgactgaggtttcagaaagggcaagttg

SEQ ID NO: 35128 - DNA, 80 bp, synthetic construct
  misc_feature 1..80: note = Artificially Synthesized Probe
  source 1..80: mol_type = other DNA
agactgccaccatgtcttatgcaggagaaactgcattcactgtcagacagtctctgggtacgtatacttgtgaataagga

SEQ ID NO: 35129 - DNA, 80 bp, synthetic construct
  misc_feature 1..80: note = Artificially Synthesized Probe
  source 1..80: mol_type = other DNA
tattctgatatcccccattcctttgctatcattcataagggcagatgtagacaaaattaaagaatttaattaagcctctc

SEQ ID NO: 35130 - DNA, 80 bp, synthetic construct
  misc_feature 1..80: note = Artificially Synthesized Probe
  source 1..80: mol_type = other DNA
gcctgggccacagatggagatgctagtaaccaagacttcctttacaaaagaccccttagggaaacatcatatttgataaa

SEQ ID NO: 35131 - DNA, 80 bp, synthetic construct
  misc_feature 1..80: note = Artificially Synthesized Probe
  source 1..80: mol_type = other DNA
atacaaaaaattagccgggcgtggtggcgggcgcttgtagtcccggctacttgagaggctgaggcaggagaatggcaaga

SEQ ID NO: 35132 - DNA, 80 bp, synthetic construct
  misc_feature 1..80: note = Artificially Synthesized Probe
  source 1..80: mol_type = other DNA
ctgtctatttctttgatctgacaatgcccctgtgcctccctgaatgcactcacaagaaggtgaaggaaaaggggaaatgc

SEQ ID NO: 35133 - DNA, 80 bp, synthetic construct
  misc_feature 1..80: note = Artificially Synthesized Probe
  source 1..80: mol_type = other DNA
acagaaccacagagtgggtagcttcaaagtatgcatacaactctgctcaaatccttaaataattcctgactatgcatgag

SEQ ID NO: 35134 - DNA, 80 bp, synthetic construct
  misc_feature 1..80: note = Artificially Synthesized Probe
  source 1..80: mol_type = other DNA
tgaagcaaacaacttgaaagtgattaatgacatcaaatttaattacatatttacacctcccagtaggacaagggaaagaa

SEQ ID NO: 35135 - DNA, 80 bp, synthetic construct
  misc_feature 1..80: note = Artificially Synthesized Probe
  source 1..80: mol_type = other DNA
cctcaaaacaggaaagacatctgagggacatacccagaactgtatccataagcattccatcctatcaacaattaacaagt

SEQ ID NO: 35136 - DNA, 80 bp, synthetic construct
  misc_feature 1..80: note = Artificially Synthesized Probe
  source 1..80: mol_type = other DNA
acatgaactcattcttttttatggctgtatagtgttccatcatgtatacatgccacattttctttatccagtctatcacc

SEQ ID NO: 35137 - DNA, 80 bp, synthetic construct
  misc_feature 1..80: note = Artificially Synthesized Probe
  source 1..80: mol_type = other DNA
atggttggagaaaaaggaaaaaaaaatgctcttaagccaagaactagcctacattttccttcatccttactcttttatcc

SEQ ID NO: 35138 - DNA, 80 bp, synthetic construct
  misc_feature 1..80: note = Artificially Synthesized Probe
  source 1..80: mol_type = other DNA
agtaagaagttcttattagccaattatctggcatccacatccttccatcctcacccccaaccaaaatctgtaccaggaaa

SEQ ID NO: 35139 - DNA, 80 bp, synthetic construct
  misc_feature 1..80: note = Artificially Synthesized Probe
  source 1..80: mol_type = other DNA
caaaaattctcaaactgttgattcccccattccctttaagagacaataaaaaggcactttaccatctgaggccctcccaa

SEQ ID NO: 35140 - DNA, 80 bp, synthetic construct
  misc_feature 1..80: note = Artificially Synthesized Probe
  source 1..80: mol_type = other DNA
ttccctgtaaggctcaaatgctccctcttcccacactgataagcccaatgcaacaactataattaaaacagttaatgtca

SEQ ID NO: 35141 - DNA, 80 bp, synthetic construct
  misc_feature 1..80: note = Artificially Synthesized Probe
  source 1..80: mol_type = other DNA
tatatgaacgcttgagtgtccacttttaaaaatactcaaaagctatataatatagaggtcttagatgatttagatgataa

SEQ ID NO: 35142 - DNA, 80 bp, synthetic construct
  misc_feature 1..80: note = Artificially Synthesized Probe
  source 1..80: mol_type = other DNA
gaattggagaacattatgctaagtgaaataaggcacaggaagacaaatacagcatgttctcacttatatgtagaattgaa

SEQ ID NO: 35143 - DNA, 80 bp, synthetic construct
  misc_feature 1..80: note = Artificially Synthesized Probe
  source 1..80: mol_type = other DNA
tgtacctcagatagtgtctaggaaaggcctccctgaggaggtatgctttgagctacaatgtaaatgaacaagtgtcatga

SEQ ID NO: 35144 - DNA, 80 bp, synthetic construct
  misc_feature 1..80: note = Artificially Synthesized Probe
  source 1..80: mol_type = other DNA
gtattactccccaccacttccactgcattctctgcccagtttatgccctctttactgaacagatcgtcattgaactcagt

SEQ ID NO: 35145 - DNA, 80 bp, synthetic construct
  misc_feature 1..80: note = Artificially Synthesized Probe
  source 1..80: mol_type = other DNA
aacttttaagaaatacaatatgaacccttgatgtttagcactaactgtaactcaatccagacaaggctcttttatttatt

SEQ ID NO: 35146 - DNA, 80 bp, synthetic construct
  misc_feature 1..80: note = Artificially Synthesized Probe
  source 1..80: mol_type = other DNA
tggcctctggaagaggctcagtaaaatgaacaaagcaaagttttctaaaatgactgcctgcattattaccaaaaatagga

SEQ ID NO: 35147 - DNA, 80 bp, synthetic construct
  misc_feature 1..80: note = Artificially Synthesized Probe
  source 1..80: mol_type = other DNA
cctgaaaaatattttacctccttttcctttttctctatcttgctaaattcctactatatttcaaatcacagataaagcat

SEQ ID NO: 35148 - DNA, 80 bp, synthetic construct
  misc_feature 1..80: note = Artificially Synthesized Probe
  source 1..80: mol_type = other DNA
agtgttattccatgtcttgtcttatatcttgtattatctgttctgttccactatctgtatttgtactattatcaagacaa

SEQ ID NO: 35149 - DNA, 80 bp, synthetic construct
  misc_feature 1..80: note = Artificially Synthesized Probe
  source 1..80: mol_type = other DNA
aaagtccaactacatgtatggctaactattctcaagtcagggttcgcagaagctaaggtcctaacatttggattattttt

SEQ ID NO: 35150 - DNA, 80 bp, synthetic construct
  misc_feature 1..80: note = Artificially Synthesized Probe
  source 1..80: mol_type = other DNA
aaagcagctcaacacactaacagtcacaatttggtttgcaagtgctcacaatcattctatttgctcatccagttgttgct

SEQ ID NO: 35151 - DNA, 80 bp, synthetic construct
  misc_feature 1..80: note = Artificially Synthesized Probe
  source 1..80: mol_type = other DNA
gcaacacctaagtgaggtctgctccacctagcttcagcccagctataataccatggtaagtgcttgaaaaatgtcagcca

SEQ ID NO: 35152 - DNA, 80 bp, synthetic construct
  misc_feature 1..80: note = Artificially Synthesized Probe
  source 1..80: mol_type = other DNA
tccccacaacaacactatgaggcatgtaaattggtattagcaccattttacacaagaaactgcaactcaaagaaataagg

SEQ ID NO: 35153 - DNA, 80 bp, synthetic construct
  misc_feature 1..80: note = Artificially Synthesized Probe
  source 1..80: mol_type = other DNA
aaatgccataagagataaagtattttcttcatctggtctgcttctctccaactaaagaaatcaactcagagggggaaaaa

SEQ ID NO: 35154 - DNA, 80 bp, synthetic construct
  misc_feature 1..80: note = Artificially Synthesized Probe
  source 1..80: mol_type = other DNA
actgtccttcttatgttaaaatgacactgttgactcaccctcagtaggatatgtgcttggttaaacttgtttttccagta

SEQ ID NO: 35155 - DNA, 80 bp, synthetic construct
  misc_feature 1..80: note = Artificially Synthesized Probe
  source 1..80: mol_type = other DNA
cccagatttcacaaagtaggatacatatgcgctcaagagtatacagtatgccagaaaaatgcaaagaaactggataaacc

SEQ ID NO: 35156 - DNA, 80 bp, synthetic construct
  misc_feature 1..80: note = Artificially Synthesized Probe
  source 1..80: mol_type = other DNA
ttaatatatgcaacatgcttacagcttggcactgttaagattattaccctctttccttcaagcacagcagaacacgagaa

SEQ ID NO: 35157 - DNA, 80 bp, synthetic construct
  misc_feature 1..80: note = Artificially Synthesized Probe
  source 1..80: mol_type = other DNA
ttaacaggcatgagccaccatgcccagctgaaaaattacttacctttctaaggcctacagtttgtaatctgtttttaaaa

SEQ ID NO: 35158 - DNA, 80 bp, synthetic construct
  misc_feature 1..80: note = Artificially Synthesized Probe
  source 1..80: mol_type = other DNA
gaaagctagaaagagaaataggctcacctataagcatcaataaacagtaggactgttgtcaggttaacccaggactatgc

SEQ ID NO: 35159 - DNA, 80 bp, synthetic construct
  misc_feature 1..80: note = Artificially Synthesized Probe
  source 1..80: mol_type = other DNA
cactatttgccaaaacaacaagaccttatttagcatcaattttgtgtacatacacttcagaaagaagataaccagatatt

SEQ ID NO: 35160 - DNA, 80 bp, synthetic construct
  misc_feature 1..80: note = Artificially Synthesized Probe
  source 1..80: mol_type = other DNA
catgaagccacagaaggcttcaaatgacaaagaaatgaattagaaaaatcacccacagtacactggcccttcctggtttt

SEQ ID NO: 35161 - DNA, 80 bp, synthetic construct
  misc_feature 1..80: note = Artificially Synthesized Probe
  source 1..80: mol_type = other DNA
cactgaccacggggcatggtcaaatgtccagttggattgctgtgagagtcaaaatgatccacttggcattttgttgatat

SEQ ID NO: 35162 - DNA, 80 bp, synthetic construct
  misc_feature 1..80: note = Artificially Synthesized Probe
  source 1..80: mol_type = other DNA
tcatctgtaaaactaaaataatgtaaccagccctccattcttaccagagttcatttgtggcccaaataaatcatgtctat

SEQ ID NO: 35163 - DNA, 80 bp, synthetic construct
  misc_feature 1..80: note = Artificially Synthesized Probe
  source 1..80: mol_type = other DNA
aaggtctagagacaaatgttcccaggctatatattccaaaggaggaattaccatgaaagtaatgaactttaaagttcagg

SEQ ID NO: 35164 - DNA, 80 bp, synthetic construct
  misc_feature 1..80: note = Artificially Synthesized Probe
  source 1..80: mol_type = other DNA
cccacagttaattccatagttcctaagccaagacaggttagtactgggtaattttaataattggctatgtgcattgttca

SEQ ID NO: 35165 - DNA, 80 bp, synthetic construct
  misc_feature 1..80: note = Artificially Synthesized Probe
  source 1..80: mol_type = other DNA
attctgctatccttcgtgtatacttctcttttattataagcagcttcagctacttttatggaaagatttaaattattgga

SEQ ID NO: 35166 - DNA, 80 bp, synthetic construct
  misc_feature 1..80: note = Artificially Synthesized Probe
  source 1..80: mol_type = other DNA
attttggcttcacattagtactctgcatggtgacactggatggcatgtgattatgtttgtcatatcataggaaatttgga

SEQ ID NO: 35167 - DNA, 80 bp, synthetic construct
  misc_feature 1..80: note = Artificially Synthesized Probe
  source 1..80: mol_type = other DNA
ccttaatggaaactcccctcttttccctccaaattatatttgcttgtcctggtaatggaaatcaactgatagaaggttaa

SEQ ID NO: 35168 - DNA, 80 bp, synthetic construct
  misc_feature 1..80: note = Artificially Synthesized Probe
  source 1..80: mol_type = other DNA
cggatcacctgaggtcaggagtacgagaccagcctgcccaacatagagaaaccccgtctctactaaaactacaaaaaatt

SEQ ID NO: 35169 - DNA, 80 bp, synthetic construct
  misc_feature 1..80: note = Artificially Synthesized Probe
  source 1..80: mol_type = other DNA
tcaaataggtttccttccttggttgatcagaaatgtcctcattccccaggtctcttcatgctaaatatggtaatagctgg

SEQ ID NO: 35170 - DNA, 80 bp, synthetic construct
  misc_feature 1..80: note = Artificially Synthesized Probe
  source 1..80: mol_type = other DNA
aagacaaaagactaacacccttaatatttaaagagctttttcaaaccagtaagaaaataattaaatgagtaaaagacaca

SEQ ID NO: 35171 - DNA, 80 bp, synthetic construct
  misc_feature 1..80: note = Artificially Synthesized Probe
  source 1..80: mol_type = other DNA
accacatttaccatttagagaagttgatatatcagcactatctagttttgtgattattcatacttagaaactcaacagaa

SEQ ID NO: 35172 - DNA, 80 bp, synthetic construct
  misc_feature 1..80: note = Artificially Synthesized Probe
  source 1..80: mol_type = other DNA
gcagcaactctgggtgtgtccacaccacacttcagtcactgcctggctgtgacgagaagttccttcagccactgccactg

SEQ ID NO: 35173 - DNA, 80 bp, synthetic construct
  misc_feature 1..80: note = Artificially Synthesized Probe
  source 1..80: mol_type = other DNA
acctttatatctctccacactaacacatctgagggaaactgccgacaccaaatatgtgttcatgagctaatgaagcagaa

SEQ ID NO: 35174 - DNA, 80 bp, synthetic construct
  misc_feature 1..80: note = Artificially Synthesized Probe
  source 1..80: mol_type = other DNA
gagaaaatatggtacctcttgactagaatgttgtaaacatcagatccagcatgggatggacagaaagactagatgaattt

SEQ ID NO: 35175 - DNA, 80 bp, synthetic construct
  misc_feature 1..80: note = Artificially Synthesized Probe
  source 1..80: mol_type = other DNA
gacaaaataacagaaattgctggcctagtaatacagtaatacaggaagcagtggaagcaaacttgagtgagaggcagggg

SEQ ID NO: 35176 - DNA, 80 bp, synthetic construct
  misc_feature 1..80: note = Artificially Synthesized Probe
  source 1..80: mol_type = other DNA
tccttattcaaatcacgccttgcagttttttactctaaaatcattgcagacgtatatagataaagggtcaaaaaacaaca

SEQ ID NO: 35177 - DNA, 80 bp, synthetic construct
  misc_feature 1..80: note = Artificially Synthesized Probe
  source 1..80: mol_type = other DNA
atcaccatctgaaagaaaattactccgattttgtttaagcaagagaagaattcagctgagaaattatctagcaggcagca

SEQ ID NO: 35178 - DNA, 80 bp, synthetic construct
  misc_feature 1..80: note = Artificially Synthesized Probe
  source 1..80: mol_type = other DNA
ttctctttttaaacatctgcgattgacatgtcgactgactgttaacaatgaacaaagaccatatttttctgaagctcatc

SEQ ID NO: 35179 - DNA, 80 bp, synthetic construct
  misc_feature 1..80: note = Artificially Synthesized Probe
  source 1..80: mol_type = other DNA
ctcggaaagaataacagcagttgagatttttaaatcatgtgcctcagcatgcagccacaccagttgccctacttctcctg

SEQ ID NO: 35180 - DNA, 80 bp, synthetic construct
  misc_feature 1..80: note = Artificially Synthesized Probe
  source 1..80: mol_type = other DNA
agcggccccgggggccgccgcgccttaactcgatcagggctgcagcggctcgctggcttgaccagtgcagaaggggcgtg

SEQ ID NO: 35181 - DNA, 80 bp, synthetic construct
  misc_feature 1..80: note = Artificially Synthesized Probe
  source 1..80: mol_type = other DNA
cttaaaaactaaatgatagtgaaaaaactaatcacagagggagacaaagtataccatttatgtatatttttttcaagaca

SEQ ID NO: 35182 - DNA, 80 bp, synthetic construct
  misc_feature 1..80: note = Artificially Synthesized Probe
  source 1..80: mol_type = other DNA
aacttctaatcataattcatccttcagtccaaagaaggctttgccgacaccgcaataaattcctccccctaacagacagt

SEQ ID NO: 35183 - DNA, 80 bp, synthetic construct
  misc_feature 1..80: note = Artificially Synthesized Probe
  source 1..80: mol_type = other DNA
caattgttttagttttaatcaaaactaaaaatatacatctatgtctttactgatttaaactcacataaaactgccttcca

SEQ ID NO: 35184 - DNA, 80 bp, synthetic construct
  misc_feature 1..80: note = Artificially Synthesized Probe
  source 1..80: mol_type = other DNA
gccaacatacaaataacataactacaacagagataaagcacagggatatgggaaagtagagagcactgggattaattttg

SEQ ID NO: 35185 - DNA, 80 bp, synthetic construct
  misc_feature 1..80: note = Artificially Synthesized Probe
  source 1..80: mol_type = other DNA
ttcagataagcaggaaaattcatataggaatgctcactgtatcactcccttaaaatcttcttttaagcattttatgctag

SEQ ID NO: 35186 - DNA, 80 bp, synthetic construct
  misc_feature 1..80: note = Artificially Synthesized Probe
  source 1..80: mol_type = other DNA
taactctacaaaaaatacaaaaattagctgggcatggtggtgcacgcctatggtcccagccactcaggagtctgaggtgg

SEQ ID NO: 35187 - DNA, 80 bp, synthetic construct
  misc_feature 1..80: note = Artificially Synthesized Probe
  source 1..80: mol_type = other DNA
gaaaagggaaataagaagagttgaagagaagaaaaacagaacagaagagtgggaaaggaagatgaaagggtgctctggag

SEQ ID NO: 35188 - DNA, 80 bp, synthetic construct
  misc_feature 1..80: note = Artificially Synthesized Probe
  source 1..80: mol_type = other DNA
tcatatacctcttttgtgctcttctatatcgtggcatccaacctcttgcttgtcagcttccaactctggttcaacttaag

SEQ ID NO: 35189 - DNA, 80 bp, synthetic construct
  misc_feature 1..80: note = Artificially Synthesized Probe
  source 1..80: mol_type = other DNA
gcaaaaccttccctagccctcaccatttctacactgacaggccatctaaggactccctaccatctcccatctcaacctca

SEQ ID NO: 35190 - DNA, 80 bp, synthetic construct
  misc_feature 1..80: note = Artificially Synthesized Probe
  source 1..80: mol_type = other DNA
taaaaatgccaattgctaggcttcattcccaaagttttgaaagggatgtgggttgagccagataatttacatttataaca

SEQ ID NO: 35191 - DNA, 80 bp, synthetic construct
  misc_feature 1..80: note = Artificially Synthesized Probe
  source 1..80: mol_type = other DNA
ctttgcctataatgcccttgctgcctcccctcccctatcccatcctcccctggatccatagtgatatagtggacccatag

SEQ ID NO: 35192 - DNA, 80 bp, synthetic construct
  misc_feature 1..80: note = Artificially Synthesized Probe
  source 1..80: mol_type = other DNA
cacaaagagaaactatgttaatgagcaagaatcaaatgtgccacctcacagcctcctgactccctgccttagagggtgaa

SEQ ID NO: 35193 - DNA, 80 bp, synthetic construct
  misc_feature 1..80: note = Artificially Synthesized Probe
  source 1..80: mol_type = other DNA
gagatactgatgctcaaagaagtcaaataacttatccaatgttgacaagctaacaagtggtaggggtcagatttgaacct

SEQ ID NO: 35194 - DNA, 80 bp, synthetic construct
  misc_feature 1..80: note = Artificially Synthesized Probe
  source 1..80: mol_type = other DNA
gagaaggaaagcacagggatcaagtacaggggacaaatacatagcattgatctgcctgagataaaatctaaagacgcagt

SEQ ID NO: 35195 - DNA, 80 bp, synthetic construct
  misc_feature 1..80: note = Artificially Synthesized Probe
  source 1..80: mol_type = other DNA
agtctccttatgttccttctgttacaggaattgcagcctcatcacctatcacaatatttctcaacccttttcttttcatt

SEQ ID NO: 35196 - DNA, 80 bp, synthetic construct
  misc_feature 1..80: note = Artificially Synthesized Probe
  source 1..80: mol_type = other DNA
ttagccaaacaagacacaggttggagaatacagctgacagcagtgttgatggaagataggagggcaaggttcaaggcagg

SEQ ID NO: 35197 - DNA, 80 bp, synthetic construct
  misc_feature 1..80: note = Artificially Synthesized Probe
  source 1..80: mol_type = other DNA
caatgtgaaatatgtaatacagatctgtacaaaatgtcttagcaactcaaaagaggaagtgatgaattctgtcttgagaa

SEQ ID NO: 35198 - DNA, 80 bp, synthetic construct
  misc_feature 1..80: note = Artificially Synthesized Probe
  source 1..80: mol_type = other DNA
cgtacatgtcaatgaggactttgcagatatgactacgtttaaggaagatgggaagattagattattcagatgaacctgat

SEQ ID NO: 35199 - DNA, 80 bp, synthetic construct
  misc_feature 1..80: note = Artificially Synthesized Probe
  source 1..80: mol_type = other DNA
attcatattttctgaatctctgtatccactaggctaatccacccatcaacctatgtctagacagtctttaaagtcttcct

SEQ ID NO: 35200 - DNA, 80 bp, synthetic construct
  misc_feature 1..80: note = Artificially Synthesized Probe
  source 1..80: mol_type = other DNA
atcacctgcttattaagcccagtaaccattagctattcttcccgacactctccctcccctcacacccccctctgactgac

SEQ ID NO: 35201 - DNA, 80 bp, synthetic construct
  misc_feature 1..80: note = Artificially Synthesized Probe
  source 1..80: mol_type = other DNA
tgaaagcatttttttttttttttggctcacccattaaaacctatattggccatgctagctcatgtttttcctgtaaacag

SEQ ID NO: 35202 - DNA, 80 bp, synthetic construct
  misc_feature 1..80: note = Artificially Synthesized Probe
  source 1..80: mol_type = other DNA
ttctctctgacaggcatatccaatcatccctactcttgaatactgaccctcaaaactcttctttctttagctctttgtaa

SEQ ID NO: 35203 - DNA, 80 bp, synthetic construct
  misc_feature 1..80: note = Artificially Synthesized Probe
  source 1..80: mol_type = other DNA
aggaaggaatggttaattctgtctgtggggttggaggtggaaggagagaaacctaaggaaatctattacaagagagataa

SEQ ID NO: 35204 - DNA, 80 bp, synthetic construct
  misc_feature 1..80: note = Artificially Synthesized Probe
  source 1..80: mol_type = other DNA
ctcaaaagagagagagagagaggatccatgatgttggtgctggcatgtgggtctgggacacaggggaatgtagctctagg

SEQ ID NO: 35205 - DNA, 80 bp, synthetic construct
  misc_feature 1..80: note = Artificially Synthesized Probe
  source 1..80: mol_type = other DNA
atagctgctaaatttatgccagagcataactttccagagtggcttgtaaaccagccacagtaatttcaagatattttaac

SEQ ID NO: 35206 - DNA, 80 bp, synthetic construct
  misc_feature 1..80: note = Artificially Synthesized Probe
  source 1..80: mol_type = other DNA
gctgggatagcaaattttaagccaaaaccactatctgagatttacacaaagcataattttagctcctcttttgtttcatg

SEQ ID NO: 35207 - DNA, 80 bp, synthetic construct
  misc_feature 1..80: note = Artificially Synthesized Probe
  source 1..80: mol_type = other DNA
acaaataagcgccaaacatgtaaacaggtctaattgttgttgtgataagccatttacttgaaagatgcatatggagataa

SEQ ID NO: 35208 - DNA, 80 bp, synthetic construct
  misc_feature 1..80: note = Artificially Synthesized Probe
  source 1..80: mol_type = other DNA
catttttattcttctcagtaagacaagggcctgtggttattgattagaccagctttgtttttaatttccttccagtaatg

SEQ ID NO: 35209 - DNA, 80 bp, synthetic construct
  misc_feature 1..80: note = Artificially Synthesized Probe
  source 1..80: mol_type = other DNA
cctcaacagagccagtatccagtgtgatctgggatggatttagcttcctggggcttcccatatgcattaatcttctgttt

SEQ ID NO: 35210 - DNA, 80 bp, synthetic construct
  misc_feature 1..80: note = Artificially Synthesized Probe
  source 1..80: mol_type = other DNA
gcactgctccctggtccattctttgaatactattgccagaatagtatcgtctccatattatgactcaatttttactcttt

SEQ ID NO: 35211 - DNA, 80 bp, synthetic construct
  misc_feature 1..80: note = Artificially Synthesized Probe
  source 1..80: mol_type = other DNA
cagggagggcctcatcgagtaggtgtttttgtacaaagacatttgggtgtcattggtggacagatcttacctgtgttctt

SEQ ID NO: 35212 - DNA, 80 bp, synthetic construct
  misc_feature 1..80: note = Artificially Synthesized Probe
  source 1..80: mol_type = other DNA
aagtgtcttgcactcactatttccacttcctcaacttgcttctatctagcttctgccccgatcattcctctaaaaattga

SEQ ID NO: 35213 - DNA, 80 bp, synthetic construct
  misc_feature 1..80: note = Artificially Synthesized Probe
  source 1..80: mol_type = other DNA
atgtccttgctaatttggagactgattcagtccccttttggcccccaagttacgtaaagataaggactttggagatgttt

SEQ ID NO: 35214 - DNA, 80 bp, synthetic construct
  misc_feature 1..80: note = Artificially Synthesized Probe
  source 1..80: mol_type = other DNA
acctggagggattggagccgcggggggagccggtggcgtgaagggggaggagacgagcggcctgaagcgtctggggcgtg

SEQ ID NO: 35215 - DNA, 80 bp, synthetic construct
  misc_feature 1..80: note = Artificially Synthesized Probe
  source 1..80: mol_type = other DNA
caaaaaggagagtcccacttgggtttttgatctcagtaggattaattgcagaagcctaatctttgtactattcagacttt

SEQ ID NO: 35216 - DNA, 80 bp, synthetic construct
  misc_feature 1..80: note = Artificially Synthesized Probe
  source 1..80: mol_type = other DNA
atttcttacacctgggtattgtgtgtacctcactgtctgtacatctttgaagaacttggcatctataccactcatttggt

SEQ ID NO: 35217 - DNA, 80 bp, synthetic construct
  misc_feature 1..80: note = Artificially Synthesized Probe
  source 1..80: mol_type = other DNA
tagccctgtggttaagtgacgcatggctgcatataacatttagtgggggggtgtaaaataggtggaactcaaaagttgaa

SEQ ID NO: 35218 - DNA, 80 bp, synthetic construct
  misc_feature 1..80: note = Artificially Synthesized Probe
  source 1..80: mol_type = other DNA
gggtatagtactactgtctttttaataggttccaatgtgagtctagaaattggagaggacaaataaatttttggggcggg

SEQ ID NO: 35219 - DNA, 80 bp, synthetic construct
  misc_feature 1..80: note = Artificially Synthesized Probe
  source 1..80: mol_type = other DNA
aagccatcctatgtaatagtttataataaaagggcaggtggtcatctgttgtcagtttaagttaaatgagctgagttgaa

SEQ ID NO: 35220 - DNA, 80 bp, synthetic construct
  misc_feature 1..80: note = Artificially Synthesized Probe
  source 1..80: mol_type = other DNA
tggtggttcttcaaaatctttgagcatgacgatgaaggcagaaaacaggaaaaaggccgaaagagccgaaagcttaaaaa

SEQ ID NO: 35221 - DNA, 80 bp, synthetic construct
  misc_feature 1..80: note = Artificially Synthesized Probe
  source 1..80: mol_type = other DNA
tttagtctgattttgagttacctttgtacaagtttataaaataagtgtttaatagcattcaccgaggctcggggacaagc

SEQ ID NO: 35222 - DNA, 80 bp, synthetic construct
  misc_feature 1..80: note = Artificially Synthesized Probe
  source 1..80: mol_type = other DNA
tattaatagaaacttcagtggtgagatggcaagggcccagcatagatagatggcaatgaaaatgcaaagaggtgcatgaa

SEQ ID NO: 35223 - DNA, 80 bp, synthetic construct
  misc_feature 1..80: note = Artificially Synthesized Probe
  source 1..80: mol_type = other DNA
acatgaagttgctgtattgggatttagagaccagtacgttcagttgttgaattaaacgtgaaccccttggtatttgctaa

SEQ ID NO: 35224 - DNA, 80 bp, synthetic construct
  misc_feature 1..80: note = Artificially Synthesized Probe
  source 1..80: mol_type = other DNA
cagtgtatggggcttctgatttcactccaacctactgatttcactacaccctcacttgccattatctgactctaatcctg

SEQ ID NO: 35225 - DNA, 80 bp, synthetic construct
  misc_feature 1..80: note = Artificially Synthesized Probe
  source 1..80: mol_type = other DNA
tgtgtatggtgtgaatggaggggtctaaatatagactttggatgtagattagcagttgccccaacatgatttgttcaaaa

SEQ ID NO: 35226 - DNA, 80 bp, synthetic construct
  misc_feature 1..80: note = Artificially Synthesized Probe
  source 1..80: mol_type = other DNA
atctgtttctacagagaaaccagcttggggagtcttctaacgattgtatttaacctgtatattcggggagtgtttccatc

SEQ ID NO: 35227 - DNA, 80 bp, synthetic construct
  misc_feature 1..80: note = Artificially Synthesized Probe
  source 1..80: mol_type = other DNA
tgttttgtagttaagggaagctggtgtgggagatcatctcatactgaaaattagtcctgaggaggattacagaaaactta

SEQ ID NO: 35228 - DNA, 80 bp, synthetic construct
  misc_feature 1..80: note = Artificially Synthesized Probe
  source 1..80: mol_type = other DNA
ccacctactcaggaggtggagacaggagaattgcttgaacctgggaggtggagtgcagtgagattgcaccactgcactcc

SEQ ID NO: 35229 - DNA, 80 bp, synthetic construct
  misc_feature 1..80: note = Artificially Synthesized Probe
  source 1..80: mol_type = other DNA
acataaacagacacttttcaaaagacatacaagtggccaaaaagcatatgaaaaacagctcaatatcactgattagagaa

SEQ ID NO: 35230 - DNA, 80 bp, synthetic construct
  misc_feature 1..80: note = Artificially Synthesized Probe
  source 1..80: mol_type = other DNA
tacttctttctacacagacacggcaaccatccgatttctcaatcttttccccacctttcctgcctttctattccacaaag

SEQ ID NO: 35231 - DNA, 80 bp, synthetic construct
  misc_feature 1..80: note = Artificially Synthesized Probe
  source 1..80: mol_type = other DNA
ggctcctcacttctcagacggggtggttgccaggcagagggtctcctcacttctcagacggggcggccaggcagagacgc

SEQ ID NO: 35232 - DNA, 80 bp, synthetic construct
  misc_feature 1..80: note = Artificially Synthesized Probe
  source 1..80: mol_type = other DNA
tgtagaagacattaaagcaaaaatgcaagcaagtatagaaaaagtgagtaaagttatcttaaaaaaactttgtctccccc

SEQ ID NO: 35233 - DNA, 80 bp, synthetic construct
  misc_feature 1..80: note = Artificially Synthesized Probe
  source 1..80: mol_type = other DNA
caatgctaaaatgacatcttttagatgcccctcccctccattttaatatggtcctatctccttggtttaattgcaggcgc

SEQ ID NO: 35234 - DNA, 80 bp, synthetic construct
  misc_feature 1..80: note = Artificially Synthesized Probe
  source 1..80: mol_type = other DNA
agcaaccgagttgccatgtttgtttgtcgaatctcaagtgtagcttatattttatgttcctagagaggttgtcagggaag

SEQ ID NO: 35235 - DNA, 80 bp, synthetic construct
  misc_feature 1..80: note = Artificially Synthesized Probe
  source 1..80: mol_type = other DNA
aaggacaatgtaaaagtggttaaatagggatgttaggtatcgtgtggagaacggatgctgcatttaatggtctttaggtt

SEQ ID NO: 35236 - DNA, 80 bp, synthetic construct
  misc_feature 1..80: note = Artificially Synthesized Probe
  source 1..80: mol_type = other DNA
attacaggcacgagccaccttgcccagcctaccagaagtatttttttgctctagaattgaaagtgttctcaagtgtcaga

SEQ ID NO: 35237 - DNA, 80 bp, synthetic construct
  misc_feature 1..80: note = Artificially Synthesized Probe
  source 1..80: mol_type = other DNA
attggccatatgggtctctgttctttctgttgatttccttaagtaaataatgctaaactattaaataattattagtatat

SEQ ID NO: 35238 - DNA, 80 bp, synthetic construct
  misc_feature 1..80: note = Artificially Synthesized Probe
  source 1..80: mol_type = other DNA
agtcttgtaaaattctatgagaatgtccctgccctccccttcaatattctctctggagctaaccactttttcatcataag

SEQ ID NO: 35239 - DNA, 80 bp, synthetic construct
  misc_feature 1..80: note = Artificially Synthesized Probe
  source 1..80: mol_type = other DNA
gcctgatgaccctctgagcttcatgaattgataagcaagttactcatcagagtaaatttcacttaagcccttcaggatct

SEQ ID NO: 35240 - DNA, 80 bp, synthetic construct
  misc_feature 1..80: note = Artificially Synthesized Probe
  source 1..80: mol_type = other DNA
ggactgcagtggcgtgatctctgctcactgcaacctctgcctcctgggttcaagtgattctcctgcctcagcctcccaag

SEQ ID NO: 35241 - DNA, 80 bp, synthetic construct
  misc_feature 1..80: note = Artificially Synthesized Probe
  source 1..80: mol_type = other DNA
ttgctgctctgtctctcccctctggttcctctctggttcccctctcttggcctacgtctgtccctgtctcccagctgccc

SEQ ID NO: 35242 - DNA, 80 bp, synthetic construct
  misc_feature 1..80: note = Artificially Synthesized Probe
  source 1..80: mol_type = other DNA
gcccctgccaagccccaggcctgtgtgctgggatggagcctccacactgaggctggtaaaagctgaactcaacagcagca

SEQ ID NO: 35243 - DNA, 80 bp, synthetic construct
  misc_feature 1..80: note = Artificially Synthesized Probe
  source 1..80: mol_type = other DNA
cagcatagtgcttaactagttaacaagaaatgctgcttccctttgaattgtttcgggggtgtagaaattgcacttatttc

SEQ ID NO: 35244 - DNA, 80 bp, synthetic construct
  misc_feature 1..80: note = Artificially Synthesized Probe
  source 1..80: mol_type = other DNA
cggcttctcactgaatcatgtcctcttccttctccactttggcaaaggtggccaccttgttcttgaggagatagaggtgt

SEQ ID NO: 35245 - DNA, 80 bp, synthetic construct
  misc_feature 1..80: note = Artificially Synthesized Probe
  source 1..80: mol_type = other DNA
ctcccgcgccacacgcctcttccccttgttctgccctccacgcctcttccccttggtcttccccaccacacgcctcttcc

SEQ ID NO: 35246 - DNA, 80 bp, synthetic construct
  misc_feature 1..80: note = Artificially Synthesized Probe
  source 1..80: mol_type = other DNA
ttctccttgatctttccccctcaatgtctacacctcttctccttggtcttccccaaccccagcctcttccccttggtctc

SEQ ID NO: 35247 - DNA, 80 bp, synthetic construct
  misc_feature 1..80: note = Artificially Synthesized Probe
  source 1..80: mol_type = other DNA
cccggcggatgatagtggggatgtactcagccttgggcaccttggaggaaatgagctgcggagacaaagagctgctcagg

SEQ ID NO: 35248 - DNA, 80 bp, synthetic construct
  misc_feature 1..80: note = Artificially Synthesized Probe
  source 1..80: mol_type = other DNA
ggaggaagctaatgtgggtggggtctaaggcacatgaagcagacacggaccagaggctcggttggttcaggggcaggatc

SEQ ID NO: 35249 - DNA, 80 bp, synthetic construct
  misc_feature 1..80: note = Artificially Synthesized Probe
  source 1..80: mol_type = other DNA
cacccagtgctcttcccgcgacagccttccagggctccccttcaactccagaacaaaggtgcagtgcctggcgctctgga

SEQ ID NO: 35250 - DNA, 80 bp, synthetic construct
  misc_feature 1..80: note = Artificially Synthesized Probe
  source 1..80: mol_type = other DNA
cctcacaggtaacccagccaccagcaggatgctggctacactgctggccagccctgaatgggcaacggaagctgatgtca

SEQ ID NO: 35251 - DNA, 80 bp, synthetic construct
  misc_feature 1..80: note = Artificially Synthesized Probe
  source 1..80: mol_type = other DNA
ctcttggtaacttgacgctttgatttttttggcttaactttccctttggccacccaaagtttgagaaacattcctttgaa

SEQ ID NO: 35252 - DNA, 80 bp, synthetic construct
  misc_feature 1..80: note = Artificially Synthesized Probe
  source 1..80: mol_type = other DNA
tgccctgacacaaacccctcaccagacacacggtcaacgctgtacatcctctccagcttcttgcggcgaccggaggtctc

SEQ ID NO: 35253 - DNA, 80 bp, synthetic construct
  misc_feature 1..80: note = Artificially Synthesized Probe
  source 1..80: mol_type = other DNA
aacgctcgggctgctctgagggtggacagagggcacggtcagaggccacggcacgaccctcccaaacaccgggccgcgca

SEQ ID NO: 35254 - DNA, 80 bp, synthetic construct
  misc_feature 1..80: note = Artificially Synthesized Probe
  source 1..80: mol_type = other DNA
ttttcttattgcggaaactgccagacggcggtggtcagtgcccagcctgaggggatggcttcgaatggaggtaagcctgt

SEQ ID NO: 35255 - DNA, 80 bp, synthetic construct
  misc_feature 1..80: note = Artificially Synthesized Probe
  source 1..80: mol_type = other DNA
gtgtttgtagggagtggtgggatcatgttgtgctggtggccccgggaggatgataggcaagcctgaaccctgtgccatat

SEQ ID NO: 35256 - DNA, 80 bp, synthetic construct
  misc_feature 1..80: note = Artificially Synthesized Probe
  source 1..80: mol_type = other DNA
tgtgttctaatcgtgtgtggcttttgctggctatgcagtgacactgtctcaggggactccaccactgcctctcagacctg

SEQ ID NO: 35257 - DNA, 80 bp, synthetic construct
  misc_feature 1..80: note = Artificially Synthesized Probe
  source 1..80: mol_type = other DNA
tggctgcggcccgagtggggccggggcttccaacgtctttgtccagatgaggacagaggtggggcctgtgaaggccgctc

SEQ ID NO: 35258 - DNA, 80 bp, synthetic construct
  misc_feature 1..80: note = Artificially Synthesized Probe
  source 1..80: mol_type = other DNA
cccagcaggaacctggcacatgcctgcagttccgctgaggtccagttagcacagcggtggtggagcctgcatagggggat

SEQ ID NO: 35259 - DNA, 80 bp, synthetic construct
  misc_feature 1..80: note = Artificially Synthesized Probe
  source 1..80: mol_type = other DNA
caagagccctggcgtctccttctgcccttatcagggcttggattccatgactgggacccacgctcatgacctgctttaac

SEQ ID NO: 35260 - DNA, 80 bp, synthetic construct
  misc_feature 1..80: note = Artificially Synthesized Probe
  source 1..80: mol_type = other DNA
tagcctcaggactcctgcatctgggcatcatccctgatgccttctgccataaatcccacccctggccagctgaaacctgg

SEQ ID NO: 35261 - DNA, 80 bp, synthetic construct
  misc_feature 1..80: note = Artificially Synthesized Probe
  source 1..80: mol_type = other DNA
ggaggagctgctggggccttccctcggggccacgggggagcccgagaaacaacgggaagagggcaaagtgaagcagccac

SEQ ID NO: 35262 - DNA, 80 bp, synthetic construct
  misc_feature 1..80: note = Artificially Synthesized Probe
  source 1..80: mol_type = other DNA
ccaacgggaggcccggcagagccacaccctctctctttgacataaagcccagctgcctcaggcttccctacctgccgcct

SEQ ID NO: 35263 - DNA, 80 bp, synthetic construct
  misc_feature 1..80: note = Artificially Synthesized Probe
  source 1..80: mol_type = other DNA
agtgcgttgggggcctcgtgtgtaagtgtgaataaatgtagttgtcttggaaaatgctcttggggctgctgcctctgtcc

SEQ ID NO: 35264 - DNA, 80 bp, synthetic construct
  misc_feature 1..80: note = Artificially Synthesized Probe
  source 1..80: mol_type = other DNA
gaatctcagatcccagcgtggacaggacccggcacccaccctggttccctcctggccaacaccttcttctccacggtctg

SEQ ID NO: 35265 - DNA, 80 bp, synthetic construct
  misc_feature 1..80: note = Artificially Synthesized Probe
  source 1..80: mol_type = other DNA
cactggctgttgtctatcccactgtccctgtccttgtcttggctgagccattcctaggaagcagaacttgtgcttcctcc

SEQ ID NO: 35266 - DNA, 80 bp, synthetic construct
  misc_feature 1..80: note = Artificially Synthesized Probe
  source 1..80: mol_type = other DNA
aagaacccctgtgtttctcagactgaaaatgtgttttgaactttgttcacgaagtgaggccgctgttgaaattcgtcaag

SEQ ID NO: 35267 - DNA, 80 bp, synthetic construct; identical to SEQ ID NO: 35255
  misc_feature 1..80: note = Artificially Synthesized Probe
  source 1..80: mol_type = other DNA

SEQ ID NO: 35268 - DNA, 80 bp, synthetic construct; identical to SEQ ID NO: 35256
  misc_feature 1..80: note = Artificially Synthesized Probe
  source 1..80: mol_type = other DNA

SEQ ID NO: 35269 - DNA, 80 bp, synthetic construct; identical to SEQ ID NO: 35257
  misc_feature 1..80: note = Artificially Synthesized Probe
  source 1..80: mol_type = other DNA

SEQ ID NO: 35270 - DNA, 80 bp, synthetic construct; identical to SEQ ID NO: 35258
  misc_feature 1..80: note = Artificially Synthesized Probe
  source 1..80: mol_type = other DNA

SEQ ID NO: 35271 - DNA, 80 bp, synthetic construct; identical to SEQ ID NO: 35259
  misc_feature 1..80: note = Artificially Synthesized Probe
  source 1..80: mol_type = other DNA

SEQ ID NO: 35272 - DNA, 80 bp, synthetic construct; identical to SEQ ID NO: 35260
  misc_feature 1..80: note = Artificially Synthesized Probe
  source 1..80: mol_type = other DNA

SEQ ID NO: 35273 - DNA, 80 bp, synthetic construct; identical to SEQ ID NO: 35261
  misc_feature 1..80: note = Artificially Synthesized Probe
  source 1..80: mol_type = other DNA

SEQ ID NO: 35274 - DNA, 80 bp, synthetic construct; identical to SEQ ID NO: 35262
  misc_feature 1..80: note = Artificially Synthesized Probe
  source 1..80: mol_type = other DNA

SEQ ID NO: 35275 - DNA, 80 bp, synthetic construct; identical to SEQ ID NO: 35263
  misc_feature 1..80: note = Artificially Synthesized Probe
  source 1..80: mol_type = other DNA

SEQ ID NO: 35276 - DNA, 80 bp, synthetic construct; identical to SEQ ID NO: 35264
  misc_feature 1..80: note = Artificially Synthesized Probe
  source 1..80: mol_type = other DNA

SEQ ID NO: 35277 - DNA, 80 bp, synthetic construct; identical to SEQ ID NO: 35265
  misc_feature 1..80: note = Artificially Synthesized Probe
  source 1..80: mol_type = other DNA

SEQ ID NO: 35278 - DNA, 80 bp, synthetic construct
  misc_feature 1..80: note = Artificially Synthesized Probe
  source 1..80: mol_type = other DNA
catagcctcctgggaaactccatctgacaacgtgagcaaggcttgcccccgttagtgaacatgctgtgctttctgacagc

SEQ ID NO: 35279 - DNA, 80 bp, synthetic construct
  misc_feature 1..80: note = Artificially Synthesized Probe
  source 1..80: mol_type = other DNA
atcaagctttattccgcggaaacgctgaaagctagcagtgcctcagcggcgcgggcaacttttcacttttatggggcacg

SEQ ID NO: 35280 - DNA, 80 bp, synthetic construct
  misc_feature 1..80: note = Artificially Synthesized Probe
  source 1..80: mol_type = other DNA
gaatttcattccttccgctcccaccccacccctttggatatcccggggagacgggggctggattcaatctgtgaaatatt

SEQ ID NO: 35281 - DNA, 80 bp, synthetic construct
  misc_feature 1..80: note = Artificially Synthesized Probe
  source 1..80: mol_type = other DNA
cctgctcagcctcccgaatagctgggattacaggcacccactagtatgcacagctaatttttgtatttttagtagagaca

SEQ ID NO: 35282 - DNA, 80 bp, synthetic construct
  misc_feature 1..80: note = Artificially Synthesized Probe
  source 1..80: mol_type = other DNA
tggaaataagagagtaaacagaccatgcagatttatgttaggctttttgttttaacccctaggcttgccgctgttccgta

SEQ ID NO: 35283 - DNA, 80 bp, synthetic construct
  misc_feature 1..80: note = Artificially Synthesized Probe
  source 1..80: mol_type = other DNA
ttaaacttttttttttttttttgagacagagtctcgctgtctcccaggctggagtgcagtggcacgatcttggcttactg

SEQ ID NO: 35284 - DNA, 80 bp, synthetic construct
  misc_feature 1..80: note = Artificially Synthesized Probe
  source 1..80: mol_type = other DNA
tgctaaagcgattcttctgacgttaagttctccaggccaaacatttcctgtttttccaatcatttgtcttaagacatggt

SEQ ID NO: 35285 - DNA, 80 bp, synthetic construct
  misc_feature 1..80: note = Artificially Synthesized Probe
  source 1..80: mol_type = other DNA
gctgaggtgggtggatcacctgaggtcaggagtttgacaccagcttggttaacatggtgaaaccccgtttctactaaaaa

SEQ ID NO: 35286 - DNA, 80 bp, synthetic construct
  misc_feature 1..80: note = Artificially Synthesized Probe
  source 1..80: mol_type = other DNA
ccaaagagctggaattacaggtgtgagccactgcacccagacctcttgtagactttaaataatctctagttataataccg

SEQ ID NO: 35287 - DNA, 80 bp, synthetic construct
  misc_feature 1..80: note = Artificially Synthesized Probe
  source 1..80: mol_type = other DNA
ttcttatcccagtgcagaggtcaggattattcccgcatttgagtgcacttagaggagataaggaatttgtctcagattgc

SEQ ID NO: 35288 - DNA, 80 bp, synthetic construct
  misc_feature 1..80: note = Artificially Synthesized Probe
  source 1..80: mol_type = other DNA
gtttgaatttttgacaacttaagactgagtctggattaatttagagtttccaaaactaccactgaacctagaatttgggg

SEQ ID NO: 35289 - DNA, 80 bp, synthetic construct
  misc_feature 1..80: note = Artificially Synthesized Probe
  source 1..80: mol_type = other DNA
ttgtgcacttttctctatggtatactttaaaagtggcttttaaaaatgtagaaaagtcatcttccttcatgtctttggaa

SEQ ID NO: 35290 - DNA, 80 bp, synthetic construct
  misc_feature 1..80: note = Artificially Synthesized Probe
  source 1..80: mol_type = other DNA
ggaaagaatttattgttggttcaacatagctaaggagtggcatgaagttctgtagctgatgtgggaagtaccttgccagt

SEQ ID NO: 35291 - DNA, 80 bp, synthetic construct
  misc_feature 1..80: note = Artificially Synthesized Probe
  source 1..80: mol_type = other DNA
acaggctctcctggtctagtgtaggcacttaataaatgcttgttgagtgaaatttctcctcagatgtttaggaacttgtg

SEQ ID NO: 35292 - DNA, 80 bp, synthetic construct
  misc_feature 1..80: note = Artificially Synthesized Probe
  source 1..80: mol_type = other DNA
aattgtatcaaagggtctgcactgaaaactgaatttctctcaactttcagaatgacagtttgtctctgctaggacaactg

SEQ ID NO: 35293 - DNA, 80 bp, synthetic construct
  misc_feature 1..80: note = Artificially Synthesized Probe
  source 1..80: mol_type = other DNA
ccacaattaattttagaacatttcattactctccaaagaaacctatccattggcagtcacctcccagttccatcagccct

SEQ ID NO: 35294 - DNA, 80 bp, synthetic construct
  misc_feature 1..80: note = Artificially Synthesized Probe
  source 1..80: mol_type = other DNA
atgaacaaacaaatgatattacaatggatgccaacaaacaccagatgaagaggtggacagggcgaggtatgtgggaagca

SEQ ID NO: 35295 - DNA, 80 bp, synthetic construct
  misc_feature 1..80: note = Artificially Synthesized Probe
  source 1..80: mol_type = other DNA
cccaagtagatgggattacaggtaaccaccacaatgcacaaccaatttttatgcttttagtagagacggggtttcgccat

SEQ ID NO: 35296 - DNA, 80 bp, synthetic construct
  misc_feature 1..80: note = Artificially Synthesized Probe
  source 1..80: mol_type = other DNA
ttaatcttgtatatctaaaacattacttcatcacgtgattgatgtaaaaaatgaatgattcaggaaatattttacattct

SEQ ID NO: 35297 - DNA, 80 bp, synthetic construct
  misc_feature 1..80: note = Artificially Synthesized Probe
  source 1..80: mol_type = other DNA
tcagcaaaccgaatcattatgcaccaagcaatgacatatatggtggagagatgcatgttcgaccaatgctctctcagcca

SEQ ID NO: 35298 - DNA, 80 bp, synthetic construct
  misc_feature 1..80: note = Artificially Synthesized Probe
  source 1..80: mol_type = other DNA
aacttgtacccgttagcggtcactcctcatttccctaaccattcttagccctaggcaaccactaatcctacatctataaa

SEQ ID NO: 35299 - DNA, 80 bp, synthetic construct
  misc_feature 1..80: note = Artificially Synthesized Probe
  source 1..80: mol_type = other DNA
gatgggtgagaagtgaagtggtgctttattgtgattttgattcgtattttctttatagctaatgttattagctatatagt

SEQ ID NO: 35300 - DNA, 80 bp, synthetic construct
  misc_feature 1..80: note = Artificially Synthesized Probe
  source 1..80: mol_type = other DNA
cacaaggatttactcctatgttttctattatttaatttttctatagtttcataattttagcttttacagttaggtctgtg

SEQ ID NO: 35301 - DNA, 80 bp, synthetic construct
  misc_feature 1..80: note = Artificially Synthesized Probe
  source 1..80: mol_type = other DNA
tatccctcttagttctcttactacttactctttgaaaaatgatgtcactgtcaagacagctggaaggagagcctcttgtt

SEQ ID NO: 35302 - DNA, 80 bp, synthetic construct
  misc_feature 1..80: note = Artificially Synthesized Probe
  source 1..80: mol_type = other DNA
gtgtgtacatttgctggccttagcccagttagtgtgggttaggttttatgatatgtctgaaatgtaactatttgcttcag

SEQ ID NO: 35303 - DNA, 80 bp, synthetic construct
  misc_feature 1..80: note = Artificially Synthesized Probe
  source 1..80: mol_type = other DNA
gtacttgagattagggagtggtgatgactcttaacgagcatactgccttcaagcatctgtttaacaaagcacatcttgca

SEQ ID NO: 35304 - DNA, 80 bp, synthetic construct
  misc_feature 1..80: note = Artificially Synthesized Probe
  source 1..80: mol_type = other DNA
ggatggggtagctgccgggcagagacgctcctcacttcccagacagagtggctgccgggcggaggggctcctcacttctc

SEQ ID NO: 35305 - DNA, 80 bp, synthetic construct
  misc_feature 1..80: note = Artificially Synthesized Probe
  source 1..80: mol_type = other DNA
tgaggcaaagacagattagaaaaatttccttttaaaaatatatactattaatcttaccaagcttcctatatgatgtgatt

SEQ ID NO: 35306 - DNA, 80 bp, synthetic construct
  misc_feature 1..80: note = Artificially Synthesized Probe
  source 1..80: mol_type = other DNA
acttgaagccctgttttttttttccctcactttaaagtgtgaaggtgttaggaagtgttttctttcgacatttacctcca

SEQ ID NO: 35307 - DNA, 80 bp, synthetic construct
  misc_feature 1..80: note = Artificially Synthesized Probe
  source 1..80: mol_type = other DNA
ggtggtttaaccacagatattttgcctttctttctattctcccctcacctgcccaagttcatgtcgcggaattcaatacc

SEQ ID NO: 35308 - DNA, 80 bp, synthetic construct
  misc_feature 1..80: note = Artificially Synthesized Probe
  source 1..80: mol_type = other DNA
taatctgtgagaaaatttagagttttataattccctgtccctgttggctcaacacagtggtttctctgcccttcttaggg

SEQ ID NO: 35309 - DNA, 80 bp, synthetic construct
  misc_feature 1..80: note = Artificially Synthesized Probe
  source 1..80: mol_type = other DNA
ccaccatgcctggcctggggtactttctttaatcatctttttcctttcctatttcttattctaaattggaagtatgctca

SEQ ID NO: 35310 - DNA, 80 bp, synthetic construct
  misc_feature 1..80: note = Artificially Synthesized Probe
  source 1..80: mol_type = other DNA
tttttaaaaactttgttttgtgaacatctttccaagtctgtcagcacatagacctaattgctcttggcagctgggtggta

SEQ ID NO: 35311 - DNA, 80 bp, synthetic construct
  misc_feature 1..80: note = Artificially Synthesized Probe
  source 1..80: mol_type = other DNA
cattttaacatccttgattggtgtaatgttcctctctcatatttcttgtttttattttcgcccaacctagacctttaaga

SEQ ID NO: 35312 - DNA, 80 bp, synthetic construct
  misc_feature 1..80: note = Artificially Synthesized Probe
  source 1..80: mol_type = other DNA
gttgagtcttttgattattcttccttttttgaacacattttggccagcataattgtgtaaaagggggctattaagccatt

SEQ ID NO: 35313 - DNA, 80 bp, synthetic construct
  misc_feature 1..80: note = Artificially Synthesized Probe
  source 1..80: mol_type = other DNA
actctgtctctaaaaacaaaaactggacttcaggtgcacagaaatagattaattcaattcttagtttatgacattatcac

SEQ ID NO: 35314 - DNA, 80 bp, synthetic construct
  misc_feature 1..80: note = Artificially Synthesized Probe
  source 1..80: mol_type = other DNA
acctatacttgtgaacatttctcttggctatgtacctaagagtggaacttctgggatgcagcgtttgtgagtgtacattt

SEQ ID NO: 35315 - DNA, 80 bp, synthetic construct
  misc_feature 1..80: note = Artificially Synthesized Probe
  source 1..80: mol_type = other DNA
gtgtccttttcacaaatgactaaccctttatagatatgacaagccaaagtgccttctctcctttagggaaagatgtgttc

SEQ ID NO: 35316 - DNA, 80 bp, synthetic construct
  misc_feature 1..80: note = Artificially Synthesized Probe
  source 1..80: mol_type = other DNA
aagggttacaacctgtaaggtggccatccttgacagtcttggaagcgtagcttctggcagacactgaaaggcacttagaa

SEQ ID NO: 35317 - DNA, 80 bp, synthetic construct
  misc_feature 1..80: note = Artificially Synthesized Probe
  source 1..80: mol_type = other DNA
cccttgtctggcatggccttaggtcttatttataatttggtgttttattgccacaaagagtctatttctatcagtcttga

SEQ ID NO: 35318 - DNA, 80 bp, synthetic construct
  misc_feature 1..80: note = Artificially Synthesized Probe
  source 1..80: mol_type = other DNA
accagtcaaaatacccatccaagatgggtacttcaagccatgtttgaattcttgaggtggcagttttttatgccagaaag

SEQ ID NO: 35319 - DNA, 80 bp, synthetic construct
  misc_feature 1..80: note = Artificially Synthesized Probe
  source 1..80: mol_type = other DNA
taaaatttccctgcatattccctaaattaataattcatactccttaagcatgttcagtgtgagtgcttgtcctttttgaa

SEQ ID NO: 35320 - DNA, 80 bp, synthetic construct
  misc_feature 1..80: note = Artificially Synthesized Probe
  source 1..80: mol_type = other DNA
gccgcagatactgggtttatacttacttggcattggtaccattaagtgggttagaggaaaaaatattttagccttttttc

SEQ ID NO: 35321 - DNA, 80 bp, synthetic construct
  misc_feature 1..80: note = Artificially Synthesized Probe
  source 1..80: mol_type = other DNA
acccaattaaggaatagctggcaaaaggggaagggcattttagccagtaagaaatctctgaaaagatacacagactctgc

SEQ ID NO: 35322 - DNA, 80 bp, synthetic construct
  misc_feature 1..80: note = Artificially Synthesized Probe
  source 1..80: mol_type = other DNA
agcacacgtaccaaaccctaaaatgccattgatcctatcacaaagctagagcggttctacccttttgaatagcagctctt

SEQ ID NO: 35323 - DNA, 80 bp, synthetic construct
  misc_feature 1..80: note = Artificially Synthesized Probe
  source 1..80: mol_type = other DNA
cgccatgcaaccttttttataagcaagtttttaaaggcaaaaacggggcacaaggagtggatagaaacaaagttgttcat

SEQ ID NO: 35324 - DNA, 80 bp, synthetic construct
  misc_feature 1..80: note = Artificially Synthesized Probe
  source 1..80: mol_type = other DNA
gttagaaatgaaaattctcctaaccgagacctggcttaggttaaatgagagtggtctttctaatgtgggcgtgagataat

SEQ ID NO: 35325 - DNA, 80 bp, synthetic construct
  misc_feature 1..80: note = Artificially Synthesized Probe
  source 1..80: mol_type = other DNA
tgcctataattgttggatctcataaacagaagggaggacatttcacattaatcaaccctgcccacatacatttctgttaa

SEQ ID NO: 35326 - DNA, 80 bp, synthetic construct
  misc_feature 1..80: note = Artificially Synthesized Probe
  source 1..80: mol_type = other DNA
agcttgtaggactggaagttgctctgggtgagtcagggagtaagtggtgagtgaatgtgaaggcctaggacattactgta

SEQ ID NO: 35327 - DNA, 80 bp, synthetic construct
  misc_feature 1..80: note = Artificially Synthesized Probe
  source 1..80: mol_type = other DNA
ggtggagctcccagtgagccgagatcgcgccactgcactctagcctgggcgacaaagtgagactccgtctcaaaaacaaa

SEQ ID NO: 35328 - DNA, 80 bp, synthetic construct
  misc_feature 1..80: note = Artificially Synthesized Probe
  source 1..80: mol_type = other DNA
tcttccatttccacatctcgttgcactggaaggtcatcagggccaataacacacccagagctgtcatcttccatggtgac

SEQ ID NO: 35329 - DNA, 80 bp, synthetic construct
  misc_feature 1..80: note = Artificially Synthesized Probe
  source 1..80: mol_type = other DNA
ttagccaggaccacaggtatgtgccactatggctggctaattttttatttttatttttgtagagaaggggtcttgctttg

SEQ ID NO: 35330 - DNA, 80 bp, synthetic construct
  misc_feature 1..80: note = Artificially Synthesized Probe
  source 1..80: mol_type = other DNA
gtggattgcttgagcctaggagttcgagaacaccctgggcattattgctaaaccccctctctacaaaaaatataaagatt

SEQ ID NO: 35331 - DNA, 80 bp, synthetic construct
  misc_feature 1..80: note = Artificially Synthesized Probe
  source 1..80: mol_type = other DNA
tcagaggacacccacttgaatgggaataagaacacataagtcatagcctgtctttcctaaggcattcttgcaagtgctta

SEQ ID NO: 35332 - DNA, 80 bp, synthetic construct
  misc_feature 1..80: note = Artificially Synthesized Probe
  source 1..80: mol_type = other DNA
ccttgcattgctaaatgagaccattgtttggtagtaataggctggtaggatgatgttaggacttttatgcaagttagagg

SEQ ID NO: 35333 - DNA, 80 bp, synthetic construct
  misc_feature 1..80: note = Artificially Synthesized Probe
  source 1..80: mol_type = other DNA
cctggccggcttgttctttttattcttcagtcatttgttttattctctctcacactccttcacgctgcctttattgctcc

SEQ ID NO: 35334 - DNA, 80 bp, synthetic construct
  misc_feature 1..80: note = Artificially Synthesized Probe
  source 1..80: mol_type = other DNA
tttctacctcaaagaagaggcatagtacctggcagttttggcagagtgtctaggaacttgttaatcattgactcatggag

SEQ ID NO: 35335 - DNA, 80 bp, synthetic construct
  misc_feature 1..80: note = Artificially Synthesized Probe
  source 1..80: mol_type = other DNA
gtataagatcaatattacaaagagcatgtgtgcattcttccccatgcagcattccagggaactagaagagcctgtagaaa

SEQ ID NO: 35336 - DNA, 80 bp, synthetic construct
  misc_feature 1..80: note = Artificially Synthesized Probe
  source 1..80: mol_type = other DNA
ttccacagtgtggctggtgaacttcaccagtgctctttcttataccaatagtcacggaagaaagatgtcctagcactttg

SEQ ID NO: 35337 - DNA, 80 bp, synthetic construct
  misc_feature 1..80: note = Artificially Synthesized Probe
  source 1..80: mol_type = other DNA
gttttgttacaatccatccaccatcaccaaatgtatttgtgtatgatgtgtagccttcctatgcccaagtattctgagga

SEQ ID NO: 35338 - DNA, 80 bp, synthetic construct
  misc_feature 1..80: note = Artificially Synthesized Probe
  source 1..80: mol_type = other DNA
gtgaaactccagtcctgtgaaaggattcagagtattttctctatggattatgggttaatggcatcgtcttcctatgtaag

SEQ ID NO: 35339 - DNA, 80 bp, synthetic construct
  misc_feature 1..80: note = Artificially Synthesized Probe
  source 1..80: mol_type = other DNA
caagaaaatgtcattctccatacccaaccagctttattatctttgaggaaggagcattgaattttatgtctgctaaggat

SEQ ID NO: 35340 - DNA, 80 bp, synthetic construct
  misc_feature 1..80: note = Artificially Synthesized Probe
  source 1..80: mol_type = other DNA
aataataaaatagccttattatctttcctatttataaagccattcattctttctgtagaaaagaacttaagcggccgggc

SEQ ID NO: 35341 - DNA, 80 bp, synthetic construct
  misc_feature 1..80: note = Artificially Synthesized Probe
  source 1..80: mol_type = other DNA
ctcccttgatcacctggctgagatagaatttgtccatgtaaagttactggatttttttttcaatccatccttttcatact

SEQ ID NO: 35342 - DNA, 80 bp, synthetic construct
  misc_feature 1..80: note = Artificially Synthesized Probe
  source 1..80: mol_type = other DNA
gaacatttattgatcacttatttttctttgatgatgtggaaatgctggagctagagacataaaatcttgtccccacccta

SEQ ID NO: 35343 - DNA, 80 bp, synthetic construct
  misc_feature 1..80: note = Artificially Synthesized Probe
  source 1..80: mol_type = other DNA
gagaaaatgccccagtaaacatattcctttgtgtctgtcgttaataggctgctgctgatgaatacaatagactgaagcaa

SEQ ID NO: 35344 - DNA, 80 bp, synthetic construct
  misc_feature 1..80: note = Artificially Synthesized Probe
  source 1..80: mol_type = other DNA
ctattgtcaatgaacgtttgggttgttcccaatttttggcatttaaaaatattgcagcttcatacatatttgtaaatgtt

SEQ ID NO: 35345 - DNA, 80 bp, synthetic construct
  misc_feature 1..80: note = Artificially Synthesized Probe
  source 1..80: mol_type = other DNA
gtgatactgccaggcaccttgcgtattttacttcaattaacactcccagcaattctcttgactaaatattccatttctgt

SEQ ID NO: 35346 - DNA, 80 bp, synthetic construct
  misc_feature 1..80: note = Artificially Synthesized Probe
  source 1..80: mol_type = other DNA
gtttgatgttattagtgctgttaacatacagcaatggaaaaccacactcaggagttgtatctgttgttgtttatactcct

SEQ ID NO: 35347 - DNA, 80 bp, synthetic construct
  misc_feature 1..80: note = Artificially Synthesized Probe
  source 1..80: mol_type = other DNA
gggattagaggcgtgagccactgtgcccggcctataatttttgatagatgattttgaattattttccagagataaaattt

SEQ ID NO: 35348 - DNA, 80 bp, synthetic construct
  misc_feature 1..80: note = Artificially Synthesized Probe
  source 1..80: mol_type = other DNA
tgatagattaactggctgttgtcacactagcaagtggcaaaacaagggattaggatcttagtctcttcaactgttagatt

SEQ ID NO: 35349 - DNA, 80 bp, synthetic construct
  misc_feature 1..80: note = Artificially Synthesized Probe
  source 1..80: mol_type = other DNA
aatgtgtgactcagtccttgtctaaaagtaaatatgcctagctacccccatcttccaaagccagaaggtgaaactttaac

SEQ ID NO: 35350 - DNA, 80 bp, synthetic construct
  misc_feature 1..80: note = Artificially Synthesized Probe
  source 1..80: mol_type = other DNA
agatgtcctaaagcttaaggccacactgtcccctttgccacgaacgccctgtccctttggccgactcttctcatccttta

SEQ ID NO: 35351 - DNA, 80 bp, synthetic construct
  misc_feature 1..80: note = Artificially Synthesized Probe
  source 1..80: mol_type = other DNA
ctttctacaggcaggcgtccctccaggccccattccccagcctcctttgcacatccagcaccccctgcgccttttcatgg

SEQ ID NO: 35352 - DNA, 80 bp, synthetic construct
  misc_feature 1..80: note = Artificially Synthesized Probe
  source 1..80: mol_type = other DNA
cctagggaagccccagcgtctgcaaagagctcacgtcggggagaaaagtaaggtctgcccagaaacctcggggcttttca

SEQ ID NO: 35353 - DNA, 80 bp, synthetic construct
  misc_feature 1..80: note = Artificially Synthesized Probe
  source 1..80: mol_type = other DNA
ccgcttccctcggggtcctggggagtggcagcaaaaagaccagcgagccttcggagaattataactttatgtgggaggct

SEQ ID NO: 35354 - DNA, 80 bp, synthetic construct
  misc_feature 1..80: note = Artificially Synthesized Probe
  source 1..80: mol_type = other DNA
cagttgtaggaaatatctttcctacccgatggactgttctgtttgaattgagaaaatgctgagaccccactgggttgatc

SEQ ID NO: 35355 - DNA, 80 bp, synthetic construct
  misc_feature 1..80: note = Artificially Synthesized Probe
  source 1..80: mol_type = other DNA
gtgcaaaaagtccaatctgttacgtatctattacttccacgagatgtctgtactctctctatattcacagacctgccgct

SEQ ID NO: 35356 - DNA, 80 bp, synthetic construct
  misc_feature 1..80: note = Artificially Synthesized Probe
  source 1..80: mol_type = other DNA
atctgtttctgtccccaggattcacgtgtttttcaagggctaacggaaatgctgagatctaaaagcatgtttattgctgc

SEQ ID NO: 35357 - DNA, 80 bp, synthetic construct
  misc_feature 1..80: note = Artificially Synthesized Probe
  source 1..80: mol_type = other DNA
ctgtgctgtcattcgcgtgtcatcgttcgtgtcttgggctatccctagtatcctcgcacacaagctctgtgctgtcattc

SEQ ID NO: 35358 - DNA, 80 bp, synthetic construct
  misc_feature 1..80: note = Artificially Synthesized Probe
  source 1..80: mol_type = other DNA
gggggacaggacccgtccagggagggcaggatctgtacagagggaccaagatctacgcacggggatagcatctatgtggg

SEQ ID NO: 35359 - DNA, 80 bp, synthetic construct
  misc_feature 1..80: note = Artificially Synthesized Probe
  source 1..80: mol_type = other DNA
tgggttctatggttatgaacatgtcagggcagaatgacacagaacacacaagaagttcaagggaacacattatgagattg

SEQ ID NO: 35360 - DNA, 80 bp, synthetic construct
  misc_feature 1..80: note = Artificially Synthesized Probe
  source 1..80: mol_type = other DNA
tcatcttgcatgtgtgtggcccgtgtgtttgtgcatccctgtgagtgtctgcatttctgagtgtgtacccatccatgtct

SEQ ID NO: 35361 - DNA, 80 bp, synthetic construct
  misc_feature 1..80: note = Artificially Synthesized Probe
  source 1..80: mol_type = other DNA
tctggggcccagctgtggcagaggtgccctgggcactgatctggggcccagctgtggcagaggtgccctgggcgtgtctc

SEQ ID NO: 35362 - DNA, 80 bp, synthetic construct
  misc_feature 1..80: note = Artificially Synthesized Probe
  source 1..80: mol_type = other DNA
tttctgggtgtgtctcagtctcttttgtgcctgcgtgtgcgtgagggcaggtttgggcatttctgtgtgtctgtgtgtgt

SEQ ID NO: 35363 - DNA, 80 bp, synthetic construct
  misc_feature 1..80: note = Artificially Synthesized Probe
  source 1..80: mol_type = other DNA
gtcggagggctcctggggaactgccttgtcatgtacgtcatcctcaggtaggctgggccccaaggttcctgtctggtgag

SEQ ID NO: 35364 - DNA, 80 bp, synthetic construct
  misc_feature 1..80: note = Artificially Synthesized Probe
  source 1..80: mol_type = other DNA
gtcagtgtgggggcagtgtgggggtcagtgtgggggcagtgtggggggggcagtgtgggggcagtgtgtgcgcagtgtgg

SEQ ID NO: 35365 - DNA, 80 bp, synthetic construct
  misc_feature 1..80: note = Artificially Synthesized Probe
  source 1..80: mol_type = other DNA
ggggagatggtgtgggggggatagcgtggggagatggtatggggggatagtgtggggatagttggggggagctggggcga

SEQ ID NO: 35366 - DNA, 80 bp, synthetic construct
  misc_feature 1..80: note = Artificially Synthesized Probe
  source 1..80: mol_type = other DNA
gtttcttattggtccaggatgtttgcctggacccggaaaaaggtgattctgaagaaagtgcccagggatctaaagcaagt

SEQ ID NO: 35367 - DNA, 80 bp, synthetic construct
  misc_feature 1..80: note = Artificially Synthesized Probe
  source 1..80: mol_type = other DNA
tattcataatccctctctaacaggcagaatggagccccatatttcctcacggcagctacactgacacagaatagtgtcat

SEQ ID NO: 35368 - DNA, 80 bp, synthetic construct
  misc_feature 1..80: note = Artificially Synthesized Probe
  source 1..80: mol_type = other DNA
tagcctacatgccctgactcctctaaagtagacctgtgtttaaggcttggaatccttctgtgtgtgtcagagtcacttga

SEQ ID NO: 35369 - DNA, 80 bp, synthetic construct
  misc_feature 1..80: note = Artificially Synthesized Probe
  source 1..80: mol_type = other DNA
cctctacgccttcctggatgagaacttcaaggcctgcttccgcaagttctgctgtgcatctgccctgcgccgggacgtgc

SEQ ID NO: 35370 - DNA, 80 bp, synthetic construct
  misc_feature 1..80: note = Artificially Synthesized Probe
  source 1..80: mol_type = other DNA
cccgggaagtgcagcaggcagcttttctttggggtgggacttgccctgagcttggagctgccacctggaggacttgcctg

SEQ ID NO: 35371 - DNA, 80 bp, synthetic construct
  misc_feature 1..80: note = Artificially Synthesized Probe
  source 1..80: mol_type = other DNA
caacattgaaaaaactcattttttccaccaaaaccttggccaggtaacctaccttaggcacctgcaaagaacaggaagtg

SEQ ID NO: 35372 - DNA, 80 bp, synthetic construct
  misc_feature 1..80: note = Artificially Synthesized Probe
  source 1..80: mol_type = other DNA
gtaacagaatacggatgtattcttctcaaccagagaagatgtaagttagcaacatgttctaaatccccagaagaaagaaa

SEQ ID NO: 35373 - DNA, 80 bp, synthetic construct
  misc_feature 1..80: note = Artificially Synthesized Probe
  source 1..80: mol_type = other DNA
ctgttactctacggtgacactgccaaaaatgctgcagaactttctctctacacacaaagcaatttctttcttgggatgca

SEQ ID NO: 35374 - DNA, 80 bp, synthetic construct
  misc_feature 1..80: note = Artificially Synthesized Probe
  source 1..80: mol_type = other DNA
gtagaattttgcctatattgcccatgtattgtatagatagatgatatttaggactgtttgtctgtgagatccttttagtt

SEQ ID NO: 35375 - DNA, 80 bp, synthetic construct
  misc_feature 1..80: note = Artificially Synthesized Probe
  source 1..80: mol_type = other DNA
acccacctccttccctcctttttataataccagtgaaacttggtttggagcatttctttcacataaaggtacaaatcata

SEQ ID NO: 35376 - DNA, 80 bp, synthetic construct
  misc_feature 1..80: note = Artificially Synthesized Probe
  source 1..80: mol_type = other DNA
aggatcccctcagcagcacaaattcaggagagagatgtcttaactacgttagcaagaaattccttttgctaaagaatagc

SEQ ID NO: 35377 - DNA, 80 bp, synthetic construct
  misc_feature 1..80: note = Artificially Synthesized Probe
  source 1..80: mol_type = other DNA
caatacctccttgtgtctagacagtcatcattatcctttacctttttctgtatttatttctgctcctaaaagggatctct

SEQ ID NO: 35378 - DNA, 80 bp, synthetic construct
  misc_feature 1..80: note = Artificially Synthesized Probe
  source 1..80: mol_type = other DNA
aactgttttgtagttcaaagaaaaaggagataaacatagagttatggcatagacttaatctggcagagagacaagcataa

SEQ ID NO: 35379 - DNA, 80 bp, synthetic construct
  misc_feature 1..80: note = Artificially Synthesized Probe
  source 1..80: mol_type = other DNA
tgtacagatacctacaggctagatattatggtcattgctaacagtggtgtgctcactgtgtgttcttttgttcttctaat

SEQ ID NO: 35380 - DNA, 80 bp, synthetic construct
  misc_feature 1..80: note = Artificially Synthesized Probe
  source 1..80: mol_type = other DNA
taagtttgccaatgtgaaatgtgccttctaggtcctagacgtctgtggtataactgctcataagcagtagaaagaattta

SEQ ID NO: 35381 - DNA, 80 bp, synthetic construct
  misc_feature 1..80: note = Artificially Synthesized Probe
  source 1..80: mol_type = other DNA
tatgggaaaagatatatttaatttatttgctacaccaaatgccaggacaatctctaagtgaattcaagacataactcttt

SEQ ID NO: 35382 - DNA, 80 bp, synthetic construct
  misc_feature 1..80: note = Artificially Synthesized Probe
  source 1..80: mol_type = other DNA
gatccagatgtgtgcatattctagccctggcatcccaaccaagaagaaggtggtgatttcaacatatgatgtgttgataa

SEQ ID NO: 35383 - DNA, 80 bp, synthetic construct
  misc_feature 1..80: note = Artificially Synthesized Probe
  source 1..80: mol_type = other DNA
gtggatggctaggaatctatcaaatgacatgatcaggaggactgaggactccagtactgagaatccatgaatgaagaatt

SEQ ID NO: 35384 - DNA, 80 bp, synthetic construct
  misc_feature 1..80: note = Artificially Synthesized Probe
  source 1..80: mol_type = other DNA
gtttaagaactactgatttaaaggaaataggaggaaaggaggaaccctggtctaacctgcctgtctctgatagttcgtgc

SEQ ID NO: 35385 - DNA, 80 bp, synthetic construct
  misc_feature 1..80: note = Artificially Synthesized Probe
  source 1..80: mol_type = other DNA
gccatcttccacattgctgctagcattaccctccttttaaagcacgtatttccaaacccctatgcttttcttccaatgtc

SEQ ID NO: 35386 - DNA, 80 bp, synthetic construct
  misc_feature 1..80: note = Artificially Synthesized Probe
  source 1..80: mol_type = other DNA
agtacttcctcagcctgacatgattaccagttttttgactaaatgaagctaaacctttaggtagagtgacttgccacaaa

SEQ ID NO: 35387 - DNA, 80 bp, synthetic construct
  misc_feature 1..80: note = Artificially Synthesized Probe
  source 1..80: mol_type = other DNA
ctgctgcactgctttcagcatgcaagtaggtatttcattaaacattcagaaaagttaccaatttacaagtgggtttttca

SEQ ID NO: 35388 - DNA, 80 bp, synthetic construct
  misc_feature 1..80: note = Artificially Synthesized Probe
  source 1..80: mol_type = other DNA
ctcaatgagctgtcgggcatacctcccagacggggtggtggccgggcagaggggctcctcacttcccagtaggggcggcc

SEQ ID NO: 35389 - DNA, 80 bp, synthetic construct
  misc_feature 1..80: note = Artificially Synthesized Probe
  source 1..80: mol_type = other DNA
gtcatgaagcactacagcaaatgtcttttatgtgccccttttgttataaaatagatcccatgtgcattttaactctcagt

SEQ ID NO: 35390 - DNA, 80 bp, synthetic construct
  misc_feature 1..80: note = Artificially Synthesized Probe
  source 1..80: mol_type = other DNA
attggctggggattatttttgtctttcggaggttcttttcccccgacaaaagaaatgtttccaagttaggttccagtttg

SEQ ID NO: 35391 - DNA, 80 bp, synthetic construct
  misc_feature 1..80: note = Artificially Synthesized Probe
  source 1..80: mol_type = other DNA
attagatgtcttggaatgcttggagtgtaagggagggaaaaaagtgatagctaagctaggtgtgatagtgtgagcctata

SEQ ID NO: 35392 - DNA, 80 bp, synthetic construct
  misc_feature 1..80: note = Artificially Synthesized Probe
  source 1..80: mol_type = other DNA
ttgcaccaccgcactccagcctgggtgacagagcgagacttatctcataaataaatagatagatactccagcctgggtga

SEQ ID NO: 35393 - DNA, 80 bp, synthetic construct
  misc_feature 1..80: note = Artificially Synthesized Probe
  source 1..80: mol_type = other DNA
tcaccaaggtcaaggggatcaccacgtccgagcacaaagtgtgggacgtggaggagtacgtgaagccccccgaggtgcgg

SEQ ID NO: 35394 - DNA, 80 bp, synthetic construct
  misc_feature 1..80: note = Artificially Synthesized Probe
  source 1..80: mol_type = other DNA
ggaaaagaaatgcgatcagcgcaacccatccggtgtggcgcttgctgaattattgacactggccatggggctggctgctg

SEQ ID NO: 35395 - DNA, 80 bp, synthetic construct
  misc_feature 1..80: note = Artificially Synthesized Probe
  source 1..80: mol_type = other DNA
ctccttcctgtgcgactggatcttgctaacattcatgaacaaaaacaaggtctacagccataagaaatttgacaaggtgt

SEQ ID NO: 35396 - DNA, 80 bp, synthetic construct
  misc_feature 1..80: note = Artificially Synthesized Probe
  source 1..80: mol_type = other DNA
caccccacaggcgttgtaaccttgaatctgcccagactcttcccttagaagtcacaacatactcagtccaataaacctgt

SEQ ID NO: 35397 - DNA, 80 bp, synthetic construct
  misc_feature 1..80: note = Artificially Synthesized Probe
  source 1..80: mol_type = other DNA
agttcctacagcagaggataaaaatttggttccaagttacttccagagttgtgttagattacactacttgaatgaaaagt

SEQ ID NO: 35398 - DNA, 80 bp, synthetic construct
  misc_feature 1..80: note = Artificially Synthesized Probe
  source 1..80: mol_type = other DNA
ttattgttttatgaccaaataagagtgtcagagaatacatatcttgggcaggtcccagaaagcgtctgccatctccccca

SEQ ID NO: 35399 - DNA, 80 bp, synthetic construct
  misc_feature 1..80: note = Artificially Synthesized Probe
  source 1..80: mol_type = other DNA
agtaatgagctcccactcttgcaccaagattatgcagaaaaatggtgggagctgggggctgtgcaaaaagcaaggaaact

SEQ ID NO: 35400 - DNA, 80 bp, synthetic construct
  misc_feature 1..80: note = Artificially Synthesized Probe
  source 1..80: mol_type = other DNA
catctggtccaacacctgacatgtcacagggactccataaatatttcctggctgaaggaatgactaactgtaggaagaca

SEQ ID NO: 35401 - DNA, 80 bp, synthetic construct
  misc_feature 1..80: note = Artificially Synthesized Probe
  source 1..80: mol_type = other DNA
ctccaggtttctcaccttgggtttacggggagacaactcacatacaacggggtaggagaagagagctagtcagctcccaa

SEQ ID NO: 35402 - DNA, 80 bp, synthetic construct
  misc_feature 1..80: note = Artificially Synthesized Probe
  source 1..80: mol_type = other DNA
caaggccctacagcgatggaggcagagagcagctgagggtgcggtaggtgggtgtggccgtggcataagacaggtgggga

SEQ ID NO: 35403 - DNA, 80 bp, synthetic construct
  misc_feature 1..80: note = Artificially Synthesized Probe
  source 1..80: mol_type = other DNA
ccagcacacagcatgcgtcaatacatgtttacagctcatatgaatgagtgaaggtgcagccaggttgagggaaaatccaa

SEQ ID NO: 35404 - DNA, 80 bp, synthetic construct
  misc_feature 1..80: note = Artificially Synthesized Probe
  source 1..80: mol_type = other DNA
agcaaggaatgaaagctgggccaggagaaaggccaccaaggtcagtgagtacctggggtgtggtttgcaagagagtcaca

SEQ ID NO: 35405 - DNA, 80 bp, synthetic construct
  misc_feature 1..80: note = Artificially Synthesized Probe
  source 1..80: mol_type = other DNA
gagctgtgggcacacagatccgttccccttctgactgctgcttccacgcttcgcctcgggtggctcctgcagctcctgct

SEQ ID NO: 35406 - DNA, 80 bp, synthetic construct
  misc_feature 1..80: note = Artificially Synthesized Probe
  source 1..80: mol_type = other DNA
tgcttcctccacccggcttcctctaccctgcttcctccatcctgggtcctccaccctgcaggccaccaccctgcttcctc

SEQ ID NO: 35407 - DNA, 80 bp, synthetic construct
  misc_feature 1..80: note = Artificially Synthesized Probe
  source 1..80: mol_type = other DNA
caggaaactccggaaacagcctctgcatggaagaaaatatccgcttttctttcctttactactccagcttccctcagccc

SEQ ID NO: 35408 - DNA, 80 bp, synthetic construct
  misc_feature 1..80: note = Artificially Synthesized Probe
  source 1..80: mol_type = other DNA
tggcatttagaaagatccctgtggtagtcagtgtgagataggttggaagggttctaaccaacaaggacgctatggtgcta

SEQ ID NO: 35409 - DNA, 80 bp, synthetic construct
  misc_feature 1..80: note = Artificially Synthesized Probe
  source 1..80: mol_type = other DNA
cctcttcctgcgccattacttccagttcacaggtctgtccccagagggtgctctgattttacccacatcacaagaaagtg

SEQ ID NO: 35410 - DNA, 80 bp, synthetic construct
  misc_feature 1..80: note = Artificially Synthesized Probe
  source 1..80: mol_type = other DNA
tccatcacaactgcaggggagggtgcccctaacatctagtgggtagaaaccgggaatgctcttaaacatcctacaatggg

SEQ ID NO: 35411 - DNA, 80 bp, synthetic construct
  misc_feature 1..80: note = Artificially Synthesized Probe
  source 1..80: mol_type = other DNA
tgtgagtcactgcgcccggcctaatcctgccctcttttagcagaagtagagatagagactttagaagttcagggactcac

SEQ ID NO: 35412 - DNA, 80 bp, synthetic construct
  misc_feature 1..80: note = Artificially Synthesized Probe
  source 1..80: mol_type = other DNA
tgagcgaggcaggttggacagcggggcccccagggaccctcccagcgtccccctcccagcctgagaacaggagaacgcac

SEQ ID NO: 35413 - DNA, 80 bp, synthetic construct
  misc_feature 1..80: note = Artificially Synthesized Probe
  source 1..80: mol_type = other DNA
accctcccaacgtcccccgccccccgcccagcctcagaacaggagaacgcacagcgggacccccagggaccctcccaacg

SEQ ID NO: 35414 - DNA, 80 bp, synthetic construct
  misc_feature 1..80: note = Artificially Synthesized Probe
  source 1..80: mol_type = other DNA
cttctcactgagccaaaaacaaagaggcatccagctatttgaaatccctgccagacattccctgaggagcaagggcttcc

SEQ ID NO: 35415 - DNA, 80 bp, synthetic construct
  misc_feature 1..80: note = Artificially Synthesized Probe
  source 1..80: mol_type = other DNA
gttcttcagggagaagggagccgcacagggtaggcctctctggacaggcacttcacactccagccagcatgtgccaaagg

SEQ ID NO: 35416 - DNA, 80 bp, synthetic construct
  misc_feature 1..80: note = Artificially Synthesized Probe
  source 1..80: mol_type = other DNA
gcgcacacacgcacacacgcgaacacacgcacacacgtgcacacacgcgcgcacacacacccccaggcagagacccacgg

SEQ ID NO: 35417 - DNA, 80 bp, synthetic construct
  misc_feature 1..80: note = Artificially Synthesized Probe
  source 1..80: mol_type = other DNA
gggttttggggataatggggccacaaacttggtatactctgcccatctgctcatggaccccacagtccccaggtagatgt

SEQ ID NO: 35418 - DNA, 80 bp, synthetic construct
  misc_feature 1..80: note = Artificially Synthesized Probe
  source 1..80: mol_type = other DNA
gggagcttccccaggccttggggtggggtagcagtcacagcaactcctagttgaggtggagcaggctcagggctccacct

SEQ ID NO: 35419 - DNA, 80 bp, synthetic construct
  misc_feature 1..80: note = Artificially Synthesized Probe
  source 1..80: mol_type = other DNA
ggtgacagggtgagacccagcctcaaaaacaacaacaaaaaaatgaaataagagtacaaatcccatacttgttgacacta

SEQ ID NO: 35420 - DNA, 80 bp, synthetic construct
  misc_feature 1..80: note = Artificially Synthesized Probe
  source 1..80: mol_type = other DNA
atccagccaccgcggtctcctctcccaaagtgctggggttacaggcatgagccactacactcagcggtgtgaaaaccacc

SEQ ID NO: 35421 - DNA, 80 bp, synthetic construct
  misc_feature 1..80: note = Artificially Synthesized Probe
  source 1..80: mol_type = other DNA
tcacccccgacccaccccggggtcagggctctgaaggcgcctggcagagcagcctccacaagttgcctctttggctttgt

SEQ ID NO: 35422 - DNA, 80 bp, synthetic construct
  misc_feature 1..80: note = Artificially Synthesized Probe
  source 1..80: mol_type = other DNA
aggatggaggcctgcagcagccggtacagcaggcccaccttcttgttcttggcgatgacatacttctcggtcttgtagtc

SEQ ID NO: 35423 - DNA, 80 bp, synthetic construct
  misc_feature 1..80: note = Artificially Synthesized Probe
  source 1..80: mol_type = other DNA
aaatgtgcagatgttggctgagtacttagcacagtggtgggcccatccttggtagtttttatttactcatttaacaaatg

SEQ ID NO: 35424 - DNA, 80 bp, synthetic construct
  misc_feature 1..80: note = Artificially Synthesized Probe
  source 1..80: mol_type = other DNA
ctgaacatctcacgtaacaatggctaatatttacatcacacttcctacattcaactcattcaatggccttgggaggcagg

SEQ ID NO: 35425 - DNA, 80 bp, synthetic construct
  misc_feature 1..80: note = Artificially Synthesized Probe
  source 1..80: mol_type = other DNA
cagtgagtctccgtctcaaaaaaaaaaaaaaaaattagatgggagtagtggcacatgcctgtaatctcaactactcagga

SEQ ID NO: 35426 - DNA, 80 bp, synthetic construct
  misc_feature 1..80: note = Artificially Synthesized Probe
  source 1..80: mol_type = other DNA
aatcattttcagaggtttatttccaaggttaaggacgtgcccaggaaaagaatacagaaacaggaaaaatctgtagtccg

SEQ ID NO: 35427 - DNA, 80 bp, synthetic construct
  misc_feature 1..80: note = Artificially Synthesized Probe
  source 1..80: mol_type = other DNA
tcctttgttccatgcctgtgaagataagctattaacttacattgtcagggtgaaattcaacagaactggttcacgggaaa

SEQ ID NO: 35428 - DNA, 80 bp, synthetic construct
  misc_feature 1..80: note = Artificially Synthesized Probe
  source 1..80: mol_type = other DNA
atggtcttatgataacacatgtgggtcacacgcttgagggcatgcacacacctggtgtgaacccccagatgtttatgaaa

SEQ ID NO: 35429 - DNA, 80 bp, synthetic construct
  misc_feature 1..80: note = Artificially Synthesized Probe
  source 1..80: mol_type = other DNA
ggagagtatctgatcccaaactgctccaaccagctggtgatggctgagtgcaaaaccacaagcacatgctgtgccctggc

SEQ ID NO: 35430 - DNA, 80 bp, synthetic construct
  misc_feature 1..80: note = Artificially Synthesized Probe
  source 1..80: mol_type = other DNA
ggaaagagagaaaaattgagagggatatggagagaaagagaacatactcaaaaacattccaccatcctgacatcagccac

SEQ ID NO: 35431 - DNA, 80 bp, synthetic construct
  misc_feature 1..80: note = Artificially Synthesized Probe
  source 1..80: mol_type = other DNA
cctggtcaacatggcgaaaccccgtctctactaaaaatacaaaaattagctgggcatggtggtgcacgtctgtagtctca

SEQ ID NO: 35432 - DNA, 80 bp, synthetic construct
  misc_feature 1..80: note = Artificially Synthesized Probe
  source 1..80: mol_type = other DNA
gtaattcagcaaactcgtattagcatcttctttggcagtggttctcacacttgagtgtgtatcaaaagcatctggagagc

SEQ ID NO: 35433 - DNA, 80 bp, synthetic construct
  misc_feature 1..80: note = Artificially Synthesized Probe
  source 1..80: mol_type = other DNA
ctcactcataggatgattgtgaaaacaaaggttaatggccacacagagaaaggtgactagcttgtcatctgctgcaggca

SEQ ID NO: 35434 - DNA, 80 bp, synthetic construct
  misc_feature 1..80: note = Artificially Synthesized Probe
  source 1..80: mol_type = other DNA
cttaaaaaaagagagagagagacattcaaagacagagggtgtattagtttcctatttgttaaaagaaacacaagacaaat

SEQ ID NO: 35435 - DNA, 80 bp, synthetic construct
  misc_feature 1..80: note = Artificially Synthesized Probe
  source 1..80: mol_type = other DNA
tgactcagaccctcctgcctccctcttataaagacctttgtattactggaaagtggtcccaatccagaccccaaaagagg

SEQ ID NO: 35436 - DNA, 80 bp, synthetic construct
  misc_feature 1..80: note = Artificially Synthesized Probe
  source 1..80: mol_type = other DNA
tactcatctgtaaaatgaacagtacccgccttacaggctagtggtgagaaccgaattaattaacgtgtggaaagaatgtg

SEQ ID NO: 35437 - DNA, 80 bp, synthetic construct
  misc_feature 1..80: note = Artificially Synthesized Probe
  source 1..80: mol_type = other DNA
tgaatctgcatttttacatgagattacataaatatagcggagaggaagcaattacatatgcatttgtctcaggggagcag

SEQ ID NO: 35438 - DNA, 80 bp, synthetic construct
  misc_feature 1..80: note = Artificially Synthesized Probe
  source 1..80: mol_type = other DNA
ttctataggttagcaatccagtatggtttagctgggttctctacttcaaggtttctcataatcaaggtattggtagagcc

SEQ ID NO: 35439 - DNA, 80 bp, synthetic construct
  misc_feature 1..80: note = Artificially Synthesized Probe
  source 1..80: mol_type = other DNA
aaaaacacatgtaatcctaagtgtttctgtgaccttatgtggacggagttctgcctctctagggattgtccactgtgaat

SEQ ID NO: 35440 - DNA, 80 bp, synthetic construct
  misc_feature 1..80: note = Artificially Synthesized Probe
  source 1..80: mol_type = other DNA
tccttcctttgtcttggcctgagccattaaaaccccatcttaagttccatggctttataggaagtcttatacctggttga

SEQ ID NO: 35441 - DNA, 80 bp, synthetic construct
  misc_feature 1..80: note = Artificially Synthesized Probe
  source 1..80: mol_type = other DNA
tctcttgctgcagtgcttagaatcatccacacaatgttaaaaagatgtgactttttgatcctaccacgttcctgattttt

SEQ ID NO: 35442 - DNA, 80 bp, synthetic construct
  misc_feature 1..80: note = Artificially Synthesized Probe
  source 1..80: mol_type = other DNA
tttgtcacactgtcattgacttgctttatggccaattacatagtcacttttttaaatgacccatgacccgtgtgtgcttt

SEQ ID NO: 35443 - DNA, 80 bp, synthetic construct
  misc_feature 1..80: note = Artificially Synthesized Probe
  source 1..80: mol_type = other DNA
ttttttagtagagactggcttttgccacgttggccaggccggtctcaaactcctaacctcaagtgatcctctcacctcag

SEQ ID NO: 35444 - DNA, 80 bp, synthetic construct
  misc_feature 1..80: note = Artificially Synthesized Probe
  source 1..80: mol_type = other DNA
cttatgacatcagatacctccatcctaaactacgccttcagaaattgccttggtgaaaatctgattttaaaatatcggtt

SEQ ID NO: 35445 - DNA, 80 bp, synthetic construct
  misc_feature 1..80: note = Artificially Synthesized Probe
  source 1..80: mol_type = other DNA
gacaagtctgcttccaatcgaattgttatttcctcctagataatccgactttcctttctgaatgcctttaagatcctctc

SEQ ID NO: 35446 - DNA, 80 bp, synthetic construct
  misc_feature 1..80: note = Artificially Synthesized Probe
  source 1..80: mol_type = other DNA
agcattggagaaagaaggcagccagaagccccagtgagcaaggtgatcccacctcttccacctgtttttgttgtagcctt

SEQ ID NO: 35447 - DNA, 80 bp, synthetic construct
  misc_feature 1..80: note = Artificially Synthesized Probe
  source 1..80: mol_type = other DNA
ctaccaggggttcatggaggtcagggtttagattaaactctattcagcaaatctttagtcagtacctaacacatgccaga

SEQ ID NO: 35448 - DNA, 80 bp, synthetic construct
  misc_feature 1..80: note = Artificially Synthesized Probe
  source 1..80: mol_type = other DNA
cctcaagtgatccactcacctcggcctcccaaagtgctgggattacaggcatgagccaccgcatctggtctcaagatcct

SEQ ID NO: 35449 - DNA, 80 bp, synthetic construct
  misc_feature 1..80: note = Artificially Synthesized Probe
  source 1..80: mol_type = other DNA
tctggccaatccgaggtgttctcctaggatttctgaaccttgggcacagtggattggtgttttctcatctcttcctgaag

SEQ ID NO: 35450 - DNA, 80 bp, synthetic construct
  misc_feature 1..80: note = Artificially Synthesized Probe
  source 1..80: mol_type = other DNA
tagagaaaaagcatggtttctagccagtcagacatctgggagttcgaaatattccatccttagtcagtgaaccacaaaga

SEQ ID NO: 35451 - DNA, 80 bp, synthetic construct
  misc_feature 1..80: note = Artificially Synthesized Probe
  source 1..80: mol_type = other DNA
taagtaataatactacagcacttactcaattgccaggcactgtgctaagactttacatttaatccttacaacaatccagt

SEQ ID NO: 35452 - DNA, 80 bp, synthetic construct
  misc_feature 1..80: note = Artificially Synthesized Probe
  source 1..80: mol_type = other DNA
gggctcacactatgggtgcacacagtcccctggggaaacgacctgcccattcagggccaggctgggtgccccaaccccgg

SEQ ID NO: 35453 - DNA, 80 bp, synthetic construct
  misc_feature 1..80: note = Artificially Synthesized Probe
  source 1..80: mol_type = other DNA
aactggctgctaagaatagtaccacactttgctgaatgagtaattaagagttcacataatagtaactatttagattagaa

SEQ ID NO: 35454 - DNA, 80 bp, synthetic construct
  misc_feature 1..80: note = Artificially Synthesized Probe
  source 1..80: mol_type = other DNA
ccttttgcccacatagcctgaacctggtgacggccctctgaaataagggttattgaaagcatcttcttgttggcaaatct

SEQ ID NO: 35455 - DNA, 80 bp, synthetic construct
  misc_feature 1..80: note = Artificially Synthesized Probe
  source 1..80: mol_type = other DNA
tttcctaagcccacccagatcccagattcaaaccaaattgaccgcaaagcctttaagcccttggctatcagtcagtccct

SEQ ID NO: 35456 - DNA, 80 bp, synthetic construct
  misc_feature 1..80: note = Artificially Synthesized Probe
  source 1..80: mol_type = other DNA
ctcctggttatagactttgagtgcaagctgacagcatgtggcatgtaatcatttgttctgcaacatcctgctaatcagag

SEQ ID NO: 35457 - DNA, 80 bp, synthetic construct
  misc_feature 1..80: note = Artificially Synthesized Probe
  source 1..80: mol_type = other DNA
ggagggttttttttttgcatgggcctgacaatcattctgatcctgatcattctgcctggtctattccaagcttttttttt

SEQ ID NO: 35458 - DNA, 80 bp, synthetic construct
  misc_feature 1..80: note = Artificially Synthesized Probe
  source 1..80: mol_type = other DNA
acatctggctagagcagatgctcaggaatgagtgaaggaatggtgtatactggacttcctataaagtttggaatagctca

SEQ ID NO: 35459 - DNA, 80 bp, synthetic construct
  misc_feature 1..80: note = Artificially Synthesized Probe
  source 1..80: mol_type = other DNA
aggctacgttaactcccaggggcctgtagagtgtgtcccatggaccttgtgcaccagaaactcctgggaactcatttaaa

SEQ ID NO: 35460 - DNA, 80 bp, synthetic construct
  misc_feature 1..80: note = Artificially Synthesized Probe
  source 1..80: mol_type = other DNA
ggtcccagcactgttccaggtggtgtgaccttgaacagtgaactcatattctgtcttctcccaagttgatatggtttggc

SEQ ID NO: 35461 - DNA, 80 bp, synthetic construct
  misc_feature 1..80: note = Artificially Synthesized Probe
  source 1..80: mol_type = other DNA
cctgacaatgcaatcgaaaagaaaatctcattttctgaggagaaattcaagccagctgcagaaatttgcataagtaacaa

SEQ ID NO: 35462 - DNA, 80 bp, synthetic construct
  misc_feature 1..80: note = Artificially Synthesized Probe
  source 1..80: mol_type = other DNA
ataatttgaatcatggtggcagtttctcccatactgttctcatgatagtgaataagtctcatgagatctgatggttttat

SEQ ID NO: 35463 - DNA, 80 bp, synthetic construct
  misc_feature 1..80: note = Artificially Synthesized Probe
  source 1..80: mol_type = other DNA
ctcttccttagatggacagggagataggaacctgagagatccttgggccgggaggctcaagcaagtgattcatctgacgt

SEQ ID NO: 35464 - DNA, 80 bp, synthetic construct
  misc_feature 1..80: note = Artificially Synthesized Probe
  source 1..80: mol_type = other DNA
atctggttcatcctaatagtaacttatagtagtgattatgtccaacatcacacctgcctgctagaatacaagcctgcgga

SEQ ID NO: 35465 - DNA, 80 bp, synthetic construct
  misc_feature 1..80: note = Artificially Synthesized Probe
  source 1..80: mol_type = other DNA
gggcttgttatttttttattaccaagataagatctggctcttcatttcccaaaacccttgtcacccgtgagctcagcttg

SEQ ID NO: 35466 - DNA, 80 bp, synthetic construct
  misc_feature 1..80: note = Artificially Synthesized Probe
  source 1..80: mol_type = other DNA
gtggagatgcagagatgctgttggattcacagtgtgtactcagccatggggtcgagttcatcctgtttcagcagcgttgg

SEQ ID NO: 35467 - DNA, 80 bp, synthetic construct
  misc_feature 1..80: note = Artificially Synthesized Probe
  source 1..80: mol_type = other DNA
tcagaatgaagagaattggagaaaaagtcacactcagcaccaggctttggccccacctgcctctccagcaccattgtagg

SEQ ID NO: 35468 - DNA, 80 bp, synthetic construct
  misc_feature 1..80: note = Artificially Synthesized Probe
  source 1..80: mol_type = other DNA
acagccagggcagtgatgtggctgaatttacattcattcatcaaacactgtttgaacacatactcagcggggccttgttc

SEQ ID NO: 35469 - DNA, 80 bp, synthetic construct
  misc_feature 1..80: note = Artificially Synthesized Probe
  source 1..80: mol_type = other DNA
ttcttaaataggatggtcagggtgggcttcacggagaagctgaccttgcagcagatgcttgagggaggtgagcgagttgg

SEQ ID NO: 35470 - DNA, 80 bp, synthetic construct
  misc_feature 1..80: note = Artificially Synthesized Probe
  source 1..80: mol_type = other DNA
gatgcccagagatgcgaacatgagggttgtcggctcgggaacggaattccatgagacttggcaggacgactgaaggggca

SEQ ID NO: 35471 - DNA, 80 bp, synthetic construct
  misc_feature 1..80: note = Artificially Synthesized Probe
  source 1..80: mol_type = other DNA
ccagccaaggcggctattagaagctgaaaaagacacggaaatataatagattctttcctcagggcctccaggaggaacca

SEQ ID NO: 35472 - DNA, 80 bp, synthetic construct
  misc_feature 1..80: note = Artificially Synthesized Probe
  source 1..80: mol_type = other DNA
ttcaccagggacctcattcctctaactcttggcactcccttctcctatctcagggtccagattttggctatgtaactcga

SEQ ID NO: 35473 - DNA, 80 bp, synthetic construct
  misc_feature 1..80: note = Artificially Synthesized Probe
  source 1..80: mol_type = other DNA
ccacatggctaacaagagatcaccgacttaggtcagactggctctaagccccatgtgtacccagaataccagcatctcat

SEQ ID NO: 35474 - DNA, 80 bp, synthetic construct
  misc_feature 1..80: note = Artificially Synthesized Probe
  source 1..80: mol_type = other DNA
caaagctgacttctaaccccagtgtttctgcctccagggcttccggctgctcctggccagccccaggtcctgctacaaac

SEQ ID NO: 35475 - DNA, 80 bp, synthetic construct
  misc_feature 1..80: note = Artificially Synthesized Probe
  source 1..80: mol_type = other DNA
tatcacacagtagattccatccattcactatacttttctgagctgtctgtcctgcatgcaagtagatatttttaatgttg

SEQ ID NO: 35476 - DNA, 80 bp, synthetic construct
  misc_feature 1..80: note = Artificially Synthesized Probe
  source 1..80: mol_type = other DNA
atcgcactactgcactccagcctgggcgacagagcaaggctctgtctcaaaacaaaaaaaaaattacactataaaaatat

SEQ ID NO: 35477 - DNA, 80 bp, synthetic construct
  misc_feature 1..80: note = Artificially Synthesized Probe
  source 1..80: mol_type = other DNA
tgggcctggccgagagtgacatcattgacatcccgcagctcttcaagctcaaagagttctctaaggcggaagcttttttc

SEQ ID NO: 35478 - DNA, 80 bp, synthetic construct
  misc_feature 1..80: note = Artificially Synthesized Probe
  source 1..80: mol_type = other DNA
tgtaattttggcagagccttcaacagcgggtgccaggtgctaatcactagtgacagcaagacagtgtctgttaagacagt

SEQ ID NO: 35479 - DNA, 80 bp, synthetic construct
  misc_feature 1..80: note = Artificially Synthesized Probe
  source 1..80: mol_type = other DNA
cttgtgggtggtcccacctttgtcttgagcgttcaccgtggcccctaagtgctgtcttgatatcatccattgtgtttttg

SEQ ID NO: 35480 - DNA, 80 bp, synthetic construct
  misc_feature 1..80: note = Artificially Synthesized Probe
  source 1..80: mol_type = other DNA
cagagtcatttacatacattatttacatatggaaagtgccataacagaggcagtcatttatctgtctagtcaacagatgt

SEQ ID NO: 35481 - DNA, 80 bp, synthetic construct
  misc_feature 1..80: note = Artificially Synthesized Probe
  source 1..80: mol_type = other DNA
cttggagtctaatagctgtagtccaagtatagctgggtggccttaggcaaacaattttccacgtctgggtctcagttttc

SEQ ID NO: 35482 - DNA, 80 bp, synthetic construct
  misc_feature 1..80: note = Artificially Synthesized Probe
  source 1..80: mol_type = other DNA
ttgctttcttctcctgtgatgtcccagtttcccactctgaagatcccaacatggtcctagcactgcacactcagttctgc

SEQ ID NO: 35483 - DNA, 80 bp, synthetic construct
  misc_feature 1..80: note = Artificially Synthesized Probe
  source 1..80: mol_type = other DNA
taatgaggggtgagggtgcccctcggtttggtggagtaagatgaggggactgtgttgaggaggcacacttttacccagaa

SEQ ID NO: 35484 - DNA, 80 bp, synthetic construct
  misc_feature 1..80: note = Artificially Synthesized Probe
  source 1..80: mol_type = other DNA
tttttatatcagtggggttttaattcccaccttcctgcttgcatcaagaattccttctcagttgtgatgggggactttgt

SEQ ID NO: 35485 - DNA, 80 bp, synthetic construct
  misc_feature 1..80: note = Artificially Synthesized Probe
  source 1..80: mol_type = other DNA
taggagtgagactgagctgatcttttacggtcttataggaatcatcacattgtttactgcactgtcaacagaggacagtt

SEQ ID NO: 35486 - DNA, 80 bp, synthetic construct
  misc_feature 1..80: note = Artificially Synthesized Probe
  source 1..80: mol_type = other DNA
acaggcaccaccatcatgccctgctaattaccttttccttattttcagaattgtgcacagtataacattatttttctaga

SEQ ID NO: 35487 - DNA, 80 bp, synthetic construct
  misc_feature 1..80: note = Artificially Synthesized Probe
  source 1..80: mol_type = other DNA
ggccagccagaatatttaataaggaaaaacaaatgcagaaatatagaggtgacaatttgaattcttattgtgataggctg

SEQ ID NO: 35488 - DNA, 80 bp, synthetic construct
  misc_feature 1..80: note = Artificially Synthesized Probe
  source 1..80: mol_type = other DNA
cagagaggatttgcttttgtttctgccaggtgtctggccccactcctagcctaggactcctttaattgaatttaccactt

SEQ ID NO: 35489 - DNA, 80 bp, synthetic construct
  misc_feature 1..80: note = Artificially Synthesized Probe
  source 1..80: mol_type = other DNA
taaaagtgcctctctgcttacttatctctttgagttcttgctttcttccagattttggcctagtagtttcttcctatttt

SEQ ID NO: 35490 - DNA, 80 bp, synthetic construct
  misc_feature 1..80: note = Artificially Synthesized Probe
  source 1..80: mol_type = other DNA
ggttcctactttgctgtgaccatgcagggacttggaggagctctgggggctgctgaaacccaccctcttttcctctgaga

SEQ ID NO: 35491 - DNA, 80 bp, synthetic construct
  misc_feature 1..80: note = Artificially Synthesized Probe
  source 1..80: mol_type = other DNA
tgtagactttatggatttaaactacctggaagaaaatccgagattctatccctataaactttattcttctacaccctcct

SEQ ID NO: 35492 - DNA, 80 bp, synthetic construct
  misc_feature 1..80: note = Artificially Synthesized Probe
  source 1..80: mol_type = other DNA
tcacctttaagctctttatatgacagttgatatacagcgttaagagctgtgccaggatctatggccattctttggcttga

SEQ ID NO: 35493 - DNA, 80 bp, synthetic construct
  misc_feature 1..80: note = Artificially Synthesized Probe
  source 1..80: mol_type = other DNA
cctactctgttgtattctgttcattgccacgatttattgagcactgacctgtaggttaactcattgactcttcaccatct

SEQ ID NO: 35494 - DNA, 80 bp, synthetic construct
  misc_feature 1..80: note = Artificially Synthesized Probe
  source 1..80: mol_type = other DNA
gggtcatcaaaaatacccagtttcttccattttcttctcagtgttgaggctgtgactcaaaaagtctcttacacatcaca

SEQ ID NO: 35495 - DNA, 80 bp, synthetic construct
  misc_feature 1..80: note = Artificially Synthesized Probe
  source 1..80: mol_type = other DNA
gtgaatgcatacactcaagaataagtgattttagaaataattgcagtgacttacacataactctacacccagccttgtcc

SEQ ID NO: 35496 - DNA, 80 bp, synthetic construct
  misc_feature 1..80: note = Artificially Synthesized Probe
  source 1..80: mol_type = other DNA
ggtacagtgacaatgagatatcttgggggaaatttggtcccgtagaccaggggttagcaaatcatatcctgtgggccaaa

SEQ ID NO: 35497 - DNA, 80 bp, synthetic construct
  misc_feature 1..80: note = Artificially Synthesized Probe
  source 1..80: mol_type = other DNA
aattttgggaccatccaggttttccccctcaagatgcctgccagaaagctcagaagtgaatttttggcttactttttttt

SEQ ID NO: 35498 - DNA, 80 bp, synthetic construct
  misc_feature 1..80: note = Artificially Synthesized Probe
  source 1..80: mol_type = other DNA
accacagatactttaatatcagattatatcgttgcagatattgcaaaatatctgtgctttttataactagaaaattaaga

SEQ ID NO: 35499 - DNA, 80 bp, synthetic construct
  misc_feature 1..80: note = Artificially Synthesized Probe
  source 1..80: mol_type = other DNA
atctcctaatttagtgagatctgagagccaccttagagattacgtagtccagtttttctccaccctgctaagcttcacaa

SEQ ID NO: 35500 - DNA, 80 bp, synthetic construct
  misc_feature 1..80: note = Artificially Synthesized Probe
  source 1..80: mol_type = other DNA
ctaaaataatttccttgtcacatttgatagacatgagtattagggacccacattggaagaaccctccaaaaacggacctg

SEQ ID NO: 35501 - DNA, 80 bp, synthetic construct
  misc_feature 1..80: note = Artificially Synthesized Probe
  source 1..80: mol_type = other DNA
caaaaatgacagaaatcaaattgcttgacatctagtaaccagagtggacatgaaagaggagtcaattctacagcaagccc

SEQ ID NO: 35502 - DNA, 80 bp, synthetic construct
  misc_feature 1..80: note = Artificially Synthesized Probe
  source 1..80: mol_type = other DNA
actaaaaagcttctgcacaacaaaggaaacaatcaacagcatgaagaggcaacctgttgaatgagagaaaatattgcata

SEQ ID NO: 35503 - DNA, 80 bp, synthetic construct
  misc_feature 1..80: note = Artificially Synthesized Probe
  source 1..80: mol_type = other DNA
gcaactggagatcattatattaaatgatataatccaggcacagaaggacaaacattgcgtgttttcactcatatgcagaa

SEQ ID NO: 35504 - DNA, 80 bp, synthetic construct
  misc_feature 1..80: note = Artificially Synthesized Probe
  source 1..80: mol_type = other DNA
gttattgatcaggaggatttccaaccaagagcgagaacccaaacaaattagcacaactcatcttctgcttctgtaacaaa

SEQ ID NO: 35505 - DNA, 80 bp, synthetic construct
  misc_feature 1..80: note = Artificially Synthesized Probe
  source 1..80: mol_type = other DNA
ataccaccatttatttctctgtgtatttcttagagcctcaacttgagcattcatgagcataatgcagctcagccctggct

SEQ ID NO: 35506 - DNA, 80 bp, synthetic construct
  misc_feature 1..80: note = Artificially Synthesized Probe
  source 1..80: mol_type = other DNA
aacaggttgatggacatttgggttgcttacagtttggggctattatgaagaatggacatgaagaatttttgaagcgtggc

SEQ ID NO: 35507 - DNA, 80 bp, synthetic construct
  misc_feature 1..80: note = Artificially Synthesized Probe
  source 1..80: mol_type = other DNA
atgctttccttttatcccttcctacatagatagatggaagggactcggcacaataaaaagaaggagcatgtagaaaaaca

SEQ ID NO: 35508 - DNA, 80 bp, synthetic construct
  misc_feature 1..80: note = Artificially Synthesized Probe
  source 1..80: mol_type = other DNA
ggcttaaacacatggtcaggggatcagactcactaatagctcttttatgtttcttccacttattgagataaaatcttttt

SEQ ID NO: 35509 - DNA, 80 bp, synthetic construct
  misc_feature 1..80: note = Artificially Synthesized Probe
  source 1..80: mol_type = other DNA
aggtgctattattccatccattttgctgacggggagattgaagctacgagtggctttagaattgattacctcaagtcaca

SEQ ID NO: 35510 - DNA, 80 bp, synthetic construct
  misc_feature 1..80: note = Artificially Synthesized Probe
  source 1..80: mol_type = other DNA
tttttcacaatgcatgtttctttctgttgtttccacagaaacattcaggtagaggctacagatttacatgaaaaggaaag

SEQ ID NO: 35511 - DNA, 80 bp, synthetic construct
  misc_feature 1..80: note = Artificially Synthesized Probe
  source 1..80: mol_type = other DNA
tggttaatagagggggagggtgcagctatttaggaacatctgaatcctgtcattctggagtctggaatccccttctcttc

SEQ ID NO: 35512 - DNA, 80 bp, synthetic construct
  misc_feature 1..80: note = Artificially Synthesized Probe
  source 1..80: mol_type = other DNA
atagagagtagaatagtggttaccagaggctggtaacgatagaagggaagggaggatgaatacagttacataggaggaat

SEQ ID NO: 35513 - DNA, 80 bp, synthetic construct
  misc_feature 1..80: note = Artificially Synthesized Probe
  source 1..80: mol_type = other DNA
cacccaggctggagtgcagtggtgggatctctgctcacctcaagctccgccccccgggttcatgccgttctcctgcctca

SEQ ID NO: 35514 - DNA, 80 bp, synthetic construct
  misc_feature 1..80: note = Artificially Synthesized Probe
  source 1..80: mol_type = other DNA
ctgggaagattacataatatcttcagggctcctgcaaattataagaaaagaccaataatggaatagaacaaggggtaaag

SEQ ID NO: 35515 - DNA, 80 bp, synthetic construct
  misc_feature 1..80: note = Artificially Synthesized Probe
  source 1..80: mol_type = other DNA
aaaaactgacagagcatgtaaggaacgaatagaaatgaccatctacttttagaagtgaggaggagggaggctagagagat

SEQ ID NO: 35516 - DNA, 80 bp, synthetic construct
  misc_feature 1..80: note = Artificially Synthesized Probe
  source 1..80: mol_type = other DNA
taaattttgaacccccatagtattccaggcatacagattcaaagataaacgtgagcaaagcagcctctctggtgttccca

SEQ ID NO: 35517 - DNA, 80 bp, synthetic construct
  misc_feature 1..80: note = Artificially Synthesized Probe
  source 1..80: mol_type = other DNA
gaggaatatggcaaggagtctatggaagagcgatgagaagacagaaaagctctgagagagaacattatcttggaagctga

SEQ ID NO: 35518 - DNA, 80 bp, synthetic construct
  misc_feature 1..80: note = Artificially Synthesized Probe
  source 1..80: mol_type = other DNA
taattgttccccagcagagagtgaacaacctttgcatatgccagctttttgtgtagacttttcagaatggtgatttcagg

SEQ ID NO: 35519 - DNA, 80 bp, synthetic construct
  misc_feature 1..80: note = Artificially Synthesized Probe
  source 1..80: mol_type = other DNA
ttaagtctataaatctagaaaacataaggcataagtctacaccacccaggcaaagtgccacaggatctcatagctacagg

SEQ ID NO: 35520 - DNA, 80 bp, synthetic construct
  misc_feature 1..80: note = Artificially Synthesized Probe
  source 1..80: mol_type = other DNA
agaggcaaaggccagggctggagaatcagttcatagcatcaggagggtctaaggagtgaaatgcaacgatgtcttagtcc

SEQ ID NO: 35521 - DNA, 80 bp, synthetic construct
  misc_feature 1..80: note = Artificially Synthesized Probe
  source 1..80: mol_type = other DNA
acatgcatatacactcccaacttcagctatgaaattctctatcttgggtccattcgagggcaggatgcaatttcaggatt

SEQ ID NO: 35522 - DNA, 80 bp, synthetic construct
  misc_feature 1..80: note = Artificially Synthesized Probe
  source 1..80: mol_type = other DNA
gtcgttaactgaagtccgtactttctttagatttccttaattttcacctaacatttttctgttcaaggatcctatcccat

SEQ ID NO: 35523 - DNA, 80 bp, synthetic construct
  misc_feature 1..80: note = Artificially Synthesized Probe
  source 1..80: mol_type = other DNA
aagcacagaacatatgattatgattccaagtgaaagatgcagccaaagctctcctgtgtcataaacctgttccttcctgc

SEQ ID NO: 35524 - DNA, 80 bp, synthetic construct
  misc_feature 1..80: note = Artificially Synthesized Probe
  source 1..80: mol_type = other DNA
actgtgttcctgggattggatttagcatgatctattgttggctccctttattcacaatctctctttacacaaaatactta

SEQ ID NO: 35525 - DNA, 80 bp, synthetic construct
  misc_feature 1..80: note = Artificially Synthesized Probe
  source 1..80: mol_type = other DNA
gtaacttgttttacaggactcacttgtgtccacacatctgtgatccctttgaaccttaagaatcaaaccattgtctggga

SEQ ID NO: 35526 - DNA, 80 bp, synthetic construct
  misc_feature 1..80: note = Artificially Synthesized Probe
  source 1..80: mol_type = other DNA
accagcccaggtaatgtggcagttgctctacattacaaaagaatacaaaaattggccagccacagtggcttgtgcctgta

SEQ ID NO: 35527 - DNA, 80 bp, synthetic construct
  misc_feature 1..80: note = Artificially Synthesized Probe
  source 1..80: mol_type = other DNA
ctctctctctctctctttctttcagacaaggtctcactccattgccaagactggagttcagtagtatgataagggctcac

SEQ ID NO: 35528 - DNA, 80 bp, synthetic construct
  misc_feature 1..80: note = Artificially Synthesized Probe
  source 1..80: mol_type = other DNA
gggtctttaaatgaatcttcaaactgcacactgaggagcgggaagatttggaacacgtttaatcagcaagggagcaatga

SEQ ID NO: 35529 - DNA, 80 bp, synthetic construct
  misc_feature 1..80: note = Artificially Synthesized Probe
  source 1..80: mol_type = other DNA
ttgggttagagtagacccagatccccagaacccttttaaacctgggtgatttagaattcaaactaccatcacttctccag

SEQ ID NO: 35530 - DNA, 80 bp, synthetic construct
  misc_feature 1..80: note = Artificially Synthesized Probe
  source 1..80: mol_type = other DNA
ctgcccccttgcagttcaagtataattcaaaatatctgcttctatttgtttgccttttgcaaaacctcaagggtgatttt

SEQ ID NO: 35531 - DNA, 80 bp, synthetic construct
  misc_feature 1..80: note = Artificially Synthesized Probe
  source 1..80: mol_type = other DNA
agaatacattcagtgagttctaataaatgtatacacgtgagtgcctcaaacccttatcaagacataaagcattgccatca

SEQ ID NO: 35532 - DNA, 80 bp, synthetic construct
  misc_feature 1..80: note = Artificially Synthesized Probe
  source 1..80: mol_type = other DNA
gccagggattcttctttgtttggtactatatttccagtgcttcagattgccactggcactgagtaggagctcaataaaca

SEQ ID NO: 35533 - DNA, 80 bp, synthetic construct
  misc_feature 1..80: note = Artificially Synthesized Probe
  source 1..80: mol_type = other DNA
tccaagtcttggattccgaccagatttgcttaatggatgagcagaacgtctagctttagagagttttaggtaacttcacc

SEQ ID NO: 35534 - DNA, 80 bp, synthetic construct
  misc_feature 1..80: note = Artificially Synthesized Probe
  source 1..80: mol_type = other DNA
tcctggcagagttttcaaaaatcctctagctcttgctaaaaaaagttggtgctttcttagctctggtgggtatgcaagtg

SEQ ID NO: 35535 - DNA, 80 bp, synthetic construct
  misc_feature 1..80: note = Artificially Synthesized Probe
  source 1..80: mol_type = other DNA
gaatgaataacttaggtatgtagactcacagctaagaaaaatatatatacatgtagctaatggctcagggtaatctgcag

SEQ ID NO: 35536 - DNA, 80 bp, synthetic construct
  misc_feature 1..80: note = Artificially Synthesized Probe
  source 1..80: mol_type = other DNA
agaaggaaaactagcaatttccatttggctgaggattgcccttgtttacagaaataacttgctgctgctgaagtgactga

SEQ ID NO: 35537 - DNA, 80 bp, synthetic construct
  misc_feature 1..80: note = Artificially Synthesized Probe
  source 1..80: mol_type = other DNA
tgcctataatcccagcactttgggaggccaagacaggtggatcacctgacatcaggagttcaagaccagcctggccaaca

SEQ ID NO: 35538 - DNA, 80 bp, synthetic construct
  misc_feature 1..80: note = Artificially Synthesized Probe
  source 1..80: mol_type = other DNA
tcatgccaaggtgctgtcggacagaggcttggcaccatgaaatattcttaggttcagagatctttaagacaaagatccta

SEQ ID NO: 35539 - DNA, 80 bp, synthetic construct
  misc_feature 1..80: note = Artificially Synthesized Probe
  source 1..80: mol_type = other DNA
accacatgtagcccccaaatctccctatttatgaagcctgcttgctttgaaaagctataatcctaacacaggacaaatag

SEQ ID NO: 35540 - DNA, 80 bp, synthetic construct
  misc_feature 1..80: note = Artificially Synthesized Probe
  source 1..80: mol_type = other DNA
ggctctctcatttcctctatttaatattggttatataaaggagttccttcctttccagatgccagggcaccagtagacat

SEQ ID NO: 35541 - DNA, 80 bp, synthetic construct
  misc_feature 1..80: note = Artificially Synthesized Probe
  source 1..80: mol_type = other DNA
cccagaggcttattaaaaggtagggttttatttttaagaattgtcatctcagccatatgcaataacgttcagagaactag

SEQ ID NO: 35542 - DNA, 80 bp, synthetic construct
  misc_feature 1..80: note = Artificially Synthesized Probe
  source 1..80: mol_type = other DNA
aatgccatgtatggaggtgactgggaaaataacttctgtatttgcattggacaattttacatagctgtcattgtaccagt

SEQ ID NO: 35543 - DNA, 80 bp, synthetic construct
  misc_feature 1..80: note = Artificially Synthesized Probe
  source 1..80: mol_type = other DNA
tatcaaataaacttatctatttcaagaccttcggggaatggctgctaagtggggaaggagtaggggtagagtcacgctga

SEQ ID NO: 35544 - DNA, 80 bp, synthetic construct
  misc_feature 1..80: note = Artificially Synthesized Probe
  source 1..80: mol_type = other DNA
ttagcagctagccatgagcaagaggttgattttgagcatatgaacagagctgtggccaaaagacaagtgaactacattga

SEQ ID NO: 35545 - DNA, 80 bp, synthetic construct
  misc_feature 1..80: note = Artificially Synthesized Probe
  source 1..80: mol_type = other DNA
gttcaagcgattctcctgagtagctaggactacaggtgcatgccaccatgcatggctaagttttgtatttttagtagaga

SEQ ID NO: 35546 - DNA, 80 bp, synthetic construct
  misc_feature 1..80: note = Artificially Synthesized Probe
  source 1..80: mol_type = other DNA
tgtctaggtttgtatgtcagtgattagctatgaacctgggccaaattacttaaactctctgggctttgttccttcatctg

SEQ ID NO: 35547 - DNA, 80 bp, synthetic construct
  misc_feature 1..80: note = Artificially Synthesized Probe
  source 1..80: mol_type = other DNA
atttcatttcaaaaatcagaggcaatctacacaacaaaatggaactgcctcactcccccagtagaagggagtaggggctt

SEQ ID NO: 35548 - DNA, 80 bp, synthetic construct
  misc_feature 1..80: note = Artificially Synthesized Probe
  source 1..80: mol_type = other DNA
tgagagtactctgcatatatcaccagcacttattgagcaccaattgtgttctgacactggagtttgacatagattattac

SEQ ID NO: 35549 - DNA, 80 bp, synthetic construct
  misc_feature 1..80: note = Artificially Synthesized Probe
  source 1..80: mol_type = other DNA
gactggagtccaaacaacaggaaatttcccaaccagatgtagctattgtgtatgatgtagcatttggctgacaaaagtaa

SEQ ID NO: 35550 - DNA, 80 bp, synthetic construct
  misc_feature 1..80: note = Artificially Synthesized Probe
  source 1..80: mol_type = other DNA
catgaaggaaaaggctgaaaactcaagtcagggttgaaagtcatgggtgatgtttcagcacagttcaagtattacatctt

SEQ ID NO: 35551 - DNA, 80 bp, synthetic construct
  misc_feature 1..80: note = Artificially Synthesized Probe
  source 1..80: mol_type = other DNA
gggtctcaaagtatattgcaggattttatgatagaccggatttgtttattgccggcagttgctgtctatttccggtgaca

SEQ ID NO: 35552 - DNA, 80 bp, synthetic construct
  misc_feature 1..80: note = Artificially Synthesized Probe
  source 1..80: mol_type = other DNA
gataacaatatatctgtatgttacatatggatatctatgtattatatataggtatacaataaatctctgtctatacacac

SEQ ID NO: 35553 - DNA, 80 bp, synthetic construct
  misc_feature 1..80: note = Artificially Synthesized Probe
  source 1..80: mol_type = other DNA
aagaaaaggtgattttatgctgaaaccaccatgaataacatcaagaggactgctcgtttgggatcccatagattagtggg

SEQ ID NO: 35554 - DNA, 80 bp, synthetic construct
  misc_feature 1..80: note = Artificially Synthesized Probe
  source 1..80: mol_type = other DNA
tagagcctaaacaggtaatgaaataagagacttgcttaacgttcttacaagtttcatttccaagaaagactagagagttt

SEQ ID NO: 35555 - DNA, 80 bp, synthetic construct
  misc_feature 1..80: note = Artificially Synthesized Probe
  source 1..80: mol_type = other DNA
gatctcttgagtcctcagattctgcagtggctggcatcctcagctaaatgggaccagataagaaatttagtctgacaaca

SEQ ID NO: 35556 - DNA, 80 bp, synthetic construct
  misc_feature 1..80: note = Artificially Synthesized Probe
  source 1..80: mol_type = other DNA
gagactctaaaaagcctgggattagacaaggcatgccctccctctgggcctcagtttctttattataaaaggagaggcca

SEQ ID NO: 35557 - DNA, 80 bp, synthetic construct
  misc_feature 1..80: note = Artificially Synthesized Probe
  source 1..80: mol_type = other DNA
tcacattttggtgattcttatgatattttagatttcttcattattattatgacctgttatggtgatctacggttagtgat

SEQ ID NO: 35558 - DNA, 80 bp, synthetic construct
  misc_feature 1..80: note = Artificially Synthesized Probe
  source 1..80: mol_type = other DNA
taccatcctgagattatagaaaaaatgaaggctcagaggatggccaaaaccaggttatggcaggaaatcaggttacgctg

SEQ ID NO: 35559 - DNA, 80 bp, synthetic construct
  misc_feature 1..80: note = Artificially Synthesized Probe
  source 1..80: mol_type = other DNA
cattttgtaagggtatagctgctctagatggtgattcctcagatgaatgtgggcaaagtaaactgaaaaccttctggaag

SEQ ID NO: 35560 - DNA, 80 bp, synthetic construct
  misc_feature 1..80: note = Artificially Synthesized Probe
  source 1..80: mol_type = other DNA
ggctgcagtgagctgtgattgtatcagtgcactccaacctgggctataggagtgagaccctttctcaaaaaaaaaaaaag

SEQ ID NO: 35561 - DNA, 80 bp, synthetic construct
  misc_feature 1..80: note = Artificially Synthesized Probe
  source 1..80: mol_type = other DNA
atttgcaaggaaaatagagtcactaggaaatggtctgcctttgttacagagcttatctccaacgtcattcttgaccttcc

SEQ ID NO: 35562 - DNA, 80 bp, synthetic construct
  misc_feature 1..80: note = Artificially Synthesized Probe
  source 1..80: mol_type = other DNA
gaattattcaacttttctttggaaacccctttattaagatacaatttaccgcaaagcctcttgccaccaccagccaacac

SEQ ID NO: 35563 - DNA, 80 bp, synthetic construct
  misc_feature 1..80: note = Artificially Synthesized Probe
  source 1..80: mol_type = other DNA
gcattcttgtgtgtaattttgagcccaattccctatttgctacttcactgggctcctgaagcctgctccccattcctttt

SEQ ID NO: 35564 - DNA, 80 bp, synthetic construct
  misc_feature 1..80: note = Artificially Synthesized Probe
  source 1..80: mol_type = other DNA
ttcaaatcagctttctctcactcactcttgcctccctcttctctgctaacatttcaggtaaccaagttgtatttggaaag

SEQ ID NO: 35565 - DNA, 80 bp, synthetic construct
  misc_feature 1..80: note = Artificially Synthesized Probe
  source 1..80: mol_type = other DNA
tgattatgatcaaaagagtaggtgatgactctgggtgggtcttcccaccaagggtctccttgcctttatgagatagacac

SEQ ID NO: 35566 - DNA, 80 bp, synthetic construct
  misc_feature 1..80: note = Artificially Synthesized Probe
  source 1..80: mol_type = other DNA
acaaaaacaactcccctcttcttctttcctccagctcctggtaactaccatccttcctccagcccgtggtaactaccatt

SEQ ID NO: 35567 - DNA, 80 bp, synthetic construct
  misc_feature 1..80: note = Artificially Synthesized Probe
  source 1..80: mol_type = other DNA
cataattaatgatgctgagcatcttacatgcttttggccatttgtagatcatctcaagttatgtctattcaagtcctttg

SEQ ID NO: 35568 - DNA, 80 bp, synthetic construct
  misc_feature 1..80: note = Artificially Synthesized Probe
  source 1..80: mol_type = other DNA
gctgtaactttagactcgagacaatgacaactatgtccatagtcactgcactattcatcatcatgcacttgcagtaaaag

SEQ ID NO: 35569 - DNA, 80 bp, synthetic construct
  misc_feature 1..80: note = Artificially Synthesized Probe
  source 1..80: mol_type = other DNA
tatccataattgtgcaaaaaggctatccaaatcctcttctcttttccagctacctacctatagttggacttcctttttat

SEQ ID NO: 35570 - DNA, 80 bp, synthetic construct
  misc_feature 1..80: note = Artificially Synthesized Probe
  source 1..80: mol_type = other DNA
agtacatttattaatattcccttaccaccctctgattaaagaattaaggataccaggagtcagcattttcttttttaaga

SEQ ID NO: 35571 - DNA, 80 bp, synthetic construct
  misc_feature 1..80: note = Artificially Synthesized Probe
  source 1..80: mol_type = other DNA
agtggctacctcttggggatggagtttggactaagagatttttactctttattgtatacattttgaaaaagagggagaaa

SEQ ID NO: 35572 - DNA, 80 bp, synthetic construct
  misc_feature 1..80: note = Artificially Synthesized Probe
  source 1..80: mol_type = other DNA
agccagtggataatgaatgcacagaacaataaacatagctgtgtcctttctgttcttgtggagaaatgacaccatgtgtt

SEQ ID NO: 35573 - DNA, 80 bp, synthetic construct
  misc_feature 1..80: note = Artificially Synthesized Probe
  source 1..80: mol_type = other DNA
gcaagttgtatgtaacctaatattcaatttcagaagttccagttactctccatgccctgtgagcttcattaggaaaggat

SEQ ID NO: 35574 - DNA, 80 bp, synthetic construct
  misc_feature 1..80: note = Artificially Synthesized Probe
  source 1..80: mol_type = other DNA
agtggctgcctacaacaaagccaaaaaagccatggacttctatgatccagcaaggtaggttttcagaggaaaattctttt

SEQ ID NO: 35575 - DNA, 80 bp, synthetic construct
  misc_feature 1..80: note = Artificially Synthesized Probe
  source 1..80: mol_type = other DNA
ggtaaaagcaatattcttatacatttcataataaaattagctctatgtattttctactgcacctgagcaggcaggtccca

SEQ ID NO: 35576 - DNA, 80 bp, synthetic construct
  misc_feature 1..80: note = Artificially Synthesized Probe
  source 1..80: mol_type = other DNA
actgaaaggtcgagttttctgaactgcactgattttattgcagttgaaaaaaaaaaaaagctattccaaagatttcaagc

SEQ ID NO: 35577 - DNA, 80 bp, synthetic construct
  misc_feature 1..80: note = Artificially Synthesized Probe
  source 1..80: mol_type = other DNA
gaaagtggactaaatgtgactctcaccattcggcttcttatgcacggaaaggaagtaggaagcatcattgggaagaaagg

SEQ ID NO: 35578 - DNA, 80 bp, synthetic construct
  misc_feature 1..80: note = Artificially Synthesized Probe
  source 1..80: mol_type = other DNA
caataacccctttctgctgttctcccatgatccaactgtgtaatttctggtcagtgattccaggttttaaataatttgta

SEQ ID NO: 35579 - DNA, 80 bp, synthetic construct
  misc_feature 1..80: note = Artificially Synthesized Probe
  source 1..80: mol_type = other DNA
gcttttgggcaacttattaaatctctgtgggtcattttaataataattcttccttcacaagtgtatcgttagaccataga

SEQ ID NO: 35580 - DNA, 80 bp, synthetic construct
  misc_feature 1..80: note = Artificially Synthesized Probe
  source 1..80: mol_type = other DNA
tactaggtttagatgaagcctccagaagctgtttttcttttgccaaagttaacttaggaggctgatttaatatgaacccc

SEQ ID NO: 35581 - DNA, 80 bp, synthetic construct
  misc_feature 1..80: note = Artificially Synthesized Probe
  source 1..80: mol_type = other DNA
tttgtttttttttttttaaatgcaacctcaccagctttggctactttcctaaggggaaaataatagccaatttgaggtat

SEQ ID NO: 35582 - DNA, 80 bp, synthetic construct
  misc_feature 1..80: note = Artificially Synthesized Probe
  source 1..80: mol_type = other DNA
tttttttttttttttttttggtagagacagggtctcgctttgttgcccaggctggtctcaactcctgggctcaagcagtc

SEQ ID NO: 35583 - DNA, 80 bp, synthetic construct
  misc_feature 1..80: note = Artificially Synthesized Probe
  source 1..80: mol_type = other DNA
ccagccgaggctcctggtagattgagagctctgacctcatctcctcaaagaagcttttttttttttttgggacggagttt

SEQ ID NO: 35584 - DNA, 80 bp, synthetic construct
  misc_feature 1..80: note = Artificially Synthesized Probe
  source 1..80: mol_type = other DNA
gcctacccactagaataataataaatctataaggcttttatctgaagtcctctgcagaggcactgcagacatcaagccca

SEQ ID NO: 35585 - DNA, 80 bp, synthetic construct
  misc_feature 1..80: note = Artificially Synthesized Probe
  source 1..80: mol_type = other DNA
tgctttgcttttcagtgcgtgtttccagaatattgtgtgttttttacttaggaagagtccttagtctgttttggggggga

SEQ ID NO: 35586 - DNA, 80 bp, synthetic construct
  misc_feature 1..80: note = Artificially Synthesized Probe
  source 1..80: mol_type = other DNA
gatgggtggatcacctgaggtcaggagtttgagaccagctggccaacatggcgaaactccatctctactaaaaacacaaa

SEQ ID NO: 35587 - DNA, 80 bp, synthetic construct
  misc_feature 1..80: note = Artificially Synthesized Probe
  source 1..80: mol_type = other DNA
tgtgtaagcttccattctctccctctaaatcaggtattttcttgtgctttcagttccccccaaatttgtttaatccttcc

SEQ ID NO: 35588 - DNA, 80 bp, synthetic construct
  misc_feature 1..80: note = Artificially Synthesized Probe
  source 1..80: mol_type = other DNA
aaaaactatatgtatgtatttttttaaatacagagtctcgctctgtcgcccaggctggagtgcactggagcaatctctgc

SEQ ID NO: 35589 - DNA, 80 bp, synthetic construct
  misc_feature 1..80: note = Artificially Synthesized Probe
  source 1..80: mol_type = other DNA
tattttctttttaggattttacagtttttggaggcagtctgtcaggagcacatgcccaaaagatctgcaaagtaagtgtt

SEQ ID NO: 35590 - DNA, 80 bp, synthetic construct
  misc_feature 1..80: note = Artificially Synthesized Probe
  source 1..80: mol_type = other DNA
ctactttgccattctgtctactgtaagttctgtcaaagcagtacctgggaacaaaactggctgctggaagacgttacaac

SEQ ID NO: 35591 - DNA, 80 bp, synthetic construct
  misc_feature 1..80: note = Artificially Synthesized Probe
  source 1..80: mol_type = other DNA
gaaaagcaagagagagtgggaagagagggttttcattttttctaacagagggccactcacaggggaaattacagttaaag

SEQ ID NO: 35592 - DNA, 80 bp, synthetic construct
  misc_feature 1..80: note = Artificially Synthesized Probe
  source 1..80: mol_type = other DNA
aacctcagcctcctgggctcaagcgatcatcccacctcagtctcctgaatagctggcaccacaggcatgcaccaccacat

SEQ ID NO: 35593 - DNA, 80 bp, synthetic construct
  misc_feature 1..80: note = Artificially Synthesized Probe
  source 1..80: mol_type = other DNA
tcatcgatgttattctaattcattatccttattcaggacttaagtcctttatagtgtgtgctctgggcatgtgtgcactt

SEQ ID NO: 35594 - DNA, 80 bp, synthetic construct
  misc_feature 1..80: note = Artificially Synthesized Probe
  source 1..80: mol_type = other DNA
actccgtctcaaaaaaaaaaaaaaaaaaaaagagcttaatgcttaatagggccgggcacggtggctcatgcctgtgatcc

SEQ ID NO: 35595 - DNA, 80 bp, synthetic construct
  misc_feature 1..80: note = Artificially Synthesized Probe
  source 1..80: mol_type = other DNA
accatttacattaccatgagcaatgtgttcagggttgcaggttctccatatctttgttgatacttggtattgtcagtctt

SEQ ID NO: 35596 - DNA, 80 bp, synthetic construct
  misc_feature 1..80: note = Artificially Synthesized Probe
  source 1..80: mol_type = other DNA
tgatcttagctcactgcaacctccacttcctgggttcaagtgattctcgtgcctcagtcacccaagtagctgggattaca

SEQ ID NO: 35597 - DNA, 80 bp, synthetic construct
  misc_feature 1..80: note = Artificially Synthesized Probe
  source 1..80: mol_type = other DNA
attgtcatatgtaaaaacttgtaatacaaagtcatgaagattttgttttcttcatggagttttttttgtaggtttggctc

SEQ ID NO: 35598 - DNA, 80 bp, synthetic construct
  misc_feature 1..80: note = Artificially Synthesized Probe
  source 1..80: mol_type = other DNA
gtagatgaatttggtgagaatttacatcctaacatattgagtcttccactccacgtagatggaatgtttctctgtttatg

SEQ ID NO: 35599 - DNA, 80 bp, synthetic construct
  misc_feature 1..80: note = Artificially Synthesized Probe
  source 1..80: mol_type = other DNA
tggtgtgtgttttttttttttttttggacattctcttgaaggttgaggaagttcctttctacttctaattttttgagtgt

SEQ ID NO: 35600 - DNA, 80 bp, synthetic construct
  misc_feature 1..80: note = Artificially Synthesized Probe
  source 1..80: mol_type = other DNA
cctcccgagtagctgggactacaggcacacgccactacacccatctaatttttgtatttgtagtagagacagggtttcac

SEQ ID NO: 35601 - DNA, 80 bp, synthetic construct
  misc_feature 1..80: note = Artificially Synthesized Probe
  source 1..80: mol_type = other DNA
atttgtttgtgtcatgtatagtttctttcagcagcgttttgtagtttcacttgtagagatcttcacctccttggttaggt

SEQ ID NO: 35602 - DNA, 80 bp, synthetic construct
  misc_feature 1..80: note = Artificially Synthesized Probe
  source 1..80: mol_type = other DNA
actgtgatccatctggtcctgggcttttttgttgttggcagtttaaaattactgattcagtctcactgcttgtttttggt

SEQ ID NO: 35603 - DNA, 80 bp, synthetic construct
  misc_feature 1..80: note = Artificially Synthesized Probe
  source 1..80: mol_type = other DNA
cccatttcactttgttgctatttcatttcctaggtctagtagtaattgttttataaatctgggagctccagtattaggtg

SEQ ID NO: 35604 - DNA, 80 bp, synthetic construct
  misc_feature 1..80: note = Artificially Synthesized Probe
  source 1..80: mol_type = other DNA
ttcccaggagttctttgagcttcttgcatttggatattgaaatctcaggcaaggccagggaagttttcctcaatgattct

SEQ ID NO: 35605 - DNA, 80 bp, synthetic construct
  misc_feature 1..80: note = Artificially Synthesized Probe
  source 1..80: mol_type = other DNA
tttgatttggctgtggtttttttaagtttctttttcctcttcactaaggatgtgactttagtgtttatagtttattatag

SEQ ID NO: 35606 - DNA, 80 bp, synthetic construct
  misc_feature 1..80: note = Artificially Synthesized Probe
  source 1..80: mol_type = other DNA
tcagtaaggcagagaggttccacccttgatgaaagtggctgggggaactctcaattagatgcactgaggtcttatcaagg

SEQ ID NO: 35607 - DNA, 80 bp, synthetic construct
  misc_feature 1..80: note = Artificially Synthesized Probe
  source 1..80: mol_type = other DNA
gatagcttaggtcatgcactggttttctcctttctgttcacagtgttattctacctagagatgctgtagtggactgtgtt

SEQ ID NO: 35608 - DNA, 80 bp, synthetic construct
  misc_feature 1..80: note = Artificially Synthesized Probe
  source 1..80: mol_type = other DNA
gtggcttcttggaaaaagagtcaccatgtgattctcaatacactattctgttcttctaagtgggagaggcatgctaacac

SEQ ID NO: 35609 - DNA, 80 bp, synthetic construct
  misc_feature 1..80: note = Artificially Synthesized Probe
  source 1..80: mol_type = other DNA
aggatttacttctgccatttagttatttctgtatgtgttttggttttttatgcctcagttcctccattatggccttgggg

SEQ ID NO: 35610 - DNA, 80 bp, synthetic construct
  misc_feature 1..80: note = Artificially Synthesized Probe
  source 1..80: mol_type = other DNA
attttattttttgtgcagactcctctgctggggccgcaactgctgagaggagcagcacatttgccttttaaatcacatag

SEQ ID NO: 35611 - DNA, 80 bp, synthetic construct
  misc_feature 1..80: note = Artificially Synthesized Probe
  source 1..80: mol_type = other DNA
cacctgacttttcagtactttaaatatgtcccactgccttccggcctccatggttaatcttgctgaggatcagttgcatg

SEQ ID NO: 35612 - DNA, 80 bp, synthetic construct
  misc_feature 1..80: note = Artificially Synthesized Probe
  source 1..80: mol_type = other DNA
gcctctatgcttagcccctcagccatcaaaagcagtggtcagtaatcagaacatacaaccttgatttttcaaggttgaaa

SEQ ID NO: 35613 - DNA, 80 bp, synthetic construct
  misc_feature 1..80: note = Artificially Synthesized Probe
  source 1..80: mol_type = other DNA
tttctgaactcttcactctgccacagctggaagtctcccctactaccttgatatctttgcagaaagcatagattacattt

SEQ ID NO: 35614 - DNA, 80 bp, synthetic construct
  misc_feature 1..80: note = Artificially Synthesized Probe
  source 1..80: mol_type = other DNA
aaggtaagaaagaagggcctgtttttggtgccgtttgagatttgtgcagttccttacctgcaataaaaataattcctgac

SEQ ID NO: 35615 - DNA, 80 bp, synthetic construct
  misc_feature 1..80: note = Artificially Synthesized Probe
  source 1..80: mol_type = other DNA
aagggaagttaggcagtaggaattcaaaagtttcacaaagtgcttaccactttgacccaactattctgttcttagtgata

SEQ ID NO: 35616 - DNA, 80 bp, synthetic construct
  misc_feature 1..80: note = Artificially Synthesized Probe
  source 1..80: mol_type = other DNA
tcactgtaaatgcagtttaactctcattttcctgtctttcaacagtattcccttggcttccattataccatactctggca

SEQ ID NO: 35617 - DNA, 80 bp, synthetic construct
  misc_feature 1..80: note = Artificially Synthesized Probe
  source 1..80: mol_type = other DNA
gggtatctcaaacttaacaggttttgatttctaccaagcttctcctgcattgctctcctgcagccttcgccattttaaat

SEQ ID NO: 35618 - DNA, 80 bp, synthetic construct
  misc_feature 1..80: note = Artificially Synthesized Probe
  source 1..80: mol_type = other DNA
acctttacgttaagtgaaaccatataatatgctttcttgtgtgcatggcttctggctcattatgttgttaagatttatct

SEQ ID NO: 35619 - DNA, 80 bp, synthetic construct
  misc_feature 1..80: note = Artificially Synthesized Probe
  source 1..80: mol_type = other DNA
cctcctgtgtagctgggactacaggcacacactgccatgcctgcctaattttttttttttattttggtagagaactggtc

SEQ ID NO: 35620 - DNA, 80 bp, synthetic construct
  misc_feature 1..80: note = Artificially Synthesized Probe
  source 1..80: mol_type = other DNA
actgtgcccagctgattggtgttactgagttcatctatgtctttactgtttctgcctgctggatctgtccacttttgata

SEQ ID NO: 35621 - DNA, 80 bp, synthetic construct
  misc_feature 1..80: note = Artificially Synthesized Probe
  source 1..80: mol_type = other DNA
ttccactctcttcgttcttgcatggtttctaagaaaaatttggatataattattatttttggtcctctataggcaaaatg

SEQ ID NO: 35622 - DNA, 80 bp, synthetic construct
  misc_feature 1..80: note = Artificially Synthesized Probe
  source 1..80: mol_type = other DNA
gaatttccatttctctgcttacattgctcatctgcttgctgtctactctatccatgagagcccttaaaccattttgtttg

SEQ ID NO: 35623 - DNA, 80 bp, synthetic construct
  misc_feature 1..80: note = Artificially Synthesized Probe
  source 1..80: mol_type = other DNA
aggctgctataaacatttgtttagaagtctgtgtgaagtggggaagacctttgtagctagacctttctagcaagatttca

SEQ ID NO: 35624 - DNA, 80 bp, synthetic construct
  misc_feature 1..80: note = Artificially Synthesized Probe
  source 1..80: mol_type = other DNA
gcacatgccaccaggcctacctaattgaaacaaatttttatggagactgggtctcgctatgttggccaggctggtcttga

SEQ ID NO: 35625 - DNA, 80 bp, synthetic construct
  misc_feature 1..80: note = Artificially Synthesized Probe
  source 1..80: mol_type = other DNA
aacaatttagagctagttgctggaatggtgattataagtaggtatgatttatgtatgtacagttgaacctttgaaaaaaa

SEQ ID NO: 35626 - DNA, 80 bp, synthetic construct
  misc_feature 1..80: note = Artificially Synthesized Probe
  source 1..80: mol_type = other DNA
tagctgttggagtaattattgcaattccatgttttcctgtaaaagaaaccacccagctgtgaatggattacctaccacac

SEQ ID NO: 35627 - DNA, 80 bp, synthetic construct
  misc_feature 1..80: note = Artificially Synthesized Probe
  source 1..80: mol_type = other DNA
agcacaatctcaagtacgttttgtttgttttttgattgtagggcagtatgtggttttctttctgggcctgaggctctttg

SEQ ID NO: 35628 - DNA, 80 bp, synthetic construct
  misc_feature 1..80: note = Artificially Synthesized Probe
  source 1..80: mol_type = other DNA
gtagtttcaaatagggtggtaacagtaggcctcactgaggttaggagctgagcagattttaaggagttaactgcattgat

SEQ ID NO: 35629 - DNA, 80 bp, synthetic construct
  misc_feature 1..80: note = Artificially Synthesized Probe
  source 1..80: mol_type = other DNA
ctcttaggtgtggcccacagagcttttgaaaatgatgttgatgccttgtgtaatctccgggatttcttcaactacctgcc

SEQ ID NO: 35630 - DNA, 80 bp, synthetic construct
  misc_feature 1..80: note = Artificially Synthesized Probe
  source 1..80: mol_type = other DNA
gcactcacttggcctggactttcttctgcagaagggatttgaaattgtattgtttgggaagaggtcattttcagatgcta

SEQ ID NO: 35631 - DNA, 80 bp, synthetic construct
  misc_feature 1..80: note = Artificially Synthesized Probe
  source 1..80: mol_type = other DNA
tataggtatgcatgtgtatgtatgtatatgcatgtgtataggtatgcatgtgtatgtatgtatatgcatgtgtatgtata

SEQ ID NO: 35632 - DNA, 80 bp, synthetic construct
  misc_feature 1..80: note = Artificially Synthesized Probe
  source 1..80: mol_type = other DNA
acagggaatgtgaacccacagtggtttatgcagagctctgcctttgcatttccaagtccttgttcttttaatgttccagg

SEQ ID NO: 35633 - DNA, 80 bp, synthetic construct
  misc_feature 1..80: note = Artificially Synthesized Probe
  source 1..80: mol_type = other DNA
tgggagacaggagccatttgtacctttttttggtacagcagattcctgggtcattaagtaaaggggacagtgttgggcaa

SEQ ID NO: 35634 - DNA, 80 bp, synthetic construct
  misc_feature 1..80: note = Artificially Synthesized Probe
  source 1..80: mol_type = other DNA
gagctgaaattaactccaattttcagtccaatccttcccctggaagttgcagtctttcaacagacgccagagtcaaaata

SEQ ID NO: 35635 - DNA, 80 bp, synthetic construct
  misc_feature 1..80: note = Artificially Synthesized Probe
  source 1..80: mol_type = other DNA
cttgcattggctacaactccctatatgtcaaatgtaatggtgaatcatagttgtgattctgggcatctttgtattgtttg

SEQ ID NO: 35636 - DNA, 80 bp, synthetic construct
  misc_feature 1..80: note = Artificially Synthesized Probe
  source 1..80: mol_type = other DNA
tggcttctggactacactcttgctgtgtcctcacgaggtctttgctctcagtgcatgcagaaagagatctctggtatctc

SEQ ID NO: 35637 - DNA, 80 bp, synthetic construct
  misc_feature 1..80: note = Artificially Synthesized Probe
  source 1..80: mol_type = other DNA
acagattagggtccccctcttatggccccgtttaactttaattacctctggaacatccctctctccaaattcactttttt

SEQ ID NO: 35638 - DNA, 80 bp, synthetic construct
  misc_feature 1..80: note = Artificially Synthesized Probe
  source 1..80: mol_type = other DNA
aggacactacatctttccccatcaccctccctaaaattagtcacccatgaactaaactgcactttgctatactgacagaa

SEQ ID NO: 35639 - DNA, 80 bp, synthetic construct
  misc_feature 1..80: note = Artificially Synthesized Probe
  source 1..80: mol_type = other DNA
gagggaagtttgtgttaatgaggctttcttgaggaatctactagagaatgagctttatccaatcaagaggtagctggaga

SEQ ID NO: 35640 - DNA, 80 bp, synthetic construct
  misc_feature 1..80: note = Artificially Synthesized Probe
  source 1..80: mol_type = other DNA
gtgattcagaaaggctaaaaataaggaatgggcagaaatatactgggagaatggaaacaataacagcagtatttgtgaca

SEQ ID NO: 35641 - DNA, 80 bp, synthetic construct
  misc_feature 1..80: note = Artificially Synthesized Probe
  source 1..80: mol_type = other DNA
gtagcctccagccgggaaataaatcttctagtaaacaattcttggatgaaaggggaaaatagaaaccaaatgacagaatt

SEQ ID NO: 35642 - DNA, 80 bp, synthetic construct
  misc_feature 1..80: note = Artificially Synthesized Probe
  source 1..80: mol_type = other DNA
acagaaattgatcccatcagagataggaagcttaaatgaaccaccaaattccacggaaggaattacttcaccaaaaagca

SEQ ID NO: 35643 - DNA, 80 bp, synthetic construct
  misc_feature 1..80: note = Artificially Synthesized Probe
  source 1..80: mol_type = other DNA
atagtttcatgtggaatttctgagacctttaagggccaaatagtcctagtgccacataaattcttccagagcatagaaag

SEQ ID NO: 35644 - DNA, 80 bp, synthetic construct
  misc_feature 1..80: note = Artificially Synthesized Probe
  source 1..80: mol_type = other DNA
ttgccaggactacaggcatgcatcaccacacacacctgatttaatatttttttttttgtaggaagaattcctgctatgtt

SEQ ID NO: 35645 - DNA, 80 bp, synthetic construct
  misc_feature 1..80: note = Artificially Synthesized Probe
  source 1..80: mol_type = other DNA
cacagatgaattcctctgaaaccttaggggaaggtttagaaatgcttttgaactgtaactcaactagtttcagtgaaaga

SEQ ID NO: 35646 - DNA, 80 bp, synthetic construct
  misc_feature 1..80: note = Artificially Synthesized Probe
  source 1..80: mol_type = other DNA
actatgcagaagtgaaaaagaatgatgatctctatgaactgataggaagtgattcccaggacatattaagtgaaaaaatt

SEQ ID NO: 35647 - DNA, 80 bp, synthetic construct
  misc_feature 1..80: note = Artificially Synthesized Probe
  source 1..80: mol_type = other DNA
taagtaaatgggaaaggcaaagatctttcttgtggtagatgtcagctaataaatggagaagaaaagtggaattggaaaac

SEQ ID NO: 35648 - DNA, 80 bp, synthetic construct
  misc_feature 1..80: note = Artificially Synthesized Probe
  source 1..80: mol_type = other DNA
cttgtgctgctataaaggatactattggaacaattggcaaacttgaataatgtcatataataagaaatagtggccgggcg

SEQ ID NO: 35649 - DNA, 80 bp, synthetic construct
  misc_feature 1..80: note = Artificially Synthesized Probe
  source 1..80: mol_type = other DNA
aggagatcgaggctgcagtgagccataattgcaccactgcattccagcctgggtgacagagggagaccctgtctcaaaaa

SEQ ID NO: 35650 - DNA, 80 bp, synthetic construct
  misc_feature 1..80: note = Artificially Synthesized Probe
  source 1..80: mol_type = other DNA
actgttggaattgttggcaaccaacctaaggtggcctcaggtaggatggagctcttataagccttggttttggggttgga

SEQ ID NO: 35651 - DNA, 80 bp, synthetic construct
  misc_feature 1..80: note = Artificially Synthesized Probe
  source 1..80: mol_type = other DNA
cctcttagatttgttttgtatccttgtttaggaagaatctgtctttcttcatgacctaacctcatcttatttctgccatg

SEQ ID NO: 35652 - DNA, 80 bp, synthetic construct
  misc_feature 1..80: note = Artificially Synthesized Probe
  source 1..80: mol_type = other DNA
ggaataaacattgatatataagtatctgtttgaacctcagttttcactttttctgggtgtgtacccagaagcaaaataac

SEQ ID NO: 35653 - DNA, 80 bp, synthetic construct
  misc_feature 1..80: note = Artificially Synthesized Probe
  source 1..80: mol_type = other DNA
tgcttgtgggaaatcaacaggctgtgggtgtatgaatttgtttctgtattcttaacactattctgttggtctgtatgtct

SEQ ID NO: 35654 - DNA, 80 bp, synthetic construct
  misc_feature 1..80: note = Artificially Synthesized Probe
  source 1..80: mol_type = other DNA
gtctaattgctctggcaagaatttcttgtacattgttgaattgcagtggtgaaagtgggcatggttgtcttgttcctcat

SEQ ID NO: 35655 - DNA, 80 bp, synthetic construct
  misc_feature 1..80: note = Artificially Synthesized Probe
  source 1..80: mol_type = other DNA
cccataccaatagtattttgttttaaatttcagattctactggtttattgccaatatataggaaagtaattgatttttgt

SEQ ID NO: 35656 - DNA, 80 bp, synthetic construct
  misc_feature 1..80: note = Artificially Synthesized Probe
  source 1..80: mol_type = other DNA
agctttgtgataccgtctagtgttcttttcttttaacctgaagggcttcctttagcatttttctgtggagtaggctggtt

SEQ ID NO: 35657 - DNA, 80 bp, synthetic construct
  misc_feature 1..80: note = Artificially Synthesized Probe
  source 1..80: mol_type = other DNA
tctgcctgctcaaatctcctattgaatccttgtagtgaatttttcatttcatttattgtacttttcagctccagaatttt

SEQ ID NO: 35658 - DNA, 80 bp, synthetic construct
  misc_feature 1..80: note = Artificially Synthesized Probe
  source 1..80: mol_type = other DNA
caacttcttttcttatttcccctctcagatcttttctgatcgtgtatctcatcctaggcatacatgtgtctttctgaatt

SEQ ID NO: 35659 - DNA, 80 bp, synthetic construct
  misc_feature 1..80: note = Artificially Synthesized Probe
  source 1..80: mol_type = other DNA
ctttttattgttgatttctagggcctggcttgtgacttgcctatttatttcctttcctttccttttttttttatttgaga

SEQ ID NO: 35660 - DNA, 80 bp, synthetic construct
  misc_feature 1..80: note = Artificially Synthesized Probe
  source 1..80: mol_type = other DNA
aaactcttctaggaggggagatttactagtaattgagctcctactctgtgctgctttatagattccatttcctttactcc

SEQ ID NO: 35661 - DNA, 80 bp, synthetic construct
  misc_feature 1..80: note = Artificially Synthesized Probe
  source 1..80: mol_type = other DNA
ttgcagaactccccgaggacttgtgacttctccatgtattctgggtgtccagaagatagggctgtgtaaggaatggccct

SEQ ID NO: 35662 - DNA, 80 bp, synthetic construct
  misc_feature 1..80: note = Artificially Synthesized Probe
  source 1..80: mol_type = other DNA
tattgcttgacctattcctcactcctccctgctttgaagtagctattgtggtcgaatcagataacttccaggtcccctag

SEQ ID NO: 35663 - DNA, 80 bp, synthetic construct
  misc_feature 1..80: note = Artificially Synthesized Probe
  source 1..80: mol_type = other DNA
actgtggtgaagagggcagctttgtttgtttggtcaacttgctcattctttctctacagaaattgtcacataactgcctt

SEQ ID NO: 35664 - DNA, 80 bp, synthetic construct
  misc_feature 1..80: note = Artificially Synthesized Probe
  source 1..80: mol_type = other DNA
tctgcccattcacatcccattcctgccttttgcaatcatgaaacctgggaatccaaatagttggataacttagaataact

SEQ ID NO: 35665 - DNA, 80 bp, synthetic construct
  misc_feature 1..80: note = Artificially Synthesized Probe
  source 1..80: mol_type = other DNA
gttcctagaaacttgtatctcctaggaacaaggtcctttgtcttacatagtctgtcgttcatgacgttgacatttttgag

SEQ ID NO: 35666 - DNA, 80 bp, synthetic construct
  misc_feature 1..80: note = Artificially Synthesized Probe
  source 1..80: mol_type = other DNA
gcagtttctccaaggagtttctttaataggtatgtagtagtagtatatagtagtttcttagtttcttttagtaggtatgt

SEQ ID NO: 35667 - DNA, 80 bp, synthetic construct
  misc_feature 1..80: note = Artificially Synthesized Probe
  source 1..80: mol_type = other DNA
ctcccactactgatggctttcccttggctccagagatctgtaagcactgcttggacagtgaatcattatttcaaggtcaa

SEQ ID NO: 35668 - DNA, 80 bp, synthetic construct
  misc_feature 1..80: note = Artificially Synthesized Probe
  source 1..80: mol_type = other DNA
agggaaaaagaaaatacactgaattttgtaaatgggaaatacttgggtccactgagctgatagctgacaagtgtctgtct

SEQ ID NO: 35669 - DNA, 80 bp, synthetic construct
  misc_feature 1..80: note = Artificially Synthesized Probe
  source 1..80: mol_type = other DNA
tactgtcctgggtggtgaaaatactccctttatgtgtccttgggagcagaaagatgctcttcaaaaagtggtgcctgatg

SEQ ID NO: 35670 - DNA, 80 bp, synthetic construct
  misc_feature 1..80: note = Artificially Synthesized Probe
  source 1..80: mol_type = other DNA
gaagtgtgtagggtatgacttcttaaagaaagagtgaggaggtctaatgccaagagaaactttttaagacagtctggctc

SEQ ID NO: 35671 - DNA, 80 bp, synthetic construct
  misc_feature 1..80: note = Artificially Synthesized Probe
  source 1..80: mol_type = other DNA
ttcaaactgaactggaaacccattggagtagatatttagcctttttgtgtggcatggtagtctacaattctgtcagcatc

SEQ ID NO: 35672 - DNA, 80 bp, synthetic construct
  misc_feature 1..80: note = Artificially Synthesized Probe
  source 1..80: mol_type = other DNA
aaccttttattcaagagtatataaaatctgggaattcatatccatatccacagagggtgtgtggtttttggcagagatgt

SEQ ID NO: 35673 - DNA, 80 bp, synthetic construct
  misc_feature 1..80: note = Artificially Synthesized Probe
  source 1..80: mol_type = other DNA
tgctgatcctggtgttagatgccaatgataacgcccctatctttgacagaccggtttatgaagttaagatgtatgaaaat

SEQ ID NO: 35674 - DNA, 80 bp, synthetic construct
  misc_feature 1..80: note = Artificially Synthesized Probe
  source 1..80: mol_type = other DNA
ttgactttgaggacagtaacacttatgaaattcatgtagatgttacagataagggaaacccacctatggttggtcactgc

SEQ ID NO: 35675 - DNA, 80 bp, synthetic construct
  misc_feature 1..80: note = Artificially Synthesized Probe
  source 1..80: mol_type = other DNA
cgggcgagatcagtacgacgcgcgctctggatgagactgactcgccacgccagcgcctactggtgctggtgaaggaccat

SEQ ID NO: 35676 - DNA, 80 bp, synthetic construct
  misc_feature 1..80: note = Artificially Synthesized Probe
  source 1..80: mol_type = other DNA
aatatgtgtagcgtaccacagcttatactgccatagtagatttcaatgttcagtgattacagctttttctcaatagtgca

SEQ ID NO: 35677 - DNA, 80 bp, synthetic construct
  misc_feature 1..80: note = Artificially Synthesized Probe
  source 1..80: mol_type = other DNA
aatgcagagtttagaagtgtatttgttattttatcaaataggtttatgaaatatatacttccccctctgatattttgaaa

SEQ ID NO: 35678 - DNA, 80 bp, synthetic construct
  misc_feature 1..80: note = Artificially Synthesized Probe
  source 1..80: mol_type = other DNA
cgagtgccaccgcacccggccgaaaggtattttttttaacagaagaaaatcagattattcctagatcagaaagaagctcc

SEQ ID NO: 35679 - DNA, 80 bp, synthetic construct
  misc_feature 1..80: note = Artificially Synthesized Probe
  source 1..80: mol_type = other DNA
tactggaaaatgcaagagaaggtacactggttattagacttaaccccttggattttgacgagggttcaaaccgtcacatt

SEQ ID NO: 35680 - DNA, 80 bp, synthetic construct
  misc_feature 1..80: note = Artificially Synthesized Probe
  source 1..80: mol_type = other DNA
cgccctggaccaagagagcaaatctatccattgttggtaatcgctcggaatggggactcgctttcattgttggccacagc

SEQ ID NO: 35681 - DNA, 80 bp, synthetic construct
  misc_feature 1..80: note = Artificially Synthesized Probe
  source 1..80: mol_type = other DNA
tttgattgctttatttattttgcttttgctttttcttttgagatgctttatttaaagtacactggggccgggtgcggtag

SEQ ID NO: 35682 - DNA, 80 bp, synthetic construct
  misc_feature 1..80: note = Artificially Synthesized Probe
  source 1..80: mol_type = other DNA
atcgataagtttatctctcacaaatggtgatgagcagggttgaggcagcttcgtccacaaacaattttgtttcttcatga

SEQ ID NO: 35683 - DNA, 80 bp, synthetic construct
  misc_feature 1..80: note = Artificially Synthesized Probe
  source 1..80: mol_type = other DNA
agggaaaaccctgtcctactttatggtgctggaattctcttcatccatagctataggacaagagccaatattgatcagta

SEQ ID NO: 35684 - DNA, 80 bp, synthetic construct
  misc_feature 1..80: note = Artificially Synthesized Probe
  source 1..80: mol_type = other DNA
tgttggctgggaagctcataacaactgacaaatgatttgtgaccaaataactgtttttacttgactaagccatgatagag

SEQ ID NO: 35685 - DNA, 80 bp, synthetic construct
  misc_feature 1..80: note = Artificially Synthesized Probe
  source 1..80: mol_type = other DNA
tcatttccctacctcgcaagactccacattccatgtaacatcttcatccccaattcccataataaggtgattgaggatct

SEQ ID NO: 35686 - DNA, 80 bp, synthetic construct
  misc_feature 1..80: note = Artificially Synthesized Probe
  source 1..80: mol_type = other DNA
acagtaaagaatgagaactatagaaaatagatatgaaaatgcaagcccacagagatgagaatagatcatgtggaacataa

SEQ ID NO: 35687 - DNA, 80 bp, synthetic construct
  misc_feature 1..80: note = Artificially Synthesized Probe
  source 1..80: mol_type = other DNA
agaatctggtactgtaagtgtaaagaagcttattttggaagccaatttcgtatgcgatgtttggttttcagagaagggga

SEQ ID NO: 35688 - DNA, 80 bp, synthetic construct
  misc_feature 1..80: note = Artificially Synthesized Probe
  source 1..80: mol_type = other DNA
gggtcaatggaactttagattatgaagaaaacaagttttataaaattgaagtacaggctacagataaggggactccccca

SEQ ID NO: 35689 - DNA, 80 bp, synthetic construct
  misc_feature 1..80: note = Artificially Synthesized Probe
  source 1..80: mol_type = other DNA
ccatctgcgtggtgtccagcctcctggtactcacgctgctgctgtatacggcgctgtggtggtcggcaacgcccactgag

SEQ ID NO: 35690 - DNA, 80 bp, synthetic construct
  misc_feature 1..80: note = Artificially Synthesized Probe
  source 1..80: mol_type = other DNA
tcttttagcagagttttgccttgatatttccacattgttagatcaactggctttgtttttctaaagggaggaggtcttcc

SEQ ID NO: 35691 - DNA, 80 bp, synthetic construct
  misc_feature 1..80: note = Artificially Synthesized Probe
  source 1..80: mol_type = other DNA
tatagaggcataacataccatttggcacaatattcaaagagtctatgctgaagcctattcatagactttagatcgagagc

SEQ ID NO: 35692 - DNA, 80 bp, synthetic construct
  misc_feature 1..80: note = Artificially Synthesized Probe
  source 1..80: mol_type = other DNA
taaaattaaagttccttagcatgtatggtacattgaccacttttgaaaatgaaaaataggaaagaaacttggtgatgata

SEQ ID NO: 35693 - DNA, 80 bp, synthetic construct
  misc_feature 1..80: note = Artificially Synthesized Probe
  source 1..80: mol_type = other DNA
ttctctaaaatcttacgatggagtgcttgtgaaggttaaaagttattgaaacagcggaattgtaagctatataaggggag

SEQ ID NO: 35694 - DNA, 80 bp, synthetic construct
  misc_feature 1..80: note = Artificially Synthesized Probe
  source 1..80: mol_type = other DNA
attaacgacaacccgccggtgttcagagaaagggaacaaaaggtacctgtttctgaatctgcgcctctggactctcattt

SEQ ID NO: 35695 - DNA, 80 bp, synthetic construct
  misc_feature 1..80: note = Artificially Synthesized Probe
  source 1..80: mol_type = other DNA
ggtaccgtcattgccctgattagcgtgtcggatcgtgactctggagccaatggacaggtcatctgctcactgacacctca

SEQ ID NO: 35696 - DNA, 80 bp, synthetic construct
  misc_feature 1..80: note = Artificially Synthesized Probe
  source 1..80: mol_type = other DNA
aagacggacctcatggccttcagcccaagccttcagctgtctcgagaagattgtttaaatcctcccagtgaagtaagtta

SEQ ID NO: 35697 - DNA, 80 bp, synthetic construct
  misc_feature 1..80: note = Artificially Synthesized Probe
  source 1..80: mol_type = other DNA
ttaaccatctgtacgatacagtacagttggtaaccaactgtggctcaaaccagtttcagatgatcccaaacttatcatag

SEQ ID NO: 35698 - DNA, 80 bp, synthetic construct
  misc_feature 1..80: note = Artificially Synthesized Probe
  source 1..80: mol_type = other DNA
gctataacaaacgaacacaaactgggtgctgtaaaacagcaaaagtttattatttctcagtattggagaccagaagtcca

SEQ ID NO: 35699 - DNA, 80 bp, synthetic construct
  misc_feature 1..80: note = Artificially Synthesized Probe
  source 1..80: mol_type = other DNA
agcaattgaatttctgtttggtcacatctctcaatgtgtgaatcatctgaaagtgaactgatggaaatgaggttgagaat

SEQ ID NO: 35700 - DNA, 80 bp, synthetic construct
  misc_feature 1..80: note = Artificially Synthesized Probe
  source 1..80: mol_type = other DNA
caaaaccttagagcattgttgtggctaaattattgtgtttatgcacatacacacactcacatacaaaatcccacacatat

SEQ ID NO: 35701 - DNA, 80 bp, synthetic construct
  misc_feature 1..80: note = Artificially Synthesized Probe
  source 1..80: mol_type = other DNA
tccttccgcactaggaagccataaaaattgggccttgagagacagtttgaggtaaggcgttgtatatattgcagatagct

SEQ ID NO: 35702 - DNA, 80 bp, synthetic construct
  misc_feature 1..80: note = Artificially Synthesized Probe
  source 1..80: mol_type = other DNA
atattccaatggcgggtcattgtacccttttggtggaagtactagatgtaaatgataacgccccagaggttaccatcact

SEQ ID NO: 35703 - DNA, 80 bp, synthetic construct
  misc_feature 1..80: note = Artificially Synthesized Probe
  source 1..80: mol_type = other DNA
ccaccgagggcgcgtgcgcgccgggcaagcccactctagtgtgctccagcgcggcagggagttggtcgtactcgcagcag

SEQ ID NO: 35704 - DNA, 80 bp, synthetic construct
  misc_feature 1..80: note = Artificially Synthesized Probe
  source 1..80: mol_type = other DNA
tcctctaggcacatcagtgttcccctctcatatatcccatgaaaaatatcttgtgattctgctttcaattttttatttgc

SEQ ID NO: 35705 - DNA, 80 bp, synthetic construct
  misc_feature 1..80: note = Artificially Synthesized Probe
  source 1..80: mol_type = other DNA
ccatggtgtgcttatctattatctgcatcacaaatatgttttcctcctatattatttctattcatttgtttgtactaatt

SEQ ID NO: 35706 - DNA, 80 bp, synthetic construct
  misc_feature 1..80: note = Artificially Synthesized Probe
  source 1..80: mol_type = other DNA
gggtttcatcttgttagccaggatagtctcgaactcctgacctcgtgatccacctggctcggcctcccaaagtgctggga

SEQ ID NO: 35707 - DNA, 80 bp, synthetic construct
  misc_feature 1..80: note = Artificially Synthesized Probe
  source 1..80: mol_type = other DNA
cagtagttcttgataagaaacagttttgtcccctctaccccctacccaggagataatttggcaatgcctggatacatttt

SEQ ID NO: 35708 - DNA, 80 bp, synthetic construct
  misc_feature 1..80: note = Artificially Synthesized Probe
  source 1..80: mol_type = other DNA
cagttacgtagataatattttttcaggtattttcctgtttaatctaaattttcagttatatgctcatactttctacagaa

SEQ ID NO: 35709 - DNA, 80 bp, synthetic construct
  misc_feature 1..80: note = Artificially Synthesized Probe
  source 1..80: mol_type = other DNA
actgcacctgattgcaagcaagaaccactcagttgagtcagaaccaggagaggtaatattaagttgttttaagatattag

SEQ ID NO: 35710 - DNA, 80 bp, synthetic construct
  misc_feature 1..80: note = Artificially Synthesized Probe
  source 1..80: mol_type = other DNA
tattgtctttccatgttagaataatttgagagtttcctttagtccaaagatgctggtgaggaatgatttcaggttttgtt

SEQ ID NO: 35711 - DNA, 80 bp, synthetic construct
  misc_feature 1..80: note = Artificially Synthesized Probe
  source 1..80: mol_type = other DNA
aataaattaacggcactgtaaaaggacttgatggaaggagcctgtccctctcttatgcttttggctctgtcatgtgacga

SEQ ID NO: 35712 - DNA, 80 bp, synthetic construct
  misc_feature 1..80: note = Artificially Synthesized Probe
  source 1..80: mol_type = other DNA
aacctttccccatcctccttttccttcacccttcccagcctctgataagcacaatactacttccatgagctcaataaaat

SEQ ID NO: 35713 - DNA, 80 bp, synthetic construct
  misc_feature 1..80: note = Artificially Synthesized Probe
  source 1..80: mol_type = other DNA
ctcttgtatagaaacaacccagatccaaagtggccagaaagttactttaccttctgaatttgtggtctttttcagaatct

SEQ ID NO: 35714 - DNA, 80 bp, synthetic construct
  misc_feature 1..80: note = Artificially Synthesized Probe
  source 1..80: mol_type = other DNA
atatcagatttgcccataatccttttcttatgctcatttttatatgaaaagtgctcccccataattttagaagaaacaga

SEQ ID NO: 35715 - DNA, 80 bp, synthetic construct
  misc_feature 1..80: note = Artificially Synthesized Probe
  source 1..80: mol_type = other DNA
ctatattaattcacttgggataatggcctgcacctccattcaatgggctgcaaagggcatgatctttttctttctttatg

SEQ ID NO: 35716 - DNA, 80 bp, synthetic construct
  misc_feature 1..80: note = Artificially Synthesized Probe
  source 1..80: mol_type = other DNA
cttaagtgatccacctgccttggcctcccaaagtgctagtattacaggcatgagtcactgtgcccggccctttgcccatt

SEQ ID NO: 35717 - DNA, 80 bp, synthetic construct
  misc_feature 1..80: note = Artificially Synthesized Probe
  source 1..80: mol_type = other DNA
cccccctccccccaccccacaactgtccccagagtgtgatgttcccttccccttcctgtgtccatgtgttctcattgttc

SEQ ID NO: 35718 - DNA, 80 bp, synthetic construct
  misc_feature 1..80: note = Artificially Synthesized Probe
  source 1..80: mol_type = other DNA
gcctaggttttcttctagggtttttatggttttgggtctaacgtttaagtctttaatccatcttgaattaatttttgtat

SEQ ID NO: 35719 - DNA, 80 bp, synthetic construct
  misc_feature 1..80: note = Artificially Synthesized Probe
  source 1..80: mol_type = other DNA
tacatttattgatttgcatatattgcatcccagggatgaagcccacttgatcatggtggataagctttttgatgtgctgc

SEQ ID NO: 35720 - DNA, 80 bp, synthetic construct
  misc_feature 1..80: note = Artificially Synthesized Probe
  source 1..80: mol_type = other DNA
tttatttttagtagacacggagtttctccatgttggtcagactggtctcaaattcccagcctcaggtgatctgcccacct

SEQ ID NO: 35721 - DNA, 80 bp, synthetic construct
  misc_feature 1..80: note = Artificially Synthesized Probe
  source 1..80: mol_type = other DNA
tctagtttcattcctctgcatatggatatctagtttcccagcacagactgtcttttctcgagtttatgttcttggcacct

SEQ ID NO: 35722 - DNA, 80 bp, synthetic construct
  misc_feature 1..80: note = Artificially Synthesized Probe
  source 1..80: mol_type = other DNA
atctgcaaacaaggataatttgatttcttcctttctaatttggatgtcctttatgtcttctctctctctctctttctttt

SEQ ID NO: 35723 - DNA, 80 bp, synthetic construct
  misc_feature 1..80: note = Artificially Synthesized Probe
  source 1..80: mol_type = other DNA
ttgctggatcaaataatagctctacttctaaatctttaagaaatctccaaactgttttccatagtggttgtgctggttta

SEQ ID NO: 35724 - DNA, 80 bp, synthetic construct
  misc_feature 1..80: note = Artificially Synthesized Probe
  source 1..80: mol_type = other DNA
tttcaatgggtttttggggaacagtatttggttacatgaataactactttagtggtcattgctgagattttggtgcaccc

SEQ ID NO: 35725 - DNA, 80 bp, synthetic construct
  misc_feature 1..80: note = Artificially Synthesized Probe
  source 1..80: mol_type = other DNA
cacatgaggcttggcagttatcccagtaccatttcttgaataaggtgtcctttccacactttgtgtttgtatgctttgtt

SEQ ID NO: 35726 - DNA, 80 bp, synthetic construct
  misc_feature 1..80: note = Artificially Synthesized Probe
  source 1..80: mol_type = other DNA
attaaccatcacaagtcctccccttgtcaacttgaacccatacacacctcctgaaattatagataatcttcaaattaaga

SEQ ID NO: 35727 - DNA, 80 bp, synthetic construct
  misc_feature 1..80: note = Artificially Synthesized Probe
  source 1..80: mol_type = other DNA
gctgattcagagcatacacaaccttctggagaattttgccccagccctgcaaagtattgtcacctagttgacattgtaat

SEQ ID NO: 35728 - DNA, 80 bp, synthetic construct
  misc_feature 1..80: note = Artificially Synthesized Probe
  source 1..80: mol_type = other DNA
caaatatcttcacagtttttgaccactcagagaggtccattcacataccttttccccaaatttctttgtcaccaattttc

SEQ ID NO: 35729 - DNA, 80 bp, synthetic construct
  misc_feature 1..80: note = Artificially Synthesized Probe
  source 1..80: mol_type = other DNA
tctcactcactgggtccaatcagcaaaatgtcatcaaggtaatgaaccagtgtgatatcttatggaagggaaaatcaatc

SEQ ID NO: 35730 - DNA, 80 bp, synthetic construct
  misc_feature 1..80: note = Artificially Synthesized Probe
  source 1..80: mol_type = other DNA
taagtgatcttttaacagcgtaaattgttgtcaaggggaaccagcctccccttcatttaagggattctaggtctgtaaac

SEQ ID NO: 35731 - DNA, 80 bp, synthetic construct
  misc_feature 1..80: note = Artificially Synthesized Probe
  source 1..80: mol_type = other DNA
cccaagctgcaacattaaatgcagaatccctgcttagtgggcccaaatcaataaattcagcctgatccaatgccttggat

SEQ ID NO: 35732 - DNA, 80 bp, synthetic construct
  misc_feature 1..80: note = Artificially Synthesized Probe
  source 1..80: mol_type = other DNA
tcgtgccaaggactatcagtgttctccatactattagaagtacagtccttagcatttttgggtctaatcatattaagcag

SEQ ID NO: 35733 - DNA, 80 bp, synthetic construct
  misc_feature 1..80: note = Artificially Synthesized Probe
  source 1..80: mol_type = other DNA
tcatccttgtatccctgggataaatcccacttggtcttttaactgtattgttgaattcagtttgctagtattttgttgag

SEQ ID NO: 35734 - DNA, 80 bp, synthetic construct
  misc_feature 1..80: note = Artificially Synthesized Probe
  source 1..80: mol_type = other DNA
ctttaagatgtatagttaggttatttaaaatgaggttttcattcttttccaatgtaggcaattacagctacaaatttccc

SEQ ID NO: 35735 - DNA, 80 bp, synthetic construct
  misc_feature 1..80: note = Artificially Synthesized Probe
  source 1..80: mol_type = other DNA
aagactaataaaagttctacactttaactgtatcctcctgcttttaactttgtgttgtttctctgtgtcttattgtacta

SEQ ID NO: 35736 - DNA, 80 bp, synthetic construct
  misc_feature 1..80: note = Artificially Synthesized Probe
  source 1..80: mol_type = other DNA
attgccaggcaaaagcacttgttcttttcccttactttctgtcaaacagtctctttctgtctctctctctctctctctct

SEQ ID NO: 35737 - DNA, 80 bp, synthetic construct
  misc_feature 1..80: note = Artificially Synthesized Probe
  source 1..80: mol_type = other DNA
caagcactcccttagctgccccagctgatgacttcctaggtcatgtgccacccctatccctctggttctgagcccagccc

SEQ ID NO: 35738 - DNA, 80 bp, synthetic construct
  misc_feature 1..80: note = Artificially Synthesized Probe
  source 1..80: mol_type = other DNA
tctctaacctgtcccattggtctatgtgtctgtttttgtattagtaccatgttgttttggttactgtagccttgcagtat

SEQ ID NO: 35739 - DNA, 80 bp, synthetic construct
  misc_feature 1..80: note = Artificially Synthesized Probe
  source 1..80: mol_type = other DNA
gggcatccttgtcttattccaagtctcaaggggaatgctttggatggtaccaatccttttaaacttattgaggattgttt

SEQ ID NO: 35740 - DNA, 80 bp, synthetic construct
  misc_feature 1..80: note = Artificially Synthesized Probe
  source 1..80: mol_type = other DNA
agacaacacatagttggatgttgttttcctaaaaactctagactgacaattctgccttttgattgggttctttaatgtat

SEQ ID NO: 35741 - DNA, 80 bp, synthetic construct
  misc_feature 1..80: note = Artificially Synthesized Probe
  source 1..80: mol_type = other DNA
aatagagttctacatactgttttatgcaattcgttagactcaggttttctatttcaccttcgaagtgtggcccttaggcc

SEQ ID NO: 35742 - DNA, 80 bp, synthetic construct
  misc_feature 1..80: note = Artificially Synthesized Probe
  source 1..80: mol_type = other DNA
ctgtgctgcagacaaaaattttcttcaatggtgtctgaaaagggaggcctgcaaccactaccaaaccactctacctgaga

SEQ ID NO: 35743 - DNA, 80 bp, synthetic construct
  misc_feature 1..80: note = Artificially Synthesized Probe
  source 1..80: mol_type = other DNA
agatgcaaaaccaaagactccttgttttggattaaaaagatctaggtacagaggctgagggcagaactctctcattatcc

SEQ ID NO: 35744 - DNA, 80 bp, synthetic construct
  misc_feature 1..80: note = Artificially Synthesized Probe
  source 1..80: mol_type = other DNA
agaataaaagagctaggtctcctcatgtcagcacttatttgaccaatgggagtatgattttaagtttttagggtcacact

SEQ ID NO: 35745 - DNA, 80 bp, synthetic construct
  misc_feature 1..80: note = Artificially Synthesized Probe
  source 1..80: mol_type = other DNA
ctggtataattggaggcatggctgcagacctaaaagttcggtacatctttacagttgtatttcatctgtttaaggcagaa

SEQ ID NO: 35746 - DNA, 80 bp, synthetic construct
  misc_feature 1..80: note = Artificially Synthesized Probe
  source 1..80: mol_type = other DNA
tacttttaggcaggtttctaccagaaaatatgtcctggaaactttaattcttgatctgtgttcagattttgcctttcaaa

SEQ ID NO: 35747 - DNA, 80 bp, synthetic construct
  misc_feature 1..80: note = Artificially Synthesized Probe
  source 1..80: mol_type = other DNA
tttctagttattgctattgactggtttataacctcctctttcacccagatcgtcaagggccgtttgcaaagcactcccaa

SEQ ID NO: 35748 - DNA, 80 bp, synthetic construct
  misc_feature 1..80: note = Artificially Synthesized Probe
  source 1..80: mol_type = other DNA
gcggaactttcgcttcctttccagccaccgcgagctctacttcggggtggatctacccagcggcaatttggtggtcagag

SEQ ID NO: 35749 - DNA, 80 bp, synthetic construct
  misc_feature 1..80: note = Artificially Synthesized Probe
  source 1..80: mol_type = other DNA
ttgctctctttagtgtaaaggatgaagacctcgattctaatggtagggtcatttgtggcatgtctagtgcaggccctttt

SEQ ID NO: 35750 - DNA, 80 bp, synthetic construct
  misc_feature 1..80: note = Artificially Synthesized Probe
  source 1..80: mol_type = other DNA
cccagaacttgtatttagtaattgccttggcttgtatttcctttttatttctggggtgcttacttttcttcgtgtgtacc

SEQ ID NO: 35751 - DNA, 80 bp, synthetic construct
  misc_feature 1..80: note = Artificially Synthesized Probe
  source 1..80: mol_type = other DNA
gggagaaagggaacataagagaacatttgagtgaggaggaaggagtcagagaaggctttgtgatagagatcacagattta

SEQ ID NO: 35752 - DNA, 80 bp, synthetic construct
  misc_feature 1..80: note = Artificially Synthesized Probe
  source 1..80: mol_type = other DNA
caagagaaggaggtgtgtagaaattaaggaaggaaaatgaagcattccttgttttactattctaggcaataaggggaaaa

SEQ ID NO: 35753 - DNA, 80 bp, synthetic construct
  misc_feature 1..80: note = Artificially Synthesized Probe
  source 1..80: mol_type = other DNA
tagagatatactgttcatatgtgcaggaatattgtaccatcccattcattcagttgaacagtctttttccatcattgttg

SEQ ID NO: 35754 - DNA, 80 bp, synthetic construct
  misc_feature 1..80: note = Artificially Synthesized Probe
  source 1..80: mol_type = other DNA
ttttgccagggtatataggaaataggatatctcctctttgcaatgtcatttgttaacagtagtagaatgtttgtggcatt

SEQ ID NO: 35755 - DNA, 80 bp, synthetic construct
  misc_feature 1..80: note = Artificially Synthesized Probe
  source 1..80: mol_type = other DNA
tgtagagaaagataaacactttatttctaacccatcccaaattccttggctgttcctagagccatctggttaccatctac

SEQ ID NO: 35756 - DNA, 80 bp, synthetic construct
  misc_feature 1..80: note = Artificially Synthesized Probe
  source 1..80: mol_type = other DNA
ctcataaacacccaaagggtccatagaccacacttcgagagctaccgttctaattctatcatttcttcttttttttaatt

SEQ ID NO: 35757 - DNA, 80 bp, synthetic construct
  misc_feature 1..80: note = Artificially Synthesized Probe
  source 1..80: mol_type = other DNA
gaaagatgatacttagagatataatctcaacaacaggtgtgcttattgctgctgggtcagttgctgtttctaggtatctt

SEQ ID NO: 35758 - DNA, 80 bp, synthetic construct
  misc_feature 1..80: note = Artificially Synthesized Probe
  source 1..80: mol_type = other DNA
aacattgctatccaatagaactttctgacatgctataaattttctctatctgcatatatggaatgtgtagctactgagca

SEQ ID NO: 35759 - DNA, 80 bp, synthetic construct
  misc_feature 1..80: note = Artificially Synthesized Probe
  source 1..80: mol_type = other DNA
accgattaacaaggtatattcttccatttatcttttttttttttttttgagacggagtctcgctctgtcgcccaggctgg

SEQ ID NO: 35760 - DNA, 80 bp, synthetic construct
  misc_feature 1..80: note = Artificially Synthesized Probe
  source 1..80: mol_type = other DNA
agtgctgggattacaggcataggccaccatgcctggtcttttaaaaactttctaatcacatagttttcttgctttctgtc

SEQ ID NO: 35761 - DNA, 80 bp, synthetic construct
  misc_feature 1..80: note = Artificially Synthesized Probe
  source 1..80: mol_type = other DNA
ggaaagttgatgatcaaggtcctggcagatttgtgtctggtaatggcccactccctggttcataaaacagaatgtcacct

SEQ ID NO: 35762 - DNA, 80 bp, synthetic construct
  misc_feature 1..80: note = Artificially Synthesized Probe
  source 1..80: mol_type = other DNA
attggcatttatttcattttggtacattaaagttacctcctcaatatcttctgggttccactgttgtctcattgtgctgc

SEQ ID NO: 35763 - DNA, 80 bp, synthetic construct
  misc_feature 1..80: note = Artificially Synthesized Probe
  source 1..80: mol_type = other DNA
tccagcttaatgtagtttggaggccccataagactccccatcttgaacatcctgcttctttttttttctttcttcctttc

SEQ ID NO: 35764 - DNA, 80 bp, synthetic construct
  misc_feature 1..80: note = Artificially Synthesized Probe
  source 1..80: mol_type = other DNA
gtaggatgactgctgtaaataatttaggctgccattacctgatattccctatcatagagttctatcaccagtgactagca

SEQ ID NO: 35765 - DNA, 80 bp, synthetic construct
  misc_feature 1..80: note = Artificially Synthesized Probe
  source 1..80: mol_type = other DNA
atttttaggcagaatattacaaaggcatgttttccacaaactagttggatttggccctgtgtcaataaaaattccagtaa

SEQ ID NO: 35766 - DNA, 80 bp, synthetic construct
  misc_feature 1..80: note = Artificially Synthesized Probe
  source 1..80: mol_type = other DNA
gtcaaaatattgtggaacacatttaaaggtctgagagaatgaaagtccacagtctaaaagcagtaggagatgtaggaaaa

SEQ ID NO: 35767 - DNA, 80 bp, synthetic construct
  misc_feature 1..80: note = Artificially Synthesized Probe
  source 1..80: mol_type = other DNA
gtaagtctgagcatttacatggaaaaaatgctgggtttattcctcctgttattgtattttacaagtctgtcgagggtcca

SEQ ID NO: 35768 - DNA, 80 bp, synthetic construct
  misc_feature 1..80: note = Artificially Synthesized Probe
  source 1..80: mol_type = other DNA
atcaaaatttcaatgaagtttttacagaaatataaaaaacttccctaaaatttgcatggaaccacaaaacaccccaaata

SEQ ID NO: 35769 - DNA, 80 bp, synthetic construct
  misc_feature 1..80: note = Artificially Synthesized Probe
  source 1..80: mol_type = other DNA
tgcacacggttggtaggaatgtaaattagtacaatcatagaaaacaatatggaggttactcaaaaattgagactaaaaca

SEQ ID NO: 35770 - DNA, 80 bp, synthetic construct
  misc_feature 1..80: note = Artificially Synthesized Probe
  source 1..80: mol_type = other DNA
cattatcttgacatctttgtaaaaagtcggttgaccataaatgtgtgggcttaattctggactctatttcactcctttga

SEQ ID NO: 35771 - DNA, 80 bp, synthetic construct
  misc_feature 1..80: note = Artificially Synthesized Probe
  source 1..80: mol_type = other DNA
gtgttccttcctctattttctgaaaggttgtgtaatattggtgttatttcttccttcagtgaaacattctgtgccaggga

SEQ ID NO: 35772 - DNA, 80 bp, synthetic construct
  misc_feature 1..80: note = Artificially Synthesized Probe
  source 1..80: mol_type = other DNA
tgttatccagattttctgtgtctttatttttttgtctagttgtcctatcaattgctcagagagcagtgttaaaaatcacc

SEQ ID NO: 35773 - DNA, 80 bp, synthetic construct
  misc_feature 1..80: note = Artificially Synthesized Probe
  source 1..80: mol_type = other DNA
actatttagctcttcctgtgccattgcttatgctatagttttcatttgtattaaatctcatacaatacaaaacccacaag

SEQ ID NO: 35774 - DNA, 80 bp, synthetic construct
  misc_feature 1..80: note = Artificially Synthesized Probe
  source 1..80: mol_type = other DNA
ttaaagtcattgtccgctaattcccacatctgtgtcatctcaggtttggattcttgatggtctttacctttaggaatgca

SEQ ID NO: 35775 - DNA, 80 bp, synthetic construct
  misc_feature 1..80: note = Artificially Synthesized Probe
  source 1..80: mol_type = other DNA
ccttgggaagctccactcctgtggctttgtggggttcagttcctgcagctgctctcatgggttggtgttgaatgcctgca

SEQ ID NO: 35776 - DNA, 80 bp, synthetic construct
  misc_feature 1..80: note = Artificially Synthesized Probe
  source 1..80: mol_type = other DNA
gagaacaacattaagggggaaatccacccccatgatccaatcacctctcacaggccccatctccaacattggggattaca

SEQ ID NO: 35777 - DNA, 80 bp, synthetic construct
  misc_feature 1..80: note = Artificially Synthesized Probe
  source 1..80: mol_type = other DNA
agttgttatctctggaagggtctgtttattatgagcttactttgatctactagactgagcttcagacattgtgttttgaa

SEQ ID NO: 35778 - DNA, 80 bp, synthetic construct
  misc_feature 1..80: note = Artificially Synthesized Probe
  source 1..80: mol_type = other DNA
taatgggcttgtttgggtttttcttgtaaatttgtttaagttccttgtagactctggatattagacttttgtcagatgga

SEQ ID NO: 35779 - DNA, 80 bp, synthetic construct
  misc_feature 1..80: note = Artificially Synthesized Probe
  source 1..80: mol_type = other DNA
ccactgtgatttccttgagcagtggtttgtcattctccttgaagaggtccttcacttccctttttagctgtattcctagg

SEQ ID NO: 35780 - DNA, 80 bp, synthetic construct
  misc_feature 1..80: note = Artificially Synthesized Probe
  source 1..80: mol_type = other DNA
tctggtcctgggctttgtttgcttggtgggctatttattattgcttcaatttgtaatttaatatttttaaatcttgggtt

SEQ ID NO: 35781 - DNA, 80 bp, synthetic construct
  misc_feature 1..80: note = Artificially Synthesized Probe
  source 1..80: mol_type = other DNA
atgtagaattcagtattatccttggtttcagacattcagtggggatcttagaaagtattctctgtggaaaaggagggact

SEQ ID NO: 35782 - DNA, 80 bp, synthetic construct
  misc_feature 1..80: note = Artificially Synthesized Probe
  source 1..80: mol_type = other DNA
tgagattttaaatgagcttatgataattggatcaaaggaatactagtccagcttgagagtactgcagaaaaccaatcaca

SEQ ID NO: 35783 - DNA, 80 bp, synthetic construct
  misc_feature 1..80: note = Artificially Synthesized Probe
  source 1..80: mol_type = other DNA
catcactgagcccggtggttgaagctgcaataagttttgattatgctactgcactccagcgggacaactgagtgagaccc

SEQ ID NO: 35784 - DNA, 80 bp, synthetic construct
  misc_feature 1..80: note = Artificially Synthesized Probe
  source 1..80: mol_type = other DNA
gtttgtttgttccaagcagcaaacataatgggtataggaaagagaaactgtggccttcatatagactgagcttaggaaaa

SEQ ID NO: 35785 - DNA, 80 bp, synthetic construct
  misc_feature 1..80: note = Artificially Synthesized Probe
  source 1..80: mol_type = other DNA
catgttatttaaacaattacaaaatcacctaactacactgtcttgcagctgcctttctttttttgtcttgtccacgtgag

SEQ ID NO: 35786 - DNA, 80 bp, synthetic construct
  misc_feature 1..80: note = Artificially Synthesized Probe
  source 1..80: mol_type = other DNA
atattctatgattcttgttaggccatctcaattgagaatactgataaagaagtaaaactccccccaatactggctagttt

SEQ ID NO: 35787 - DNA, 80 bp, synthetic construct
  misc_feature 1..80: note = Artificially Synthesized Probe
  source 1..80: mol_type = other DNA
ttacagatatgctgtagactgtgaaaatgaaaaaaaaaacctcgtgtttagagtagacactgtttgatggattaggtagg

SEQ ID NO: 35788 - DNA, 80 bp, synthetic construct
  misc_feature 1..80: note = Artificially Synthesized Probe
  source 1..80: mol_type = other DNA
gtaaggttggcaggagcctcagtataatggtgtgaggaacgaaatcattatagtgccaaatagagtataccatctcttta

SEQ ID NO: 35789 - DNA, 80 bp, synthetic construct
  misc_feature 1..80: note = Artificially Synthesized Probe
  source 1..80: mol_type = other DNA
aagcatgccaaatgtcaggtctcactctgactttgttccagtccatagctagaaaatgacccatagaggaagatctacag

SEQ ID NO: 35790 - DNA, 80 bp, synthetic construct
  misc_feature 1..80: note = Artificially Synthesized Probe
  source 1..80: mol_type = other DNA
taccagattttccccattgtcgccaaaatgggtcaaataatagatttgcctacagcttcatggagactatttttttaaac

SEQ ID NO: 35791 - DNA, 80 bp, synthetic construct
  misc_feature 1..80: note = Artificially Synthesized Probe
  source 1..80: mol_type = other DNA
cggcgcgctcgtgggcaacgtggctcgcgcgctggggcttgagctgcggcgcttggggccgggttgcttgcgcatcaacc

SEQ ID NO: 35792 - DNA, 80 bp, synthetic construct
  misc_feature 1..80: note = Artificially Synthesized Probe
  source 1..80: mol_type = other DNA
actgaaggttgagatctctgacatcaatgacaatccaccaagcttcctggaggactcctattccatctacatacaggaga

SEQ ID NO: 35793 - DNA, 80 bp, synthetic construct
  misc_feature 1..80: note = Artificially Synthesized Probe
  source 1..80: mol_type = other DNA
tggatagggtttccaaaatcctccctgacactcagaggcatgttaagagccctcggacatactctgaaattaccctttat

SEQ ID NO: 35794 - DNA, 80 bp, synthetic construct
  misc_feature 1..80: note = Artificially Synthesized Probe
  source 1..80: mol_type = other DNA
cagatttgtagagaaacaggacaggccttggaatagggattatgttttagggagtaatgttatgagactcaaggagaaat

SEQ ID NO: 35795 - DNA, 80 bp, synthetic construct
  misc_feature 1..80: note = Artificially Synthesized Probe
  source 1..80: mol_type = other DNA
tgtgtgtgtgtttgtgttgtgtgttcgtctccatatgtatgcttgaaataacagagatatgctttgtgatacttaaaact

SEQ ID NO: 35796 - DNA, 80 bp, synthetic construct
  misc_feature 1..80: note = Artificially Synthesized Probe
  source 1..80: mol_type = other DNA
ttggaaatccagtgaagaaccccaagatctacagctccagaaatttttgcagttatagggagagagtgtcacattgttac

SEQ ID NO: 35797 - DNA, 80 bp, synthetic construct
  misc_feature 1..80: note = Artificially Synthesized Probe
  source 1..80: mol_type = other DNA
cgccaccgtgtctgactagtttttaggtgttttttttttttggaagagatgggggtctcactatgttgcacatgctgtta

SEQ ID NO: 35798 - DNA, 80 bp, synthetic construct
  misc_feature 1..80: note = Artificially Synthesized Probe
  source 1..80: mol_type = other DNA
ccctaattccaggtatagtgacctgaaagagttaattcttctttcagtggcacctacttttatttcccccagcactgatt

SEQ ID NO: 35799 - DNA, 80 bp, synthetic construct
  misc_feature 1..80: note = Artificially Synthesized Probe
  source 1..80: mol_type = other DNA
tgctaacctgaaaactatacaagggtttttctttcaagaattttaacttgacaaatgcaaaggaatatccaacattgcaa

SEQ ID NO: 35800 - DNA, 80 bp, synthetic construct
  misc_feature 1..80: note = Artificially Synthesized Probe
  source 1..80: mol_type = other DNA
tgatctccctttcttaaagccaactgtgctacatagcataatgtaatcatgggaataagatccatcacaatcacagtctt

SEQ ID NO: 35801 - DNA, 80 bp, synthetic construct
  misc_feature 1..80: note = Artificially Synthesized Probe
  source 1..80: mol_type = other DNA
gtgatagtaatatatgtcttactgtgtcagatatatcagtagtcaacttttcaacttgaatttttccaagtttaatcaag

SEQ ID NO: 35802 - DNA, 80 bp, synthetic construct
  misc_feature 1..80: note = Artificially Synthesized Probe
  source 1..80: mol_type = other DNA
ttccctgcctgatcttactgccataagaaatcttgtaactgtgattctgtcaaatgaatctaagaaggatgttgttgctg

SEQ ID NO: 35803 - DNA, 80 bp, synthetic construct
  misc_feature 1..80: note = Artificially Synthesized Probe
  source 1..80: mol_type = other DNA
atattttcctctttgttctcccccttcagactgagagtttgtagagagagggcaacagatcttttcaatacacaactaat

SEQ ID NO: 35804 - DNA, 80 bp, synthetic construct
  misc_feature 1..80: note = Artificially Synthesized Probe
  source 1..80: mol_type = other DNA
cttggtatggctcagataaactgcatctccataggccagaagcagctgtcaaaactaaaaagctttaggtactttgccag

SEQ ID NO: 35805 - DNA, 80 bp, synthetic construct
  misc_feature 1..80: note = Artificially Synthesized Probe
  source 1..80: mol_type = other DNA
ctttctctactttgtctctctgacagtaattgattaactaccattatttctggaggtgatccagtatccatgccatgggg

SEQ ID NO: 35806 - DNA, 80 bp, synthetic construct
  misc_feature 1..80: note = Artificially Synthesized Probe
  source 1..80: mol_type = other DNA
aaaaaaagccaaatgtgctcctattcgggtttcaattaagatattatgagatttgagtagggtaagaaataaaataaaaa

SEQ ID NO: 35807 - DNA, 80 bp, synthetic construct
  misc_feature 1..80: note = Artificially Synthesized Probe
  source 1..80: mol_type = other DNA
attttgatgagggttttcttggacattttctcttaggatcccacttatttcttccttcctttcttccttcctcccttcca

SEQ ID NO: 35808 - DNA, 80 bp, synthetic construct
  misc_feature 1..80: note = Artificially Synthesized Probe
  source 1..80: mol_type = other DNA
agagctggggtctctccattctttcttggtttctggaaagtgatcagatgacctacttttgtaagatcaggaatgttgat

SEQ ID NO: 35809 - DNA, 80 bp, synthetic construct
  misc_feature 1..80: note = Artificially Synthesized Probe
  source 1..80: mol_type = other DNA
tattaagccataatatgcctagacactgtgccaagtacattgtatgtgtggtctcatttattccttaagtcaagcttgca

SEQ ID NO: 35810 - DNA, 80 bp, synthetic construct
  misc_feature 1..80: note = Artificially Synthesized Probe
  source 1..80: mol_type = other DNA
attggtgatgctggttggtgtgtattcctaggcaaatgtggaataggaaccatgtattgatatttcatacatctggccaa

SEQ ID NO: 35811 - DNA, 80 bp, synthetic construct
  misc_feature 1..80: note = Artificially Synthesized Probe
  source 1..80: mol_type = other DNA
ctcttttttctttctggactacttttctgcaatctatgatatagtgttggctgatagcctggtggccagaattcagtagt

SEQ ID NO: 35812 - DNA, 80 bp, synthetic construct
  misc_feature 1..80: note = Artificially Synthesized Probe
  source 1..80: mol_type = other DNA
aggatcaacaagggcatcaccaagtaatgttttctgcaggataaacaagtcaggcattaaattggttaatcctgattact

SEQ ID NO: 35813 - DNA, 80 bp, synthetic construct
  misc_feature 1..80: note = Artificially Synthesized Probe
  source 1..80: mol_type = other DNA
ttaggtagcggaagccactaaggcagtgagtcttagttagagaactttggtttagacaatggttctcaaaggggcagcaa

SEQ ID NO: 35814 - DNA, 80 bp, synthetic construct
  misc_feature 1..80: note = Artificially Synthesized Probe
  source 1..80: mol_type = other DNA
agactccatggagactccatctctgatccttccccagaaagaaagcatgattcttaagttttttagaatctgtttaggag

SEQ ID NO: 35815 - DNA, 80 bp, synthetic construct
  misc_feature 1..80: note = Artificially Synthesized Probe
  source 1..80: mol_type = other DNA
taacattttagagggtgtagtgaggagaatagaacaacactgttctcttaggctgcagtttccttcaagccccacgatgg

SEQ ID NO: 35816 - DNA, 80 bp, synthetic construct
  misc_feature 1..80: note = Artificially Synthesized Probe
  source 1..80: mol_type = other DNA
atgaaagtctgtcctagtgacagcaagggtctttcatggcaatattttaaaagaaactctgcccagatttcaaaggaacg

SEQ ID NO: 35817 - DNA, 80 bp, synthetic construct
  misc_feature 1..80: note = Artificially Synthesized Probe
  source 1..80: mol_type = other DNA
tgttgctgtaggtggtatcatgtatcaagctgaatagtgaggtgacattccccaagtcttctctcttgtcttttttgact

SEQ ID NO: 35818 - DNA, 80 bp, synthetic construct
  misc_feature 1..80: note = Artificially Synthesized Probe
  source 1..80: mol_type = other DNA
ccactatataacaaggatccactttcctttagtttccaataacaggctccttatttctacctgagccctcactggcagca

SEQ ID NO: 35819 - DNA, 80 bp, synthetic construct
  misc_feature 1..80: note = Artificially Synthesized Probe
  source 1..80: mol_type = other DNA
cattacattattgtgttctggacttagagatattgttctgccccaggtctaagaatattgttccaagagttgggagcagg

SEQ ID NO: 35820 - DNA, 80 bp, synthetic construct
  misc_feature 1..80: note = Artificially Synthesized Probe
  source 1..80: mol_type = other DNA
tcccagccgggtccctgaaactccatcattaaccaccttcatcagcatttctcttttaaaatccttattcattcctgttc

SEQ ID NO: 35821 - DNA, 80 bp, synthetic construct
  misc_feature 1..80: note = Artificially Synthesized Probe
  source 1..80: mol_type = other DNA
aatatgatggaaatattacattgtcatgtgataagggcgacaataatgccctacgtaggtagggtcaacgaaggggaagg

SEQ ID NO: 35822 - DNA, 80 bp, synthetic construct
  misc_feature 1..80: note = Artificially Synthesized Probe
  source 1..80: mol_type = other DNA
agggtacttgaatacaagccctttgataccaaaacagccagtcggataccaagacactttctaagtgaactaacaggtga

SEQ ID NO: 35823 - DNA, 80 bp, synthetic construct
  misc_feature 1..80: note = Artificially Synthesized Probe
  source 1..80: mol_type = other DNA
gggttctcccattatcttgccttccttatactgcaatgtgctgacagcacctccattttataccctcaatgcaaggatat

SEQ ID NO: 35824 - DNA, 80 bp, synthetic construct
  misc_feature 1..80: note = Artificially Synthesized Probe
  source 1..80: mol_type = other DNA
aaatgagtagtgcctcactccctacatccaatcatgctttccaaaagtaaccactaccaataatttagcgtgcatcttca

SEQ ID NO: 35825 - DNA, 80 bp, synthetic construct
  misc_feature 1..80: note = Artificially Synthesized Probe
  source 1..80: mol_type = other DNA
aaaatatcaaattggcaaattggcattcacgtacctgtggttggactgcacttgttacatacttccctctgagccttcca

SEQ ID NO: 35826 - DNA, 80 bp, synthetic construct
  misc_feature 1..80: note = Artificially Synthesized Probe
  source 1..80: mol_type = other DNA
atccctaattcctaatttaatgtctaatttattgtaaataagttttttttttttgagacagagttttgctcttgttgccc

SEQ ID NO: 35827 - DNA, 80 bp, synthetic construct
  misc_feature 1..80: note = Artificially Synthesized Probe
  source 1..80: mol_type = other DNA
caacgaataagtggtgaagcagattccaactcaagtctatgttacccaagaacctacattttaagcattttgttaccccc

SEQ ID NO: 35828 - DNA, 80 bp, synthetic construct
  misc_feature 1..80: note = Artificially Synthesized Probe
  source 1..80: mol_type = other DNA
tatatatatatatatttttttttttttttttttttttgagacagagttttgctcttgttgcccaagctggagtgcaatgg

SEQ ID NO: 35829 - DNA, 80 bp, synthetic construct
  misc_feature 1..80: note = Artificially Synthesized Probe
  source 1..80: mol_type = other DNA
ataatttacatgatgtagccaggtttaagcctactattctgattacagagcctaagatcctacagagaacagggagtata

SEQ ID NO: 35830 - DNA, 80 bp, synthetic construct
  misc_feature 1..80: note = Artificially Synthesized Probe
  source 1..80: mol_type = other DNA
acatttgtataacgctttagcattttcaaaggatgaccttgttatacagctcaggatctgagtctcctagctggagtcag

SEQ ID NO: 35831 - DNA, 80 bp, synthetic construct
  misc_feature 1..80: note = Artificially Synthesized Probe
  source 1..80: mol_type = other DNA
ttcgagtgattcttatgcctcagcctcccaagtagatgaaattacaggcgtgcaccaccacagtctcgctaatttttata

SEQ ID NO: 35832 - DNA, 80 bp, synthetic construct
  misc_feature 1..80: note = Artificially Synthesized Probe
  source 1..80: mol_type = other DNA
tcttccgttttcatcttcttcaaaagggagtatctccatgattctgccccaaaggcatgacattttataggcaaagccag

SEQ ID NO: 35833 - DNA, 80 bp, synthetic construct
  misc_feature 1..80: note = Artificially Synthesized Probe
  source 1..80: mol_type = other DNA
tgctaggcactggtgatacattggtgaataaacagatacattttttgcctttgtgaatcttacagtggtagagaataata

SEQ ID NO: 35834 - DNA, 80 bp, synthetic construct
  misc_feature 1..80: note = Artificially Synthesized Probe
  source 1..80: mol_type = other DNA
caattccaaagagtgtttgaggatctgaaagaaggcctgtatggttggagtataatagtaagagggagatttgtagatga

SEQ ID NO: 35835 - DNA, 80 bp, synthetic construct
  misc_feature 1..80: note = Artificially Synthesized Probe
  source 1..80: mol_type = other DNA
tttcagatttcttcagtttgggatgcccatgagatttccaactggggataccagataggcagttatacatgagattggag

SEQ ID NO: 35836 - DNA, 80 bp, synthetic construct
  misc_feature 1..80: note = Artificially Synthesized Probe
  source 1..80: mol_type = other DNA
gggtccagtccatctaagaacttattggggttattctacatgacaaagaactcatgagaataagtgtttcaagaagggga

SEQ ID NO: 35837 - DNA, 80 bp, synthetic construct
  misc_feature 1..80: note = Artificially Synthesized Probe
  source 1..80: mol_type = other DNA
tagccaaagtttaatctagacactaaaaggagcatattttgcctttaggctctgtatttcccatcccgttcccagtcaag

SEQ ID NO: 35838 - DNA, 80 bp, synthetic construct
  misc_feature 1..80: note = Artificially Synthesized Probe
  source 1..80: mol_type = other DNA
gtgtggcatcaagagcatgtgttgaccctgttaatgatttgtaatgttttgtctttcagaaccagaggcaggagaagtgt

SEQ ID NO: 35839 - DNA, 80 bp, synthetic construct
  misc_feature 1..80: note = Artificially Synthesized Probe
  source 1..80: mol_type = other DNA
gcggaagttatcagtatggaggggaagtgtaaacttaaagggaccagactttctaaatcttacaactcaagaggtggcag

SEQ ID NO: 35840 - DNA, 80 bp, synthetic construct
  misc_feature 1..80: note = Artificially Synthesized Probe
  source 1..80: mol_type = other DNA
ctttcttaaatcaagatactggtgattcaaggaattttatttatggtccagccaagagccatctcgtgccaagacttctg

SEQ ID NO: 35841 - DNA, 80 bp, synthetic construct
  misc_feature 1..80: note = Artificially Synthesized Probe
  source 1..80: mol_type = other DNA
tacagctgtaaggataaaacacgtcatgtggattcattttgaattggtgctattggtatttcctctgttattgctaataa

SEQ ID NO: 35842 - DNA, 80 bp, synthetic construct
  misc_feature 1..80: note = Artificially Synthesized Probe
  source 1..80: mol_type = other DNA
ctcgctgcaagctttccctcttatgcagcctcccccgccctccgttttttcccctggagggagatgccaccgtctgatac

SEQ ID NO: 35843 - DNA, 80 bp, synthetic construct
  misc_feature 1..80: note = Artificially Synthesized Probe
  source 1..80: mol_type = other DNA
ggccgcagtctataataaactcactggtcagaatttatagcattattcgctactatgcagtaatcatatcttgtcacatg

SEQ ID NO: 35844 - DNA, 80 bp, synthetic construct
  misc_feature 1..80: note = Artificially Synthesized Probe
  source 1..80: mol_type = other DNA
ttttttttggtggggggacaatacttaatgtggaaactgagtctttagtgtttggtaagagagaatgttgattatttttt

SEQ ID NO: 35845 - DNA, 80 bp, synthetic construct
  misc_feature 1..80: note = Artificially Synthesized Probe
  source 1..80: mol_type = other DNA
ggctgtggcagaaatttgtaatcaatcaggctcttaaagtctctccttttttgggccaaatttgtggtaagccaagacta

SEQ ID NO: 35846 - DNA, 80 bp, synthetic construct
  misc_feature 1..80: note = Artificially Synthesized Probe
  source 1..80: mol_type = other DNA
atcacctggagagcttttcaaaatacagattgccggagcttgagaatttgtatttctaacagatttgtaagtggtgccac

SEQ ID NO: 35847 - DNA, 80 bp, synthetic construct
  misc_feature 1..80: note = Artificially Synthesized Probe
  source 1..80: mol_type = other DNA
gtgggatgttaacttaatggataggcttcaaatgctatagagtagtccctcccttatcccatggttttgctttctgaagt

SEQ ID NO: 35848 - DNA, 80 bp, synthetic construct
  misc_feature 1..80: note = Artificially Synthesized Probe
  source 1..80: mol_type = other DNA
tcaggcatctattaagggtcttggaccgtatttcctgtgggtaaagggaaactactgtactgaccactgaaagcaattgt

SEQ ID NO: 35849 - DNA, 80 bp, synthetic construct
  misc_feature 1..80: note = Artificially Synthesized Probe
  source 1..80: mol_type = other DNA
acccgcctcagtctccaatattgctgggattataggcatgagcccctgcgcccagccagcatttactcttaatattccac

SEQ ID NO: 35850 - DNA, 80 bp, synthetic construct
  misc_feature 1..80: note = Artificially Synthesized Probe
  source 1..80: mol_type = other DNA
gtgtttaaatttgaagaaatgtcatgtagtagagggtcaaaccaggacaaatgggaggcagattttggctcattataagt

SEQ ID NO: 35851 - DNA, 80 bp, synthetic construct
  misc_feature 1..80: note = Artificially Synthesized Probe
  source 1..80: mol_type = other DNA
taatagtgttatggattgcatgaaattacttgtggagtgtatgtgttttagtagccagctacagaagtttaacattaact

SEQ ID NO: 35852 - DNA, 80 bp, synthetic construct
  misc_feature 1..80: note = Artificially Synthesized Probe
  source 1..80: mol_type = other DNA
tttttcagtacagaaagtacctgggagtgtctcagcctctacttagcatctatcatgcctaatcattctgaatgggaaga

SEQ ID NO: 35853 - DNA, 80 bp, synthetic construct
  misc_feature 1..80: note = Artificially Synthesized Probe
  source 1..80: mol_type = other DNA
tggttccatggtgctgaagacctagactcctctcttgttgctctgctctttccctcatctacaaggttaaagatagttta

SEQ ID NO: 35854 - DNA, 80 bp, synthetic construct
  misc_feature 1..80: note = Artificially Synthesized Probe
  source 1..80: mol_type = other DNA
aatttataaactgacactacctcttaacccatctacttggtaagaaagggtattagggagttcccgctctcatttcctaa

SEQ ID NO: 35855 - DNA, 80 bp, synthetic construct
  misc_feature 1..80: note = Artificially Synthesized Probe
  source 1..80: mol_type = other DNA
caagctgttctctatttcagaaaagcctaatggtaattgcacatttacccctaattagcctgtacatgcaaagtaaaaca

SEQ ID NO: 35856 - DNA, 80 bp, synthetic construct
  misc_feature 1..80: note = Artificially Synthesized Probe
  source 1..80: mol_type = other DNA
aataacaatttagagtttttagtaacttccatatgccttcatatctgtagagccaaagaagctcacataaatttgataga

SEQ ID NO: 35857 - DNA, 80 bp, synthetic construct
  misc_feature 1..80: note = Artificially Synthesized Probe
  source 1..80: mol_type = other DNA
aagcgaatatcactgctattattactctgcttttaaaactttaaaaaaaaatgctttcaggctagggacaggggctcaca

SEQ ID NO: 35858 - DNA, 80 bp, synthetic construct
  misc_feature 1..80: note = Artificially Synthesized Probe
  source 1..80: mol_type = other DNA
ccagcctgggagacagagcgagactctgtctcaaaaaaaaaaaaaaaaaaaattaaaaaatgctttcagtgttttattct

SEQ ID NO: 35859 - DNA, 80 bp, synthetic construct
  misc_feature 1..80: note = Artificially Synthesized Probe
  source 1..80: mol_type = other DNA
gaaacacatcctctagaagattcctcagaaagggcttgtgtgtacagcattctctgagttcctgcatattcaaaatggtt

SEQ ID NO: 35860 - DNA, 80 bp, synthetic construct
  misc_feature 1..80: note = Artificially Synthesized Probe
  source 1..80: mol_type = other DNA
aaaataccaaacttagctggatgtggtggcaggcgcttataatcccagctacttgggaggctgaggcaggagaatcactt

SEQ ID NO: 35861 - DNA, 80 bp, synthetic construct
  misc_feature 1..80: note = Artificially Synthesized Probe
  source 1..80: mol_type = other DNA
ggtcttaaactcctgacctcaggtgatccacccacctcggcctcccaaagtgctgggattacaggcatgagccaccatgc

SEQ ID NO: 35862 - DNA, 80 bp, synthetic construct
  misc_feature 1..80: note = Artificially Synthesized Probe
  source 1..80: mol_type = other DNA
tttcctacttttaggcattttgtggacagagttcattgtgtaccccctcctgttagtatagcatcctgcaccttctttaa

SEQ ID NO: 35863 - DNA, 80 bp, synthetic construct
  misc_feature 1..80: note = Artificially Synthesized Probe
  source 1..80: mol_type = other DNA
cacctggccttaatctcagctaattgttggggaaggcaaatatatattattgatcttgctttccttcctgagaaattcac

SEQ ID NO: 35864 - DNA, 80 bp, synthetic construct
  misc_feature 1..80: note = Artificially Synthesized Probe
  source 1..80: mol_type = other DNA
aaaagaaaccaggttgccattacctgggccattacaacaacttccaatcattctctcttccagttcagtctctatagcac

SEQ ID NO: 35865 - DNA, 80 bp, synthetic construct
  misc_feature 1..80: note = Artificially Synthesized Probe
  source 1..80: mol_type = other DNA
tctctgctttatttgccctgcttttttggcttgtgtttgtttttagaaagtcctgtatttaactccttctcctgaagcag

SEQ ID NO: 35866 - DNA, 80 bp, synthetic construct
  misc_feature 1..80: note = Artificially Synthesized Probe
  source 1..80: mol_type = other DNA
ctaattttaactgctgggtgacagtactctaatagaagtaagttttattttcttgagatcataaaaactaaaaaagaatt

SEQ ID NO: 35867 - DNA, 80 bp, synthetic construct
  misc_feature 1..80: note = Artificially Synthesized Probe
  source 1..80: mol_type = other DNA
attatttcacattttatgtggaaaattcattagggagtggttaagtataagagccattaagctgcatagctccttgagaa

SEQ ID NO: 35868 - DNA, 80 bp, synthetic construct
  misc_feature 1..80: note = Artificially Synthesized Probe
  source 1..80: mol_type = other DNA
gccattctcctgcctcagcctcctgagtagctgggactacaggtgcccgccaccatgccctgctagttttttgtattttt

SEQ ID NO: 35869 - DNA, 80 bp, synthetic construct
  misc_feature 1..80: note = Artificially Synthesized Probe
  source 1..80: mol_type = other DNA
agactctgtctctacaaaaaattttaaaaattagttgggtgtggtggcaatgttcctgtagtcccagctacaagggaggc

SEQ ID NO: 35870 - DNA, 80 bp, synthetic construct
  misc_feature 1..80: note = Artificially Synthesized Probe
  source 1..80: mol_type = other DNA
ttagtaaattgcaaattagcactataatgaggtaccagttttcacctatcagattgttagagattaaaaaatttgatact

SEQ ID NO: 35871 - DNA, 80 bp, synthetic construct
  misc_feature 1..80: note = Artificially Synthesized Probe
  source 1..80: mol_type = other DNA
ataggaattagcttatttaggatatatgggtggaattgagatctgattttcactctgtgtccttgatctgttatcaattc

SEQ ID NO: 35872 - DNA, 80 bp, synthetic construct
  misc_feature 1..80: note = Artificially Synthesized Probe
  source 1..80: mol_type = other DNA
ccaccttagcctcctgagtagctgggactataggcacataccaccaccctttactttttaaaaacattttctgtagagat

SEQ ID NO: 35873 - DNA, 80 bp, synthetic construct
  misc_feature 1..80: note = Artificially Synthesized Probe
  source 1..80: mol_type = other DNA
gaactgtgctcagtctctcccgtctctgatttgtcccacaacactacctaaatgaaagatttatatagaagcatgaatgt

SEQ ID NO: 35874 - DNA, 80 bp, synthetic construct
  misc_feature 1..80: note = Artificially Synthesized Probe
  source 1..80: mol_type = other DNA
atctctacaaaaaataaaaaacatttagctgggcgtgatagtacgtgcctgtggtcccagctattctgcagactgaggtg

SEQ ID NO: 35875 - DNA, 80 bp, synthetic construct
  misc_feature 1..80: note = Artificially Synthesized Probe
  source 1..80: mol_type = other DNA
cgttttggccatttctgtatcttctttggagaaacatttattcagtctcttacccctttcttgtttttttttttttgttt

SEQ ID NO: 35876 - DNA, 80 bp, synthetic construct
  misc_feature 1..80: note = Artificially Synthesized Probe
  source 1..80: mol_type = other DNA
gcataaatcttagcagtattataagacaagcagaaagtgaggatgcaaagagaaatgacatctacatctaatgaacctta

SEQ ID NO: 35877 - DNA, 80 bp, synthetic construct
  misc_feature 1..80: note = Artificially Synthesized Probe
  source 1..80: mol_type = other DNA
gatcactattttgttatcatcaatgtaatgaattaggcaaagattattaatgaatctaaaaccattaggaggaagattgt

SEQ ID NO: 35878 - DNA, 80 bp, synthetic construct
  misc_feature 1..80: note = Artificially Synthesized Probe
  source 1..80: mol_type = other DNA
tataggtataagtcaccatgccttgccaggactccttaaatgagtcagtgtcctgaagaacagagcaaagtggtaggtgg

SEQ ID NO: 35879 - DNA, 80 bp, synthetic construct
  misc_feature 1..80: note = Artificially Synthesized Probe
  source 1..80: mol_type = other DNA
ttattcttaaaactttttttttcaggaacacttcctaatggtccttcctgttgcatcatatcaggaggtccataatgtct

SEQ ID NO: 35880 - DNA, 80 bp, synthetic construct
  misc_feature 1..80: note = Artificially Synthesized Probe
  source 1..80: mol_type = other DNA
tagaaagaagtagacatgggagacttttcattttgttctgtactaagaaaaattcttctgccttgggatcctgttgatcg

SEQ ID NO: 35881 - DNA, 80 bp, synthetic construct
  misc_feature 1..80: note = Artificially Synthesized Probe
  source 1..80: mol_type = other DNA
gggcagaggcgctcctcacatcccagacggggcggcggggcagaggcgctccccacatctcagacgatgggcggctgagc

SEQ ID NO: 35882 - DNA, 80 bp, synthetic construct
  misc_feature 1..80: note = Artificially Synthesized Probe
  source 1..80: mol_type = other DNA
ccaccatgcccggcccaaatgtttttaaatctttgacataatttctgacttacagaaatattatgcagatagtacagttc

SEQ ID NO: 35883 - DNA, 80 bp, synthetic construct
  misc_feature 1..80: note = Artificially Synthesized Probe
  source 1..80: mol_type = other DNA
ggcatttgatgtcagtgtgtcccataattgtggtgttaactttgatcatctgattaaggtagtgttgacccagtttttcc

SEQ ID NO: 35884 - DNA, 80 bp, synthetic construct
  misc_feature 1..80: note = Artificially Synthesized Probe
  source 1..80: mol_type = other DNA
agtaatacctgggcagatagccaagataacttggttatcttggtagatgacaatagtagaaaaattggtagaaagttggc

SEQ ID NO: 35885 - DNA, 80 bp, synthetic construct
  misc_feature 1..80: note = Artificially Synthesized Probe
  source 1..80: mol_type = other DNA
tttttcttcttaaaaacagaggttttattgcatttggtccacagttggtatttcaccttatctcatggtgcagggaccct

SEQ ID NO: 35886 - DNA, 80 bp, synthetic construct
  misc_feature 1..80: note = Artificially Synthesized Probe
  source 1..80: mol_type = other DNA
atcacatcagtttgatttgagaaatatcgtgcctggaggacagattggaatattctgatctagttaaattgggagttgtg

SEQ ID NO: 35887 - DNA, 80 bp, synthetic construct
  misc_feature 1..80: note = Artificially Synthesized Probe
  source 1..80: mol_type = other DNA
ggaacggttaacttgccaaggtatgtatgtatgtaagtgatgacacttagacaagaacccagatagtttgacttcaaagc

SEQ ID NO: 35888 - DNA, 80 bp, synthetic construct
  misc_feature 1..80: note = Artificially Synthesized Probe
  source 1..80: mol_type = other DNA
gaattgttttctcttttccaggttggatgtactggaaaagtcataggaattgatcacattaaagagctagtagatgactc

SEQ ID NO: 35889 - DNA, 80 bp, synthetic construct
  misc_feature 1..80: note = Artificially Synthesized Probe
  source 1..80: mol_type = other DNA
ccctgatcctgtgtggacactgaaaggggaatacaggagtaaaccacaccaaaatgagtctcatgttgccagtgagggac

SEQ ID NO: 35890 - DNA, 80 bp, synthetic construct
  misc_feature 1..80: note = Artificially Synthesized Probe
  source 1..80: mol_type = other DNA
acaaatagcaccaatagtgagtaacactatatttgttgtagacccatccgtttctactgcacagccaaatacagtgttgg

SEQ ID NO: 35891 - DNA, 80 bp, synthetic construct
  misc_feature 1..80: note = Artificially Synthesized Probe
  source 1..80: mol_type = other DNA
aagtttgatctaaacaggtttttaaagcatagctgtttttctttcagtgggggatggaagaatgggatatgctgaagaag

SEQ ID NO: 35892 - DNA, 80 bp, synthetic construct
  misc_feature 1..80: note = Artificially Synthesized Probe
  source 1..80: mol_type = other DNA
tgtgcagtgagtggtcaaggagacatcacacacggatggaacttgaactgaatcttaaagaatagtaggatatatggccg

SEQ ID NO: 35893 - DNA, 80 bp, synthetic construct
  misc_feature 1..80: note = Artificially Synthesized Probe
  source 1..80: mol_type = other DNA
ggggctttccagttttaagatagcagaatgaagatgtttatgccttcttttggatatcaccccaagataaccagaaaaac

SEQ ID NO: 35894 - DNA, 80 bp, synthetic construct
  misc_feature 1..80: note = Artificially Synthesized Probe
  source 1..80: mol_type = other DNA
ttatttccaacctcgaattctgtatgcacacacatcaccaagatagttttaggtttgcaaatctccatctctttctttta

SEQ ID NO: 35895 - DNA, 80 bp, synthetic construct
  misc_feature 1..80: note = Artificially Synthesized Probe
  source 1..80: mol_type = other DNA
aaattgagaaaaacaagaagatagacttgcagacaaccaaaactttgattgagggcaccctttcctgaggtaataaatat

SEQ ID NO: 35896 - DNA, 80 bp, synthetic construct
  misc_feature 1..80: note = Artificially Synthesized Probe
  source 1..80: mol_type = other DNA
gttagatgctaaagacacaaagatgaataagacacagtccccatcctcaagagcttgtcgtttaatagaggaggctgata

SEQ ID NO: 35897 - DNA, 80 bp, synthetic construct
  misc_feature 1..80: note = Artificially Synthesized Probe
  source 1..80: mol_type = other DNA
gtgatgtatgtgcttttttttttttcttttagctaatagatcagttaaagcccggaggaagattgatattgcctgttggt

SEQ ID NO: 35898 - DNA, 80 bp, synthetic construct
  misc_feature 1..80: note = Artificially Synthesized Probe
  source 1..80: mol_type = other DNA
ggccatcatttcctgccctgtttattgtaccaacaaggagaaagaaggggaaagataacggtcgtctcagttttctaaaa

SEQ ID NO: 35899 - DNA, 80 bp, synthetic construct
  misc_feature 1..80: note = Artificially Synthesized Probe
  source 1..80: mol_type = other DNA
ctctcaatgttgtttttattcttcaccaatagctattttctgtgaattatacgtggagcacagccactggaaaaaaaaaa

SEQ ID NO: 35900 - DNA, 80 bp, synthetic construct
  misc_feature 1..80: note = Artificially Synthesized Probe
  source 1..80: mol_type = other DNA
aacttcataaaaaggttcccctgttttctaattatataaaccttaggcccccacaaaacctgaatccacctttgataaaa

SEQ ID NO: 35901 - DNA, 80 bp, synthetic construct
  misc_feature 1..80: note = Artificially Synthesized Probe
  source 1..80: mol_type = other DNA
gagatcgagaccatcctggccaacatggtgaaactccatctctactaaaaaaacaatacaaaaattagctgggcgtggtg

SEQ ID NO: 35902 - DNA, 80 bp, synthetic construct
  misc_feature 1..80: note = Artificially Synthesized Probe
  source 1..80: mol_type = other DNA
aaactttcttcaggattactttaactcattataatactttcctaggaaccttctcttgtgtctcaccagctttccacctt

SEQ ID NO: 35903 - DNA, 80 bp, synthetic construct
  misc_feature 1..80: note = Artificially Synthesized Probe
  source 1..80: mol_type = other DNA
aaagatgttaggaattgactgcatttccaagactgacagtattggtgctaagggatccaattgatcccgtgttccatatt

SEQ ID NO: 35904 - DNA, 80 bp, synthetic construct
  misc_feature 1..80: note = Artificially Synthesized Probe
  source 1..80: mol_type = other DNA
ttagacagagaggatagttggaaaaatggtacctatgttgttgagggggcattaatttatttacagtatacttaatgtct

SEQ ID NO: 35905 - DNA, 80 bp, synthetic construct
  misc_feature 1..80: note = Artificially Synthesized Probe
  source 1..80: mol_type = other DNA
ctcctaaatctcttcatccagagtcatcaattattatcatttttctacatttctttcccctctttctatatatacatata

SEQ ID NO: 35906 - DNA, 80 bp, synthetic construct
  misc_feature 1..80: note = Artificially Synthesized Probe
  source 1..80: mol_type = other DNA
tacttggttctggagtggcatggaagatgtttggaatggctgaccctctgttgctttcacttgggttgtttgcattttta

SEQ ID NO: 35907 - DNA, 80 bp, synthetic construct
  misc_feature 1..80: note = Artificially Synthesized Probe
  source 1..80: mol_type = other DNA
atatgaacttaacatgctgtgtaagctgtgtcctagttcttgaacagtttatgcagtgctgctttgccaaataaagttaa

SEQ ID NO: 35908 - DNA, 80 bp, synthetic construct
  misc_feature 1..80: note = Artificially Synthesized Probe
  source 1..80: mol_type = other DNA
tcctgcctcagcctccaaagtagctgggattacaggtgtgtgccaccatgcccagctaagttttgtattattagtagaga

SEQ ID NO: 35909 - DNA, 80 bp, synthetic construct
  misc_feature 1..80: note = Artificially Synthesized Probe
  source 1..80: mol_type = other DNA
cggggaaaatattgagagagacagaaagaaaaggagaaacttatctgaggttggaaataaagagaaggtgacattggagc

SEQ ID NO: 35910 - DNA, 80 bp, synthetic construct
  misc_feature 1..80: note = Artificially Synthesized Probe
  source 1..80: mol_type = other DNA
aggacaagttccttctaaaatcaatcctttgctttggcctggaagaccgaacatattaggctcaattttcttcgtgtagc

SEQ ID NO: 35911 - DNA, 80 bp, synthetic construct
  misc_feature 1..80: note = Artificially Synthesized Probe
  source 1..80: mol_type = other DNA
ttaatagttactcatctgacaaactacacctatattcatcttcgttgatgtaatgataagtcttgaaatgtttttaaaaa

SEQ ID NO: 35912 - DNA, 80 bp, synthetic construct
  misc_feature 1..80: note = Artificially Synthesized Probe
  source 1..80: mol_type = other DNA
aatttgatagcttcagagcatcaaggtgtacacataggttcttttttcctggacagtaagtgtccactgatgattgtcct

SEQ ID NO: 35913 - DNA, 80 bp, synthetic construct
  misc_feature 1..80: note = Artificially Synthesized Probe
  source 1..80: mol_type = other DNA
ttttgaagcccagcagattgcacattctgtgtaggtggatagcttgaaacctgcagacaactgtcagaggacaatgactt

SEQ ID NO: 35914 - DNA, 80 bp, synthetic construct
  misc_feature 1..80: note = Artificially Synthesized Probe
  source 1..80: mol_type = other DNA
actgccaaatcgttttccaaaagggttgtaccttttacattcccactagcaatgtatgaaggttctcatttctccacatc

SEQ ID NO: 35915 - DNA, 80 bp, synthetic construct
  misc_feature 1..80: note = Artificially Synthesized Probe
  source 1..80: mol_type = other DNA
aacatgacatattatttcatttattttggttaatggttctccgctaagggcaattgtgcatcacaagggacatttgacag

SEQ ID NO: 35916 - DNA, 80 bp, synthetic construct
  misc_feature 1..80: note = Artificially Synthesized Probe
  source 1..80: mol_type = other DNA
cttttggaggccgaggcacgcagatcacgaggtcaggagacagagaccatcctggccaacatggtgaaaccctgtctctg

SEQ ID NO: 35917 - DNA, 80 bp, synthetic construct
  misc_feature 1..80: note = Artificially Synthesized Probe
  source 1..80: mol_type = other DNA
ctttgtgtccctgttttcaatgcttttgggttgcaaaagaagagggattattgcatatatggtaattctatatttaattt

SEQ ID NO: 35918 - DNA, 80 bp, synthetic construct
  misc_feature 1..80: note = Artificially Synthesized Probe
  source 1..80: mol_type = other DNA
tgattaaaatgtgcctaggtgtggttactttcatgtttctcgtgctttggatttgttacgcttaccggatctgtgtgttt

SEQ ID NO: 35919 - DNA, 80 bp, synthetic construct
  misc_feature 1..80: note = Artificially Synthesized Probe
  source 1..80: mol_type = other DNA
ccataaacattattgagctttattctgggtcacagttagttggaaacagatccttcttgatcttaagcttcattatgggg

SEQ ID NO: 35920 - DNA, 80 bp, synthetic construct
  misc_feature 1..80: note = Artificially Synthesized Probe
  source 1..80: mol_type = other DNA
tctgtcatttcagctaagacacagaggcggttggcttttatttttgtagacagtgtggaattatagaagcttttaaagaa

SEQ ID NO: 35921 - DNA, 80 bp, synthetic construct
  misc_feature 1..80: note = Artificially Synthesized Probe
  source 1..80: mol_type = other DNA
ccgaaatctgtttatatctcttaaacaaacatcagttaatactgcaagaaagtagatgttggccgtgcgcggttgctcac

SEQ ID NO: 35922 - DNA, 80 bp, synthetic construct
  misc_feature 1..80: note = Artificially Synthesized Probe
  source 1..80: mol_type = other DNA
cttccagtaaatcctattttaaaaaatagctggagtctgttcactgatctttccaaaaggtatatatggaatggcaggca

SEQ ID NO: 35923 - DNA, 80 bp, synthetic construct
  misc_feature 1..80: note = Artificially Synthesized Probe
  source 1..80: mol_type = other DNA
aacttggtaccctgcagatcccgaaaacaaaaccaacaaagaagataaccgggggataaaaagagacaacttcatggttg

SEQ ID NO: 35924 - DNA, 80 bp, synthetic construct
  misc_feature 1..80: note = Artificially Synthesized Probe
  source 1..80: mol_type = other DNA
gactataaaacgaaaacctttggtagaacttgggcaaaaatggtctggtcttcaagttagcataccaagtatgaaaatgt

SEQ ID NO: 35925 - DNA, 80 bp, synthetic construct
  misc_feature 1..80: note = Artificially Synthesized Probe
  source 1..80: mol_type = other DNA
ttggattggggaaaggttcagaagtctgtgtgtttgttactattactattgctgcatagcaaatcacctcagtggctgaa

SEQ ID NO: 35926 - DNA, 80 bp, synthetic construct
  misc_feature 1..80: note = Artificially Synthesized Probe
  source 1..80: mol_type = other DNA
ttttgtctatatcctcagaacaataacaaactcagactctgcttgcctcagtcatcccttcaaccaccgctggaagacat

SEQ ID NO: 35927 - DNA, 80 bp, synthetic construct
  misc_feature 1..80: note = Artificially Synthesized Probe
  source 1..80: mol_type = other DNA
ttaccttgtggtatcttaaaggtgccacctgatgtccaaccattcataacagacagagagctgttgccaacaaggtcagc

SEQ ID NO: 35928 - DNA, 80 bp, synthetic construct
  misc_feature 1..80: note = Artificially Synthesized Probe
  source 1..80: mol_type = other DNA
tttctcattaaaatttcttcctcgtgtgaagctttctgaggctgtatcttgatatttttgaacctttgccagctggaaga

SEQ ID NO: 35929 - DNA, 80 bp, synthetic construct
  misc_feature 1..80: note = Artificially Synthesized Probe
  source 1..80: mol_type = other DNA
tcagtgttacttttcactcatatgtgtgtatgagtgaaagttattatatatggcttcagggaccagctagtagatggcat

SEQ ID NO: 35930 - DNA, 80 bp, synthetic construct
  misc_feature 1..80: note = Artificially Synthesized Probe
  source 1..80: mol_type = other DNA
tgggtgttgaaaggataaaggggattgtgtgagtaaattaccatcagctgtctgaaggcttggttgtaatttctttcctt

SEQ ID NO: 35931 - DNA, 80 bp, synthetic construct
  misc_feature 1..80: note = Artificially Synthesized Probe
  source 1..80: mol_type = other DNA
gctcattttgttcttacagtggccctattaggtagttattatcattaaccttgttttacaaatgaggaagctaaagcaca

SEQ ID NO: 35932 - DNA, 80 bp, synthetic construct
  misc_feature 1..80: note = Artificially Synthesized Probe
  source 1..80: mol_type = other DNA
atagtcttcagagccacacatcctcctccaaaccctcctgccccattccactccagctactgaagggcagatcttttcat

SEQ ID NO: 35933 - DNA, 80 bp, synthetic construct
  misc_feature 1..80: note = Artificially Synthesized Probe
  source 1..80: mol_type = other DNA
tatggtttcaggtctaacatttaagtctttaatacatctcgaattagttcttgtataaggtgtaaggaagggatctagtt

SEQ ID NO: 35934 - DNA, 80 bp, synthetic construct
  misc_feature 1..80: note = Artificially Synthesized Probe
  source 1..80: mol_type = other DNA
atttttgcacattgattttgtatcatgagactttgctgaagttgccaatcagcttaaggagattttgggctgagatgatg

SEQ ID NO: 35935 - DNA, 80 bp, synthetic construct
  misc_feature 1..80: note = Artificially Synthesized Probe
  source 1..80: mol_type = other DNA
ggtgtttatagtattctctgatgttagtttgtatttctgtgggatcggtggtgatatcccctttatcattttttattgca

SEQ ID NO: 35936 - DNA, 80 bp, synthetic construct
  misc_feature 1..80: note = Artificially Synthesized Probe
  source 1..80: mol_type = other DNA
gcccgcttacatttaaggttaatattgttatgtttgaatttgatcctgtcattatgatgttagctggttattttgcttgt

SEQ ID NO: 35937 - DNA, 80 bp, synthetic construct
  misc_feature 1..80: note = Artificially Synthesized Probe
  source 1..80: mol_type = other DNA
tttctatttgttagtcttccttctaacagtcaggaccctcagctgcaggtctgttggagtttgcttgaggtcactccaga

SEQ ID NO: 35938 - DNA, 80 bp, synthetic construct
  misc_feature 1..80: note = Artificially Synthesized Probe
  source 1..80: mol_type = other DNA
gtatatacaacagtttacttggacagcctgggtagtcaggaacatccatccaagccacacttctgcctattaggttcctc

SEQ ID NO: 35939 - DNA, 80 bp, synthetic construct
  misc_feature 1..80: note = Artificially Synthesized Probe
  source 1..80: mol_type = other DNA
gtgcctgatgcctttgaggactgctggtggcctcaagacctctcctctctatagctccagcaaggtagtcagatttcttt

SEQ ID NO: 35940 - DNA, 80 bp, synthetic construct
  misc_feature 1..80: note = Artificially Synthesized Probe
  source 1..80: mol_type = other DNA
cacccacatttcattctgaagccagctttttcaccttgcttggactaactgtgagtctgacatgggataacagaacctta

SEQ ID NO: 35941 - DNA, 80 bp, synthetic construct
  misc_feature 1..80: note = Artificially Synthesized Probe
  source 1..80: mol_type = other DNA
tgctgtattctattagtcaagtaagtctctaagggtagcccatattaaagggaggagaattagattccacctctcaatgg

SEQ ID NO: 35942 - DNA, 80 bp, synthetic construct
  misc_feature 1..80: note = Artificially Synthesized Probe
  source 1..80: mol_type = other DNA
tggaatatttggagctgactgtaaagactgtgacaccttccgattttttgtcccttatcatcaattcaggtattccctga

SEQ ID NO: 35943 - DNA, 80 bp, synthetic construct
  misc_feature 1..80: note = Artificially Synthesized Probe
  source 1..80: mol_type = other DNA
caagaaagcagcacatacagtgactggtggattgcattattgttccacaaatattactctcccctcctgcactctgtggg

SEQ ID NO: 35944 - DNA, 80 bp, synthetic construct
  misc_feature 1..80: note = Artificially Synthesized Probe
  source 1..80: mol_type = other DNA
tatgaactttccctaaaaacatggacaaatatttactaagtgaaagaaggagaatataaacatatacctaagctgtaatc

SEQ ID NO: 35945 - DNA, 80 bp, synthetic construct
  misc_feature 1..80: note = Artificially Synthesized Probe
  source 1..80: mol_type = other DNA
ttgtctaagatcaaactggaccttgaaatttttcctggtaacattttgagctctggagcagtgtggtcctaccaataaat

SEQ ID NO: 35946 - DNA, 80 bp, synthetic construct
  misc_feature 1..80: note = Artificially Synthesized Probe
  source 1..80: mol_type = other DNA
gggcttggtaccgcgtcctctaagctctctgccctctgccgtcatcattcatctgagccagcgagagaggggtcggggag

SEQ ID NO: 35947 - DNA, 80 bp, synthetic construct
  misc_feature 1..80: note = Artificially Synthesized Probe
  source 1..80: mol_type = other DNA
ccagcccacctctcttggtcattttcacatgttctgttttacggggtttcccttgcttaatgactctcccctccaccgag

SEQ ID NO: 35948 - DNA, 80 bp, synthetic construct
  misc_feature 1..80: note = Artificially Synthesized Probe
  source 1..80: mol_type = other DNA
tctccgagagggctgtgcttagttctgggcatcattagataaaataagtacaatcaagagacaggagggaactcaaagcc

SEQ ID NO: 35949 - DNA, 80 bp, synthetic construct
  misc_feature 1..80: note = Artificially Synthesized Probe
  source 1..80: mol_type = other DNA
atatttacagtccaattaatttgacaaactgagtatactcatgggatgggcattcagatagagaaagggaacattaccag

SEQ ID NO: 35950 - DNA, 80 bp, synthetic construct
  misc_feature 1..80: note = Artificially Synthesized Probe
  source 1..80: mol_type = other DNA
tagaaccacaacaccatgctgctatatacatatcagaatggctgaaattaaaaagatagaaagtagcaaatgctggcaag

SEQ ID NO: 35951 - DNA, 80 bp, synthetic construct
  misc_feature 1..80: note = Artificially Synthesized Probe
  source 1..80: mol_type = other DNA
tacttaattcacctaatccttacaaccctatgaagtaaatgttatactcatttttaagaaaaggaaattgagcttcagaa

SEQ ID NO: 35952 - DNA, 80 bp, synthetic construct
  misc_feature 1..80: note = Artificially Synthesized Probe
  source 1..80: mol_type = other DNA
agtacttcaggattactgtttgtattaatttcctgttgctggtgtaacaaatcaccacaaacttttttttttttttttga

SEQ ID NO: 35953 - DNA, 80 bp, synthetic construct
  misc_feature 1..80: note = Artificially Synthesized Probe
  source 1..80: mol_type = other DNA
acagccttcaagcaagacaaggtgtccatttaccacagctatattgtacttaacagatctccattgatagcttatttgaa

SEQ ID NO: 35954 - DNA, 80 bp, synthetic construct
  misc_feature 1..80: note = Artificially Synthesized Probe
  source 1..80: mol_type = other DNA
tgagggatcatattttcaaggctaagtggagcatccatccattcagtggatgccccaggacactacttctattgaaatct

SEQ ID NO: 35955 - DNA, 80 bp, synthetic construct
  misc_feature 1..80: note = Artificially Synthesized Probe
  source 1..80: mol_type = other DNA
atgttcagaagtagaataactatgtcaacatttccagttcttgaaagtacattgcaaattacttaaagttatagtcccat

SEQ ID NO: 35956 - DNA, 80 bp, synthetic construct
  misc_feature 1..80: note = Artificially Synthesized Probe
  source 1..80: mol_type = other DNA
gcatctaacattgcctctagcacttagaaggtcatctattaagagctttccagagaacattccccaaaaggccgatggga

SEQ ID NO: 35957 - DNA, 80 bp, synthetic construct
  misc_feature 1..80: note = Artificially Synthesized Probe
  source 1..80: mol_type = other DNA
tacattcaatattatttccatttgcagaattcacacaggcaaataaactgaagaacaactaaatacatacaaatctttat

SEQ ID NO: 35958 - DNA, 80 bp, synthetic construct
  misc_feature 1..80: note = Artificially Synthesized Probe
  source 1..80: mol_type = other DNA
gaaaaaaacacatctgagaagtctcagagcttgttcactaatgccttttccactttgattgtttctgtttccaccacctt

SEQ ID NO: 35959 - DNA, 80 bp, synthetic construct
  misc_feature 1..80: note = Artificially Synthesized Probe
  source 1..80: mol_type = other DNA
tttataaactgtcagggccagagcttcccatattaaaaaataggccacagttcttctcattctgacccttttgtgtttgc

SEQ ID NO: 35960 - DNA, 80 bp, synthetic construct
  misc_feature 1..80: note = Artificially Synthesized Probe
  source 1..80: mol_type = other DNA
ttttgggggcttctaagctatagtgtttgaggagggaggtgcaaatgaagaaacaatttcacccttggcttcccttcata

SEQ ID NO: 35961 - DNA, 80 bp, synthetic construct
  misc_feature 1..80: note = Artificially Synthesized Probe
  source 1..80: mol_type = other DNA
gaagcttgaaagctagaaaacgcctctgggagatggccctggtcttcaggcttagaaatgttaagcaagggtggtggtta

SEQ ID NO: 35962 - DNA, 80 bp, synthetic construct
  misc_feature 1..80: note = Artificially Synthesized Probe
  source 1..80: mol_type = other DNA
gagctaaaagtggcctggcgaaccacatattagctgagcatgagtcattcatgaattgatattttcaaaaactagagaca

SEQ ID NO: 35963 - DNA, 80 bp, synthetic construct
  misc_feature 1..80: note = Artificially Synthesized Probe
  source 1..80: mol_type = other DNA
gactgtgccttaataaagcagaaatgaaattctgtctgcacttggtctatactggggtaacagcatcagaaacctgcaag

SEQ ID NO: 35964 - DNA, 80 bp, synthetic construct
  misc_feature 1..80: note = Artificially Synthesized Probe
  source 1..80: mol_type = other DNA
ggaagaaaaaaccaccaatttccaagcaaatgccaggtcctcctctgcctccctgtgaatatcttctggcttttaaaaag

SEQ ID NO: 35965 - DNA, 80 bp, synthetic construct
  misc_feature 1..80: note = Artificially Synthesized Probe
  source 1..80: mol_type = other DNA
acctcttgctactgaatcatggtgttattaacatttccactcataaactttgtctgtttttcaaggtttctgtgtcaatt

SEQ ID NO: 35966 - DNA, 80 bp, synthetic construct
  misc_feature 1..80: note = Artificially Synthesized Probe
  source 1..80: mol_type = other DNA
ttcttttgtttattcatttggttttcttttgagacaggttctcactctgtcactatggatgtagtgcagtggtgtgatca

SEQ ID NO: 35967 - DNA, 80 bp, synthetic construct
  misc_feature 1..80: note = Artificially Synthesized Probe
  source 1..80: mol_type = other DNA
cataggtgagattgagaaaagcttttagtacagaggctatcaaggaataagcactctgtatcttatctattgttactatt

SEQ ID NO: 35968 - DNA, 80 bp, synthetic construct
  misc_feature 1..80: note = Artificially Synthesized Probe
  source 1..80: mol_type = other DNA
ctaaattcccacaattagcaagtggtcaggattcaaatccaagcctcaaggcattgctctttctatcatagccaccaatc

SEQ ID NO: 35969 - DNA, 80 bp, synthetic construct
  misc_feature 1..80: note = Artificially Synthesized Probe
  source 1..80: mol_type = other DNA
catacacacacactcacacaaaaacaaattaataaaacaaaagcctcttttaaaaccaccctattgaccatcatcatttt

SEQ ID NO: 35970 - DNA, 80 bp, synthetic construct
  misc_feature 1..80: note = Artificially Synthesized Probe
  source 1..80: mol_type = other DNA
ctgccccaacatgaggtcctctgtgtactttgtttgacagaggctttgctttctcattctttaacaatgttacttctcaa

SEQ ID NO: 35971 - DNA, 80 bp, synthetic construct
  misc_feature 1..80: note = Artificially Synthesized Probe
  source 1..80: mol_type = other DNA
acagggtagagttgagtacctgtgccagagatgatatgacccacaagcctaaaacactgtctggtcctttaagaaaatgt

SEQ ID NO: 35972 - DNA, 80 bp, synthetic construct
  misc_feature 1..80: note = Artificially Synthesized Probe
  source 1..80: mol_type = other DNA
gtactatggaatagtgatgcctgataaaaatatgacccatggattggtccggattatggatggtattatcattatggtgt

SEQ ID NO: 35973 - DNA, 80 bp, synthetic construct
  misc_feature 1..80: note = Artificially Synthesized Probe
  source 1..80: mol_type = other DNA
tgccccctcagggatacccagcaagcaggtcccacataaataatgtgtaaatagtctgtgagatactggggtttctctca

SEQ ID NO: 35974 - DNA, 80 bp, synthetic construct
  misc_feature 1..80: note = Artificially Synthesized Probe
  source 1..80: mol_type = other DNA
taatatgacagattagtccttatttctcgatgctgggaaacactgacagaaaccaagctaagacgcagggaaaaggccaa

SEQ ID NO: 35975 - DNA, 80 bp, synthetic construct
  misc_feature 1..80: note = Artificially Synthesized Probe
  source 1..80: mol_type = other DNA
gaaagagataacagactaaaaatgcaaatactggcacattatggaaccaaaacataattagtcaattaacaagcgaaagt

SEQ ID NO: 35976 - DNA, 80 bp, synthetic construct
  misc_feature 1..80: note = Artificially Synthesized Probe
  source 1..80: mol_type = other DNA
aagacttcagcagcacatacataatactggctagcatttgatgatcactttctatgtggcagatattgctctaagtatgt

SEQ ID NO: 35977 - DNA, 80 bp, synthetic construct
  misc_feature 1..80: note = Artificially Synthesized Probe
  source 1..80: mol_type = other DNA
tgttggggaactcagctggtgaaagtttggtgctaatgaaggtgttggcttatttggaaatggaatcactagttcctcct

SEQ ID NO: 35978 - DNA, 80 bp, synthetic construct
  misc_feature 1..80: note = Artificially Synthesized Probe
  source 1..80: mol_type = other DNA
atattatttttacaaccattatactagtgaagagatcaaggttcaaataacttgcccaaagttatataagaataaagtaa

SEQ ID NO: 35979 - DNA, 80 bp, synthetic construct
  misc_feature 1..80: note = Artificially Synthesized Probe
  source 1..80: mol_type = other DNA
aacattaccaaagatatgaatcaaatcaattactttttttcttatagaactacagagtaaaaggaatgcttctgagtgct

SEQ ID NO: 35980 - DNA, 80 bp, synthetic construct
  misc_feature 1..80: note = Artificially Synthesized Probe
  source 1..80: mol_type = other DNA
gaaaggtatgattaccaacacagaaaagagagcaaccactttcacagagaatgtagcacttgaattagaataattctttt

SEQ ID NO: 35981 - DNA, 80 bp, synthetic construct
  misc_feature 1..80: note = Artificially Synthesized Probe
  source 1..80: mol_type = other DNA
agtattctctataccaatacaatattagtactcaaggtgaggattatttcaagtgtggaatatatatacaatagaacatt

SEQ ID NO: 35982 - DNA, 80 bp, synthetic construct
  misc_feature 1..80: note = Artificially Synthesized Probe
  source 1..80: mol_type = other DNA
agaacatgagctcactatagcagggacagtggttgtcttttcacttctagatacagtgattagcataatgcctggtacat

SEQ ID NO: 35983 - DNA, 80 bp, synthetic construct
  misc_feature 1..80: note = Artificially Synthesized Probe
  source 1..80: mol_type = other DNA
catgggcattcatggtatcactgtggactcttggtttttggttttgttttgtttttttttttttttagacatggtcttgc

SEQ ID NO: 35984 - DNA, 80 bp, synthetic construct
  misc_feature 1..80: note = Artificially Synthesized Probe
  source 1..80: mol_type = other DNA
ttaatcaacctgatgcaatagctctgtcattagtgctcttgttatcaggcaagaaaaggctgtgtacaggatgggtatca

SEQ ID NO: 35985 - DNA, 80 bp, synthetic construct
  misc_feature 1..80: note = Artificially Synthesized Probe
  source 1..80: mol_type = other DNA
aaaccactaatctactttctgcctggatttgcctattctggacatttcatgtaaatggaattatacagtatgtgaccttt

SEQ ID NO: 35986 - DNA, 80 bp, synthetic construct
  misc_feature 1..80: note = Artificially Synthesized Probe
  source 1..80: mol_type = other DNA
agtaaaatggggatcatcatgtcttcctacttcaaaggttgtggtaaagataaacgaaataatacacatggaagtacttt

SEQ ID NO: 35987 - DNA, 80 bp, synthetic construct
  misc_feature 1..80: note = Artificially Synthesized Probe
  source 1..80: mol_type = other DNA
ttgcaaccttcttagtatcctgcccagatcccagtcttctgactgtcttcctatacttaactattaagtagtttccccaa

SEQ ID NO: 35988 - DNA, 80 bp, synthetic construct
  misc_feature 1..80: note = Artificially Synthesized Probe
  source 1..80: mol_type = other DNA
agagccattaaggtttggaagaaacattctgagaccagagtaaagatgttatatgtactaggagaaaaaggaagaacaaa

SEQ ID NO: 35989 - DNA, 80 bp, synthetic construct
  misc_feature 1..80: note = Artificially Synthesized Probe
  source 1..80: mol_type = other DNA
tctacataatcttgtgtatcgattaagttgtattactccaatgagaaataaatcagcaggttaattactcatccattctt

SEQ ID NO: 35990 - DNA, 80 bp, synthetic construct
  misc_feature 1..80: note = Artificially Synthesized Probe
  source 1..80: mol_type = other DNA
gaacaagagtgggagcaggaacaccagttaaggggctattcagatcatgtaaggaaaagatggcagtactgtgggtcagg

SEQ ID NO: 35991 - DNA, 80 bp, synthetic construct
  misc_feature 1..80: note = Artificially Synthesized Probe
  source 1..80: mol_type = other DNA
gttgaatgatctaagccaagagttgaatatgtacggctagatcttgggtgagaagactcggttggagatttgggaattgt

SEQ ID NO: 35992 - DNA, 80 bp, synthetic construct
  misc_feature 1..80: note = Artificially Synthesized Probe
  source 1..80: mol_type = other DNA
agttgttttaacttagacttttttcttcactgtctctaactaagcctagttggcattctcaaattctaagaattcagatt

SEQ ID NO: 35993 - DNA, 80 bp, synthetic construct
  misc_feature 1..80: note = Artificially Synthesized Probe
  source 1..80: mol_type = other DNA
attggaagaatgaaaagcaggtaggttggggaggaaatgagggcttgaattaagtgtaaattttgtagtttcctttatct

SEQ ID NO: 35994 - DNA, 80 bp, synthetic construct
  misc_feature 1..80: note = Artificially Synthesized Probe
  source 1..80: mol_type = other DNA
aggagggtgacagcagagtcctggcttggagtcgggttacaccacttgtgtctgagttcacgcagcatgttcctctgtca

SEQ ID NO: 35995 - DNA, 80 bp, synthetic construct
  misc_feature 1..80: note = Artificially Synthesized Probe
  source 1..80: mol_type = other DNA
caagtgatgccttctggctcagcctcctgagcagctgggaccacaggcacaggacaccaggcccagataattaaaaaaaa

SEQ ID NO: 35996 - DNA, 80 bp, synthetic construct
  misc_feature 1..80: note = Artificially Synthesized Probe
  source 1..80: mol_type = other DNA
tatgaggattaagcctcgtagctggtcaccacaatattggtttcctcagccctctctgtgtctggacaagcaggacctga

SEQ ID NO: 35997 - DNA, 80 bp, synthetic construct
  misc_feature 1..80: note = Artificially Synthesized Probe
  source 1..80: mol_type = other DNA
atgggtcccatacaggaagtagatatggccctgtctctatctagtcttacgtgttagcagagttgtcaggcagctactgc

SEQ ID NO: 35998 - DNA, 80 bp, synthetic construct
  misc_feature 1..80: note = Artificially Synthesized Probe
  source 1..80: mol_type = other DNA
gatgtaagaacgagggattcggaaaacactgcattaagacctattgtcaaccaggagacttagttaggcaagttacttag

SEQ ID NO: 35999 - DNA, 80 bp, synthetic construct
  misc_feature 1..80: note = Artificially Synthesized Probe
  source 1..80: mol_type = other DNA
taagcttcaatttttgtaaatcatcataataaattttttaaaaaggaagaggctgcttaccctctgtaccgacagagtgg

SEQ ID NO: 36000 - DNA, 80 bp, synthetic construct
  misc_feature 1..80: note = Artificially Synthesized Probe
  source 1..80: mol_type = other DNA
gggtgaaatcttgatttttctacttactatttgtgttgggaaaaataccataatttctctgagctaaagcaagggcagta

SEQ ID NO: 36001 - DNA, 80 bp, synthetic construct
  misc_feature 1..80: note = Artificially Synthesized Probe
  source 1..80: mol_type = other DNA
tacatgatcttggccaagtcacttaacttctgtgaaccttagtttcctaaattagagtcatcaattcctgtcgtgctctt

SEQ ID NO: 36002 - DNA, 80 bp, synthetic construct
  misc_feature 1..80: note = Artificially Synthesized Probe
  source 1..80: mol_type = other DNA
aacaaaatgtgggctatatagacactggatattatttagccttagaaaggtatgaaactctgacatgtgctgtaacatga

SEQ ID NO: 36003 - DNA, 80 bp, synthetic construct
  misc_feature 1..80: note = Artificially Synthesized Probe
  source 1..80: mol_type = other DNA
taaattctgggccctaatttaattctaatccactttcagttatccccctaacaatgtctacataatttatacttctgcat

SEQ ID NO: 36004 - DNA, 80 bp, synthetic construct
  misc_feature 1..80: note = Artificially Synthesized Probe
  source 1..80: mol_type = other DNA
tagatcatgtggtttggagggcttgtggtggtggtaagatgaggctgcaggggagaaatcatggaaagctttggacttat

SEQ ID NO: 36005 - DNA, 80 bp, synthetic construct
  misc_feature 1..80: note = Artificially Synthesized Probe
  source 1..80: mol_type = other DNA
ttctcaccacagcttagatagttgcttaaaagagactcatagtttctcagcttctctgacagcttctcaggatgggaggt

SEQ ID NO: 36006 - DNA, 80 bp, synthetic construct
  misc_feature 1..80: note = Artificially Synthesized Probe
  source 1..80: mol_type = other DNA
tcatccatatgttttcaaaagtcaccgtgaacatatttttctcttttgccttgctccctgctctggcttttgccatctca

SEQ ID NO: 36007 - DNA, 80 bp, synthetic construct
  misc_feature 1..80: note = Artificially Synthesized Probe
  source 1..80: mol_type = other DNA
cttcctctctcagagttactccgtcagacctcacactccagattctcatcagtcaagttcagtatctgcccaacacaaaa

SEQ ID NO: 36008 - DNA, 80 bp, synthetic construct
  misc_feature 1..80: note = Artificially Synthesized Probe
  source 1..80: mol_type = other DNA
gtttctttatccactcattgattggtgggcacttgggttggttccacgtttttgcagttgtgaactgtgctgctatacat

SEQ ID NO: 36009 - DNA, 80 bp, synthetic construct
  misc_feature 1..80: note = Artificially Synthesized Probe
  source 1..80: mol_type = other DNA
tctattctgttccattggtctctgtgcctatttttatgccagtatcatgctgttttggtgactatggccttatagtatag

SEQ ID NO: 36010 - DNA, 80 bp, synthetic construct
  misc_feature 1..80: note = Artificially Synthesized Probe
  source 1..80: mol_type = other DNA
ggttccctctttctcaatcctatgaaatagtgtcaataggattggtaccaattctttgaatgcctggttacattctgctg

SEQ ID NO: 36011 - DNA, 80 bp, synthetic construct
  misc_feature 1..80: note = Artificially Synthesized Probe
  source 1..80: mol_type = other DNA
acctgagaaaaacaagcaatggggaaaggattccctatttaataaatggtgctgggaaaactggctagccatatgtagaa

SEQ ID NO: 36012 - DNA, 80 bp, synthetic construct
  misc_feature 1..80: note = Artificially Synthesized Probe
  source 1..80: mol_type = other DNA
tgatggttttataaatttgggagctccagtgttaggtgcatatatgtttaggattgtgatattttcctgttggacaaggc

SEQ ID NO: 36013 - DNA, 80 bp, synthetic construct
  misc_feature 1..80: note = Artificially Synthesized Probe
  source 1..80: mol_type = other DNA
ggtgttctttgtgcttcttgtatttgtttaggtctctagcaaggttggggaaattttcctcaattattcccccaaatatg

SEQ ID NO: 36014 - DNA, 80 bp, synthetic construct
  misc_feature 1..80: note = Artificially Synthesized Probe
  source 1..80: mol_type = other DNA
ctggagagaattgctgcagttagaggatggtgatgtcaattaggaatggaattccacctgacgctttctgagttggcctt

SEQ ID NO: 36015 - DNA, 80 bp, synthetic construct
  misc_feature 1..80: note = Artificially Synthesized Probe
  source 1..80: mol_type = other DNA
agaaagaaaggactctagtaaaatgatatttactttcgtagtgacttttgccaagattgtggcaggaaggggtggcattg

SEQ ID NO: 36016 - DNA, 80 bp, synthetic construct
  misc_feature 1..80: note = Artificially Synthesized Probe
  source 1..80: mol_type = other DNA
gctcaaatctgaaactccagcactttgggaggcagtggtggaaggattgctagagcctaggaggtcaaggctgcagtgag

SEQ ID NO: 36017 - DNA, 80 bp, synthetic construct
  misc_feature 1..80: note = Artificially Synthesized Probe
  source 1..80: mol_type = other DNA
gtattggccaggctgcattctcctctagaggcttgactgaggaatctgactcagagctcacttgggctgtcaacagaatc

SEQ ID NO: 36018 - DNA, 80 bp, synthetic construct
  misc_feature 1..80: note = Artificially Synthesized Probe
  source 1..80: mol_type = other DNA
gcagaaaaccactgatctgctttctgttgatagatagttctgtctattgtagaatttcattgaaagtgaatcataaaata

SEQ ID NO: 36019 - DNA, 80 bp, synthetic construct
  misc_feature 1..80: note = Artificially Synthesized Probe
  source 1..80: mol_type = other DNA
taaagacttcagcttttactcagagtgacatgggaacctattgaagggttttgagcagaggaggggtctaacaaatgcca

SEQ ID NO: 36020 - DNA, 80 bp, synthetic construct
  misc_feature 1..80: note = Artificially Synthesized Probe
  source 1..80: mol_type = other DNA
aaaaggaagatagagaaggtacaaaccagtgaagtaggagaaaaagtctggagtcccggaagccaaatgaagaatgtgtg

SEQ ID NO: 36021 - DNA, 80 bp, synthetic construct
  misc_feature 1..80: note = Artificially Synthesized Probe
  source 1..80: mol_type = other DNA
tgtttgtttgtttgtttgtttgagacagagtatgtccctgttgcccaggctggagtgcagtggtgcaatctcggctcact

SEQ ID NO: 36022 - DNA, 80 bp, synthetic construct
  misc_feature 1..80: note = Artificially Synthesized Probe
  source 1..80: mol_type = other DNA
tcagtagccacatgtggctcatgcctgccatcctggatggtacatctgtagagtctacagggtaagtgctgtctctagtg

SEQ ID NO: 36023 - DNA, 80 bp, synthetic construct
  misc_feature 1..80: note = Artificially Synthesized Probe
  source 1..80: mol_type = other DNA
cctggtcagattttgttttttagagcagttttaagctcacggcaaagttaagcagaagagccagagatttcccatttact

SEQ ID NO: 36024 - DNA, 80 bp, synthetic construct
  misc_feature 1..80: note = Artificially Synthesized Probe
  source 1..80: mol_type = other DNA
agcgatgcttagagaaagagcaaaccaaggtatggtatatcttgagttagagtaggagttgagttgagtgggagcctaag

SEQ ID NO: 36025 - DNA, 80 bp, synthetic construct
  misc_feature 1..80: note = Artificially Synthesized Probe
  source 1..80: mol_type = other DNA
aatgtggaatcagtagaaaggtagagattgtgcatttgaatcaagactttcttccacttcacattaaagtgtaaaaactt

SEQ ID NO: 36026 - DNA, 80 bp, synthetic construct
  misc_feature 1..80: note = Artificially Synthesized Probe
  source 1..80: mol_type = other DNA
tgaatagctgagtagctgaggagccctgagtagctgggctcccaccaccacgcccggctaatttatgtatttttagtaga

SEQ ID NO: 36027 - DNA, 80 bp, synthetic construct
  misc_feature 1..80: note = Artificially Synthesized Probe
  source 1..80: mol_type = other DNA
cattagttctgactgggaggttggggaaaggtttctataggagaggatgtttgagctgaacctagaagaacaggtttaga

SEQ ID NO: 36028 - DNA, 80 bp, synthetic construct
  misc_feature 1..80: note = Artificially Synthesized Probe
  source 1..80: mol_type = other DNA
tcgttctccatcttgtcctcttccaccccttacagcaactctctgacatcatataattttatttgggaagatatcagaat

SEQ ID NO: 36029 - DNA, 80 bp, synthetic construct
  misc_feature 1..80: note = Artificially Synthesized Probe
  source 1..80: mol_type = other DNA
atccgcccgcctcggcctcccaaagtgctgggattacaggcatgagccaccgtgcccggcccttattttttatttttttg

SEQ ID NO: 36030 - DNA, 80 bp, synthetic construct
  misc_feature 1..80: note = Artificially Synthesized Probe
  source 1..80: mol_type = other DNA
cgcacctgggtagttctgccacaccatcatttcctctgtccttagggagtttgcaatttaaaagggtaaataagacaggt

SEQ ID NO: 36031 - DNA, 80 bp, synthetic construct
  misc_feature 1..80: note = Artificially Synthesized Probe
  source 1..80: mol_type = other DNA
aaagagaagtgctttcttcccatctcccctttcttgagtacataaatttccttagatatcttgacaaagagccaagaaga

SEQ ID NO: 36032 - DNA, 80 bp, synthetic construct
  misc_feature 1..80: note = Artificially Synthesized Probe
  source 1..80: mol_type = other DNA
ggaaagtgatagagccaggattcgaacctaattctttctggctttaggttggtttcatagtgcctctcactttccctgtt

SEQ ID NO: 36033 - DNA, 80 bp, synthetic construct
  misc_feature 1..80: note = Artificially Synthesized Probe
  source 1..80: mol_type = other DNA
tttagcaaatcttctattttactgattcatcaattggtacagatgaattattcttgcagtgccaggccatggaactgata

SEQ ID NO: 36034 - DNA, 80 bp, synthetic construct
  misc_feature 1..80: note = Artificially Synthesized Probe
  source 1..80: mol_type = other DNA
ttgtatgttgccttggacttctagaagtctaggtgttggtggttattatatggcgatagtaaagtaaaatcctccctact

SEQ ID NO: 36035 - DNA, 80 bp, synthetic construct
  misc_feature 1..80: note = Artificially Synthesized Probe
  source 1..80: mol_type = other DNA
actttaccatcagagtcccctctcaccttaagcaaacctaatttataaaattccaattttatgataaaagcattgttttt

SEQ ID NO: 36036 - DNA, 80 bp, synthetic construct
  misc_feature 1..80: note = Artificially Synthesized Probe
  source 1..80: mol_type = other DNA
tgagataacatttggggaaaatgggcactctcatacactaccagtgagtgtaaattgtgacaacatttttagtatgggat

SEQ ID NO: 36037 - DNA, 80 bp, synthetic construct
  misc_feature 1..80: note = Artificially Synthesized Probe
  source 1..80: mol_type = other DNA
agatcgaaaccatcctggctaacacggtgaaccccgtctcttctaaaaatagaaaaaaaaaaattagccgggtgtggtgg

SEQ ID NO: 36038 - DNA, 80 bp, synthetic construct
  misc_feature 1..80: note = Artificially Synthesized Probe
  source 1..80: mol_type = other DNA
caaaaagagacaagtcggatttatttaaactaaagagttttgcacagcaaaagaaactatcaacagagtaaacagacaac

SEQ ID NO: 36039 - DNA, 80 bp, synthetic construct
  misc_feature 1..80: note = Artificially Synthesized Probe
  source 1..80: mol_type = other DNA
acattcttttcagggttgaattttcagtggtatccattatgaaaactcacttcatggattcagtgggcaaatagcggcaa

SEQ ID NO: 36040 - DNA, 80 bp, synthetic construct
  misc_feature 1..80: note = Artificially Synthesized Probe
  source 1..80: mol_type = other DNA
ttcctagaggaagcgaaatctgagctgagctttgaaggatgaataggaggtagaataaataggtagaaagtggataggga

SEQ ID NO: 36041 - DNA, 80 bp, synthetic construct
  misc_feature 1..80: note = Artificially Synthesized Probe
  source 1..80: mol_type = other DNA
gctatggcaagtctccagaattttgctcatgcttttccttctgtgggaaacatctgccaactttttcccttctagtgaac

SEQ ID NO: 36042 - DNA, 80 bp, synthetic construct
  misc_feature 1..80: note = Artificially Synthesized Probe
  source 1..80: mol_type = other DNA
aggccgaggcgggcggatcacgagattaagaccatcctggccaacatggtgaaaccccatctcaactaaaaatacaaaaa

SEQ ID NO: 36043 - DNA, 80 bp, synthetic construct
  misc_feature 1..80: note = Artificially Synthesized Probe
  source 1..80: mol_type = other DNA
agtgttattgagctttttatcatatgcttgttggctgcaggtacgtcttttgaagtgtctgtttatgtcctttgcccact

SEQ ID NO: 36044 - DNA, 80 bp, synthetic construct
  misc_feature 1..80: note = Artificially Synthesized Probe
  source 1..80: mol_type = other DNA
caactgccagtgcagtaggtttgctttacaccagcaacaccacaaacaagtgagaaatacattgcactatgatgttactg

SEQ ID NO: 36045 - DNA, 80 bp, synthetic construct
  misc_feature 1..80: note = Artificially Synthesized Probe
  source 1..80: mol_type = other DNA
gtaaggtttggtcagtacatccagaagcacttgcttcatgctttcataagccctgctttttaatatctaagtgtatttgt

SEQ ID NO: 36046 - DNA, 80 bp, synthetic construct
  misc_feature 1..80: note = Artificially Synthesized Probe
  source 1..80: mol_type = other DNA
tctctgtttgtatatattggagtatgaaccttccaggtccttgaaaatgtgctgggtactagttgaaatggtgattacta

SEQ ID NO: 36047 - DNA, 80 bp, synthetic construct
  misc_feature 1..80: note = Artificially Synthesized Probe
  source 1..80: mol_type = other DNA
atcttggccacaattacaaacttcttagactgcagctccattttggttggaaagcattggttaacaaactcaagaaataa

SEQ ID NO: 36048 - DNA, 80 bp, synthetic construct
  misc_feature 1..80: note = Artificially Synthesized Probe
  source 1..80: mol_type = other DNA
ttggtcctctcaagtgtggagaatagaaagcctcccatagcatatttccttgtttctccctttgggtctacgtcttatgg

SEQ ID NO: 36049 - DNA, 80 bp, synthetic construct
  misc_feature 1..80: note = Artificially Synthesized Probe
  source 1..80: mol_type = other DNA
taagtattggagaatgataaaatatatagctggaaagtaccataaatgttgagctaagggcttcatgttgtaggcaccag

SEQ ID NO: 36050 - DNA, 80 bp, synthetic construct
  misc_feature 1..80: note = Artificially Synthesized Probe
  source 1..80: mol_type = other DNA
cattcagatcaatagtatgtgtgatcagagtgttgaggagctttttgatgtgaggctgtgacatcttgtccacatctttt

SEQ ID NO: 36051 - DNA, 80 bp, synthetic construct
  misc_feature 1..80: note = Artificially Synthesized Probe
  source 1..80: mol_type = other DNA
gcagagactgaaaaccttgcagtgattagtagctcaggcagctccggacaacttcatatgagatttttttttagagtagc

SEQ ID NO: 36052 - DNA, 80 bp, synthetic construct
  misc_feature 1..80: note = Artificially Synthesized Probe
  source 1..80: mol_type = other DNA
ggtggaggtggtagtgatagaaaagaatattccaagtgtatgaagtatagaggtggggaagttcagggtagagaagtagt

SEQ ID NO: 36053 - DNA, 80 bp, synthetic construct
  misc_feature 1..80: note = Artificially Synthesized Probe
  source 1..80: mol_type = other DNA
ctcattcatacattctattcaataacaattgagtgcctaccatgactaggcaatggtgctgtcatggtaggcactagaga

SEQ ID NO: 36054 - DNA, 80 bp, synthetic construct
  misc_feature 1..80: note = Artificially Synthesized Probe
  source 1..80: mol_type = other DNA
ccaaccctagaagcttgctatatttaaccttttatggagccagaatcccctgctaaagtgcagcctctccaagtcacccc

SEQ ID NO: 36055 - DNA, 80 bp, synthetic construct
  misc_feature 1..80: note = Artificially Synthesized Probe
  source 1..80: mol_type = other DNA
tctttgaatgaacaactatagaggattagatgtatggatggatgaacctggtcattcaaaaatccccaacatctctcttt

SEQ ID NO: 36056 - DNA, 80 bp, synthetic construct
  misc_feature 1..80: note = Artificially Synthesized Probe
  source 1..80: mol_type = other DNA
aacccagttgccacacagggggtgcaaaagtgactatggtgactgcaaaatttagaggtcaaaacagagatagtgcaaaa

SEQ ID NO: 36057 - DNA, 80 bp, synthetic construct
  misc_feature 1..80: note = Artificially Synthesized Probe
  source 1..80: mol_type = other DNA
tatacacctatgttatcttcatccaaaacaagatacagaacagcttcatcacctcagaaaatttctttgtgcccctttgc

SEQ ID NO: 36058 - DNA, 80 bp, synthetic construct
  misc_feature 1..80: note = Artificially Synthesized Probe
  source 1..80: mol_type = other DNA
ttcttattttaggttcaagttttaccacttagaccctgacattagtgtgttaaattggcagcccttattttaactataaa

SEQ ID NO: 36059 - DNA, 80 bp, synthetic construct
  misc_feature 1..80: note = Artificially Synthesized Probe
  source 1..80: mol_type = other DNA
catgttgcttaatttcttccaactttgaagctcacatacctagaggcaggcaaaaatgcagctgtggttttacttgaact

SEQ ID NO: 36060 - DNA, 80 bp, synthetic construct
  misc_feature 1..80: note = Artificially Synthesized Probe
  source 1..80: mol_type = other DNA
aagtgattgctgaggttgttcctcttgttacgtgtctgaatgcctctcaagccaggaagataattccttattaaaaatgg

SEQ ID NO: 36061 - DNA, 80 bp, synthetic construct
  misc_feature 1..80: note = Artificially Synthesized Probe
  source 1..80: mol_type = other DNA
gggagcccagtctgctaaaaggggaggacgttgaggacgcggcggctggcgggagagacagctggggagagacatggcag

SEQ ID NO: 36062 - DNA, 80 bp, synthetic construct
  misc_feature 1..80: note = Artificially Synthesized Probe
  source 1..80: mol_type = other DNA
atgcgagatactctgcactgctccaggaggacttcgcctattcagggtttgagtgctgggtggagaatgaggatcagatc

SEQ ID NO: 36063 - DNA, 80 bp, synthetic construct
  misc_feature 1..80: note = Artificially Synthesized Probe
  source 1..80: mol_type = other DNA
aaatttgttcttgttttcagatttatagacgtttcctcccaatggttttctgtaaggcagttagttctctagttagttct

SEQ ID NO: 36064 - DNA, 80 bp, synthetic construct
  misc_feature 1..80: note = Artificially Synthesized Probe
  source 1..80: mol_type = other DNA
tgatggccacttgaaatttttggaaagtagttctatggtatgtatactgtctatcacaataagaacctaagcagaaaaca

SEQ ID NO: 36065 - DNA, 80 bp, synthetic construct
  misc_feature 1..80: note = Artificially Synthesized Probe
  source 1..80: mol_type = other DNA
tctggttacttttaagctccttaagagccttatgacaaaaccagtgctagatgggacaatggcagactggtttttgtcta

SEQ ID NO: 36066 - DNA, 80 bp, synthetic construct
  misc_feature 1..80: note = Artificially Synthesized Probe
  source 1..80: mol_type = other DNA
tggccttagcctaaaaaaaagtctcatattgtgcaacactaggcctggaagcggttctcttttctgatactggaaagcct

SEQ ID NO: 36067 - DNA, 80 bp, synthetic construct
  misc_feature 1..80: note = Artificially Synthesized Probe
  source 1..80: mol_type = other DNA
ccaacctgagtggaaatccagttcagtttaattggatctttttcctgatttcccatgaaaccttggactaattacttctc

SEQ ID NO: 36068 - DNA, 80 bp, synthetic construct
  misc_feature 1..80: note = Artificially Synthesized Probe
  source 1..80: mol_type = other DNA
ttgagatgtgctgtgagtataaaatataccttgaatttcagacttatgaaaaatcatgtaatattatctcagataataat

SEQ ID NO: 36069 - DNA, 80 bp, synthetic construct
  misc_feature 1..80: note = Artificially Synthesized Probe
  source 1..80: mol_type = other DNA
ccttttctctcttaatgagtttatattcctaattggaatggaagcaggtatggaggcgggaagatcaaatttaattgccg

SEQ ID NO: 36070 - DNA, 80 bp, synthetic construct
  misc_feature 1..80: note = Artificially Synthesized Probe
  source 1..80: mol_type = other DNA
agagttgctgaaacaacaaaagctgaattcacatgagaccactataactcagcagtctgtatctgattcccacttggcag

SEQ ID NO: 36071 - DNA, 80 bp, synthetic construct
  misc_feature 1..80: note = Artificially Synthesized Probe
  source 1..80: mol_type = other DNA
cactgagataggaggtctgtgttttttattttagcttaacttgttactactttctagcccatgaattttaatgtctggct

SEQ ID NO: 36072 - DNA, 80 bp, synthetic construct
  misc_feature 1..80: note = Artificially Synthesized Probe
  source 1..80: mol_type = other DNA
tgaaatacagaagctccagagggtggtacgacagaaagagcgccaactggctgatgccaaacaatgtgtgcaatttgtag

SEQ ID NO: 36073 - DNA, 80 bp, synthetic construct
  misc_feature 1..80: note = Artificially Synthesized Probe
  source 1..80: mol_type = other DNA
tgtggtaaattctgaaggggatgtatatatggggtcctacaggaatatctaggaaaggagtcaaggaaaaggaatcaagg

SEQ ID NO: 36074 - DNA, 80 bp, synthetic construct
  misc_feature 1..80: note = Artificially Synthesized Probe
  source 1..80: mol_type = other DNA
aatggttcctttatcttgttaggtcagagtgtatgtgtttgtttaagatttaaaagatttttttgtgtgtggtctcttct

SEQ ID NO: 36075 - DNA, 80 bp, synthetic construct
  misc_feature 1..80: note = Artificially Synthesized Probe
  source 1..80: mol_type = other DNA
gaaaaaaggatgataggaatagtttatccttgagcttattgtaaataatccaggtttaccgtaggacagattctcactta

SEQ ID NO: 36076 - DNA, 80 bp, synthetic construct
  misc_feature 1..80: note = Artificially Synthesized Probe
  source 1..80: mol_type = other DNA
attaagaagagactgatctgttctgccacctactctaagcttcagtcacattgaatccactacatttcactgaatgtaca

SEQ ID NO: 36077 - DNA, 80 bp, synthetic construct
  misc_feature 1..80: note = Artificially Synthesized Probe
  source 1..80: mol_type = other DNA
cctgagcctgaagcatgacccccttccatcattttctgaaaaccagggattttgctttataagggggaagaaaaccaaaa

SEQ ID NO: 36078 - DNA, 80 bp, synthetic construct
  misc_feature 1..80: note = Artificially Synthesized Probe
  source 1..80: mol_type = other DNA
acatgatagctaacctttattagttatagtcttcatgctgggtcaggtactgttttaagatcctaatggatattaactca

SEQ ID NO: 36079 - DNA, 80 bp, synthetic construct
  misc_feature 1..80: note = Artificially Synthesized Probe
  source 1..80: mol_type = other DNA
ttctgcattaggatcttagtgcaacactgctctgcaaacttggaccagggcagagtgagatagcagaggagctgtgccag

SEQ ID NO: 36080 - DNA, 80 bp, synthetic construct
  misc_feature 1..80: note = Artificially Synthesized Probe
  source 1..80: mol_type = other DNA
ttcctcatttctatgtgttttctcctcaaggctaaaaactcttagttgacttgtgctgcatttcagataccagtagctca

SEQ ID NO: 36081 - DNA, 80 bp, synthetic construct
  misc_feature 1..80: note = Artificially Synthesized Probe
  source 1..80: mol_type = other DNA
tcatatttcccctagaaattgtgacaagagctcagcttctgccctaaaacaatagtacttttcctcagagacagttggtg

SEQ ID NO: 36082 - DNA, 80 bp, synthetic construct
  misc_feature 1..80: note = Artificially Synthesized Probe
  source 1..80: mol_type = other DNA
ccacacaaatgtttgagtgaaaaggaatccacccctaagaagcaactatccgagaataaagacatttgttatactaattc

SEQ ID NO: 36083 - DNA, 80 bp, synthetic construct
  misc_feature 1..80: note = Artificially Synthesized Probe
  source 1..80: mol_type = other DNA
cttcattgactgccaaagaggatgtcagcatacccagatccacattaggtaagtatcaaatttcatttcattaagggact

SEQ ID NO: 36084 - DNA, 80 bp, synthetic construct
  misc_feature 1..80: note = Artificially Synthesized Probe
  source 1..80: mol_type = other DNA
tgaagatttgatactgatttccttaattccaatttaacaatataggttcttttttccctcatttcatatttgtatctcct

SEQ ID NO: 36085 - DNA, 80 bp, synthetic construct
  misc_feature 1..80: note = Artificially Synthesized Probe
  source 1..80: mol_type = other DNA
gaacaacctgtgtgtatgttttcttttttcttattattggaatgtgtcctctgtaaattactcaaaggaggcagcagata

SEQ ID NO: 36086 - DNA, 80 bp, synthetic construct
  misc_feature 1..80: note = Artificially Synthesized Probe
  source 1..80: mol_type = other DNA
cgctgtgtgattgctgcttagagttatgacattagatccgtgaaattagatttagaaacatgaaacgagaaatttgagta

SEQ ID NO: 36087 - DNA, 80 bp, synthetic construct
  misc_feature 1..80: note = Artificially Synthesized Probe
  source 1..80: mol_type = other DNA
acttgtcttaccataaagattgtatggatatgtggtatctacaggaaagatattatagcctagtggctctgagtcagctt

SEQ ID NO: 36088 - DNA, 80 bp, synthetic construct
  misc_feature 1..80: note = Artificially Synthesized Probe
  source 1..80: mol_type = other DNA
gattaaatctatacaaagcatttattagagagcccagggcatagtaagtgttagcagctatggttgttatcatgattttt

SEQ ID NO: 36089 - DNA, 80 bp, synthetic construct
  misc_feature 1..80: note = Artificially Synthesized Probe
  source 1..80: mol_type = other DNA
ataggatatgcaaaagcatttgcctcagtgttaaaatgtaaacatggcagacattgtttcctcttttcacagatggaact

SEQ ID NO: 36090 - DNA, 80 bp, synthetic construct
  misc_feature 1..80: note = Artificially Synthesized Probe
  source 1..80: mol_type = other DNA
gctcaaaccttatttttctactgtgaaataaaccatggtaaagctgtcaatctcagctatttgtggagggttagttgatg

SEQ ID NO: 36091 - DNA, 80 bp, synthetic construct
  misc_feature 1..80: note = Artificially Synthesized Probe
  source 1..80: mol_type = other DNA
ctattgtatttatgccttttattcttcattaagtgcagatgcttatgatactgaagaggggagaaaaaagagggacaatt

SEQ ID NO: 36092 - DNA, 80 bp, synthetic construct
  misc_feature 1..80: note = Artificially Synthesized Probe
  source 1..80: mol_type = other DNA
cacatatatgatacctctctggatcattttatattctcttcatttttgttttctcattttgccttccctactagcccctt

SEQ ID NO: 36093 - DNA, 80 bp, synthetic construct
  misc_feature 1..80: note = Artificially Synthesized Probe
  source 1..80: mol_type = other DNA
agcccaggatggaaaaccttgtttgcactaaccagaaagatccttgtctgattttggcagaattaaacggtgacttacta

SEQ ID NO: 36094 - DNA, 80 bp, synthetic construct
  misc_feature 1..80: note = Artificially Synthesized Probe
  source 1..80: mol_type = other DNA
atgttacagatgtatgtttatagttttaatcattgcctcagtgctttcttgtggcagcgtgacaggtataaggagagggg

SEQ ID NO: 36095 - DNA, 80 bp, synthetic construct
  misc_feature 1..80: note = Artificially Synthesized Probe
  source 1..80: mol_type = other DNA
gcttgcaaacagtgttatctggagagagcttgctggtctaacaactttgtgtgataatttggcatctgattagagagcat

SEQ ID NO: 36096 - DNA, 80 bp, synthetic construct
  misc_feature 1..80: note = Artificially Synthesized Probe
  source 1..80: mol_type = other DNA
acattattggactaagttagtaggtcagccttttcctttgatagtgtgtactcttatctgtcacccaaccttctccacac

SEQ ID NO: 36097 - DNA, 80 bp, synthetic construct
  misc_feature 1..80: note = Artificially Synthesized Probe
  source 1..80: mol_type = other DNA
atcctgcaaggaaaggtgacaaacttcctgtgaagttaggaagaaatattagtaacccacacacttgaagtgagttttcc

SEQ ID NO: 36098 - DNA, 80 bp, synthetic construct
  misc_feature 1..80: note = Artificially Synthesized Probe
  source 1..80: mol_type = other DNA
ttgtaggcatgcatttataccagcatgttttataaattatgagtttctatctgtgtccatgaagtcttactagttttcac

SEQ ID NO: 36099 - DNA, 80 bp, synthetic construct
  misc_feature 1..80: note = Artificially Synthesized Probe
  source 1..80: mol_type = other DNA
gatacaccataaaggggtttgactgcagacagcagttttctaccacttctgttccacgatcagaatctgtctagatagag

SEQ ID NO: 36100 - DNA, 80 bp, synthetic construct
  misc_feature 1..80: note = Artificially Synthesized Probe
  source 1..80: mol_type = other DNA
gcaaaataaaacaaaaaaagaggtcatgaagttccccctaaggcttatttgtgcatgttggagttttaagacagttatca

SEQ ID NO: 36101 - DNA, 80 bp, synthetic construct
  misc_feature 1..80: note = Artificially Synthesized Probe
  source 1..80: mol_type = other DNA
ataaaattgccagtctaacatgtaaaacttaatctcgaagaagcaagttaaatgaacagattcttagctcccagagaatc

SEQ ID NO: 36102 - DNA, 80 bp, synthetic construct
  misc_feature 1..80: note = Artificially Synthesized Probe
  source 1..80: mol_type = other DNA
ctctactcagctagtatcctgagtgagatggtttctggggttggtttgaatgagtaagtattggaaataactcttgtaca

SEQ ID NO: 36103 - DNA, 80 bp, synthetic construct
  misc_feature 1..80: note = Artificially Synthesized Probe
  source 1..80: mol_type = other DNA
tctagtgagggctagttgtgtaaccttggactcaccacgtaatctcttagaggtccaggttaatcagtggtcagaagtgg

SEQ ID NO: 36104 - DNA, 80 bp, synthetic construct
  misc_feature 1..80: note = Artificially Synthesized Probe
  source 1..80: mol_type = other DNA
gaaagtttttatgtagccaggcagtggggaataattcaggctttcttgacattcgagtggggtaaccagtgcatccgaca

SEQ ID NO: 36105 - DNA, 80 bp, synthetic construct
  misc_feature 1..80: note = Artificially Synthesized Probe
  source 1..80: mol_type = other DNA
cctatgattcttaaggagaaagtgaatcattggtagatatcctgcacaagcagctggactttccagtaatagctttcttg

SEQ ID NO: 36106 - DNA, 80 bp, synthetic construct
  misc_feature 1..80: note = Artificially Synthesized Probe
  source 1..80: mol_type = other DNA
catggagaatctgaccagaccccattttgagaaggtcagcctacactggaatgaactttttacattagggcatttgtatt

SEQ ID NO: 36107 - DNA, 80 bp, synthetic construct
  misc_feature 1..80: note = Artificially Synthesized Probe
  source 1..80: mol_type = other DNA
gacaaatcgtaattgtatacatttatggggtatatgattatatatatatatacacacaaacaatatggaatgattaaacc

SEQ ID NO: 36108 - DNA, 80 bp, synthetic construct
  misc_feature 1..80: note = Artificially Synthesized Probe
  source 1..80: mol_type = other DNA
gatatcagatttgcacagaggcctttgtggggcagatgggaacccagcacacaaaaagttgaattatatgaagcaatatc

SEQ ID NO: 36109 - DNA, 80 bp, synthetic construct
  misc_feature 1..80: note = Artificially Synthesized Probe
  source 1..80: mol_type = other DNA
tagaacaagataacatatatccagaaggcactttaataatgggtaaacttcattaaagttagacattatttttaagcaga

SEQ ID NO: 36110 - DNA, 80 bp, synthetic construct
  misc_feature 1..80: note = Artificially Synthesized Probe
  source 1..80: mol_type = other DNA
tatgctaagtagattatcatactcagattttgatttctacacttttaagagcgtgggaaaagaccaaagataagcccaaa

SEQ ID NO: 36111 - DNA, 80 bp, synthetic construct
  misc_feature 1..80: note = Artificially Synthesized Probe
  source 1..80: mol_type = other DNA
catttgttttaatttcttatgtgcttttctccctcaccatctctggattctcctcttctccatggggaaattcctcctgc

SEQ ID NO: 36112 - DNA, 80 bp, synthetic construct
  misc_feature 1..80: note = Artificially Synthesized Probe
  source 1..80: mol_type = other DNA
ccacctctcgggttcatgccattctcctgcctcagcctgccgagtagctgggactatgggagcccgccaccacgcccgtc

SEQ ID NO: 36113 - DNA, 80 bp, synthetic construct
  misc_feature 1..80: note = Artificially Synthesized Probe
  source 1..80: mol_type = other DNA
tatgaagttagaacataatattaaatattcttttccatatacacatgcgccctctttatcccctttccacatcccagttt

SEQ ID NO: 36114 - DNA, 80 bp, synthetic construct
  misc_feature 1..80: note = Artificially Synthesized Probe
  source 1..80: mol_type = other DNA
tgaggctcaaaaaagttaagtgaatagacttgttacagccatgtttgcttccactcaaccctagtatgagtttgttgttg

SEQ ID NO: 36115 - DNA, 80 bp, synthetic construct
  misc_feature 1..80: note = Artificially Synthesized Probe
  source 1..80: mol_type = other DNA
ttgcgggctgagatgttggtaagaggtagtattaggaactgttgtgaggaccagacctagccctcaattaagtgtgtttc

SEQ ID NO: 36116 - DNA, 80 bp, synthetic construct
  misc_feature 1..80: note = Artificially Synthesized Probe
  source 1..80: mol_type = other DNA
ttcagatgggttactgggatcctctttagggaaggagccatgctgaagattcagtgaaatggagaatacagggattctga

SEQ ID NO: 36117 - DNA, 80 bp, synthetic construct
  misc_feature 1..80: note = Artificially Synthesized Probe
  source 1..80: mol_type = other DNA
agtgtacaatccctgacttacagatatctggtcccaactaaagcctgggttatctgaaggggagataatggcaaatgcag

SEQ ID NO: 36118 - DNA, 80 bp, synthetic construct
  misc_feature 1..80: note = Artificially Synthesized Probe
  source 1..80: mol_type = other DNA
cttgtcctacattcttgtggccatcctaaatagataaggccatgttaatgtcttaagaaacaccagtgtgtgtggaatga

SEQ ID NO: 36119 - DNA, 80 bp, synthetic construct
  misc_feature 1..80: note = Artificially Synthesized Probe
  source 1..80: mol_type = other DNA
tggcaccttggaggggtcttcacctcatagtgtccctgatgaggatgaggggtggctgtctgatggcactggggctttct

SEQ ID NO: 36120 - DNA, 80 bp, synthetic construct
  misc_feature 1..80: note = Artificially Synthesized Probe
  source 1..80: mol_type = other DNA
aaaagaattaatacaagtgcttagaatagtgcctagcatatgttaagctctcaatgctatttgccatagttataagtgtt

SEQ ID NO: 36121 - DNA, 80 bp, synthetic construct
  misc_feature 1..80: note = Artificially Synthesized Probe
  source 1..80: mol_type = other DNA
gaagggagaggtatttgttatcttatcacccggcatgcaaaagatacagtaaaatcttttgaggatctcctaaggagcaa

SEQ ID NO: 36122 - DNA, 80 bp, synthetic construct
  misc_feature 1..80: note = Artificially Synthesized Probe
  source 1..80: mol_type = other DNA
acatggaggctggagtgtcccgcagggcagctgggcaagggcctcatgattaatggaacaaaagacattataaatgtttt

SEQ ID NO: 36123 - DNA, 80 bp, synthetic construct
  misc_feature 1..80: note = Artificially Synthesized Probe
  source 1..80: mol_type = other DNA
tgtgtgtttaataagcaggatgagctttttccaaagttgggttgacagctaatttaatagtcactcaattgccctggggg

SEQ ID NO: 36124 - DNA, 80 bp, synthetic construct
  misc_feature 1..80: note = Artificially Synthesized Probe
  source 1..80: mol_type = other DNA
tctgactcccaccgctctcccagcagcacctctttcctgtctgatgaactggaagcctgctctgacatggacatagtcag

SEQ ID NO: 36125 - DNA, 80 bp, synthetic construct
  misc_feature 1..80: note = Artificially Synthesized Probe
  source 1..80: mol_type = other DNA
catctcctctttctctgctgcctgtttgatttttcttcaacgacagaggtttggactgttaggggcctaaatgcatcaaa

SEQ ID NO: 36126 - DNA, 80 bp, synthetic construct
  misc_feature 1..80: note = Artificially Synthesized Probe
  source 1..80: mol_type = other DNA
atgttgtgggttcaaacagagcagtaggtaaagaacagaggattttaaaatcagaatgcctcctcaaagaatgcctgggc

SEQ ID NO: 36127 - DNA, 80 bp, synthetic construct
  misc_feature 1..80: note = Artificially Synthesized Probe
  source 1..80: mol_type = other DNA
ttctcttgatgatgtgtctcttttctccttaactttcttttcctaggctttcattttcactccatacccaagctggctag

SEQ ID NO: 36128 - DNA, 80 bp, synthetic construct
  misc_feature 1..80: note = Artificially Synthesized Probe
  source 1..80: mol_type = other DNA
atatcattaggttggagcaaaaagggtaatgatagagggattcagaagaggaaatgatgagccccttttcctactgcaca

SEQ ID NO: 36129 - DNA, 80 bp, synthetic construct
  misc_feature 1..80: note = Artificially Synthesized Probe
  source 1..80: mol_type = other DNA
gtaagtgggagagatggggttgaatctggtcttctgctccaggttttatgtttctgttatatcttttctacttaggatgg

SEQ ID NO: 36130 - DNA, 80 bp, synthetic construct
  misc_feature 1..80: note = Artificially Synthesized Probe
  source 1..80: mol_type = other DNA
ggcaaaatctctggaatccaggaatcagtatatgtttccatactttctcaggtgattccaatatgtacccacatttgaga

SEQ ID NO: 36131 - DNA, 80 bp, synthetic construct
  misc_feature 1..80: note = Artificially Synthesized Probe
  source 1..80: mol_type = other DNA
gtgttcacaggtaagctcaatcctgcattccactgcactcacaacttctaactgtgggagtgaatcctacttttagaact

SEQ ID NO: 36132 - DNA, 80 bp, synthetic construct
  misc_feature 1..80: note = Artificially Synthesized Probe
  source 1..80: mol_type = other DNA
caaagcaaaatggtgcagttaatgtccggtgtaagcatccgtctgacttttctggatatttttgctttgtttggcagggg

SEQ ID NO: 36133 - DNA, 80 bp, synthetic construct
  misc_feature 1..80: note = Artificially Synthesized Probe
  source 1..80: mol_type = other DNA
gaacctgcgccagcgcctggaggaatccatctgcatcaatgaccgcctacgggagcaactggaacaccggctgacctcta

SEQ ID NO: 36134 - DNA, 80 bp, synthetic construct
  misc_feature 1..80: note = Artificially Synthesized Probe
  source 1..80: mol_type = other DNA
tcacaactgacttggaaccaataaaggagggagtgcgaatgcctatcttccctctcaagtttctccagactttactgcag

SEQ ID NO: 36135 - DNA, 80 bp, synthetic construct
  misc_feature 1..80: note = Artificially Synthesized Probe
  source 1..80: mol_type = other DNA
actctttccccagaggacttactgagcctgcagctgtatttttagagtcccttcaataatctttgacaacttgtgaagat

SEQ ID NO: 36136 - DNA, 80 bp, synthetic construct
  misc_feature 1..80: note = Artificially Synthesized Probe
  source 1..80: mol_type = other DNA
ttcattcttacattacaagaggaagggatattggcaagacaattgatgtcctcttttggaaacctaaatgttccctctgc

SEQ ID NO: 36137 - DNA, 80 bp, synthetic construct
  misc_feature 1..80: note = Artificially Synthesized Probe
  source 1..80: mol_type = other DNA
ctcaaacacaaagcccaacgggacaggttggtggcacgagcaagatccggcctgatcattcctaattactttaagaaaat

SEQ ID NO: 36138 - DNA, 80 bp, synthetic construct
  misc_feature 1..80: note = Artificially Synthesized Probe
  source 1..80: mol_type = other DNA
tgtaagtgtgatgttcgcctgtggagaccatgtctaaaatattgttagattaaggggcaccatctttgaaaagggcgttg

SEQ ID NO: 36139 - DNA, 80 bp, synthetic construct
  misc_feature 1..80: note = Artificially Synthesized Probe
  source 1..80: mol_type = other DNA
aaatagttatatgtttgataaaggattgtggctcacatgcaactgggtacatgttatatatgatatatgcaccctgttgc

SEQ ID NO: 36140 - DNA, 80 bp, synthetic construct
  misc_feature 1..80: note = Artificially Synthesized Probe
  source 1..80: mol_type = other DNA
tccctcgtctaaggtgcccaactcacattctcacatgctaccaaaagacctcctccttctctttcatttttgagagtgag

SEQ ID NO: 36141 - DNA, 80 bp, synthetic construct
  misc_feature 1..80: note = Artificially Synthesized Probe
  source 1..80: mol_type = other DNA
tctaaagtctcagaggtttaagctttagtttccttatatttaagatgaggataatgatcatatgtaccttatatgatttt

SEQ ID NO: 36142 - DNA, 80 bp, synthetic construct
  misc_feature 1..80: note = Artificially Synthesized Probe
  source 1..80: mol_type = other DNA
gacaataacatgattatgctgttttggcaattcaataaaaaaacacatgtggtccaccaagcaaaccgcctgaccaccag

SEQ ID NO: 36143 - DNA, 80 bp, synthetic construct
  misc_feature 1..80: note = Artificially Synthesized Probe
  source 1..80: mol_type = other DNA
tgctgtttttgcttcattgcaccataatctctctattcttgaaaatgctgtctgtatccagcttgacttccttgtctgtg

SEQ ID NO: 36144 - DNA, 80 bp, synthetic construct
  misc_feature 1..80: note = Artificially Synthesized Probe
  source 1..80: mol_type = other DNA
tggcccccacatgtggaaggggtgagaagcctggcagccatgtcatttccttgtgcagactgcatagagggagggaaggc

SEQ ID NO: 36145 - DNA, 80 bp, synthetic construct
  misc_feature 1..80: note = Artificially Synthesized Probe
  source 1..80: mol_type = other DNA
aagatgaaggggtgtgaagaaggcggagacatcataaccctggccatccataaatgttcagtttatttacttctctgaag

SEQ ID NO: 36146 - DNA, 80 bp, synthetic construct
  misc_feature 1..80: note = Artificially Synthesized Probe
  source 1..80: mol_type = other DNA
gaaatccagttcaagagagttgagaagactgtagaatccttctttgaattggaaagagccacaaagcacagggtgcttta

SEQ ID NO: 36147 - DNA, 80 bp, synthetic construct
  misc_feature 1..80: note = Artificially Synthesized Probe
  source 1..80: mol_type = other DNA
tgtcatcatctctcctttttactccaatttttcttctttgaggccaagttcagagactggagaaatgcaattcagctgac

SEQ ID NO: 36148 - DNA, 80 bp, synthetic construct
  misc_feature 1..80: note = Artificially Synthesized Probe
  source 1..80: mol_type = other DNA
gcatgtttcatgctaagcacttctttcttgggtggacatggcaaaggcctctttctgctgagacaaagtgatttggagag

SEQ ID NO: 36149 - DNA, 80 bp, synthetic construct
  misc_feature 1..80: note = Artificially Synthesized Probe
  source 1..80: mol_type = other DNA
gaactagcaagagcacatttcttgcctcatcagctgtcctgagatggaaaactcagtgaatataggaccctgattccgat

SEQ ID NO: 36150 - DNA, 80 bp, synthetic construct
  misc_feature 1..80: note = Artificially Synthesized Probe
  source 1..80: mol_type = other DNA
aaaaagtatgtcattccataaacattgatataaaaattttaaaatattccttgggaaaagttcttagctacatgcttttg

SEQ ID NO: 36151 - DNA, 80 bp, synthetic construct
  misc_feature 1..80: note = Artificially Synthesized Probe
  source 1..80: mol_type = other DNA
gaggttcctcttgcttgggggaaagaaagggaagtaagctaggggctttacctgggaatgcggagaacaatccctgatct

SEQ ID NO: 36152 - DNA, 80 bp, synthetic construct
  misc_feature 1..80: note = Artificially Synthesized Probe
  source 1..80: mol_type = other DNA
tagaagagggcctgaaaagagaaaatcaaagattcattggccttaaagagggacttgagaaggagcaaagagtagaacac

SEQ ID NO: 36153 - DNA, 80 bp, synthetic construct
  misc_feature 1..80: note = Artificially Synthesized Probe
  source 1..80: mol_type = other DNA
ccttgcccatgcctatgtcctgaatggtattgcctaggttttcttctagggtttttatggttttacatctaacatttaag

SEQ ID NO: 36154 - DNA, 80 bp, synthetic construct
  misc_feature 1..80: note = Artificially Synthesized Probe
  source 1..80: mol_type = other DNA
tccaacactatgttgaataggagtggtgggagagggcatccctgtcttgtgccagttttcaaagggaatgcttccagttt

SEQ ID NO: 36155 - DNA, 80 bp, synthetic construct
  misc_feature 1..80: note = Artificially Synthesized Probe
  source 1..80: mol_type = other DNA
cttcttcctggtttagtcttgcgagggtgtatgtgtcaaggaatttatccatttcttctagattttcttgtttatttgca

SEQ ID NO: 36156 - DNA, 80 bp, synthetic construct
  misc_feature 1..80: note = Artificially Synthesized Probe
  source 1..80: mol_type = other DNA
ttatgaatctgggtgctcctgtattgggtacatatatatttaggatagttagctcttcttgttgaattgatccctttacc

SEQ ID NO: 36157 - DNA, 80 bp, synthetic construct
  misc_feature 1..80: note = Artificially Synthesized Probe
  source 1..80: mol_type = other DNA
acttctctgcattggttattctagttagtcgttcatctaatcttttttcaaggtttttaacttctttgcaatgggttcga

SEQ ID NO: 36158 - DNA, 80 bp, synthetic construct
  misc_feature 1..80: note = Artificially Synthesized Probe
  source 1..80: mol_type = other DNA
tgccgtttgctaagaacattggaaaagtgctgtattagcatgggagtgacccaattttccaggtgccatctgccacagct

SEQ ID NO: 36159 - DNA, 80 bp, synthetic construct
  misc_feature 1..80: note = Artificially Synthesized Probe
  source 1..80: mol_type = other DNA
aaagttctaggattacaggcgtgagccactgctcccggccttattttacctattaatagatgcagtttcttcatagcata

SEQ ID NO: 36160 - DNA, 80 bp, synthetic construct
  misc_feature 1..80: note = Artificially Synthesized Probe
  source 1..80: mol_type = other DNA
taccgaccttctgaagcctgcttctgtcacctcatcaaactaattctccatccagttttgttcccttgctggtgaggact

SEQ ID NO: 36161 - DNA, 80 bp, synthetic construct
  misc_feature 1..80: note = Artificially Synthesized Probe
  source 1..80: mol_type = other DNA
tttttttttgtattttggtagagacagggtttcaccatattgcccagactggtttcaaactcctgaggtcaagccattct

SEQ ID NO: 36162 - DNA, 80 bp, synthetic construct
  misc_feature 1..80: note = Artificially Synthesized Probe
  source 1..80: mol_type = other DNA
caaatctccatttctggttagaaaatcttgccaaaaccaaccaaacaaatgcatagaagtatatgaagaaggaaatgaaa

SEQ ID NO: 36163 - DNA, 80 bp, synthetic construct
  misc_feature 1..80: note = Artificially Synthesized Probe
  source 1..80: mol_type = other DNA
gagttttcttttgttcacatcattgggccattgccctacatctctttggaagaaatgacctatatgaaaagctttacttc

SEQ ID NO: 36164 - DNA, 80 bp, synthetic construct
  misc_feature 1..80: note = Artificially Synthesized Probe
  source 1..80: mol_type = other DNA
gagcaaggggaccagggaggttgtgcagaggcttctgcacagcaaggcagacattcttcttggagcccccaacccaaatc

SEQ ID NO: 36165 - DNA, 80 bp, synthetic construct
  misc_feature 1..80: note = Artificially Synthesized Probe
  source 1..80: mol_type = other DNA
cagtacttacctggaataggaaaacgatggggagggtgaccaaagattgcaaaaatctttgaagcttatctacttgagag

SEQ ID NO: 36166 - DNA, 80 bp, synthetic construct
  misc_feature 1..80: note = Artificially Synthesized Probe
  source 1..80: mol_type = other DNA
gccatcagttagagaatgtttgaggaatgatccattcatatcaagaaggacatttcaaagatcaaagcctgatggaaatg

SEQ ID NO: 36167 - DNA, 80 bp, synthetic construct
  misc_feature 1..80: note = Artificially Synthesized Probe
  source 1..80: mol_type = other DNA
tcaagctgacatcgcatggccactgagttggttagacctgagtctaggagcctcggctgaagcagactcaggctcaaacc

SEQ ID NO: 36168 - DNA, 80 bp, synthetic construct
  misc_feature 1..80: note = Artificially Synthesized Probe
  source 1..80: mol_type = other DNA
acctagattcagtaatccccgggttaccttcatctccacctccctcctaagaagtggggcacccacaaatcaatcgtgca

SEQ ID NO: 36169 - DNA, 80 bp, synthetic construct
  misc_feature 1..80: note = Artificially Synthesized Probe
  source 1..80: mol_type = other DNA
ctgaattgccaccaaaaaaagcaaatcttcatgaagtgcaaatcctcatgaagtgcaaagcctcatgaagtgcatctcag

SEQ ID NO: 36170 - DNA, 80 bp, synthetic construct
  misc_feature 1..80: note = Artificially Synthesized Probe
  source 1..80: mol_type = other DNA
cctccatccctcccaacatgtcagaagccaatgggccagccgggtgagaggccctgcccagctacccagtgttcatggct

SEQ ID NO: 36171 - DNA, 80 bp, synthetic construct
  misc_feature 1..80: note = Artificially Synthesized Probe
  source 1..80: mol_type = other DNA
gactggacagtggagaggaagagaccagcaggcaaggaccccccggccaggcatcactacaggggacacagaacccagag

SEQ ID NO: 36172 - DNA, 80 bp, synthetic construct
  misc_feature 1..80: note = Artificially Synthesized Probe
  source 1..80: mol_type = other DNA
gttcccatactttctttgtgaaacaagagctgtgaaaacgtgtggggcagagagaagtgacagagtcaggtctgagatcc

SEQ ID NO: 36173 - DNA, 80 bp, synthetic construct
  misc_feature 1..80: note = Artificially Synthesized Probe
  source 1..80: mol_type = other DNA
tctttccagaatctctggtatatgtccaggtgtcacgctgtgatctgtgtggcaccatctgagtgtcacgttatgtgaat

SEQ ID NO: 36174 - DNA, 80 bp, synthetic construct
  misc_feature 1..80: note = Artificially Synthesized Probe
  source 1..80: mol_type = other DNA
gaggagacactgtccaaactgccacaggcacaacaggcaccacgacaagcaggcaggagtgtgctgtgcttggcctcagg

SEQ ID NO: 36175 - DNA, 80 bp, synthetic construct
  misc_feature 1..80: note = Artificially Synthesized Probe
  source 1..80: mol_type = other DNA
catgtaaacaaatgtcagaaccaggaagtaagaggagggtctggggtcacatccaactctctgaaggacagaatcccagt

SEQ ID NO: 36176 - DNA, 80 bp, synthetic construct
  misc_feature 1..80: note = Artificially Synthesized Probe
  source 1..80: mol_type = other DNA
ctttcctctcttgcggcagtgccctcacttcagctcatttgctgacgagctcactgactacaagacaaagaatatgctgg

SEQ ID NO: 36177 - DNA, 80 bp, synthetic construct
  misc_feature 1..80: note = Artificially Synthesized Probe
  source 1..80: mol_type = other DNA
cttgttgcaattcctgtttcaggtgttcttgaagtacctgaattttgccacgttgtacctgaagatctatcacctgagct

SEQ ID NO: 36178 - DNA, 80 bp, synthetic construct
  misc_feature 1..80: note = Artificially Synthesized Probe
  source 1..80: mol_type = other DNA
gagggaggctctatgttggggctgggaagccgtccatgcaatggcctgggggctgagccacaaaggagaactgtgaagac

SEQ ID NO: 36179 - DNA, 80 bp, synthetic construct
  misc_feature 1..80: note = Artificially Synthesized Probe
  source 1..80: mol_type = other DNA
ggtttgaggcaccgcaccgagcctggcttggttttgaaatggatgcccctgtctcattgtgtatttcctgccctggtctt

SEQ ID NO: 36180 - DNA, 80 bp, synthetic construct
  misc_feature 1..80: note = Artificially Synthesized Probe
  source 1..80: mol_type = other DNA
caaccagagtttttaaatatattttcaacacaagtcctttatcagatatgtttgctttgagagcttcttgctaaattggg

SEQ ID NO: 36181 - DNA, 80 bp, synthetic construct
  misc_feature 1..80: note = Artificially Synthesized Probe
  source 1..80: mol_type = other DNA
agggaatagagagcaggtcccttaagttcatgggcaaatgtctgaacagccttttctaaaggaaagggggagaagtgggg

SEQ ID NO: 36182 - DNA, 80 bp, synthetic construct
  misc_feature 1..80: note = Artificially Synthesized Probe
  source 1..80: mol_type = other DNA
tctacaaaaaaagaagagtgatttgcaaatattttctaccaagatgtggcttgtcttttaactcactttacactgtattt

SEQ ID NO: 36183 - DNA, 80 bp, synthetic construct
  misc_feature 1..80: note = Artificially Synthesized Probe
  source 1..80: mol_type = other DNA
taggtttagagtaagtcttgaagttgggaatgtcagcgctctagttgtctttcttctgcagtattgtgctagctattctg

SEQ ID NO: 36184 - DNA, 80 bp, synthetic construct
  misc_feature 1..80: note = Artificially Synthesized Probe
  source 1..80: mol_type = other DNA
tgccttattgcactagctaggacttcaagtataatgttgaatgtgagtggtgagaggagggagatatctttgccttattc

SEQ ID NO: 36185 - DNA, 80 bp, synthetic construct
  misc_feature 1..80: note = Artificially Synthesized Probe
  source 1..80: mol_type = other DNA
tgaatttttaaaatccacttgaggaagttctctctatttctagtttgctaagtgtttttattcagaatgagtgttggatt

SEQ ID NO: 36186 - DNA, 80 bp, synthetic construct
  misc_feature 1..80: note = Artificially Synthesized Probe
  source 1..80: mol_type = other DNA
ttgctttaggcttaatttgaagttctttttctagtttcttaagctttgagtgttgatttagatctttcttcttgtttatt

SEQ ID NO: 36187 - DNA, 80 bp, synthetic construct
  misc_feature 1..80: note = Artificially Synthesized Probe
  source 1..80: mol_type = other DNA
ccttacagctccatcagcttttgcttcatgtgtttcgaagctttgttattagatgtgtgaacatgaatgatttttatgtc

SEQ ID NO: 36188 - DNA, 80 bp, synthetic construct
  misc_feature 1..80: note = Artificially Synthesized Probe
  source 1..80: mol_type = other DNA
ataatcatttatgactactctaagccctcttccaaatagcattatactgcttcacttagagtgtggctatcttaccacaa

SEQ ID NO: 36189 - DNA, 80 bp, synthetic construct
  misc_feature 1..80: note = Artificially Synthesized Probe
  source 1..80: mol_type = other DNA
ggtgtctgtcaatacttttggaaaatctcagccattattacttccaacatgtcttctccttcgctctttctgctccttcc

SEQ ID NO: 36190 - DNA, 80 bp, synthetic construct
  misc_feature 1..80: note = Artificially Synthesized Probe
  source 1..80: mol_type = other DNA
aacaaaataccacacaccgagcacctgagacagtgggcattcgtttctgacacttctggaggctgtgaagttccagatga

SEQ ID NO: 36191 - DNA, 80 bp, synthetic construct
  misc_feature 1..80: note = Artificially Synthesized Probe
  source 1..80: mol_type = other DNA
catttttaggcatcctgacttgcaggaggcacaggcctgcctcacggctctttttgaaaataaaagtttgtgatgagcaa

SEQ ID NO: 36192 - DNA, 80 bp, synthetic construct
  misc_feature 1..80: note = Artificially Synthesized Probe
  source 1..80: mol_type = other DNA
gaattgtcataatggctatgtttaatggctggctctcagaatgcctgaggattcaacaaccagctctgagaagctcacca

SEQ ID NO: 36193 - DNA, 80 bp, synthetic construct
  misc_feature 1..80: note = Artificially Synthesized Probe
  source 1..80: mol_type = other DNA
agggggtaggtcccacccagcactggatgtttggcttaacaagttcccaacattttaaagtcgagacaattcacgtaaga

SEQ ID NO: 36194 - DNA, 80 bp, synthetic construct
  misc_feature 1..80: note = Artificially Synthesized Probe
  source 1..80: mol_type = other DNA
ggccccaggggttggtgggtcctcagggggggcctcctggaaaggacttgaggccaggccttgggaggaggagggcctgg

SEQ ID NO: 36195 - DNA, 80 bp, synthetic construct
  misc_feature 1..80: note = Artificially Synthesized Probe
  source 1..80: mol_type = other DNA
gacgtgcatggacctggaggatgccactggccaaaagctaggatctcactcacatgtgggatccgaaaaccctgaattca

SEQ ID NO: 36196 - DNA, 80 bp, synthetic construct
  misc_feature 1..80: note = Artificially Synthesized Probe
  source 1..80: mol_type = other DNA
agataaactaaaatcagtaaaatcaatgtactgggaaataaagctacgaacatctcactgcccttggcaacaggagagcc

SEQ ID NO: 36197 - DNA, 80 bp, synthetic construct
  misc_feature 1..80: note = Artificially Synthesized Probe
  source 1..80: mol_type = other DNA
ctacctcaactgcgagcggtactccgtgggcctcctggacatgaccaaggagaaggtgaggcttccgtggctcagggacc

SEQ ID NO: 36198 - DNA, 80 bp, synthetic construct
  misc_feature 1..80: note = Artificially Synthesized Probe
  source 1..80: mol_type = other DNA
tctcaggaaattgtcttctacaaagtgatcgactacgtcctccacggcaaggaggagatcaaggtcattccgtaagtgca

SEQ ID NO: 36199 - DNA, 80 bp, synthetic construct
  misc_feature 1..80: note = Artificially Synthesized Probe
  source 1..80: mol_type = other DNA
ttccaagctacgtggcagaaagcggctttgtgagtcccgtgctgtctggagtccccacagccttgccctcactgggtgcg

SEQ ID NO: 36200 - DNA, 80 bp, synthetic construct
  misc_feature 1..80: note = Artificially Synthesized Probe
  source 1..80: mol_type = other DNA
ctacctcctccggtgggaaaatatcatgacacaaaaaccatggacacaaactccaaatgcagagagggagagagggaatg

SEQ ID NO: 36201 - DNA, 80 bp, synthetic construct
  misc_feature 1..80: note = Artificially Synthesized Probe
  source 1..80: mol_type = other DNA
ggctgtgcggcaggggcaggtcgtccaggggtcacccaggggtcatggctgtgtggcacaggcaggtcgtccaggggtcc

SEQ ID NO: 36202 - DNA, 80 bp, synthetic construct
  misc_feature 1..80: note = Artificially Synthesized Probe
  source 1..80: mol_type = other DNA
gccagggccttcccagggtgaaagcacaagctcttgacagcaccttcctctagctcacacggggtggacgcaccgccgtc

SEQ ID NO: 36203 - DNA, 80 bp, synthetic construct
  misc_feature 1..80: note = Artificially Synthesized Probe
  source 1..80: mol_type = other DNA
gtgcacatggatatatatagacacatgcttgtgtgtgtctcctagagacgattgctggatcaatgtggggattatgtggt

SEQ ID NO: 36204 - DNA, 80 bp, synthetic construct
  misc_feature 1..80: note = Artificially Synthesized Probe
  source 1..80: mol_type = other DNA
cacaggaagtttagagggccgacatgttcatcacagaacaggtaaaatgcacacgggaagtaagcataaaacaaataatt

SEQ ID NO: 36205 - DNA, 80 bp, synthetic construct
  misc_feature 1..80: note = Artificially Synthesized Probe
  source 1..80: mol_type = other DNA
gagaatcctcttttctcatgcccctctgagaacaggtgcagcaggccagcattttcaaaagaagttttactaaatactaa

SEQ ID NO: 36206 - DNA, 80 bp, synthetic construct
  misc_feature 1..80: note = Artificially Synthesized Probe
  source 1..80: mol_type = other DNA
caactccacgcccttggcgtgaattaggcttcgcatagcaggctatgtagaaagtggagtccacggccaggccccgtact

SEQ ID NO: 36207 - DNA, 80 bp, synthetic construct
  misc_feature 1..80: note = Artificially Synthesized Probe
  source 1..80: mol_type = other DNA
acgcttgtggggaagacaactggaaagggcccctcatggggtggggtggaagccgaaggggaagcggcccgggacccacc

SEQ ID NO: 36208 - DNA, 80 bp, synthetic construct
  misc_feature 1..80: note = Artificially Synthesized Probe
  source 1..80: mol_type = other DNA
cggcagcttgtcgagggctgtgaaacaaatgcgccgtccttatttccccccagctctcagggagatggtgcagagctggg

SEQ ID NO: 36209 - DNA, 80 bp, synthetic construct
  misc_feature 1..80: note = Artificially Synthesized Probe
  source 1..80: mol_type = other DNA
tggaaaggacagtcttggatcagcagcccattgtgagtgctgcttctggaaccttccactcctgaaacgggtgttagaga

SEQ ID NO: 36210 - DNA, 80 bp, synthetic construct
  misc_feature 1..80: note = Artificially Synthesized Probe
  source 1..80: mol_type = other DNA
tcggggggctgggcggggccccaggagctgcctccctggtcactgttctcccgccctctgttcctcccaccagcctatga

SEQ ID NO: 36211 - DNA, 80 bp, synthetic construct
  misc_feature 1..80: note = Artificially Synthesized Probe
  source 1..80: mol_type = other DNA
tgtgtgatgcccataagagccagctgcctccggccacactccctggtgatggaatccacgccccaaggaggatgccacgg

SEQ ID NO: 36212 - DNA, 80 bp, synthetic construct
  misc_feature 1..80: note = Artificially Synthesized Probe
  source 1..80: mol_type = other DNA
gaagtaaccatatcttatgtcctttataaaggacttagttgcaacaagtcagcacacccccaagttcaaatcccaaaggc

SEQ ID NO: 36213 - DNA, 80 bp, synthetic construct
  misc_feature 1..80: note = Artificially Synthesized Probe
  source 1..80: mol_type = other DNA
catgctattcccctaccctatgctgctcccactaccccatgctattcccactactccatgctgctgccactaccccatgc

SEQ ID NO: 36214 - DNA, 80 bp, synthetic construct
  misc_feature 1..80: note = Artificially Synthesized Probe
  source 1..80: mol_type = other DNA
ctcaatcttcacccactaggatttgggttctgcctgtggctatttgctacaagaggttaggaagcccaagaaaatgactg

SEQ ID NO: 36215 - DNA, 80 bp, synthetic construct
  misc_feature 1..80: note = Artificially Synthesized Probe
  source 1..80: mol_type = other DNA
atcctgaacaggtcagggtcagagtcagttaagtttggaagaatcccagagcaataaaacttgtgtcccatttgggacct

SEQ ID NO: 36216 - DNA, 80 bp, synthetic construct
  misc_feature 1..80: note = Artificially Synthesized Probe
  source 1..80: mol_type = other DNA
attgttatttgctatttaccacaattgcaaaatcaacttgtcaaggaaagacaattagagtccttcaaatatcttgatgt

SEQ ID NO: 36217 - DNA, 80 bp, synthetic construct
  misc_feature 1..80: note = Artificially Synthesized Probe
  source 1..80: mol_type = other DNA
ccgtgaaactgtatgtaattgtcatggagatctaggatatccacaataaaccatcccgtgtttctctctgatgttgacgt

SEQ ID NO: 36218 - DNA, 80 bp, synthetic construct
  misc_feature 1..80: note = Artificially Synthesized Probe
  source 1..80: mol_type = other DNA
gaggaatggaataagggaatggggacgtggccacatggcacgaatgccatggagatgttagaattatcttggttgacttg

SEQ ID NO: 36219 - DNA, 80 bp, synthetic construct
  misc_feature 1..80: note = Artificially Synthesized Probe
  source 1..80: mol_type = other DNA
agttgcctttagtctataaagtcttaaaggagaagaaatgaactgtcgccaagctgtatcgtaaattccagggttaaaag

SEQ ID NO: 36220 - DNA, 80 bp, synthetic construct
  misc_feature 1..80: note = Artificially Synthesized Probe
  source 1..80: mol_type = other DNA
actctagcctgggcaacagagcaagactccatctcaaaaaagaaaaaaaaaaaaataaagaatctgtttgagtccctgct

SEQ ID NO: 36221 - DNA, 80 bp, synthetic construct
  misc_feature 1..80: note = Artificially Synthesized Probe
  source 1..80: mol_type = other DNA
ttgtgacttcacttggtggctacttggacatgtcctggaatctccttttttaaacgaggcaccatccatatcctatcctt

SEQ ID NO: 36222 - DNA, 80 bp, synthetic construct
  misc_feature 1..80: note = Artificially Synthesized Probe
  source 1..80: mol_type = other DNA
aactgactgcactgtcttttaaaaatagccatgttaaaattcatttacaataatgacagcagctttaacatgctttctac

SEQ ID NO: 36223 - DNA, 80 bp, synthetic construct
  misc_feature 1..80: note = Artificially Synthesized Probe
  source 1..80: mol_type = other DNA
tgtattaaactgagcatgtacaatcttcacaccaggaagttccatttccaaaggaatgttaggggccagcttagccgcaa

SEQ ID NO: 36224 - DNA, 80 bp, synthetic construct
  misc_feature 1..80: note = Artificially Synthesized Probe
  source 1..80: mol_type = other DNA
agccctagaaaaaaccaataaatgcttatcaccttgaaattaatgattagaggagaaataaggtggtgtttcactctttc

SEQ ID NO: 36225 - DNA, 80 bp, synthetic construct
  misc_feature 1..80: note = Artificially Synthesized Probe
  source 1..80: mol_type = other DNA
gggatttgaaacacagagttaaatcctgggagacttcggcctcccagtaatgaacctactcaacaagcatttataactac

SEQ ID NO: 36226 - DNA, 80 bp, synthetic construct
  misc_feature 1..80: note = Artificially Synthesized Probe
  source 1..80: mol_type = other DNA
ggtcaccacgacctgttcctgatgacctggaaaggcaggtgctaatgagattttctggggttgacttagtgacttggcaa

SEQ ID NO: 36227 - DNA, 80 bp, synthetic construct
  misc_feature 1..80: note = Artificially Synthesized Probe
  source 1..80: mol_type = other DNA
aatgcacccgaaaaaaactacatttgttttaaaagttaaaaacaaatctagttgtaggctggtatgcagccactcacaat

SEQ ID NO: 36228 - DNA, 80 bp, synthetic construct
  misc_feature 1..80: note = Artificially Synthesized Probe
  source 1..80: mol_type = other DNA
ttgtagatggtcgcttattgagcatttattctgtctcatttctaggtgctgggggtataatgttgagccagtcagaccag

SEQ ID NO: 36229 - DNA, 80 bp, synthetic construct
  misc_feature 1..80: note = Artificially Synthesized Probe
  source 1..80: mol_type = other DNA
gagaagatatttgaaaaggatgatctgaagatgatcagtttctctactgagagacgagaaggaagagcttgctccttatc

SEQ ID NO: 36230 - DNA, 80 bp, synthetic construct
  misc_feature 1..80: note = Artificially Synthesized Probe
  source 1..80: mol_type = other DNA
tgagcgaaaccaacagcatcactactgttaataaaggcatctttacccacgacgagattgacggaaagattagaggagga

SEQ ID NO: 36231 - DNA, 80 bp, synthetic construct
  misc_feature 1..80: note = Artificially Synthesized Probe
  source 1..80: mol_type = other DNA
tttactctagtccccaaaagattaaagtcagtaattcagagagagaaaatgtgtatggttcacaggaggattttcacttt

SEQ ID NO: 36232 - DNA, 80 bp, synthetic construct
  misc_feature 1..80: note = Artificially Synthesized Probe
  source 1..80: mol_type = other DNA
gagtgtctctcttccctaggtgtaagaccagagtttttcatagaagattcttgtgcctgagaatatgaacaacttcctgt

SEQ ID NO: 36233 - DNA, 80 bp, synthetic construct
  misc_feature 1..80: note = Artificially Synthesized Probe
  source 1..80: mol_type = other DNA
tctgcccttatttcttcttagccttaagatgataattaaatataggtagtgttgtcctgtaaataaggcaacttctctga

SEQ ID NO: 36234 - DNA, 80 bp, synthetic construct
  misc_feature 1..80: note = Artificially Synthesized Probe
  source 1..80: mol_type = other DNA
atccttttttctccagtgagcagtttcaagtgtttcccatctctcactgggaagagcttgaggaaatggtgactatgaaa

SEQ ID NO: 36235 - DNA, 80 bp, synthetic construct
  misc_feature 1..80: note = Artificially Synthesized Probe
  source 1..80: mol_type = other DNA
gggttgagaaacaaaaactcaaatttcatattgttccatggccttttgctattcatctgcaatgacatcctgaagcatga

SEQ ID NO: 36236 - DNA, 80 bp, synthetic construct
  misc_feature 1..80: note = Artificially Synthesized Probe
  source 1..80: mol_type = other DNA
aatacttgctgaattacttacatgctggggtgacggatgcaaccatgatgaaggatcactggggatttggtacttcggtc

SEQ ID NO: 36237 - DNA, 80 bp, synthetic construct
  misc_feature 1..80: note = Artificially Synthesized Probe
  source 1..80: mol_type = other DNA
agattactttccatgcaacagctgagagtgatggcagaacaccattttgagaactggctcccaggacaggtcctggcaat

SEQ ID NO: 36238 - DNA, 80 bp, synthetic construct
  misc_feature 1..80: note = Artificially Synthesized Probe
  source 1..80: mol_type = other DNA
tactgatgttattcaacatcttttcacaaaagaaatcagaggcttatggagacaagtagaaaacttgaaggacaaattca

SEQ ID NO: 36239 - DNA, 80 bp, synthetic construct
  misc_feature 1..80: note = Artificially Synthesized Probe
  source 1..80: mol_type = other DNA
tgctctaaaacgcatacctgtggttctgattctaagttgattttgaaaggatgggctttcccatcttcagatacttgtgg

SEQ ID NO: 36240 - DNA, 80 bp, synthetic construct
  misc_feature 1..80: note = Artificially Synthesized Probe
  source 1..80: mol_type = other DNA
tggtggattgattgatccttctgtaccacagcacggaaaactgtgagtacaatcataacaggataaacacacactaacaa

SEQ ID NO: 36241 - DNA, 80 bp, synthetic construct
  misc_feature 1..80: note = Artificially Synthesized Probe
  source 1..80: mol_type = other DNA
tttgtgcctgacatttgtgtttcagcctggtaacattttaaatgtttaattgggcagaaagactgtaaatctaactaaag

SEQ ID NO: 36242 - DNA, 80 bp, synthetic construct
  misc_feature 1..80: note = Artificially Synthesized Probe
  source 1..80: mol_type = other DNA
taacaaattgctaaagatccagtgtgagttaacatgagcgtacagaactcccggaaaccagagacaaaggaagtttgtat

SEQ ID NO: 36243 - DNA, 80 bp, synthetic construct
  misc_feature 1..80: note = Artificially Synthesized Probe
  source 1..80: mol_type = other DNA
aattgcggttctaaggaagatacaagttcatctgaataaataaaaattgctaaaataataagttgtcttgtgtcctggat

SEQ ID NO: 36244 - DNA, 80 bp, synthetic construct
  misc_feature 1..80: note = Artificially Synthesized Probe
  source 1..80: mol_type = other DNA
tggttaggatgagtgtaaggtgggatgagtgggggtttgtttctgcatgtgtccacactaattttaaacacacatctgaa

SEQ ID NO: 36245 - DNA, 80 bp, synthetic construct
  misc_feature 1..80: note = Artificially Synthesized Probe
  source 1..80: mol_type = other DNA
aaggctccagtcctattccagatgctcggaatcaggaacagaatctctaggagaggagccagggaatttatgctttcaac

SEQ ID NO: 36246 - DNA, 80 bp, synthetic construct
  misc_feature 1..80: note = Artificially Synthesized Probe
  source 1..80: mol_type = other DNA
atctcgcattgcctctcctgcaggtaatctttccttcaacacctcctagctctttgaccatacttttcttgtggaattct

SEQ ID NO: 36247 - DNA, 80 bp, synthetic construct
  misc_feature 1..80: note = Artificially Synthesized Probe
  source 1..80: mol_type = other DNA
ggggtcttggaatgtgtcccctgtggatgagaggggattactatattccatattgaaatcttgtcaaagcaaacgatttg

SEQ ID NO: 36248 - DNA, 80 bp, synthetic construct
  misc_feature 1..80: note = Artificially Synthesized Probe
  source 1..80: mol_type = other DNA
gctttaagtgtagatattggtatttcaattctttgtatattaagaacttatttaaaactgacacatcagccaggcgtggt

SEQ ID NO: 36249 - DNA, 80 bp, synthetic construct
  misc_feature 1..80: note = Artificially Synthesized Probe
  source 1..80: mol_type = other DNA
agtagtagaaaaaatggaaagtggcagatgttgaagacagcatcaataaggccagtgatgaacaggatggcacaaaacaa

SEQ ID NO: 36250 - DNA, 80 bp, synthetic construct
  misc_feature 1..80: note = Artificially Synthesized Probe
  source 1..80: mol_type = other DNA
accaaatgtcaaaaatgagtgatacaaattagttatgagttaggaattccagatagaattggtttccctaataataactg

SEQ ID NO: 36251 - DNA, 80 bp, synthetic construct
  misc_feature 1..80: note = Artificially Synthesized Probe
  source 1..80: mol_type = other DNA
gttggtaattcctaagccaagttctcagctttggaaaacgtgctcaaaatgcctggaaactgaggagtgagcattaggaa

SEQ ID NO: 36252 - DNA, 80 bp, synthetic construct
  misc_feature 1..80: note = Artificially Synthesized Probe
  source 1..80: mol_type = other DNA
agcctgaagccccagggcgcagggcccgggaggatcaccgtctggggcatgccgccttcctcccgcccaccgggctctaa

SEQ ID NO: 36253 - DNA, 80 bp, synthetic construct
  misc_feature 1..80: note = Artificially Synthesized Probe
  source 1..80: mol_type = other DNA
tcagcgttgtgggaagcccctgggaggccgaatgtgcaggatcaccgaggggaaagtgagcttgacaggtaggagggatt

SEQ ID NO: 36254 - DNA, 80 bp, synthetic construct
  misc_feature 1..80: note = Artificially Synthesized Probe
  source 1..80: mol_type = other DNA
tggctttttgataggcgttcttgatctttttttttgtggggcggggagtggggggttgtgagtctgtttgagaacctgag

SEQ ID NO: 36255 - DNA, 80 bp, synthetic construct
  misc_feature 1..80: note = Artificially Synthesized Probe
  source 1..80: mol_type = other DNA
ggattgggcctgaatgtcttgaccatgccgtgctggaggtaggaggggtgtcttcatatggaagaactgtacatatttct

SEQ ID NO: 36256 - DNA, 80 bp, synthetic construct
  misc_feature 1..80: note = Artificially Synthesized Probe
  source 1..80: mol_type = other DNA
gggagtgttcctttttcagtctatgcactcatcccctgagccgcctgacccagggtttagatgctccagggcagctgatt

SEQ ID NO: 36257 - DNA, 80 bp, synthetic construct
  misc_feature 1..80: note = Artificially Synthesized Probe
  source 1..80: mol_type = other DNA
tctgtttaaagagttggattatacagggacccacagaattgggaactgacagtactgtagagcctgtgtatgaaaaagat

SEQ ID NO: 36258 - DNA, 80 bp, synthetic construct
  misc_feature 1..80: note = Artificially Synthesized Probe
  source 1..80: mol_type = other DNA
ctgcctcggtgattccaggagccccggggttgggagcggggacaggaccttgctcctgagtcttaggtgtggtgtctctc

SEQ ID NO: 36259 - DNA, 80 bp, synthetic construct
  misc_feature 1..80: note = Artificially Synthesized Probe
  source 1..80: mol_type = other DNA
aataaggtaggtctggctctgtctcctggaacttactggactgaggatgaacctttctccactaatttttgttctgaaaa

SEQ ID NO: 36260 - DNA, 80 bp, synthetic construct
  misc_feature 1..80: note = Artificially Synthesized Probe
  source 1..80: mol_type = other DNA
gctgtcacctgtacaacctcttcatcatcacatccgagatagcattaacattgcattttttttttttttttgagatggaa

SEQ ID NO: 36261 - DNA, 80 bp, synthetic construct
  misc_feature 1..80: note = Artificially Synthesized Probe
  source 1..80: mol_type = other DNA
tgggaatacaggcatgagctacagcaacctggccagcatttcttaaaatatgagggtagttgtctcgtattttatataaa

SEQ ID NO: 36262 - DNA, 80 bp, synthetic construct
  misc_feature 1..80: note = Artificially Synthesized Probe
  source 1..80: mol_type = other DNA
agtgagagctctccgacctcggtgggggcggggctaattgaccttcagacccaccgtgtgccagtgctggctggcacaca

SEQ ID NO: 36263 - DNA, 80 bp, synthetic construct
  misc_feature 1..80: note = Artificially Synthesized Probe
  source 1..80: mol_type = other DNA
ggtgaggacggccccggttggtttaggaaaagtggttatgaacagaacgggccccatgctcctggcctgaggaaatgttg

SEQ ID NO: 36264 - DNA, 80 bp, synthetic construct
  misc_feature 1..80: note = Artificially Synthesized Probe
  source 1..80: mol_type = other DNA
tgaggtgcccttagtgcgtcgtattggggtacaggacatccacgtgactcatcgctggtgacgttcaacaaaattactta

SEQ ID NO: 36265 - DNA, 80 bp, synthetic construct
  misc_feature 1..80: note = Artificially Synthesized Probe
  source 1..80: mol_type = other DNA
gtaacttcttaatgaatattttaataatataaatcttagtctgaatttctgactgtgtcgcctagatgccatgtagggga

SEQ ID NO: 36266 - DNA, 80 bp, synthetic construct
  misc_feature 1..80: note = Artificially Synthesized Probe
  source 1..80: mol_type = other DNA
aagggaacaaagcctccttgcagagaaatcttgtactttggtgtttcatcatctgtttgtgtgacaaatatacaacgtta

SEQ ID NO: 36267 - DNA, 80 bp, synthetic construct
  misc_feature 1..80: note = Artificially Synthesized Probe
  source 1..80: mol_type = other DNA
ctgtgctgggcctagctttgtggagttttctgaggtgagaggaggtttttaccagaatgttctttgccagtgagcacagc

SEQ ID NO: 36268 - DNA, 80 bp, synthetic construct
  misc_feature 1..80: note = Artificially Synthesized Probe
  source 1..80: mol_type = other DNA
accctgcctggtttctacttctaagagatggagactgctgaacttcatacccagacaagttaaagaaattgaaactctaa

SEQ ID NO: 36269 - DNA, 80 bp, synthetic construct
  misc_feature 1..80: note = Artificially Synthesized Probe
  source 1..80: mol_type = other DNA
ttttttttaatttcttttttaaaaagagacaaggttttgttctgtcacccctgctggagtgcagtgctatgaccacggct

SEQ ID NO: 36270 - DNA, 80 bp, synthetic construct
  misc_feature 1..80: note = Artificially Synthesized Probe
  source 1..80: mol_type = other DNA
cgctcaaagagggcttttgctcgggctttttatttcacaattgatgcttaaaagtgcttttaaaggcaatattgcaacta

SEQ ID NO: 36271 - DNA, 80 bp, synthetic construct
  misc_feature 1..80: note = Artificially Synthesized Probe
  source 1..80: mol_type = other DNA
gattgaagctgctggcgtggaagctgtgccatgtcatgtaaagcatgcagtgggaaagcagtggggtgggggcgtctttg

SEQ ID NO: 36272 - DNA, 80 bp, synthetic construct
  misc_feature 1..80: note = Artificially Synthesized Probe
  source 1..80: mol_type = other DNA
ctcttattggctgagtaattgggtccatagcgtaggtaagtcacctcctttaagagactttgataagcaaaatagtgaat

SEQ ID NO: 36273 - DNA, 80 bp, synthetic construct
  misc_feature 1..80: note = Artificially Synthesized Probe
  source 1..80: mol_type = other DNA
tttctgtgtctcattgacaactgttctgtagtcgctttgttgacagttgccaaactgctttccaaaaacatttccactgc

SEQ ID NO: 36274 - DNA, 80 bp, synthetic construct
  misc_feature 1..80: note = Artificially Synthesized Probe
  source 1..80: mol_type = other DNA
cccaagcagatgacgtgatgagtgtggctaaatatttaacctggttttgtagatgagaacgttagacacatctcttgatg

SEQ ID NO: 36275 - DNA, 80 bp, synthetic construct
  misc_feature 1..80: note = Artificially Synthesized Probe
  source 1..80: mol_type = other DNA
tcatgaaaaatgccttcaaccatgagactagtccccaaagttttggggactcagatcctttcagaaagaagaaactcttt

SEQ ID NO: 36276 - DNA, 80 bp, synthetic construct
  misc_feature 1..80: note = Artificially Synthesized Probe
  source 1..80: mol_type = other DNA
ggcatgtgccaccatacatggcccttaacatttatcttgactgaaaaaggaagactcatctgtgaaattgcctgtttccc

SEQ ID NO: 36277 - DNA, 80 bp, synthetic construct
  misc_feature 1..80: note = Artificially Synthesized Probe
  source 1..80: mol_type = other DNA
caggctagtccgagtggagggtctctcccctgtttgggatgcctgccctgctggagtgctctgtctcggaggtggggttt

SEQ ID NO: 36278 - DNA, 80 bp, synthetic construct
  misc_feature 1..80: note = Artificially Synthesized Probe
  source 1..80: mol_type = other DNA
agtaactcacttctctctcacctgaagttaaaattctggagaagcgacatatcataaaagagaacaaggtcccctatgta

SEQ ID NO: 36279 - DNA, 80 bp, synthetic construct
  misc_feature 1..80: note = Artificially Synthesized Probe
  source 1..80: mol_type = other DNA
tcttctgtgttagagcttcgttctggcctgctcccactctcagcaccatcctgcagctccttcggctgccggcggagtgt

SEQ ID NO: 36280 - DNA, 80 bp, synthetic construct
  misc_feature 1..80: note = Artificially Synthesized Probe
  source 1..80: mol_type = other DNA
ccagttgttgatggtgggtaggcagtttcttggggggactgttcaaggaagagtaagaggtgaggaaatggaaacgacgc

SEQ ID NO: 36281 - DNA, 80 bp, synthetic construct
  misc_feature 1..80: note = Artificially Synthesized Probe
  source 1..80: mol_type = other DNA
cgtttgccgcttgcaggggaatctgtatctgggatccatttattgtcggtcttaagtcctcttggaaaaggaggctacag

SEQ ID NO: 36282 - DNA, 80 bp, synthetic construct
  misc_feature 1..80: note = Artificially Synthesized Probe
  source 1..80: mol_type = other DNA
atcagacttttaaggttagttttccaaaaatgacttttacaaaataaaacacatgagccaggcgtggtagcgcgtaccta

SEQ ID NO: 36283 - DNA, 80 bp, synthetic construct
  misc_feature 1..80: note = Artificially Synthesized Probe
  source 1..80: mol_type = other DNA
tttatttctagcagagcctggctctgtgcttcagatggaaagcgacttctgaggagtgtttgcattgtgtcatcttcatc

SEQ ID NO: 36284 - DNA, 80 bp, synthetic construct
  misc_feature 1..80: note = Artificially Synthesized Probe
  source 1..80: mol_type = other DNA
ggtagagagaagataaagccttgggatgaggtttggggaagctgaaggctgctgtgtgcattataagtgaccttgaaggt

SEQ ID NO: 36285 - DNA, 80 bp, synthetic construct
  misc_feature 1..80: note = Artificially Synthesized Probe
  source 1..80: mol_type = other DNA
gatggcacacacctgtagtcccagctactcgagaggctgaaatgagagatggatgatgcagtgaactaggatgatcccac

SEQ ID NO: 36286 - DNA, 80 bp, synthetic construct
  misc_feature 1..80: note = Artificially Synthesized Probe
  source 1..80: mol_type = other DNA
agggatagtcttgttgccctgtagccacttaaaaaaaacgggcatttaagtgcgctgatgaaatagtgaaatagcttggg

SEQ ID NO: 36287 - DNA, 80 bp, synthetic construct
  misc_feature 1..80: note = Artificially Synthesized Probe
  source 1..80: mol_type = other DNA
ttcccacctgggctgtctctggcctgtgccctctatgcaagaaccttggggagctcggggtgtccttggaggttcagact

SEQ ID NO: 36288 - DNA, 80 bp, synthetic construct
  misc_feature 1..80: note = Artificially Synthesized Probe
  source 1..80: mol_type = other DNA
acatgtattttaatctgtagcttcccccatttttattttttcccttgcagtttgttgaagaaacaagtcatttgcatctg

SEQ ID NO: 36289 - DNA, 80 bp, synthetic construct
  misc_feature 1..80: note = Artificially Synthesized Probe
  source 1..80: mol_type = other DNA
ctgaccaacatggcgaaaccctgtctctactgaaaatacaggtgtgtttttagctaggtgtggtggtgcatgcctgtact

SEQ ID NO: 36290 - DNA, 80 bp, synthetic construct
  misc_feature 1..80: note = Artificially Synthesized Probe
  source 1..80: mol_type = other DNA
tgatatgggacttgtatccagaatgtaaggaactcagagggagaaaaaaaaaataaagcacggaacaaagggtatgagta

SEQ ID NO: 36291 - DNA, 80 bp, synthetic construct
  misc_feature 1..80: note = Artificially Synthesized Probe
  source 1..80: mol_type = other DNA
ccagttgaggtgggaggatcgcttgaacccgggaggcggaggaggttgcagtaagctgacctcagaccgctgcactccag

SEQ ID NO: 36292 - DNA, 80 bp, synthetic construct
  misc_feature 1..80: note = Artificially Synthesized Probe
  source 1..80: mol_type = other DNA
tcccttctgtgcctcggctattccatatttttgtcctgtagaggtggggaatttttgttaactgcattttctgcatctgt

SEQ ID NO: 36293 - DNA, 80 bp, synthetic construct
  misc_feature 1..80: note = Artificially Synthesized Probe
  source 1..80: mol_type = other DNA
tgtattggattataattgctttctcctacagtcctgtgtattttatgcatttggaacattattccgagggtagccatctt

SEQ ID NO: 36294 - DNA, 80 bp, synthetic construct
  misc_feature 1..80: note = Artificially Synthesized Probe
  source 1..80: mol_type = other DNA
actgtaccctcagcttcccgggttcaagcgatcctcccttctcagcctcccgagtagctgagactagaggtgcaccacca

SEQ ID NO: 36295 - DNA, 80 bp, synthetic construct
  misc_feature 1..80: note = Artificially Synthesized Probe
  source 1..80: mol_type = other DNA
aggcaggcgtctttgagccggtgagccatgagccagccccggtgcgccccggacaagtctggctcctgggggtgcatggt

SEQ ID NO: 36296 - DNA, 80 bp, synthetic construct
  misc_feature 1..80: note = Artificially Synthesized Probe
  source 1..80: mol_type = other DNA
agccaggggaccaccggcggtgtgggggaggatgtccagggagctgacggcaagggttggtgagaagtctgaggtgctgt

SEQ ID NO: 36297 - DNA, 80 bp, synthetic construct
  misc_feature 1..80: note = Artificially Synthesized Probe
  source 1..80: mol_type = other DNA
agagctagcgtttcctcgtttgtagattttactttcagggcggagggccactttagcattggtgcagaaagatctccaag

SEQ ID NO: 36298 - DNA, 80 bp, synthetic construct
  misc_feature 1..80: note = Artificially Synthesized Probe
  source 1..80: mol_type = other DNA
aggtcttagaaaataaatctccaaacccacttatagtcacagataataattgggcgtacaggtatatgtctttccagtca

SEQ ID NO: 36299 - DNA, 80 bp, synthetic construct
  misc_feature 1..80: note = Artificially Synthesized Probe
  source 1..80: mol_type = other DNA
cgcattagaggtgaaactggggccttggagacagagtgggaaatggactgggcttgtcgcttgtattttacacatgtctt

SEQ ID NO: 36300 - DNA, 80 bp, synthetic construct
  misc_feature 1..80: note = Artificially Synthesized Probe
  source 1..80: mol_type = other DNA
acaaacaaacaaaacccaaacgttttgagtacttattgtcacttctcagtatctgctggagagcaccccgtactgttccc

SEQ ID NO: 36301 - DNA, 80 bp, synthetic construct
  misc_feature 1..80: note = Artificially Synthesized Probe
  source 1..80: mol_type = other DNA
tccagcaccagtaacttaaaatgctgtgcagtgttgagcaaatgctaaatggtacagtaatttccgttgatttctaaatt

SEQ ID NO: 36302 - DNA, 80 bp, synthetic construct
  misc_feature 1..80: note = Artificially Synthesized Probe
  source 1..80: mol_type = other DNA
ggctctgaggctgctggtctcccagcttgaccacagccatggggtcttcagcacgcttggctctttaagcttctcgtaga

SEQ ID NO: 36303 - DNA, 80 bp, synthetic construct
  misc_feature 1..80: note = Artificially Synthesized Probe
  source 1..80: mol_type = other DNA
gtgtgcttgcacttgccgcatacctgtgcaggcccctgtgcctgggcctactgagagctggggctgcttgatacgtggct

SEQ ID NO: 36304 - DNA, 80 bp, synthetic construct
  misc_feature 1..80: note = Artificially Synthesized Probe
  source 1..80: mol_type = other DNA
agtgagtttccgttgtcgacactagcttgtctttttcctagagtaacaggcagcgttatctacagtaagtttagtttatc

SEQ ID NO: 36305 - DNA, 80 bp, synthetic construct
  misc_feature 1..80: note = Artificially Synthesized Probe
  source 1..80: mol_type = other DNA
atagagcagtacattcacgatctggactcgaactcctttgaactggacttacagttttccgaagatgagaagaggttgtt

SEQ ID NO: 36306 - DNA, 80 bp, synthetic construct
  misc_feature 1..80: note = Artificially Synthesized Probe
  source 1..80: mol_type = other DNA
acacctggttaatttttgtattttttgatagagacaggctttccctgtgttggccaggctggtgcctctttttaacatgg

SEQ ID NO: 36307 - DNA, 80 bp, synthetic construct
  misc_feature 1..80: note = Artificially Synthesized Probe
  source 1..80: mol_type = other DNA
gcgtgtatggtgagtttttcagtggtcacatgctgtagaatggaatctgcgtgcttttggtcttttctaaggtcataggt

SEQ ID NO: 36308 - DNA, 80 bp, synthetic construct
  misc_feature 1..80: note = Artificially Synthesized Probe
  source 1..80: mol_type = other DNA
cagacaataaattaaagagtcactgaagctcttagaagctgcattgtagaggctggagaggccacacggtagctgagaga

SEQ ID NO: 36309 - DNA, 80 bp, synthetic construct
  misc_feature 1..80: note = Artificially Synthesized Probe
  source 1..80: mol_type = other DNA
gacgggcaaaccgccgttatgcagacttagctatttggccagtatttttcttgaaaatgattggaatgagcttgttactt

SEQ ID NO: 36310 - DNA, 80 bp, synthetic construct
  misc_feature 1..80: note = Artificially Synthesized Probe
  source 1..80: mol_type = other DNA
agctttaagcagccaccaccttctgaactgcagtgtagtgtccaagaagaatatccacaaacatctacacttattcttag

SEQ ID NO: 36311 - DNA, 80 bp, synthetic construct
  misc_feature 1..80: note = Artificially Synthesized Probe
  source 1..80: mol_type = other DNA
agggagccaagatggcggtgtatgagagtgaggtgcctcgggaaagtcccgtgtgcatggcgagtagttaggtgtgtctc

SEQ ID NO: 36312 - DNA, 80 bp, synthetic construct
  misc_feature 1..80: note = Artificially Synthesized Probe
  source 1..80: mol_type = other DNA
tttttttttctcaggatggatttctggaagcgaggctacttctcagtactatttccgaatcgcttcctcagtgagtcctc

SEQ ID NO: 36313 - DNA, 80 bp, synthetic construct
  misc_feature 1..80: note = Artificially Synthesized Probe
  source 1..80: mol_type = other DNA
gcagccaggcaggcgtgtggatgtgctcagatattgatttgatcatcttatgccttcttcaaatataaaacatattattg

SEQ ID NO: 36314 - DNA, 80 bp, synthetic construct
  misc_feature 1..80: note = Artificially Synthesized Probe
  source 1..80: mol_type = other DNA
gaggtgggaaaatggcttgagcgcaggagattgaggctacagtgagctatggtggcgccactgctctccagcctgggtga

SEQ ID NO: 36315 - DNA, 80 bp, synthetic construct
  misc_feature 1..80: note = Artificially Synthesized Probe
  source 1..80: mol_type = other DNA
ccatctcttgattttcatcagacatcatctctagatttcatagctcgggaaggcttaagtcccttgagagaagccatgtg

SEQ ID NO: 36316 - DNA, 80 bp, synthetic construct
  misc_feature 1..80: note = Artificially Synthesized Probe
  source 1..80: mol_type = other DNA
tgattagacagaacacaaaccagtaactgttagctttaacccttggttagaaaatattcagctccaggtgctcacggggc

SEQ ID NO: 36317 - DNA, 80 bp, synthetic construct
  misc_feature 1..80: note = Artificially Synthesized Probe
  source 1..80: mol_type = other DNA
cacaaggggaacgcagaggcggaaaccttgcagcatttttatttaaaagaaaagaagaaaaaaaacacccaaccacacaa

SEQ ID NO: 36318 - DNA, 80 bp, synthetic construct
  misc_feature 1..80: note = Artificially Synthesized Probe
  source 1..80: mol_type = other DNA
gacaccaccgtcacacacgccccttttgtgttttggttcaagtttctcagagcccctcagagcttctacatctgtgcatc

SEQ ID NO: 36319 - DNA, 80 bp, synthetic construct
  misc_feature 1..80: note = Artificially Synthesized Probe
  source 1..80: mol_type = other DNA
cacctaccctggggccccagggagcaggacgctccggggcccagcacgttgccctgggcctgtggccggagtcggagtcc

SEQ ID NO: 36320 - DNA, 80 bp, synthetic construct
  misc_feature 1..80: note = Artificially Synthesized Probe
  source 1..80: mol_type = other DNA
gctctgggtgactcagtaaaactaacgtttgtctctgacaagatcagctgtaggctcaccggccagagaagaccactgtg

SEQ ID NO: 36321 - DNA, 80 bp, synthetic construct
  misc_feature 1..80: note = Artificially Synthesized Probe
  source 1..80: mol_type = other DNA
gcagagcaaagcctctttgaaaaaaaccacgtagctgattgggttttacaagagtgcatttgtctcccccttccacccgt

SEQ ID NO: 36322 - DNA, 80 bp, synthetic construct
  misc_feature 1..80: note = Artificially Synthesized Probe
  source 1..80: mol_type = other DNA
aggaggaagctgtttccaacaaagagcactttcatctgttgagatggctgtggtgagcaactgaacgagcctacgtgtgt

SEQ ID NO: 36323 - DNA, 80 bp, synthetic construct
  misc_feature 1..80: note = Artificially Synthesized Probe
  source 1..80: mol_type = other DNA
gagagcgactgcagctatttactttggagttagaggaagacagatcttgcctgaaattttagagccaaagtgctcagagc

SEQ ID NO: 36324 - DNA, 80 bp, synthetic construct
  misc_feature 1..80: note = Artificially Synthesized Probe
  source 1..80: mol_type = other DNA
tcagatatttctagttccacagaagaagccagtatttgaagagatgggtgcatccaccctcttatgccactacatgcttc

SEQ ID NO: 36325 - DNA, 80 bp, synthetic construct
  misc_feature 1..80: note = Artificially Synthesized Probe
  source 1..80: mol_type = other DNA
ttgctctccaccagagctctactacctcctaatggttgtacattcttctgacttcactagtagtgtgaacaaatattgta

SEQ ID NO: 36326 - DNA, 80 bp, synthetic construct
  misc_feature 1..80: note = Artificially Synthesized Probe
  source 1..80: mol_type = other DNA
atgtaggaaagtttggaaattcctagagtcttgttgaatggctttgaccaaaatgctgaaagtgatatggacgatgaagt

SEQ ID NO: 36327 - DNA, 80 bp, synthetic construct
  misc_feature 1..80: note = Artificially Synthesized Probe
  source 1..80: mol_type = other DNA
gcaaagccacagagtcagagccacccaagttcttgggagcccaccctttgcatcagtgtgacctagatgtgagacatgga

SEQ ID NO: 36328 - DNA, 80 bp, synthetic construct
  misc_feature 1..80: note = Artificially Synthesized Probe
  source 1..80: mol_type = other DNA
actttcagagagtgtgtgagggaaaggtaagaaacaaaatcggaattagaaaatgactgttgcccctctcttttcattct

SEQ ID NO: 36329 - DNA, 80 bp, synthetic construct
  misc_feature 1..80: note = Artificially Synthesized Probe
  source 1..80: mol_type = other DNA
gaatatgtaatgctgtgggggaaagaatgaaactcaggccaactactttgactggtgtctggcaaagtcaactttcattg

SEQ ID NO: 36330 - DNA, 80 bp, synthetic construct
  misc_feature 1..80: note = Artificially Synthesized Probe
  source 1..80: mol_type = other DNA
gggattgcagacataagcacccggcctaaaattattaattatattgcctgtaaatttctattctaaattgtagatctctg

SEQ ID NO: 36331 - DNA, 80 bp, synthetic construct
  misc_feature 1..80: note = Artificially Synthesized Probe
  source 1..80: mol_type = other DNA
agtttgcaatcttgattgacgtatggtcaagtttcaaatgtttcttgagaagaatacatatgacccagtgccaggcaata

SEQ ID NO: 36332 - DNA, 80 bp, synthetic construct
  misc_feature 1..80: note = Artificially Synthesized Probe
  source 1..80: mol_type = other DNA
ctgaagctggttttgcttgggtcactgatagcttccctgtgctaaatccaatggatgtgttaccagcagcaaatttgtac

SEQ ID NO: 36333 - DNA, 80 bp, synthetic construct
  misc_feature 1..80: note = Artificially Synthesized Probe
  source 1..80: mol_type = other DNA
gggccccctcctctctctcttccttatatatctgtgtccatacttacgtctctcaaataatatcactactccaggttgaa

SEQ ID NO: 36334 - DNA, 80 bp, synthetic construct
  misc_feature 1..80: note = Artificially Synthesized Probe
  source 1..80: mol_type = other DNA
ttctaatcccacatcaaagcccatctcctccatgaaatactcagtttttctagcctgcactgatctcttccttccctgaa

SEQ ID NO: 36335 - DNA, 80 bp, synthetic construct
  misc_feature 1..80: note = Artificially Synthesized Probe
  source 1..80: mol_type = other DNA
agcgaaactccgtctcaaaaaaaaaaagaaatcctgttggctttctgtgcagttttttgatgccattgtgacacagagaa

SEQ ID NO: 36336 - DNA, 80 bp, synthetic construct
  misc_feature 1..80: note = Artificially Synthesized Probe
  source 1..80: mol_type = other DNA
ctcaaggtatgagccaccatgcccggctaattttttttttttttttgtatttttagtagagatggggtttcaccatgttg

SEQ ID NO: 36337 - DNA, 80 bp, synthetic construct
  misc_feature 1..80: note = Artificially Synthesized Probe
  source 1..80: mol_type = other DNA
agtacatattgccatgcccaggtctggctgccactttagctgggcttttcaaagagctctcagtatatttgtagcaagca

SEQ ID NO: 36338 - DNA, 80 bp, synthetic construct
  misc_feature 1..80: note = Artificially Synthesized Probe
  source 1..80: mol_type = other DNA
gctagtttaaatagtaagttcactactgccctctccagggaatgtcagagctgcagccttattctccctataagtgattg

SEQ ID NO: 36339 - DNA, 80 bp, synthetic construct
  misc_feature 1..80: note = Artificially Synthesized Probe
  source 1..80: mol_type = other DNA
gggattttaataaacgatagaaggtatatcttaagaaacagagcacgagggagaaactactacttactgatttttatatt

SEQ ID NO: 36340 - DNA, 80 bp, synthetic construct
  misc_feature 1..80: note = Artificially Synthesized Probe
  source 1..80: mol_type = other DNA
aagttaggttctccaggaggcagactctgagatgaagtttaaaggacaggatgtttattcgggattatcccctgggatta

SEQ ID NO: 36341 - DNA, 80 bp, synthetic construct
  misc_feature 1..80: note = Artificially Synthesized Probe
  source 1..80: mol_type = other DNA
gaaggttgctaccaaaggaaatggttttgtctttcacctaggagatggttctgtggatatgtccatagtcactgttaaaa

SEQ ID NO: 36342 - DNA, 80 bp, synthetic construct
  misc_feature 1..80: note = Artificially Synthesized Probe
  source 1..80: mol_type = other DNA
ataggggtctctctccacatatcccaagattcagaagctcttgtaatttcttcttcagtggcaagcaaataagcaatagt

SEQ ID NO: 36343 - DNA, 80 bp, synthetic construct
  misc_feature 1..80: note = Artificially Synthesized Probe
  source 1..80: mol_type = other DNA
gtgcccagttttttgaaggcttgattcagtttggcattttggagatgtcatcttaaggacagtgtgaggtttttctgtaa

SEQ ID NO: 36344 - DNA, 80 bp, synthetic construct
  misc_feature 1..80: note = Artificially Synthesized Probe
  source 1..80: mol_type = other DNA
actctagtatcttggtgagtgctgccaatttcattgcaacttctcagcaggagccccgtctgctgatgtaatttatcata

SEQ ID NO: 36345 - DNA, 80 bp, synthetic construct
  misc_feature 1..80: note = Artificially Synthesized Probe
  source 1..80: mol_type = other DNA
aaagggtctagggtttagttctaaggctgctggtaagaggagccagcgtgacatcatattttaaaattatatgtaaagca

SEQ ID NO: 36346 - DNA, 80 bp, synthetic construct
  misc_feature 1..80: note = Artificially Synthesized Probe
  source 1..80: mol_type = other DNA
acaaacatcttctgttggttactgaggttgtcatactaaacgtttaatttaagacattactacgcggggtgcggtggctt

SEQ ID NO: 36347 - DNA, 80 bp, synthetic construct
  misc_feature 1..80: note = Artificially Synthesized Probe
  source 1..80: mol_type = other DNA
ctctcttactgaatcacacacttttcggaccgcatttgtttctcagatttgtctcattaaaaatatgcttgctcaaatgt

SEQ ID NO: 36348 - DNA, 80 bp, synthetic construct
  misc_feature 1..80: note = Artificially Synthesized Probe
  source 1..80: mol_type = other DNA
gttgactaaattctgtacatcagaatgttggccaaaaagcagatggcgtttagatttggagaggatgtgggtaactctat

SEQ ID NO: 36349 - DNA, 80 bp, synthetic construct
  misc_feature 1..80: note = Artificially Synthesized Probe
  source 1..80: mol_type = other DNA
atgaacatcactgtttagatactgaagaacctaagacaataagtacctaaatagttatgttaaaaattctgtgaactcta

SEQ ID NO: 36350 - DNA, 80 bp, synthetic construct
  misc_feature 1..80: note = Artificially Synthesized Probe
  source 1..80: mol_type = other DNA
catctgaaccaattatgcaaataagtccactcagtgaagaagggggcagaactttttgagcagaaggaacagtaagtgga

SEQ ID NO: 36351 - DNA, 80 bp, synthetic construct
  misc_feature 1..80: note = Artificially Synthesized Probe
  source 1..80: mol_type = other DNA
cctagaaaatatttcggtgaagaatcttaaaatagtacccaaaaatcccaagaggttaatgaggaaaagaatgacatccc

SEQ ID NO: 36352 - DNA, 80 bp, synthetic construct
  misc_feature 1..80: note = Artificially Synthesized Probe
  source 1..80: mol_type = other DNA
tgtggtattcatcgttagtccaagaatgaaaagcagtctctccatagaattgtttatctgcccatctctaagcctgacag

SEQ ID NO: 36353 - DNA, 80 bp, synthetic construct
  misc_feature 1..80: note = Artificially Synthesized Probe
  source 1..80: mol_type = other DNA
aagcattagtagtagtgagactattggaattggaaacaccaagacttactgtctgcaccatgcagacatcctgcaggcac

SEQ ID NO: 36354 - DNA, 80 bp, synthetic construct
  misc_feature 1..80: note = Artificially Synthesized Probe
  source 1..80: mol_type = other DNA
ttgtactcatgcaaaatacattttgtagtttactaataaagacagtggcttgtttcccaggaaatctggtggaaatgaga

SEQ ID NO: 36355 - DNA, 80 bp, synthetic construct
  misc_feature 1..80: note = Artificially Synthesized Probe
  source 1..80: mol_type = other DNA
tttggaagagtgcaggccagttatgttgttgagcctctcagtcgggcttctctgatacttctcaagattcgatccaggtt

SEQ ID NO: 36356 - DNA, 80 bp, synthetic construct
  misc_feature 1..80: note = Artificially Synthesized Probe
  source 1..80: mol_type = other DNA
caccgtgcccagccatcttattttattctgtagattataacactgtcattattttaatactcaattatccaacgtatggc

SEQ ID NO: 36357 - DNA, 80 bp, synthetic construct
  misc_feature 1..80: note = Artificially Synthesized Probe
  source 1..80: mol_type = other DNA
tgtcttgggcctgaggataatagaatcaaagcactgttcaaaagttacctttctctacgtatcagtgtggttgtgttatt

SEQ ID NO: 36358 - DNA, 80 bp, synthetic construct
  misc_feature 1..80: note = Artificially Synthesized Probe
  source 1..80: mol_type = other DNA
gttcctccttcctgggtttcgtttagcacaaacaggcagacacaagtatgctatcttcccttctttctcacagcaagaag

SEQ ID NO: 36359 - DNA, 80 bp, synthetic construct
  misc_feature 1..80: note = Artificially Synthesized Probe
  source 1..80: mol_type = other DNA
tacaattacaaacactactgcaagggctgatcgtgcataaacctatttttgtgttgtgagaggagtgcctgcagggtgaa

SEQ ID NO: 36360 - DNA, 80 bp, synthetic construct
  misc_feature 1..80: note = Artificially Synthesized Probe
  source 1..80: mol_type = other DNA
cagaacagtgcctagcacatagtggacgctcagaaattgttagcttttatcatcaccaaccacataatccatatttgtgg

SEQ ID NO: 36361 - DNA, 80 bp, synthetic construct
  misc_feature 1..80: note = Artificially Synthesized Probe
  source 1..80: mol_type = other DNA
tgccaaggctcctatttctggttccagtggatgaggtggaggaggattatttgtaataatagcaaacagccaggtgcggt

SEQ ID NO: 36362 - DNA, 80 bp, synthetic construct
  misc_feature 1..80: note = Artificially Synthesized Probe
  source 1..80: mol_type = other DNA
tcccccattgaaaggagggaaaagggtttttatacagttacttcttttgagagaaatgtggaaacagtgggaccagtgaa

SEQ ID NO: 36363 - DNA, 80 bp, synthetic construct
  misc_feature 1..80: note = Artificially Synthesized Probe
  source 1..80: mol_type = other DNA
agtggtgcatgagatcgcctatcagtacggaaaaaatgtaggaatagcttttcaggttagtatgctttttatttgtaaga

SEQ ID NO: 36364 - DNA, 80 bp, synthetic construct
  misc_feature 1..80: note = Artificially Synthesized Probe
  source 1..80: mol_type = other DNA
tattctgtcttcacgtttacaaaggtcagtcatgtcctccataaaattcagtgattccactgtgatacagaaaccacggc

SEQ ID NO: 36365 - DNA, 80 bp, synthetic construct
  misc_feature 1..80: note = Artificially Synthesized Probe
  source 1..80: mol_type = other DNA
gaaatccagctagcttggtaaagattcctttacctaggctcagattatcaggataaaaggaaaaagcctttttccctgga

SEQ ID NO: 36366 - DNA, 80 bp, synthetic construct
  misc_feature 1..80: note = Artificially Synthesized Probe
  source 1..80: mol_type = other DNA
ctcacaactcctctttgtggtagatattatggtgtttattctgcaagtaagaaactgatgcccaaacctcgccaaaatta

SEQ ID NO: 36367 - DNA, 80 bp, synthetic construct
  misc_feature 1..80: note = Artificially Synthesized Probe
  source 1..80: mol_type = other DNA
gtgttacccagtttcgtttgggtagactcatactcatcaccttagcagtttagtttatggatgggtttcacagagttaca

SEQ ID NO: 36368 - DNA, 80 bp, synthetic construct
  misc_feature 1..80: note = Artificially Synthesized Probe
  source 1..80: mol_type = other DNA
gtggctcacgcctgtaatcccactttgggaggcactttgggaggccgaggtgggcagatcacgaggttaggagatcaaga

SEQ ID NO: 36369 - DNA, 80 bp, synthetic construct
  misc_feature 1..80: note = Artificially Synthesized Probe
  source 1..80: mol_type = other DNA
accaagactagagttcggatctaggaagtgaagtgatttggtgtcctggcttttgtattctgttaatggtgacacttcta

SEQ ID NO: 36370 - DNA, 80 bp, synthetic construct
  misc_feature 1..80: note = Artificially Synthesized Probe
  source 1..80: mol_type = other DNA
gactctcaaaatgttggcagagaccagagatactggtgtcacctgttagatggtggcatctgttagaaatgcatgccaag

SEQ ID NO: 36371 - DNA, 80 bp, synthetic construct
  misc_feature 1..80: note = Artificially Synthesized Probe
  source 1..80: mol_type = other DNA
atgtagacagagctcgacagtatgtactacaggtaagactgtttttttaaaaaaaaggcagcagcaggaacaacgtggca

SEQ ID NO: 36372 - DNA, 80 bp, synthetic construct
  misc_feature 1..80: note = Artificially Synthesized Probe
  source 1..80: mol_type = other DNA
atgttctctgaacaaattctccaaaattctagctccctgttcacccacagagcttctaggcctattccctcattaaatat

SEQ ID NO: 36373 - DNA, 80 bp, synthetic construct
  misc_feature 1..80: note = Artificially Synthesized Probe
  source 1..80: mol_type = other DNA
taggttatttgcagatgtacttcaggaaaacgtgtggaaaacactgagagaaggcaggcttctgtacaaaaaggaacagc

SEQ ID NO: 36374 - DNA, 80 bp, synthetic construct
  misc_feature 1..80: note = Artificially Synthesized Probe
  source 1..80: mol_type = other DNA
ggacaagagctcatagaagataaaatctgaagttgatgctacctaacagaagtaatcaacaaaacaactaaagacagcag

SEQ ID NO: 36375 - DNA, 80 bp, synthetic construct
  misc_feature 1..80: note = Artificially Synthesized Probe
  source 1..80: mol_type = other DNA
cagctcatctgatctcaaaactatgtgttcatttattatagcaggaagttaaaacgctgattcagtcagtgacaggcatc

SEQ ID NO: 36376 - DNA, 80 bp, synthetic construct
  misc_feature 1..80: note = Artificially Synthesized Probe
  source 1..80: mol_type = other DNA
aggcttagtcttattccgtgattaaaagcatttcttgtatgtttgtcctttcccagcctggagtgatgggaataaggcca

SEQ ID NO: 36377 - DNA, 80 bp, synthetic construct
  misc_feature 1..80: note = Artificially Synthesized Probe
  source 1..80: mol_type = other DNA
ttcttcgggcagtgtcgccgtccagcctggttgttgaagcgtccccgtggtcccccggggtccaggcccctttgtggagg

SEQ ID NO: 36378 - DNA, 80 bp, synthetic construct
  misc_feature 1..80: note = Artificially Synthesized Probe
  source 1..80: mol_type = other DNA
gtgtttttacctttaaacttagttcacccgtatttcaatttttgggctttcctgaccgaatgagaatgcctgcttgtttt

SEQ ID NO: 36379 - DNA, 80 bp, synthetic construct
  misc_feature 1..80: note = Artificially Synthesized Probe
  source 1..80: mol_type = other DNA
ttacgttctaggccttgtgttacatgctttgaatgcattatctacttactctccatgagaaccctagaggtagttactgt

SEQ ID NO: 36380 - DNA, 80 bp, synthetic construct
  misc_feature 1..80: note = Artificially Synthesized Probe
  source 1..80: mol_type = other DNA
gcccatgtttaggatgggcttctccgcacacaagagaaaaatcccaaatctaaaaactaaaactcacctttaataagatc

SEQ ID NO: 36381 - DNA, 80 bp, synthetic construct
  misc_feature 1..80: note = Artificially Synthesized Probe
  source 1..80: mol_type = other DNA
tagtagagctcttctagtattttgtagattcttttggaatcgtgcctgtttcacagaggcagagacatgcaaaccttaga

SEQ ID NO: 36382 - DNA, 80 bp, synthetic construct
  misc_feature 1..80: note = Artificially Synthesized Probe
  source 1..80: mol_type = other DNA
actagtctgaagatgcacagtgaataagtgatggagttaggatttaaatgtgggtagactgaccctacaacttgtattct

SEQ ID NO: 36383 - DNA, 80 bp, synthetic construct
  misc_feature 1..80: note = Artificially Synthesized Probe
  source 1..80: mol_type = other DNA
ggccagaatatgcttttgcaaaatactctagttgagagttagaagtgtttggagagttgaggaggtagtagttatttttc

SEQ ID NO: 36384 - DNA, 80 bp, synthetic construct
  misc_feature 1..80: note = Artificially Synthesized Probe
  source 1..80: mol_type = other DNA
gacaaagactgctagtatcagctaatattttcacacccctgcccaaatgtccctctttaatgcaaattggagttagtagg

SEQ ID NO: 36385 - DNA, 80 bp, synthetic construct
  misc_feature 1..80: note = Artificially Synthesized Probe
  source 1..80: mol_type = other DNA
aaacatccatagggaagagcagacctatgtgtctttaattctagcctagcattccacttctctgattctcttggtaggca

SEQ ID NO: 36386 - DNA, 80 bp, synthetic construct
  misc_feature 1..80: note = Artificially Synthesized Probe
  source 1..80: mol_type = other DNA
tccctgggtacttgagattagggagtggtgatgactcttaaagagcatgctgccttcaagcatctgtttaacaaagcaca

SEQ ID NO: 36387 - DNA, 80 bp, synthetic construct
  misc_feature 1..80: note = Artificially Synthesized Probe
  source 1..80: mol_type = other DNA
atggcggctgggaagaggcgctcctcacttcctagatgggatggcggccgggcagagacgctcctcactttccagactgg

SEQ ID NO: 36388 - DNA, 80 bp, synthetic construct
  misc_feature 1..80: note = Artificially Synthesized Probe
  source 1..80: mol_type = other DNA
tcccttcttaattttgagcctgctactatcccatctgtatgcaaagatatgtttgggaaagggagagctagaaggatgta

SEQ ID NO: 36389 - DNA, 80 bp, synthetic construct
  misc_feature 1..80: note = Artificially Synthesized Probe
  source 1..80: mol_type = other DNA
gcctttgcaagtctttagagccagaaatccctttctttttgctctctacctcttttagggtctttagcatatcttgtctg

SEQ ID NO: 36390 - DNA, 80 bp, synthetic construct
  misc_feature 1..80: note = Artificially Synthesized Probe
  source 1..80: mol_type = other DNA
aacatggagaaaccccatgtctctactaaaaatacaaaattagcgtggtgtgttggcgcatgcctgtaatcccagctact

SEQ ID NO: 36391 - DNA, 80 bp, synthetic construct
  misc_feature 1..80: note = Artificially Synthesized Probe
  source 1..80: mol_type = other DNA
attttgcctatagcatgtgctgttgacttagaagcatatgttacttctggggtcttactgaaaaacaaatctacctgtgg

SEQ ID NO: 36392 - DNA, 80 bp, synthetic construct
  misc_feature 1..80: note = Artificially Synthesized Probe
  source 1..80: mol_type = other DNA
catgtgcaaaagagtgaaactgaaccgttacctcacactatgtacaaaacttaatccaaaatggcttaaagacccaaatg

SEQ ID NO: 36393 - DNA, 80 bp, synthetic construct
  misc_feature 1..80: note = Artificially Synthesized Probe
  source 1..80: mol_type = other DNA
ctgaagagcattcgcatcacttctggctgtcatatacaggccatcatatcttaaggaagtatctagagcagtgaggataa

SEQ ID NO: 36394 - DNA, 80 bp, synthetic construct
  misc_feature 1..80: note = Artificially Synthesized Probe
  source 1..80: mol_type = other DNA
ttcttaactgcatttagaaagacctccacctgttgttttgcatcttgttttcgttctggtgtattattttatgatggtaa

SEQ ID NO: 36395 - DNA, 80 bp, synthetic construct
  misc_feature 1..80: note = Artificially Synthesized Probe
  source 1..80: mol_type = other DNA
ttttacttgtgtcatacatgatctttataatatggagaatttgccagcaattaattccggaacctgtttggaggccctca

SEQ ID NO: 36396 - DNA, 80 bp, synthetic construct
  misc_feature 1..80: note = Artificially Synthesized Probe
  source 1..80: mol_type = other DNA
ggatgaggaattacagtaacctaagtcccagtaggagggtgaccttggttttggaagtttggatggattgagactgaagg

SEQ ID NO: 36397 - DNA, 80 bp, synthetic construct
  misc_feature 1..80: note = Artificially Synthesized Probe
  source 1..80: mol_type = other DNA
taatttgttcagacttttggagtcttggggtatttcattccagtgttccatgtactgactgccttgggaggactgggaaa

SEQ ID NO: 36398 - DNA, 80 bp, synthetic construct
  misc_feature 1..80: note = Artificially Synthesized Probe
  source 1..80: mol_type = other DNA
catctgtaatgtctgtcctttcccccacttttactgggaattgatagtccagcttccttgggcagtgtaagtaggaggtt

SEQ ID NO: 36399 - DNA, 80 bp, synthetic construct
  misc_feature 1..80: note = Artificially Synthesized Probe
  source 1..80: mol_type = other DNA
tggaggactgggattcaacagtttctgcctttcaaattctcactggtatattggttacctgctcatccctctaaaaatga

SEQ ID NO: 36400 - DNA, 80 bp, synthetic construct
  misc_feature 1..80: note = Artificially Synthesized Probe
  source 1..80: mol_type = other DNA
ccaccgtgcccagccaaaaaaaagtctaacttttaaatttatttaaaaagtttttcaaatagagactagatctcactatg

SEQ ID NO: 36401 - DNA, 80 bp, synthetic construct
  misc_feature 1..80: note = Artificially Synthesized Probe
  source 1..80: mol_type = other DNA
ctcagaaataacaccgcatatctacaactatctgatctttgacaaacctgacaaaagcaatggggaaaggattccctatt

SEQ ID NO: 36402 - DNA, 80 bp, synthetic construct
  misc_feature 1..80: note = Artificially Synthesized Probe
  source 1..80: mol_type = other DNA
caacgatagactggattaagaaaatgtggcacatatacaccatggaatactatgcagccgtaaaaaatgatgagttcatg

SEQ ID NO: 36403 - DNA, 80 bp, synthetic construct
  misc_feature 1..80: note = Artificially Synthesized Probe
  source 1..80: mol_type = other DNA
ataaatcactacccaaaagacacatgcactcatatgttcattgcagcagtattcatgatagcaacgacgtggaatcaacc

SEQ ID NO: 36404 - DNA, 80 bp, synthetic construct
  misc_feature 1..80: note = Artificially Synthesized Probe
  source 1..80: mol_type = other DNA
ataacaacttactttatctccagggcaagtgtaagtgatttaaatttcatttaatctagtattttagaaaggaaaatcca

SEQ ID NO: 36405 - DNA, 80 bp, synthetic construct
  misc_feature 1..80: note = Artificially Synthesized Probe
  source 1..80: mol_type = other DNA
taaaaaccactccaaaatttagtggcttaaaacaacaataattaattatctctgactattctgtggattggcaatctggg

SEQ ID NO: 36406 - DNA, 80 bp, synthetic construct
  misc_feature 1..80: note = Artificially Synthesized Probe
  source 1..80: mol_type = other DNA
cagagtgggatggcaacttcagggaggggagttagttagtctaactaatatcagttagacgttattttacttataagttc

SEQ ID NO: 36407 - DNA, 80 bp, synthetic construct
  misc_feature 1..80: note = Artificially Synthesized Probe
  source 1..80: mol_type = other DNA
cccgccacttcactccagcctgagcaacagagcctgtctcaaaggaaaaaaaaaaaaagtagtgcaggtttttaacatta

SEQ ID NO: 36408 - DNA, 80 bp, synthetic construct
  misc_feature 1..80: note = Artificially Synthesized Probe
  source 1..80: mol_type = other DNA
aaccttaggtgatcctcccacctcggcctcccaaagtgctgggattacaggcatgagccaccatgcccagcctgttatat

SEQ ID NO: 36409 - DNA, 80 bp, synthetic construct
  misc_feature 1..80: note = Artificially Synthesized Probe
  source 1..80: mol_type = other DNA
gtgaaatctccagcttcttcctggaggtctcatgcagtttacggcttcctgtctctgtgcctatagctcccaaatatttt

SEQ ID NO: 36410 - DNA, 80 bp, synthetic construct
  misc_feature 1..80: note = Artificially Synthesized Probe
  source 1..80: mol_type = other DNA
actgcacccggcctgagggtctaaaatgtgcttagtatgactgaggacatgatgttttaattttatttaattttgcttaa

SEQ ID NO: 36411 - DNA, 80 bp, synthetic construct
  misc_feature 1..80: note = Artificially Synthesized Probe
  source 1..80: mol_type = other DNA
tgaatcacacattattaccagtaactgtcagctgaacttggacagaagacaagcttttcaaaatgtccttaccttggccg

SEQ ID NO: 36412 - DNA, 80 bp, synthetic construct
  misc_feature 1..80: note = Artificially Synthesized Probe
  source 1..80: mol_type = other DNA
ggagtgcagtgacgtgatcttggcccgctgcaacctttgcctcctgggttcaagcaattctcctgcctcaggctcccaag

SEQ ID NO: 36413 - DNA, 80 bp, synthetic construct
  misc_feature 1..80: note = Artificially Synthesized Probe
  source 1..80: mol_type = other DNA
ttggacacagttgagtgagggtgacaaggggggacccagaaaccacccctgggccccaccaagcgccagccaccatccgg

SEQ ID NO: 36414 - DNA, 80 bp, synthetic construct
  misc_feature 1..80: note = Artificially Synthesized Probe
  source 1..80: mol_type = other DNA
cagcagtattacgaagacggagcccggatcgaggccgccttccggaactacatccaccgcgcagatgccaggcaggagga

SEQ ID NO: 36415 - DNA, 80 bp, synthetic construct
  misc_feature 1..80: note = Artificially Synthesized Probe
  source 1..80: mol_type = other DNA
ggccaaatctcactaaatgcaaatttgaaacaaatttgcctcttctctggatccattaggaaatgtgtgtgtgggctccg

SEQ ID NO: 36416 - DNA, 80 bp, synthetic construct
  misc_feature 1..80: note = Artificially Synthesized Probe
  source 1..80: mol_type = other DNA
atgaaggcaactccgagcttttccgcaaatgcgaattgtgcctaagaagtgcatgaagatgccacggcgggtagatccca

SEQ ID NO: 36417 - DNA, 80 bp, synthetic construct
  misc_feature 1..80: note = Artificially Synthesized Probe
  source 1..80: mol_type = other DNA
gggatcagacagcctgacttctctgcagggttttatacctgaccatgaacccccaggatggcgtggggtttaaggtgaaa

SEQ ID NO: 36418 - DNA, 80 bp, synthetic construct
  misc_feature 1..80: note = Artificially Synthesized Probe
  source 1..80: mol_type = other DNA
tctgggtttttgctttgaaaacaagtttctccaaatttacagatttcctgatgatgttgggtctgaactcaccaacttga

SEQ ID NO: 36419 - DNA, 80 bp, synthetic construct
  misc_feature 1..80: note = Artificially Synthesized Probe
  source 1..80: mol_type = other DNA
ttactccaaaaaaccccatatatatatgtttctcctttataagcttagagattgctttggtggtcaagtgcagggcggct

SEQ ID NO: 36420 - DNA, 80 bp, synthetic construct
  misc_feature 1..80: note = Artificially Synthesized Probe
  source 1..80: mol_type = other DNA
cctggagaaaacagccacgcaggtatcagtgcaggtggggccgcggctgcagctcccagggcccagatacggtggttact

SEQ ID NO: 36421 - DNA, 80 bp, synthetic construct
  misc_feature 1..80: note = Artificially Synthesized Probe
  source 1..80: mol_type = other DNA
ctcacacaaactggacagacgcatatggccgctctgcacccacacactcactagccccctgtaccactgggtttctagaa

SEQ ID NO: 36422 - DNA, 80 bp, synthetic construct
  misc_feature 1..80: note = Artificially Synthesized Probe
  source 1..80: mol_type = other DNA
tccccgggctggtcgcaggcgtggtagaactgtggggaggctccatgagcgcggtcctgccctcccaccccacatccctg

SEQ ID NO: 36423 - DNA, 80 bp, synthetic construct
  misc_feature 1..80: note = Artificially Synthesized Probe
  source 1..80: mol_type = other DNA
tccacaatcgttcaaacagggcaccaggtacaaggtggtctccacgtggaccacagcctgctcacagtccctttgaggaa

SEQ ID NO: 36424 - DNA, 80 bp, synthetic construct
  misc_feature 1..80: note = Artificially Synthesized Probe
  source 1..80: mol_type = other DNA
ggaggccccccaacatgggcccctgtcttggcccgtgcctgctggtgtcactgtgccgcctgtcccgtgccaaggtaaat

SEQ ID NO: 36425 - DNA, 80 bp, synthetic construct
  misc_feature 1..80: note = Artificially Synthesized Probe
  source 1..80: mol_type = other DNA
tgcaggtgagcaccttctggaagttgctaggcagggtgaccgggcccacggtgagacgcacggggcagcccaggctccca

SEQ ID NO: 36426 - DNA, 80 bp, synthetic construct
  misc_feature 1..80: note = Artificially Synthesized Probe
  source 1..80: mol_type = other DNA
gaagtgctcggacaccagccccacctctgtgaggagaaggaggtgtcagccaggccgggaccctcctccagggccgcaga

SEQ ID NO: 36427 - DNA, 80 bp, synthetic construct
  misc_feature 1..80: note = Artificially Synthesized Probe
  source 1..80: mol_type = other DNA
agcccaaattccccttacccagagggagatactgcatgtgggagggacccaggccagaagcctggccagtcatgagaaca

SEQ ID NO: 36428 - DNA, 80 bp, synthetic construct
  misc_feature 1..80: note = Artificially Synthesized Probe
  source 1..80: mol_type = other DNA
tgagggcacctagaacccagctggtggctgtgaagtttcagcaggtacacagagataagagatctgttcaaggttgtcct

SEQ ID NO: 36429 - DNA, 80 bp, synthetic construct
  misc_feature 1..80: note = Artificially Synthesized Probe
  source 1..80: mol_type = other DNA
tctcgaactcctgacctcaggtgatccacccgcctcagcctcccaaagtgcgggattgcaggcgtgagcttcgcgcctgg

SEQ ID NO: 36430 - DNA, 80 bp, synthetic construct
  misc_feature 1..80: note = Artificially Synthesized Probe
  source 1..80: mol_type = other DNA
acagggtctaacaactttctcccggctctgcccctctctcaggccggacccggccggtgagctcacggcccagccactcc

SEQ ID NO: 36431 - DNA, 80 bp, synthetic construct
  misc_feature 1..80: note = Artificially Synthesized Probe
  source 1..80: mol_type = other DNA
ggcgcctcagcacggggacccccgggccggccttcacgccgcagagccgctgcaggtgcgtgtcagatccacgcttttat

SEQ ID NO: 36432 - DNA, 80 bp, synthetic construct
  misc_feature 1..80: note = Artificially Synthesized Probe
  source 1..80: mol_type = other DNA
ctcaaaaaacaaaaacacaaaaacaaaaacaaaaacaaaaaacaaaacactaaagtgtccttcccaggatgtgagggtaa

SEQ ID NO: 36433 - DNA, 80 bp, synthetic construct
  misc_feature 1..80: note = Artificially Synthesized Probe
  source 1..80: mol_type = other DNA
gggttctcattttaaaggcacggaggtcagattgcagattttgctgagccgtgatttgagtgtgctgtgccggactgcac

SEQ ID NO: 36434 - DNA, 80 bp, synthetic construct
  misc_feature 1..80: note = Artificially Synthesized Probe
  source 1..80: mol_type = other DNA
tgtttgcagcagaactgcttgtatttggaaaaacctgggcgctccatgagggcaatgggtaaataaatcatgctataata

SEQ ID NO: 36435 - DNA, 80 bp, synthetic construct
  misc_feature 1..80: note = Artificially Synthesized Probe
  source 1..80: mol_type = other DNA
cgcgcccggcctactctgaatatttatgcaacttttagatgggtctataaatgtgtcttcagaaggaatgtcagtaaagt

SEQ ID NO: 36436 - DNA, 80 bp, synthetic construct
  misc_feature 1..80: note = Artificially Synthesized Probe
  source 1..80: mol_type = other DNA
gaagaggacagaagaaaacaacacgcttttgttcactgtggatgttaaagccaacaagcaccagatcaaacaggctgtga

SEQ ID NO: 36437 - DNA, 80 bp, synthetic construct
  misc_feature 1..80: note = Artificially Synthesized Probe
  source 1..80: mol_type = other DNA
tgtgtgtctttcggtggtggtggtgctggtgctggtggtgctggtggtggtggtgtgtgtgtctgtgtgtgtgtgtgtgt

SEQ ID NO: 36438 - DNA, 80 bp, synthetic construct; identical to SEQ ID NO: 36437
  misc_feature 1..80: note = Artificially Synthesized Probe
  source 1..80: mol_type = other DNA

SEQ ID NO: 36439 - DNA, 80 bp, synthetic construct
  misc_feature 1..80: note = Artificially Synthesized Probe
  source 1..80: mol_type = other DNA
gtctgcactaagatctaattttcagctttggtcttctagtcaatggcttcctacttatttggagcttcctacacttgagg

SEQ ID NO: 36440 - DNA, 80 bp, synthetic construct
  misc_feature 1..80: note = Artificially Synthesized Probe
  source 1..80: mol_type = other DNA
tcgattcctacgagtcttctagcttcatgttcctggtgtttgacctgtgagtatctccctgccaccatctgagaagcctc

SEQ ID NO: 36441 - DNA, 80 bp, synthetic construct
  misc_feature 1..80: note = Artificially Synthesized Probe
  source 1..80: mol_type = other DNA
ctgcccatcagttctttttctggtcagaatctgaatgtccgatgcaattggtataatgcaaaccaactgcaaaggtattt

SEQ ID NO: 36442 - DNA, 80 bp, synthetic construct
  misc_feature 1..80: note = Artificially Synthesized Probe
  source 1..80: mol_type = other DNA
agcagtgagctttctccatgccaacaacattgtgcatcgagatctgaagcccgagaatattctcctagatgacaatatgc

SEQ ID NO: 36443 - DNA, 80 bp, synthetic construct
  misc_feature 1..80: note = Artificially Synthesized Probe
  source 1..80: mol_type = other DNA
aaagaggtgagatgactgctctagggtcctaatgctaggatttgaacttggacagtctgactccagagttaatactctta

SEQ ID NO: 36444 - DNA, 80 bp, synthetic construct
  misc_feature 1..80: note = Artificially Synthesized Probe
  source 1..80: mol_type = other DNA
aaaatacagacttggataaagttttggagggctctggactttagaactgtagatttgatcatgtgtcatgatgtggaatc

SEQ ID NO: 36445 - DNA, 80 bp, synthetic construct
  misc_feature 1..80: note = Artificially Synthesized Probe
  source 1..80: mol_type = other DNA
tcaatcttggtcctctctccccagagttgtgtgggaccccagggtatctagcgccagagatccttaaatgctccatggat

SEQ ID NO: 36446 - DNA, 80 bp, synthetic construct
  misc_feature 1..80: note = Artificially Synthesized Probe
  source 1..80: mol_type = other DNA
cccggtcagtgctgcatgcactgcatatgaaataaaatctgctacacgccagggagaacaggtgtcctgtgtctgtctgg

SEQ ID NO: 36447 - DNA, 80 bp, synthetic construct
  misc_feature 1..80: note = Artificially Synthesized Probe
  source 1..80: mol_type = other DNA
aaatgcttagagcagggcatgcactgcacacctattgccaagtatgtgctggctgttattgtcattggctttctcttttt

SEQ ID NO: 36448 - DNA, 80 bp, synthetic construct
  misc_feature 1..80: note = Artificially Synthesized Probe
  source 1..80: mol_type = other DNA
cctgatgtcatccaaacccttcattctacacctgctcagagggacagggcagcctgccctctccagatcctcacttggct

SEQ ID NO: 36449 - DNA, 80 bp, synthetic construct
  misc_feature 1..80: note = Artificially Synthesized Probe
  source 1..80: mol_type = other DNA
tatggttttcggcactgaacaagacagacaaggtcctgcccttacgaagcttatattctaggggaataaaccaagaaata

SEQ ID NO: 36450 - DNA, 80 bp, synthetic construct
  misc_feature 1..80: note = Artificially Synthesized Probe
  source 1..80: mol_type = other DNA
ccatttctaaagcctagggttaggaatcttgaattcttttttctgctctgccactaccttgtatgaccttggtcaagtac

SEQ ID NO: 36451 - DNA, 80 bp, synthetic construct
  misc_feature 1..80: note = Artificially Synthesized Probe
  source 1..80: mol_type = other DNA
tgtttttctttggctattcagaggacatctattgtgtgtcaggccctgtgctgagctgttgttgcctgacagcaggaaga

SEQ ID NO: 36452 - DNA, 80 bp, synthetic construct
  misc_feature 1..80: note = Artificially Synthesized Probe
  source 1..80: mol_type = other DNA
gctccctcgggagtggtccttgggccgtggcccctctggggtgagcgtggatgattagtacccagaagggactgtgtcca

SEQ ID NO: 36453 - DNA, 80 bp, synthetic construct
  misc_feature 1..80: note = Artificially Synthesized Probe
  source 1..80: mol_type = other DNA
ttccgtgatttctctcgattcagcgagtcatacgttggaaacgtttagattcacaaactatcgttactgtctggggcttt

SEQ ID NO: 36454 - DNA, 80 bp, synthetic construct
  misc_feature 1..80: note = Artificially Synthesized Probe
  source 1..80: mol_type = other DNA
ttgtttcagcagtgtgagctggctgaggtcctgctgagtggtggttttcttttccttccccacttaatttaacagaccag

SEQ ID NO: 36455 - DNA, 80 bp, synthetic construct
  misc_feature 1..80: note = Artificially Synthesized Probe
  source 1..80: mol_type = other DNA
atagactttagagctgaaaagttgtcaggaatcttagaaacacggtctgttgatcttgttttacccatgaagcagcagag

SEQ ID NO: 36456 - DNA, 80 bp, synthetic construct
  misc_feature 1..80: note = Artificially Synthesized Probe
  source 1..80: mol_type = other DNA
aagtcagcatccaggatagggaaccaggacagctgggctctaattcgggtggtaattttggaaacagtatatttcctcta

SEQ ID NO: 36457 - DNA, 80 bp, synthetic construct
  misc_feature 1..80: note = Artificially Synthesized Probe
  source 1..80: mol_type = other DNA
cctctacctttgtaccctttttgcctacccagcaattctcccctctctcctgcatacccttttactgggttatttccact

SEQ ID NO: 36458 - DNA, 80 bp, synthetic construct
  misc_feature 1..80: note = Artificially Synthesized Probe
  source 1..80: mol_type = other DNA
aggcatgagcctggccttcttcctcattttattaaatggcaattcttttcttccagttactcaaccaaaattctggtttt

SEQ ID NO: 36459 - DNA, 80 bp, synthetic construct
  misc_feature 1..80: note = Artificially Synthesized Probe
  source 1..80: mol_type = other DNA
aaccgccttggtgcttctgggatgttccactaatatacagctatatccaggatgtctactggaatgttggctttttgaaa

SEQ ID NO: 36460 - DNA, 80 bp, synthetic construct
  misc_feature 1..80: note = Artificially Synthesized Probe
  source 1..80: mol_type = other DNA
agatttattttattttactttatttatttatttatttatttatttttttagatggagtctcgctctgttgcccaggctgg

SEQ ID NO: 36461 - DNA, 80 bp, synthetic construct
  misc_feature 1..80: note = Artificially Synthesized Probe
  source 1..80: mol_type = other DNA
gtaactcactggagtacttgagaaaggcatcatatttcagctgggtcctgaagaatgagattttccatataagaagcaga

SEQ ID NO: 36462 - DNA, 80 bp, synthetic construct
  misc_feature 1..80: note = Artificially Synthesized Probe
  source 1..80: mol_type = other DNA
gacaaaaggtccccagaaatcctatcatgggacttttgtatcactggaaaacctgttctccagtcacacgatacattcta

SEQ ID NO: 36463 - DNA, 80 bp, synthetic construct
  misc_feature 1..80: note = Artificially Synthesized Probe
  source 1..80: mol_type = other DNA
cagttatacatgcaatgaattgcctttttaaaaataatacaggccaggcacgacgtttcacactgtaatcccagcacttt

SEQ ID NO: 36464 - DNA, 80 bp, synthetic construct
  misc_feature 1..80: note = Artificially Synthesized Probe
  source 1..80: mol_type = other DNA
tctggaaagcctcaagaattggaattttgacacactccctctgaccatgacagaaagctcaacttgccagctgaagggaa

SEQ ID NO: 36465 - DNA, 80 bp, synthetic construct
  misc_feature 1..80: note = Artificially Synthesized Probe
  source 1..80: mol_type = other DNA
ggagagtgtttgacatacctttaccagtcctcctggaaaaatgttacttttattgaatagaccctctcactgtcatctga

SEQ ID NO: 36466 - DNA, 80 bp, synthetic construct
  misc_feature 1..80: note = Artificially Synthesized Probe
  source 1..80: mol_type = other DNA
ggggaggccagctctgggcgcaggcccctcagccctagtgaaaatagtgacatacaaaaatatacacattttaacaccat

SEQ ID NO: 36467 - DNA, 80 bp, synthetic construct
  misc_feature 1..80: note = Artificially Synthesized Probe
  source 1..80: mol_type = other DNA
gggcagcggctccatcccttcaaagcggactttgtggcggaactgggggcggcacaggggctcagtcagtccggctgcac

SEQ ID NO: 36468 - DNA, 80 bp, synthetic construct
  misc_feature 1..80: note = Artificially Synthesized Probe
  source 1..80: mol_type = other DNA
tccctgtgccaagtacgggcctcggccacggcgaagtgcacggcgaacagcagcaggcacacctgtggggggcgcggtca

SEQ ID NO: 36469 - DNA, 80 bp, synthetic construct
  misc_feature 1..80: note = Artificially Synthesized Probe
  source 1..80: mol_type = other DNA
tcaattagacaacgttaccatctctcatatacagagaaggaaacggcggtgttaagagggcaaaggtcacacagctaggg

SEQ ID NO: 36470 - DNA, 80 bp, synthetic construct
  misc_feature 1..80: note = Artificially Synthesized Probe
  source 1..80: mol_type = other DNA
aggcatccccatagctggccagcagggtcaccagcagaaaaagcatgtacaccaggaggctctggtggacgggggggccc

SEQ ID NO: 36471 - DNA, 80 bp, synthetic construct
  misc_feature 1..80: note = Artificially Synthesized Probe
  source 1..80: mol_type = other DNA
aattcatcccggcctccaggaggcagttgcagccaagcccatgttaacctgggcgggcagtttcttgagcctcttgggtc

SEQ ID NO: 36472 - DNA, 80 bp, synthetic construct
  misc_feature 1..80: note = Artificially Synthesized Probe
  source 1..80: mol_type = other DNA
gaaagaacggcctgacccagggtcacactgcactgaatgcttcctgttttgctgtctctcggaggataaaagacactctt

SEQ ID NO: 36473 - DNA, 80 bp, synthetic construct
  misc_feature 1..80: note = Artificially Synthesized Probe
  source 1..80: mol_type = other DNA
ccctcatgtgatggttatctgccttttgtaaatcaggaagttttcctttttgtttgagtccaggggcagttcatacctct

SEQ ID NO: 36474 - DNA, 80 bp, synthetic construct
  misc_feature 1..80: note = Artificially Synthesized Probe
  source 1..80: mol_type = other DNA
gctcctacaaagccccatgagcctgctccctccctagagggaaggttctggggccctggggatcccatgaggctctttcc

SEQ ID NO: 36475 - DNA, 80 bp, synthetic construct
  misc_feature 1..80: note = Artificially Synthesized Probe
  source 1..80: mol_type = other DNA
cgtggaggcctgagaacgtgaggaaggagctgtccagcacggacgagtccaggcagctgtcgatgtccagcacctgctgc

SEQ ID NO: 36476 - DNA, 80 bp, synthetic construct
  misc_feature 1..80: note = Artificially Synthesized Probe
  source 1..80: mol_type = other DNA
tttttttttttttttggagatggagtcttgctccgttgcccaggatggagtgcagtggcgcaatctcggctcactgcaag

SEQ ID NO: 36477 - DNA, 80 bp, synthetic construct
  misc_feature 1..80: note = Artificially Synthesized Probe
  source 1..80: mol_type = other DNA
cacaggtgaggctgaggggcaggaagggctgggcaggaagaggctgccccgacccctacggcacccacctgtaggcagag

SEQ ID NO: 36478 - DNA, 80 bp, synthetic construct
  misc_feature 1..80: note = Artificially Synthesized Probe
  source 1..80: mol_type = other DNA
tcaaggacatgattaagttacatggaaagaactgtaacttgtgacatgcaaacatggctgcacacgcctcagtccacacc

SEQ ID NO: 36479 - DNA, 80 bp, synthetic construct
  misc_feature 1..80: note = Artificially Synthesized Probe
  source 1..80: mol_type = other DNA
caaaaactgccttgttctgacgcctgcgacgagactcactcccagagggtgcaaccagcacagccagtgagagcagggga

SEQ ID NO: 36480 - DNA, 80 bp, synthetic construct
  misc_feature 1..80: note = Artificially Synthesized Probe
  source 1..80: mol_type = other DNA
ggctccgagtgtaggtagactgccaggtagggctcaggttcctcagacaggtagtggcctggggcagaacgcgcaggtca

SEQ ID NO: 36481 - DNA, 80 bp, synthetic construct
  misc_feature 1..80: note = Artificially Synthesized Probe
  source 1..80: mol_type = other DNA
gatggagaagtggcagccaggccctggggcgccgccatagcacagcaggctccgcgggtccgagcgcttgccctgggcca

SEQ ID NO: 36482 - DNA, 80 bp, synthetic construct
  misc_feature 1..80: note = Artificially Synthesized Probe
  source 1..80: mol_type = other DNA
accacgtgatgcagcccaccgaccacacaaggcacctcttcacatgagagcggaggaggaggggagagaggagaggggag

SEQ ID NO: 36483 - DNA, 80 bp, synthetic construct
  misc_feature 1..80: note = Artificially Synthesized Probe
  source 1..80: mol_type = other DNA
tttatctctggggcccgggatgagccctctgcaaagctccaggcaggggtacaggtcttggtcccaagcacgcatgcagc

SEQ ID NO: 36484 - DNA, 80 bp, synthetic construct
  misc_feature 1..80: note = Artificially Synthesized Probe
  source 1..80: mol_type = other DNA
gcggcgggcggttgggggacaggcggatggaggcgcagccctcctcctcgccagagcggcccagcaccgtgagcgtgaag

SEQ ID NO: 36485 - DNA, 80 bp, synthetic construct
  misc_feature 1..80: note = Artificially Synthesized Probe
  source 1..80: mol_type = other DNA
agcatatgtggcttgaagactgtacgtggaactgtggcaggtttggaaggaagcaaagctgaagcaggctgtcgtgttac

SEQ ID NO: 36486 - DNA, 80 bp, synthetic construct
  misc_feature 1..80: note = Artificially Synthesized Probe
  source 1..80: mol_type = other DNA
gcagtcgcgcaggtcaacgtgggcctccaagtagttgcgctgtgatcgccgcatcagcacctgcaggggcaggaccacgt

SEQ ID NO: 36487 - DNA, 80 bp, synthetic construct
  misc_feature 1..80: note = Artificially Synthesized Probe
  source 1..80: mol_type = other DNA
atccgggaagaccatggtgacatgagggccacgcttgctgctgccgccgggcacagcccagcaccagctcacattggtgc

SEQ ID NO: 36488 - DNA, 80 bp, synthetic construct
  misc_feature 1..80: note = Artificially Synthesized Probe
  source 1..80: mol_type = other DNA
ggcctcgctgcggctcacctcattccagccggccaccctaacggtgaagtcacctgtgctgttgtaagcgtgggtgacct

SEQ ID NO: 36489 - DNA, 80 bp, synthetic construct
  misc_feature 1..80: note = Artificially Synthesized Probe
  source 1..80: mol_type = other DNA
gcgcagcacctccaggacgaagaccagcacgtgcaggctccgggccaggtggccggcggggctggccgcacccacggtca

SEQ ID NO: 36490 - DNA, 80 bp, synthetic construct
  misc_feature 1..80: note = Artificially Synthesized Probe
  source 1..80: mol_type = other DNA
cagtgagggctgttggggaggaaggggggcagcttgactggggagctggggggaccccgtgctcagagcctgaaaggcag

SEQ ID NO: 36491 - DNA, 80 bp, synthetic construct
  misc_feature 1..80: note = Artificially Synthesized Probe
  source 1..80: mol_type = other DNA
tgacattgaagaccacgttctggaaggtcagggactgcttgtcgttgatggtccaccggaagaccatgtccgagccggcc

SEQ ID NO: 36492 - DNA, 80 bp, synthetic construct
  misc_feature 1..80: note = Artificially Synthesized Probe
  source 1..80: mol_type = other DNA
agggcagggcagacattctcaaagcgggcgctgacactgcccccaggccagcgagccgtggccgtggcgttggcaccaga

SEQ ID NO: 36493 - DNA, 80 bp, synthetic construct
  misc_feature 1..80: note = Artificially Synthesized Probe
  source 1..80: mol_type = other DNA
acagacccaggtcagggccacacaccgagtactgcgcggggggccccgcgggaacggagaagaggaactctctccatagc

SEQ ID NO: 36494 - DNA, 80 bp, synthetic construct
  misc_feature 1..80: note = Artificially Synthesized Probe
  source 1..80: mol_type = other DNA
tttcaggaataactcacacacgctcagagaaaaggcctggaggtaatgtgagtaaacgctttcctctctgcactctggat

SEQ ID NO: 36495 - DNA, 80 bp, synthetic construct
  misc_feature 1..80: note = Artificially Synthesized Probe
  source 1..80: mol_type = other DNA
ccgatccacacgtctaggctcctgggggcgggtgtgggatggcagggggctcagggcactcctccatcctcccaccctca

SEQ ID NO: 36496 - DNA, 80 bp, synthetic construct
  misc_feature 1..80: note = Artificially Synthesized Probe
  source 1..80: mol_type = other DNA
tccagggcggcaggtgccgcttccacctgcacgtctgtccccagcagggctgagccggcccccagggccagcacggccgt

SEQ ID NO: 36497 - DNA, 80 bp, synthetic construct
  misc_feature 1..80: note = Artificially Synthesized Probe
  source 1..80: mol_type = other DNA
tggggtccagccaggaccccacccaaagaaccacaacttacatttcacttaaattaaataaattagcaaatattccttct

SEQ ID NO: 36498 - DNA, 80 bp, synthetic construct
  misc_feature 1..80: note = Artificially Synthesized Probe
  source 1..80: mol_type = other DNA
gagaccccgtatctacaaaaaatacacattagccaggcatggcggcatgcgcctggggtcccaagtactcgggaggtaga

SEQ ID NO: 36499 - DNA, 80 bp, synthetic construct
  misc_feature 1..80: note = Artificially Synthesized Probe
  source 1..80: mol_type = other DNA
tcactcctgtaatgccagaactttgggaggccaaggtgggtggatcatgagatcaagagatcgagaccatcctggccaac

SEQ ID NO: 36500 - DNA, 80 bp, synthetic construct
  misc_feature 1..80: note = Artificially Synthesized Probe
  source 1..80: mol_type = other DNA
gcccagcccctgccagcctccagccctgctcctcccaccggagctccgctcccacaggagcctacccggcgcaggagaga

SEQ ID NO: 36501 - DNA, 80 bp, synthetic construct
  misc_feature 1..80: note = Artificially Synthesized Probe
  source 1..80: mol_type = other DNA
ccaggccacgggagaaaggaaagaaggaaaagcctgaagatgtttggccacacctcattttctggaaaatccatcaagag

SEQ ID NO: 36502 - DNA, 80 bp, synthetic construct
  misc_feature 1..80: note = Artificially Synthesized Probe
  source 1..80: mol_type = other DNA
ccacgttctggttccctgcaaggatgggggacacagcagggcccaggcatctggcagcaggaccaccgagcggccctaag

SEQ ID NO: 36503 - DNA, 80 bp, synthetic construct
  misc_feature 1..80: note = Artificially Synthesized Probe
  source 1..80: mol_type = other DNA
tgtaaccgctcctccctcggcaggggcaggacaggacgccagacccagggaggccccatgccccctgccaggccccgtcc

SEQ ID NO: 36504 - DNA, 80 bp, synthetic construct
  misc_feature 1..80: note = Artificially Synthesized Probe
  source 1..80: mol_type = other DNA
actccggcctcggaggctgaacgagggagatgagaaaggggagtctgcgatgtccttgcctacacagatggaaaaacaca

SEQ ID NO: 36505 - DNA, 80 bp, synthetic construct
  misc_feature 1..80: note = Artificially Synthesized Probe
  source 1..80: mol_type = other DNA
caagccatgaagagcgaggtgttctgggaaagggcgtgagctgcattttccagctgcgctcactctgcagggagactgtg

SEQ ID NO: 36506 - DNA, 80 bp, synthetic construct
  misc_feature 1..80: note = Artificially Synthesized Probe
  source 1..80: mol_type = other DNA
agccaggtcactgctacactgccctgcagggtgcatctaatcatggagcccactttacaggtgaggaaactgaggctgag

SEQ ID NO: 36507 - DNA, 80 bp, synthetic construct
  misc_feature 1..80: note = Artificially Synthesized Probe
  source 1..80: mol_type = other DNA
ccctcagcccctcggggagtgcaagcacatcgcagcccgactcggaagcgccactgccacctctgtctgtctataaacca

SEQ ID NO: 36508 - DNA, 80 bp, synthetic construct
  misc_feature 1..80: note = Artificially Synthesized Probe
  source 1..80: mol_type = other DNA
cctcaaactcctggcctcaagccatctgctctcctaaagtgctgggattacaggcgtgaggcaccgcgcccggctggaca

SEQ ID NO: 36509 - DNA, 80 bp, synthetic construct
  misc_feature 1..80: note = Artificially Synthesized Probe
  source 1..80: mol_type = other DNA
cagaggccctacccctgcccccgagtcaccttgccccttggggactctctctgggcagctccctgtgggagctttgaaac

SEQ ID NO: 36510 - DNA, 80 bp, synthetic construct
  misc_feature 1..80: note = Artificially Synthesized Probe
  source 1..80: mol_type = other DNA
gcaggagccagtttcttcaacaaattgcacaaggaaaaagagaggaagggaagctcctagacatcatcggacatttaaaa

SEQ ID NO: 36511 - DNA, 80 bp, synthetic construct
  misc_feature 1..80: note = Artificially Synthesized Probe
  source 1..80: mol_type = other DNA
aaaccccgtctctcctaaaaatacaaaattagccaggcatggtggcacatgcctgtaatcccagctactggagaggctga

SEQ ID NO: 36512 - DNA, 80 bp, synthetic construct
  misc_feature 1..80: note = Artificially Synthesized Probe
  source 1..80: mol_type = other DNA
ccacgtctccccacgaagcttcgagccacgcagagcagcacgttttgcagtacgccatcttttccaaaagccaccacctc

SEQ ID NO: 36513 - DNA, 80 bp, synthetic construct
  misc_feature 1..80: note = Artificially Synthesized Probe
  source 1..80: mol_type = other DNA
tgcaattctgtgggtgctgttgccaggcaggaggaggccatctccacagagacagccgcgagacacacgcgtccgcagtc

SEQ ID NO: 36514 - DNA, 80 bp, synthetic construct
  misc_feature 1..80: note = Artificially Synthesized Probe
  source 1..80: mol_type = other DNA
caaatccttttccagacacctcctggaactcttccctgccgccccctacagccatccccacctctccgggtaccccgcag

SEQ ID NO: 36515 - DNA, 80 bp, synthetic construct
  misc_feature 1..80: note = Artificially Synthesized Probe
  source 1..80: mol_type = other DNA
agggtggtccccagagtgtccttaagtcggttctcctcggtggggctccaaggccgacgggaattagccgggatagaaag

SEQ ID NO: 36516 - DNA, 80 bp, synthetic construct
  misc_feature 1..80: note = Artificially Synthesized Probe
  source 1..80: mol_type = other DNA
ccttctcatgtggcttcgtgtgaacccctattcggcgtagcttttgtggctcctggactctactttgggtcccagatgta

SEQ ID NO: 36517 - DNA, 80 bp, synthetic construct
  misc_feature 1..80: note = Artificially Synthesized Probe
  source 1..80: mol_type = other DNA
gcctagatgagtggcctcggagtttccatctggctcaggcctgagctctaaggggagagaggcttccaaaaccctgtgcg

SEQ ID NO: 36518 - DNA, 80 bp, synthetic construct
  misc_feature 1..80: note = Artificially Synthesized Probe
  source 1..80: mol_type = other DNA
ggcatggctgtagtctctagtgtgacagagaaggccttgccctggtctaatgggatcctagcccagccccagtcccaact

SEQ ID NO: 36519 - DNA, 80 bp, synthetic construct
  misc_feature 1..80: note = Artificially Synthesized Probe
  source 1..80: mol_type = other DNA
tgtggctgagggcgccaagaacgtggtgaaactgcttagtagccggagaacacaggaccgcaaggcactggctgaggtca

SEQ ID NO: 36520 - DNA, 80 bp, synthetic construct
  misc_feature 1..80: note = Artificially Synthesized Probe
  source 1..80: mol_type = other DNA
tggtggctcatgcctgtaatcccagcactttggaagactgaggtgggcggatcacctgaggtcaggagttcaagaccagc

SEQ ID NO: 36521 - DNA, 80 bp, synthetic construct
  misc_feature 1..80: note = Artificially Synthesized Probe
  source 1..80: mol_type = other DNA
gggtgacacagcaaaactctttcaagaaaaaaaaaaaaagaaagagttttctggtctggctcagtggctcatgtttataa

SEQ ID NO: 36522 - DNA, 80 bp, synthetic construct
  misc_feature 1..80: note = Artificially Synthesized Probe
  source 1..80: mol_type = other DNA
cgatctcggctcactgcaagctcctcttcccggattcatgccattctcctgtctcagcctcccgagtagctgggactaca

SEQ ID NO: 36523 - DNA, 80 bp, synthetic construct
  misc_feature 1..80: note = Artificially Synthesized Probe
  source 1..80: mol_type = other DNA
agaagtcaactactcaaggccaccccatatcctgtcccctggctaaacaccccagatacttgagttgtcctttttttttt

SEQ ID NO: 36524 - DNA, 80 bp, synthetic construct
  misc_feature 1..80: note = Artificially Synthesized Probe
  source 1..80: mol_type = other DNA
ggacagagtcttgctttgtcgcccaggctggagtgcagtggcataatcttgactcactgcaacctccgcctcccaggttc

SEQ ID NO: 36525 - DNA, 80 bp, synthetic construct
  misc_feature 1..80: note = Artificially Synthesized Probe
  source 1..80: mol_type = other DNA
tatccttgccacagtgctctctaggccccacttctaggcagcatctcgtcatgtgctgtggctctgtgcagcctggctaa

SEQ ID NO: 36526 - DNA, 80 bp, synthetic construct
  misc_feature 1..80: note = Artificially Synthesized Probe
  source 1..80: mol_type = other DNA
agaccgatgcactgcgtgtaggtgcagagactgacgaccagagaggagggctccaggaataagggctcctagccgctctc

SEQ ID NO: 36527 - DNA, 80 bp, synthetic construct
  misc_feature 1..80: note = Artificially Synthesized Probe
  source 1..80: mol_type = other DNA
ggcttcctgactccagatccaggcggtatctgtctgtctgtctgcattgctcagcccgctaaccctctgtccatctcact

SEQ ID NO: 36528 - DNA, 80 bp, synthetic construct
  misc_feature 1..80: note = Artificially Synthesized Probe
  source 1..80: mol_type = other DNA
ttctcttttggcacctgcagttgttaactgtgtttccttgggcaggtcccctcttctctctgtcagtttgctctactgta

SEQ ID NO: 36529 - DNA, 80 bp, synthetic construct
  misc_feature 1..80: note = Artificially Synthesized Probe
  source 1..80: mol_type = other DNA
agcctgggcaagaaagtgagaccctgtctcaaaaaaaaaaaaaaaaaaggctgggcgcactggctcacacttgtaatccc

SEQ ID NO: 36530 - DNA, 80 bp, synthetic construct
  misc_feature 1..80: note = Artificially Synthesized Probe
  source 1..80: mol_type = other DNA
gtgagccaccacacctggtgagtctcagatctttatttgaaaaataggcatgattggccgggcacctgtaatcccagcac

SEQ ID NO: 36531 - DNA, 80 bp, synthetic construct
  misc_feature 1..80: note = Artificially Synthesized Probe
  source 1..80: mol_type = other DNA
ctacgtggcttgtgttgtcctggggctgcagttcttacacgagaagaagatcatttacaggtgacttttgtcccagggat

SEQ ID NO: 36532 - DNA, 80 bp, synthetic construct
  misc_feature 1..80: note = Artificially Synthesized Probe
  source 1..80: mol_type = other DNA
cccaagtagctgggactacaagcgagcaccaccacacctggctaatttttgtatttttttagtagagacggggtttcact

SEQ ID NO: 36533 - DNA, 80 bp, synthetic construct
  misc_feature 1..80: note = Artificially Synthesized Probe
  source 1..80: mol_type = other DNA
aggtgtttgactgcatcgtcaacatggacgccccctaccccggctttctgtcggtgcaagggcttgagttcattcagaag

SEQ ID NO: 36534 - DNA, 80 bp, synthetic construct
  misc_feature 1..80: note = Artificially Synthesized Probe
  source 1..80: mol_type = other DNA
gacctggcccagaaagggtgccgcagcaaggagtgatatggtttgtctttttaagactggacttgctttatattaaattt

SEQ ID NO: 36535 - DNA, 80 bp, synthetic construct
  misc_feature 1..80: note = Artificially Synthesized Probe
  source 1..80: mol_type = other DNA
acgctttatttccttgtgcaaaagagcatttcaagtcaaggtagtcagtcacacttgggcgagtccggctcacataggaa

SEQ ID NO: 36536 - DNA, 80 bp, synthetic construct
  misc_feature 1..80: note = Artificially Synthesized Probe
  source 1..80: mol_type = other DNA
tatttttagtagagatggggttttgccatattgccaggctggtcttgaactcctgagctcaagtgatccacctgcctcag

SEQ ID NO: 36537 - DNA, 80 bp, synthetic construct
  misc_feature 1..80: note = Artificially Synthesized Probe
  source 1..80: mol_type = other DNA
aagaagaaaaaatctgtaggcatcactacccagcttcaaattatgctacaaggctatagtaaccaaaacagcatggtact

SEQ ID NO: 36538 - DNA, 80 bp, synthetic construct
  misc_feature 1..80: note = Artificially Synthesized Probe
  source 1..80: mol_type = other DNA
gcaaggaatttatgactaagaccccaaaagcaaatgcaacaaaacaaaaataaataaataggacttaattaaactaaaaa

SEQ ID NO: 36539 - DNA, 80 bp, synthetic construct
  misc_feature 1..80: note = Artificially Synthesized Probe
  source 1..80: mol_type = other DNA
caattgcaaagatatagaaccaacctaagtgcccatcaaccaatgagcagataaagaaaatgtggtggctgggtgcagtg

SEQ ID NO: 36540 - DNA, 80 bp, synthetic construct
  misc_feature 1..80: note = Artificially Synthesized Probe
  source 1..80: mol_type = other DNA
ctcctgcttcttgttaccagggcaaaattctcacaacacaaaatgtaccatttcaaagtgtacaagtcagtgacatttag

SEQ ID NO: 36541 - DNA, 80 bp, synthetic construct
  misc_feature 1..80: note = Artificially Synthesized Probe
  source 1..80: mol_type = other DNA
tagccacatccagcttccaccctttccctctcctgggtttgtaccatatggcaaccagagtagtttggttaaaatacata

SEQ ID NO: 36542 - DNA, 80 bp, synthetic construct
  misc_feature 1..80: note = Artificially Synthesized Probe
  source 1..80: mol_type = other DNA
cagtaacagagaaatcctcaccatgcactcctgctttttgttattggggcaaaattctcacaacctaaaatttaccatat

SEQ ID NO: 36543 - DNA, 80 bp, synthetic construct
  misc_feature 1..80: note = Artificially Synthesized Probe
  source 1..80: mol_type = other DNA
atagcaacagaaagcctatatacatgacctcttatgtctggctctgttcactcgatgctgtatttcttcttcctttcttt

SEQ ID NO: 36544 - DNA, 80 bp, synthetic construct
  misc_feature 1..80: note = Artificially Synthesized Probe
  source 1..80: mol_type = other DNA
caaagaaaagaaaagagaaaagaaaagaaaagggggaggggggagagagagagaggaggggagaggagggaaaagaaaag

SEQ ID NO: 36545 - DNA, 80 bp, synthetic construct
  misc_feature 1..80: note = Artificially Synthesized Probe
  source 1..80: mol_type = other DNA
caagcagaataggcaagttgaagggagaaaggaaagattttcaacagatttcccactgaagcctcatttcacctcctcat

SEQ ID NO: 36546 - DNA, 80 bp, synthetic construct
  misc_feature 1..80: note = Artificially Synthesized Probe
  source 1..80: mol_type = other DNA
ccgaggtgggcagatcacctgaggttaggagtttgagaccagccaggccaacatggtgaaaccccatctctactaaaaat

SEQ ID NO: 36547 - DNA, 80 bp, synthetic construct
  misc_feature 1..80: note = Artificially Synthesized Probe
  source 1..80: mol_type = other DNA
taactgggcatggtgattcatgcctgcaatcccagcactttcagaggcagacaggcagaaggattgcttgaagccaagat

SEQ ID NO: 36548 - DNA, 80 bp, synthetic construct
  misc_feature 1..80: note = Artificially Synthesized Probe
  source 1..80: mol_type = other DNA
gcgacaaagtgagactttgtctcaaaaaaattagcccagcatcgtgccacacacctatagtctcagctactcaggaggct

SEQ ID NO: 36549 - DNA, 80 bp, synthetic construct
  misc_feature 1..80: note = Artificially Synthesized Probe
  source 1..80: mol_type = other DNA
gggaaagggatttttcgaggcagagtgatgaaaaagtttaggtggtggttggatgacattgtgaatatactaagtatcac

SEQ ID NO: 36550 - DNA, 80 bp, synthetic construct
  misc_feature 1..80: note = Artificially Synthesized Probe
  source 1..80: mol_type = other DNA
tcagaatggaatctatttctttttgtttttgtttgagatagagtttcactctgttgcccaggctggagtacgatctcggc

SEQ ID NO: 36551 - DNA, 80 bp, synthetic construct
  misc_feature 1..80: note = Artificially Synthesized Probe
  source 1..80: mol_type = other DNA
agacatcaaataattaggtttcttcatggttttctttttcaagtcctcattgttaaagatcactcacattagggccagac

SEQ ID NO: 36552 - DNA, 80 bp, synthetic construct
  misc_feature 1..80: note = Artificially Synthesized Probe
  source 1..80: mol_type = other DNA
tgccaggactatgggtgactgaagacccccagggaggcacagcatcctcttatctaagatttttttttttttaagagaca

SEQ ID NO: 36553 - DNA, 80 bp, synthetic construct
  misc_feature 1..80: note = Artificially Synthesized Probe
  source 1..80: mol_type = other DNA
atctgtaatcccagcactttgggaggctaaggtgggaggatcacttgagatcagggggtcgagaccagcctgggcaacat

SEQ ID NO: 36554 - DNA, 80 bp, synthetic construct
  misc_feature 1..80: note = Artificially Synthesized Probe
  source 1..80: mol_type = other DNA
ccctggaccaaaccccagcttcagttttgggtacttcctcataagccttgactaccccagagtgtgagggattttgtggc

SEQ ID NO: 36555 - DNA, 80 bp, synthetic construct
  misc_feature 1..80: note = Artificially Synthesized Probe
  source 1..80: mol_type = other DNA
tgtaatcccagctactagggaggctgaggaaggagagtcacttgaacctgagagatgaaggttgcagtgagccaagattt

SEQ ID NO: 36556 - DNA, 80 bp, synthetic construct
  misc_feature 1..80: note = Artificially Synthesized Probe
  source 1..80: mol_type = other DNA
atcctgggctcaagcaatcctcctgcctcagtctccagacatacgggcatgcaccaccatgcccagctaatttttaaatt

SEQ ID NO: 36557 - DNA, 80 bp, synthetic construct
  misc_feature 1..80: note = Artificially Synthesized Probe
  source 1..80: mol_type = other DNA
gtgtgtgtgtgtgtgtgtacacggtgcatctgaattgtcctgagtgctgtctcgggtatccttgagctgtgtgtgcgtgt

SEQ ID NO: 36558 - DNA, 80 bp, synthetic construct
  misc_feature 1..80: note = Artificially Synthesized Probe
  source 1..80: mol_type = other DNA
gccccatcggagggtggcagaggtgggacggtgctgcagggccaccggaggcaccaagcccggcggacacacaccccggc

SEQ ID NO: 36559 - DNA, 80 bp, synthetic construct
  misc_feature 1..80: note = Artificially Synthesized Probe
  source 1..80: mol_type = other DNA
tgaggccagagtttagagatcaagagacagagtgtttgtctttcaggaactcaatctaatggataattccatgtcaaggt

SEQ ID NO: 36560 - DNA, 80 bp, synthetic construct
  misc_feature 1..80: note = Artificially Synthesized Probe
  source 1..80: mol_type = other DNA
tcacgaacccagcccagcccacccacccttccccactcacagccagcgactccagtgcagaatggttggaatagattcgg

SEQ ID NO: 36561 - DNA, 80 bp, synthetic construct
  misc_feature 1..80: note = Artificially Synthesized Probe
  source 1..80: mol_type = other DNA
gtcacacagctggaaagtgtcagaagctgcctctagaacctagggtcctaacctacattatctcctttaaccttagaaca

SEQ ID NO: 36562 - DNA, 80 bp, synthetic construct
  misc_feature 1..80: note = Artificially Synthesized Probe
  source 1..80: mol_type = other DNA
aagataaaatggcctcaaggtcacaaagctgtgttgtgctgaggtttttgtcaaaacccatgttctgatctttgctgtgt

SEQ ID NO: 36563 - DNA, 80 bp, synthetic construct
  misc_feature 1..80: note = Artificially Synthesized Probe
  source 1..80: mol_type = other DNA
atccagactctttgtggatgtcctttttgcattagtatctcagcccttgccatgtcttctgtttttgatatggagtctca

SEQ ID NO: 36564 - DNA, 80 bp, synthetic construct
  misc_feature 1..80: note = Artificially Synthesized Probe
  source 1..80: mol_type = other DNA
tccagcctgggtgacagagtgagactttgtccccccaccgaaaaaaaaagatctgactaaaaatttatttttcaatagag

SEQ ID NO: 36565 - DNA, 80 bp, synthetic construct
  misc_feature 1..80: note = Artificially Synthesized Probe
  source 1..80: mol_type = other DNA
actctcctccccaatacacaaataaacaaaagtatatgtgaattattattaaagccctcacacttgcaaagcttgggttc

SEQ ID NO: 36566 - DNA, 80 bp, synthetic construct
  misc_feature 1..80: note = Artificially Synthesized Probe
  source 1..80: mol_type = other DNA
catgcttctttgccaagtactctaagctcttcacatagatcgacttctttaatctgcataacaacgtgtgttttcttact

SEQ ID NO: 36567 - DNA, 80 bp, synthetic construct
  misc_feature 1..80: note = Artificially Synthesized Probe
  source 1..80: mol_type = other DNA
ttattattattactaccactatagaggtttcaaaaaaataactaaacaagatggcatgggggggccgcgcatggtggctc

SEQ ID NO: 36568 - DNA, 80 bp, synthetic construct
  misc_feature 1..80: note = Artificially Synthesized Probe
  source 1..80: mol_type = other DNA
tctcagataatcctcacagcaaccccaggaggaggcactgccagccaagtgaggaaacaagcactttgcccagacagaaa

SEQ ID NO: 36569 - DNA, 80 bp, synthetic construct
  misc_feature 1..80: note = Artificially Synthesized Probe
  source 1..80: mol_type = other DNA
atacactttgtttgatgaataaataatactgacagtgtaccaacaccaggttataatccatcatcttctctcccccatcc

SEQ ID NO: 36570 - DNA, 80 bp, synthetic construct
  misc_feature 1..80: note = Artificially Synthesized Probe
  source 1..80: mol_type = other DNA
acaacgatcttataaaataggatcttataaaatgaggatattgaggcaccaagcttcagtgacttggccacgttcacaca

SEQ ID NO: 36571 - DNA, 80 bp, synthetic construct
  misc_feature 1..80: note = Artificially Synthesized Probe
  source 1..80: mol_type = other DNA
aacttagacttgggtggctcaaagttgaacttgggtggctgagagaggaggtcttcctgatccaggtgttaaaaatgagc

SEQ ID NO: 36572 - DNA, 80 bp, synthetic construct
  misc_feature 1..80: note = Artificially Synthesized Probe
  source 1..80: mol_type = other DNA
acttactcagagatgttgtagtagaagtggccttctttgccccgcaggtccggaatggtgatagtctccagctcttgctc

SEQ ID NO: 36573 - DNA, 80 bp, synthetic construct
  misc_feature 1..80: note = Artificially Synthesized Probe
  source 1..80: mol_type = other DNA
tcttggagggtggcttgcggtctcctaggcctcgcgcccggggaggagaggaggtggccgaccagaccgtgggctcccgg

SEQ ID NO: 36574 - DNA, 80 bp, synthetic construct
  misc_feature 1..80: note = Artificially Synthesized Probe
  source 1..80: mol_type = other DNA
tggttcgaagcaacacaaatttattaccctacagtatgtaaattagtcccacagtgctggttccttccagaggctgaggg

SEQ ID NO: 36575 - DNA, 80 bp, synthetic construct
  misc_feature 1..80: note = Artificially Synthesized Probe
  source 1..80: mol_type = other DNA
gctgtcttgggggctgttatcctgccacagctcccaatctggagagttcataagtgggatcctgcagaccacgccagcac

SEQ ID NO: 36576 - DNA, 80 bp, synthetic construct
  misc_feature 1..80: note = Artificially Synthesized Probe
  source 1..80: mol_type = other DNA
ttcttgcctggacacacacacacgagcgcatgcaaacatagagaaaaaaaatttgcaagcaatgctccatctggtttgaa

SEQ ID NO: 36577 - DNA, 80 bp, synthetic construct
  misc_feature 1..80: note = Artificially Synthesized Probe
  source 1..80: mol_type = other DNA
agccagtgattacttttaaagggctgtcaggttattcattccacttcacagctctccccctcacctgaataaaagccccc

SEQ ID NO: 36578 - DNA, 80 bp, synthetic construct
  misc_feature 1..80: note = Artificially Synthesized Probe
  source 1..80: mol_type = other DNA
aggtctttatccaagaaacactgtggctagaagtcagactctgggccctcttctaattaaactctgcccttgagtcattt

SEQ ID NO: 36579 - DNA, 80 bp, synthetic construct
  misc_feature 1..80: note = Artificially Synthesized Probe
  source 1..80: mol_type = other DNA
gcgggcagatcatgaggtcaggagatcaacaccagcctgaccaacatggtgaaaccccatctctattaaaaatataaaaa

SEQ ID NO: 36580 - DNA, 80 bp, synthetic construct
  misc_feature 1..80: note = Artificially Synthesized Probe
  source 1..80: mol_type = other DNA
acctcaaacgctaactgcgttggagtcaaccaaagctcggagatagaatactggccgggccaggcacagtggctcatgcc

SEQ ID NO: 36581 - DNA, 80 bp, synthetic construct
  misc_feature 1..80: note = Artificially Synthesized Probe
  source 1..80: mol_type = other DNA
ctggggtccgaaggtccagtttttactagttggcaaggaaatcagtttagccctttcagtgactggagctaaaagaatac

SEQ ID NO: 36582 - DNA, 80 bp, synthetic construct
  misc_feature 1..80: note = Artificially Synthesized Probe
  source 1..80: mol_type = other DNA
ctatcagaacagcttcattaacagcagttaagttgagagtctgaggtctgaaaaacacaaaaatgattcaaaccatatcc

SEQ ID NO: 36583 - DNA, 80 bp, synthetic construct
  misc_feature 1..80: note = Artificially Synthesized Probe
  source 1..80: mol_type = other DNA
tgcatctggtcctgagtgctggataagacaaacactgctcaaggcaggagacagctggtgagcaaacacaggcttggtcc

SEQ ID NO: 36584 - DNA, 80 bp, synthetic construct
  misc_feature 1..80: note = Artificially Synthesized Probe
  source 1..80: mol_type = other DNA
aagtgtggtccatctgggaccctaagtggtctgtgattacctgggccaacttgaaatgtcacagatgagaggttatcttt

SEQ ID NO: 36585 - DNA, 80 bp, synthetic construct
  misc_feature 1..80: note = Artificially Synthesized Probe
  source 1..80: mol_type = other DNA
tactctactgtcaatcaacactggcgcacaggctgtctgtctttctgaacacacacattccatacactatgcatactaat

SEQ ID NO: 36586 - DNA, 80 bp, synthetic construct
  misc_feature 1..80: note = Artificially Synthesized Probe
  source 1..80: mol_type = other DNA
tattagatcttcaatttgagggggagtctgggaatgaacactaaacacactcacgctatgagcctctgcccctggagcac

SEQ ID NO: 36587 - DNA, 80 bp, synthetic construct
  misc_feature 1..80: note = Artificially Synthesized Probe
  source 1..80: mol_type = other DNA
atccaactctccggagaagacatcagttgctactattaacgatttaaatggaatatatccttctagacccttgtctccat

SEQ ID NO: 36588 - DNA, 80 bp, synthetic construct
  misc_feature 1..80: note = Artificially Synthesized Probe
  source 1..80: mol_type = other DNA
aaatctgtgaaaagtcacactcccaccaatggtgtgtaagagcacctttctgccaatgctggatatcaatccttctcatc

SEQ ID NO: 36589 - DNA, 80 bp, synthetic construct
  misc_feature 1..80: note = Artificially Synthesized Probe
  source 1..80: mol_type = other DNA
tgctggaattacaaggtgtgcaccaccatgttaggcctgaggaggaaaaatgtataataaggcattacacaaactagtaa

SEQ ID NO: 36590 - DNA, 80 bp, synthetic construct
  misc_feature 1..80: note = Artificially Synthesized Probe
  source 1..80: mol_type = other DNA
ccctggttcccagtacatagataatctgctcaaaagctggtgctggcctaaaagacccaagtcttccatgtgtttggagt

SEQ ID NO: 36591 - DNA, 80 bp, synthetic construct
  misc_feature 1..80: note = Artificially Synthesized Probe
  source 1..80: mol_type = other DNA
gcgagattagttggctgaggcaaaactcgaaatttacatccggtatcttcctggtttgaatggcagtccacatctgaaaa

SEQ ID NO: 36592 - DNA, 80 bp, synthetic construct
  misc_feature 1..80: note = Artificially Synthesized Probe
  source 1..80: mol_type = other DNA
tgcaatatggccatatactcaccagaatggtaaaattaaaaaaacaacaaatgctcacaaagatcaggatcaagaggaat

SEQ ID NO: 36593 - DNA, 80 bp, synthetic construct
  misc_feature 1..80: note = Artificially Synthesized Probe
  source 1..80: mol_type = other DNA
agaaagaaacaaatcacagaaaaggacagactgaataacttcaaattaaaaacagattaaactataccgttttgggtttt

SEQ ID NO: 36594 - DNA, 80 bp, synthetic construct
  misc_feature 1..80: note = Artificially Synthesized Probe
  source 1..80: mol_type = other DNA
acaaaagcttttcctcttgtagcaaaatttgccttttatctggagtaacattgatatcaacgcattctaaggcaaaaaag

SEQ ID NO: 36595 - DNA, 80 bp, synthetic construct
  misc_feature 1..80: note = Artificially Synthesized Probe
  source 1..80: mol_type = other DNA
taggtaggtgtgtaaattggtacatctagaacacaatacagaaaaagccttaaaatgatcatattcactgacccagtaat

SEQ ID NO: 36596 - DNA, 80 bp, synthetic construct
  misc_feature 1..80: note = Artificially Synthesized Probe
  source 1..80: mol_type = other DNA
ctttctcccttggttgacattaaaaaaaattacattttcctaacaatataattaacatagtctcaagtagaaagcgggaa

SEQ ID NO: 36597 - DNA, 80 bp, synthetic construct
  misc_feature 1..80: note = Artificially Synthesized Probe
  source 1..80: mol_type = other DNA
tcaacctcccaaagtgctgggattataggcgtaagccactacacctggcctaaggatacatttttttaacagctttactg

SEQ ID NO: 36598 - DNA, 80 bp, synthetic construct
  misc_feature 1..80: note = Artificially Synthesized Probe
  source 1..80: mol_type = other DNA
atctgaggcagaagtaatctgagcccttattttcctaggaaaatagaaagaagagaaaatatagaaatctatagaaaata

SEQ ID NO: 36599 - DNA, 80 bp, synthetic construct
  misc_feature 1..80: note = Artificially Synthesized Probe
  source 1..80: mol_type = other DNA
gggttatgtcctgataaacccataagttaaaaatattgtatctgctgggcgcggtggctcacacctgtaattccagcact

SEQ ID NO: 36600 - DNA, 80 bp, synthetic construct
  misc_feature 1..80: note = Artificially Synthesized Probe
  source 1..80: mol_type = other DNA
ataatgttaaagccatgtttctcaaagtcccgagctccacgtaaactgcctattatcagaaaaaagttatcaattaaaag

SEQ ID NO: 36601 - DNA, 80 bp, synthetic construct
  misc_feature 1..80: note = Artificially Synthesized Probe
  source 1..80: mol_type = other DNA
tccagaagaacaccaccttcacataaagacataaagctccatgtttaccatttcaggcataagccaaaagcaagtggagg

SEQ ID NO: 36602 - DNA, 80 bp, synthetic construct
  misc_feature 1..80: note = Artificially Synthesized Probe
  source 1..80: mol_type = other DNA
gttcaattgtagttctcttgccagcaatctacttactaaaaaagattatgcagagcatcggaacagctcaaaccgtactc

SEQ ID NO: 36603 - DNA, 80 bp, synthetic construct
  misc_feature 1..80: note = Artificially Synthesized Probe
  source 1..80: mol_type = other DNA
cctacttattcagaacccacacattgcccacaataacttatatttttttcagagagagagtgaaaagacgcagtatacga

SEQ ID NO: 36604 - DNA, 80 bp, synthetic construct
  misc_feature 1..80: note = Artificially Synthesized Probe
  source 1..80: mol_type = other DNA
ttctaagattttattctccattctactggaagggacaatggaaacccgctataatcactagagcaataagaggcgttgaa

SEQ ID NO: 36605 - DNA, 80 bp, synthetic construct
  misc_feature 1..80: note = Artificially Synthesized Probe
  source 1..80: mol_type = other DNA
ctgaaacaatctctatgaacaaacagaaacaacctaagcaagcatcattgaggagttgattaattatggtatagccatag

SEQ ID NO: 36606 - DNA, 80 bp, synthetic construct
  misc_feature 1..80: note = Artificially Synthesized Probe
  source 1..80: mol_type = other DNA
gttttctctactttagaaaatttaaatttgtgaaaaaatgtaataaagttaaaattagcagccaagtgcagtggctcaca

SEQ ID NO: 36607 - DNA, 80 bp, synthetic construct
  misc_feature 1..80: note = Artificially Synthesized Probe
  source 1..80: mol_type = other DNA
ccagctaatttttgtatttttagtagagatggggtttcaccagtttggccaggatggctttgatctcttgacctcgtgat

SEQ ID NO: 36608 - DNA, 80 bp, synthetic construct
  misc_feature 1..80: note = Artificially Synthesized Probe
  source 1..80: mol_type = other DNA
tttcttaaaaagctgacgatccctctgagataatcaagatctaaatggttgaggagtcatcataaaatctaaggtttggc

SEQ ID NO: 36609 - DNA, 80 bp, synthetic construct
  misc_feature 1..80: note = Artificially Synthesized Probe
  source 1..80: mol_type = other DNA
ctcagtgcacaaagtgagctcagagcttccccccgaaagccaaaagtttcaacctgagttaggtcggcaaactcttgaat

SEQ ID NO: 36610 - DNA, 80 bp, synthetic construct
  misc_feature 1..80: note = Artificially Synthesized Probe
  source 1..80: mol_type = other DNA
ggttgcagtgagccgagatcgtgccattgcactatagcctgggcaacaagagcaaaactctatctcaaaaaaaaaaaaaa

SEQ ID NO: 36611 - DNA, 80 bp, synthetic construct
  misc_feature 1..80: note = Artificially Synthesized Probe
  source 1..80: mol_type = other DNA
tataggcgtgagacaccacgcccagctgttctgcaaattaaatatttctgtgcaattcttagcataacacctgcctggca

SEQ ID NO: 36612 - DNA, 80 bp, synthetic construct
  misc_feature 1..80: note = Artificially Synthesized Probe
  source 1..80: mol_type = other DNA
ttaaatccaggaggcggaggttgcagtgagctgagattgcggcattgcactccagcctgggcaacgagcaaaaaaaaaaa

SEQ ID NO: 36613 - DNA, 80 bp, synthetic construct
  misc_feature 1..80: note = Artificially Synthesized Probe
  source 1..80: mol_type = other DNA
atcccctatattgtagcacagtgaacaactgtcctgaacatcacaagctctttgagacactacagtgtataagcaggtct

SEQ ID NO: 36614 - DNA, 80 bp, synthetic construct
  misc_feature 1..80: note = Artificially Synthesized Probe
  source 1..80: mol_type = other DNA
tataggcgtgagtcaccgctctcggcccacttcagatatttattttgaggagggagcgcatttagacacagaccccaaat

SEQ ID NO: 36615 - DNA, 80 bp, synthetic construct
  misc_feature 1..80: note = Artificially Synthesized Probe
  source 1..80: mol_type = other DNA
ctcgctccatggatgcaacacccgatccgcctcggggactgggaaagttccctccagggctcccacaggcgctccgcctc

SEQ ID NO: 36616 - DNA, 80 bp, synthetic construct
  misc_feature 1..80: note = Artificially Synthesized Probe
  source 1..80: mol_type = other DNA
gctgtgcctggctcatggagcccacggcatgatgccgtggttggagggatgctggtccctgtggtgctgtctggtgacac

SEQ ID NO: 36617 - DNA, 80 bp, synthetic construct
  misc_feature 1..80: note = Artificially Synthesized Probe
  source 1..80: mol_type = other DNA
taatgtctaaagtgctcatgccaggtcccagctggactcccctcggtagggccccaccttttgttacctgaaaatgtcct

SEQ ID NO: 36618 - DNA, 80 bp, synthetic construct
  misc_feature 1..80: note = Artificially Synthesized Probe
  source 1..80: mol_type = other DNA
caaaccagttgagaggtggagatgggaactttataatagatttggggcggcaaaagcctggtcataccctgttcacgtgg

SEQ ID NO: 36619 - DNA, 80 bp, synthetic construct
  misc_feature 1..80: note = Artificially Synthesized Probe
  source 1..80: mol_type = other DNA
tgtcactcccacaaggggggggaccgctttccccaggtgtccacctggctccctcctttccctgccttaggccttttcct

SEQ ID NO: 36620 - DNA, 80 bp, synthetic construct
  misc_feature 1..80: note = Artificially Synthesized Probe
  source 1..80: mol_type = other DNA
gcttaccctggagtctaaagccctcgctctggatctctgtgcccccacatagctcccagcctcccttccagccatacctg

SEQ ID NO: 36621 - DNA, 80 bp, synthetic construct
  misc_feature 1..80: note = Artificially Synthesized Probe
  source 1..80: mol_type = other DNA
gtgctttttttatggattcagcatcgtagagatgagacacatgggactcagaatgtggtggtaacagcatttgaactcaa

SEQ ID NO: 36622 - DNA, 80 bp, synthetic construct
  misc_feature 1..80: note = Artificially Synthesized Probe
  source 1..80: mol_type = other DNA
ccaccccactgaaacaggcaacacttctttctttactggacacatccccttctctcccagccatattttttcttttcttt

SEQ ID NO: 36623 - DNA, 80 bp, synthetic construct
  misc_feature 1..80: note = Artificially Synthesized Probe
  source 1..80: mol_type = other DNA
ggtacttttctctacagaattggtttcctccttgacaaaaaatgtggctagatataggtccggggcttggcctgttacca

SEQ ID NO: 36624 - DNA, 80 bp, synthetic construct
  misc_feature 1..80: note = Artificially Synthesized Probe
  source 1..80: mol_type = other DNA
gaaacctccgcccccgacagcgcccctaagtccttctttggcttcaccctcgatgttctagtttcctcatctataaaaag

SEQ ID NO: 36625 - DNA, 80 bp, synthetic construct
  misc_feature 1..80: note = Artificially Synthesized Probe
  source 1..80: mol_type = other DNA
atgttgaatgaacactcacaacacacttcacatttatctcagaggtaaaactctttaatctcagagcgcccctcccaact

SEQ ID NO: 36626 - DNA, 80 bp, synthetic construct
  misc_feature 1..80: note = Artificially Synthesized Probe
  source 1..80: mol_type = other DNA
cgcttcagcttctggaagtcgctggtgttaagccgcggccgtggcaggtccccgaagacctgggtgtcctcggcctctcg

SEQ ID NO: 36627 - DNA, 80 bp, synthetic construct
  misc_feature 1..80: note = Artificially Synthesized Probe
  source 1..80: mol_type = other DNA
tcttcagtgctcactgcttcattgagggaggatgcacagaaaaggtcaccactgtgactgctggtttgcatataaggaca

SEQ ID NO: 36628 - DNA, 80 bp, synthetic construct
  misc_feature 1..80: note = Artificially Synthesized Probe
  source 1..80: mol_type = other DNA
gagacccatttccttcacctcaaaaacaacttcctctagcagcctgcctggtcatcggcaaaaaccaacccagtttctat

SEQ ID NO: 36629 - DNA, 80 bp, synthetic construct
  misc_feature 1..80: note = Artificially Synthesized Probe
  source 1..80: mol_type = other DNA
tcccagcacagagctggccccaggaccagtaaggctcagagcagggaagggactggctttagatcacacagcaagcccca

SEQ ID NO: 36630 - DNA, 80 bp, synthetic construct
  misc_feature 1..80: note = Artificially Synthesized Probe
  source 1..80: mol_type = other DNA
tttaacatggtgtctagaaaatttagaattccacgtggggcttgtgttgaatttgatggatgatgccaccctgctccgtc

SEQ ID NO: 36631 - DNA, 80 bp, synthetic construct
  misc_feature 1..80: note = Artificially Synthesized Probe
  source 1..80: mol_type = other DNA
ttgtgtttgcaggacaggtcggccctaagcagacaatgcagggtgcgtctccttactgggtgagaagagcgagggcaggg

SEQ ID NO: 36632 - DNA, 80 bp, synthetic construct
  misc_feature 1..80: note = Artificially Synthesized Probe
  source 1..80: mol_type = other DNA
ctcaaacacacccatgtccttcccagctgatgagggaggaaactgaggctctaagcaagaaatggctggtccaaagtcaa

SEQ ID NO: 36633 - DNA, 80 bp, synthetic construct
  misc_feature 1..80: note = Artificially Synthesized Probe
  source 1..80: mol_type = other DNA
ttgcctcaggtctgacaggacgattcccacgggcgacccccttccagcgctcagcaaaggatcgctggcagacctctgcc

SEQ ID NO: 36634 - DNA, 80 bp, synthetic construct
  misc_feature 1..80: note = Artificially Synthesized Probe
  source 1..80: mol_type = other DNA
gcttaggccatgccctcgagcaaaatggtacctccttggcttcaattccagtatacaatatggagaaggaagtgggcgtt

SEQ ID NO: 36635 - DNA, 80 bp, synthetic construct
  misc_feature 1..80: note = Artificially Synthesized Probe
  source 1..80: mol_type = other DNA
gcagggctcggacccgctccgagcgggatgcaggcggtctgggatgcaggcggcagctgtaggagtttggtctggcggtc

SEQ ID NO: 36636 - DNA, 80 bp, synthetic construct
  misc_feature 1..80: note = Artificially Synthesized Probe
  source 1..80: mol_type = other DNA
gcacaaatgtaaataataaattcctccacgttgccagctgtaattcagtgttcatgcactctcaagagtcacagactcag

SEQ ID NO: 36637 - DNA, 80 bp, synthetic construct
  misc_feature 1..80: note = Artificially Synthesized Probe
  source 1..80: mol_type = other DNA
accactatagcaaagtgaataaaacatagtacgtgtttaataataatttcataaaaatatcctgggacaataaaaccttt

SEQ ID NO: 36638 - DNA, 80 bp, synthetic construct
  misc_feature 1..80: note = Artificially Synthesized Probe
  source 1..80: mol_type = other DNA
catacagcatgtgctcaaacatacttgctgaatactgttccctgctgaggcaattaactaaatgcacatagttctgtaaa

SEQ ID NO: 36639 - DNA, 80 bp, synthetic construct
  misc_feature 1..80: note = Artificially Synthesized Probe
  source 1..80: mol_type = other DNA
gagccctaggttataccaccaagtcaggaagaggcagaagagccaggaaagaaaaaggatgagaaaaaggagagtggtat

SEQ ID NO: 36640 - DNA, 80 bp, synthetic construct
  misc_feature 1..80: note = Artificially Synthesized Probe
  source 1..80: mol_type = other DNA
agttcaaaggggaaagaaataattcacattcactaacatgtgtacaaatattttaattactatgtctactcactaaaaag

SEQ ID NO: 36641 - DNA, 80 bp, synthetic construct
  misc_feature 1..80: note = Artificially Synthesized Probe
  source 1..80: mol_type = other DNA
atccgagatccaaaatggtcctggtccaaagcgtttttggataatactcaatctgtaattaaaatgacatttaaactcat

SEQ ID NO: 36642 - DNA, 80 bp, synthetic construct
  misc_feature 1..80: note = Artificially Synthesized Probe
  source 1..80: mol_type = other DNA
aaattaacttgagaccctcccattttctgacaactccctcagtcaaaatgcttctttcagcatcactttggaccctacca

SEQ ID NO: 36643 - DNA, 80 bp, synthetic construct
  misc_feature 1..80: note = Artificially Synthesized Probe
  source 1..80: mol_type = other DNA
aaaagagggcttcggtttttcctgagtgagatgagaagctttcctggagtgttctgagcaaaggagcaacacaacatgca

SEQ ID NO: 36644 - DNA, 80 bp, synthetic construct
  misc_feature 1..80: note = Artificially Synthesized Probe
  source 1..80: mol_type = other DNA
agaggtcaatagcacaggtctccctgatccgggtctttcttcctcctatgtaccaatgcttcagcttctgatacaaatgg

SEQ ID NO: 36645 - DNA, 80 bp, synthetic construct
  misc_feature 1..80: note = Artificially Synthesized Probe
  source 1..80: mol_type = other DNA
gagagggacttaggcatcaattttttcaatagccctacagactatttctttaatgcttccgagctcagagttagtattca

SEQ ID NO: 36646 - DNA, 80 bp, synthetic construct
  misc_feature 1..80: note = Artificially Synthesized Probe
  source 1..80: mol_type = other DNA
cctatttgaattgcatatgatactttaaagattcacaagaatttgccctcaaaggcagtaaactttctgatacctgggac

SEQ ID NO: 36647 - DNA, 80 bp, synthetic construct
  misc_feature 1..80: note = Artificially Synthesized Probe
  source 1..80: mol_type = other DNA
aaatttctgcaataggaaaactcttcattagtgaaaatgataccaataaaagaacaaaataatctgggcatggtagttca

SEQ ID NO: 36648 - DNA, 80 bp, synthetic construct
  misc_feature 1..80: note = Artificially Synthesized Probe
  source 1..80: mol_type = other DNA
aaaaggtaaggaagtgctcgtcaagacaatgatggaaatatgtcaaaaggacactggccaagtctaggacaatttgacca

SEQ ID NO: 36649 - DNA, 80 bp, synthetic construct
  misc_feature 1..80: note = Artificially Synthesized Probe
  source 1..80: mol_type = other DNA
aagttaacatcaccagtaacactcctcatatgacacactgagaagagagcttctcagtactaccacttctgtagtactcc

SEQ ID NO: 36650 - DNA, 80 bp, synthetic construct
  misc_feature 1..80: note = Artificially Synthesized Probe
  source 1..80: mol_type = other DNA
agtagctgggaccacaggttgctgaaatttaatttttaaaaagtgaaaatactggccaggcacagtggctcacgcctgtt

SEQ ID NO: 36651 - DNA, 80 bp, synthetic construct
  misc_feature 1..80: note = Artificially Synthesized Probe
  source 1..80: mol_type = other DNA
cagtttaaatgggtatttggggatgtttgagtcgggaaatggtaacataacacatggcaagacaaaaatgcttacttcaa

SEQ ID NO: 36652 - DNA, 80 bp, synthetic construct
  misc_feature 1..80: note = Artificially Synthesized Probe
  source 1..80: mol_type = other DNA
gtcaatagacacattaatagtagtaataacgttaacacagcataaagacagatgttggctaagcttggtggctcacgcct

SEQ ID NO: 36653 - DNA, 80 bp, synthetic construct
  misc_feature 1..80: note = Artificially Synthesized Probe
  source 1..80: mol_type = other DNA
caccccaaatatcttttactgttctctttccagttaagattcatgtactgcattctgagtaggtttctttcatccatttg

SEQ ID NO: 36654 - DNA, 80 bp, synthetic construct
  misc_feature 1..80: note = Artificially Synthesized Probe
  source 1..80: mol_type = other DNA
aaaaaaaaaaaaaaggaaccaggatctgggcactaggtgtgctcattgctactgagggtcattgcttctaggaactttaa

SEQ ID NO: 36655 - DNA, 80 bp, synthetic construct
  misc_feature 1..80: note = Artificially Synthesized Probe
  source 1..80: mol_type = other DNA
tcaaaatgtctgtgtagttccttatgcacttagactacattgcactaaatgacagcactgtgttcagaagttgccccgtg

SEQ ID NO: 36656 - DNA, 80 bp, synthetic construct
  misc_feature 1..80: note = Artificially Synthesized Probe
  source 1..80: mol_type = other DNA
agagcgcatctctctccgaagttaaagagcacactctcccatcactcaacggatcccaacaagccaccactaccgttaac

SEQ ID NO: 36657 - DNA, 80 bp, synthetic construct
  misc_feature 1..80: note = Artificially Synthesized Probe
  source 1..80: mol_type = other DNA
tgtgacgggttgccacttgaaatatcttccatttggataaagtaggaatatttatacatgtgccccaaacgtccctccgt

SEQ ID NO: 36658 - DNA, 80 bp, synthetic construct
  misc_feature 1..80: note = Artificially Synthesized Probe
  source 1..80: mol_type = other DNA
acattgctataagagaagtgcacacggatactagtagttaattcagtcacatctgtgaaatagcttataaaatgctactt

SEQ ID NO: 36659 - DNA, 80 bp, synthetic construct
  misc_feature 1..80: note = Artificially Synthesized Probe
  source 1..80: mol_type = other DNA
ttatgactcagaagcccctaaagacatgggtactaagcaacaaaataagcagatgttaattaactgtaattttctcttac

SEQ ID NO: 36660 - DNA, 80 bp, synthetic construct
  misc_feature 1..80: note = Artificially Synthesized Probe
  source 1..80: mol_type = other DNA
tggcctcctgagtagctgagaatacagatgtgtgccagcatgcctggctaattttttgtatttttgtggagacggggttt

SEQ ID NO: 36661 - DNA, 80 bp, synthetic construct
  misc_feature 1..80: note = Artificially Synthesized Probe
  source 1..80: mol_type = other DNA
tttagtacaaaaggcttcagttaaaaaaaaaaaaaaaagctacctttctcgtcttggttcatgacacatggaggctgctt

SEQ ID NO: 36662 - DNA, 80 bp, synthetic construct
  misc_feature 1..80: note = Artificially Synthesized Probe
  source 1..80: mol_type = other DNA
taagaggttgggtcagtctgcagtgagttcatgcatttagaggtgttcttcaagatgactaatgtcaaaaattgagacat

SEQ ID NO: 36663 - DNA, 80 bp, synthetic construct
  misc_feature 1..80: note = Artificially Synthesized Probe
  source 1..80: mol_type = other DNA
cttggtttctcaggaaattatatgtacagtgcttgctggcagttagatgtcaggacaatctaagctgagaaaaccccttc

SEQ ID NO: 36664 - DNA, 80 bp, synthetic construct
  misc_feature 1..80: note = Artificially Synthesized Probe
  source 1..80: mol_type = other DNA
gaccctgactctacaaataagaaaataagctgggatgccaggtgtggtggctcactcctgtaatcccagcactttgggag

SEQ ID NO: 36665 - DNA, 80 bp, synthetic construct
  misc_feature 1..80: note = Artificially Synthesized Probe
  source 1..80: mol_type = other DNA
ccgggccaggcatggtggctcatgcctgtaatcccagcactttgggaggccaaggcgggtggatcacctgaggtcaggag

SEQ ID NO: 36666 - DNA, 80 bp, synthetic construct
  misc_feature 1..80: note = Artificially Synthesized Probe
  source 1..80: mol_type = other DNA
ctaaaaatacaaaaattagccaggcatggtggcatgcgcctgtaatcccagctacttaggaggcttgaggcaggagaatc

SEQ ID NO: 36667 - DNA, 80 bp, synthetic construct
  misc_feature 1..80: note = Artificially Synthesized Probe
  source 1..80: mol_type = other DNA
tgatgaaacccaatttatagaggtggggataagggaccatctttaagagttgcctaccacaagtctataaaatacagttt

SEQ ID NO: 36668 - DNA, 80 bp, synthetic construct
  misc_feature 1..80: note = Artificially Synthesized Probe
  source 1..80: mol_type = other DNA
atggcacacatatacctatgtaacaaacccgcatgttctacacatgtattccatatttttattattttttttttgagata

SEQ ID NO: 36669 - DNA, 80 bp, synthetic construct
  misc_feature 1..80: note = Artificially Synthesized Probe
  source 1..80: mol_type = other DNA
tgcacctggccaaaattaccctttttaagagcacagttcaataattttcagttagttttagagcattccatcaccccagt

SEQ ID NO: 36670 - DNA, 80 bp, synthetic construct
  misc_feature 1..80: note = Artificially Synthesized Probe
  source 1..80: mol_type = other DNA
tgggactacaggcgcccgctaccaagcccggctaattttctgtattttcagtagagacggggtttcaccttgttagccag

SEQ ID NO: 36671 - DNA, 80 bp, synthetic construct
  misc_feature 1..80: note = Artificially Synthesized Probe
  source 1..80: mol_type = other DNA
ccagctactcaggtggctgaggtgggagaatcccttgagcctgagaggtggagtttgcagtgagacgtggagtttgcagt

SEQ ID NO: 36672 - DNA, 80 bp, synthetic construct
  misc_feature 1..80: note = Artificially Synthesized Probe
  source 1..80: mol_type = other DNA
ctgatccctccctcctcctgtcactatggacttatgtatttttattcaatatattaaataattgttttcccagttgcctt

SEQ ID NO: 36673 - DNA, 80 bp, synthetic construct
  misc_feature 1..80: note = Artificially Synthesized Probe
  source 1..80: mol_type = other DNA
ttttggcatgttggccaagctggtcttgaactcctgacctcaggtgattcacctgactcggcctcccaaagtgctgggat

SEQ ID NO: 36674 - DNA, 80 bp, synthetic construct
  misc_feature 1..80: note = Artificially Synthesized Probe
  source 1..80: mol_type = other DNA
tcaatggttatgtacaaatgcaattttaggaaacagtataaatattcatcataggggactggctaaacaaattacagttc

SEQ ID NO: 36675 - DNA, 80 bp, synthetic construct
  misc_feature 1..80: note = Artificially Synthesized Probe
  source 1..80: mol_type = other DNA
cctgctgtaactgcttgtagcaaggagtgcagtttaggtgtctttcagtatctcaggtgacaccagctgacttccagaag

SEQ ID NO: 36676 - DNA, 80 bp, synthetic construct
  misc_feature 1..80: note = Artificially Synthesized Probe
  source 1..80: mol_type = other DNA
aggcccgccaccaggcccggctaatgttgtatttttagtagagacgtgtttcaccatgttggccaggatggtctcgatct

SEQ ID NO: 36677 - DNA, 80 bp, synthetic construct
  misc_feature 1..80: note = Artificially Synthesized Probe
  source 1..80: mol_type = other DNA
cagagttttgctcttgtctcacaggctgaagtacaatggcactatctcagctcactacaacctctgcctcctgggttcaa

SEQ ID NO: 36678 - DNA, 80 bp, synthetic construct
  misc_feature 1..80: note = Artificially Synthesized Probe
  source 1..80: mol_type = other DNA
atttttagtagagatgaggggtttactatgttggccaggctggtcttgaactcctggtcacaagtgatcctcccacctcg

SEQ ID NO: 36679 - DNA, 80 bp, synthetic construct
  misc_feature 1..80: note = Artificially Synthesized Probe
  source 1..80: mol_type = other DNA
caccattctcctgcctcagcctcctgagcagctgggactgcaggcgcccgccaccacgcctggctgatttttttgtatct

SEQ ID NO: 36680 - DNA, 80 bp, synthetic construct
  misc_feature 1..80: note = Artificially Synthesized Probe
  source 1..80: mol_type = other DNA
accacctggggagccttggggcagtgatttatgctaagtctgtttccttatctataaaaggggtatagttacagtattta

SEQ ID NO: 36681 - DNA, 80 bp, synthetic construct
  misc_feature 1..80: note = Artificially Synthesized Probe
  source 1..80: mol_type = other DNA
gcaaatatttcaaaatccaaaaaaaaatcacaaattcaataagatggtcccaagaatttcagagaagggatactcaacct

SEQ ID NO: 36682 - DNA, 80 bp, synthetic construct
  misc_feature 1..80: note = Artificially Synthesized Probe
  source 1..80: mol_type = other DNA
tctatttttgcacctgtgactctgggcagatggcaacttccttgatttcctgtgagagtgtttgtgtcatttatctaggt

SEQ ID NO: 36683 - DNA, 80 bp, synthetic construct
  misc_feature 1..80: note = Artificially Synthesized Probe
  source 1..80: mol_type = other DNA
tggagtagccagctgcaatgtagaaagggtggaacaatgacctcataatgatgcagcagtgaccttgtagaaaagtggat

SEQ ID NO: 36684 - DNA, 80 bp, synthetic construct
  misc_feature 1..80: note = Artificially Synthesized Probe
  source 1..80: mol_type = other DNA
aagccttgacccgccctggggttgtaactctccttggtatggaaaaatggttcaaatgctgttgctttcaagaggttctt

SEQ ID NO: 36685 - DNA, 80 bp, synthetic construct
  misc_feature 1..80: note = Artificially Synthesized Probe
  source 1..80: mol_type = other DNA
ccagcttttaaaaaaatcttaatagtttttacttgaaaaaacaatctgtggccaggcacagtggctcatggctgtaatcc

SEQ ID NO: 36686 - DNA, 80 bp, synthetic construct
  misc_feature 1..80: note = Artificially Synthesized Probe
  source 1..80: mol_type = other DNA
ctataaggcaagtctaaagatttagtggccatgtcagatgtttggggaagggactctattttccagacatttcagatagc

SEQ ID NO: 36687 - DNA, 80 bp, synthetic construct
  misc_feature 1..80: note = Artificially Synthesized Probe
  source 1..80: mol_type = other DNA
ctaagtttgcttacctcaggaactgtcaccctggcctaatgtatactttgagagtaacaataaggtacatctaagacttc

SEQ ID NO: 36688 - DNA, 80 bp, synthetic construct
  misc_feature 1..80: note = Artificially Synthesized Probe
  source 1..80: mol_type = other DNA
gaaaaatctatataagaatattcacactaatctttacatgtgattcctgaagctcacagaccctaccctgaaaccacatc

SEQ ID NO: 36689 - DNA, 80 bp, synthetic construct
  misc_feature 1..80: note = Artificially Synthesized Probe
  source 1..80: mol_type = other DNA
tacagctactcaggaggctgaggcagaagaatcacttgaacccaggaggcggaggttgcagtgagccgagattgcaccat

SEQ ID NO: 36690 - DNA, 80 bp, synthetic construct
  misc_feature 1..80: note = Artificially Synthesized Probe
  source 1..80: mol_type = other DNA
gagaggaaagtttcttcctcaaacaggatgccagaaaaagggcaaaaattctacaactgttaagtccaatgctgaatgaa

SEQ ID NO: 36691 - DNA, 80 bp, synthetic construct
  misc_feature 1..80: note = Artificially Synthesized Probe
  source 1..80: mol_type = other DNA
ctgcagaaaaccttctctccaatgaaatagaaggaacatggagaacagaggtaaagaggtaaagagagagaataaacaga

SEQ ID NO: 36692 - DNA, 80 bp, synthetic construct
  misc_feature 1..80: note = Artificially Synthesized Probe
  source 1..80: mol_type = other DNA
gacagacattatgaaacatgtcacctctaaatacttcaaaatgcatctctaaaatataagaaatggctgggtgcagtggc

SEQ ID NO: 36693 - DNA, 80 bp, synthetic construct
  misc_feature 1..80: note = Artificially Synthesized Probe
  source 1..80: mol_type = other DNA
ttataaaagcatccaaacatgaaccatgcactgcatctcgttatgtctttgaagtgtcttttaatctagaatagtgcagc

SEQ ID NO: 36694 - DNA, 80 bp, synthetic construct
  misc_feature 1..80: note = Artificially Synthesized Probe
  source 1..80: mol_type = other DNA
agaaaagagaaaagaacaggccagttgtctttgcagaaggtcatgtcccacattctggacttgtctaattgtttccacat

SEQ ID NO: 36695 - DNA, 80 bp, synthetic construct
  misc_feature 1..80: note = Artificially Synthesized Probe
  source 1..80: mol_type = other DNA
tacattcagtgtacttcaatcaactacataattattctttttaatgcccaaattgtcccaattttggtcactgggagcct

SEQ ID NO: 36696 - DNA, 80 bp, synthetic construct
  misc_feature 1..80: note = Artificially Synthesized Probe
  source 1..80: mol_type = other DNA
taaaggagctcatgctacatttgccaatgcatagtactagaaaaagcacttaaaaaccagaattcatattgatattgcca

SEQ ID NO: 36697 - DNA, 80 bp, synthetic construct
  misc_feature 1..80: note = Artificially Synthesized Probe
  source 1..80: mol_type = other DNA
agttcaagaccagcctgggcaataaagtgagactcttgtctctacaaaaaattttaaaaattatctgggcatggtggcac

SEQ ID NO: 36698 - DNA, 80 bp, synthetic construct
  misc_feature 1..80: note = Artificially Synthesized Probe
  source 1..80: mol_type = other DNA
tcacaagtttgactttgagtcagaattaggctttccttactttcagatgataaaggaatttaccactaacaccctgctta

SEQ ID NO: 36699 - DNA, 80 bp, synthetic construct
  misc_feature 1..80: note = Artificially Synthesized Probe
  source 1..80: mol_type = other DNA
gtgtatttgtttgagtacctgttttcaattttttttttttttttttttttttttgagtctcactctgacacccaggctgg

SEQ ID NO: 36700 - DNA, 80 bp, synthetic construct
  misc_feature 1..80: note = Artificially Synthesized Probe
  source 1..80: mol_type = other DNA
tcagcaccacttatcgaagagactattctttctccattgaatagttttgacatccttgttgaaaatcaactggccataga

SEQ ID NO: 36701 - DNA, 80 bp, synthetic construct
  misc_feature 1..80: note = Artificially Synthesized Probe
  source 1..80: mol_type = other DNA
tcatgttggacaggctggtcttgaactcctgaccttatgatcttcctgcttcagcctcccaaagtgttgggattacaggc

SEQ ID NO: 36702 - DNA, 80 bp, synthetic construct
  misc_feature 1..80: note = Artificially Synthesized Probe
  source 1..80: mol_type = other DNA
ttcttggttaaatttgttcccaggcattttattcttttgaatgctatggaaaatagaattgtttttattatttccttttt

SEQ ID NO: 36703 - DNA, 80 bp, synthetic construct
  misc_feature 1..80: note = Artificially Synthesized Probe
  source 1..80: mol_type = other DNA
aactctgctaaatttgttcgttagctttaatagccgcttttttattgttgttttcttttgagacttctttgtgattttat

SEQ ID NO: 36704 - DNA, 80 bp, synthetic construct
  misc_feature 1..80: note = Artificially Synthesized Probe
  source 1..80: mol_type = other DNA
cttctttaaatatgtggtagagttcaccagtgaagccatctggttttagactttttgttttttggaggtttttgttacta

SEQ ID NO: 36705 - DNA, 80 bp, synthetic construct
  misc_feature 1..80: note = Artificially Synthesized Probe
  source 1..80: mol_type = other DNA
ccgcacttggctaattttaaagtttttctgtagagatgaagtctcactatattgcccagacaggtcttgaactcttgggc

SEQ ID NO: 36706 - DNA, 80 bp, synthetic construct
  misc_feature 1..80: note = Artificially Synthesized Probe
  source 1..80: mol_type = other DNA
gtagtgttctatttccttactaattttcttcttctttttttttttttaatagagacaggatctcactctgtcacccaggc

SEQ ID NO: 36707 - DNA, 80 bp, synthetic construct
  misc_feature 1..80: note = Artificially Synthesized Probe
  source 1..80: mol_type = other DNA
acaacagcattttggccgaggcaggaggatcacttaaatctaggaggtcaaggctgcagtgaactatgatcacaccactc

SEQ ID NO: 36708 - DNA, 80 bp, synthetic construct
  misc_feature 1..80: note = Artificially Synthesized Probe
  source 1..80: mol_type = other DNA
atattttcctaaatcttgattgcttttcttctgctcaccttattataatagtctttcaattagaaaactgttggagtttt

SEQ ID NO: 36709 - DNA, 80 bp, synthetic construct
  misc_feature 1..80: note = Artificially Synthesized Probe
  source 1..80: mol_type = other DNA
gtctctactaaaaaaatacaaaaattagctgtgcgtggtggtgcgcacctgtagtcccagctattcgggaggctgaggca

SEQ ID NO: 36710 - DNA, 80 bp, synthetic construct
  misc_feature 1..80: note = Artificially Synthesized Probe
  source 1..80: mol_type = other DNA
tatggagtttatcctggtatacagtgtgggttcaatttcaatttttgtcaaatgcctattcaatttaccccccgtccatt

SEQ ID NO: 36711 - DNA, 80 bp, synthetic construct
  misc_feature 1..80: note = Artificially Synthesized Probe
  source 1..80: mol_type = other DNA
tatgtgagccactgcaccccactcattcttcactgttcttggttgtgtatttttcaatgaaaactttagaattcaggagt

SEQ ID NO: 36712 - DNA, 80 bp, synthetic construct
  misc_feature 1..80: note = Artificially Synthesized Probe
  source 1..80: mol_type = other DNA
ttctcaccttcagatttcctaaaacatctacctgctaaggcctcaaggtgaatcaaatcacctttcatgctacctatgga

SEQ ID NO: 36713 - DNA, 80 bp, synthetic construct
  misc_feature 1..80: note = Artificially Synthesized Probe
  source 1..80: mol_type = other DNA
tcagagtggctagaaaaacatttggatttgaagatggtggtagtagagggttagagtgataagaacagattccaaggcaa

SEQ ID NO: 36714 - DNA, 80 bp, synthetic construct
  misc_feature 1..80: note = Artificially Synthesized Probe
  source 1..80: mol_type = other DNA
gggcctgcattctcaggtgaatggatttatgtagtagggataaaaatgaaaaagtgatggtattgtgtatcaagacagtc

SEQ ID NO: 36715 - DNA, 80 bp, synthetic construct
  misc_feature 1..80: note = Artificially Synthesized Probe
  source 1..80: mol_type = other DNA
tcttcagagaccttagcttggatgtcaggacagatttcagctctacctaggctagtcttgtgagcactaactgtatatac

SEQ ID NO: 36716 - DNA, 80 bp, synthetic construct
  misc_feature 1..80: note = Artificially Synthesized Probe
  source 1..80: mol_type = other DNA
gagcccacgttccttgtactatattgtggaccctaagtccaagtcccaggctatgctattcatgcatcaggttctattct

SEQ ID NO: 36717 - DNA, 80 bp, synthetic construct
  misc_feature 1..80: note = Artificially Synthesized Probe
  source 1..80: mol_type = other DNA
ggcagtcatgtgataggaaagggagaggtttaatcagtgttttggtggtgatgctgacaaaagtgacataatggtgatga

SEQ ID NO: 36718 - DNA, 80 bp, synthetic construct
  misc_feature 1..80: note = Artificially Synthesized Probe
  source 1..80: mol_type = other DNA
actgatgaagaaaacttgttataaggccagtgtcatcttaagcatgaatagttcttgagctatgtccttgctgagagaca

SEQ ID NO: 36719 - DNA, 80 bp, synthetic construct
  misc_feature 1..80: note = Artificially Synthesized Probe
  source 1..80: mol_type = other DNA
aatctagtccttgtatatttgaaaggaaaaggctttgactgaagctagagactatattctgaacactcagctggcaccct

SEQ ID NO: 36720 - DNA, 80 bp, synthetic construct
  misc_feature 1..80: note = Artificially Synthesized Probe
  source 1..80: mol_type = other DNA
ataaaatctgaataatctctgaagtatgaaataaatcagaccagtcactgtccccaacagctgatctagaggagggttag

SEQ ID NO: 36721 - DNA, 80 bp, synthetic construct
  misc_feature 1..80: note = Artificially Synthesized Probe
  source 1..80: mol_type = other DNA
atttcaggaatctagaaggcaacttattctcataaaattagcctggaaagttaccaaaacctttctcccccttgctagtc

SEQ ID NO: 36722 - DNA, 80 bp, synthetic construct
  misc_feature 1..80: note = Artificially Synthesized Probe
  source 1..80: mol_type = other DNA
tttcaggggaagacgtggcacatttcttcaaatgaggaatacgacatttatgagggttgcaagtacctctatttatagct

SEQ ID NO: 36723 - DNA, 80 bp, synthetic construct
  misc_feature 1..80: note = Artificially Synthesized Probe
  source 1..80: mol_type = other DNA
attccttgttagaaccaagaagcccacccctccactgtctcacccctagaaacatgaaacagaatttttacaatgcccac

SEQ ID NO: 36724 - DNA, 80 bp, synthetic construct
  misc_feature 1..80: note = Artificially Synthesized Probe
  source 1..80: mol_type = other DNA
tgagtataaagggtaatagagtactacggataccaaccgacacctacacctcaaagagaaaataatgtatatcctaccta

SEQ ID NO: 36725 - DNA, 80 bp, synthetic construct
  misc_feature 1..80: note = Artificially Synthesized Probe
  source 1..80: mol_type = other DNA
ttacccaaggtgaccaagagctggagagggctggacctttaatatcaattgcattgttaatatattactgcttgttgagc

SEQ ID NO: 36726 - DNA, 80 bp, synthetic construct
  misc_feature 1..80: note = Artificially Synthesized Probe
  source 1..80: mol_type = other DNA
atatattgtctcttacaggatcctcattccctcatctctaccatttgtgatttcaccattgcacatgacttctgaacttc

SEQ ID NO: 36727 - DNA, 80 bp, synthetic construct
  misc_feature 1..80: note = Artificially Synthesized Probe
  source 1..80: mol_type = other DNA
tttttttaatagaattcaaaagaaggggccttcctctcatctcccacctgctagctcctcacctgtgtgttgtcctcata

SEQ ID NO: 36728 - DNA, 80 bp, synthetic construct
  misc_feature 1..80: note = Artificially Synthesized Probe
  source 1..80: mol_type = other DNA
tgaagtcccagactcccattgtgctgcacatcatacttgacacagtcatagatgtcagggatcttactgatatcatagcg

SEQ ID NO: 36729 - DNA, 80 bp, synthetic construct
  misc_feature 1..80: note = Artificially Synthesized Probe
  source 1..80: mol_type = other DNA
atcacagataacattatcttcttcctctaaacaagatgctagcctgagcctagagtagaaatgctgcctcaaaactgggt

SEQ ID NO: 36730 - DNA, 80 bp, synthetic construct
  misc_feature 1..80: note = Artificially Synthesized Probe
  source 1..80: mol_type = other DNA
aggaaagtccttgtggtctacagtccttgtagtgctttaaagatgaccatcaattctttgtcttcctttccttcccttcc

SEQ ID NO: 36731 - DNA, 80 bp, synthetic construct
  misc_feature 1..80: note = Artificially Synthesized Probe
  source 1..80: mol_type = other DNA
tattattgatccctactatttagaattctaggaattggggatccaggctatttttgagcctgacctgatcgtagtcctca

SEQ ID NO: 36732 - DNA, 80 bp, synthetic construct
  misc_feature 1..80: note = Artificially Synthesized Probe
  source 1..80: mol_type = other DNA
gaagcttttactccatgagggtagtaagtcaattgtaccttccggtttatacctgagaagtgaccatacctgcaggataa

SEQ ID NO: 36733 - DNA, 80 bp, synthetic construct
  misc_feature 1..80: note = Artificially Synthesized Probe
  source 1..80: mol_type = other DNA
aagttccatcctaagatcataaatgttatcagagcctctcccacacccccatcccacctgctgtcatcacattacttgac

SEQ ID NO: 36734 - DNA, 80 bp, synthetic construct
  misc_feature 1..80: note = Artificially Synthesized Probe
  source 1..80: mol_type = other DNA
gcattatggtgttcctagaaagagaaacaaagaagccctgtaaaaatgaataaaccagaactactcagaggaatgaagct

SEQ ID NO: 36735 - DNA, 80 bp, synthetic construct
  misc_feature 1..80: note = Artificially Synthesized Probe
  source 1..80: mol_type = other DNA
agctaggtggtgaatacatagatgctcactatagtcatcattcctcatatatttctgaatggtttatacattacgtgacg

SEQ ID NO: 36736 - DNA, 80 bp, synthetic construct
  misc_feature 1..80: note = Artificially Synthesized Probe
  source 1..80: mol_type = other DNA
agtatttcatcgagttcttgacaaaactaaagccattgacatcacacacaaaggaatgaccattggcacgaagaaggtca

SEQ ID NO: 36737 - DNA, 80 bp, synthetic construct
  misc_feature 1..80: note = Artificially Synthesized Probe
  source 1..80: mol_type = other DNA
ctgccaatcttcaagagaaaaaaagaagaaaaagcaatgttgcctcaactctctgttctgtccccaaattctccatcttc

SEQ ID NO: 36738 - DNA, 80 bp, synthetic construct
  misc_feature 1..80: note = Artificially Synthesized Probe
  source 1..80: mol_type = other DNA
ttggatgtaatactgcatggccagatcattgataagaaaggggtttcgaagcttggagtaagcaacagctttgtccagag

SEQ ID NO: 36739 - DNA, 80 bp, synthetic construct
  misc_feature 1..80: note = Artificially Synthesized Probe
  source 1..80: mol_type = other DNA
aggttgaggcacagctagggattccaactgcctacagaataggagcctttccacagtaggaaatatgtgctcaagcagga

SEQ ID NO: 36740 - DNA, 80 bp, synthetic construct
  misc_feature 1..80: note = Artificially Synthesized Probe
  source 1..80: mol_type = other DNA
gttcctagcccttttccacctcctcacagtagtgttgaattcagtaatttaattcaaaggcagaggaatgagagagctca

SEQ ID NO: 36741 - DNA, 80 bp, synthetic construct
  misc_feature 1..80: note = Artificially Synthesized Probe
  source 1..80: mol_type = other DNA
ggctgaaccaggatgactgcttgagcctcggagtttgagaccagcctgggcaatataggtagacctgacctttacaaaag

SEQ ID NO: 36742 - DNA, 80 bp, synthetic construct
  misc_feature 1..80: note = Artificially Synthesized Probe
  source 1..80: mol_type = other DNA
catccatacagtagtctccagcccactctcaaactgaaatctcaatgttctctctagtgtcccctggtactatagaacca

SEQ ID NO: 36743 - DNA, 80 bp, synthetic construct
  misc_feature 1..80: note = Artificially Synthesized Probe
  source 1..80: mol_type = other DNA
ttccaaaaataaaaattgagtcacacatcagcaattttccgtggtctccaaaagttctcagaaacactgaccaatgactc

SEQ ID NO: 36744 - DNA, 80 bp, synthetic construct
  misc_feature 1..80: note = Artificially Synthesized Probe
  source 1..80: mol_type = other DNA
ctcgttttccactgaatgtacactcatgttcttgaaattctactgcaactacataacggggcatggtaactaatagaata

SEQ ID NO: 36745 - DNA, 80 bp, synthetic construct
  misc_feature 1..80: note = Artificially Synthesized Probe
  source 1..80: mol_type = other DNA
gtggacgcctcacttccttcttaatgcaatttttaattcttcagacacactcctcattccgactctgatcaactgtgctc

SEQ ID NO: 36746 - DNA, 80 bp, synthetic construct
  misc_feature 1..80: note = Artificially Synthesized Probe
  source 1..80: mol_type = other DNA
ctgaaaacaacgatggcatggaaaacacttcccatttacctgttgttgctgctgtctgttttcgtgattcagcaagtttc

SEQ ID NO: 36747 - DNA, 80 bp, synthetic construct
  misc_feature 1..80: note = Artificially Synthesized Probe
  source 1..80: mol_type = other DNA
ctcatttttagagactgttaaagtacattcagtgaaatcacattagtaaaagatgctagcatgccatctagggggattaa

SEQ ID NO: 36748 - DNA, 80 bp, synthetic construct
  misc_feature 1..80: note = Artificially Synthesized Probe
  source 1..80: mol_type = other DNA
cccaaagtgctggaattacagatgatttcttatttcagaaatctgccaactataaaagagcaatctcttgatactgtctt

SEQ ID NO: 36749 - DNA, 80 bp, synthetic construct
  misc_feature 1..80: note = Artificially Synthesized Probe
  source 1..80: mol_type = other DNA
cttagctctaaaaaagggctactaaatcctggaaacattttcataagcattagtgataatgtatgactcagcacctggca

SEQ ID NO: 36750 - DNA, 80 bp, synthetic construct
  misc_feature 1..80: note = Artificially Synthesized Probe
  source 1..80: mol_type = other DNA
ctttgcttaagtgactttccttcacttgcataaatgttgcagcgcattgtacctaaggatggtgtcaaagcttgtgatta

SEQ ID NO: 36751 - DNA, 80 bp, synthetic construct
  misc_feature 1..80: note = Artificially Synthesized Probe
  source 1..80: mol_type = other DNA
tatctagacatttcccgatttttctttgtccatacatgtaaataactcgggcagcatcaggatgtctcttggagtctgga

SEQ ID NO: 36752 - DNA, 80 bp, synthetic construct
  misc_feature 1..80: note = Artificially Synthesized Probe
  source 1..80: mol_type = other DNA
ttaactgtcatgttccttcccatttctgcagtctcctcagcagtctctattccaatacatgtgcatggtaaagtcaataa

SEQ ID NO: 36753 - DNA, 80 bp, synthetic construct
  misc_feature 1..80: note = Artificially Synthesized Probe
  source 1..80: mol_type = other DNA
tcaagaattgaaggaatcccagccatccaagtgcctctgaatgtgaaagagaaaacagagtccaagaggttaaccatttt

SEQ ID NO: 36754 - DNA, 80 bp, synthetic construct
  misc_feature 1..80: note = Artificially Synthesized Probe
  source 1..80: mol_type = other DNA
tcacagttagagctgctgatgaacataaacaagatgttaactgacttgtcttacttggcctcagtgcataatcccacatc

SEQ ID NO: 36755 - DNA, 80 bp, synthetic construct
  misc_feature 1..80: note = Artificially Synthesized Probe
  source 1..80: mol_type = other DNA
cttgacatcattttgcttcttctccttcatcttccttgcattttcattttcccttccccagctttattttaacaaacatt

SEQ ID NO: 36756 - DNA, 80 bp, synthetic construct
  misc_feature 1..80: note = Artificially Synthesized Probe
  source 1..80: mol_type = other DNA
taattggtgcagcaagatggtagtactaggtttccaggaggaaggaagggacactgggcactgaagaataagagtacaaa

SEQ ID NO: 36757 - DNA, 80 bp, synthetic construct
  misc_feature 1..80: note = Artificially Synthesized Probe
  source 1..80: mol_type = other DNA
cccaccactaccaagtctgcacccaccactcccaaggagccttcacccaccaccaccaaggagcctgcacccaccactcc

SEQ ID NO: 36758 - DNA, 80 bp, synthetic construct
  misc_feature 1..80: note = Artificially Synthesized Probe
  source 1..80: mol_type = other DNA
caaccacttcagaggtctctactccaactaccaccaaggagcctaccactatccacaaaagccctgatgaatcaactcct

SEQ ID NO: 36759 - DNA, 80 bp, synthetic construct
  misc_feature 1..80: note = Artificially Synthesized Probe
  source 1..80: mol_type = other DNA
ctccaaactccaaactagttgaagtaaatccaaagagtgaagatgcaggtggtgctgaaggagaaacacctcatatgctt

SEQ ID NO: 36760 - DNA, 80 bp, synthetic construct
  misc_feature 1..80: note = Artificially Synthesized Probe
  source 1..80: mol_type = other DNA
ttccgaggtgagctatgtacacatttatttttcttctcatcattctgttttggcatttatgagaaccaaagccgtggaag

SEQ ID NO: 36761 - DNA, 80 bp, synthetic construct
  misc_feature 1..80: note = Artificially Synthesized Probe
  source 1..80: mol_type = other DNA
taaattttaggtcattatttctggatgctaagtccattcagtccaccatctccagctcgcagaattactgaagtttgggg

SEQ ID NO: 36762 - DNA, 80 bp, synthetic construct
  misc_feature 1..80: note = Artificially Synthesized Probe
  source 1..80: mol_type = other DNA
gagggtagtattcttattgccctcaatttttattttcatttcttcacaggcaagtcacaattcatttgagttttcaggtc

SEQ ID NO: 36763 - DNA, 80 bp, synthetic construct
  misc_feature 1..80: note = Artificially Synthesized Probe
  source 1..80: mol_type = other DNA
gctatatcactgcccaacatcagaaaacctgacggctatgattactatgccttttctaaaggtaaggtattaactaacag

SEQ ID NO: 36764 - DNA, 80 bp, synthetic construct
  misc_feature 1..80: note = Artificially Synthesized Probe
  source 1..80: mol_type = other DNA
caaagtctggtacaactgtccttagactgatgagcaaaggaggagtcaactaatgaagaaatgaataataaattttgaca

SEQ ID NO: 36765 - DNA, 80 bp, synthetic construct
  misc_feature 1..80: note = Artificially Synthesized Probe
  source 1..80: mol_type = other DNA
gacagaggacagagacatagaaaagacaggagggagagagactgaatcacagagacacagggagagagggagagacctca

SEQ ID NO: 36766 - DNA, 80 bp, synthetic construct
  misc_feature 1..80: note = Artificially Synthesized Probe
  source 1..80: mol_type = other DNA
ccagagacagagattcagagagccagagacacagagagattcatagagacatatagagagattcagagagcctgaatcac

SEQ ID NO: 36767 - DNA, 80 bp, synthetic construct
  misc_feature 1..80: note = Artificially Synthesized Probe
  source 1..80: mol_type = other DNA
gagccagagagggacaagtacagagaaacagatggaaccagagagatataggaagagacaaacaaaaacagagacggagt

SEQ ID NO: 36768 - DNA, 80 bp, synthetic construct
  misc_feature 1..80: note = Artificially Synthesized Probe
  source 1..80: mol_type = other DNA
tctcggtcgtcctggcaacgcctcccccaacccggggctcccacatttcagcaggtgccggagctggagctcccaccgcc

SEQ ID NO: 36769 - DNA, 80 bp, synthetic construct
  misc_feature 1..80: note = Artificially Synthesized Probe
  source 1..80: mol_type = other DNA
gtccaggtacccctttctgcactgacctaggatccctgactcttccaggggtatcggaaagcagggcctgcaatgtcaag

SEQ ID NO: 36770 - DNA, 80 bp, synthetic construct
  misc_feature 1..80: note = Artificially Synthesized Probe
  source 1..80: mol_type = other DNA
tctctctttccaattttctgtctgctggggtctcccgctggactaatccatgcctccgtctgtgtctctatgattttcat

SEQ ID NO: 36771 - DNA, 80 bp, synthetic construct
  misc_feature 1..80: note = Artificially Synthesized Probe
  source 1..80: mol_type = other DNA
ctcctctataaaatggggctgatgatctagcattgaccaacagaactgtttacagtgacggaagcattctgtacatgcac

SEQ ID NO: 36772 - DNA, 80 bp, synthetic construct
  misc_feature 1..80: note = Artificially Synthesized Probe
  source 1..80: mol_type = other DNA
gctgggactagaacaggcatgagccaccatggccggctaatttttatatttttagtagacagggtttcatcatgctggcc

SEQ ID NO: 36773 - DNA, 80 bp, synthetic construct
  misc_feature 1..80: note = Artificially Synthesized Probe
  source 1..80: mol_type = other DNA
tggagatgataattatgctcactatggattgttttgaagatttagtgagtcagacatttgggatggtttctgacacatag

SEQ ID NO: 36774 - DNA, 80 bp, synthetic construct
  misc_feature 1..80: note = Artificially Synthesized Probe
  source 1..80: mol_type = other DNA
aaaaaaaaaaaaaaaagtaacatggatcaagatttggcaagaatgatttcatttagtccccagggagggcacatgccccc

SEQ ID NO: 36775 - DNA, 80 bp, synthetic construct
  misc_feature 1..80: note = Artificially Synthesized Probe
  source 1..80: mol_type = other DNA
tggggttcagggtggcccacaagtcctcaaataataacttgtgggagttggggggatgggaactatgggaggttggaagc

SEQ ID NO: 36776 - DNA, 80 bp, synthetic construct
  misc_feature 1..80: note = Artificially Synthesized Probe
  source 1..80: mol_type = other DNA
ctacgggcttgtgcaccagggcatgaaatgctcctgtgagtgacctgggccttgccagggcccttccaaagcgcccggtc

SEQ ID NO: 36777 - DNA, 80 bp, synthetic construct
  misc_feature 1..80: note = Artificially Synthesized Probe
  source 1..80: mol_type = other DNA
ctcatttttgtatttttagtagagacagggtttcaccatgctagccaggctggtctggaactcctgacctcaggtgatcc

SEQ ID NO: 36778 - DNA, 80 bp, synthetic construct
  misc_feature 1..80: note = Artificially Synthesized Probe
  source 1..80: mol_type = other DNA
atctctaacccgtcacactcttcctcactccccgtttagttggcgaggcccgtaacctaattcctatggaccccaatggt

SEQ ID NO: 36779 - DNA, 80 bp, synthetic construct
  misc_feature 1..80: note = Artificially Synthesized Probe
  source 1..80: mol_type = other DNA
ctttctccctctccctctctttttatctcactctttctctcttccatctctgtgtccgtctctctgtgtctctttcctcc

SEQ ID NO: 36780 - DNA, 80 bp, synthetic construct
  misc_feature 1..80: note = Artificially Synthesized Probe
  source 1..80: mol_type = other DNA
ctgaccctcaagcaactctccaaggtagggacacagtcacagatacttaaaatacaggaagatgtgctaaattagaggta

SEQ ID NO: 36781 - DNA, 80 bp, synthetic construct
  misc_feature 1..80: note = Artificially Synthesized Probe
  source 1..80: mol_type = other DNA
cagacgaatacccattttctagggtgtcataagccaggccctgttctgggaatagaatcaggccattccctggtggagct

SEQ ID NO: 36782 - DNA, 80 bp, synthetic construct
  misc_feature 1..80: note = Artificially Synthesized Probe
  source 1..80: mol_type = other DNA
agacctactcagtgacgatctctctgatgcctcaaatgtctgcctactaaattaattcctcaggtgatccttttgcaaag

SEQ ID NO: 36783 - DNA, 80 bp, synthetic construct
  misc_feature 1..80: note = Artificially Synthesized Probe
  source 1..80: mol_type = other DNA
actctgtgccaagccttgagctaggtacggggctaacaacacagcaaacagaaacagccctgattattattattattatt

SEQ ID NO: 36784 - DNA, 80 bp, synthetic construct
  misc_feature 1..80: note = Artificially Synthesized Probe
  source 1..80: mol_type = other DNA
ggtttacaagcataggggagacatgacctggtttatttatttttaaattggctcctgtgcctgctgagtagagaatgcat

SEQ ID NO: 36785 - DNA, 80 bp, synthetic construct
  misc_feature 1..80: note = Artificially Synthesized Probe
  source 1..80: mol_type = other DNA
ggaagagactgggctcctgcatcttcaaatatggttaggttgggccgttcaggttcctggagaggagaggtttacagatg

SEQ ID NO: 36786 - DNA, 80 bp, synthetic construct
  misc_feature 1..80: note = Artificially Synthesized Probe
  source 1..80: mol_type = other DNA
cggtgagttcctcggtggcatggcctggccaggtgaatgggtcctgcggaggtgtcgtgaagcggttgagttccttgggg

SEQ ID NO: 36787 - DNA, 80 bp, synthetic construct
  misc_feature 1..80: note = Artificially Synthesized Probe
  source 1..80: mol_type = other DNA
ccacgcccagctgcaactttgattcttagtaggaagccagaattgcatctgtgtgtgagtggctgtggaaagagattttg

SEQ ID NO: 36788 - DNA, 80 bp, synthetic construct
  misc_feature 1..80: note = Artificially Synthesized Probe
  source 1..80: mol_type = other DNA
tctgagtgggtgtggcctgtcccctgccaacactgaacatgtccggactatcttctgaatactttaaactgggcagggct

SEQ ID NO: 36789 - DNA, 80 bp, synthetic construct
  misc_feature 1..80: note = Artificially Synthesized Probe
  source 1..80: mol_type = other DNA
tgggaggatgtgcctgactcgtgcccaaataatcaatgtcagtgatcacaaaacctggctggtaatcagaatcatctgta

SEQ ID NO: 36790 - DNA, 80 bp, synthetic construct
  misc_feature 1..80: note = Artificially Synthesized Probe
  source 1..80: mol_type = other DNA
aacgaaacaaaaaatcacctgatgaaataaatattcagagtgggaagagcttgtgctgaaagcacttaacgtgggtagcg

SEQ ID NO: 36791 - DNA, 80 bp, synthetic construct
  misc_feature 1..80: note = Artificially Synthesized Probe
  source 1..80: mol_type = other DNA
aaatcagcttgattggattcctggactgctgagtgtactacaactaaaaaaattggttaccacactcttgatcatcttct

SEQ ID NO: 36792 - DNA, 80 bp, synthetic construct
  misc_feature 1..80: note = Artificially Synthesized Probe
  source 1..80: mol_type = other DNA
ataattaacagcctgctgatttacatagcagataaagagaggcagaatagtacagagatgcacagatctgaggcatccga

SEQ ID NO: 36793 - DNA, 80 bp, synthetic construct
  misc_feature 1..80: note = Artificially Synthesized Probe
  source 1..80: mol_type = other DNA
cttctctgagtttctgccttcttacctggggtctctgtaccaccctctgaatttctatttccccttttctctgggtctgc

SEQ ID NO: 36794 - DNA, 80 bp, synthetic construct
  misc_feature 1..80: note = Artificially Synthesized Probe
  source 1..80: mol_type = other DNA
tgtctctgtccctctttctctgggtctacctgtccggcactctgtctgtttgtctgtctgtctctctctgtgtttcccac

SEQ ID NO: 36795 - DNA, 80 bp, synthetic construct
  misc_feature 1..80: note = Artificially Synthesized Probe
  source 1..80: mol_type = other DNA
ctggggatttctgggatatatggaggattctttccccagaggctcccaatcagcttttgttctagacttccccatcccga

SEQ ID NO: 36796 - DNA, 80 bp, synthetic construct
  misc_feature 1..80: note = Artificially Synthesized Probe
  source 1..80: mol_type = other DNA
ttaattcccctgaaaaagctgtttggatctttatcatttggtgacaagtatttgggacatgatagtgtcacttggggtcc

SEQ ID NO: 36797 - DNA, 80 bp, synthetic construct
  misc_feature 1..80: note = Artificially Synthesized Probe
  source 1..80: mol_type = other DNA
ctctctgcagaaccttagtgtatccgcactgatcctggggctgatccattcgcccagaggatgaagtgcttgcctacctc

SEQ ID NO: 36798 - DNA, 80 bp, synthetic construct
  misc_feature 1..80: note = Artificially Synthesized Probe
  source 1..80: mol_type = other DNA
tcatagactctggccttcctcaaataggtggtggtaagcacatgttgagtaatatatcttacagatacatttagttacta

SEQ ID NO: 36799 - DNA, 80 bp, synthetic construct
  misc_feature 1..80: note = Artificially Synthesized Probe
  source 1..80: mol_type = other DNA
cgtgcggacgaagaaagggcacccagcagagtgggaggcactggcagccaggccttacatccggagcggggagcgtcctg

SEQ ID NO: 36800 - DNA, 80 bp, synthetic construct
  misc_feature 1..80: note = Artificially Synthesized Probe
  source 1..80: mol_type = other DNA
cgtccccccatcctcctcctgctcaggtccccgtccctgctccactctgtcctcctcctgctctggtccctgttcctgtc

SEQ ID NO: 36801 - DNA, 80 bp, synthetic construct
  misc_feature 1..80: note = Artificially Synthesized Probe
  source 1..80: mol_type = other DNA
actcccagtgggagactgcagacagggaagacgcaaagcacgtaaacaaatatccttaaatacccgccaaatgtcagtgt

SEQ ID NO: 36802 - DNA, 80 bp, synthetic construct
  misc_feature 1..80: note = Artificially Synthesized Probe
  source 1..80: mol_type = other DNA
aactcttgtgtgcaaggctgtgataaaatgaacatggaccaacacacagaactgtgtgcaaggctgtgataaaatgacta

SEQ ID NO: 36803 - DNA, 80 bp, synthetic construct
  misc_feature 1..80: note = Artificially Synthesized Probe
  source 1..80: mol_type = other DNA
tccaaactgttaccaatgtcattttctcagaacataagcatctcaaaatctctgctctcggctgctggcctggcattcta

SEQ ID NO: 36804 - DNA, 80 bp, synthetic construct
  misc_feature 1..80: note = Artificially Synthesized Probe
  source 1..80: mol_type = other DNA
tattgaggttatttgcctttttcctttacactgaatctttggaatctggtgtgaatttacactgaggtgcagccctcgtg

SEQ ID NO: 36805 - DNA, 80 bp, synthetic construct
  misc_feature 1..80: note = Artificially Synthesized Probe
  source 1..80: mol_type = other DNA
acttggttttatcccctttaaagtgaggatctcacccctagaggtgcagtgaggattacagataacgttcttgacttatg

SEQ ID NO: 36806 - DNA, 80 bp, synthetic construct
  misc_feature 1..80: note = Artificially Synthesized Probe
  source 1..80: mol_type = other DNA
aaccttacatatatagtggaatgcggataaatatttaatgggatgtcataaccttttccagtgttccttgctgctttgtg

SEQ ID NO: 36807 - DNA, 80 bp, synthetic construct
  misc_feature 1..80: note = Artificially Synthesized Probe
  source 1..80: mol_type = other DNA
tcccatagctcagagatggtctgttcatttttcaaaaatctccgttctctccgtgttttacttttgatagtttctgttgt

SEQ ID NO: 36808 - DNA, 80 bp, synthetic construct
  misc_feature 1..80: note = Artificially Synthesized Probe
  source 1..80: mol_type = other DNA
caccatggaaattctggacagtagctgagaccgttgtttcttggggattacgattcctgaaaaccatcattccatagatt

SEQ ID NO: 36809 - DNA, 80 bp, synthetic construct
  misc_feature 1..80: note = Artificially Synthesized Probe
  source 1..80: mol_type = other DNA
tatgttggaaaagctggtctttactcctggccttaagtgatcgacctgcctcggcctcccgaagcgctgggattacagat

SEQ ID NO: 36810 - DNA, 80 bp, synthetic construct
  misc_feature 1..80: note = Artificially Synthesized Probe
  source 1..80: mol_type = other DNA
cacatggtccttgtcaccaaggtctccaggtactcactctggtttaaacagatcatgaactaactgaaactcagctagcc

SEQ ID NO: 36811 - DNA, 80 bp, synthetic construct
  misc_feature 1..80: note = Artificially Synthesized Probe
  source 1..80: mol_type = other DNA
caaaatgaagcagcagccttcaggcttggctccatagcaccagtatagcaccattatatctgctcttaacctcaaatgca

SEQ ID NO: 36812 - DNA, 80 bp, synthetic construct
  misc_feature 1..80: note = Artificially Synthesized Probe
  source 1..80: mol_type = other DNA
gcagagctagtaagaacagcaggcaagtaccctttgctggttagctacacatcaaagtcacttaagaaagagtttttaaa

SEQ ID NO: 36813 - DNA, 80 bp, synthetic construct
  misc_feature 1..80: note = Artificially Synthesized Probe
  source 1..80: mol_type = other DNA
ctggacaatgacatcctgctgatcaagctctccatgcctgctgtcatcaatgcccacatgtccaccatctctctacccac

SEQ ID NO: 36814 - DNA, 80 bp, synthetic construct
  misc_feature 1..80: note = Artificially Synthesized Probe
  source 1..80: mol_type = other DNA
ttcagagcaaatgtagctatattcttcctctttctctctcttcatacagcttgtcccttcttctccccagggtgactctg

SEQ ID NO: 36815 - DNA, 80 bp, synthetic construct
  misc_feature 1..80: note = Artificially Synthesized Probe
  source 1..80: mol_type = other DNA
gaccagggaaagaaactagagagggtcaagattcacccatttgatcaattaactgaggtaggtttcattttcatataact

SEQ ID NO: 36816 - DNA, 80 bp, synthetic construct
  misc_feature 1..80: note = Artificially Synthesized Probe
  source 1..80: mol_type = other DNA
agagtctttacacagaaatctgagttagccctgtgagaagggttgacagcacaaacagtgcatgaaaatcacagataacc

SEQ ID NO: 36817 - DNA, 80 bp, synthetic construct
  misc_feature 1..80: note = Artificially Synthesized Probe
  source 1..80: mol_type = other DNA
tactcttcccatctttacatccatttttacccaatgctcagctccgacttatacatgagaacgtgatatttggttttctg

SEQ ID NO: 36818 - DNA, 80 bp, synthetic construct
  misc_feature 1..80: note = Artificially Synthesized Probe
  source 1..80: mol_type = other DNA
ttgtagccaccagagcctgctgggaaggggcccctcacgcatgcattgatcttgtcatgtggaatttgagagatctagaa

SEQ ID NO: 36819 - DNA, 80 bp, synthetic construct
  misc_feature 1..80: note = Artificially Synthesized Probe
  source 1..80: mol_type = other DNA
ttcaagctctagatacagaaaatcctcaattcttgggtgttacctttcagaaaaagagtcagagctacaagccctgatcc

SEQ ID NO: 36820 - DNA, 80 bp, synthetic construct
  misc_feature 1..80: note = Artificially Synthesized Probe
  source 1..80: mol_type = other DNA
ttagcacgttggtgggaagttaaactgcgaaactcagcataaacaaagagcaatgtaccactgttgcttacgtgaaaact

SEQ ID NO: 36821 - DNA, 80 bp, synthetic construct
  misc_feature 1..80: note = Artificially Synthesized Probe
  source 1..80: mol_type = other DNA
atcctatggaatgctgagtctctcttctccttaccccttaatgttggaattctcattccccaaagccttggatttgactt

SEQ ID NO: 36822 - DNA, 80 bp, synthetic construct
  misc_feature 1..80: note = Artificially Synthesized Probe
  source 1..80: mol_type = other DNA
acatgccctgccattcttgccacctctcctcttttgactgtgctgtgatattctatttcctccatctggcatttcttctt

SEQ ID NO: 36823 - DNA, 80 bp, synthetic construct
  misc_feature 1..80: note = Artificially Synthesized Probe
  source 1..80: mol_type = other DNA
ttaaggttttctaattagcaggaagcagccacaggctgggagcgccacccctaacatgctactgacttgccttctccctt

SEQ ID NO: 36824 - DNA, 80 bp, synthetic construct
  misc_feature 1..80: note = Artificially Synthesized Probe
  source 1..80: mol_type = other DNA
ccaagaatggagggaggagcaggcactgtgcacagttagcaaaggcctggagtgaagaatgttgggaaaacttcaaggag

SEQ ID NO: 36825 - DNA, 80 bp, synthetic construct
  misc_feature 1..80: note = Artificially Synthesized Probe
  source 1..80: mol_type = other DNA
ggcttcctcgagggaggcaaggattcctgccaggtgatttgaccccttcccatgctgaggctcccactgataaccaggcc

SEQ ID NO: 36826 - DNA, 80 bp, synthetic construct
  misc_feature 1..80: note = Artificially Synthesized Probe
  source 1..80: mol_type = other DNA
atgcctcagcctcctgagtagctgtgactccaggtatgccccacctcgcctggctacttttttttattttttgtagggtc

SEQ ID NO: 36827 - DNA, 80 bp, synthetic construct
  misc_feature 1..80: note = Artificially Synthesized Probe
  source 1..80: mol_type = other DNA
tcactacttagacaaccccaacattggttataaattatctaagctaacagtaaaaagactcaaaggcggctgggtgtggt

SEQ ID NO: 36828 - DNA, 80 bp, synthetic construct
  misc_feature 1..80: note = Artificially Synthesized Probe
  source 1..80: mol_type = other DNA
tagtctcagaaaatgacattaattcagaggaataaaatgctgttgtggtgtgggatgcagtggcacacacctgtaatccc

SEQ ID NO: 36829 - DNA, 80 bp, synthetic construct
  misc_feature 1..80: note = Artificially Synthesized Probe
  source 1..80: mol_type = other DNA
gagttcgagaccagcatggccaacgtggcgaaacattgtctctactaaaaatacaaaacttagctggcatggtggcgtgt

SEQ ID NO: 36830 - DNA, 80 bp, synthetic construct
  misc_feature 1..80: note = Artificially Synthesized Probe
  source 1..80: mol_type = other DNA
cctcccaaagtgctgggattacaggtgtgagccatcacacctagccaacctttgcttttaaattataactatcaattgta

SEQ ID NO: 36831 - DNA, 80 bp, synthetic construct
  misc_feature 1..80: note = Artificially Synthesized Probe
  source 1..80: mol_type = other DNA
aaaaaaaaatcactatcagtcactccttgatgtaactggcgatctgagataatataacagctgtggcaccgctatggacc

SEQ ID NO: 36832 - DNA, 80 bp, synthetic construct
  misc_feature 1..80: note = Artificially Synthesized Probe
  source 1..80: mol_type = other DNA
ggaaaacctgaacatttcgctcctgtaggcgacttaccagctccctgcaaaataaaatacaaaatacccaacactgagta

SEQ ID NO: 36833 - DNA, 80 bp, synthetic construct
  misc_feature 1..80: note = Artificially Synthesized Probe
  source 1..80: mol_type = other DNA
tctgcccatggacccagaaaaacacaagatgaggacaaacaaggaaagcttaggttttccctggagaaagaggaaaggca

SEQ ID NO: 36834 - DNA, 80 bp, synthetic construct
  misc_feature 1..80: note = Artificially Synthesized Probe
  source 1..80: mol_type = other DNA
ctgactctaaaaaaaataataataggccgggtgcagtggctcacagctataatcccagcactttgggaggcccaggcagg

SEQ ID NO: 36835 - DNA, 80 bp, synthetic construct
  misc_feature 1..80: note = Artificially Synthesized Probe
  source 1..80: mol_type = other DNA
ttttcttgcaagctgtgagctgtcataaatcaagaaagagaccaaaggttaagcattcttccatgaaaggcagttgaaaa

SEQ ID NO: 36836 - DNA, 80 bp, synthetic construct
  misc_feature 1..80: note = Artificially Synthesized Probe
  source 1..80: mol_type = other DNA
tgtcaaattcagctctaaggaatgaaagaaaaagcctagtgcaaatgttccatagccagggtctagcacttcatccaaaa

SEQ ID NO: 36837 - DNA, 80 bp, synthetic construct
  misc_feature 1..80: note = Artificially Synthesized Probe
  source 1..80: mol_type = other DNA
aggtgtgcataaggctctgtgggaacacaggaaaaatgtttagccttatctatgaaacagggcttcagactgggcacagt

SEQ ID NO: 36838 - DNA, 80 bp, synthetic construct
  misc_feature 1..80: note = Artificially Synthesized Probe
  source 1..80: mol_type = other DNA
gaaggagaacgaaaatggtgaaggtacaggaagaaactctggaagccacactgctacagaagctgcagaggacagagagt

SEQ ID NO: 36839 - DNA, 80 bp, synthetic construct
  misc_feature 1..80: note = Artificially Synthesized Probe
  source 1..80: mol_type = other DNA
gatttttacatttattttattttactttttttttttgttttttttgtttgagacagagtctggctctgtcgcccaggctg

SEQ ID NO: 36840 - DNA, 80 bp, synthetic construct
  misc_feature 1..80: note = Artificially Synthesized Probe
  source 1..80: mol_type = other DNA
gccctaccagagccacagtacccagccattaacataatgtctttattacataatttatgcccatcacgatctggctccta

SEQ ID NO: 36841 - DNA, 80 bp, synthetic construct
  misc_feature 1..80: note = Artificially Synthesized Probe
  source 1..80: mol_type = other DNA
cccttataccacattatttcctccccatcaacccagaaaatcagtcaatcactccagttgaattatcttctatctctgca

SEQ ID NO: 36842 - DNA, 80 bp, synthetic construct
  misc_feature 1..80: note = Artificially Synthesized Probe
  source 1..80: mol_type = other DNA
aaataaaaagaaaccagtcatttggctttggtccagcagaaatcaagctaattcatactacatgcccaggcaggctcact

SEQ ID NO: 36843 - DNA, 80 bp, synthetic construct
  misc_feature 1..80: note = Artificially Synthesized Probe
  source 1..80: mol_type = other DNA
ctaagacagcaggatcacttgagcccaggagtttgagatcagttctcgagaacacagtaagattctttctctaaaaaaaa

SEQ ID NO: 36844 - DNA, 80 bp, synthetic construct
  misc_feature 1..80: note = Artificially Synthesized Probe
  source 1..80: mol_type = other DNA
ccacagctccttttagctcttcccatcctgctctgcaaaatggtgcacctccctgtacacttttgatttcctccttctta

SEQ ID NO: 36845 - DNA, 80 bp, synthetic construct
  misc_feature 1..80: note = Artificially Synthesized Probe
  source 1..80: mol_type = other DNA
tttccttgcccaaagaaatgctttcccaacttctcaatctctgtatctttcaagaggcttctaagatcaccttacttcct

SEQ ID NO: 36846 - DNA, 80 bp, synthetic construct
  misc_feature 1..80: note = Artificially Synthesized Probe
  source 1..80: mol_type = other DNA
aggccgttatcctaagtgaattagcgcaggaacagaaaaccaaataccacatgttctcacttataagtgggagctaaact

SEQ ID NO: 36847 - DNA, 80 bp, synthetic construct
  misc_feature 1..80: note = Artificially Synthesized Probe
  source 1..80: mol_type = other DNA
tctgggaagctgagatcttctgcatgccacatagttgacatcaatttttaaaattcaggtgaggagtaaactgctggccg

SEQ ID NO: 36848 - DNA, 80 bp, synthetic construct
  misc_feature 1..80: note = Artificially Synthesized Probe
  source 1..80: mol_type = other DNA
cctgattagcagggtacaaagacaagggagagggaaagagaatctcttaggagaactaaatgcagagacaaggaagcaga

SEQ ID NO: 36849 - DNA, 80 bp, synthetic construct
  misc_feature 1..80: note = Artificially Synthesized Probe
  source 1..80: mol_type = other DNA
ttaaaagtcctgactactttgtttcaccgacatgaaagtgacagggctatatggtcatgatattgaaaacctacccggca

SEQ ID NO: 36850 - DNA, 80 bp, synthetic construct
  misc_feature 1..80: note = Artificially Synthesized Probe
  source 1..80: mol_type = other DNA
ccaggggaggggctccctgaaccagccccctcctcctccgggggctcagcccctgcagtctgagaggtgcacggtgcctg

SEQ ID NO: 36851 - DNA, 80 bp, synthetic construct
  misc_feature 1..80: note = Artificially Synthesized Probe
  source 1..80: mol_type = other DNA
ctccgtttaaaaaaaaaattattccatgtgtcacttgcccagctccttgtatgttaactacaacaaataaggggtgtttc

SEQ ID NO: 36852 - DNA, 80 bp, synthetic construct
  misc_feature 1..80: note = Artificially Synthesized Probe
  source 1..80: mol_type = other DNA
tatctaagtggtaacagaatttattttgtttgaggtgaaaagaaactcaagtaagtaaatgtggaaggctagaagagtta

SEQ ID NO: 36853 - DNA, 80 bp, synthetic construct
  misc_feature 1..80: note = Artificially Synthesized Probe
  source 1..80: mol_type = other DNA
atacaaaaagtagccaggcctgatggcaggcgcctgtaatctcagctactgaggaggctgaagcaggagaatcacttgaa

SEQ ID NO: 36854 - DNA, 80 bp, synthetic construct
  misc_feature 1..80: note = Artificially Synthesized Probe
  source 1..80: mol_type = other DNA
gtgctgggattacaagagtgagccaccgtgcccagccacaaattttctcatggctaattatattagaatcatgtactctt

SEQ ID NO: 36855 - DNA, 80 bp, synthetic construct
  misc_feature 1..80: note = Artificially Synthesized Probe
  source 1..80: mol_type = other DNA
tatataagaattctcacagcagtactgtgaacattctcagttactgtgatgctccaatagccactggaaactttaaaaag

SEQ ID NO: 36856 - DNA, 80 bp, synthetic construct
  misc_feature 1..80: note = Artificially Synthesized Probe
  source 1..80: mol_type = other DNA
gtcttgaaagaacacagtgaacacagtttgaaatgtgatttaatataaacattggcattcaaaataagtcataccatgga

SEQ ID NO: 36857 - DNA, 80 bp, synthetic construct
  misc_feature 1..80: note = Artificially Synthesized Probe
  source 1..80: mol_type = other DNA
aaacaagcagagcagagcagggatacaaagaactgagggcaagcctcaatcaagcagaaagggagtggaaacccttgtaa

SEQ ID NO: 36858 - DNA, 80 bp, synthetic construct
  misc_feature 1..80: note = Artificially Synthesized Probe
  source 1..80: mol_type = other DNA
cgtgaggctgaggcaggagaactgcttgaactgggaggcagaggttgcagtcagctgagattgtgccactggcactctag

SEQ ID NO: 36859 - DNA, 80 bp, synthetic construct
  misc_feature 1..80: note = Artificially Synthesized Probe
  source 1..80: mol_type = other DNA
tccaaaaaacaggtaaaataaccatcacagaagtgaatatgaagctaaaaagaggacaaataaaagtggacactatgaaa

SEQ ID NO: 36860 - DNA, 80 bp, synthetic construct
  misc_feature 1..80: note = Artificially Synthesized Probe
  source 1..80: mol_type = other DNA
gcgcgatcttggtgcaccgcaactgtcgcctcgtaggttcaagtgattctcctgcctcagcctcccgtgtagctgggaat

SEQ ID NO: 36861 - DNA, 80 bp, synthetic construct
  misc_feature 1..80: note = Artificially Synthesized Probe
  source 1..80: mol_type = other DNA
aggctgaggtgggaggatcacttgagcccaggagttaaaagctgcagtgagctaatgattgtgccgctgcactttattta

SEQ ID NO: 36862 - DNA, 80 bp, synthetic construct
  misc_feature 1..80: note = Artificially Synthesized Probe
  source 1..80: mol_type = other DNA
ccctacttacaaactaatacgttagtctcttgcttgttttatggatgtggcctaagaaagaagactcctggccaggcgcg

SEQ ID NO: 36863 - DNA, 80 bp, synthetic construct
  misc_feature 1..80: note = Artificially Synthesized Probe
  source 1..80: mol_type = other DNA
agcctgtagtcccagctactcaagaggttgaggcaggagaatcacttgaacccagaaggtggaggttgcagtgagccggt

SEQ ID NO: 36864 - DNA, 80 bp, synthetic construct
  misc_feature 1..80: note = Artificially Synthesized Probe
  source 1..80: mol_type = other DNA
ttgaaaaggacacgttaatttctctggtgttcttgccaaaaatgaataacctgcttttttttttttttttgataagagcc

SEQ ID NO: 36865 - DNA, 80 bp, synthetic construct
  misc_feature 1..80: note = Artificially Synthesized Probe
  source 1..80: mol_type = other DNA
gatgtttacactgggggatctgtgggtagagtatgggaattcttcttactgttttttacaaattccttccatttttgaga

SEQ ID NO: 36866 - DNA, 80 bp, synthetic construct
  misc_feature 1..80: note = Artificially Synthesized Probe
  source 1..80: mol_type = other DNA
cccctgacaggtcccagtgtgtgatgttcccctccctgtacagacccatgggaaatgtttcaaaagtgagaacttcttat

SEQ ID NO: 36867 - DNA, 80 bp, synthetic construct
  misc_feature 1..80: note = Artificially Synthesized Probe
  source 1..80: mol_type = other DNA
ccaccacgcctggctaatttttgtatttgttgtatagatggagtctcgctatgttacccagactggtcttgaactcccgg

SEQ ID NO: 36868 - DNA, 80 bp, synthetic construct
  misc_feature 1..80: note = Artificially Synthesized Probe
  source 1..80: mol_type = other DNA
agtgagaccctatgtttacaaaaagaaaataaataaagtaaaataccacgtgttactgaatccctggtatttggcgggac

SEQ ID NO: 36869 - DNA, 80 bp, synthetic construct
  misc_feature 1..80: note = Artificially Synthesized Probe
  source 1..80: mol_type = other DNA
gtgcgtcccactcacagggatcctctttcagttcatttagataggtgccctttgggcccttgaaattcaacggctatgtg

SEQ ID NO: 36870 - DNA, 80 bp, synthetic construct
  misc_feature 1..80: note = Artificially Synthesized Probe
  source 1..80: mol_type = other DNA
ggcgggactctttatgcgctgcggcaggatacgcgctcggcgctgggacgcgactgcgctcagttctctcctctcggaag

SEQ ID NO: 36871 - DNA, 80 bp, synthetic construct
  misc_feature 1..80: note = Artificially Synthesized Probe
  source 1..80: mol_type = other DNA
cgattgctttcttaggctatctatatggtctcttcctgagggctattgtccgttaatacagaatacagtacactgttagt

SEQ ID NO: 36872 - DNA, 80 bp, synthetic construct
  misc_feature 1..80: note = Artificially Synthesized Probe
  source 1..80: mol_type = other DNA
aagacagaagcccaagaattttaacagtgtgtagctttagttgtctaaaagttaggccttcgggcttcaaaagttagtgg

SEQ ID NO: 36873 - DNA, 80 bp, synthetic construct
  misc_feature 1..80: note = Artificially Synthesized Probe
  source 1..80: mol_type = other DNA
gaaaaaaagtcagtaaggaaagtcagtgaagtgcttgcttttttgataattgcactcccaataattttgatattccaacg

SEQ ID NO: 36874 - DNA, 80 bp, synthetic construct
  misc_feature 1..80: note = Artificially Synthesized Probe
  source 1..80: mol_type = other DNA
atagtgcttattcaagtgtaaagcacaactgaaaggagtaatgtacagtttatatgaggaaaaaggaattttattgctgc

SEQ ID NO: 36875 - DNA, 80 bp, synthetic construct
  misc_feature 1..80: note = Artificially Synthesized Probe
  source 1..80: mol_type = other DNA
cttgtggcctgaattcattaagaaaagatgttaggatttgttctgaagatagtgacttaggaaatttgtgagactggggt

SEQ ID NO: 36876 - DNA, 80 bp, synthetic construct
  misc_feature 1..80: note = Artificially Synthesized Probe
  source 1..80: mol_type = other DNA
gccagtgttgagaatattgagagatggatattgtagctgtacctgccatcaaaagaattttcttgacctccacatagtgt

SEQ ID NO: 36877 - DNA, 80 bp, synthetic construct
  misc_feature 1..80: note = Artificially Synthesized Probe
  source 1..80: mol_type = other DNA
tctgggtatgacatgtctgtgattttgctggttcatcacaaatgggaaataaatctctgctaactcaaactgttgaccaa

SEQ ID NO: 36878 - DNA, 80 bp, synthetic construct
  misc_feature 1..80: note = Artificially Synthesized Probe
  source 1..80: mol_type = other DNA
ttggcatctgagcacagctgagttttctaaatcaatctctctccttgcacctagtttttgctttagatcactacctaaga

SEQ ID NO: 36879 - DNA, 80 bp, synthetic construct
  misc_feature 1..80: note = Artificially Synthesized Probe
  source 1..80: mol_type = other DNA
tacactttttaaatcattagctcatttgattttgcaaagaagaacaggtaacctaagaggcagacagaacaggcattact

SEQ ID NO: 36880 - DNA, 80 bp, synthetic construct
  misc_feature 1..80: note = Artificially Synthesized Probe
  source 1..80: mol_type = other DNA
aaataaataaatacatccccgctcagccacttatcagttacgtagatacactgcctaaccttagtgaaccctgtttcgac

SEQ ID NO: 36881 - DNA, 80 bp, synthetic construct
  misc_feature 1..80: note = Artificially Synthesized Probe
  source 1..80: mol_type = other DNA
ttctttgatccatgtgttgcattcttttctaggccctaaatttgctatgccagcctgttgaattaaagtgctttatttat

SEQ ID NO: 36882 - DNA, 80 bp, synthetic construct
  misc_feature 1..80: note = Artificially Synthesized Probe
  source 1..80: mol_type = other DNA
tatactttaaaacctagttcatggtgaacttaagagggtgttctttttaaaaaacaatttccattgcactttgtcgttgc

SEQ ID NO: 36883 - DNA, 80 bp, synthetic construct
  misc_feature 1..80: note = Artificially Synthesized Probe
  source 1..80: mol_type = other DNA
tggattttttttaatactgaaaaggtcacacagattgtgattattgtgtagtgtccaagaactaaggcctaccatctgtt

SEQ ID NO: 36884 - DNA, 80 bp, synthetic construct
  misc_feature 1..80: note = Artificially Synthesized Probe
  source 1..80: mol_type = other DNA
cagtttgtagactttggtgagaactgaattggaggctatgaaaaaaataccttttgggcctttctgaatagacatatata

SEQ ID NO: 36885 - DNA, 80 bp, synthetic construct
  misc_feature 1..80: note = Artificially Synthesized Probe
  source 1..80: mol_type = other DNA
gagacttgattttattacattaaagccaaatataaaatgatgcaatctagcacacacttgtttggaacttttctctttta

SEQ ID NO: 36886 - DNA, 80 bp, synthetic construct
  misc_feature 1..80: note = Artificially Synthesized Probe
  source 1..80: mol_type = other DNA
ctgaaacaggaaaccagtcttatcatattcatccagagacctaggaagaaggtaattgtttggtatactcgttaaaacca

SEQ ID NO: 36887 - DNA, 80 bp, synthetic construct
  misc_feature 1..80: note = Artificially Synthesized Probe
  source 1..80: mol_type = other DNA
taaagctatagaggtaatatttcatcaggtgagggtaactaccatggtttgtttgctatactgtgttagggttattttcg

SEQ ID NO: 36888 - DNA, 80 bp, synthetic construct
  misc_feature 1..80: note = Artificially Synthesized Probe
  source 1..80: mol_type = other DNA
acaaaacaaaaatatatgtggcccagagattgagtgatttacctgaggttataggctttagattgcatagctggaagtag

SEQ ID NO: 36889 - DNA, 80 bp, synthetic construct
  misc_feature 1..80: note = Artificially Synthesized Probe
  source 1..80: mol_type = other DNA
cctgtttctccacatcctctccagcacctgttgtttcctgactttttaatgatcactattctaactggtgtgagatggta

SEQ ID NO: 36890 - DNA, 80 bp, synthetic construct
  misc_feature 1..80: note = Artificially Synthesized Probe
  source 1..80: mol_type = other DNA
cttttttgctcacaagaaccctaactgtgtgttacttgaaagcactgatggaaatcagggaaaaagctccagaagttcct

SEQ ID NO: 36891 - DNA, 80 bp, synthetic construct
  misc_feature 1..80: note = Artificially Synthesized Probe
  source 1..80: mol_type = other DNA
ctttggtgagaaaggattcttgtaacacctaaatcaagactgtccaaacatggcatatgcagtttaccagtcaaaacaaa

SEQ ID NO: 36892 - DNA, 80 bp, synthetic construct
  misc_feature 1..80: note = Artificially Synthesized Probe
  source 1..80: mol_type = other DNA
tagaaaatacaaataagcaaacacatactgaaaatttagtgttcccaaatctaaaacagagacactgtttttttcttttg

SEQ ID NO: 36893 - DNA, 80 bp, synthetic construct
  misc_feature 1..80: note = Artificially Synthesized Probe
  source 1..80: mol_type = other DNA
gtggcataagaaatatttgcctcaagatttggtgcttgtttaggtagttgctggcattacttttggaaatgtcagtaaat

SEQ ID NO: 36894 - DNA, 80 bp, synthetic construct
  misc_feature 1..80: note = Artificially Synthesized Probe
  source 1..80: mol_type = other DNA
taaagctggaccttactttgtcagtcctgccttctccatgttgctttgtgtgtaagcttcactggactgtttgctttttg

SEQ ID NO: 36895 - DNA, 80 bp, synthetic construct
  misc_feature 1..80: note = Artificially Synthesized Probe
  source 1..80: mol_type = other DNA
ctggaacttcttagagagttgtcatcagttggtagaactataagtggtaaaggtctttctgatgatatctcagaaatgaa

SEQ ID NO: 36896 - DNA, 80 bp, synthetic construct
  misc_feature 1..80: note = Artificially Synthesized Probe
  source 1..80: mol_type = other DNA
cttaggctactgctgagtactcaaatggtaaaccttggcagcgtctatatggtgctaattctgcaggctcacaggatgaa

SEQ ID NO: 36897 - DNA, 80 bp, synthetic construct
  misc_feature 1..80: note = Artificially Synthesized Probe
  source 1..80: mol_type = other DNA
actttgggttccctgccattgcttctggtgcctcattttttctgacgtcttccattttcttacatttgtcttctaaggtg

SEQ ID NO: 36898 - DNA, 80 bp, synthetic construct
  misc_feature 1..80: note = Artificially Synthesized Probe
  source 1..80: mol_type = other DNA
taaaacagtatccaggccagcattgcacctatgaaattggctgttaggaatcttgtatctttaaaaatcaagggcagcaa

SEQ ID NO: 36899 - DNA, 80 bp, synthetic construct
  misc_feature 1..80: note = Artificially Synthesized Probe
  source 1..80: mol_type = other DNA
gaaagacaaaataaatacttaaatctcactctttaccatttttcaaagtgaagaactattccgttaaccacctcaaaaga

SEQ ID NO: 36900 - DNA, 80 bp, synthetic construct
  misc_feature 1..80: note = Artificially Synthesized Probe
  source 1..80: mol_type = other DNA
ttcagggggaaaaaaaagataaaatagtttgaggaggctggatgtagtggctcatgcatgtcatcctggcactttgggag

SEQ ID NO: 36901 - DNA, 80 bp, synthetic construct
  misc_feature 1..80: note = Artificially Synthesized Probe
  source 1..80: mol_type = other DNA
ggtcaactttgaattttatttggaagataaatgagtccagaagtgagtgggcagagattattggagttggtcttgaaatg

SEQ ID NO: 36902 - DNA, 80 bp, synthetic construct
  misc_feature 1..80: note = Artificially Synthesized Probe
  source 1..80: mol_type = other DNA
aggtccacatacaagtggtccgacacagctcaaaccggttttgttcattggccaactgtagtttgattgaaagtaataat

SEQ ID NO: 36903 - DNA, 80 bp, synthetic construct
  misc_feature 1..80: note = Artificially Synthesized Probe
  source 1..80: mol_type = other DNA
ttttaaggtaccactgtgcatatgtataccaactacctgaagaagtatttggttggtacaagagatatagaaaggaatcg

SEQ ID NO: 36904 - DNA, 80 bp, synthetic construct
  misc_feature 1..80: note = Artificially Synthesized Probe
  source 1..80: mol_type = other DNA
aagtatataagacaacctacattcttcatgagctagccataagttttagcaacttgctttgaaccacggtagatttacaa

SEQ ID NO: 36905 - DNA, 80 bp, synthetic construct
  misc_feature 1..80: note = Artificially Synthesized Probe
  source 1..80: mol_type = other DNA
ctagtttttacgttggtctcttctcagtgtcgttagtcactgaggctgattgatcatcttttaggttactgataaagttc

SEQ ID NO: 36906 - DNA, 80 bp, synthetic construct
  misc_feature 1..80: note = Artificially Synthesized Probe
  source 1..80: mol_type = other DNA
ctgtgatttttccccaaacggaaaatactctgcagagattagactttgttattgttgtactacatcattgctttgactaa

SEQ ID NO: 36907 - DNA, 80 bp, synthetic construct
  misc_feature 1..80: note = Artificially Synthesized Probe
  source 1..80: mol_type = other DNA
gaagctcatccttttttatggctgcatactactccgtggtgtatatgtgccacattttcttaatccagtcagtcattgat

SEQ ID NO: 36908 - DNA, 80 bp, synthetic construct
  misc_feature 1..80: note = Artificially Synthesized Probe
  source 1..80: mol_type = other DNA
ccctttccccatttcctgtttttgtcaggtttgtcaaagatcagatggttgtagatgtgtcatgttatttctgagggctc

SEQ ID NO: 36909 - DNA, 80 bp, synthetic construct
  misc_feature 1..80: note = Artificially Synthesized Probe
  source 1..80: mol_type = other DNA
attttgtcaaaggccttttctgcatctattgagataatcatgtggttttttgtctttggttctctttatgtgatggatta

SEQ ID NO: 36910 - DNA, 80 bp, synthetic construct
  misc_feature 1..80: note = Artificially Synthesized Probe
  source 1..80: mol_type = other DNA
aaaaaccagctcctggattcattgattttttttttgaagggttttttgtgtcctatctccttcaattctgctctgatctt

SEQ ID NO: 36911 - DNA, 80 bp, synthetic construct
  misc_feature 1..80: note = Artificially Synthesized Probe
  source 1..80: mol_type = other DNA
gtctgcatgtgagatacatctcctgaatacagcacactgatgggtcttgactctttatccaatttgccagtctttgtctt

SEQ ID NO: 36912 - DNA, 80 bp, synthetic construct
  misc_feature 1..80: note = Artificially Synthesized Probe
  source 1..80: mol_type = other DNA
ggtcatttatggtcttctgtacactgtttattctagttagccatttgtctaatcttttttcaagatttttagcttccttg

SEQ ID NO: 36913 - DNA, 80 bp, synthetic construct
  misc_feature 1..80: note = Artificially Synthesized Probe
  source 1..80: mol_type = other DNA
accaggtacctcagttggaaatgcagaaatcacctgtcttccgcgtggatcatgctgggagctgcagacaggagctgttc

SEQ ID NO: 36914 - DNA, 80 bp, synthetic construct
  misc_feature 1..80: note = Artificially Synthesized Probe
  source 1..80: mol_type = other DNA
ttggtggcatgagtcctatattataaggaaatgcttttagagtacagtcttctgatatatagtgatttttgaaaaagatt

SEQ ID NO: 36915 - DNA, 80 bp, synthetic construct
  misc_feature 1..80: note = Artificially Synthesized Probe
  source 1..80: mol_type = other DNA
ccttagtggatttgacagtgtttatattatctacaccaatgcatttttttgtatgttaataataggagatatttattggg

SEQ ID NO: 36916 - DNA, 80 bp, synthetic construct
  misc_feature 1..80: note = Artificially Synthesized Probe
  source 1..80: mol_type = other DNA
agaaggtggtaaaacatcaccttgaaagttctgcattcagcctagaattctgtatccagttaaaccatcaatcaagtgtg

SEQ ID NO: 36917 - DNA, 80 bp, synthetic construct
  misc_feature 1..80: note = Artificially Synthesized Probe
  source 1..80: mol_type = other DNA
gcaattgtcaccactgtccatctctagaactttttcattatcccacactgacataccacacccattaaataataactcct

SEQ ID NO: 36918 - DNA, 80 bp, synthetic construct
  misc_feature 1..80: note = Artificially Synthesized Probe
  source 1..80: mol_type = other DNA
agccttttgcccatttatgaattgagtagtttgggatttttaaattgtgttttagaagttctttgtatactctggctggg

SEQ ID NO: 36919 - DNA, 80 bp, synthetic construct
  misc_feature 1..80: note = Artificially Synthesized Probe
  source 1..80: mol_type = other DNA
aaagtgttgcgattacaggtatgagccaccgtgcatggccccaacttcttatatttcaagatggttttggcccttcaggg

SEQ ID NO: 36920 - DNA, 80 bp, synthetic construct
  misc_feature 1..80: note = Artificially Synthesized Probe
  source 1..80: mol_type = other DNA
atttttattcattttcttaatgctctctcatacattcaatactatgttgaatggaagtggtgaaagcaggcatcctgtct

SEQ ID NO: 36921 - DNA, 80 bp, synthetic construct
  misc_feature 1..80: note = Artificially Synthesized Probe
  source 1..80: mol_type = other DNA
caattgttcatagtactgtcttctcttttttttaaacttctgtgcagttgatactaatgtccctacttttatttcagatt

SEQ ID NO: 36922 - DNA, 80 bp, synthetic construct
  misc_feature 1..80: note = Artificially Synthesized Probe
  source 1..80: mol_type = other DNA
atattctgactgggtgtttttgtccattattgagagtagggtatcgaagtgtccagctgttatttcagaactgtctgttt

SEQ ID NO: 36923 - DNA, 80 bp, synthetic construct
  misc_feature 1..80: note = Artificially Synthesized Probe
  source 1..80: mol_type = other DNA
ctttatttcttaatacagcttcaagttactgtctagtctccttttatttcagcctgaaagactcacttcagcgtttcttg

SEQ ID NO: 36924 - DNA, 80 bp, synthetic construct
  misc_feature 1..80: note = Artificially Synthesized Probe
  source 1..80: mol_type = other DNA
tattttcagctgttctgccttccaagtttactgattcttctgcctgcccaaattggcttttgaattcctctagtaaattt

SEQ ID NO: 36925 - DNA, 80 bp, synthetic construct
  misc_feature 1..80: note = Artificially Synthesized Probe
  source 1..80: mol_type = other DNA
ctttccttagaaactgaaaacctgaatagactccagagttccagaatcacagattctgcttacagtcgtctaggtgggga

SEQ ID NO: 36926 - DNA, 80 bp, synthetic construct
  misc_feature 1..80: note = Artificially Synthesized Probe
  source 1..80: mol_type = other DNA
tgtgctgtcagtgccccactactacactcccttaagtagccccacattcttgtgcttgtttcttttttctgctctctttc

SEQ ID NO: 36927 - DNA, 80 bp, synthetic construct
  misc_feature 1..80: note = Artificially Synthesized Probe
  source 1..80: mol_type = other DNA
cttaggactttgctgcttggacacttggtgtaatagctgctgccactatgcctcgaaactggtgactctgctcattaact

SEQ ID NO: 36928 - DNA, 80 bp, synthetic construct
  misc_feature 1..80: note = Artificially Synthesized Probe
  source 1..80: mol_type = other DNA
tcaccttgcttaaattagcaagtaggaaatgctttcaataaagagaactgtcatgtacccactactccttacttactgaa

SEQ ID NO: 36929 - DNA, 80 bp, synthetic construct
  misc_feature 1..80: note = Artificially Synthesized Probe
  source 1..80: mol_type = other DNA
agtatttccttccttgtctgacgtgaactctaaaattatgtgaacactttctccctgtttcctggcatttccactcaaac

SEQ ID NO: 36930 - DNA, 80 bp, synthetic construct
  misc_feature 1..80: note = Artificially Synthesized Probe
  source 1..80: mol_type = other DNA
gtaaacacacaccttcttgtaaacacaacaaccaagatttagaacactcgctttatgaaaagtttccctcatgcccattt

SEQ ID NO: 36931 - DNA, 80 bp, synthetic construct
  misc_feature 1..80: note = Artificially Synthesized Probe
  source 1..80: mol_type = other DNA
acaacttcataatgagaaaataaccccataaagagaagggcaggccgggtgcagtggctcatgcctataatgccagcact

SEQ ID NO: 36932 - DNA, 80 bp, synthetic construct
  misc_feature 1..80: note = Artificially Synthesized Probe
  source 1..80: mol_type = other DNA
gtcttgcctgccttccttgccttgcctgccttgccttcctttcttcctttcttccctttcttttctttcttttctttttt

SEQ ID NO: 36933 - DNA, 80 bp, synthetic construct
  misc_feature 1..80: note = Artificially Synthesized Probe
  source 1..80: mol_type = other DNA
atgggagtggtttgtaatggttttagcactatcaccctagagctgtctcgcgaaagagttctcctgagatctgcttgtat

SEQ ID NO: 36934 - DNA, 80 bp, synthetic construct
  misc_feature 1..80: note = Artificially Synthesized Probe
  source 1..80: mol_type = other DNA
tgcctgtctagtaaattttaatcgtatgttgaaatgtagggagtttggattgttacttcctttaagggtgctgagtttca

SEQ ID NO: 36935 - DNA, 80 bp, synthetic construct
  misc_feature 1..80: note = Artificially Synthesized Probe
  source 1..80: mol_type = other DNA
ggattcccttttcctctcttgtgggttagattcttcagttcttggagactgtcatcttctttcatggtttcccactcttg

SEQ ID NO: 36936 - DNA, 80 bp, synthetic construct
  misc_feature 1..80: note = Artificially Synthesized Probe
  source 1..80: mol_type = other DNA
gcccttcttttgcctatcttatggggttgaggattaaacagtttatatacctgaggtgcttaggatatgtctgtcatata

SEQ ID NO: 36937 - DNA, 80 bp, synthetic construct
  misc_feature 1..80: note = Artificially Synthesized Probe
  source 1..80: mol_type = other DNA
ccatggaggtatacttcagagtgaatataattttgtttatcctgtgtctctagagctattgactgaaaaagctgttaggg

SEQ ID NO: 36938 - DNA, 80 bp, synthetic construct
  misc_feature 1..80: note = Artificially Synthesized Probe
  source 1..80: mol_type = other DNA
attggaaacactaattttaccttataaagaaggtttcataaaggaaggcaagtttgagctggggtgaaaaggaccagtaa

SEQ ID NO: 36939 - DNA, 80 bp, synthetic construct
  misc_feature 1..80: note = Artificially Synthesized Probe
  source 1..80: mol_type = other DNA
cctagagaagttaagtgagttgaacaaggtcacacaggtacatatggtagccgaccatccactgtttatgccaatattcc

SEQ ID NO: 36940 - DNA, 80 bp, synthetic construct
  misc_feature 1..80: note = Artificially Synthesized Probe
  source 1..80: mol_type = other DNA
tcaaagagagtaaagaagagacctgcctacctagctgattctatggcaaatctcacttctctggaagcttttcctgttaa

SEQ ID NO: 36941 - DNA, 80 bp, synthetic construct
  misc_feature 1..80: note = Artificially Synthesized Probe
  source 1..80: mol_type = other DNA
cttaacagtaatatttgagaggcatttttattaaagcagtcttaaggagtgttcgtcaaaccacatgttctgggatcctg

SEQ ID NO: 36942 - DNA, 80 bp, synthetic construct
  misc_feature 1..80: note = Artificially Synthesized Probe
  source 1..80: mol_type = other DNA
tttgttttgcatagtagttggagttaccagggtactgctaaccacactgatatgtaagatctctttctgagccttttatt

SEQ ID NO: 36943 - DNA, 80 bp, synthetic construct
  misc_feature 1..80: note = Artificially Synthesized Probe
  source 1..80: mol_type = other DNA
tatttgaggcagttggtctaatagtaagcaatcacagggagaaagcagaactacttaactcttctgtgttgaggaatgac

SEQ ID NO: 36944 - DNA, 80 bp, synthetic construct
  misc_feature 1..80: note = Artificially Synthesized Probe
  source 1..80: mol_type = other DNA
cattgtctaccagaagatctctcctgtcacaccaaaggataattgattatatcctgtaccatattatgagtcacctgatt

SEQ ID NO: 36945 - DNA, 80 bp, synthetic construct
  misc_feature 1..80: note = Artificially Synthesized Probe
  source 1..80: mol_type = other DNA
tttctctggaatccagtgtttcttttaaatacctgttaagtttgtatgcaacatttctaaagttacctacttgttaatta

SEQ ID NO: 36946 - DNA, 80 bp, synthetic construct
  misc_feature 1..80: note = Artificially Synthesized Probe
  source 1..80: mol_type = other DNA
aaaactcttgggagaacttttacagtgatttaattttgctgttgatatatttctttgggtggtaagtatggcaaaacatg

SEQ ID NO: 36947 - DNA, 80 bp, synthetic construct
  misc_feature 1..80: note = Artificially Synthesized Probe
  source 1..80: mol_type = other DNA
ttttgtaataaaatagaaaaattttgtaatgtggaggcgcagaacactagatttaagccagggggtcttaaattgtgtta

SEQ ID NO: 36948 - DNA, 80 bp, synthetic construct
  misc_feature 1..80: note = Artificially Synthesized Probe
  source 1..80: mol_type = other DNA
ataagatttctttcaggattgatgacagtcttgcaccctagcgcatactgatgaagagagcagtgggtgaccatgacatg

SEQ ID NO: 36949 - DNA, 80 bp, synthetic construct
  misc_feature 1..80: note = Artificially Synthesized Probe
  source 1..80: mol_type = other DNA
cacacacatatgcatacataccctgtctgatgtatctgcttcttcagaatagttggctgtgctctgctgatgatgagaac

SEQ ID NO: 36950 - DNA, 80 bp, synthetic construct
  misc_feature 1..80: note = Artificially Synthesized Probe
  source 1..80: mol_type = other DNA
gtttcttatagatgatcaaacaggcacaggaaggggaagtgttgtgatcaatattatccagttaatattagcattcagag

SEQ ID NO: 36951 - DNA, 80 bp, synthetic construct
  misc_feature 1..80: note = Artificially Synthesized Probe
  source 1..80: mol_type = other DNA
ttcagtgttgcagagaagtcagacaactgatagttattataaagaaaaatgttctgagagtgaggtaaccgcttaaggga

SEQ ID NO: 36952 - DNA, 80 bp, synthetic construct
  misc_feature 1..80: note = Artificially Synthesized Probe
  source 1..80: mol_type = other DNA
gtttgttttgtttttttgtttgagacagtctcactcaatcacccaggctggagtgcagtggcaacatctcagctcactgc

SEQ ID NO: 36953 - DNA, 80 bp, synthetic construct
  misc_feature 1..80: note = Artificially Synthesized Probe
  source 1..80: mol_type = other DNA
agaccagcttgggcaacatagtgagaggctgtctctacaaaaaaatatttaaaaaatagccgggcatggtgtcacgtgcc

SEQ ID NO: 36954 - DNA, 80 bp, synthetic construct
  misc_feature 1..80: note = Artificially Synthesized Probe
  source 1..80: mol_type = other DNA
tccagatcctggttttgaatgagataattacgtgcagtcggactgttttctgatcctaaaaatagagacaataatatcta

SEQ ID NO: 36955 - DNA, 80 bp, synthetic construct
  misc_feature 1..80: note = Artificially Synthesized Probe
  source 1..80: mol_type = other DNA
aaaagcttctatcacctagtgatgttgaagccgttgcaatgcaatgtatcactcacatgtttgtggtaatgctggtgtaa

SEQ ID NO: 36956 - DNA, 80 bp, synthetic construct
  misc_feature 1..80: note = Artificially Synthesized Probe
  source 1..80: mol_type = other DNA
catctaggcttgtgtaagtatattttatgacacagtgatgaaatcatccagatacagtttctcttaagcaacacataact

SEQ ID NO: 36957 - DNA, 80 bp, synthetic construct
  misc_feature 1..80: note = Artificially Synthesized Probe
  source 1..80: mol_type = other DNA
gagaggtaagagtggaaacagaggttggagctgtatttttatgctgtgattgaattacagtgtgtgataaatattgctct

SEQ ID NO: 36958 - DNA, 80 bp, synthetic construct
  misc_feature 1..80: note = Artificially Synthesized Probe
  source 1..80: mol_type = other DNA
gagattaccaggtagaaattccagccagatgttggaattctgcactggcagttgggaataaagtcatgttaaaggagata

SEQ ID NO: 36959 - DNA, 80 bp, synthetic construct
  misc_feature 1..80: note = Artificially Synthesized Probe
  source 1..80: mol_type = other DNA
ggattgtgaaaacagcaggaaattagttgttgacaaagcattaatgaccattaagaaatcagcctcggctgggcatggtg

SEQ ID NO: 36960 - DNA, 80 bp, synthetic construct
  misc_feature 1..80: note = Artificially Synthesized Probe
  source 1..80: mol_type = other DNA
agaagggaattttgagtgtttgtattggatgacctcagggttcccagtaaagcaggagctgaattcatcgaaggtgatgt

SEQ ID NO: 36961 - DNA, 80 bp, synthetic construct
  misc_feature 1..80: note = Artificially Synthesized Probe
  source 1..80: mol_type = other DNA
tgattagtgtcacacagtgttttaaacagattcttgcaaccctggagttcactgcagtagcaacagaagttagctatgag

SEQ ID NO: 36962 - DNA, 80 bp, synthetic construct
  misc_feature 1..80: note = Artificially Synthesized Probe
  source 1..80: mol_type = other DNA
tgaggtcaggagttcaagacagcctggccaacatgctgactcacccttccctactgaaaatacaaaagttagccaggcgc

SEQ ID NO: 36963 - DNA, 80 bp, synthetic construct
  misc_feature 1..80: note = Artificially Synthesized Probe
  source 1..80: mol_type = other DNA
tgctcttcaaagtactactactttaccttaccttttactgttttgttaagaaaattaggccgggcgcagtggctcacgcc

SEQ ID NO: 36964 - DNA, 80 bp, synthetic construct
  misc_feature 1..80: note = Artificially Synthesized Probe
  source 1..80: mol_type = other DNA
gtctataataaaatcatgctcatctttgaaaaaatattaggagtactacagtggatacctacatacttgctattcagcat

SEQ ID NO: 36965 - DNA, 80 bp, synthetic construct
  misc_feature 1..80: note = Artificially Synthesized Probe
  source 1..80: mol_type = other DNA
attgtttcacacatttacatcaactgcatagtcctgtttttgttgggccctaatgccagcatcactttttgctactgctg

SEQ ID NO: 36966 - DNA, 80 bp, synthetic construct
  misc_feature 1..80: note = Artificially Synthesized Probe
  source 1..80: mol_type = other DNA
ttatgaaagaaatattctgtgttataaccaccaaatacagcccaattctgactagatgatggaagaacctgtcccatcag

SEQ ID NO: 36967 - DNA, 80 bp, synthetic construct
  misc_feature 1..80: note = Artificially Synthesized Probe
  source 1..80: mol_type = other DNA
atgatttaatactgtagtaaagttttaataaaatatgagctatatgtaattaagtgggaggttgtggggctaggcacgag

SEQ ID NO: 36968 - DNA, 80 bp, synthetic construct
  misc_feature 1..80: note = Artificially Synthesized Probe
  source 1..80: mol_type = other DNA
gtgactgttagaggatcttgaatggggataacagacttgatttcataaatactgagatgtcatgataatacttgaggact

SEQ ID NO: 36969 - DNA, 80 bp, synthetic construct
  misc_feature 1..80: note = Artificially Synthesized Probe
  source 1..80: mol_type = other DNA
cattgtacccattaagtaatttctcatcttctactcaccgtttcaagtctccactatttatcattccattctttacattc

SEQ ID NO: 36970 - DNA, 80 bp, synthetic construct
  misc_feature 1..80: note = Artificially Synthesized Probe
  source 1..80: mol_type = other DNA
aagttagatttcccagtgaaatttcagtatcacataaagtcttatgaaatggctcattgcactttgaactttgagtcaag

SEQ ID NO: 36971 - DNA, 80 bp, synthetic construct
  misc_feature 1..80: note = Artificially Synthesized Probe
  source 1..80: mol_type = other DNA
catgtagtgatttgtattttgtgatctttgccgcatgctagagacttaagaatactatagcaaatatctgtcttctttac

SEQ ID NO: 36972 - DNA, 80 bp, synthetic construct
  misc_feature 1..80: note = Artificially Synthesized Probe
  source 1..80: mol_type = other DNA
aattttggtctataggtagaaatgagatctgttctgtggtcttatgtagtgacacaaaccactttttctccattttggct

SEQ ID NO: 36973 - DNA, 80 bp, synthetic construct
  misc_feature 1..80: note = Artificially Synthesized Probe
  source 1..80: mol_type = other DNA
ccttgttaaacatactagatagcatattgccaatctttaaacattctcaatgataggatttatttactttttctgatttt

SEQ ID NO: 36974 - DNA, 80 bp, synthetic construct
  misc_feature 1..80: note = Artificially Synthesized Probe
  source 1..80: mol_type = other DNA
tgtatttgccatgcgtcatcagggaagttgcactcaccgtccaagaacttttgttaaagtaaatcttggaataggtagct

SEQ ID NO: 36975 - DNA, 80 bp, synthetic construct
  misc_feature 1..80: note = Artificially Synthesized Probe
  source 1..80: mol_type = other DNA
ttttcctaattcttcgttgtttgctgaaatctggggcaaaggtgcgggagggggctaaatgactgggatatgaagtagga

SEQ ID NO: 36976 - DNA, 80 bp, synthetic construct
  misc_feature 1..80: note = Artificially Synthesized Probe
  source 1..80: mol_type = other DNA
ttttttcttcccccttcctatttcttattctacctgattttcccctgttcattcaccacactcgtttctttctctttttt

SEQ ID NO: 36977 - DNA, 80 bp, synthetic construct
  misc_feature 1..80: note = Artificially Synthesized Probe
  source 1..80: mol_type = other DNA
acatctccctatcctcccctcccactccctttcccggcctctaataaccacactcttatgagctcaacttttttagcttc

SEQ ID NO: 36978 - DNA, 80 bp, synthetic construct
  misc_feature 1..80: note = Artificially Synthesized Probe
  source 1..80: mol_type = other DNA
gactcttggataataggggagggaggggctgtcaatataatataatgaagaagggatttgaagtcatttctgatttaaat

SEQ ID NO: 36979 - DNA, 80 bp, synthetic construct
  misc_feature 1..80: note = Artificially Synthesized Probe
  source 1..80: mol_type = other DNA
ggcaacatcatgaaccccatttctactaaaatacaaaaaattatctgggcatggtggtgtacacctgtagccctagctgt

SEQ ID NO: 36980 - DNA, 80 bp, synthetic construct
  misc_feature 1..80: note = Artificially Synthesized Probe
  source 1..80: mol_type = other DNA
aattttatgctggactctggaccatataccatctccagctatttacacacacctttctttagcatgctacagttattaat

SEQ ID NO: 36981 - DNA, 80 bp, synthetic construct
  misc_feature 1..80: note = Artificially Synthesized Probe
  source 1..80: mol_type = other DNA
tgctcccccgagttgggactagggcttcaatttcacttcttaaaaaaaatcatcatatatttgatatgcccagactgcat

SEQ ID NO: 36982 - DNA, 80 bp, synthetic construct
  misc_feature 1..80: note = Artificially Synthesized Probe
  source 1..80: mol_type = other DNA
agttgggccctgtaccatcccaagtcctttgtagctcctcttgaacatgtttgccatacttttaaaagggtagttgaata

SEQ ID NO: 36983 - DNA, 80 bp, synthetic construct
  misc_feature 1..80: note = Artificially Synthesized Probe
  source 1..80: mol_type = other DNA
aaaaaaaaaaaaacatggcctgagagtagagtatctgtctactcatgtttaattaaggaaaaacacttatttttagggct

SEQ ID NO: 36984 - DNA, 80 bp, synthetic construct
  misc_feature 1..80: note = Artificially Synthesized Probe
  source 1..80: mol_type = other DNA
catgtcctttgtacgttgtaatatgagctggcttggttcagtaaatgccatcaccatttccattgagaatttaaaactca

SEQ ID NO: 36985 - DNA, 80 bp, synthetic construct
  misc_feature 1..80: note = Artificially Synthesized Probe
  source 1..80: mol_type = other DNA
gtgatttgattactttctaatgccacagatgcagattacatgtagttattgagaatcctttcgaattcagtggcttaatc

SEQ ID NO: 36986 - DNA, 80 bp, synthetic construct
  misc_feature 1..80: note = Artificially Synthesized Probe
  source 1..80: mol_type = other DNA
tttctgcctactctatccagttgtccaaatgatatcctacattttacaaatgccctttcagtttctattttctttttcca

SEQ ID NO: 36987 - DNA, 80 bp, synthetic construct
  misc_feature 1..80: note = Artificially Synthesized Probe
  source 1..80: mol_type = other DNA
cctccagaagacttagtgtgacttactatttcacacgctttccatctcatgtagcacatcggataagcctgattagtctg

SEQ ID NO: 36988 - DNA, 80 bp, synthetic construct
  misc_feature 1..80: note = Artificially Synthesized Probe
  source 1..80: mol_type = other DNA
attggacgcagacactccacatttgtgaacctttcctgcacccatcacctcagtaaaccccagggaagcgcgtgggcctt

SEQ ID NO: 36989 - DNA, 80 bp, synthetic construct
  misc_feature 1..80: note = Artificially Synthesized Probe
  source 1..80: mol_type = other DNA
ggcacctgacccctgctgaacatctcatgcaggagaatcccaaaggaccagacgtcggatttggtggagtaatggcctcg

SEQ ID NO: 36990 - DNA, 80 bp, synthetic construct
  misc_feature 1..80: note = Artificially Synthesized Probe
  source 1..80: mol_type = other DNA
tctcatctgcctccaagctctgcgggctcagaggaggggccggggcaaagggcagctggcctgattgaaaattggaactg

SEQ ID NO: 36991 - DNA, 80 bp, synthetic construct
  misc_feature 1..80: note = Artificially Synthesized Probe
  source 1..80: mol_type = other DNA
tgtagctctcctcagacacacacggcatttttcctataccacaacgttccctcccattctaacatcggaatccaaactgc

SEQ ID NO: 36992 - DNA, 80 bp, synthetic construct
  misc_feature 1..80: note = Artificially Synthesized Probe
  source 1..80: mol_type = other DNA
cacggggctgtggtggccacccgatttcttcctgtgcccggcccagacctctgacatagaggccagacctctgctggggc

SEQ ID NO: 36993 - DNA, 80 bp, synthetic construct
  misc_feature 1..80: note = Artificially Synthesized Probe
  source 1..80: mol_type = other DNA
gtctgacacaagggtggactctcctgggggctgcccccagcccagcatgaaacacccagacagaccggagccaggaccct

SEQ ID NO: 36994 - DNA, 80 bp, synthetic construct
  misc_feature 1..80: note = Artificially Synthesized Probe
  source 1..80: mol_type = other DNA
aggcgcccgtggcgttgccctcggcctgcagccgacgcacagcttccgagcgggagatgcagccaaagaaccacctgcag

SEQ ID NO: 36995 - DNA, 80 bp, synthetic construct
  misc_feature 1..80: note = Artificially Synthesized Probe
  source 1..80: mol_type = other DNA
ccagcatggagcccctggggtccaccccctccacttccgcacacctggaagcactgccccacctgcccctccaaccacct

SEQ ID NO: 36996 - DNA, 80 bp, synthetic construct
  misc_feature 1..80: note = Artificially Synthesized Probe
  source 1..80: mol_type = other DNA
cacagcaggcaggaagtttgcccggcagccggcccgctcccctaactaggtcgtgtgtctggttccggcactttggaaac

SEQ ID NO: 36997 - DNA, 80 bp, synthetic construct
  misc_feature 1..80: note = Artificially Synthesized Probe
  source 1..80: mol_type = other DNA
aaatgtgttggtaactggaagtgagaagcctgctgtaaaccatcaagattgttgtctcagggagacatagctagttgtgt

SEQ ID NO: 36998 - DNA, 80 bp, synthetic construct; identical to SEQ ID NO: 36997
  misc_feature 1..80: note = Artificially Synthesized Probe
  source 1..80: mol_type = other DNA

SEQ ID NO: 36999 - DNA, 80 bp, synthetic construct
  misc_feature 1..80: note = Artificially Synthesized Probe
  source 1..80: mol_type = other DNA
agctccattgctttttattccaggcaaacttcccaacctcctgaatagaccaaatatcctattatatgcttaaatcagag

SEQ ID NO: 37000 - DNA, 80 bp, synthetic construct
  misc_feature 1..80: note = Artificially Synthesized Probe
  source 1..80: mol_type = other DNA
agtgttctctggttctaataaagttgtaatgccaggcagatctaccacactatagcatggcagttaggagtatatgagtt

SEQ ID NO: 37001 - DNA, 80 bp, synthetic construct
  misc_feature 1..80: note = Artificially Synthesized Probe
  source 1..80: mol_type = other DNA
ctgatttcttctcattgcctttggtataaattctaatcttttttgccagagaaactggttccactaatgatctgggggct

SEQ ID NO: 37002 - DNA, 80 bp, synthetic construct
  misc_feature 1..80: note = Artificially Synthesized Probe
  source 1..80: mol_type = other DNA
gagataaaaaaattaaccagaggcgaagtgggaggatgaagacagcaggactattttgtccagattaaattaagttgatt

SEQ ID NO: 37003 - DNA, 80 bp, synthetic construct
  misc_feature 1..80: note = Artificially Synthesized Probe
  source 1..80: mol_type = other DNA
cccatagcagtggccttttaccaaaggcttagtgctatgacttttgcatacataaagacctcactttttaagatatgata

SEQ ID NO: 37004 - DNA, 80 bp, synthetic construct
  misc_feature 1..80: note = Artificially Synthesized Probe
  source 1..80: mol_type = other DNA
ccaagctgggaaacatcatgacatctgtagtgataaatattttgaaaatctaactctatgaatcttgtgatttttagcta

SEQ ID NO: 37005 - DNA, 80 bp, synthetic construct
  misc_feature 1..80: note = Artificially Synthesized Probe
  source 1..80: mol_type = other DNA
aatacagatctaaattttccaaaaccatttaaattcttctctttggccagaaacattttctgtgtgtagttttggctacc

SEQ ID NO: 37006 - DNA, 80 bp, synthetic construct
  misc_feature 1..80: note = Artificially Synthesized Probe
  source 1..80: mol_type = other DNA
aggtcctcagtacctgtttgctgaacaaacgaatggtctgtcagcttaacccaactctgtatgtagaaggcacttaataa

SEQ ID NO: 37007 - DNA, 80 bp, synthetic construct
  misc_feature 1..80: note = Artificially Synthesized Probe
  source 1..80: mol_type = other DNA
tgggagctggtaatttctcagaggttgtttgtgtgacatatgcatgtaagttcattcacctgatttagctacttacatga

SEQ ID NO: 37008 - DNA, 80 bp, synthetic construct
  misc_feature 1..80: note = Artificially Synthesized Probe
  source 1..80: mol_type = other DNA
gattcactcatcgattcatcaattgtttatagagcccctgctaagctaaaaactgttttaagtgttgacacagtggtaaa

SEQ ID NO: 37009 - DNA, 80 bp, synthetic construct
  misc_feature 1..80: note = Artificially Synthesized Probe
  source 1..80: mol_type = other DNA
ggtctcaactggagacataaacataggagtcattgcattcagatggagcttaaagctaagggactgcatgtgacagtgta

SEQ ID NO: 37010 - DNA, 80 bp, synthetic construct
  misc_feature 1..80: note = Artificially Synthesized Probe
  source 1..80: mol_type = other DNA
caggcacttctgttaacattttataaatgttatctcatttaacaagctcatgtcattgtatagtctagcttatacttgtc

SEQ ID NO: 37011 - DNA, 80 bp, synthetic construct
  misc_feature 1..80: note = Artificially Synthesized Probe
  source 1..80: mol_type = other DNA
ataacacaaacactgtattagtgtgtgagaagcagataatcgtgcatgtaggcactatcatttgtgaaatcagaaagcat

SEQ ID NO: 37012 - DNA, 80 bp, synthetic construct
  misc_feature 1..80: note = Artificially Synthesized Probe
  source 1..80: mol_type = other DNA
gaatgttcaaccactgtcaacatgaactcctattctgtaattaatctattctataaacatctgtatttgctaaagagcaa

SEQ ID NO: 37013 - DNA, 80 bp, synthetic construct
  misc_feature 1..80: note = Artificially Synthesized Probe
  source 1..80: mol_type = other DNA
cctgctgtcctttataagagaataatatattttgtaatttgagaaaatcatgcaaaggaaagtttctcaaaattcacatt

SEQ ID NO: 37014 - DNA, 80 bp, synthetic construct
  misc_feature 1..80: note = Artificially Synthesized Probe
  source 1..80: mol_type = other DNA
ctggtttctttttcagtgagatttacagcttagactagtttctgaatcttgaccctgtggacaatctagttggagaactg

SEQ ID NO: 37015 - DNA, 80 bp, synthetic construct
  misc_feature 1..80: note = Artificially Synthesized Probe
  source 1..80: mol_type = other DNA
attattctcagtttttgacttaaaaggtattgttgcttccctttctttccctcccctactcaagtttttgcccatggatc

SEQ ID NO: 37016 - DNA, 80 bp, synthetic construct
  misc_feature 1..80: note = Artificially Synthesized Probe
  source 1..80: mol_type = other DNA
ccaacttttgtaagccaccactattttctgaagattttatttctctctaagctaagaaaggatgtcaagaataaaccatt

SEQ ID NO: 37017 - DNA, 80 bp, synthetic construct
  misc_feature 1..80: note = Artificially Synthesized Probe
  source 1..80: mol_type = other DNA
atactcgatgaatgtgtgttaaactaaactgtgcccaagctctgtgcaacagtacaggtttttcacctttccaggggaga

SEQ ID NO: 37018 - DNA, 80 bp, synthetic construct
  misc_feature 1..80: note = Artificially Synthesized Probe
  source 1..80: mol_type = other DNA
tcatttgagaacgttaagttgaataactgatacggtactaccctacagacatgcgcaggaagtatctgcatttctgtggc

SEQ ID NO: 37019 - DNA, 80 bp, synthetic construct
  misc_feature 1..80: note = Artificially Synthesized Probe
  source 1..80: mol_type = other DNA
gtgagccactgtgcctgaccaagaatatttttcttaatttttctgtaaaactagttgttttagttttcaaagaaagatat

SEQ ID NO: 37020 - DNA, 80 bp, synthetic construct
  misc_feature 1..80: note = Artificially Synthesized Probe
  source 1..80: mol_type = other DNA
attcctttcacaatggagctgcagaatctttgagttgaaagaagccttagaggtgactaggatcaatgtatatatatccc

SEQ ID NO: 37021 - DNA, 80 bp, synthetic construct
  misc_feature 1..80: note = Artificially Synthesized Probe
  source 1..80: mol_type = other DNA
gttcttggggactatcttgagtctccagaaaacactgagaaccactgatacgccaacaagataaaattcttatccttacc

SEQ ID NO: 37022 - DNA, 80 bp, synthetic construct
  misc_feature 1..80: note = Artificially Synthesized Probe
  source 1..80: mol_type = other DNA
tttcctccaacgtaaggatctcatatcacgctttcattctgaactaaccattccctctctgcagttgatgtaactgtgcc

SEQ ID NO: 37023 - DNA, 80 bp, synthetic construct
  misc_feature 1..80: note = Artificially Synthesized Probe
  source 1..80: mol_type = other DNA
atccacagctgacctagtggccttgatatataatattgattgcaggatagttttgtgatggttaagattgcaggctttaa

SEQ ID NO: 37024 - DNA, 80 bp, synthetic construct
  misc_feature 1..80: note = Artificially Synthesized Probe
  source 1..80: mol_type = other DNA
tgaagctctagaataggctgtttgggaagactacaaaatctcctctccgaggtcccttataaccctgatagttgctagat

SEQ ID NO: 37025 - DNA, 80 bp, synthetic construct
  misc_feature 1..80: note = Artificially Synthesized Probe
  source 1..80: mol_type = other DNA
ttttgatgaatgcatttttgtcaaagttgtcaaagtcaagaagtcattattgagaccctgagggtaaggcaggagccaag

SEQ ID NO: 37026 - DNA, 80 bp, synthetic construct
  misc_feature 1..80: note = Artificially Synthesized Probe
  source 1..80: mol_type = other DNA
cttcaaatatgcggagggctataacagagatcatgatgaacagacttttattctggcttagaaagactagacacagaaat

SEQ ID NO: 37027 - DNA, 80 bp, synthetic construct
  misc_feature 1..80: note = Artificially Synthesized Probe
  source 1..80: mol_type = other DNA
aattttcctcagatgggaataaagaatgtcaactggtctggccaagtgagtttggaaagctaagatttagccttgggtgc

SEQ ID NO: 37028 - DNA, 80 bp, synthetic construct
  misc_feature 1..80: note = Artificially Synthesized Probe
  source 1..80: mol_type = other DNA
aatgtcacccaaattagggttttgaagacaatacaggagttagatagataaagaagagagggaagggcataacacaaagg

SEQ ID NO: 37029 - DNA, 80 bp, synthetic construct
  misc_feature 1..80: note = Artificially Synthesized Probe
  source 1..80: mol_type = other DNA
ggtaatagttacaaaggattgacttcttcgcaaataaaatggttgaaatagtacccaaaactagcagattgggcaaaaat

SEQ ID NO: 37030 - DNA, 80 bp, synthetic construct
  misc_feature 1..80: note = Artificially Synthesized Probe
  source 1..80: mol_type = other DNA
cagatttgtccttaagtactgaatataaatgtttctgcttcttattttccttagcatttttaaagaaagtcctggaagcc

SEQ ID NO: 37031 - DNA, 80 bp, synthetic construct
  misc_feature 1..80: note = Artificially Synthesized Probe
  source 1..80: mol_type = other DNA
tcccagtctacactctcacttttcactaacccatttactgctttcttgcttgttctcccagcacaccacaaaaacaactt

SEQ ID NO: 37032 - DNA, 80 bp, synthetic construct
  misc_feature 1..80: note = Artificially Synthesized Probe
  source 1..80: mol_type = other DNA
tgtggatgtcagagcaaaaatatggaaggaatctgggtcctgataccatcatcaaaccattgagctaattccgttttgta

SEQ ID NO: 37033 - DNA, 80 bp, synthetic construct
  misc_feature 1..80: note = Artificially Synthesized Probe
  source 1..80: mol_type = other DNA
aagtcttccatgattaccctaagaatagggtaggcattctttctctctgcttccatagaaagtaggaaactattgcactt

SEQ ID NO: 37034 - DNA, 80 bp, synthetic construct
  misc_feature 1..80: note = Artificially Synthesized Probe
  source 1..80: mol_type = other DNA
atgaagacctttgttgtagttgcatttgttcctcatatgcagtagaatgacccagcctctttggcttagaggtagtgcct

SEQ ID NO: 37035 - DNA, 80 bp, synthetic construct
  misc_feature 1..80: note = Artificially Synthesized Probe
  source 1..80: mol_type = other DNA
tttatttcttatgcatctttagtcccctaggatttgtgacggttttctgtcttttttcttttgaagactgttcattgcct

SEQ ID NO: 37036 - DNA, 80 bp, synthetic construct
  misc_feature 1..80: note = Artificially Synthesized Probe
  source 1..80: mol_type = other DNA
gtagaactgtgtcaaagaccgaaatatcattcctaccttagactgtacctcaagatcgaagctctggatgctatctggaa

SEQ ID NO: 37037 - DNA, 80 bp, synthetic construct
  misc_feature 1..80: note = Artificially Synthesized Probe
  source 1..80: mol_type = other DNA
ggtgttaactgtaatgaacatttatccaacattacccgtgggcctgctatccattttaaattctaaaagcactttacagc

SEQ ID NO: 37038 - DNA, 80 bp, synthetic construct
  misc_feature 1..80: note = Artificially Synthesized Probe
  source 1..80: mol_type = other DNA
ggagactaaacctcggaaatatcatttaacctgtacaagaccttacttggctgagctaggattcaaaactaggtcattcc

SEQ ID NO: 37039 - DNA, 80 bp, synthetic construct
  misc_feature 1..80: note = Artificially Synthesized Probe
  source 1..80: mol_type = other DNA
aggtgagcgacagcaccataaaaacacgctgcgtacaattctggtattaggatcacaaaggcagagaggtgacaaatcct

SEQ ID NO: 37040 - DNA, 80 bp, synthetic construct
  misc_feature 1..80: note = Artificially Synthesized Probe
  source 1..80: mol_type = other DNA
agatccattgctgaggatgggctcgtcacacttcagcagcctgtcctgtttgtaaaccagccagacatagcggtggagat

SEQ ID NO: 37041 - DNA, 80 bp, synthetic construct
  misc_feature 1..80: note = Artificially Synthesized Probe
  source 1..80: mol_type = other DNA
agatgctctgaatcctctattcccaggaggcagcattatggagttaggagaaaatgcaggagctttggattctagtagac

SEQ ID NO: 37042 - DNA, 80 bp, synthetic construct
  misc_feature 1..80: note = Artificially Synthesized Probe
  source 1..80: mol_type = other DNA
tcttgagactatcaagtgtgtatttaaggagccattcaacttacttcagtgcatttgcttgcaaagggtgcaatgtgatg

SEQ ID NO: 37043 - DNA, 80 bp, synthetic construct
  misc_feature 1..80: note = Artificially Synthesized Probe
  source 1..80: mol_type = other DNA
ctcagctttaggagtgggaggcttttgtgcagcctcagcagacattttattctgtttgtgagatgggagattagtttcta

SEQ ID NO: 37044 - DNA, 80 bp, synthetic construct
  misc_feature 1..80: note = Artificially Synthesized Probe
  source 1..80: mol_type = other DNA
tgccattcacatagtacccgcttattaaatagtaaacactgttgatagcaccaaatacactaataaaagatttcaccact

SEQ ID NO: 37045 - DNA, 80 bp, synthetic construct
  misc_feature 1..80: note = Artificially Synthesized Probe
  source 1..80: mol_type = other DNA
aatctaaatcaaagacttcaatttgaccatcattgcacaggaagcgataaaattttccccctgacttgtagataaatagt

SEQ ID NO: 37046 - DNA, 80 bp, synthetic construct
  misc_feature 1..80: note = Artificially Synthesized Probe
  source 1..80: mol_type = other DNA
tttcctcgtgtgtgcctgtgagcaatttactaaactcttttaggtcccagtttcattccctataaaaaaggataaataat

SEQ ID NO: 37047 - DNA, 80 bp, synthetic construct
  misc_feature 1..80: note = Artificially Synthesized Probe
  source 1..80: mol_type = other DNA
ccatttttttttcttttttttttagcggggagggagaacgggtgatatttaaagcccaagtatgtcttttgaaatgccgt

SEQ ID NO: 37048 - DNA, 80 bp, synthetic construct
  misc_feature 1..80: note = Artificially Synthesized Probe
  source 1..80: mol_type = other DNA
aagtaatacaggaaatagggtagagtacaaggctgtctacatacataaaacaacttaggtaactacatcagttcatttgt

SEQ ID NO: 37049 - DNA, 80 bp, synthetic construct
  misc_feature 1..80: note = Artificially Synthesized Probe
  source 1..80: mol_type = other DNA
tgaccatgagaacaagcaagttgagtcttacactaagtctaaacagtgatgctgaagtcttggaattttcttttaaaaag

SEQ ID NO: 37050 - DNA, 80 bp, synthetic construct
  misc_feature 1..80: note = Artificially Synthesized Probe
  source 1..80: mol_type = other DNA
tttctaagcttcttagggtttttgtggtgcttaagaaagaaaacataagcaaaagacttagtatagtgcctggcacccag

SEQ ID NO: 37051 - DNA, 80 bp, synthetic construct
  misc_feature 1..80: note = Artificially Synthesized Probe
  source 1..80: mol_type = other DNA
gtgttttatgggttataagcttatccagggcaagggtcatgcttttatcatgtttgaacctagtctccaacagcatacca

SEQ ID NO: 37052 - DNA, 80 bp, synthetic construct
  misc_feature 1..80: note = Artificially Synthesized Probe
  source 1..80: mol_type = other DNA
tagactgaatctagttcccatcatgccaagaaagctgctcttttcaacatttccacaaacccagatgataaatccagttg

SEQ ID NO: 37053 - DNA, 80 bp, synthetic construct
  misc_feature 1..80: note = Artificially Synthesized Probe
  source 1..80: mol_type = other DNA
ccatttcctgaaaggttgatctaaaattcaaatgtttctcctttaggcctccctttaaagacatccctttaatggatatc

SEQ ID NO: 37054 - DNA, 80 bp, synthetic construct
  misc_feature 1..80: note = Artificially Synthesized Probe
  source 1..80: mol_type = other DNA
cttgacattcacttgttcttaaactttctgcttatacgttatagagtttaataactacctaaacatgttattaaatttgt

SEQ ID NO: 37055 - DNA, 80 bp, synthetic construct
  misc_feature 1..80: note = Artificially Synthesized Probe
  source 1..80: mol_type = other DNA
tgcaaaggaaaatggtctctcccaaatattggccacaacaatgtcatcaatggaaaccaggagaatttgcaaagtggagg

SEQ ID NO: 37056 - DNA, 80 bp, synthetic construct
  misc_feature 1..80: note = Artificially Synthesized Probe
  source 1..80: mol_type = other DNA
gagtggacgataaagggaacttgttgaaacatttctctcaaagcaaaagggatcattggaagcaggcagacaccagaatt

SEQ ID NO: 37057 - DNA, 80 bp, synthetic construct
  misc_feature 1..80: note = Artificially Synthesized Probe
  source 1..80: mol_type = other DNA
ctctcattctctccctttttccatatttgtgccattgtcttttgcccaatcttgttgaactgatttaattattttttgtt

SEQ ID NO: 37058 - DNA, 80 bp, synthetic construct
  misc_feature 1..80: note = Artificially Synthesized Probe
  source 1..80: mol_type = other DNA
gagtaaatggaagttttgtcttttttttcccctggaaccctagccctgctaaaaaccttctaactttacctttctctatc

SEQ ID NO: 37059 - DNA, 80 bp, synthetic construct
  misc_feature 1..80: note = Artificially Synthesized Probe
  source 1..80: mol_type = other DNA
aaatatagatcgactgaagtaattaatgcatgttgttagggagtggagagagaaaagaagggaagcaagatctccaagga

SEQ ID NO: 37060 - DNA, 80 bp, synthetic construct
  misc_feature 1..80: note = Artificially Synthesized Probe
  source 1..80: mol_type = other DNA
gtaaaaatttgaacacattgcccaaaatttttacaaaaggaatgcaaggatgaaggtgctgatgactaggtggaacatct

SEQ ID NO: 37061 - DNA, 80 bp, synthetic construct
  misc_feature 1..80: note = Artificially Synthesized Probe
  source 1..80: mol_type = other DNA
aatttgtaagagatactagtacattggaagattcctttcttattctccctacaaagaaatgtcccatctgtcagtttgta

SEQ ID NO: 37062 - DNA, 80 bp, synthetic construct
  misc_feature 1..80: note = Artificially Synthesized Probe
  source 1..80: mol_type = other DNA
gaacaaatgtccttttaacagagatgaaataatagtgagaattgtgagactacagcaaaaatctgctcaggaggaaagag

SEQ ID NO: 37063 - DNA, 80 bp, synthetic construct
  misc_feature 1..80: note = Artificially Synthesized Probe
  source 1..80: mol_type = other DNA
tgctagagaggggagaacagatcaagtgagtgagaggagtgtggaaaagaaggtggaaaaaagctgatttcaaaactctg

SEQ ID NO: 37064 - DNA, 80 bp, synthetic construct
  misc_feature 1..80: note = Artificially Synthesized Probe
  source 1..80: mol_type = other DNA
aagaaaaagaaaacctttgagctcatgctgtggcccaggcaggatcccattcagctctattttaagaaaattaaaactga

SEQ ID NO: 37065 - DNA, 80 bp, synthetic construct
  misc_feature 1..80: note = Artificially Synthesized Probe
  source 1..80: mol_type = other DNA
caacaccaccatcacagcgaacacctcaggtctgactatgctgctctagtagtgtcttcagttatagataatgaaatgga

SEQ ID NO: 37066 - DNA, 80 bp, synthetic construct
  misc_feature 1..80: note = Artificially Synthesized Probe
  source 1..80: mol_type = other DNA
ctcctttctttaagttgcattaagtgtttgaatcctgagggtgatggaacagcaggaagatatttctctgcttagcagtg

SEQ ID NO: 37067 - DNA, 80 bp, synthetic construct
  misc_feature 1..80: note = Artificially Synthesized Probe
  source 1..80: mol_type = other DNA
cccactagtaagctaaactcactggctctaatttctcaccgatgactagtctcaaattagtaaaaaattactagctacac

SEQ ID NO: 37068 - DNA, 80 bp, synthetic construct
  misc_feature 1..80: note = Artificially Synthesized Probe
  source 1..80: mol_type = other DNA
gtaatccggttgtcattcatctctcctcccgcctcttgaatcattgcctccttatgttcttcacttaagtaatatggaac

SEQ ID NO: 37069 - DNA, 80 bp, synthetic construct
  misc_feature 1..80: note = Artificially Synthesized Probe
  source 1..80: mol_type = other DNA
attttacccaagttaaggaaagaatgagggcttctgatccctgagtaattaatgccccacatatatcaagaaacaggtgg

SEQ ID NO: 37070 - DNA, 80 bp, synthetic construct
  misc_feature 1..80: note = Artificially Synthesized Probe
  source 1..80: mol_type = other DNA
aaaaggaaggttatggtcatgttagtgagatcaagttggttttgtcagctaagctactgcttggaaagaggagggggtga

SEQ ID NO: 37071 - DNA, 80 bp, synthetic construct
  misc_feature 1..80: note = Artificially Synthesized Probe
  source 1..80: mol_type = other DNA
acaatgttgttctagatattatttaatcttactctctgccctttctctcttcctccctgcctctcttgttctccctctgt

SEQ ID NO: 37072 - DNA, 80 bp, synthetic construct
  misc_feature 1..80: note = Artificially Synthesized Probe
  source 1..80: mol_type = other DNA
cagacaaggaaaggaagagcaatcatgacagaccaatgataaaatgttctctctagacaatctattagatgaagactagg

SEQ ID NO: 37073 - DNA, 80 bp, synthetic construct
  misc_feature 1..80: note = Artificially Synthesized Probe
  source 1..80: mol_type = other DNA
agcgccatttgctgaaaatactatttattcccccactgaatagtcttgccattcttatcaaaaattagttgaccataatg

SEQ ID NO: 37074 - DNA, 80 bp, synthetic construct
  misc_feature 1..80: note = Artificially Synthesized Probe
  source 1..80: mol_type = other DNA
gtaaaaaggatagttgaaggctaaagaggctgcctaaatccttgtctcctcatacttctccaaaataatatatagctaca

SEQ ID NO: 37075 - DNA, 80 bp, synthetic construct
  misc_feature 1..80: note = Artificially Synthesized Probe
  source 1..80: mol_type = other DNA
ttgaatcctaggtaaaatgtggtgtatctttacaataactactgataattttttaaaattctaactatgacacatgcaac

SEQ ID NO: 37076 - DNA, 80 bp, synthetic construct
  misc_feature 1..80: note = Artificially Synthesized Probe
  source 1..80: mol_type = other DNA
agaagtgaagctgcacatcaaggagtaattacctggaatccccctcaaagatcatttcataattttaccctctgttatat

SEQ ID NO: 37077 - DNA, 80 bp, synthetic construct
  misc_feature 1..80: note = Artificially Synthesized Probe
  source 1..80: mol_type = other DNA
tatctaaattgtttgtagaaagtaacatcagtggagtatctcagagcagcctcaatgcctgggatagccctttctctatt

SEQ ID NO: 37078 - DNA, 80 bp, synthetic construct
  misc_feature 1..80: note = Artificially Synthesized Probe
  source 1..80: mol_type = other DNA
ttctccttcatctcaaacatatacctgtctcctctcccatgttacctaaggcaaagagagttgataggattatagtatcg

SEQ ID NO: 37079 - DNA, 80 bp, synthetic construct
  misc_feature 1..80: note = Artificially Synthesized Probe
  source 1..80: mol_type = other DNA
attgatattattattactgttgctgctatccagaaacatgttgccactctaatcatcctctttcctgatgtcacttggct

SEQ ID NO: 37080 - DNA, 80 bp, synthetic construct
  misc_feature 1..80: note = Artificially Synthesized Probe
  source 1..80: mol_type = other DNA
cttatacgaaatatgttttatcattacatgcctacatcattgcaaaagtgcaacgtaatggaagtgctgcaatgtgtcat

SEQ ID NO: 37081 - DNA, 80 bp, synthetic construct
  misc_feature 1..80: note = Artificially Synthesized Probe
  source 1..80: mol_type = other DNA
tttcaatggcatttggctcttgccactagtataatctctccatagtttccaggcccaaagttagatctgcttctggggca

SEQ ID NO: 37082 - DNA, 80 bp, synthetic construct
  misc_feature 1..80: note = Artificially Synthesized Probe
  source 1..80: mol_type = other DNA
tagctaaattattgcttctgtgttaagaagcacaacactttatgcacaacagattattactttaccaaatctaccttttc

SEQ ID NO: 37083 - DNA, 80 bp, synthetic construct
  misc_feature 1..80: note = Artificially Synthesized Probe
  source 1..80: mol_type = other DNA
tgaaatatggtattgatatctttcttttaatgaagtttctttacttattgttctttgtgttattctttgcctcttttatc

SEQ ID NO: 37084 - DNA, 80 bp, synthetic construct
  misc_feature 1..80: note = Artificially Synthesized Probe
  source 1..80: mol_type = other DNA
aaggagatcattcagtgagtagagacggtgttggcataggcgttggatgacatcattcttattaaatttggtataaaggt

SEQ ID NO: 37085 - DNA, 80 bp, synthetic construct
  misc_feature 1..80: note = Artificially Synthesized Probe
  source 1..80: mol_type = other DNA
atacttgccataccttcttattatgcttatttctgtctccactatcatgttttgtgttcactccttcatgagagagcagt

SEQ ID NO: 37086 - DNA, 80 bp, synthetic construct
  misc_feature 1..80: note = Artificially Synthesized Probe
  source 1..80: mol_type = other DNA
agctgcatgttacattccccacccacaattctgtttgccaggcaaccacttttaaccatttctatttttgggtctcctta

SEQ ID NO: 37087 - DNA, 80 bp, synthetic construct
  misc_feature 1..80: note = Artificially Synthesized Probe
  source 1..80: mol_type = other DNA
attagcaatgttgtctggtaaccagctaatattccacttttatcaggtttccaggtcaacggagccaaaaaattagccct

SEQ ID NO: 37088 - DNA, 80 bp, synthetic construct
  misc_feature 1..80: note = Artificially Synthesized Probe
  source 1..80: mol_type = other DNA
ctttttttggtctgttcccaagttttcctcccctggaaatgctaggtttctgtctttattcttggtcttacctgaatttt

SEQ ID NO: 37089 - DNA, 80 bp, synthetic construct
  misc_feature 1..80: note = Artificially Synthesized Probe
  source 1..80: mol_type = other DNA
ctaattttagtcctgtgcctcatcccttccctgtactgagcctgactttattctcagtctctcactgctttcatttaatt

SEQ ID NO: 37090 - DNA, 80 bp, synthetic construct
  misc_feature 1..80: note = Artificially Synthesized Probe
  source 1..80: mol_type = other DNA
ctcaagtttggataatttaatctatttgccctatgagtcaaagaaatgacagagcctgaattcaagctcaggtcttacag

SEQ ID NO: 37091 - DNA, 80 bp, synthetic construct
  misc_feature 1..80: note = Artificially Synthesized Probe
  source 1..80: mol_type = other DNA
ttttgtgaatagtgaataattagtacttactacttcccagccaccgtgctacgtgtttactgtgaatcaacacctttagc

SEQ ID NO: 37092 - DNA, 80 bp, synthetic construct
  misc_feature 1..80: note = Artificially Synthesized Probe
  source 1..80: mol_type = other DNA
ttgtgacatcaatagccctgcttgttgttctctacaaaatctatgatctacataagaaaagatcctggtaagagttgatt

SEQ ID NO: 37093 - DNA, 80 bp, synthetic construct
  misc_feature 1..80: note = Artificially Synthesized Probe
  source 1..80: mol_type = other DNA
gcaattctcatgtgcctcagcttcccaagtatctgggattacagacacacatcaccaggcccagctaatttttgtatttt

SEQ ID NO: 37094 - DNA, 80 bp, synthetic construct
  misc_feature 1..80: note = Artificially Synthesized Probe
  source 1..80: mol_type = other DNA
ctatcctctcctaactagaatgtaagctttgtgaaagcgtggaggcttttttcttattcactgctttatgcccagtacca

SEQ ID NO: 37095 - DNA, 80 bp, synthetic construct
  misc_feature 1..80: note = Artificially Synthesized Probe
  source 1..80: mol_type = other DNA
tgtttggtctgggatcccttctcttaagcatagaaaatggggaagaacattctagtagagagaacaatataaagcccaga

SEQ ID NO: 37096 - DNA, 80 bp, synthetic construct
  misc_feature 1..80: note = Artificially Synthesized Probe
  source 1..80: mol_type = other DNA
actcaaaacggtcattggtaagggggaaattatttttcctgaatctgctgtgatccaagaaatcgttgtttctttcagag

SEQ ID NO: 37097 - DNA, 80 bp, synthetic construct
  misc_feature 1..80: note = Artificially Synthesized Probe
  source 1..80: mol_type = other DNA
taaaaatatatacagactgaaaaaattctttttgtctccccaaatctgccattttcccagtgtcctcacctaccagaaat

SEQ ID NO: 37098 - DNA, 80 bp, synthetic construct
  misc_feature 1..80: note = Artificially Synthesized Probe
  source 1..80: mol_type = other DNA
gttggcaggatataaaatgttgaaatgtctagagcactcttgtaaattaccacagcatcgcagatgaagatgaaacctag

SEQ ID NO: 37099 - DNA, 80 bp, synthetic construct
  misc_feature 1..80: note = Artificially Synthesized Probe
  source 1..80: mol_type = other DNA
agtatatttcactgttttaacttcacaagaccttaatactcgaaacaaaactgaccttgggcagataggtggtgagtcat

SEQ ID NO: 37100 - DNA, 80 bp, synthetic construct
  misc_feature 1..80: note = Artificially Synthesized Probe
  source 1..80: mol_type = other DNA
tcagtggttgcctggagctgaggaggtcaaacagaaatggggagtggctgcaaataagaacaggctttcattttgtgatg

SEQ ID NO: 37101 - DNA, 80 bp, synthetic construct
  misc_feature 1..80: note = Artificially Synthesized Probe
  source 1..80: mol_type = other DNA
ttgtactaatttactttctcaccaacattgtctgagggttttctttccttcacatccttgcaagcattcattcttggcta

SEQ ID NO: 37102 - DNA, 80 bp, synthetic construct
  misc_feature 1..80: note = Artificially Synthesized Probe
  source 1..80: mol_type = other DNA
tgcatattctgggtacctgtatcaaaaatgagtccactgtagagttgtttcattgctctatgtatgtttttatgccagta

SEQ ID NO: 37103 - DNA, 80 bp, synthetic construct
  misc_feature 1..80: note = Artificially Synthesized Probe
  source 1..80: mol_type = other DNA
tgtctttgtctggttttggtatcagagtaatactggccttgcagaatgagtttggaagaattcctttctcttccattttt

SEQ ID NO: 37104 - DNA, 80 bp, synthetic construct
  misc_feature 1..80: note = Artificially Synthesized Probe
  source 1..80: mol_type = other DNA
aaatattgttagagctaaagagagagatagactccaatacaataatagttggagacttcaacactctactttcagcatta

SEQ ID NO: 37105 - DNA, 80 bp, synthetic construct
  misc_feature 1..80: note = Artificially Synthesized Probe
  source 1..80: mol_type = other DNA
attacactcaagcctgggctttgcagtgagactttatctcaaaaaaaaagataaaattgacaaacctttagtcagactaa

SEQ ID NO: 37106 - DNA, 80 bp, synthetic construct
  misc_feature 1..80: note = Artificially Synthesized Probe
  source 1..80: mol_type = other DNA
cccatgcaccccacttttatggtgtatgtttattttgggttttttttgcttgacagcatgcaagttcctagaaattttgg

SEQ ID NO: 37107 - DNA, 80 bp, synthetic construct
  misc_feature 1..80: note = Artificially Synthesized Probe
  source 1..80: mol_type = other DNA
aaagtggatgtttatggttatgttgtcaagctaaggcgacagagatgcctgatggttcaagtagaggtatgttctaacct

SEQ ID NO: 37108 - DNA, 80 bp, synthetic construct
  misc_feature 1..80: note = Artificially Synthesized Probe
  source 1..80: mol_type = other DNA
aaaataaagtacagtggaaagacagtgccaaactcagggaactaaaggtggcggttaaagaggattatcagaagtatacc

SEQ ID NO: 37109 - DNA, 80 bp, synthetic construct
  misc_feature 1..80: note = Artificially Synthesized Probe
  source 1..80: mol_type = other DNA
ggagaaacagaagtgaatttgtctgaattacatccatatctacataacatgaagaaaagggatccacccagtgagccgtc

SEQ ID NO: 37110 - DNA, 80 bp, synthetic construct
  misc_feature 1..80: note = Artificially Synthesized Probe
  source 1..80: mol_type = other DNA
tgcaagtggacatgggaagaaggatgagaggatgtgatccagatcacagatggaagctgtgaaattattccatttaagca

SEQ ID NO: 37111 - DNA, 80 bp, synthetic construct
  misc_feature 1..80: note = Artificially Synthesized Probe
  source 1..80: mol_type = other DNA
tgtaatatttggaatgaaacctacaaaggtggaatgatgaaagtggatgactgggaagtggagggaaagtcatgggaggt

SEQ ID NO: 37112 - DNA, 80 bp, synthetic construct
  misc_feature 1..80: note = Artificially Synthesized Probe
  source 1..80: mol_type = other DNA
ggaaagactgtaggcaggggtgtcttccagaagaaattggtatttaaactgatacctagagggtaagaaaagttattaga

SEQ ID NO: 37113 - DNA, 80 bp, synthetic construct
  misc_feature 1..80: note = Artificially Synthesized Probe
  source 1..80: mol_type = other DNA
ctgaagaaggagacatagtctgttacatatatatctttagtgcatactagccctgtcaaaaggactaaatgcctgagcaa

SEQ ID NO: 37114 - DNA, 80 bp, synthetic construct
  misc_feature 1..80: note = Artificially Synthesized Probe
  source 1..80: mol_type = other DNA
atcagatcagtgcatggttgacctagttaattttcataggagtccttatgaatgtagtttaaaatatggaattgatggtg

SEQ ID NO: 37115 - DNA, 80 bp, synthetic construct
  misc_feature 1..80: note = Artificially Synthesized Probe
  source 1..80: mol_type = other DNA
attattaggtgagtctgtgtcatatccccccacttttttaattaactgagaattcaaacaatgaaactttagtcatttat

SEQ ID NO: 37116 - DNA, 80 bp, synthetic construct
  misc_feature 1..80: note = Artificially Synthesized Probe
  source 1..80: mol_type = other DNA
cattttcacgctgttttcctcattttctcaagataaaagccaagatctttttgtgatatccagcaccctggacaatcacc

SEQ ID NO: 37117 - DNA, 80 bp, synthetic construct
  misc_feature 1..80: note = Artificially Synthesized Probe
  source 1..80: mol_type = other DNA
gggacctgagttattgaaagggtcatgaataacattgactcatgccagccataaatattgaagaggtcatgataagcatg

SEQ ID NO: 37118 - DNA, 80 bp, synthetic construct
  misc_feature 1..80: note = Artificially Synthesized Probe
  source 1..80: mol_type = other DNA
ctcggttcacatgttgtcttatctagttatcctcatatatgaaacacataaccacagtaaaaacttcttatggagtcggt

SEQ ID NO: 37119 - DNA, 80 bp, synthetic construct
  misc_feature 1..80: note = Artificially Synthesized Probe
  source 1..80: mol_type = other DNA
attacttttctactgatgcagaagtgaaaacatttgtgaaacgtggtagagaggcagaagagtgaagaagagcatgtgtt

SEQ ID NO: 37120 - DNA, 80 bp, synthetic construct
  misc_feature 1..80: note = Artificially Synthesized Probe
  source 1..80: mol_type = other DNA
ggagcctaaacaaataacatttattatggttcagtagtctaatgatatgctggaatgttctgctggtgccctcaggctca

SEQ ID NO: 37121 - DNA, 80 bp, synthetic construct
  misc_feature 1..80: note = Artificially Synthesized Probe
  source 1..80: mol_type = other DNA
ctaggagcaatatcaattcctatatgacgtcattgccagcacctaccctgctcagaatggacaagtaaagaaaaacaacc

SEQ ID NO: 37122 - DNA, 80 bp, synthetic construct
  misc_feature 1..80: note = Artificially Synthesized Probe
  source 1..80: mol_type = other DNA
cttatcatgctgtctttacatggggttttcaattttgcatgctcgattattccctgtacaatatttaaaatttattgctt

SEQ ID NO: 37123 - DNA, 80 bp, synthetic construct
  misc_feature 1..80: note = Artificially Synthesized Probe
  source 1..80: mol_type = other DNA
ctgagattttgagtctctgcctcgtcccttaccccagggatacaatgtttcctagttagagagacatggatcttaaattt

SEQ ID NO: 37124 - DNA, 80 bp, synthetic construct
  misc_feature 1..80: note = Artificially Synthesized Probe
  source 1..80: mol_type = other DNA
aagattatcacatcattttacagtccatgagatatggacaaattttaagtgaaaagtcatttcaaattcgtaagtaatgt

SEQ ID NO: 37125 - DNA, 80 bp, synthetic construct
  misc_feature 1..80: note = Artificially Synthesized Probe
  source 1..80: mol_type = other DNA
tggacttagcggagtaatggtagaaaccaacctaataactttattttcttcccagcacttcctttaaacccaagtgggtt

SEQ ID NO: 37126 - DNA, 80 bp, synthetic construct
  misc_feature 1..80: note = Artificially Synthesized Probe
  source 1..80: mol_type = other DNA
tgggcagcattaaaaaataactgttatagaattaacaatgacagtaagccatggaatatagcccagcaacattgtaagtt

SEQ ID NO: 37127 - DNA, 80 bp, synthetic construct
  misc_feature 1..80: note = Artificially Synthesized Probe
  source 1..80: mol_type = other DNA
tgacttttatttcctggcactcaaagataaatatgttctccttgagatatccttatctatagtgaactaaggcagatcct

SEQ ID NO: 37128 - DNA, 80 bp, synthetic construct
  misc_feature 1..80: note = Artificially Synthesized Probe
  source 1..80: mol_type = other DNA
cattccattcctggcttcaaactggggtttggtactcaacaggaacgtaatgaatgaaagattaatagtctctttctttc

SEQ ID NO: 37129 - DNA, 80 bp, synthetic construct
  misc_feature 1..80: note = Artificially Synthesized Probe
  source 1..80: mol_type = other DNA
aggcttattgcgagatttgcaattcgcctgaagacatatggctaatgagttaatgaaagtcaactctgtctcttgctgct

SEQ ID NO: 37130 - DNA, 80 bp, synthetic construct
  misc_feature 1..80: note = Artificially Synthesized Probe
  source 1..80: mol_type = other DNA
tacagaaagaaggtcttcttacatgggcagatggatcatcttttggccttaagaaaaatgaaatattttctttttcattg

SEQ ID NO: 37131 - DNA, 80 bp, synthetic construct
  misc_feature 1..80: note = Artificially Synthesized Probe
  source 1..80: mol_type = other DNA
agtgcctacctcataggggatgatcaataaatttttgtggagctgtatttccgatatgtgctgagagcaggaaagggaca

SEQ ID NO: 37132 - DNA, 80 bp, synthetic construct
  misc_feature 1..80: note = Artificially Synthesized Probe
  source 1..80: mol_type = other DNA
tctctgccctctagtctgacaaggcagaagaggtaagagacatatataatgtatgaccattaaatgccatgcacactgtt

SEQ ID NO: 37133 - DNA, 80 bp, synthetic construct
  misc_feature 1..80: note = Artificially Synthesized Probe
  source 1..80: mol_type = other DNA
ctttaaacattattccaatctgcatttttttctaccaaagtccctagaagacatctttttttgtcatagccttgggtgga

SEQ ID NO: 37134 - DNA, 80 bp, synthetic construct
  misc_feature 1..80: note = Artificially Synthesized Probe
  source 1..80: mol_type = other DNA
taagttaacagtgatagtgccgcattataattgccattagagtagttatgctgtggatactatgggaacatagagaagga

SEQ ID NO: 37135 - DNA, 80 bp, synthetic construct
  misc_feature 1..80: note = Artificially Synthesized Probe
  source 1..80: mol_type = other DNA
ataattttacataaataattaacttaaacatcagctacagttttgtgaaattaagatatgggatgcagactaagggttcc

SEQ ID NO: 37136 - DNA, 80 bp, synthetic construct
  misc_feature 1..80: note = Artificially Synthesized Probe
  source 1..80: mol_type = other DNA
acttggagcaaacgcctttgagaacttgcatgaactggctttctatttgcctctgacctcatcttattctctccttcatt

SEQ ID NO: 37137 - DNA, 80 bp, synthetic construct
  misc_feature 1..80: note = Artificially Synthesized Probe
  source 1..80: mol_type = other DNA
gaccatataattcttcagtgggaaccttcacaagatggccatgagatctacattcagattaaatccatatcagatccaag

SEQ ID NO: 37138 - DNA, 80 bp, synthetic construct
  misc_feature 1..80: note = Artificially Synthesized Probe
  source 1..80: mol_type = other DNA
atataattcccaggacagtgtctctggtcattcagggcttctgtaattcatttccaaaattttccccatcatggacctag

SEQ ID NO: 37139 - DNA, 80 bp, synthetic construct
  misc_feature 1..80: note = Artificially Synthesized Probe
  source 1..80: mol_type = other DNA
agctatggccatgcatagtgggaagtaaagccatttcagcagtctgtgtgatctctctttgttggaggaattaactatac

SEQ ID NO: 37140 - DNA, 80 bp, synthetic construct
  misc_feature 1..80: note = Artificially Synthesized Probe
  source 1..80: mol_type = other DNA
tttaccatcccaagatcttttaattcctgcttaagccatacttggaagctttcatagatcattgtccacagattcagatg

SEQ ID NO: 37141 - DNA, 80 bp, synthetic construct
  misc_feature 1..80: note = Artificially Synthesized Probe
  source 1..80: mol_type = other DNA
caatttcttatgtaatcagcacagtgactctgcaatgtagatgctagtctccttcccattttagagaagaagaccaaggc

SEQ ID NO: 37142 - DNA, 80 bp, synthetic construct
  misc_feature 1..80: note = Artificially Synthesized Probe
  source 1..80: mol_type = other DNA
gaaggaggggcaaatgtgaccatggctttacaccatggtaataaaataactgttgacaatttagctccagacacagaata

SEQ ID NO: 37143 - DNA, 80 bp, synthetic construct
  misc_feature 1..80: note = Artificially Synthesized Probe
  source 1..80: mol_type = other DNA
taacatgtccagtgccctcattatttgctcttcctgtctctatatatatccacctaggtcattaggctaccatgtatctt

SEQ ID NO: 37144 - DNA, 80 bp, synthetic construct
  misc_feature 1..80: note = Artificially Synthesized Probe
  source 1..80: mol_type = other DNA
gtttgttgtgtgtttggataggtctggaagcaccactgaatatccatgaaggcaaagttacagattcttctatagacatt

SEQ ID NO: 37145 - DNA, 80 bp, synthetic construct
  misc_feature 1..80: note = Artificially Synthesized Probe
  source 1..80: mol_type = other DNA
agcattgctaactgcttatggtctggccagagtttccatttgtgatttaattaccccattttccaatgaagtgccacctt

SEQ ID NO: 37146 - DNA, 80 bp, synthetic construct
  misc_feature 1..80: note = Artificially Synthesized Probe
  source 1..80: mol_type = other DNA
tcttaaatgatatagccccaagtgcagctgaatttatgaaacatagcagagacccaaatgcagtaactgttagctggcct

SEQ ID NO: 37147 - DNA, 80 bp, synthetic construct
  misc_feature 1..80: note = Artificially Synthesized Probe
  source 1..80: mol_type = other DNA
gttctcacctaggaaatgagaataattattcctgcctaggtaaaataacctgttactaaagtgaaatgtgaaactcttcc

SEQ ID NO: 37148 - DNA, 80 bp, synthetic construct
  misc_feature 1..80: note = Artificially Synthesized Probe
  source 1..80: mol_type = other DNA
tatatatcagtgaaagcttagttgctgcttagatttgggtgttgttgttctcattgtcaccatcatcatcaccattgtca

SEQ ID NO: 37149 - DNA, 80 bp, synthetic construct
  misc_feature 1..80: note = Artificially Synthesized Probe
  source 1..80: mol_type = other DNA
tagatatagagagcctagacttggggtaaatagcttgcacatggtcacacagtgctaaaattgactggataagcctaggt

SEQ ID NO: 37150 - DNA, 80 bp, synthetic construct
  misc_feature 1..80: note = Artificially Synthesized Probe
  source 1..80: mol_type = other DNA
agtctgtgggagcaataaacatttccagtggtagtctgtgggagcaataaacatttccagtggtaggagatggtaacttt

SEQ ID NO: 37151 - DNA, 80 bp, synthetic construct
  misc_feature 1..80: note = Artificially Synthesized Probe
  source 1..80: mol_type = other DNA
taaagaactagaggaagttagatcaagcctcttaatatctttatccttgggaagagcagataactctctttccctaaaac

SEQ ID NO: 37152 - DNA, 80 bp, synthetic construct
  misc_feature 1..80: note = Artificially Synthesized Probe
  source 1..80: mol_type = other DNA
ctcagaattgtaatggaactgaaggcatagtctagtccaagcatgaaaataaacattggcttgcatatttcagacccaaa

SEQ ID NO: 37153 - DNA, 80 bp, synthetic construct
  misc_feature 1..80: note = Artificially Synthesized Probe
  source 1..80: mol_type = other DNA
acagagagtgactattgtcatctggattaaatgataaagtggaagaatggcaaaaattggcccatcggtgtccggctcaa

SEQ ID NO: 37154 - DNA, 80 bp, synthetic construct
  misc_feature 1..80: note = Artificially Synthesized Probe
  source 1..80: mol_type = other DNA
tacctctgaaacagcttctgaatgtgttcacttttctatgtctcctctgcattcctcttgtcatagtcactatcctttct

SEQ ID NO: 37155 - DNA, 80 bp, synthetic construct
  misc_feature 1..80: note = Artificially Synthesized Probe
  source 1..80: mol_type = other DNA
gtgataggggcatcctgaataataaatcactcatgaaaaattccatcctttccagaatgattcaattcattcctatattc

SEQ ID NO: 37156 - DNA, 80 bp, synthetic construct
  misc_feature 1..80: note = Artificially Synthesized Probe
  source 1..80: mol_type = other DNA
caataagcaatggtatgcttctagacctcaggattatcttcttcattaatgaagcacttttcccacaagacagtgataac

SEQ ID NO: 37157 - DNA, 80 bp, synthetic construct
  misc_feature 1..80: note = Artificially Synthesized Probe
  source 1..80: mol_type = other DNA
cccattgattttcttctttcccttcctatagtcttctgtttacatggagttgagagagtaggtcgtaggtactatccata

SEQ ID NO: 37158 - DNA, 80 bp, synthetic construct
  misc_feature 1..80: note = Artificially Synthesized Probe
  source 1..80: mol_type = other DNA
atataagcacaattcattttctactgacctgagggttgataaacagagtaattctgtttctctttcctgaagtttgtaaa

SEQ ID NO: 37159 - DNA, 80 bp, synthetic construct
  misc_feature 1..80: note = Artificially Synthesized Probe
  source 1..80: mol_type = other DNA
aaccttggaggatgtggcatgtttaccagggttgttgcaggtgtgcaaattctctttgatatttaagaaattcacatttc

SEQ ID NO: 37160 - DNA, 80 bp, synthetic construct
  misc_feature 1..80: note = Artificially Synthesized Probe
  source 1..80: mol_type = other DNA
cccagaggtagggaacagcccatgcaaaactatggaggtgtaaatgaatatgctgtatttgtggaactataagcaattca

SEQ ID NO: 37161 - DNA, 80 bp, synthetic construct
  misc_feature 1..80: note = Artificially Synthesized Probe
  source 1..80: mol_type = other DNA
gccacaatttttctactttacaatgatgcagaagcaatatgcattcggtacactcctcaacttacattggggttacatct

SEQ ID NO: 37162 - DNA, 80 bp, synthetic construct
  misc_feature 1..80: note = Artificially Synthesized Probe
  source 1..80: mol_type = other DNA
gtgtgagtggcaggatttgctcccttagagaaaattttgtcagaggaaaaagtgaccaaggtggtatcaatatcaggaaa

SEQ ID NO: 37163 - DNA, 80 bp, synthetic construct
  misc_feature 1..80: note = Artificially Synthesized Probe
  source 1..80: mol_type = other DNA
atagcctatttctaaaatatgaggaagctacaggcacttgataagtatacattgccctggtatgggacatatttagactg

SEQ ID NO: 37164 - DNA, 80 bp, synthetic construct
  misc_feature 1..80: note = Artificially Synthesized Probe
  source 1..80: mol_type = other DNA
tgtggctactagaaaattcaaaactgcatgtgtggctcacgttatagttttattggacattgatggtttagagaatcaca

SEQ ID NO: 37165 - DNA, 80 bp, synthetic construct
  misc_feature 1..80: note = Artificially Synthesized Probe
  source 1..80: mol_type = other DNA
tttctttgtcttggtgagacatagttcattcctaagcaagggttcttcagtccaggaaaccacatcccatttcactgcca

SEQ ID NO: 37166 - DNA, 80 bp, synthetic construct
  misc_feature 1..80: note = Artificially Synthesized Probe
  source 1..80: mol_type = other DNA
gaactttatgtggaaaactcccttcgaggaggtacaggcagcatgaacaaaatttttgaaaaagtggaagcaaaggtaga

SEQ ID NO: 37167 - DNA, 80 bp, synthetic construct
  misc_feature 1..80: note = Artificially Synthesized Probe
  source 1..80: mol_type = other DNA
caatatttccacacattccttttctctgcactggagcctaccctctggtcatgtggaaaggtatcaagtggatcttgttc

SEQ ID NO: 37168 - DNA, 80 bp, synthetic construct
  misc_feature 1..80: note = Artificially Synthesized Probe
  source 1..80: mol_type = other DNA
aagaattttaatgcaactatttgtttgtggtgttctaggttgatgtttccaatgtcgttcctggtactaggtacgatata

SEQ ID NO: 37169 - DNA, 80 bp, synthetic construct
  misc_feature 1..80: note = Artificially Synthesized Probe
  source 1..80: mol_type = other DNA
gtgactgacaacgttcacagtcatggcctcacacccacctgagattttaaaacttggtaaaatgttattgtgtcttttca

SEQ ID NO: 37170 - DNA, 80 bp, synthetic construct
  misc_feature 1..80: note = Artificially Synthesized Probe
  source 1..80: mol_type = other DNA
ctcctaccctccccatttttgaaatcccgtgtttattatttccattgttatgcccatgtgtactcatagctcccacttgt

SEQ ID NO: 37171 - DNA, 80 bp, synthetic construct
  misc_feature 1..80: note = Artificially Synthesized Probe
  source 1..80: mol_type = other DNA
taagtccttaatccagaatgtgctaatttttgtatatgctgagagctaaggatccagtttcattctcttggatatggcca

SEQ ID NO: 37172 - DNA, 80 bp, synthetic construct
  misc_feature 1..80: note = Artificially Synthesized Probe
  source 1..80: mol_type = other DNA
atgtgccactttttcttaatccagtctatcattgttggacatttgggttggttccaagtctttgctattgtgaatagtgc

SEQ ID NO: 37173 - DNA, 80 bp, synthetic construct
  misc_feature 1..80: note = Artificially Synthesized Probe
  source 1..80: mol_type = other DNA
tgaatggtaatgcctaggtttacttctagggtttttatggttttaggtctaacatttaagtctttaatccatcttgaatt

SEQ ID NO: 37174 - DNA, 80 bp, synthetic construct
  misc_feature 1..80: note = Artificially Synthesized Probe
  source 1..80: mol_type = other DNA
gagtggtgagagagggcatccctgtcttgtgccagttttcaaagggaatgcttctggtttttgcccattcagtatgatat

SEQ ID NO: 37175 - DNA, 80 bp, synthetic construct
  misc_feature 1..80: note = Artificially Synthesized Probe
  source 1..80: mol_type = other DNA
ttctgctctgattttagttatttcttgccttctgctagcttatgaatgtgtttgctcttgcttttctagttcttttaatt

SEQ ID NO: 37176 - DNA, 80 bp, synthetic construct
  misc_feature 1..80: note = Artificially Synthesized Probe
  source 1..80: mol_type = other DNA
gaagaaactgcatcaactaacgagcaaaataaaccagctaacatcatactgacaggttcaaattcacacataacaatatt

SEQ ID NO: 37177 - DNA, 80 bp, synthetic construct
  misc_feature 1..80: note = Artificially Synthesized Probe
  source 1..80: mol_type = other DNA
tggtttgaatttcctcctgtagctcggagtagtttgatcgtccgaagccttcttctctcaactcgtgaaagtcattctct

SEQ ID NO: 37178 - DNA, 80 bp, synthetic construct
  misc_feature 1..80: note = Artificially Synthesized Probe
  source 1..80: mol_type = other DNA
tgttcaataggattggtgagagtagacatcctacttttgttgcatttcttagggataatcctttaaacttttctccgttt

SEQ ID NO: 37179 - DNA, 80 bp, synthetic construct
  misc_feature 1..80: note = Artificially Synthesized Probe
  source 1..80: mol_type = other DNA
tggtttgaacatttctaaagtgccacttttgctaagaatcgtgaactcaatgtaattactttcaacaaatatttcttgaa

SEQ ID NO: 37180 - DNA, 80 bp, synthetic construct
  misc_feature 1..80: note = Artificially Synthesized Probe
  source 1..80: mol_type = other DNA
tcatctcacactttataaatcattcttgtgacctttactctgttcaaataaatgttagccattgcagaattccaaagggt

SEQ ID NO: 37181 - DNA, 80 bp, synthetic construct
  misc_feature 1..80: note = Artificially Synthesized Probe
  source 1..80: mol_type = other DNA
tgtttgaacacaatccttttggtctgttctaggttgctgctgaaaacagtgctggcattggagtgtttagtgatccattt

SEQ ID NO: 37182 - DNA, 80 bp, synthetic construct
  misc_feature 1..80: note = Artificially Synthesized Probe
  source 1..80: mol_type = other DNA
ttagaatgcagctgtcctgaagtcccttaattcctaccttatatcattcatatagacctccttccaaagatctaactttc

SEQ ID NO: 37183 - DNA, 80 bp, synthetic construct
  misc_feature 1..80: note = Artificially Synthesized Probe
  source 1..80: mol_type = other DNA
tctcacagttgaggcctacaacgcttcagcagttaagctgatttggtatttacctcggcaaccaaatggcaaaattacca

SEQ ID NO: 37184 - DNA, 80 bp, synthetic construct
  misc_feature 1..80: note = Artificially Synthesized Probe
  source 1..80: mol_type = other DNA
ttctttttcaacttatgatatagttctaatacacgcacacacctaacgtgtgagctagtggcatactactactttttagt

SEQ ID NO: 37185 - DNA, 80 bp, synthetic construct
  misc_feature 1..80: note = Artificially Synthesized Probe
  source 1..80: mol_type = other DNA
agttatcagatacaagcagtagctaaaatatatacctacttatatcccatttgcactgcagtttcctcatctgaaaaata

SEQ ID NO: 37186 - DNA, 80 bp, synthetic construct
  misc_feature 1..80: note = Artificially Synthesized Probe
  source 1..80: mol_type = other DNA
cgtgcagtgcgccgtgagagagccgaagcagggcgaggcattgcctcacttggggagcacaaggggtcagggagttccct

SEQ ID NO: 37187 - DNA, 80 bp, synthetic construct
  misc_feature 1..80: note = Artificially Synthesized Probe
  source 1..80: mol_type = other DNA
gaagcatcaggagccaatgcaatcaactgggagaaagggtatcagcgatggaagatgaaatgaatgaaatgaagcaagaa

SEQ ID NO: 37188 - DNA, 80 bp, synthetic construct; identical to SEQ ID NO: 37176
  misc_feature 1..80: note = Artificially Synthesized Probe
  source 1..80: mol_type = other DNA

SEQ ID NO: 37189 - DNA, 80 bp, synthetic construct
  misc_feature 1..80: note = Artificially Synthesized Probe
  source 1..80: mol_type = other DNA
atagatgcaataaaaaatgataaaggggatattaccactgatcccacagaaatacaaactaccatcagagaatactacaa

SEQ ID NO: 37190 - DNA, 80 bp, synthetic construct
  misc_feature 1..80: note = Artificially Synthesized Probe
  source 1..80: mol_type = other DNA
aaccccatcgtctcagcccaaaatctccttaagctgataagcaatttcagcaaagtctcaggatacaaaatcaatgtaca

SEQ ID NO: 37191 - DNA, 80 bp, synthetic construct
  misc_feature 1..80: note = Artificially Synthesized Probe
  source 1..80: mol_type = other DNA
gatcccttccttataccttatacaaaaatcaattcaagatagattaaagacttaaatgttagacctaaaaccataaaaac

SEQ ID NO: 37192 - DNA, 80 bp, synthetic construct
  misc_feature 1..80: note = Artificially Synthesized Probe
  source 1..80: mol_type = other DNA
aaaacaatgatttcataagggtcatacaaggtgaaatttgctagacaataattttgttttgaaaaatatttggaattgtt

SEQ ID NO: 37193 - DNA, 80 bp, synthetic construct
  misc_feature 1..80: note = Artificially Synthesized Probe
  source 1..80: mol_type = other DNA
attttagtgcctgaaggaccaccacaaaactgcgtaacaggcaacatcacaggaaagtccttttcaattttatgggaccc

SEQ ID NO: 37194 - DNA, 80 bp, synthetic construct
  misc_feature 1..80: note = Artificially Synthesized Probe
  source 1..80: mol_type = other DNA
gctacatcttttctgtctgacattattgttcaatacttggctgaagtactctttcatttgtaaggctggctgataaatca

SEQ ID NO: 37195 - DNA, 80 bp, synthetic construct
  misc_feature 1..80: note = Artificially Synthesized Probe
  source 1..80: mol_type = other DNA
ggagtgaagatagggcagaaggtattagaggtctgagcagagaagagtaagtgtaaaataatcttctagaagagtagagt

SEQ ID NO: 37196 - DNA, 80 bp, synthetic construct
  misc_feature 1..80: note = Artificially Synthesized Probe
  source 1..80: mol_type = other DNA
ttctcaggaaagagccagtttgtagttagagcaagaaggtaaaggaaacatttaaagcaaagtcgaagatttaaagtatt

SEQ ID NO: 37197 - DNA, 80 bp, synthetic construct
  misc_feature 1..80: note = Artificially Synthesized Probe
  source 1..80: mol_type = other DNA
atagcatgcttcataataaaagggacccaagatcaggtaaggttaggaaatatcatatgtagtattggcctgttagagat

SEQ ID NO: 37198 - DNA, 80 bp, synthetic construct
  misc_feature 1..80: note = Artificially Synthesized Probe
  source 1..80: mol_type = other DNA
acacacacacacacaggtcatacattcatcgttcaagcgtttgaccattagagggcagtaactattaggaaattttgtac

SEQ ID NO: 37199 - DNA, 80 bp, synthetic construct
  misc_feature 1..80: note = Artificially Synthesized Probe
  source 1..80: mol_type = other DNA
gggatagttcagccacaggagctgcctcaatggaatactctggcaaatgcagtaaatgtagctttctacttctgacacca

SEQ ID NO: 37200 - DNA, 80 bp, synthetic construct
  misc_feature 1..80: note = Artificially Synthesized Probe
  source 1..80: mol_type = other DNA
tttgcaggaaaataactgagagcctgccaactttgtgttttcaggatttgcaatggctttaatttttactacttgttttt

SEQ ID NO: 37201 - DNA, 80 bp, synthetic construct
  misc_feature 1..80: note = Artificially Synthesized Probe
  source 1..80: mol_type = other DNA
ttgagattctacatcagttcaaaataaatggaaaaagtgccagatctcctctgacttaagttatgcaatactggctattg

SEQ ID NO: 37202 - DNA, 80 bp, synthetic construct
  misc_feature 1..80: note = Artificially Synthesized Probe
  source 1..80: mol_type = other DNA
ttgaactgtaaataaaaatgatcaaaagcccaggggatatttgttttttgcccgttactcctgtgaaactgggaagttcc

SEQ ID NO: 37203 - DNA, 80 bp, synthetic construct
  misc_feature 1..80: note = Artificially Synthesized Probe
  source 1..80: mol_type = other DNA
tgcctcactcgggaagcgcaaggggtcagggagttccctttccccttgtcaaagaaaggggtgatggacggcacctggaa

SEQ ID NO: 37204 - DNA, 80 bp, synthetic construct
  misc_feature 1..80: note = Artificially Synthesized Probe
  source 1..80: mol_type = other DNA
gtgtacctgaaagtgacggggagaatgcaaccaagttggaaaacactctgcaggatattatccaggagaacttccccaat

SEQ ID NO: 37205 - DNA, 80 bp, synthetic construct
  misc_feature 1..80: note = Artificially Synthesized Probe
  source 1..80: mol_type = other DNA
aggaaacccatctcacgtgcagagacacacataggctcaaaataaaaggatggaggaagatctaccaagcaaatggagaa

SEQ ID NO: 37206 - DNA, 80 bp, synthetic construct
  misc_feature 1..80: note = Artificially Synthesized Probe
  source 1..80: mol_type = other DNA
gagctggttttttgaaaggatcaacaaaatacatagaccactagcaagactaataaagaaaaaaagagagaagaatcaaa

SEQ ID NO: 37207 - DNA, 80 bp, synthetic construct
  misc_feature 1..80: note = Artificially Synthesized Probe
  source 1..80: mol_type = other DNA
aaagagaataaaatacctaggaatccaacttacaagggatgtgaaggacgtcttcaaggagaactacaaaccgctgctca

SEQ ID NO: 37208 - DNA, 80 bp, synthetic construct
  misc_feature 1..80: note = Artificially Synthesized Probe
  source 1..80: mol_type = other DNA
gacatttatgcagccaaaagacacatgaaaaaatgcttatcatcactggccatcagagaaatgcaaatcaaaaccacaat

SEQ ID NO: 37209 - DNA, 80 bp, synthetic construct
  misc_feature 1..80: note = Artificially Synthesized Probe
  source 1..80: mol_type = other DNA
taggtacttctcctaatgctatccctcccctagccccccacccaccgacaggccccggtgtatgatgttcctctccctgt

SEQ ID NO: 37210 - DNA, 80 bp, synthetic construct
  misc_feature 1..80: note = Artificially Synthesized Probe
  source 1..80: mol_type = other DNA
tctttcttagttccaggggcagtgtttgatttacaacttgcagaggtagaatccacgcaagtaagaattacttggaagaa

SEQ ID NO: 37211 - DNA, 80 bp, synthetic construct
  misc_feature 1..80: note = Artificially Synthesized Probe
  source 1..80: mol_type = other DNA
ggcattcaaagaataaacttccttaggaccagtgcagcaatcactgggccttaaagacaaacacgatagttattcagcac

SEQ ID NO: 37212 - DNA, 80 bp, synthetic construct
  misc_feature 1..80: note = Artificially Synthesized Probe
  source 1..80: mol_type = other DNA
ggatcatccaccttagttgctacccaatattacttcccttatactctctcaatgaaaggagacattatgcttctctttac

SEQ ID NO: 37213 - DNA, 80 bp, synthetic construct
  misc_feature 1..80: note = Artificially Synthesized Probe
  source 1..80: mol_type = other DNA
gtcttggtacctgggtttagaattttctaatccctctgactggacataacacaaatctctgacctcaaggtcattgtcta

SEQ ID NO: 37214 - DNA, 80 bp, synthetic construct
  misc_feature 1..80: note = Artificially Synthesized Probe
  source 1..80: mol_type = other DNA
cttggctggagaatccccttagtgccttacagttgtttttttttttgtcccatgtggcctttttcaacatggccatttac

SEQ ID NO: 37215 - DNA, 80 bp, synthetic construct
  misc_feature 1..80: note = Artificially Synthesized Probe
  source 1..80: mol_type = other DNA
gaaatacctgtcttttaattttcatcagttcgtcctaagtctcctctctagaccaacacagtagattccagtggttatga

SEQ ID NO: 37216 - DNA, 80 bp, synthetic construct
  misc_feature 1..80: note = Artificially Synthesized Probe
  source 1..80: mol_type = other DNA
acagtcagatcccatccagtacttgttcaattagaaacctgagacatttttctccaacagacatattgctgcctagtatt

SEQ ID NO: 37217 - DNA, 80 bp, synthetic construct
  misc_feature 1..80: note = Artificially Synthesized Probe
  source 1..80: mol_type = other DNA
cgaatttttaggtgttgcaatggacttttttccctcctatttctctcatttctactgctgcttctctctgccccttccca

SEQ ID NO: 37218 - DNA, 80 bp, synthetic construct
  misc_feature 1..80: note = Artificially Synthesized Probe
  source 1..80: mol_type = other DNA
ttgccattgtagatagttaactgaaatgccataaaatttcttgctttactgaactttttcctgagcacctactttctttt

SEQ ID NO: 37219 - DNA, 80 bp, synthetic construct
  misc_feature 1..80: note = Artificially Synthesized Probe
  source 1..80: mol_type = other DNA
tctactgtattcatccataatctgttcctgatgttttcacctcagtgtttgccattttggtgaacttgacatgtgtgaat

SEQ ID NO: 37220 - DNA, 80 bp, synthetic construct
  misc_feature 1..80: note = Artificially Synthesized Probe
  source 1..80: mol_type = other DNA
catagacaatcagttattacagttgccaaagcaggtgtgatgggaagggattaacatatcttcaaatcatttacaggcct

SEQ ID NO: 37221 - DNA, 80 bp, synthetic construct
  misc_feature 1..80: note = Artificially Synthesized Probe
  source 1..80: mol_type = other DNA
tctgggatatttatttgtcagttatccaagcatgcttgctttcaagaattatttggtttactgaatgtatgaacatatgg

SEQ ID NO: 37222 - DNA, 80 bp, synthetic construct
  misc_feature 1..80: note = Artificially Synthesized Probe
  source 1..80: mol_type = other DNA
ccagaatatcccaatggaaaaataactcactatacgatttatgcaatggaattggatacaaacagagcattccagataac

SEQ ID NO: 37223 - DNA, 80 bp, synthetic construct
  misc_feature 1..80: note = Artificially Synthesized Probe
  source 1..80: mol_type = other DNA
aggaacttaagacctcacaccctctataacatttctgtaaggtcttacaccagatttggtcatggcaatcaggtatcttc

SEQ ID NO: 37224 - DNA, 80 bp, synthetic construct
  misc_feature 1..80: note = Artificially Synthesized Probe
  source 1..80: mol_type = other DNA
attaaattctcataagaagcacacaacatagatcccttgcatgggcaattcacaatagagtttgcgctccaatgaaaatc

SEQ ID NO: 37225 - DNA, 80 bp, synthetic construct
  misc_feature 1..80: note = Artificially Synthesized Probe
  source 1..80: mol_type = other DNA
tggattaaggaaatgaaacaagcatatttttagcacctattaagggtcacgggccctgttgataggtttcacagaaactg

SEQ ID NO: 37226 - DNA, 80 bp, synthetic construct
  misc_feature 1..80: note = Artificially Synthesized Probe
  source 1..80: mol_type = other DNA
gtcttagaaaacatgcagagccctttattttttaggtgagaagacctaggaccatttgggtaaaaggactcacaagttat

SEQ ID NO: 37227 - DNA, 80 bp, synthetic construct
  misc_feature 1..80: note = Artificially Synthesized Probe
  source 1..80: mol_type = other DNA
cctttcctttttaagacacaaccatctttactgtaagcctttaacaaaacaccttgtctgatttggggcaacaaccatga

SEQ ID NO: 37228 - DNA, 80 bp, synthetic construct
  misc_feature 1..80: note = Artificially Synthesized Probe
  source 1..80: mol_type = other DNA
tttgagatggaggactgaggaaagacctcactgagaggttatatttgcccagtgatattaatgaggtacaggattgaata

SEQ ID NO: 37229 - DNA, 80 bp, synthetic construct
  misc_feature 1..80: note = Artificially Synthesized Probe
  source 1..80: mol_type = other DNA
tggggcatacaattgattagtgtttggcaagaagggaggtcattggtgacttcacaggagtagattttacagaaaaaata

SEQ ID NO: 37230 - DNA, 80 bp, synthetic construct
  misc_feature 1..80: note = Artificially Synthesized Probe
  source 1..80: mol_type = other DNA
agaagtgacagaggtattaccagttgtctgtcttaaagaggggtagcacgtgatggtatctaatggaatggggcttcaaa

SEQ ID NO: 37231 - DNA, 80 bp, synthetic construct
  misc_feature 1..80: note = Artificially Synthesized Probe
  source 1..80: mol_type = other DNA
aaccctccaagttaattatttatgttattgttctatgtactcaatttttaaaccattatcttggccactctgatctttca

SEQ ID NO: 37232 - DNA, 80 bp, synthetic construct
  misc_feature 1..80: note = Artificially Synthesized Probe
  source 1..80: mol_type = other DNA
ttatttcttttctatctctccacccagaggagtggcaacagagaaagaaggtttcctttctgtcctctctgcatggtaga

SEQ ID NO: 37233 - DNA, 80 bp, synthetic construct
  misc_feature 1..80: note = Artificially Synthesized Probe
  source 1..80: mol_type = other DNA
tgttagatacagaaaactagtgttttacttaatgatatcccatattcttgggagatggttttgctgccaggtcataatat

SEQ ID NO: 37234 - DNA, 80 bp, synthetic construct
  misc_feature 1..80: note = Artificially Synthesized Probe
  source 1..80: mol_type = other DNA
gtgaaggagttcggagtgctcccataagtatactgacggaggaagatggtaaatataatagtggatattgatatactttg

SEQ ID NO: 37235 - DNA, 80 bp, synthetic construct
  misc_feature 1..80: note = Artificially Synthesized Probe
  source 1..80: mol_type = other DNA
ccctgcattgctctctttcttttcaaaataataaagtcttcaaatccctcttctctttttgcaggtctctccatgtttta

SEQ ID NO: 37236 - DNA, 80 bp, synthetic construct
  misc_feature 1..80: note = Artificially Synthesized Probe
  source 1..80: mol_type = other DNA
tgacatgaaaatgaataaagagggagggtgagaaataggaaagatcatgccaggtagaggagtgagagatttgtgaagtc

SEQ ID NO: 37237 - DNA, 80 bp, synthetic construct
  misc_feature 1..80: note = Artificially Synthesized Probe
  source 1..80: mol_type = other DNA
tatcttgggaaacagacatctctaactgatgtatacattcctgtgataatcaatatttgatagcaacattattatagtgc

SEQ ID NO: 37238 - DNA, 80 bp, synthetic construct
  misc_feature 1..80: note = Artificially Synthesized Probe
  source 1..80: mol_type = other DNA
gacagttgaccaagatgtacttgaacagtaggtgagtcactgtgacataccccttgttcttctttctcatgaaatatttt

SEQ ID NO: 37239 - DNA, 80 bp, synthetic construct
  misc_feature 1..80: note = Artificially Synthesized Probe
  source 1..80: mol_type = other DNA
catttccttttatatttctgaatttgaagggccagcattgagggagatgccatgatgttttaaagaagtctcctcttctt

SEQ ID NO: 37240 - DNA, 80 bp, synthetic construct
  misc_feature 1..80: note = Artificially Synthesized Probe
  source 1..80: mol_type = other DNA
gtaacagtggggacaggaaataaagttcaggagtcaagccatggtaaggattttgttttcattttaactataaagggagt

SEQ ID NO: 37241 - DNA, 80 bp, synthetic construct
  misc_feature 1..80: note = Artificially Synthesized Probe
  source 1..80: mol_type = other DNA
caatcaattcaaagtttaactcttcaattgtactttttctctcatccttcaagaggtatgcttatctcattttctgaggt

SEQ ID NO: 37242 - DNA, 80 bp, synthetic construct
  misc_feature 1..80: note = Artificially Synthesized Probe
  source 1..80: mol_type = other DNA
ggatgatctgctagaggagcccttacatcttgcttgacacagagattttctaagcggcttgtcatgtttatctccatcct

SEQ ID NO: 37243 - DNA, 80 bp, synthetic construct
  misc_feature 1..80: note = Artificially Synthesized Probe
  source 1..80: mol_type = other DNA
agtgatgctttttcagataatggatgactcagtggaaaagagtaagattacataaagatagaacaaaaaaggatagacct

SEQ ID NO: 37244 - DNA, 80 bp, synthetic construct
  misc_feature 1..80: note = Artificially Synthesized Probe
  source 1..80: mol_type = other DNA
tcccccctgcagttattgataaataacacgtatttttcaaatgatacacagtccttgaattcctagggcaaccaccatta

SEQ ID NO: 37245 - DNA, 80 bp, synthetic construct
  misc_feature 1..80: note = Artificially Synthesized Probe
  source 1..80: mol_type = other DNA
gggaagatgaaagaaagaaatacagatagatggagcggtagagcatatgaatgctctttagggcttaatatgaggtttct

SEQ ID NO: 37246 - DNA, 80 bp, synthetic construct
  misc_feature 1..80: note = Artificially Synthesized Probe
  source 1..80: mol_type = other DNA
ttcccaccttctggtaaccatgcttctactctctatctctataaattcaattgttttgatatttagcatccacaaataaa

SEQ ID NO: 37247 - DNA, 80 bp, synthetic construct
  misc_feature 1..80: note = Artificially Synthesized Probe
  source 1..80: mol_type = other DNA
tccattggtctatgtgtctgtttttatgccagtaccatactattttggttactataactctgtagtataatttgaagtca

SEQ ID NO: 37248 - DNA, 80 bp, synthetic construct
  misc_feature 1..80: note = Artificially Synthesized Probe
  source 1..80: mol_type = other DNA
cctctgtaaattagccagaaccagtccatggtcagtggtcttatcaggagaaagttactgaaatcagtatcttgtccaat

SEQ ID NO: 37249 - DNA, 80 bp, synthetic construct
  misc_feature 1..80: note = Artificially Synthesized Probe
  source 1..80: mol_type = other DNA
cttaatccagtctatcattgttggacatttgggttggttgcaagtctttgttattgtgaatagtgccacaataaacatac

SEQ ID NO: 37250 - DNA, 80 bp, synthetic construct
  misc_feature 1..80: note = Artificially Synthesized Probe
  source 1..80: mol_type = other DNA
ttaggttttctcctagagtttttatggttttaggtctgacatttaagtctttaatccatcttgaattaatttttgtgtaa

SEQ ID NO: 37251 - DNA, 80 bp, synthetic construct
  misc_feature 1..80: note = Artificially Synthesized Probe
  source 1..80: mol_type = other DNA
gtttattgatttgcatatgtggagccagccttgcatcccagggatgaagcccacttgatcatggtggataagctttttga

SEQ ID NO: 37252 - DNA, 80 bp, synthetic construct
  misc_feature 1..80: note = Artificially Synthesized Probe
  source 1..80: mol_type = other DNA
cccagtagtcattcaggagcagggtgttcagtttccacgtagttgagcagttttgagagagtttcttaatcctgagttct

SEQ ID NO: 37253 - DNA, 80 bp, synthetic construct
  misc_feature 1..80: note = Artificially Synthesized Probe
  source 1..80: mol_type = other DNA
ctcccatcctgtcatggccagaaactccattgtttttaagattctgttggttgacaggcttaggattgtatttttagctt

SEQ ID NO: 37254 - DNA, 80 bp, synthetic construct
  misc_feature 1..80: note = Artificially Synthesized Probe
  source 1..80: mol_type = other DNA
aagctggagagctggttaggccatatacattgagtcttgaagccagaataagaagtttgaattttcttgcgagtgcagcg

SEQ ID NO: 37255 - DNA, 80 bp, synthetic construct
  misc_feature 1..80: note = Artificially Synthesized Probe
  source 1..80: mol_type = other DNA
agttggagaactagttctgtacattggaattccagaaactttcagaagagtcagttggacatatcagtccaaagactatt

SEQ ID NO: 37256 - DNA, 80 bp, synthetic construct
  misc_feature 1..80: note = Artificially Synthesized Probe
  source 1..80: mol_type = other DNA
aaatattatgctttgctctccctttgtacaaaattgataagttctcaagcagacagggaagaaacatgaataattattcc

SEQ ID NO: 37257 - DNA, 80 bp, synthetic construct
  misc_feature 1..80: note = Artificially Synthesized Probe
  source 1..80: mol_type = other DNA
caaattttggagccctaatgggatgataatatgtggctataaacccattgaagccagaggttatgtctttgtcaccttca

SEQ ID NO: 37258 - DNA, 80 bp, synthetic construct
  misc_feature 1..80: note = Artificially Synthesized Probe
  source 1..80: mol_type = other DNA
aaacagagaaatttatttactgtggtttgggtattcaggattccttcataggcctagcatggacttggtgttgtaagaga

SEQ ID NO: 37259 - DNA, 80 bp, synthetic construct
  misc_feature 1..80: note = Artificially Synthesized Probe
  source 1..80: mol_type = other DNA
ctttctagtgaataatttcctggatctctggggccatgccttattctctttttttatactgtggtcacaactaatttctt

SEQ ID NO: 37260 - DNA, 80 bp, synthetic construct
  misc_feature 1..80: note = Artificially Synthesized Probe
  source 1..80: mol_type = other DNA
aaaagatacttctttaaggataactatggcatcattgttaataatagctaaagaaataaaaaagagaaaaagcctgaaag

SEQ ID NO: 37261 - DNA, 80 bp, synthetic construct
  misc_feature 1..80: note = Artificially Synthesized Probe
  source 1..80: mol_type = other DNA
acttatgtacaagattttgctgtgaaaatcagggcaagaaggtagtgatgcaaggtagcagataacattgaaatacattt

SEQ ID NO: 37262 - DNA, 80 bp, synthetic construct
  misc_feature 1..80: note = Artificially Synthesized Probe
  source 1..80: mol_type = other DNA
tcaatggtaaagaaagagctttttctattcagagggaatattcatttacttcttcagtgctttgtgtgtctaaagtagaa

SEQ ID NO: 37263 - DNA, 80 bp, synthetic construct
  misc_feature 1..80: note = Artificially Synthesized Probe
  source 1..80: mol_type = other DNA
gtaacagctagcaccagatttggtgatgggaaaacaagaagcaatatcattagctttcaaacaccagagggaggtgagtt

SEQ ID NO: 37264 - DNA, 80 bp, synthetic construct
  misc_feature 1..80: note = Artificially Synthesized Probe
  source 1..80: mol_type = other DNA
gaaaattctgtttataaagatggccctcaattacacttcctccaataagtgttctctaaagtgctgatggtatcatttat

SEQ ID NO: 37265 - DNA, 80 bp, synthetic construct
  misc_feature 1..80: note = Artificially Synthesized Probe
  source 1..80: mol_type = other DNA
taacctagcagggagaaagacaaagtccagaaggtggtttagtgtttatattctgttctataagagtagggttgtataag

SEQ ID NO: 37266 - DNA, 80 bp, synthetic construct
  misc_feature 1..80: note = Artificially Synthesized Probe
  source 1..80: mol_type = other DNA
ccccttcctacagaactttgtagaatatgtcatgcatggcatatcatgttctgcctcctattaccgataactgttgcttc

SEQ ID NO: 37267 - DNA, 80 bp, synthetic construct
  misc_feature 1..80: note = Artificially Synthesized Probe
  source 1..80: mol_type = other DNA
caaatttgttacatgcctatgcacattaagtcacacagtcagcaggaatgacttctgggtgattcagataatttgttatg

SEQ ID NO: 37268 - DNA, 80 bp, synthetic construct
  misc_feature 1..80: note = Artificially Synthesized Probe
  source 1..80: mol_type = other DNA
atcagtctgctatccctttgctacaactgtgagaagtaaagtctgaaaagaaatgtgaaagtctgaaagcccactaaatg

SEQ ID NO: 37269 - DNA, 80 bp, synthetic construct
  misc_feature 1..80: note = Artificially Synthesized Probe
  source 1..80: mol_type = other DNA
acattttggttaacagcaagtacttcagttggaaatgggaataaaagcagtgacatcattgaagtatacacagatcaaga

SEQ ID NO: 37270 - DNA, 80 bp, synthetic construct
  misc_feature 1..80: note = Artificially Synthesized Probe
  source 1..80: mol_type = other DNA
gactagatcttgggaaagcttttagtattgattcttctggctacccacatgaccttggagaagtaacttaatggctgagc

SEQ ID NO: 37271 - DNA, 80 bp, synthetic construct
  misc_feature 1..80: note = Artificially Synthesized Probe
  source 1..80: mol_type = other DNA
caacagaaaagggattctctgatacctatactgcccagctatacatcaagactgaagaagatggtaggctagaccctttt

SEQ ID NO: 37272 - DNA, 80 bp, synthetic construct
  misc_feature 1..80: note = Artificially Synthesized Probe
  source 1..80: mol_type = other DNA
tccacaaaatttgactttaatcaactgtacttcagactttgtatggctgaaatggagcccaagtcctcttccaggtggta

SEQ ID NO: 37273 - DNA, 80 bp, synthetic construct
  misc_feature 1..80: note = Artificially Synthesized Probe
  source 1..80: mol_type = other DNA
tcactgggagatagatatcaaaaggaaaaaagaatcattttctcagagtaatcgcattcctaggataattgtgtacgtgt

SEQ ID NO: 37274 - DNA, 80 bp, synthetic construct
  misc_feature 1..80: note = Artificially Synthesized Probe
  source 1..80: mol_type = other DNA
gttactgctatcccagtcaatccactgtggtccacagataataaaatcaataggtgacttaggtcactcacacatactga

SEQ ID NO: 37275 - DNA, 80 bp, synthetic construct
  misc_feature 1..80: note = Artificially Synthesized Probe
  source 1..80: mol_type = other DNA
gattcctacatttatatcacataggagattatcttctctttccatgaggatagctgattaatcttagctgctttcttggt

SEQ ID NO: 37276 - DNA, 80 bp, synthetic construct
  misc_feature 1..80: note = Artificially Synthesized Probe
  source 1..80: mol_type = other DNA
ttctgtttttcagaatatatcaggatttaaaactgaagccaaacttgttggactggaaccagtcagcacctactctatcc

SEQ ID NO: 37277 - DNA, 80 bp, synthetic construct
  misc_feature 1..80: note = Artificially Synthesized Probe
  source 1..80: mol_type = other DNA
tctgtcaatgtttattgaatgagcaaaagatcccgttctagtcatttcttcttatcagctctggatgcacttcctggtat

SEQ ID NO: 37278 - DNA, 80 bp, synthetic construct
  misc_feature 1..80: note = Artificially Synthesized Probe
  source 1..80: mol_type = other DNA
cagggctaatcttgtagaaagtgctctgtaaacccataaatattttttatcagtaagataaaattgtaccccaacattct

SEQ ID NO: 37279 - DNA, 80 bp, synthetic construct
  misc_feature 1..80: note = Artificially Synthesized Probe
  source 1..80: mol_type = other DNA
agccatcccggtaaaaaccagtacctttaaattagttaggggtttccaagtactgtgaagcccagatttgtcacaacagg

SEQ ID NO: 37280 - DNA, 80 bp, synthetic construct
  misc_feature 1..80: note = Artificially Synthesized Probe
  source 1..80: mol_type = other DNA
gctttttatcccacgtgttgcttgagtaccagctgtgtactacattgacccttctccaaaacattgggagattgaaggga

SEQ ID NO: 37281 - DNA, 80 bp, synthetic construct
  misc_feature 1..80: note = Artificially Synthesized Probe
  source 1..80: mol_type = other DNA
cttctcttaggaagtccttgccttcctctttcagggatctagctgttcattttcattttaatcttatgtcttctctagga

SEQ ID NO: 37282 - DNA, 80 bp, synthetic construct
  misc_feature 1..80: note = Artificially Synthesized Probe
  source 1..80: mol_type = other DNA
catgtgtaggagatgggttaaaatactccaaatattttgctcattctcattgtctagaaaatatcccagaatccatcgct

SEQ ID NO: 37283 - DNA, 80 bp, synthetic construct
  misc_feature 1..80: note = Artificially Synthesized Probe
  source 1..80: mol_type = other DNA
gaaattcagttagtagaactgtgattcataatccaaatcgcaatgtgcacctgatgtagagccacctaaatttaaggtcc

SEQ ID NO: 37284 - DNA, 80 bp, synthetic construct
  misc_feature 1..80: note = Artificially Synthesized Probe
  source 1..80: mol_type = other DNA
gtcacagtcagatatgttggaacagggcagtaaagatgaaggcccccaagcttggttctacatttttaacagcaatttta

SEQ ID NO: 37285 - DNA, 80 bp, synthetic construct
  misc_feature 1..80: note = Artificially Synthesized Probe
  source 1..80: mol_type = other DNA
tttgtccagtggaagatatcaggcatatgcagtgatccactggaaatccactgagcttgcaaatatattaatgctacaat

SEQ ID NO: 37286 - DNA, 80 bp, synthetic construct
  misc_feature 1..80: note = Artificially Synthesized Probe
  source 1..80: mol_type = other DNA
gattctgattgctctcaagcaagtgaataaaaacattcaacttaccggtgggtaatcactagaagcacaaaagacattat

SEQ ID NO: 37287 - DNA, 80 bp, synthetic construct
  misc_feature 1..80: note = Artificially Synthesized Probe
  source 1..80: mol_type = other DNA
tgtacatatcaaagaacattcctcttttattggaaatatcttggatggttaggttgagatcagaagagattatgggttga

SEQ ID NO: 37288 - DNA, 80 bp, synthetic construct
  misc_feature 1..80: note = Artificially Synthesized Probe
  source 1..80: mol_type = other DNA
atatattatatgtaccattatctgtgggtctgttctcacatgctgcatggggacagagatttttcttggttcaaacctat

SEQ ID NO: 37289 - DNA, 80 bp, synthetic construct
  misc_feature 1..80: note = Artificially Synthesized Probe
  source 1..80: mol_type = other DNA
taccacagttcccttaaccattcactagttgaaggacatgtgagttgtgtccattttgtggctattagaaataaagcttc

SEQ ID NO: 37290 - DNA, 80 bp, synthetic construct
  misc_feature 1..80: note = Artificially Synthesized Probe
  source 1..80: mol_type = other DNA
attttttcttttatggattgtgtctatggatgtctaattgctctagcaccacttgatgaaagagctgtctctcctccatt

SEQ ID NO: 37291 - DNA, 80 bp, synthetic construct
  misc_feature 1..80: note = Artificially Synthesized Probe
  source 1..80: mol_type = other DNA
cttgggagctctttgattttgtcaaagagatgagcagagattccctgtgggtattttaaggcttggtgtcaaggtatttt

SEQ ID NO: 37292 - DNA, 80 bp, synthetic construct
  misc_feature 1..80: note = Artificially Synthesized Probe
  source 1..80: mol_type = other DNA
tcttggtcctttgagaaacacatagtatcccaacttgtcagagaggaaatttgagctggtccttctttatccaggagaga

SEQ ID NO: 37293 - DNA, 80 bp, synthetic construct
  misc_feature 1..80: note = Artificially Synthesized Probe
  source 1..80: mol_type = other DNA
ggtggattatgttgattgatcttctaatattgaaccagccttgggattcttacactgcttggccatgatatgcatattcc

SEQ ID NO: 37294 - DNA, 80 bp, synthetic construct
  misc_feature 1..80: note = Artificially Synthesized Probe
  source 1..80: mol_type = other DNA
tccacaaaagaaagcctagagatagaaaaggcagagaatccaaaccatgcagaaggcagggaataataaaatgcagaaat

SEQ ID NO: 37295 - DNA, 80 bp, synthetic construct
  misc_feature 1..80: note = Artificially Synthesized Probe
  source 1..80: mol_type = other DNA
accttttcactgatgtccacatgttttccattgacattatggtggaagggtcttattactactggagagggtgaaaatct

SEQ ID NO: 37296 - DNA, 80 bp, synthetic construct
  misc_feature 1..80: note = Artificially Synthesized Probe
  source 1..80: mol_type = other DNA
tgggaggagtggaaagaatacatctacttcatcttccttgaagcagaagttcatccatgggtatattttgaatatcaagc

SEQ ID NO: 37297 - DNA, 80 bp, synthetic construct
  misc_feature 1..80: note = Artificially Synthesized Probe
  source 1..80: mol_type = other DNA
tgtgtgcatgcaaaagccctcttctttctttctggtaaccatatgacgtgaaagcttcaggaatgtgcctgttgtttgtc

SEQ ID NO: 37298 - DNA, 80 bp, synthetic construct
  misc_feature 1..80: note = Artificially Synthesized Probe
  source 1..80: mol_type = other DNA
ggttcattactaattaaaataacgctacttttgtgttttcatttttatttttttgagacaggatctcactctgtcacaca

SEQ ID NO: 37299 - DNA, 80 bp, synthetic construct
  misc_feature 1..80: note = Artificially Synthesized Probe
  source 1..80: mol_type = other DNA
aaacaatagttgaaagtagttggtgacatacttgggctaatcattgctaaggcttcctttctaatatggatgtatgagaa

SEQ ID NO: 37300 - DNA, 80 bp, synthetic construct
  misc_feature 1..80: note = Artificially Synthesized Probe
  source 1..80: mol_type = other DNA
ccattcatatacaggcagtctttgctttacatagtagtataggactaaaaaatgattatagaaactgaatttgtgcaaag

SEQ ID NO: 37301 - DNA, 80 bp, synthetic construct
  misc_feature 1..80: note = Artificially Synthesized Probe
  source 1..80: mol_type = other DNA
ttgagaagacaggtgttacttaactaaaccatagtaacaaaaattcaagcacattggaatgtgcaaaggactgacttatc

SEQ ID NO: 37302 - DNA, 80 bp, synthetic construct
  misc_feature 1..80: note = Artificially Synthesized Probe
  source 1..80: mol_type = other DNA
ttgaggaatcaccacactgtcttccacaatggttgaactaatttacactcctacgaacagtataaaagtgttcctgtttc

SEQ ID NO: 37303 - DNA, 80 bp, synthetic construct
  misc_feature 1..80: note = Artificially Synthesized Probe
  source 1..80: mol_type = other DNA
tttctaattctgtgaagaaagtcaatggtagcttcaagggggatagcactgaatctataaattatggagtctcactctgt

SEQ ID NO: 37304 - DNA, 80 bp, synthetic construct
  misc_feature 1..80: note = Artificially Synthesized Probe
  source 1..80: mol_type = other DNA
cccatggcattttcattgggattgcatcagatctatatacatgcatgtatacatctatacatggggagaattgacatctc

SEQ ID NO: 37305 - DNA, 80 bp, synthetic construct
  misc_feature 1..80: note = Artificially Synthesized Probe
  source 1..80: mol_type = other DNA
tcagatatttacatcaaagttatactaccctaatatcagtagttggggaatgttctttcctcctttattttcacagttat

SEQ ID NO: 37306 - DNA, 80 bp, synthetic construct
  misc_feature 1..80: note = Artificially Synthesized Probe
  source 1..80: mol_type = other DNA
attttcttgcttctaaatattttgccataaggttctatgtattagttccatgtggttaatagtgttttgcaaaatgtctg

SEQ ID NO: 37307 - DNA, 80 bp, synthetic construct
  misc_feature 1..80: note = Artificially Synthesized Probe
  source 1..80: mol_type = other DNA
taatatacgtgtgtatgtgtgcatgcacactcggtttttcagctgtctttctactgagctccttggattctccgtcatgt

SEQ ID NO: 37308 - DNA, 80 bp, synthetic construct
  misc_feature 1..80: note = Artificially Synthesized Probe
  source 1..80: mol_type = other DNA
gcccagatgtttaaggttacactgagctatgaaggtaccactgcactccagcctgggcaacaaaatggcaccctcatccc

SEQ ID NO: 37309 - DNA, 80 bp, synthetic construct
  misc_feature 1..80: note = Artificially Synthesized Probe
  source 1..80: mol_type = other DNA
cctattctacttcactgtacattaactattgatatagactcaattcttcatctctggtgttttgataatatgagtactcc

SEQ ID NO: 37310 - DNA, 80 bp, synthetic construct
  misc_feature 1..80: note = Artificially Synthesized Probe
  source 1..80: mol_type = other DNA
ggcctccaaacagaatatgtataactatatgtataactagctttccttgtaacgatccctaaaaaatgactttttctttg

SEQ ID NO: 37311 - DNA, 80 bp, synthetic construct
  misc_feature 1..80: note = Artificially Synthesized Probe
  source 1..80: mol_type = other DNA
gcctcagcctcctgagtagctggggctgcaggcgcctgccactacgcccggctaattttttgttgtatttttagtagaga

SEQ ID NO: 37312 - DNA, 80 bp, synthetic construct
  misc_feature 1..80: note = Artificially Synthesized Probe
  source 1..80: mol_type = other DNA
aatctctgtctgttgtttctctgtcacctactgtagtcacctaaactgctttcaaactttcactgcctttcaataacacc

SEQ ID NO: 37313 - DNA, 80 bp, synthetic construct
  misc_feature 1..80: note = Artificially Synthesized Probe
  source 1..80: mol_type = other DNA
agaaaatctaagcaagctgtgtgattactccaggaagcatggaatgatgtgttcaaattagtaccatctgtggatagaaa

SEQ ID NO: 37314 - DNA, 80 bp, synthetic construct
  misc_feature 1..80: note = Artificially Synthesized Probe
  source 1..80: mol_type = other DNA
aaaaaatagttgatcatagaggcatgggcatctagtcatccctccagatgggattagcaaagggcagcctcttctgcctt

SEQ ID NO: 37315 - DNA, 80 bp, synthetic construct
  misc_feature 1..80: note = Artificially Synthesized Probe
  source 1..80: mol_type = other DNA
agtttccagggcagtctgggtttatgcttgctgtgctggcatttcatccaatagacattgccttttactctcaaaagtga

SEQ ID NO: 37316 - DNA, 80 bp, synthetic construct
  misc_feature 1..80: note = Artificially Synthesized Probe
  source 1..80: mol_type = other DNA
tggtttaaggactcagtttaatgtgattccacttacattgcctacttcgccccttcccattcatctccttgtagacccag

SEQ ID NO: 37317 - DNA, 80 bp, synthetic construct
  misc_feature 1..80: note = Artificially Synthesized Probe
  source 1..80: mol_type = other DNA
tttgacttccttttctgaaaacggccaaaaatactatcctccttttagagggctcaggttataaggtcaggtccactgga

SEQ ID NO: 37318 - DNA, 80 bp, synthetic construct
  misc_feature 1..80: note = Artificially Synthesized Probe
  source 1..80: mol_type = other DNA
ttccatgatctccacttttacaatcagtgaaattccatctcatgtgccatctcttctctaaaaacattttctgaacaccc

SEQ ID NO: 37319 - DNA, 80 bp, synthetic construct
  misc_feature 1..80: note = Artificially Synthesized Probe
  source 1..80: mol_type = other DNA
gtaccagtcactcagtccttcttgttattctccaaatataccaggcatgcctccaactatacagtttcctctgcttcaaa

SEQ ID NO: 37320 - DNA, 80 bp, synthetic construct
  misc_feature 1..80: note = Artificially Synthesized Probe
  source 1..80: mol_type = other DNA
gtgtctgtaccccacatgcccagacttttatttcttggcattaatctctaaacagtacaacagctatttatagagcattt

SEQ ID NO: 37321 - DNA, 80 bp, synthetic construct
  misc_feature 1..80: note = Artificially Synthesized Probe
  source 1..80: mol_type = other DNA
gctcagagcctgacacatggtatgcatttggcaaacctgtagttagtgtggaagcaaataaatgactccaagcaggacta

SEQ ID NO: 37322 - DNA, 80 bp, synthetic construct
  misc_feature 1..80: note = Artificially Synthesized Probe
  source 1..80: mol_type = other DNA
gagaaattcaatgttagtcattattagggcttttctcaaactcccaaagttgtgccaaggtcctagagtctcatattgca

SEQ ID NO: 37323 - DNA, 80 bp, synthetic construct
  misc_feature 1..80: note = Artificially Synthesized Probe
  source 1..80: mol_type = other DNA
ttcaggtttgccaggccacccatcccatataaatccttcagatataggccttatgttatcatcttcctatcttgactgag

SEQ ID NO: 37324 - DNA, 80 bp, synthetic construct
  misc_feature 1..80: note = Artificially Synthesized Probe
  source 1..80: mol_type = other DNA
cacaccatctaaacaaattcctccatttgcattactattacattagtacaactcttcattactgctcccacagcactagc

SEQ ID NO: 37325 - DNA, 80 bp, synthetic construct
  misc_feature 1..80: note = Artificially Synthesized Probe
  source 1..80: mol_type = other DNA
cacgcatattttcttattgtctagaatagttcccagtaccagtagatactctataaatattccctgaatgagagaaattt

SEQ ID NO: 37326 - DNA, 80 bp, synthetic construct
  misc_feature 1..80: note = Artificially Synthesized Probe
  source 1..80: mol_type = other DNA
tatggccatattttatttccaggagacacaggggaaatggtctttctaccactgtgattaggagagaaagatgaaaagat

SEQ ID NO: 37327 - DNA, 80 bp, synthetic construct
  misc_feature 1..80: note = Artificially Synthesized Probe
  source 1..80: mol_type = other DNA
attcctggggtaacacttaggttgggaaaaccacaggataccatactcatgaggaattttaactacccaaacatctgtta

SEQ ID NO: 37328 - DNA, 80 bp, synthetic construct
  misc_feature 1..80: note = Artificially Synthesized Probe
  source 1..80: mol_type = other DNA
cacctgcctgaccatgaatttcctctgctgaaaatctttgatcattttctacatgcctgcatgttaaaactatgcccatt

SEQ ID NO: 37329 - DNA, 80 bp, synthetic construct
  misc_feature 1..80: note = Artificially Synthesized Probe
  source 1..80: mol_type = other DNA
taatagattgatggtccatgaaagaacaaaggggaagaacaatgtttaaatttagagtgctaagtgtgattacaaagagg

SEQ ID NO: 37330 - DNA, 80 bp, synthetic construct
  misc_feature 1..80: note = Artificially Synthesized Probe
  source 1..80: mol_type = other DNA
ccttacctgaattattccagtttgttccaatgcagagcttcatggtagcatgaaaatggtgatattttatgctctaatgg

SEQ ID NO: 37331 - DNA, 80 bp, synthetic construct
  misc_feature 1..80: note = Artificially Synthesized Probe
  source 1..80: mol_type = other DNA
tttgtaacactattgtgctataccctctgcagcaccaccttgcggttaggaaatctaattagaaaacacacttaacatct

SEQ ID NO: 37332 - DNA, 80 bp, synthetic construct
  misc_feature 1..80: note = Artificially Synthesized Probe
  source 1..80: mol_type = other DNA
tgaccctgacccacataagacccacattcctgtgcaaggatagaagcatgataatcaggaaatgatggttgttagttaca

SEQ ID NO: 37333 - DNA, 80 bp, synthetic construct
  misc_feature 1..80: note = Artificially Synthesized Probe
  source 1..80: mol_type = other DNA
tggaaaagttcaagaaatggcattaaagcatagctcagcaaggggctaaataccttgcttttttataatgattgatcagt

SEQ ID NO: 37334 - DNA, 80 bp, synthetic construct
  misc_feature 1..80: note = Artificially Synthesized Probe
  source 1..80: mol_type = other DNA
tatatttccagcacttccaaagtgcctggcatgccataggtgttcagtaaactgttgctaaatgaaaagggttaaacagt

SEQ ID NO: 37335 - DNA, 80 bp, synthetic construct
  misc_feature 1..80: note = Artificially Synthesized Probe
  source 1..80: mol_type = other DNA
ttccttgataccttagttgttgcagaaactgtgtacccaattctgtcttcatcattagcatctcttagctcatcaaatcg

SEQ ID NO: 37336 - DNA, 80 bp, synthetic construct
  misc_feature 1..80: note = Artificially Synthesized Probe
  source 1..80: mol_type = other DNA
ccttttgactctcttcagagcatgtgattcacttgaaccagatatactgcccatatttataccatcccaacttgcaagaa

SEQ ID NO: 37337 - DNA, 80 bp, synthetic construct
  misc_feature 1..80: note = Artificially Synthesized Probe
  source 1..80: mol_type = other DNA
tttctatgatcctccccttatcacagaagtgcccctaaccctgctctatccttctcatctatcaaagactagtgcaattc

SEQ ID NO: 37338 - DNA, 80 bp, synthetic construct
  misc_feature 1..80: note = Artificially Synthesized Probe
  source 1..80: mol_type = other DNA
tactttcattataccagttttaattttcagctgtgcttctctatctctctgtagtcaaatactacgtttctgcaagggtt

SEQ ID NO: 37339 - DNA, 80 bp, synthetic construct
  misc_feature 1..80: note = Artificially Synthesized Probe
  source 1..80: mol_type = other DNA
tatgttaagggcagtggggtgccagttggtgatacagatttctactgtataacataggcatggttgcagtgtagaggata

SEQ ID NO: 37340 - DNA, 80 bp, synthetic construct
  misc_feature 1..80: note = Artificially Synthesized Probe
  source 1..80: mol_type = other DNA
gttttgctgggcctgatgaacacagttttctaatagcatcttatgcattaaattgtatagcatagtgatttctcctcctt

SEQ ID NO: 37341 - DNA, 80 bp, synthetic construct
  misc_feature 1..80: note = Artificially Synthesized Probe
  source 1..80: mol_type = other DNA
cttcctcacacattttaaaatacttccaatgtaccagaactgtgctaggtgctggatatgtagaagtgaacaactctgat

SEQ ID NO: 37342 - DNA, 80 bp, synthetic construct
  misc_feature 1..80: note = Artificially Synthesized Probe
  source 1..80: mol_type = other DNA
ccagtgaccttgtggaagtgtagaattctatggactcttgaaagacctgggctcaaatccttcctctgctactaagtaac

SEQ ID NO: 37343 - DNA, 80 bp, synthetic construct
  misc_feature 1..80: note = Artificially Synthesized Probe
  source 1..80: mol_type = other DNA
agtagtatgtatgataggattttgaattttctcatggttatcttgggaaaagcccttctacttagtgctagcaagtttag

SEQ ID NO: 37344 - DNA, 80 bp, synthetic construct
  misc_feature 1..80: note = Artificially Synthesized Probe
  source 1..80: mol_type = other DNA
gagtcaaaagtagagtttcattgactgcaaagatgatttttgcttatttatttaatgggttggttaatcacggttggctg

SEQ ID NO: 37345 - DNA, 80 bp, synthetic construct
  misc_feature 1..80: note = Artificially Synthesized Probe
  source 1..80: mol_type = other DNA
tcctccttcagactcctgatgttctttgccaccagatatatcattggaaaaagcagatgaagggatatgttgctatagtt

SEQ ID NO: 37346 - DNA, 80 bp, synthetic construct
  misc_feature 1..80: note = Artificially Synthesized Probe
  source 1..80: mol_type = other DNA
atttacattttttgcaagataatgaagcttgaatatctgaactgttgacagccaaatattacatttcttcatggaaattc

SEQ ID NO: 37347 - DNA, 80 bp, synthetic construct
  misc_feature 1..80: note = Artificially Synthesized Probe
  source 1..80: mol_type = other DNA
cagttacataagatattaccaatggggaaaactgggagaaagttaaatggtatgtcctgtttttgccacttcttttgact

SEQ ID NO: 37348 - DNA, 80 bp, synthetic construct
  misc_feature 1..80: note = Artificially Synthesized Probe
  source 1..80: mol_type = other DNA
acccaaatgacaatgtcagtttatgaacttggcatttaaaaatattgcagtttgtgtacacatgacatttcccatatctt

SEQ ID NO: 37349 - DNA, 80 bp, synthetic construct
  misc_feature 1..80: note = Artificially Synthesized Probe
  source 1..80: mol_type = other DNA
tgaatcaaaatctgcatatttgcatttaacaaggtgtgcgaatgacttctttgcacactgcaatttcagaggcagtgccc

SEQ ID NO: 37350 - DNA, 80 bp, synthetic construct
  misc_feature 1..80: note = Artificially Synthesized Probe
  source 1..80: mol_type = other DNA
ggatttcatcttagagagggaaaaaaagaggatcttgaatatggatttacagaaggccagagttacctagctacagagag

SEQ ID NO: 37351 - DNA, 80 bp, synthetic construct
  misc_feature 1..80: note = Artificially Synthesized Probe
  source 1..80: mol_type = other DNA
acaaacaaaccatgaaacccaaaaaagatgattaagaggaatttagggccattcgaatgatcacggtgccctctcttctt

SEQ ID NO: 37352 - DNA, 80 bp, synthetic construct
  misc_feature 1..80: note = Artificially Synthesized Probe
  source 1..80: mol_type = other DNA
ggtgtacagatagcaatacatgcatcacttttatgctttagtaaaacttcccatttcagatgctattcccatccccatgc

SEQ ID NO: 37353 - DNA, 80 bp, synthetic construct
  misc_feature 1..80: note = Artificially Synthesized Probe
  source 1..80: mol_type = other DNA
aatatgatgcagctgcaccatgatatataatatagtcattaagaagaatgagttagctctgtacctggtcacttggaaac

SEQ ID NO: 37354 - DNA, 80 bp, synthetic construct
  misc_feature 1..80: note = Artificially Synthesized Probe
  source 1..80: mol_type = other DNA
gctccagcacgaccaaaaaccaaaccaacccctatttatgatgccacaggaaaactgcttgtgacttcaacaacaattac

SEQ ID NO: 37355 - DNA, 80 bp, synthetic construct
  misc_feature 1..80: note = Artificially Synthesized Probe
  source 1..80: mol_type = other DNA
gcaatggaccactgaaaccaaaaaagcaatacttgtaagtataggttatatctaccatgcattctgttagcaagctagtt

SEQ ID NO: 37356 - DNA, 80 bp, synthetic construct
  misc_feature 1..80: note = Artificially Synthesized Probe
  source 1..80: mol_type = other DNA
atgctatggaagcaaaaaagtatacaaatgcaactgtgcacacacagaaataacaaacattttcttaatgtgtttatatg

SEQ ID NO: 37357 - DNA, 80 bp, synthetic construct
  misc_feature 1..80: note = Artificially Synthesized Probe
  source 1..80: mol_type = other DNA
aatgctgctaaatttccacaatgcacaaaacagcccgtaatgtcagtggtcctgaggatgagaaactctgacttaagccc

SEQ ID NO: 37358 - DNA, 80 bp, synthetic construct
  misc_feature 1..80: note = Artificially Synthesized Probe
  source 1..80: mol_type = other DNA
caagtgtttcttcatttgataggtgagtctatcacactctgatgccaccacagtaaaataaatgtcttcttgtcatcagc

SEQ ID NO: 37359 - DNA, 80 bp, synthetic construct
  misc_feature 1..80: note = Artificially Synthesized Probe
  source 1..80: mol_type = other DNA
taattggcctttgccctacagtgcttattctggattgaccacatggagttctgctatttagatagtcatttatagcgagt

SEQ ID NO: 37360 - DNA, 80 bp, synthetic construct
  misc_feature 1..80: note = Artificially Synthesized Probe
  source 1..80: mol_type = other DNA
aaagtacaagtgagagatggccaggtagaacttcactggatggataagtatgagtctgtggaagagcagtttgcatttag

SEQ ID NO: 37361 - DNA, 80 bp, synthetic construct
  misc_feature 1..80: note = Artificially Synthesized Probe
  source 1..80: mol_type = other DNA
tggtaatgtggtggtgaacctcacatactctgtagtcaagacagacgtatttcaggcaggcttggtatatattgaattta

SEQ ID NO: 37362 - DNA, 80 bp, synthetic construct
  misc_feature 1..80: note = Artificially Synthesized Probe
  source 1..80: mol_type = other DNA
gaagaaggagagggagaaataaggaggaaaagactttccattttatatgcatctttatcaggagccaggcattgtactat

SEQ ID NO: 37363 - DNA, 80 bp, synthetic construct
  misc_feature 1..80: note = Artificially Synthesized Probe
  source 1..80: mol_type = other DNA
ctgagttctaaggcccagtgattcattattacctaataaagaggattctttattcatcttcatgcctcctttcccaagca

SEQ ID NO: 37364 - DNA, 80 bp, synthetic construct
  misc_feature 1..80: note = Artificially Synthesized Probe
  source 1..80: mol_type = other DNA
tcttcttataagtcactaatcccatcagatcggggcctcaccctatggcctcatttaactgtaattcctttcttactcca

SEQ ID NO: 37365 - DNA, 80 bp, synthetic construct
  misc_feature 1..80: note = Artificially Synthesized Probe
  source 1..80: mol_type = other DNA
agcagcaaaggtggagcaaagtgaatggaacatacataaaactagaaaaaatggtgtcatgaacccccaaatacctacta

SEQ ID NO: 37366 - DNA, 80 bp, synthetic construct
  misc_feature 1..80: note = Artificially Synthesized Probe
  source 1..80: mol_type = other DNA
ggattataggcatgagccaccgtgcccagccctgtttattaatttctaattttgtcactcctttaacatttatgcagcaa

SEQ ID NO: 37367 - DNA, 80 bp, synthetic construct
  misc_feature 1..80: note = Artificially Synthesized Probe
  source 1..80: mol_type = other DNA
gatagagcctacaggatttcctcacatgttttggatgtattctatgaaagagagtcaaagatgactccagggttttggcc

SEQ ID NO: 37368 - DNA, 80 bp, synthetic construct
  misc_feature 1..80: note = Artificially Synthesized Probe
  source 1..80: mol_type = other DNA
gaaattggtaatagaagcatcccattcttgctgaatggtgtaggtgagctggtactacttgagactgttcacgaatggca

SEQ ID NO: 37369 - DNA, 80 bp, synthetic construct
  misc_feature 1..80: note = Artificially Synthesized Probe
  source 1..80: mol_type = other DNA
tctgacctcaaaatctagcttcttaaggcagattgccgagttaaagggaccttacatttgtaaagtaaactttctaccaa

SEQ ID NO: 37370 - DNA, 80 bp, synthetic construct
  misc_feature 1..80: note = Artificially Synthesized Probe
  source 1..80: mol_type = other DNA
catagttcctttatatgacaaatcaatgacatagctagagagaagagaaacaagatcacaacgtaagtcttcttggctct

SEQ ID NO: 37371 - DNA, 80 bp, synthetic construct
  misc_feature 1..80: note = Artificially Synthesized Probe
  source 1..80: mol_type = other DNA
cagagatcttctttcaaagagtgacctccgtcttctacacacttctcactgctgttcagagaatcacttaatcttcctaa

SEQ ID NO: 37372 - DNA, 80 bp, synthetic construct
  misc_feature 1..80: note = Artificially Synthesized Probe
  source 1..80: mol_type = other DNA
agcactgctactactagactgtgtctcagcccttaaggaatcattctgcatcatcaaagaaagtttttcctccttttccc

SEQ ID NO: 37373 - DNA, 80 bp, synthetic construct
  misc_feature 1..80: note = Artificially Synthesized Probe
  source 1..80: mol_type = other DNA
tataaaattagcccagcatggtggcatgtgcctgtagtcccagctactccagcctgggtgacagagcgagactccatgtc

SEQ ID NO: 37374 - DNA, 80 bp, synthetic construct
  misc_feature 1..80: note = Artificially Synthesized Probe
  source 1..80: mol_type = other DNA
cgctctctctacttgattcttaggcatgtcctttttattccaacctgctaaatttttcatgcaaaattgagctcataact

SEQ ID NO: 37375 - DNA, 80 bp, synthetic construct
  misc_feature 1..80: note = Artificially Synthesized Probe
  source 1..80: mol_type = other DNA
aacaacattttgtgatggctcctgcaaaacaccaccacttagcccactgaagttagaaaggtttcttagagctcttattg

SEQ ID NO: 37376 - DNA, 80 bp, synthetic construct
  misc_feature 1..80: note = Artificially Synthesized Probe
  source 1..80: mol_type = other DNA
atgtaaatgtctaaggtcatacagctaataagcaggagagctacaagctagcccaggtctttctctgaggtatgaagata

SEQ ID NO: 37377 - DNA, 80 bp, synthetic construct
  misc_feature 1..80: note = Artificially Synthesized Probe
  source 1..80: mol_type = other DNA
attaagtttgcacctagattcctgtacaggcttctcattctgttatcaacatgacgcaagagttgagctctacatctgat

SEQ ID NO: 37378 - DNA, 80 bp, synthetic construct
  misc_feature 1..80: note = Artificially Synthesized Probe
  source 1..80: mol_type = other DNA
ttttcctattctttttctccttctctctttctctctctctcactctctctctctctctcttgctctctctctctcgctct

SEQ ID NO: 37379 - DNA, 80 bp, synthetic construct
  misc_feature 1..80: note = Artificially Synthesized Probe
  source 1..80: mol_type = other DNA
ggcactgggaatagtgtgatgagaaaggaagaaacattgcctccaaagagctatccttcaaatttaatgcttcttttaaa

SEQ ID NO: 37380 - DNA, 80 bp, synthetic construct
  misc_feature 1..80: note = Artificially Synthesized Probe
  source 1..80: mol_type = other DNA
atttttaacttaacatcactggttaagtagaagaaaagtttctcagtttgtcccataccactggtaatgctggttgaagc

SEQ ID NO: 37381 - DNA, 80 bp, synthetic construct
  misc_feature 1..80: note = Artificially Synthesized Probe
  source 1..80: mol_type = other DNA
aaatacaatttagaatgtagccaacacctaagggagaaatacacctatacaacatgaggctaagaacgaaagcaatgata

SEQ ID NO: 37382 - DNA, 80 bp, synthetic construct
  misc_feature 1..80: note = Artificially Synthesized Probe
  source 1..80: mol_type = other DNA
tatttaatgtttactgtgaataatgttatgagggacatctagtaagccaagtgttaatcctgccccagccctgaagtata

SEQ ID NO: 37383 - DNA, 80 bp, synthetic construct
  misc_feature 1..80: note = Artificially Synthesized Probe
  source 1..80: mol_type = other DNA
ttatggtttaaaatatctttaggcggacatcatgaaatgcacatctttattatcccccttgaggggtgagggagctgggg

SEQ ID NO: 37384 - DNA, 80 bp, synthetic construct
  misc_feature 1..80: note = Artificially Synthesized Probe
  source 1..80: mol_type = other DNA
gacattctattttcccttccccaaatcaaagattcttctcatttggtagccctttcagccatctccatatccatctagaa

SEQ ID NO: 37385 - DNA, 80 bp, synthetic construct
  misc_feature 1..80: note = Artificially Synthesized Probe
  source 1..80: mol_type = other DNA
tgtttacagagtataagtaatttggccaatgatctgtcacaaaagataggtctaaaataatggaaatagttataatttgt

SEQ ID NO: 37386 - DNA, 80 bp, synthetic construct
  misc_feature 1..80: note = Artificially Synthesized Probe
  source 1..80: mol_type = other DNA
gtgttgtttgtgattttggggatgtccattgttctttaacttgttaaaagtgaagccagtgccaatgctaacgcgaacaa

SEQ ID NO: 37387 - DNA, 80 bp, synthetic construct
  misc_feature 1..80: note = Artificially Synthesized Probe
  source 1..80: mol_type = other DNA
aactataagaaaattatttctagaactgtctaaaaataaaaaaaaagataagtaatgtccacgttttacagggggccttt

SEQ ID NO: 37388 - DNA, 80 bp, synthetic construct
  misc_feature 1..80: note = Artificially Synthesized Probe
  source 1..80: mol_type = other DNA
gaggatcaaatctgtttgtatatcaaccagaaaagagtttataaaaaaggtgtctttcaggatgaactttaggatgagca

SEQ ID NO: 37389 - DNA, 80 bp, synthetic construct
  misc_feature 1..80: note = Artificially Synthesized Probe
  source 1..80: mol_type = other DNA
gaccaactttattcaggatatttttggtgaaagcctaggtaaactcattactgttaacttgaccttgtttccacagttat

SEQ ID NO: 37390 - DNA, 80 bp, synthetic construct
  misc_feature 1..80: note = Artificially Synthesized Probe
  source 1..80: mol_type = other DNA
gagtaaatgcgcacttacatgaattcattttacatatgaggcagaatgagcttcaccatagtacatacagcttcattttt

SEQ ID NO: 37391 - DNA, 80 bp, synthetic construct
  misc_feature 1..80: note = Artificially Synthesized Probe
  source 1..80: mol_type = other DNA
cttttctttctttttggacttttgatcttgttgtccaggctggagtgcggtagtgcaaccttggctcactgcaacttctg

SEQ ID NO: 37392 - DNA, 80 bp, synthetic construct
  misc_feature 1..80: note = Artificially Synthesized Probe
  source 1..80: mol_type = other DNA
ctgggttacatatctgtttacccactaactacattagtgactctggacattttattcagtggtctctaccccataagagt

SEQ ID NO: 37393 - DNA, 80 bp, synthetic construct
  misc_feature 1..80: note = Artificially Synthesized Probe
  source 1..80: mol_type = other DNA
aaacactttaagatgctagaattagcagcaaatacttgcagaagagatttccaaatctccgtttgacagacgacctatga

SEQ ID NO: 37394 - DNA, 80 bp, synthetic construct
  misc_feature 1..80: note = Artificially Synthesized Probe
  source 1..80: mol_type = other DNA
gtacggcaaaattgatagacaaattcatggacaaatgacaaactaagaagaaaattttaattaatatgacaaaaggcgat

SEQ ID NO: 37395 - DNA, 80 bp, synthetic construct
  misc_feature 1..80: note = Artificially Synthesized Probe
  source 1..80: mol_type = other DNA
agataataataacagagtaaagctgatagctgacgctagtgttccaggttcggattatattaatgccagctatatttctg

SEQ ID NO: 37396 - DNA, 80 bp, synthetic construct
  misc_feature 1..80: note = Artificially Synthesized Probe
  source 1..80: mol_type = other DNA
tgtgctgtgtctcattccctccaagcctttgtcatggaggaaaaaaacgaattagttctaaatctgatattggttgataa

SEQ ID NO: 37397 - DNA, 80 bp, synthetic construct
  misc_feature 1..80: note = Artificially Synthesized Probe
  source 1..80: mol_type = other DNA
ctgtagcactcagagaaatctcctttgctcaggatgtcaagaacagatgggaacagatgtagcaatgatactgcagtggc

SEQ ID NO: 37398 - DNA, 80 bp, synthetic construct
  misc_feature 1..80: note = Artificially Synthesized Probe
  source 1..80: mol_type = other DNA
ccaaactttgtatatttagcatagcctttgtcagattctaactcacagtgatctcatttattaactgccttctctgtgtg

SEQ ID NO: 37399 - DNA, 80 bp, synthetic construct
  misc_feature 1..80: note = Artificially Synthesized Probe
  source 1..80: mol_type = other DNA
atcaccatcaatgcccaacacattttctttagcataataaagcaattgagggtgtttgcaggagtaaatataaactgcac

SEQ ID NO: 37400 - DNA, 80 bp, synthetic construct
  misc_feature 1..80: note = Artificially Synthesized Probe
  source 1..80: mol_type = other DNA
ttctacattttcctggctgataatccagaggaaaatctctgagctaatttaaggactgcaatgaaaagtggcatccatgg

SEQ ID NO: 37401 - DNA, 80 bp, synthetic construct
  misc_feature 1..80: note = Artificially Synthesized Probe
  source 1..80: mol_type = other DNA
gtatacaatatgtgatatattgtctatattactctgtgtggaacctactcctcccttacaggtactggctttctggcctt

SEQ ID NO: 37402 - DNA, 80 bp, synthetic construct
  misc_feature 1..80: note = Artificially Synthesized Probe
  source 1..80: mol_type = other DNA
ctccctttgcctctcaagaacatgggttgaggaattctcccttctgcatcatcattttttctcttttagcagctaaacaa

SEQ ID NO: 37403 - DNA, 80 bp, synthetic construct
  misc_feature 1..80: note = Artificially Synthesized Probe
  source 1..80: mol_type = other DNA
agctgaagtacgtggagtccgatgttctagggcaggaagcatccagcatttcccagtccactgactcaaatgttaatctc

SEQ ID NO: 37404 - DNA, 80 bp, synthetic construct
  misc_feature 1..80: note = Artificially Synthesized Probe
  source 1..80: mol_type = other DNA
gagtagaatagtggttaaaagctgggaaggggaagaggtgagagtaagagattggttaacgaatgcaaaattacagctag

SEQ ID NO: 37405 - DNA, 80 bp, synthetic construct
  misc_feature 1..80: note = Artificially Synthesized Probe
  source 1..80: mol_type = other DNA
tgctttttctagccattatctgttactcttccccctcatttactctactccaggcacctgctgttcctagaacattcctg

SEQ ID NO: 37406 - DNA, 80 bp, synthetic construct
  misc_feature 1..80: note = Artificially Synthesized Probe
  source 1..80: mol_type = other DNA
acaaggatgtcataatagatttaagacagatctcatgtcctatgagtttactgtattagcaaaatgaaacttcatattac

SEQ ID NO: 37407 - DNA, 80 bp, synthetic construct
  misc_feature 1..80: note = Artificially Synthesized Probe
  source 1..80: mol_type = other DNA
atgaatttattgctactcaaggtccactaccaggaacagttggagatttttggagaatggtgtgggaaaccagagcaaaa

SEQ ID NO: 37408 - DNA, 80 bp, synthetic construct
  misc_feature 1..80: note = Artificially Synthesized Probe
  source 1..80: mol_type = other DNA
tatttggtttggtaaatagtcatttttaaaagatcaccttcaaaaactgggactattgccttcaaccttcattgtggaac

SEQ ID NO: 37409 - DNA, 80 bp, synthetic construct
  misc_feature 1..80: note = Artificially Synthesized Probe
  source 1..80: mol_type = other DNA
acattgagaatatacttaatgccactgaattgtacatgtaaaatggtcaaaatggtagattctctgttattcatctttca

SEQ ID NO: 37410 - DNA, 80 bp, synthetic construct
  misc_feature 1..80: note = Artificially Synthesized Probe
  source 1..80: mol_type = other DNA
gaaattttgtctgctgaccctatcctaccctatcaccctctatctccttaacctgattcatctttttttcagtatgagac

SEQ ID NO: 37411 - DNA, 80 bp, synthetic construct
  misc_feature 1..80: note = Artificially Synthesized Probe
  source 1..80: mol_type = other DNA
atccaaagacactccaaagaaaatctgcctccaaataagagaagaaactattagaatttattgctatcatagctcattat

SEQ ID NO: 37412 - DNA, 80 bp, synthetic construct
  misc_feature 1..80: note = Artificially Synthesized Probe
  source 1..80: mol_type = other DNA
ttatttgtaaggcagggccagtaaaaccataaatattactggctctgctttacaaacagggaagcacatgttccaagaag

SEQ ID NO: 37413 - DNA, 80 bp, synthetic construct
  misc_feature 1..80: note = Artificially Synthesized Probe
  source 1..80: mol_type = other DNA
gttgttatttttacctcatagtatggctacaagagtattccaggagtatgatgaatgtgttagtcttgccaattttttgt

SEQ ID NO: 37414 - DNA, 80 bp, synthetic construct
  misc_feature 1..80: note = Artificially Synthesized Probe
  source 1..80: mol_type = other DNA
aggggtggggcagggattagaaagaaggtttttgaagtcagagaactaaattccgaatacatctctgctaattgttggct

SEQ ID NO: 37415 - DNA, 80 bp, synthetic construct
  misc_feature 1..80: note = Artificially Synthesized Probe
  source 1..80: mol_type = other DNA
tacttttagtgcctcaaggaagtggaaatttactggtgtgaactcatataggggaagaaaaagaaaaaaagtcaacatat

SEQ ID NO: 37416 - DNA, 80 bp, synthetic construct
  misc_feature 1..80: note = Artificially Synthesized Probe
  source 1..80: mol_type = other DNA
caatagaggagttccaaaaggttttgaggtacagtagcaatagatacgaatataacctctgaggctgatcacttttgaga

SEQ ID NO: 37417 - DNA, 80 bp, synthetic construct
  misc_feature 1..80: note = Artificially Synthesized Probe
  source 1..80: mol_type = other DNA
ctctgtctttggtgtctaggcacagtatatctttttacaccagtgcattctggatctcttatcaaataagggaagtaatc

SEQ ID NO: 37418 - DNA, 80 bp, synthetic construct
  misc_feature 1..80: note = Artificially Synthesized Probe
  source 1..80: mol_type = other DNA
atgatctgtacttccatgtacacccctgtgttttgaatcctctgttttatgagtgctgagatatcatctcatgatcccga

SEQ ID NO: 37419 - DNA, 80 bp, synthetic construct
  misc_feature 1..80: note = Artificially Synthesized Probe
  source 1..80: mol_type = other DNA
ttctatgataagaagtatatcttatgcttatttccgctggaacatatatatataagaaatgctatggccaataaaattga

SEQ ID NO: 37420 - DNA, 80 bp, synthetic construct
  misc_feature 1..80: note = Artificially Synthesized Probe
  source 1..80: mol_type = other DNA
tctgctgtcatctgagtgcctgagcaacttacataaccatcagcttttagacgaacttacacatttcctatttgacagaa

SEQ ID NO: 37421 - DNA, 80 bp, synthetic construct
  misc_feature 1..80: note = Artificially Synthesized Probe
  source 1..80: mol_type = other DNA
gctgtgtgttcggggaaaggttgctcagaacacagatcgctttgtatttagagaaaaatggaaggttttggtcaattaaa

SEQ ID NO: 37422 - DNA, 80 bp, synthetic construct
  misc_feature 1..80: note = Artificially Synthesized Probe
  source 1..80: mol_type = other DNA
aagaaatggtgttgggaggcaaaatcaatttaggcgcctaaatgattcaactgtgcaatttaatagtagcaccaattttt

SEQ ID NO: 37423 - DNA, 80 bp, synthetic construct
  misc_feature 1..80: note = Artificially Synthesized Probe
  source 1..80: mol_type = other DNA
agtggtgggcaggtcagtgtttacccaccagctctgcagggaggagctgatctaccccattcatgggtttccatggcatg

SEQ ID NO: 37424 - DNA, 80 bp, synthetic construct
  misc_feature 1..80: note = Artificially Synthesized Probe
  source 1..80: mol_type = other DNA
cgtgctgtcaaataaaaaccgtagtcacaaaggcgacgttctcagaggactgtgggagcaagattcaaccagatgacgag

SEQ ID NO: 37425 - DNA, 80 bp, synthetic construct
  misc_feature 1..80: note = Artificially Synthesized Probe
  source 1..80: mol_type = other DNA
ccatctttcctgcatgcctcattcattagcaactggcacttaagttatcaaagcttagaactttctagctgaaaccatgg

SEQ ID NO: 37426 - DNA, 80 bp, synthetic construct
  misc_feature 1..80: note = Artificially Synthesized Probe
  source 1..80: mol_type = other DNA
gatgtacacctagtctctaggctgcagaaggaggaagacctgccgcacgctgtccactctgacagctgcctggggacttg

SEQ ID NO: 37427 - DNA, 80 bp, synthetic construct
  misc_feature 1..80: note = Artificially Synthesized Probe
  source 1..80: mol_type = other DNA
gagttattcctgaataagaggcttaagaacaggacttcatgtctgaactctcctacagcatcctaatcctgtgttccctc

SEQ ID NO: 37428 - DNA, 80 bp, synthetic construct
  misc_feature 1..80: note = Artificially Synthesized Probe
  source 1..80: mol_type = other DNA
tgcctcggaaatgataggaaaaggcattgaactgccccctggtcctacagtctaaaatggaagcacaaagcagaatgtca

SEQ ID NO: 37429 - DNA, 80 bp, synthetic construct
  misc_feature 1..80: note = Artificially Synthesized Probe
  source 1..80: mol_type = other DNA
gagcacgaaagtgaagggcaaatatggacctttgcaaaatgctaatgtctcaggaagccactggagtagaaattctatga

SEQ ID NO: 37430 - DNA, 80 bp, synthetic construct
  misc_feature 1..80: note = Artificially Synthesized Probe
  source 1..80: mol_type = other DNA
attgacatttggttctgtcaaatctgagttctgttttcgtatttttctgctgtatttagatatggcttttggggtaaaat

SEQ ID NO: 37431 - DNA, 80 bp, synthetic construct
  misc_feature 1..80: note = Artificially Synthesized Probe
  source 1..80: mol_type = other DNA
gcaagcataattttattttttatgtgaattctcctatcatatatacttccatgcatgtgtgtgtgggtggtggggggtgc

SEQ ID NO: 37432 - DNA, 80 bp, synthetic construct
  misc_feature 1..80: note = Artificially Synthesized Probe
  source 1..80: mol_type = other DNA
tattttgttttcagttttcaagattaggatgacatctgcaggtcattaagcacccgccaagcagtcaccaaaaccaggga

SEQ ID NO: 37433 - DNA, 80 bp, synthetic construct
  misc_feature 1..80: note = Artificially Synthesized Probe
  source 1..80: mol_type = other DNA
aaaaaaagaacgacagtgttagctcttctgactagcaacaaagacgatgggcaactttaaaaaaacaaaacaaaactggc

SEQ ID NO: 37434 - DNA, 80 bp, synthetic construct
  misc_feature 1..80: note = Artificially Synthesized Probe
  source 1..80: mol_type = other DNA
aaggaagaaaatttaagccacaccttttccaactattcagggataaccacacgtaacatcataatgtatacccttccaat

SEQ ID NO: 37435 - DNA, 80 bp, synthetic construct
  misc_feature 1..80: note = Artificially Synthesized Probe
  source 1..80: mol_type = other DNA
gtccctttttcttctaagttcaatgacattcaggttgaacttctagctctaagatgtcccctgggagtgaaacttggtcg

SEQ ID NO: 37436 - DNA, 80 bp, synthetic construct
  misc_feature 1..80: note = Artificially Synthesized Probe
  source 1..80: mol_type = other DNA
acttacaataaattacaagtaaaaaatcactttcccctagaaggcacaggtcagatcctaacagggtatgtcctaacttc

SEQ ID NO: 37437 - DNA, 80 bp, synthetic construct
  misc_feature 1..80: note = Artificially Synthesized Probe
  source 1..80: mol_type = other DNA
tcctaatctacctggccagcttcccttgtctcaggggtgacagcgtcccattttgcctttgtggcagaacaaggagaacc

SEQ ID NO: 37438 - DNA, 80 bp, synthetic construct
  misc_feature 1..80: note = Artificially Synthesized Probe
  source 1..80: mol_type = other DNA
tcacaatccggaagggagagaagaaagctttgtgaagggggaggtgatcttgtgcaatgggctggaagttctcgtccagc

SEQ ID NO: 37439 - DNA, 80 bp, synthetic construct
  misc_feature 1..80: note = Artificially Synthesized Probe
  source 1..80: mol_type = other DNA
acaccaggtcgttgtagtggtaacctgggacgtggagaaaagcaagacgcactcaattcccctggaggatgtgtgagggc

SEQ ID NO: 37440 - DNA, 80 bp, synthetic construct
  misc_feature 1..80: note = Artificially Synthesized Probe
  source 1..80: mol_type = other DNA
ctggcacaggctccgactaggtcaccttcttgctcagagaccttctgtctttgcccactagctacagaagaaattccaaa

SEQ ID NO: 37441 - DNA, 80 bp, synthetic construct
  misc_feature 1..80: note = Artificially Synthesized Probe
  source 1..80: mol_type = other DNA
cccttcctcaccccctttccagccacagtgaccacctgctgttccactatgctccaacgtgccccacctccaagactctg

SEQ ID NO: 37442 - DNA, 80 bp, synthetic construct
  misc_feature 1..80: note = Artificially Synthesized Probe
  source 1..80: mol_type = other DNA
agatctgatcctgtaactaaatgaagaaaggtagggagtagcaagaaattacacttagtaactccctcttcattctctgg

SEQ ID NO: 37443 - DNA, 80 bp, synthetic construct
  misc_feature 1..80: note = Artificially Synthesized Probe
  source 1..80: mol_type = other DNA
agcgacagggctgtagggctcaagaggaatcacagtttaaggaaataatttcacagttcataagcacagtgggaaagaaa

SEQ ID NO: 37444 - DNA, 80 bp, synthetic construct
  misc_feature 1..80: note = Artificially Synthesized Probe
  source 1..80: mol_type = other DNA
atcaaatcaaaattcatatattagaactgcatgcattctttaatcactcccaccttcaccctaaagctcagtgatttgag

SEQ ID NO: 37445 - DNA, 80 bp, synthetic construct
  misc_feature 1..80: note = Artificially Synthesized Probe
  source 1..80: mol_type = other DNA
acacataccacacacaatcacattatatacacagaaacacatacgccacctacacagaacattatatagagacacaccac

SEQ ID NO: 37446 - DNA, 80 bp, synthetic construct
  misc_feature 1..80: note = Artificially Synthesized Probe
  source 1..80: mol_type = other DNA
acacacagaatcacacaccttatctacccctaaagttactgccctctttctagttccctcttgtcattcttttctgctta

SEQ ID NO: 37447 - DNA, 80 bp, synthetic construct
  misc_feature 1..80: note = Artificially Synthesized Probe
  source 1..80: mol_type = other DNA
cccctcctgacagggacccgaactctttaaactgcaacttacccctcctgactggggggggacctgcctcctactgactg

SEQ ID NO: 37448 - DNA, 80 bp, synthetic construct
  misc_feature 1..80: note = Artificially Synthesized Probe
  source 1..80: mol_type = other DNA
ctgtgatttcctttctccttgtctcttcctcctgagcactccatttcagctgtgggctctctctctctctctctctctct

SEQ ID NO: 37449 - DNA, 80 bp, synthetic construct
  misc_feature 1..80: note = Artificially Synthesized Probe
  source 1..80: mol_type = other DNA
acggactcctcaccatctgagcgtgactgctcatctcactgcttcttactcatctctccaccaggatctaactccatgga

SEQ ID NO: 37450 - DNA, 80 bp, synthetic construct
  misc_feature 1..80: note = Artificially Synthesized Probe
  source 1..80: mol_type = other DNA
aaagtctttgaggaattccattacggttcacatttatgtctgccatgttcatggcactgagtgggggtcactcttcctgt

SEQ ID NO: 37451 - DNA, 80 bp, synthetic construct
  misc_feature 1..80: note = Artificially Synthesized Probe
  source 1..80: mol_type = other DNA
aggaatcagaatctcttcaagcaaccatatttgccaaattgtaactgtaaattacacctggtcatttctggacagatgtg

SEQ ID NO: 37452 - DNA, 80 bp, synthetic construct
  misc_feature 1..80: note = Artificially Synthesized Probe
  source 1..80: mol_type = other DNA
gcaaagaaatgaaataacgatgaaaacccttccttattgatgatgagaccatagttctataagagggtttttctttgctt

SEQ ID NO: 37453 - DNA, 80 bp, synthetic construct
  misc_feature 1..80: note = Artificially Synthesized Probe
  source 1..80: mol_type = other DNA
tctggggagccgttcaggaatcccacccccgcattctctatacaggcacccagcgttctgctaggtcagggacgccaagg

SEQ ID NO: 37454 - DNA, 80 bp, synthetic construct
  misc_feature 1..80: note = Artificially Synthesized Probe
  source 1..80: mol_type = other DNA
aacaaccatcactgaaaaataagcaaatgttttcacccgctaaagggacagagattgaatgagctactatgcagacaccc

SEQ ID NO: 37455 - DNA, 80 bp, synthetic construct
  misc_feature 1..80: note = Artificially Synthesized Probe
  source 1..80: mol_type = other DNA
aatatattcctcgactgtttccagaaaattctatcctccatgcaaatagattccttcaagaggctacttaaaagcacatc

SEQ ID NO: 37456 - DNA, 80 bp, synthetic construct
  misc_feature 1..80: note = Artificially Synthesized Probe
  source 1..80: mol_type = other DNA
ataaaagtaacagccacaaaaaaagtaaatccatgtaacgcagttgcactgctgtgcgtgcagattctcgacagattgcc

SEQ ID NO: 37457 - DNA, 80 bp, synthetic construct
  misc_feature 1..80: note = Artificially Synthesized Probe
  source 1..80: mol_type = other DNA
tgtattctgtggctggattacaaaagtgggtcgagctgtcacaattaaacagaaattctcaattaatttctcccggtttg

SEQ ID NO: 37458 - DNA, 80 bp, synthetic construct
  misc_feature 1..80: note = Artificially Synthesized Probe
  source 1..80: mol_type = other DNA
ctacacaaatgaactagaaaatctggaagaaagcggtaaattcctggacatatacaccctcctaagagggtattcaaata

SEQ ID NO: 37459 - DNA, 80 bp, synthetic construct
  misc_feature 1..80: note = Artificially Synthesized Probe
  source 1..80: mol_type = other DNA
tcagaaataacaccacccatctacaaccatctgatctttgacaaacctgacaaaaacaagcaatggggaaaggattccct

SEQ ID NO: 37460 - DNA, 80 bp, synthetic construct
  misc_feature 1..80: note = Artificially Synthesized Probe
  source 1..80: mol_type = other DNA
gcctgtcggggggttgggggaaaggggacagagagcattaggacaaatatccaatgcctgtcgggcttaaaacctagatg

SEQ ID NO: 37461 - DNA, 80 bp, synthetic construct
  misc_feature 1..80: note = Artificially Synthesized Probe
  source 1..80: mol_type = other DNA
caaaactggatctagctagcataagactacctatagtctttatgctactttctgtgaatatccatacagtttgctatagg

SEQ ID NO: 37462 - DNA, 80 bp, synthetic construct
  misc_feature 1..80: note = Artificially Synthesized Probe
  source 1..80: mol_type = other DNA
ggacaaaggaagtgggaaccacatggatgcatccagacaaacactgggagaacaaaataataatgtttataggtttaaaa

SEQ ID NO: 37463 - DNA, 80 bp, synthetic construct
  misc_feature 1..80: note = Artificially Synthesized Probe
  source 1..80: mol_type = other DNA
ttgtgtctcacagagacctacacgtcactctattcctattactatatattattaccatagtccgtgacagcagttggcca

SEQ ID NO: 37464 - DNA, 80 bp, synthetic construct
  misc_feature 1..80: note = Artificially Synthesized Probe
  source 1..80: mol_type = other DNA
atatccttgggctttcctttgaatggaaatgtgatagccaggaattctcagtcactgataactgttgattgtgtctatgc

SEQ ID NO: 37465 - DNA, 80 bp, synthetic construct
  misc_feature 1..80: note = Artificially Synthesized Probe
  source 1..80: mol_type = other DNA
gcaagtttaggcgggaatctgtcttcatgctcagctcattactacaaagacagaaatatggtctggtcaagtgttgaaag

SEQ ID NO: 37466 - DNA, 80 bp, synthetic construct
  misc_feature 1..80: note = Artificially Synthesized Probe
  source 1..80: mol_type = other DNA
ctcaccccacctgtaacttcactttagttccctttatgcagaagcaggtgaagaggagagaggtgacattggatgccact

SEQ ID NO: 37467 - DNA, 80 bp, synthetic construct
  misc_feature 1..80: note = Artificially Synthesized Probe
  source 1..80: mol_type = other DNA
gtgagatttcaactgcgggcatcaattttttcgtatataaaatgtaggtgtgatggactggggccaaatttatgcttccc

SEQ ID NO: 37468 - DNA, 80 bp, synthetic construct
  misc_feature 1..80: note = Artificially Synthesized Probe
  source 1..80: mol_type = other DNA
acaggtccacagcatgtttgtggacacaagagaagacttcctttgtttgggagacaagttagatccacacgggagctgag

SEQ ID NO: 37469 - DNA, 80 bp, synthetic construct
  misc_feature 1..80: note = Artificially Synthesized Probe
  source 1..80: mol_type = other DNA
tgaaaataaatgacaacacacgctgagttctctgtgtccaaaaggaaaccacagatgcccaaaggtgtaattcagccaca

SEQ ID NO: 37470 - DNA, 80 bp, synthetic construct
  misc_feature 1..80: note = Artificially Synthesized Probe
  source 1..80: mol_type = other DNA
ccaacgttccgtaaaccctcccatggctccccatcaccacaaaatcaaaataagctttcgctgctttcttcattatttag

SEQ ID NO: 37471 - DNA, 80 bp, synthetic construct
  misc_feature 1..80: note = Artificially Synthesized Probe
  source 1..80: mol_type = other DNA
cggcgctcagttctaactgcccctgacatagctccagcaagaactgagctagaagaaacttaaaaaaaaaaactgtgtat

SEQ ID NO: 37472 - DNA, 80 bp, synthetic construct
  misc_feature 1..80: note = Artificially Synthesized Probe
  source 1..80: mol_type = other DNA
gcgcgtgtgtctataaatggtgtgtgtgtaaatgtgtgtgtgtggtgtgtggatgttgtgtgtgtagatggtgtgtgtgt

SEQ ID NO: 37473 - DNA, 80 bp, synthetic construct
  misc_feature 1..80: note = Artificially Synthesized Probe
  source 1..80: mol_type = other DNA
cactgtcactcaacgcccatcatcacgggcaggacagttctacatcatctccctccggcctgaggcttcccaggcagtgt

SEQ ID NO: 37474 - DNA, 80 bp, synthetic construct
  misc_feature 1..80: note = Artificially Synthesized Probe
  source 1..80: mol_type = other DNA
tcagggatgtgaggttagagactgctccgagcagacagcagccaggacacagcgtgttctcttgatgcagctctgtaaat

SEQ ID NO: 37475 - DNA, 80 bp, synthetic construct
  misc_feature 1..80: note = Artificially Synthesized Probe
  source 1..80: mol_type = other DNA
tctgtctcaaaaaaaagggtaaagatcagcctccttagtatgctgtagaaagacacagaatatagcacagaggttctttc

SEQ ID NO: 37476 - DNA, 80 bp, synthetic construct
  misc_feature 1..80: note = Artificially Synthesized Probe
  source 1..80: mol_type = other DNA
tcacaatctcttcatagattccaagtgattaaatgtccctggaactaaatgtgtaatccggttgttatgcaaaaatctgt

SEQ ID NO: 37477 - DNA, 80 bp, synthetic construct
  misc_feature 1..80: note = Artificially Synthesized Probe
  source 1..80: mol_type = other DNA
aaataagagaccatctttcctcgggtgtcgttgattgtacagaatacccagtgtttctatttctttccatttaccatact

SEQ ID NO: 37478 - DNA, 80 bp, synthetic construct
  misc_feature 1..80: note = Artificially Synthesized Probe
  source 1..80: mol_type = other DNA
cgagggaaggaaagggggtatttcaagccccacggagagcgatgggtgtaaaaatccctccacccagactgcaatgcagg

SEQ ID NO: 37479 - DNA, 80 bp, synthetic construct
  misc_feature 1..80: note = Artificially Synthesized Probe
  source 1..80: mol_type = other DNA
ccagctcaagaagccctccccatcatccaaaatttcagcaaacatctacttggtgattcacagatgcccttcctcattca

SEQ ID NO: 37480 - DNA, 80 bp, synthetic construct
  misc_feature 1..80: note = Artificially Synthesized Probe
  source 1..80: mol_type = other DNA
atgcatcatgcaaacagctagctcactccactggtccctacaagaggaaaacagccagacggcatccaagaactaaagca

SEQ ID NO: 37481 - DNA, 80 bp, synthetic construct
  misc_feature 1..80: note = Artificially Synthesized Probe
  source 1..80: mol_type = other DNA
caagcctgatggaggatgaaaatttccacaccaaagtatcacaattccaaaaagagccacaaaaccatgcgcattgtgcc

SEQ ID NO: 37482 - DNA, 80 bp, synthetic construct
  misc_feature 1..80: note = Artificially Synthesized Probe
  source 1..80: mol_type = other DNA
aatggacagaagttgttgaaattaatgtgtgtgtatatatataaagctcttacaatatggcccctgcacacattaaccat

SEQ ID NO: 37483 - DNA, 80 bp, synthetic construct
  misc_feature 1..80: note = Artificially Synthesized Probe
  source 1..80: mol_type = other DNA
taggttgtacacaggtgaaatcacagcatttaactctcacacagtttcctaaatcagcacttatcaaatgtactccacca

SEQ ID NO: 37484 - DNA, 80 bp, synthetic construct
  misc_feature 1..80: note = Artificially Synthesized Probe
  source 1..80: mol_type = other DNA
cacacacttcgtcacctttccaattttatagcaagtatgtgtgtgactgagactaaaccagtacttcccaggaagctcat

SEQ ID NO: 37485 - DNA, 80 bp, synthetic construct
  misc_feature 1..80: note = Artificially Synthesized Probe
  source 1..80: mol_type = other DNA
aaccatcatgaagaaaacgttgctgagcaatggtgtccgtaccactccacagttactaccttttgatacagcggagaaaa

SEQ ID NO: 37486 - DNA, 80 bp, synthetic construct
  misc_feature 1..80: note = Artificially Synthesized Probe
  source 1..80: mol_type = other DNA
tgccccaggttggatctctctgattctgttaaagcgaagatctctgtgaagaaacaagaaaggtattattacgtgaaaaa

SEQ ID NO: 37487 - DNA, 80 bp, synthetic construct
  misc_feature 1..80: note = Artificially Synthesized Probe
  source 1..80: mol_type = other DNA
atgcagaggcgtcggctctacccttgcagacagcccatcccagcttgaattaaaactataaattgaacaggtatagaaac

SEQ ID NO: 37488 - DNA, 80 bp, synthetic construct
  misc_feature 1..80: note = Artificially Synthesized Probe
  source 1..80: mol_type = other DNA
acacgcaccctccccctgcaccgccatgctcccctctaaacagatgagattttaatttacattcatattcagaatatcac

SEQ ID NO: 37489 - DNA, 80 bp, synthetic construct
  misc_feature 1..80: note = Artificially Synthesized Probe
  source 1..80: mol_type = other DNA
tgtcccatccacaagtccctgtgccctgggtctgagcacctgagaggtggcctagagtgatggacagagaggtgctgtcc

SEQ ID NO: 37490 - DNA, 80 bp, synthetic construct
  misc_feature 1..80: note = Artificially Synthesized Probe
  source 1..80: mol_type = other DNA
taatagctgaaatgaaaagctcattgcatggacttaacatattgaatactgcagaggggagaggacttgggagctactca

SEQ ID NO: 37491 - DNA, 80 bp, synthetic construct
  misc_feature 1..80: note = Artificially Synthesized Probe
  source 1..80: mol_type = other DNA
aaagtacttaaatttaagtgccacatgtaagtgctccccactttacaatttttaaaataagctttgcacatgtctgggca

SEQ ID NO: 37492 - DNA, 80 bp, synthetic construct
  misc_feature 1..80: note = Artificially Synthesized Probe
  source 1..80: mol_type = other DNA
agaaatgcaattagagtcggcccagggctcttttctcagcattaaaattgctctcattgaaggcatttcaagaggttaat

SEQ ID NO: 37493 - DNA, 80 bp, synthetic construct
  misc_feature 1..80: note = Artificially Synthesized Probe
  source 1..80: mol_type = other DNA
aaccccgtttctattaaaaatacaaaaaattagctgggcgtggtggtgggtgcctgtaatcccagctactcgggaggttg

SEQ ID NO: 37494 - DNA, 80 bp, synthetic construct
  misc_feature 1..80: note = Artificially Synthesized Probe
  source 1..80: mol_type = other DNA
attatcttgaagctaatggcagaaatatcattttaagctcctcattaaggtacaggatttcaactcgaatgtgccttcct

SEQ ID NO: 37495 - DNA, 80 bp, synthetic construct
  misc_feature 1..80: note = Artificially Synthesized Probe
  source 1..80: mol_type = other DNA
tgaaggattaggacttcataatgtactcgcttctgtacttaacatatgtgacctgagccactcgtgcaggcggccacagt

SEQ ID NO: 37496 - DNA, 80 bp, synthetic construct
  misc_feature 1..80: note = Artificially Synthesized Probe
  source 1..80: mol_type = other DNA
tgccaaggtcgaggacatgcccatgacacagcctcaggaggtcccgacgacaaatgtccaaagtcttcagggcacagctt

SEQ ID NO: 37497 - DNA, 80 bp, synthetic construct
  misc_feature 1..80: note = Artificially Synthesized Probe
  source 1..80: mol_type = other DNA
actccaggtgaaggtagggggcaactccaggtgaaggtaggggacaactccaggtgaaggggggcaactccaggtgaagg

SEQ ID NO: 37498 - DNA, 80 bp, synthetic construct; identical to SEQ ID NO: 37497
  misc_feature 1..80: note = Artificially Synthesized Probe
  source 1..80: mol_type = other DNA

SEQ ID NO: 37499 - DNA, 80 bp, synthetic construct
  misc_feature 1..80: note = Artificially Synthesized Probe
  source 1..80: mol_type = other DNA
cacgacctgggacgcagggtgcagggtgcagctccctgtgacctgggacgcagggtgcagagtgcagggtgcagctcccc

SEQ ID NO: 37500 - DNA, 80 bp, synthetic construct
  misc_feature 1..80: note = Artificially Synthesized Probe
  source 1..80: mol_type = other DNA
agtaacaactgtttaagtcacaaatcggacacggtctcactgcaagccacagaatcttacatcctgctggcattgccaga

SEQ ID NO: 37501 - DNA, 80 bp, synthetic construct
  misc_feature 1..80: note = Artificially Synthesized Probe
  source 1..80: mol_type = other DNA
tgacttttgtgtaaataatcaacccacacttttcacccaaatttttggaagcacgaggttgccaaaagtcttccaaaaat

SEQ ID NO: 37502 - DNA, 80 bp, synthetic construct
  misc_feature 1..80: note = Artificially Synthesized Probe
  source 1..80: mol_type = other DNA
cacgcaccctctgtccctgccattgttctgcaattagttaagagggggaaacatgcttcttacaacccagcaggacgctt

SEQ ID NO: 37503 - DNA, 80 bp, synthetic construct
  misc_feature 1..80: note = Artificially Synthesized Probe
  source 1..80: mol_type = other DNA
tggctctgatcccacccgtggaactgcaaagaatatcccagcccctgtgctcgccgctcactcattggtactagcgacac

SEQ ID NO: 37504 - DNA, 80 bp, synthetic construct
  misc_feature 1..80: note = Artificially Synthesized Probe
  source 1..80: mol_type = other DNA
acgcagctgcggagaggagaacatctgggttcctccagttttgcactattataaatagccctgcaatgacaagctttcgg

SEQ ID NO: 37505 - DNA, 80 bp, synthetic construct
  misc_feature 1..80: note = Artificially Synthesized Probe
  source 1..80: mol_type = other DNA
ctccaccagcacccactccaccagcacccactccaccagcacccactctccaccagcacccactccaccagcacccactc

SEQ ID NO: 37506 - DNA, 80 bp, synthetic construct
  misc_feature 1..80: note = Artificially Synthesized Probe
  source 1..80: mol_type = other DNA
cttcactcaaccagcggctcccatctcagcttcccaagacaagatgtcaggttaacacaactctcaagtaatcatccagt

SEQ ID NO: 37507 - DNA, 80 bp, synthetic construct
  misc_feature 1..80: note = Artificially Synthesized Probe
  source 1..80: mol_type = other DNA
ttaaaaagaatactcctttaattaaaagtaaatgaatgagtcacacaggtggcccctggttcctagacctggtgatcttg

SEQ ID NO: 37508 - DNA, 80 bp, synthetic construct
  misc_feature 1..80: note = Artificially Synthesized Probe
  source 1..80: mol_type = other DNA
ggcacgtgggtctcaagggacagtgaagtttcatgtcaccctgaaacatggcccagcctgggcaacctacgataatattg

SEQ ID NO: 37509 - DNA, 80 bp, synthetic construct
  misc_feature 1..80: note = Artificially Synthesized Probe
  source 1..80: mol_type = other DNA
gtcttgctcaccctgtcccagattaacctatgtctagcatttatcttttgggagcatcaggttttaggcgacatatgaac

SEQ ID NO: 37510 - DNA, 80 bp, synthetic construct
  misc_feature 1..80: note = Artificially Synthesized Probe
  source 1..80: mol_type = other DNA
tactcagggttaaggtacttgcccgggaaaaccaaaatgtgtgcgtatgacacagacatagttttttccagcaaacaata

SEQ ID NO: 37511 - DNA, 80 bp, synthetic construct
  misc_feature 1..80: note = Artificially Synthesized Probe
  source 1..80: mol_type = other DNA
aaccgctccagacacacctgtttgaccccaaggacaaacatgaggggctggaaaatgatgaaaggaagcccagttccact

SEQ ID NO: 37512 - DNA, 80 bp, synthetic construct
  misc_feature 1..80: note = Artificially Synthesized Probe
  source 1..80: mol_type = other DNA
aaactcctattgacaaaagaaaaacttgcaacaatagactcacctaatttacctaatagatgaaaagaatcaggtcacca

SEQ ID NO: 37513 - DNA, 80 bp, synthetic construct
  misc_feature 1..80: note = Artificially Synthesized Probe
  source 1..80: mol_type = other DNA
aacctaccacctaaacttactctactaacctactctaacttaccacccaaacctactcttttaacctactccactaacct

SEQ ID NO: 37514 - DNA, 80 bp, synthetic construct
  misc_feature 1..80: note = Artificially Synthesized Probe
  source 1..80: mol_type = other DNA
acagtcctccagtttcagcccccacggccagctgttaatccctgaacattttcaagttcaagttctcaggagacagcact

SEQ ID NO: 37515 - DNA, 80 bp, synthetic construct
  misc_feature 1..80: note = Artificially Synthesized Probe
  source 1..80: mol_type = other DNA
ctcgctccacgctttctcacaccacctgctccagaccagagcctggggaggcagccgaccacctttgcctctcagataca

SEQ ID NO: 37516 - DNA, 80 bp, synthetic construct
  misc_feature 1..80: note = Artificially Synthesized Probe
  source 1..80: mol_type = other DNA
gtggcaggcagctgagatgaagccaacttagaagtgtcagaattcaaacaactgaacgggaatagtttcaacaacggtac

SEQ ID NO: 37517 - DNA, 80 bp, synthetic construct
  misc_feature 1..80: note = Artificially Synthesized Probe
  source 1..80: mol_type = other DNA
atcacttgttaggaaggcgagaaaggcaagccaagctgatgagtgaatgaggaaacgctttttaaagtgctaaataagac

SEQ ID NO: 37518 - DNA, 80 bp, synthetic construct
  misc_feature 1..80: note = Artificially Synthesized Probe
  source 1..80: mol_type = other DNA
atgagtggttatggatgaatggacagatggactaatgaatggatacattgatggatggctgactggaaaatggatgagta

SEQ ID NO: 37519 - DNA, 80 bp, synthetic construct
  misc_feature 1..80: note = Artificially Synthesized Probe
  source 1..80: mol_type = other DNA
atggatggatgaatggatggatgaaaggggggttatggatggatgggtaaacgtgaatggatagggtgacatgggcactg

SEQ ID NO: 37520 - DNA, 80 bp, synthetic construct
  misc_feature 1..80: note = Artificially Synthesized Probe
  source 1..80: mol_type = other DNA
gacgaccctttcctcattgtgtattcttggcacccttgttgaaagttagttgatcatctatgcctgagttcatttctggg

SEQ ID NO: 37521 - DNA, 80 bp, synthetic construct
  misc_feature 1..80: note = Artificially Synthesized Probe
  source 1..80: mol_type = other DNA
caaatgggatctaattaaactaaagagcttctgcatagcaaaacaaactaccatcagagtgaacaggcaacctacagaat

SEQ ID NO: 37522 - DNA, 80 bp, synthetic construct
  misc_feature 1..80: note = Artificially Synthesized Probe
  source 1..80: mol_type = other DNA
tccttggctgtacagagcttttactttaatgtagtcctacttgtttatttatttttgcttttgaatttccgtttttattg

SEQ ID NO: 37523 - DNA, 80 bp, synthetic construct
  misc_feature 1..80: note = Artificially Synthesized Probe
  source 1..80: mol_type = other DNA
acttaaatgtgcaggattccatgcaagccgtaacgtaataagtagcatccattgcaagagcagctactgtgcttggctgt

SEQ ID NO: 37524 - DNA, 80 bp, synthetic construct
  misc_feature 1..80: note = Artificially Synthesized Probe
  source 1..80: mol_type = other DNA
gctggtaaagctgacaacggccctcttgtttccactctcctgccgtaaacagggtctttttcaaggtctatttagggcca

SEQ ID NO: 37525 - DNA, 80 bp, synthetic construct
  misc_feature 1..80: note = Artificially Synthesized Probe
  source 1..80: mol_type = other DNA
aaaccatttgcagaaaaaacaaattgtaagaatcaaaatgcagtcactcagcaaagaaacatgagcacttacacaggctg

SEQ ID NO: 37526 - DNA, 80 bp, synthetic construct
  misc_feature 1..80: note = Artificially Synthesized Probe
  source 1..80: mol_type = other DNA
aaagctggatgatgcaattagtgggtaaaagagcaggcatcataattcttagcttacagcttgtggagaaaaagctgctg

SEQ ID NO: 37527 - DNA, 80 bp, synthetic construct
  misc_feature 1..80: note = Artificially Synthesized Probe
  source 1..80: mol_type = other DNA
acacacacatgaactagtgagaggaagttttaagagagcgagcaataattgtgtgctattaaactttgggacagctatgg

SEQ ID NO: 37528 - DNA, 80 bp, synthetic construct
  misc_feature 1..80: note = Artificially Synthesized Probe
  source 1..80: mol_type = other DNA
aagccgaatggccctgactaaggcaacagcattccaaagacagatggagaacaccaggattgagtcattttcatcttttc

SEQ ID NO: 37529 - DNA, 80 bp, synthetic construct
  misc_feature 1..80: note = Artificially Synthesized Probe
  source 1..80: mol_type = other DNA
agaggagacaaagatggggacagaaaacatatctgaagatgaaacacccccagattttccaaatttgaagaaatctgtaa

SEQ ID NO: 37530 - DNA, 80 bp, synthetic construct
  misc_feature 1..80: note = Artificially Synthesized Probe
  source 1..80: mol_type = other DNA
caacaatatcacaaaacttggggccagagagaaatataccgctcggatatttcaggtttgggcccagatcactgaaataa

SEQ ID NO: 37531 - DNA, 80 bp, synthetic construct
  misc_feature 1..80: note = Artificially Synthesized Probe
  source 1..80: mol_type = other DNA
catccatagacacaactccccctctgttctagtttatcatgaagttgcagcaattctctcatatcttcagactccatttc

SEQ ID NO: 37532 - DNA, 80 bp, synthetic construct
  misc_feature 1..80: note = Artificially Synthesized Probe
  source 1..80: mol_type = other DNA
tgtttttccattggtagagcagaaacacagtagatttggcagggtccttaagaccctagggttggggaatggtaaatgag

SEQ ID NO: 37533 - DNA, 80 bp, synthetic construct
  misc_feature 1..80: note = Artificially Synthesized Probe
  source 1..80: mol_type = other DNA
agagttttgttatctcatgtggacaaaggtcaaatcaggtaacagtcactggtcaagcctctccttctgatttaactgta

SEQ ID NO: 37534 - DNA, 80 bp, synthetic construct
  misc_feature 1..80: note = Artificially Synthesized Probe
  source 1..80: mol_type = other DNA
atgcctattcttttctttttttttttgagatggagtcttgctctgtcccccaagctggagttcagtggcacgatctcaac

SEQ ID NO: 37535 - DNA, 80 bp, synthetic construct
  misc_feature 1..80: note = Artificially Synthesized Probe
  source 1..80: mol_type = other DNA
tgtcaagcgcaaaggaaaaacacctggattctccaatcagaaaggtatttatctcataataagccaatgggaatcagcat

SEQ ID NO: 37536 - DNA, 80 bp, synthetic construct
  misc_feature 1..80: note = Artificially Synthesized Probe
  source 1..80: mol_type = other DNA
cccaggaaaggtcccaacacacactgtcttggggatgggccctctctaagcttattttgaacactgaagattttcctctt

SEQ ID NO: 37537 - DNA, 80 bp, synthetic construct
  misc_feature 1..80: note = Artificially Synthesized Probe
  source 1..80: mol_type = other DNA
catgtgactcactcaggcgacgcagtctcctagacacaggaagtcagttaaaaggcccaaacacccactcccacctatgg

SEQ ID NO: 37538 - DNA, 80 bp, synthetic construct
  misc_feature 1..80: note = Artificially Synthesized Probe
  source 1..80: mol_type = other DNA
attgtgttgggtacagaatgattctgtattcaaaaaccaaccatttctacacagctgaactaagtaaggcctccagaggg

SEQ ID NO: 37539 - DNA, 80 bp, synthetic construct
  misc_feature 1..80: note = Artificially Synthesized Probe
  source 1..80: mol_type = other DNA
ttctataagggattcgatcaacttaacagctaccagtctacctgcctcacagaatcaacgtgactcaacagcgacatttc

SEQ ID NO: 37540 - DNA, 80 bp, synthetic construct
  misc_feature 1..80: note = Artificially Synthesized Probe
  source 1..80: mol_type = other DNA
aggcctgcagcgaactctggcggcatctcggtacctggagccgcggggcggagggatggggattcctgctgtggagaccg

SEQ ID NO: 37541 - DNA, 80 bp, synthetic construct
  misc_feature 1..80: note = Artificially Synthesized Probe
  source 1..80: mol_type = other DNA
tccagcagcagatgcatgcagcgcacggtggtgcggaagcacaggcagcggctcggacaccctgcgcccggcttctgggc

SEQ ID NO: 37542 - DNA, 80 bp, synthetic construct
  misc_feature 1..80: note = Artificially Synthesized Probe
  source 1..80: mol_type = other DNA
caaacttggtgtctcaagttcagggcttcgaaagtcccgaatatttgtttgtcccgagagaagagttttgactttgaaga

SEQ ID NO: 37543 - DNA, 80 bp, synthetic construct
  misc_feature 1..80: note = Artificially Synthesized Probe
  source 1..80: mol_type = other DNA
gtcgggctctgccaggtttttttaatttttaaaatcatggtgaaaattggttccagttgagtgcagaggccagtgctctc

SEQ ID NO: 37544 - DNA, 80 bp, synthetic construct
  misc_feature 1..80: note = Artificially Synthesized Probe
  source 1..80: mol_type = other DNA
ggcagcggctacccagaggccagcggcagtctgagccccagccgagccagtctgcagtgtcacctgctgctcaggcatca

SEQ ID NO: 37545 - DNA, 80 bp, synthetic construct
  misc_feature 1..80: note = Artificially Synthesized Probe
  source 1..80: mol_type = other DNA
gccctggccaccgactcttagagtgctgtggcttctgggtagtaagagtgcagggaccccgccattcatcaagcatcatc

SEQ ID NO: 37546 - DNA, 80 bp, synthetic construct
  misc_feature 1..80: note = Artificially Synthesized Probe
  source 1..80: mol_type = other DNA
gcaacacaccccctgctctacgttccctggggaacccagaggctgagtgatcctaagacgtgcaggcctacgcgggggct

SEQ ID NO: 37547 - DNA, 80 bp, synthetic construct
  misc_feature 1..80: note = Artificially Synthesized Probe
  source 1..80: mol_type = other DNA
tggttctttctgggagaggcggcccctgacctaaaggatcagtataagaccaaagggggctaggcacggtcgctcacacc

SEQ ID NO: 37548 - DNA, 80 bp, synthetic construct
  misc_feature 1..80: note = Artificially Synthesized Probe
  source 1..80: mol_type = other DNA
ttctagtgggtgctacagaaataaatcccgtaaacctaatttttattttttatgactgcactgcacgtgcataagaatga

SEQ ID NO: 37549 - DNA, 80 bp, synthetic construct
  misc_feature 1..80: note = Artificially Synthesized Probe
  source 1..80: mol_type = other DNA
tctgggggaaagatgttccaggcaaggggggcaggtgcaaaggccctgaggcagcgtggccaggggagtgtgtaaggaga

SEQ ID NO: 37550 - DNA, 80 bp, synthetic construct
  misc_feature 1..80: note = Artificially Synthesized Probe
  source 1..80: mol_type = other DNA
cacaggttaggtctgtagcttggaaatgatttcccttcagagctctcaggacatcgctctactgccttctgggtttctgc

SEQ ID NO: 37551 - DNA, 80 bp, synthetic construct
  misc_feature 1..80: note = Artificially Synthesized Probe
  source 1..80: mol_type = other DNA
agccccccacccgccagaattctctcggaggtctggtgggactaacctgtaaaaggaccatttcagcaagaactgccggg

SEQ ID NO: 37552 - DNA, 80 bp, synthetic construct
  misc_feature 1..80: note = Artificially Synthesized Probe
  source 1..80: mol_type = other DNA
gagggagcaggaaacagcaacctgggcagggaagagggaacctcctgctattcttaaggacccagtgtgtgagaatcagt

SEQ ID NO: 37553 - DNA, 80 bp, synthetic construct
  misc_feature 1..80: note = Artificially Synthesized Probe
  source 1..80: mol_type = other DNA
gaaatgcttgtgagaacggtgggtaatcactctcttttccacaagtcggccaaggttctacatttcaaattcgactgatt

SEQ ID NO: 37554 - DNA, 80 bp, synthetic construct
  misc_feature 1..80: note = Artificially Synthesized Probe
  source 1..80: mol_type = other DNA
ccccaccccagacaacgatccagccccagatatcaacagtgccaagggaaagaggccttgacacaaacacacacacacac

SEQ ID NO: 37555 - DNA, 80 bp, synthetic construct
  misc_feature 1..80: note = Artificially Synthesized Probe
  source 1..80: mol_type = other DNA
tgtgcctgtcactctctccccaccccaccaagtcctgtgggaaatcacagggtggggcgctggggtgtaaatgtctcctg

SEQ ID NO: 37556 - DNA, 80 bp, synthetic construct
  misc_feature 1..80: note = Artificially Synthesized Probe
  source 1..80: mol_type = other DNA
tctcaaactcctgggctcagcgatttgtctgcctcagcctcccatagtgtggggatcactggcatgagccaccgcgcccg

SEQ ID NO: 37557 - DNA, 80 bp, synthetic construct
  misc_feature 1..80: note = Artificially Synthesized Probe
  source 1..80: mol_type = other DNA
caagtcaactctaccaagtctaaaaattacagggatggaggcagaggggtctgaaccctgattcttggagagctgaggct

SEQ ID NO: 37558 - DNA, 80 bp, synthetic construct
  misc_feature 1..80: note = Artificially Synthesized Probe
  source 1..80: mol_type = other DNA
caaccgcccgagtaactgggattacaggtgggcgccacgatgccagctaatttttgcattttttagtagagacaggattt

SEQ ID NO: 37559 - DNA, 80 bp, synthetic construct
  misc_feature 1..80: note = Artificially Synthesized Probe
  source 1..80: mol_type = other DNA
ctcctgcctcagcctcctgagtaggtgggaccacaggagcttgctactatgcctggctaattttttaagtttttagtatg

SEQ ID NO: 37560 - DNA, 80 bp, synthetic construct
  misc_feature 1..80: note = Artificially Synthesized Probe
  source 1..80: mol_type = other DNA
aggattcagtcaggcatgtgtgtgtgatgtttacaagttgcggtcaaatacacataacacaaaagctaccatcggaacca

SEQ ID NO: 37561 - DNA, 80 bp, synthetic construct
  misc_feature 1..80: note = Artificially Synthesized Probe
  source 1..80: mol_type = other DNA
ggagattctttgcgtgaatcacaaacatcttattattggtgcaatcttagaagttctgagactttcattttgagccagat

SEQ ID NO: 37562 - DNA, 80 bp, synthetic construct
  misc_feature 1..80: note = Artificially Synthesized Probe
  source 1..80: mol_type = other DNA
gctggctcctgccttagaagatgagaaagtttgtgatggatggagaagaggatcttccagaaaataaccagggctttcca

SEQ ID NO: 37563 - DNA, 80 bp, synthetic construct
  misc_feature 1..80: note = Artificially Synthesized Probe
  source 1..80: mol_type = other DNA
ggtacttcgagttgcccctggaaaccaaacatcccagggtcagctccctttgcagatgtcctgaacaacaagacaggttg

SEQ ID NO: 37564 - DNA, 80 bp, synthetic construct
  misc_feature 1..80: note = Artificially Synthesized Probe
  source 1..80: mol_type = other DNA
atgatgatcagagggctttaaacaatttagttcagaaaacagctcacagagtccttacaggagggaagcattaacccaca

SEQ ID NO: 37565 - DNA, 80 bp, synthetic construct
  misc_feature 1..80: note = Artificially Synthesized Probe
  source 1..80: mol_type = other DNA
gtgctgctgtttctttctgttagaggagagttggcataattgcctgtgataagtctgtggcctgtgatgtcccggggctg

SEQ ID NO: 37566 - DNA, 80 bp, synthetic construct
  misc_feature 1..80: note = Artificially Synthesized Probe
  source 1..80: mol_type = other DNA
aagagaacttctggggagactcacaccttccgctgtttcataattatccaacagccactggagctgtaaaaagaaagaca

SEQ ID NO: 37567 - DNA, 80 bp, synthetic construct
  misc_feature 1..80: note = Artificially Synthesized Probe
  source 1..80: mol_type = other DNA
tttgtaaacatctgggtgtgatcaggaactattagcttctgtcttcagtcccttaaatgaaatacccacacaccacacag

SEQ ID NO: 37568 - DNA, 80 bp, synthetic construct
  misc_feature 1..80: note = Artificially Synthesized Probe
  source 1..80: mol_type = other DNA
cagccctcccccaccgggcatgttgggctcctgcacagcccttggcctgggaagcccttgtccctgtgccccgcacaccc

SEQ ID NO: 37569 - DNA, 80 bp, synthetic construct
  misc_feature 1..80: note = Artificially Synthesized Probe
  source 1..80: mol_type = other DNA
ccagcaggggcactgcccacgtgggtgttgaggatgaagaggagcaaagcgtaagcctcgaagtgtgggtccaacctcac

SEQ ID NO: 37570 - DNA, 80 bp, synthetic construct
  misc_feature 1..80: note = Artificially Synthesized Probe
  source 1..80: mol_type = other DNA
tgcaggatcctggagatgtctcaagcctggcagcagagaaagactgtccaaggaggtagatggggagcaacagagggtgt

SEQ ID NO: 37571 - DNA, 80 bp, synthetic construct
  misc_feature 1..80: note = Artificially Synthesized Probe
  source 1..80: mol_type = other DNA
catgtgtacccacatttgccacaatctgtcaggacagcacacttcttgatgaaatggatcaaatcattccttttaaggaa

SEQ ID NO: 37572 - DNA, 80 bp, synthetic construct
  misc_feature 1..80: note = Artificially Synthesized Probe
  source 1..80: mol_type = other DNA
cgatctgacctgggttttagcaggatcactctggtggctgctgtgagaaggggctggaggctgggtaggggtgggtgctg

SEQ ID NO: 37573 - DNA, 80 bp, synthetic construct
  misc_feature 1..80: note = Artificially Synthesized Probe
  source 1..80: mol_type = other DNA
ggttcttccaatgtgcagacctccaggccctgcagaccccctgggtccaagcccctagaggggaggcctgggaagctcct

SEQ ID NO: 37574 - DNA, 80 bp, synthetic construct
  misc_feature 1..80: note = Artificially Synthesized Probe
  source 1..80: mol_type = other DNA
tttattctgcccgtgtgtgtggtgaactttttagaaagatcttattttacttcctttgcttcgagtcaccaagcccggaa

SEQ ID NO: 37575 - DNA, 80 bp, synthetic construct
  misc_feature 1..80: note = Artificially Synthesized Probe
  source 1..80: mol_type = other DNA
ggtgtttgttttgttttgtcttttttgcttcaagacaatcggcagaaggaaatatttctgccatttcttctagtgaccag

SEQ ID NO: 37576 - DNA, 80 bp, synthetic construct
  misc_feature 1..80: note = Artificially Synthesized Probe
  source 1..80: mol_type = other DNA
gacaacccgaggaggtaggtgttgttattatctaccttttacaaataaagaatctgtcttgatttctccttcattgctga

SEQ ID NO: 37577 - DNA, 80 bp, synthetic construct
  misc_feature 1..80: note = Artificially Synthesized Probe
  source 1..80: mol_type = other DNA
attaatatccaaataatgattcgagctcctacaaaataaaaatgaggctccacgcaggcagggcgggggtgagttaaatt

SEQ ID NO: 37578 - DNA, 80 bp, synthetic construct
  misc_feature 1..80: note = Artificially Synthesized Probe
  source 1..80: mol_type = other DNA
ctcattagctacccttgcttcaagccaaggaggacgtcagggtcacctttaagaagtgcagaaggtacactggaggacca

SEQ ID NO: 37579 - DNA, 80 bp, synthetic construct
  misc_feature 1..80: note = Artificially Synthesized Probe
  source 1..80: mol_type = other DNA
aaaaaaacaacaaaaccaaaagaagagtggaatgattccgcatcttcacaaatctgtagagtgcgtgacttacagaagac

SEQ ID NO: 37580 - DNA, 80 bp, synthetic construct
  misc_feature 1..80: note = Artificially Synthesized Probe
  source 1..80: mol_type = other DNA
aaatgcagattttacaaaattagttcagaaaggtcatgaaacaaacgatcaacaacacctataagcagcaacagcaaacc

SEQ ID NO: 37581 - DNA, 80 bp, synthetic construct
  misc_feature 1..80: note = Artificially Synthesized Probe
  source 1..80: mol_type = other DNA
tgagctgagcctaagaaacttgtgggacaccaccaagcttaccaacaaacacacaataggagtcccagaaagagaggaga

SEQ ID NO: 37582 - DNA, 80 bp, synthetic construct
  misc_feature 1..80: note = Artificially Synthesized Probe
  source 1..80: mol_type = other DNA
ctgccagctgtttttcttaatatgtcaggctttgttcatttttggaaacatgtctgccaaatacctgagtccgaataatc

SEQ ID NO: 37583 - DNA, 80 bp, synthetic construct
  misc_feature 1..80: note = Artificially Synthesized Probe
  source 1..80: mol_type = other DNA
agacagagagggccactcccaaacctgctgtagttaattcaccctctgttctaaaacagaacttagacatgttaccatag

SEQ ID NO: 37584 - DNA, 80 bp, synthetic construct
  misc_feature 1..80: note = Artificially Synthesized Probe
  source 1..80: mol_type = other DNA
aatatctctgtgcacgtcctttgtggggcatgagatcacattcacacttgctttaattattttccctcagtctctattta

SEQ ID NO: 37585 - DNA, 80 bp, synthetic construct
  misc_feature 1..80: note = Artificially Synthesized Probe
  source 1..80: mol_type = other DNA
tacaggcaaatctgagactaaatcttcaaacatatctttcaaagggttacttgtaagtgtgaacctgggtacttttccca

SEQ ID NO: 37586 - DNA, 80 bp, synthetic construct
  misc_feature 1..80: note = Artificially Synthesized Probe
  source 1..80: mol_type = other DNA
actgtgcccaggtgacttttcattctacatcttcactgaagagccaggctacagaagaagagatgtgtgtgactcctgat

SEQ ID NO: 37587 - DNA, 80 bp, synthetic construct
  misc_feature 1..80: note = Artificially Synthesized Probe
  source 1..80: mol_type = other DNA
cgagaaacaaaactctgacatgaacgaactggtagacatccaatgttgggtccagcagctgtatttctgttgcaatttca

SEQ ID NO: 37588 - DNA, 80 bp, synthetic construct
  misc_feature 1..80: note = Artificially Synthesized Probe
  source 1..80: mol_type = other DNA
accaccttctatctcaggagatgagccttacaccaaaataagaagttattgtgtaattgaaagtcaatcaatgcaattca

SEQ ID NO: 37589 - DNA, 80 bp, synthetic construct
  misc_feature 1..80: note = Artificially Synthesized Probe
  source 1..80: mol_type = other DNA
tagaaatgaacagttggaaacagaaatttaaagatcaatgccaagaaaacccacaatgccatttacaatagctctccaaa

SEQ ID NO: 37590 - DNA, 80 bp, synthetic construct
  misc_feature 1..80: note = Artificially Synthesized Probe
  source 1..80: mol_type = other DNA
ataggaagcagatctaaatgtaaaatgtaaaactatggtcaggcgcggtggctcacgcctgtaatcccagcactttggga

SEQ ID NO: 37591 - DNA, 80 bp, synthetic construct
  misc_feature 1..80: note = Artificially Synthesized Probe
  source 1..80: mol_type = other DNA
caaccacttgggaaactggtggtttctgataaagttaaacatacactttctgtatgagccagcagcaattccacttgtag

SEQ ID NO: 37592 - DNA, 80 bp, synthetic construct
  misc_feature 1..80: note = Artificially Synthesized Probe
  source 1..80: mol_type = other DNA
ataggctcccgcgctggagacgatggggctccccccgacatccatggtgatgcccaccatgctgtgggaggggaccgctg

SEQ ID NO: 37593 - DNA, 80 bp, synthetic construct
  misc_feature 1..80: note = Artificially Synthesized Probe
  source 1..80: mol_type = other DNA
taaatacaaataaaacttaaaattgtaagtggataaatgggtcacatgagggagctcctgtgtggagatggagcagttct

SEQ ID NO: 37594 - DNA, 80 bp, synthetic construct
  misc_feature 1..80: note = Artificially Synthesized Probe
  source 1..80: mol_type = other DNA
agtacaaaagtctgtgatttctgaaatctccacagggttatgatgtcctaatccctcagctcccaccccgctcctttttt

SEQ ID NO: 37595 - DNA, 80 bp, synthetic construct
  misc_feature 1..80: note = Artificially Synthesized Probe
  source 1..80: mol_type = other DNA
gggacttcaaactctcaccccagagggcatcttagtggctgtctacatccactgaattttggggtgagaagatggagggc

SEQ ID NO: 37596 - DNA, 80 bp, synthetic construct
  misc_feature 1..80: note = Artificially Synthesized Probe
  source 1..80: mol_type = other DNA
cgtgctttcaaactttgttcttagataattgaaatcataagaagcatttcctctgttgtgcccgcatctgagggtatggc

SEQ ID NO: 37597 - DNA, 80 bp, synthetic construct
  misc_feature 1..80: note = Artificially Synthesized Probe
  source 1..80: mol_type = other DNA
aacaatgcacatacatacacaagtgtgcacatacactcagcccatgcaccacacatatgcacgaattgtgggcacacaca

SEQ ID NO: 37598 - DNA, 80 bp, synthetic construct
  misc_feature 1..80: note = Artificially Synthesized Probe
  source 1..80: mol_type = other DNA
cggaattgtgtttttttgtttttgtttttttgtgttttttgggacggatttttgctcttgtcgcccaggctgaagtgcga

SEQ ID NO: 37599 - DNA, 80 bp, synthetic construct
  misc_feature 1..80: note = Artificially Synthesized Probe
  source 1..80: mol_type = other DNA
tttttttttttttttttttttttgtcacttaggttggagagcagtggtatgattacagctcactgcagcctcaaaccact

SEQ ID NO: 37600 - DNA, 80 bp, synthetic construct
  misc_feature 1..80: note = Artificially Synthesized Probe
  source 1..80: mol_type = other DNA
aggaaattgtgcctatttcaacagcagcagcactgggactgagaagtccattcagaaaaatacagattcctctctttgca

SEQ ID NO: 37601 - DNA, 80 bp, synthetic construct
  misc_feature 1..80: note = Artificially Synthesized Probe
  source 1..80: mol_type = other DNA
agggagcaaagaaacagtacattttatcctgggctggataaaagtcctcacgaattttggcagtaagtaaaaactgcctt

SEQ ID NO: 37602 - DNA, 80 bp, synthetic construct
  misc_feature 1..80: note = Artificially Synthesized Probe
  source 1..80: mol_type = other DNA
gactaagaccagttccttgttccgcaggtggaaataattttgctccaaactccagaccttatttaagtaagaagaggcca

SEQ ID NO: 37603 - DNA, 80 bp, synthetic construct
  misc_feature 1..80: note = Artificially Synthesized Probe
  source 1..80: mol_type = other DNA
aagtcacttgccttcaggggaactcagatgaacctacagattctacaatacatcattaatgatgtccaggacccagtaaa

SEQ ID NO: 37604 - DNA, 80 bp, synthetic construct
  misc_feature 1..80: note = Artificially Synthesized Probe
  source 1..80: mol_type = other DNA
agcagtcagagaaaaactacatattatattcggagaacaagggcacagatgatgactggcttctcatcaataacaatggc

SEQ ID NO: 37605 - DNA, 80 bp, synthetic construct
  misc_feature 1..80: note = Artificially Synthesized Probe
  source 1..80: mol_type = other DNA
atgaaaaggcagaaatgatcagcctggataacaatcaagatcccattatatggtccctaaaagaaaccctccttaaaaat

SEQ ID NO: 37606 - DNA, 80 bp, synthetic construct
  misc_feature 1..80: note = Artificially Synthesized Probe
  source 1..80: mol_type = other DNA
taagcctcaatacatttcaaaataccataattatacagagcatgtatgcactttgaccacagtggagtaaattagaaatc

SEQ ID NO: 37607 - DNA, 80 bp, synthetic construct
  misc_feature 1..80: note = Artificially Synthesized Probe
  source 1..80: mol_type = other DNA
gggaagctgtgcatgtgtggaggtatggggtatatgggaaatctctgtattttcctgtcaattttgctgtgaacctaaaa

SEQ ID NO: 37608 - DNA, 80 bp, synthetic construct
  misc_feature 1..80: note = Artificially Synthesized Probe
  source 1..80: mol_type = other DNA
actataagacttctcagagagaacataggaggttagacaaaggtttcttagaatgcacaaatcagcataaaagaaaaact

SEQ ID NO: 37609 - DNA, 80 bp, synthetic construct
  misc_feature 1..80: note = Artificially Synthesized Probe
  source 1..80: mol_type = other DNA
tgttcctcatcaggagagtggacgagaaattgcagattatgatgatttaaagattcatattgaaaaccctaaaacaacca

SEQ ID NO: 37610 - DNA, 80 bp, synthetic construct
  misc_feature 1..80: note = Artificially Synthesized Probe
  source 1..80: mol_type = other DNA
ctttgtggatgtttgaaatttccatgataaggagttaaacaaacacacacacaagacaccagcgatgagcaggagtggct

SEQ ID NO: 37611 - DNA, 80 bp, synthetic construct
  misc_feature 1..80: note = Artificially Synthesized Probe
  source 1..80: mol_type = other DNA
atgttttgtcatctttggtgataattggggcagagttagctgagtggttttagttaccttcattctgattggctgatgag

SEQ ID NO: 37612 - DNA, 80 bp, synthetic construct
  misc_feature 1..80: note = Artificially Synthesized Probe
  source 1..80: mol_type = other DNA
tcagccaggcaaggagtgtgaaataaatgaacaggaccctctgaaggctacccacacattccagagcagcaggcttcaat

SEQ ID NO: 37613 - DNA, 80 bp, synthetic construct
  misc_feature 1..80: note = Artificially Synthesized Probe
  source 1..80: mol_type = other DNA
agtcttcatgacactttcacccagcaaatactcttttggcaggcaacctgattccactgcttctagcaataacttcaaca

SEQ ID NO: 37614 - DNA, 80 bp, synthetic construct
  misc_feature 1..80: note = Artificially Synthesized Probe
  source 1..80: mol_type = other DNA
agcctcaaagtacatttttttctctgtacttttctccttgcaagattccattctaaaattgcaactcttttgtccccctt

SEQ ID NO: 37615 - DNA, 80 bp, synthetic construct
  misc_feature 1..80: note = Artificially Synthesized Probe
  source 1..80: mol_type = other DNA
tcctaattggtctccctgcttccagcctctgccctctcccagccaattttctttcacattggggtgattcaaaagataac

SEQ ID NO: 37616 - DNA, 80 bp, synthetic construct
  misc_feature 1..80: note = Artificially Synthesized Probe
  source 1..80: mol_type = other DNA
gtgcccaccccgagtgtggatcccagcaggtgcctgatcaatgaaatatgtcctaggcaggggcgggaggatccattgaa

SEQ ID NO: 37617 - DNA, 80 bp, synthetic construct
  misc_feature 1..80: note = Artificially Synthesized Probe
  source 1..80: mol_type = other DNA
gtaagtgctcttcattcattctcagtaaccaggaggaaaaggtaaatcagcgtgacttagaatgatcgttccctctgtct

SEQ ID NO: 37618 - DNA, 80 bp, synthetic construct
  misc_feature 1..80: note = Artificially Synthesized Probe
  source 1..80: mol_type = other DNA
tgatgagcagtggggaaaccctctctccagtcagcttgtcatgtcatacaggctttcctgacctcagcaatgcggatatg

SEQ ID NO: 37619 - DNA, 80 bp, synthetic construct
  misc_feature 1..80: note = Artificially Synthesized Probe
  source 1..80: mol_type = other DNA
agaagcggagaaagagcctagttcaaattcaagaatttccatctaaaaccacagcatggagaggcccctttaaaaaccac

SEQ ID NO: 37620 - DNA, 80 bp, synthetic construct
  misc_feature 1..80: note = Artificially Synthesized Probe
  source 1..80: mol_type = other DNA
atcgtccttaaaaaaaatccatacaactaaagcgagtctcaccacgggaaccacaggagctgttttagtgaggggctgga

SEQ ID NO: 37621 - DNA, 80 bp, synthetic construct
  misc_feature 1..80: note = Artificially Synthesized Probe
  source 1..80: mol_type = other DNA
gaaggcatcgtgctgaaaagcgctccagaaattgcggatttatcagtgatgtacggtagtaggttggacaagtaatgatt

SEQ ID NO: 37622 - DNA, 80 bp, synthetic construct
  misc_feature 1..80: note = Artificially Synthesized Probe
  source 1..80: mol_type = other DNA
ttaaaacgacttttggaaatatcatgtacgtatggaacaagtgcaaagggaaccactgactcagcgtcagaaatgccttg

SEQ ID NO: 37623 - DNA, 80 bp, synthetic construct
  misc_feature 1..80: note = Artificially Synthesized Probe
  source 1..80: mol_type = other DNA
agaaggatgagtaacagagatcctgtgtcattcattgatttcaataaaatatttattggatccatagcatgggcctggca

SEQ ID NO: 37624 - DNA, 80 bp, synthetic construct
  misc_feature 1..80: note = Artificially Synthesized Probe
  source 1..80: mol_type = other DNA
tgtatacaggatgtaggctggagtcatcagtgtataaatgacctagttaaaaccataagactatctgggctcaccaagga

SEQ ID NO: 37625 - DNA, 80 bp, synthetic construct
  misc_feature 1..80: note = Artificially Synthesized Probe
  source 1..80: mol_type = other DNA
ggccagggctaggtgcatggatatgcatccaccagtacaggagagaagacagagtgtccaccctggaaggtgacaccaag

SEQ ID NO: 37626 - DNA, 80 bp, synthetic construct
  misc_feature 1..80: note = Artificially Synthesized Probe
  source 1..80: mol_type = other DNA
tgctcgaattatgcaagattgcaaggaaatttaatgcaagacaaatgagtgaggccaggaatcttgctgtgagagtttgg

SEQ ID NO: 37627 - DNA, 80 bp, synthetic construct
  misc_feature 1..80: note = Artificially Synthesized Probe
  source 1..80: mol_type = other DNA
tggaatgttctaactccgcctgagagatggaaagagaaacagagatgagtctgatgaaacagaactcaaatcaccctctt

SEQ ID NO: 37628 - DNA, 80 bp, synthetic construct
  misc_feature 1..80: note = Artificially Synthesized Probe
  source 1..80: mol_type = other DNA
gcccaagatcgtcaaaaagagaaccaaggagttcatctggcaccagtcagaccaacatgtcaaaattaagtgtaactgga

SEQ ID NO: 37629 - DNA, 80 bp, synthetic construct
  misc_feature 1..80: note = Artificially Synthesized Probe
  source 1..80: mol_type = other DNA
tttctgtgtaagtcaaattctcttttttaccgtgcaaatttcatggttaagatgaggttgaatgcggacggctaatacca

SEQ ID NO: 37630 - DNA, 80 bp, synthetic construct
  misc_feature 1..80: note = Artificially Synthesized Probe
  source 1..80: mol_type = other DNA
gtggagtgcggcatgggccaggggcaacaaggtgacctggggcagtgacaggacagaggcagagtgaggtgaggaaagtg

SEQ ID NO: 37631 - DNA, 80 bp, synthetic construct
  misc_feature 1..80: note = Artificially Synthesized Probe
  source 1..80: mol_type = other DNA
cagaaaagaggtcccttctcaagttcaaaggtcatgaacagttggaggatctggcataggggacagaggagaggaagaaa

SEQ ID NO: 37632 - DNA, 80 bp, synthetic construct
  misc_feature 1..80: note = Artificially Synthesized Probe
  source 1..80: mol_type = other DNA
acaaagtgtggagtttaatggccagcccagcacacggaaaatgcccataaatgttcattagcgtcatcgttgtaattcac

SEQ ID NO: 37633 - DNA, 80 bp, synthetic construct
  misc_feature 1..80: note = Artificially Synthesized Probe
  source 1..80: mol_type = other DNA
gtggggtctttttcccctcctcaaaattcatcctgcagaagtagacatgtgctaaacagtgcatggccacacaaatgctt

SEQ ID NO: 37634 - DNA, 80 bp, synthetic construct
  misc_feature 1..80: note = Artificially Synthesized Probe
  source 1..80: mol_type = other DNA
atggtgcatcctagctctaaaactatgctgccattaaaaagaagaggtaccgtctccaagaaagaaagccaacatctgca

SEQ ID NO: 37635 - DNA, 80 bp, synthetic construct
  misc_feature 1..80: note = Artificially Synthesized Probe
  source 1..80: mol_type = other DNA
gagaaaatataccagacaaacaaactgtggtaggatcacacaaggactgtgctccagcaataaaaggaacaaacgactga

SEQ ID NO: 37636 - DNA, 80 bp, synthetic construct
  misc_feature 1..80: note = Artificially Synthesized Probe
  source 1..80: mol_type = other DNA
tcaggcaagaatacacaaggttccagatacacaaggttgttcagtagagatccgggctgtggtgcaaggtgattgcagag

SEQ ID NO: 37637 - DNA, 80 bp, synthetic construct
  misc_feature 1..80: note = Artificially Synthesized Probe
  source 1..80: mol_type = other DNA
gacctgtctgtggaaccggggaaggaatcatatcattttataaacaaaccaagtaacactaagcccattgcatgaaggat

SEQ ID NO: 37638 - DNA, 80 bp, synthetic construct
  misc_feature 1..80: note = Artificially Synthesized Probe
  source 1..80: mol_type = other DNA
atggaccagatgttgaatctagtttggttatagtcattgctggggattaatatagtaagaggagggtccttctctcctga

SEQ ID NO: 37639 - DNA, 80 bp, synthetic construct
  misc_feature 1..80: note = Artificially Synthesized Probe
  source 1..80: mol_type = other DNA
tactgcattaaaacattgtgtatcttgatgactgtggatttttgtaggcactgccttaaattttgcatcccaggcgaggg

SEQ ID NO: 37640 - DNA, 80 bp, synthetic construct
  misc_feature 1..80: note = Artificially Synthesized Probe
  source 1..80: mol_type = other DNA
agttagcccagttaagcgcatggaaactaaatgagttcgctgtgcattgttcagctatacatgaccacaggcaagataaa

SEQ ID NO: 37641 - DNA, 80 bp, synthetic construct
  misc_feature 1..80: note = Artificially Synthesized Probe
  source 1..80: mol_type = other DNA
tgcagcctgtgtcagaatttccttcctttttcaaggctgaatagtattccattgtatagatggatcacattttatttatc

SEQ ID NO: 37642 - DNA, 80 bp, synthetic construct
  misc_feature 1..80: note = Artificially Synthesized Probe
  source 1..80: mol_type = other DNA
gtggtcccagctagttgggaggcagaagcaggaggatctcttgagcccaggaggccgaggctgcagtgagccatgattgt

SEQ ID NO: 37643 - DNA, 80 bp, synthetic construct
  misc_feature 1..80: note = Artificially Synthesized Probe
  source 1..80: mol_type = other DNA
ctctacagagatacaaacatcacatgggcacctctgccttttctgtttactactaacgtagattgtcatgtaatttttgc

SEQ ID NO: 37644 - DNA, 80 bp, synthetic construct
  misc_feature 1..80: note = Artificially Synthesized Probe
  source 1..80: mol_type = other DNA
aatagcttttttgacagctaaacagaaattattttccttgattagccatggcacattcgcccttcttaggtggacagcgt

SEQ ID NO: 37645 - DNA, 80 bp, synthetic construct
  misc_feature 1..80: note = Artificially Synthesized Probe
  source 1..80: mol_type = other DNA
gcttgagtcaccatgccagcccagcatttttttttaaaggcacagttctcataggtataagaaggcaacgaaattcatcc

SEQ ID NO: 37646 - DNA, 80 bp, synthetic construct
  misc_feature 1..80: note = Artificially Synthesized Probe
  source 1..80: mol_type = other DNA
tccatcacgtgaggacacagctagaaggcagaagccgaaccagaaagcaggccctccccagacactgaatctgccagtgc

SEQ ID NO: 37647 - DNA, 80 bp, synthetic construct
  misc_feature 1..80: note = Artificially Synthesized Probe
  source 1..80: mol_type = other DNA
ctggagccctcactccctgccggtgggactgtgaaaggacaatttggcagttaacttgcagttaccatacgactcagcaa

SEQ ID NO: 37648 - DNA, 80 bp, synthetic construct
  misc_feature 1..80: note = Artificially Synthesized Probe
  source 1..80: mol_type = other DNA
agccacgaagagaaacaatgatatagagactaaaagcattcctgcattcctcacctcaggagaagtaaaatgcaatattc

SEQ ID NO: 37649 - DNA, 80 bp, synthetic construct
  misc_feature 1..80: note = Artificially Synthesized Probe
  source 1..80: mol_type = other DNA
ataagaagaagccaactataacagcaaggaagacattcaagaacaggatctagtggctgcacaactgagctccctcctcg

SEQ ID NO: 37650 - DNA, 80 bp, synthetic construct
  misc_feature 1..80: note = Artificially Synthesized Probe
  source 1..80: mol_type = other DNA
aaatatatttggacacgggtgcttactgcagcattggcggtaaagtggaaggtataaccaaaatgcctataaataaataa

SEQ ID NO: 37651 - DNA, 80 bp, synthetic construct
  misc_feature 1..80: note = Artificially Synthesized Probe
  source 1..80: mol_type = other DNA
atgtaaaagagaagcagtcagaattatggggactacacacaggatcccaaagtcctgaaatggtcactagggaattctgg

SEQ ID NO: 37652 - DNA, 80 bp, synthetic construct
  misc_feature 1..80: note = Artificially Synthesized Probe
  source 1..80: mol_type = other DNA
aaaacaaataaataaaatgcggctactagaaaattgcaaatttcacacgtggcttgtgttatgtttctttattggccggt

SEQ ID NO: 37653 - DNA, 80 bp, synthetic construct
  misc_feature 1..80: note = Artificially Synthesized Probe
  source 1..80: mol_type = other DNA
ttactatctagccctttatagagaatgtttgctgatccccacttccttggaatactaaaacatcctgtgggcttcctttg

SEQ ID NO: 37654 - DNA, 80 bp, synthetic construct
  misc_feature 1..80: note = Artificially Synthesized Probe
  source 1..80: mol_type = other DNA
aactggaacagtataatcagaaacagaaagggaagaatcaatacaagaccagtttgggtggtgggacctataggaagtag

SEQ ID NO: 37655 - DNA, 80 bp, synthetic construct
  misc_feature 1..80: note = Artificially Synthesized Probe
  source 1..80: mol_type = other DNA
gcccatttgcttgattctgtggccaacgtaacactctctgctgttcttgaaaaaccctctttcttcttttcttatacaag

SEQ ID NO: 37656 - DNA, 80 bp, synthetic construct
  misc_feature 1..80: note = Artificially Synthesized Probe
  source 1..80: mol_type = other DNA
ttttgaagtctgttcttcgttaaacgtgagaggtcaggagtgttatagaggggttaaagataccttaacacccacgagag

SEQ ID NO: 37657 - DNA, 80 bp, synthetic construct
  misc_feature 1..80: note = Artificially Synthesized Probe
  source 1..80: mol_type = other DNA
aagaactgaaggtttaccatcttgatgtaggccttgccgtcctgaagagcactcgggctcatgtgtttcattcactcaca

SEQ ID NO: 37658 - DNA, 80 bp, synthetic construct
  misc_feature 1..80: note = Artificially Synthesized Probe
  source 1..80: mol_type = other DNA
cgctgctactgactccaccatccggcagttcgtgaaattaaataactgcaaattgatgagtcttttcttttgcatgctga

SEQ ID NO: 37659 - DNA, 80 bp, synthetic construct
  misc_feature 1..80: note = Artificially Synthesized Probe
  source 1..80: mol_type = other DNA
gcaggctacatctgtctgtatgtattctgagaaggacaggagaggtgggaaaaaggccttcgtgttattttctttgggtt

SEQ ID NO: 37660 - DNA, 80 bp, synthetic construct
  misc_feature 1..80: note = Artificially Synthesized Probe
  source 1..80: mol_type = other DNA
tatttgatactgactcctcttccttgttggtctttggtctttgtaactggataggatagcactttactcaaaataggcaa

SEQ ID NO: 37661 - DNA, 80 bp, synthetic construct
  misc_feature 1..80: note = Artificially Synthesized Probe
  source 1..80: mol_type = other DNA
ccaagtggctcatttccagactctgactgtgttggcatccaagagccagtgataacagagaagggaaaccagtcttaaaa

SEQ ID NO: 37662 - DNA, 80 bp, synthetic construct
  misc_feature 1..80: note = Artificially Synthesized Probe
  source 1..80: mol_type = other DNA
ttgggctctactgactcagagatggcaatatgaacttaaggtacctatgagcaattcttaatttaaaaaaaatttttttg

SEQ ID NO: 37663 - DNA, 80 bp, synthetic construct
  misc_feature 1..80: note = Artificially Synthesized Probe
  source 1..80: mol_type = other DNA
aaaaaagaagttaataaaacagaagttcctgcccttactgagctgacattctaacaagaggacagtgataatacaataaa

SEQ ID NO: 37664 - DNA, 80 bp, synthetic construct
  misc_feature 1..80: note = Artificially Synthesized Probe
  source 1..80: mol_type = other DNA
tacaccaggcatatgtctacatgagagaacatgagaacatgaccagcagaggagctaattgccatttaaattctagagac

SEQ ID NO: 37665 - DNA, 80 bp, synthetic construct
  misc_feature 1..80: note = Artificially Synthesized Probe
  source 1..80: mol_type = other DNA
tatatattataagatgtggttccttctggccccagcattttatgagcaaaacaatcactagctactataaaaatccacag

SEQ ID NO: 37666 - DNA, 80 bp, synthetic construct
  misc_feature 1..80: note = Artificially Synthesized Probe
  source 1..80: mol_type = other DNA
gtcacagaatcacagaacagtgatctttcccatcatacattataagttgccttccgtaccacgcctgttgatgaagaagc

SEQ ID NO: 37667 - DNA, 80 bp, synthetic construct
  misc_feature 1..80: note = Artificially Synthesized Probe
  source 1..80: mol_type = other DNA
ccacaaacacacacacgcactcgcactacctcggagaaaatgcctggagcagtttaggttctttaacaaaataaataaat

SEQ ID NO: 37668 - DNA, 80 bp, synthetic construct
  misc_feature 1..80: note = Artificially Synthesized Probe
  source 1..80: mol_type = other DNA
cccatctcagagatctggggagtaaaagtgaggagagggtccccaagcgcccccaattcagagaattcgagggtttgagt

SEQ ID NO: 37669 - DNA, 80 bp, synthetic construct
  misc_feature 1..80: note = Artificially Synthesized Probe
  source 1..80: mol_type = other DNA
gggacatgtgggaacagtctgatcaggggtcagcaaactctcgctcgccgcctgtttttcacggacccccagctgaaaat

SEQ ID NO: 37670 - DNA, 80 bp, synthetic construct
  misc_feature 1..80: note = Artificially Synthesized Probe
  source 1..80: mol_type = other DNA
ggcaggagattaggcttcagccccactcattcattcaacaagaaatcatattagtgagcactgattaaattgctatgtgc

SEQ ID NO: 37671 - DNA, 80 bp, synthetic construct
  misc_feature 1..80: note = Artificially Synthesized Probe
  source 1..80: mol_type = other DNA
ccacagcatacagcaggaaatacattttacctaggggctcagtccacacaaacatatctataactaaaacaaatgatact

SEQ ID NO: 37672 - DNA, 80 bp, synthetic construct
  misc_feature 1..80: note = Artificially Synthesized Probe
  source 1..80: mol_type = other DNA
tatttgctaggtgctagggacacaggtgtaaataaaatagataaaattcccatggccataggaaaagtgatacagtagtg

SEQ ID NO: 37673 - DNA, 80 bp, synthetic construct
  misc_feature 1..80: note = Artificially Synthesized Probe
  source 1..80: mol_type = other DNA
cacatttttgtaaattaaggtgacatttacataccataaaatgagccattttaaaaggaaacagttcagtggcatttagt

SEQ ID NO: 37674 - DNA, 80 bp, synthetic construct
  misc_feature 1..80: note = Artificially Synthesized Probe
  source 1..80: mol_type = other DNA
gactataggcatgtgccaccaaggctggctaaatacaagaattttttttttttttgtagagacagggtcttgatctcctg

SEQ ID NO: 37675 - DNA, 80 bp, synthetic construct
  misc_feature 1..80: note = Artificially Synthesized Probe
  source 1..80: mol_type = other DNA
cctgtgaattatgagccacatttatctatgcctagcattacaactttccatctgattacagatgacttttctaccttttc

SEQ ID NO: 37676 - DNA, 80 bp, synthetic construct
  misc_feature 1..80: note = Artificially Synthesized Probe
  source 1..80: mol_type = other DNA
tgggactttcccacttctaaaactcaaagttgcagttccccaaaatgtaaaaagtggaattcccatgggatccagcaatt

SEQ ID NO: 37677 - DNA, 80 bp, synthetic construct
  misc_feature 1..80: note = Artificially Synthesized Probe
  source 1..80: mol_type = other DNA
ttccaaggatgggtctctgtcacctcaaatagtctgtgagtaaaaaacataatttaagatgaggcattgagaaaaagtgg

SEQ ID NO: 37678 - DNA, 80 bp, synthetic construct
  misc_feature 1..80: note = Artificially Synthesized Probe
  source 1..80: mol_type = other DNA
tgaatgtattcactatctactgctgtgtaacaaattaccccaaagatcagtagcttaaaacaagcattcatgatctcaca

SEQ ID NO: 37679 - DNA, 80 bp, synthetic construct
  misc_feature 1..80: note = Artificially Synthesized Probe
  source 1..80: mol_type = other DNA
gcatatcttagaacttattcctctcatatagctgaaacttcatacctgttgaacagcaactccctatgggagaggattca

SEQ ID NO: 37680 - DNA, 80 bp, synthetic construct
  misc_feature 1..80: note = Artificially Synthesized Probe
  source 1..80: mol_type = other DNA
cctgggggcccatgtaggggctgccccaccacactggggtacagaaggggtcagtcacttgtccacacttacagagctgg

SEQ ID NO: 37681 - DNA, 80 bp, synthetic construct
  misc_feature 1..80: note = Artificially Synthesized Probe
  source 1..80: mol_type = other DNA
agattacaatcatgagccacccttccctgcctcaaacaaaaacatttagacagcacgcttacaaggaaagaattagtaaa

SEQ ID NO: 37682 - DNA, 80 bp, synthetic construct
  misc_feature 1..80: note = Artificially Synthesized Probe
  source 1..80: mol_type = other DNA
gcctgggcagcagagtgagactccatctcaaaaaaaaaaaaaaaaattagcccgtgtggtggcggcgcctgttaatccca

SEQ ID NO: 37683 - DNA, 80 bp, synthetic construct
  misc_feature 1..80: note = Artificially Synthesized Probe
  source 1..80: mol_type = other DNA
acagtgggggctttgcgactagttcccatctttataaacgacattggcttcatctgcattattttaaggacatcactgtg

SEQ ID NO: 37684 - DNA, 80 bp, synthetic construct
  misc_feature 1..80: note = Artificially Synthesized Probe
  source 1..80: mol_type = other DNA
tctggcttctttagcatattatatctgtgaagttcattcatattgttgaatgcatcagttgttcattcttttaaaaaaaa

SEQ ID NO: 37685 - DNA, 80 bp, synthetic construct
  misc_feature 1..80: note = Artificially Synthesized Probe
  source 1..80: mol_type = other DNA
atcaggcacttcaaatgataatgatgctctaatttgcatgcattgttggaggagtcatccagttgctggcttgatccctg

SEQ ID NO: 37686 - DNA, 80 bp, synthetic construct
  misc_feature 1..80: note = Artificially Synthesized Probe
  source 1..80: mol_type = other DNA
cttatggctgtaagatttttcttctctgtgattaataggtgttgttgggtgcaattttatggggtatgcaaagcaggtgg

SEQ ID NO: 37687 - DNA, 80 bp, synthetic construct
  misc_feature 1..80: note = Artificially Synthesized Probe
  source 1..80: mol_type = other DNA
tgtccctttatattgttgagaattttaaataattctttaaagcagttatgttctgataaatatttaataactggctcttg

SEQ ID NO: 37688 - DNA, 80 bp, synthetic construct
  misc_feature 1..80: note = Artificially Synthesized Probe
  source 1..80: mol_type = other DNA
tggaacctaagtgctcagacaaaggagcagaattgaattaagaaacagacgccacatggcaatgatccagtatccaatca

SEQ ID NO: 37689 - DNA, 80 bp, synthetic construct
  misc_feature 1..80: note = Artificially Synthesized Probe
  source 1..80: mol_type = other DNA
acatgatgaaacctcgtctctactaaaaatacaacaattagcttggcatggtgatgcatgcctgtaaccccagctacttg

SEQ ID NO: 37690 - DNA, 80 bp, synthetic construct
  misc_feature 1..80: note = Artificially Synthesized Probe
  source 1..80: mol_type = other DNA
aatatagttgttagaataagaagcacaactggcataaacaggtttgggaatacacagcttgcactcagtgagcacacagc

SEQ ID NO: 37691 - DNA, 80 bp, synthetic construct
  misc_feature 1..80: note = Artificially Synthesized Probe
  source 1..80: mol_type = other DNA
aaggtaagtggagggattttagtggcatacaacgactgcttttgttgcagagagcttattaggaagcagatgagaggaac

SEQ ID NO: 37692 - DNA, 80 bp, synthetic construct
  misc_feature 1..80: note = Artificially Synthesized Probe
  source 1..80: mol_type = other DNA
gagtgcatatgtgtgtcataatgtatgtgtgtatgtaactgtgtgtatgaggttgtgtgtgagtctgagcaagtgtgtgc

SEQ ID NO: 37693 - DNA, 80 bp, synthetic construct
  misc_feature 1..80: note = Artificially Synthesized Probe
  source 1..80: mol_type = other DNA
tgtgcatgtaattgtgcgtatgagggcctgagcaatgtgactgtgtgactgtcacacattgtgtgtctgacagtgtacat

SEQ ID NO: 37694 - DNA, 80 bp, synthetic construct
  misc_feature 1..80: note = Artificially Synthesized Probe
  source 1..80: mol_type = other DNA
cctgggaaacattctctctctttaggtgagagctctggggaagaagggctgaatggacattggtggacactggctgtcct

SEQ ID NO: 37695 - DNA, 80 bp, synthetic construct
  misc_feature 1..80: note = Artificially Synthesized Probe
  source 1..80: mol_type = other DNA
acacatgaagacaggcagcgtaagagaaagtcacgagggcaggaataacatccaggcatacttcagatcccagctcaaga

SEQ ID NO: 37696 - DNA, 80 bp, synthetic construct
  misc_feature 1..80: note = Artificially Synthesized Probe
  source 1..80: mol_type = other DNA
tgactgtctttgcaggaagaagaaaacacctgagtgaccagatgtcccagctccaggtgccttgccagatggccagaacc

SEQ ID NO: 37697 - DNA, 80 bp, synthetic construct
  misc_feature 1..80: note = Artificially Synthesized Probe
  source 1..80: mol_type = other DNA
cttcgtgaaatcgaatattactagtaacttacaagtcctctgtagagaactcctgagctcaagtgatccacctgccacgg

SEQ ID NO: 37698 - DNA, 80 bp, synthetic construct
  misc_feature 1..80: note = Artificially Synthesized Probe
  source 1..80: mol_type = other DNA
aaacacttttatcgtggaaagtttcaaacacaaaagtagagctgatcataacataagcccccagctacctatcactcggc

SEQ ID NO: 37699 - DNA, 80 bp, synthetic construct
  misc_feature 1..80: note = Artificially Synthesized Probe
  source 1..80: mol_type = other DNA
tcttgggccgcacactccgtgcatgtttttcatgcatatctgtagcttggtctggatctgctgttttgggctgctcgctt

SEQ ID NO: 37700 - DNA, 80 bp, synthetic construct
  misc_feature 1..80: note = Artificially Synthesized Probe
  source 1..80: mol_type = other DNA
aattttcctccctgaaagccactagaaaaatcagtttcaataaatgttgaccaacaatttggcctccacttcccccaggg

SEQ ID NO: 37701 - DNA, 80 bp, synthetic construct
  misc_feature 1..80: note = Artificially Synthesized Probe
  source 1..80: mol_type = other DNA
ggctaatgtggtgaacccttgtttctactaaaagaatatttttaaaaattagctgggtacggtggcctgtaatccctgct

SEQ ID NO: 37702 - DNA, 80 bp, synthetic construct
  misc_feature 1..80: note = Artificially Synthesized Probe
  source 1..80: mol_type = other DNA
aggtatattgcactaaagagtacgtgggagagagagtggcacattgattccacaaaggctctttgcagaggagtctggat

SEQ ID NO: 37703 - DNA, 80 bp, synthetic construct
  misc_feature 1..80: note = Artificially Synthesized Probe
  source 1..80: mol_type = other DNA
gctataatcattttactgtcagagctaaagtcaagggacatggtgacatcatagacagctctgataccagtgggttgggg

SEQ ID NO: 37704 - DNA, 80 bp, synthetic construct
  misc_feature 1..80: note = Artificially Synthesized Probe
  source 1..80: mol_type = other DNA
acatgcctggattatagtgagtctcaacttattgcaacctctgcctcccaggctcaagcgattctcatgcctcggccacc

SEQ ID NO: 37705 - DNA, 80 bp, synthetic construct
  misc_feature 1..80: note = Artificially Synthesized Probe
  source 1..80: mol_type = other DNA
cacccagcctactgaagtaattagttaaaatgacgtcatgaggttaggtcccaatccaatgtgaccagtgtctttataaa

SEQ ID NO: 37706 - DNA, 80 bp, synthetic construct
  misc_feature 1..80: note = Artificially Synthesized Probe
  source 1..80: mol_type = other DNA
ttacaggcatgaaccagcctgctgtctgttgatgactatctgaacatacatctccagtccttgggtcctactactggcac

SEQ ID NO: 37707 - DNA, 80 bp, synthetic construct
  misc_feature 1..80: note = Artificially Synthesized Probe
  source 1..80: mol_type = other DNA
tgtgacaggacaatggacgatggggaattatgcaccgggtcttaaatcttctccccatgaacgacacacataactcactt

SEQ ID NO: 37708 - DNA, 80 bp, synthetic construct
  misc_feature 1..80: note = Artificially Synthesized Probe
  source 1..80: mol_type = other DNA
gagtttgagatcagcctcggaaacacagtagaaccccatctctacaaaacattaaaaaataaattagctaggcatggtgg

SEQ ID NO: 37709 - DNA, 80 bp, synthetic construct
  misc_feature 1..80: note = Artificially Synthesized Probe
  source 1..80: mol_type = other DNA
tcatgagcctcagccactcagttcctctctgtggaagcggtcaccattgtcagttttttgtgtgtccttttgggaaataa

SEQ ID NO: 37710 - DNA, 80 bp, synthetic construct
  misc_feature 1..80: note = Artificially Synthesized Probe
  source 1..80: mol_type = other DNA
agttcatctctcctgaaagatggtctcctttagccatgttcttagttccgtggagttaaaggtccccctcctcccgtaaa

SEQ ID NO: 37711 - DNA, 80 bp, synthetic construct
  misc_feature 1..80: note = Artificially Synthesized Probe
  source 1..80: mol_type = other DNA
ctacctcggcctcccaaagtgctgggattacaggcgtgagccaccacgcctgtaattttttttaaattagactcagtgga

SEQ ID NO: 37712 - DNA, 80 bp, synthetic construct
  misc_feature 1..80: note = Artificially Synthesized Probe
  source 1..80: mol_type = other DNA
tgacggttgtacaaccatgtggatgtgtttaatgccactaaactacactcttaaaaatggtcaaaacgggctgcgtgtgg

SEQ ID NO: 37713 - DNA, 80 bp, synthetic construct
  misc_feature 1..80: note = Artificially Synthesized Probe
  source 1..80: mol_type = other DNA
aatgatataacatctctgtgtttatgttttgtttttctgtttgctttttccttcccagctgggtttggagcgtttccacg

SEQ ID NO: 37714 - DNA, 80 bp, synthetic construct
  misc_feature 1..80: note = Artificially Synthesized Probe
  source 1..80: mol_type = other DNA
ttgtagagatggtttcttgctatgttgcccaggctgtaatcgtgaaaaaaacaaaagtaaaaataaaatactgatttctt

SEQ ID NO: 37715 - DNA, 80 bp, synthetic construct
  misc_feature 1..80: note = Artificially Synthesized Probe
  source 1..80: mol_type = other DNA
ttggataaagaccctgagatctgaactcgtttgttcgactcaagattaataataacaacagcaacgacagcagcagcagc

SEQ ID NO: 37716 - DNA, 80 bp, synthetic construct
  misc_feature 1..80: note = Artificially Synthesized Probe
  source 1..80: mol_type = other DNA
gaacacctgaggtcgggagtttgagaccagcctgaccagcatgtagaaactctatctctactaaaaaaaaccccaaaaaa

SEQ ID NO: 37717 - DNA, 80 bp, synthetic construct
  misc_feature 1..80: note = Artificially Synthesized Probe
  source 1..80: mol_type = other DNA
taattataatgtgcctcattccctgccatattaaaagcacaacaactagatcaacagagcagagagcccagaaatagctc

SEQ ID NO: 37718 - DNA, 80 bp, synthetic construct
  misc_feature 1..80: note = Artificially Synthesized Probe
  source 1..80: mol_type = other DNA
acttatcatcattgtcatttttgttgtcttcatcattgttaagttggggaggaagggaagctggtgctgtggctgcaaac

SEQ ID NO: 37719 - DNA, 80 bp, synthetic construct
  misc_feature 1..80: note = Artificially Synthesized Probe
  source 1..80: mol_type = other DNA
tgatctcctgacctcgtgatccgcccgccttggcctcccaaagtgctgggattacaggcgtgagccaccgccccgagccc

SEQ ID NO: 37720 - DNA, 80 bp, synthetic construct
  misc_feature 1..80: note = Artificially Synthesized Probe
  source 1..80: mol_type = other DNA
ctatttcttgcctaagttctatcccttcctgtttcatttttttctagtgtcctgctgtctcttccctgagtgcttgtatg

SEQ ID NO: 37721 - DNA, 80 bp, synthetic construct
  misc_feature 1..80: note = Artificially Synthesized Probe
  source 1..80: mol_type = other DNA
cctttgactcctaattcctgacttggttcaggaaggacagacctccacctctggcctagagcttttaaaaattcttttct

SEQ ID NO: 37722 - DNA, 80 bp, synthetic construct
  misc_feature 1..80: note = Artificially Synthesized Probe
  source 1..80: mol_type = other DNA
ggagatctttatttgggggagtaatcacagatcctcctctgcttataatcctctaattctctagcggttttctgttggag

SEQ ID NO: 37723 - DNA, 80 bp, synthetic construct
  misc_feature 1..80: note = Artificially Synthesized Probe
  source 1..80: mol_type = other DNA
ggttccagccaacttcatgaaggatttttattgcctgactccgagtaaaaggttagctaaatctgggctgcaaggtgcaa

SEQ ID NO: 37724 - DNA, 80 bp, synthetic construct
  misc_feature 1..80: note = Artificially Synthesized Probe
  source 1..80: mol_type = other DNA
tgaaaggtgaggaaaggaagtgggtggggccttgtgaggaaagtgggtgtgacctttcaaaggacgtgaaatgtgagcag

SEQ ID NO: 37725 - DNA, 80 bp, synthetic construct
  misc_feature 1..80: note = Artificially Synthesized Probe
  source 1..80: mol_type = other DNA
cttaaaagactactttgttagcaataacacttacagcagggtttctcaacctccttgctgttgacatttggggcaggtaa

SEQ ID NO: 37726 - DNA, 80 bp, synthetic construct
  misc_feature 1..80: note = Artificially Synthesized Probe
  source 1..80: mol_type = other DNA
gaacccgggaagcggaggttgcagtgagccgagatagtgccactgcactcaagcctggcgaaagagcgagactccatcta

SEQ ID NO: 37727 - DNA, 80 bp, synthetic construct
  misc_feature 1..80: note = Artificially Synthesized Probe
  source 1..80: mol_type = other DNA
gggcttgtgtgtgctcttcctctcacccttgccctaccttgttacagattatctgggcaaagggctttgcctgctcagat

SEQ ID NO: 37728 - DNA, 80 bp, synthetic construct
  misc_feature 1..80: note = Artificially Synthesized Probe
  source 1..80: mol_type = other DNA
cagctcctagagctacatcttgactcattcacatacacagtctgtgtctcagaattcccaggtaaagtcttcatcttcat

SEQ ID NO: 37729 - DNA, 80 bp, synthetic construct
  misc_feature 1..80: note = Artificially Synthesized Probe
  source 1..80: mol_type = other DNA
tcaaaagcagaaaaatgtctggcagggtatgcacccagcagacaatgattcctctgtgtgagtcaggaaggttgtgtgtg

SEQ ID NO: 37730 - DNA, 80 bp, synthetic construct
  misc_feature 1..80: note = Artificially Synthesized Probe
  source 1..80: mol_type = other DNA
aatgaagaatttctataaaagcattcttataaatgcttccctgccccccctcagcctagggtaatagttaccagcacaca

SEQ ID NO: 37731 - DNA, 80 bp, synthetic construct
  misc_feature 1..80: note = Artificially Synthesized Probe
  source 1..80: mol_type = other DNA
gtcacttcctcagtgaagccctccctaacttccatgtttgaaatagcaaacaataaaccaccccattactacctaattcc

SEQ ID NO: 37732 - DNA, 80 bp, synthetic construct
  misc_feature 1..80: note = Artificially Synthesized Probe
  source 1..80: mol_type = other DNA
aattacaggcgtgagccatggcgcctggccaatattagtcctttaattgatgcacagttgcaaatattttctcctattct

SEQ ID NO: 37733 - DNA, 80 bp, synthetic construct
  misc_feature 1..80: note = Artificially Synthesized Probe
  source 1..80: mol_type = other DNA
atattccttgatgcctagtttgttgagggttcttatcataaagaatgttggattttgtcaaatgctttttctgcagccat

SEQ ID NO: 37734 - DNA, 80 bp, synthetic construct
  misc_feature 1..80: note = Artificially Synthesized Probe
  source 1..80: mol_type = other DNA
ctttgtctttttttttttcttaactgtcattagtttacaatctgttttattggataaaacagtagcaccctctcatctta

SEQ ID NO: 37735 - DNA, 80 bp, synthetic construct
  misc_feature 1..80: note = Artificially Synthesized Probe
  source 1..80: mol_type = other DNA
aattctttcttctgcttggtctagtctaactatatttttaaatttctatagtgaaattttcaattccagaagttcaattt

SEQ ID NO: 37736 - DNA, 80 bp, synthetic construct
  misc_feature 1..80: note = Artificially Synthesized Probe
  source 1..80: mol_type = other DNA
ttctctatcacacccctgtcatggggctcacaatcttctgtttataaaggcttcatcctttagttcctggcagcagtgtg

SEQ ID NO: 37737 - DNA, 80 bp, synthetic construct
  misc_feature 1..80: note = Artificially Synthesized Probe
  source 1..80: mol_type = other DNA
cgctgagcccaagccacagggctctgggcagggtcatgctgtctgtgggtagcttacaggaccaacatgaggacatcact

SEQ ID NO: 37738 - DNA, 80 bp, synthetic construct
  misc_feature 1..80: note = Artificially Synthesized Probe
  source 1..80: mol_type = other DNA
aaattacttggtcaagatcacagagcaagggaagctctgaactgagatctgaaccaggagtgtctaaaccattgtacatc

SEQ ID NO: 37739 - DNA, 80 bp, synthetic construct
  misc_feature 1..80: note = Artificially Synthesized Probe
  source 1..80: mol_type = other DNA
aagcctctgtccccactttaaagaagaggcaataaaagccacgagggattttaaggaaatagcccaaatgtctagcaaac

SEQ ID NO: 37740 - DNA, 80 bp, synthetic construct
  misc_feature 1..80: note = Artificially Synthesized Probe
  source 1..80: mol_type = other DNA
agttaccaacccccaggtgttatgatgattaaatgacttggtgtttgtaaagtatgaagacagtgtcttggtcatagtag

SEQ ID NO: 37741 - DNA, 80 bp, synthetic construct
  misc_feature 1..80: note = Artificially Synthesized Probe
  source 1..80: mol_type = other DNA
ggtgagtagatggttgttaatcattcgacagattttttgggtgaagccccatgtctaacggttttatctctgccctcatc

SEQ ID NO: 37742 - DNA, 80 bp, synthetic construct
  misc_feature 1..80: note = Artificially Synthesized Probe
  source 1..80: mol_type = other DNA
tgaagtttttgcatacatgtccagttgctccatctgatctgtcacatgcttatcaatagtctccaaatgttcaaatattc

SEQ ID NO: 37743 - DNA, 80 bp, synthetic construct
  misc_feature 1..80: note = Artificially Synthesized Probe
  source 1..80: mol_type = other DNA
catgtctagactttgcaaacggagccagaaaagaactctgacattttccccaagttacattctctgaattagtttcctgt

SEQ ID NO: 37744 - DNA, 80 bp, synthetic construct
  misc_feature 1..80: note = Artificially Synthesized Probe
  source 1..80: mol_type = other DNA
ttgttttctgaagtacgtgcaccagaaatgtgcgaaggttacagtttctctacatcttcactaacgcatgttactatctg

SEQ ID NO: 37745 - DNA, 80 bp, synthetic construct
  misc_feature 1..80: note = Artificially Synthesized Probe
  source 1..80: mol_type = other DNA
ggggaggggagaaagaaggaaagaaaggaaggagggaggaaaaaagaggaaggaaggaaggaagaaagaaaaagaaagaa

SEQ ID NO: 37746 - DNA, 80 bp, synthetic construct
  misc_feature 1..80: note = Artificially Synthesized Probe
  source 1..80: mol_type = other DNA
ccacagtttctttagccaaccctttgtcattgaacctgtaagctgtttccattctgttacaaaacagtgttgcaaagaac

SEQ ID NO: 37747 - DNA, 80 bp, synthetic construct
  misc_feature 1..80: note = Artificially Synthesized Probe
  source 1..80: mol_type = other DNA
ttctccacttgacggcattcttattcacaggaaatataatactcccgtgagctaccgcatggctaagactctcgtgttca

SEQ ID NO: 37748 - DNA, 80 bp, synthetic construct
  misc_feature 1..80: note = Artificially Synthesized Probe
  source 1..80: mol_type = other DNA
cccagcattgccatacatttaaaagtcatttgtacttcctttcctatgagctgtctgtccatattatctgcctgttttaa

SEQ ID NO: 37749 - DNA, 80 bp, synthetic construct
  misc_feature 1..80: note = Artificially Synthesized Probe
  source 1..80: mol_type = other DNA
tcctaatcactgcagagaggtctacctgttttctttaaaatgagggttttgttcctatctttaagccaaaggcatttttt

SEQ ID NO: 37750 - DNA, 80 bp, synthetic construct
  misc_feature 1..80: note = Artificially Synthesized Probe
  source 1..80: mol_type = other DNA
cccagaggaaaactcagtaagagaaggataaagaaattccttgtgacatcattttggcacctggatccagccatatctga

SEQ ID NO: 37751 - DNA, 80 bp, synthetic construct
  misc_feature 1..80: note = Artificially Synthesized Probe
  source 1..80: mol_type = other DNA
ccaaaaggtcagctggcttcaggcatggctggatctgggtgccaaaatgaggtcataaggaattttaaaattcttttctt

SEQ ID NO: 37752 - DNA, 80 bp, synthetic construct
  misc_feature 1..80: note = Artificially Synthesized Probe
  source 1..80: mol_type = other DNA
agccatgaacaatgcacagaggattgaaaagtgggtcatcttggagaaggacttttccatctatggtggagagctaggtg

SEQ ID NO: 37753 - DNA, 80 bp, synthetic construct
  misc_feature 1..80: note = Artificially Synthesized Probe
  source 1..80: mol_type = other DNA
ttctgggctggggttttaaggggatctttgggggtgaagggctggaaaattagagtcattgattggttgaggtaaagggg

SEQ ID NO: 37754 - DNA, 80 bp, synthetic construct
  misc_feature 1..80: note = Artificially Synthesized Probe
  source 1..80: mol_type = other DNA
agcctcctgagtagctgggatgagtgcgcgccaccatgcgtggctattttctttctttctttctttcttttttttttttg

SEQ ID NO: 37755 - DNA, 80 bp, synthetic construct
  misc_feature 1..80: note = Artificially Synthesized Probe
  source 1..80: mol_type = other DNA
ttttgtagcccagaaatacaaaaaacaaattgatcacatgtaccactgactgctttgatggagctgctctcagctgttct

SEQ ID NO: 37756 - DNA, 80 bp, synthetic construct
  misc_feature 1..80: note = Artificially Synthesized Probe
  source 1..80: mol_type = other DNA
tcacatcatcttccctctgggtgtcactgtgttcaaatttcccttttatagggacaggttagtaagattagggcccaccc

SEQ ID NO: 37757 - DNA, 80 bp, synthetic construct
  misc_feature 1..80: note = Artificially Synthesized Probe
  source 1..80: mol_type = other DNA
ctatacattgttaaattgcataggtggctccagtaatgtttcttgtggatagtgccactctaaagttcattgtggggaga

SEQ ID NO: 37758 - DNA, 80 bp, synthetic construct
  misc_feature 1..80: note = Artificially Synthesized Probe
  source 1..80: mol_type = other DNA
cctttatttagtgtgatggggagggcttggactctgaaatcagttctgggttcaaattgtgaccagctgtgatttcaact

SEQ ID NO: 37759 - DNA, 80 bp, synthetic construct
  misc_feature 1..80: note = Artificially Synthesized Probe
  source 1..80: mol_type = other DNA
ccaaatcaatagttatggcactttagaggtcattccaggacatacacaggagtgaaaaatttgagtggccaactgtacat

SEQ ID NO: 37760 - DNA, 80 bp, synthetic construct
  misc_feature 1..80: note = Artificially Synthesized Probe
  source 1..80: mol_type = other DNA
gtcaagtgagggaagctcgaatacaggagaggaatgtatgtattttctataatgattctcaccctggtctcactgttctc

SEQ ID NO: 37761 - DNA, 80 bp, synthetic construct
  misc_feature 1..80: note = Artificially Synthesized Probe
  source 1..80: mol_type = other DNA
cctgctttcaattatgcttggtgggcaaatgaattcataaacccccaggcacagtgactcaaagtccttctctaactcaa

SEQ ID NO: 37762 - DNA, 80 bp, synthetic construct
  misc_feature 1..80: note = Artificially Synthesized Probe
  source 1..80: mol_type = other DNA
agtcccagctacttgggaggctgaggcaggagaatggtgtgaacccgggaggcggagcttgcagtgagccaagattgcgc

SEQ ID NO: 37763 - DNA, 80 bp, synthetic construct
  misc_feature 1..80: note = Artificially Synthesized Probe
  source 1..80: mol_type = other DNA
atctctctttttttttttttttttttgagatggagtctcactatgtcacccaggctggagtacagtgccgcgatctcggc

SEQ ID NO: 37764 - DNA, 80 bp, synthetic construct
  misc_feature 1..80: note = Artificially Synthesized Probe
  source 1..80: mol_type = other DNA
aaagaagtgtctggtccctggggaggagacggcgcccggcagggacagtgggcctacagctgacctgtctgcttgctggt

SEQ ID NO: 37765 - DNA, 80 bp, synthetic construct
  misc_feature 1..80: note = Artificially Synthesized Probe
  source 1..80: mol_type = other DNA
ctcatcttcatgagggaactgaggtcttggggggtgggggttaccccaaataggttcacagaagaaccagaaataaaacc

SEQ ID NO: 37766 - DNA, 80 bp, synthetic construct
  misc_feature 1..80: note = Artificially Synthesized Probe
  source 1..80: mol_type = other DNA
acaaaatggtgttaactatgaaaatttttacagagaaaagggcaactgacaaaagcaggtgtttggaatgaattaagacc

SEQ ID NO: 37767 - DNA, 80 bp, synthetic construct
  misc_feature 1..80: note = Artificially Synthesized Probe
  source 1..80: mol_type = other DNA
gggattacaggcgtgagccaccatgcccagcagacctgaattattattattattaaaatgttacatcaacatgtacaaat

SEQ ID NO: 37768 - DNA, 80 bp, synthetic construct
  misc_feature 1..80: note = Artificially Synthesized Probe
  source 1..80: mol_type = other DNA
gtactatcacattgaggattaagtttcaatataacttttgaggagacacaaacattcagaccatagctttatctatcatg

SEQ ID NO: 37769 - DNA, 80 bp, synthetic construct
  misc_feature 1..80: note = Artificially Synthesized Probe
  source 1..80: mol_type = other DNA
gagttaaataaggcttcagtatgagattttgtgtttctctggctaggagttaggctttgtttactctttgctatatagtc

SEQ ID NO: 37770 - DNA, 80 bp, synthetic construct
  misc_feature 1..80: note = Artificially Synthesized Probe
  source 1..80: mol_type = other DNA
ttttcatgttttctactcttcaagagtaggtaagactttagtttgtaatacattacaaaaggaatcctgtggttctctaa

SEQ ID NO: 37771 - DNA, 80 bp, synthetic construct
  misc_feature 1..80: note = Artificially Synthesized Probe
  source 1..80: mol_type = other DNA
cttcaatttacattttaaaataggagcttagttagcccccaaataatatgtaattgatgtattagcgttggggagtgaat

SEQ ID NO: 37772 - DNA, 80 bp, synthetic construct
  misc_feature 1..80: note = Artificially Synthesized Probe
  source 1..80: mol_type = other DNA
atattgagacattgttctagactaccacagttccatattttgtgaaaagttatattgcacttttttttttttttgagagt

SEQ ID NO: 37773 - DNA, 80 bp, synthetic construct
  misc_feature 1..80: note = Artificially Synthesized Probe
  source 1..80: mol_type = other DNA
aacatggtgaaaacttgtctctactaaaatccaaaaaaaaaaaaaaaaaattagccaggcatgggctgggcgcagtggct

SEQ ID NO: 37774 - DNA, 80 bp, synthetic construct
  misc_feature 1..80: note = Artificially Synthesized Probe
  source 1..80: mol_type = other DNA
ttatcagttaatggtttttggggcaaaaaatgttttctgacatttcgataagagctatagacgaagtccagcattagtca

SEQ ID NO: 37775 - DNA, 80 bp, synthetic construct
  misc_feature 1..80: note = Artificially Synthesized Probe
  source 1..80: mol_type = other DNA
ggggcaaaagttcccagagagaggcaggggtgacaggttgtctcaaatgctaggcagacatctggagtggtaaccactac

SEQ ID NO: 37776 - DNA, 80 bp, synthetic construct
  misc_feature 1..80: note = Artificially Synthesized Probe
  source 1..80: mol_type = other DNA
ctcaatactatacacttccagctacaccaccacctaacagggactttaaaaagaatacaaagtacggtatgccttctcag

SEQ ID NO: 37777 - DNA, 80 bp, synthetic construct
  misc_feature 1..80: note = Artificially Synthesized Probe
  source 1..80: mol_type = other DNA
aaaaaaaaaaaaaaaattaatgacctctgcccctaactgaacaaagcccttcatctaaggccaccctttggttggcagcc

SEQ ID NO: 37778 - DNA, 80 bp, synthetic construct
  misc_feature 1..80: note = Artificially Synthesized Probe
  source 1..80: mol_type = other DNA
ttttgatttaagaacaacacagtttggatctagtcattaaaacatatgcagcggtgtcaaaggcaagtaacactaccacc

SEQ ID NO: 37779 - DNA, 80 bp, synthetic construct
  misc_feature 1..80: note = Artificially Synthesized Probe
  source 1..80: mol_type = other DNA
agctcactagcctcaaacgattctccagcctcagcctccccaagtagtgggatttcaggcatgaatcaccacacctggcc

SEQ ID NO: 37780 - DNA, 80 bp, synthetic construct
  misc_feature 1..80: note = Artificially Synthesized Probe
  source 1..80: mol_type = other DNA
agaaattcttcctctattctgaaataccatcttctcacaatatactttgatgttatgaatcaatgtctgttcttgaacat

SEQ ID NO: 37781 - DNA, 80 bp, synthetic construct
  misc_feature 1..80: note = Artificially Synthesized Probe
  source 1..80: mol_type = other DNA
ttttcaaacttttacatggggaaattttctagagttaaagccattttatttttctgttctgtctggttttatctgcgtgt

SEQ ID NO: 37782 - DNA, 80 bp, synthetic construct
  misc_feature 1..80: note = Artificially Synthesized Probe
  source 1..80: mol_type = other DNA
cagatgactataaacatttccctaaactgaaatgcactgttgtatgttcacctgcaatgaatggtgtaagctgaatataa

SEQ ID NO: 37783 - DNA, 80 bp, synthetic construct
  misc_feature 1..80: note = Artificially Synthesized Probe
  source 1..80: mol_type = other DNA
ccctagtatgtgtttattataaagattttgatgctgcttttcagagttgggtaacctactttaccccctaagctaatgtt

SEQ ID NO: 37784 - DNA, 80 bp, synthetic construct
  misc_feature 1..80: note = Artificially Synthesized Probe
  source 1..80: mol_type = other DNA
acatgagacagtattacaccaatgctgttgagaagtctattgtgaggcaatgtgtcttctttctctggctgcttttgaga

SEQ ID NO: 37785 - DNA, 80 bp, synthetic construct
  misc_feature 1..80: note = Artificially Synthesized Probe
  source 1..80: mol_type = other DNA
ttacattctctctcttaaagagaaaatgtaaggtatctaaatctgctgctaaaccatcatggtttttaattataataagg

SEQ ID NO: 37786 - DNA, 80 bp, synthetic construct
  misc_feature 1..80: note = Artificially Synthesized Probe
  source 1..80: mol_type = other DNA
ttcaaggtatgggccccagaccagaagtatcagcaacaaaatgctaaaactgcagaatcttgggtcagaaattggggacc

SEQ ID NO: 37787 - DNA, 80 bp, synthetic construct
  misc_feature 1..80: note = Artificially Synthesized Probe
  source 1..80: mol_type = other DNA
atgaagcatttcaaagaagttaatgacatcacagtattaaatccatctgacatggaaaccaactctaactacatcatagt

SEQ ID NO: 37788 - DNA, 80 bp, synthetic construct
  misc_feature 1..80: note = Artificially Synthesized Probe
  source 1..80: mol_type = other DNA
tggcttcaagaaaatgaactgcagcaagacgttcttcaagtgttccacgttagctgcagacacctcttgctcttgattcc

SEQ ID NO: 37789 - DNA, 80 bp, synthetic construct
  misc_feature 1..80: note = Artificially Synthesized Probe
  source 1..80: mol_type = other DNA
tgtgtaaatactggggttcttgtctcagaagcacagggtatcatggaaatggagttgaaagctggggaactgatggaacg

SEQ ID NO: 37790 - DNA, 80 bp, synthetic construct
  misc_feature 1..80: note = Artificially Synthesized Probe
  source 1..80: mol_type = other DNA
gataatgtttttattagtgggaaaatgttattttatagagatgcatactgaagtatttaatggtggaatgtcatgatata

SEQ ID NO: 37791 - DNA, 80 bp, synthetic construct
  misc_feature 1..80: note = Artificially Synthesized Probe
  source 1..80: mol_type = other DNA
cttgggtacatgtgtatggagggtccagaaaaccaaactggcagtttttatggtggccaggttttctgatctcaccttaa

SEQ ID NO: 37792 - DNA, 80 bp, synthetic construct
  misc_feature 1..80: note = Artificially Synthesized Probe
  source 1..80: mol_type = other DNA
atcactacaaaaatttagcattacttcatcaagaggaataaactgaaactgtcagtttcttggaagggtgagaggatagt

SEQ ID NO: 37793 - DNA, 80 bp, synthetic construct
  misc_feature 1..80: note = Artificially Synthesized Probe
  source 1..80: mol_type = other DNA
tgagaggaaactgggcctattagattttttttaaaggttaagtatgagattgttcaaaatctattgattcggccttacag

SEQ ID NO: 37794 - DNA, 80 bp, synthetic construct
  misc_feature 1..80: note = Artificially Synthesized Probe
  source 1..80: mol_type = other DNA
ttcttgaaacacacttgctgaaatctgcttggtagacatcctcaatcactgcccttatacctttacctctgcagcttcgt

SEQ ID NO: 37795 - DNA, 80 bp, synthetic construct
  misc_feature 1..80: note = Artificially Synthesized Probe
  source 1..80: mol_type = other DNA
ttcctggaagcagaatggaagatactgggtacggctgaactaaaactccaactaattgtaaatgtgaaagcaaagaagct

SEQ ID NO: 37796 - DNA, 80 bp, synthetic construct
  misc_feature 1..80: note = Artificially Synthesized Probe
  source 1..80: mol_type = other DNA
ggctgaaaacaacccatccccagccaccattaatgcaaagggcaaaaaattagaaacagaaaaaacttctatatgcaacc

SEQ ID NO: 37797 - DNA, 80 bp, synthetic construct
  misc_feature 1..80: note = Artificially Synthesized Probe
  source 1..80: mol_type = other DNA
ggctaagatgtgttactggtcactaagggtgagatttcacttccctaacctgttcttgaaggccttcaacagatcccact

SEQ ID NO: 37798 - DNA, 80 bp, synthetic construct
  misc_feature 1..80: note = Artificially Synthesized Probe
  source 1..80: mol_type = other DNA
actgctacctccatctcctgtgctcaagcgatcctcctgcctcaacctcctgagtagctgctaattataggcacgcacca

SEQ ID NO: 37799 - DNA, 80 bp, synthetic construct
  misc_feature 1..80: note = Artificially Synthesized Probe
  source 1..80: mol_type = other DNA
tcgatatcagagttctttgacagttcacattttttaggttccactttgctttcagatccactctgggctactgaactagt

SEQ ID NO: 37800 - DNA, 80 bp, synthetic construct
  misc_feature 1..80: note = Artificially Synthesized Probe
  source 1..80: mol_type = other DNA
cctgttgttgactcatcaaagtggaaaagattttttctcacagggctacttgccaatggagaagcatgtactgagctact

SEQ ID NO: 37801 - DNA, 80 bp, synthetic construct
  misc_feature 1..80: note = Artificially Synthesized Probe
  source 1..80: mol_type = other DNA
tgatccacatgcccaaaatagtcatgaaatacataccttcttcattcctaaacaatttatcaaatgatgttaacaataat

SEQ ID NO: 37802 - DNA, 80 bp, synthetic construct
  misc_feature 1..80: note = Artificially Synthesized Probe
  source 1..80: mol_type = other DNA
tgacaaactagaaaaaaactgctaaatatgacatgaagaataagagaatagcatcgctgtgatcaacaagaactacctca

SEQ ID NO: 37803 - DNA, 80 bp, synthetic construct
  misc_feature 1..80: note = Artificially Synthesized Probe
  source 1..80: mol_type = other DNA
gcctcaaggaacatgtttttgaagtgagccttgaaaatctgcaaaatgacgaggttgcattgtgcaaattgaagctatta

SEQ ID NO: 37804 - DNA, 80 bp, synthetic construct
  misc_feature 1..80: note = Artificially Synthesized Probe
  source 1..80: mol_type = other DNA
agatcttggctctcgccctttcagtgccacaaagctgttttgtgaacctgtaaataatccatttggagtctccatgtttc

SEQ ID NO: 37805 - DNA, 80 bp, synthetic construct
  misc_feature 1..80: note = Artificially Synthesized Probe
  source 1..80: mol_type = other DNA
ataataatgagtaagttacctaacctttctttatccatttccttatttataaaaaagggattaataatggtaccggccat

SEQ ID NO: 37806 - DNA, 80 bp, synthetic construct
  misc_feature 1..80: note = Artificially Synthesized Probe
  source 1..80: mol_type = other DNA
ttgtataatagtagagatgcggtttcaccatgtttgccaggctagtcttgaactcctgacctcaagtgatccaccacctc

SEQ ID NO: 37807 - DNA, 80 bp, synthetic construct
  misc_feature 1..80: note = Artificially Synthesized Probe
  source 1..80: mol_type = other DNA
gtggtatcagaaaacaggtaaattttgaaaagtttcaaacttctctgtatcagcccaggaatccgaccagttctaacaag

SEQ ID NO: 37808 - DNA, 80 bp, synthetic construct
  misc_feature 1..80: note = Artificially Synthesized Probe
  source 1..80: mol_type = other DNA
tttgatgtaactttagcagtataatttagttcttgcctgataaacatgaaagaacctacttttatttccaattccaaaaa

SEQ ID NO: 37809 - DNA, 80 bp, synthetic construct
  misc_feature 1..80: note = Artificially Synthesized Probe
  source 1..80: mol_type = other DNA
ggctctcttgagctaggaggtcgaagccgcagtaagctgtgatcataccactgtactccagcctgcacaacaagaccctg

SEQ ID NO: 37810 - DNA, 80 bp, synthetic construct
  misc_feature 1..80: note = Artificially Synthesized Probe
  source 1..80: mol_type = other DNA
ttggaaagcttttccaagtgaacaaaataagttactgatgttttctaactgattttcaatggtgacagaaatacagatgc

SEQ ID NO: 37811 - DNA, 80 bp, synthetic construct
  misc_feature 1..80: note = Artificially Synthesized Probe
  source 1..80: mol_type = other DNA
tcttctatatttccatttactgcatccaatatagcaaaagttacgtgtgcgtcttcttcatattcaacaatttctgatgc

SEQ ID NO: 37812 - DNA, 80 bp, synthetic construct
  misc_feature 1..80: note = Artificially Synthesized Probe
  source 1..80: mol_type = other DNA
caccgcacccggcctctacactcaacttttaaatgcttctaatgataccaccctaacgtagcaatcccaactgcttttta

SEQ ID NO: 37813 - DNA, 80 bp, synthetic construct
  misc_feature 1..80: note = Artificially Synthesized Probe
  source 1..80: mol_type = other DNA
aggggcaggcataacggctgataggagctgtggtgagaattacatttctcctttaattgtaagtggctggtatatactac

SEQ ID NO: 37814 - DNA, 80 bp, synthetic construct
  misc_feature 1..80: note = Artificially Synthesized Probe
  source 1..80: mol_type = other DNA
accccaaaacaatgggttttcctttaagtcattaaagcaatggaacaccactatataatccatcagtacagtaaagaaat

SEQ ID NO: 37815 - DNA, 80 bp, synthetic construct
  misc_feature 1..80: note = Artificially Synthesized Probe
  source 1..80: mol_type = other DNA
aaaattatctgggccgagtggcatgtgcctatggtaccagctactcaggaggctgaggcaagagaatcccttgagcccag

SEQ ID NO: 37816 - DNA, 80 bp, synthetic construct
  misc_feature 1..80: note = Artificially Synthesized Probe
  source 1..80: mol_type = other DNA
taggtgactgactagaaaacagagcatcatataatgcagactgcccgcttttgttggcaaaagtttcaacaaccactttt

SEQ ID NO: 37817 - DNA, 80 bp, synthetic construct
  misc_feature 1..80: note = Artificially Synthesized Probe
  source 1..80: mol_type = other DNA
gccttgttcccagagatttttatgccataggtttacagtaagcaatcaaaaaatcatagtcctcggataaagtactgata

SEQ ID NO: 37818 - DNA, 80 bp, synthetic construct
  misc_feature 1..80: note = Artificially Synthesized Probe
  source 1..80: mol_type = other DNA
agtgactaaatattcaggatagaggctctagcagccagatgaagaaagagttaagaaatcctctccacataggaacaaac

SEQ ID NO: 37819 - DNA, 80 bp, synthetic construct
  misc_feature 1..80: note = Artificially Synthesized Probe
  source 1..80: mol_type = other DNA
cacctgttaattccagctacacgggaggctgaggcacaaggatagcttgaacctgggaggcagaggttgtagtgcgccga

SEQ ID NO: 37820 - DNA, 80 bp, synthetic construct
  misc_feature 1..80: note = Artificially Synthesized Probe
  source 1..80: mol_type = other DNA
tcatggcacaagttaatcattgctaaattacttgaagtagcattttaaaaaaaaagtaaaagcaagctaatgtcctggct

SEQ ID NO: 37821 - DNA, 80 bp, synthetic construct
  misc_feature 1..80: note = Artificially Synthesized Probe
  source 1..80: mol_type = other DNA
cctctcaagtagctgggactacaggcacccgccaccatgcgtggctaatttttctatttttagtagagatggggtttgac

SEQ ID NO: 37822 - DNA, 80 bp, synthetic construct
  misc_feature 1..80: note = Artificially Synthesized Probe
  source 1..80: mol_type = other DNA
tctttacaaaaaatttaacaatgtagccaggcatggtggcaggcacctgtagtcccagtaccgagctgaggctgaagcag

SEQ ID NO: 37823 - DNA, 80 bp, synthetic construct
  misc_feature 1..80: note = Artificially Synthesized Probe
  source 1..80: mol_type = other DNA
gtgaacctcactaaatccattaattttcactaatccattccttatgaacacagaagtttctactgagcaaatattagcac

SEQ ID NO: 37824 - DNA, 80 bp, synthetic construct
  misc_feature 1..80: note = Artificially Synthesized Probe
  source 1..80: mol_type = other DNA
aaaaaaaaaaaaaaaaaggccaggcgcgccaggcgcagtgcctcgcgcctgtaatcccagcactttgggagaccaaggca

SEQ ID NO: 37825 - DNA, 80 bp, synthetic construct
  misc_feature 1..80: note = Artificially Synthesized Probe
  source 1..80: mol_type = other DNA
atttcatttcaactttaattccacaggtttgttcacatattgtcattacataccagagcacaccttcatttaaaacacat

SEQ ID NO: 37826 - DNA, 80 bp, synthetic construct
  misc_feature 1..80: note = Artificially Synthesized Probe
  source 1..80: mol_type = other DNA
aaaagcaaacacttaaacgtgaagcatgattttaaagtggcttacaataaagcaaccagagcaagtgaggtctaaagatc

SEQ ID NO: 37827 - DNA, 80 bp, synthetic construct
  misc_feature 1..80: note = Artificially Synthesized Probe
  source 1..80: mol_type = other DNA
agcactttgggaggctgaggcgggtggatcacctgaggtcaggagttcaagaccagcctagccaacatggtgaaacccta

SEQ ID NO: 37828 - DNA, 80 bp, synthetic construct
  misc_feature 1..80: note = Artificially Synthesized Probe
  source 1..80: mol_type = other DNA
cgagaccatcctggctaagaaggtgacactccgtctctactaaaaatacaaaaaaattagccgagcgtggtggtgggcgc

SEQ ID NO: 37829 - DNA, 80 bp, synthetic construct
  misc_feature 1..80: note = Artificially Synthesized Probe
  source 1..80: mol_type = other DNA
acccacatacaaacatctttgatgtccttaagaaaaatgtaaaaggaacttgtgaccaaaaaatttgagtatacaaagaa

SEQ ID NO: 37830 - DNA, 80 bp, synthetic construct
  misc_feature 1..80: note = Artificially Synthesized Probe
  source 1..80: mol_type = other DNA
agattgcctcctagtggttcactgtattaactataactcctaggtacattatagaaataatgattcagtaaagaaattta

SEQ ID NO: 37831 - DNA, 80 bp, synthetic construct
  misc_feature 1..80: note = Artificially Synthesized Probe
  source 1..80: mol_type = other DNA
ccttatgctcaaactgctctgtatctccttaaatctgactcaatcccgcatcccctctcctcccactgttctgttacctt

SEQ ID NO: 37832 - DNA, 80 bp, synthetic construct
  misc_feature 1..80: note = Artificially Synthesized Probe
  source 1..80: mol_type = other DNA
atataaattccattttaccttacctacttaaactcgtctttccccaactctcaagaccaagccgcccattagtactctgt

SEQ ID NO: 37833 - DNA, 80 bp, synthetic construct
  misc_feature 1..80: note = Artificially Synthesized Probe
  source 1..80: mol_type = other DNA
aatctggacatgattgttcatagcagttgaacaatagccaaaacctagaaataaccaaaatgcccctcaaaagtgaatgg

SEQ ID NO: 37834 - DNA, 80 bp, synthetic construct
  misc_feature 1..80: note = Artificially Synthesized Probe
  source 1..80: mol_type = other DNA
ttgtgctttgggcgggttaaacaggttgagtatcccttatccaaaatgcttgagaccagaagtatttcagattttgaatt

SEQ ID NO: 37835 - DNA, 80 bp, synthetic construct
  misc_feature 1..80: note = Artificially Synthesized Probe
  source 1..80: mol_type = other DNA
aatccctaaaatattaattattccagaagggtaaatgagatgtcacttataaagtataacaatgcctaataagacagtag

SEQ ID NO: 37836 - DNA, 80 bp, synthetic construct
  misc_feature 1..80: note = Artificially Synthesized Probe
  source 1..80: mol_type = other DNA
aagacccagaaatctgtgagctctgggatccatctctcgcacattaatgtaagtacatatgtatctgttttttaaaagta

SEQ ID NO: 37837 - DNA, 80 bp, synthetic construct
  misc_feature 1..80: note = Artificially Synthesized Probe
  source 1..80: mol_type = other DNA
gccaggtccacgtggtggtgcgcatctgtatccccagctacttggggcgctgaggtgtaaagatctcttgagcccagaag

SEQ ID NO: 37838 - DNA, 80 bp, synthetic construct
  misc_feature 1..80: note = Artificially Synthesized Probe
  source 1..80: mol_type = other DNA
gattgtgccattgcactccagcctgggcgacagagactccatctcccaaacatcatcatcatcatcatcataaataagct

SEQ ID NO: 37839 - DNA, 80 bp, synthetic construct
  misc_feature 1..80: note = Artificially Synthesized Probe
  source 1..80: mol_type = other DNA
aggcaggtggatcacttgaagccaagagttcgagaccagcctggccaacatacagaaacctcctttctactaaaaataca

SEQ ID NO: 37840 - DNA, 80 bp, synthetic construct
  misc_feature 1..80: note = Artificially Synthesized Probe
  source 1..80: mol_type = other DNA
gtgtcctaggtaggacggagcaggaggccgtgaaatttttatcatgttattcagaactgtttgcaatttaaaactcatga

SEQ ID NO: 37841 - DNA, 80 bp, synthetic construct
  misc_feature 1..80: note = Artificially Synthesized Probe
  source 1..80: mol_type = other DNA
atggtgtcgctctctcgaccttgtaatctgacttcctccgcctcccaaggtgctgggattacaggcgtcagccacggagc

SEQ ID NO: 37842 - DNA, 80 bp, synthetic construct
  misc_feature 1..80: note = Artificially Synthesized Probe
  source 1..80: mol_type = other DNA
ataaccaaatgatcaactaaattaagtaaagacattttaaagacataccattagtttccagaccagcctgaccagtatgg

SEQ ID NO: 37843 - DNA, 80 bp, synthetic construct
  misc_feature 1..80: note = Artificially Synthesized Probe
  source 1..80: mol_type = other DNA
ctctactaaaaacactaaaaaattagccgggtgttgtggcgggtgcccgtagtcccagctacaggctggggcaggagaat

SEQ ID NO: 37844 - DNA, 80 bp, synthetic construct
  misc_feature 1..80: note = Artificially Synthesized Probe
  source 1..80: mol_type = other DNA
tcacactccaaaactccgacattctagaaagcatgggcagttcacagatggccagcctctgccaaactgggggagaatac

SEQ ID NO: 37845 - DNA, 80 bp, synthetic construct
  misc_feature 1..80: note = Artificially Synthesized Probe
  source 1..80: mol_type = other DNA
caagccatactaacgatttgtaagaactttagaattttttttttttaagcaaagtcagctaccaaagtgttccgggcagg

SEQ ID NO: 37846 - DNA, 80 bp, synthetic construct
  misc_feature 1..80: note = Artificially Synthesized Probe
  source 1..80: mol_type = other DNA
gtcgggagccatgatgcctgagccatcaaggcagccgccgggccgggtcgaggcagccgcctccacagagcgcgccaggg

SEQ ID NO: 37847 - DNA, 80 bp, synthetic construct
  misc_feature 1..80: note = Artificially Synthesized Probe
  source 1..80: mol_type = other DNA
ctcaacagagcgcgccagggagcagcgcccgtcgggagccatgacgcctgagccatcgaggccgccgcagggccaggtcg

SEQ ID NO: 37848 - DNA, 80 bp, synthetic construct
  misc_feature 1..80: note = Artificially Synthesized Probe
  source 1..80: mol_type = other DNA
ttaacccaaaactttaataatgtgtctgtaaccaagaaaatattgatagcatcatcctaatgaaactaaacatttatttt

SEQ ID NO: 37849 - DNA, 80 bp, synthetic construct
  misc_feature 1..80: note = Artificially Synthesized Probe
  source 1..80: mol_type = other DNA
ctcctttaaaccctaacaacacagtgagacagttactgttatctccatgtcagatgacgagactgaagctacaagatcac

SEQ ID NO: 37850 - DNA, 80 bp, synthetic construct
  misc_feature 1..80: note = Artificially Synthesized Probe
  source 1..80: mol_type = other DNA
ctcaaactttcattgtaggcattgcttccccactcaaacctttgggaatttcccatttgcctgaaggatgaaattgaagt

SEQ ID NO: 37851 - DNA, 80 bp, synthetic construct
  misc_feature 1..80: note = Artificially Synthesized Probe
  source 1..80: mol_type = other DNA
atgaaagcagaagacacgtgaaagattgtgttataaactgaagttttggccgggcatggtggctcacgcctgtaatccca

SEQ ID NO: 37852 - DNA, 80 bp, synthetic construct
  misc_feature 1..80: note = Artificially Synthesized Probe
  source 1..80: mol_type = other DNA
cgcatatgtggggtgtctttggagccaaaagacatcacatttcttcttttctatgcattagttctgtcattttgggcaag

SEQ ID NO: 37853 - DNA, 80 bp, synthetic construct
  misc_feature 1..80: note = Artificially Synthesized Probe
  source 1..80: mol_type = other DNA
ctcaagtgactgagctggagatttctcctgtttgtgctgtccttggttgattagcatagtacttggtatagaatagttat

SEQ ID NO: 37854 - DNA, 80 bp, synthetic construct
  misc_feature 1..80: note = Artificially Synthesized Probe
  source 1..80: mol_type = other DNA
aaagtagttcagtggttgcctttgggtgggaccaggtgggtaggaagggaggaatttcaaaggagcaggaggaagtgtgt

SEQ ID NO: 37855 - DNA, 80 bp, synthetic construct
  misc_feature 1..80: note = Artificially Synthesized Probe
  source 1..80: mol_type = other DNA
ggtcctctctgcttgacccctcatgcacaggtgtccaggcccataataaggctgcttctctgtctctttagtgagcaaca

SEQ ID NO: 37856 - DNA, 80 bp, synthetic construct
  misc_feature 1..80: note = Artificially Synthesized Probe
  source 1..80: mol_type = other DNA
gttggactccaaggcttgaggtttcttccagcttttgcattgcggggttctgtcacccgcatgtcaaactatttggctac

SEQ ID NO: 37857 - DNA, 80 bp, synthetic construct
  misc_feature 1..80: note = Artificially Synthesized Probe
  source 1..80: mol_type = other DNA
ccgattctgtaaacaatttttttttttttgaaaaaaagaactgggaatggcagtgtactgagcagtacatgagagccaca

SEQ ID NO: 37858 - DNA, 80 bp, synthetic construct
  misc_feature 1..80: note = Artificially Synthesized Probe
  source 1..80: mol_type = other DNA
gatctctggcgcctgcatgaattttccagatagctgaggcttactcatcactgaggaatatctgtctaaaatatattttg

SEQ ID NO: 37859 - DNA, 80 bp, synthetic construct
  misc_feature 1..80: note = Artificially Synthesized Probe
  source 1..80: mol_type = other DNA
caataactatgcttgataggattgttccttaaataagtatagacaggcccacagagggctcaattaacaagttaaatgct

SEQ ID NO: 37860 - DNA, 80 bp, synthetic construct
  misc_feature 1..80: note = Artificially Synthesized Probe
  source 1..80: mol_type = other DNA
tggcatccacctcctgcttagggacacatatatgggtgtctaaccaataaaagatgtttgcttgtagaataacaagttct

SEQ ID NO: 37861 - DNA, 80 bp, synthetic construct
  misc_feature 1..80: note = Artificially Synthesized Probe
  source 1..80: mol_type = other DNA
aactaaatgcatcgcatatctccctcctcttcattggggtctctgcttaaaagctaactactcagataagctttccctga

SEQ ID NO: 37862 - DNA, 80 bp, synthetic construct
  misc_feature 1..80: note = Artificially Synthesized Probe
  source 1..80: mol_type = other DNA
agggaggcgacggagattccaagattgtggcttattttagttcccagcacctcatggataatgaaccagaccaggagtca

SEQ ID NO: 37863 - DNA, 80 bp, synthetic construct
  misc_feature 1..80: note = Artificially Synthesized Probe
  source 1..80: mol_type = other DNA
tataaagtgggagaaataatcacagtccctacctcataagatcataggagagtggagagaattaaaaagaattacctgca

SEQ ID NO: 37864 - DNA, 80 bp, synthetic construct
  misc_feature 1..80: note = Artificially Synthesized Probe
  source 1..80: mol_type = other DNA
ctacaggcaagagccacaacgcccagctaattttttgtatttttagtaaggacagggtttcaccatgttggccaggatga

SEQ ID NO: 37865 - DNA, 80 bp, synthetic construct
  misc_feature 1..80: note = Artificially Synthesized Probe
  source 1..80: mol_type = other DNA
aacaatttcacttctaggcatataatcaacagaagtgcattcgtgtgctccaaaaacaaaagtgctagaatgttcagagg

SEQ ID NO: 37866 - DNA, 80 bp, synthetic construct
  misc_feature 1..80: note = Artificially Synthesized Probe
  source 1..80: mol_type = other DNA
ggggccccaccctgatgactttatctaatcctagttacctcccaaaggcttcacctccaatttcatcaacatatgaattt

SEQ ID NO: 37867 - DNA, 80 bp, synthetic construct
  misc_feature 1..80: note = Artificially Synthesized Probe
  source 1..80: mol_type = other DNA
cattctaaaaggaaaaagaggcaagggaaaaagggtaactggttccaggaaagtacaaaacccaacatagaaaacaacat

SEQ ID NO: 37868 - DNA, 80 bp, synthetic construct
  misc_feature 1..80: note = Artificially Synthesized Probe
  source 1..80: mol_type = other DNA
ctcatcagaatggccttcaccagccacatttctatcagcattctgatctcaacgacttcagtaaccattaagaagttcca

SEQ ID NO: 37869 - DNA, 80 bp, synthetic construct
  misc_feature 1..80: note = Artificially Synthesized Probe
  source 1..80: mol_type = other DNA
ttcaaaccatcacatatataatgtacaaaaacagacaaaactgactgatgctgttagaagtcaggttagtggttatcctg

SEQ ID NO: 37870 - DNA, 80 bp, synthetic construct
  misc_feature 1..80: note = Artificially Synthesized Probe
  source 1..80: mol_type = other DNA
aaagagatacaatgaaaacaaaatgttgctaaaatctctcccagatatggcagtctgaggttttctctgctattcaaaag

SEQ ID NO: 37871 - DNA, 80 bp, synthetic construct
  misc_feature 1..80: note = Artificially Synthesized Probe
  source 1..80: mol_type = other DNA
accacagaatcacagaattgggaatctaggcagcccacaagcagaatttagccacacagtgttactaacaatcttgaatt

SEQ ID NO: 37872 - DNA, 80 bp, synthetic construct
  misc_feature 1..80: note = Artificially Synthesized Probe
  source 1..80: mol_type = other DNA
cactttttcattttatataagccatgtccagaaaatattcacacaacatccaggaagtaatggctagggctctggtgtgt

SEQ ID NO: 37873 - DNA, 80 bp, synthetic construct
  misc_feature 1..80: note = Artificially Synthesized Probe
  source 1..80: mol_type = other DNA
cttctcagacttgaatgtgtactcacatcaatggggagtttgttgaaatgaagagctggctttagtggatgtggggtggg

SEQ ID NO: 37874 - DNA, 80 bp, synthetic construct
  misc_feature 1..80: note = Artificially Synthesized Probe
  source 1..80: mol_type = other DNA
agccagcagatgtggacacatatgcaaattcagtcaggctggttccttccttaggatccccattagtcttcagaataaaa

SEQ ID NO: 37875 - DNA, 80 bp, synthetic construct
  misc_feature 1..80: note = Artificially Synthesized Probe
  source 1..80: mol_type = other DNA
tttcaaagccagaggagataaaagaaatttgttccccttgcaaagatgaaaatcagatttgccctggttttggtcaatcg

SEQ ID NO: 37876 - DNA, 80 bp, synthetic construct
  misc_feature 1..80: note = Artificially Synthesized Probe
  source 1..80: mol_type = other DNA
taaaccaaagagccccttctccagagaatttgggattggggccaagagattccatccaccaggctgctttcttgaagcaa

SEQ ID NO: 37877 - DNA, 80 bp, synthetic construct
  misc_feature 1..80: note = Artificially Synthesized Probe
  source 1..80: mol_type = other DNA
tgctcagcatcctaggcacccatcacactcattagtggtgtgtccctggacagcgggaagaatgggtttttgttttattt

SEQ ID NO: 37878 - DNA, 80 bp, synthetic construct
  misc_feature 1..80: note = Artificially Synthesized Probe
  source 1..80: mol_type = other DNA
tagtgtcacatacttctctacttctgattctgatggttccattcttgaaatttgttggggggaagagagaggctggctaa

SEQ ID NO: 37879 - DNA, 80 bp, synthetic construct
  misc_feature 1..80: note = Artificially Synthesized Probe
  source 1..80: mol_type = other DNA
ttatttttttttttttaatgaatgtgctgctttaacttgaccccgtggcctgatagtcctttgcctactatcaagctcac

SEQ ID NO: 37880 - DNA, 80 bp, synthetic construct
  misc_feature 1..80: note = Artificially Synthesized Probe
  source 1..80: mol_type = other DNA
agaaagttcagagcttcacttaggaggtgtgacttgaagccacgagactggtgttcagagcttacccagcccaacccagc

SEQ ID NO: 37881 - DNA, 80 bp, synthetic construct
  misc_feature 1..80: note = Artificially Synthesized Probe
  source 1..80: mol_type = other DNA
tttttagcaccatttcccactgaccccatcttggtttaagccaccatcaccgctaccccaaattgttacagtaacctcct

SEQ ID NO: 37882 - DNA, 80 bp, synthetic construct
  misc_feature 1..80: note = Artificially Synthesized Probe
  source 1..80: mol_type = other DNA
ttttttttatcaccatgtgctgacaattctaaacagcatgggtggtaaatagccctcccagcaccctgccattgttctgc

SEQ ID NO: 37883 - DNA, 80 bp, synthetic construct
  misc_feature 1..80: note = Artificially Synthesized Probe
  source 1..80: mol_type = other DNA
actcctcttcttgacagccatgtttttactgtgtgaactatttcccatgccagctgtagctgcttggaccagagtggaaa

SEQ ID NO: 37884 - DNA, 80 bp, synthetic construct
  misc_feature 1..80: note = Artificially Synthesized Probe
  source 1..80: mol_type = other DNA
ctcttggagaattcctaccaaaaatgcatacccacaatctaatcatgaggaacagcagacaaacccacattctacaaaag

SEQ ID NO: 37885 - DNA, 80 bp, synthetic construct
  misc_feature 1..80: note = Artificially Synthesized Probe
  source 1..80: mol_type = other DNA
attcgagatgagattggagggggatacagaacccaactgcatcagaaatatacactgaggccggttatggtggcccacgc

SEQ ID NO: 37886 - DNA, 80 bp, synthetic construct
  misc_feature 1..80: note = Artificially Synthesized Probe
  source 1..80: mol_type = other DNA
tgaccgctcgtctctttccctgcgttacacttctgccacccactgtcaagccttagaccttgtcattaccagtaactgtt

SEQ ID NO: 37887 - DNA, 80 bp, synthetic construct
  misc_feature 1..80: note = Artificially Synthesized Probe
  source 1..80: mol_type = other DNA
tctgccggcctattcacagtccctgccatttctctcgttaagatgaactctccgcctcaggaacgagatggcggttctct

SEQ ID NO: 37888 - DNA, 80 bp, synthetic construct
  misc_feature 1..80: note = Artificially Synthesized Probe
  source 1..80: mol_type = other DNA
cagaaaattagacagtgtttaattttcaaaaacttccctctctagtcggtagataccacctaccgatggttacatatact

SEQ ID NO: 37889 - DNA, 80 bp, synthetic construct
  misc_feature 1..80: note = Artificially Synthesized Probe
  source 1..80: mol_type = other DNA
ccatctctctttatcctcactcctgagtgatctccttgggtctcatggctttaaacaccatctgtattgtaacaactccc

SEQ ID NO: 37890 - DNA, 80 bp, synthetic construct
  misc_feature 1..80: note = Artificially Synthesized Probe
  source 1..80: mol_type = other DNA
aagaagatgctggctgtacaaacttgctggacccactgctggtgaggctctgagaattaattacttttatacaaccataa

SEQ ID NO: 37891 - DNA, 80 bp, synthetic construct
  misc_feature 1..80: note = Artificially Synthesized Probe
  source 1..80: mol_type = other DNA
cctcagcctcctgagtaactgacactacaggtgcatgccaccacaactggataatttagaaaaaattactttttagagat

SEQ ID NO: 37892 - DNA, 80 bp, synthetic construct
  misc_feature 1..80: note = Artificially Synthesized Probe
  source 1..80: mol_type = other DNA
tctcactgagcctatttctccttctgcaaattaagaatgatgatcaaacgtatcccatgttggtgtcctggggatgtgaa

SEQ ID NO: 37893 - DNA, 80 bp, synthetic construct
  misc_feature 1..80: note = Artificially Synthesized Probe
  source 1..80: mol_type = other DNA
agaggattaaaatggactttttggaaacagtcatgccagctgatcacaaatgtgaggttcaaatccagctggcctagatc

SEQ ID NO: 37894 - DNA, 80 bp, synthetic construct
  misc_feature 1..80: note = Artificially Synthesized Probe
  source 1..80: mol_type = other DNA
ggctgagtgagccatgaacatgccacttcactccagcctggacaacagagtgagaccctgtctcaaacacagttttaggc

SEQ ID NO: 37895 - DNA, 80 bp, synthetic construct
  misc_feature 1..80: note = Artificially Synthesized Probe
  source 1..80: mol_type = other DNA
tgtgtgtgtgtgtgtgtgtgtgtattgaatcccggtgggaattaactctaagatggtttttgttttgttttgtttttgag

SEQ ID NO: 37896 - DNA, 80 bp, synthetic construct
  misc_feature 1..80: note = Artificially Synthesized Probe
  source 1..80: mol_type = other DNA
tgcccagcctctaaaccttttaaaaaagaaaaatacatacagtttttttcctctagggccagtcaggagctggctagact

SEQ ID NO: 37897 - DNA, 80 bp, synthetic construct
  misc_feature 1..80: note = Artificially Synthesized Probe
  source 1..80: mol_type = other DNA
aaaggcatctaaacaaagcacaggtaatttaatgaaaataaaggcatggctatttcttgtctagtagctttagggggctg

SEQ ID NO: 37898 - DNA, 80 bp, synthetic construct
  misc_feature 1..80: note = Artificially Synthesized Probe
  source 1..80: mol_type = other DNA
gagcctcaatgttctcaactgaataatggggataacataacatgccgtgtggggataaggtaaggattagaggagctaaa

SEQ ID NO: 37899 - DNA, 80 bp, synthetic construct
  misc_feature 1..80: note = Artificially Synthesized Probe
  source 1..80: mol_type = other DNA
tttaccatgtgcctacgctgttttaatcactttacatagactatcttgtttcgttctcacaaccacactttgacatgggt

SEQ ID NO: 37900 - DNA, 80 bp, synthetic construct
  misc_feature 1..80: note = Artificially Synthesized Probe
  source 1..80: mol_type = other DNA
ccagcctagacaatgtttttcgaaaaggtggaaggggaagcataggttttgagttcacatagctctgttcgatcccagct

SEQ ID NO: 37901 - DNA, 80 bp, synthetic construct
  misc_feature 1..80: note = Artificially Synthesized Probe
  source 1..80: mol_type = other DNA
ttgtgttcagttggagactgcatgccccacttcagatatgcaaatccaaccttttattaaacacgattgttaaagtgcat

SEQ ID NO: 37902 - DNA, 80 bp, synthetic construct
  misc_feature 1..80: note = Artificially Synthesized Probe
  source 1..80: mol_type = other DNA
tagcactttgggaggctgaggtgggcagatcacttgaagtcaggagtttgagaccagcctggccaacatggtgaaatccc

SEQ ID NO: 37903 - DNA, 80 bp, synthetic construct
  misc_feature 1..80: note = Artificially Synthesized Probe
  source 1..80: mol_type = other DNA
gcctcatgacttgcagaaagaagtctaacctggtagttcagcagcgagagataaggcaatactcaccattgttgtaacag

SEQ ID NO: 37904 - DNA, 80 bp, synthetic construct
  misc_feature 1..80: note = Artificially Synthesized Probe
  source 1..80: mol_type = other DNA
gaccaaagctgcagtgtggaaggtgccagggtttggagtgtttacatgtcactgggaaaactcctctgtcttctagtagc

SEQ ID NO: 37905 - DNA, 80 bp, synthetic construct
  misc_feature 1..80: note = Artificially Synthesized Probe
  source 1..80: mol_type = other DNA
atctggtctcatcacaggtcatccagaccagtagtcattacagcaaagaacacacaccccagaaaatgctcaatacaatc

SEQ ID NO: 37906 - DNA, 80 bp, synthetic construct
  misc_feature 1..80: note = Artificially Synthesized Probe
  source 1..80: mol_type = other DNA
aatattggtccaatgagaaggatttgatacgcatttctctatattcttcatgttgcaactaatggcagggttttatgttt

SEQ ID NO: 37907 - DNA, 80 bp, synthetic construct
  misc_feature 1..80: note = Artificially Synthesized Probe
  source 1..80: mol_type = other DNA
gtttaccaggactgaattcaattaagtggattgacagattaagttacctaagtttaactcaacaaactttcacaaaatga

SEQ ID NO: 37908 - DNA, 80 bp, synthetic construct
  misc_feature 1..80: note = Artificially Synthesized Probe
  source 1..80: mol_type = other DNA
ctgtttatttttatttattactattatttttttcagacagagtcccactctgtcacccaggctggagtgcagtggcgtat

SEQ ID NO: 37909 - DNA, 80 bp, synthetic construct
  misc_feature 1..80: note = Artificially Synthesized Probe
  source 1..80: mol_type = other DNA
ctcaacgccactgtaaaatggggccatgatgcataatggttaagtgtaaggaaactaaatccagggtggctaaatttaaa

SEQ ID NO: 37910 - DNA, 80 bp, synthetic construct
  misc_feature 1..80: note = Artificially Synthesized Probe
  source 1..80: mol_type = other DNA
ttgggagactgaggctggaggatcgcttgtgtccaggagtttgagaccagtctgggaaacacagggagacccacatctct

SEQ ID NO: 37911 - DNA, 80 bp, synthetic construct
  misc_feature 1..80: note = Artificially Synthesized Probe
  source 1..80: mol_type = other DNA
tttgaaagagggcattctattcctttgacacccaaacataatccttctttactctgtacttcagtcatcttcagcatatc

SEQ ID NO: 37912 - DNA, 80 bp, synthetic construct
  misc_feature 1..80: note = Artificially Synthesized Probe
  source 1..80: mol_type = other DNA
atgaggtagtgagcaccctgtcactagaggaatgcagaaatgtcttgaaaacaattcctatgtagatcagaggagatttt

SEQ ID NO: 37913 - DNA, 80 bp, synthetic construct
  misc_feature 1..80: note = Artificially Synthesized Probe
  source 1..80: mol_type = other DNA
taaacccaggcagcctaacttcaggacctgggtgtttgaccacttaactgtagcctagatcaggggtccccaacctattt

SEQ ID NO: 37914 - DNA, 80 bp, synthetic construct
  misc_feature 1..80: note = Artificially Synthesized Probe
  source 1..80: mol_type = other DNA
tcgaaagcagagtttttgctcttcccctctgactcttataaaaggccccattttctgactacatttcccgatattctgtc

SEQ ID NO: 37915 - DNA, 80 bp, synthetic construct
  misc_feature 1..80: note = Artificially Synthesized Probe
  source 1..80: mol_type = other DNA
ttcacagcacttactagcatctgacgaagtctatatttttacttgtgtatttaggttttttttttagatggagtactctg

SEQ ID NO: 37916 - DNA, 80 bp, synthetic construct
  misc_feature 1..80: note = Artificially Synthesized Probe
  source 1..80: mol_type = other DNA
catctgacaccatggcttgtgttgctaatcactttgcaattctgcctcccaagttactaaatcacccagtctcaatttcc

SEQ ID NO: 37917 - DNA, 80 bp, synthetic construct
  misc_feature 1..80: note = Artificially Synthesized Probe
  source 1..80: mol_type = other DNA
tcataggattgttgtgaggattaaaacaaaatgtatctgatacttggagtggcggctgccatagttagtgctgtgtataa

SEQ ID NO: 37918 - DNA, 80 bp, synthetic construct
  misc_feature 1..80: note = Artificially Synthesized Probe
  source 1..80: mol_type = other DNA
caaatcccttcatcagaaagtcccagaaggagggacaagcctaaattcctctgtaggccttggtcttttgaatgagggca

SEQ ID NO: 37919 - DNA, 80 bp, synthetic construct
  misc_feature 1..80: note = Artificially Synthesized Probe
  source 1..80: mol_type = other DNA
cttttttctactgctccacacatagcattctgttcatatcctttctcaatgatgggcaggccttggtgaaactttgagct

SEQ ID NO: 37920 - DNA, 80 bp, synthetic construct
  misc_feature 1..80: note = Artificially Synthesized Probe
  source 1..80: mol_type = other DNA
gatgttgattaagggaggggtgattacaggccagagagagttctgtgaaacccaggacaaaacaaaatggcatctacttc

SEQ ID NO: 37921 - DNA, 80 bp, synthetic construct
  misc_feature 1..80: note = Artificially Synthesized Probe
  source 1..80: mol_type = other DNA
tgggccagacgggttggacatcgttaataatcatagttggcttctaaatactggtagcaagatgacttctgatttgtaat

SEQ ID NO: 37922 - DNA, 80 bp, synthetic construct
  misc_feature 1..80: note = Artificially Synthesized Probe
  source 1..80: mol_type = other DNA
ctcgtagccatttcaaaaacctctctcactccatctttggtctttgctgaacactccatgtacccaaaagcgccaatcct

SEQ ID NO: 37923 - DNA, 80 bp, synthetic construct
  misc_feature 1..80: note = Artificially Synthesized Probe
  source 1..80: mol_type = other DNA
agagggaaggcattagggctttctatctggactcccagccttcaagatttccttatctttcagttgccactaatttatct

SEQ ID NO: 37924 - DNA, 80 bp, synthetic construct
  misc_feature 1..80: note = Artificially Synthesized Probe
  source 1..80: mol_type = other DNA
atcaaaaaaaagaaagttcctacatctagagccactgattactagctactaatgaaatggttcattctcaggccagcagt

SEQ ID NO: 37925 - DNA, 80 bp, synthetic construct
  misc_feature 1..80: note = Artificially Synthesized Probe
  source 1..80: mol_type = other DNA
cagcagctgacccagggtccacatgttctttttctaacttgttcatcaactctcagcataacttctaccctatggggttt

SEQ ID NO: 37926 - DNA, 80 bp, synthetic construct
  misc_feature 1..80: note = Artificially Synthesized Probe
  source 1..80: mol_type = other DNA
gtagcagtgagctatgatcacgctactactgcactccagccagggtgacaaagtgagacttcatctcttaaaaacaaata

SEQ ID NO: 37927 - DNA, 80 bp, synthetic construct
  misc_feature 1..80: note = Artificially Synthesized Probe
  source 1..80: mol_type = other DNA
tgcgtgacaagagcaaaagtctgtctcaaaaaaacaaaaataaaaataaataaaacaaaacagcatacaaccatgaccca

SEQ ID NO: 37928 - DNA, 80 bp, synthetic construct
  misc_feature 1..80: note = Artificially Synthesized Probe
  source 1..80: mol_type = other DNA
agttttttccctcaagaattatacactagataacgagggcaaaggcacacagtccttctcattccaataggatctaggtg

SEQ ID NO: 37929 - DNA, 80 bp, synthetic construct
  misc_feature 1..80: note = Artificially Synthesized Probe
  source 1..80: mol_type = other DNA
caagtggctcaatatcttggagcaaccccagttatcatcattaaggtagggacaaccataacaacacaatcactctaaca

SEQ ID NO: 37930 - DNA, 80 bp, synthetic construct
  misc_feature 1..80: note = Artificially Synthesized Probe
  source 1..80: mol_type = other DNA
ctgttgctcagtctggaatgcagtgccataatctcggctcactgcaatctccacctaccaggttcaaacgattctcctgc

SEQ ID NO: 37931 - DNA, 80 bp, synthetic construct
  misc_feature 1..80: note = Artificially Synthesized Probe
  source 1..80: mol_type = other DNA
taatccccccacccacttttagaaaaagtgacacttaccatagtacattgaaatggcagaccattgaaatggcagacggt

SEQ ID NO: 37932 - DNA, 80 bp, synthetic construct
  misc_feature 1..80: note = Artificially Synthesized Probe
  source 1..80: mol_type = other DNA
gcaacatggtgaaaccccgtccctactaaaatacgaaagaaattagccaggcacggcagcgtgcgcctgtagtcccagct

SEQ ID NO: 37933 - DNA, 80 bp, synthetic construct
  misc_feature 1..80: note = Artificially Synthesized Probe
  source 1..80: mol_type = other DNA
ctgctataatgtggaaaccatggaaacaaatctgtattttgagttggtaggtaggaaaagacaccatgctggctgttagg

SEQ ID NO: 37934 - DNA, 80 bp, synthetic construct
  misc_feature 1..80: note = Artificially Synthesized Probe
  source 1..80: mol_type = other DNA
actattgcatactgttaaatgaatattcctacacagtaccctctcccatcttggggactcttgagttgctctgaggcagg

SEQ ID NO: 37935 - DNA, 80 bp, synthetic construct
  misc_feature 1..80: note = Artificially Synthesized Probe
  source 1..80: mol_type = other DNA
caccttcagggtacatcccaaaattctgttaggctggtatttgttgtattttttccatctatacttgggccagaaagtat

SEQ ID NO: 37936 - DNA, 80 bp, synthetic construct
  misc_feature 1..80: note = Artificially Synthesized Probe
  source 1..80: mol_type = other DNA
agaagagcacctcattctagttttaggggttttttcctttcagctgacccacttcaaaagatgtataggagagctgggca

SEQ ID NO: 37937 - DNA, 80 bp, synthetic construct
  misc_feature 1..80: note = Artificially Synthesized Probe
  source 1..80: mol_type = other DNA
actaaaaatacaaaaaattagccagtctggtggtggacacctgtagtcccagctacttgggaggatgaggcaggagaaca

SEQ ID NO: 37938 - DNA, 80 bp, synthetic construct
  misc_feature 1..80: note = Artificially Synthesized Probe
  source 1..80: mol_type = other DNA
aatattctaacatggaaaatggcatcagttgttatgaaaagtatactcacctgctttccatccacctcgatatctgccac

SEQ ID NO: 37939 - DNA, 80 bp, synthetic construct
  misc_feature 1..80: note = Artificially Synthesized Probe
  source 1..80: mol_type = other DNA
cagggcaataaggtaagaaaatgaaataaaagacatccaaattggaaaggaagaagtaaaactatctcaattcacacatg

SEQ ID NO: 37940 - DNA, 80 bp, synthetic construct
  misc_feature 1..80: note = Artificially Synthesized Probe
  source 1..80: mol_type = other DNA
attgaggccgagcacagtggttcatgtctgtaatcccaacactttgggagactgaagcaggaggaatgctcaggcccagg

SEQ ID NO: 37941 - DNA, 80 bp, synthetic construct
  misc_feature 1..80: note = Artificially Synthesized Probe
  source 1..80: mol_type = other DNA
gtaccactgcactccagcctgggcaacagagcactccagcctgggcaacagagtgaaactgtgtcttaaaaaaaaaaaaa

SEQ ID NO: 37942 - DNA, 80 bp, synthetic construct
  misc_feature 1..80: note = Artificially Synthesized Probe
  source 1..80: mol_type = other DNA
ataacaacttgtacctctacatgaatattcatagcaggattattcataatatattgtcaaaaaatgtaaagaacccaaat

SEQ ID NO: 37943 - DNA, 80 bp, synthetic construct
  misc_feature 1..80: note = Artificially Synthesized Probe
  source 1..80: mol_type = other DNA
gggattacaggcgtgagccaccgcacccagcccacagtatatataattcacactttaaaaaggtgaattgtaagatatgt

SEQ ID NO: 37944 - DNA, 80 bp, synthetic construct
  misc_feature 1..80: note = Artificially Synthesized Probe
  source 1..80: mol_type = other DNA
agggctgacagtgctgccattactcatttgtgaattctcaggacaatattacatacagcagtgaatacgtgtgtgtgtat

SEQ ID NO: 37945 - DNA, 80 bp, synthetic construct
  misc_feature 1..80: note = Artificially Synthesized Probe
  source 1..80: mol_type = other DNA
cagcctgggcaacacagtgagactctgtcaaaaaaaaaaaaggattggcatggtggctcacgcctgtaatcccagcactt

SEQ ID NO: 37946 - DNA, 80 bp, synthetic construct
  misc_feature 1..80: note = Artificially Synthesized Probe
  source 1..80: mol_type = other DNA
atctctacccaaaatacaaaaaattagctggctgtggtggtgcgcatctgtggtcacagctactcaggaggctaagatgg

SEQ ID NO: 37947 - DNA, 80 bp, synthetic construct
  misc_feature 1..80: note = Artificially Synthesized Probe
  source 1..80: mol_type = other DNA
aaaaaaaaaaagagctatctttgctttgtttatagttcaacatgcccacaatatttgttccagtattgacttaaatcttc

SEQ ID NO: 37948 - DNA, 80 bp, synthetic construct
  misc_feature 1..80: note = Artificially Synthesized Probe
  source 1..80: mol_type = other DNA
gaaaggaaatcacgcttagctctcccagacgtgtcattttccaggctaggtttagtctcagaaataacttataagtttgg

SEQ ID NO: 37949 - DNA, 80 bp, synthetic construct
  misc_feature 1..80: note = Artificially Synthesized Probe
  source 1..80: mol_type = other DNA
tttttttatttttttgatgatgccctttggggcacaacgttttttattttgttgaagtcaaatttatctatttttccctt

SEQ ID NO: 37950 - DNA, 80 bp, synthetic construct
  misc_feature 1..80: note = Artificially Synthesized Probe
  source 1..80: mol_type = other DNA
cccttccgttttctccttatacttagaaccacaggcatcaaactaaatgtagggaagccttgtctcccaccactactttg

SEQ ID NO: 37951 - DNA, 80 bp, synthetic construct
  misc_feature 1..80: note = Artificially Synthesized Probe
  source 1..80: mol_type = other DNA
catgaggtcaggaaattgagaccatcctggctaatatggtgaaaccccatctctactaaaaatacaaaaaattagccagg

SEQ ID NO: 37952 - DNA, 80 bp, synthetic construct
  misc_feature 1..80: note = Artificially Synthesized Probe
  source 1..80: mol_type = other DNA
gaatgataggtgaaggccagtccttttcacactttacaagtcaaagtgatttcctgggataactatagctcatctgcatt

SEQ ID NO: 37953 - DNA, 80 bp, synthetic construct
  misc_feature 1..80: note = Artificially Synthesized Probe
  source 1..80: mol_type = other DNA
tagggatgaggctaatagggactctccaggcagaacccaagaagaatgtgtgagcttagtttggggttcagcagcacttg

SEQ ID NO: 37954 - DNA, 80 bp, synthetic construct
  misc_feature 1..80: note = Artificially Synthesized Probe
  source 1..80: mol_type = other DNA
ggcgggtccccgtccatctataatacccacagactgtgagaagcaaatagctttgacagtccgttgtcaggaattttttt

SEQ ID NO: 37955 - DNA, 80 bp, synthetic construct
  misc_feature 1..80: note = Artificially Synthesized Probe
  source 1..80: mol_type = other DNA
ctccagtctgggtgacagagcaacgccgtctcaaaaaaaaaaaaaaagaaatacaaaaattagccaggtgtggtagtaca

SEQ ID NO: 37956 - DNA, 80 bp, synthetic construct
  misc_feature 1..80: note = Artificially Synthesized Probe
  source 1..80: mol_type = other DNA
aaaaaacaaacaaaaacaaaaaaacaatgctggtcaggcacagtgactcccacctgtaatcccaggatgtctgaggccag

SEQ ID NO: 37957 - DNA, 80 bp, synthetic construct
  misc_feature 1..80: note = Artificially Synthesized Probe
  source 1..80: mol_type = other DNA
aagacatatccacaatttaatgtcacaaatttttccagaaaatggtcaccacaaacatcaggtcttttagaggccaggcg

SEQ ID NO: 37958 - DNA, 80 bp, synthetic construct
  misc_feature 1..80: note = Artificially Synthesized Probe
  source 1..80: mol_type = other DNA
gtgtgtgtgtgtgtgtgtgtgtgtgtgacagaatctcgctctgtcgcccaggctggagtgcagtggtgcaatctcggctc

SEQ ID NO: 37959 - DNA, 80 bp, synthetic construct
  misc_feature 1..80: note = Artificially Synthesized Probe
  source 1..80: mol_type = other DNA
ttctatgggccattccttgttctagctactagagatacagctttatctggaaaacactcagggaaaacagcacaatgtaa

SEQ ID NO: 37960 - DNA, 80 bp, synthetic construct
  misc_feature 1..80: note = Artificially Synthesized Probe
  source 1..80: mol_type = other DNA
gaaagaaccctaatggaaggggaggtggaatgggcacaatctaaggaggcgttttccaaacctcacaaacatttccccac

SEQ ID NO: 37961 - DNA, 80 bp, synthetic construct
  misc_feature 1..80: note = Artificially Synthesized Probe
  source 1..80: mol_type = other DNA
acaccagcccgggcaacatagtgagaccacatctttactaaaaaaaatttttttaaagtagtcagcctgggcttggtggc

SEQ ID NO: 37962 - DNA, 80 bp, synthetic construct
  misc_feature 1..80: note = Artificially Synthesized Probe
  source 1..80: mol_type = other DNA
tttcgcttgcaagtggaagggctgaccttagatagaacaatggactcccaagggactgatccacaggaatagaaaaataa

SEQ ID NO: 37963 - DNA, 80 bp, synthetic construct
  misc_feature 1..80: note = Artificially Synthesized Probe
  source 1..80: mol_type = other DNA
aaaggtaaggagcagtgaaagggtaggcagtagcatcaatagatgttaagccccagtgggggcttaaagaattttgctgg

SEQ ID NO: 37964 - DNA, 80 bp, synthetic construct
  misc_feature 1..80: note = Artificially Synthesized Probe
  source 1..80: mol_type = other DNA
tagtgtaatggcgggatacatagatatacaaaacagggcttgacagaggtgtacaatattcaccaatagacactggtata

SEQ ID NO: 37965 - DNA, 80 bp, synthetic construct
  misc_feature 1..80: note = Artificially Synthesized Probe
  source 1..80: mol_type = other DNA
tttcagtgctgtttcatgcctatgtgagcttgaatcactgaatactttgttctggtacagagaagactgtatcaggactt

SEQ ID NO: 37966 - DNA, 80 bp, synthetic construct
  misc_feature 1..80: note = Artificially Synthesized Probe
  source 1..80: mol_type = other DNA
cctcatctctcaaaaaaatatgaaaacggacaggcaaggtagcttatgcctataatcccagcactttgggaggccatggc

SEQ ID NO: 37967 - DNA, 80 bp, synthetic construct
  misc_feature 1..80: note = Artificially Synthesized Probe
  source 1..80: mol_type = other DNA
aagcaatgaagaaaaccttcaatttactgccaagtgaaaatcacttcaaactcaagttctttggggaaagacaggcaagg

SEQ ID NO: 37968 - DNA, 80 bp, synthetic construct
  misc_feature 1..80: note = Artificially Synthesized Probe
  source 1..80: mol_type = other DNA
ctggctaacagagtgaaaccccatctctactaaaaatacaaaaagttagctgggtgtggtggcacgcacctgtagtccca

SEQ ID NO: 37969 - DNA, 80 bp, synthetic construct
  misc_feature 1..80: note = Artificially Synthesized Probe
  source 1..80: mol_type = other DNA
tgattccaatttggggaactggattccaagtttgggaacagtggagtctaggaaccactgttcttaagtaccaggaacca

SEQ ID NO: 37970 - DNA, 80 bp, synthetic construct
  misc_feature 1..80: note = Artificially Synthesized Probe
  source 1..80: mol_type = other DNA
aaaaattagccaggcgtggcagcatgcacctgtagtcccagtttacctgggaggctaaggcaggagaaccgcatgaaccc

SEQ ID NO: 37971 - DNA, 80 bp, synthetic construct
  misc_feature 1..80: note = Artificially Synthesized Probe
  source 1..80: mol_type = other DNA
ctgccttctgtttctgaacttaagatcttcaaaagataaacagagcttcattatgaataactggaaaagttaaacaagag

SEQ ID NO: 37972 - DNA, 80 bp, synthetic construct
  misc_feature 1..80: note = Artificially Synthesized Probe
  source 1..80: mol_type = other DNA
gtaatcgagctagtgggtaggttgaggcacgagaatcgcttgactcacatctttaatcccagcactttgggaggctgagg

SEQ ID NO: 37973 - DNA, 80 bp, synthetic construct
  misc_feature 1..80: note = Artificially Synthesized Probe
  source 1..80: mol_type = other DNA
ttttcctctttcccttcacttaaatttaagatactatcataaatatgcttaaatatggccagacatagtggctctcacct

SEQ ID NO: 37974 - DNA, 80 bp, synthetic construct
  misc_feature 1..80: note = Artificially Synthesized Probe
  source 1..80: mol_type = other DNA
ttttcagtcacatgactatcgtaattatgaacataccaaggccttcacttaatactacagctccacagattaaagatgag

SEQ ID NO: 37975 - DNA, 80 bp, synthetic construct
  misc_feature 1..80: note = Artificially Synthesized Probe
  source 1..80: mol_type = other DNA
gaaacacctgaagagctacctgtttttactctcctaataacttacacccccatatgaccagaataaacttttaaaaagca

SEQ ID NO: 37976 - DNA, 80 bp, synthetic construct
  misc_feature 1..80: note = Artificially Synthesized Probe
  source 1..80: mol_type = other DNA
gtttttcagtccaatgtcacttgtgccaaatgctcaaaacagtatctccgccaatctagccacatctaaggtgacaatca

SEQ ID NO: 37977 - DNA, 80 bp, synthetic construct
  misc_feature 1..80: note = Artificially Synthesized Probe
  source 1..80: mol_type = other DNA
tccaggtggtatggccgtagatcatacccctaagcgttcaatacaatcttttacttacttacacagtctccaacaagtct

SEQ ID NO: 37978 - DNA, 80 bp, synthetic construct
  misc_feature 1..80: note = Artificially Synthesized Probe
  source 1..80: mol_type = other DNA
aaaagacctggttgctattttgtactcccggagtcactcatcccttaagcaagcagggtggggttaggtgcgcgtgcgcg

SEQ ID NO: 37979 - DNA, 80 bp, synthetic construct
  misc_feature 1..80: note = Artificially Synthesized Probe
  source 1..80: mol_type = other DNA
cccttgtagggaatttgcagaggtggaatcctaataaattcaagaaacacaacatcatgaatgctcggagcatctctggt

SEQ ID NO: 37980 - DNA, 80 bp, synthetic construct
  misc_feature 1..80: note = Artificially Synthesized Probe
  source 1..80: mol_type = other DNA
gcacgcagtcaccacgtggtacttttgaagtttttagcaacagggcaaatgcctacgttatatcttagcttcaaaaaagc

SEQ ID NO: 37981 - DNA, 80 bp, synthetic construct
  misc_feature 1..80: note = Artificially Synthesized Probe
  source 1..80: mol_type = other DNA
tgagggcgtaaatatcctacattttaatctttctacctttatgcacctctgcagcttagagaatatgtaagccatctgaa

SEQ ID NO: 37982 - DNA, 80 bp, synthetic construct
  misc_feature 1..80: note = Artificially Synthesized Probe
  source 1..80: mol_type = other DNA
accagtgattaaaacaaaaccctgtacattgaacacacagaaccacaaataataacgatggcaggtatcttttgttaagt

SEQ ID NO: 37983 - DNA, 80 bp, synthetic construct
  misc_feature 1..80: note = Artificially Synthesized Probe
  source 1..80: mol_type = other DNA
cagcgcagcggtctccgttcaggggagtaatgctatttaatgtgtttcacaaagatgtccatttgaaaaatttaactgaa

SEQ ID NO: 37984 - DNA, 80 bp, synthetic construct
  misc_feature 1..80: note = Artificially Synthesized Probe
  source 1..80: mol_type = other DNA
tgcaccagggtgggtagctgaggaccagcagccttgcttccagagggggtgggctcaaggtgggaggggaacgctttcat

SEQ ID NO: 37985 - DNA, 80 bp, synthetic construct
  misc_feature 1..80: note = Artificially Synthesized Probe
  source 1..80: mol_type = other DNA
acagaatgaggtcctgacaccaaaagcagacagaaacgttacaaggaaagaagtgtgctgaccagtatctcttatgaata

SEQ ID NO: 37986 - DNA, 80 bp, synthetic construct
  misc_feature 1..80: note = Artificially Synthesized Probe
  source 1..80: mol_type = other DNA
acctaaataaaggtaaagctatgtccaacattcatggattggaagatgcagtgttagtattagatggcaataccccctac

SEQ ID NO: 37987 - DNA, 80 bp, synthetic construct
  misc_feature 1..80: note = Artificially Synthesized Probe
  source 1..80: mol_type = other DNA
ccatattgttagatttataacacatagatcccatatatatgtacataaatacatatgacaaagcaggtgggaggaagcgg

SEQ ID NO: 37988 - DNA, 80 bp, synthetic construct
  misc_feature 1..80: note = Artificially Synthesized Probe
  source 1..80: mol_type = other DNA
ccttccattttaaggctgaatcatagcccactgtacggagacacacattgtgcctatccattcatctgatggatacttag

SEQ ID NO: 37989 - DNA, 80 bp, synthetic construct
  misc_feature 1..80: note = Artificially Synthesized Probe
  source 1..80: mol_type = other DNA
tttttttctctgtagatgaggtcttgctatgttgcccaggctggactccatctccttggctcgagcaatcctcccacctc

SEQ ID NO: 37990 - DNA, 80 bp, synthetic construct
  misc_feature 1..80: note = Artificially Synthesized Probe
  source 1..80: mol_type = other DNA
tcccccactgaatagtgtctttctccattgaatagtgtgttttgttttgaggacatgaatcttattggcttagggctaat

SEQ ID NO: 37991 - DNA, 80 bp, synthetic construct
  misc_feature 1..80: note = Artificially Synthesized Probe
  source 1..80: mol_type = other DNA
taatcaatggagagacatagcacatctaagcactgagacagttaaaactgtgaagatggcaattctccccacaccgatgt

SEQ ID NO: 37992 - DNA, 80 bp, synthetic construct
  misc_feature 1..80: note = Artificially Synthesized Probe
  source 1..80: mol_type = other DNA
ccatgctcttcattccttctaacagattgaagtgactgtgtggcatcaacctaaatgccttcctttacatttcttgtagg

SEQ ID NO: 37993 - DNA, 80 bp, synthetic construct
  misc_feature 1..80: note = Artificially Synthesized Probe
  source 1..80: mol_type = other DNA
agtatgaagaaatgttccagtccagaggagagagaagagatgttacagctggatgtagctcatctttccatgagattctt

SEQ ID NO: 37994 - DNA, 80 bp, synthetic construct
  misc_feature 1..80: note = Artificially Synthesized Probe
  source 1..80: mol_type = other DNA
aacatgctcagtggttcagagaaataccaatgatgacagattgggagcaaattaacaaaatgttaacatttggggaatct

SEQ ID NO: 37995 - DNA, 80 bp, synthetic construct
  misc_feature 1..80: note = Artificially Synthesized Probe
  source 1..80: mol_type = other DNA
tatttatctgataaggaaatgtcatccaaaaaaaagacacacaaaaaagaaatgtcatccaaaatatacacaggactctt

SEQ ID NO: 37996 - DNA, 80 bp, synthetic construct
  misc_feature 1..80: note = Artificially Synthesized Probe
  source 1..80: mol_type = other DNA
gtctctaaaattcaaaggtcaaatataaaattacaaagcaaattgggtaaaaggttaatatcctgcacactgagggcttc

SEQ ID NO: 37997 - DNA, 80 bp, synthetic construct
  misc_feature 1..80: note = Artificially Synthesized Probe
  source 1..80: mol_type = other DNA
ctttcagggaatgcattttaatcgatgcatgtatcggtctgaggttacaggacattttacttacccattcgtccatcttg

SEQ ID NO: 37998 - DNA, 80 bp, synthetic construct
  misc_feature 1..80: note = Artificially Synthesized Probe
  source 1..80: mol_type = other DNA
ccaccccacagatcctttaatccacaggcccttccagtacaccgtggaagcccctctgtgtcctcatggtctctctacca

SEQ ID NO: 37999 - DNA, 80 bp, synthetic construct
  misc_feature 1..80: note = Artificially Synthesized Probe
  source 1..80: mol_type = other DNA
tgtacgcatcggtgtgttcacatctgcatttggctgcctacacgcatgtttgctctttggattctcctttaaaccagttt

SEQ ID NO: 38000 - DNA, 80 bp, synthetic construct
  misc_feature 1..80: note = Artificially Synthesized Probe
  source 1..80: mol_type = other DNA
acagccttaacttagaaattatcccgccaagccagacaccttagtcaacacttccatctgcatgtgaaggcagactctcc

SEQ ID NO: 38001 - DNA, 80 bp, synthetic construct
  misc_feature 1..80: note = Artificially Synthesized Probe
  source 1..80: mol_type = other DNA
ctcacttaggaactttgattcattacattctggttcctcagcaataatttccaacagtagcacctagtgaagtgtcaatc

SEQ ID NO: 38002 - DNA, 80 bp, synthetic construct
  misc_feature 1..80: note = Artificially Synthesized Probe
  source 1..80: mol_type = other DNA
cggaacagtgcttgccaatgagccacactgtgtcgcacaacccgaagcaacacataaatcaaataagccaataactggca

SEQ ID NO: 38003 - DNA, 80 bp, synthetic construct
  misc_feature 1..80: note = Artificially Synthesized Probe
  source 1..80: mol_type = other DNA
atgggaccaacatagattcaacacaggaccaacatgggacctgtacgggaacaacacaggaacaacacagaacctgcatg

SEQ ID NO: 38004 - DNA, 80 bp, synthetic construct
  misc_feature 1..80: note = Artificially Synthesized Probe
  source 1..80: mol_type = other DNA
ttccttcatttgccaaaggcagacaggaaaacatcataggattcattttgcgttggccccctcctagccctgccatcctt

SEQ ID NO: 38005 - DNA, 80 bp, synthetic construct
  misc_feature 1..80: note = Artificially Synthesized Probe
  source 1..80: mol_type = other DNA
aagtaataaatctgaatgtgtttcctatcacaggggtggactgaatttgtgccttccatctgaagagctaggagctaccc

SEQ ID NO: 38006 - DNA, 80 bp, synthetic construct
  misc_feature 1..80: note = Artificially Synthesized Probe
  source 1..80: mol_type = other DNA
taagaaggctctgaatcagtgaaatgttcttactgggtttgcaaacggcatttcacatgaattcagcagttcccatagcg

SEQ ID NO: 38007 - DNA, 80 bp, synthetic construct
  misc_feature 1..80: note = Artificially Synthesized Probe
  source 1..80: mol_type = other DNA
gattccagacaactctaaaatgcactgtttcgtgggagcaagaggatgatgacaaaaacaacaatgacaacaaaagtggg

SEQ ID NO: 38008 - DNA, 80 bp, synthetic construct
  misc_feature 1..80: note = Artificially Synthesized Probe
  source 1..80: mol_type = other DNA
tgcagagggtactacttgaaaagataatgggcaggaattttacagaactgatgcaaaacacgaatccacagaatgaaaga

SEQ ID NO: 38009 - DNA, 80 bp, synthetic construct
  misc_feature 1..80: note = Artificially Synthesized Probe
  source 1..80: mol_type = other DNA
atacactgcaggctggatttggcctggagtttgcttgctgatgcctggaacacacccttcacaacacaagcccatggcaa

SEQ ID NO: 38010 - DNA, 80 bp, synthetic construct
  misc_feature 1..80: note = Artificially Synthesized Probe
  source 1..80: mol_type = other DNA
tcactttttcttttttgtctcccttcttcccttcggttttcccacagcatttttgctctgatgaaagtttctggtaaatg

SEQ ID NO: 38011 - DNA, 80 bp, synthetic construct
  misc_feature 1..80: note = Artificially Synthesized Probe
  source 1..80: mol_type = other DNA
tatgcccatcctccaggtttgctgggaggattaggagacaacatacacaaaatataacaaaatctgagcccaggctggct

SEQ ID NO: 38012 - DNA, 80 bp, synthetic construct
  misc_feature 1..80: note = Artificially Synthesized Probe
  source 1..80: mol_type = other DNA
ggagcagggagtgggtaataggatggggtaaaggggtgacagaatggggttgagaggtgacagaatgtggtgggggtatg

SEQ ID NO: 38013 - DNA, 80 bp, synthetic construct
  misc_feature 1..80: note = Artificially Synthesized Probe
  source 1..80: mol_type = other DNA
actggaggcattttgctcctgccctcaatgtctgtggaactttgaacttgaaaaagatgatttagggcatctggcagaag

SEQ ID NO: 38014 - DNA, 80 bp, synthetic construct
  misc_feature 1..80: note = Artificially Synthesized Probe
  source 1..80: mol_type = other DNA
agcatgtcctggatgtgagacattgggtaaaaggataaatttaagatttaatggctgccctgctgggttctggacttgca

SEQ ID NO: 38015 - DNA, 80 bp, synthetic construct
  misc_feature 1..80: note = Artificially Synthesized Probe
  source 1..80: mol_type = other DNA
ttcaaagttttttaaaaaggacttgtttttcaaaatgggatggttgagcagagaagccttcaagctgccttccaaactcc

SEQ ID NO: 38016 - DNA, 80 bp, synthetic construct
  misc_feature 1..80: note = Artificially Synthesized Probe
  source 1..80: mol_type = other DNA
aacataaggaggaaagagagtcctgtgatttcctcagaggaagaaaagagctatttcgtatgagttgagtgttcagacaa

SEQ ID NO: 38017 - DNA, 80 bp, synthetic construct
  misc_feature 1..80: note = Artificially Synthesized Probe
  source 1..80: mol_type = other DNA
ctcaaagccacactcaattgtgcctgtgtgggaagcttctccaaagcaccctcagcaggaacattccaccctgcaggcaa

SEQ ID NO: 38018 - DNA, 80 bp, synthetic construct
  misc_feature 1..80: note = Artificially Synthesized Probe
  source 1..80: mol_type = other DNA
tttgcactcttaaaagttactgagggccccagagagctttgcttatgtgggttttatctgttggtatttaccctattaga

SEQ ID NO: 38019 - DNA, 80 bp, synthetic construct
  misc_feature 1..80: note = Artificially Synthesized Probe
  source 1..80: mol_type = other DNA
gtcgagcctctgggcacctccttggaggatgtggctgggcataacttgagacggcaacagcctcgggaaagcctgagata

SEQ ID NO: 38020 - DNA, 80 bp, synthetic construct
  misc_feature 1..80: note = Artificially Synthesized Probe
  source 1..80: mol_type = other DNA
cacagaaatattttggcagaaaatatttgctgatcaaatatcttcaaaggaacttgcctccagaacacagaaaacacatg

SEQ ID NO: 38021 - DNA, 80 bp, synthetic construct
  misc_feature 1..80: note = Artificially Synthesized Probe
  source 1..80: mol_type = other DNA
agctccatggtctcgggatagcgcacctggctcatcacagaaccaagcacacctcccacagctccatggtctcagcatag

SEQ ID NO: 38022 - DNA, 80 bp, synthetic construct
  misc_feature 1..80: note = Artificially Synthesized Probe
  source 1..80: mol_type = other DNA
cccagttaaaaactgtacttgaagacctagaattagctatagatgactcaagtggccagcacattgtgaatggcctctca

SEQ ID NO: 38023 - DNA, 80 bp, synthetic construct
  misc_feature 1..80: note = Artificially Synthesized Probe
  source 1..80: mol_type = other DNA
tgcagacgctcccaacttccttcacaagtgccttcaggatgccctgcctcacctccctgcacctctggccttccctcact

SEQ ID NO: 38024 - DNA, 80 bp, synthetic construct
  misc_feature 1..80: note = Artificially Synthesized Probe
  source 1..80: mol_type = other DNA
tggcccatgtgagtgcgcagggagcgggaactgtcactgttatctaaggtatattataaatacacagatgcctcagagac

SEQ ID NO: 38025 - DNA, 80 bp, synthetic construct
  misc_feature 1..80: note = Artificially Synthesized Probe
  source 1..80: mol_type = other DNA
agagctgaggccctcgcatcatcaagaaaactgaatttttgttagacttttaaaagtcaagattgctcgcacaatcccca

SEQ ID NO: 38026 - DNA, 80 bp, synthetic construct
  misc_feature 1..80: note = Artificially Synthesized Probe
  source 1..80: mol_type = other DNA
caccgcacccggccgcgttttccatattgaagttccaacttttgactaacaaatggtctctatcatcatatttgaccact

SEQ ID NO: 38027 - DNA, 80 bp, synthetic construct
  misc_feature 1..80: note = Artificially Synthesized Probe
  source 1..80: mol_type = other DNA
ttttctcagggaaaccacctagctttgttgaacttttcttctctttctaaacttttcaagtggtcaaactctggctcatc

SEQ ID NO: 38028 - DNA, 80 bp, synthetic construct
  misc_feature 1..80: note = Artificially Synthesized Probe
  source 1..80: mol_type = other DNA
caggaccccaagtgtgctgaaatccaggcatactaaagttccacagttggccttgtagaacctgcatacaggaaacgtca

SEQ ID NO: 38029 - DNA, 80 bp, synthetic construct
  misc_feature 1..80: note = Artificially Synthesized Probe
  source 1..80: mol_type = other DNA
caggtccagctctcatatgaacataggtgcaaaaaaccccatgcaaaatagtagcaaactgaatttacttacatatacaa

SEQ ID NO: 38030 - DNA, 80 bp, synthetic construct
  misc_feature 1..80: note = Artificially Synthesized Probe
  source 1..80: mol_type = other DNA
aacagtaagtccacaataacaatcccaacaggattctgtgtctgtggaaattgacgacatgcctccaaaatttatgcgga

SEQ ID NO: 38031 - DNA, 80 bp, synthetic construct
  misc_feature 1..80: note = Artificially Synthesized Probe
  source 1..80: mol_type = other DNA
ccaccacccaaccaatacggtggtgccctattctgtgcgttcaatcgtaatggagcattataatgacaaacaaatcaata

SEQ ID NO: 38032 - DNA, 80 bp, synthetic construct
  misc_feature 1..80: note = Artificially Synthesized Probe
  source 1..80: mol_type = other DNA
aagagcccacacggtctgtgatggtttagagaaagagaagcaggaacaacttctacatgttaaacaattttacttacaca

SEQ ID NO: 38033 - DNA, 80 bp, synthetic construct
  misc_feature 1..80: note = Artificially Synthesized Probe
  source 1..80: mol_type = other DNA
tcattacttcaggaatttatgccacagaaatattcttataagtgtggagagatattggttaaaaatgttcactggaaggt

SEQ ID NO: 38034 - DNA, 80 bp, synthetic construct
  misc_feature 1..80: note = Artificially Synthesized Probe
  source 1..80: mol_type = other DNA
cttaaggtgcctgtattgtgctgcagaaatctatttaacccactttcatttccaggaacacagcacgattcaacaaccta

SEQ ID NO: 38035 - DNA, 80 bp, synthetic construct
  misc_feature 1..80: note = Artificially Synthesized Probe
  source 1..80: mol_type = other DNA
tgcagccttgacacccccgggctcaacagtcttcccctctcagcctccctgagtagctaggaccacagacgtgtgccgcc

SEQ ID NO: 38036 - DNA, 80 bp, synthetic construct
  misc_feature 1..80: note = Artificially Synthesized Probe
  source 1..80: mol_type = other DNA
tctcttcttcaagttgccctcatgctaaaaacatctacccttgacagtaggtcccctcccttctagctctttaagtgcaa

SEQ ID NO: 38037 - DNA, 80 bp, synthetic construct
  misc_feature 1..80: note = Artificially Synthesized Probe
  source 1..80: mol_type = other DNA
ctattgcttttgttttaaaaatctgcatctataggaaatgcttggaaggatatacaccagagctaaacaagggcttccct

SEQ ID NO: 38038 - DNA, 80 bp, synthetic construct
  misc_feature 1..80: note = Artificially Synthesized Probe
  source 1..80: mol_type = other DNA
ggttacacacccaacagaaatgtgtacctaagatcaccgaagacaggagcaagaagattcacagtagcattatttctgca

SEQ ID NO: 38039 - DNA, 80 bp, synthetic construct
  misc_feature 1..80: note = Artificially Synthesized Probe
  source 1..80: mol_type = other DNA
tcttgcataaacatcagttcaacacaaaattttcacagaaagaaaaacgcctccctgacaatgcgactgtccacttgaca

SEQ ID NO: 38040 - DNA, 80 bp, synthetic construct
  misc_feature 1..80: note = Artificially Synthesized Probe
  source 1..80: mol_type = other DNA
gtcctgtggggcggctggaagcagcgattacagaacacccagttggccatgccaggcgggcgaccgcagcggcgaggccg

SEQ ID NO: 38041 - DNA, 80 bp, synthetic construct
  misc_feature 1..80: note = Artificially Synthesized Probe
  source 1..80: mol_type = other DNA
ttgggggatgggctttgatttgggtggcagtgtctgtgcttgggaaaaaatgtcagagaaaagacaggaagcggattgaa

SEQ ID NO: 38042 - DNA, 80 bp, synthetic construct
  misc_feature 1..80: note = Artificially Synthesized Probe
  source 1..80: mol_type = other DNA
gtggcaggggtaggggagttttaaactctccttctactctgaaggagagataattttagtctctggaataaaagggcagc

SEQ ID NO: 38043 - DNA, 80 bp, synthetic construct
  misc_feature 1..80: note = Artificially Synthesized Probe
  source 1..80: mol_type = other DNA
cccacccagcccaacccatgttctcagcagcagggatggttctaggctggctgaatgagggaccagggcagagactgcaa

SEQ ID NO: 38044 - DNA, 80 bp, synthetic construct
  misc_feature 1..80: note = Artificially Synthesized Probe
  source 1..80: mol_type = other DNA
aaaacaagaagttttgtcggggtctttgctggaggttcctgcttttgaaaattttcagtttcatttcctagagagagctc

SEQ ID NO: 38045 - DNA, 80 bp, synthetic construct
  misc_feature 1..80: note = Artificially Synthesized Probe
  source 1..80: mol_type = other DNA
gctcgccatggggtctctccgatgttgtccttcaagggtgtgagccccagtccttccatgtttgtttgtttttttttttt

SEQ ID NO: 38046 - DNA, 80 bp, synthetic construct
  misc_feature 1..80: note = Artificially Synthesized Probe
  source 1..80: mol_type = other DNA
ccatctctgtattacaagaaaaaaaaagtgaggacattgggtggcaaaggaagggatccttcaagttgggatggggacat

SEQ ID NO: 38047 - DNA, 80 bp, synthetic construct
  misc_feature 1..80: note = Artificially Synthesized Probe
  source 1..80: mol_type = other DNA
caggtgtgagccacccaccgcacctggcctcatgtctctcactttaaatcaagagttagacatgattaagcttcttgagg

SEQ ID NO: 38048 - DNA, 80 bp, synthetic construct
  misc_feature 1..80: note = Artificially Synthesized Probe
  source 1..80: mol_type = other DNA
ttccggctaatattgtattttttattagagatagggtttctccatattagcattgctggtctccaactccttgacctcaa

SEQ ID NO: 38049 - DNA, 80 bp, synthetic construct
  misc_feature 1..80: note = Artificially Synthesized Probe
  source 1..80: mol_type = other DNA
catgtacctatccatccatcttatctatctatcctatctatccatctatctataagtctgtattagggttctctaaaggg

SEQ ID NO: 38050 - DNA, 80 bp, synthetic construct
  misc_feature 1..80: note = Artificially Synthesized Probe
  source 1..80: mol_type = other DNA
aatctatccatccatccattcatctgttctatctatgtatctatcttatgtatctatccattcatctatcccatcttatc

SEQ ID NO: 38051 - DNA, 80 bp, synthetic construct
  misc_feature 1..80: note = Artificially Synthesized Probe
  source 1..80: mol_type = other DNA
ggcctccgttctgatttccttcatcagtaggcatggcaggcatctctttggaagttaagagaccacatgtatgtgtattt

SEQ ID NO: 38052 - DNA, 80 bp, synthetic construct
  misc_feature 1..80: note = Artificially Synthesized Probe
  source 1..80: mol_type = other DNA
ggagaagggtctgtggggatcaggcagagggaaggttctgtacagaaaagcaggcttggcctggcaccatctggagtgtg

SEQ ID NO: 38053 - DNA, 80 bp, synthetic construct
  misc_feature 1..80: note = Artificially Synthesized Probe
  source 1..80: mol_type = other DNA
atgggacatcttgacttcataacaacccacctggcgggtgctaatccattcccgaggggagtaaacaagcctctcaagag

SEQ ID NO: 38054 - DNA, 80 bp, synthetic construct
  misc_feature 1..80: note = Artificially Synthesized Probe
  source 1..80: mol_type = other DNA
ttccaaagcctcctggaccgtccaagaagtgagtgcactgcctcggctcccctccgcccccgctcactctgcccaggaaa

SEQ ID NO: 38055 - DNA, 80 bp, synthetic construct
  misc_feature 1..80: note = Artificially Synthesized Probe
  source 1..80: mol_type = other DNA
ggctttcgaggggagcgtcctggacatgttcaaggagaatggttggaagagaagggctcctgggctctagcgcggcctgg

SEQ ID NO: 38056 - DNA, 80 bp, synthetic construct
  misc_feature 1..80: note = Artificially Synthesized Probe
  source 1..80: mol_type = other DNA
gtttgggtaactccctttttatgcctaatttggaactctgtcagagtgggaaagtggcagtacggatggtgttccttgaa

SEQ ID NO: 38057 - DNA, 80 bp, synthetic construct
  misc_feature 1..80: note = Artificially Synthesized Probe
  source 1..80: mol_type = other DNA
atttgtaaaatgtagagttgacacagaagatgtgaaaagaatgaagacattttctagggaatcttgaacaagagaaaacc

SEQ ID NO: 38058 - DNA, 80 bp, synthetic construct
  misc_feature 1..80: note = Artificially Synthesized Probe
  source 1..80: mol_type = other DNA
acatgctaaatgaaagaagccagatacaagaggccatgtatgattcctttgatatgaaatatccacgatagactcaccca

SEQ ID NO: 38059 - DNA, 80 bp, synthetic construct
  misc_feature 1..80: note = Artificially Synthesized Probe
  source 1..80: mol_type = other DNA
ttcttcctctggagaggctactgggcttggctgctgggttgtacttcctgtggtgagggaagaggagactgccggagcca

SEQ ID NO: 38060 - DNA, 80 bp, synthetic construct
  misc_feature 1..80: note = Artificially Synthesized Probe
  source 1..80: mol_type = other DNA
tttactccgtgcagctgtccccttggacacctggagaaacttaacctggctgcactcacctggctaaagctccaccagca

SEQ ID NO: 38061 - DNA, 80 bp, synthetic construct
  misc_feature 1..80: note = Artificially Synthesized Probe
  source 1..80: mol_type = other DNA
aggacttttgcttttggggaaaagcaagggagcttcataccttgaagagtgatgcttgtgaagtttattacttttttgca

SEQ ID NO: 38062 - DNA, 80 bp, synthetic construct
  misc_feature 1..80: note = Artificially Synthesized Probe
  source 1..80: mol_type = other DNA
tgtgaggaggagaaatggatgggagatttatagtaaagctgtcaacgtacacgggtggaaacattcccacggagtaacag

SEQ ID NO: 38063 - DNA, 80 bp, synthetic construct
  misc_feature 1..80: note = Artificially Synthesized Probe
  source 1..80: mol_type = other DNA
tccaaggatgcccagtcccagatatgaaacggcgtggcattggtacataacccacagcatccgcctgtacacttaatttt

SEQ ID NO: 38064 - DNA, 80 bp, synthetic construct
  misc_feature 1..80: note = Artificially Synthesized Probe
  source 1..80: mol_type = other DNA
caaagtgctgggattacaggcgtgagccactgcacccggcctattattactatttttcaaggcagagtgttgctctgtct

SEQ ID NO: 38065 - DNA, 80 bp, synthetic construct
  misc_feature 1..80: note = Artificially Synthesized Probe
  source 1..80: mol_type = other DNA
gagcctgattatgtcatcgaagctgctagagcatccatgaccttggcttattttcaactttcataattagggaaaaactt

SEQ ID NO: 38066 - DNA, 80 bp, synthetic construct
  misc_feature 1..80: note = Artificially Synthesized Probe
  source 1..80: mol_type = other DNA
ccatctcaaaaaaagaaaaaaaaaaaagcctttgaattgcaaataatggaaagcccagctccacctttctaatcccattg

SEQ ID NO: 38067 - DNA, 80 bp, synthetic construct
  misc_feature 1..80: note = Artificially Synthesized Probe
  source 1..80: mol_type = other DNA
cagtgaagggttgtgcagcacctgcctgtttcttgacggcctcttgcttccccctctcagcaggtcccccggcagctgac

SEQ ID NO: 38068 - DNA, 80 bp, synthetic construct
  misc_feature 1..80: note = Artificially Synthesized Probe
  source 1..80: mol_type = other DNA
agtgggcacaggttcacacctgctgcctggcagtttggggccctcatcacacaccaccaggtttcaggggatctacaagt

SEQ ID NO: 38069 - DNA, 80 bp, synthetic construct
  misc_feature 1..80: note = Artificially Synthesized Probe
  source 1..80: mol_type = other DNA
ttcattctttccaggaaattgcagatttaacagatgttaggtactttggtcgagccaagcttgatgtagttgaggaacgg

SEQ ID NO: 38070 - DNA, 80 bp, synthetic construct
  misc_feature 1..80: note = Artificially Synthesized Probe
  source 1..80: mol_type = other DNA
gtttggggtctttcaggcagttgatgctgtagctgagccagccaatgcagttaaaggggccgggaaggaaatgaaagaga

SEQ ID NO: 38071 - DNA, 80 bp, synthetic construct
  misc_feature 1..80: note = Artificially Synthesized Probe
  source 1..80: mol_type = other DNA
cattctggccgctgtaagaagcatcccctgtaggggtcaatgtggaggctgggccaggcgcggtagctcacacctataat

SEQ ID NO: 38072 - DNA, 80 bp, synthetic construct
  misc_feature 1..80: note = Artificially Synthesized Probe
  source 1..80: mol_type = other DNA
tcacacgtggacgtgcttgcatgtttgctagggtgtgataatgtgcattacgaacacaaggaccatgtgcctgtgtgtgt

SEQ ID NO: 38073 - DNA, 80 bp, synthetic construct
  misc_feature 1..80: note = Artificially Synthesized Probe
  source 1..80: mol_type = other DNA
ccactgcgcccagcctttaaataatttttatccagtgagttgatgacattcttcgggttctggaagatgaatatttcaga

SEQ ID NO: 38074 - DNA, 80 bp, synthetic construct
  misc_feature 1..80: note = Artificially Synthesized Probe
  source 1..80: mol_type = other DNA
tcagtgacactgactctgggttgtgtctctggttggttaaagatgtgttggcttctcctttgagctcagtgtgacttacc

SEQ ID NO: 38075 - DNA, 80 bp, synthetic construct
  misc_feature 1..80: note = Artificially Synthesized Probe
  source 1..80: mol_type = other DNA
catgtgttgttttaggcagatacagaagaatgtaaatttagtccctgtcactccaccttggacaaagacagaagtcctaa

SEQ ID NO: 38076 - DNA, 80 bp, synthetic construct
  misc_feature 1..80: note = Artificially Synthesized Probe
  source 1..80: mol_type = other DNA
tgtaggtcttcacgtggcctctgaccctgtcattgacatcttgggttttctaattattttacagtcaacctcactgggtt

SEQ ID NO: 38077 - DNA, 80 bp, synthetic construct
  misc_feature 1..80: note = Artificially Synthesized Probe
  source 1..80: mol_type = other DNA
cttgttccttctgtccctcttagactggcatcagtactatgacatagtttatatgaagcctcatgggagactccagaaag

SEQ ID NO: 38078 - DNA, 80 bp, synthetic construct
  misc_feature 1..80: note = Artificially Synthesized Probe
  source 1..80: mol_type = other DNA
gactgaaagcacacaggcaagaaataaaaccacccgtgattttaccactcactgtggtcatgtcagtagtttttcctagc

SEQ ID NO: 38079 - DNA, 80 bp, synthetic construct
  misc_feature 1..80: note = Artificially Synthesized Probe
  source 1..80: mol_type = other DNA
tgacattaggtagcctttcctgaccagcatgtcttatcacgacatctgcctctcagttttacacatttatttatttgttg

SEQ ID NO: 38080 - DNA, 80 bp, synthetic construct
  misc_feature 1..80: note = Artificially Synthesized Probe
  source 1..80: mol_type = other DNA
gggtgtggtggtgcacctgtaattccagcactggagaggctgaggcaggaggatcccttgagcccaagagttcgaggtta

SEQ ID NO: 38081 - DNA, 80 bp, synthetic construct
  misc_feature 1..80: note = Artificially Synthesized Probe
  source 1..80: mol_type = other DNA
cttatctacatgaatctgggaagactgactcctacattgtgcacccggagtcccggtgggctctgcagtgactccattcc

SEQ ID NO: 38082 - DNA, 80 bp, synthetic construct
  misc_feature 1..80: note = Artificially Synthesized Probe
  source 1..80: mol_type = other DNA
ccagtgtgtgttgttcccctctatgtgtccctgtgttctcatcatttagctcccacttacaagtgagaacctgcggtatt

SEQ ID NO: 38083 - DNA, 80 bp, synthetic construct
  misc_feature 1..80: note = Artificially Synthesized Probe
  source 1..80: mol_type = other DNA
ttgtgaaaagtgtctgttcatgtcctttgcccactttttaatgaggttgcttgtttttttttcttgtaaatttgtgtatg

SEQ ID NO: 38084 - DNA, 80 bp, synthetic construct
  misc_feature 1..80: note = Artificially Synthesized Probe
  source 1..80: mol_type = other DNA
atagccataatatggaatcatcctgagtgtccacccgcagatgagtggatgaagaaagtgttgtctatatacacagtaga

SEQ ID NO: 38085 - DNA, 80 bp, synthetic construct
  misc_feature 1..80: note = Artificially Synthesized Probe
  source 1..80: mol_type = other DNA
attccctagaagttgaaataaaagcatctttattttcagattcttgacaggtaaccacaaactttctctttaagtataat

SEQ ID NO: 38086 - DNA, 80 bp, synthetic construct
  misc_feature 1..80: note = Artificially Synthesized Probe
  source 1..80: mol_type = other DNA
ggtcttgcctttagaaggcgtaaaagcctttggaaaccaattctattccttttcttttttcttttcttttcttttttttt

SEQ ID NO: 38087 - DNA, 80 bp, synthetic construct
  misc_feature 1..80: note = Artificially Synthesized Probe
  source 1..80: mol_type = other DNA
atatcccttttattgtaaaatatacataatctccagtttaccatgttaactccttttcaaggcacagttccctggcacca

SEQ ID NO: 38088 - DNA, 80 bp, synthetic construct
  misc_feature 1..80: note = Artificially Synthesized Probe
  source 1..80: mol_type = other DNA
atctgcctgcctcggcctcccaaagtgctgggattacagacgtgagccactgcgcccggcctgattttattactattttt

SEQ ID NO: 38089 - DNA, 80 bp, synthetic construct
  misc_feature 1..80: note = Artificially Synthesized Probe
  source 1..80: mol_type = other DNA
agcacctgggtcgttttcctgctcatatcctggactgtctttcagggatttactaccggcttccgggacttgagcaagtc

SEQ ID NO: 38090 - DNA, 80 bp, synthetic construct
  misc_feature 1..80: note = Artificially Synthesized Probe
  source 1..80: mol_type = other DNA
ggattacaggcgcaccccaccacgcccagctaatttttgtgtgttggtttgtttgtttgtttgtttttttgagatggagt

SEQ ID NO: 38091 - DNA, 80 bp, synthetic construct
  misc_feature 1..80: note = Artificially Synthesized Probe
  source 1..80: mol_type = other DNA
ctctgagcggctcgggcacttccagtcttcgttcacctcctttgttcacgtctctgccgatgttgatccagcacctgtga

SEQ ID NO: 38092 - DNA, 80 bp, synthetic construct
  misc_feature 1..80: note = Artificially Synthesized Probe
  source 1..80: mol_type = other DNA
ctacttaagttttacgagctgccagccttatctgccgagattgtctgcagaatgattagacttctatctctggtggtaag

SEQ ID NO: 38093 - DNA, 80 bp, synthetic construct
  misc_feature 1..80: note = Artificially Synthesized Probe
  source 1..80: mol_type = other DNA
tgctgggattacaggcttaaaccaccacgcccagcctcccatggatcagttttacctgtcttccagctttgacctttctg

SEQ ID NO: 38094 - DNA, 80 bp, synthetic construct
  misc_feature 1..80: note = Artificially Synthesized Probe
  source 1..80: mol_type = other DNA
gaataaatgtcattggtgagatgatcacgttctctggagtggctgctatttaaaccgccacaggcagctgccaacttcca

SEQ ID NO: 38095 - DNA, 80 bp, synthetic construct
  misc_feature 1..80: note = Artificially Synthesized Probe
  source 1..80: mol_type = other DNA
caggactgtggggctcctcccaggaggaggtggccctgacccctgacctgtatgcttcctgggaaatgtgcttctgggga

SEQ ID NO: 38096 - DNA, 80 bp, synthetic construct
  misc_feature 1..80: note = Artificially Synthesized Probe
  source 1..80: mol_type = other DNA
tgcctcattcacatacgtcaaggaaattgaggtaggcatttggccgaaggcttctgggtagggatgtgactgatcgtgat

SEQ ID NO: 38097 - DNA, 80 bp, synthetic construct
  misc_feature 1..80: note = Artificially Synthesized Probe
  source 1..80: mol_type = other DNA
atggtggaggtaatggaggtgatggtggtggtggtggtggtggtggaggtaatggaggtgatggtggtggtggaggtgat

SEQ ID NO: 38098 - DNA, 80 bp, synthetic construct
  misc_feature 1..80: note = Artificially Synthesized Probe
  source 1..80: mol_type = other DNA
gtggtggtggaggtaatggaggtgatggtggtggtggtggtggtggtggaggtactggaggtgatggcggtcgtggaggt

SEQ ID NO: 38099 - DNA, 80 bp, synthetic construct
  misc_feature 1..80: note = Artificially Synthesized Probe
  source 1..80: mol_type = other DNA
attgtggtggaggtgatggtggtgatggtgatggttgtggaggtgatggtggaggtaatggaggtgatggtggtggtgaa

SEQ ID NO: 38100 - DNA, 80 bp, synthetic construct
  misc_feature 1..80: note = Artificially Synthesized Probe
  source 1..80: mol_type = other DNA
attttcaaagtataacatgagagataagtcctttcagaataaaaagccggttgtgcagtaggaggaccagtagtggcccc

SEQ ID NO: 38101 - DNA, 80 bp, synthetic construct
  misc_feature 1..80: note = Artificially Synthesized Probe
  source 1..80: mol_type = other DNA
ctctgccagggccaatgtgacagcctcttttaggtacccacactcggtgggtcccaagctcttgtccagcatccaagaag

SEQ ID NO: 38102 - DNA, 80 bp, synthetic construct
  misc_feature 1..80: note = Artificially Synthesized Probe
  source 1..80: mol_type = other DNA
cagacatgcccctcatgctgaattaaggcctgaggctcaaggaaaattagtttttatgtgatatgagagttttatatgta

SEQ ID NO: 38103 - DNA, 80 bp, synthetic construct
  misc_feature 1..80: note = Artificially Synthesized Probe
  source 1..80: mol_type = other DNA
ctcagtaggtgtgcgggaagagactccaaaggttgacagaacatttatggaagcaaaatatgtgaaatggaaaattgtat

SEQ ID NO: 38104 - DNA, 80 bp, synthetic construct
  misc_feature 1..80: note = Artificially Synthesized Probe
  source 1..80: mol_type = other DNA
cgacctcaggtgatccacccaccttggcctcccgaagtgccgagattacaggtgtgagccaccgcgcccggccgagcata

SEQ ID NO: 38105 - DNA, 80 bp, synthetic construct
  misc_feature 1..80: note = Artificially Synthesized Probe
  source 1..80: mol_type = other DNA
ttggggattaggaatgctcaacctatatttcatttttttccatggccaaatattccccgtttatccatgtgtccattgac

SEQ ID NO: 38106 - DNA, 80 bp, synthetic construct
  misc_feature 1..80: note = Artificially Synthesized Probe
  source 1..80: mol_type = other DNA
actacaggcatgtgccaccatgttcagctaattaaaaaaaaaatttctgtgggccgggcatggtggctcatgcctgtaga

SEQ ID NO: 38107 - DNA, 80 bp, synthetic construct
  misc_feature 1..80: note = Artificially Synthesized Probe
  source 1..80: mol_type = other DNA
actgacaaggaagtcagctgggattctggtagggctggtattcaatgtatagatcagtttggagagcattgccatcttaa

SEQ ID NO: 38108 - DNA, 80 bp, synthetic construct
  misc_feature 1..80: note = Artificially Synthesized Probe
  source 1..80: mol_type = other DNA
taactgccctggctagaacctccagtacaatgttgaatgaaagtattgaaagtggacatctttgtcttgttctgatctta

SEQ ID NO: 38109 - DNA, 80 bp, synthetic construct
  misc_feature 1..80: note = Artificially Synthesized Probe
  source 1..80: mol_type = other DNA
aattttcttgtagtctcagaccagtatccttcaggggttctcttactctgatttgcggaaatttggcatcgtcttgtctg

SEQ ID NO: 38110 - DNA, 80 bp, synthetic construct
  misc_feature 1..80: note = Artificially Synthesized Probe
  source 1..80: mol_type = other DNA
taaaacaaggtcttctctgttgcgcaagttagcatgtagtagagtgatgccatcatcgctcaccgtaagcgctgacctcc

SEQ ID NO: 38111 - DNA, 80 bp, synthetic construct
  misc_feature 1..80: note = Artificially Synthesized Probe
  source 1..80: mol_type = other DNA
ctctttgcatatgctatgaaagtgtctccctaagaccatcctgatagacattgctaggtatgtctgcatcctctggtgca

SEQ ID NO: 38112 - DNA, 80 bp, synthetic construct
  misc_feature 1..80: note = Artificially Synthesized Probe
  source 1..80: mol_type = other DNA
ggctcctgaggcattaagtagctggaagacacgtttgtgtttgcgtgtgcatttttgtaaaggagataatcatcttagcc

SEQ ID NO: 38113 - DNA, 80 bp, synthetic construct
  misc_feature 1..80: note = Artificially Synthesized Probe
  source 1..80: mol_type = other DNA
ttaatgatacgctgttttcattgtattaatttctaattccatcgcaatctctgccgagtgtctgaatttccttgaagatc

SEQ ID NO: 38114 - DNA, 80 bp, synthetic construct
  misc_feature 1..80: note = Artificially Synthesized Probe
  source 1..80: mol_type = other DNA
attttttcttctcttgctggaattcctgttaattggatatgggacctcctggatgatcatctaactgtcatcatttttct

SEQ ID NO: 38115 - DNA, 80 bp, synthetic construct
  misc_feature 1..80: note = Artificially Synthesized Probe
  source 1..80: mol_type = other DNA
aattcatgtcttctgttagcttcctgagaaaggggatgtgtctagaaaggccctttgttctgccatgtatctgtggcctc

SEQ ID NO: 38116 - DNA, 80 bp, synthetic construct
  misc_feature 1..80: note = Artificially Synthesized Probe
  source 1..80: mol_type = other DNA
ctgccatctttacccagaagtttatgatgctttctttatcatgaatattggttaacaaggccaagcggggagggaaagac

SEQ ID NO: 38117 - DNA, 80 bp, synthetic construct
  misc_feature 1..80: note = Artificially Synthesized Probe
  source 1..80: mol_type = other DNA
gaggtcacccttgcagagattgatgtcatcttcaaggactttgtgaataaatacacggacctggattcagaacttaagat

SEQ ID NO: 38118 - DNA, 80 bp, synthetic construct
  misc_feature 1..80: note = Artificially Synthesized Probe
  source 1..80: mol_type = other DNA
gctgaggtgggcagatcacctgaggtgaggagttcgagaccagcctgaccaacatggagaaaccccatctctactaaaaa

SEQ ID NO: 38119 - DNA, 80 bp, synthetic construct
  misc_feature 1..80: note = Artificially Synthesized Probe
  source 1..80: mol_type = other DNA
gggttctggttaatgagttccagtccacagtagagctttttcttgcagactgataacttcgacgactttcgccgtgaaac

SEQ ID NO: 38120 - DNA, 80 bp, synthetic construct
  misc_feature 1..80: note = Artificially Synthesized Probe
  source 1..80: mol_type = other DNA
attgatgctgtgcgtttcttggcagcctcttcagttctgtggcttagatgtcgttggcagaggagagaggaagaggcaga

SEQ ID NO: 38121 - DNA, 80 bp, synthetic construct
  misc_feature 1..80: note = Artificially Synthesized Probe
  source 1..80: mol_type = other DNA
gaactcccctcttctcttccccaggcatcaatgagctgaaggtgtttgtggacctggcctccatctcagcgggggagaat

SEQ ID NO: 38122 - DNA, 80 bp, synthetic construct
  misc_feature 1..80: note = Artificially Synthesized Probe
  source 1..80: mol_type = other DNA
cagagtttccaaacaaaaccctctgttgtgatttttcctaaacttctcttattgtacttggggaccacagaaggacactg

SEQ ID NO: 38123 - DNA, 80 bp, synthetic construct
  misc_feature 1..80: note = Artificially Synthesized Probe
  source 1..80: mol_type = other DNA
gtgtactcccaagaaaacggaaaggatttgacttgggatttgactgataagaagggctctgctcttaggcccatggagag

SEQ ID NO: 38124 - DNA, 80 bp, synthetic construct
  misc_feature 1..80: note = Artificially Synthesized Probe
  source 1..80: mol_type = other DNA
aaacaaatgataccatttatctctacaatgactctttccctgatgagagtgccatcttctcaggtgggttgtgtagatga

SEQ ID NO: 38125 - DNA, 80 bp, synthetic construct
  misc_feature 1..80: note = Artificially Synthesized Probe
  source 1..80: mol_type = other DNA
ctcccgctgatgctcttatcagagttcagcctggtggacaagctgaggatcatcatggagcagtccatgaggtgccttcc

SEQ ID NO: 38126 - DNA, 80 bp, synthetic construct
  misc_feature 1..80: note = Artificially Synthesized Probe
  source 1..80: mol_type = other DNA
tacagtggcgtgatctcggctcactgcaaccttcgcctcccggattcaagcgattttcctgcctcagcctcccaagtagc

SEQ ID NO: 38127 - DNA, 80 bp, synthetic construct
  misc_feature 1..80: note = Artificially Synthesized Probe
  source 1..80: mol_type = other DNA
gaccacgtatatgaccacggtcccataagattagaaaactgtactttaaaaattagccaggcatggtggtgcatgcctgt

SEQ ID NO: 38128 - DNA, 80 bp, synthetic construct
  misc_feature 1..80: note = Artificially Synthesized Probe
  source 1..80: mol_type = other DNA
attttatacaaagagaagtaacttctagtggatctttatagattctcttactctttgtcctagccctgggacttaatttt

SEQ ID NO: 38129 - DNA, 80 bp, synthetic construct
  misc_feature 1..80: note = Artificially Synthesized Probe
  source 1..80: mol_type = other DNA
aaacataaaaatggtacagggaaatatagtattaggattttatggggctgcccttggagacatgggccgttgttggctga

SEQ ID NO: 38130 - DNA, 80 bp, synthetic construct
  misc_feature 1..80: note = Artificially Synthesized Probe
  source 1..80: mol_type = other DNA
cacaaaagcatttcttagaaagtcttcttgtaaccatttcattaatgtctctcctttccagcgtacacgtgtaccccagt

SEQ ID NO: 38131 - DNA, 80 bp, synthetic construct
  misc_feature 1..80: note = Artificially Synthesized Probe
  source 1..80: mol_type = other DNA
ttaaaatccttgccatcgagatgcggttccggtgtgggatcccggttatcatcatgggagaaactggctgtgggaaaacc

SEQ ID NO: 38132 - DNA, 80 bp, synthetic construct
  misc_feature 1..80: note = Artificially Synthesized Probe
  source 1..80: mol_type = other DNA
gccaggttctttccgaaaccgtatgacgacagcaggctgcttctggatgaaataacacgggcacaggatctttttctgga

SEQ ID NO: 38133 - DNA, 80 bp, synthetic construct
  misc_feature 1..80: note = Artificially Synthesized Probe
  source 1..80: mol_type = other DNA
aaggaattcttcgggcttcgtgactactacagcctcatcaaaatggtctttgctgcagcaaaggcttcaaatagaaagcc

SEQ ID NO: 38134 - DNA, 80 bp, synthetic construct
  misc_feature 1..80: note = Artificially Synthesized Probe
  source 1..80: mol_type = other DNA
gacctggagcgccacgccatcttcacagaggtgattgtctttctgcacttgtaccctatcccctgtcacccaagagtcct

SEQ ID NO: 38135 - DNA, 80 bp, synthetic construct
  misc_feature 1..80: note = Artificially Synthesized Probe
  source 1..80: mol_type = other DNA
taccgcaggaacggacagcaggttgtgggaggctagtgatgatgtccgccggggacaggtttctatgcatcgtgcagctg

SEQ ID NO: 38136 - DNA, 80 bp, synthetic construct
  misc_feature 1..80: note = Artificially Synthesized Probe
  source 1..80: mol_type = other DNA
cattccttgggtttcctcccctggactatctgttcttactgaagaaaatcctacctgagtagctgtttctttgtagcctt

SEQ ID NO: 38137 - DNA, 80 bp, synthetic construct
  misc_feature 1..80: note = Artificially Synthesized Probe
  source 1..80: mol_type = other DNA
ggccagagcaagagcctgtcctccccacaaaaaaggtgaaatgcgagaggtgtaaataatggaacattaacaagctataa

SEQ ID NO: 38138 - DNA, 80 bp, synthetic construct
  misc_feature 1..80: note = Artificially Synthesized Probe
  source 1..80: mol_type = other DNA
aaatgaaatcaacaaaatacgagaaaatgaggaccgtatcttcgtctatttcatcacaaaactgtcccgggtgggaagag

SEQ ID NO: 38139 - DNA, 80 bp, synthetic construct
  misc_feature 1..80: note = Artificially Synthesized Probe
  source 1..80: mol_type = other DNA
cactaactgtgatacagcaaatacaacaatgcatgggtgaaagaaccacaggccttatccatgcgtccttcccacgctgg

SEQ ID NO: 38140 - DNA, 80 bp, synthetic construct
  misc_feature 1..80: note = Artificially Synthesized Probe
  source 1..80: mol_type = other DNA
ggggaggtggcagaggtggcagaggaggccatggaaacagaaagttctgagaaggtgggaaaggaaacctctgaactcgg

SEQ ID NO: 38141 - DNA, 80 bp, synthetic construct
  misc_feature 1..80: note = Artificially Synthesized Probe
  source 1..80: mol_type = other DNA
agtaggtctggacagtggccaaatggcaggtgctggactcttcctctaatttcgtgtttacagtttttcatactaaaaac

SEQ ID NO: 38142 - DNA, 80 bp, synthetic construct
  misc_feature 1..80: note = Artificially Synthesized Probe
  source 1..80: mol_type = other DNA
aggaagaagcggggtggatgggaatcggggctcacggaggaagaggggtgaccgggaatgggggctcacagaggaagaag

SEQ ID NO: 38143 - DNA, 80 bp, synthetic construct
  misc_feature 1..80: note = Artificially Synthesized Probe
  source 1..80: mol_type = other DNA
ccccactctgctgttcacgcagcactaggcctggctccgtcgtgttctgtggtcaccgtgaggcctgcgcagccgctgag

SEQ ID NO: 38144 - DNA, 80 bp, synthetic construct
  misc_feature 1..80: note = Artificially Synthesized Probe
  source 1..80: mol_type = other DNA
ataacaacaaaatgtcttgtagttaaccaattatctttctgtctgcctatctgtgcattcatccatccctccgcctgcct

SEQ ID NO: 38145 - DNA, 80 bp, synthetic construct
  misc_feature 1..80: note = Artificially Synthesized Probe
  source 1..80: mol_type = other DNA
gtagactagttgttttgttaatgctcaagaaggaacaaaatgtcaaaaggtggcagaccgccactctggttcctctgacc

SEQ ID NO: 38146 - DNA, 80 bp, synthetic construct
  misc_feature 1..80: note = Artificially Synthesized Probe
  source 1..80: mol_type = other DNA
cttccacttcagctttcaggggcttcaattctggatgtagatttataaagaatatagaaataaatgtgcccaggctcggt

SEQ ID NO: 38147 - DNA, 80 bp, synthetic construct
  misc_feature 1..80: note = Artificially Synthesized Probe
  source 1..80: mol_type = other DNA
gattgcctgacagtgaaaagcagatgggtggctagaattgcaaggtgaattttggagtttttagttttcacactttgttt

SEQ ID NO: 38148 - DNA, 80 bp, synthetic construct
  misc_feature 1..80: note = Artificially Synthesized Probe
  source 1..80: mol_type = other DNA
gacctgtagccatgcaacatacaatgtagccatgcaacatacaactcagtcttatctagatgtttctctttggggctagc

SEQ ID NO: 38149 - DNA, 80 bp, synthetic construct
  misc_feature 1..80: note = Artificially Synthesized Probe
  source 1..80: mol_type = other DNA
gaacttcttcagtgttacttgaaggatttcattctcttgaccatgcgtgtgtcaacggaggaggaattaaaggtagatgt

SEQ ID NO: 38150 - DNA, 80 bp, synthetic construct
  misc_feature 1..80: note = Artificially Synthesized Probe
  source 1..80: mol_type = other DNA
cagaatagcacacatggtttctaatttcctcttttatggttttccaatagttcggatttcccacggggaaaacataccat

SEQ ID NO: 38151 - DNA, 80 bp, synthetic construct
  misc_feature 1..80: note = Artificially Synthesized Probe
  source 1..80: mol_type = other DNA
aacaccctgaagcccagtccccaggcgtggctacagttggtgaagaatctttccatgccgctggagctcatctgctccga

SEQ ID NO: 38152 - DNA, 80 bp, synthetic construct
  misc_feature 1..80: note = Artificially Synthesized Probe
  source 1..80: mol_type = other DNA
actgacagtgatctgcggctgggagacgctcttttggctctgaccgttttgtctagacatgcaaaggaaggtgatttcat

SEQ ID NO: 38153 - DNA, 80 bp, synthetic construct
  misc_feature 1..80: note = Artificially Synthesized Probe
  source 1..80: mol_type = other DNA
tgtgggacagaaagcaggggaggtagaggacaggccgttttccttaagagcccaatcccggacacgcacacgccacacca

SEQ ID NO: 38154 - DNA, 80 bp, synthetic construct
  misc_feature 1..80: note = Artificially Synthesized Probe
  source 1..80: mol_type = other DNA
ggtctgaatttctccacatcatgggcaacacctgttactatctgatttttttcataatggccaccgtgataattcattgt

SEQ ID NO: 38155 - DNA, 80 bp, synthetic construct
  misc_feature 1..80: note = Artificially Synthesized Probe
  source 1..80: mol_type = other DNA
cggaggagaccttaaaagaaaaagaagagggaaaatcgtaacttgagaatgtagtcccctgacaagcagcataatcacaa

SEQ ID NO: 38156 - DNA, 80 bp, synthetic construct
  misc_feature 1..80: note = Artificially Synthesized Probe
  source 1..80: mol_type = other DNA
tacacatacagatttcagacaacaaattcagaggaactaagccagaaagtcttaacaaaggtcctcaccagaggcccaag

SEQ ID NO: 38157 - DNA, 80 bp, synthetic construct
  misc_feature 1..80: note = Artificially Synthesized Probe
  source 1..80: mol_type = other DNA
aagggtattgttgccgggtccaaatgatcaaagtgtttccagaaagggatgcatgtaaatatcatctgctgaggttttga

SEQ ID NO: 38158 - DNA, 80 bp, synthetic construct
  misc_feature 1..80: note = Artificially Synthesized Probe
  source 1..80: mol_type = other DNA
aacacacaaaatctctctctccattcaatgatgttgtggataagactcctgtcatccgctcagtgatactgaaactgctt

SEQ ID NO: 38159 - DNA, 80 bp, synthetic construct
  misc_feature 1..80: note = Artificially Synthesized Probe
  source 1..80: mol_type = other DNA
actatgagcttgtgagcttttgaatacttaaagacattttggggcaatttgtggtgatattaatgaatatggattttttt

SEQ ID NO: 38160 - DNA, 80 bp, synthetic construct
  misc_feature 1..80: note = Artificially Synthesized Probe
  source 1..80: mol_type = other DNA
ggggttctcaatttttaagactataaaggggtcctgaaaccaaagtttgaggacagctggtctaaaatgtgagttttata

SEQ ID NO: 38161 - DNA, 80 bp, synthetic construct
  misc_feature 1..80: note = Artificially Synthesized Probe
  source 1..80: mol_type = other DNA
cgttatttagaaattcaggaagtatgggaaactagttcttcgaatagactactactgggcttttctacatcccctctccc

SEQ ID NO: 38162 - DNA, 80 bp, synthetic construct
  misc_feature 1..80: note = Artificially Synthesized Probe
  source 1..80: mol_type = other DNA
agggccaaggtgagggcactcacctcagagcttctttaattaggcatcacttctaattgaatttcactcaaggaaagtag

SEQ ID NO: 38163 - DNA, 80 bp, synthetic construct
  misc_feature 1..80: note = Artificially Synthesized Probe
  source 1..80: mol_type = other DNA
agagggcaccagactgtcctgcctcaggccaggtcagggaatcccagcttggctgcctttaaacctcgaatgatcaacca

SEQ ID NO: 38164 - DNA, 80 bp, synthetic construct
  misc_feature 1..80: note = Artificially Synthesized Probe
  source 1..80: mol_type = other DNA
ttgagtttaatctgagagtatttcaggaactttgtagcccaaaagttgctcgccagaagactgcccatgtggggcatgac

SEQ ID NO: 38165 - DNA, 80 bp, synthetic construct
  misc_feature 1..80: note = Artificially Synthesized Probe
  source 1..80: mol_type = other DNA
aaatggtggtgatttctccatatttaccttgatatttgatgtgtatttggtgtcagtgtatgtctaagagcaattcacac

SEQ ID NO: 38166 - DNA, 80 bp, synthetic construct
  misc_feature 1..80: note = Artificially Synthesized Probe
  source 1..80: mol_type = other DNA
atcagagacgcattcaaaggcccaccacaaaacaaagtttttgacacaaagctcttctgaaatatatgaaatatagaacc

SEQ ID NO: 38167 - DNA, 80 bp, synthetic construct
  misc_feature 1..80: note = Artificially Synthesized Probe
  source 1..80: mol_type = other DNA
attctttctagccactgcagcatggggtcagtgagccttgtcttgatagaatggcaaggtgttgcctggaccacaggctg

SEQ ID NO: 38168 - DNA, 80 bp, synthetic construct
  misc_feature 1..80: note = Artificially Synthesized Probe
  source 1..80: mol_type = other DNA
gtttggtgtgttatcagccgtgactctcagtatattgtggcacaatatctgattttgaaaaataagcctttggaagtaga

SEQ ID NO: 38169 - DNA, 80 bp, synthetic construct
  misc_feature 1..80: note = Artificially Synthesized Probe
  source 1..80: mol_type = other DNA
cggctttcatctggtcaagtatgtgggtcaggattctatttcctaagtactcaaactttggggtgttgggctgtttttat

SEQ ID NO: 38170 - DNA, 80 bp, synthetic construct
  misc_feature 1..80: note = Artificially Synthesized Probe
  source 1..80: mol_type = other DNA
gcgagtctatcatgagagagactcttaggaacatggtccaggctttgtggaacagcaagtactcttcacataactctctt

SEQ ID NO: 38171 - DNA, 80 bp, synthetic construct
  misc_feature 1..80: note = Artificially Synthesized Probe
  source 1..80: mol_type = other DNA
gcccccacaggctctgataaacatcattaagcctccagtgagggatccaaaaggctttctgcagcagcacatcctgaagg

SEQ ID NO: 38172 - DNA, 80 bp, synthetic construct
  misc_feature 1..80: note = Artificially Synthesized Probe
  source 1..80: mol_type = other DNA
tttgaacaatctgattttattttaagcctcttattctggtgggatttcagcaaagtgagcacacccagagtcacactgat

SEQ ID NO: 38173 - DNA, 80 bp, synthetic construct
  misc_feature 1..80: note = Artificially Synthesized Probe
  source 1..80: mol_type = other DNA
acaatctgtttgtagcaatacctcacttccagaattttttttttcattttctccatccagcatctagataaaacccttcc

SEQ ID NO: 38174 - DNA, 80 bp, synthetic construct
  misc_feature 1..80: note = Artificially Synthesized Probe
  source 1..80: mol_type = other DNA
tttctacaacacattgtctaaacatttctctccatggactattatttgctgtctagcaaggatgaagacgagttggaaac

SEQ ID NO: 38175 - DNA, 80 bp, synthetic construct
  misc_feature 1..80: note = Artificially Synthesized Probe
  source 1..80: mol_type = other DNA
gtaaagttcctgcctgagattttggccttgcaaagggatctagtgaagcagttccagaacgtccagcaagttgaatacag

SEQ ID NO: 38176 - DNA, 80 bp, synthetic construct
  misc_feature 1..80: note = Artificially Synthesized Probe
  source 1..80: mol_type = other DNA
ctctctgcttaagcataaccctgtcgtttaaaggtgagatcaacctacccaaagactactgcagcactgacttggatctg

SEQ ID NO: 38177 - DNA, 80 bp, synthetic construct
  misc_feature 1..80: note = Artificially Synthesized Probe
  source 1..80: mol_type = other DNA
gtggtgccaagcctccacctctgggctcaagcgatcctctcacatcagcttcccaaatagctgagatcacaagtgtgcac

SEQ ID NO: 38178 - DNA, 80 bp, synthetic construct
  misc_feature 1..80: note = Artificially Synthesized Probe
  source 1..80: mol_type = other DNA
ctgtacttatgtacggtaccacccgcaactgggccaggaactgtgagagcccatggattttttttttttttttttttttt

SEQ ID NO: 38179 - DNA, 80 bp, synthetic construct
  misc_feature 1..80: note = Artificially Synthesized Probe
  source 1..80: mol_type = other DNA
ttacagagagcaagcaagacagcaaatcagcaagttttcttgtagagtaaaagcagattgacatcttgtgggtttgattc

SEQ ID NO: 38180 - DNA, 80 bp, synthetic construct
  misc_feature 1..80: note = Artificially Synthesized Probe
  source 1..80: mol_type = other DNA
atttggggaaatcagttcaaggtacaaagcggatctgagcccggaaaatgctaagctcctcagcacattcctaaatcaga

SEQ ID NO: 38181 - DNA, 80 bp, synthetic construct
  misc_feature 1..80: note = Artificially Synthesized Probe
  source 1..80: mol_type = other DNA
gtcaaagagaggtacattttaaatttgatagaaaaagctatcctaggccgggtgtggaggcttaccctgtaatcccagca

SEQ ID NO: 38182 - DNA, 80 bp, synthetic construct
  misc_feature 1..80: note = Artificially Synthesized Probe
  source 1..80: mol_type = other DNA
ggttcatcttctctgccgtgtgccacagtgctctatttcagcctttaattttatgaagtcaaatctgacagaattttcct

SEQ ID NO: 38183 - DNA, 80 bp, synthetic construct
  misc_feature 1..80: note = Artificially Synthesized Probe
  source 1..80: mol_type = other DNA
acccaggatgctagtcccagttcaggagctcaggtcattgaccttaaactgctcctcaggatttctgggttttttttttt

SEQ ID NO: 38184 - DNA, 80 bp, synthetic construct
  misc_feature 1..80: note = Artificially Synthesized Probe
  source 1..80: mol_type = other DNA
agaattatttcctcagctatctttggatgactttggagagaagactcctctctcctcgtctgcggcgtggacttgatcat

SEQ ID NO: 38185 - DNA, 80 bp, synthetic construct
  misc_feature 1..80: note = Artificially Synthesized Probe
  source 1..80: mol_type = other DNA
tagtcctttctgtggttctcagccaagacataaaaactaggactcagagcacatacaaaaccagttatgtttcggaaaga

SEQ ID NO: 38186 - DNA, 80 bp, synthetic construct
  misc_feature 1..80: note = Artificially Synthesized Probe
  source 1..80: mol_type = other DNA
ctatttatggcacatagacatcagctaggcttttgggaatcgtttgtgttctttgtggaaatgtcctttagaagcaccca

SEQ ID NO: 38187 - DNA, 80 bp, synthetic construct
  misc_feature 1..80: note = Artificially Synthesized Probe
  source 1..80: mol_type = other DNA
aaattatttgcctttcatgaatagttatgagactttgtgcatgtgttaaccgagacggccctgagctatttcagttactc

SEQ ID NO: 38188 - DNA, 80 bp, synthetic construct
  misc_feature 1..80: note = Artificially Synthesized Probe
  source 1..80: mol_type = other DNA
cagccatgggcaagtggctcgacctctctaagcttcagtttcctcgtctgtgaaatatctgtcagtgctcttaagggagg

SEQ ID NO: 38189 - DNA, 80 bp, synthetic construct
  misc_feature 1..80: note = Artificially Synthesized Probe
  source 1..80: mol_type = other DNA
ggttttgattttggtttggtgtaaactgtaaaagtgtgtgtgtgccctttttacctgttctttgttttgtggtatgcgtg

SEQ ID NO: 38190 - DNA, 80 bp, synthetic construct
  misc_feature 1..80: note = Artificially Synthesized Probe
  source 1..80: mol_type = other DNA
gaccttttagatgtggaatcggttgggggcgaatcttctaatacttgagctttctaaagactccttgtccagctggaaca

SEQ ID NO: 38191 - DNA, 80 bp, synthetic construct
  misc_feature 1..80: note = Artificially Synthesized Probe
  source 1..80: mol_type = other DNA
tcatgtatttgattaaataaaaatctgcaagccctgaccttaggctagagccccaaaacactggattctgaccacatcat

SEQ ID NO: 38192 - DNA, 80 bp, synthetic construct
  misc_feature 1..80: note = Artificially Synthesized Probe
  source 1..80: mol_type = other DNA
tgaggaagctgatgggcagtggttctagttggttagcagaagtagtatttccaaagttactccattcgacaagctgagtg

SEQ ID NO: 38193 - DNA, 80 bp, synthetic construct
  misc_feature 1..80: note = Artificially Synthesized Probe
  source 1..80: mol_type = other DNA
ctgctagtattggatcatgccctttttgttcagtcacatttctaggcccttgcaattcctggtcttttccaagagccaat

SEQ ID NO: 38194 - DNA, 80 bp, synthetic construct
  misc_feature 1..80: note = Artificially Synthesized Probe
  source 1..80: mol_type = other DNA
tgaaggattttagttgtggccctgcttgtcctgagggcccttcaggacttgtcttcttcctaaaaagaaggttttactat

SEQ ID NO: 38195 - DNA, 80 bp, synthetic construct
  misc_feature 1..80: note = Artificially Synthesized Probe
  source 1..80: mol_type = other DNA
gtgtctcacagaacactattaatttgcatttcaatgaacaaaacttacttgctttgttaacagttttctgcaagttaaag

SEQ ID NO: 38196 - DNA, 80 bp, synthetic construct
  misc_feature 1..80: note = Artificially Synthesized Probe
  source 1..80: mol_type = other DNA
gactatttttcatgttcttaactaagcctttgccctctttccattttctctgaggcaggctcatgcaaaatgagcacccc

SEQ ID NO: 38197 - DNA, 80 bp, synthetic construct
  misc_feature 1..80: note = Artificially Synthesized Probe
  source 1..80: mol_type = other DNA
tgacttagcttgaggtcccaatataattttaatcatgttgatggcattctaccattgagttctttgcgtgagctcagact

SEQ ID NO: 38198 - DNA, 80 bp, synthetic construct
  misc_feature 1..80: note = Artificially Synthesized Probe
  source 1..80: mol_type = other DNA
gagttcatatatacaaagttcttagaatattgtcaggcacataacaatggcaaacactgacactgctttctgtggtcagt

SEQ ID NO: 38199 - DNA, 80 bp, synthetic construct
  misc_feature 1..80: note = Artificially Synthesized Probe
  source 1..80: mol_type = other DNA
ggaattaagcaatgtgttggtaatgcaagtacatcataaaatagtaggagctgatggaggaaagcagtggagccagttaa

SEQ ID NO: 38200 - DNA, 80 bp, synthetic construct
  misc_feature 1..80: note = Artificially Synthesized Probe
  source 1..80: mol_type = other DNA
aaaagaaaaaaaagcacactaccctcactttcccctagatgaccactacctagaaagcacactcttattacctcccaccc

SEQ ID NO: 38201 - DNA, 80 bp, synthetic construct
  misc_feature 1..80: note = Artificially Synthesized Probe
  source 1..80: mol_type = other DNA
cgtaaaagtaactttcctgttaacccagtattgtaccaaatggcagtataatttaaatcaaatgttgtctggttgcaagt

SEQ ID NO: 38202 - DNA, 80 bp, synthetic construct
  misc_feature 1..80: note = Artificially Synthesized Probe
  source 1..80: mol_type = other DNA
cactcctgcagcaaacttctgcctgggcatccaggtgtttccatacatcttctgaaatctagacagaggttcccaaacct

SEQ ID NO: 38203 - DNA, 80 bp, synthetic construct
  misc_feature 1..80: note = Artificially Synthesized Probe
  source 1..80: mol_type = other DNA
atatcgctatcagcattttgggcaaggccattcaacaagtctccaaacttaaccacatttttctgtcttctgagccctcc

SEQ ID NO: 38204 - DNA, 80 bp, synthetic construct
  misc_feature 1..80: note = Artificially Synthesized Probe
  source 1..80: mol_type = other DNA
gactacaaaccactgcttaaggaaatgagaggacacaaatgggaaaacattccatgcccatggataggaagaatcaatat

SEQ ID NO: 38205 - DNA, 80 bp, synthetic construct
  misc_feature 1..80: note = Artificially Synthesized Probe
  source 1..80: mol_type = other DNA
taaagatacatgcacatgtatgttcattgcagcactattcataatatcgaagacatggaatcaacccaaatgccaccaat

SEQ ID NO: 38206 - DNA, 80 bp, synthetic construct
  misc_feature 1..80: note = Artificially Synthesized Probe
  source 1..80: mol_type = other DNA
tttggacgcatgcaattttccatcactgggttttggcatggctccttgttagttgagtagttgatttaccttcttaacaa

SEQ ID NO: 38207 - DNA, 80 bp, synthetic construct
  misc_feature 1..80: note = Artificially Synthesized Probe
  source 1..80: mol_type = other DNA
aaaaatgtttgtcctactttcacatcagttagattagcagtttcccttaagaggaatggggatcaaacacatgagggagt

SEQ ID NO: 38208 - DNA, 80 bp, synthetic construct
  misc_feature 1..80: note = Artificially Synthesized Probe
  source 1..80: mol_type = other DNA
tgctcttgggttaagcaaaaccaatggaagagcctttggcccagtatgaaaagcttttgttaattttgccaaatggattt

SEQ ID NO: 38209 - DNA, 80 bp, synthetic construct
  misc_feature 1..80: note = Artificially Synthesized Probe
  source 1..80: mol_type = other DNA
ataatttgcaagtgggggaaaggtgtgtctcctttgttagccatatctgctttttcttctctgaacccttttcttgagcc

SEQ ID NO: 38210 - DNA, 80 bp, synthetic construct
  misc_feature 1..80: note = Artificially Synthesized Probe
  source 1..80: mol_type = other DNA
tcaacttcagatgtcttgttttaaatgtctctcctcccttctcccttgtctgcaccagattaagaatgtgttcagggtca

SEQ ID NO: 38211 - DNA, 80 bp, synthetic construct
  misc_feature 1..80: note = Artificially Synthesized Probe
  source 1..80: mol_type = other DNA
gttgaaataattattatctacagacctggaatcaatagaagggaatgtttgggtgaagataaggggttatggagaccaag

SEQ ID NO: 38212 - DNA, 80 bp, synthetic construct
  misc_feature 1..80: note = Artificially Synthesized Probe
  source 1..80: mol_type = other DNA
ggcaaattccagccttgcaagtgagagttcatctttaattcataggcctagtttcttttacctgtgtgttcaacctgcag

SEQ ID NO: 38213 - DNA, 80 bp, synthetic construct
  misc_feature 1..80: note = Artificially Synthesized Probe
  source 1..80: mol_type = other DNA
cagcctcctgaatagctggaatacaaatgtgtgcctccacacctggctaagaaaatatctttatgcgacttttcctcagt

SEQ ID NO: 38214 - DNA, 80 bp, synthetic construct
  misc_feature 1..80: note = Artificially Synthesized Probe
  source 1..80: mol_type = other DNA
ctgggattacagatgtgagccactgtgcctggcccctgtctgctcctttgaagagtgctgggctacctgatggtcagcca

SEQ ID NO: 38215 - DNA, 80 bp, synthetic construct
  misc_feature 1..80: note = Artificially Synthesized Probe
  source 1..80: mol_type = other DNA
tacgcagagacactggtttgtagcagagaaaggtttaaccatagggccaccaatcaaggagacaagaggaatcctcaaat

SEQ ID NO: 38216 - DNA, 80 bp, synthetic construct
  misc_feature 1..80: note = Artificially Synthesized Probe
  source 1..80: mol_type = other DNA
gaatgcagtcttttgtctattatctacttatgacccggaagaccccttccccgcctcaagttgtcctgccttatcagact

SEQ ID NO: 38217 - DNA, 80 bp, synthetic construct
  misc_feature 1..80: note = Artificially Synthesized Probe
  source 1..80: mol_type = other DNA
agttttggcatagaaagattagggagggaggaggttagagtaatattgttaaattttgtgaacccccaaaatgtgagata

SEQ ID NO: 38218 - DNA, 80 bp, synthetic construct
  misc_feature 1..80: note = Artificially Synthesized Probe
  source 1..80: mol_type = other DNA
aacaaacaaaagaacaatcctggaaaattgatataggccacattactctaaagtccatacattagtagacaggtatgaaa

SEQ ID NO: 38219 - DNA, 80 bp, synthetic construct
  misc_feature 1..80: note = Artificially Synthesized Probe
  source 1..80: mol_type = other DNA
gttgtgagaaacttgtattcaagagcacctgttaagagttttatagctgattataaagccaccttctaaagaggaccaaa

SEQ ID NO: 38220 - DNA, 80 bp, synthetic construct
  misc_feature 1..80: note = Artificially Synthesized Probe
  source 1..80: mol_type = other DNA
aaaaatttgtctcagttttttttcgtaagcaaatcaaaacttaatgccataggaattatttccataaaacgtaaaatctg

SEQ ID NO: 38221 - DNA, 80 bp, synthetic construct
  misc_feature 1..80: note = Artificially Synthesized Probe
  source 1..80: mol_type = other DNA
cacactggggcctgtcagggggtgaggggctaggggaggaatagcattaggagaaatacctaatgtagatgatgggtgga

SEQ ID NO: 38222 - DNA, 80 bp, synthetic construct
  misc_feature 1..80: note = Artificially Synthesized Probe
  source 1..80: mol_type = other DNA
aaaaccctttttttttatagctttctttacatctctcttattttgtggttccttttacaacttgttttatacataacctt

SEQ ID NO: 38223 - DNA, 80 bp, synthetic construct
  misc_feature 1..80: note = Artificially Synthesized Probe
  source 1..80: mol_type = other DNA
caggctaaagactgctttctaccgctctagaagcaggaggaaaaaaacaacaaaaaatgttaaactcatattccctgctg

SEQ ID NO: 38224 - DNA, 80 bp, synthetic construct
  misc_feature 1..80: note = Artificially Synthesized Probe
  source 1..80: mol_type = other DNA
gattctagtttctatggctatcctcaggagcatgagaggccagagtcaggagggcagaataattgaaagaaacttttgcc

SEQ ID NO: 38225 - DNA, 80 bp, synthetic construct
  misc_feature 1..80: note = Artificially Synthesized Probe
  source 1..80: mol_type = other DNA
ctgtggggtttgcttcttgcctttcttcagaatcacaagctaatcattagctttcctgctccttgcactttccagaactc

SEQ ID NO: 38226 - DNA, 80 bp, synthetic construct
  misc_feature 1..80: note = Artificially Synthesized Probe
  source 1..80: mol_type = other DNA
ttggggcacagaactgttttaaagggagtacagatgctccccttgtgttgttgcttattgtctgttggggaagatgggag

SEQ ID NO: 38227 - DNA, 80 bp, synthetic construct
  misc_feature 1..80: note = Artificially Synthesized Probe
  source 1..80: mol_type = other DNA
ccaactccttgtccaggacatgacagctatttttaaaacgtccttatcagttagcagtgtggggttttttttgtttgttt

SEQ ID NO: 38228 - DNA, 80 bp, synthetic construct
  misc_feature 1..80: note = Artificially Synthesized Probe
  source 1..80: mol_type = other DNA
ccctctatccttcagtcagccccagtgtgtattgttgccctctgttagctcccacttacaagtgagaacatgtggtattt

SEQ ID NO: 38229 - DNA, 80 bp, synthetic construct
  misc_feature 1..80: note = Artificially Synthesized Probe
  source 1..80: mol_type = other DNA
ttctcacaaacatcctaaatctctcccagtctagtgtgctaaatttgctgacttcctcccttagtctttctgaattctgg

SEQ ID NO: 38230 - DNA, 80 bp, synthetic construct
  misc_feature 1..80: note = Artificially Synthesized Probe
  source 1..80: mol_type = other DNA
acttgttcatgggctccagatatcttgtaaaatctagggaagatgtcagttagttgtaccaagttttctcctgggacctt

SEQ ID NO: 38231 - DNA, 80 bp, synthetic construct
  misc_feature 1..80: note = Artificially Synthesized Probe
  source 1..80: mol_type = other DNA
gacaaacccacagccaatatcatactgaatgggcaaaaactggaagcattccctttgaaaaccggcacaagacagggatg

SEQ ID NO: 38232 - DNA, 80 bp, synthetic construct; identical to SEQ ID NO: 30692
  misc_feature 1..80: note = Artificially Synthesized Probe
  source 1..80: mol_type = other DNA

SEQ ID NO: 38233 - DNA, 80 bp, synthetic construct
  misc_feature 1..80: note = Artificially Synthesized Probe
  source 1..80: mol_type = other DNA
aaaaaaaagaaaatattaaaactaagttttgtggtaaagactaacacaggggcagtccagaggagactgatgttggtgag

SEQ ID NO: 38234 - DNA, 80 bp, synthetic construct
  misc_feature 1..80: note = Artificially Synthesized Probe
  source 1..80: mol_type = other DNA
aacttagtaactgcaccatgaatagaatttgtaccctgcatactacttgctgtctttaaaaatatactcggggttcctac

SEQ ID NO: 38235 - DNA, 80 bp, synthetic construct
  misc_feature 1..80: note = Artificially Synthesized Probe
  source 1..80: mol_type = other DNA
aacctcttgtagctcaatttcttgatttgctaaatgggagtactagaattagctaacagggctgctgagtatctgatgag

SEQ ID NO: 38236 - DNA, 80 bp, synthetic construct
  misc_feature 1..80: note = Artificially Synthesized Probe
  source 1..80: mol_type = other DNA
gtttctctttaagtgccaggattgagtggatttgggattcctgtatttaaccttagttcccaaactgagatttttgtctt

SEQ ID NO: 38237 - DNA, 80 bp, synthetic construct
  misc_feature 1..80: note = Artificially Synthesized Probe
  source 1..80: mol_type = other DNA
tgcctgtactgttgagcttatttacttttattgtactttctgactccttctttccaggaaagattcgaagaatctcgggg

SEQ ID NO: 38238 - DNA, 80 bp, synthetic construct
  misc_feature 1..80: note = Artificially Synthesized Probe
  source 1..80: mol_type = other DNA
tttttaggttccatggtgtaacttcttttctccctcttctttcctctcattctgtggttaaatgtgacaagaagtagaat

SEQ ID NO: 38239 - DNA, 80 bp, synthetic construct
  misc_feature 1..80: note = Artificially Synthesized Probe
  source 1..80: mol_type = other DNA
atggacatgggctttgtaaggcttggttggaaagaagaattccctttataccatgtttgggtttttaacttcacctcctt

SEQ ID NO: 38240 - DNA, 80 bp, synthetic construct
  misc_feature 1..80: note = Artificially Synthesized Probe
  source 1..80: mol_type = other DNA
tatcaagggctcgtacagggggattaaaaggaggaggcagtcttgagaggtatcagcttcttaggatattgcgagactaa

SEQ ID NO: 38241 - DNA, 80 bp, synthetic construct
  misc_feature 1..80: note = Artificially Synthesized Probe
  source 1..80: mol_type = other DNA
aacagccaagaaggtaggaggaagagaagatttgcaaatcactgttagtaaaatgggagaacttgcccttggtgataatg

SEQ ID NO: 38242 - DNA, 80 bp, synthetic construct
  misc_feature 1..80: note = Artificially Synthesized Probe
  source 1..80: mol_type = other DNA
agtcttaccttagactgctgcccattcatctctgctctttctttaaagccttttctgaacctgatttaactgttttttgg

SEQ ID NO: 38243 - DNA, 80 bp, synthetic construct
  misc_feature 1..80: note = Artificially Synthesized Probe
  source 1..80: mol_type = other DNA
ttttcagttgtatagattgtggagattttctcccactctgtgggttgactgtttactctgctgactgttccttttgttgt

SEQ ID NO: 38244 - DNA, 80 bp, synthetic construct
  misc_feature 1..80: note = Artificially Synthesized Probe
  source 1..80: mol_type = other DNA
catttatcagatctaagagctttttggatgagtcctgagggttttctaggtatatgatcatattattagtgaacagcaac

SEQ ID NO: 38245 - DNA, 80 bp, synthetic construct
  misc_feature 1..80: note = Artificially Synthesized Probe
  source 1..80: mol_type = other DNA
aattcagctgtgaatccatttggttctggactttttttgttggcagtttttttaattactgtttcagtgtcgctgcttgt

SEQ ID NO: 38246 - DNA, 80 bp, synthetic construct
  misc_feature 1..80: note = Artificially Synthesized Probe
  source 1..80: mol_type = other DNA
gtgtggagtatcttttcccacccctttacagtaagtttatgtgaatccttatgtgttaggtgagtctcttgaagacaaca

SEQ ID NO: 38247 - DNA, 80 bp, synthetic construct
  misc_feature 1..80: note = Artificially Synthesized Probe
  source 1..80: mol_type = other DNA
gcatttttatttggatgtctagatttccagcaataccaggaaagttttcctcaattattccctcaagtaagctttccaaa

SEQ ID NO: 38248 - DNA, 80 bp, synthetic construct
  misc_feature 1..80: note = Artificially Synthesized Probe
  source 1..80: mol_type = other DNA
ggttatgcccttctggggttagccacccagtgcggctactgggctccaggctggtattggggaatgtctgcagaaagtcc

SEQ ID NO: 38249 - DNA, 80 bp, synthetic construct
  misc_feature 1..80: note = Artificially Synthesized Probe
  source 1..80: mol_type = other DNA
ccgtctcctgtgatctggatttttcaggttccccggtggggatgtatgttcagaggcagacttttccccctctcacactt

SEQ ID NO: 38250 - DNA, 80 bp, synthetic construct
  misc_feature 1..80: note = Artificially Synthesized Probe
  source 1..80: mol_type = other DNA
agcagggaatcactggatgaaaggattaatgtgtctgtgatttttgttagatggtttcagattgccgtctgtagcttgta

SEQ ID NO: 38251 - DNA, 80 bp, synthetic construct
  misc_feature 1..80: note = Artificially Synthesized Probe
  source 1..80: mol_type = other DNA
ttgcaaatatctcctcccattccgaggaaatctttcaaggctggtggtatgattgaaaataactggtagtggggctcctt

SEQ ID NO: 38252 - DNA, 80 bp, synthetic construct
  misc_feature 1..80: note = Artificially Synthesized Probe
  source 1..80: mol_type = other DNA
gagaaataaaaatcaaaacttctttaagctggtaaagtgaggggcccaccagcagtgatctcctgatgccttactggaaa

SEQ ID NO: 38253 - DNA, 80 bp, synthetic construct
  misc_feature 1..80: note = Artificially Synthesized Probe
  source 1..80: mol_type = other DNA
ttcaactcaatccacagagcaccaaatgtttaatgggagccaaggtaggactgagcattgaacttccagctatgcaactc

SEQ ID NO: 38254 - DNA, 80 bp, synthetic construct
  misc_feature 1..80: note = Artificially Synthesized Probe
  source 1..80: mol_type = other DNA
atggctgtcagttcggtaaagtcaccctctccttctactctggtattaccacgagaattgaaatttttaagcagaaaaaa

SEQ ID NO: 38255 - DNA, 80 bp, synthetic construct
  misc_feature 1..80: note = Artificially Synthesized Probe
  source 1..80: mol_type = other DNA
aacaaaaaaaaaaaacaagagcagataagtagataagtagatgtaccagttgtccatgaaaatgcagcaaacacctataa

SEQ ID NO: 38256 - DNA, 80 bp, synthetic construct
  misc_feature 1..80: note = Artificially Synthesized Probe
  source 1..80: mol_type = other DNA
gttttgccatattggccagtctggtctcgaactcctggcctcaagtgtctgcccacctcagcctcccgaagtgctgggat

SEQ ID NO: 38257 - DNA, 80 bp, synthetic construct
  misc_feature 1..80: note = Artificially Synthesized Probe
  source 1..80: mol_type = other DNA
aaaaaaggagcactgtgacagtgctccacaccaacaaagcaatctccacaccaacaaagcaatctccacaccaacaaagc

SEQ ID NO: 38258 - DNA, 80 bp, synthetic construct
  misc_feature 1..80: note = Artificially Synthesized Probe
  source 1..80: mol_type = other DNA
cattctcactgcttcccaggcagactgtgaggacttcacttaagcttcaaagtctcttcttcacggacatagctaaacat

SEQ ID NO: 38259 - DNA, 80 bp, synthetic construct
  misc_feature 1..80: note = Artificially Synthesized Probe
  source 1..80: mol_type = other DNA
caagggaaacaactggaattcaaaaggaaagctcttggtcagacacagtggttcatgcctgtaatcccagcacttttggg

SEQ ID NO: 38260 - DNA, 80 bp, synthetic construct
  misc_feature 1..80: note = Artificially Synthesized Probe
  source 1..80: mol_type = other DNA
agtggcacaatcacagctcattacaaccctaacctgctgggctcaagccatcctcccacttcagctccccaagtggctgg

SEQ ID NO: 38261 - DNA, 80 bp, synthetic construct
  misc_feature 1..80: note = Artificially Synthesized Probe
  source 1..80: mol_type = other DNA
cattaaattgaccaatgaagtgacaagttcatctgtctcaacagaatattttatctgtctcccaacactgaactaatatc

SEQ ID NO: 38262 - DNA, 80 bp, synthetic construct
  misc_feature 1..80: note = Artificially Synthesized Probe
  source 1..80: mol_type = other DNA
aaaaatggtaacaaatcccatttacatacatactatgagacaacatcccagtgtaaacgtacttgactacttccacacaa

SEQ ID NO: 38263 - DNA, 80 bp, synthetic construct
  misc_feature 1..80: note = Artificially Synthesized Probe
  source 1..80: mol_type = other DNA
aggaagacccttcctctacaaaaaaatttaaaaattagctaggtatggtggtgcatgcctgtggtgccagctattccaga

SEQ ID NO: 38264 - DNA, 80 bp, synthetic construct
  misc_feature 1..80: note = Artificially Synthesized Probe
  source 1..80: mol_type = other DNA
cacttaaacctggaaggtggaggttgcagtgagccaagatcacaccattgcactccagcctgggtgacagagtgagattc

SEQ ID NO: 38265 - DNA, 80 bp, synthetic construct
  misc_feature 1..80: note = Artificially Synthesized Probe
  source 1..80: mol_type = other DNA
caaccttctggagaatttagagcaaatgcaaatttaggagacttctacacacaaatacgaagtctgaatcccccaaacat

SEQ ID NO: 38266 - DNA, 80 bp, synthetic construct
  misc_feature 1..80: note = Artificially Synthesized Probe
  source 1..80: mol_type = other DNA
gtaggttttctcaacagtatctcaaaatgttcgtgaccacccgagtggcaataaggatgtaacttacaaaattggcagca

SEQ ID NO: 38267 - DNA, 80 bp, synthetic construct
  misc_feature 1..80: note = Artificially Synthesized Probe
  source 1..80: mol_type = other DNA
ttgacaccattaatgcacttgtgcatcgtaccaacctgtactttcacgtttaaaagctctgcagaactaaatagactttt

SEQ ID NO: 38268 - DNA, 80 bp, synthetic construct
  misc_feature 1..80: note = Artificially Synthesized Probe
  source 1..80: mol_type = other DNA
ccgccctccacccaggtaatcaggcccccggccggggtccgaggaccagtggccggcccagaccgcagtctccaggctcc

SEQ ID NO: 38269 - DNA, 80 bp, synthetic construct
  misc_feature 1..80: note = Artificially Synthesized Probe
  source 1..80: mol_type = other DNA
aattgtaaatcactcagtggcacacacactctccactccctttacctggcttcagtgtactcacctagcaaaagtccaat

SEQ ID NO: 38270 - DNA, 80 bp, synthetic construct
  misc_feature 1..80: note = Artificially Synthesized Probe
  source 1..80: mol_type = other DNA
cccaaaagactatttcacacctcagtcataatgccagccccttcttcctaaacctccctctcagcagttgacttttattg

SEQ ID NO: 38271 - DNA, 80 bp, synthetic construct
  misc_feature 1..80: note = Artificially Synthesized Probe
  source 1..80: mol_type = other DNA
cccgcccccacctctccagcctcacccccatcctccatcctcactcccatgccatgttcagccctactccccaccctgag

SEQ ID NO: 38272 - DNA, 80 bp, synthetic construct
  misc_feature 1..80: note = Artificially Synthesized Probe
  source 1..80: mol_type = other DNA
acccggcctatcatccttatgattttcttccaagcagttaatgcagcctgtcattatttgttaatctgtgtacttgacta

SEQ ID NO: 38273 - DNA, 80 bp, synthetic construct
  misc_feature 1..80: note = Artificially Synthesized Probe
  source 1..80: mol_type = other DNA
aaaaaaaaaagaatcttggcccataaaagaatgttggcctataaacacataaacattagccattgctactactgtcatta

SEQ ID NO: 38274 - DNA, 80 bp, synthetic construct
  misc_feature 1..80: note = Artificially Synthesized Probe
  source 1..80: mol_type = other DNA
tggaaggaagccaaggctgcagttagatatgatcacgcggcgacagagtgagatcctgtcttaaacaaaacaaaacgaaa

SEQ ID NO: 38275 - DNA, 80 bp, synthetic construct
  misc_feature 1..80: note = Artificially Synthesized Probe
  source 1..80: mol_type = other DNA
cctcccagagtgccgagattacaggcgtgagccaccgcgcccggcctacccttgaagaccccgcagccaaggtcctccgg

SEQ ID NO: 38276 - DNA, 80 bp, synthetic construct
  misc_feature 1..80: note = Artificially Synthesized Probe
  source 1..80: mol_type = other DNA
attttatagatcagcttaactgaagcctggagattgcagttactggcccaagacctcccatcaaaagtcagagggtaagg

SEQ ID NO: 38277 - DNA, 80 bp, synthetic construct
  misc_feature 1..80: note = Artificially Synthesized Probe
  source 1..80: mol_type = other DNA
ctcagcatgtcttcagaggacgacctggcagtggattctccagcacctccctagggcaccttggccccaaatgtgaaccc

SEQ ID NO: 38278 - DNA, 80 bp, synthetic construct
  misc_feature 1..80: note = Artificially Synthesized Probe
  source 1..80: mol_type = other DNA
gctgggacaaacacgcgcagtgacacgcggcggctgcggttcccgcgctggccgcggtcgggctctggcgctcctgagcc

SEQ ID NO: 38279 - DNA, 80 bp, synthetic construct
  misc_feature 1..80: note = Artificially Synthesized Probe
  source 1..80: mol_type = other DNA
aaaaaaaaaaaaaaagaaagttaaggacaaacggcaaactcacactgcctgacgcagggcctggtttctcttccttgaag

SEQ ID NO: 38280 - DNA, 80 bp, synthetic construct
  misc_feature 1..80: note = Artificially Synthesized Probe
  source 1..80: mol_type = other DNA
agcactaaggacagataagggatcttgtccacagatgctgacatataattaacacttaagtagaagaataaatcgtttca

SEQ ID NO: 38281 - DNA, 80 bp, synthetic construct
  misc_feature 1..80: note = Artificially Synthesized Probe
  source 1..80: mol_type = other DNA
ttgtacctattgacggtctcgtcaaagtgacggtaaaggcctattctcttgttgaccagggtcaagacctgctctgtgat

SEQ ID NO: 38282 - DNA, 80 bp, synthetic construct
  misc_feature 1..80: note = Artificially Synthesized Probe
  source 1..80: mol_type = other DNA
tcacagtccagtaaggcagacagatagatgtgaacaaggatgataatgtcagtgtgccctgcatatatattacagcagtc

SEQ ID NO: 38283 - DNA, 80 bp, synthetic construct
  misc_feature 1..80: note = Artificially Synthesized Probe
  source 1..80: mol_type = other DNA
tgtgaaacccaagtatacaaaaagtcagccctccacatatttggtttcagttccctcaaacactgtattgagtactgtat

SEQ ID NO: 38284 - DNA, 80 bp, synthetic construct
  misc_feature 1..80: note = Artificially Synthesized Probe
  source 1..80: mol_type = other DNA
aggaaggaagaaaagagcaagaggatgacctgaggataacagcagtgcagcctggggaggaccaaggagccacggagcct

SEQ ID NO: 38285 - DNA, 80 bp, synthetic construct
  misc_feature 1..80: note = Artificially Synthesized Probe
  source 1..80: mol_type = other DNA
gcacggctgatttcatagggactatcaatttcaatgttcctggaagaagatgggaataaaatatagcctccaaccaacta

SEQ ID NO: 38286 - DNA, 80 bp, synthetic construct
  misc_feature 1..80: note = Artificially Synthesized Probe
  source 1..80: mol_type = other DNA
catgtgactcaagagaggccaagtagatgttccctgataaagtaaatctagagaaaagtgacacaaagactgtgccccta

SEQ ID NO: 38287 - DNA, 80 bp, synthetic construct
  misc_feature 1..80: note = Artificially Synthesized Probe
  source 1..80: mol_type = other DNA
tataaaaattagtcaggtgtggtggcacatgcctgtaatcccagcaacttgggaagctgaggtaagaaaatcactggaac

SEQ ID NO: 38288 - DNA, 80 bp, synthetic construct
  misc_feature 1..80: note = Artificially Synthesized Probe
  source 1..80: mol_type = other DNA
ttttcatttttaaaaatttttttgtagagacccgttttcaccatgttgccccggctggtctcaaactcctgagtgcaagc

SEQ ID NO: 38289 - DNA, 80 bp, synthetic construct
  misc_feature 1..80: note = Artificially Synthesized Probe
  source 1..80: mol_type = other DNA
gtggatcacctgaggtcaggagttcaagaccaacctggccaacatggtgaaaccccatctctactagaaatacaaaaaat

SEQ ID NO: 38290 - DNA, 80 bp, synthetic construct
  misc_feature 1..80: note = Artificially Synthesized Probe
  source 1..80: mol_type = other DNA
ctttccccacaaaggtttgcgtcgacttctcaatcaagggtgctaactacccaaattcttctaaacagtaaataattaag

SEQ ID NO: 38291 - DNA, 80 bp, synthetic construct
  misc_feature 1..80: note = Artificially Synthesized Probe
  source 1..80: mol_type = other DNA
gtttaggctgggcatggtggctcacgcctgtaatcccagcactttgagaggccaaggcggccgggcgcggtggctcatgc

SEQ ID NO: 38292 - DNA, 80 bp, synthetic construct
  misc_feature 1..80: note = Artificially Synthesized Probe
  source 1..80: mol_type = other DNA
ccccttaagcacagctcctgtgtgctttaagtccacattttcttccacagcaatattaccccagtgagagacttcaatga

SEQ ID NO: 38293 - DNA, 80 bp, synthetic construct
  misc_feature 1..80: note = Artificially Synthesized Probe
  source 1..80: mol_type = other DNA
aaatactacctctcaataaggcccaacacaccttgcttcccaaaagtccatgaaaaggacaagatctattttgttagctc

SEQ ID NO: 38294 - DNA, 80 bp, synthetic construct
  misc_feature 1..80: note = Artificially Synthesized Probe
  source 1..80: mol_type = other DNA
gcgcctgtagtcccagatactaaggaggctgaggtaggagaatcgcttgaacccgggaggcggaggctgcagtgagccga

SEQ ID NO: 38295 - DNA, 80 bp, synthetic construct
  misc_feature 1..80: note = Artificially Synthesized Probe
  source 1..80: mol_type = other DNA
actcagtttgaagtaagtaaaagaaatcatgcagttagagaaagcacagctcagagtggcaaggctgtcatcttcacagt

SEQ ID NO: 38296 - DNA, 80 bp, synthetic construct
  misc_feature 1..80: note = Artificially Synthesized Probe
  source 1..80: mol_type = other DNA
cacacacacacacacacacacacgtgtatatataaaaaacaaaatggtacacctggccttatatatatacgtgtgtgtat

SEQ ID NO: 38297 - DNA, 80 bp, synthetic construct
  misc_feature 1..80: note = Artificially Synthesized Probe
  source 1..80: mol_type = other DNA
gtatagaagtaggtaaaaagacatgactgctgagatttgctttaaaatcctctagcaaaaaggccagggaccatggctca

SEQ ID NO: 38298 - DNA, 80 bp, synthetic construct
  misc_feature 1..80: note = Artificially Synthesized Probe
  source 1..80: mol_type = other DNA
atcccccaaggagaaacaagacccccatggagtcatttcactgcaggttaaacacttttgggatgaccttagaaatgact

SEQ ID NO: 38299 - DNA, 80 bp, synthetic construct
  misc_feature 1..80: note = Artificially Synthesized Probe
  source 1..80: mol_type = other DNA
ggttcaagagattctattgcctcagcctcccgagtagctgggactactggcacctgccaccatgtcctgttaataaaaga

SEQ ID NO: 38300 - DNA, 80 bp, synthetic construct
  misc_feature 1..80: note = Artificially Synthesized Probe
  source 1..80: mol_type = other DNA
gtatttcaaggaatgttcaacaaaatgttaatggtaactgtctcaaggttgtagaataagtttagtttgtcttttccaat

SEQ ID NO: 38301 - DNA, 80 bp, synthetic construct
  misc_feature 1..80: note = Artificially Synthesized Probe
  source 1..80: mol_type = other DNA
ttatcattcatgatcccaagtcttgatctctcttaataccactgccatctgatcaactctaagctagaaacccaggcatc

SEQ ID NO: 38302 - DNA, 80 bp, synthetic construct
  misc_feature 1..80: note = Artificially Synthesized Probe
  source 1..80: mol_type = other DNA
aaacacaccatgaaatgtcaaccctccgtatctttacagatatctctgcctgaaatgttccttccattccattagccttc

SEQ ID NO: 38303 - DNA, 80 bp, synthetic construct
  misc_feature 1..80: note = Artificially Synthesized Probe
  source 1..80: mol_type = other DNA
tagagccaataaacacagacagggtactcagacagcctcagagagggagaggagtctcttaaagcaagagaaagcaattt

SEQ ID NO: 38304 - DNA, 80 bp, synthetic construct
  misc_feature 1..80: note = Artificially Synthesized Probe
  source 1..80: mol_type = other DNA
gaggctgaggttgcagtgagccgagatcacgccactgcactccagtctgggcaacaagaccaagactccatctccaaaaa

SEQ ID NO: 38305 - DNA, 80 bp, synthetic construct
  misc_feature 1..80: note = Artificially Synthesized Probe
  source 1..80: mol_type = other DNA
ttctcacataaagctctgtggaaccaggagggagaactgatctgatatagaaagtaactactttcttcctataaaacaaa

SEQ ID NO: 38306 - DNA, 80 bp, synthetic construct
  misc_feature 1..80: note = Artificially Synthesized Probe
  source 1..80: mol_type = other DNA
cccatatgatcccaaccctgacataacctttaacaagagacaaggtatattgtttgtcagcttaccttttacccttaatt

SEQ ID NO: 38307 - DNA, 80 bp, synthetic construct
  misc_feature 1..80: note = Artificially Synthesized Probe
  source 1..80: mol_type = other DNA
tgtctcaaaaaaagaaatacacacatacacaaaaagattacacttccaaatatacttcccaaaggcctctttcttgatgc

SEQ ID NO: 38308 - DNA, 80 bp, synthetic construct
  misc_feature 1..80: note = Artificially Synthesized Probe
  source 1..80: mol_type = other DNA
aaaaaaaaaaaaaatggttaacagtggcaaaatacccttggggaggagccaatgaccactgtttggggtaccctcacagc

SEQ ID NO: 38309 - DNA, 80 bp, synthetic construct
  misc_feature 1..80: note = Artificially Synthesized Probe
  source 1..80: mol_type = other DNA
ccactggctcctagtcagtaaccaccatggtcccttctgctagctcctaaaattctacaagggtttgaaaataacccact

SEQ ID NO: 38310 - DNA, 80 bp, synthetic construct
  misc_feature 1..80: note = Artificially Synthesized Probe
  source 1..80: mol_type = other DNA
acacaacttacggaataagctggagccctgacttactctgcactgtaagaccgcatgtaaggggctaaataacttaacct

SEQ ID NO: 38311 - DNA, 80 bp, synthetic construct
  misc_feature 1..80: note = Artificially Synthesized Probe
  source 1..80: mol_type = other DNA
ccaacattttctttggtgatcactgaaatacctggaaacatttaagccaaacacagccatttattgccgaggtgtaagaa

SEQ ID NO: 38312 - DNA, 80 bp, synthetic construct
  misc_feature 1..80: note = Artificially Synthesized Probe
  source 1..80: mol_type = other DNA
tggagccgccgcccaggtgcgccaggaccacctcggccgtcaccttagccaggtggctgcttaggtccactgtgcgcttc

SEQ ID NO: 38313 - DNA, 80 bp, synthetic construct
  misc_feature 1..80: note = Artificially Synthesized Probe
  source 1..80: mol_type = other DNA
cagccgcgagtgtacttattattactagttttcacttacctaatttttacaggagcggcccttgcctaggtctctactct

SEQ ID NO: 38314 - DNA, 80 bp, synthetic construct
  misc_feature 1..80: note = Artificially Synthesized Probe
  source 1..80: mol_type = other DNA
ctgtggtattgccacaaaattattgaaaatccattacctcaatctagtcataaatatcagacaaggccaggcacagtggc

SEQ ID NO: 38315 - DNA, 80 bp, synthetic construct
  misc_feature 1..80: note = Artificially Synthesized Probe
  source 1..80: mol_type = other DNA
tcagtaaggtctttatgaccagtattttgtgccgaccttctatctcatcctgttgagaggtgacagcgtgcgccctccct

SEQ ID NO: 38316 - DNA, 80 bp, synthetic construct
  misc_feature 1..80: note = Artificially Synthesized Probe
  source 1..80: mol_type = other DNA
ttcactcctgaagccagcgagaccacaaacctaccgggaggaacgaacaactccagacgcgcctccttaagagctgttaa

SEQ ID NO: 38317 - DNA, 80 bp, synthetic construct
  misc_feature 1..80: note = Artificially Synthesized Probe
  source 1..80: mol_type = other DNA
aggatcacttgggcctgggaggttgtagctgcagtgagctgtgatcatgacactgcactccaccctggatgacaaagtga

SEQ ID NO: 38318 - DNA, 80 bp, synthetic construct
  misc_feature 1..80: note = Artificially Synthesized Probe
  source 1..80: mol_type = other DNA
aggtcaagggatcgaaaccaggctgggcgcggtggctcacgcctgtaatcccacactttgggaggcctaggcgggcagat

SEQ ID NO: 38319 - DNA, 80 bp, synthetic construct
  misc_feature 1..80: note = Artificially Synthesized Probe
  source 1..80: mol_type = other DNA
agtcttcttttttggggattcctcttattttactgttcggttttacccatcttcaatattttgcactttgtcttgaatca

SEQ ID NO: 38320 - DNA, 80 bp, synthetic construct
  misc_feature 1..80: note = Artificially Synthesized Probe
  source 1..80: mol_type = other DNA
tgagctcccttgtccctatcatgctcaattttgattctgttgagtagtttctcctcattgtagggcactgtcacagaagg

SEQ ID NO: 38321 - DNA, 80 bp, synthetic construct
  misc_feature 1..80: note = Artificially Synthesized Probe
  source 1..80: mol_type = other DNA
cacccaattctttattattttgtaagatgttcacataagggaatgctgggtgaaagatgccagatgcaaattggcagctg

SEQ ID NO: 38322 - DNA, 80 bp, synthetic construct
  misc_feature 1..80: note = Artificially Synthesized Probe
  source 1..80: mol_type = other DNA
aaaaaagatatgcaaaccctgcggcctaccaatgtcattcctaaacatataccctagagaaatgtgagcacatgtacccc

SEQ ID NO: 38323 - DNA, 80 bp, synthetic construct
  misc_feature 1..80: note = Artificially Synthesized Probe
  source 1..80: mol_type = other DNA
tagaagggagtgtctggggttaaaataaggggttcttattatgcagatgaaattcaggttctattatgcaggcttcaaag

SEQ ID NO: 38324 - DNA, 80 bp, synthetic construct
  misc_feature 1..80: note = Artificially Synthesized Probe
  source 1..80: mol_type = other DNA
tccagcatgaaagcatgaggagctccatgacctattctccagtaagacttgtgaaaactataaagacccaactacttaaa

SEQ ID NO: 38325 - DNA, 80 bp, synthetic construct
  misc_feature 1..80: note = Artificially Synthesized Probe
  source 1..80: mol_type = other DNA
agaccagctcggtgggggagaccctaatccagcagcgctagaggaattaaagacacacacacagaaatatagaggtgtga

SEQ ID NO: 38326 - DNA, 80 bp, synthetic construct
  misc_feature 1..80: note = Artificially Synthesized Probe
  source 1..80: mol_type = other DNA
ttaaagtgaaaggcagaactggagaaccgctagtttataagagggaatggtgaataagacaggtgagaagaggcctccta

SEQ ID NO: 38327 - DNA, 80 bp, synthetic construct
  misc_feature 1..80: note = Artificially Synthesized Probe
  source 1..80: mol_type = other DNA
gaaagaaaataaagaaaaggaagaaagaggatttactctgtgagagaaaagacagccttcactaaaagattccagtaagt

SEQ ID NO: 38328 - DNA, 80 bp, synthetic construct
  misc_feature 1..80: note = Artificially Synthesized Probe
  source 1..80: mol_type = other DNA
tttttccccaaaacataaaggatgttgaattaaagataagaaacatgtgggggagctctctgccttccctgtttgcctag

SEQ ID NO: 38329 - DNA, 80 bp, synthetic construct
  misc_feature 1..80: note = Artificially Synthesized Probe
  source 1..80: mol_type = other DNA
gggtggtgggtgcctgtaatcccagctactcaagagactgaggcaggagaattgcttgaacccagaaggcggaggttgca

SEQ ID NO: 38330 - DNA, 80 bp, synthetic construct
  misc_feature 1..80: note = Artificially Synthesized Probe
  source 1..80: mol_type = other DNA
ttctttcactactttacttttttttgagacgaagtttcattcttcttgcccaggctggactgcaacggctggacttgctc

SEQ ID NO: 38331 - DNA, 80 bp, synthetic construct
  misc_feature 1..80: note = Artificially Synthesized Probe
  source 1..80: mol_type = other DNA
tgtttcaagggcgtttcattgaggctatcagaaactacagtaacactgatcctgcctcaagggaaggacaaacccttttc

SEQ ID NO: 38332 - DNA, 80 bp, synthetic construct
  misc_feature 1..80: note = Artificially Synthesized Probe
  source 1..80: mol_type = other DNA
actggccattggaagagggactgcccaccgcactggaaggagctatccgcgcccgaaccaatgatggctgaaatagccag

SEQ ID NO: 38333 - DNA, 80 bp, synthetic construct
  misc_feature 1..80: note = Artificially Synthesized Probe
  source 1..80: mol_type = other DNA
gacgaggacacttacggaaatatcaggctttgttgttagacactcctgatgtaacacttaaaagtatgccagacttggaa

SEQ ID NO: 38334 - DNA, 80 bp, synthetic construct
  misc_feature 1..80: note = Artificially Synthesized Probe
  source 1..80: mol_type = other DNA
ttagtagagacaaggtttcactatgttggccaggatggtctctatctcctgacctcaggcgatccacccgcctcagcctc

SEQ ID NO: 38335 - DNA, 80 bp, synthetic construct
  misc_feature 1..80: note = Artificially Synthesized Probe
  source 1..80: mol_type = other DNA
gactaacctgggcaagatagtgaggcccagtttctaccaaaaaatttttttttttaaattatgtgggcatggtggcaaat

SEQ ID NO: 38336 - DNA, 80 bp, synthetic construct
  misc_feature 1..80: note = Artificially Synthesized Probe
  source 1..80: mol_type = other DNA
agacaaggtctcgctctgtcacccaggctggagtgcaggggcactcattgcaacctccagcttccaggctcacaagatcc

SEQ ID NO: 38337 - DNA, 80 bp, synthetic construct
  misc_feature 1..80: note = Artificially Synthesized Probe
  source 1..80: mol_type = other DNA
tactcggccaatattttgtattttttgtagagatagggtttcaccatgttggccaggctggtcttgaactcctggcctca

SEQ ID NO: 38338 - DNA, 80 bp, synthetic construct
  misc_feature 1..80: note = Artificially Synthesized Probe
  source 1..80: mol_type = other DNA
ctgctgcagtgtgggtttgtgggcgcactggctgatgtggctgatctgctgggcaatgtggctaatctgctgtagtgtgg

SEQ ID NO: 38339 - DNA, 80 bp, synthetic construct
  misc_feature 1..80: note = Artificially Synthesized Probe
  source 1..80: mol_type = other DNA
gagttcctgtccggcataccccctatatctaattataataaaggtttaaagccttgcacctggtaccgttgctcttcttg

SEQ ID NO: 38340 - DNA, 80 bp, synthetic construct
  misc_feature 1..80: note = Artificially Synthesized Probe
  source 1..80: mol_type = other DNA
aaggctccccaagccagggatctggtgaaatgaggcaaaaagtttttaaattttaaaaaaagttgttttagaaatgaggt

SEQ ID NO: 38341 - DNA, 80 bp, synthetic construct
  misc_feature 1..80: note = Artificially Synthesized Probe
  source 1..80: mol_type = other DNA
ttgtattttttgtagagacagcgtttcaccatgttgctcaggcttgatgtgtcatttttcaaaaatcaagccagtcccct

SEQ ID NO: 38342 - DNA, 80 bp, synthetic construct
  misc_feature 1..80: note = Artificially Synthesized Probe
  source 1..80: mol_type = other DNA
catgcccagttaatttttgttttgttttgttttgttttttgagacagagtctggctctgtcgcccaggctggagtggagt

SEQ ID NO: 38343 - DNA, 80 bp, synthetic construct
  misc_feature 1..80: note = Artificially Synthesized Probe
  source 1..80: mol_type = other DNA
tcactgtccttatttgtcaaatgggaatgctagtactaatcacctcacagagttgtagtaaaaactgcaggctggtgtag

SEQ ID NO: 38344 - DNA, 80 bp, synthetic construct
  misc_feature 1..80: note = Artificially Synthesized Probe
  source 1..80: mol_type = other DNA
ggctcactgcgcaagctcacacccagtcccaggaagcgagccccacgtcgccccagctctgcattcacagccgccaagcg

SEQ ID NO: 38345 - DNA, 80 bp, synthetic construct
  misc_feature 1..80: note = Artificially Synthesized Probe
  source 1..80: mol_type = other DNA
accatgtggtatccccatttacaactctatgacttttacccaatgtaccatgccatttgtatctgttttcacaacccctt

SEQ ID NO: 38346 - DNA, 80 bp, synthetic construct
  misc_feature 1..80: note = Artificially Synthesized Probe
  source 1..80: mol_type = other DNA
gaaaaggtgtcctggaagccactagatttgggaatcatgatcttgtggcgaactaactcaatgcacacaacttccgctac

SEQ ID NO: 38347 - DNA, 80 bp, synthetic construct
  misc_feature 1..80: note = Artificially Synthesized Probe
  source 1..80: mol_type = other DNA
gtgcatatataaatacccgctttagttcttttccacagtgagaaggaagaggactcactatcctgggacctcctacacat

SEQ ID NO: 38348 - DNA, 80 bp, synthetic construct
  misc_feature 1..80: note = Artificially Synthesized Probe
  source 1..80: mol_type = other DNA
gtcgttgcccaggcgcgtgtagtacttttctatgatgacccgggccgccttcttcacggttttggtgcgaacgcggccct

SEQ ID NO: 38349 - DNA, 80 bp, synthetic construct
  misc_feature 1..80: note = Artificially Synthesized Probe
  source 1..80: mol_type = other DNA
cataaggcagactttacctccaaattctggtcccctgtcctgtgttttaacttgtgttaagatcagactcggctttctct

SEQ ID NO: 38350 - DNA, 80 bp, synthetic construct
  misc_feature 1..80: note = Artificially Synthesized Probe
  source 1..80: mol_type = other DNA
cacacatacatattccactgttggtctttagcagagcacagcttcatttattgatacattgagtaggctgtatagtgtca

SEQ ID NO: 38351 - DNA, 80 bp, synthetic construct
  misc_feature 1..80: note = Artificially Synthesized Probe
  source 1..80: mol_type = other DNA
tgacctcttgctgtcttttttagtccaagctggcagcgtttctgctcataaaacattctgaagaaccttgtgggccctct

SEQ ID NO: 38352 - DNA, 80 bp, synthetic construct
  misc_feature 1..80: note = Artificially Synthesized Probe
  source 1..80: mol_type = other DNA
catattcttaccaacaatctgcttgtgatcatttagatatcctctaagacaatacaggttttctctactctacctcactt

SEQ ID NO: 38353 - DNA, 80 bp, synthetic construct
  misc_feature 1..80: note = Artificially Synthesized Probe
  source 1..80: mol_type = other DNA
acatttggaaagcgttatctaattggccacattttaaacgtggtggcttgcgtttcctttagtaccagggtacaatgaga

SEQ ID NO: 38354 - DNA, 80 bp, synthetic construct
  misc_feature 1..80: note = Artificially Synthesized Probe
  source 1..80: mol_type = other DNA
ttatatagaaaagttcatactccacatcttacagcgtttgaatggtgacagccattgaaaacattctgtatcttggagga

SEQ ID NO: 38355 - DNA, 80 bp, synthetic construct
  misc_feature 1..80: note = Artificially Synthesized Probe
  source 1..80: mol_type = other DNA
gagcaaagaacattaactcccaaaagaaagccaaatgtatcctttacttctgaaatatttgtgggagattttacaggcat

SEQ ID NO: 38356 - DNA, 80 bp, synthetic construct
  misc_feature 1..80: note = Artificially Synthesized Probe
  source 1..80: mol_type = other DNA
cagctacttgggaggctgaggcaaaagaatccttgaacctgggagtcagaggatgcagtgaggtaagatcatgccactgc

SEQ ID NO: 38357 - DNA, 80 bp, synthetic construct
  misc_feature 1..80: note = Artificially Synthesized Probe
  source 1..80: mol_type = other DNA
atagggcacaggcagagtagatttaggatagttttaaaggtcctaggattttcagaatgataaatgagcattggcttcaa

SEQ ID NO: 38358 - DNA, 80 bp, synthetic construct
  misc_feature 1..80: note = Artificially Synthesized Probe
  source 1..80: mol_type = other DNA
tgcaagcttctccaacccaccttattttattgttgttgttctgttttgttttgtcttaggcttttagcagcctgaagcca

SEQ ID NO: 38359 - DNA, 80 bp, synthetic construct
  misc_feature 1..80: note = Artificially Synthesized Probe
  source 1..80: mol_type = other DNA
gtactaacttaagtgtttccacacattcaccatccttgtttgaccaaaagtgaatcagaagtaacggctcaccttgaaga

SEQ ID NO: 38360 - DNA, 80 bp, synthetic construct
  misc_feature 1..80: note = Artificially Synthesized Probe
  source 1..80: mol_type = other DNA
ggcctagttcaaattcttgttctattactttgctgtctgaccttgggcaagtttcttaacctctctgtttcagtttcctc

SEQ ID NO: 38361 - DNA, 80 bp, synthetic construct
  misc_feature 1..80: note = Artificially Synthesized Probe
  source 1..80: mol_type = other DNA
catttacatagctcttactatgtgtgagacactattctcagtgctcacaagcatccatgaggcaggtactgtgcttacct

SEQ ID NO: 38362 - DNA, 80 bp, synthetic construct
  misc_feature 1..80: note = Artificially Synthesized Probe
  source 1..80: mol_type = other DNA
gtcaacagcaacatatgaagtggttgctgtgttccaggggcttttacagatattagctcagtgaattttaatcctcagaa

SEQ ID NO: 38363 - DNA, 80 bp, synthetic construct
  misc_feature 1..80: note = Artificially Synthesized Probe
  source 1..80: mol_type = other DNA
gtgatacatttaggagattttatatacttaggaaactaaaattgcctttagctacaggtaagctgcctaaatagtagtag

SEQ ID NO: 38364 - DNA, 80 bp, synthetic construct
  misc_feature 1..80: note = Artificially Synthesized Probe
  source 1..80: mol_type = other DNA
gcaaactcagacaaactaatagctgaagggggtagtggatttatttgtaaagttattaatttatgtactgcttggagcaa

SEQ ID NO: 38365 - DNA, 80 bp, synthetic construct
  misc_feature 1..80: note = Artificially Synthesized Probe
  source 1..80: mol_type = other DNA
tgcagtgagcctagatcacaccactgcactccagccggtgacagagcaagaccctgtctcaaaaaaaaaaaaaaaaaagt

SEQ ID NO: 38366 - DNA, 80 bp, synthetic construct
  misc_feature 1..80: note = Artificially Synthesized Probe
  source 1..80: mol_type = other DNA
ataacctgtttttcaatatgattacaaggtcccacagtatctccctttcacccacaaatgttagcatccatataaatacc

SEQ ID NO: 38367 - DNA, 80 bp, synthetic construct
  misc_feature 1..80: note = Artificially Synthesized Probe
  source 1..80: mol_type = other DNA
ttaactcaatctaagtagagttaggggtgtggggcctatcaacaaatgttttctaaaggaggtgatagctgagcagtctt

SEQ ID NO: 38368 - DNA, 80 bp, synthetic construct
  misc_feature 1..80: note = Artificially Synthesized Probe
  source 1..80: mol_type = other DNA
tcttttagatctgtggttccttgacggaggcactgtgggacatcaccaaatattttaaatatttatgggaaacactgata

SEQ ID NO: 38369 - DNA, 80 bp, synthetic construct
  misc_feature 1..80: note = Artificially Synthesized Probe
  source 1..80: mol_type = other DNA
atgggttttcaccatattgtgtaggctggtctcgaactcctggactcaagcgatccgcctacctcagtcaactaaagtgc

SEQ ID NO: 38370 - DNA, 80 bp, synthetic construct
  misc_feature 1..80: note = Artificially Synthesized Probe
  source 1..80: mol_type = other DNA
tttaatgaaaactttttaaaaatacagttaaaaagagagtaggctgagcacagtggctcatacctgtaatcccagcacgt

SEQ ID NO: 38371 - DNA, 80 bp, synthetic construct
  misc_feature 1..80: note = Artificially Synthesized Probe
  source 1..80: mol_type = other DNA
aatttgtcagcactttctcatccattgagtcagatgaagagtgtaatagcagctcacaccataaaagggttgagaactac

SEQ ID NO: 38372 - DNA, 80 bp, synthetic construct
  misc_feature 1..80: note = Artificially Synthesized Probe
  source 1..80: mol_type = other DNA
tgtgataatgagtggataaacccattcctcaaaagaaatggaggcttcgtggagctgcttttcataatatatgacagccc

SEQ ID NO: 38373 - DNA, 80 bp, synthetic construct
  misc_feature 1..80: note = Artificially Synthesized Probe
  source 1..80: mol_type = other DNA
aaaatctcactgacatgatttttgaatcatacattcattattcatcattctgtccctggttgcgggatgtggccttagac

SEQ ID NO: 38374 - DNA, 80 bp, synthetic construct
  misc_feature 1..80: note = Artificially Synthesized Probe
  source 1..80: mol_type = other DNA
acgtttttgattgtcacaactggaggaaagaggttgtcacaactggtatctagcagatagagcccagggatacagctgaa

SEQ ID NO: 38375 - DNA, 80 bp, synthetic construct
  misc_feature 1..80: note = Artificially Synthesized Probe
  source 1..80: mol_type = other DNA
aggaattttcctgtggtggaggcaagttggtcaatgctgcatgatgagaggccatatttatgtaatttcttaggaacgat

SEQ ID NO: 38376 - DNA, 80 bp, synthetic construct
  misc_feature 1..80: note = Artificially Synthesized Probe
  source 1..80: mol_type = other DNA
catattcgttcagtcagtgtttaccaagcaattgctctatgccagaaacttgtttacccacagtaaatacagcagtgaac

SEQ ID NO: 38377 - DNA, 80 bp, synthetic construct
  misc_feature 1..80: note = Artificially Synthesized Probe
  source 1..80: mol_type = other DNA
tgtaataatctgactctgacaattcagctggcacttagaatctattgttcctactacccttttgttgtccttcactcccc

SEQ ID NO: 38378 - DNA, 80 bp, synthetic construct
  misc_feature 1..80: note = Artificially Synthesized Probe
  source 1..80: mol_type = other DNA
attctcaacacaatagccagattgattctgatgaaacctacatcacgtcatgtcaccccatgatcaaaagcctgcatgat

SEQ ID NO: 38379 - DNA, 80 bp, synthetic construct
  misc_feature 1..80: note = Artificially Synthesized Probe
  source 1..80: mol_type = other DNA
tgcagttactcaagtccatgggtgctccctttatctttatcaagaactggaaggaactccctgctgttttagaaaaagag

SEQ ID NO: 38380 - DNA, 80 bp, synthetic construct
  misc_feature 1..80: note = Artificially Synthesized Probe
  source 1..80: mol_type = other DNA
ccagagcagagggaaaagggggtgggtgctacacacttttaaacaaccagatctcacaagcactcactaccaggaaagca

SEQ ID NO: 38381 - DNA, 80 bp, synthetic construct
  misc_feature 1..80: note = Artificially Synthesized Probe
  source 1..80: mol_type = other DNA
gcaacaccagggaatacagaaacccacgttaagttggccattctgacatgaatctatacttgaaaatgaaaacaatccca

SEQ ID NO: 38382 - DNA, 80 bp, synthetic construct
  misc_feature 1..80: note = Artificially Synthesized Probe
  source 1..80: mol_type = other DNA
aaaattaattggttcagaactgcctctttaatagactctgtggcttcccttgacactggaggatctttaaaatccaggtg

SEQ ID NO: 38383 - DNA, 80 bp, synthetic construct
  misc_feature 1..80: note = Artificially Synthesized Probe
  source 1..80: mol_type = other DNA
ctctggtcaaattttacttggcaataaatccttgcaaacgtcagtcatgtaagtgactaacaagactgaaataccacatt

SEQ ID NO: 38384 - DNA, 80 bp, synthetic construct
  misc_feature 1..80: note = Artificially Synthesized Probe
  source 1..80: mol_type = other DNA
cacacaattagcctatgtccccagtactagtatttacctgggaaatactccatggatgcacacattcacacaggcacatg

SEQ ID NO: 38385 - DNA, 80 bp, synthetic construct
  misc_feature 1..80: note = Artificially Synthesized Probe
  source 1..80: mol_type = other DNA
tgttactgaggtttccaggaagggagggagcacttttgttttcatttagaaagaagatgaaagtgaaaacagaatagtca

SEQ ID NO: 38386 - DNA, 80 bp, synthetic construct
  misc_feature 1..80: note = Artificially Synthesized Probe
  source 1..80: mol_type = other DNA
tcctacttattgcttgccccagagagtactgttaaatgtacagagactgggaatatatctaaatgtggagacactggtgc

SEQ ID NO: 38387 - DNA, 80 bp, synthetic construct
  misc_feature 1..80: note = Artificially Synthesized Probe
  source 1..80: mol_type = other DNA
tcaagttatgcatgttgagcaatcaaatctctgagtaagcctgaacgttgagacctggaaccaatgtgagtttgtgttaa

SEQ ID NO: 38388 - DNA, 80 bp, synthetic construct
  misc_feature 1..80: note = Artificially Synthesized Probe
  source 1..80: mol_type = other DNA
cctgctatatgctgcagtatttctccaccctgaaatagtatatgtaaactaaaaaaattttgtaaatctctggggttctt

SEQ ID NO: 38389 - DNA, 80 bp, synthetic construct
  misc_feature 1..80: note = Artificially Synthesized Probe
  source 1..80: mol_type = other DNA
tctctggaacaaagtaggaactcaggcattctctgtccttgttttgtaaccatagaacctacctggacttttccacacgt

SEQ ID NO: 38390 - DNA, 80 bp, synthetic construct
  misc_feature 1..80: note = Artificially Synthesized Probe
  source 1..80: mol_type = other DNA
gccattgatagcaggaaggtagtttttccacactcttcgagctaacaaaaacaatcaggggttagagtttacttgttggt

SEQ ID NO: 38391 - DNA, 80 bp, synthetic construct
  misc_feature 1..80: note = Artificially Synthesized Probe
  source 1..80: mol_type = other DNA
aaccaaaacaaaattgttttactcagaaaagaagctcaaatgttaataattaactgaagtctatgaaatcataagagtaa

SEQ ID NO: 38392 - DNA, 80 bp, synthetic construct
  misc_feature 1..80: note = Artificially Synthesized Probe
  source 1..80: mol_type = other DNA
caggattttagtccccgcaagtttaatataagagataaggcagtctttccaaacttgttgtagacatgtacacaaatata

SEQ ID NO: 38393 - DNA, 80 bp, synthetic construct
  misc_feature 1..80: note = Artificially Synthesized Probe
  source 1..80: mol_type = other DNA
taagagtaagagaatcttaccttgaacgtggcgaaatcccatctctactaagaatacaaaaatcagctgggcgcggtggc

SEQ ID NO: 38394 - DNA, 80 bp, synthetic construct
  misc_feature 1..80: note = Artificially Synthesized Probe
  source 1..80: mol_type = other DNA
gctagccaatcaggacaaatacagaatgtgaggtcccattccagccaatggaaaccggacacagcagtagggtggacgca

SEQ ID NO: 38395 - DNA, 80 bp, synthetic construct
  misc_feature 1..80: note = Artificially Synthesized Probe
  source 1..80: mol_type = other DNA
ctgagcacattcataacgattgtcttatgtcttaatctgctaattccatcatctttgtcacacttgtgtctgtttctact

SEQ ID NO: 38396 - DNA, 80 bp, synthetic construct
  misc_feature 1..80: note = Artificially Synthesized Probe
  source 1..80: mol_type = other DNA
ttccagaaccagtactcacttatggccaaaagcacaagtgccccataatgacaacataagttttagtgtagctactttag

SEQ ID NO: 38397 - DNA, 80 bp, synthetic construct
  misc_feature 1..80: note = Artificially Synthesized Probe
  source 1..80: mol_type = other DNA
gcagggcacacggtggctcatgcctgtaatcccagcactttggaaggccgaggggggcggatcacctgaggtgaggagtt

SEQ ID NO: 38398 - DNA, 80 bp, synthetic construct
  misc_feature 1..80: note = Artificially Synthesized Probe
  source 1..80: mol_type = other DNA
cagcctaagcaacatggtgaaaccctatctctacaaataaattaaaaaattagccagatgtggtagcatgtgcctgtagt

SEQ ID NO: 38399 - DNA, 80 bp, synthetic construct
  misc_feature 1..80: note = Artificially Synthesized Probe
  source 1..80: mol_type = other DNA
gtttcacgatgttggccaggttggaaattacgctgtttttgcagacaattttatctactcaatttcaccatgatcatttt

SEQ ID NO: 38400 - DNA, 80 bp, synthetic construct
  misc_feature 1..80: note = Artificially Synthesized Probe
  source 1..80: mol_type = other DNA
ggtcacaggttaaattaggtttctgtttctaataatttacccactttaacattaactttattctcaaattcgttacataa

SEQ ID NO: 38401 - DNA, 80 bp, synthetic construct
  misc_feature 1..80: note = Artificially Synthesized Probe
  source 1..80: mol_type = other DNA
tgtataaaattgtaatgtatctactgaattagtgcttaaaatagtacatggtgcaatggctcctatctttaatcccaaca

SEQ ID NO: 38402 - DNA, 80 bp, synthetic construct
  misc_feature 1..80: note = Artificially Synthesized Probe
  source 1..80: mol_type = other DNA
attctccctgggagcgaggtcacctataatttattattttaggaacaggtcaaatcacctgatcataatttatctaccag

SEQ ID NO: 38403 - DNA, 80 bp, synthetic construct
  misc_feature 1..80: note = Artificially Synthesized Probe
  source 1..80: mol_type = other DNA
cagctacttgggaagctgaggcaggagaatcactggaacccaggaagcagaagttgcggtggtgagctgagatcatgcca

SEQ ID NO: 38404 - DNA, 80 bp, synthetic construct
  misc_feature 1..80: note = Artificially Synthesized Probe
  source 1..80: mol_type = other DNA
gcgcgtgccaccatgcctgtctaattttttgtatttttagtagagacggggtttcaccgtgttagccaggatggtcttga

SEQ ID NO: 38405 - DNA, 80 bp, synthetic construct
  misc_feature 1..80: note = Artificially Synthesized Probe
  source 1..80: mol_type = other DNA
aaaaaaaagaactgctgggtaaagaagtctcatttggcttattaaaaactgctatttatggtgtacaagctactttatgg

SEQ ID NO: 38406 - DNA, 80 bp, synthetic construct
  misc_feature 1..80: note = Artificially Synthesized Probe
  source 1..80: mol_type = other DNA
ttgcttgagcctcggaggtagagattgtaatgaaccgagatcgcaccactgcactccagccagggtgacagtaaatggga

SEQ ID NO: 38407 - DNA, 80 bp, synthetic construct
  misc_feature 1..80: note = Artificially Synthesized Probe
  source 1..80: mol_type = other DNA
aacatccagaatagaaatgaaaaaggacaaggggaacaggattttgagagtactagtgagagggctgtagggatctgatc

SEQ ID NO: 38408 - DNA, 80 bp, synthetic construct
  misc_feature 1..80: note = Artificially Synthesized Probe
  source 1..80: mol_type = other DNA
aacaggttacacaacaccatgaacacactattaagacatgtgaagagcaaaggtcaagaacaaggaaacatacacacgtc

SEQ ID NO: 38409 - DNA, 80 bp, synthetic construct
  misc_feature 1..80: note = Artificially Synthesized Probe
  source 1..80: mol_type = other DNA
gcaatcctcccacctcaacctcctgagtacctgggggctacaggcataggccactatgcctggctcatttactttttaaa

SEQ ID NO: 38410 - DNA, 80 bp, synthetic construct
  misc_feature 1..80: note = Artificially Synthesized Probe
  source 1..80: mol_type = other DNA
aagggacctaatagtctaaagaggcaaatatgacatcagagtatgattgtagaatcaatgcactaataactttgggatgc

SEQ ID NO: 38411 - DNA, 80 bp, synthetic construct
  misc_feature 1..80: note = Artificially Synthesized Probe
  source 1..80: mol_type = other DNA
tttgagaccagactgggcaacatgggaagaccccgtctctacaaaagaaaaaatacaaaaataggccaggcacggtggct

SEQ ID NO: 38412 - DNA, 80 bp, synthetic construct
  misc_feature 1..80: note = Artificially Synthesized Probe
  source 1..80: mol_type = other DNA
ccaacatagtgaaaccccgagttgggatgagtatttaaagtgagcgagcgtagaaatactatgctcagccaagtgagtac

SEQ ID NO: 38413 - DNA, 80 bp, synthetic construct
  misc_feature 1..80: note = Artificially Synthesized Probe
  source 1..80: mol_type = other DNA
tttgtaattactgacagtgcatctctgacatttctaaaatgaagacaccttccttttctacaaactcagaaaatgccaat

SEQ ID NO: 38414 - DNA, 80 bp, synthetic construct
  misc_feature 1..80: note = Artificially Synthesized Probe
  source 1..80: mol_type = other DNA
ctctgtctcaaaacaacaacaaaaatttaaaaaattaaaacaaaaatcagtacagttttctcaacagtgtatcttttttc

SEQ ID NO: 38415 - DNA, 80 bp, synthetic construct
  misc_feature 1..80: note = Artificially Synthesized Probe
  source 1..80: mol_type = other DNA
ctccaccccctggattcaagagattctcctacctcagcctccccagtagcggggactacaggcacccgccaccactgtcc

SEQ ID NO: 38416 - DNA, 80 bp, synthetic construct
  misc_feature 1..80: note = Artificially Synthesized Probe
  source 1..80: mol_type = other DNA
attgcaccattgcactctagcctgggcgacagagcgagactctgtctccgtctcaaaaaataaataaattaattaaatta

SEQ ID NO: 38417 - DNA, 80 bp, synthetic construct
  misc_feature 1..80: note = Artificially Synthesized Probe
  source 1..80: mol_type = other DNA
ctaatggattggcattgccttctttaaatgcatcaagagctgtttagggattctcagcaaagcctatcattggctctgct

SEQ ID NO: 38418 - DNA, 80 bp, synthetic construct
  misc_feature 1..80: note = Artificially Synthesized Probe
  source 1..80: mol_type = other DNA
tacaattttgcctgtaacttctgcttttctgaaatttacccctccctttaaaaactcttgcttaggccaggcacagtggc

SEQ ID NO: 38419 - DNA, 80 bp, synthetic construct
  misc_feature 1..80: note = Artificially Synthesized Probe
  source 1..80: mol_type = other DNA
ttttccctcctgaacctattttcagggcctggcacaaaataggtacttaataaatatgatttgtaacatgaaggggtcct

SEQ ID NO: 38420 - DNA, 80 bp, synthetic construct
  misc_feature 1..80: note = Artificially Synthesized Probe
  source 1..80: mol_type = other DNA
acaaagtgagaccctatctctgaaaaaaaatttttttaattagcgaggtgtggtagtgtgcatgtgaagtcccagctact

SEQ ID NO: 38421 - DNA, 80 bp, synthetic construct
  misc_feature 1..80: note = Artificially Synthesized Probe
  source 1..80: mol_type = other DNA
gtctctacaaaaatacaaaaattagctgggcatagtggtgcacgcctgtagtgacagctactagggaggctgaggcagga

SEQ ID NO: 38422 - DNA, 80 bp, synthetic construct
  misc_feature 1..80: note = Artificially Synthesized Probe
  source 1..80: mol_type = other DNA
acccagctcctcttttcgcataatttcctcatcctttggatcacagctcaaatgtcatctcctgtcctaaccatcctacc

SEQ ID NO: 38423 - DNA, 80 bp, synthetic construct
  misc_feature 1..80: note = Artificially Synthesized Probe
  source 1..80: mol_type = other DNA
aggaaaaggtaggtttagaggggaaggtatacatctttaatactgtggtgtcagggtatctgtagataaatagttgggtt

SEQ ID NO: 38424 - DNA, 80 bp, synthetic construct
  misc_feature 1..80: note = Artificially Synthesized Probe
  source 1..80: mol_type = other DNA
gacttctcattactaagcactcaagtgaaaaaaaaaaaagaacttagaccaacatagtttagaaacaagtgctagtgatg

SEQ ID NO: 38425 - DNA, 80 bp, synthetic construct
  misc_feature 1..80: note = Artificially Synthesized Probe
  source 1..80: mol_type = other DNA
gagcgagactccatctcaaaaaaaaaaaaaaaaagaaaaaagataaacatagacacatagacacgaatagggccagggtc

SEQ ID NO: 38426 - DNA, 80 bp, synthetic construct
  misc_feature 1..80: note = Artificially Synthesized Probe
  source 1..80: mol_type = other DNA
atcagtggttaaggaactcaattcaacatgtgggatggattagaggcaatccagaaggcgattcattcccaacagttcaa

SEQ ID NO: 38427 - DNA, 80 bp, synthetic construct
  misc_feature 1..80: note = Artificially Synthesized Probe
  source 1..80: mol_type = other DNA
ttttctttctttctttttttttttttttcagacggggttgtgctctgttgcccaggctggagtgcactggcgtggtctcg

SEQ ID NO: 38428 - DNA, 80 bp, synthetic construct
  misc_feature 1..80: note = Artificially Synthesized Probe
  source 1..80: mol_type = other DNA
atctcagttacttaaacttaccttcctactatcccaaaggttaggcagatgacaaatgctgtttttcttctgtctctctc

SEQ ID NO: 38429 - DNA, 80 bp, synthetic construct
  misc_feature 1..80: note = Artificially Synthesized Probe
  source 1..80: mol_type = other DNA
taaataaataaatctctgaacacacagatattgcttaaatagcttgaacccgggaggcagaggttgcagcaagccaaggt

SEQ ID NO: 38430 - DNA, 80 bp, synthetic construct
  misc_feature 1..80: note = Artificially Synthesized Probe
  source 1..80: mol_type = other DNA
ttagtaaagttctgaggcaaatgatgaaaacagggttagtataaaatttagtatttagttatttgaatttttactgacct

SEQ ID NO: 38431 - DNA, 80 bp, synthetic construct
  misc_feature 1..80: note = Artificially Synthesized Probe
  source 1..80: mol_type = other DNA
ccttgcccagcccgacacagtggtttagatctggcttttttttgtatgtaatataacacttcatagcaggcatttggtat

SEQ ID NO: 38432 - DNA, 80 bp, synthetic construct
  misc_feature 1..80: note = Artificially Synthesized Probe
  source 1..80: mol_type = other DNA
cctcttctcccagtcttcagtcttaagtcgttagcctcctccctccgctttcagcagtggtctttcagctctcttcttgt

SEQ ID NO: 38433 - DNA, 80 bp, synthetic construct
  misc_feature 1..80: note = Artificially Synthesized Probe
  source 1..80: mol_type = other DNA
tgaggcactgcaccagttggttccttctgaataatttttgaaagaggctctagattcctaagtcctaaaagtttgactct

SEQ ID NO: 38434 - DNA, 80 bp, synthetic construct; identical to SEQ ID NO: 38433
  misc_feature 1..80: note = Artificially Synthesized Probe
  source 1..80: mol_type = other DNA

SEQ ID NO: 38435 - DNA, 80 bp, synthetic construct
  misc_feature 1..80: note = Artificially Synthesized Probe
  source 1..80: mol_type = other DNA
atccacccatccgcccaccaatcctttcatccatccatccatccatccaccaatccttccttccgtccatccatccatcc

SEQ ID NO: 38436 - DNA, 80 bp, synthetic construct
  misc_feature 1..80: note = Artificially Synthesized Probe
  source 1..80: mol_type = other DNA
catccccttccttcttttattccttccatttatccctaactttatctcaaatccaaaatctattcctgaaactatcccta

SEQ ID NO: 38437 - DNA, 80 bp, synthetic construct
  misc_feature 1..80: note = Artificially Synthesized Probe
  source 1..80: mol_type = other DNA
ctgcctcggactgcggcgtgggcttgcacagccgcctcaccctctccgggcctcagtttcccctggcatcaagtaagaga

SEQ ID NO: 38438 - DNA, 80 bp, synthetic construct
  misc_feature 1..80: note = Artificially Synthesized Probe
  source 1..80: mol_type = other DNA
ctccttcttttctctctctgtcttcctcccctggctcccgtctctcacctctgggtccccatcctcaggggtctcggagg

SEQ ID NO: 38439 - DNA, 80 bp, synthetic construct
  misc_feature 1..80: note = Artificially Synthesized Probe
  source 1..80: mol_type = other DNA
tccacttcgagaccttgtaagttaagggcttctactttgggtcgtgtttggtggtccttatgccaccaaaaatgtgccag

SEQ ID NO: 38440 - DNA, 80 bp, synthetic construct
  misc_feature 1..80: note = Artificially Synthesized Probe
  source 1..80: mol_type = other DNA
tcagtggggctttttaggggaaatggtagcttgtgattggagaaaagctagagctagtgcctttgtcctcaacccagatg

SEQ ID NO: 38441 - DNA, 80 bp, synthetic construct
  misc_feature 1..80: note = Artificially Synthesized Probe
  source 1..80: mol_type = other DNA
caatagttactggttaactgcttacttcaggtgaagtttttcaaatcccttaacatgaacatccaatatattgttctagg

SEQ ID NO: 38442 - DNA, 80 bp, synthetic construct
  misc_feature 1..80: note = Artificially Synthesized Probe
  source 1..80: mol_type = other DNA
tttccatgaaagcaattcctgtttctgatactgactcctggcatttgtaatacctctgtttctttagcggatatgcaggt

SEQ ID NO: 38443 - DNA, 80 bp, synthetic construct
  misc_feature 1..80: note = Artificially Synthesized Probe
  source 1..80: mol_type = other DNA
gaataattttttatcccacataataagtaatttctgaattgcaagtatttctaaatacttgaagacattcctcacatccc

SEQ ID NO: 38444 - DNA, 80 bp, synthetic construct
  misc_feature 1..80: note = Artificially Synthesized Probe
  source 1..80: mol_type = other DNA
tccactaagtagcatacattaagacttcacagaggaagtgtgcctttttcatttcgtatctgagtcagtgagtatcctgt

SEQ ID NO: 38445 - DNA, 80 bp, synthetic construct
  misc_feature 1..80: note = Artificially Synthesized Probe
  source 1..80: mol_type = other DNA
ttgtggtcctcagtctgaccccatgggatagaccctctaccattcgtagaatctgattgtcagtcccttctccaggtgcg

SEQ ID NO: 38446 - DNA, 80 bp, synthetic construct
  misc_feature 1..80: note = Artificially Synthesized Probe
  source 1..80: mol_type = other DNA
actgtgtgagtagttggctttctctgaatccccccagcgggtggatttgggcctggaagacaaagttggcgctcctgttt

SEQ ID NO: 38447 - DNA, 80 bp, synthetic construct
  misc_feature 1..80: note = Artificially Synthesized Probe
  source 1..80: mol_type = other DNA
gagctgtccctaaggcagtgtgtgacttcttgcatctatgtcagaaagttgaatcgataatcttacataccaggttttaa

SEQ ID NO: 38448 - DNA, 80 bp, synthetic construct
  misc_feature 1..80: note = Artificially Synthesized Probe
  source 1..80: mol_type = other DNA
gaacaagtattttaagtctcttttaccacctctgagttcctgaatggattggttttgtttgttttgttttgttttgtttt

SEQ ID NO: 38449 - DNA, 80 bp, synthetic construct
  misc_feature 1..80: note = Artificially Synthesized Probe
  source 1..80: mol_type = other DNA
tgtggagtgcctcttcgggttgtgtagaagtaggaaatgtgtcaccaaaataggagctgttgctgctgcgttctctagca

SEQ ID NO: 38450 - DNA, 80 bp, synthetic construct
  misc_feature 1..80: note = Artificially Synthesized Probe
  source 1..80: mol_type = other DNA
ggacaaaagagcaagtgttggtgaggatgtggagaaaagggaaccctgtgtgctgttggtgggaatgtaaattagtacaa

SEQ ID NO: 38451 - DNA, 80 bp, synthetic construct
  misc_feature 1..80: note = Artificially Synthesized Probe
  source 1..80: mol_type = other DNA
gcgaagatagtagacgttaggcgtctgtatctccaaaaaaaggataattgtatgaggtgatagatgtgtattaacttgat

SEQ ID NO: 38452 - DNA, 80 bp, synthetic construct
  misc_feature 1..80: note = Artificially Synthesized Probe
  source 1..80: mol_type = other DNA
gggctgccgtgtccattctgtgatctcaccagataggaggtccagatgtgggccgctgtgtgcagtcactgctctctatt

SEQ ID NO: 38453 - DNA, 80 bp, synthetic construct
  misc_feature 1..80: note = Artificially Synthesized Probe
  source 1..80: mol_type = other DNA
tgcccagcacatggtagggtctccaccggggtttactgagtgaacattctgagagctgggagaatgccatggaaccgaga

SEQ ID NO: 38454 - DNA, 80 bp, synthetic construct
  misc_feature 1..80: note = Artificially Synthesized Probe
  source 1..80: mol_type = other DNA
ttgcttagagctccactgctcatgctttgtcttcagtatgtgagaagtaaccacagaaaaaagagcattgaaacttagaa

SEQ ID NO: 38455 - DNA, 80 bp, synthetic construct
  misc_feature 1..80: note = Artificially Synthesized Probe
  source 1..80: mol_type = other DNA
tagtctgcgatattttcctaaagacctacattttgaaaattttagccagtttctttctcaaatctgtggaacagagtttc

SEQ ID NO: 38456 - DNA, 80 bp, synthetic construct
  misc_feature 1..80: note = Artificially Synthesized Probe
  source 1..80: mol_type = other DNA
ggtttcagccaactatgtattgaaaataaaattgcatccttacaaatatgcagactttttttccttgtcattgttccctt

SEQ ID NO: 38457 - DNA, 80 bp, synthetic construct
  misc_feature 1..80: note = Artificially Synthesized Probe
  source 1..80: mol_type = other DNA
gggatctttataattcattcctttgagtggtttgtggttcacacagagcttgtcagtcacttaggctccttgttgggcga

SEQ ID NO: 38458 - DNA, 80 bp, synthetic construct
  misc_feature 1..80: note = Artificially Synthesized Probe
  source 1..80: mol_type = other DNA
catgcaggcctggtaagtgttttcttcaggagccagactatttgagaaggcgcaggacgttagaaagtcttttttctttt

SEQ ID NO: 38459 - DNA, 80 bp, synthetic construct
  misc_feature 1..80: note = Artificially Synthesized Probe
  source 1..80: mol_type = other DNA
atttaggccattctagaaacaaagtacagctagcctctattagaggagaagggatgacttacagtgaacaggattcccac

SEQ ID NO: 38460 - DNA, 80 bp, synthetic construct
  misc_feature 1..80: note = Artificially Synthesized Probe
  source 1..80: mol_type = other DNA
tatatacacatatatatgtattttttttttttaagagatagtctccctctgtcgcccaggctgtagtgcagtggtacgat

SEQ ID NO: 38461 - DNA, 80 bp, synthetic construct
  misc_feature 1..80: note = Artificially Synthesized Probe
  source 1..80: mol_type = other DNA
gcctgtttgactcctgcatttcatacatcctacctcctgcatgtattacctgttgaagaaaatatatataacgttataaa

SEQ ID NO: 38462 - DNA, 80 bp, synthetic construct
  misc_feature 1..80: note = Artificially Synthesized Probe
  source 1..80: mol_type = other DNA
tttgttttaggagataaagtccctccaattaaaccaaacgctggggaagaatctgtcatgaatcttgacaaattgagatt

SEQ ID NO: 38463 - DNA, 80 bp, synthetic construct
  misc_feature 1..80: note = Artificially Synthesized Probe
  source 1..80: mol_type = other DNA
tgaactatacagaagtgcacttcttttccacatagaaggtcggcagactagggcagaattagtgactgcttggcatccag

SEQ ID NO: 38464 - DNA, 80 bp, synthetic construct
  misc_feature 1..80: note = Artificially Synthesized Probe
  source 1..80: mol_type = other DNA
gtggaaatgcgttccgttggggaagggatttttctgctgagtctggctattcatagtaagaagcaaaaaaaagaaatgag

SEQ ID NO: 38465 - DNA, 80 bp, synthetic construct
  misc_feature 1..80: note = Artificially Synthesized Probe
  source 1..80: mol_type = other DNA
ccaccttggaaccttttcatgctaataataagggggaaggagagtataacgaagtaacagaagaaattacagagcaggtt

SEQ ID NO: 38466 - DNA, 80 bp, synthetic construct
  misc_feature 1..80: note = Artificially Synthesized Probe
  source 1..80: mol_type = other DNA
attatatcaaggcctgtgatggtatcagaggtactctgcataaagcgactttgttggcacaagctatggcaggactgaaa

SEQ ID NO: 38467 - DNA, 80 bp, synthetic construct
  misc_feature 1..80: note = Artificially Synthesized Probe
  source 1..80: mol_type = other DNA
ggatattatttttgatggcggccattgttaagcttccagaacctatacctttaaaatggttaacatataagccaatttgg

SEQ ID NO: 38468 - DNA, 80 bp, synthetic construct
  misc_feature 1..80: note = Artificially Synthesized Probe
  source 1..80: mol_type = other DNA
attttctatccttagaggagatcctagtctcactagccctcggctatgccatgagtaatctattttctatccttagagga

SEQ ID NO: 38469 - DNA, 80 bp, synthetic construct
  misc_feature 1..80: note = Artificially Synthesized Probe
  source 1..80: mol_type = other DNA
tccaactccacattcacctactggtgttattgttcaagagcaagattttgtagaatggctttttcttccacatactaatt

SEQ ID NO: 38470 - DNA, 80 bp, synthetic construct
  misc_feature 1..80: note = Artificially Synthesized Probe
  source 1..80: mol_type = other DNA
tttgcagtgttttgtggtaattggcattctagcttctattaaaacagataacgccccaggctatactagccaagctctag

SEQ ID NO: 38471 - DNA, 80 bp, synthetic construct
  misc_feature 1..80: note = Artificially Synthesized Probe
  source 1..80: mol_type = other DNA
ggggtgctggcaacgattcctatggaatcattattgattgatctcctaaggggatgtttagcttgaattgcacctctctg

SEQ ID NO: 38472 - DNA, 80 bp, synthetic construct
  misc_feature 1..80: note = Artificially Synthesized Probe
  source 1..80: mol_type = other DNA
acgctggaaggttgtcggtttactggaatgagggcaagggacacctggcccacccagggtggaaaaccgtttaaggcatt

SEQ ID NO: 38473 - DNA, 80 bp, synthetic construct
  misc_feature 1..80: note = Artificially Synthesized Probe
  source 1..80: mol_type = other DNA
cagggctgctggcttgtgtcacgttcaccaccagaccccgcgtcaggagtcccgccaggggtgtggagaggcagcgctgc

SEQ ID NO: 38474 - DNA, 80 bp, synthetic construct
  misc_feature 1..80: note = Artificially Synthesized Probe
  source 1..80: mol_type = other DNA
ctgcattttctttcgttgccccaaaagtaaatccaaaaaatgcctttttcccccctggtaactttgatccctgggttctc

SEQ ID NO: 38475 - DNA, 80 bp, synthetic construct
  misc_feature 1..80: note = Artificially Synthesized Probe
  source 1..80: mol_type = other DNA
gtggaggaaatgccagtttagtaacgagtaagtcaccgttttaagcctgtcctgtggaggaaatgccagtttattaacga

SEQ ID NO: 38476 - DNA, 80 bp, synthetic construct
  misc_feature 1..80: note = Artificially Synthesized Probe
  source 1..80: mol_type = other DNA
acttgctcttgtctccttgtatgtattaagagtttcctgcaaagtatatgaatccgtgtttgccagaatacagaataata

SEQ ID NO: 38477 - DNA, 80 bp, synthetic construct
  misc_feature 1..80: note = Artificially Synthesized Probe
  source 1..80: mol_type = other DNA
tcttagatcatgttaatgtctgctgtgttttttctgtattgctctgttagagtaataagaaacgtgatggtgtttctggc

SEQ ID NO: 38478 - DNA, 80 bp, synthetic construct
  misc_feature 1..80: note = Artificially Synthesized Probe
  source 1..80: mol_type = other DNA
ttggggtgagcagtgtcctgggaacagccagccgagggtgtggtagggggtcgcagcctttttccacacacggtgagcag

SEQ ID NO: 38479 - DNA, 80 bp, synthetic construct
  misc_feature 1..80: note = Artificially Synthesized Probe
  source 1..80: mol_type = other DNA
gggaccagaagcgttgtggatttcaggcttgttcagactttggaatatttgcattatacttactgtctgagcatccctaa

SEQ ID NO: 38480 - DNA, 80 bp, synthetic construct
  misc_feature 1..80: note = Artificially Synthesized Probe
  source 1..80: mol_type = other DNA
agggacagggtctcactgtgttgcctaggctggtctcaagtgatcctccctccttggcctcccaaggtgctggaattata

SEQ ID NO: 38481 - DNA, 80 bp, synthetic construct
  misc_feature 1..80: note = Artificially Synthesized Probe
  source 1..80: mol_type = other DNA
aatggattgccactcatctacctgctctaacaccagcgagtgagttcttaacactatttttttcattttgatagctccag

SEQ ID NO: 38482 - DNA, 80 bp, synthetic construct
  misc_feature 1..80: note = Artificially Synthesized Probe
  source 1..80: mol_type = other DNA
tgatctataggctcatcaattgttgacaaaatgtcagtttctttataggaagaaaattgaaactttgctcaagtttccat

SEQ ID NO: 38483 - DNA, 80 bp, synthetic construct
  misc_feature 1..80: note = Artificially Synthesized Probe
  source 1..80: mol_type = other DNA
tgaggggaaatccctctcactcctgggtttttctacagtatacagaaatagcagtcactttagcagtaatgtacaatact

SEQ ID NO: 38484 - DNA, 80 bp, synthetic construct
  misc_feature 1..80: note = Artificially Synthesized Probe
  source 1..80: mol_type = other DNA
ttgctaaaactaaagctgaacaaagaaaagtcgctcatttacagactgtgtttcctgcatctttacttttactgggacca

SEQ ID NO: 38485 - DNA, 80 bp, synthetic construct
  misc_feature 1..80: note = Artificially Synthesized Probe
  source 1..80: mol_type = other DNA
agaggttcgcatttactggctacttttaccctttataatgcaataatacttttagcaccatctctctaatacaataggac

SEQ ID NO: 38486 - DNA, 80 bp, synthetic construct
  misc_feature 1..80: note = Artificially Synthesized Probe
  source 1..80: mol_type = other DNA
aaaaatgacatttgtattctctggtgatctgctctagtgatctgctccaatctccaaaatccagattttacagtcaagat

SEQ ID NO: 38487 - DNA, 80 bp, synthetic construct
  misc_feature 1..80: note = Artificially Synthesized Probe
  source 1..80: mol_type = other DNA
tacatcaccaacatagtttgcttgccaaaaacacaaagatgaataatgagtaaccaacgagacaaattcgtattaaatga

SEQ ID NO: 38488 - DNA, 80 bp, synthetic construct
  misc_feature 1..80: note = Artificially Synthesized Probe
  source 1..80: mol_type = other DNA
aacaactggtgaatacgggtggggatctagggaggtttcatgataccatgcttgttaacttttcaataggttttaaaact

SEQ ID NO: 38489 - DNA, 80 bp, synthetic construct
  misc_feature 1..80: note = Artificially Synthesized Probe
  source 1..80: mol_type = other DNA
acaacaacaaaaatgcagttcccaagggtaaatatgttcatcacaatgctgctttactgatgtcattaacagtgaatacc

SEQ ID NO: 38490 - DNA, 80 bp, synthetic construct
  misc_feature 1..80: note = Artificially Synthesized Probe
  source 1..80: mol_type = other DNA
aaatatatacaactattacaatagcatgtagcaaataatcttagtactcttacctagtaataagcaaaagccacaaagtt

SEQ ID NO: 38491 - DNA, 80 bp, synthetic construct
  misc_feature 1..80: note = Artificially Synthesized Probe
  source 1..80: mol_type = other DNA
cagatctggcctgcagactgcagtttgacaatatctgttttaaagacacagaaacctgggttatttcacttccctaaaat

SEQ ID NO: 38492 - DNA, 80 bp, synthetic construct
  misc_feature 1..80: note = Artificially Synthesized Probe
  source 1..80: mol_type = other DNA
gaagccagtgaatatcaatcaacagcactacacctgtgcctagtgatgcacatgttaaaagtgaaacagatttctatgag

SEQ ID NO: 38493 - DNA, 80 bp, synthetic construct
  misc_feature 1..80: note = Artificially Synthesized Probe
  source 1..80: mol_type = other DNA
catggcactttttataccaatcaatgaatggaatttacttgcttcatttcaggatgcttggtgttggcaggctacctctg

SEQ ID NO: 38494 - DNA, 80 bp, synthetic construct
  misc_feature 1..80: note = Artificially Synthesized Probe
  source 1..80: mol_type = other DNA
acaacaatgaccagggtcagagcaattctaatggttccatgtcgccagcaggatcctcagagagaaaatttaagaatttt

SEQ ID NO: 38495 - DNA, 80 bp, synthetic construct
  misc_feature 1..80: note = Artificially Synthesized Probe
  source 1..80: mol_type = other DNA
agcctacattatcattcaagacctgaagctgtttcacatttggctttgtattatctttaatcttagacagccttgggatg

SEQ ID NO: 38496 - DNA, 80 bp, synthetic construct
  misc_feature 1..80: note = Artificially Synthesized Probe
  source 1..80: mol_type = other DNA
ttctataaatgttagcttttcccttaaccaacctcttgacatcagggtccacagtactgtttctctacagtaaacatgaa

SEQ ID NO: 38497 - DNA, 80 bp, synthetic construct
  misc_feature 1..80: note = Artificially Synthesized Probe
  source 1..80: mol_type = other DNA
attatatatatatatatatcactaggcatggtggtacacgtctgtagtcccagctagttgggaggttgaggtgggagaat

SEQ ID NO: 38498 - DNA, 80 bp, synthetic construct
  misc_feature 1..80: note = Artificially Synthesized Probe
  source 1..80: mol_type = other DNA
ccctggagaattcttccagagactaaaaaaacaaatcaaagcttacacaaactcttctgagcaaaaaagggaatacttcc

SEQ ID NO: 38499 - DNA, 80 bp, synthetic construct
  misc_feature 1..80: note = Artificially Synthesized Probe
  source 1..80: mol_type = other DNA
atgtcaattctccccataatgaaccatggattcaatgcaataccaatgtaaatttcagcagctttttggggggaaaattg

SEQ ID NO: 38500 - DNA, 80 bp, synthetic construct
  misc_feature 1..80: note = Artificially Synthesized Probe
  source 1..80: mol_type = other DNA
gtttcctgactttttaatgactgctgttctaactggcgtgagatggtatctcattgtggttttgatttgcatttctctaa

SEQ ID NO: 38501 - DNA, 80 bp, synthetic construct
  misc_feature 1..80: note = Artificially Synthesized Probe
  source 1..80: mol_type = other DNA
ttactgggtatatacccaaaggactataaatcatgctgctataaagacacatgcacacgtatgtttattgccgcattatt

SEQ ID NO: 38502 - DNA, 80 bp, synthetic construct
  misc_feature 1..80: note = Artificially Synthesized Probe
  source 1..80: mol_type = other DNA
ttgtatcctaagacttagctgaagttgcttatcagcttaatgagattttgggctgagacgatggggttttctaaatatat

SEQ ID NO: 38503 - DNA, 80 bp, synthetic construct
  misc_feature 1..80: note = Artificially Synthesized Probe
  source 1..80: mol_type = other DNA
aatggtaccagctcctctttgtagctctggtagaatttggccgtgaaaccatctggtcctggacttttttttggttggta

SEQ ID NO: 38504 - DNA, 80 bp, synthetic construct
  misc_feature 1..80: note = Artificially Synthesized Probe
  source 1..80: mol_type = other DNA
gtctgttttatcagagactaggattataaaccctgcttttttttgctttccatttgcttggtaaatattcctccatctct

SEQ ID NO: 38505 - DNA, 80 bp, synthetic construct
  misc_feature 1..80: note = Artificially Synthesized Probe
  source 1..80: mol_type = other DNA
tgttctctgtatttcctgaatttgaatgttgaccttgctaggttggggaagttctcctggataatgtcctgaagagtatt

SEQ ID NO: 38506 - DNA, 80 bp, synthetic construct
  misc_feature 1..80: note = Artificially Synthesized Probe
  source 1..80: mol_type = other DNA
ctgagctcagcatcatctattttacaacaaagtgccattacaatttactgaggaaagaatgaccttttcaatgaatggtg

SEQ ID NO: 38507 - DNA, 80 bp, synthetic construct
  misc_feature 1..80: note = Artificially Synthesized Probe
  source 1..80: mol_type = other DNA
ttatatgacctttaggaataggcaaaactaatctatggcgattatagacagaatagtgggaggtagagggatggggagat

SEQ ID NO: 38508 - DNA, 80 bp, synthetic construct
  misc_feature 1..80: note = Artificially Synthesized Probe
  source 1..80: mol_type = other DNA
tccttttcaaatacttcctggggggcggcaagaagagaaatacaaaatctgtcaacctatatttatctttcagacaaaca

SEQ ID NO: 38509 - DNA, 80 bp, synthetic construct
  misc_feature 1..80: note = Artificially Synthesized Probe
  source 1..80: mol_type = other DNA
ggaacatgaccacacccatctgtaagttcagcagttgctacaaacactgtatgacttataaaacctaaaatatttactat

SEQ ID NO: 38510 - DNA, 80 bp, synthetic construct
  misc_feature 1..80: note = Artificially Synthesized Probe
  source 1..80: mol_type = other DNA
agaaagaagctaaaatctaccactagttgaataaattgagtcaaaatactacagtctctaccagttgactcaggagaaaa

SEQ ID NO: 38511 - DNA, 80 bp, synthetic construct
  misc_feature 1..80: note = Artificially Synthesized Probe
  source 1..80: mol_type = other DNA
agcatggagaaagacagaagacgacacacaacaagattatgcactctgatcatttgaggctgacaaggggttttcctaaa

SEQ ID NO: 38512 - DNA, 80 bp, synthetic construct
  misc_feature 1..80: note = Artificially Synthesized Probe
  source 1..80: mol_type = other DNA
ctgtaactaaggatcctactgtgatgttgttgctatcttcatcatctaacactgttaagatggaagaaaaaaaacagcaa

SEQ ID NO: 38513 - DNA, 80 bp, synthetic construct
  misc_feature 1..80: note = Artificially Synthesized Probe
  source 1..80: mol_type = other DNA
cagtgacataaaaatagggttctgtcaccctattaaactgtgcaaaccttacattcacaagattttacctgtatgatcaa

SEQ ID NO: 38514 - DNA, 80 bp, synthetic construct
  misc_feature 1..80: note = Artificially Synthesized Probe
  source 1..80: mol_type = other DNA
aacactcttaaatttctactttctataagaaaatctcttctaatattcatttttctaagaagcatgtacttttggccagg

SEQ ID NO: 38515 - DNA, 80 bp, synthetic construct
  misc_feature 1..80: note = Artificially Synthesized Probe
  source 1..80: mol_type = other DNA
tgacaccactgggcccagcccttatcttatttttaagcctattgcttcaactagacaataagctctctttaaagacacaa

SEQ ID NO: 38516 - DNA, 80 bp, synthetic construct
  misc_feature 1..80: note = Artificially Synthesized Probe
  source 1..80: mol_type = other DNA
ctacagaacagagtgttcagacttcatcccattatgaggataataaaagtaggactctatcagtgttctcaaactattag

SEQ ID NO: 38517 - DNA, 80 bp, synthetic construct
  misc_feature 1..80: note = Artificially Synthesized Probe
  source 1..80: mol_type = other DNA
gctagttatttttcactttcaaagacacagattagatcatgaggcatgtaaaatctctgcttttagattctgaagttttt

SEQ ID NO: 38518 - DNA, 80 bp, synthetic construct
  misc_feature 1..80: note = Artificially Synthesized Probe
  source 1..80: mol_type = other DNA
caccatgacaagaaccaacatcacccgtaacaacaaaccataaccactatccttttttaagggcattcctttccattact

SEQ ID NO: 38519 - DNA, 80 bp, synthetic construct
  misc_feature 1..80: note = Artificially Synthesized Probe
  source 1..80: mol_type = other DNA
ctctaccaaaaatacaaaaattagccaggtgtggtggtacgcgcctgtaatcccagctgctcaggaggctgaggcaggag

SEQ ID NO: 38520 - DNA, 80 bp, synthetic construct
  misc_feature 1..80: note = Artificially Synthesized Probe
  source 1..80: mol_type = other DNA
attttacagattgaatggaagagtttctcctcagtatcactatgtcaaaaatcagccataaaaccctagctcagattaga

SEQ ID NO: 38521 - DNA, 80 bp, synthetic construct
  misc_feature 1..80: note = Artificially Synthesized Probe
  source 1..80: mol_type = other DNA
aaagtccttgagcaattatttggccaaaaaagaacagcaacaaaacacaccgcaccaccatgctatggtttgggtctgtg

SEQ ID NO: 38522 - DNA, 80 bp, synthetic construct
  misc_feature 1..80: note = Artificially Synthesized Probe
  source 1..80: mol_type = other DNA
atacttaactgctcatcgggggatttgggaaattagcctaacctgtggtattagaatattatccgttggtctgcttgtgg

SEQ ID NO: 38523 - DNA, 80 bp, synthetic construct
  misc_feature 1..80: note = Artificially Synthesized Probe
  source 1..80: mol_type = other DNA
aatgtactcacaaaaggcaggatagtatagaagttaagtgcacagaccttggtattttgtcacttcctagctaaatgacc

SEQ ID NO: 38524 - DNA, 80 bp, synthetic construct
  misc_feature 1..80: note = Artificially Synthesized Probe
  source 1..80: mol_type = other DNA
tactgtaaaacagcactcacttacgagaacacagcaaaaattaaatgagtcaagacacatacagtaactagcagtgtctg

SEQ ID NO: 38525 - DNA, 80 bp, synthetic construct
  misc_feature 1..80: note = Artificially Synthesized Probe
  source 1..80: mol_type = other DNA
aaaactacccactgctataagcaccaagctggttcttgacacacagcatgtcttcaataaatacttgataaacaaatgta

SEQ ID NO: 38526 - DNA, 80 bp, synthetic construct
  misc_feature 1..80: note = Artificially Synthesized Probe
  source 1..80: mol_type = other DNA
catacatatacacgtgtcatacacatgtatgtcatacacacacgtgtcatacatatatgcacgtgtcatgcatatataca

SEQ ID NO: 38527 - DNA, 80 bp, synthetic construct
  misc_feature 1..80: note = Artificially Synthesized Probe
  source 1..80: mol_type = other DNA
ttaatccttattctcaaactccaagaggaaggtaccattattaccctccttttgtaggtagaaaacctgcagtacacatg

SEQ ID NO: 38528 - DNA, 80 bp, synthetic construct
  misc_feature 1..80: note = Artificially Synthesized Probe
  source 1..80: mol_type = other DNA
gacattttagggttgcagtgattgaagtctgatatcctacctcctcctgaaataccatatggaatatatacaattcaatt

SEQ ID NO: 38529 - DNA, 80 bp, synthetic construct
  misc_feature 1..80: note = Artificially Synthesized Probe
  source 1..80: mol_type = other DNA
tttttccgggactcttcatccgttaaactagcatcaaaagaacaaagttgcaaaattagaaagccacatctgaaaaacaa

SEQ ID NO: 38530 - DNA, 80 bp, synthetic construct
  misc_feature 1..80: note = Artificially Synthesized Probe
  source 1..80: mol_type = other DNA
ttttagatacctaaaatgtaacccctgactttgacaatggctcaaggtacagagtcaagaataactttattccagttccc

SEQ ID NO: 38531 - DNA, 80 bp, synthetic construct
  misc_feature 1..80: note = Artificially Synthesized Probe
  source 1..80: mol_type = other DNA
tctatgacccctttgccctgggaaaaatgcacattacaaagacacataaattttgtatacaatttcagggactccagatc

SEQ ID NO: 38532 - DNA, 80 bp, synthetic construct
  misc_feature 1..80: note = Artificially Synthesized Probe
  source 1..80: mol_type = other DNA
aaacttgaaaatgttaaaatacctaaagactggggggatagggtggggggatttcaccaaagcactaaaataaaaactac

SEQ ID NO: 38533 - DNA, 80 bp, synthetic construct
  misc_feature 1..80: note = Artificially Synthesized Probe
  source 1..80: mol_type = other DNA
agtgatatgtgatctttgacatttctattatcattgcggggctggcacacaaactgcacctgcagaagaaaaagaactta

SEQ ID NO: 38534 - DNA, 80 bp, synthetic construct
  misc_feature 1..80: note = Artificially Synthesized Probe
  source 1..80: mol_type = other DNA
gtccacaagattttccaaaagaaaccatctctacaacagaagtgcaaggtgaagtagcaagtgctgatttggaagctgca

SEQ ID NO: 38535 - DNA, 80 bp, synthetic construct
  misc_feature 1..80: note = Artificially Synthesized Probe
  source 1..80: mol_type = other DNA
gtctctactaaaaatacaataatttgccaggcatggtggtgcatgcctgtagtccgagctactcgggaggctgaggaaga

SEQ ID NO: 38536 - DNA, 80 bp, synthetic construct
  misc_feature 1..80: note = Artificially Synthesized Probe
  source 1..80: mol_type = other DNA
ttagttgataaagcagtggcagaatgtgagaggattgactccaattttgaaagaagttctggctgagcacggtggttcac

SEQ ID NO: 38537 - DNA, 80 bp, synthetic construct
  misc_feature 1..80: note = Artificially Synthesized Probe
  source 1..80: mol_type = other DNA
tttcactctttcattcaatgtaagagctatgtggggatgtacttatgaagagtcctgaagaatctagttaagttttatct

SEQ ID NO: 38538 - DNA, 80 bp, synthetic construct
  misc_feature 1..80: note = Artificially Synthesized Probe
  source 1..80: mol_type = other DNA
accaccacacagggttaattcttttattttttgtagagatggggtcttggtatgttgccagggatggtctcaaactcctg

SEQ ID NO: 38539 - DNA, 80 bp, synthetic construct
  misc_feature 1..80: note = Artificially Synthesized Probe
  source 1..80: mol_type = other DNA
atctggctcaaagaatcctcaaatcaaaggttaactttctaaggaataatctgaggaatacctggtttcagctgcttgtc

SEQ ID NO: 38540 - DNA, 80 bp, synthetic construct
  misc_feature 1..80: note = Artificially Synthesized Probe
  source 1..80: mol_type = other DNA
actgcggctggccaaaagactagttttctatttagaacccattaatcaggtttaatcaaaaaatcacctaaggggcacac

SEQ ID NO: 38541 - DNA, 80 bp, synthetic construct
  misc_feature 1..80: note = Artificially Synthesized Probe
  source 1..80: mol_type = other DNA
aggcgtgatggcaggtgcctgtagtcccagctacttgggaggctgaggcaggagaatggcatgaacccaggaggcagagt

SEQ ID NO: 38542 - DNA, 80 bp, synthetic construct
  misc_feature 1..80: note = Artificially Synthesized Probe
  source 1..80: mol_type = other DNA
ctgttacagcaacgacagtgtcttttttacctctgcattctttataatctagtacagtgtctactattcatagattttct

SEQ ID NO: 38543 - DNA, 80 bp, synthetic construct
  misc_feature 1..80: note = Artificially Synthesized Probe
  source 1..80: mol_type = other DNA
gatgaatgacttttatttcttatactgaatgacttttatttcttataccctttgtatgacaatttgttacactgagcaag

SEQ ID NO: 38544 - DNA, 80 bp, synthetic construct
  misc_feature 1..80: note = Artificially Synthesized Probe
  source 1..80: mol_type = other DNA
acatcatgctctgtgctcaatttttttaaaaaacctgtttggttcctctgaaaagataagcattttccccatacttggct

SEQ ID NO: 38545 - DNA, 80 bp, synthetic construct
  misc_feature 1..80: note = Artificially Synthesized Probe
  source 1..80: mol_type = other DNA
tgggggggaggggcggattgttttctgtcttgctgctttaggaaaatttaattcaaaatgagaaccaacagtaaagaata

SEQ ID NO: 38546 - DNA, 80 bp, synthetic construct
  misc_feature 1..80: note = Artificially Synthesized Probe
  source 1..80: mol_type = other DNA
ctcctgtcagtttcatctattacctctaaactgatgacgcaggataaatgtccaaagccttgtgtttaaccagtacaccc

SEQ ID NO: 38547 - DNA, 80 bp, synthetic construct
  misc_feature 1..80: note = Artificially Synthesized Probe
  source 1..80: mol_type = other DNA
gtctgccatttagaacaaacaacctatctagaaaatttcattcaactaccaagtgaccattttggaaatgagacttaatg

SEQ ID NO: 38548 - DNA, 80 bp, synthetic construct
  misc_feature 1..80: note = Artificially Synthesized Probe
  source 1..80: mol_type = other DNA
agtatcataaattctaattattttgtgttaagctggaaaagtctcctaaacccgtaaaacttaggtttatggggtcaggc

SEQ ID NO: 38549 - DNA, 80 bp, synthetic construct
  misc_feature 1..80: note = Artificially Synthesized Probe
  source 1..80: mol_type = other DNA
aaatcaagttttgaaacaaaaatctgcctttttaagaagatggcaccaaaaacaaaggaggaagcccttgcccaccccaa

SEQ ID NO: 38550 - DNA, 80 bp, synthetic construct
  misc_feature 1..80: note = Artificially Synthesized Probe
  source 1..80: mol_type = other DNA
atagaaggttccaaaaccaccaggtaagaagtccaactaccttgttaccaccatgcttagatgaagtcatccacatggga

SEQ ID NO: 38551 - DNA, 80 bp, synthetic construct
  misc_feature 1..80: note = Artificially Synthesized Probe
  source 1..80: mol_type = other DNA
agaacacagaatcagttttgtgaaattcctgcccaagatacacaacctgactctaataatgagaaaacactgtacaaccc

SEQ ID NO: 38552 - DNA, 80 bp, synthetic construct
  misc_feature 1..80: note = Artificially Synthesized Probe
  source 1..80: mol_type = other DNA
gcccctctgcctggctgcccagtctggaaagtgaggagcgcctcttcccagccgccatcccgtctaggaagtgaggagcg

SEQ ID NO: 38553 - DNA, 80 bp, synthetic construct; identical to SEQ ID NO: 35880
  misc_feature 1..80: note = Artificially Synthesized Probe
  source 1..80: mol_type = other DNA

SEQ ID NO: 38554 - DNA, 80 bp, synthetic construct
  misc_feature 1..80: note = Artificially Synthesized Probe
  source 1..80: mol_type = other DNA
agcagttagatttccagcaaaactaaatattcgtggtacacattcaaaatctctgtatgaatgacctcaagtcaaagtaa

SEQ ID NO: 38555 - DNA, 80 bp, synthetic construct
  misc_feature 1..80: note = Artificially Synthesized Probe
  source 1..80: mol_type = other DNA
ctttgctattgtgagcagtgctgcaatgaacatgggtgcacgtctttttggcagaacaatttattttcttttagatatat

SEQ ID NO: 38556 - DNA, 80 bp, synthetic construct
  misc_feature 1..80: note = Artificially Synthesized Probe
  source 1..80: mol_type = other DNA
tcacctcagcctctggagtagctgggactacaggaagatgccactatgcctgactaattttttttcatagagacaaggag

SEQ ID NO: 38557 - DNA, 80 bp, synthetic construct
  misc_feature 1..80: note = Artificially Synthesized Probe
  source 1..80: mol_type = other DNA
aaagtacacttctgccagtatggctcaatcttttccaaaacagctttacctaaagctgcagattagcttattcgatgtat

SEQ ID NO: 38558 - DNA, 80 bp, synthetic construct
  misc_feature 1..80: note = Artificially Synthesized Probe
  source 1..80: mol_type = other DNA
ggaatataggcttcataagattacatattgttcaccatcaccaccacccaggatacacaatcacagattacctaaatcag

SEQ ID NO: 38559 - DNA, 80 bp, synthetic construct
  misc_feature 1..80: note = Artificially Synthesized Probe
  source 1..80: mol_type = other DNA
agtagtaacaattcattgagctgaaagggcctctggagataagtgcagagtgtgtcttgctcaagatcgcaatgctagcc

SEQ ID NO: 38560 - DNA, 80 bp, synthetic construct
  misc_feature 1..80: note = Artificially Synthesized Probe
  source 1..80: mol_type = other DNA
cagcagctgcccaagtgagcttctcaaagagaaaaacgggacacataaaagcccacttaaggatagcatttctatgatgt

SEQ ID NO: 38561 - DNA, 80 bp, synthetic construct
  misc_feature 1..80: note = Artificially Synthesized Probe
  source 1..80: mol_type = other DNA
cccatggtgttgcaaggtttatggtatcacactgaatacaaagaaaaatacaagagaacctcaagagatcactttctatg

SEQ ID NO: 38562 - DNA, 80 bp, synthetic construct
  misc_feature 1..80: note = Artificially Synthesized Probe
  source 1..80: mol_type = other DNA
taatgtgactatctagaggaaaagtattccaggcaaagggagcagcaaccagtaaaagactgaaagagtgtgtttcactg

SEQ ID NO: 38563 - DNA, 80 bp, synthetic construct
  misc_feature 1..80: note = Artificially Synthesized Probe
  source 1..80: mol_type = other DNA
aacccgtctgtactaaaaatacaaaaattagctgcaggtggtggtgtatgcctgtaatcccaagtactcaggaggctgag

SEQ ID NO: 38564 - DNA, 80 bp, synthetic construct
  misc_feature 1..80: note = Artificially Synthesized Probe
  source 1..80: mol_type = other DNA
gccgagaacatctttttaaaagaatgaacagcatcgcctttcaaagaaacaatgtgatggtgaaatagtgtaacaacatt

SEQ ID NO: 38565 - DNA, 80 bp, synthetic construct
  misc_feature 1..80: note = Artificially Synthesized Probe
  source 1..80: mol_type = other DNA
taatctaatgtttgtcaccacatttataaaaccttcatgttgtcctgtaattcctactgccaagttcccaactgctttcc

SEQ ID NO: 38566 - DNA, 80 bp, synthetic construct
  misc_feature 1..80: note = Artificially Synthesized Probe
  source 1..80: mol_type = other DNA
agaacaaaaaaaccaaaccactcaacaggagactgagataacccatcctactgtaattacaactctatagggagtgacgg

SEQ ID NO: 38567 - DNA, 80 bp, synthetic construct
  misc_feature 1..80: note = Artificially Synthesized Probe
  source 1..80: mol_type = other DNA
cttccacctggtagctgtatgactttaggaaagttggtaacctcctctaggacgcagttttctcatgaataaaatgagat

SEQ ID NO: 38568 - DNA, 80 bp, synthetic construct
  misc_feature 1..80: note = Artificially Synthesized Probe
  source 1..80: mol_type = other DNA
agttgatttttcagccaatcttcagagggcaaaagggaagtttcccttggcccctacatccacactttgttttctaaaca

SEQ ID NO: 38569 - DNA, 80 bp, synthetic construct
  misc_feature 1..80: note = Artificially Synthesized Probe
  source 1..80: mol_type = other DNA
aaatgtaaatggttaaatgttccaatcaaaagactggcagaatggattaaaagcacctgatccaactacgtccatctaca

SEQ ID NO: 38570 - DNA, 80 bp, synthetic construct
  misc_feature 1..80: note = Artificially Synthesized Probe
  source 1..80: mol_type = other DNA
acattaacaattacaagaaagcacaaagtgggcagtacacacaaaaggtcacagcacagtattgttggcaataccaaaga

SEQ ID NO: 38571 - DNA, 80 bp, synthetic construct
  misc_feature 1..80: note = Artificially Synthesized Probe
  source 1..80: mol_type = other DNA
tttgtccttaattgtctgaagaaatattcattttattcagccaatttgcaaaccaagagagtaaaacaaataactactaa

SEQ ID NO: 38572 - DNA, 80 bp, synthetic construct
  misc_feature 1..80: note = Artificially Synthesized Probe
  source 1..80: mol_type = other DNA
gtgtaactgccagagcaaaccttttcatgctttcatgcacatgctatctctgaaaatactgtcagaagtctgaaattcaa

SEQ ID NO: 38573 - DNA, 80 bp, synthetic construct
  misc_feature 1..80: note = Artificially Synthesized Probe
  source 1..80: mol_type = other DNA
aatggcggttttgtggaatagaaagaggggaaaggcagggaaaggattgggaaatcggatggttgccatgtctgtgtaga

SEQ ID NO: 38574 - DNA, 80 bp, synthetic construct
  misc_feature 1..80: note = Artificially Synthesized Probe
  source 1..80: mol_type = other DNA
ggctctgaagctaagcgaccaatgttctaatcccagttcaaccatacaggaaaattacttacatgctctaccctcagttt

SEQ ID NO: 38575 - DNA, 80 bp, synthetic construct
  misc_feature 1..80: note = Artificially Synthesized Probe
  source 1..80: mol_type = other DNA
ctgtaatcccagctactggggaagctgtggcagaactgcttgaacccagcaggtggaggctgcaatgagtcaagatcaag

SEQ ID NO: 38576 - DNA, 80 bp, synthetic construct
  misc_feature 1..80: note = Artificially Synthesized Probe
  source 1..80: mol_type = other DNA
agctttccctaagttgttaatactcaaaacccactccttactgttaacactaccataaataacccattaggccctcgcag

SEQ ID NO: 38577 - DNA, 80 bp, synthetic construct
  misc_feature 1..80: note = Artificially Synthesized Probe
  source 1..80: mol_type = other DNA
gtccacaacaatggagaagatggagcgagcgaaactcctgaggacaatgaagggaggtggagaagcgccgagggaaacgc

SEQ ID NO: 38578 - DNA, 80 bp, synthetic construct
  misc_feature 1..80: note = Artificially Synthesized Probe
  source 1..80: mol_type = other DNA
aaatatcaataatttgttgggggaaaagtggggggtaagagttgtaagggagctttggagataatgaatgcataccttct

SEQ ID NO: 38579 - DNA, 80 bp, synthetic construct
  misc_feature 1..80: note = Artificially Synthesized Probe
  source 1..80: mol_type = other DNA
aaagcacagggcaagtctcaaaaacagataacaattcccagtcaagagcaagagcatagccaaaaggcaaataaaatatc

SEQ ID NO: 38580 - DNA, 80 bp, synthetic construct
  misc_feature 1..80: note = Artificially Synthesized Probe
  source 1..80: mol_type = other DNA
ctccctctcagaatacaggaaagagatatgtagaaagatccttgttcatgttgtgaaagagaagatggaaagggagacac

SEQ ID NO: 38581 - DNA, 80 bp, synthetic construct
  misc_feature 1..80: note = Artificially Synthesized Probe
  source 1..80: mol_type = other DNA
ctctgctgctgggtcaaaaggcagctctctggctgccttgccacccatggtgagacctcagggcctcacaggtatgtcca

SEQ ID NO: 38582 - DNA, 80 bp, synthetic construct
  misc_feature 1..80: note = Artificially Synthesized Probe
  source 1..80: mol_type = other DNA
ggagctctgtgttggagctctgcggtggaggcttcagggcaggcttcccagaagaggtggccttgagccaagctgacccc

SEQ ID NO: 38583 - DNA, 80 bp, synthetic construct
  misc_feature 1..80: note = Artificially Synthesized Probe
  source 1..80: mol_type = other DNA
gggatgtgagatgggaacagagctttctgtccctgccacaggaacatggcgctgctctgggggctcctggtgctcagctg

SEQ ID NO: 38584 - DNA, 80 bp, synthetic construct
  misc_feature 1..80: note = Artificially Synthesized Probe
  source 1..80: mol_type = other DNA
tggcactaggtaccctggcaccacttgtccagaccaagagagctgggaggccagtaggaactcagtactccaatggttct

SEQ ID NO: 38585 - DNA, 80 bp, synthetic construct
  misc_feature 1..80: note = Artificially Synthesized Probe
  source 1..80: mol_type = other DNA
ggtcacccagcctgtcagccacaggggtgagagccacgcagaacagatccgtggctgtggaaggatggcgtgtggtcccg

SEQ ID NO: 38586 - DNA, 80 bp, synthetic construct
  misc_feature 1..80: note = Artificially Synthesized Probe
  source 1..80: mol_type = other DNA
tgatccacccacctcggcctcccaaagtgctgggattacaggcgtgagccaccgcgcccggccatgcaggctttgttctg

SEQ ID NO: 38587 - DNA, 80 bp, synthetic construct
  misc_feature 1..80: note = Artificially Synthesized Probe
  source 1..80: mol_type = other DNA
gttctaagcactagggtttttgtggagcatgagggaggccaggtctctgctcttaggaaggaggatacacagtgcaacag

SEQ ID NO: 38588 - DNA, 80 bp, synthetic construct
  misc_feature 1..80: note = Artificially Synthesized Probe
  source 1..80: mol_type = other DNA
tgctccttagaaaggaggatctgattggattggatttctcagcatcttgcgtggaacattctgattggataaacttcttt

SEQ ID NO: 38589 - DNA, 80 bp, synthetic construct
  misc_feature 1..80: note = Artificially Synthesized Probe
  source 1..80: mol_type = other DNA
attggataaaattccgtgccaggctgtctcaggtgtggcctctcttgcttctagcctaaatgtggtccccttggcctggg

SEQ ID NO: 38590 - DNA, 80 bp, synthetic construct
  misc_feature 1..80: note = Artificially Synthesized Probe
  source 1..80: mol_type = other DNA
aagaaaaaaaaagaaatcttaagccaaatcacaatatatttacacagctggcaaagtcacaagagggaggtgtgggaggg

SEQ ID NO: 38591 - DNA, 80 bp, synthetic construct
  misc_feature 1..80: note = Artificially Synthesized Probe
  source 1..80: mol_type = other DNA
ttgggacaccctgcacccacctctggtgtgggagaggcccaccaaggtccggctgcctaagctgtatctgaaacaccaaa

SEQ ID NO: 38592 - DNA, 80 bp, synthetic construct
  misc_feature 1..80: note = Artificially Synthesized Probe
  source 1..80: mol_type = other DNA
gtgagccataattgtgccactgcactccagcctcagcaaaagaactaagaccttgtctcaaaaataaaaataaaggccgg

SEQ ID NO: 38593 - DNA, 80 bp, synthetic construct
  misc_feature 1..80: note = Artificially Synthesized Probe
  source 1..80: mol_type = other DNA
gcattgccatgtcccgcatgtccctgtcctccttcagcgtgaaccgccccttcctcttcttcatcttcgaggacaccaca

SEQ ID NO: 38594 - DNA, 80 bp, synthetic construct
  misc_feature 1..80: note = Artificially Synthesized Probe
  source 1..80: mol_type = other DNA
aaccgaggcagggaaggatcccatgagctccttaaggctcttttgtaaggtttttgtagtgatttttatgccacctgaat

SEQ ID NO: 38595 - DNA, 80 bp, synthetic construct
  misc_feature 1..80: note = Artificially Synthesized Probe
  source 1..80: mol_type = other DNA
ggtagtcaatgtcccttaactttcacatccatcatctcatggcagcttccacagggcactccaaagtgttaattatggct

SEQ ID NO: 38596 - DNA, 80 bp, synthetic construct
  misc_feature 1..80: note = Artificially Synthesized Probe
  source 1..80: mol_type = other DNA
ggtatgatcatgacactgcaccccaccgtgagtgacagagaaagaccccatcttttttttttttttttttttttttttgg

SEQ ID NO: 38597 - DNA, 80 bp, synthetic construct
  misc_feature 1..80: note = Artificially Synthesized Probe
  source 1..80: mol_type = other DNA
cccagccagactgtactataatttaactctcattttactgctcagataaagtgaggaacttgctaagacttctctcttcc

SEQ ID NO: 38598 - DNA, 80 bp, synthetic construct
  misc_feature 1..80: note = Artificially Synthesized Probe
  source 1..80: mol_type = other DNA
aaataaaataaaaactattatgtgtggtatgaatatatggcaaattttttggaaggtagtgaatgaatggctagagtttg

SEQ ID NO: 38599 - DNA, 80 bp, synthetic construct
  misc_feature 1..80: note = Artificially Synthesized Probe
  source 1..80: mol_type = other DNA
gtcaggagatcaagaccatcatggctaatatggtgaaaccccacctctactaaaaatacaaaaaattagccaggagtggt

SEQ ID NO: 38600 - DNA, 80 bp, synthetic construct
  misc_feature 1..80: note = Artificially Synthesized Probe
  source 1..80: mol_type = other DNA
ggcgcctgccaccacgcccaggtaatttttttgtatttttagtagagatggagtttcaccatgttggccaggctggtctc

SEQ ID NO: 38601 - DNA, 80 bp, synthetic construct
  misc_feature 1..80: note = Artificially Synthesized Probe
  source 1..80: mol_type = other DNA
acgcccagcccccaatacctttcacatccattctccgtgcagcagccagatcagtctttaaaatgtgcctcgaagctggg

SEQ ID NO: 38602 - DNA, 80 bp, synthetic construct
  misc_feature 1..80: note = Artificially Synthesized Probe
  source 1..80: mol_type = other DNA
atattgaccataaatgaaccctccctaaatgactcctcactgcacttggaataaaatccaaattcctactttaaatgggc

SEQ ID NO: 38603 - DNA, 80 bp, synthetic construct
  misc_feature 1..80: note = Artificially Synthesized Probe
  source 1..80: mol_type = other DNA
ccatgcctttcccacactggccccccactttcgttttgcaaacattccatgattgtttctttttttaattgttgagacag

SEQ ID NO: 38604 - DNA, 80 bp, synthetic construct
  misc_feature 1..80: note = Artificially Synthesized Probe
  source 1..80: mol_type = other DNA
aaaaaccacacacacacaaaaaagtgcctaatacttaagtgaatcagtatttgttggaggatttattgaatcatttcaat

SEQ ID NO: 38605 - DNA, 80 bp, synthetic construct
  misc_feature 1..80: note = Artificially Synthesized Probe
  source 1..80: mol_type = other DNA
tgatgtgatgggagacatcacaactggaagcacttggtgaatgtcatacaaaagctactaagtaaaaggtacttgaggcc

SEQ ID NO: 38606 - DNA, 80 bp, synthetic construct
  misc_feature 1..80: note = Artificially Synthesized Probe
  source 1..80: mol_type = other DNA
ctgggattacaggcgtgagccaccgcgcccggccagagttcttattagtacatcactggccatgtgattggtcttaccct

SEQ ID NO: 38607 - DNA, 80 bp, synthetic construct
  misc_feature 1..80: note = Artificially Synthesized Probe
  source 1..80: mol_type = other DNA
aggctgggagttcgggaccagctttgctaacatggtgaatccccatctctgctaaaaatacaaaaattagccaggcctgg

SEQ ID NO: 38608 - DNA, 80 bp, synthetic construct
  misc_feature 1..80: note = Artificially Synthesized Probe
  source 1..80: mol_type = other DNA
gttatagcggaaagcatcccgagttttacatccctgcttatgaggaagaagggtttctccccttcatattaatgccttgg

SEQ ID NO: 38609 - DNA, 80 bp, synthetic construct
  misc_feature 1..80: note = Artificially Synthesized Probe
  source 1..80: mol_type = other DNA
tgccttctagagaccatggcagcacaccctgtgatcccccacggatccctttatatcatttgtgtttgtgtttgcccatt

SEQ ID NO: 38610 - DNA, 80 bp, synthetic construct
  misc_feature 1..80: note = Artificially Synthesized Probe
  source 1..80: mol_type = other DNA
atttcattgggaatctcagaaaagaggcatgctccttctaggagagttgctaagctattagggtttaagcttggagctac

SEQ ID NO: 38611 - DNA, 80 bp, synthetic construct
  misc_feature 1..80: note = Artificially Synthesized Probe
  source 1..80: mol_type = other DNA
acggggtttcaccatgttggtcaggctggtctcaaactcctgacctcaagccatccgcccgcctcggcctcccaaagggc

SEQ ID NO: 38612 - DNA, 80 bp, synthetic construct
  misc_feature 1..80: note = Artificially Synthesized Probe
  source 1..80: mol_type = other DNA
aggtgcccttccctcccgccgctgttctctatggtctcttccttcagcgacgggaaagggggtcctgacgcctgcgcgga

SEQ ID NO: 38613 - DNA, 80 bp, synthetic construct
  misc_feature 1..80: note = Artificially Synthesized Probe
  source 1..80: mol_type = other DNA
ccacacccagctctgccactttctagttgtaagaccttgagagggctcctcctttctctaatttctattttagaaaattg

SEQ ID NO: 38614 - DNA, 80 bp, synthetic construct
  misc_feature 1..80: note = Artificially Synthesized Probe
  source 1..80: mol_type = other DNA
ttgaaacctctcagggaaaggtaagataaccaagtgggagcctctagaatggctcatgggaagtgtgacatgaatattgg

SEQ ID NO: 38615 - DNA, 80 bp, synthetic construct
  misc_feature 1..80: note = Artificially Synthesized Probe
  source 1..80: mol_type = other DNA
gggcgccttgaaggatggagcagggatggtgcagagggaagagctgctgagtttcatgggggctgaggaggcagcccctg

SEQ ID NO: 38616 - DNA, 80 bp, synthetic construct
  misc_feature 1..80: note = Artificially Synthesized Probe
  source 1..80: mol_type = other DNA
tatatatgtgtccagtgccttgagagtgtgtccctggggctgcagcttttctgggatagcggaagacagggaaatgttct

SEQ ID NO: 38617 - DNA, 80 bp, synthetic construct
  misc_feature 1..80: note = Artificially Synthesized Probe
  source 1..80: mol_type = other DNA
ggattacaggtgtgagccatcgtacccggcctcgccttattttatttttcaatttttttagagacaggttctcactatgt

SEQ ID NO: 38618 - DNA, 80 bp, synthetic construct
  misc_feature 1..80: note = Artificially Synthesized Probe
  source 1..80: mol_type = other DNA
tctccaagcttctggaacactttgtagaaatctttgttttgttcttactctgcatctctgtgtctgtcaggggcaatcac

SEQ ID NO: 38619 - DNA, 80 bp, synthetic construct
  misc_feature 1..80: note = Artificially Synthesized Probe
  source 1..80: mol_type = other DNA
taatagaaggagcatctttgatgcctcttaagagttaggggctttgtcctatagttcaacaaaggacacctttttttttt

SEQ ID NO: 38620 - DNA, 80 bp, synthetic construct
  misc_feature 1..80: note = Artificially Synthesized Probe
  source 1..80: mol_type = other DNA
taaggcattctgctctccgtttctgcaacagtctttcagctgttgattcagaaaaagatggagacacattgggactttag

SEQ ID NO: 38621 - DNA, 80 bp, synthetic construct
  misc_feature 1..80: note = Artificially Synthesized Probe
  source 1..80: mol_type = other DNA
agggggagccagagggcggtgagggggaccagcccctctcagggtatccttggttccacgggatgctctctcggctcaag

SEQ ID NO: 38622 - DNA, 80 bp, synthetic construct
  misc_feature 1..80: note = Artificially Synthesized Probe
  source 1..80: mol_type = other DNA
ctgcctccacaatcagtctgttttcttaccattcctatccagaaccgaccacctcccatgacccaccccagccccctgaa

SEQ ID NO: 38623 - DNA, 80 bp, synthetic construct
  misc_feature 1..80: note = Artificially Synthesized Probe
  source 1..80: mol_type = other DNA
tcagttacattaaggtggttgttgttgttgttttaaacaaaatggagaagcataaataaataaaaaggtttatctcggtt

SEQ ID NO: 38624 - DNA, 80 bp, synthetic construct
  misc_feature 1..80: note = Artificially Synthesized Probe
  source 1..80: mol_type = other DNA
gtgtcctcaacatttcatagctcgaaccgtcctttctttacgttgtgcattgatatgggcttctcagttcagaaaacaag

SEQ ID NO: 38625 - DNA, 80 bp, synthetic construct
  misc_feature 1..80: note = Artificially Synthesized Probe
  source 1..80: mol_type = other DNA
aagacaacaagttttcactggtgaggccaaagaagaagttcaacgtttaggtttaaaatatgcttccctaaagcggaggg

SEQ ID NO: 38626 - DNA, 80 bp, synthetic construct
  misc_feature 1..80: note = Artificially Synthesized Probe
  source 1..80: mol_type = other DNA
tgggaaaatcaatattgtggcccacacacaaaaagtcattgccagatcaactggataatgcttgcttgttcaataactga

SEQ ID NO: 38627 - DNA, 80 bp, synthetic construct
  misc_feature 1..80: note = Artificially Synthesized Probe
  source 1..80: mol_type = other DNA
tgacttcaagttggattggatcatttcaaatacaaagattgacctgcaaaaggttttggaacagaaggtccaaaaacttg

SEQ ID NO: 38628 - DNA, 80 bp, synthetic construct
  misc_feature 1..80: note = Artificially Synthesized Probe
  source 1..80: mol_type = other DNA
aggggaaaagcctctaagtaccatcttccctggcctccgagagcaaaaggactgtctcagcagagatgctcacccttggc

SEQ ID NO: 38629 - DNA, 80 bp, synthetic construct
  misc_feature 1..80: note = Artificially Synthesized Probe
  source 1..80: mol_type = other DNA
gaggccacctgcatgctgggcggcaggctgagaatctttttccatgttagaaaaactccctccccttgtcccatgtgtga

SEQ ID NO: 38630 - DNA, 80 bp, synthetic construct
  misc_feature 1..80: note = Artificially Synthesized Probe
  source 1..80: mol_type = other DNA
ctctttgttcatctctgttggcgagaccacagggcttggggcacgtcttgttcctgaggtcctgctttcatagtcggggg

SEQ ID NO: 38631 - DNA, 80 bp, synthetic construct
  misc_feature 1..80: note = Artificially Synthesized Probe
  source 1..80: mol_type = other DNA
agttttgttgcagaaggagctggggtaccctgtgttatttttagcccctttcatgtgagaggctcactggtaggacacac

SEQ ID NO: 38632 - DNA, 80 bp, synthetic construct
  misc_feature 1..80: note = Artificially Synthesized Probe
  source 1..80: mol_type = other DNA
aactccccagacactgagagaccctgaaccttagaggccatttggttgggccttggttttcattccagggtatgcacaaa

SEQ ID NO: 38633 - DNA, 80 bp, synthetic construct
  misc_feature 1..80: note = Artificially Synthesized Probe
  source 1..80: mol_type = other DNA
ccaaaaaacccgaaatcaaatcagagcccagtggggcttcacagcaggggagaggggccagcaccctctagtatctcagt

SEQ ID NO: 38634 - DNA, 80 bp, synthetic construct
  misc_feature 1..80: note = Artificially Synthesized Probe
  source 1..80: mol_type = other DNA
aacaccggtcatgggagcaaatgaaaatgacaaatggaatgacttgagacaacactgcaaaaattaatgaacaagaaagg

SEQ ID NO: 38635 - DNA, 80 bp, synthetic construct
  misc_feature 1..80: note = Artificially Synthesized Probe
  source 1..80: mol_type = other DNA
tcctcagcagcttgactctcttggttaatcacattgatgatattcactggatcttcccggttgcacagatggttacgttg

SEQ ID NO: 38636 - DNA, 80 bp, synthetic construct
  misc_feature 1..80: note = Artificially Synthesized Probe
  source 1..80: mol_type = other DNA
ccaagtcagttttgaagcagtctgtgctctgggaccagctgggcagagataactttttaacaacccaaagttatttgaaa

SEQ ID NO: 38637 - DNA, 80 bp, synthetic construct
  misc_feature 1..80: note = Artificially Synthesized Probe
  source 1..80: mol_type = other DNA
agtttgttttgggtcaaagcatataagtcaggcaagctgctgtgttctcctgggttccttaggcacttagcccttgagtc

SEQ ID NO: 38638 - DNA, 80 bp, synthetic construct
  misc_feature 1..80: note = Artificially Synthesized Probe
  source 1..80: mol_type = other DNA
gacacactcactcttccttccccaaaccagtttccttcactttgatccagtttgagatcaaagatgagactacctcctgg

SEQ ID NO: 38639 - DNA, 80 bp, synthetic construct
  misc_feature 1..80: note = Artificially Synthesized Probe
  source 1..80: mol_type = other DNA
gtttctatggaaatgggatttttacaccactgcttatctgtcatttcaaaaagcatggctggttttcaattttccctaga

SEQ ID NO: 38640 - DNA, 80 bp, synthetic construct
  misc_feature 1..80: note = Artificially Synthesized Probe
  source 1..80: mol_type = other DNA
tctccttcagagtacagcaggattctgccctatgaagtctgctttgagccagccccctctcagggtccccctggagaaat

SEQ ID NO: 38641 - DNA, 80 bp, synthetic construct
  misc_feature 1..80: note = Artificially Synthesized Probe
  source 1..80: mol_type = other DNA
agcggcaaagcaacaccctttctcaaaattcctggaggctgttgagtgtacttgtaggtgtatacgtacataattcttag

SEQ ID NO: 38642 - DNA, 80 bp, synthetic construct
  misc_feature 1..80: note = Artificially Synthesized Probe
  source 1..80: mol_type = other DNA
ccctctggttgcgtctagaaatgactcctgacttattctacgttcagttccaatggaaataatgtaaaccctgcacaata

SEQ ID NO: 38643 - DNA, 80 bp, synthetic construct
  misc_feature 1..80: note = Artificially Synthesized Probe
  source 1..80: mol_type = other DNA
catcttcttccacgagcgcgtcttgataaagtgcattgcttttgtgaatgatgggcttcatttttggcttaggaggtact

SEQ ID NO: 38644 - DNA, 80 bp, synthetic construct
  misc_feature 1..80: note = Artificially Synthesized Probe
  source 1..80: mol_type = other DNA
gtgaccgtagggaagccggcatccaggctgggccgcattttggtatcaatgtaaagaggtttgttgaggtcggccttggg

SEQ ID NO: 38645 - DNA, 80 bp, synthetic construct
  misc_feature 1..80: note = Artificially Synthesized Probe
  source 1..80: mol_type = other DNA
tgccgctcttcctctgttattcctacaagcagaaaacaggtttagctttaagtcacaatagcaacaaagcctaagttcct

SEQ ID NO: 38646 - DNA, 80 bp, synthetic construct
  misc_feature 1..80: note = Artificially Synthesized Probe
  source 1..80: mol_type = other DNA
aagggttgcaggtattgctgtgtttatgtggcaaggatggtgtgcagtccaccgtccagatggcacttgagccccacggc

SEQ ID NO: 38647 - DNA, 80 bp, synthetic construct
  misc_feature 1..80: note = Artificially Synthesized Probe
  source 1..80: mol_type = other DNA
acagattccaaaccgtaaggttcactaacctgatagaaagattctgctgtctgacaggaggaaatcagttgttattaacc

SEQ ID NO: 38648 - DNA, 80 bp, synthetic construct
  misc_feature 1..80: note = Artificially Synthesized Probe
  source 1..80: mol_type = other DNA
accctcccgctttaccctgctggaattatcacagataactgggcttcaagatgacagaagccaccctagattttgtgtcc

SEQ ID NO: 38649 - DNA, 80 bp, synthetic construct
  misc_feature 1..80: note = Artificially Synthesized Probe
  source 1..80: mol_type = other DNA
tcagatgcggacgctcaatggaaatattcgtgtgcaagcttttattgctccagctttgagatgcagtttccatgtgtcca

SEQ ID NO: 38650 - DNA, 80 bp, synthetic construct
  misc_feature 1..80: note = Artificially Synthesized Probe
  source 1..80: mol_type = other DNA
tctgtctgaagagtgtgtcaaggccccttacttccatgtgctcacgggtcctcagccaagtatgacaggacaccttcgag

SEQ ID NO: 38651 - DNA, 80 bp, synthetic construct
  misc_feature 1..80: note = Artificially Synthesized Probe
  source 1..80: mol_type = other DNA
tgccctcggaggcatgcacgaggcatggacatagaagaccctccacagctcggccaccttcttaagtgcccagcccccaa

SEQ ID NO: 38652 - DNA, 80 bp, synthetic construct
  misc_feature 1..80: note = Artificially Synthesized Probe
  source 1..80: mol_type = other DNA
tgtttgggatcaggcataagggtgtgtctaaggctgtttaaatgcaagggccctgtgccactgagacctggagagctggt

SEQ ID NO: 38653 - DNA, 80 bp, synthetic construct
  misc_feature 1..80: note = Artificially Synthesized Probe
  source 1..80: mol_type = other DNA
gttgtcagcaaaatgccaagtgttcacgcaaagcaagaaagcccttgccccatagtgtccgggcagccaaatctcccccc

SEQ ID NO: 38654 - DNA, 80 bp, synthetic construct
  misc_feature 1..80: note = Artificially Synthesized Probe
  source 1..80: mol_type = other DNA
ctgagcggggtgcagcagcatgtacctccatgaacatgacccagaagggatgccaccaagttaggggaagagcagctgga

SEQ ID NO: 38655 - DNA, 80 bp, synthetic construct
  misc_feature 1..80: note = Artificially Synthesized Probe
  source 1..80: mol_type = other DNA
tcatcctgtttctcatcctaatgagaagctggctgtagtaaagggattgttcccatgtcgaagggaaaacatttcaggtc

SEQ ID NO: 38656 - DNA, 80 bp, synthetic construct
  misc_feature 1..80: note = Artificially Synthesized Probe
  source 1..80: mol_type = other DNA
ctcattctaggctcctaaggattatgcttaatttataaaagctcagaactaggtctttattcagggactctggatgaagg

SEQ ID NO: 38657 - DNA, 80 bp, synthetic construct
  misc_feature 1..80: note = Artificially Synthesized Probe
  source 1..80: mol_type = other DNA
ttctctggagttgcagtgctactacatcctgtctctgggtgagagagtacaaatgtcactccatttccaaaaggaaaaca

SEQ ID NO: 38658 - DNA, 80 bp, synthetic construct
  misc_feature 1..80: note = Artificially Synthesized Probe
  source 1..80: mol_type = other DNA
acttttcaacccaatacaactgtaaaggcctgacttttgttccacatggcctttctggagtgtgacgagtgctttttccg

SEQ ID NO: 38659 - DNA, 80 bp, synthetic construct
  misc_feature 1..80: note = Artificially Synthesized Probe
  source 1..80: mol_type = other DNA
agatgtgccttagggccaggtgctaggctcctcccaactccaagggattaattaaaagctgggagtgctgcttttaattg

SEQ ID NO: 38660 - DNA, 80 bp, synthetic construct
  misc_feature 1..80: note = Artificially Synthesized Probe
  source 1..80: mol_type = other DNA
gttgtttcttgactgagctgagctctcaggagcaccccttgcaaagatgagagctgctaggcttgtccctctggggagcc

SEQ ID NO: 38661 - DNA, 80 bp, synthetic construct
  misc_feature 1..80: note = Artificially Synthesized Probe
  source 1..80: mol_type = other DNA
tggggacccagtggggctgcttacctttatccactagtgagaggcccaaaaattcaaaacaaaacaatgttagataaaca

SEQ ID NO: 38662 - DNA, 80 bp, synthetic construct
  misc_feature 1..80: note = Artificially Synthesized Probe
  source 1..80: mol_type = other DNA
ggtgattccctccctgccggatcatgttcaccacctgcctgtggccgactttgacaacattctcattgttaacctgtggg

SEQ ID NO: 38663 - DNA, 80 bp, synthetic construct
  misc_feature 1..80: note = Artificially Synthesized Probe
  source 1..80: mol_type = other DNA
gacacggaagtaggaacggactcagggtgccatccccctggcccctctgctattctcacctccctgagcaatgctcagca

SEQ ID NO: 38664 - DNA, 80 bp, synthetic construct
  misc_feature 1..80: note = Artificially Synthesized Probe
  source 1..80: mol_type = other DNA
agtggggccagggcagtccccgtgccagctgctctgcagtctctgctgtgggaccggctcattcccatgtactcagaccc

SEQ ID NO: 38665 - DNA, 80 bp, synthetic construct
  misc_feature 1..80: note = Artificially Synthesized Probe
  source 1..80: mol_type = other DNA
agatgaggcatctgacccgagcagctgtgagtatgaggtgccaaacacacgtgggggggcaccgagacactggggtctca

SEQ ID NO: 38666 - DNA, 80 bp, synthetic construct
  misc_feature 1..80: note = Artificially Synthesized Probe
  source 1..80: mol_type = other DNA
acaaagaggcatacagggcttgcaggggtggagctaggtttggaatcagttgttgggcatctgatgcccctctgacgtcc

SEQ ID NO: 38667 - DNA, 80 bp, synthetic construct
  misc_feature 1..80: note = Artificially Synthesized Probe
  source 1..80: mol_type = other DNA
ttggatttgtggctcttgccagccaccagtgaaacagaaaactgctatcactgcctttgatgccatctgcgtttagaatt

SEQ ID NO: 38668 - DNA, 80 bp, synthetic construct
  misc_feature 1..80: note = Artificially Synthesized Probe
  source 1..80: mol_type = other DNA
ggtgcatcatctctgtgtccccagacacttgttctggactgaactgtgtcctgcccaaatttatatgctggagtcctaat

SEQ ID NO: 38669 - DNA, 80 bp, synthetic construct
  misc_feature 1..80: note = Artificially Synthesized Probe
  source 1..80: mol_type = other DNA
tggttaccaccctgaggactgttctattgcagccctcagccacagtgcatctctgtctgctgcccactgaggctcacctg

SEQ ID NO: 38670 - DNA, 80 bp, synthetic construct
  misc_feature 1..80: note = Artificially Synthesized Probe
  source 1..80: mol_type = other DNA
gtgttgtgagtgggaactcagaggcactgtcattggaaaatgactgccgcagccctgggagggagtgggcagtgcaggct

SEQ ID NO: 38671 - DNA, 80 bp, synthetic construct
  misc_feature 1..80: note = Artificially Synthesized Probe
  source 1..80: mol_type = other DNA
tcccgtcgaccatgctggtcttaagttctcatcctattctgcaaaataaacaagctttggatgaagtccttccccaaaag

SEQ ID NO: 38672 - DNA, 80 bp, synthetic construct
  misc_feature 1..80: note = Artificially Synthesized Probe
  source 1..80: mol_type = other DNA
tcgatattatccgctgacacactgtgatggaaaaggatgacttggctcagagtttgtgaaatgtggcactatggtgattt

SEQ ID NO: 38673 - DNA, 80 bp, synthetic construct
  misc_feature 1..80: note = Artificially Synthesized Probe
  source 1..80: mol_type = other DNA
gtacaatccccacccccaaaccaacaaataaattctctgaaggttctgaagagtgaacaaagacaggcagattttagatg

SEQ ID NO: 38674 - DNA, 80 bp, synthetic construct
  misc_feature 1..80: note = Artificially Synthesized Probe
  source 1..80: mol_type = other DNA
gggcttaacatcagcatggatatgacagagctaattattagtgaatttgaagacatgccaagagaacatatccaatccaa

SEQ ID NO: 38675 - DNA, 80 bp, synthetic construct
  misc_feature 1..80: note = Artificially Synthesized Probe
  source 1..80: mol_type = other DNA
gacctaattatgctgtccgtacactttcaatacaaagacactgagaggctgagagttaataaatgagaaaagacagttcc

SEQ ID NO: 38676 - DNA, 80 bp, synthetic construct
  misc_feature 1..80: note = Artificially Synthesized Probe
  source 1..80: mol_type = other DNA
tcttttctgagaaattcttttcaagtttatctttcaatctatctttcaaatttttaatgccagcccggagcggtggctca

SEQ ID NO: 38677 - DNA, 80 bp, synthetic construct
  misc_feature 1..80: note = Artificially Synthesized Probe
  source 1..80: mol_type = other DNA
gacagtcttttcaacaagccatgctggacatccacatgcaaaaatgaatgtagagacagacctgaaatctttcacaaaaa

SEQ ID NO: 38678 - DNA, 80 bp, synthetic construct
  misc_feature 1..80: note = Artificially Synthesized Probe
  source 1..80: mol_type = other DNA
ccatctagaaaacggaatattagttagcactaaaaagaaatgagctaccaagccatgggaaggcctgcaggaagcttaca

SEQ ID NO: 38679 - DNA, 80 bp, synthetic construct
  misc_feature 1..80: note = Artificially Synthesized Probe
  source 1..80: mol_type = other DNA
gggcgatcatatccctctgcgttccctggaaatggctcagcatgctttctatgaaaagacagagactcttattaagaaga

SEQ ID NO: 38680 - DNA, 80 bp, synthetic construct
  misc_feature 1..80: note = Artificially Synthesized Probe
  source 1..80: mol_type = other DNA
tcgcctttcatcagttttcatgtgaatgagtcacttctttcaagtgaccagttctttaaaaagtgtcattatgggcgggg

SEQ ID NO: 38681 - DNA, 80 bp, synthetic construct
  misc_feature 1..80: note = Artificially Synthesized Probe
  source 1..80: mol_type = other DNA
ttcattaactaaagcccacattttattcggatttctctaatttttacctgacgtcccttgtctgtcccaggatctgtcca

SEQ ID NO: 38682 - DNA, 80 bp, synthetic construct
  misc_feature 1..80: note = Artificially Synthesized Probe
  source 1..80: mol_type = other DNA
gctcctgagcccatcacatgtgactttgtgtcttcaataccttccttgcttttggatgtgacaaaatattctaccctctt

SEQ ID NO: 38683 - DNA, 80 bp, synthetic construct
  misc_feature 1..80: note = Artificially Synthesized Probe
  source 1..80: mol_type = other DNA
ttttccgagtgcacctttgggctatgttcacatctgtggggttgctggctctaacggtttcttatccaaactacccatca

SEQ ID NO: 38684 - DNA, 80 bp, synthetic construct
  misc_feature 1..80: note = Artificially Synthesized Probe
  source 1..80: mol_type = other DNA
tggccggccacctgctcacactgtctaagctttttcaaggctgtccttggcatccattcggaccgtgtcccagtccctca

SEQ ID NO: 38685 - DNA, 80 bp, synthetic construct
  misc_feature 1..80: note = Artificially Synthesized Probe
  source 1..80: mol_type = other DNA
gtacgggattctcagtccactatcttgttctcaacaagaatatccataatttcagttcaaagcagtggaagagcatcata

SEQ ID NO: 38686 - DNA, 80 bp, synthetic construct
  misc_feature 1..80: note = Artificially Synthesized Probe
  source 1..80: mol_type = other DNA
cacgatactgatgacattacggtaactagatcatgagcaggaagtagcaaatgcttcggatgccttctatgcaaagaagg

SEQ ID NO: 38687 - DNA, 80 bp, synthetic construct
  misc_feature 1..80: note = Artificially Synthesized Probe
  source 1..80: mol_type = other DNA
tggaaacgagcttcgaggtaggggagaaaacaggctctttcttttgaaatgccagggttggcagcatcagaacaggagcg

SEQ ID NO: 38688 - DNA, 80 bp, synthetic construct
  misc_feature 1..80: note = Artificially Synthesized Probe
  source 1..80: mol_type = other DNA
ctggccttgggataagcaacattaatataattgtagctcatccacctccagacactgacagctggcctgtgttccaccag

SEQ ID NO: 38689 - DNA, 80 bp, synthetic construct
  misc_feature 1..80: note = Artificially Synthesized Probe
  source 1..80: mol_type = other DNA
ttccctgatcctggcctccaggcctcctccacatcgtgctggtgttctgacccacaaacggctctgattccacagctgtg

SEQ ID NO: 38690 - DNA, 80 bp, synthetic construct
  misc_feature 1..80: note = Artificially Synthesized Probe
  source 1..80: mol_type = other DNA
ccacaaaatgggatggtggtgagagggaggggcctgagtgcatgttaaggacctggagagctgccaggagcatctgcagc

SEQ ID NO: 38691 - DNA, 80 bp, synthetic construct
  misc_feature 1..80: note = Artificially Synthesized Probe
  source 1..80: mol_type = other DNA
accaggccaggaccagtgtctcatgtggcaccagctcaggacccatgtcatgctaggaaaccatcatggcacccactact

SEQ ID NO: 38692 - DNA, 80 bp, synthetic construct
  misc_feature 1..80: note = Artificially Synthesized Probe
  source 1..80: mol_type = other DNA
acagaagaagagaaaggaatgcagggactcaagcagatatttgctcaccatgttcacagcagcgtcatcgcaataaccaa

SEQ ID NO: 38693 - DNA, 80 bp, synthetic construct
  misc_feature 1..80: note = Artificially Synthesized Probe
  source 1..80: mol_type = other DNA
aatgaagagctagtgtttactggggacggagtttactggggacagtgtttattgggaagatggaaagttctgagatggat

SEQ ID NO: 38694 - DNA, 80 bp, synthetic construct
  misc_feature 1..80: note = Artificially Synthesized Probe
  source 1..80: mol_type = other DNA
ccaaaccttcccggagctgacagtagggaccagatctctccttgtctgcctggaccgtggtgtgtagtgacagttctggg

SEQ ID NO: 38695 - DNA, 80 bp, synthetic construct
  misc_feature 1..80: note = Artificially Synthesized Probe
  source 1..80: mol_type = other DNA
ttccagggaagcaggcacagcacagtgaagccagctcccaatacagtccattgtccatggaaaaaaaaaaaaaagcattt

SEQ ID NO: 38696 - DNA, 80 bp, synthetic construct
  misc_feature 1..80: note = Artificially Synthesized Probe
  source 1..80: mol_type = other DNA
tctcaaatacagagactcctaggtgcaaattctacatccttattccagtgtcagaactgctgagaatgtccaacctagct

SEQ ID NO: 38697 - DNA, 80 bp, synthetic construct
  misc_feature 1..80: note = Artificially Synthesized Probe
  source 1..80: mol_type = other DNA
agccaaaccatatcaggcagtaactcactaagtccttgctcagccctgggaggcaggtgctgtccccattcacagacaga

SEQ ID NO: 38698 - DNA, 80 bp, synthetic construct
  misc_feature 1..80: note = Artificially Synthesized Probe
  source 1..80: mol_type = other DNA
attcatccattcattatctaccatcatccatctgccatcatccatcagtctaaccagtccatccatttatccatcatcca

SEQ ID NO: 38699 - DNA, 80 bp, synthetic construct
  misc_feature 1..80: note = Artificially Synthesized Probe
  source 1..80: mol_type = other DNA
ttaaagttcaactccgttggaccaagctgagatgaggcttggtctaaaataaaaccggagctgcgtcagtgtgtgggccg

SEQ ID NO: 38700 - DNA, 80 bp, synthetic construct
  misc_feature 1..80: note = Artificially Synthesized Probe
  source 1..80: mol_type = other DNA
agaggacccttcttactccaggaaataaacagcattttctgagccgtgttgagtgttgggctttgtgtcgtacgtcagct

SEQ ID NO: 38701 - DNA, 80 bp, synthetic construct
  misc_feature 1..80: note = Artificially Synthesized Probe
  source 1..80: mol_type = other DNA
ccatgagtgtcacaaaacagtgatctcaaagtagctcactcacttgcagaggggcgttacccttgaacactcgtgaccat

SEQ ID NO: 38702 - DNA, 80 bp, synthetic construct
  misc_feature 1..80: note = Artificially Synthesized Probe
  source 1..80: mol_type = other DNA
ctgtctcaggggcacccccagcctcaccatcaaccacccctccattagccttggctactgagatgcagcctagaagagga

SEQ ID NO: 38703 - DNA, 80 bp, synthetic construct
  misc_feature 1..80: note = Artificially Synthesized Probe
  source 1..80: mol_type = other DNA
ggccgtagcagagggcctgggtgctttaaccacagacgttcatgttcctacagtcctggaggtgaagtccaagatcaagg

SEQ ID NO: 38704 - DNA, 80 bp, synthetic construct
  misc_feature 1..80: note = Artificially Synthesized Probe
  source 1..80: mol_type = other DNA
tctttatagttttaatttttaactgtactgcggtaaaatccatataacataaaacttccaacctgcccaacatggtgaag

SEQ ID NO: 38705 - DNA, 80 bp, synthetic construct
  misc_feature 1..80: note = Artificially Synthesized Probe
  source 1..80: mol_type = other DNA
acagatgtggggcgtggagcctggtgtccaacttggctctgagagcccggtttatggcctaaggcagtggttttcaagcg

SEQ ID NO: 38706 - DNA, 80 bp, synthetic construct
  misc_feature 1..80: note = Artificially Synthesized Probe
  source 1..80: mol_type = other DNA
atgagggatgagaagagagaggaggatgaggctgtgtgacgacagagacacaggttggcaccatgtggctagcagccaag

SEQ ID NO: 38707 - DNA, 80 bp, synthetic construct
  misc_feature 1..80: note = Artificially Synthesized Probe
  source 1..80: mol_type = other DNA
gattgaatcaatcatgtccgtgtaatgaaacttccataaaacccccaaaaggacagggtttggaggagtttctgaataga

SEQ ID NO: 38708 - DNA, 80 bp, synthetic construct
  misc_feature 1..80: note = Artificially Synthesized Probe
  source 1..80: mol_type = other DNA
agttcaaatctccactctccacatgcaggagagagtcctggggccgcagaacctctccagccccggcctgcccactctgt

SEQ ID NO: 38709 - DNA, 80 bp, synthetic construct
  misc_feature 1..80: note = Artificially Synthesized Probe
  source 1..80: mol_type = other DNA
cctgccgtgggcgtctctttttgtctgagaatggatggaagtggctcctgcagtccctgggctcgcgctgtctgagctcc

SEQ ID NO: 38710 - DNA, 80 bp, synthetic construct
  misc_feature 1..80: note = Artificially Synthesized Probe
  source 1..80: mol_type = other DNA
gtgaaccactgcgcccagagttttaatggaggtttcaatacttaggtacagctgattaatcattggccaatggcaattga

SEQ ID NO: 38711 - DNA, 80 bp, synthetic construct
  misc_feature 1..80: note = Artificially Synthesized Probe
  source 1..80: mol_type = other DNA
agtcctatcccgtactaagtctcctccctattcaatattctgctactcccctaccgcaatagtcctggataaaaactgta

SEQ ID NO: 38712 - DNA, 80 bp, synthetic construct
  misc_feature 1..80: note = Artificially Synthesized Probe
  source 1..80: mol_type = other DNA
aagtgcaaattaactctgctaaaggaatccttggtccccataaccatttagacacaatcgagacagagaatttcaatgtt

SEQ ID NO: 38713 - DNA, 80 bp, synthetic construct
  misc_feature 1..80: note = Artificially Synthesized Probe
  source 1..80: mol_type = other DNA
taagatgaggtcactggggtacatcctaatccagtcattggtgttctcaaacaagaggacaatgtggacacgcatggtgg

SEQ ID NO: 38714 - DNA, 80 bp, synthetic construct
  misc_feature 1..80: note = Artificially Synthesized Probe
  source 1..80: mol_type = other DNA
attaggacctcgaaggaatcttcagccctgttggaattcatgcctcttggaggtgagaccttttccacagacagttaaca

SEQ ID NO: 38715 - DNA, 80 bp, synthetic construct
  misc_feature 1..80: note = Artificially Synthesized Probe
  source 1..80: mol_type = other DNA
ggttatggagaggaacttgtctagcctcatgagcagacacgtgtggacccaaacagccacgctgcagtggtaaacgctct

SEQ ID NO: 38716 - DNA, 80 bp, synthetic construct
  misc_feature 1..80: note = Artificially Synthesized Probe
  source 1..80: mol_type = other DNA
tgactcagtggtttttttcactcaaattcccaagcctccactaagcaggagcatgaatagagctttaattctacaacgat

SEQ ID NO: 38717 - DNA, 80 bp, synthetic construct
  misc_feature 1..80: note = Artificially Synthesized Probe
  source 1..80: mol_type = other DNA
agctcagggagatttatagctcaatttagttcctgtatgtcccatgtcacagcgagtcatttatcgagtgcttcaacttg

SEQ ID NO: 38718 - DNA, 80 bp, synthetic construct
  misc_feature 1..80: note = Artificially Synthesized Probe
  source 1..80: mol_type = other DNA
tgtgacgatccccagcagccccctgccatcctgactgccggtcccagctcctgtcctgacagctcagtcactggaacact

SEQ ID NO: 38719 - DNA, 80 bp, synthetic construct
  misc_feature 1..80: note = Artificially Synthesized Probe
  source 1..80: mol_type = other DNA
ccaccatgagtcaaagcttgcaaggacctacctgatcttattttaacaaagactttatattttggaacatttttggattt

SEQ ID NO: 38720 - DNA, 80 bp, synthetic construct
  misc_feature 1..80: note = Artificially Synthesized Probe
  source 1..80: mol_type = other DNA
aatcgataaatattgtgtgttctgactgctccaccgactgtccactcctccatctctctccctctgtgcaggcctcctta

SEQ ID NO: 38721 - DNA, 80 bp, synthetic construct
  misc_feature 1..80: note = Artificially Synthesized Probe
  source 1..80: mol_type = other DNA
atccaggctacatccagtttttggcaataaagctgctataagcacttaacgtgcagcctgatcacatttattttctctct

SEQ ID NO: 38722 - DNA, 80 bp, synthetic construct
  misc_feature 1..80: note = Artificially Synthesized Probe
  source 1..80: mol_type = other DNA
tcaactggcctcaggatctcacgaattacagacaaaaagcaagcaagcaaacagatgatcacatgtgagttccagggcgg

SEQ ID NO: 38723 - DNA, 80 bp, synthetic construct
  misc_feature 1..80: note = Artificially Synthesized Probe
  source 1..80: mol_type = other DNA
aatgacagtctttggcaaatatgttaaataccaattgagaacaaatgccaccaggaactctgatcatccttcatctgctg

SEQ ID NO: 38724 - DNA, 80 bp, synthetic construct
  misc_feature 1..80: note = Artificially Synthesized Probe
  source 1..80: mol_type = other DNA
ggcaatgtgcacacacacgcctcttaataacgatttcctcatttcggagactcttaataacaattttctcatttcacaga

SEQ ID NO: 38725 - DNA, 80 bp, synthetic construct
  misc_feature 1..80: note = Artificially Synthesized Probe
  source 1..80: mol_type = other DNA
atctgcatcgatcattttcataggaattgatgagctgtcctccaaggaggacgtgcatcgtaacctctccccaaaacaga

SEQ ID NO: 38726 - DNA, 80 bp, synthetic construct
  misc_feature 1..80: note = Artificially Synthesized Probe
  source 1..80: mol_type = other DNA
tcatgggaaatgcaaaatatctagagtaagcaaaacaactgtaaaaaaggacaaagttggaggactaacttgacctgatt

SEQ ID NO: 38727 - DNA, 80 bp, synthetic construct
  misc_feature 1..80: note = Artificially Synthesized Probe
  source 1..80: mol_type = other DNA
gctccattttccttgtttttctattttctatgtcattgattgctgtgagcttaatcacttcttctgcttgcttgttgttg

SEQ ID NO: 38728 - DNA, 80 bp, synthetic construct
  misc_feature 1..80: note = Artificially Synthesized Probe
  source 1..80: mol_type = other DNA
gactttctgtacacttccatcagttacagaaggagaagtgattatacttgtagttttatttatttttccttgcaggtcta

SEQ ID NO: 38729 - DNA, 80 bp, synthetic construct
  misc_feature 1..80: note = Artificially Synthesized Probe
  source 1..80: mol_type = other DNA
agaattaaacaaaacaaattttacatatatagccatgcagctaagtccttccttccttggtgtatttccatctgtggtca

SEQ ID NO: 38730 - DNA, 80 bp, synthetic construct
  misc_feature 1..80: note = Artificially Synthesized Probe
  source 1..80: mol_type = other DNA
tttttctctcatgtgtcttgtgcttggagtctattgagctgcttgggtgtgtgagttcattgtttacttcaaatttggaa

SEQ ID NO: 38731 - DNA, 80 bp, synthetic construct
  misc_feature 1..80: note = Artificially Synthesized Probe
  source 1..80: mol_type = other DNA
ttccttacgggctgtattttcctgcttctttgcaagactgggaatttctgaatggatgccagacatcatgaattgtactt

SEQ ID NO: 38732 - DNA, 80 bp, synthetic construct
  misc_feature 1..80: note = Artificially Synthesized Probe
  source 1..80: mol_type = other DNA
aagatatacctaagactgggtaatttatgtagaaaaaaaggtttaatggactcatagttccacatggctggggaggcctc

SEQ ID NO: 38733 - DNA, 80 bp, synthetic construct
  misc_feature 1..80: note = Artificially Synthesized Probe
  source 1..80: mol_type = other DNA
attgattggagcagaaaagcctcatgcctttgaagtccctcattaattacctggacaggaagaaggaagaatctctactc

SEQ ID NO: 38734 - DNA, 80 bp, synthetic construct
  misc_feature 1..80: note = Artificially Synthesized Probe
  source 1..80: mol_type = other DNA
cagacaccctatgtatttgtccaacccaaacacgtcaaatggactgagctattcaaaccaaaactcagcgaggagacggg

SEQ ID NO: 38735 - DNA, 80 bp, synthetic construct
  misc_feature 1..80: note = Artificially Synthesized Probe
  source 1..80: mol_type = other DNA
tctggaagaagccaggttcagggagcaattctgcaagataaaccaccctctggagggtgtggctccaagactttgattct

SEQ ID NO: 38736 - DNA, 80 bp, synthetic construct
  misc_feature 1..80: note = Artificially Synthesized Probe
  source 1..80: mol_type = other DNA
gggttcccgtttcccaggccacagtgattggttgagggatggtcatccaggccaatcagaatcctgcctgggtttttcct

SEQ ID NO: 38737 - DNA, 80 bp, synthetic construct
  misc_feature 1..80: note = Artificially Synthesized Probe
  source 1..80: mol_type = other DNA
gaggatgtgggtgtactggagtggggagtggggagtggggaatggggtgtcatagaccgaggccctctgggaatcaatgc

SEQ ID NO: 38738 - DNA, 80 bp, synthetic construct
  misc_feature 1..80: note = Artificially Synthesized Probe
  source 1..80: mol_type = other DNA
gctactttttctttgaaataaaatgttcattttccagtataaaagtctagatgctacccccaccatgtgccccaccccag

SEQ ID NO: 38739 - DNA, 80 bp, synthetic construct
  misc_feature 1..80: note = Artificially Synthesized Probe
  source 1..80: mol_type = other DNA
cacagaagacacagggatggttggcaagaataagaaaagaggcccaacatcaggggtctccagggaaatgtgagctaaag

SEQ ID NO: 38740 - DNA, 80 bp, synthetic construct
  misc_feature 1..80: note = Artificially Synthesized Probe
  source 1..80: mol_type = other DNA
taaagaaaataggagttactgggaccaagacatgaagatgaccccagtggcccctcctacattgaccagatcaagcttca

SEQ ID NO: 38741 - DNA, 80 bp, synthetic construct
  misc_feature 1..80: note = Artificially Synthesized Probe
  source 1..80: mol_type = other DNA
attcatctgactctggggccatggctcctcccattttcacacatttgcactttgccaggggacttctagtgactgtccct

SEQ ID NO: 38742 - DNA, 80 bp, synthetic construct
  misc_feature 1..80: note = Artificially Synthesized Probe
  source 1..80: mol_type = other DNA
cgggcagcagaggaatggtcacccaacggtgactgtcaaagtacaaaggccagccggatgtggtagttcacgcctgtaat

SEQ ID NO: 38743 - DNA, 80 bp, synthetic construct
  misc_feature 1..80: note = Artificially Synthesized Probe
  source 1..80: mol_type = other DNA
ccacaaggagagcatttcacgggcttaaattttggcagacagactcttggaatctgagcaccaggccatttgtgtctacg

SEQ ID NO: 38744 - DNA, 80 bp, synthetic construct
  misc_feature 1..80: note = Artificially Synthesized Probe
  source 1..80: mol_type = other DNA
gctgcatttttctggaaagcatgataagggatcatcagtgtcaaaaccccgagctccaggcaggggccatgatttctcca

SEQ ID NO: 38745 - DNA, 80 bp, synthetic construct
  misc_feature 1..80: note = Artificially Synthesized Probe
  source 1..80: mol_type = other DNA
gctgactcagacacacgaagacacactgacttagtgcggtgccatggcatctcatacactgtactctcgccattgcacag

SEQ ID NO: 38746 - DNA, 80 bp, synthetic construct
  misc_feature 1..80: note = Artificially Synthesized Probe
  source 1..80: mol_type = other DNA
tctgctaatttacatgaaatggagcaacaggatggcccatggaagattttagcccagttcagagataaccaagagattgg

SEQ ID NO: 38747 - DNA, 80 bp, synthetic construct
  misc_feature 1..80: note = Artificially Synthesized Probe
  source 1..80: mol_type = other DNA
gcaaaagggactttgcagatgtgatgaagacctggagatggccctgatgttcagcgtcatcacaagcgtcctgataagtg

SEQ ID NO: 38748 - DNA, 80 bp, synthetic construct
  misc_feature 1..80: note = Artificially Synthesized Probe
  source 1..80: mol_type = other DNA
atgaaattggaccgccaatgagcggcgtgggcctgcagcctgggctgctggggacccggccttgtctgggcagtctgggt

SEQ ID NO: 38749 - DNA, 80 bp, synthetic construct
  misc_feature 1..80: note = Artificially Synthesized Probe
  source 1..80: mol_type = other DNA
gaaaggcctctgccttcctcaaagatggcatcttcctatctgaatggtatattttgtgttacattaaggttgttggtgct

SEQ ID NO: 38750 - DNA, 80 bp, synthetic construct
  misc_feature 1..80: note = Artificially Synthesized Probe
  source 1..80: mol_type = other DNA
ctaactctactactgctgactgaatgccgtggaggccgccagccccggccggatccaattagctcatgcacacatctgca

SEQ ID NO: 38751 - DNA, 80 bp, synthetic construct
  misc_feature 1..80: note = Artificially Synthesized Probe
  source 1..80: mol_type = other DNA
gctgactccagaaggcctagcagcatgtccccaactgatgcaagaggtgggaggaggccttgctggcagagggagcatgt

SEQ ID NO: 38752 - DNA, 80 bp, synthetic construct
  misc_feature 1..80: note = Artificially Synthesized Probe
  source 1..80: mol_type = other DNA
cttggttggcccctgatgtgtccccagctctgagagtggggcctggatcaagggcacacttgcgggtctggtgagtccga

SEQ ID NO: 38753 - DNA, 80 bp, synthetic construct
  misc_feature 1..80: note = Artificially Synthesized Probe
  source 1..80: mol_type = other DNA
cattttaaaacactgcggtacacaggacctgcctgacaaaggatccaggaaagcaagtccctgaaggcaattgttttgtg

SEQ ID NO: 38754 - DNA, 80 bp, synthetic construct
  misc_feature 1..80: note = Artificially Synthesized Probe
  source 1..80: mol_type = other DNA
ctccccccatccatccatccacccatccttcatccattcctccatccatccatccatccaacagctatctgaactgttta

SEQ ID NO: 38755 - DNA, 80 bp, synthetic construct
  misc_feature 1..80: note = Artificially Synthesized Probe
  source 1..80: mol_type = other DNA
cagcctctggcaccgttgctgtggaaaccaactggcaatgagaaatttagcaatttgaaaaaagcatttccttcccttat

SEQ ID NO: 38756 - DNA, 80 bp, synthetic construct
  misc_feature 1..80: note = Artificially Synthesized Probe
  source 1..80: mol_type = other DNA
cagccatcaaaggcatggatgacagtgcttaccgacaggaaaaaatattccccacatgttcagaaaaaaagggtaggtta

SEQ ID NO: 38757 - DNA, 80 bp, synthetic construct
  misc_feature 1..80: note = Artificially Synthesized Probe
  source 1..80: mol_type = other DNA
ttccatcaagtttaagaaaagaagctgtgttctgtaacgtaaacacgcaaggcaaagtagcaagtcttgatggagaagct

SEQ ID NO: 38758 - DNA, 80 bp, synthetic construct
  misc_feature 1..80: note = Artificially Synthesized Probe
  source 1..80: mol_type = other DNA
gctatttacagcatgaatattttaagcccattgttgagatttactgctcagaaaaaagagattccattccaaatgttact

SEQ ID NO: 38759 - DNA, 80 bp, synthetic construct
  misc_feature 1..80: note = Artificially Synthesized Probe
  source 1..80: mol_type = other DNA
gcagccatcaacattgaagtgagactctccaacagcaaaattatgatgactcgccgaaggctctgatgattgctagcatt

SEQ ID NO: 38760 - DNA, 80 bp, synthetic construct
  misc_feature 1..80: note = Artificially Synthesized Probe
  source 1..80: mol_type = other DNA
cagataaattacaggagtaagcgcattgccctggactcaaacgctgtcaacttctggagatacaacatttgcttttctta

SEQ ID NO: 38761 - DNA, 80 bp, synthetic construct
  misc_feature 1..80: note = Artificially Synthesized Probe
  source 1..80: mol_type = other DNA
aaaataataaaaaataacaagcagaggtgtggagactacatttaaacagggcatgcaggaagcccagtccctgtcaagcc

SEQ ID NO: 38762 - DNA, 80 bp, synthetic construct
  misc_feature 1..80: note = Artificially Synthesized Probe
  source 1..80: mol_type = other DNA
ttggctaggtgtagctcctctacttattatattctataatttctcagcagtctccacgcagttctgagaactcttgctgc

SEQ ID NO: 38763 - DNA, 80 bp, synthetic construct
  misc_feature 1..80: note = Artificially Synthesized Probe
  source 1..80: mol_type = other DNA
tgttggagctgcccgattcgtaaatcgctgcttgctcacatcaattctttaaaattttattgtgcctcagctgactttat

SEQ ID NO: 38764 - DNA, 80 bp, synthetic construct
  misc_feature 1..80: note = Artificially Synthesized Probe
  source 1..80: mol_type = other DNA
caccgtgaacctcgaaatgtcactgattatacacactgagtgaatgaatggagtgaagagtgagctaatgggcattcgtt

SEQ ID NO: 38765 - DNA, 80 bp, synthetic construct
  misc_feature 1..80: note = Artificially Synthesized Probe
  source 1..80: mol_type = other DNA
tttagttaaggtaaggtcatgctggattagggtaggactttattccagcgactggtgtccttgtgagagaaaacagagcg

SEQ ID NO: 38766 - DNA, 80 bp, synthetic construct
  misc_feature 1..80: note = Artificially Synthesized Probe
  source 1..80: mol_type = other DNA
gggctgtctggagctgtgctctcccccagtgtgaggaatcatcgaggcttctcggaggaggagagaacagaggacagtgc

SEQ ID NO: 38767 - DNA, 80 bp, synthetic construct
  misc_feature 1..80: note = Artificially Synthesized Probe
  source 1..80: mol_type = other DNA
agagagggtagagaggataagagatttttctttacctggcaaagtcctcatgggacttctgagcaggcatatcagaaaat

SEQ ID NO: 38768 - DNA, 80 bp, synthetic construct
  misc_feature 1..80: note = Artificially Synthesized Probe
  source 1..80: mol_type = other DNA
aagagcttgactccggttggaaaagaatggcctcagaaaggaaaattacagacaaatctcactcatgaccttggatgcaa

SEQ ID NO: 38769 - DNA, 80 bp, synthetic construct
  misc_feature 1..80: note = Artificially Synthesized Probe
  source 1..80: mol_type = other DNA
tctaaaaaaggttttgcagaagctctttgtggagatacttaaaaaaccagtttgaaagagaaatgtaggcagggcgcagt

SEQ ID NO: 38770 - DNA, 80 bp, synthetic construct
  misc_feature 1..80: note = Artificially Synthesized Probe
  source 1..80: mol_type = other DNA
aatttttcccaaattggtctattctgggtcaatgcaattctaaccaaaatcccaatagggtttgttgttgctgttttgtt

SEQ ID NO: 38771 - DNA, 80 bp, synthetic construct
  misc_feature 1..80: note = Artificially Synthesized Probe
  source 1..80: mol_type = other DNA
atatctatatttgagatggagtcttgctctgatgcccaggctgagcgcagtggtgtaatctcagctcacggcaatctcca

SEQ ID NO: 38772 - DNA, 80 bp, synthetic construct
  misc_feature 1..80: note = Artificially Synthesized Probe
  source 1..80: mol_type = other DNA
tcccagcaaaggcaccacaaacagtccagaaacataaaagatgctcaagtccattagtaatcaggaaacgcacattcaaa

SEQ ID NO: 38773 - DNA, 80 bp, synthetic construct
  misc_feature 1..80: note = Artificially Synthesized Probe
  source 1..80: mol_type = other DNA
aatacatgcatgatgtatgtttattctgaaatgcacgtggacccacaggctttggatagcgactaagaagctgtctatca

SEQ ID NO: 38774 - DNA, 80 bp, synthetic construct
  misc_feature 1..80: note = Artificially Synthesized Probe
  source 1..80: mol_type = other DNA
gcagaacctttgctcagtaggcacacaaatcattcttgagcaggtgagccactaataatgtgtcactgacaccaaggaac

SEQ ID NO: 38775 - DNA, 80 bp, synthetic construct
  misc_feature 1..80: note = Artificially Synthesized Probe
  source 1..80: mol_type = other DNA
ctacacatgtatacatacaacatgcattctacatacagcatagcggcatgccgcaagcatacgcagtgcttttcataaac

SEQ ID NO: 38776 - DNA, 80 bp, synthetic construct
  misc_feature 1..80: note = Artificially Synthesized Probe
  source 1..80: mol_type = other DNA
tcttaatggccggctgcctccggtggccttatttttagccatttccactctactgaccgctcagtgaagctcagatgtat

SEQ ID NO: 38777 - DNA, 80 bp, synthetic construct
  misc_feature 1..80: note = Artificially Synthesized Probe
  source 1..80: mol_type = other DNA
ctggaaatcagctcttctggctccattgcccatccttcccccaccttttccactgaagagactcctactcactctttaaa

SEQ ID NO: 38778 - DNA, 80 bp, synthetic construct
  misc_feature 1..80: note = Artificially Synthesized Probe
  source 1..80: mol_type = other DNA
gccttcctccccgggcaccaacagcaatatgtgccttttcaggtctgggaagaatgtggctccggggtctgggtactgca

SEQ ID NO: 38779 - DNA, 80 bp, synthetic construct
  misc_feature 1..80: note = Artificially Synthesized Probe
  source 1..80: mol_type = other DNA
cacctcacccagccagaagggatatttctttcctctttgtgaaaagagctactattttcagctactgactgggctacagg

SEQ ID NO: 38780 - DNA, 80 bp, synthetic construct
  misc_feature 1..80: note = Artificially Synthesized Probe
  source 1..80: mol_type = other DNA
tggcacggttttgaataacgagataatggaaacacaaacccatgctaattaatttcactgctcagagagagctcgctcct

SEQ ID NO: 38781 - DNA, 80 bp, synthetic construct
  misc_feature 1..80: note = Artificially Synthesized Probe
  source 1..80: mol_type = other DNA
aagaagccaggcgtaaaaggccacattctgtgattttatttataggaaatatacggaatcagtgcatccatagagacaga

SEQ ID NO: 38782 - DNA, 80 bp, synthetic construct
  misc_feature 1..80: note = Artificially Synthesized Probe
  source 1..80: mol_type = other DNA
ttgccttttcacatgtgaagccaacgcttcagaatgcaagaaaagtggcagctttcaaaaggagtttggaggttctcaga

SEQ ID NO: 38783 - DNA, 80 bp, synthetic construct
  misc_feature 1..80: note = Artificially Synthesized Probe
  source 1..80: mol_type = other DNA
gaagcctacctgtagcccccatctctgacagaggcaagatgaacaagcacctgccatttacctgatagcagctgcatctc

SEQ ID NO: 38784 - DNA, 80 bp, synthetic construct
  misc_feature 1..80: note = Artificially Synthesized Probe
  source 1..80: mol_type = other DNA
ggagtcacatgctggtttgcacagcaggtgtgtctttcatattagtgggcaatgactactgttttctaaagaggttgcaa

SEQ ID NO: 38785 - DNA, 80 bp, synthetic construct
  misc_feature 1..80: note = Artificially Synthesized Probe
  source 1..80: mol_type = other DNA
agtctccaactcctgacctcaaattatctgcccacttctgcctcccaaagtgctgggatcacaggcatgagccattgcgc

SEQ ID NO: 38786 - DNA, 80 bp, synthetic construct
  misc_feature 1..80: note = Artificially Synthesized Probe
  source 1..80: mol_type = other DNA
catgccatctgcaatgcttcatggaagacatcttccgatggcagagggggatcatgaactcaacactcagcctccctctg

SEQ ID NO: 38787 - DNA, 80 bp, synthetic construct
  misc_feature 1..80: note = Artificially Synthesized Probe
  source 1..80: mol_type = other DNA
cttggggcagagctgtcaggccattcagtccaatcctggggtttggtggtagaaggaagcccacccacccacaggtctaa

SEQ ID NO: 38788 - DNA, 80 bp, synthetic construct
  misc_feature 1..80: note = Artificially Synthesized Probe
  source 1..80: mol_type = other DNA
gagcaagttctcctgagggttaaaacattcacacctgagaaggaaggcagggtggggtgtggggggatctgaggcctccg

SEQ ID NO: 38789 - DNA, 80 bp, synthetic construct
  misc_feature 1..80: note = Artificially Synthesized Probe
  source 1..80: mol_type = other DNA
aatgagggaaagaggctttcatgatcaaggtggagtttaccccacgtgcatatgaccaaaactctgaaaaacagtatttt

SEQ ID NO: 38790 - DNA, 80 bp, synthetic construct
  misc_feature 1..80: note = Artificially Synthesized Probe
  source 1..80: mol_type = other DNA
agtcataaaacacaaggctggctacttagagcagaattacgaggcatttcagcttgtgaatacggtaatccagcttaatt

SEQ ID NO: 38791 - DNA, 80 bp, synthetic construct
  misc_feature 1..80: note = Artificially Synthesized Probe
  source 1..80: mol_type = other DNA
cccccttataaggacgcctgtggtcacactcaggcccccctaagcgatccgtgatgacctcctgattgcagcaagatccc

SEQ ID NO: 38792 - DNA, 80 bp, synthetic construct
  misc_feature 1..80: note = Artificially Synthesized Probe
  source 1..80: mol_type = other DNA
atggagattttggtggctgtccatgaagtacttaattaagcagaacaggtaatcccatcgttattacaagaaacacacag

SEQ ID NO: 38793 - DNA, 80 bp, synthetic construct
  misc_feature 1..80: note = Artificially Synthesized Probe
  source 1..80: mol_type = other DNA
ccaaggggcagtcctagacacttgaggagattaagtgtcataagacatcagcccctcttgtcctgatcactattttgcag

SEQ ID NO: 38794 - DNA, 80 bp, synthetic construct
  misc_feature 1..80: note = Artificially Synthesized Probe
  source 1..80: mol_type = other DNA
aagggccccacagctgcccggcagtgtatggaagagcccaggactcaactcatgtcaacccccgcccccacctgtgctgt

SEQ ID NO: 38795 - DNA, 80 bp, synthetic construct
  misc_feature 1..80: note = Artificially Synthesized Probe
  source 1..80: mol_type = other DNA
caaaaaaaaaaaaaattcctctccacatcctgtggggcctgtgcctgcctctcccacccttcccgcacttgggtgcatgg

SEQ ID NO: 38796 - DNA, 80 bp, synthetic construct
  misc_feature 1..80: note = Artificially Synthesized Probe
  source 1..80: mol_type = other DNA
agttgctttagaccaaggaaggagagagaattcagggctgtcagcattatgaaggtcccagggcatctcttccagcctat

SEQ ID NO: 38797 - DNA, 80 bp, synthetic construct
  misc_feature 1..80: note = Artificially Synthesized Probe
  source 1..80: mol_type = other DNA
aagaccaccctcaggtttggtgatttgtgggaaagactcgtagaactcactaaaagcacctatgctcacagttatggttt

SEQ ID NO: 38798 - DNA, 80 bp, synthetic construct
  misc_feature 1..80: note = Artificially Synthesized Probe
  source 1..80: mol_type = other DNA
gcctcccagaggtccacaagcccaagctgggggaaatctcagtgcagcctcttggatctctgtgcaaaaatgaaaaaaaa

SEQ ID NO: 38799 - DNA, 80 bp, synthetic construct
  misc_feature 1..80: note = Artificially Synthesized Probe
  source 1..80: mol_type = other DNA
cctgtagtacctctgaaaggccaatccttgtagcagccctgaaaggtccagatgcagccccttattctgcagaggaggag

SEQ ID NO: 38800 - DNA, 80 bp, synthetic construct
  misc_feature 1..80: note = Artificially Synthesized Probe
  source 1..80: mol_type = other DNA
tttaaagaattttgtgcatgaaacagttttcattgtgttttgactgggacttaccccatgaggtcaggcttggaatttta

SEQ ID NO: 38801 - DNA, 80 bp, synthetic construct
  misc_feature 1..80: note = Artificially Synthesized Probe
  source 1..80: mol_type = other DNA
agtcactactaagcagtgccttaatatatcaagagctcttttccccggggcctccttcagtccttatagtagctctgaaa

SEQ ID NO: 38802 - DNA, 80 bp, synthetic construct
  misc_feature 1..80: note = Artificially Synthesized Probe
  source 1..80: mol_type = other DNA
ctgaagggtttggtcagttctctgtcatttaacctagtgcttggtgatgaggacacagaatagagtgtggctctgctgct

SEQ ID NO: 38803 - DNA, 80 bp, synthetic construct
  misc_feature 1..80: note = Artificially Synthesized Probe
  source 1..80: mol_type = other DNA
aggcctctggaaattgtgtgtgatttcaagcaaagagacggtagtggttgaattttgtccccctaaaatccacgtctatg

SEQ ID NO: 38804 - DNA, 80 bp, synthetic construct
  misc_feature 1..80: note = Artificially Synthesized Probe
  source 1..80: mol_type = other DNA
ttctaaagcaaataaggtccaggttgcctaaaacaggggagggtagcctaaggctctcccagactcatgacaacttagaa

SEQ ID NO: 38805 - DNA, 80 bp, synthetic construct
  misc_feature 1..80: note = Artificially Synthesized Probe
  source 1..80: mol_type = other DNA
gaggacaatggaaaggttcactctgttctgggaaacgcttcatttagacgctaaacattagaatgcgatttgtccttcaa

SEQ ID NO: 38806 - DNA, 80 bp, synthetic construct
  misc_feature 1..80: note = Artificially Synthesized Probe
  source 1..80: mol_type = other DNA
agatgggcaacctgggcaccatgcagaatagtgtctgcagctgatttagacacgttgaatatataaatacgttatatata

SEQ ID NO: 38807 - DNA, 80 bp, synthetic construct
  misc_feature 1..80: note = Artificially Synthesized Probe
  source 1..80: mol_type = other DNA
acattaacagcgctgcaagagctcacctccatttataggaagtgggaaggacccaaggactggccgatgacaccacagga

SEQ ID NO: 38808 - DNA, 80 bp, synthetic construct
  misc_feature 1..80: note = Artificially Synthesized Probe
  source 1..80: mol_type = other DNA
aacaacagaaacaaaaatctaatttaaaaatgggcaaactggccaggtgaggtggctcatgcctgtaatcccagcacttt

SEQ ID NO: 38809 - DNA, 80 bp, synthetic construct
  misc_feature 1..80: note = Artificially Synthesized Probe
  source 1..80: mol_type = other DNA
aatacaaagtataactgtaaaaaaaaaaaggggggaggaagtgaatggagcaaatggcggctgtgatctcttgggggcca

SEQ ID NO: 38810 - DNA, 80 bp, synthetic construct
  misc_feature 1..80: note = Artificially Synthesized Probe
  source 1..80: mol_type = other DNA
gtgtgcaagtgtgtgagcatatgaatatgtgtgagcacgtgtgagcatctgtgtatgtgtaagcacgtgtgtgaacatat

SEQ ID NO: 38811 - DNA, 80 bp, synthetic construct
  misc_feature 1..80: note = Artificially Synthesized Probe
  source 1..80: mol_type = other DNA
tatagagaccctcctgctattcacagatgggggcaggtggggctgggctgggtgtttactcccctcctggccgggccacg

SEQ ID NO: 38812 - DNA, 80 bp, synthetic construct
  misc_feature 1..80: note = Artificially Synthesized Probe
  source 1..80: mol_type = other DNA
cgcggtggccgaggaagccctattttctttagtctgctcagcatttcttgtacaataataaaaacatctgaatttccaac

SEQ ID NO: 38813 - DNA, 80 bp, synthetic construct
  misc_feature 1..80: note = Artificially Synthesized Probe
  source 1..80: mol_type = other DNA
tgaaggccccaccttctaaaacaccatcacactgtggatgaggatttactgtatgaatttttcaggtgacacagaccatc

SEQ ID NO: 38814 - DNA, 80 bp, synthetic construct
  misc_feature 1..80: note = Artificially Synthesized Probe
  source 1..80: mol_type = other DNA
cgcatcgctgttgtctcaggccactcagtttctggtcatttgtgacagcggcctcaggacatgaatacagctatgcttca

SEQ ID NO: 38815 - DNA, 80 bp, synthetic construct
  misc_feature 1..80: note = Artificially Synthesized Probe
  source 1..80: mol_type = other DNA
cactgcgcctggactatgcttttttcttaaacgtgctttagcttgtctaggaggatccagtacaaggcattgtgagatca

SEQ ID NO: 38816 - DNA, 80 bp, synthetic construct
  misc_feature 1..80: note = Artificially Synthesized Probe
  source 1..80: mol_type = other DNA
catcctgcctagctactggcaattaggctgcctttgagataaattttctcgcctaaaaatgcccatgggtcttaaaactt

SEQ ID NO: 38817 - DNA, 80 bp, synthetic construct
  misc_feature 1..80: note = Artificially Synthesized Probe
  source 1..80: mol_type = other DNA
gatttggagtgttcccagcacaaagaaatacatgttggaggtgacgacatcgcagttatcctgatttgatccttagacat

SEQ ID NO: 38818 - DNA, 80 bp, synthetic construct
  misc_feature 1..80: note = Artificially Synthesized Probe
  source 1..80: mol_type = other DNA
aacatgctgggacttgccccagatttaacaggaaagcccaactattcaaaagttaaacaacaaaaagtgaagaacattgc

SEQ ID NO: 38819 - DNA, 80 bp, synthetic construct
  misc_feature 1..80: note = Artificially Synthesized Probe
  source 1..80: mol_type = other DNA
gtcactgagtcccactttgctgtgctcatttcattgattccttcctttatgcattcagcaaacaacagcccatgcctttt

SEQ ID NO: 38820 - DNA, 80 bp, synthetic construct
  misc_feature 1..80: note = Artificially Synthesized Probe
  source 1..80: mol_type = other DNA
tgtaatcagaaggctcatcgaaaaacactctggaaaaattaactgacaacaaaaaatgtcttcccggaaaagatgaggct

SEQ ID NO: 38821 - DNA, 80 bp, synthetic construct
  misc_feature 1..80: note = Artificially Synthesized Probe
  source 1..80: mol_type = other DNA
tatggagaagcatgggacctgaactctgcactctttgggaagaaggatcagataggattcaaatctgtttcaccaaccac

SEQ ID NO: 38822 - DNA, 80 bp, synthetic construct
  misc_feature 1..80: note = Artificially Synthesized Probe
  source 1..80: mol_type = other DNA
tatcatctgtatgtagaagtaagcccccagttttccttcaagtcttgcctgtgcataacttttgttccttccggctttct

SEQ ID NO: 38823 - DNA, 80 bp, synthetic construct
  misc_feature 1..80: note = Artificially Synthesized Probe
  source 1..80: mol_type = other DNA
atataaagaagtaaaattccacaaagataagccttgttatgcggacactgtctcctggtggcagcatccctggttttttc

SEQ ID NO: 38824 - DNA, 80 bp, synthetic construct
  misc_feature 1..80: note = Artificially Synthesized Probe
  source 1..80: mol_type = other DNA
tgaccccctaggtcctgccatggagactgaacacaaaggagatgcatgggaaagtctgctccatgggacccatctgaaga

SEQ ID NO: 38825 - DNA, 80 bp, synthetic construct
  misc_feature 1..80: note = Artificially Synthesized Probe
  source 1..80: mol_type = other DNA
gggaggtggatagtaagtcagtcacctaacacgggagatgtatgattcctatggtcatggaagcacacggtgtgagtgtg

SEQ ID NO: 38826 - DNA, 80 bp, synthetic construct
  misc_feature 1..80: note = Artificially Synthesized Probe
  source 1..80: mol_type = other DNA
tgccagaaactgctacatgcttcacacacacttttatttacagttcaagaaactgaggccaagaaatgagcaacctgccc

SEQ ID NO: 38827 - DNA, 80 bp, synthetic construct
  misc_feature 1..80: note = Artificially Synthesized Probe
  source 1..80: mol_type = other DNA
tcaaaaccatctaaataagagtggaagaaattttggggatggggtggagagttcctagattggtcatcaggtccaccagc

SEQ ID NO: 38828 - DNA, 80 bp, synthetic construct
  misc_feature 1..80: note = Artificially Synthesized Probe
  source 1..80: mol_type = other DNA
cattttatcaacacgaatactgggacccagcaagcataatgactgatcatgctgcatctggacttcattttctttccctt

SEQ ID NO: 38829 - DNA, 80 bp, synthetic construct
  misc_feature 1..80: note = Artificially Synthesized Probe
  source 1..80: mol_type = other DNA
atcagtcattaggcttgctgggtcccagtattcctgttgataaattgggtggttgtgacagtagcagaatcacctgagat

SEQ ID NO: 38830 - DNA, 80 bp, synthetic construct
  misc_feature 1..80: note = Artificially Synthesized Probe
  source 1..80: mol_type = other DNA
gatgatattgtgctgatcattttgattctgcctttctcactaagtagaatgtaaccttttctggttggtattaagagctc

SEQ ID NO: 38831 - DNA, 80 bp, synthetic construct
  misc_feature 1..80: note = Artificially Synthesized Probe
  source 1..80: mol_type = other DNA
gctgctataaacaaggacacagccttcttgggacatttgttgcaaatgttgtttgccctctgcctgcctgctgttgagtt

SEQ ID NO: 38832 - DNA, 80 bp, synthetic construct
  misc_feature 1..80: note = Artificially Synthesized Probe
  source 1..80: mol_type = other DNA
tcaaatgtccctacccgtgggacattcacttatctttcacgtccacctctgaggtgaaccttttattaccacacagcttg

SEQ ID NO: 38833 - DNA, 80 bp, synthetic construct
  misc_feature 1..80: note = Artificially Synthesized Probe
  source 1..80: mol_type = other DNA
ttaatattccggtggcaaaatccagtcgctaggaacacaactcaatggaattctcagtcttaagcccctagaggagaatt

SEQ ID NO: 38834 - DNA, 80 bp, synthetic construct
  misc_feature 1..80: note = Artificially Synthesized Probe
  source 1..80: mol_type = other DNA
cattcaaaccaggttctgattggtcaataataatttaaatgcatcttccagcaaatcaaagagatcaacatgaggcactc

SEQ ID NO: 38835 - DNA, 80 bp, synthetic construct
  misc_feature 1..80: note = Artificially Synthesized Probe
  source 1..80: mol_type = other DNA
tttccttttcagtaccagcaaaagttcattttcaaagcatctgaattcctaagtttcctttttgcaccatcgacaccagc

SEQ ID NO: 38836 - DNA, 80 bp, synthetic construct
  misc_feature 1..80: note = Artificially Synthesized Probe
  source 1..80: mol_type = other DNA
gtgactaaacattttcggttctaaaaatggaaaagttcctcccctgccacacagagctacagaaacaccacactaaacca

SEQ ID NO: 38837 - DNA, 80 bp, synthetic construct
  misc_feature 1..80: note = Artificially Synthesized Probe
  source 1..80: mol_type = other DNA
ccagagctctgagggtagccacagtctggctcaactagaacacaaaatactgaccaccccatcatttaaaaacaaaaggt

SEQ ID NO: 38838 - DNA, 80 bp, synthetic construct
  misc_feature 1..80: note = Artificially Synthesized Probe
  source 1..80: mol_type = other DNA
tcagccagaggagaaatgaggcagcagttttgttttgcttttccttgaagggggtttaaaataaaatcaaatcctatctg

SEQ ID NO: 38839 - DNA, 80 bp, synthetic construct
  misc_feature 1..80: note = Artificially Synthesized Probe
  source 1..80: mol_type = other DNA
ggggagtgagatgaaggctaccggcacccccccgccccgtaggactctgctgctgcccggaagttagtggggagctggga

SEQ ID NO: 38840 - DNA, 80 bp, synthetic construct
  misc_feature 1..80: note = Artificially Synthesized Probe
  source 1..80: mol_type = other DNA
atggttattgtgacctttagaaaatgatggggctctctaaacctcagtttccctgcacagcaagagtgggtaagaacaaa

SEQ ID NO: 38841 - DNA, 80 bp, synthetic construct
  misc_feature 1..80: note = Artificially Synthesized Probe
  source 1..80: mol_type = other DNA
acccccttcctcctacagggacccctctgatctcgacatccagggctaaaaccttttcagtgattcctaatgcacccaag

SEQ ID NO: 38842 - DNA, 80 bp, synthetic construct
  misc_feature 1..80: note = Artificially Synthesized Probe
  source 1..80: mol_type = other DNA
tacttacagcctcaatttcctgacctgcaaagttggggagaaacctctggcttgtaagttttaggaggagcaagtgaggc

SEQ ID NO: 38843 - DNA, 80 bp, synthetic construct
  misc_feature 1..80: note = Artificially Synthesized Probe
  source 1..80: mol_type = other DNA
attgattgaacaaaaaatgtaatccagcggcgcactccccaaatgttttctgagctaggtggaagggcactttgacatgc

SEQ ID NO: 38844 - DNA, 80 bp, synthetic construct
  misc_feature 1..80: note = Artificially Synthesized Probe
  source 1..80: mol_type = other DNA
ctgtgtgcctccccacacatggggtggatagatgtggacattttaactctgaacaccagtgttattggggtagaccagat

SEQ ID NO: 38845 - DNA, 80 bp, synthetic construct
  misc_feature 1..80: note = Artificially Synthesized Probe
  source 1..80: mol_type = other DNA
ctggaggaggaggactgaagtatacataggagaatgggttggaggactggggaggggacagaagagaaaagaacattcca

SEQ ID NO: 38846 - DNA, 80 bp, synthetic construct
  misc_feature 1..80: note = Artificially Synthesized Probe
  source 1..80: mol_type = other DNA
agggacccccaaatgtgtctgcaacctgaaaaataaaattcactggctccaaaatccaaagagaaaacaacagtgcggtt

SEQ ID NO: 38847 - DNA, 80 bp, synthetic construct
  misc_feature 1..80: note = Artificially Synthesized Probe
  source 1..80: mol_type = other DNA
attgctgtttccagggcaggaggtgatgactttgggcaattcctgcacggaggggactcctcctggctcccaggagccac

SEQ ID NO: 38848 - DNA, 80 bp, synthetic construct
  misc_feature 1..80: note = Artificially Synthesized Probe
  source 1..80: mol_type = other DNA
tagaacttgcttcattctggagaccttatgcataaacagatattttcacttgtccccaggtaaaagactctcctactgag

SEQ ID NO: 38849 - DNA, 80 bp, synthetic construct
  misc_feature 1..80: note = Artificially Synthesized Probe
  source 1..80: mol_type = other DNA
ttccagccatgctgccatcctctcttcctccagcaggtcacactcatctccacacagtgcctttgcgttgcctgtgcaat

SEQ ID NO: 38850 - DNA, 80 bp, synthetic construct
  misc_feature 1..80: note = Artificially Synthesized Probe
  source 1..80: mol_type = other DNA
aaaaaaaaatcaggggaacagtacaactgcctggcattttgctgtgagtgcaggaagggactgttgatgacttttccttc

SEQ ID NO: 38851 - DNA, 80 bp, synthetic construct
  misc_feature 1..80: note = Artificially Synthesized Probe
  source 1..80: mol_type = other DNA
cctagttcccacaagatctgattgttaaacagagtctggcactttcctcttctctctctttcctcctctcttgccatgtg

SEQ ID NO: 38852 - DNA, 80 bp, synthetic construct
  misc_feature 1..80: note = Artificially Synthesized Probe
  source 1..80: mol_type = other DNA
ttagtgtaattattatgctacggcctttgagcaccttccacacaccaggcgttgttctaagtgttctgtgggtttaacta

SEQ ID NO: 38853 - DNA, 80 bp, synthetic construct
  misc_feature 1..80: note = Artificially Synthesized Probe
  source 1..80: mol_type = other DNA
acttccaagaggaccttaatgctgtccctcacgtgacactgtgtgcttagagggaggggactaagtcttctttctccacc

SEQ ID NO: 38854 - DNA, 80 bp, synthetic construct
  misc_feature 1..80: note = Artificially Synthesized Probe
  source 1..80: mol_type = other DNA
aatgaactttggttcagaaaacagaactaaggaaaagtggtttccttggactcaaccggtctgaatttcccactaaccac

SEQ ID NO: 38855 - DNA, 80 bp, synthetic construct
  misc_feature 1..80: note = Artificially Synthesized Probe
  source 1..80: mol_type = other DNA
ccccagccagtttctcactttaaatcttccccattctccaggacttcctgatttccttctcattttccttcttgttcttt

SEQ ID NO: 38856 - DNA, 80 bp, synthetic construct
  misc_feature 1..80: note = Artificially Synthesized Probe
  source 1..80: mol_type = other DNA
agatatccccaggttacctccaagctccaacacactcactctccttagccaggggatctcagcatgctcgctaggacaac

SEQ ID NO: 38857 - DNA, 80 bp, synthetic construct
  misc_feature 1..80: note = Artificially Synthesized Probe
  source 1..80: mol_type = other DNA
caacagttgtgtgatccattcccaaatccacagagcccagggtgactgtggcctttggggctgcacagtcccttcccaga

SEQ ID NO: 38858 - DNA, 80 bp, synthetic construct
  misc_feature 1..80: note = Artificially Synthesized Probe
  source 1..80: mol_type = other DNA
tctttccctggtgaggctcaaggtggatgaggctttaatatggagtgggggtgttttcaacaatctttcgcagattgtgg

SEQ ID NO: 38859 - DNA, 80 bp, synthetic construct
  misc_feature 1..80: note = Artificially Synthesized Probe
  source 1..80: mol_type = other DNA
cggtaaccttctctggcaaggttaaagggtctatcagattcccggcccagaaactaattagataaagaggaaacctgggc

SEQ ID NO: 38860 - DNA, 80 bp, synthetic construct
  misc_feature 1..80: note = Artificially Synthesized Probe
  source 1..80: mol_type = other DNA
cattctttgaatatcttgagatggaaaagtgggcactgttgttttctaaaacagacaatgaagatgggagggagagaggg

SEQ ID NO: 38861 - DNA, 80 bp, synthetic construct
  misc_feature 1..80: note = Artificially Synthesized Probe
  source 1..80: mol_type = other DNA
aggcattccttgtcttggggtcaatctctctaatctctgcctctgtggtcatgtggctttctcctcttctagcttcatga

SEQ ID NO: 38862 - DNA, 80 bp, synthetic construct
  misc_feature 1..80: note = Artificially Synthesized Probe
  source 1..80: mol_type = other DNA
gaaagagtgtcaaggtgggagcaggtaaacccttggcccctgtccgtcactcagtgtgactcagtgagtgcctgagtcac

SEQ ID NO: 38863 - DNA, 80 bp, synthetic construct
  misc_feature 1..80: note = Artificially Synthesized Probe
  source 1..80: mol_type = other DNA
ttccaagctggaccctcccgaagacttggatgggctgcatctctttgtaatcctaagcatggggacaggtgcccagtgct

SEQ ID NO: 38864 - DNA, 80 bp, synthetic construct
  misc_feature 1..80: note = Artificially Synthesized Probe
  source 1..80: mol_type = other DNA
tcatctgtctatccatccatcttctcacctctctctccactcaactctccattctctgagagctggacatttgccagacc

SEQ ID NO: 38865 - DNA, 80 bp, synthetic construct
  misc_feature 1..80: note = Artificially Synthesized Probe
  source 1..80: mol_type = other DNA
tatattcacaagagatctcagcaatgatgtaggcattttacaatgtagccatcttacaaatggggaaactaaggcccgtg

SEQ ID NO: 38866 - DNA, 80 bp, synthetic construct
  misc_feature 1..80: note = Artificially Synthesized Probe
  source 1..80: mol_type = other DNA
acctaccctcaccttggtctggggccaaggtccaaagtccccaagtcaggtgcttgacgtcataaaactgcaaggggaag

SEQ ID NO: 38867 - DNA, 80 bp, synthetic construct
  misc_feature 1..80: note = Artificially Synthesized Probe
  source 1..80: mol_type = other DNA
tggctggctggtttgttcacaaagagatccggaaaccacttctctcaagctttagaagcttatcccattgttgaaaggaa

SEQ ID NO: 38868 - DNA, 80 bp, synthetic construct
  misc_feature 1..80: note = Artificially Synthesized Probe
  source 1..80: mol_type = other DNA
agagttttgaaactggagttctacaacctggagaacatttgataactagggaatttccagacagggaggttacattccag

SEQ ID NO: 38869 - DNA, 80 bp, synthetic construct
  misc_feature 1..80: note = Artificially Synthesized Probe
  source 1..80: mol_type = other DNA
caaagtgctgaggttacagatgtgaaccactgtgctcaccctccactgttttttaacttctgagtccaacttggagacaa

SEQ ID NO: 38870 - DNA, 80 bp, synthetic construct
  misc_feature 1..80: note = Artificially Synthesized Probe
  source 1..80: mol_type = other DNA
gggccatctgtggttgtgatgccttcctttgcctatgcccagagaaatacctctctgtttcaaaaaactacaaaagaact

SEQ ID NO: 38871 - DNA, 80 bp, synthetic construct
  misc_feature 1..80: note = Artificially Synthesized Probe
  source 1..80: mol_type = other DNA
gagagataacttaggaccggtgatttctcagcgtctttagaacgcttcagataacatgcatatatgcttctatttgcagg

SEQ ID NO: 38872 - DNA, 80 bp, synthetic construct
  misc_feature 1..80: note = Artificially Synthesized Probe
  source 1..80: mol_type = other DNA
ttttcatgaagcacgaggtctttctctgacattactgcctctaatctcttctaggccatggctattcctgcagtgtcgaa

SEQ ID NO: 38873 - DNA, 80 bp, synthetic construct
  misc_feature 1..80: note = Artificially Synthesized Probe
  source 1..80: mol_type = other DNA
tggaacagctgaatatgttcactaatgaattggtgtgtttcaacatttggctctccagctctgagactctgagcagtttt

SEQ ID NO: 38874 - DNA, 80 bp, synthetic construct
  misc_feature 1..80: note = Artificially Synthesized Probe
  source 1..80: mol_type = other DNA
tctggagctggacggtggtgtcggttgcacaacacagtgaatgtcttaataccactagactagtgattcacttaaaaatg

SEQ ID NO: 38875 - DNA, 80 bp, synthetic construct
  misc_feature 1..80: note = Artificially Synthesized Probe
  source 1..80: mol_type = other DNA
acaccaaaacagggatgcagagttggtggggatcttggaggtcatccagtccaatcttctgtgacattctggcaagagaa

SEQ ID NO: 38876 - DNA, 80 bp, synthetic construct
  misc_feature 1..80: note = Artificially Synthesized Probe
  source 1..80: mol_type = other DNA
ttccttttacagcacacctcatttacaagagaagcggttgggacaggtcagcattataactgagtccaatgagcaattct

SEQ ID NO: 38877 - DNA, 80 bp, synthetic construct
  misc_feature 1..80: note = Artificially Synthesized Probe
  source 1..80: mol_type = other DNA
acattttacttcaatcaaaacagacaaacaaaaacaaatcaatcagctaacccaggttggatccctccacaggcaggtct

SEQ ID NO: 38878 - DNA, 80 bp, synthetic construct
  misc_feature 1..80: note = Artificially Synthesized Probe
  source 1..80: mol_type = other DNA
gaagctgtcataggagcccacggtgtagtgcctgaaaagcttcttgctgcggtcagcgcgggtttctgtacagagaggga

SEQ ID NO: 38879 - DNA, 80 bp, synthetic construct
  misc_feature 1..80: note = Artificially Synthesized Probe
  source 1..80: mol_type = other DNA
aaccttctctgttgttagcctcctccatcccaaattctgaggtgaaatcattttttcttccactcaaaccccaaaatgca

SEQ ID NO: 38880 - DNA, 80 bp, synthetic construct
  misc_feature 1..80: note = Artificially Synthesized Probe
  source 1..80: mol_type = other DNA
caaaaagacgcattgcacgattaccagataaaaacacagtatacacaatcagattggtcagagtgcacagggccctcacc

SEQ ID NO: 38881 - DNA, 80 bp, synthetic construct
  misc_feature 1..80: note = Artificially Synthesized Probe
  source 1..80: mol_type = other DNA
tggtgcgatctcagctcactgtaagctctgccttccaggtcacgccattctcatgcctcagcctcccgagtagctaggac

SEQ ID NO: 38882 - DNA, 80 bp, synthetic construct
  misc_feature 1..80: note = Artificially Synthesized Probe
  source 1..80: mol_type = other DNA
catcaccaccatcaccaccaacatcatcaccaccatcatcactatcatcaccactaatcatcatcatgaccccatcacca

SEQ ID NO: 38883 - DNA, 80 bp, synthetic construct
  misc_feature 1..80: note = Artificially Synthesized Probe
  source 1..80: mol_type = other DNA
ttcccaaggctccctggatctcactggtgaaaacgtgggtcacaaataaaacaccctgaggcagacgaggggaggagcag

SEQ ID NO: 38884 - DNA, 80 bp, synthetic construct
  misc_feature 1..80: note = Artificially Synthesized Probe
  source 1..80: mol_type = other DNA
taggaatgatgcagtaatgcatttaatagttgtgctgctgcactgcgtggctaagaaactgccgtggctacatagcttct

SEQ ID NO: 38885 - DNA, 80 bp, synthetic construct
  misc_feature 1..80: note = Artificially Synthesized Probe
  source 1..80: mol_type = other DNA
cctctgagagaatggctgtactttctaggagaaaaggaaaaaaccacctactagacaatggaaatggatcccattaagca

SEQ ID NO: 38886 - DNA, 80 bp, synthetic construct
  misc_feature 1..80: note = Artificially Synthesized Probe
  source 1..80: mol_type = other DNA
gtccagacacctcacacatgcagcatttgagcatgcagggcctgaaagctgttttctgagtatggcctagaaaaatctac

SEQ ID NO: 38887 - DNA, 80 bp, synthetic construct
  misc_feature 1..80: note = Artificially Synthesized Probe
  source 1..80: mol_type = other DNA
tgagacacacgtggacagacagaggcaggaaggatacacaacagtccatctttagacaagacaagctcgagcttaaatct

SEQ ID NO: 38888 - DNA, 80 bp, synthetic construct
  misc_feature 1..80: note = Artificially Synthesized Probe
  source 1..80: mol_type = other DNA
tgggcatccttgcctccaatctctaaacattgggattcaagatgacaaccaagtaacgtcccctccacgtttccaatcag

SEQ ID NO: 38889 - DNA, 80 bp, synthetic construct
  misc_feature 1..80: note = Artificially Synthesized Probe
  source 1..80: mol_type = other DNA
acaaaacaaaacatactaagaattccgatgtaggcgaattctgaatgggacagttcaaaaggtgactgcagagagctgag

SEQ ID NO: 38890 - DNA, 80 bp, synthetic construct
  misc_feature 1..80: note = Artificially Synthesized Probe
  source 1..80: mol_type = other DNA
ttttctaggcgctctcccagatcaaaacccaccaccacctttgcactgaaaacccctgtcctgagatgaacgcgatttta

SEQ ID NO: 38891 - DNA, 80 bp, synthetic construct
  misc_feature 1..80: note = Artificially Synthesized Probe
  source 1..80: mol_type = other DNA
aggcatgtgggtgaagggaattcccagaacatcttcccttcttccctcccttgaaatccatcatcctctctgaactctca

SEQ ID NO: 38892 - DNA, 80 bp, synthetic construct
  misc_feature 1..80: note = Artificially Synthesized Probe
  source 1..80: mol_type = other DNA
aaagcaacacgtatcacaaaaatgccgccaactggctcggctcacttgttccttttctcaatcagcagcagatcattcat

SEQ ID NO: 38893 - DNA, 80 bp, synthetic construct
  misc_feature 1..80: note = Artificially Synthesized Probe
  source 1..80: mol_type = other DNA
agcaccaacaagcacccgagtccatagttccacttgttcccagctccctggaagatcgtggttcctcccatgtgcgcaca

SEQ ID NO: 38894 - DNA, 80 bp, synthetic construct
  misc_feature 1..80: note = Artificially Synthesized Probe
  source 1..80: mol_type = other DNA
cttgatctgtccttttccaccatccgtcatgccttgccgtgtgccacacacaccatttaagtgtaaaacacactctcttc

SEQ ID NO: 38895 - DNA, 80 bp, synthetic construct
  misc_feature 1..80: note = Artificially Synthesized Probe
  source 1..80: mol_type = other DNA
tgtttagccacaaagagccccatgagacaggcactgtcattataataatcacttatcagatgtggaaatcgaggcaccgg

SEQ ID NO: 38896 - DNA, 80 bp, synthetic construct
  misc_feature 1..80: note = Artificially Synthesized Probe
  source 1..80: mol_type = other DNA
caggagctcagtggaagcatgtataccaatacatcgagccaaactcacagtttaaatggaaattagagtaaatggatgaa

SEQ ID NO: 38897 - DNA, 80 bp, synthetic construct
  misc_feature 1..80: note = Artificially Synthesized Probe
  source 1..80: mol_type = other DNA
aatcttttttaaggatgccggcagctgaggcttcggaaataggacatctagaaaaaagacctgttgagctcaaggaaacc

SEQ ID NO: 38898 - DNA, 80 bp, synthetic construct
  misc_feature 1..80: note = Artificially Synthesized Probe
  source 1..80: mol_type = other DNA
ccctgggattctggatgcaactgagaagcctgtttcctcccgaatgatctgaggctatatctttatttccattctaaatc

SEQ ID NO: 38899 - DNA, 80 bp, synthetic construct
  misc_feature 1..80: note = Artificially Synthesized Probe
  source 1..80: mol_type = other DNA
cacttcccactgtaccagggacttttttttcccctagtgccagtttccatggcaatgcatcagtcactagtctaaataag

SEQ ID NO: 38900 - DNA, 80 bp, synthetic construct
  misc_feature 1..80: note = Artificially Synthesized Probe
  source 1..80: mol_type = other DNA
ctttgattcccgttagcccacccacgttggaatagacactttgtgacggttcaaatagacactttgtaacagttcaaaga

SEQ ID NO: 38901 - DNA, 80 bp, synthetic construct
  misc_feature 1..80: note = Artificially Synthesized Probe
  source 1..80: mol_type = other DNA
cacacgagatcctcttgtcccactgcgctggaatcttaaaggttcctgtccttggagacaccctatcttgccaggaaaat

SEQ ID NO: 38902 - DNA, 80 bp, synthetic construct
  misc_feature 1..80: note = Artificially Synthesized Probe
  source 1..80: mol_type = other DNA
acatgttggggaggaacagaggagagactgggaattgggaattcttttctttggaaaaataatctcaaggctttctttcc

SEQ ID NO: 38903 - DNA, 80 bp, synthetic construct
  misc_feature 1..80: note = Artificially Synthesized Probe
  source 1..80: mol_type = other DNA
gcacagcgtgttttgagcacggcttgaatacatacaattcttcaggaatgccaatgacttcaacatcaagggaagaatgt

SEQ ID NO: 38904 - DNA, 80 bp, synthetic construct
  misc_feature 1..80: note = Artificially Synthesized Probe
  source 1..80: mol_type = other DNA
ctattagaggtgagaaccacagagcaaaaatgagagatggtttcttaaagggttgaggatggtggagctaggaataaagg

SEQ ID NO: 38905 - DNA, 80 bp, synthetic construct
  misc_feature 1..80: note = Artificially Synthesized Probe
  source 1..80: mol_type = other DNA
gtaaatgcatgttgttggagccactgattttatggtaatattgtcatgcagcaacaggtgactaatcaagtcccacactg

SEQ ID NO: 38906 - DNA, 80 bp, synthetic construct
  misc_feature 1..80: note = Artificially Synthesized Probe
  source 1..80: mol_type = other DNA
atcctctcctcctttgatctcatcaagcatggtatccttttggaaatatcagacagcatccaatttagaggatgcaagag

SEQ ID NO: 38907 - DNA, 80 bp, synthetic construct
  misc_feature 1..80: note = Artificially Synthesized Probe
  source 1..80: mol_type = other DNA
actctacgtattttattccctgtcttcatggatgacccggtagacctctgaagacaactgaaagatggtgtacaatgaat

SEQ ID NO: 38908 - DNA, 80 bp, synthetic construct
  misc_feature 1..80: note = Artificially Synthesized Probe
  source 1..80: mol_type = other DNA
ggtggaagccaaaaggcaggggcaagtgtctctgtctgtggagatcaaagattttcagagagggagaaagtaagctcatt

SEQ ID NO: 38909 - DNA, 80 bp, synthetic construct
  misc_feature 1..80: note = Artificially Synthesized Probe
  source 1..80: mol_type = other DNA
actgactcttgtgtagtttccagggctttctggcaactaaggtggtaggtaatttgttccctgatgtaagaggcaccatg

SEQ ID NO: 38910 - DNA, 80 bp, synthetic construct
  misc_feature 1..80: note = Artificially Synthesized Probe
  source 1..80: mol_type = other DNA
gacagagataatggattcttacccaaacaacacatcttcctggaaacaaacaaggcacaaacaaatacgcacgcccagaa

SEQ ID NO: 38911 - DNA, 80 bp, synthetic construct
  misc_feature 1..80: note = Artificially Synthesized Probe
  source 1..80: mol_type = other DNA
cgagagagaggtggctgttgtacatacctgtgaatgtactcatgccactgcactgtgtactttcttcatttttttttttt

SEQ ID NO: 38912 - DNA, 80 bp, synthetic construct
  misc_feature 1..80: note = Artificially Synthesized Probe
  source 1..80: mol_type = other DNA
cttggagaggaggaagtgggacctgtgtgccagctgctattatgtgtttcaatcttatcatcaatgctatttgcagcatg

SEQ ID NO: 38913 - DNA, 80 bp, synthetic construct
  misc_feature 1..80: note = Artificially Synthesized Probe
  source 1..80: mol_type = other DNA
gataactaaggttaaatgaggttgtaaaggtggggtcctgatccttaggattagagtccttataagaagagaaagaaaca

SEQ ID NO: 38914 - DNA, 80 bp, synthetic construct
  misc_feature 1..80: note = Artificially Synthesized Probe
  source 1..80: mol_type = other DNA
ccagttgctgaagccgcaagcctcgcctctgctctcaccctccacagccaatcagacagcaagtgcctgcaggtcacaga

SEQ ID NO: 38915 - DNA, 80 bp, synthetic construct
  misc_feature 1..80: note = Artificially Synthesized Probe
  source 1..80: mol_type = other DNA
cagcccgcgcgaatagtgctctgtggaatgaatgaattctaagcttctcctgcatgtcagatgctgccgatggagtgatg

SEQ ID NO: 38916 - DNA, 80 bp, synthetic construct
  misc_feature 1..80: note = Artificially Synthesized Probe
  source 1..80: mol_type = other DNA
tctgtgtacttgctcgcgcactcacacactcatggaagacaggggagggtgtgcagtgactggggagaggggaagagtca

SEQ ID NO: 38917 - DNA, 80 bp, synthetic construct
  misc_feature 1..80: note = Artificially Synthesized Probe
  source 1..80: mol_type = other DNA
cccccaggcttgggaaggaaagagaaattctgccaagaacagagtacaaggcccatgaagctgggaatggcaggatattt

SEQ ID NO: 38918 - DNA, 80 bp, synthetic construct
  misc_feature 1..80: note = Artificially Synthesized Probe
  source 1..80: mol_type = other DNA
tgaggttcttgtagctctctcttcagcgtgtccacccttcaggcaggtggctgcgtggtcatgctctccaaaccctacac

SEQ ID NO: 38919 - DNA, 80 bp, synthetic construct
  misc_feature 1..80: note = Artificially Synthesized Probe
  source 1..80: mol_type = other DNA
ccaccctcacacccttcagatcccagggatgaagcaaaggacagcaccatctccctgggggtgaagtggcttctccagaa

SEQ ID NO: 38920 - DNA, 80 bp, synthetic construct
  misc_feature 1..80: note = Artificially Synthesized Probe
  source 1..80: mol_type = other DNA
ccacagacccttacatcgcaaacattttgaggacaaatgattccagaatgaaggcttcttggggccggttttccctgcac

SEQ ID NO: 38921 - DNA, 80 bp, synthetic construct
  misc_feature 1..80: note = Artificially Synthesized Probe
  source 1..80: mol_type = other DNA
cggaatctacaaagctgccccatggtgttctggtctgtttaggcccaaacttatccactgtttcagctacccaagggacc

SEQ ID NO: 38922 - DNA, 80 bp, synthetic construct
  misc_feature 1..80: note = Artificially Synthesized Probe
  source 1..80: mol_type = other DNA
ctgtgccttgtctggggaacacctggatcatgacctgtggctgctgggctccaccagatcatgtgatttgtcttgttctg

SEQ ID NO: 38923 - DNA, 80 bp, synthetic construct
  misc_feature 1..80: note = Artificially Synthesized Probe
  source 1..80: mol_type = other DNA
aggtgctgaatgaaagactgaaagggcttctctgccgctgcagcccacatctgtatgaatgaaaaccataaaggttgtcc

SEQ ID NO: 38924 - DNA, 80 bp, synthetic construct
  misc_feature 1..80: note = Artificially Synthesized Probe
  source 1..80: mol_type = other DNA
tccatccaatcatccatctcataaactgagctattgctcattgagcacctacctgatataccttctcccacttttgaact

SEQ ID NO: 38925 - DNA, 80 bp, synthetic construct
  misc_feature 1..80: note = Artificially Synthesized Probe
  source 1..80: mol_type = other DNA
ccgagtccccacctcctcatctgtaaaatggagtaatgaaaaccactcacaaggcaaaacattagatacactggctgtcc

SEQ ID NO: 38926 - DNA, 80 bp, synthetic construct
  misc_feature 1..80: note = Artificially Synthesized Probe
  source 1..80: mol_type = other DNA
ggaaatggaaagaaagtttgccttgggctggaagtagaaaattcacacctctgacgccttgcacatatttgatgagccgg

SEQ ID NO: 38927 - DNA, 80 bp, synthetic construct
  misc_feature 1..80: note = Artificially Synthesized Probe
  source 1..80: mol_type = other DNA
ttccctgtccaccaattcctgtggattcaggctccaaaacgtctttctttctcaggtctccttccctcctttcctacccg

SEQ ID NO: 38928 - DNA, 80 bp, synthetic construct
  misc_feature 1..80: note = Artificially Synthesized Probe
  source 1..80: mol_type = other DNA
tggaattgtgatggctggggaccgaagtgccagcgtttctccaagcactaggacatcgcacagccagacgaagtttcttg

SEQ ID NO: 38929 - DNA, 80 bp, synthetic construct
  misc_feature 1..80: note = Artificially Synthesized Probe
  source 1..80: mol_type = other DNA
gaagttgcagagccttggtgggaaacgcattgctgaggatgcaaatgcaactgaggctcaaaaggtggcctcatgccctg

SEQ ID NO: 38930 - DNA, 80 bp, synthetic construct
  misc_feature 1..80: note = Artificially Synthesized Probe
  source 1..80: mol_type = other DNA
tgggtgactcttctgtgtccccaggcatgtcacacgacctcccacctcagctcctctatgccccgctgcccccacactgg

SEQ ID NO: 38931 - DNA, 80 bp, synthetic construct
  misc_feature 1..80: note = Artificially Synthesized Probe
  source 1..80: mol_type = other DNA
ttccttgtcacatcctggaaggacagctgagtaactgaagattggcttacagactagtgttgggatttggaagcctgttt

SEQ ID NO: 38932 - DNA, 80 bp, synthetic construct
  misc_feature 1..80: note = Artificially Synthesized Probe
  source 1..80: mol_type = other DNA
tacccacccccaatataattccttctaactgttaaggtgcagacaaactagaagaaggacattgtttacaacacaaccgt

SEQ ID NO: 38933 - DNA, 80 bp, synthetic construct
  misc_feature 1..80: note = Artificially Synthesized Probe
  source 1..80: mol_type = other DNA
attctcaagagaaaagacaagagatagcaggcttgagatgatgcagatgctggacctaggaggcaatgagtttaatgcca

SEQ ID NO: 38934 - DNA, 80 bp, synthetic construct
  misc_feature 1..80: note = Artificially Synthesized Probe
  source 1..80: mol_type = other DNA
ctgaaagccacatgtgtataacaagtgtggataaaaagagcttcaagaaaagggagccccaaggttcagagtgcatggga

SEQ ID NO: 38935 - DNA, 80 bp, synthetic construct
  misc_feature 1..80: note = Artificially Synthesized Probe
  source 1..80: mol_type = other DNA
ttcatacagaagaaaaaccacaggaattactgcagattcctcatcagaactatggaggtcagaaggaagtggaacagtat

SEQ ID NO: 38936 - DNA, 80 bp, synthetic construct
  misc_feature 1..80: note = Artificially Synthesized Probe
  source 1..80: mol_type = other DNA
gccagagtggctatattaatatcaaagtagtctcaagtgcaaggaaaattgccagggataaataggaacattgaataatg

SEQ ID NO: 38937 - DNA, 80 bp, synthetic construct
  misc_feature 1..80: note = Artificially Synthesized Probe
  source 1..80: mol_type = other DNA
gccacacgatgatactggaaaatttccacattcctacgttctcagcaatcaacaacagaggacaagtcagcaaggctata

SEQ ID NO: 38938 - DNA, 80 bp, synthetic construct
  misc_feature 1..80: note = Artificially Synthesized Probe
  source 1..80: mol_type = other DNA
actacgcctgacaattgtgtagtttaaaaagcatctgaaaaagacttcttgactccagtgatttcgctggtgaattttgc

SEQ ID NO: 38939 - DNA, 80 bp, synthetic construct
  misc_feature 1..80: note = Artificially Synthesized Probe
  source 1..80: mol_type = other DNA
tgcagagagacatcgattacagggaggcacctgggtccctaagaagatactaatacagcaataataacggctatgattac

SEQ ID NO: 38940 - DNA, 80 bp, synthetic construct
  misc_feature 1..80: note = Artificially Synthesized Probe
  source 1..80: mol_type = other DNA
caccctccgattgttggaaatacaagtttatttccatcttacaggatggctttccgttgcccagctcttgaatacccagc

SEQ ID NO: 38941 - DNA, 80 bp, synthetic construct
  misc_feature 1..80: note = Artificially Synthesized Probe
  source 1..80: mol_type = other DNA
ttttgctttgtaagctgctttgtctttctgggaacgtgtcctctaagctcacctttacacagatctgcagcttgtcttat

SEQ ID NO: 38942 - DNA, 80 bp, synthetic construct
  misc_feature 1..80: note = Artificially Synthesized Probe
  source 1..80: mol_type = other DNA
gcagactccgcctaagctgtggcactgttataaaccttagacaacaggatgactctatatcgagtcctgcgagtccttcc

SEQ ID NO: 38943 - DNA, 80 bp, synthetic construct
  misc_feature 1..80: note = Artificially Synthesized Probe
  source 1..80: mol_type = other DNA
gaacaaggatccccagttaacagaggctctgaggaagaatctgccccaagcctctctcccagcctctggggctgctggca

SEQ ID NO: 38944 - DNA, 80 bp, synthetic construct
  misc_feature 1..80: note = Artificially Synthesized Probe
  source 1..80: mol_type = other DNA
ctgataacagaccccatgccagcagccataactataactgtgattggataagaggctgatttcagtagctttctcttgat

SEQ ID NO: 38945 - DNA, 80 bp, synthetic construct
  misc_feature 1..80: note = Artificially Synthesized Probe
  source 1..80: mol_type = other DNA
atccttaactacatttgcaaagatgcttttattttccaaataaggtctgactcatagcacctggaagttaggacgcatac

SEQ ID NO: 38946 - DNA, 80 bp, synthetic construct
  misc_feature 1..80: note = Artificially Synthesized Probe
  source 1..80: mol_type = other DNA
ctgtgagaaaatcgatttctggtgtgtgagccccagtctcgattgtgtttgtttcagcagcctgagctgagacatcagcc

SEQ ID NO: 38947 - DNA, 80 bp, synthetic construct
  misc_feature 1..80: note = Artificially Synthesized Probe
  source 1..80: mol_type = other DNA
tccaacaaagcaaaacctaagccaacgcggtagttctcaaaattctgtggttttacaaacgtggcctgaaattagcttat

SEQ ID NO: 38948 - DNA, 80 bp, synthetic construct
  misc_feature 1..80: note = Artificially Synthesized Probe
  source 1..80: mol_type = other DNA
tctgccttggagggtgggtctaagttacaacaaatgcaacccaaatgatgcatcctaatgaacaccagtgatgaagcacc

SEQ ID NO: 38949 - DNA, 80 bp, synthetic construct
  misc_feature 1..80: note = Artificially Synthesized Probe
  source 1..80: mol_type = other DNA
atctcttccttcccctctctcttttgtccatcaatccattcacccacccacccatccacccatgcatccacatatccacc

SEQ ID NO: 38950 - DNA, 80 bp, synthetic construct
  misc_feature 1..80: note = Artificially Synthesized Probe
  source 1..80: mol_type = other DNA
gcagtgattcaaatcagtccagtgaaattagatcctgaaccttcttttacaatgactgggaaagaggcagtcttgctctt

SEQ ID NO: 38951 - DNA, 80 bp, synthetic construct
  misc_feature 1..80: note = Artificially Synthesized Probe
  source 1..80: mol_type = other DNA
aggttatctggaataaagccaacagctcagcctcctttgagatgatgttatggctgatcatccataattggaagcagagt

SEQ ID NO: 38952 - DNA, 80 bp, synthetic construct
  misc_feature 1..80: note = Artificially Synthesized Probe
  source 1..80: mol_type = other DNA
ttttaaccacacggaattctaaatctgttttgagctggttagcgctccttagaaaataactagctgtccgggagatgtga

SEQ ID NO: 38953 - DNA, 80 bp, synthetic construct
  misc_feature 1..80: note = Artificially Synthesized Probe
  source 1..80: mol_type = other DNA
actttaaaatggttaatgtcaatttcgcctgaatcaaaacacaaaaaccttccagaatggtctgctggggctcagatatg

SEQ ID NO: 38954 - DNA, 80 bp, synthetic construct
  misc_feature 1..80: note = Artificially Synthesized Probe
  source 1..80: mol_type = other DNA
tccagctttccccaaaggtgtctgcacaggtggccgaagcttcccaggctttggtctcacatccgcatcttgggtctgcc

SEQ ID NO: 38955 - DNA, 80 bp, synthetic construct
  misc_feature 1..80: note = Artificially Synthesized Probe
  source 1..80: mol_type = other DNA
acgtgtgtaggtgtgtgtgtatgggtatctttcatctgctactcaatgaggtctgtggttgcatgtgtttgtgagagagg

SEQ ID NO: 38956 - DNA, 80 bp, synthetic construct
  misc_feature 1..80: note = Artificially Synthesized Probe
  source 1..80: mol_type = other DNA
ggctctgggaaagggcttgggcaccttgagaagttgtaaccgtttacaaataaaaagctccacagtgatgatgaaagtga

SEQ ID NO: 38957 - DNA, 80 bp, synthetic construct
  misc_feature 1..80: note = Artificially Synthesized Probe
  source 1..80: mol_type = other DNA
tttggaggttcataaataatgaacacttcctggagccaaatccccgttcccagttgagctgccaggactccagaatctgc

SEQ ID NO: 38958 - DNA, 80 bp, synthetic construct
  misc_feature 1..80: note = Artificially Synthesized Probe
  source 1..80: mol_type = other DNA
agtaaacatacataatggagtagccctcatcttccactgctttacaccacctgtatatgtcctagggactccactagaaa

SEQ ID NO: 38959 - DNA, 80 bp, synthetic construct
  misc_feature 1..80: note = Artificially Synthesized Probe
  source 1..80: mol_type = other DNA
ttaatgttgctgaatatacatttatgctcaaaggactacagcctcagtggtgactatgaacgtgggatagactcaggagt

SEQ ID NO: 38960 - DNA, 80 bp, synthetic construct
  misc_feature 1..80: note = Artificially Synthesized Probe
  source 1..80: mol_type = other DNA
ctgtcctaactaaaagaagctggtcataaaggaccccacatggatgatcccattacatgaaatggacagaacaggcaaat

SEQ ID NO: 38961 - DNA, 80 bp, synthetic construct
  misc_feature 1..80: note = Artificially Synthesized Probe
  source 1..80: mol_type = other DNA
gtgtggtgatgcacacctataatccaacactttgggaggctgaagcgaaaggatcacttgagtccaggagtttaaggctg

SEQ ID NO: 38962 - DNA, 80 bp, synthetic construct
  misc_feature 1..80: note = Artificially Synthesized Probe
  source 1..80: mol_type = other DNA
caaaaacaacatcttcattcaataacagagcaccatatgacagctttcatttcccagaatgagccatggcatgctctgga

SEQ ID NO: 38963 - DNA, 80 bp, synthetic construct
  misc_feature 1..80: note = Artificially Synthesized Probe
  source 1..80: mol_type = other DNA
atccatccacccattgagatacctactaacccatttatccatctactcagccacccttctgtcctccaacctacccacct

SEQ ID NO: 38964 - DNA, 80 bp, synthetic construct
  misc_feature 1..80: note = Artificially Synthesized Probe
  source 1..80: mol_type = other DNA
gtaaaccttgatcaattgaccccacaaacaggcgtttacaaattaattaacctccaggtccttgccttcagtcctcttgg

SEQ ID NO: 38965 - DNA, 80 bp, synthetic construct
  misc_feature 1..80: note = Artificially Synthesized Probe
  source 1..80: mol_type = other DNA
agagaggtaattaagattaaatgaaggtacaaggcagggccttgacccaagaggactggcattcttaagaggaagagaga

SEQ ID NO: 38966 - DNA, 80 bp, synthetic construct
  misc_feature 1..80: note = Artificially Synthesized Probe
  source 1..80: mol_type = other DNA
aagaaccaaacatgggtatgctgatgttttgccgagggtttatacacactgtgactaacgacacttctgtttaataggac

SEQ ID NO: 38967 - DNA, 80 bp, synthetic construct
  misc_feature 1..80: note = Artificially Synthesized Probe
  source 1..80: mol_type = other DNA
ggctctaaatgagtttttccaaattggagtccagaaactccaagtcatctgaggggcatctcatgtctgtttatttggtg

SEQ ID NO: 38968 - DNA, 80 bp, synthetic construct
  misc_feature 1..80: note = Artificially Synthesized Probe
  source 1..80: mol_type = other DNA
ggttgcatgtaaggagctcacatccttacatgcaaaataggaacgacaatactgaacacacagttcacgattgttctgga

SEQ ID NO: 38969 - DNA, 80 bp, synthetic construct
  misc_feature 1..80: note = Artificially Synthesized Probe
  source 1..80: mol_type = other DNA
cattttaagtggaaaaccagcctccctggcatagatggaaggaagccttcacatccaacaagggggaaagcaggctatgg

SEQ ID NO: 38970 - DNA, 80 bp, synthetic construct
  misc_feature 1..80: note = Artificially Synthesized Probe
  source 1..80: mol_type = other DNA
gccatgctcgcaccctcatctctgactgtccagcctccagaaccagcattttagccctccagatctcagtgttctgttac

SEQ ID NO: 38971 - DNA, 80 bp, synthetic construct
  misc_feature 1..80: note = Artificially Synthesized Probe
  source 1..80: mol_type = other DNA
gctggaagtgggaacaagtggctgcctgaaggccccaagggtgtctccggggcaaagccgggatgtttcaggtgctgcag

SEQ ID NO: 38972 - DNA, 80 bp, synthetic construct
  misc_feature 1..80: note = Artificially Synthesized Probe
  source 1..80: mol_type = other DNA
tggtcccaggtcctgagcacaagtggtggcttcccaggagggccatctgcagtgggtctctgggtttccatggggtgtcc

SEQ ID NO: 38973 - DNA, 80 bp, synthetic construct
  misc_feature 1..80: note = Artificially Synthesized Probe
  source 1..80: mol_type = other DNA
gacctttgcacctgtcctttgcttctgtgcctttctcctctgcagccaccctgggctgtctctggcctggcctcctttta

SEQ ID NO: 38974 - DNA, 80 bp, synthetic construct
  misc_feature 1..80: note = Artificially Synthesized Probe
  source 1..80: mol_type = other DNA
atcatccctttatcatcttaaaacctctgacaccatcaccaccagcatcattgctagtcacatcactaccaccatcaatc

SEQ ID NO: 38975 - DNA, 80 bp, synthetic construct
  misc_feature 1..80: note = Artificially Synthesized Probe
  source 1..80: mol_type = other DNA
tttactctgaggatcacatgagttacctataaacatcaaatgagaggtgagaggatgcaaccacagggacaaggtttgga

SEQ ID NO: 38976 - DNA, 80 bp, synthetic construct
  misc_feature 1..80: note = Artificially Synthesized Probe
  source 1..80: mol_type = other DNA
tgcagtcacaaaagagttggtaaaaccaagaggtccccatccttctcctgcccagccctgaccccagggttggatttggg

SEQ ID NO: 38977 - DNA, 80 bp, synthetic construct
  misc_feature 1..80: note = Artificially Synthesized Probe
  source 1..80: mol_type = other DNA
gatgtacagcggtgactcatcacacccattttctcatcatgttctacatgaatggtgctcactgatagtcaagtcttttg

SEQ ID NO: 38978 - DNA, 80 bp, synthetic construct
  misc_feature 1..80: note = Artificially Synthesized Probe
  source 1..80: mol_type = other DNA
agtccttgaaatgagtctcttaatacatacgctctatctgtatctacatctgtgtctacgtcctactggttctgtttctc

SEQ ID NO: 38979 - DNA, 80 bp, synthetic construct
  misc_feature 1..80: note = Artificially Synthesized Probe
  source 1..80: mol_type = other DNA
ttacgcacagaaacaaaaaagctatgatcataaacttccacccaactcttcatacgcatcatctccaggcttcacatttc

SEQ ID NO: 38980 - DNA, 80 bp, synthetic construct
  misc_feature 1..80: note = Artificially Synthesized Probe
  source 1..80: mol_type = other DNA
tcatgaggctatgagaattcactgggtcctgagcagccacttctttactgagttattcattctgtgagtcactcacttat

SEQ ID NO: 38981 - DNA, 80 bp, synthetic construct
  misc_feature 1..80: note = Artificially Synthesized Probe
  source 1..80: mol_type = other DNA
tgatgtgaggtggtggtgtcctggaaccaatccccacgtatactgagagatgactgtagttagaaaatgaaaacgcaagt

SEQ ID NO: 38982 - DNA, 80 bp, synthetic construct
  misc_feature 1..80: note = Artificially Synthesized Probe
  source 1..80: mol_type = other DNA
agttgcagggtctcatctacatgaaatccagtgataggcaaaatctatggtgacagaaatctatggtctatggtgacaga

SEQ ID NO: 38983 - DNA, 80 bp, synthetic construct
  misc_feature 1..80: note = Artificially Synthesized Probe
  source 1..80: mol_type = other DNA
ataaaagaagataatacaaaagaaggtgctaagtcacgatcttagaacacccaagggcaagcagaacccagcaggaacca

SEQ ID NO: 38984 - DNA, 80 bp, synthetic construct
  misc_feature 1..80: note = Artificially Synthesized Probe
  source 1..80: mol_type = other DNA
cccaggtagaaaatacggttttatcaaggacattgtcctgggagtgtgagctggagcaagatcacccttctagaaacctc

SEQ ID NO: 38985 - DNA, 80 bp, synthetic construct
  misc_feature 1..80: note = Artificially Synthesized Probe
  source 1..80: mol_type = other DNA
tcattacagtctgatttccatgctaaatgaccctccccccagcaccaggatagttgacaatcaccatgacaacaacagaa

SEQ ID NO: 38986 - DNA, 80 bp, synthetic construct
  misc_feature 1..80: note = Artificially Synthesized Probe
  source 1..80: mol_type = other DNA
agcctgggattctactaaaagccagatgccgttcacatgcggactgctttcttcttataagacacttaaggcttcacttt

SEQ ID NO: 38987 - DNA, 80 bp, synthetic construct
  misc_feature 1..80: note = Artificially Synthesized Probe
  source 1..80: mol_type = other DNA
gtgatgagacaggaatgaagcactgacatgtttgcatctttacgtatctgacaccacgtcatatgaatggatgtgcacgg

SEQ ID NO: 38988 - DNA, 80 bp, synthetic construct
  misc_feature 1..80: note = Artificially Synthesized Probe
  source 1..80: mol_type = other DNA
ttaatcaggaacctattcattacgtggttgctggcaaggactgcagttttctttctgacttgtggttgaaagaagccaat

SEQ ID NO: 38989 - DNA, 80 bp, synthetic construct
  misc_feature 1..80: note = Artificially Synthesized Probe
  source 1..80: mol_type = other DNA
ggaactgaaaaccccactttataagttcctaataacctgaagaaatgacctaactgaaacagatcagccacatcccaggt

SEQ ID NO: 38990 - DNA, 80 bp, synthetic construct
  misc_feature 1..80: note = Artificially Synthesized Probe
  source 1..80: mol_type = other DNA
caggatgtgttattgttattacaagaccaaccaaaaatatgaaaggctgtttccaatgggcttgtacaaggaggcagagg

SEQ ID NO: 38991 - DNA, 80 bp, synthetic construct
  misc_feature 1..80: note = Artificially Synthesized Probe
  source 1..80: mol_type = other DNA
ctgggaaacctggctagaaagaaggttcatcctcaacaccatgtctgctccaacacagacgatgctttaaggcacctatg

SEQ ID NO: 38992 - DNA, 80 bp, synthetic construct
  misc_feature 1..80: note = Artificially Synthesized Probe
  source 1..80: mol_type = other DNA
aagcatggtggtgagagcgtgggacaaaacacacactgctatttagaaaactctgtcattctttcacgctgccatgcact

SEQ ID NO: 38993 - DNA, 80 bp, synthetic construct
  misc_feature 1..80: note = Artificially Synthesized Probe
  source 1..80: mol_type = other DNA
atgattgttcccttgatatcaaggggacagaattcctccaaacggccttggctctgcaggcagtggatcggctcgacccg

SEQ ID NO: 38994 - DNA, 80 bp, synthetic construct
  misc_feature 1..80: note = Artificially Synthesized Probe
  source 1..80: mol_type = other DNA
gctgctactcagggtcccctctaagggactctcagctgtttagtgcccactcccatgggcctctgctctatgtctaaggg

SEQ ID NO: 38995 - DNA, 80 bp, synthetic construct
  misc_feature 1..80: note = Artificially Synthesized Probe
  source 1..80: mol_type = other DNA
aaatgaatagagctccagggacttgtttgatgctatcaaatgatgaaatatgtgtgcagcagaaacactggccatcaggc

SEQ ID NO: 38996 - DNA, 80 bp, synthetic construct
  misc_feature 1..80: note = Artificially Synthesized Probe
  source 1..80: mol_type = other DNA
ccccttcgatccctgagacccagcactggggaagccgcagcagctccctggagagtgagggaaagggtctgggaacgtca

SEQ ID NO: 38997 - DNA, 80 bp, synthetic construct
  misc_feature 1..80: note = Artificially Synthesized Probe
  source 1..80: mol_type = other DNA
tacaccagacacaaaagaacacagactgtgtgatcccagccatgcgagggcccgagagcagtcagattcatggacacaga

SEQ ID NO: 38998 - DNA, 80 bp, synthetic construct
  misc_feature 1..80: note = Artificially Synthesized Probe
  source 1..80: mol_type = other DNA
aaacaaaaacaaacaaatcccaaagagactcaggtggagacagaaatccaggaaggccatgggtgtccgacacttcatcc

SEQ ID NO: 38999 - DNA, 80 bp, synthetic construct
  misc_feature 1..80: note = Artificially Synthesized Probe
  source 1..80: mol_type = other DNA
tgtaatcacccgactcatgtgtccctgataattgccttatagtttgctctgtgcttgtataaagttacagaagggcaatg

SEQ ID NO: 39000 - DNA, 80 bp, synthetic construct
  misc_feature 1..80: note = Artificially Synthesized Probe
  source 1..80: mol_type = other DNA
tcccggcaaccaagggactccaaggagaatacagcaccccagggtcagaatccctcctctccttgaacttcccttaatgc

SEQ ID NO: 39001 - DNA, 80 bp, synthetic construct
  misc_feature 1..80: note = Artificially Synthesized Probe
  source 1..80: mol_type = other DNA
ccctgcttgagaagtcagttaacttcatcagaattaatccatccactcatctcttctttgttatccatccaggcctcctt

SEQ ID NO: 39002 - DNA, 80 bp, synthetic construct
  misc_feature 1..80: note = Artificially Synthesized Probe
  source 1..80: mol_type = other DNA
gtgacagaatgaggtgaacaagatctcacctgctacaaggtgtcttatccttgtgatgtctcatttgatgaactacatcc

SEQ ID NO: 39003 - DNA, 80 bp, synthetic construct
  misc_feature 1..80: note = Artificially Synthesized Probe
  source 1..80: mol_type = other DNA
ggccatcccaggggagctaggggagcccctgatgtgtagaattgtgagaaagttggaggtttcaagaggcacaatcaccc

SEQ ID NO: 39004 - DNA, 80 bp, synthetic construct
  misc_feature 1..80: note = Artificially Synthesized Probe
  source 1..80: mol_type = other DNA
gaaagtcagggccaccgggagagctcccaattccacacctcacccctactctgccagcagggcccagccacccccacttt

SEQ ID NO: 39005 - DNA, 80 bp, synthetic construct
  misc_feature 1..80: note = Artificially Synthesized Probe
  source 1..80: mol_type = other DNA
ccacacactcccagagcagggactcaggtgtctcaggaatgttctcaggacagtggtccagcagtgccagtggacgccac

SEQ ID NO: 39006 - DNA, 80 bp, synthetic construct
  misc_feature 1..80: note = Artificially Synthesized Probe
  source 1..80: mol_type = other DNA
gatgaagacgaccctaagagtggccgacgtttctgcagaaccgaagactgtctatgagcagctgtggatgtcagtgcagg

SEQ ID NO: 39007 - DNA, 80 bp, synthetic construct
  misc_feature 1..80: note = Artificially Synthesized Probe
  source 1..80: mol_type = other DNA
tgcagggacagaacacaacagtggcacctgcatgccccaccctcatcccaggggacctcaaaaagatgcctggagaagca

SEQ ID NO: 39008 - DNA, 80 bp, synthetic construct
  misc_feature 1..80: note = Artificially Synthesized Probe
  source 1..80: mol_type = other DNA
gctaccgcacctggtcccttgttttataattgacaaagattaggcagattgggttttacctgcccaaggttatgcagcta

SEQ ID NO: 39009 - DNA, 80 bp, synthetic construct
  misc_feature 1..80: note = Artificially Synthesized Probe
  source 1..80: mol_type = other DNA
tcgaccctgtctaggggccgggagaagtgggctctcaccggcatgttctccccacaaactccttggctgtggccccaaag

SEQ ID NO: 39010 - DNA, 80 bp, synthetic construct
  misc_feature 1..80: note = Artificially Synthesized Probe
  source 1..80: mol_type = other DNA
cacacccctgaccaggcttgcagccctgcctctctccctcttgacatttcacttaggaccaagaagtcagtacacaagga

SEQ ID NO: 39011 - DNA, 80 bp, synthetic construct
  misc_feature 1..80: note = Artificially Synthesized Probe
  source 1..80: mol_type = other DNA
acatctccacggcacggagctcaagccagtacttcgcatggaagggacgtggggtctgagcttccatctggcctgggaga

SEQ ID NO: 39012 - DNA, 80 bp, synthetic construct
  misc_feature 1..80: note = Artificially Synthesized Probe
  source 1..80: mol_type = other DNA
tacagtctccgagtccactggctggatgattcaatctcagtcctcactaagaaggtgccttcctccctcccatcaagtgg

SEQ ID NO: 39013 - DNA, 80 bp, synthetic construct
  misc_feature 1..80: note = Artificially Synthesized Probe
  source 1..80: mol_type = other DNA
gtcacagggacaaagatggcactggcagagttcataggggacagaggtggagttggcagagttcatgagggacagaggtg

SEQ ID NO: 39014 - DNA, 80 bp, synthetic construct
  misc_feature 1..80: note = Artificially Synthesized Probe
  source 1..80: mol_type = other DNA
agaactcatgagggacagaggtggcgctggcagaactcatgagggacagaggtggtgttagtagagctcatgagggacag

SEQ ID NO: 39015 - DNA, 80 bp, synthetic construct
  misc_feature 1..80: note = Artificially Synthesized Probe
  source 1..80: mol_type = other DNA
attggggaggtcgcggtgtcacacctgctctgatctggttcctctgtgaagcctttctgtcattgaagatgccctgctaa

SEQ ID NO: 39016 - DNA, 80 bp, synthetic construct
  misc_feature 1..80: note = Artificially Synthesized Probe
  source 1..80: mol_type = other DNA
ttagaggggggaagaattcacatggggaggccacccttggaggattaaggaataaaagagctgggacattttcaaataca

SEQ ID NO: 39017 - DNA, 80 bp, synthetic construct
  misc_feature 1..80: note = Artificially Synthesized Probe
  source 1..80: mol_type = other DNA
aactcaaaccaaaccgtatcccaaaccaaagtcattatcccctgacatgctagggattaacaactggcaattttaggagg

SEQ ID NO: 39018 - DNA, 80 bp, synthetic construct
  misc_feature 1..80: note = Artificially Synthesized Probe
  source 1..80: mol_type = other DNA
aatttctgaacacgacctatatttctgttcaaaagaatcagacacaagtgcccatgacttctctggctccccacccatcg

SEQ ID NO: 39019 - DNA, 80 bp, synthetic construct
  misc_feature 1..80: note = Artificially Synthesized Probe
  source 1..80: mol_type = other DNA
ggctgaggcaggaggattgcttgagcctagaagttcaatgctccaatgagctatgattgcaccactgcacatcagcctgg

SEQ ID NO: 39020 - DNA, 80 bp, synthetic construct
  misc_feature 1..80: note = Artificially Synthesized Probe
  source 1..80: mol_type = other DNA
accccctccatctgtcactgatcgattccctcccaaaagcacagagcctcatcccaagccaagtttctgagccaatcact

SEQ ID NO: 39021 - DNA, 80 bp, synthetic construct
  misc_feature 1..80: note = Artificially Synthesized Probe
  source 1..80: mol_type = other DNA
acaccttcaattctttcaataagcagacaacttttcccgcccacactcggaggaggctgagtaaaccattcacaaagatc

SEQ ID NO: 39022 - DNA, 80 bp, synthetic construct
  misc_feature 1..80: note = Artificially Synthesized Probe
  source 1..80: mol_type = other DNA
cccttcccatctctaaaacaagtattccgaggatgaccgagcgctagtggttgagatgaaaattaagacaaagataaaag

SEQ ID NO: 39023 - DNA, 80 bp, synthetic construct
  misc_feature 1..80: note = Artificially Synthesized Probe
  source 1..80: mol_type = other DNA
taaaaaaaaagctcttcacacatcagaacatttcaaggtgctctgaagtcctggcggggacgccgtaccaggtgttataa

SEQ ID NO: 39024 - DNA, 80 bp, synthetic construct
  misc_feature 1..80: note = Artificially Synthesized Probe
  source 1..80: mol_type = other DNA
tgaattaacagagggggtgagtcctagctttttttctgagtgttccagagcactttactaggttcaccaggctgctctct

SEQ ID NO: 39025 - DNA, 80 bp, synthetic construct
  misc_feature 1..80: note = Artificially Synthesized Probe
  source 1..80: mol_type = other DNA
ctgacagcatctctgcaacatctgcagctggactttctgggttcaaatcccacaaggtaactgtccatgagtcacaaaat

SEQ ID NO: 39026 - DNA, 80 bp, synthetic construct
  misc_feature 1..80: note = Artificially Synthesized Probe
  source 1..80: mol_type = other DNA
ccaccttaacacaaaatacacaggaggtggctctaactctggtcagactgaaggcccatggggagccgaaaaaagaaaac

SEQ ID NO: 39027 - DNA, 80 bp, synthetic construct
  misc_feature 1..80: note = Artificially Synthesized Probe
  source 1..80: mol_type = other DNA
tactgtgtgcgggacacacctgaaggaggaggggtggagccaaggggcgtgcaatggcttacgggcagcatgaaccatcc

SEQ ID NO: 39028 - DNA, 80 bp, synthetic construct
  misc_feature 1..80: note = Artificially Synthesized Probe
  source 1..80: mol_type = other DNA
tgcaagttggagaaaggataataacagcagctgtcttgaaggccagcagttgtgcaagtcaacgtttacaaagtgccagg

SEQ ID NO: 39029 - DNA, 80 bp, synthetic construct
  misc_feature 1..80: note = Artificially Synthesized Probe
  source 1..80: mol_type = other DNA
agccaccagtctatggtattttttgttaaagtggctgcagctaatgaagacaccaggcagactgagcatgccactgcccc

SEQ ID NO: 39030 - DNA, 80 bp, synthetic construct
  misc_feature 1..80: note = Artificially Synthesized Probe
  source 1..80: mol_type = other DNA
tgctgagtaacttcatccaataaatgaataaataaaaggaaggcacgttcctacctcccaccctggacttgtatggtgtt

SEQ ID NO: 39031 - DNA, 80 bp, synthetic construct
  misc_feature 1..80: note = Artificially Synthesized Probe
  source 1..80: mol_type = other DNA
aacatgctgggactcaattctatactctatctctcctgtggaagaaattactgaagtctccccaaggcacttgggctttt

SEQ ID NO: 39032 - DNA, 80 bp, synthetic construct
  misc_feature 1..80: note = Artificially Synthesized Probe
  source 1..80: mol_type = other DNA
cacatttatattttgggaactaattaaggctcagtgactgatttaaccttcaaataaattcctcccagggccgagctggc

SEQ ID NO: 39033 - DNA, 80 bp, synthetic construct
  misc_feature 1..80: note = Artificially Synthesized Probe
  source 1..80: mol_type = other DNA
gctccctggagcctcagtttccccatatatcaaaaggaggctagaatgcaccccaaaagtccttcaggctgcaagatccc

SEQ ID NO: 39034 - DNA, 80 bp, synthetic construct
  misc_feature 1..80: note = Artificially Synthesized Probe
  source 1..80: mol_type = other DNA
agactccgtcttaaaaaaaatagcaattatcaccgcagtgaaaggtgggcagtggcagcaggtgatgcctgtgacacgcc

SEQ ID NO: 39035 - DNA, 80 bp, synthetic construct
  misc_feature 1..80: note = Artificially Synthesized Probe
  source 1..80: mol_type = other DNA
tttctttttagtaaaatttgacgatggttttgccttcccttgacttggggccaaaacccatgctggaaagagacagacac

SEQ ID NO: 39036 - DNA, 80 bp, synthetic construct
  misc_feature 1..80: note = Artificially Synthesized Probe
  source 1..80: mol_type = other DNA
tggtggcttttgggaagagtttatggatggctggcgctgtagacagagctgaaattcgtattgtgaggtcctgactccta

SEQ ID NO: 39037 - DNA, 80 bp, synthetic construct
  misc_feature 1..80: note = Artificially Synthesized Probe
  source 1..80: mol_type = other DNA
cctgccacaggcacccctacaacattagttcaactcattaatactctgcttaaaaagaaaaatctaatgaatgccccatt

SEQ ID NO: 39038 - DNA, 80 bp, synthetic construct
  misc_feature 1..80: note = Artificially Synthesized Probe
  source 1..80: mol_type = other DNA
ggccctgggcacgtgtctggccaattgctttcaccagagttatgccaatttatatgaccaaatcactgggacccaatttc

SEQ ID NO: 39039 - DNA, 80 bp, synthetic construct
  misc_feature 1..80: note = Artificially Synthesized Probe
  source 1..80: mol_type = other DNA
tttcccataattacatagagatggaaataagcagcacagaacaaagcgagaaggagagcccacttccaagttgtttgcag

SEQ ID NO: 39040 - DNA, 80 bp, synthetic construct
  misc_feature 1..80: note = Artificially Synthesized Probe
  source 1..80: mol_type = other DNA
agcatggttcaaggcccgtggtgctatttaagagtttctctgtgctcataaaagagcctgctgccacggggactggctgc

SEQ ID NO: 39041 - DNA, 80 bp, synthetic construct
  misc_feature 1..80: note = Artificially Synthesized Probe
  source 1..80: mol_type = other DNA
attttaaattaatttaaaattgctctggaacgggggaccagcactgaaaacctgcccgagcatctctctgcgctcagcag

SEQ ID NO: 39042 - DNA, 80 bp, synthetic construct
  misc_feature 1..80: note = Artificially Synthesized Probe
  source 1..80: mol_type = other DNA
accctggagacccttgaagatgactgtgcaaaataggttctacagtcatgtttgggaaacgccagatcaaacaaagctaa

SEQ ID NO: 39043 - DNA, 80 bp, synthetic construct
  misc_feature 1..80: note = Artificially Synthesized Probe
  source 1..80: mol_type = other DNA
agcataaccctgggcaagtgcctaccctttgtcaaatgaaaatacaagggatcactgtgtgagaacataacaccctaata

SEQ ID NO: 39044 - DNA, 80 bp, synthetic construct
  misc_feature 1..80: note = Artificially Synthesized Probe
  source 1..80: mol_type = other DNA
agtactcaggtgaccagatgggatcagagaagccaaacaacatgtccaagatcacacagctgcacctgaaacttgaacct

SEQ ID NO: 39045 - DNA, 80 bp, synthetic construct
  misc_feature 1..80: note = Artificially Synthesized Probe
  source 1..80: mol_type = other DNA
agggagctgtgtgataagatcctgaccactgggacataaataaaagaaacaggtccacttaaggaaagtgtccttatagg

SEQ ID NO: 39046 - DNA, 80 bp, synthetic construct
  misc_feature 1..80: note = Artificially Synthesized Probe
  source 1..80: mol_type = other DNA
tgcacagtgccagattgtacagaccacaaagaaaactggctcctgcttagaagctttaaagaaagaatattgggagagcg

SEQ ID NO: 39047 - DNA, 80 bp, synthetic construct
  misc_feature 1..80: note = Artificially Synthesized Probe
  source 1..80: mol_type = other DNA
aaatgaaacatgagcaacactccgtgagctctggaaacagagccagactctttctagggagcagacactggaaactccag

SEQ ID NO: 39048 - DNA, 80 bp, synthetic construct
  misc_feature 1..80: note = Artificially Synthesized Probe
  source 1..80: mol_type = other DNA
aggtccttgttgactgtcatgagtaggaaagttaccaatgctaaaaatgctgagatcgaatctagtgagtccagcagaga

SEQ ID NO: 39049 - DNA, 80 bp, synthetic construct
  misc_feature 1..80: note = Artificially Synthesized Probe
  source 1..80: mol_type = other DNA
cagggagtgaacagcaagagctgtactttttgtttttgcagaaatccagatcacggttcacccacgactatcagaaaccc

SEQ ID NO: 39050 - DNA, 80 bp, synthetic construct
  misc_feature 1..80: note = Artificially Synthesized Probe
  source 1..80: mol_type = other DNA
agaaaaaagaaaggtgggaagaaaggaaggagttaaatcgatggcaggatgggtaactgcatggattgttggatgaatgg

SEQ ID NO: 39051 - DNA, 80 bp, synthetic construct
  misc_feature 1..80: note = Artificially Synthesized Probe
  source 1..80: mol_type = other DNA
cctgctttattgaatcagagaatttcaaggatcttacacagagtcccactcaataagcaggtgggacagctggaattcaa

SEQ ID NO: 39052 - DNA, 80 bp, synthetic construct
  misc_feature 1..80: note = Artificially Synthesized Probe
  source 1..80: mol_type = other DNA
ggaagaactgacggcagccttagcacatgacatcacgaagacacaatgacccttgaaggccaaaaatggtggtaacagca

SEQ ID NO: 39053 - DNA, 80 bp, synthetic construct
  misc_feature 1..80: note = Artificially Synthesized Probe
  source 1..80: mol_type = other DNA
cttccttccttgctaaagacagttatccacacaacagccaaaggattcttcttaacaacagcaatcatggaaacttcttt

SEQ ID NO: 39054 - DNA, 80 bp, synthetic construct
  misc_feature 1..80: note = Artificially Synthesized Probe
  source 1..80: mol_type = other DNA
gtccctgcccttgaatgtggtttgacctccacgaagtgagaaaacatgccaggaagcttgttacccacagattggttcta

SEQ ID NO: 39055 - DNA, 80 bp, synthetic construct
  misc_feature 1..80: note = Artificially Synthesized Probe
  source 1..80: mol_type = other DNA
aggtgacgggtctctttatgtaaccccaagaaagaacgttttgaaggtggaaattgtctgtggaatgcaggaaggaataa

SEQ ID NO: 39056 - DNA, 80 bp, synthetic construct
  misc_feature 1..80: note = Artificially Synthesized Probe
  source 1..80: mol_type = other DNA
gcctctgtttccatgtgaaaataaatgagtcccacacctagtaatggttttgctcctccagtctgtcctcttaaaaatgg

SEQ ID NO: 39057 - DNA, 80 bp, synthetic construct
  misc_feature 1..80: note = Artificially Synthesized Probe
  source 1..80: mol_type = other DNA
aagctactacactggtctgtgtagtctctggaatgggcttgagtagagacaatggaaatggaaagaagtgcaatacgtca

SEQ ID NO: 39058 - DNA, 80 bp, synthetic construct
  misc_feature 1..80: note = Artificially Synthesized Probe
  source 1..80: mol_type = other DNA
catccatcttagatggcagggatcaaggggtttttatacctgggtaggtctagagaaaccgtgaacactgtcacattcca

SEQ ID NO: 39059 - DNA, 80 bp, synthetic construct
  misc_feature 1..80: note = Artificially Synthesized Probe
  source 1..80: mol_type = other DNA
gatgctctgctatttgcacattttgaaattggaggtgggtagtgagaagggaaaaaggaaagaaaaattgagggagatga

SEQ ID NO: 39060 - DNA, 80 bp, synthetic construct
  misc_feature 1..80: note = Artificially Synthesized Probe
  source 1..80: mol_type = other DNA
ctctcactggacaaaccattctagagaaaagcaaagatgctgcagaactaggcgacgtctaaatttagcctcacaaagaa

SEQ ID NO: 39061 - DNA, 80 bp, synthetic construct
  misc_feature 1..80: note = Artificially Synthesized Probe
  source 1..80: mol_type = other DNA
tactgctctacccaagcatcaaggaatatgcccacagtgctgcccttcctcaacttcaaatacctggctttcttgggtcg

SEQ ID NO: 39062 - DNA, 80 bp, synthetic construct
  misc_feature 1..80: note = Artificially Synthesized Probe
  source 1..80: mol_type = other DNA
aggaatgacttttcttatcagttcacgcaggggcccggagacacacaagtcaacaaataggagatttttgtgatttctaa

SEQ ID NO: 39063 - DNA, 80 bp, synthetic construct
  misc_feature 1..80: note = Artificially Synthesized Probe
  source 1..80: mol_type = other DNA
ctttaacatttacccagcggcacagagtcattattctgtgacaatattccactgctgacctttattgcctaggactctct

SEQ ID NO: 39064 - DNA, 80 bp, synthetic construct
  misc_feature 1..80: note = Artificially Synthesized Probe
  source 1..80: mol_type = other DNA
atgcggcctcctcatcctcacccattctcttccacaaacctgcccaattctcacccagggtgccaaagtccagaggatgt

SEQ ID NO: 39065 - DNA, 80 bp, synthetic construct
  misc_feature 1..80: note = Artificially Synthesized Probe
  source 1..80: mol_type = other DNA
aatgcttccaatctcagcctgtgctgtaggaggctttcatatttcacggcaaagttgtgcagaccagttggttcatggca

SEQ ID NO: 39066 - DNA, 80 bp, synthetic construct
  misc_feature 1..80: note = Artificially Synthesized Probe
  source 1..80: mol_type = other DNA
gcctgtaggcaatctttggcattccttgactgacagaagcatcacccagagctctgccttcatctttgtgtgaggtttgc

SEQ ID NO: 39067 - DNA, 80 bp, synthetic construct
  misc_feature 1..80: note = Artificially Synthesized Probe
  source 1..80: mol_type = other DNA
gaacaagcagggcagggagagaaaggaaagtgaggtcgagacaaatattataaatatgaccatatccctgatggagaaga

SEQ ID NO: 39068 - DNA, 80 bp, synthetic construct
  misc_feature 1..80: note = Artificially Synthesized Probe
  source 1..80: mol_type = other DNA
aaaaactataaatagcctcaaatcagttcaggtcaagtactactgccaacgagctacggagaaggcattcgcttttcaga

SEQ ID NO: 39069 - DNA, 80 bp, synthetic construct
  misc_feature 1..80: note = Artificially Synthesized Probe
  source 1..80: mol_type = other DNA
ttgcctttcaaatgcatttgatacaatttgcttggaaggcattaacatcctctgacaaaacccatgaggaagaggagggc

SEQ ID NO: 39070 - DNA, 80 bp, synthetic construct
  misc_feature 1..80: note = Artificially Synthesized Probe
  source 1..80: mol_type = other DNA
ccaatgcaaagtacatttttgaacagactaaagaacatgtgaacagtacacagaaattcctccatctagccatctatcca

SEQ ID NO: 39071 - DNA, 80 bp, synthetic construct
  misc_feature 1..80: note = Artificially Synthesized Probe
  source 1..80: mol_type = other DNA
tttagaacggggggacatggtgatcattaaaagggaagggacatttagctggctttattgttatttggaattctctccag

SEQ ID NO: 39072 - DNA, 80 bp, synthetic construct
  misc_feature 1..80: note = Artificially Synthesized Probe
  source 1..80: mol_type = other DNA
gccgagatcacaccattgcactccagcctgggcaacaagagtgaaactccatctcaaaaaacaaaaaaaaaaaaacaaaa

SEQ ID NO: 39073 - DNA, 80 bp, synthetic construct
  misc_feature 1..80: note = Artificially Synthesized Probe
  source 1..80: mol_type = other DNA
ctggtgagaaaggagtaactattgcttcctgtcccagccacacaatttcctcccatctcttcctcactgatatttttatt

SEQ ID NO: 39074 - DNA, 80 bp, synthetic construct
  misc_feature 1..80: note = Artificially Synthesized Probe
  source 1..80: mol_type = other DNA
accaggaaagaacaggtctgaatagtcagcaattgactcaacaaatatttgtcaagcacctaccaggtggcagaagccat

SEQ ID NO: 39075 - DNA, 80 bp, synthetic construct
  misc_feature 1..80: note = Artificially Synthesized Probe
  source 1..80: mol_type = other DNA
tcttatttttcagcctctacttgataaatgagtccatgagtttgccatgagaggtgaacttcctcctgctccatcaaaag

SEQ ID NO: 39076 - DNA, 80 bp, synthetic construct
  misc_feature 1..80: note = Artificially Synthesized Probe
  source 1..80: mol_type = other DNA
acaaaaattaagatctctgtgactatttcctgactccaatgccagtggctagaaattcaggggttgaatcccttgcccca

SEQ ID NO: 39077 - DNA, 80 bp, synthetic construct
  misc_feature 1..80: note = Artificially Synthesized Probe
  source 1..80: mol_type = other DNA
cccactgacgcatagattttccctccatagaacaaggaggactgaaggggctagggtcccagctgccacctgtggatagg

SEQ ID NO: 39078 - DNA, 80 bp, synthetic construct
  misc_feature 1..80: note = Artificially Synthesized Probe
  source 1..80: mol_type = other DNA
gtgggtgaatcaggggtacaagatagacacaaatcttaaaacaatggctaatggggttggttacagtgtcttatgtctgt

SEQ ID NO: 39079 - DNA, 80 bp, synthetic construct
  misc_feature 1..80: note = Artificially Synthesized Probe
  source 1..80: mol_type = other DNA
gagtgatggggaaattgattttccttgataaaatggcccagtgaaaaagatcatgacagaagctgccaaggattccttac

SEQ ID NO: 39080 - DNA, 80 bp, synthetic construct
  misc_feature 1..80: note = Artificially Synthesized Probe
  source 1..80: mol_type = other DNA
ggtataacataaatgtcctccatctgtaggaaaccaacagccaaaagtccagctcctcagctatggcacaaagtcctggt

SEQ ID NO: 39081 - DNA, 80 bp, synthetic construct
  misc_feature 1..80: note = Artificially Synthesized Probe
  source 1..80: mol_type = other DNA
gggattgtgagtgacctaccagatgttcagacaaatgcaaaatctgtttatctgcacaacctcctgcgtgttacttagaa

SEQ ID NO: 39082 - DNA, 80 bp, synthetic construct
  misc_feature 1..80: note = Artificially Synthesized Probe
  source 1..80: mol_type = other DNA
ctaagggtgagaactgcccaggaccggggagcaaagagctgggagaagctcaggtttggggaagagttcaacccagaaga

SEQ ID NO: 39083 - DNA, 80 bp, synthetic construct
  misc_feature 1..80: note = Artificially Synthesized Probe
  source 1..80: mol_type = other DNA
tgccttgaaactgctgtgtctgttgggggttttctgtccttcctctccggcaatttgttttgaaaatattctatgggaat

SEQ ID NO: 39084 - DNA, 80 bp, synthetic construct
  misc_feature 1..80: note = Artificially Synthesized Probe
  source 1..80: mol_type = other DNA
catctccccacaaagccgggcaaaagcaaaaacaacaaagaccgtaaaaaataggttatcccagtccaaagcttatcagc

SEQ ID NO: 39085 - DNA, 80 bp, synthetic construct
  misc_feature 1..80: note = Artificially Synthesized Probe
  source 1..80: mol_type = other DNA
catccatatgtctcctaagctaagttgtataagacaagtcttgctgaagaccataatgcagaaacgccatgattcctgag

SEQ ID NO: 39086 - DNA, 80 bp, synthetic construct
  misc_feature 1..80: note = Artificially Synthesized Probe
  source 1..80: mol_type = other DNA
cacagtggggacggtagaatcagataccatctgtccttgaagaggtaacagcctgagaagacaaaagtcatgaagcaatg

SEQ ID NO: 39087 - DNA, 80 bp, synthetic construct
  misc_feature 1..80: note = Artificially Synthesized Probe
  source 1..80: mol_type = other DNA
gggcctgggacatgcaaatatttctgaatctccaaattagcacagggtctgtgaaaaaggtgctcaatgaagacttgtca

SEQ ID NO: 39088 - DNA, 80 bp, synthetic construct
  misc_feature 1..80: note = Artificially Synthesized Probe
  source 1..80: mol_type = other DNA
cctctcctctagcacaggcagtctgccttcctcagcgtatgcgggctcctctctagacgggaagagactggggccatatc

SEQ ID NO: 39089 - DNA, 80 bp, synthetic construct
  misc_feature 1..80: note = Artificially Synthesized Probe
  source 1..80: mol_type = other DNA
tgggaaggagcatcccagtgacaattgaaaatttcatggtgggtgagaaatgccacagaagacattcctctttgaaatgt

SEQ ID NO: 39090 - DNA, 80 bp, synthetic construct
  misc_feature 1..80: note = Artificially Synthesized Probe
  source 1..80: mol_type = other DNA
ggtgcttcctgtatctcctccacaataaacaacttgtcctcaaatcctcacctcaaggtcagcttctaggggagccccac

SEQ ID NO: 39091 - DNA, 80 bp, synthetic construct
  misc_feature 1..80: note = Artificially Synthesized Probe
  source 1..80: mol_type = other DNA
acgaacccttagatgactcagatgaaacaagaggttttttttcttcttcttctttgtagatgcacaaggaaccgcatggg

SEQ ID NO: 39092 - DNA, 80 bp, synthetic construct
  misc_feature 1..80: note = Artificially Synthesized Probe
  source 1..80: mol_type = other DNA
ctcccttcttcactgtgtgcccctggtcaagagagtcccactcccttcacagcagccgatatttttagctctcaaaccaa

SEQ ID NO: 39093 - DNA, 80 bp, synthetic construct
  misc_feature 1..80: note = Artificially Synthesized Probe
  source 1..80: mol_type = other DNA
agctgcaaattaatttgtttcagcaatcaagagccgtgccctacatccattgcttgatgcttagcacattctccagtttg

SEQ ID NO: 39094 - DNA, 80 bp, synthetic construct
  misc_feature 1..80: note = Artificially Synthesized Probe
  source 1..80: mol_type = other DNA
agctcaaagttgcctgctattatggccacctgcaaagtgaaaatcacattaagttaagtgtcacctgcagaacaatgatt

SEQ ID NO: 39095 - DNA, 80 bp, synthetic construct
  misc_feature 1..80: note = Artificially Synthesized Probe
  source 1..80: mol_type = other DNA
ccagcctggagaaatacacatacatctacaatgcgctgatgtcaagtcataatgtaagtggaccttatccaaacagctgg

SEQ ID NO: 39096 - DNA, 80 bp, synthetic construct
  misc_feature 1..80: note = Artificially Synthesized Probe
  source 1..80: mol_type = other DNA
attacaggcatgtgccaccatgtctggctaattaaaaaaaaatttttttttttggtagagacagggtttcaccatgttgg

SEQ ID NO: 39097 - DNA, 80 bp, synthetic construct
  misc_feature 1..80: note = Artificially Synthesized Probe
  source 1..80: mol_type = other DNA
aaccctgaaaggaattcagagatcatcagatccaccccttggtttcaacagttagatggtctctgcccaaagacttacgg

SEQ ID NO: 39098 - DNA, 80 bp, synthetic construct
  misc_feature 1..80: note = Artificially Synthesized Probe
  source 1..80: mol_type = other DNA
ttacgtgtaacccacaaacctaggttttctcacctgtgaaataggtttggtgtgtggatttattgagatctcacaagtaa

SEQ ID NO: 39099 - DNA, 80 bp, synthetic construct
  misc_feature 1..80: note = Artificially Synthesized Probe
  source 1..80: mol_type = other DNA
aggaacgggctccacatcacagtcagcaccaaagtcaagacattcactcaagccgtttgggttcaaactcttcatctaat

SEQ ID NO: 39100 - DNA, 80 bp, synthetic construct
  misc_feature 1..80: note = Artificially Synthesized Probe
  source 1..80: mol_type = other DNA
ggaggttacagctcaggcaaaggtttggaggatggatgtcagacgtggtgaatgtggcagcaagacaggcaagatggatg

SEQ ID NO: 39101 - DNA, 80 bp, synthetic construct
  misc_feature 1..80: note = Artificially Synthesized Probe
  source 1..80: mol_type = other DNA
attttttttgtgggaatcacccccagttgtaagtcctcagtgccctaaactgggttttcctggaatgaagcaatcatatc

SEQ ID NO: 39102 - DNA, 80 bp, synthetic construct
  misc_feature 1..80: note = Artificially Synthesized Probe
  source 1..80: mol_type = other DNA
attatcttagcctcaagctttgaagcacatctttgaagcctataatatgacaatcacagcccactaggacttaggatcac

SEQ ID NO: 39103 - DNA, 80 bp, synthetic construct
  misc_feature 1..80: note = Artificially Synthesized Probe
  source 1..80: mol_type = other DNA
ccctcagcctctgaggaacttaaagaccaacacgggtgacatggcttggctctatgtccccacccaaatctcatctcata

SEQ ID NO: 39104 - DNA, 80 bp, synthetic construct
  misc_feature 1..80: note = Artificially Synthesized Probe
  source 1..80: mol_type = other DNA
tcactgaacaccacaaagtgccgcatcctataccacctagcactgaacttggcctgctgtgatgctcttcctgcttcatg

SEQ ID NO: 39105 - DNA, 80 bp, synthetic construct
  misc_feature 1..80: note = Artificially Synthesized Probe
  source 1..80: mol_type = other DNA
acctctctcctcatcacttgctcaacaagctcctgggatccacagccagaactcggaggaaagccactccaccgccccga

SEQ ID NO: 39106 - DNA, 80 bp, synthetic construct
  misc_feature 1..80: note = Artificially Synthesized Probe
  source 1..80: mol_type = other DNA
taacttgacagggctgaccagatagagccagggctgactcaagcaatgtccacaactcctgaagtgccggctcaggggag

SEQ ID NO: 39107 - DNA, 80 bp, synthetic construct
  misc_feature 1..80: note = Artificially Synthesized Probe
  source 1..80: mol_type = other DNA
tgaactttgcctgctagtgcagcagtgaaacagattgttgcttaagagaccaccctaaaactaagggctgcatgggtctg

SEQ ID NO: 39108 - DNA, 80 bp, synthetic construct
  misc_feature 1..80: note = Artificially Synthesized Probe
  source 1..80: mol_type = other DNA
tttcagcgtttgaaagtttctgacctaatcaacatcaacgtcaaaccgcgacccaactgatctacctccatttagtcgtt

SEQ ID NO: 39109 - DNA, 80 bp, synthetic construct
  misc_feature 1..80: note = Artificially Synthesized Probe
  source 1..80: mol_type = other DNA
gttccaaagcaagaattgaacaccattttctgcaggacagtaaccaaagaaagaaatcatggctgacaacggggtacgct

SEQ ID NO: 39110 - DNA, 80 bp, synthetic construct
  misc_feature 1..80: note = Artificially Synthesized Probe
  source 1..80: mol_type = other DNA
ctgcctctcccatccccatgattcggttatgaaaagtgtcacacccaccgaaaaagttgaaagaataggctgggtgtggt

SEQ ID NO: 39111 - DNA, 80 bp, synthetic construct
  misc_feature 1..80: note = Artificially Synthesized Probe
  source 1..80: mol_type = other DNA
acaaaaaaacaaaaaacaaaacctgccttctcagagcagggggttagcattccatgccctagttactccacattctcaca

SEQ ID NO: 39112 - DNA, 80 bp, synthetic construct
  misc_feature 1..80: note = Artificially Synthesized Probe
  source 1..80: mol_type = other DNA
tacatgttgtgggagggacccggggagaggtaattgaatcacgggggccggtctttcccatgctattcttgtgatagtga

SEQ ID NO: 39113 - DNA, 80 bp, synthetic construct
  misc_feature 1..80: note = Artificially Synthesized Probe
  source 1..80: mol_type = other DNA
cttcagggaccatatggaatacccagggggctctatgtgctaaaatggatgggaggtatgagaattaaattcaacacaat

SEQ ID NO: 39114 - DNA, 80 bp, synthetic construct
  misc_feature 1..80: note = Artificially Synthesized Probe
  source 1..80: mol_type = other DNA
agcctcgcacagaaaggcctttcaaaaacacaacgcccttgcaaacacacacaagaggctgagtatatgaagaggagggt

SEQ ID NO: 39115 - DNA, 80 bp, synthetic construct
  misc_feature 1..80: note = Artificially Synthesized Probe
  source 1..80: mol_type = other DNA
atggtgccatctgtggacagataatgagagacaataatccaagaatagctatcaggcatttgttcagcagagtttcagca

SEQ ID NO: 39116 - DNA, 80 bp, synthetic construct
  misc_feature 1..80: note = Artificially Synthesized Probe
  source 1..80: mol_type = other DNA
ccttgctcttgtttttgggagccagacatgtctagggaggcctacatattttctgcagaaaagaattagagaagaatgaa

SEQ ID NO: 39117 - DNA, 80 bp, synthetic construct
  misc_feature 1..80: note = Artificially Synthesized Probe
  source 1..80: mol_type = other DNA
actgaaccccagcaggctctggtgtcttaatgtacaaatgtcctcctatgataagcaaatgtatcatttctcaatctcca

SEQ ID NO: 39118 - DNA, 80 bp, synthetic construct
  misc_feature 1..80: note = Artificially Synthesized Probe
  source 1..80: mol_type = other DNA
acatagagaaaaacaacagacacaggagcctttcaggggggtggagggtgagaggagggagaggatcgagaagaacaact

SEQ ID NO: 39119 - DNA, 80 bp, synthetic construct
  misc_feature 1..80: note = Artificially Synthesized Probe
  source 1..80: mol_type = other DNA
ttaagttgacaaataaaaatagtatacactgatggtgtacaacatgttttgaaaaacgcatacaggccaggcacagtggc

SEQ ID NO: 39120 - DNA, 80 bp, synthetic construct
  misc_feature 1..80: note = Artificially Synthesized Probe
  source 1..80: mol_type = other DNA
atgtcttttaaataatcaatcaagagcaaccaacccaagcttggtaactggcagcttccaaagctgcagagacatagcca

SEQ ID NO: 39121 - DNA, 80 bp, synthetic construct
  misc_feature 1..80: note = Artificially Synthesized Probe
  source 1..80: mol_type = other DNA
tttagcatagctgaaggcgatacagatgttaagatcaaggaggttaagtcaaaaccttgtcctgaatcacaacaggcaat

SEQ ID NO: 39122 - DNA, 80 bp, synthetic construct
  misc_feature 1..80: note = Artificially Synthesized Probe
  source 1..80: mol_type = other DNA
aagtgctgagggctacaatctagaaggaaaggagaactggagttagaatgaatcctctcaaaactacaacccagccttga

SEQ ID NO: 39123 - DNA, 80 bp, synthetic construct
  misc_feature 1..80: note = Artificially Synthesized Probe
  source 1..80: mol_type = other DNA
actgaaaaccaaggacaaagaaaatttctaaagcaaccatagcaaatggccattatctacaatcacaccgacagcagtct

SEQ ID NO: 39124 - DNA, 80 bp, synthetic construct
  misc_feature 1..80: note = Artificially Synthesized Probe
  source 1..80: mol_type = other DNA
gttcactgataactccacctcccaggctcaagcaatcctcccatctcagcctctcaagtagctgggactacaagtatgca

SEQ ID NO: 39125 - DNA, 80 bp, synthetic construct
  misc_feature 1..80: note = Artificially Synthesized Probe
  source 1..80: mol_type = other DNA
tcctgggtaagatgctgcatcccagtctcacctgggacacgctgctcctaggatctcggggccgggctcaggtgtgagag

SEQ ID NO: 39126 - DNA, 80 bp, synthetic construct
  misc_feature 1..80: note = Artificially Synthesized Probe
  source 1..80: mol_type = other DNA
aagccctgttaattcttgcagattaggtgcccaataggagtaggtatcacctggaaaccaagctgtgtaataaggaaaca

SEQ ID NO: 39127 - DNA, 80 bp, synthetic construct
  misc_feature 1..80: note = Artificially Synthesized Probe
  source 1..80: mol_type = other DNA
ccctgtttccaaaacaaaacaaccaaaacaaaaatggtgcattcacggccaatggcactatgactcagacatgaatgaag

SEQ ID NO: 39128 - DNA, 80 bp, synthetic construct
  misc_feature 1..80: note = Artificially Synthesized Probe
  source 1..80: mol_type = other DNA
ctcgatctccagaaaagatttcacaataaaatattccgtttatcccatctctcttgctatgctcccagggtcatttcact

SEQ ID NO: 39129 - DNA, 80 bp, synthetic construct
  misc_feature 1..80: note = Artificially Synthesized Probe
  source 1..80: mol_type = other DNA
tatcttattggttccatttttctagagaaccctggctaatacaaggcctgtcgacaccacaaactgcatgccctgaaacc

SEQ ID NO: 39130 - DNA, 80 bp, synthetic construct
  misc_feature 1..80: note = Artificially Synthesized Probe
  source 1..80: mol_type = other DNA
agcctctgcttttgcagaaatatctgaggggtagaatggagagacaggatgccgaggtttaaatgtggctctgccccgag

SEQ ID NO: 39131 - DNA, 80 bp, synthetic construct
  misc_feature 1..80: note = Artificially Synthesized Probe
  source 1..80: mol_type = other DNA
ctgtgtaaacctcaatgcagaatattttcttggttccaatcattcaatctctccctggatgaggatcagaaagtcctgcc

SEQ ID NO: 39132 - DNA, 80 bp, synthetic construct
  misc_feature 1..80: note = Artificially Synthesized Probe
  source 1..80: mol_type = other DNA
tctgggtacggctacagaagccatcaatggataaatggatgcacaaaattcagccatgaaagggaatgaagccccaacac

SEQ ID NO: 39133 - DNA, 80 bp, synthetic construct
  misc_feature 1..80: note = Artificially Synthesized Probe
  source 1..80: mol_type = other DNA
agaaagccactgcctgctgctgaagggccaatctcttctgagcagataccctctcaacgacgcttattatttttccaaag

SEQ ID NO: 39134 - DNA, 80 bp, synthetic construct
  misc_feature 1..80: note = Artificially Synthesized Probe
  source 1..80: mol_type = other DNA
tgccttccatacaatattgtcctggtggttgccacagaaaacagaaactattgaaaagcacagcataccacttcacgtga

SEQ ID NO: 39135 - DNA, 80 bp, synthetic construct
  misc_feature 1..80: note = Artificially Synthesized Probe
  source 1..80: mol_type = other DNA
caaaaaaaaaaaaaaacaaaaaacaaacaaacaaacaaacaaaacaacaacagctgggcgcagtggctcatgcctattat

SEQ ID NO: 39136 - DNA, 80 bp, synthetic construct
  misc_feature 1..80: note = Artificially Synthesized Probe
  source 1..80: mol_type = other DNA
ctctcctggcattctttgcaattgtcagaccaaattccatcaaatcaaagccaccatcaattaaggaggctccttatttt

SEQ ID NO: 39137 - DNA, 80 bp, synthetic construct
  misc_feature 1..80: note = Artificially Synthesized Probe
  source 1..80: mol_type = other DNA
tgctgaactttccaacagcctaaaacctaaaaccacaaccgagtctattctggcctggacatgaggtcttttctgaaact

SEQ ID NO: 39138 - DNA, 80 bp, synthetic construct
  misc_feature 1..80: note = Artificially Synthesized Probe
  source 1..80: mol_type = other DNA
aagaccatgtgtttgtgtgtttgtctttgctatttatttctctatcttgttgacaatcattttggtctctgaagatcatg

SEQ ID NO: 39139 - DNA, 80 bp, synthetic construct
  misc_feature 1..80: note = Artificially Synthesized Probe
  source 1..80: mol_type = other DNA
gtgtctagaagagtttaagagtcaccaaacactagatgcacagatgctctcaaagctcaaaggagatggaagaaaacatc

SEQ ID NO: 39140 - DNA, 80 bp, synthetic construct
  misc_feature 1..80: note = Artificially Synthesized Probe
  source 1..80: mol_type = other DNA
tctatcttattctctccagttctatatcaccttctcactttatttttttctggcatgtccttctccagcttctgcctccc

SEQ ID NO: 39141 - DNA, 80 bp, synthetic construct
  misc_feature 1..80: note = Artificially Synthesized Probe
  source 1..80: mol_type = other DNA
ctttctgactttccctccggggctttgggttttgctgggagcttctcaagatctcgtgcacttacgtttaaaaagaggat

SEQ ID NO: 39142 - DNA, 80 bp, synthetic construct
  misc_feature 1..80: note = Artificially Synthesized Probe
  source 1..80: mol_type = other DNA
agaagagatcaagtcccaatccctggagcccataaataagtgaactttgtcttcatagatgtcatgaagttaacgatctt

SEQ ID NO: 39143 - DNA, 80 bp, synthetic construct
  misc_feature 1..80: note = Artificially Synthesized Probe
  source 1..80: mol_type = other DNA
gcttgaagcacagcaatgcagtgataactaaaaagatttacagcctatgtggggcattaaaacttcatggagggtgcaag

SEQ ID NO: 39144 - DNA, 80 bp, synthetic construct
  misc_feature 1..80: note = Artificially Synthesized Probe
  source 1..80: mol_type = other DNA
tgtaacacctcccagcctacagcactttgctatagcagcctgtctttgtctgttttgtgttataacaataatataatata

SEQ ID NO: 39145 - DNA, 80 bp, synthetic construct
  misc_feature 1..80: note = Artificially Synthesized Probe
  source 1..80: mol_type = other DNA
gccattcttatgggaacaaacccattcccatgaggactaatcccatctagagagtgaaatctcactcactactagagaac

SEQ ID NO: 39146 - DNA, 80 bp, synthetic construct
  misc_feature 1..80: note = Artificially Synthesized Probe
  source 1..80: mol_type = other DNA
caaacccaggaggaaccaggagcttttcccatgcaaacagagatggcaatgggtccagatttagggcacagcaaactcat

SEQ ID NO: 39147 - DNA, 80 bp, synthetic construct
  misc_feature 1..80: note = Artificially Synthesized Probe
  source 1..80: mol_type = other DNA
ctttctatttacatgtaacgaatttatcaccaagttctgacagaggtgtaaattgcagagcgcaggtctattcctgtaag

SEQ ID NO: 39148 - DNA, 80 bp, synthetic construct
  misc_feature 1..80: note = Artificially Synthesized Probe
  source 1..80: mol_type = other DNA
ggtttctgcccggactatttagttctgcttgtttcatatctgcctttgagatgacagctttcctttaatgacaggtgatt

SEQ ID NO: 39149 - DNA, 80 bp, synthetic construct
  misc_feature 1..80: note = Artificially Synthesized Probe
  source 1..80: mol_type = other DNA
tacagcccttggtgggaatgaacgtgacctcaagtcctctctttcacagcctccctctccactaaccaaaccttcccagt

SEQ ID NO: 39150 - DNA, 80 bp, synthetic construct
  misc_feature 1..80: note = Artificially Synthesized Probe
  source 1..80: mol_type = other DNA
tcaattaaccaactgacttggaaaatctccctgtgctgaccccaatctggtgaaattcttgaggcacctctccaacacac

SEQ ID NO: 39151 - DNA, 80 bp, synthetic construct
  misc_feature 1..80: note = Artificially Synthesized Probe
  source 1..80: mol_type = other DNA
gggagctctagaatattctgccaaatccagatgcctcactcagcatcttcatgagattttaccaacgttgcttcccatcc

SEQ ID NO: 39152 - DNA, 80 bp, synthetic construct
  misc_feature 1..80: note = Artificially Synthesized Probe
  source 1..80: mol_type = other DNA
gagtctgaatcccaaataagactcagaggaacttttaaaagaagctacttctaaatgactgactccgccaactgcgtgcc

SEQ ID NO: 39153 - DNA, 80 bp, synthetic construct
  misc_feature 1..80: note = Artificially Synthesized Probe
  source 1..80: mol_type = other DNA
tgtttgcagggatcatggggggccggctggacacaaccacctcctcctgccatggaaggaagtccccatcccacacactc

SEQ ID NO: 39154 - DNA, 80 bp, synthetic construct
  misc_feature 1..80: note = Artificially Synthesized Probe
  source 1..80: mol_type = other DNA
accctcatgatgtaatcacctccaaaaggtcccacctcttcgtgctgccacaccagtgattaaatttcaacacaattttt

SEQ ID NO: 39155 - DNA, 80 bp, synthetic construct
  misc_feature 1..80: note = Artificially Synthesized Probe
  source 1..80: mol_type = other DNA
taaattcatttcccctggctgctgtgtggtgatgtcataaattcatttcccctggttgctgcatggtgacatcataaatt

SEQ ID NO: 39156 - DNA, 80 bp, synthetic construct
  misc_feature 1..80: note = Artificially Synthesized Probe
  source 1..80: mol_type = other DNA
tgcctcagtaaatgcagacccaaaataaaccaccttcttgggtgactgagaaccaggaatagaattctggaaacaagttc

SEQ ID NO: 39157 - DNA, 80 bp, synthetic construct
  misc_feature 1..80: note = Artificially Synthesized Probe
  source 1..80: mol_type = other DNA
acatttacacaggaaagggagttttttaagggagaattggctcacagcatcacaagcagaagtctcacaacaagccatct

SEQ ID NO: 39158 - DNA, 80 bp, synthetic construct
  misc_feature 1..80: note = Artificially Synthesized Probe
  source 1..80: mol_type = other DNA
gtgtgtctaatagacagtcttacatgaactttacaatttgcccacatcagctcatagaaattgcaatgcagacagcagca

SEQ ID NO: 39159 - DNA, 80 bp, synthetic construct
  misc_feature 1..80: note = Artificially Synthesized Probe
  source 1..80: mol_type = other DNA
tgtcgtttccctcccatttcatccttgtccttccctgcccatattaaatttgggccttattaaaatggagccattctgaa

SEQ ID NO: 39160 - DNA, 80 bp, synthetic construct
  misc_feature 1..80: note = Artificially Synthesized Probe
  source 1..80: mol_type = other DNA
atttttaaaaaagtttaggacctgggcttgtgcattacaccacagaacaccctggcccatgattggctggggttgttctc

SEQ ID NO: 39161 - DNA, 80 bp, synthetic construct
  misc_feature 1..80: note = Artificially Synthesized Probe
  source 1..80: mol_type = other DNA
atacatgttctaaaataggggagagtggggatatattctagaacattcttcacctaggcagtctcaggacaaaacaaggc

SEQ ID NO: 39162 - DNA, 80 bp, synthetic construct
  misc_feature 1..80: note = Artificially Synthesized Probe
  source 1..80: mol_type = other DNA
ggtctcagtctgtcacccaggctagagtgcagcggtgcgatcacagctcacagcagcctcgacctcccacctcaacctcc

SEQ ID NO: 39163 - DNA, 80 bp, synthetic construct
  misc_feature 1..80: note = Artificially Synthesized Probe
  source 1..80: mol_type = other DNA
agtctagtgtacagacaacaggtgtgaccacctggactcaacactgcacaaatatacaccgaataaaggggtaagtggat

SEQ ID NO: 39164 - DNA, 80 bp, synthetic construct
  misc_feature 1..80: note = Artificially Synthesized Probe
  source 1..80: mol_type = other DNA
tctctgcgttctccagcatcctggggcctcggtgactgtggccagctttgttcatcgactgtgtaaaaagccacctgcat

SEQ ID NO: 39165 - DNA, 80 bp, synthetic construct
  misc_feature 1..80: note = Artificially Synthesized Probe
  source 1..80: mol_type = other DNA
tgagctgagaaaaagcaaacacaaggaaacgagctgctagaagcccatggtgtttcaaaacaacgtgtgagtctgcaaga

SEQ ID NO: 39166 - DNA, 80 bp, synthetic construct
  misc_feature 1..80: note = Artificially Synthesized Probe
  source 1..80: mol_type = other DNA
gccccacttaggctgatgacagggagtgcagggtgataaccagcttcagcactgagagagcggttctgcctcttgtcttc

SEQ ID NO: 39167 - DNA, 80 bp, synthetic construct
  misc_feature 1..80: note = Artificially Synthesized Probe
  source 1..80: mol_type = other DNA
caaaaagtttgttttttgctttggtaagagagaaaacgaagaggaggcggagagaccacagggccaggagaatgggatga

SEQ ID NO: 39168 - DNA, 80 bp, synthetic construct
  misc_feature 1..80: note = Artificially Synthesized Probe
  source 1..80: mol_type = other DNA
ctattataaaggacatgtacttcctatagaaagttaagaataaatcctcagcaggcactgccattccagggcgatacagt

SEQ ID NO: 39169 - DNA, 80 bp, synthetic construct
  misc_feature 1..80: note = Artificially Synthesized Probe
  source 1..80: mol_type = other DNA
ccatttacatatgaagacctgcagttcccactggctgctggattccccagaccccatcatttccatttacagatgaagag

SEQ ID NO: 39170 - DNA, 80 bp, synthetic construct
  misc_feature 1..80: note = Artificially Synthesized Probe
  source 1..80: mol_type = other DNA
gtaacaggagcgtgcagtgcagacgccgagagatgccacagaaacgttgagctggatggggacagagacgggaccttgga

SEQ ID NO: 39171 - DNA, 80 bp, synthetic construct
  misc_feature 1..80: note = Artificially Synthesized Probe
  source 1..80: mol_type = other DNA
ccccggagatgagcagtgagtggggaagttggcgggggagggtacagaactctcccacgaagatgagcagagagtgggga

SEQ ID NO: 39172 - DNA, 80 bp, synthetic construct
  misc_feature 1..80: note = Artificially Synthesized Probe
  source 1..80: mol_type = other DNA
tccccagtcagtgggttacaggaatgcatccacaaggcatgggttggaaacctggcttcctcatttactaacggagcggc

SEQ ID NO: 39173 - DNA, 80 bp, synthetic construct
  misc_feature 1..80: note = Artificially Synthesized Probe
  source 1..80: mol_type = other DNA
cgtcactatcattaccatcagcactgccatcatcattagtaccatgacttaatctacaagtagaaagaggaagggggtga

SEQ ID NO: 39174 - DNA, 80 bp, synthetic construct
  misc_feature 1..80: note = Artificially Synthesized Probe
  source 1..80: mol_type = other DNA
atcattatcaaccaccaccatcatcaccatcaccatggccaccatcactatcaccatgaccaccctcaccaccatcatca

SEQ ID NO: 39175 - DNA, 80 bp, synthetic construct
  misc_feature 1..80: note = Artificially Synthesized Probe
  source 1..80: mol_type = other DNA
ctcatacatgtgtagacaagggggagtgagtatagcaaggtgttcaaatggtgactcaggaaggaaagaagctttgggtc

SEQ ID NO: 39176 - DNA, 80 bp, synthetic construct
  misc_feature 1..80: note = Artificially Synthesized Probe
  source 1..80: mol_type = other DNA
gatatggggcatgtggagtgtggagtgataccaagtcaagctcaatacagatcatcaaaatgtgttaaccttttctaatc

SEQ ID NO: 39177 - DNA, 80 bp, synthetic construct
  misc_feature 1..80: note = Artificially Synthesized Probe
  source 1..80: mol_type = other DNA
agaaaaaagaaggcacggacagagaagtccttcaatagtgatgtccaggaattcacctgactttgagcaccaaggaaaca

SEQ ID NO: 39178 - DNA, 80 bp, synthetic construct
  misc_feature 1..80: note = Artificially Synthesized Probe
  source 1..80: mol_type = other DNA
ctattattcagcttaaaaaggaaggataaaaaattccgacacagcctacagcgtggacaaacctcgaaaacattgcactc

SEQ ID NO: 39179 - DNA, 80 bp, synthetic construct
  misc_feature 1..80: note = Artificially Synthesized Probe
  source 1..80: mol_type = other DNA
tttcatgtgatggtgccacgcatgcctggtgggggtaccagaactatcctggggctttgtccgccacgtccttccccatc

SEQ ID NO: 39180 - DNA, 80 bp, synthetic construct
  misc_feature 1..80: note = Artificially Synthesized Probe
  source 1..80: mol_type = other DNA
gctgagtactgtgggttacaatttttctggacgttgcctattggttgttgggttggggctttacgtgtttttttaaggat

SEQ ID NO: 39181 - DNA, 80 bp, synthetic construct
  misc_feature 1..80: note = Artificially Synthesized Probe
  source 1..80: mol_type = other DNA
agacccctggctgtggatcagggagaaagaccttcatggtgggattggggactggtgctcagttgtgagacagagggtct

SEQ ID NO: 39182 - DNA, 80 bp, synthetic construct
  misc_feature 1..80: note = Artificially Synthesized Probe
  source 1..80: mol_type = other DNA
tgaatttcaccttctcagggtccacgagaaagagctacacctcagcaattaacagtgaggaaagatgacagggaagatat

SEQ ID NO: 39183 - DNA, 80 bp, synthetic construct
  misc_feature 1..80: note = Artificially Synthesized Probe
  source 1..80: mol_type = other DNA
ataaagacaactaatgttagcataaaaacactgaacaattaatccacactcattattccccttcccccggttaatctgaa

SEQ ID NO: 39184 - DNA, 80 bp, synthetic construct
  misc_feature 1..80: note = Artificially Synthesized Probe
  source 1..80: mol_type = other DNA
gccatcctgaagggacacccactggctaaaactgggataataataacagattattacctcctgaataaagagaactctgc

SEQ ID NO: 39185 - DNA, 80 bp, synthetic construct
  misc_feature 1..80: note = Artificially Synthesized Probe
  source 1..80: mol_type = other DNA
actcagaagttaccacccttttcctagcaattcctgcagaacctgccccataatttgcatgtaattaaaagtgggtataa

SEQ ID NO: 39186 - DNA, 80 bp, synthetic construct
  misc_feature 1..80: note = Artificially Synthesized Probe
  source 1..80: mol_type = other DNA
gacagagtgagactccgagaaaagagagaaagaaagagagagtaagaaagagagagaagagagagagagaaagaaaaaga

SEQ ID NO: 39187 - DNA, 80 bp, synthetic construct
  misc_feature 1..80: note = Artificially Synthesized Probe
  source 1..80: mol_type = other DNA
ggcatttctcccaaaacatatgccttgtgacatgaggtagagacaccacagcccacacaacaaagagtcacatcatttcg

SEQ ID NO: 39188 - DNA, 80 bp, synthetic construct
  misc_feature 1..80: note = Artificially Synthesized Probe
  source 1..80: mol_type = other DNA
tggagcccatcactctcataacatgatttttggaaagatgaggtctcttaaagatgtcacctatgtcaggagggcaggat

SEQ ID NO: 39189 - DNA, 80 bp, synthetic construct
  misc_feature 1..80: note = Artificially Synthesized Probe
  source 1..80: mol_type = other DNA
taccacagtacactagaaaaacctcaatctgaaggaagaccacaacccatgtggctccatcccattctaaatgctaactt

SEQ ID NO: 39190 - DNA, 80 bp, synthetic construct
  misc_feature 1..80: note = Artificially Synthesized Probe
  source 1..80: mol_type = other DNA
tgacaatgaggatgatgatggggggacagatgatgacaataatgatagggacatttattaagcacctggtctatgccggg

SEQ ID NO: 39191 - DNA, 80 bp, synthetic construct
  misc_feature 1..80: note = Artificially Synthesized Probe
  source 1..80: mol_type = other DNA
ccgcacccggcccgaataacaacttttaagataatttgcagacagcctgagctcaaatggggctcttctaacatcagcct

SEQ ID NO: 39192 - DNA, 80 bp, synthetic construct
  misc_feature 1..80: note = Artificially Synthesized Probe
  source 1..80: mol_type = other DNA
aaattaaatgttcctcttccaggagcactcctgttttaatgatatcagtgacagctctcaaaatcagtagactttaggct

SEQ ID NO: 39193 - DNA, 80 bp, synthetic construct
  misc_feature 1..80: note = Artificially Synthesized Probe
  source 1..80: mol_type = other DNA
agacatttgcctggttgggagagagggcaggaaaaaggaaaaaggaggggtgtgggaggggaaaggacggagctccagga

SEQ ID NO: 39194 - DNA, 80 bp, synthetic construct
  misc_feature 1..80: note = Artificially Synthesized Probe
  source 1..80: mol_type = other DNA
atttttacaaagagacgcctctgtcctgtgcctggaggactcattcactaaaggaaacctgaatttaaaccttcctcttc

SEQ ID NO: 39195 - DNA, 80 bp, synthetic construct
  misc_feature 1..80: note = Artificially Synthesized Probe
  source 1..80: mol_type = other DNA
aatcagcctagtgagttttaaaaaccaagctcattagcgctttggcagtcccaagaactgcccttttccaagcaggtcac

SEQ ID NO: 39196 - DNA, 80 bp, synthetic construct
  misc_feature 1..80: note = Artificially Synthesized Probe
  source 1..80: mol_type = other DNA
ctgtgcaagaattcacctgctgcttccacattcaggatatatcagtcagggttctacagagacacagaacgtgtgtgtgt

SEQ ID NO: 39197 - DNA, 80 bp, synthetic construct
  misc_feature 1..80: note = Artificially Synthesized Probe
  source 1..80: mol_type = other DNA
taaaattaaagatagaaatattttaaagagttggctcatgcaatcacggaggctgtaagtctgaaatctgcagggcaggc

SEQ ID NO: 39198 - DNA, 80 bp, synthetic construct
  misc_feature 1..80: note = Artificially Synthesized Probe
  source 1..80: mol_type = other DNA
tcactggagacagccggtgaaatctgtttcttgccaagaccaggctgacctacctcctaacccaactgttgcaaggttgg

SEQ ID NO: 39199 - DNA, 80 bp, synthetic construct
  misc_feature 1..80: note = Artificially Synthesized Probe
  source 1..80: mol_type = other DNA
tctaaaagggtctaggaaaaaaaaattgaaagccgtcgttattggtctcatgaccccttttgcagagtgaggtgatccag

SEQ ID NO: 39200 - DNA, 80 bp, synthetic construct
  misc_feature 1..80: note = Artificially Synthesized Probe
  source 1..80: mol_type = other DNA
tccgatctcacatttctttattgcaacgcaggaacagactcacacaccaacagaaggggtgcagctgaaatgaagtgaaa

SEQ ID NO: 39201 - DNA, 80 bp, synthetic construct
  misc_feature 1..80: note = Artificially Synthesized Probe
  source 1..80: mol_type = other DNA
caaacacacacactttagaaccaacatttgtcacactgctcacaaagccatattcagatgcccaaaactaagctgaaaga

SEQ ID NO: 39202 - DNA, 80 bp, synthetic construct
  misc_feature 1..80: note = Artificially Synthesized Probe
  source 1..80: mol_type = other DNA
cactgctaaacaagaggaactactttgaggtcctcttttgagagttcctcatttgagaggctcttaacgttccagaaaag

SEQ ID NO: 39203 - DNA, 80 bp, synthetic construct
  misc_feature 1..80: note = Artificially Synthesized Probe
  source 1..80: mol_type = other DNA
gcagaagttttaaagaaaaatagaaattttctgggactaagggacttcagtggcagtgggggatgtttcttgcatagaaa

SEQ ID NO: 39204 - DNA, 80 bp, synthetic construct
  misc_feature 1..80: note = Artificially Synthesized Probe
  source 1..80: mol_type = other DNA
tgaggttccacatttggggctgatggaatcacccccgagaagatgctggttgatgagctataaaccggtgacagatataa

SEQ ID NO: 39205 - DNA, 80 bp, synthetic construct
  misc_feature 1..80: note = Artificially Synthesized Probe
  source 1..80: mol_type = other DNA
tgtacatgcctgtgtgtatgcatgcctgttgtgtatgcaggcctatgtgtatgcatgcctgtatgtatgtgtacatgcct

SEQ ID NO: 39206 - DNA, 80 bp, synthetic construct
  misc_feature 1..80: note = Artificially Synthesized Probe
  source 1..80: mol_type = other DNA
aaataaagctgggttataagtcaaccagaaagtgagtgcaaccacattgatagaaataagcaagggattcacaagtgaac

SEQ ID NO: 39207 - DNA, 80 bp, synthetic construct
  misc_feature 1..80: note = Artificially Synthesized Probe
  source 1..80: mol_type = other DNA
cctggctattgtgcgggttaacagatttaatgtaaaaaatgctgctgctcagagaggcagaaaatgtttgtgaaaagcgt

SEQ ID NO: 39208 - DNA, 80 bp, synthetic construct
  misc_feature 1..80: note = Artificially Synthesized Probe
  source 1..80: mol_type = other DNA
tgaatgaagccaatctgaaaaggctgcatgctgtgtgattccaactcgatgacattctagaaaaggcaaaactatagagc

SEQ ID NO: 39209 - DNA, 80 bp, synthetic construct
  misc_feature 1..80: note = Artificially Synthesized Probe
  source 1..80: mol_type = other DNA
cttaaaaacaggtctctttttatgagaaactgtactgaacaaaccaaaggcactggtagcaaagggagttatttactcga

SEQ ID NO: 39210 - DNA, 80 bp, synthetic construct
  misc_feature 1..80: note = Artificially Synthesized Probe
  source 1..80: mol_type = other DNA
aaaatttacatttagaacaggtaccagatggtcgcctgcaatcacacaggctgttttgttttcattgacaggtcgttcca

SEQ ID NO: 39211 - DNA, 80 bp, synthetic construct
  misc_feature 1..80: note = Artificially Synthesized Probe
  source 1..80: mol_type = other DNA
tttctccctctgcatccaaaaccaggagaaaacaacattgactgagctgccgtagttgatgctgatgacaggaacattct

SEQ ID NO: 39212 - DNA, 80 bp, synthetic construct
  misc_feature 1..80: note = Artificially Synthesized Probe
  source 1..80: mol_type = other DNA
accgtaggtgttatcattcaatttaggagacaagaggatggaagctgagagaggttcattaacctggtcttcacacagcc

SEQ ID NO: 39213 - DNA, 80 bp, synthetic construct
  misc_feature 1..80: note = Artificially Synthesized Probe
  source 1..80: mol_type = other DNA
tggataagcaaactggggtacattggaaaatggaacattatccagcaccaaaaggaaacgcgcttccaagctgtgaaagg

SEQ ID NO: 39214 - DNA, 80 bp, synthetic construct
  misc_feature 1..80: note = Artificially Synthesized Probe
  source 1..80: mol_type = other DNA
tcactgattgtaacagatgtcctatactaaagcaagatattactaacagaggaaactgggggagcagtcaatatgggaac

SEQ ID NO: 39215 - DNA, 80 bp, synthetic construct
  misc_feature 1..80: note = Artificially Synthesized Probe
  source 1..80: mol_type = other DNA
gggtaatgatttctgtcaaggccaaaaccaaaacacaataaacccccaacctctatgcgtggtcaccatctccctgggtg

SEQ ID NO: 39216 - DNA, 80 bp, synthetic construct
  misc_feature 1..80: note = Artificially Synthesized Probe
  source 1..80: mol_type = other DNA
gtgtttttagcagtgaattgagagtctattctggaataacagtcatctcagaaccttaaagtcgagacattaacagtctg

SEQ ID NO: 39217 - DNA, 80 bp, synthetic construct
  misc_feature 1..80: note = Artificially Synthesized Probe
  source 1..80: mol_type = other DNA
ccccccccagcgttcagaggtcgagggggctcccacaaatgatgagaaagtggcattctttggttgacaaacacatttgt

SEQ ID NO: 39218 - DNA, 80 bp, synthetic construct
  misc_feature 1..80: note = Artificially Synthesized Probe
  source 1..80: mol_type = other DNA
ttctgactgagaagacagaggagagtgagaatgcacctttaaacaccaaacaaaaccaagtaaaaggtaactgcagcgtt

SEQ ID NO: 39219 - DNA, 80 bp, synthetic construct
  misc_feature 1..80: note = Artificially Synthesized Probe
  source 1..80: mol_type = other DNA
gagctgaggcttttggaaccacagggtgagcacagtgtctggcacgtgacaagtacaatcggcctatcctggatgaatgt

SEQ ID NO: 39220 - DNA, 80 bp, synthetic construct
  misc_feature 1..80: note = Artificially Synthesized Probe
  source 1..80: mol_type = other DNA
atagcgatgcctggtccccgagtggctcaaggtgaagtgcgggactcatttcctgtgaggtcatgatggtccgcagatca

SEQ ID NO: 39221 - DNA, 80 bp, synthetic construct
  misc_feature 1..80: note = Artificially Synthesized Probe
  source 1..80: mol_type = other DNA
gcatctgatataaggaggaggggcagcaaaacaaaaaccgagaggatcctgctggctgagaaagccattggtgagctcgc

SEQ ID NO: 39222 - DNA, 80 bp, synthetic construct
  misc_feature 1..80: note = Artificially Synthesized Probe
  source 1..80: mol_type = other DNA
ttatacacccgcttcttgtatcgaaactggcacagaaaacaaaaaagagagagaaaacaagtcaatacttctcagagttg

SEQ ID NO: 39223 - DNA, 80 bp, synthetic construct
  misc_feature 1..80: note = Artificially Synthesized Probe
  source 1..80: mol_type = other DNA
cctgagcattgaatgtgagcttcctggcacagacctggcactagacaagtccactttatctctccctccttactgccctt

SEQ ID NO: 39224 - DNA, 80 bp, synthetic construct
  misc_feature 1..80: note = Artificially Synthesized Probe
  source 1..80: mol_type = other DNA
cctaatgtgtcaatccctgagccaatctcagcctttgcagtgggtcatgcaaaggagattaataaacctaagtatcggca

SEQ ID NO: 39225 - DNA, 80 bp, synthetic construct
  misc_feature 1..80: note = Artificially Synthesized Probe
  source 1..80: mol_type = other DNA
ccaggacagctgagtgatttgctctaaaccacacaacttccaagtggcatctcatctttttctacactgaaacccctccc

SEQ ID NO: 39226 - DNA, 80 bp, synthetic construct
  misc_feature 1..80: note = Artificially Synthesized Probe
  source 1..80: mol_type = other DNA
aagctgtgctgttgagaacagctggatggtcacagccgccctgttactcaaggactcagagatgaattggagaatggtat

SEQ ID NO: 39227 - DNA, 80 bp, synthetic construct
  misc_feature 1..80: note = Artificially Synthesized Probe
  source 1..80: mol_type = other DNA
aaattccttctttgtgcctgactcctggcagagttcctaaaacctttgtactgtcctcagtgataagagtatctctggag

SEQ ID NO: 39228 - DNA, 80 bp, synthetic construct
  misc_feature 1..80: note = Artificially Synthesized Probe
  source 1..80: mol_type = other DNA
gaatctgtagtgaaaaaaaaatgtataaaagttgtacaacagtgtgagattcatggcaaaatcagaagcaaccttttatt

SEQ ID NO: 39229 - DNA, 80 bp, synthetic construct
  misc_feature 1..80: note = Artificially Synthesized Probe
  source 1..80: mol_type = other DNA
aaaataaagcctactggttgctgggacacagacattcggtaaatataaaagggaaaaaggaaagaccgaggcattggtct

SEQ ID NO: 39230 - DNA, 80 bp, synthetic construct
  misc_feature 1..80: note = Artificially Synthesized Probe
  source 1..80: mol_type = other DNA
cagctgtcagcaggggctcaataattcactttgtcactgtcaaagtgttcagaacaaaaggaggtttgattgaatataag

SEQ ID NO: 39231 - DNA, 80 bp, synthetic construct
  misc_feature 1..80: note = Artificially Synthesized Probe
  source 1..80: mol_type = other DNA
agaatataaataagacatgttgttatgggctgaactgtgcccctctaaataaatgttgaagtcctaatgcccatacccta

SEQ ID NO: 39232 - DNA, 80 bp, synthetic construct
  misc_feature 1..80: note = Artificially Synthesized Probe
  source 1..80: mol_type = other DNA
taaaaagtcaggaaacaacaggtgctggagaggatgtggagaaataggaatgcttttacactgttggtaggagtgtacac

SEQ ID NO: 39233 - DNA, 80 bp, synthetic construct
  misc_feature 1..80: note = Artificially Synthesized Probe
  source 1..80: mol_type = other DNA
ggatttaaggcaccagtctgtggttggttatggcaggcatgggaactcataaacgtgtgaatcacctgccactaattgtg

SEQ ID NO: 39234 - DNA, 80 bp, synthetic construct
  misc_feature 1..80: note = Artificially Synthesized Probe
  source 1..80: mol_type = other DNA
ttgccccttaaagagttcagtgtctacagggaggggatgatgatgatggtggtgatgctgatgatgagggtggttgtaat

SEQ ID NO: 39235 - DNA, 80 bp, synthetic construct
  misc_feature 1..80: note = Artificially Synthesized Probe
  source 1..80: mol_type = other DNA
gtttttgcaaattggaggtttgcggcaactccgcaacgagaaaatctatcggcattatttctccaacagcacacgctcac

SEQ ID NO: 39236 - DNA, 80 bp, synthetic construct
  misc_feature 1..80: note = Artificially Synthesized Probe
  source 1..80: mol_type = other DNA
gacagggagaaggtttgagtcaccaaactttgatgatcaagacggtcacaacattcatttaaaccaaagcctcatccaga

SEQ ID NO: 39237 - DNA, 80 bp, synthetic construct
  misc_feature 1..80: note = Artificially Synthesized Probe
  source 1..80: mol_type = other DNA
tggagctgggcaaagtcaagtcaactgaaaccttctggaaagaatttagcattccagatgccattaagaatattcatgtt

SEQ ID NO: 39238 - DNA, 80 bp, synthetic construct
  misc_feature 1..80: note = Artificially Synthesized Probe
  source 1..80: mol_type = other DNA
tggcagccatcaacatgagacaagacactccaccaacaaaaacattacaggccactgaagatgcaggtgattcttaagta

SEQ ID NO: 39239 - DNA, 80 bp, synthetic construct
  misc_feature 1..80: note = Artificially Synthesized Probe
  source 1..80: mol_type = other DNA
aacgagatctccgagacacaaaccaggctgtcttctcccttatctccagaaaggcagtacatacagcatgagacctgggt

SEQ ID NO: 39240 - DNA, 80 bp, synthetic construct
  misc_feature 1..80: note = Artificially Synthesized Probe
  source 1..80: mol_type = other DNA
ttgcataaccaaaccaaagctagtaaacgtggatggcattgaacagcattggatcaacattccagacatggaacactcct

SEQ ID NO: 39241 - DNA, 80 bp, synthetic construct
  misc_feature 1..80: note = Artificially Synthesized Probe
  source 1..80: mol_type = other DNA
ctcccattctggaagccataagtctgagatcaagatgtctgcagggctggttcctctggaggcctctcttcctggcttgc

SEQ ID NO: 39242 - DNA, 80 bp, synthetic construct
  misc_feature 1..80: note = Artificially Synthesized Probe
  source 1..80: mol_type = other DNA
aaagccggaaaaaactccaagtttctgagcacgtcattcattacaaagaagcgcatttcacattcagaatttcctctgca

SEQ ID NO: 39243 - DNA, 80 bp, synthetic construct
  misc_feature 1..80: note = Artificially Synthesized Probe
  source 1..80: mol_type = other DNA
aagtaagtcagccatggaaggggggttataattaaaaagtcctgactgcagacacaaaacacttactatgtgcccatagc

SEQ ID NO: 39244 - DNA, 80 bp, synthetic construct
  misc_feature 1..80: note = Artificially Synthesized Probe
  source 1..80: mol_type = other DNA
gcacgaacccaatacgtaacagaggaagggtccacatataatccttacaatatttgctttaaatgacgtgtaagaaaaca

SEQ ID NO: 39245 - DNA, 80 bp, synthetic construct
  misc_feature 1..80: note = Artificially Synthesized Probe
  source 1..80: mol_type = other DNA
gggagggagggagagagagacagagggatggacggacggatggatggcaggcagacaggcaggcaggctggctggctgga

SEQ ID NO: 39246 - DNA, 80 bp, synthetic construct
  misc_feature 1..80: note = Artificially Synthesized Probe
  source 1..80: mol_type = other DNA
ttcacagtggtgatgggctcactcatccgtgaatttcctaaaatccaacgacttgcacacttccaatgggtgaattatat

SEQ ID NO: 39247 - DNA, 80 bp, synthetic construct
  misc_feature 1..80: note = Artificially Synthesized Probe
  source 1..80: mol_type = other DNA
aggaaaaagaatccactgacttgcacacttccaataggtgtgtgcccagactaggggggatatgtttttttttttttttt

SEQ ID NO: 39248 - DNA, 80 bp, synthetic construct
  misc_feature 1..80: note = Artificially Synthesized Probe
  source 1..80: mol_type = other DNA
gacttggaaactgaaactcaaatcctgaatgttctcacttataagtggaagctaaataatgtgtgtgcaggaatgcagag

SEQ ID NO: 39249 - DNA, 80 bp, synthetic construct
  misc_feature 1..80: note = Artificially Synthesized Probe
  source 1..80: mol_type = other DNA
agcaaataacagtggggccagacctggaggttcctagagaaagttacggtcatagcattggttttgcacaacttgagttg

SEQ ID NO: 39250 - DNA, 80 bp, synthetic construct
  misc_feature 1..80: note = Artificially Synthesized Probe
  source 1..80: mol_type = other DNA
tagagtcctcccaatattcaaaagtagaggaatcctcaaatacaaaatgcaaatgcggtaattatgtgcctgtgaccaaa

SEQ ID NO: 39251 - DNA, 80 bp, synthetic construct
  misc_feature 1..80: note = Artificially Synthesized Probe
  source 1..80: mol_type = other DNA
aaccactttgggccacggggccagttttcttccctcttcctcattcacactcccccagaaataacagagctcaccagttt

SEQ ID NO: 39252 - DNA, 80 bp, synthetic construct
  misc_feature 1..80: note = Artificially Synthesized Probe
  source 1..80: mol_type = other DNA
gcaaagtggtcttcagaaggttccagaaacaaccaggctcccacgagtagagactaaaccctgaagaggccctggctttc

SEQ ID NO: 39253 - DNA, 80 bp, synthetic construct
  misc_feature 1..80: note = Artificially Synthesized Probe
  source 1..80: mol_type = other DNA
gttacatgctgcgttccgtttgagtgtacgggacacatgccctgtggacgggtgtgttatccttcaacaaagatgctcac

SEQ ID NO: 39254 - DNA, 80 bp, synthetic construct
  misc_feature 1..80: note = Artificially Synthesized Probe
  source 1..80: mol_type = other DNA
aaactcaccacaattaaaagaagaaaagcccccgagaatgcttgatgccagggaggacaaaaataagacagaaaacctac

SEQ ID NO: 39255 - DNA, 80 bp, synthetic construct
  misc_feature 1..80: note = Artificially Synthesized Probe
  source 1..80: mol_type = other DNA
aaaaaaaagtcacctatgagatggaaaaaataaatctgttggcctcaaatgtattcaaagcaatgttcagggcaggaaga

SEQ ID NO: 39256 - DNA, 80 bp, synthetic construct
  misc_feature 1..80: note = Artificially Synthesized Probe
  source 1..80: mol_type = other DNA
attcaccgagaaagcactgctcttaggaactcttgctaaaaaaaacccactgaacagtgaattccctccaattaaaagca

SEQ ID NO: 39257 - DNA, 80 bp, synthetic construct
  misc_feature 1..80: note = Artificially Synthesized Probe
  source 1..80: mol_type = other DNA
tgcctgacatttggaggccttttattatagcaatgagcttagtttacccctaaatgatataggaagaggggacagtgaaa

SEQ ID NO: 39258 - DNA, 80 bp, synthetic construct
  misc_feature 1..80: note = Artificially Synthesized Probe
  source 1..80: mol_type = other DNA
catccctagagggcacgtgtcagcacgttagtcccctcagcccagttagcgtctctctcagagggagcagggctgggggt

SEQ ID NO: 39259 - DNA, 80 bp, synthetic construct
  misc_feature 1..80: note = Artificially Synthesized Probe
  source 1..80: mol_type = other DNA
gcagccacgcgggaaggagtgctcagggctgtaccccctggaagtgggggagcatgggatgctgggcctctggcacagca

SEQ ID NO: 39260 - DNA, 80 bp, synthetic construct
  misc_feature 1..80: note = Artificially Synthesized Probe
  source 1..80: mol_type = other DNA
cttcgaggtggggagaaggaagacaaagaacgggagatgtgaaaatgaaagaaaacccaggggcacggtggacactggcg

SEQ ID NO: 39261 - DNA, 80 bp, synthetic construct
  misc_feature 1..80: note = Artificially Synthesized Probe
  source 1..80: mol_type = other DNA
aaagttggcttgacccagggatggcagggactgggggaggaggggccatgctgaaccagcaattccacttctgggtgcgt

SEQ ID NO: 39262 - DNA, 80 bp, synthetic construct
  misc_feature 1..80: note = Artificially Synthesized Probe
  source 1..80: mol_type = other DNA
gcaagacgtaaatttcagaagttcatcactagagacagctttagacccttgtcagccccgccctggaggaacctacagag

SEQ ID NO: 39263 - DNA, 80 bp, synthetic construct
  misc_feature 1..80: note = Artificially Synthesized Probe
  source 1..80: mol_type = other DNA
gggagagggagggagggaaggaaggagggagggaaggagggagggagagggagggagaggaagggagggagggagggaga

SEQ ID NO: 39264 - DNA, 80 bp, synthetic construct
  misc_feature 1..80: note = Artificially Synthesized Probe
  source 1..80: mol_type = other DNA
gtcctcagcaggcactccggcctcacccctcagctttgctgcccagaaacctgacagcagccactcctcatcagatatca

SEQ ID NO: 39265 - DNA, 80 bp, synthetic construct
  misc_feature 1..80: note = Artificially Synthesized Probe
  source 1..80: mol_type = other DNA
tctcctgcctcagcctcccaattagctgggattacagatacctgccaccatgccttgcgaattttttgtatttttagtag

SEQ ID NO: 39266 - DNA, 80 bp, synthetic construct
  misc_feature 1..80: note = Artificially Synthesized Probe
  source 1..80: mol_type = other DNA
gggtcttgagtaacctgattagcagcttcctgggaacagcagacacctgatcactgcctgggaaaacatttaattattaa

SEQ ID NO: 39267 - DNA, 80 bp, synthetic construct
  misc_feature 1..80: note = Artificially Synthesized Probe
  source 1..80: mol_type = other DNA
aattagccaggtgtggtggtgggcgcctgtaatcccagctacttgggaggctaaggcaggagaatcgcttgaacttggga

SEQ ID NO: 39268 - DNA, 80 bp, synthetic construct
  misc_feature 1..80: note = Artificially Synthesized Probe
  source 1..80: mol_type = other DNA
aggggtggacctacccccgcccacgctcccagaagagggatggacctacccccgcccacgctcccagaggaggggtggac

SEQ ID NO: 39269 - DNA, 80 bp, synthetic construct
  misc_feature 1..80: note = Artificially Synthesized Probe
  source 1..80: mol_type = other DNA
cctgggggtgcatgcgcacagagggatgatcacaggaagacacagcaagaaggcagccacgtgcacgccagggagcgaga

SEQ ID NO: 39270 - DNA, 80 bp, synthetic construct
  misc_feature 1..80: note = Artificially Synthesized Probe
  source 1..80: mol_type = other DNA
acaaaaacacacaggtcattttgctgctgaatttttaagagggctttatatggcagtgtctcagagaaaggggtaaacgc

SEQ ID NO: 39271 - DNA, 80 bp, synthetic construct
  misc_feature 1..80: note = Artificially Synthesized Probe
  source 1..80: mol_type = other DNA
gggtttctgtccaggctgctgtaaagagcacatgatttataaagaagtcttcattttatgacaggtttccatttcagttt

SEQ ID NO: 39272 - DNA, 80 bp, synthetic construct
  misc_feature 1..80: note = Artificially Synthesized Probe
  source 1..80: mol_type = other DNA
tgtgttgggggaaagagaagaattaataaacctatgaggctgacactagcaggtattcacatggagaagatgagaaatag

SEQ ID NO: 39273 - DNA, 80 bp, synthetic construct
  misc_feature 1..80: note = Artificially Synthesized Probe
  source 1..80: mol_type = other DNA
acaaggcgagaaaaaaagtgtttctttctacaaggcatcgggtacaaggcatgaagggacagacaaattagacaatgtaa

SEQ ID NO: 39274 - DNA, 80 bp, synthetic construct
  misc_feature 1..80: note = Artificially Synthesized Probe
  source 1..80: mol_type = other DNA
ctacaacatcatgtgtaaaacataacagagttgatggggaaaaagttgaggaggccactccaacgtatgccattttgtcc

SEQ ID NO: 39275 - DNA, 80 bp, synthetic construct
  misc_feature 1..80: note = Artificially Synthesized Probe
  source 1..80: mol_type = other DNA
aacccaactaccttgggcacatgttctcagacctctgggactataaaatgggccttagtcactcacatttggctcagaat

SEQ ID NO: 39276 - DNA, 80 bp, synthetic construct
  misc_feature 1..80: note = Artificially Synthesized Probe
  source 1..80: mol_type = other DNA
ccaacacatgaaatttgaggaacatgttcaaaccatagcagccaccaacaggaaactaagtaaatgattgtatagtaata

SEQ ID NO: 39277 - DNA, 80 bp, synthetic construct
  misc_feature 1..80: note = Artificially Synthesized Probe
  source 1..80: mol_type = other DNA
ccttatctgatagataaggagccttagaagataagctcctggtccatcacagccagaaagagaggcagctcacactcaat

SEQ ID NO: 39278 - DNA, 80 bp, synthetic construct
  misc_feature 1..80: note = Artificially Synthesized Probe
  source 1..80: mol_type = other DNA
gggctgggggattaactggcctttgaagattaaatatcacagcacattgcatctcagcagtgtctgtctaggcagagagg

SEQ ID NO: 39279 - DNA, 80 bp, synthetic construct
  misc_feature 1..80: note = Artificially Synthesized Probe
  source 1..80: mol_type = other DNA
ttgttttcttaagaagaaatatttttcccatctggggcattttaaactattgcgctaacctcatggcgagagaatctctt

SEQ ID NO: 39280 - DNA, 80 bp, synthetic construct
  misc_feature 1..80: note = Artificially Synthesized Probe
  source 1..80: mol_type = other DNA
agtgggaagagaatttgagcactggaaggatctaggtaaggacaagccaagaaattaaccggacagctacttctttccag

SEQ ID NO: 39281 - DNA, 80 bp, synthetic construct
  misc_feature 1..80: note = Artificially Synthesized Probe
  source 1..80: mol_type = other DNA
tggtgatgactcttaaggagcatgctgccttcaagcatctgtttaacaaagcacatcttgcactgcccttaatccattta

SEQ ID NO: 39282 - DNA, 80 bp, synthetic construct
  misc_feature 1..80: note = Artificially Synthesized Probe
  source 1..80: mol_type = other DNA
cccgcacggggcggcagggcagaggtgctccccacatctcagacgatgggcggctgggcagagacgctcctcacttccca

SEQ ID NO: 39283 - DNA, 80 bp, synthetic construct
  misc_feature 1..80: note = Artificially Synthesized Probe
  source 1..80: mol_type = other DNA
cacaacagtggcaggtagcatctagggaccatttgacaacactgataaaaggtcaactgaggcagaataagatgcataaa

SEQ ID NO: 39284 - DNA, 80 bp, synthetic construct
  misc_feature 1..80: note = Artificially Synthesized Probe
  source 1..80: mol_type = other DNA
tgtgtgtaaaactagatactgatttttgcatatctcagcggtagaactgtgatttgttttatattcataacaatatttag

SEQ ID NO: 39285 - DNA, 80 bp, synthetic construct
  misc_feature 1..80: note = Artificially Synthesized Probe
  source 1..80: mol_type = other DNA
ggaggaagcagctatttctcccaggacaagggtcagaccttcatgcatatcaaatcacgagagctttaggaaatgcgatg

SEQ ID NO: 39286 - DNA, 80 bp, synthetic construct
  misc_feature 1..80: note = Artificially Synthesized Probe
  source 1..80: mol_type = other DNA
agaggccccattctcaaagacagttgcgatgggggtcacggcttccacggaggaatcttgatgggacacaatctagtcca

SEQ ID NO: 39287 - DNA, 80 bp, synthetic construct
  misc_feature 1..80: note = Artificially Synthesized Probe
  source 1..80: mol_type = other DNA
tacacacacagtgactgagtcccatgtgagaacgtgatcaaaaatgcacgagcacagcaaattcgtgctccttcaaagac

SEQ ID NO: 39288 - DNA, 80 bp, synthetic construct
  misc_feature 1..80: note = Artificially Synthesized Probe
  source 1..80: mol_type = other DNA
ctttcacatccacaagctaggaggacttccactgcaacaattttaacttctgcccaaagagtcaactattccaaaacatg

SEQ ID NO: 39289 - DNA, 80 bp, synthetic construct
  misc_feature 1..80: note = Artificially Synthesized Probe
  source 1..80: mol_type = other DNA
acagagcgagactctgtctcaaaaaaaaaaaaaaaaaaatcaaaaattagctgagtgtagtggcacatgcctgtggttcc

SEQ ID NO: 39290 - DNA, 80 bp, synthetic construct
  misc_feature 1..80: note = Artificially Synthesized Probe
  source 1..80: mol_type = other DNA
agaaatagaccaaggctggtgaaagagaagtggggacaaaaaaggcagaggggcagaaacagacagacagacagacagag

SEQ ID NO: 39291 - DNA, 80 bp, synthetic construct
  misc_feature 1..80: note = Artificially Synthesized Probe
  source 1..80: mol_type = other DNA
caagctgtttctaagtaaattaactaaatcccgcccccaaaaagctcaagaatatgtacagaaatccaaaacacacaggt

SEQ ID NO: 39292 - DNA, 80 bp, synthetic construct
  misc_feature 1..80: note = Artificially Synthesized Probe
  source 1..80: mol_type = other DNA
atgaattacacaaaagagtgaagatgatcagaaatggtaaccatgaggctaaatatgcaagtttttcttatttaaacccc

SEQ ID NO: 39293 - DNA, 80 bp, synthetic construct
  misc_feature 1..80: note = Artificially Synthesized Probe
  source 1..80: mol_type = other DNA
ccagaaagagacgggagaggaactattgtttaatgggcacagagattttgtgaaaaatgacaaaagaaagttttgggtat

SEQ ID NO: 39294 - DNA, 80 bp, synthetic construct
  misc_feature 1..80: note = Artificially Synthesized Probe
  source 1..80: mol_type = other DNA
ataaaatccctcagcaaagcagaactggaagggagtcttctcagcctgagaaaaggcatctctgaaaaacccacagtgtc

SEQ ID NO: 39295 - DNA, 80 bp, synthetic construct
  misc_feature 1..80: note = Artificially Synthesized Probe
  source 1..80: mol_type = other DNA
ctttgcacttgcagaaaaacatgactcagaagcaaatagctctgggcatccttattccaggtgtactcacaattacatct

SEQ ID NO: 39296 - DNA, 80 bp, synthetic construct
  misc_feature 1..80: note = Artificially Synthesized Probe
  source 1..80: mol_type = other DNA
atttttaatgcatataaacacaaggacaaacaggaaaggagaagctgggaaagaaaccagagatggcggaagatccttga

SEQ ID NO: 39297 - DNA, 80 bp, synthetic construct
  misc_feature 1..80: note = Artificially Synthesized Probe
  source 1..80: mol_type = other DNA
gaggctagggccttttccttccccaaggcagcatcttctttaggcaaaaaaaaaaaaatctctccaaacatggtcctatt

SEQ ID NO: 39298 - DNA, 80 bp, synthetic construct
  misc_feature 1..80: note = Artificially Synthesized Probe
  source 1..80: mol_type = other DNA
actggtgtgagtaataaactccttcatctctgacctgggagtcttgtgtcttcatgaaactctggtgagctcacttgtta

SEQ ID NO: 39299 - DNA, 80 bp, synthetic construct
  misc_feature 1..80: note = Artificially Synthesized Probe
  source 1..80: mol_type = other DNA
atccaaaagtaacatgggaaggggtgtgttctacgcttgtacttccccatttcacacgggccaagaaggacgctcctgac

SEQ ID NO: 39300 - DNA, 80 bp, synthetic construct
  misc_feature 1..80: note = Artificially Synthesized Probe
  source 1..80: mol_type = other DNA
gtcagcatgtagatgcctgagctcagagtccatttgttctttgatgagactgaataagaccaagctgttgactgggcctg

SEQ ID NO: 39301 - DNA, 80 bp, synthetic construct
  misc_feature 1..80: note = Artificially Synthesized Probe
  source 1..80: mol_type = other DNA
ggattatatagaccaactgtgaaaactcaaggttccaccctgaccattcttgggcatgaagcttctttcttccctctagc

SEQ ID NO: 39302 - DNA, 80 bp, synthetic construct
  misc_feature 1..80: note = Artificially Synthesized Probe
  source 1..80: mol_type = other DNA
cacattgaacagtttggacccgcagactgaactgaattaatctaactgaaccaggcgccttaaggtctatcagtcatcca

SEQ ID NO: 39303 - DNA, 80 bp, synthetic construct
  misc_feature 1..80: note = Artificially Synthesized Probe
  source 1..80: mol_type = other DNA
aatggcacactcaggaaaatttgccaggatgatgtagacatgaggggtagatattgctcaggaacagttcttcatgggtt

SEQ ID NO: 39304 - DNA, 80 bp, synthetic construct
  misc_feature 1..80: note = Artificially Synthesized Probe
  source 1..80: mol_type = other DNA
caaaggtcagaccccacacagtccttgccaccacacatctgctcctcccattagaaactgagacatcaccggagacgttt

SEQ ID NO: 39305 - DNA, 80 bp, synthetic construct
  misc_feature 1..80: note = Artificially Synthesized Probe
  source 1..80: mol_type = other DNA
gatgaggctctccgggttgggttgtgaaatagtcacatctgccattctcggctgaaatccccgaccactcattccctctc

SEQ ID NO: 39306 - DNA, 80 bp, synthetic construct
  misc_feature 1..80: note = Artificially Synthesized Probe
  source 1..80: mol_type = other DNA
tgcttctgcagctgcaaaggtgggcgttgttggcagcagcttcagaaggctttcgcttcttgtgttctccttccaagtaa

SEQ ID NO: 39307 - DNA, 80 bp, synthetic construct
  misc_feature 1..80: note = Artificially Synthesized Probe
  source 1..80: mol_type = other DNA
gtatccccatccatgctatgtctttgttcacaatttaatactgataaactgtgtgttatgagggagacaggacgctgcat

SEQ ID NO: 39308 - DNA, 80 bp, synthetic construct
  misc_feature 1..80: note = Artificially Synthesized Probe
  source 1..80: mol_type = other DNA
caggacaccagtcctttggattagggtccatccatatgaccccaacttaacttgattacttgtctccaaatacagttaca

SEQ ID NO: 39309 - DNA, 80 bp, synthetic construct
  misc_feature 1..80: note = Artificially Synthesized Probe
  source 1..80: mol_type = other DNA
gacaaatggcctccaggcaatgcagagacataactctgctaaagccagattcctccccgaaatcatactaataaatcaac

SEQ ID NO: 39310 - DNA, 80 bp, synthetic construct
  misc_feature 1..80: note = Artificially Synthesized Probe
  source 1..80: mol_type = other DNA
agatcgttcccattttccatggaaatcaaggcagagagagatccccaagccttactgacaccaaacacatcaccacccac

SEQ ID NO: 39311 - DNA, 80 bp, synthetic construct
  misc_feature 1..80: note = Artificially Synthesized Probe
  source 1..80: mol_type = other DNA
ctgcttccttcgtgggttaatggtttacaatcccaataaggcttaaacctgagaacagacatgaagaaagaaaccaaagc

SEQ ID NO: 39312 - DNA, 80 bp, synthetic construct
  misc_feature 1..80: note = Artificially Synthesized Probe
  source 1..80: mol_type = other DNA
ttcccttgaggaacaagaaaggacctggtgttggtacctgcctgccatagaggagagtcagtcataaaaataaatgtgat

SEQ ID NO: 39313 - DNA, 80 bp, synthetic construct
  misc_feature 1..80: note = Artificially Synthesized Probe
  source 1..80: mol_type = other DNA
actagcaaggtcctagaaatgtcaaaggctctctggcacaacaaaccaggggtctccctgcatgccctcccccgcatggc

SEQ ID NO: 39314 - DNA, 80 bp, synthetic construct
  misc_feature 1..80: note = Artificially Synthesized Probe
  source 1..80: mol_type = other DNA
ggagatggaccccatgggtctcagattttagattttgtctgcatcttctgaagagaacctggcaggcattttatttattt

SEQ ID NO: 39315 - DNA, 80 bp, synthetic construct
  misc_feature 1..80: note = Artificially Synthesized Probe
  source 1..80: mol_type = other DNA
cctcccgtccagcagatgtactggaggttcaaaatccagaagacagcagtgagcctctgaggcagatgtctcgtgtctgt

SEQ ID NO: 39316 - DNA, 80 bp, synthetic construct
  misc_feature 1..80: note = Artificially Synthesized Probe
  source 1..80: mol_type = other DNA
acctgccgtagaggcaatacctgcagctacacgtgaccactcagtcaaaatgaaggttgcagtcacgccccaggaagagg

SEQ ID NO: 39317 - DNA, 80 bp, synthetic construct
  misc_feature 1..80: note = Artificially Synthesized Probe
  source 1..80: mol_type = other DNA
attccttttcaggccaagtcacatcccatcacatgggtacaccacactgtttatttattactcagctgacagacatctga

SEQ ID NO: 39318 - DNA, 80 bp, synthetic construct
  misc_feature 1..80: note = Artificially Synthesized Probe
  source 1..80: mol_type = other DNA
gtgcccaaaaattcctcccaagatggaaaattaatcttccaattaggccatgaggagctcctgcagatgacatgcattca

SEQ ID NO: 39319 - DNA, 80 bp, synthetic construct
  misc_feature 1..80: note = Artificially Synthesized Probe
  source 1..80: mol_type = other DNA
gaccaattattgttatttggacaagtcctggtttatctgattctctgattcttcacagctgtgtggaggaggggtgtgcc

SEQ ID NO: 39320 - DNA, 80 bp, synthetic construct
  misc_feature 1..80: note = Artificially Synthesized Probe
  source 1..80: mol_type = other DNA
tctgtggagcagcaaaataagaagtaaattgagatatggaaaacactgtgtgtccgcaggactgtacacacaggcatgct

SEQ ID NO: 39321 - DNA, 80 bp, synthetic construct
  misc_feature 1..80: note = Artificially Synthesized Probe
  source 1..80: mol_type = other DNA
gctgtgatgaaccctgcctgtcgctaaaacagcttcactaaggactctgtgagtccttctcatgaatcagtgaacctgga

SEQ ID NO: 39322 - DNA, 80 bp, synthetic construct
  misc_feature 1..80: note = Artificially Synthesized Probe
  source 1..80: mol_type = other DNA
ctaaccctgaccagagacacagaaaacaagaccaagaatgcactcattctgggactgctaagtgatgagggccaccctgg

SEQ ID NO: 39323 - DNA, 80 bp, synthetic construct
  misc_feature 1..80: note = Artificially Synthesized Probe
  source 1..80: mol_type = other DNA
attcaactttgggaagtccgagtcggccacccagagatttccaagatgtcagggaagcaccacacttccaaattttacca

SEQ ID NO: 39324 - DNA, 80 bp, synthetic construct
  misc_feature 1..80: note = Artificially Synthesized Probe
  source 1..80: mol_type = other DNA
atccacagttacagaaccacagcaaaattacagcgctcatgtccccatacctccaaaaaactagcttgctacctcagtaa

SEQ ID NO: 39325 - DNA, 80 bp, synthetic construct
  misc_feature 1..80: note = Artificially Synthesized Probe
  source 1..80: mol_type = other DNA
aacagtctcagataggccaagcctcctacattaggtttgtttgcttgttgtggtgaattacattctctctgatttttccc

SEQ ID NO: 39326 - DNA, 80 bp, synthetic construct
  misc_feature 1..80: note = Artificially Synthesized Probe
  source 1..80: mol_type = other DNA
tggcttggaatcctgattccaattcccctaggtgtgatccttggtgagttactgaatctccagcctcagtttccttatct

SEQ ID NO: 39327 - DNA, 80 bp, synthetic construct
  misc_feature 1..80: note = Artificially Synthesized Probe
  source 1..80: mol_type = other DNA
tgcaaggactgtcatgattgttctcatcaagaaatccccttcacaatttgtagtgagtgggccactcccgacacaggcca

SEQ ID NO: 39328 - DNA, 80 bp, synthetic construct
  misc_feature 1..80: note = Artificially Synthesized Probe
  source 1..80: mol_type = other DNA
tccccagtatttagtggtgcatacctggtctcagcccttgccacctggtcctcttcattggaaatccacaggtatatata

SEQ ID NO: 39329 - DNA, 80 bp, synthetic construct
  misc_feature 1..80: note = Artificially Synthesized Probe
  source 1..80: mol_type = other DNA
aaaacattgagattttaaaatttacacatcatcgaattcactcatttaaagcatgtaactcagtgctcccagccttttgg

SEQ ID NO: 39330 - DNA, 80 bp, synthetic construct
  misc_feature 1..80: note = Artificially Synthesized Probe
  source 1..80: mol_type = other DNA
ttcagctttcactgaggtcaaagatatttgaaaccattttgttttttgcaaaaccccacctgcaaacaccgtgtcgcatg

SEQ ID NO: 39331 - DNA, 80 bp, synthetic construct
  misc_feature 1..80: note = Artificially Synthesized Probe
  source 1..80: mol_type = other DNA
gctgccacccaggtaagtccagggggcttaagggctgaggttctttacagagaacaagcaaaggtggaaaaggagaatct

SEQ ID NO: 39332 - DNA, 80 bp, synthetic construct
  misc_feature 1..80: note = Artificially Synthesized Probe
  source 1..80: mol_type = other DNA
tgataagcaaactggactaatcatgtcttctattttctgtcttaggacgttttgacatctaggggagcctcgcagacact

SEQ ID NO: 39333 - DNA, 80 bp, synthetic construct
  misc_feature 1..80: note = Artificially Synthesized Probe
  source 1..80: mol_type = other DNA
gtattgaaggccaccaagcatcccgccttccacacatcctcctctcggcagggagggagaacagaatagggctgcgtggc

SEQ ID NO: 39334 - DNA, 80 bp, synthetic construct
  misc_feature 1..80: note = Artificially Synthesized Probe
  source 1..80: mol_type = other DNA
aacctctgcaaacacgattatttagcaaaacccagacatgacaccccagaagcggcacccccactctgtagtcagaccac

SEQ ID NO: 39335 - DNA, 80 bp, synthetic construct
  misc_feature 1..80: note = Artificially Synthesized Probe
  source 1..80: mol_type = other DNA
aggtgattggttagagggattcaggaggagggagtgacttctaatggtacaggttttgggggggaatataaaaaaagatt

SEQ ID NO: 39336 - DNA, 80 bp, synthetic construct
  misc_feature 1..80: note = Artificially Synthesized Probe
  source 1..80: mol_type = other DNA
tattagtagaggtggggtttctccatgttggccaggctggtctcaaactcctgacctctggggatccacctgccttggcc

SEQ ID NO: 39337 - DNA, 80 bp, synthetic construct
  misc_feature 1..80: note = Artificially Synthesized Probe
  source 1..80: mol_type = other DNA
ccacatcagcacagaacacctacacacccaatctccatcaactccaaggtctctcgatgggaaagactcacgtgaaaatc

SEQ ID NO: 39338 - DNA, 80 bp, synthetic construct
  misc_feature 1..80: note = Artificially Synthesized Probe
  source 1..80: mol_type = other DNA
ccagattgtcaggaaatatcacaaattacacatctgaccagggattagcatctagcatatatcaagaactcatacaatcc

SEQ ID NO: 39339 - DNA, 80 bp, synthetic construct
  misc_feature 1..80: note = Artificially Synthesized Probe
  source 1..80: mol_type = other DNA
aaactaaacataaaaaaccatatgaacctgccattccatttctgggggtaggtatatgcctgaaagaacgggtggatatc

SEQ ID NO: 39340 - DNA, 80 bp, synthetic construct
  misc_feature 1..80: note = Artificially Synthesized Probe
  source 1..80: mol_type = other DNA
tcatgtcattaatcattagggggtgcctgattacacccacaagtggaaaatataatttgagacaatagcaaagaacacct

SEQ ID NO: 39341 - DNA, 80 bp, synthetic construct
  misc_feature 1..80: note = Artificially Synthesized Probe
  source 1..80: mol_type = other DNA
caactgtgtgggctgaaagtgccctggccagaaaaacaaaactaaaacaaattcactcccagccttcgtgagttgcccag

SEQ ID NO: 39342 - DNA, 80 bp, synthetic construct
  misc_feature 1..80: note = Artificially Synthesized Probe
  source 1..80: mol_type = other DNA
gcaacagccttccatatgcgtggcttcagttaccctgaactcaaccaaccatgcgcacattggaaatattttttagttgc

SEQ ID NO: 39343 - DNA, 80 bp, synthetic construct
  misc_feature 1..80: note = Artificially Synthesized Probe
  source 1..80: mol_type = other DNA
gtcctcactgaaaatggtggtaattccactttctgcatggagctggtggtagtcagcgtcaacgttgataagatacttgg

SEQ ID NO: 39344 - DNA, 80 bp, synthetic construct
  misc_feature 1..80: note = Artificially Synthesized Probe
  source 1..80: mol_type = other DNA
ataagccagcaacccagaaaagccaacaggagcaggaacagtaccacaacaaaagcatattctctttagtcgaaagacta

SEQ ID NO: 39345 - DNA, 80 bp, synthetic construct
  misc_feature 1..80: note = Artificially Synthesized Probe
  source 1..80: mol_type = other DNA
cctcaccagagcagtgcctttcaccaaagatataaaaaagaatcaagtgaaaatgatagaactggccgggcacggtggct

SEQ ID NO: 39346 - DNA, 80 bp, synthetic construct
  misc_feature 1..80: note = Artificially Synthesized Probe
  source 1..80: mol_type = other DNA
actgtggagaccaaaagaaagtggcacagtaattttcaagtgatgaaagaaaagtattctcaatccataattttatacca

SEQ ID NO: 39347 - DNA, 80 bp, synthetic construct
  misc_feature 1..80: note = Artificially Synthesized Probe
  source 1..80: mol_type = other DNA
acaggaaaatcagcaaggatacagaactcagtaatatacccaatcaacaagatcaaagtgatagttgtagaaccttcctc

SEQ ID NO: 39348 - DNA, 80 bp, synthetic construct
  misc_feature 1..80: note = Artificially Synthesized Probe
  source 1..80: mol_type = other DNA
aagtagaataggagagaacatttcttaatttattttatggagcaactactaccttgataccaaagccagagaaaatgagc

SEQ ID NO: 39349 - DNA, 80 bp, synthetic construct
  misc_feature 1..80: note = Artificially Synthesized Probe
  source 1..80: mol_type = other DNA
cagcatgaaaaatcacaaagaaacaaccataaaaccccaaaacctcctggaaataataaatgagttgagcaaggtcacaa

SEQ ID NO: 39350 - DNA, 80 bp, synthetic construct
  misc_feature 1..80: note = Artificially Synthesized Probe
  source 1..80: mol_type = other DNA
attatctgggtgtggtggcgggcacctgtagtactagctactcgggaggctgaggcaggagaatggcgtgaacccgggag

SEQ ID NO: 39351 - DNA, 80 bp, synthetic construct
  misc_feature 1..80: note = Artificially Synthesized Probe
  source 1..80: mol_type = other DNA
gaaagacctgctgaaaggagaaaaacacaaaccatagagtgggagaaaaatgtctgcaaaccacatatttaacaaataat

SEQ ID NO: 39352 - DNA, 80 bp, synthetic construct
  misc_feature 1..80: note = Artificially Synthesized Probe
  source 1..80: mol_type = other DNA
ttattcataatagccaaaaactgcaaaccacccagatagccttcagaagctcaatggttaaacaaacggatacatccaca

SEQ ID NO: 39353 - DNA, 80 bp, synthetic construct
  misc_feature 1..80: note = Artificially Synthesized Probe
  source 1..80: mol_type = other DNA
atctctaccaaaaaaaaaaagtgtatatgaatgttcacggcagcatacctcataacagcccaaaagtggaggtaacccca

SEQ ID NO: 39354 - DNA, 80 bp, synthetic construct
  misc_feature 1..80: note = Artificially Synthesized Probe
  source 1..80: mol_type = other DNA
agggggatgctccttcccccagtagcgaataactgaattactgaactatttaaaatgttggcctgcaggccagacacagt

SEQ ID NO: 39355 - DNA, 80 bp, synthetic construct
  misc_feature 1..80: note = Artificially Synthesized Probe
  source 1..80: mol_type = other DNA
cacattttacaacagccaaaacccagaaagaacaaaacacccacccacacacaatggagacacgaaacatgagctaccgt

SEQ ID NO: 39356 - DNA, 80 bp, synthetic construct
  misc_feature 1..80: note = Artificially Synthesized Probe
  source 1..80: mol_type = other DNA
accatgtacaggcatgcagcagggacagaagagcctccgatcttcagtttttgtcagaagccacctcctgaggtctatgt

SEQ ID NO: 39357 - DNA, 80 bp, synthetic construct
  misc_feature 1..80: note = Artificially Synthesized Probe
  source 1..80: mol_type = other DNA
acagctgtgtccattccctcatgtattgcctttgactgcttttttggagacaaactgtacagcacataagcacaacattt

SEQ ID NO: 39358 - DNA, 80 bp, synthetic construct
  misc_feature 1..80: note = Artificially Synthesized Probe
  source 1..80: mol_type = other DNA
cagcaaaggttaactaacacgaccctcaacttaacagtggcttattagatagctgtcgttatctccaacctaaagatcac

SEQ ID NO: 39359 - DNA, 80 bp, synthetic construct
  misc_feature 1..80: note = Artificially Synthesized Probe
  source 1..80: mol_type = other DNA
aacacagataatgcaaacatcaccactaatgacagtaagaacagttggcggtacgtggatgcttaccatagtctcagctt

SEQ ID NO: 39360 - DNA, 80 bp, synthetic construct
  misc_feature 1..80: note = Artificially Synthesized Probe
  source 1..80: mol_type = other DNA
gagtgaaggagattaaatgctcccatccctttctgttctactggttgtaacacgcaacatgctacatgggctcaaagccc

SEQ ID NO: 39361 - DNA, 80 bp, synthetic construct
  misc_feature 1..80: note = Artificially Synthesized Probe
  source 1..80: mol_type = other DNA
gtggccagaaagccgtctgaatatccaagggtctccatgaatgttcaatagtaatatgatactaattctagactgcttct

SEQ ID NO: 39362 - DNA, 80 bp, synthetic construct
  misc_feature 1..80: note = Artificially Synthesized Probe
  source 1..80: mol_type = other DNA
atgcaagttaaaaggagacaccatttcccacgcattagactggtaaatatcaggaaataccaagtcttgctgaggaggag

SEQ ID NO: 39363 - DNA, 80 bp, synthetic construct
  misc_feature 1..80: note = Artificially Synthesized Probe
  source 1..80: mol_type = other DNA
tgaagaaaggtggggcctccttctgtgagaaagcagcctaggctggagcgagtgggtaaaagatctcagctttagtatct

SEQ ID NO: 39364 - DNA, 80 bp, synthetic construct
  misc_feature 1..80: note = Artificially Synthesized Probe
  source 1..80: mol_type = other DNA
ttatttatgatctcctttaattattgtttgctcccctggcgaggatgtcgaccctacaagggcagaaatatttgtctgtc

SEQ ID NO: 39365 - DNA, 80 bp, synthetic construct
  misc_feature 1..80: note = Artificially Synthesized Probe
  source 1..80: mol_type = other DNA
actacatagcaaccacattagagaaactcacatgaagtggacacatttctggtgggacacaaactaacaaacttgactca

SEQ ID NO: 39366 - DNA, 80 bp, synthetic construct
  misc_feature 1..80: note = Artificially Synthesized Probe
  source 1..80: mol_type = other DNA
tttttcaagctcatcctctcccaagtgcacaacggaagctacaaaacttgtgatattgcaacaagctgactgcaggagca

SEQ ID NO: 39367 - DNA, 80 bp, synthetic construct
  misc_feature 1..80: note = Artificially Synthesized Probe
  source 1..80: mol_type = other DNA
aaaatgctaagagagcaaaaaagattccttaagctagaagtctgacaaccactgtgctacctcatctgctttacctgaaa

SEQ ID NO: 39368 - DNA, 80 bp, synthetic construct
  misc_feature 1..80: note = Artificially Synthesized Probe
  source 1..80: mol_type = other DNA
atgtcactgccttcacgtaagtatcatcactgtccccaggtaagaatcacctgcaggaccttgagtacaggtgtaatctt

SEQ ID NO: 39369 - DNA, 80 bp, synthetic construct
  misc_feature 1..80: note = Artificially Synthesized Probe
  source 1..80: mol_type = other DNA
ctttaaaatgtgtgagaagcttggtaaatgatgaatggcacaatctgaaaggagtttactggcaattgtttcagctttgc

SEQ ID NO: 39370 - DNA, 80 bp, synthetic construct
  misc_feature 1..80: note = Artificially Synthesized Probe
  source 1..80: mol_type = other DNA
atgaatcggagctggctcattggacttctgagatttactgagggaataaatagcaagagtgtggcactaatgccaatcaa

SEQ ID NO: 39371 - DNA, 80 bp, synthetic construct
  misc_feature 1..80: note = Artificially Synthesized Probe
  source 1..80: mol_type = other DNA
aactctctcgtctgcaactctgttacgtatttggaagtaaggcaagtatgctaaagcactgccttcctataaagagccat

SEQ ID NO: 39372 - DNA, 80 bp, synthetic construct
  misc_feature 1..80: note = Artificially Synthesized Probe
  source 1..80: mol_type = other DNA
atagaaacccacagctcccacctaccaatccccctcttagagcagacacgacggctttccctcagaattaacactgaacc

SEQ ID NO: 39373 - DNA, 80 bp, synthetic construct
  misc_feature 1..80: note = Artificially Synthesized Probe
  source 1..80: mol_type = other DNA
cgggcgaaagttgccagggaaacttgatcaactcgagcgcgccggtgccagcttcctgcataattcacggacggtggcgg

SEQ ID NO: 39374 - DNA, 80 bp, synthetic construct
  misc_feature 1..80: note = Artificially Synthesized Probe
  source 1..80: mol_type = other DNA
cgcccacctctccagcctctctgggtccaggactgcgcttacccggtagttggtgctcccggaatcgagatgcccccaaa

SEQ ID NO: 39375 - DNA, 80 bp, synthetic construct
  misc_feature 1..80: note = Artificially Synthesized Probe
  source 1..80: mol_type = other DNA
ccaagccccgtggcgggaccagtgaagggcacggcagtggggaaacacaagtgggaggggtgaggggtggaggctgtgtg

SEQ ID NO: 39376 - DNA, 80 bp, synthetic construct
  misc_feature 1..80: note = Artificially Synthesized Probe
  source 1..80: mol_type = other DNA
acgtttgttcctttctccagctgtgaagtcttgtgaaggccaaccaagtcccctcctttactcacccatgcatggtgtga

SEQ ID NO: 39377 - DNA, 80 bp, synthetic construct
  misc_feature 1..80: note = Artificially Synthesized Probe
  source 1..80: mol_type = other DNA
tgattagacctctcattaatcctcttccagagggactattataaccctgtttcacagatggggacacagagtacccgact

SEQ ID NO: 39378 - DNA, 80 bp, synthetic construct
  misc_feature 1..80: note = Artificially Synthesized Probe
  source 1..80: mol_type = other DNA
gactcactctgaagtaggtctcgtttgtttttaggatgagcctgaacttcttacatagcccgtgtttctgcttgcctggg

SEQ ID NO: 39379 - DNA, 80 bp, synthetic construct
  misc_feature 1..80: note = Artificially Synthesized Probe
  source 1..80: mol_type = other DNA
ctggaccccaacttccatgaccctgactcaggaggtgaggagtggagtcggggaggggcatggcctttgcgcggctggga

SEQ ID NO: 39380 - DNA, 80 bp, synthetic construct
  misc_feature 1..80: note = Artificially Synthesized Probe
  source 1..80: mol_type = other DNA
ctgtacagtgattgtacacgtgtaccagggagtgtggatatacttgcctgttctgggggtgtacgtgtgtttgtgtgcac

SEQ ID NO: 39381 - DNA, 80 bp, synthetic construct
  misc_feature 1..80: note = Artificially Synthesized Probe
  source 1..80: mol_type = other DNA
aggtagtgtggatatacttgtctgttctgggggtgtacacgtgtgtttgcacacagatgaccttgtacagtgattgcatg

SEQ ID NO: 39382 - DNA, 80 bp, synthetic construct
  misc_feature 1..80: note = Artificially Synthesized Probe
  source 1..80: mol_type = other DNA
acagtgattgtacacgtgtaccagggagtgtggatatacttgcctgttctggggttgtacgtgtgtgtgtgcacacagat

SEQ ID NO: 39383 - DNA, 80 bp, synthetic construct
  misc_feature 1..80: note = Artificially Synthesized Probe
  source 1..80: mol_type = other DNA
attgcatgcgtgcaccagggagtgtggatatacttgcctgttctggggttgtacatgtgtgtgcacacagatgaccctgt

SEQ ID NO: 39384 - DNA, 80 bp, synthetic construct
  misc_feature 1..80: note = Artificially Synthesized Probe
  source 1..80: mol_type = other DNA
acaccggtggtttacaggagctcaaggctgccccagaggtgtctgtctctgtgtccatgtgacttgacttctctgaacct

SEQ ID NO: 39385 - DNA, 80 bp, synthetic construct
  misc_feature 1..80: note = Artificially Synthesized Probe
  source 1..80: mol_type = other DNA
ctcaggtggccatcatcgcagggaactttgagcttgcagaggttatcaagacccacaaagactcggatgttggtgagttc

SEQ ID NO: 39386 - DNA, 80 bp, synthetic construct
  misc_feature 1..80: note = Artificially Synthesized Probe
  source 1..80: mol_type = other DNA
gctgggatggtcctgttgtagctgccggagtcccctctgggagagttgctgctggccaggctgggaccgtcctgttgtag

SEQ ID NO: 39387 - DNA, 80 bp, synthetic construct
  misc_feature 1..80: note = Artificially Synthesized Probe
  source 1..80: mol_type = other DNA
ccccttcctgccatgagtgtttactcgtgggtgtccccattttttgtttttgttttaatttgaagtgacagcgggcagca

SEQ ID NO: 39388 - DNA, 80 bp, synthetic construct
  misc_feature 1..80: note = Artificially Synthesized Probe
  source 1..80: mol_type = other DNA
gggcctcctcttctgcctataattgtctaaccgtgggaaagctgtctgggacctctgcgcctcagtttctcttaagtgaa

SEQ ID NO: 39389 - DNA, 80 bp, synthetic construct
  misc_feature 1..80: note = Artificially Synthesized Probe
  source 1..80: mol_type = other DNA
ttgctccaaggacaggacagtcatgacttgctacatcctatgcccactggggtcccagagtggggcctgtacacagaaga

SEQ ID NO: 39390 - DNA, 80 bp, synthetic construct
  misc_feature 1..80: note = Artificially Synthesized Probe
  source 1..80: mol_type = other DNA
caccaacagttgttactatcttttttttttgaccgtagccatcctagtaagtgtgaaatggtatttcattgtgattttga

SEQ ID NO: 39391 - DNA, 80 bp, synthetic construct
  misc_feature 1..80: note = Artificially Synthesized Probe
  source 1..80: mol_type = other DNA
tatttggactctcaattctatcccagtggtctacatgtatattcttatgccaggaccacatggtttgattactgcagctt

SEQ ID NO: 39392 - DNA, 80 bp, synthetic construct
  misc_feature 1..80: note = Artificially Synthesized Probe
  source 1..80: mol_type = other DNA
agggggaaagcattcaatctttcaccattgtgtatggtgctatctatgtgtgttttttttgtttgtttgttttttgtttt

SEQ ID NO: 39393 - DNA, 80 bp, synthetic construct
  misc_feature 1..80: note = Artificially Synthesized Probe
  source 1..80: mol_type = other DNA
tttgctcttctttctcttgtttttttgtttgtttctttttggtctttctctagtctgtccgtccctccgtccctccctct

SEQ ID NO: 39394 - DNA, 80 bp, synthetic construct
  misc_feature 1..80: note = Artificially Synthesized Probe
  source 1..80: mol_type = other DNA
tgagtagctgggattacaggcatgcactgccacacccggccaatttttgtattattagtagagacggggtttctccatgt

SEQ ID NO: 39395 - DNA, 80 bp, synthetic construct
  misc_feature 1..80: note = Artificially Synthesized Probe
  source 1..80: mol_type = other DNA
atgttctgtacgtatcgttgagtctaattggtttaagtcttctatgtccttattgatctctccagatgttctacccatta

SEQ ID NO: 39396 - DNA, 80 bp, synthetic construct
  misc_feature 1..80: note = Artificially Synthesized Probe
  source 1..80: mol_type = other DNA
catttgtagggtggccaactcttttggtttgcctggaaccaaggcagttcctggaacataggatttagttttaacatctg

SEQ ID NO: 39397 - DNA, 80 bp, synthetic construct
  misc_feature 1..80: note = Artificially Synthesized Probe
  source 1..80: mol_type = other DNA
tcagagccaggcactgaggagggtgtttggcagacattgttgagtggaagagttacataaacagtatgttgttgtcagga

SEQ ID NO: 39398 - DNA, 80 bp, synthetic construct
  misc_feature 1..80: note = Artificially Synthesized Probe
  source 1..80: mol_type = other DNA
tgctgtgtgaggggctccagctcacctgctctgtggggatggcagaattctgttttttccttcctcgcaaacatttattg

SEQ ID NO: 39399 - DNA, 80 bp, synthetic construct
  misc_feature 1..80: note = Artificially Synthesized Probe
  source 1..80: mol_type = other DNA
actgacggcctgtctggcttcttcctccagtgctcagcattggggagggcggtttctgggagggaaccgtgaaaggccgc

SEQ ID NO: 39400 - DNA, 80 bp, synthetic construct
  misc_feature 1..80: note = Artificially Synthesized Probe
  source 1..80: mol_type = other DNA
tcctgagtgatggtcactgggggccatcggtggtgtgtctggatcaagggtgcatgcaccctccctctgcatgtgaaggg

SEQ ID NO: 39401 - DNA, 80 bp, synthetic construct
  misc_feature 1..80: note = Artificially Synthesized Probe
  source 1..80: mol_type = other DNA
tagcacttctacacgtataagtcgttgactcatcccagcagtcccaagaggtggggccacttgttgttattccatttcta

SEQ ID NO: 39402 - DNA, 80 bp, synthetic construct
  misc_feature 1..80: note = Artificially Synthesized Probe
  source 1..80: mol_type = other DNA
tgtgttgggcattttctcttcagctggcttttatgtgtcttattaacaaaactggaaaaatgagtttgtgttatgtaatc

SEQ ID NO: 39403 - DNA, 80 bp, synthetic construct
  misc_feature 1..80: note = Artificially Synthesized Probe
  source 1..80: mol_type = other DNA
gctaggatcacagagataaagaacatgtggcccttaccctcaaggagctcacaattagtgggggaaacaggtcatcgaaa

SEQ ID NO: 39404 - DNA, 80 bp, synthetic construct
  misc_feature 1..80: note = Artificially Synthesized Probe
  source 1..80: mol_type = other DNA
agcgcctataggcacatagcacggcatttgtacatgagtgtgggtaatgcagattcagatgtgcacacacacatgcatga

SEQ ID NO: 39405 - DNA, 80 bp, synthetic construct
  misc_feature 1..80: note = Artificially Synthesized Probe
  source 1..80: mol_type = other DNA
tggggcaggacctgcagtgtagagggaggccaggtatgaagaggtcagaggagggcaagggaatgtgcctggccgacctc

SEQ ID NO: 39406 - DNA, 80 bp, synthetic construct
  misc_feature 1..80: note = Artificially Synthesized Probe
  source 1..80: mol_type = other DNA
gaccttagacctttgacttcaggcccacattcctcttcccatccctgacccccaactgctgacatcagattcctgaacct

SEQ ID NO: 39407 - DNA, 80 bp, synthetic construct
  misc_feature 1..80: note = Artificially Synthesized Probe
  source 1..80: mol_type = other DNA
caccacactgaccctgcgctccaagtccatgacagctgagctcgaggaacttggtgagtggcgggggtggcggtggaggt

SEQ ID NO: 39408 - DNA, 80 bp, synthetic construct
  misc_feature 1..80: note = Artificially Synthesized Probe
  source 1..80: mol_type = other DNA
tgaccatcaacagcctcttcatgggcaggtcttatatatgtgtccattaacaaccttgtcatgtgcacgtccagatatac

SEQ ID NO: 39409 - DNA, 80 bp, synthetic construct
  misc_feature 1..80: note = Artificially Synthesized Probe
  source 1..80: mol_type = other DNA
cgtccattgggctgacgtggtcagaattttcaccatagctattccaaataaaataaaacccaaagaaaaaaacaaaaaac

SEQ ID NO: 39410 - DNA, 80 bp, synthetic construct
  misc_feature 1..80: note = Artificially Synthesized Probe
  source 1..80: mol_type = other DNA
atagataattcaatgggactattgggaaaatcccagcatctacctaatgcaaggcgtggaagcaaaaataaaatgttgcc

SEQ ID NO: 39411 - DNA, 80 bp, synthetic construct
  misc_feature 1..80: note = Artificially Synthesized Probe
  source 1..80: mol_type = other DNA
ctctgggcttttctgcctgaagaaactggtgaatgaagacgctcctttccctcccctctgggctgagtgttccctcttct

SEQ ID NO: 39412 - DNA, 80 bp, synthetic construct
  misc_feature 1..80: note = Artificially Synthesized Probe
  source 1..80: mol_type = other DNA
aagcccttcctgtgtattcacgttcccgggagaactctggacttccctgtaatttctgggcccctttttcttttgtgatg

SEQ ID NO: 39413 - DNA, 80 bp, synthetic construct
  misc_feature 1..80: note = Artificially Synthesized Probe
  source 1..80: mol_type = other DNA
tgataaagaggtgtaggctgggggcagatttgggaggtcatggtttttgggggaggtggtggtgagagggatggggtggg

SEQ ID NO: 39414 - DNA, 80 bp, synthetic construct
  misc_feature 1..80: note = Artificially Synthesized Probe
  source 1..80: mol_type = other DNA
ctctcgggtggatgggaatcagggcccagacagaggcttgaggtggctttctccacccaggcctgtatatttgctccacg

SEQ ID NO: 39415 - DNA, 80 bp, synthetic construct
  misc_feature 1..80: note = Artificially Synthesized Probe
  source 1..80: mol_type = other DNA
acctcatcagtttgtaatttgcagaattcttgatgaatcctttcccttttgaaaacacttctcacccggctccagcacca

SEQ ID NO: 39416 - DNA, 80 bp, synthetic construct
  misc_feature 1..80: note = Artificially Synthesized Probe
  source 1..80: mol_type = other DNA
ggttgggtacaggacagtcttggggagttccttccttccagcaatgctaagcttggggagttccttccttccttccagca

SEQ ID NO: 39417 - DNA, 80 bp, synthetic construct
  misc_feature 1..80: note = Artificially Synthesized Probe
  source 1..80: mol_type = other DNA
gtggacccctctccagaggggtgtgtgcaccccatggcctctctcagagactcttggggctgtctctgccccctaaatgg

SEQ ID NO: 39418 - DNA, 80 bp, synthetic construct
  misc_feature 1..80: note = Artificially Synthesized Probe
  source 1..80: mol_type = other DNA
tttccagtttccctctcagtcctgtctcttcctggccccagctaaaggatctcatacgttgatggacatgtggggattag

SEQ ID NO: 39419 - DNA, 80 bp, synthetic construct
  misc_feature 1..80: note = Artificially Synthesized Probe
  source 1..80: mol_type = other DNA
gttacacataggagtaaacctctcagcacttactacgggctggacactgagcatttaatacttagaataaccatattgag

SEQ ID NO: 39420 - DNA, 80 bp, synthetic construct
  misc_feature 1..80: note = Artificially Synthesized Probe
  source 1..80: mol_type = other DNA
tcatgactgcctgccctggctctgccctctggtccatccctctggccaaatcaggctttccgcagagctgctatcacccc

SEQ ID NO: 39421 - DNA, 80 bp, synthetic construct
  misc_feature 1..80: note = Artificially Synthesized Probe
  source 1..80: mol_type = other DNA
acaatagttgcaggctgtcctcttgacatgaggaaactgaagttcctagaggcttctgaagttcctggcagatctaaaat

SEQ ID NO: 39422 - DNA, 80 bp, synthetic construct
  misc_feature 1..80: note = Artificially Synthesized Probe
  source 1..80: mol_type = other DNA
gctgtccctgcctttctgggatatcttctcagggcctgcttgatgaccctgggtttgggcaggtcttggccccaacccag

SEQ ID NO: 39423 - DNA, 80 bp, synthetic construct
  misc_feature 1..80: note = Artificially Synthesized Probe
  source 1..80: mol_type = other DNA
cccctacgccaacctgggcgccttcagcgccagcctcttcgctccgtccaagccgcagcgccgcaagagccccctggtga

SEQ ID NO: 39424 - DNA, 80 bp, synthetic construct
  misc_feature 1..80: note = Artificially Synthesized Probe
  source 1..80: mol_type = other DNA
gcccaccacggtgcccagcccggcctcagggaagcccagcagtgagccaccccctgcccctgagtctgcagccgactctg

SEQ ID NO: 39425 - DNA, 80 bp, synthetic construct
  misc_feature 1..80: note = Artificially Synthesized Probe
  source 1..80: mol_type = other DNA
ttggcaccaccttagaatcccttaaacatggattcccgtgtgtcatttctaaagtgcagtaagaagatagatggaagtca

SEQ ID NO: 39426 - DNA, 80 bp, synthetic construct
  misc_feature 1..80: note = Artificially Synthesized Probe
  source 1..80: mol_type = other DNA
gcctggttcgggccctcaataaacatttcttaaatggatgaaagaacaaagcaaaatgcaaatgctgtgttttgtgattt

SEQ ID NO: 39427 - DNA, 80 bp, synthetic construct
  misc_feature 1..80: note = Artificially Synthesized Probe
  source 1..80: mol_type = other DNA
gggggctctccagatggaagtccagtgctgtcccttgagtaagtagatgctggacagcctgtagcaaccaatgttctgtg

SEQ ID NO: 39428 - DNA, 80 bp, synthetic construct
  misc_feature 1..80: note = Artificially Synthesized Probe
  source 1..80: mol_type = other DNA
acacttggtgatgtctgagtccagtcctgtttcagatctggtccttgtgtgcccaccgtggctgttgtcagctcttgtcc

SEQ ID NO: 39429 - DNA, 80 bp, synthetic construct
  misc_feature 1..80: note = Artificially Synthesized Probe
  source 1..80: mol_type = other DNA
tttgtaggtaaagttcatggcaaagtagctttggaaacacaaaaagaggttctttgctgcagtacttctggtgcctttga

SEQ ID NO: 39430 - DNA, 80 bp, synthetic construct
  misc_feature 1..80: note = Artificially Synthesized Probe
  source 1..80: mol_type = other DNA
ctctgtgtgtggcaatgacagggtgccgttcactgagttggggatggagggacatgtgtggataccccagtagaggtgtt

SEQ ID NO: 39431 - DNA, 80 bp, synthetic construct
  misc_feature 1..80: note = Artificially Synthesized Probe
  source 1..80: mol_type = other DNA
cagggtaggtgtccatcctgtgatacaggtccccaggccagggccactttgttggggctggtgggtggaggccaggtgca

SEQ ID NO: 39432 - DNA, 80 bp, synthetic construct
  misc_feature 1..80: note = Artificially Synthesized Probe
  source 1..80: mol_type = other DNA
cccattgtgtggttgcagctgtgggtcgcgtgggcctggccggctaactctctctctcattgctctctcctgcccatctg

SEQ ID NO: 39433 - DNA, 80 bp, synthetic construct
  misc_feature 1..80: note = Artificially Synthesized Probe
  source 1..80: mol_type = other DNA
ggggccaaagaaaagggccagggtaaccgtaggatcccaccctttatttcttcctctggccgggctactcccgccagccg

SEQ ID NO: 39434 - DNA, 80 bp, synthetic construct
  misc_feature 1..80: note = Artificially Synthesized Probe
  source 1..80: mol_type = other DNA
ccacccagcgcacagtcaggaagggcgtggaccagggaggctggggcgggaggtgccgggggtggggtgccctagcgtga

SEQ ID NO: 39435 - DNA, 80 bp, synthetic construct
  misc_feature 1..80: note = Artificially Synthesized Probe
  source 1..80: mol_type = other DNA
ctgtcctgccctttatgtgtgtgggtgaaactgggtgcgtctgagcacgtgggagccgtgtgtgtgcctgattactgagt

SEQ ID NO: 39436 - DNA, 80 bp, synthetic construct
  misc_feature 1..80: note = Artificially Synthesized Probe
  source 1..80: mol_type = other DNA
gcctcctgaccctgacgttgtgatacgccccacagagatctatgtttcttatattattattattgataataattattata

SEQ ID NO: 39437 - DNA, 80 bp, synthetic construct
  misc_feature 1..80: note = Artificially Synthesized Probe
  source 1..80: mol_type = other DNA
ccaggccggcccagaagccagatggtcccgggacaggcccagccccagagcccagagatgctgctgctgcccctgctgct

SEQ ID NO: 39438 - DNA, 80 bp, synthetic construct
  misc_feature 1..80: note = Artificially Synthesized Probe
  source 1..80: mol_type = other DNA
tctccacccccaccctctctctttccctgtcttcagccctggaactccagggaaacgtcatatatctggaagttcagaaa

SEQ ID NO: 39439 - DNA, 80 bp, synthetic construct
  misc_feature 1..80: note = Artificially Synthesized Probe
  source 1..80: mol_type = other DNA
gccacgctcggcacccgctgggctcccagcgcgtctctctcagcttctccgtgcactgtgagtggggaaaggggacacct

SEQ ID NO: 39440 - DNA, 80 bp, synthetic construct
  misc_feature 1..80: note = Artificially Synthesized Probe
  source 1..80: mol_type = other DNA
tcccagaatctcaatcctgggggtacttggacagttaaagaggcctgtggccaggcagaggctgagttgatcgtgatgat

SEQ ID NO: 39441 - DNA, 80 bp, synthetic construct
  misc_feature 1..80: note = Artificially Synthesized Probe
  source 1..80: mol_type = other DNA
cacgtgtagtttcttctcctgaaacacccttccctcctgccaaaccacgtctggaccctccttcaggttcactttttttt

SEQ ID NO: 39442 - DNA, 80 bp, synthetic construct
  misc_feature 1..80: note = Artificially Synthesized Probe
  source 1..80: mol_type = other DNA
tgaaagctgtaggcaattataacgcaatggataggttaaagacagagttttagtaaaaatatggcataataggccaggcg

SEQ ID NO: 39443 - DNA, 80 bp, synthetic construct
  misc_feature 1..80: note = Artificially Synthesized Probe
  source 1..80: mol_type = other DNA
cgtataaaactaagctgtgccccaaccacgctgaccatgtcatcaggacctcctgaggctgtgtcacggcctgtgtcctc

SEQ ID NO: 39444 - DNA, 80 bp, synthetic construct
  misc_feature 1..80: note = Artificially Synthesized Probe
  source 1..80: mol_type = other DNA
cagatagaaagtgctggaatgttctggaacagatctgtttctggaggagaggctgagtatggagagtcaacagaatgtga

SEQ ID NO: 39445 - DNA, 80 bp, synthetic construct
  misc_feature 1..80: note = Artificially Synthesized Probe
  source 1..80: mol_type = other DNA
tcagttcaagagggtcacagtcagaagaaagctttttccattaggagcttcagcagagtgaagagttcaacacagcaaac

SEQ ID NO: 39446 - DNA, 80 bp, synthetic construct
  misc_feature 1..80: note = Artificially Synthesized Probe
  source 1..80: mol_type = other DNA
gtttaagcctcattgttagctgggttccctgcctccataatgaagtgaccatgattggtaaaaaatcagcctgcaaccag

SEQ ID NO: 39447 - DNA, 80 bp, synthetic construct
  misc_feature 1..80: note = Artificially Synthesized Probe
  source 1..80: mol_type = other DNA
acccgtatcatcttagaatcacataccaggccttagagggacactgttggctgctttattttagggagtgaaggtaacgc

SEQ ID NO: 39448 - DNA, 80 bp, synthetic construct
  misc_feature 1..80: note = Artificially Synthesized Probe
  source 1..80: mol_type = other DNA
ccaccaatctcatttcttcagctgagctcctgccgcttggcctccgtgacggttttctcccctccgcctctctctctctc

SEQ ID NO: 39449 - DNA, 80 bp, synthetic construct
  misc_feature 1..80: note = Artificially Synthesized Probe
  source 1..80: mol_type = other DNA
taaaactactatgtagaaaatttaaaatttttaaaaacctctcatcatcataaactgcaaaaatatttacaacatatgac

SEQ ID NO: 39450 - DNA, 80 bp, synthetic construct
  misc_feature 1..80: note = Artificially Synthesized Probe
  source 1..80: mol_type = other DNA
gagacgaggtctgactatactgcccaggctggtctcaaatgcctagcttcaggcaatcttcctgccttggcctcccagag

SEQ ID NO: 39451 - DNA, 80 bp, synthetic construct
  misc_feature 1..80: note = Artificially Synthesized Probe
  source 1..80: mol_type = other DNA
cacacatgatacacttataatcaggaaaaaggccattttcatttcacttcaacaataaagatggctggtggcccaagtgt

SEQ ID NO: 39452 - DNA, 80 bp, synthetic construct
  misc_feature 1..80: note = Artificially Synthesized Probe
  source 1..80: mol_type = other DNA
ttcatggtctcatttcttgctctcatcacagcttttaggaatttcctgagctgcagacgcagacgcagaacagctgcttg

SEQ ID NO: 39453 - DNA, 80 bp, synthetic construct
  misc_feature 1..80: note = Artificially Synthesized Probe
  source 1..80: mol_type = other DNA
aacctccagggaggtcccaaggatgagcagcagatctgccatggggaaatcaaccacatgcagcaagaacctctggggca

SEQ ID NO: 39454 - DNA, 80 bp, synthetic construct
  misc_feature 1..80: note = Artificially Synthesized Probe
  source 1..80: mol_type = other DNA
aacactgcttccttactggccaaggtgaagtggacacaacttccctttgcgtcaagattaatataaataaatgccttgga

SEQ ID NO: 39455 - DNA, 80 bp, synthetic construct
  misc_feature 1..80: note = Artificially Synthesized Probe
  source 1..80: mol_type = other DNA
cacaggaaaaacatgagtcacggcacatctgtgcttgtttctgtcccaagaggttctcaggaggtttagtaattacatgt

SEQ ID NO: 39456 - DNA, 80 bp, synthetic construct
  misc_feature 1..80: note = Artificially Synthesized Probe
  source 1..80: mol_type = other DNA
gcaattcgcctgcctcagcctcccgagtatctgagattataggcatgcaccatcacgcccggctaattttgtatttttag

SEQ ID NO: 39457 - DNA, 80 bp, synthetic construct
  misc_feature 1..80: note = Artificially Synthesized Probe
  source 1..80: mol_type = other DNA
acacagtactgaaggagaagaacaaaggtggggaattaacatcaacctgttgcccaaattatctattttattctcttatt

SEQ ID NO: 39458 - DNA, 80 bp, synthetic construct
  misc_feature 1..80: note = Artificially Synthesized Probe
  source 1..80: mol_type = other DNA
acacctatggccaactgattttcaacaacaatgccaagaccacagtttttttaaacaaatggtgctggaacaattacata

SEQ ID NO: 39459 - DNA, 80 bp, synthetic construct
  misc_feature 1..80: note = Artificially Synthesized Probe
  source 1..80: mol_type = other DNA
actccgtctcaaaacaaacaaacaaaaaagttaaacatgggcagggcatggtggctcacgcctgtaatcttagcactttg

SEQ ID NO: 39460 - DNA, 80 bp, synthetic construct
  misc_feature 1..80: note = Artificially Synthesized Probe
  source 1..80: mol_type = other DNA
atgcttataaaataccacttttccagatcaccccaacagcaaactgcagaaggacaaccaacagcaggataactcacccg

SEQ ID NO: 39461 - DNA, 80 bp, synthetic construct
  misc_feature 1..80: note = Artificially Synthesized Probe
  source 1..80: mol_type = other DNA
tagaaacagacaaaaagtgacttcttatgaaagttgtgttagtattaactggttctgaaaggctgcggtggcacagccag

SEQ ID NO: 39462 - DNA, 80 bp, synthetic construct
  misc_feature 1..80: note = Artificially Synthesized Probe
  source 1..80: mol_type = other DNA
tttctagattaaattcatgatgtgagagatttgcttcaaaataatctggggatttggaagaaggtggtgaggacgcagga

SEQ ID NO: 39463 - DNA, 80 bp, synthetic construct
  misc_feature 1..80: note = Artificially Synthesized Probe
  source 1..80: mol_type = other DNA
gcccgaatcagctcagctacatcctgcagggaaagcttccccttgtcactgctgcctccacttccaacaacacttgaagc

SEQ ID NO: 39464 - DNA, 80 bp, synthetic construct
  misc_feature 1..80: note = Artificially Synthesized Probe
  source 1..80: mol_type = other DNA
cgtaaataaaatgtttgtgagtcactgaaaaacacataaacggcgttttaccaaatgtctggaacatacgtaagatgtat

SEQ ID NO: 39465 - DNA, 80 bp, synthetic construct
  misc_feature 1..80: note = Artificially Synthesized Probe
  source 1..80: mol_type = other DNA
ccgccaccacgcccggctaatttttgtaatttcagtagaaatggggtttcaccatgttggcccagctggtctcgaactcc

SEQ ID NO: 39466 - DNA, 80 bp, synthetic construct
  misc_feature 1..80: note = Artificially Synthesized Probe
  source 1..80: mol_type = other DNA
taaactcccagacatgccgcaaaggaaacacggcaaggtgagaaagagtgggcgaggtgtcgacaacgaacacgcaagaa

SEQ ID NO: 39467 - DNA, 80 bp, synthetic construct
  misc_feature 1..80: note = Artificially Synthesized Probe
  source 1..80: mol_type = other DNA
tgggctgcaaacgccggagagttttgtccggagcgcagagacgcgctgtaaccgagcaaccagcggggcccgcccccggc

SEQ ID NO: 39468 - DNA, 80 bp, synthetic construct
  misc_feature 1..80: note = Artificially Synthesized Probe
  source 1..80: mol_type = other DNA
aaaccagcctgggcgacaaaacgagaccccatctctacaaaatacaaacgaacaaaacacagcacatagaaatttatact

SEQ ID NO: 39469 - DNA, 80 bp, synthetic construct
  misc_feature 1..80: note = Artificially Synthesized Probe
  source 1..80: mol_type = other DNA
cttcatgttgcccgactagcaggcaggtatgtgaacctaaagtagaagtcctagcttacatattattcataattaaacac

SEQ ID NO: 39470 - DNA, 80 bp, synthetic construct
  misc_feature 1..80: note = Artificially Synthesized Probe
  source 1..80: mol_type = other DNA
gcccaaagtcagaccatactaatctatggggttaaaagttgggagagtggttccacttggtgagggtgaaggaaaaatag

SEQ ID NO: 39471 - DNA, 80 bp, synthetic construct
  misc_feature 1..80: note = Artificially Synthesized Probe
  source 1..80: mol_type = other DNA
aaagcaggatataacatgggatctgtcagtaagacaactgttcagtgtataaccctgtggcataaaaatatcagacagtt

SEQ ID NO: 39472 - DNA, 80 bp, synthetic construct
  misc_feature 1..80: note = Artificially Synthesized Probe
  source 1..80: mol_type = other DNA
agaccagcctgggcaaggtggtgaaaccccatctttacaagaagtaggaaaattagctggacatggtagtgtacatctgt

SEQ ID NO: 39473 - DNA, 80 bp, synthetic construct
  misc_feature 1..80: note = Artificially Synthesized Probe
  source 1..80: mol_type = other DNA
ttgaattttaattattgcattatttatttatatgctgactcattccacaaagtttttgaggcagtgctcaaagtaagaaa

SEQ ID NO: 39474 - DNA, 80 bp, synthetic construct
  misc_feature 1..80: note = Artificially Synthesized Probe
  source 1..80: mol_type = other DNA
aattcaggaatccatatttccctagcagaagtgctggcattatcagtaagtgaaatgaacacatggtagtgagctgactt

SEQ ID NO: 39475 - DNA, 80 bp, synthetic construct
  misc_feature 1..80: note = Artificially Synthesized Probe
  source 1..80: mol_type = other DNA
aaccattcctggaatagtggcaaatgtatttgtgatgcccaggaggataccagcatacctgtagaaacattttcatagac

SEQ ID NO: 39476 - DNA, 80 bp, synthetic construct
  misc_feature 1..80: note = Artificially Synthesized Probe
  source 1..80: mol_type = other DNA
ctctgcccggccgccatcccatctaggaagtgaggagcgcctcttcccggcagccatcccatctgggaagtgaggagcgt

SEQ ID NO: 39477 - DNA, 80 bp, synthetic construct
  misc_feature 1..80: note = Artificially Synthesized Probe
  source 1..80: mol_type = other DNA
aaatcggatggttgccgtgtctgtgtagaaagaagtagacatgggagacttttcattttgttctgtactaagatacattc

SEQ ID NO: 39478 - DNA, 80 bp, synthetic construct
  misc_feature 1..80: note = Artificially Synthesized Probe
  source 1..80: mol_type = other DNA
taggttcaagtgattcttctgcttcagcctcccaagtagctgggactatacacgcatgccatgtaggtcaggctggtctt

SEQ ID NO: 39479 - DNA, 80 bp, synthetic construct
  misc_feature 1..80: note = Artificially Synthesized Probe
  source 1..80: mol_type = other DNA
ggccatgaaagattgatgaccacttggaagaaaacaagttgtatggactcagtctggattctgtgctgttggagtactat

SEQ ID NO: 39480 - DNA, 80 bp, synthetic construct
  misc_feature 1..80: note = Artificially Synthesized Probe
  source 1..80: mol_type = other DNA
caaaacacagtaatcactgaacccaatctgtaggaaagataaattttctcatgcttcatttttcaccacaagccctggtg

SEQ ID NO: 39481 - DNA, 80 bp, synthetic construct
  misc_feature 1..80: note = Artificially Synthesized Probe
  source 1..80: mol_type = other DNA
tccagcctgggcaacaagagtgaaactccatctcaaaaacaaaacaaaacaaaaaacaaataataataattttgaatttg

SEQ ID NO: 39482 - DNA, 80 bp, synthetic construct
  misc_feature 1..80: note = Artificially Synthesized Probe
  source 1..80: mol_type = other DNA
aaacggcatctatcataggaggcctggctgaagtcctgacatatcaaatctactatattttctttattctattaggctaa

SEQ ID NO: 39483 - DNA, 80 bp, synthetic construct
  misc_feature 1..80: note = Artificially Synthesized Probe
  source 1..80: mol_type = other DNA
accgtgcccggctcaaaatgactcatgtttatttacatcttcatgtgttataatggatgttaccgatggattcctcagca

SEQ ID NO: 39484 - DNA, 80 bp, synthetic construct
  misc_feature 1..80: note = Artificially Synthesized Probe
  source 1..80: mol_type = other DNA
atttattgaagagataggagactgaggattcatagaaatcagaagattctgtaggagtccaggtgtgaagattttgaggt

SEQ ID NO: 39485 - DNA, 80 bp, synthetic construct
  misc_feature 1..80: note = Artificially Synthesized Probe
  source 1..80: mol_type = other DNA
tgggtgaacagacacagtaatgagttattgcaatgttctaatgagagcactgtggacagaggtgatgatagttaaaagtt

SEQ ID NO: 39486 - DNA, 80 bp, synthetic construct
  misc_feature 1..80: note = Artificially Synthesized Probe
  source 1..80: mol_type = other DNA
atagctgacacagaatgtggtttaaaatacatataaccaaaggagataaactgaataataaactctgttggatgaggtta

SEQ ID NO: 39487 - DNA, 80 bp, synthetic construct
  misc_feature 1..80: note = Artificially Synthesized Probe
  source 1..80: mol_type = other DNA
ttacttatttatttattttcttgtttttttgagacagggtctcactgtcgtcaggctggagtgcagtggtgcgatcatgg

SEQ ID NO: 39488 - DNA, 80 bp, synthetic construct
  misc_feature 1..80: note = Artificially Synthesized Probe
  source 1..80: mol_type = other DNA
tccagggtctctactggagacttttaaaaagttaaatgattgtcttagacagttttatttctacgtacatttttttctaa

SEQ ID NO: 39489 - DNA, 80 bp, synthetic construct
  misc_feature 1..80: note = Artificially Synthesized Probe
  source 1..80: mol_type = other DNA
caagcaattctcctgcttcagcctcccaggtagctgggattacaggcacttgccaccacgcccagctaatttttgtattt

SEQ ID NO: 39490 - DNA, 80 bp, synthetic construct
  misc_feature 1..80: note = Artificially Synthesized Probe
  source 1..80: mol_type = other DNA
atttaatcaatcatacacatttaacgaagtctccatacaaactcaaagggacagggtttggatgaacttttgcggtcggg

SEQ ID NO: 39491 - DNA, 80 bp, synthetic construct
  misc_feature 1..80: note = Artificially Synthesized Probe
  source 1..80: mol_type = other DNA
aaagttgaaaaattccattttgcccttaaattgtcagcagcttgaccagacaggatcatacataaccaagagcctaaata

SEQ ID NO: 39492 - DNA, 80 bp, synthetic construct
  misc_feature 1..80: note = Artificially Synthesized Probe
  source 1..80: mol_type = other DNA
tcatgagtctttctaatgaccatctaggtcaagaaatagaactttgccagccttgccagaagacacttcatggtcctagt

SEQ ID NO: 39493 - DNA, 80 bp, synthetic construct
  misc_feature 1..80: note = Artificially Synthesized Probe
  source 1..80: mol_type = other DNA
cttctgcacggtgggatcacatctatcattatttgtggcaaaatcctgtataagaataaatggtttcaaaatattagtag

SEQ ID NO: 39494 - DNA, 80 bp, synthetic construct
  misc_feature 1..80: note = Artificially Synthesized Probe
  source 1..80: mol_type = other DNA
aaaatgagtttctggttgtgacgacctaccgacgagaacacacctcttgcaaaaaatttccttcatccctctccagaaga

SEQ ID NO: 39495 - DNA, 80 bp, synthetic construct
  misc_feature 1..80: note = Artificially Synthesized Probe
  source 1..80: mol_type = other DNA
ggatttgctccatgcagggttagcacaaatcttcaattcataaaaaatacaatatttgcagagtataataaagcaaagtg

SEQ ID NO: 39496 - DNA, 80 bp, synthetic construct
  misc_feature 1..80: note = Artificially Synthesized Probe
  source 1..80: mol_type = other DNA
gatttgctatttttaatcttcctgtggatctcagttttaccccaaatgataattaccaaattaacctttcaatgcacagt

SEQ ID NO: 39497 - DNA, 80 bp, synthetic construct
  misc_feature 1..80: note = Artificially Synthesized Probe
  source 1..80: mol_type = other DNA
ttagtagagacggttttgctgtattatccaatctgtattatcgaactcctgggctcaagcagtccttctgcctcagcctc

SEQ ID NO: 39498 - DNA, 80 bp, synthetic construct
  misc_feature 1..80: note = Artificially Synthesized Probe
  source 1..80: mol_type = other DNA
ataaaaagtccagttgtaagaaaagtgtgcaactacgatagcccaaagtggcagggattttaaaatgggtacccacggca

SEQ ID NO: 39499 - DNA, 80 bp, synthetic construct
  misc_feature 1..80: note = Artificially Synthesized Probe
  source 1..80: mol_type = other DNA
gggtaaaagcaccataggggtatgcaagatgatctgttggggtgaggaaagacatatttctatttatttccatttttact

SEQ ID NO: 39500 - DNA, 80 bp, synthetic construct
  misc_feature 1..80: note = Artificially Synthesized Probe
  source 1..80: mol_type = other DNA
accgtacccggctgagctgccacttttcttgatgagtcctttgtcaactacttcgccaagcaaaataatggcagatcatt

SEQ ID NO: 39501 - DNA, 80 bp, synthetic construct
  misc_feature 1..80: note = Artificially Synthesized Probe
  source 1..80: mol_type = other DNA
ttgtgagcctcccacctgtttattgattcttgcatgatcaagaaagcttggataccactgatatttagggcatcagattt

SEQ ID NO: 39502 - DNA, 80 bp, synthetic construct
  misc_feature 1..80: note = Artificially Synthesized Probe
  source 1..80: mol_type = other DNA
aaaactctgagtgtagggccaaggaatctaagttttaaaaggcttcactggtgattctatagagcagtgggttcccaaac

SEQ ID NO: 39503 - DNA, 80 bp, synthetic construct
  misc_feature 1..80: note = Artificially Synthesized Probe
  source 1..80: mol_type = other DNA
actatccgcgtatctagcagacatttataaaaaaatccttcaagagtttaaggtagtgctgtccagtagaactttccatg

SEQ ID NO: 39504 - DNA, 80 bp, synthetic construct
  misc_feature 1..80: note = Artificially Synthesized Probe
  source 1..80: mol_type = other DNA
tctagaaattattctcttgctattgtttctaacacactactatcttgccaatcaagcaatgtaaacacatactctcgatg

SEQ ID NO: 39505 - DNA, 80 bp, synthetic construct
  misc_feature 1..80: note = Artificially Synthesized Probe
  source 1..80: mol_type = other DNA
agttcctattagagggctacattattctaaaataccactgctgataaaagaaaatacatatgcgtggctgggcgtggtgg

SEQ ID NO: 39506 - DNA, 80 bp, synthetic construct
  misc_feature 1..80: note = Artificially Synthesized Probe
  source 1..80: mol_type = other DNA
aaacaaacccagaaccaaccaaacaagaaaaccccatgatatccttggaattaagaaaagaagaagaagccgggtgtggt

SEQ ID NO: 39507 - DNA, 80 bp, synthetic construct
  misc_feature 1..80: note = Artificially Synthesized Probe
  source 1..80: mol_type = other DNA
tacgacgcctggctaatttttgtatttttactagagatggagctttgccatattggccaggctggtctcaaactcctgac

SEQ ID NO: 39508 - DNA, 80 bp, synthetic construct
  misc_feature 1..80: note = Artificially Synthesized Probe
  source 1..80: mol_type = other DNA
tctgagcacagacaaaaacacaaatgccataaactacaaaaaatgcgaaacatcttcctctcccagctaatatgagtgac

SEQ ID NO: 39509 - DNA, 80 bp, synthetic construct
  misc_feature 1..80: note = Artificially Synthesized Probe
  source 1..80: mol_type = other DNA
aatgaatgagtagatgctgcacatttcttgggtccaagatttaaagatgcagcttcacgtaacacatcattttacaacac

SEQ ID NO: 39510 - DNA, 80 bp, synthetic construct
  misc_feature 1..80: note = Artificially Synthesized Probe
  source 1..80: mol_type = other DNA
agtaacttaacttatttatttgagacatggtcttgctctgttgcccaggttggagtgcaatggctgatcatagttcactg

SEQ ID NO: 39511 - DNA, 80 bp, synthetic construct
  misc_feature 1..80: note = Artificially Synthesized Probe
  source 1..80: mol_type = other DNA
aggccaggagttcgagaccagcctggccaataaggtgaaatcccgtctctactaaaaatacaaaaaattagctgggagtg

SEQ ID NO: 39512 - DNA, 80 bp, synthetic construct
  misc_feature 1..80: note = Artificially Synthesized Probe
  source 1..80: mol_type = other DNA
agatttgggatgtacaactgtataaacacactagttggttttctaacaactaatggtcagaatgagaatcctttcatgaa

SEQ ID NO: 39513 - DNA, 80 bp, synthetic construct
  misc_feature 1..80: note = Artificially Synthesized Probe
  source 1..80: mol_type = other DNA
ggaaattctcttgtgtttttgtggtgtgtcactaactaaccagatccacaaaagaaaccaaaatattccaatagtacctt

SEQ ID NO: 39514 - DNA, 80 bp, synthetic construct
  misc_feature 1..80: note = Artificially Synthesized Probe
  source 1..80: mol_type = other DNA
gtactatttaagtacaggatcaacagtcatttctactgagaaatattccaaaactaacatcagctcgtaactcaaatagg

SEQ ID NO: 39515 - DNA, 80 bp, synthetic construct
  misc_feature 1..80: note = Artificially Synthesized Probe
  source 1..80: mol_type = other DNA
agatataaggctagctgcaacaaagtagtgaagactgtaaagaatcttgcccctagttcaaggagtttgggatttattca

SEQ ID NO: 39516 - DNA, 80 bp, synthetic construct
  misc_feature 1..80: note = Artificially Synthesized Probe
  source 1..80: mol_type = other DNA
cagcaaaatttggtaattgttatctcacctgcatatgaaatgctaagaagtttgcttctttcaagagggggagcccaaga

SEQ ID NO: 39517 - DNA, 80 bp, synthetic construct
  misc_feature 1..80: note = Artificially Synthesized Probe
  source 1..80: mol_type = other DNA
tacagcctttcttcttttttttcctgtgataacaagcctagtagatgccaattactgacacggagagctaacaggatgtg

SEQ ID NO: 39518 - DNA, 80 bp, synthetic construct
  misc_feature 1..80: note = Artificially Synthesized Probe
  source 1..80: mol_type = other DNA
tgaatactaggatcagagaaaatatgctagatttaagtatattttactttgtcaagaagaacaggaacctggtaatagag

SEQ ID NO: 39519 - DNA, 80 bp, synthetic construct
  misc_feature 1..80: note = Artificially Synthesized Probe
  source 1..80: mol_type = other DNA
atcttggctcactgcaacctctgcctcccgggttcaagcagttctcccacttcatcctcccgagtagctgcaattacagg

SEQ ID NO: 39520 - DNA, 80 bp, synthetic construct
  misc_feature 1..80: note = Artificially Synthesized Probe
  source 1..80: mol_type = other DNA
caaaaaaagagtcacaggcttaatccagaaagctattaagcagaaaactgtagtggctgagctaggctttgggaaccagg

SEQ ID NO: 39521 - DNA, 80 bp, synthetic construct
  misc_feature 1..80: note = Artificially Synthesized Probe
  source 1..80: mol_type = other DNA
attttgtttagagagaaaccctctttcctgcttgaatgctctgcttgtgaatgatagaggagattcatctaagtatgaac

SEQ ID NO: 39522 - DNA, 80 bp, synthetic construct
  misc_feature 1..80: note = Artificially Synthesized Probe
  source 1..80: mol_type = other DNA
actggccagttcttgtttttcatcttgcaactgagattacctaaactctcttgcagctgtaactctataagtgatatagg

SEQ ID NO: 39523 - DNA, 80 bp, synthetic construct
  misc_feature 1..80: note = Artificially Synthesized Probe
  source 1..80: mol_type = other DNA
attactgattatgagttagtagccatctcattgttaaatgtagcatagcaaaaaaaatttactgccaagggtagggcatg

SEQ ID NO: 39524 - DNA, 80 bp, synthetic construct
  misc_feature 1..80: note = Artificially Synthesized Probe
  source 1..80: mol_type = other DNA
gtttctcttttttcttcttttattgagttgcagaattggagagggataggattcaggatgctgactaaggataatcaacc

SEQ ID NO: 39525 - DNA, 80 bp, synthetic construct
  misc_feature 1..80: note = Artificially Synthesized Probe
  source 1..80: mol_type = other DNA
attaaaatgtgttactttgagcaatttggagcaagaaaaacccagatttatgtactatgtctgttttgtcaatgcagcat

SEQ ID NO: 39526 - DNA, 80 bp, synthetic construct
  misc_feature 1..80: note = Artificially Synthesized Probe
  source 1..80: mol_type = other DNA
acgccatcgcactccagcctgggggacaagagcgagacttcgtctcaaaaaaaaaagaaaataaaaagccaactcaggtg

SEQ ID NO: 39527 - DNA, 80 bp, synthetic construct
  misc_feature 1..80: note = Artificially Synthesized Probe
  source 1..80: mol_type = other DNA
aaaaaggaacaaaagaggcacattaatctgatggaggggacagtggagacagtcagagaaggcctcttggagaagtctct

SEQ ID NO: 39528 - DNA, 80 bp, synthetic construct
  misc_feature 1..80: note = Artificially Synthesized Probe
  source 1..80: mol_type = other DNA
aattgggatctgggaaaagtaagaaattgttgaagagagtgggggcatgaggttctcagtgaaacacaggaatgctgagc

SEQ ID NO: 39529 - DNA, 80 bp, synthetic construct
  misc_feature 1..80: note = Artificially Synthesized Probe
  source 1..80: mol_type = other DNA
ctagaatataaaagtctataagggcaggagcttttgttctgttttgtttacttctttgtatctccagtgtctagagccgt

SEQ ID NO: 39530 - DNA, 80 bp, synthetic construct
  misc_feature 1..80: note = Artificially Synthesized Probe
  source 1..80: mol_type = other DNA
ggctaattttttgtatttttagtagggacggcgtttcaggcgtttcaccttgttagccgggatggtctcggtctgctgac

SEQ ID NO: 39531 - DNA, 80 bp, synthetic construct
  misc_feature 1..80: note = Artificially Synthesized Probe
  source 1..80: mol_type = other DNA
cacatctctgctaacatttggtattatcagccttttggattttagctattctagtgggtgtatagtgcctcgttgtaatt

SEQ ID NO: 39532 - DNA, 80 bp, synthetic construct
  misc_feature 1..80: note = Artificially Synthesized Probe
  source 1..80: mol_type = other DNA
gttatacaatagttgccctctgcatactcacaaatgttaactccagtccttttttgtcttccctccccgcctaagaagct

SEQ ID NO: 39533 - DNA, 80 bp, synthetic construct
  misc_feature 1..80: note = Artificially Synthesized Probe
  source 1..80: mol_type = other DNA
gcgggttaaactttgaccaaggaaatgattgctaaactcgattccataagtgtcaccggtcacactttaattccagtcta

SEQ ID NO: 39534 - DNA, 80 bp, synthetic construct
  misc_feature 1..80: note = Artificially Synthesized Probe
  source 1..80: mol_type = other DNA
ctgatggtctccatcatgtggctgtgtacccagagcatgctggagaacttctcggccgccgtgcccagccaccgctgctg

SEQ ID NO: 39535 - DNA, 80 bp, synthetic construct
  misc_feature 1..80: note = Artificially Synthesized Probe
  source 1..80: mol_type = other DNA
ctgaacctcgagttcaccaactttactctgggggttgtagaggatttctgctccccagcaaacattcactgctaaaactg

SEQ ID NO: 39536 - DNA, 80 bp, synthetic construct
  misc_feature 1..80: note = Artificially Synthesized Probe
  source 1..80: mol_type = other DNA
gctcctctcaagtgctccttctcctacttattcttctcttttcctccctcctcctcatctcttggcctattctcctctcc

SEQ ID NO: 39537 - DNA, 80 bp, synthetic construct
  misc_feature 1..80: note = Artificially Synthesized Probe
  source 1..80: mol_type = other DNA
tggatggatggatggatggatggatgaatggatagttggaataaatggatggatggatgaatggatggatggatgggtgg

SEQ ID NO: 39538 - DNA, 80 bp, synthetic construct
  misc_feature 1..80: note = Artificially Synthesized Probe
  source 1..80: mol_type = other DNA
atggatggatggatggttggaatagatggatggatggatggatggttggaatagacggatggatggatggttggaataga

SEQ ID NO: 39539 - DNA, 80 bp, synthetic construct
  misc_feature 1..80: note = Artificially Synthesized Probe
  source 1..80: mol_type = other DNA
caaatctctcccacccaacagcttggagtggagtaacaatttgcagccactcctcagagcaggagaaaattacatctcat

SEQ ID NO: 39540 - DNA, 80 bp, synthetic construct
  misc_feature 1..80: note = Artificially Synthesized Probe
  source 1..80: mol_type = other DNA
ggcttcatcagctctatctctaatatgcacctggaatctccacttctcccctctgttctgcaaatccctaaggagctcag

SEQ ID NO: 39541 - DNA, 80 bp, synthetic construct
  misc_feature 1..80: note = Artificially Synthesized Probe
  source 1..80: mol_type = other DNA
gggagacccaccaaggacctcagctccctgggaagaaggtctcagagaggaggaggtgcctggcgcccccagtgccaaca

SEQ ID NO: 39542 - DNA, 80 bp, synthetic construct
  misc_feature 1..80: note = Artificially Synthesized Probe
  source 1..80: mol_type = other DNA
cagagagggaggcagaaatcccctgcttctcccctcctccaacctcttgccagcacctcccatcagccaaacccaaaggg

SEQ ID NO: 39543 - DNA, 80 bp, synthetic construct
  misc_feature 1..80: note = Artificially Synthesized Probe
  source 1..80: mol_type = other DNA
ggcttctcccagacctagatgttcatgtcatgcatctccctcttgtgtggtccccggggctgctcaggtgcatcccaagc

SEQ ID NO: 39544 - DNA, 80 bp, synthetic construct
  misc_feature 1..80: note = Artificially Synthesized Probe
  source 1..80: mol_type = other DNA
cttcctgaacagggcagtaaagaaggcaacacatggcacgctggggaactctgtcctaaaatccacacagttttagcctc

SEQ ID NO: 39545 - DNA, 80 bp, synthetic construct
  misc_feature 1..80: note = Artificially Synthesized Probe
  source 1..80: mol_type = other DNA
gaccccatgtcccagctccccacacagcgctgggccagagaggcattggtgcgagggattgaataaagaaacaaatgaat

SEQ ID NO: 39546 - DNA, 80 bp, synthetic construct
  misc_feature 1..80: note = Artificially Synthesized Probe
  source 1..80: mol_type = other DNA
cactgaggtaaaaaagcctctgtaacatgggagttcctgggacagggagaaatataaagcaaatcctatgaagttcagtt

SEQ ID NO: 39547 - DNA, 80 bp, synthetic construct
  misc_feature 1..80: note = Artificially Synthesized Probe
  source 1..80: mol_type = other DNA
gccccttattagctgagcatcactgggtaagtcactgcctctctaagcctcatttcctcatcagtcaaccagggatgatg

SEQ ID NO: 39548 - DNA, 80 bp, synthetic construct
  misc_feature 1..80: note = Artificially Synthesized Probe
  source 1..80: mol_type = other DNA
ccctcaaggagtctgcagtcttgtggggactgagaggggaagaggatggcaagaatgagaccagtgttcgtttaatgaca

SEQ ID NO: 39549 - DNA, 80 bp, synthetic construct
  misc_feature 1..80: note = Artificially Synthesized Probe
  source 1..80: mol_type = other DNA
agagatggtgaagaggatatggtttgtattgtacctggcaaccccacactaagcactccatgttcttttggggtcgtggt

SEQ ID NO: 39550 - DNA, 80 bp, synthetic construct
  misc_feature 1..80: note = Artificially Synthesized Probe
  source 1..80: mol_type = other DNA
atctcctctgctgctaagatcatgaggtccactcggggagggatgtgggcattttcctggcttttgactctcccaacaag

SEQ ID NO: 39551 - DNA, 80 bp, synthetic construct
  misc_feature 1..80: note = Artificially Synthesized Probe
  source 1..80: mol_type = other DNA
gtccactcgggggggatgtgggcattttcctgacttttgactcttcccaacaagaggatctcctctggtgctaagatcat

SEQ ID NO: 39552 - DNA, 80 bp, synthetic construct
  misc_feature 1..80: note = Artificially Synthesized Probe
  source 1..80: mol_type = other DNA
ccaacttgcaaagattataataaaaaccagacaaacaatggctgagaagggaataagccgaggccccaggtaataattcc

SEQ ID NO: 39553 - DNA, 80 bp, synthetic construct
  misc_feature 1..80: note = Artificially Synthesized Probe
  source 1..80: mol_type = other DNA
cctcccaagtagctgggactacaggcacatggtaccatgtctgactaattttttaatattttgtagagatgaggcctcac

SEQ ID NO: 39554 - DNA, 80 bp, synthetic construct
  misc_feature 1..80: note = Artificially Synthesized Probe
  source 1..80: mol_type = other DNA
taacaactaatagcttactattgactggaaggaagctttgccaatcacataaacagccaatgaacacatatcttgtatgt

SEQ ID NO: 39555 - DNA, 80 bp, synthetic construct
  misc_feature 1..80: note = Artificially Synthesized Probe
  source 1..80: mol_type = other DNA
ctagggctcttagagatgttaggtttggagatgagttgcacggcctgagacatctacgaagagatgccaaggagccactt

SEQ ID NO: 39556 - DNA, 80 bp, synthetic construct
  misc_feature 1..80: note = Artificially Synthesized Probe
  source 1..80: mol_type = other DNA
tggaggtctgaggccaggggacacaaggtggacaagtgaagtggcctagtggaggcagatgggggtggcagaggggacgg

SEQ ID NO: 39557 - DNA, 80 bp, synthetic construct
  misc_feature 1..80: note = Artificially Synthesized Probe
  source 1..80: mol_type = other DNA
atgtgactagggcaggacatgggctagaatggcctcctctctttttgtgtctgagacacttaaattatcacttagattac

SEQ ID NO: 39558 - DNA, 80 bp, synthetic construct
  misc_feature 1..80: note = Artificially Synthesized Probe
  source 1..80: mol_type = other DNA
aggtccccaggaggcactcaaagatatttgctaaatgaatgaacacccctggggtcctgacaaatattccagctgagtct

SEQ ID NO: 39559 - DNA, 80 bp, synthetic construct
  misc_feature 1..80: note = Artificially Synthesized Probe
  source 1..80: mol_type = other DNA
cgctttctgtcctctcgagggaccagtctcttggagtggggggcgcctacaggccgtcttccaaaggccatggtgtccac

SEQ ID NO: 39560 - DNA, 80 bp, synthetic construct
  misc_feature 1..80: note = Artificially Synthesized Probe
  source 1..80: mol_type = other DNA
caaacaaggtgttaatcatattagctgtgagtgcttcgcagagtctgaagggcaaagaactccacaggtcagtttttatt

SEQ ID NO: 39561 - DNA, 80 bp, synthetic construct
  misc_feature 1..80: note = Artificially Synthesized Probe
  source 1..80: mol_type = other DNA
aaaagaatgggaagttgcctcctgctgatttaaaggtgaaatctaggaaggggtatctcacatcactgaatctggggctg

SEQ ID NO: 39562 - DNA, 80 bp, synthetic construct
  misc_feature 1..80: note = Artificially Synthesized Probe
  source 1..80: mol_type = other DNA
attcctcatatctaaacaccctagagaccctacctgagcatctctgtgcatttgttacctattgactagagaacgcacac

SEQ ID NO: 39563 - DNA, 80 bp, synthetic construct
  misc_feature 1..80: note = Artificially Synthesized Probe
  source 1..80: mol_type = other DNA
cccctcagtaatgggagaagtgatagtacctatctcacagatgtgttgggaggattaaggagattatatgtgtaaatgac

SEQ ID NO: 39564 - DNA, 80 bp, synthetic construct
  misc_feature 1..80: note = Artificially Synthesized Probe
  source 1..80: mol_type = other DNA
ctgtgtgctgggaactataattggcacttttgtacgctaattcagtgagtactcaagacaaacagatgtgggaggtacta

SEQ ID NO: 39565 - DNA, 80 bp, synthetic construct
  misc_feature 1..80: note = Artificially Synthesized Probe
  source 1..80: mol_type = other DNA
gataagcctctggaatgagaacaaagatgaggtgctacctttgtctacaaagtttttttagattttaaattgaggggccg

SEQ ID NO: 39566 - DNA, 80 bp, synthetic construct
  misc_feature 1..80: note = Artificially Synthesized Probe
  source 1..80: mol_type = other DNA
atgagacccacccatgttgtcacatgagagtgtagttggtacttcaaacaaaattattgtgtaggattccactgtatgaa

SEQ ID NO: 39567 - DNA, 80 bp, synthetic construct
  misc_feature 1..80: note = Artificially Synthesized Probe
  source 1..80: mol_type = other DNA
tttagtgagtcattttggcaggctttcgtgcagggtattgtagagactgttctgtgaaatctgtatgcccaagaactagg

SEQ ID NO: 39568 - DNA, 80 bp, synthetic construct
  misc_feature 1..80: note = Artificially Synthesized Probe
  source 1..80: mol_type = other DNA
gaggggcactctcatttggaccctcacactggctgagtgagatgatacaagatttccataaatagccagtatctggggac

SEQ ID NO: 39569 - DNA, 80 bp, synthetic construct
  misc_feature 1..80: note = Artificially Synthesized Probe
  source 1..80: mol_type = other DNA
gagattcaaaaagcccattctttcccctgttcaatggagtcttcttgaatatgtcatcgtcaactccccaaatctcttga

SEQ ID NO: 39570 - DNA, 80 bp, synthetic construct
  misc_feature 1..80: note = Artificially Synthesized Probe
  source 1..80: mol_type = other DNA
ctccagctcctgacaaccgcctgtctactttctgtttctatgagtttggttactttaggtacctcatataagtggaatca

SEQ ID NO: 39571 - DNA, 80 bp, synthetic construct
  misc_feature 1..80: note = Artificially Synthesized Probe
  source 1..80: mol_type = other DNA
agattagtttgacgacacacacacacacatacactcacacacacgtatatatagtcatttagccactgccatgatgaaaa

SEQ ID NO: 39572 - DNA, 80 bp, synthetic construct
  misc_feature 1..80: note = Artificially Synthesized Probe
  source 1..80: mol_type = other DNA
agccaccacacctggtctggtgtcagctttctaaaagtcattttggtaggtaatggtattattgtgacttgacttttcct

SEQ ID NO: 39573 - DNA, 80 bp, synthetic construct
  misc_feature 1..80: note = Artificially Synthesized Probe
  source 1..80: mol_type = other DNA
gctagatgttcagaaaaaactctcaacttcttatgtacacacgcgcacacacacaaggtaaggcagtcattcaagttcca

SEQ ID NO: 39574 - DNA, 80 bp, synthetic construct
  misc_feature 1..80: note = Artificially Synthesized Probe
  source 1..80: mol_type = other DNA
gggtggaagagactagctccacaccatcagcccctgtagatcaggaataagtgagccaaaaaaatctaatcatatacaac

SEQ ID NO: 39575 - DNA, 80 bp, synthetic construct
  misc_feature 1..80: note = Artificially Synthesized Probe
  source 1..80: mol_type = other DNA
accaagtagccaggctgaaagtttgtcacctatataagaagaacaaattgttatcatttgatgaagacagtcaatgcctg

SEQ ID NO: 39576 - DNA, 80 bp, synthetic construct
  misc_feature 1..80: note = Artificially Synthesized Probe
  source 1..80: mol_type = other DNA
gtaatgatagaatcaactaaatcaggtcatggagggatggtttgagggggaagtagaaatatactaattttatgattgtt

SEQ ID NO: 39577 - DNA, 80 bp, synthetic construct
  misc_feature 1..80: note = Artificially Synthesized Probe
  source 1..80: mol_type = other DNA
ttggtaccaaagaacaacaaagataaaggaaacaaggaaactacagacatatatttatgaatatggatctagaaatccta

SEQ ID NO: 39578 - DNA, 80 bp, synthetic construct
  misc_feature 1..80: note = Artificially Synthesized Probe
  source 1..80: mol_type = other DNA
aaaggaaagacagagagaatcagtgagctgtgatacaattcaatgaatgtaattggagtctgtagaagtgagtaggaggg

SEQ ID NO: 39579 - DNA, 80 bp, synthetic construct
  misc_feature 1..80: note = Artificially Synthesized Probe
  source 1..80: mol_type = other DNA
acaatgaactgtttaaagcaggcattggcaaacttttccagtacagagctggatagctaatgttttaggctttgtggatc

SEQ ID NO: 39580 - DNA, 80 bp, synthetic construct
  misc_feature 1..80: note = Artificially Synthesized Probe
  source 1..80: mol_type = other DNA
accagagatgaagagggtcatttcaagtagatagtttctctacatgtttccccactaactttctttcttcgattcctcaa

SEQ ID NO: 39581 - DNA, 80 bp, synthetic construct
  misc_feature 1..80: note = Artificially Synthesized Probe
  source 1..80: mol_type = other DNA
atacacctaagagctaaatatttgaatgtgtagttaaaaagaggtaggctctctgccattgcatgggcaacggatggctc

SEQ ID NO: 39582 - DNA, 80 bp, synthetic construct
  misc_feature 1..80: note = Artificially Synthesized Probe
  source 1..80: mol_type = other DNA
ataggacagaatctgagagaccttttgacagtctcctgataaatctgatcaccaattcttacacatttaacacacaattg

SEQ ID NO: 39583 - DNA, 80 bp, synthetic construct
  misc_feature 1..80: note = Artificially Synthesized Probe
  source 1..80: mol_type = other DNA
gactttatgtaagaaaataatgaagagcatgacttgacagctatctgttctcaagtgcatggcagagaatgatttgtctg

SEQ ID NO: 39584 - DNA, 80 bp, synthetic construct
  misc_feature 1..80: note = Artificially Synthesized Probe
  source 1..80: mol_type = other DNA
actaagtgtgcagaagaagcacaaaaggaacatgctaaaatgctaaattccttggccttcttggtttttggtttagaatg

SEQ ID NO: 39585 - DNA, 80 bp, synthetic construct
  misc_feature 1..80: note = Artificially Synthesized Probe
  source 1..80: mol_type = other DNA
gcatttcaccgaatcctcccaaaacattgggaggcagcttctatggttatcagacccattccacagatgaaggagataat

SEQ ID NO: 39586 - DNA, 80 bp, synthetic construct
  misc_feature 1..80: note = Artificially Synthesized Probe
  source 1..80: mol_type = other DNA
tcaaccaggtccagaagagtgttcttttccaaatattccagcagagatgttttcttcaatgtcttccctctgcctcatgt

SEQ ID NO: 39587 - DNA, 80 bp, synthetic construct
  misc_feature 1..80: note = Artificially Synthesized Probe
  source 1..80: mol_type = other DNA
ctgataaggaagagttaacatgattggctctttgccaggtaaagaaggataaggcagatttaccaaagggaggcatttcc

SEQ ID NO: 39588 - DNA, 80 bp, synthetic construct
  misc_feature 1..80: note = Artificially Synthesized Probe
  source 1..80: mol_type = other DNA
agcacagttgtacttgtccttctgtttttggctcactcgtaaaagctggaagtcaaggtgtccttcagctgccaaggaca

SEQ ID NO: 39589 - DNA, 80 bp, synthetic construct
  misc_feature 1..80: note = Artificially Synthesized Probe
  source 1..80: mol_type = other DNA
agaatgggaagaggcacaaagagagacactacttctcatagacccaaagccagatttctccaaacctagtcatctggttt

SEQ ID NO: 39590 - DNA, 80 bp, synthetic construct
  misc_feature 1..80: note = Artificially Synthesized Probe
  source 1..80: mol_type = other DNA
acaaagatgaccacaaatctttgtggccttgaatgtgactgctctgggctggaggtgagacagctgagtgaacgccttgt

SEQ ID NO: 39591 - DNA, 80 bp, synthetic construct
  misc_feature 1..80: note = Artificially Synthesized Probe
  source 1..80: mol_type = other DNA
ttcctgggcagtctttcagcacttagaacagatggtttcaccttcatcagtctcttaaggcaaagagcaaatcattgctc

SEQ ID NO: 39592 - DNA, 80 bp, synthetic construct
  misc_feature 1..80: note = Artificially Synthesized Probe
  source 1..80: mol_type = other DNA
ttgatattggaacttaaaccttctcctgtgttctttctaataatgcctcttggtcctgctatttcagtgccttggagcct

SEQ ID NO: 39593 - DNA, 80 bp, synthetic construct
  misc_feature 1..80: note = Artificially Synthesized Probe
  source 1..80: mol_type = other DNA
atacgtggcaaattagttatggggtagattagaatcctagctgtccttctgtaactccatgacctcctcacccccactct

SEQ ID NO: 39594 - DNA, 80 bp, synthetic construct
  misc_feature 1..80: note = Artificially Synthesized Probe
  source 1..80: mol_type = other DNA
gctgcaggggaggatggaggctcagggagtctagagcttcagccaaggctggcctggactccagatcctggctaaggaag

SEQ ID NO: 39595 - DNA, 80 bp, synthetic construct
  misc_feature 1..80: note = Artificially Synthesized Probe
  source 1..80: mol_type = other DNA
agggccttgatgcccatcaagtccacgaagctgactccactcatgtccaggatgagggtgtggaaggtgacgaagggtgg

SEQ ID NO: 39596 - DNA, 80 bp, synthetic construct
  misc_feature 1..80: note = Artificially Synthesized Probe
  source 1..80: mol_type = other DNA
atcttagccagaaaatggagaagggccttgggggttcagtggcttccctgggagatggtagcacctcatccaagaagaaa

SEQ ID NO: 39597 - DNA, 80 bp, synthetic construct
  misc_feature 1..80: note = Artificially Synthesized Probe
  source 1..80: mol_type = other DNA
cttggggtggtgcagagcaaaagaaggaggtcataagcttgaattacctaccctattataggtcttgggattcacataaa

SEQ ID NO: 39598 - DNA, 80 bp, synthetic construct
  misc_feature 1..80: note = Artificially Synthesized Probe
  source 1..80: mol_type = other DNA
ctttggttacactttcctctttcccttagattgactgtggttgcctgatcttgtctgtgtttttagtagaagccccagca

SEQ ID NO: 39599 - DNA, 80 bp, synthetic construct
  misc_feature 1..80: note = Artificially Synthesized Probe
  source 1..80: mol_type = other DNA
cattgggtgaagttttgatagttgccccctatagattttaagacctggaaattcctctaaaggaaataaatctgcccaga

SEQ ID NO: 39600 - DNA, 80 bp, synthetic construct
  misc_feature 1..80: note = Artificially Synthesized Probe
  source 1..80: mol_type = other DNA
taggatgtttcacttcgaaactcggacttttaaccactcatctcatgctaattaggaagcagcagactagagggttcatt

SEQ ID NO: 39601 - DNA, 80 bp, synthetic construct
  misc_feature 1..80: note = Artificially Synthesized Probe
  source 1..80: mol_type = other DNA
tccgagaaagagttggggatagagggaaggtgtgaaatttttgctcttgatttacttccaatccatggctttggtggagt

SEQ ID NO: 39602 - DNA, 80 bp, synthetic construct
  misc_feature 1..80: note = Artificially Synthesized Probe
  source 1..80: mol_type = other DNA
tgagagaacctaacttgcccaaggtccccgggccagtatgtggtagggcctcgtttgttaactcccagattctgaaccct

SEQ ID NO: 39603 - DNA, 80 bp, synthetic construct
  misc_feature 1..80: note = Artificially Synthesized Probe
  source 1..80: mol_type = other DNA
ccaacatcccagctctgaacaaggtccttaccacaatcatctctgtagggatggggaagcgaatcttgtgcatgtagcga

SEQ ID NO: 39604 - DNA, 80 bp, synthetic construct
  misc_feature 1..80: note = Artificially Synthesized Probe
  source 1..80: mol_type = other DNA
aagacgatggaccctgggcctgtgtaggaggggatggtcagtccgaagatgtacttgagcaccgaaatcaggatctgcag

SEQ ID NO: 39605 - DNA, 80 bp, synthetic construct
  misc_feature 1..80: note = Artificially Synthesized Probe
  source 1..80: mol_type = other DNA
aatgagtgaatgaaaaggcgctctctgggactgcgttttgctcttgcattctgtcatgttgtgcttcccttcataaaacc

SEQ ID NO: 39606 - DNA, 80 bp, synthetic construct
  misc_feature 1..80: note = Artificially Synthesized Probe
  source 1..80: mol_type = other DNA
gatgctgataacggcaaaggtacctgtggtgccccacccagccagcaaaaatcagaggtttgaaccacaccgatggaaac

SEQ ID NO: 39607 - DNA, 80 bp, synthetic construct
  misc_feature 1..80: note = Artificially Synthesized Probe
  source 1..80: mol_type = other DNA
gagtccaccgagcaggtcaggaatgatgtagtctttaatcttgtacttggggagccaggagagcacaggcagcagcccaa

SEQ ID NO: 39608 - DNA, 80 bp, synthetic construct
  misc_feature 1..80: note = Artificially Synthesized Probe
  source 1..80: mol_type = other DNA
aaaaggaaggctctattgttcctgcagggtgcactctgctgactcactatcctttatgtgtggtaactccaataccggag

SEQ ID NO: 39609 - DNA, 80 bp, synthetic construct
  misc_feature 1..80: note = Artificially Synthesized Probe
  source 1..80: mol_type = other DNA
ctatgccaggcactgttcaaggctctcatgccagtatcataggaattgttagtttgctatatccctttacagctttcatt

SEQ ID NO: 39610 - DNA, 80 bp, synthetic construct
  misc_feature 1..80: note = Artificially Synthesized Probe
  source 1..80: mol_type = other DNA
cagatgaggttgtaggatcttaaattcatcattcagaacctcacttccccagggcttcccttaaccccatcttagggata

SEQ ID NO: 39611 - DNA, 80 bp, synthetic construct
  misc_feature 1..80: note = Artificially Synthesized Probe
  source 1..80: mol_type = other DNA
ccagagctgggagaagttgctcagaggaccacagagaaagaaggacagagaagaaagagatggggaaggcttagagtgag

SEQ ID NO: 39612 - DNA, 80 bp, synthetic construct
  misc_feature 1..80: note = Artificially Synthesized Probe
  source 1..80: mol_type = other DNA
gttgagcgaattgataaatggtgttttggaggagacatgggcagaaatgagtaagggcaatggcatgtgagacatttcag

SEQ ID NO: 39613 - DNA, 80 bp, synthetic construct
  misc_feature 1..80: note = Artificially Synthesized Probe
  source 1..80: mol_type = other DNA
ggcatttttgtttttttatcctctggccttgtattggtggattcaggaaatctgttggctgggtccctccacaccatctg

SEQ ID NO: 39614 - DNA, 80 bp, synthetic construct
  misc_feature 1..80: note = Artificially Synthesized Probe
  source 1..80: mol_type = other DNA
gtagaagagaacttgaggaccacatttgtccaattgtctcattttgcagataaagaaactgcacttgatttaactccagt

SEQ ID NO: 39615 - DNA, 80 bp, synthetic construct
  misc_feature 1..80: note = Artificially Synthesized Probe
  source 1..80: mol_type = other DNA
attctccaggatttctcctccaatgagctcatgccaaagcacgcccctggtaccttctcccagtcacatttctaaccagg

SEQ ID NO: 39616 - DNA, 80 bp, synthetic construct
  misc_feature 1..80: note = Artificially Synthesized Probe
  source 1..80: mol_type = other DNA
agctgctggttgcctccctgcctcatccagggtgggggccacagggtaagagcagcctctgagtgacccaggtgtgaatg

SEQ ID NO: 39617 - DNA, 80 bp, synthetic construct
  misc_feature 1..80: note = Artificially Synthesized Probe
  source 1..80: mol_type = other DNA
agaggagtccgtctctgccccagggtttatacaaatgagactcagagagcaggtggctagctctgggaagtgcctgggaa

SEQ ID NO: 39618 - DNA, 80 bp, synthetic construct
  misc_feature 1..80: note = Artificially Synthesized Probe
  source 1..80: mol_type = other DNA
gtgaaggaggatgtctgggcggtagaaggagggggagacagccatgcagagtaggctggtgagtcaagcattaagagctt

SEQ ID NO: 39619 - DNA, 80 bp, synthetic construct
  misc_feature 1..80: note = Artificially Synthesized Probe
  source 1..80: mol_type = other DNA
tcttgtggtccagaccattcccttttcctggcttggaggctctcaggccatttcacatttgtgaccttcatctactccca

SEQ ID NO: 39620 - DNA, 80 bp, synthetic construct
  misc_feature 1..80: note = Artificially Synthesized Probe
  source 1..80: mol_type = other DNA
gcaagcgaatcgtaatgaggcgtgcaccgccaatatgcattgtacattccacaagtattgccttcttattttacttcttt

SEQ ID NO: 39621 - DNA, 80 bp, synthetic construct
  misc_feature 1..80: note = Artificially Synthesized Probe
  source 1..80: mol_type = other DNA
ctggcccagcctttcctggggtctgccacactacagtgagcttctggtcccccaaatctccccaggccagacctcatgtt

SEQ ID NO: 39622 - DNA, 80 bp, synthetic construct
  misc_feature 1..80: note = Artificially Synthesized Probe
  source 1..80: mol_type = other DNA
tcagcatttgtcaatcttggttgattgcaaaagaaggcacggagtggcacaccaggaagggtggtagctgtgggagcatg

SEQ ID NO: 39623 - DNA, 80 bp, synthetic construct
  misc_feature 1..80: note = Artificially Synthesized Probe
  source 1..80: mol_type = other DNA
cgagagccttgatttccttctgtgtaaggggaggggaatcatacgaactctcagtgttattgagaggcatcagtaaggca

SEQ ID NO: 39624 - DNA, 80 bp, synthetic construct
  misc_feature 1..80: note = Artificially Synthesized Probe
  source 1..80: mol_type = other DNA
caccatgcctggctaaatttcacattttttgtagatactcagttttgccatgttgcccaggctggtctcagactcttgag

SEQ ID NO: 39625 - DNA, 80 bp, synthetic construct
  misc_feature 1..80: note = Artificially Synthesized Probe
  source 1..80: mol_type = other DNA
tccagcctggatgacagagagaggttacgtgtcaaaaaaaaagatacttacctgaagcactagcaacatggctgatgcta

SEQ ID NO: 39626 - DNA, 80 bp, synthetic construct
  misc_feature 1..80: note = Artificially Synthesized Probe
  source 1..80: mol_type = other DNA
aaagaaaggaaagaaaaaaatggtgctgaaaggggagagggaagaaggcagccagggaagaagagagggttgggcaaatc

SEQ ID NO: 39627 - DNA, 80 bp, synthetic construct
  misc_feature 1..80: note = Artificially Synthesized Probe
  source 1..80: mol_type = other DNA
catgtcacgtcacctccctttttccatctggaaaatggtgacagtaaacctgggccactccagggttactgtgaaggtga

SEQ ID NO: 39628 - DNA, 80 bp, synthetic construct
  misc_feature 1..80: note = Artificially Synthesized Probe
  source 1..80: mol_type = other DNA
cagtaactggtcattgtcatcagcactgtttaacttctctcttgtatgtgaatctggtctcttgggtgcatttgtcagct

SEQ ID NO: 39629 - DNA, 80 bp, synthetic construct
  misc_feature 1..80: note = Artificially Synthesized Probe
  source 1..80: mol_type = other DNA
cacacagcctccagcacctgccaggtctctaggaaccccacccccatcaggcagtgtgctgcagtagaaacacacagctt

SEQ ID NO: 39630 - DNA, 80 bp, synthetic construct
  misc_feature 1..80: note = Artificially Synthesized Probe
  source 1..80: mol_type = other DNA
tttaatttaaaaataaaaataaacaggattagccaggcgtggtgcacatgcctatggtctcagctactgggaaggctgag

SEQ ID NO: 39631 - DNA, 80 bp, synthetic construct
  misc_feature 1..80: note = Artificially Synthesized Probe
  source 1..80: mol_type = other DNA
tggcatgacggtggtgattcggaagaagttctcagcctcccggttctgggacgattgtatcaagtacaactgcacggtga

SEQ ID NO: 39632 - DNA, 80 bp, synthetic construct
  misc_feature 1..80: note = Artificially Synthesized Probe
  source 1..80: mol_type = other DNA
ggagccttgttctgaccagtggccatcagttatctctgctcttagggttacaagttactcatttatttgtgtatccatcc

SEQ ID NO: 39633 - DNA, 80 bp, synthetic construct
  misc_feature 1..80: note = Artificially Synthesized Probe
  source 1..80: mol_type = other DNA
ttattctggctcagctccttagctctgtgtcatgggcgagtattcagcctcactgtgcctaagtccccttatctacaaac

SEQ ID NO: 39634 - DNA, 80 bp, synthetic construct
  misc_feature 1..80: note = Artificially Synthesized Probe
  source 1..80: mol_type = other DNA
gggacacgttccgctggaaaggtgagaacgtgtccaccaccgaggtggaaggcacactcagccgcctgctggacatggct

SEQ ID NO: 39635 - DNA, 80 bp, synthetic construct
  misc_feature 1..80: note = Artificially Synthesized Probe
  source 1..80: mol_type = other DNA
taaacagataaaaagaaaaatgaaccacagagcaagctgataggaaagcaaaaaggtgggacgcttgggatgactagaag

SEQ ID NO: 39636 - DNA, 80 bp, synthetic construct
  misc_feature 1..80: note = Artificially Synthesized Probe
  source 1..80: mol_type = other DNA
gagacaggagaattgcttgaacccaggagacccaggagccacaggttgcagtgagctgagatcatgccactacactccag

SEQ ID NO: 39637 - DNA, 80 bp, synthetic construct
  misc_feature 1..80: note = Artificially Synthesized Probe
  source 1..80: mol_type = other DNA
ttcagatgggctttgctgcagaacaaaccacccccaaacttacttgccccaaaatggctcgaaacaaccagtttattgat

SEQ ID NO: 39638 - DNA, 80 bp, synthetic construct
  misc_feature 1..80: note = Artificially Synthesized Probe
  source 1..80: mol_type = other DNA
ttgcttttgccaccttctgttggttaaagcaagttgtaaagccagtccagattgaggccaatggagattgaaaaagtcga

SEQ ID NO: 39639 - DNA, 80 bp, synthetic construct
  misc_feature 1..80: note = Artificially Synthesized Probe
  source 1..80: mol_type = other DNA
agaatccagagaatacggttgagcacctgccttatggggctgatgtacagatgaaataagctcacactgttacctggtag

SEQ ID NO: 39640 - DNA, 80 bp, synthetic construct
  misc_feature 1..80: note = Artificially Synthesized Probe
  source 1..80: mol_type = other DNA
cccagactcaggaagtcaacagagtgggcagggacagtggtagcatccatctggtggccaaagagaatcgtagccccaga

SEQ ID NO: 39641 - DNA, 80 bp, synthetic construct
  misc_feature 1..80: note = Artificially Synthesized Probe
  source 1..80: mol_type = other DNA
ctcagcaggaggggcagatgaggcgtaggtaacctgctgactcttccgggtaataggtaagaatgtgaaccagacagggc

SEQ ID NO: 39642 - DNA, 80 bp, synthetic construct
  misc_feature 1..80: note = Artificially Synthesized Probe
  source 1..80: mol_type = other DNA
ggaaagcacagagaagccaccacaaggggaggtggcctttccgcaccacccccgacgctcactcacaggcccccggagtt

SEQ ID NO: 39643 - DNA, 80 bp, synthetic construct
  misc_feature 1..80: note = Artificially Synthesized Probe
  source 1..80: mol_type = other DNA
tctgttgctgctttaacaaacttggcagcttgaaacaacagattctcttatagctctgaaggtcagaactctgacatggg

SEQ ID NO: 39644 - DNA, 80 bp, synthetic construct
  misc_feature 1..80: note = Artificially Synthesized Probe
  source 1..80: mol_type = other DNA
agaaggctgtgaaagggccagatcatgcaagaaaagctgcagggggtgagggcagtttttaaataaactttttcacattt

SEQ ID NO: 39645 - DNA, 80 bp, synthetic construct
  misc_feature 1..80: note = Artificially Synthesized Probe
  source 1..80: mol_type = other DNA
ggaatgcttcacaaatttgtgtttacccttgcacaggggccattctaatcattccaattttagtgtatgtactatagaag

SEQ ID NO: 39646 - DNA, 80 bp, synthetic construct
  misc_feature 1..80: note = Artificially Synthesized Probe
  source 1..80: mol_type = other DNA
aaaaaagtgttggcagggctgcattccttctgtaaacactagggggaaaattgttctgtagctcatggccccttccccca

SEQ ID NO: 39647 - DNA, 80 bp, synthetic construct
  misc_feature 1..80: note = Artificially Synthesized Probe
  source 1..80: mol_type = other DNA
gaatattggagaaaactgaactcccccatacaaaagaaaacagatttccactttacacacactcaaaattaaattccaga

SEQ ID NO: 39648 - DNA, 80 bp, synthetic construct
  misc_feature 1..80: note = Artificially Synthesized Probe
  source 1..80: mol_type = other DNA
ttgcaggcatgacccaccattcctggcccacactcagctaactttcagtttttgtttgtttgttttttgagacgaagtct

SEQ ID NO: 39649 - DNA, 80 bp, synthetic construct
  misc_feature 1..80: note = Artificially Synthesized Probe
  source 1..80: mol_type = other DNA
gtccatctctgcctcacgactaaagaaacaactggcaagtttaataaatcgaacttaaatctctgaaaagacactgtaaa

SEQ ID NO: 39650 - DNA, 80 bp, synthetic construct
  misc_feature 1..80: note = Artificially Synthesized Probe
  source 1..80: mol_type = other DNA
cgtggccacacaccctgttcatagcactggttggtattcgtagcattgtcaacaaaccagatacacatcaatataacgtg

SEQ ID NO: 39651 - DNA, 80 bp, synthetic construct
  misc_feature 1..80: note = Artificially Synthesized Probe
  source 1..80: mol_type = other DNA
ttcataaccttatggtttatagtttaaaacacagaggataacagccctttcccaaagcagacctccttcttgcctgggga

SEQ ID NO: 39652 - DNA, 80 bp, synthetic construct
  misc_feature 1..80: note = Artificially Synthesized Probe
  source 1..80: mol_type = other DNA
ccatacctggccccatagttgaacttaaaatagactatatgattatctgggggtgtgggggggctgatctagctacatga

SEQ ID NO: 39653 - DNA, 80 bp, synthetic construct
  misc_feature 1..80: note = Artificially Synthesized Probe
  source 1..80: mol_type = other DNA
tgagcaacagagcaagactctgtctcaaaaaaagagaaatgcctatttttattttttttgagacagagtcttgctgtgtc

SEQ ID NO: 39654 - DNA, 80 bp, synthetic construct
  misc_feature 1..80: note = Artificially Synthesized Probe
  source 1..80: mol_type = other DNA
tagcaaggcagagagggatctgtgtgaggaggtacctctcattaccaccactgttaatcatcattgacttattcattcat

SEQ ID NO: 39655 - DNA, 80 bp, synthetic construct
  misc_feature 1..80: note = Artificially Synthesized Probe
  source 1..80: mol_type = other DNA
aaaaggaagaaagaaagaaagaaacaatccttcctaggacagtgaatcactcctataatcccagcactttgggaagctga

SEQ ID NO: 39656 - DNA, 80 bp, synthetic construct
  misc_feature 1..80: note = Artificially Synthesized Probe
  source 1..80: mol_type = other DNA
gacaggagaaacagaaagacttatagaatgaaattaagaatacgctgggtgtggtggctcacgcctgtcatcccagcacg

SEQ ID NO: 39657 - DNA, 80 bp, synthetic construct
  misc_feature 1..80: note = Artificially Synthesized Probe
  source 1..80: mol_type = other DNA
attccgtaccctcctccctttgtttctgttggttgtcactcctgctgaatgtattgctttttaatactgtactgcaggtt

SEQ ID NO: 39658 - DNA, 80 bp, synthetic construct
  misc_feature 1..80: note = Artificially Synthesized Probe
  source 1..80: mol_type = other DNA
agtggtgcaatcttggctcactacaacctccacctcccaagttcaagcgattctcctgcttcagcctcctgagtagctgg

SEQ ID NO: 39659 - DNA, 80 bp, synthetic construct
  misc_feature 1..80: note = Artificially Synthesized Probe
  source 1..80: mol_type = other DNA
aaatagcaagtcacaacaactatcacttcgcagaagagaattacagtgcacggccaccaccaatgacaaacagatgctca

SEQ ID NO: 39660 - DNA, 80 bp, synthetic construct
  misc_feature 1..80: note = Artificially Synthesized Probe
  source 1..80: mol_type = other DNA
gggcagggtcgcagtctgcagcactgcccacggacagccctttgcatatggcgtttactgctgtggggttccttttctca

SEQ ID NO: 39661 - DNA, 80 bp, synthetic construct
  misc_feature 1..80: note = Artificially Synthesized Probe
  source 1..80: mol_type = other DNA
tgccgtcaggggccggaaggactgggcccggttgtccagtacaaacagagggtcaaccacgatccccacattgaagccct

SEQ ID NO: 39662 - DNA, 80 bp, synthetic construct
  misc_feature 1..80: note = Artificially Synthesized Probe
  source 1..80: mol_type = other DNA
acaacggtggactcttcatcacccagcaccctgccaaggacagacccaaagacacagacagggagatccagagatgagag

SEQ ID NO: 39663 - DNA, 80 bp, synthetic construct
  misc_feature 1..80: note = Artificially Synthesized Probe
  source 1..80: mol_type = other DNA
gcggactgtatgtgtccggtcctctggttgctacaggaatgtccccagaagggtgaggaggaggtgctcttggggcatgc

SEQ ID NO: 39664 - DNA, 80 bp, synthetic construct
  misc_feature 1..80: note = Artificially Synthesized Probe
  source 1..80: mol_type = other DNA
cctgtctccaggatgccgggaaagctccgtgcctgttataaagtgagcaatgctaaataagggctgtaaatattaaattt

SEQ ID NO: 39665 - DNA, 80 bp, synthetic construct
  misc_feature 1..80: note = Artificially Synthesized Probe
  source 1..80: mol_type = other DNA
gggtggacagagtagtgagtgagaagatggatgtgtggacagagtagtgagtgagaagatggatgggtgaacagttagag

SEQ ID NO: 39666 - DNA, 80 bp, synthetic construct
  misc_feature 1..80: note = Artificially Synthesized Probe
  source 1..80: mol_type = other DNA
atgaatgagtgaggaagtaggtgagtaggtagatgggtgggttggtgaatgtttgtatggttgtattgacgtatggacac

SEQ ID NO: 39667 - DNA, 80 bp, synthetic construct
  misc_feature 1..80: note = Artificially Synthesized Probe
  source 1..80: mol_type = other DNA
aacatagactggacatcatatgatattaaggggttacatcatatgatattaaggacatcatatgatattaatgttgttac

SEQ ID NO: 39668 - DNA, 80 bp, synthetic construct
  misc_feature 1..80: note = Artificially Synthesized Probe
  source 1..80: mol_type = other DNA
ttgagacagagtctcgctttttgcacaggctggaatgcaatggctagatctcggctcactgcaacccctgcgccccgggt

SEQ ID NO: 39669 - DNA, 80 bp, synthetic construct
  misc_feature 1..80: note = Artificially Synthesized Probe
  source 1..80: mol_type = other DNA
ctcaccaccatgcctggcttttttttttttttaacagatggactctcactatgttgcccaggctggtgttgaactcctgg

SEQ ID NO: 39670 - DNA, 80 bp, synthetic construct
  misc_feature 1..80: note = Artificially Synthesized Probe
  source 1..80: mol_type = other DNA
acagctaaacttttcataattaaaaaaaaaagaaaaatttggccgggcgcggtggctcatgcctgtaatcccagcacttt

SEQ ID NO: 39671 - DNA, 80 bp, synthetic construct
  misc_feature 1..80: note = Artificially Synthesized Probe
  source 1..80: mol_type = other DNA
ttgccctttgccttgtgatctttgttggaccctgatcagtagttccgttttttgccctttgaagcatgtgatctttgtac

SEQ ID NO: 39672 - DNA, 80 bp, synthetic construct
  misc_feature 1..80: note = Artificially Synthesized Probe
  source 1..80: mol_type = other DNA
ccaagatggtgaaatcccgtctctactaaaactacaaaaattagccgggcgtggtggtgggcgcctgtaatcccagttac

SEQ ID NO: 39673 - DNA, 80 bp, synthetic construct
  misc_feature 1..80: note = Artificially Synthesized Probe
  source 1..80: mol_type = other DNA
cagagaacagtcaagtatagggatttgtggttgggttcacaggctgaatttggactgaaagtaatatgtcaagatcaaag

SEQ ID NO: 39674 - DNA, 80 bp, synthetic construct
  misc_feature 1..80: note = Artificially Synthesized Probe
  source 1..80: mol_type = other DNA
ttttggtcaaattgtgggaaaattaaactctgatgacctgagaactactttctgctcataagtcttgattataattgcct

SEQ ID NO: 39675 - DNA, 80 bp, synthetic construct
  misc_feature 1..80: note = Artificially Synthesized Probe
  source 1..80: mol_type = other DNA
ggatcccccaggagccagcgcagggtcaaggccacagcgactggccacactggctgccccaggccccagagcaggagcag

SEQ ID NO: 39676 - DNA, 80 bp, synthetic construct
  misc_feature 1..80: note = Artificially Synthesized Probe
  source 1..80: mol_type = other DNA
acaacacttatcaggccctcctcggtacccagccctgtcacgaggcccagagaggagctgattcaagcttccacactggg

SEQ ID NO: 39677 - DNA, 80 bp, synthetic construct
  misc_feature 1..80: note = Artificially Synthesized Probe
  source 1..80: mol_type = other DNA
cacaggctgccttgccctctccagagaggatcatggggcttaatttgttgattgaatttgcttgtttggcccagatggtt

SEQ ID NO: 39678 - DNA, 80 bp, synthetic construct
  misc_feature 1..80: note = Artificially Synthesized Probe
  source 1..80: mol_type = other DNA
ccactgcgtgtacggattgacgggaaagattctaatgggctttaagttaataagctgggaacgaattaagtttgatctct

SEQ ID NO: 39679 - DNA, 80 bp, synthetic construct
  misc_feature 1..80: note = Artificially Synthesized Probe
  source 1..80: mol_type = other DNA
agtggctcgcacctgtaatcccagcgctttgggaggccaaggtgggtggaacacctgagaacaggagttcgagaccagct

SEQ ID NO: 39680 - DNA, 80 bp, synthetic construct
  misc_feature 1..80: note = Artificially Synthesized Probe
  source 1..80: mol_type = other DNA
aatggtaagatctcagctcagtgcaacctccgcctcccaggttcaagcaattctcctgcctcagcctcccaagcagctgg

SEQ ID NO: 39681 - DNA, 80 bp, synthetic construct
  misc_feature 1..80: note = Artificially Synthesized Probe
  source 1..80: mol_type = other DNA
gtggtggtgggtgcctgtaatcccagctacgtgggaggctgaggcaggagaatcgcttgaactggggaggcagagattgc

SEQ ID NO: 39682 - DNA, 80 bp, synthetic construct
  misc_feature 1..80: note = Artificially Synthesized Probe
  source 1..80: mol_type = other DNA
cccacccccacatccaggacaaggcagggatccccgttgaaagctctaggcttatgggaagcactggagcttgtgaactt

SEQ ID NO: 39683 - DNA, 80 bp, synthetic construct
  misc_feature 1..80: note = Artificially Synthesized Probe
  source 1..80: mol_type = other DNA
agaaaaacggaggctcccaggcaaagggagtcatgggaagcaacctagccagttctgatcccaagctgggaggagaaagg

SEQ ID NO: 39684 - DNA, 80 bp, synthetic construct
  misc_feature 1..80: note = Artificially Synthesized Probe
  source 1..80: mol_type = other DNA
gaggaatggggaggagggagagaggaggtagaaggggagggaggaggagggagagggggaagagaggaggaggaatgggg

SEQ ID NO: 39685 - DNA, 80 bp, synthetic construct
  misc_feature 1..80: note = Artificially Synthesized Probe
  source 1..80: mol_type = other DNA
gtggcagcttgtgcaactgttgaatgcctactgtgtgcagctgagcctaccccaccagccacccacccagtccctgtttg

SEQ ID NO: 39686 - DNA, 80 bp, synthetic construct
  misc_feature 1..80: note = Artificially Synthesized Probe
  source 1..80: mol_type = other DNA
ttcaaagccccagtgaggccccaggcccccttttaggccccagttaaaattctgtagtgagctagaagagggggacatgg

SEQ ID NO: 39687 - DNA, 80 bp, synthetic construct
  misc_feature 1..80: note = Artificially Synthesized Probe
  source 1..80: mol_type = other DNA
tcgggaggctgaggcagaagaatcgctggaacccaggagacggaggttgcagcgagccaagattgctccactgcactcca

SEQ ID NO: 39688 - DNA, 80 bp, synthetic construct
  misc_feature 1..80: note = Artificially Synthesized Probe
  source 1..80: mol_type = other DNA
tagaaaggacggtccccccaggggatacagtcccggccgcatggcatcaatgtggtgaaactgaggctcagagaggttta

SEQ ID NO: 39689 - DNA, 80 bp, synthetic construct
  misc_feature 1..80: note = Artificially Synthesized Probe
  source 1..80: mol_type = other DNA
agaggaggctctgtcttaacatgggcttttgtgctcactgggtgggtgaagggaccatggctcatgcgctgacccgtaca

SEQ ID NO: 39690 - DNA, 80 bp, synthetic construct
  misc_feature 1..80: note = Artificially Synthesized Probe
  source 1..80: mol_type = other DNA
aacacttgagcccaggagtttgaggccggcctgaacaacctggcaaaatctcgtctgtacaaaaaatacaaaaattagcc

SEQ ID NO: 39691 - DNA, 80 bp, synthetic construct
  misc_feature 1..80: note = Artificially Synthesized Probe
  source 1..80: mol_type = other DNA
agctccgcttcctgggttcacgccattctcctgcctcagcctcccgagtagctgggactacaggcgcccactaccatgcc

SEQ ID NO: 39692 - DNA, 80 bp, synthetic construct
  misc_feature 1..80: note = Artificially Synthesized Probe
  source 1..80: mol_type = other DNA
tgagcacctgctgtctctggccctctgcagggacctccatcgtgtttgacatgagcctcacctacatcttggtggcactg

SEQ ID NO: 39693 - DNA, 80 bp, synthetic construct
  misc_feature 1..80: note = Artificially Synthesized Probe
  source 1..80: mol_type = other DNA
ctggtttccctggtataaacagggcttcaaagactgttctgcctttgtcaccatgtcactgtttatcttgggcaatggct

SEQ ID NO: 39694 - DNA, 80 bp, synthetic construct
  misc_feature 1..80: note = Artificially Synthesized Probe
  source 1..80: mol_type = other DNA
atagcatttttttttttctgacccaacatcctctctagattcatacctttcctttaatccgggacggtccttcacccacc

SEQ ID NO: 39695 - DNA, 80 bp, synthetic construct
  misc_feature 1..80: note = Artificially Synthesized Probe
  source 1..80: mol_type = other DNA
gagaatcatgtgaacccaggaggcagaggttgcagtgagccgagatcgcaccactgcactccagcccagacgacagtgcg

SEQ ID NO: 39696 - DNA, 80 bp, synthetic construct
  misc_feature 1..80: note = Artificially Synthesized Probe
  source 1..80: mol_type = other DNA
aggtgataatggtgcctctgggttgttcctctctctctctcttaagtgcagcaatccagcttctacgggtacacggggat

SEQ ID NO: 39697 - DNA, 80 bp, synthetic construct
  misc_feature 1..80: note = Artificially Synthesized Probe
  source 1..80: mol_type = other DNA
ccacagcctgcccaccccaaggccctccctcccggcctcgtgaccctaatggcggcttccagcgcctcaaacatgagcac

SEQ ID NO: 39698 - DNA, 80 bp, synthetic construct
  misc_feature 1..80: note = Artificially Synthesized Probe
  source 1..80: mol_type = other DNA
acgaagctgctgctgcccgacgagcgcgccagcacgctcatcttcttcctggtgtcggtggcgctggagctgctgtgttt

SEQ ID NO: 39699 - DNA, 80 bp, synthetic construct
  misc_feature 1..80: note = Artificially Synthesized Probe
  source 1..80: mol_type = other DNA
ggcagacgtccttggggggctggggtgccttctggtggcagcagcactgcacagccccccaggctcagggccggcagctg

SEQ ID NO: 39700 - DNA, 80 bp, synthetic construct
  misc_feature 1..80: note = Artificially Synthesized Probe
  source 1..80: mol_type = other DNA
tctgcacacagtaggtaccacctgaatgtcagcgccagccccagtgcggctcttctgattgggcctggattcctggcccg

SEQ ID NO: 39701 - DNA, 80 bp, synthetic construct
  misc_feature 1..80: note = Artificially Synthesized Probe
  source 1..80: mol_type = other DNA
aaaaacaagcaaacgaacaaaaaaatcactcagccagccgtggtggtgcgtgcctatggtcccagctagtcgggaggctg

SEQ ID NO: 39702 - DNA, 80 bp, synthetic construct
  misc_feature 1..80: note = Artificially Synthesized Probe
  source 1..80: mol_type = other DNA
agaacagtcagtgtctgggaggccgtaggtgtggggacattctcagccacttcattcactcatttattcgttcgttcatc

SEQ ID NO: 39703 - DNA, 80 bp, synthetic construct
  misc_feature 1..80: note = Artificially Synthesized Probe
  source 1..80: mol_type = other DNA
gcccatgggacatcccaaattgttcctgatagggaggaagctgcaagtcggagagtggagatttttttttctttttagat

SEQ ID NO: 39704 - DNA, 80 bp, synthetic construct
  misc_feature 1..80: note = Artificially Synthesized Probe
  source 1..80: mol_type = other DNA
cctcaggctggtgttgtccacagggaacaccatgaccgtgtcctacatgtcagggctgacgctggggtccgccgtggcct

SEQ ID NO: 39705 - DNA, 80 bp, synthetic construct
  misc_feature 1..80: note = Artificially Synthesized Probe
  source 1..80: mol_type = other DNA
ggaggtaagtctgggggctacgaagccgggcccccacaccctggctgaagtcagcttgacctaggtcttgaccctcatcc

SEQ ID NO: 39706 - DNA, 80 bp, synthetic construct
  misc_feature 1..80: note = Artificially Synthesized Probe
  source 1..80: mol_type = other DNA
tacgcaccaccacacctggctaatttgtcttgtggagaccgggtttcaccatgttggccatgctggtctcgaactcctga

SEQ ID NO: 39707 - DNA, 80 bp, synthetic construct
  misc_feature 1..80: note = Artificially Synthesized Probe
  source 1..80: mol_type = other DNA
gccacccacactaaccaggtcagtcactgggcagccagacccccacctatagcttccctaggccccagtgcagagatgcc

SEQ ID NO: 39708 - DNA, 80 bp, synthetic construct
  misc_feature 1..80: note = Artificially Synthesized Probe
  source 1..80: mol_type = other DNA
tccgcctgccttggcctcccaaagtgctggcattacaggcgtgagccactgtgcccagccgatgagctcatttagatggc

SEQ ID NO: 39709 - DNA, 80 bp, synthetic construct
  misc_feature 1..80: note = Artificially Synthesized Probe
  source 1..80: mol_type = other DNA
gtaaatgtatccacataagcattaaaaagctataggaatgtatttactacaactgcagctgctgttaactacaaggcaaa

SEQ ID NO: 39710 - DNA, 80 bp, synthetic construct
  misc_feature 1..80: note = Artificially Synthesized Probe
  source 1..80: mol_type = other DNA
ttttttgggcggtcacagcgtgcaaaggatctatagcaaaggctctaaaaatcccacatttatttgttgtaccaacattt

SEQ ID NO: 39711 - DNA, 80 bp, synthetic construct
  misc_feature 1..80: note = Artificially Synthesized Probe
  source 1..80: mol_type = other DNA
gctctgatggcaccattgcactgcggcttggtcaagggaacaagaccctgtctctaaaaattaagtaaattaaaacaaaa

SEQ ID NO: 39712 - DNA, 80 bp, synthetic construct
  misc_feature 1..80: note = Artificially Synthesized Probe
  source 1..80: mol_type = other DNA
atttggatggacaggtctgggctcagaaggtgctctgtgatgtctattctctctggaataatgagacaagatcatccctg

SEQ ID NO: 39713 - DNA, 80 bp, synthetic construct
  misc_feature 1..80: note = Artificially Synthesized Probe
  source 1..80: mol_type = other DNA
tcagagtccttgtagggaggctgtgacttcaaaacatgattcatgcacatatgtggccaaggtttgcctaaccacaaagt

SEQ ID NO: 39714 - DNA, 80 bp, synthetic construct
  misc_feature 1..80: note = Artificially Synthesized Probe
  source 1..80: mol_type = other DNA
cggggaacagaacaagtactctgtatttaatcacattacacatacaatgaacatgcctactgctttttacaaacctgtga

SEQ ID NO: 39715 - DNA, 80 bp, synthetic construct
  misc_feature 1..80: note = Artificially Synthesized Probe
  source 1..80: mol_type = other DNA
tcacatctcctggggcgtggaaaattttcacatctaccatagcaaattatgtcagtggccaaaaggaagggatgagagaa

SEQ ID NO: 39716 - DNA, 80 bp, synthetic construct
  misc_feature 1..80: note = Artificially Synthesized Probe
  source 1..80: mol_type = other DNA
gctggtgcctaataaatgcttgcaggaaagaaatagagccagagggagggaaagagagaatgaaggagagaagggcggga

SEQ ID NO: 39717 - DNA, 80 bp, synthetic construct
  misc_feature 1..80: note = Artificially Synthesized Probe
  source 1..80: mol_type = other DNA
cttcctgcacttttctactcctcatctttccccaaatcctgttttagaagcagcaggttgaagtgtttgaaaacacagac

SEQ ID NO: 39718 - DNA, 80 bp, synthetic construct
  misc_feature 1..80: note = Artificially Synthesized Probe
  source 1..80: mol_type = other DNA
cggagttggaggaattgcttgagcccaggaatttgagaccaccctgagcaacatagacttcatctctacaaaaaaaaaaa

SEQ ID NO: 39719 - DNA, 80 bp, synthetic construct
  misc_feature 1..80: note = Artificially Synthesized Probe
  source 1..80: mol_type = other DNA
ttcctggccttcagagatgtttcaaaatgtatgagagcatttttggttgtcacaataatttgggagtgctactggcattc

SEQ ID NO: 39720 - DNA, 80 bp, synthetic construct
  misc_feature 1..80: note = Artificially Synthesized Probe
  source 1..80: mol_type = other DNA
agatggcaaggatcaagtattttcattccggaatgcccaaaggccaacagagtggagttgcatcttaacacagaaataag

SEQ ID NO: 39721 - DNA, 80 bp, synthetic construct
  misc_feature 1..80: note = Artificially Synthesized Probe
  source 1..80: mol_type = other DNA
tggggattagaggtaagcatctttgggggccatttctctgtctaccacaagatttccttaaattgcccatggatttgcag

SEQ ID NO: 39722 - DNA, 80 bp, synthetic construct
  misc_feature 1..80: note = Artificially Synthesized Probe
  source 1..80: mol_type = other DNA
atgaagagagaaggaaatgtctgtttagaggtccggagttaacctcatccttttggagctaagatactgactgtgagagg

SEQ ID NO: 39723 - DNA, 80 bp, synthetic construct
  misc_feature 1..80: note = Artificially Synthesized Probe
  source 1..80: mol_type = other DNA
gatgattgtgttgtaatttatttaactagtctcgggctgaaggtcatttggattgtttccaatctcttactataataaac

SEQ ID NO: 39724 - DNA, 80 bp, synthetic construct
  misc_feature 1..80: note = Artificially Synthesized Probe
  source 1..80: mol_type = other DNA
taatatctcaaagttttttttgttttttgttttttgttttgagacggagtcttgctgtcgctcagcctggagtgcactgg

SEQ ID NO: 39725 - DNA, 80 bp, synthetic construct
  misc_feature 1..80: note = Artificially Synthesized Probe
  source 1..80: mol_type = other DNA
actgagccctcatgaatgggattacagactttattaaagaagctcaagggaactagttttacccctttttgcccttctgt

SEQ ID NO: 39726 - DNA, 80 bp, synthetic construct
  misc_feature 1..80: note = Artificially Synthesized Probe
  source 1..80: mol_type = other DNA
tcttccctcacccacctctcttctttttttttcagtccacagtgaagaccaaaagagacacagtgaaaggctacttcctg

SEQ ID NO: 39727 - DNA, 80 bp, synthetic construct
  misc_feature 1..80: note = Artificially Synthesized Probe
  source 1..80: mol_type = other DNA
gagggcaaaaatgaaagctactaggctgttaaggtcttggcctggaagtcacttctaccacattctgttggttaaagtaa

SEQ ID NO: 39728 - DNA, 80 bp, synthetic construct
  misc_feature 1..80: note = Artificially Synthesized Probe
  source 1..80: mol_type = other DNA
ttcagggatttaagaaaatgtcttttcagtcattagctgcccaataaactgagcatagattttggtggccacacatgata

SEQ ID NO: 39729 - DNA, 80 bp, synthetic construct
  misc_feature 1..80: note = Artificially Synthesized Probe
  source 1..80: mol_type = other DNA
atcaaactgtcaaaagtcaaagattcttgaaagcagcaagagaggaacaatccattacatacaggaagtcttcggctggg

SEQ ID NO: 39730 - DNA, 80 bp, synthetic construct
  misc_feature 1..80: note = Artificially Synthesized Probe
  source 1..80: mol_type = other DNA
ctagataatatctagcacaaaaggcaatggaggaatagaagaataagaaggacactagacatatattaattgcatggtaa

SEQ ID NO: 39731 - DNA, 80 bp, synthetic construct
  misc_feature 1..80: note = Artificially Synthesized Probe
  source 1..80: mol_type = other DNA
attaaacaacacacttctaaataaccaatgggccaaagaagaaatcacaagacaaattagaaaatactttgagattactg

SEQ ID NO: 39732 - DNA, 80 bp, synthetic construct
  misc_feature 1..80: note = Artificially Synthesized Probe
  source 1..80: mol_type = other DNA
ttagtaatcacaaaacttctcacaaagaaaaagaccaagcaccaaggatcaagatggcttcaacgataaactcttccaaa

SEQ ID NO: 39733 - DNA, 80 bp, synthetic construct
  misc_feature 1..80: note = Artificially Synthesized Probe
  source 1..80: mol_type = other DNA
cctcctttcccctcctcactggatctgcctttttttttttttttgagacggagtctctgtcgtccaggctggagtgcagt

SEQ ID NO: 39734 - DNA, 80 bp, synthetic construct
  misc_feature 1..80: note = Artificially Synthesized Probe
  source 1..80: mol_type = other DNA
tcttggggaagaagaatctcattctaatgtaaacaaaaatgccagataggctaggggtggccctgccttcctctacttct

SEQ ID NO: 39735 - DNA, 80 bp, synthetic construct
  misc_feature 1..80: note = Artificially Synthesized Probe
  source 1..80: mol_type = other DNA
cagtagtttttgactttgtttgctacctctgagatactcaagggataagatacactctcgtatatagcagggctcatttg

SEQ ID NO: 39736 - DNA, 80 bp, synthetic construct
  misc_feature 1..80: note = Artificially Synthesized Probe
  source 1..80: mol_type = other DNA
ttatgagggtcaaatgaattaatgcttgtaaagggtgcagagaggcgcctggcatacagtactcattaagtatcatcttc

SEQ ID NO: 39737 - DNA, 80 bp, synthetic construct
  misc_feature 1..80: note = Artificially Synthesized Probe
  source 1..80: mol_type = other DNA
aatcttggctcacctggtctcaccagcctccccagcagctaggaccacagatgcaagccaccacacccagctaatttttg

SEQ ID NO: 39738 - DNA, 80 bp, synthetic construct
  misc_feature 1..80: note = Artificially Synthesized Probe
  source 1..80: mol_type = other DNA
tgcttttatttacagttttaattctgcatacctgaacaatgcagttgaattttactttttttggtgaagggtgggtcata

SEQ ID NO: 39739 - DNA, 80 bp, synthetic construct
  misc_feature 1..80: note = Artificially Synthesized Probe
  source 1..80: mol_type = other DNA
cagcagtgtatgaaaattccctttcctgcaattcagcgtatccttggttacattttatattctccaacttaaagattctt

SEQ ID NO: 39740 - DNA, 80 bp, synthetic construct
  misc_feature 1..80: note = Artificially Synthesized Probe
  source 1..80: mol_type = other DNA
tagaaatggggtttcaccatgttgcccagtctggtctcaaactgcactcaagtgattccccttgccttagtctcccaaag

SEQ ID NO: 39741 - DNA, 80 bp, synthetic construct
  misc_feature 1..80: note = Artificially Synthesized Probe
  source 1..80: mol_type = other DNA
actccaagaaccctgccaacccttggataggactgttctcttcctcctggaattagacagtgatcagctgtttatccgat

SEQ ID NO: 39742 - DNA, 80 bp, synthetic construct
  misc_feature 1..80: note = Artificially Synthesized Probe
  source 1..80: mol_type = other DNA
tcactcctttaccctagataaaaagatttctcctgaccattatccaaaggaagggggttacctgataagataaagctttt

SEQ ID NO: 39743 - DNA, 80 bp, synthetic construct
  misc_feature 1..80: note = Artificially Synthesized Probe
  source 1..80: mol_type = other DNA
aagagtgcctggcacgcagtagggccttgagaagtacctgtttttaaatatttattatctcatcttccactctattttca

SEQ ID NO: 39744 - DNA, 80 bp, synthetic construct
  misc_feature 1..80: note = Artificially Synthesized Probe
  source 1..80: mol_type = other DNA
gtacccaatgggtagtttttcaactggtatccccctccctctccctcctctagtagtccccaattcccttattcaagtcc

SEQ ID NO: 39745 - DNA, 80 bp, synthetic construct
  misc_feature 1..80: note = Artificially Synthesized Probe
  source 1..80: mol_type = other DNA
accatgatggagccggagagaaagagtgaagcgggaggtgctacacacttttttcttttcttttctttttgagatggaga

SEQ ID NO: 39746 - DNA, 80 bp, synthetic construct
  misc_feature 1..80: note = Artificially Synthesized Probe
  source 1..80: mol_type = other DNA
ctcattgtggtagtgatttgtttttgtttgattgtttgtttgtttgtttttctttttttgagacagggtctccctctgtt

SEQ ID NO: 39747 - DNA, 80 bp, synthetic construct
  misc_feature 1..80: note = Artificially Synthesized Probe
  source 1..80: mol_type = other DNA
caccggctatttggtgaaagactgaacaaaatgatccccacagtgcctggcatatgagagattctcatcactgttaatat

SEQ ID NO: 39748 - DNA, 80 bp, synthetic construct
  misc_feature 1..80: note = Artificially Synthesized Probe
  source 1..80: mol_type = other DNA
cccaccctgggcaacatagcaagactccatctctagagaaaagttaaaaattagccaggcatggtggctcatgcttatag

SEQ ID NO: 39749 - DNA, 80 bp, synthetic construct
  misc_feature 1..80: note = Artificially Synthesized Probe
  source 1..80: mol_type = other DNA
caaaatgggcgtgcacacagggaggagtgatcgtggccatctttgcaatcagtcagcactaagaaatctcccatcgggtc

SEQ ID NO: 39750 - DNA, 80 bp, synthetic construct
  misc_feature 1..80: note = Artificially Synthesized Probe
  source 1..80: mol_type = other DNA
agctttaaactctagcactagcccacacctagactttagcatttcatttcaaaatattcgcccaattcttcgtaccagct

SEQ ID NO: 39751 - DNA, 80 bp, synthetic construct
  misc_feature 1..80: note = Artificially Synthesized Probe
  source 1..80: mol_type = other DNA
cacaggtggatgtaaagagcagaacaaacgctaaagaaaatcaaacccaggatgaaaacaaataggagttcttttttttt

SEQ ID NO: 39752 - DNA, 80 bp, synthetic construct
  misc_feature 1..80: note = Artificially Synthesized Probe
  source 1..80: mol_type = other DNA
ttagaaggaggatgatatatctagctaggtgtgaagggtttgctgtgtcttaggcaaaatcgatgaacaagatctccagg

SEQ ID NO: 39753 - DNA, 80 bp, synthetic construct
  misc_feature 1..80: note = Artificially Synthesized Probe
  source 1..80: mol_type = other DNA
aagtacatggaataaaattccctattgaaagacaaggcttcttataagcagttacaatctgtgtggctgtttgttctgtt

SEQ ID NO: 39754 - DNA, 80 bp, synthetic construct
  misc_feature 1..80: note = Artificially Synthesized Probe
  source 1..80: mol_type = other DNA
tacttagaaatttaatagccatcttctaaatagtgcctgggtcacaaaggaagtaaaagctgcaattacagactatgcag

SEQ ID NO: 39755 - DNA, 80 bp, synthetic construct
  misc_feature 1..80: note = Artificially Synthesized Probe
  source 1..80: mol_type = other DNA
cactccagcctgggtgacagagtgagaccctgtctctaagaacaaaacaaaacaacaaaacctgaaaccattattagacc

SEQ ID NO: 39756 - DNA, 80 bp, synthetic construct
  misc_feature 1..80: note = Artificially Synthesized Probe
  source 1..80: mol_type = other DNA
caagtgtagatgattttagggaggtagtaaattatttttgggagaattcaatgggcttaaataacatacaatggcatggg

SEQ ID NO: 39757 - DNA, 80 bp, synthetic construct
  misc_feature 1..80: note = Artificially Synthesized Probe
  source 1..80: mol_type = other DNA
tctctcatttgcgttttccctgcttccttgactacttcctcctttccattgctctacatgctattttatttcttcctctg

SEQ ID NO: 39758 - DNA, 80 bp, synthetic construct
  misc_feature 1..80: note = Artificially Synthesized Probe
  source 1..80: mol_type = other DNA
atatcattttaaaaagtagagtgaggtcaaggagattgagagtgtgggagtgcaatttaaaatggggtgacaggtggctc

SEQ ID NO: 39759 - DNA, 80 bp, synthetic construct
  misc_feature 1..80: note = Artificially Synthesized Probe
  source 1..80: mol_type = other DNA
cagtttaattaaagcaataatcatggcattggacattgatttgatgcaggagacttcagagaatgaaacccaggtctcat

SEQ ID NO: 39760 - DNA, 80 bp, synthetic construct
  misc_feature 1..80: note = Artificially Synthesized Probe
  source 1..80: mol_type = other DNA
ctgacctacagctctctgatccagtttccactatctaatcctactctcatctatttctatttcgttgacctgttggaact

SEQ ID NO: 39761 - DNA, 80 bp, synthetic construct
  misc_feature 1..80: note = Artificially Synthesized Probe
  source 1..80: mol_type = other DNA
caaacaaacaaacaaacaaaaaggaaccacttggctgggcacagtggctcacacctgtaatccccgcactttgggaggct

SEQ ID NO: 39762 - DNA, 80 bp, synthetic construct
  misc_feature 1..80: note = Artificially Synthesized Probe
  source 1..80: mol_type = other DNA
aggtcattaacaaaaactgcatatttcacactgtccttgagcacattgatgccttcgggcaactgtctctgacaaggtac

SEQ ID NO: 39763 - DNA, 80 bp, synthetic construct
  misc_feature 1..80: note = Artificially Synthesized Probe
  source 1..80: mol_type = other DNA
ccccatctcttaaaaaaaaaaggcattttaaaaaatttacatgatggggagtccagaggtggctaatggcaatggaagca

SEQ ID NO: 39764 - DNA, 80 bp, synthetic construct
  misc_feature 1..80: note = Artificially Synthesized Probe
  source 1..80: mol_type = other DNA
gaccacagggactgagcataggaaagagatgtttcttcaaacagaagcttggcaaaccaagatcctaagtctcctacaac

SEQ ID NO: 39765 - DNA, 80 bp, synthetic construct
  misc_feature 1..80: note = Artificially Synthesized Probe
  source 1..80: mol_type = other DNA
gtagctgggactacaggtgcccgtcaccatgcccagctaattttttgcacttttagtagagacagggtttcaccatgtta

SEQ ID NO: 39766 - DNA, 80 bp, synthetic construct
  misc_feature 1..80: note = Artificially Synthesized Probe
  source 1..80: mol_type = other DNA
tctcatgtgaaagtttgtcccttactttagtgtttgagctcagtggttgggttgggtaactttggcccagtgaaatcctt

SEQ ID NO: 39767 - DNA, 80 bp, synthetic construct
  misc_feature 1..80: note = Artificially Synthesized Probe
  source 1..80: mol_type = other DNA
ggaagatccagagggagttaagaactgggatctgggttttgcagtgatttggaaaatatacagctgttcagcaagtcttg

SEQ ID NO: 39768 - DNA, 80 bp, synthetic construct
  misc_feature 1..80: note = Artificially Synthesized Probe
  source 1..80: mol_type = other DNA
gcttaaagcagctcctggcacacagtaagctctatccaagtgtttactattattattttatacatgtattacctcatttc

SEQ ID NO: 39769 - DNA, 80 bp, synthetic construct
  misc_feature 1..80: note = Artificially Synthesized Probe
  source 1..80: mol_type = other DNA
gtgactttctgggagttactgagctagtgccagatgagccaggatttgaatccagatgtagctgattctaaaacttgact

SEQ ID NO: 39770 - DNA, 80 bp, synthetic construct
  misc_feature 1..80: note = Artificially Synthesized Probe
  source 1..80: mol_type = other DNA
tgtggtccccagcccagcagtggctcctgggaacttgttagaagtgcaaactttcagtcccgattcaaaaccttctgaat

SEQ ID NO: 39771 - DNA, 80 bp, synthetic construct
  misc_feature 1..80: note = Artificially Synthesized Probe
  source 1..80: mol_type = other DNA
gaagtccaagctcagaaaatgccagacgtttataaaaccatcagatctcatgagaactcactcactatcatgagtacaca

SEQ ID NO: 39772 - DNA, 80 bp, synthetic construct
  misc_feature 1..80: note = Artificially Synthesized Probe
  source 1..80: mol_type = other DNA
agcttcatccatgagaaatggcacatatttttaaataaactatatggaaattaagagagaagcaaaacaaccctcaaaac

SEQ ID NO: 39773 - DNA, 80 bp, synthetic construct
  misc_feature 1..80: note = Artificially Synthesized Probe
  source 1..80: mol_type = other DNA
tataggaaatgattcattaaccaggacaggtgagcagatgttactgaacagtgagttaatgatcatggacggatcacttg

SEQ ID NO: 39774 - DNA, 80 bp, synthetic construct
  misc_feature 1..80: note = Artificially Synthesized Probe
  source 1..80: mol_type = other DNA
taatgtcccttcactcctgaatcaagtcccctggagcacccagaaaggagatcaccggatgggctctgatccaaggcagg

SEQ ID NO: 39775 - DNA, 80 bp, synthetic construct
  misc_feature 1..80: note = Artificially Synthesized Probe
  source 1..80: mol_type = other DNA
ttaaaagagacagagagagggaaagaggagtaaatgttcagatgatgctaatttgtgcctctcgccgccggcaccagggt

SEQ ID NO: 39776 - DNA, 80 bp, synthetic construct
  misc_feature 1..80: note = Artificially Synthesized Probe
  source 1..80: mol_type = other DNA
aaaaaaaaaaagcaatgagaggttctcatgaaaagtatcttgatgcattttttgttattgaacagggaagctaaattaag

SEQ ID NO: 39777 - DNA, 80 bp, synthetic construct
  misc_feature 1..80: note = Artificially Synthesized Probe
  source 1..80: mol_type = other DNA
ctgcagtgagctatgaccatgccactgcactcccacctgggtgacagaacaagagcctgtctttaaaaaaaaaaaaaaaa

SEQ ID NO: 39778 - DNA, 80 bp, synthetic construct
  misc_feature 1..80: note = Artificially Synthesized Probe
  source 1..80: mol_type = other DNA
ggttcaagaaaacacgtctaaaacccacagctgtgagtagcttctctcctcagttacagcaagaaggagtacgtgttaaa

SEQ ID NO: 39779 - DNA, 80 bp, synthetic construct
  misc_feature 1..80: note = Artificially Synthesized Probe
  source 1..80: mol_type = other DNA
ttgcttagtgtggggtgaacccaggggtccaaactctgtttctcttcagtgctccatttttttaatgaaagaaaaaataa

SEQ ID NO: 39780 - DNA, 80 bp, synthetic construct
  misc_feature 1..80: note = Artificially Synthesized Probe
  source 1..80: mol_type = other DNA
cgacacaggatgtagggacaggcatgaatcactgctctcagggagccgacgtacaacatcacgcatggacacccaggtct

SEQ ID NO: 39781 - DNA, 80 bp, synthetic construct
  misc_feature 1..80: note = Artificially Synthesized Probe
  source 1..80: mol_type = other DNA
cctcccttaaactcagctgctccacgctggggcaaagctggggaggcccccacctggggtgctgctgaggagggagaaca

SEQ ID NO: 39782 - DNA, 80 bp, synthetic construct
  misc_feature 1..80: note = Artificially Synthesized Probe
  source 1..80: mol_type = other DNA
acttttcctctgagctttacaccaggttgtcaatttccagaagagattcttcggcgctcccttggccctgtgctgctttc

SEQ ID NO: 39783 - DNA, 80 bp, synthetic construct
  misc_feature 1..80: note = Artificially Synthesized Probe
  source 1..80: mol_type = other DNA
acaacactctggttgattttttatctacatttatgcccacgtggcagtctacatacggctttaatgcagccgctgtacca

SEQ ID NO: 39784 - DNA, 80 bp, synthetic construct
  misc_feature 1..80: note = Artificially Synthesized Probe
  source 1..80: mol_type = other DNA
gaggctggcttgggggtgtccccccattcacatgggagcctggccctgagaaaggcaggtatgctgactccctgccatga

SEQ ID NO: 39785 - DNA, 80 bp, synthetic construct
  misc_feature 1..80: note = Artificially Synthesized Probe
  source 1..80: mol_type = other DNA
ctgtgaggccaccaggactgagacgcagcatgcagacacaggggcctcttcagcagcgtagtgatgcccatggaaccagg

SEQ ID NO: 39786 - DNA, 80 bp, synthetic construct
  misc_feature 1..80: note = Artificially Synthesized Probe
  source 1..80: mol_type = other DNA
aatgctggtccctcagcaaacgcaacacaggggtcacgcttagaccccaagtcctagtccagggccggctgcctcctttt

SEQ ID NO: 39787 - DNA, 80 bp, synthetic construct
  misc_feature 1..80: note = Artificially Synthesized Probe
  source 1..80: mol_type = other DNA
agcacacgtgcagtccagttcttatgacctccacgctgtgctgtgcttccctgccaggtccggaccaccgaggtcccctt

SEQ ID NO: 39788 - DNA, 80 bp, synthetic construct
  misc_feature 1..80: note = Artificially Synthesized Probe
  source 1..80: mol_type = other DNA
gagatagagaccatcctggctaacatggtgaaaccccgtctctactaaaaatacaaaaaattagccaggcctggtggcag

SEQ ID NO: 39789 - DNA, 80 bp, synthetic construct
  misc_feature 1..80: note = Artificially Synthesized Probe
  source 1..80: mol_type = other DNA
ccacatttccccagtcaagtgtcccagaaatgggctgcagtgggtcctgagagatgtcacgggagcctgctgttgtcaga

SEQ ID NO: 39790 - DNA, 80 bp, synthetic construct
  misc_feature 1..80: note = Artificially Synthesized Probe
  source 1..80: mol_type = other DNA
ctctgaaactgactttgttttaaaatagccactccagatttctttgggctatgttaacagagtgtattttttccatcctt

SEQ ID NO: 39791 - DNA, 80 bp, synthetic construct
  misc_feature 1..80: note = Artificially Synthesized Probe
  source 1..80: mol_type = other DNA
aagaagagttcttaccctgtattctctagtgtgtgctatcatctccagtctggtatcacacatgtgtggattcttttcaa

SEQ ID NO: 39792 - DNA, 80 bp, synthetic construct
  misc_feature 1..80: note = Artificially Synthesized Probe
  source 1..80: mol_type = other DNA
aaggatatggtcagaaacgagggtgaccaggagagaggcaagtggaggtgggtggcttgggagagggaggccagggaggg

SEQ ID NO: 39793 - DNA, 80 bp, synthetic construct
  misc_feature 1..80: note = Artificially Synthesized Probe
  source 1..80: mol_type = other DNA
aagtggacatggatgtgaggggtcaggggaggagggacagggttctgggagaggctggctggggactggatgtccctgct

SEQ ID NO: 39794 - DNA, 80 bp, synthetic construct
  misc_feature 1..80: note = Artificially Synthesized Probe
  source 1..80: mol_type = other DNA
ctgactcattccagatgcacattctccagaacccccgggtgtggctggacgcagccacccagatattcttctctctgtcc

SEQ ID NO: 39795 - DNA, 80 bp, synthetic construct
  misc_feature 1..80: note = Artificially Synthesized Probe
  source 1..80: mol_type = other DNA
ccatcgctgtcttctctgtcctggggttcaaagcaactaatgactacgagcactgcctggacaggtgagcacaggtgccg

SEQ ID NO: 39796 - DNA, 80 bp, synthetic construct
  misc_feature 1..80: note = Artificially Synthesized Probe
  source 1..80: mol_type = other DNA
ggcagcacgtcagcactgcacctgatggcacttttcaacggggacgtcaccaagaaaacgcacacaaaagtggaaaacat

SEQ ID NO: 39797 - DNA, 80 bp, synthetic construct
  misc_feature 1..80: note = Artificially Synthesized Probe
  source 1..80: mol_type = other DNA
gggggagtgctccccttccaaacccaggggggtagagaacagcttctcccctcacccggcagtgtgcatggagtaaacca

SEQ ID NO: 39798 - DNA, 80 bp, synthetic construct
  misc_feature 1..80: note = Artificially Synthesized Probe
  source 1..80: mol_type = other DNA
cagagttgcgcttgcagcctcgtctcccagaaggcatggccagccctgagccacctcagcccgacaccaggaggggtgat

SEQ ID NO: 39799 - DNA, 80 bp, synthetic construct
  misc_feature 1..80: note = Artificially Synthesized Probe
  source 1..80: mol_type = other DNA
ttttcgacaattttgccgcttccccgaacctgctcatgttggcctttctcgaggttgtgggtgtcgtttatgtttatgga

SEQ ID NO: 39800 - DNA, 80 bp, synthetic construct
  misc_feature 1..80: note = Artificially Synthesized Probe
  source 1..80: mol_type = other DNA
ggttgtgcacagacccctactgccacccagtgggtcagtttggctggaggccgtttccacacaaaagcctcccgaggaga

SEQ ID NO: 39801 - DNA, 80 bp, synthetic construct
  misc_feature 1..80: note = Artificially Synthesized Probe
  source 1..80: mol_type = other DNA
caggagaagctctacccgggctgggcgcgcgccgcctgtgtgctgctgtccttgctgcccgtgctgtgggtcccggtggc

SEQ ID NO: 39802 - DNA, 80 bp, synthetic construct
  misc_feature 1..80: note = Artificially Synthesized Probe
  source 1..80: mol_type = other DNA
gcttttggccaacatccttcactcagtattgctaattattcttgtaaacaaaaactgcaatatcagcaagcaggctcgcg

SEQ ID NO: 39803 - DNA, 80 bp, synthetic construct
  misc_feature 1..80: note = Artificially Synthesized Probe
  source 1..80: mol_type = other DNA
ccatttcaccttctgcacagctaaaccaagcaggacacttggctttttaatatgggcaaagtaaatggtctaggaagcta

SEQ ID NO: 39804 - DNA, 80 bp, synthetic construct
  misc_feature 1..80: note = Artificially Synthesized Probe
  source 1..80: mol_type = other DNA
agtgtgcttcataaacatttccaaacaggggcatgcggggcttgcttctgacaaaaccacgccggccatggaaagccact

SEQ ID NO: 39805 - DNA, 80 bp, synthetic construct
  misc_feature 1..80: note = Artificially Synthesized Probe
  source 1..80: mol_type = other DNA
tggaataatagggatcgaatttaccctactgtccgaaacaagccccaaataaacaaaacacacgtgccgatgaccttcca

SEQ ID NO: 39806 - DNA, 80 bp, synthetic construct
  misc_feature 1..80: note = Artificially Synthesized Probe
  source 1..80: mol_type = other DNA
agtgcctagttttcctgctgtgggctcacaagggtctgtttgttacggtgacaaattaataatttaaaaatggccacatg

SEQ ID NO: 39807 - DNA, 80 bp, synthetic construct
  misc_feature 1..80: note = Artificially Synthesized Probe
  source 1..80: mol_type = other DNA
aaaagagagaaatagatttgaacaatcatagcatgttcatcagtaggaggaagatttaagtccttataatgggatggggt

SEQ ID NO: 39808 - DNA, 80 bp, synthetic construct
  misc_feature 1..80: note = Artificially Synthesized Probe
  source 1..80: mol_type = other DNA
aatatactatcgaggaagaatatgccacaggcatctctcaattactcatggtcaagcacccctaaagttgacaaagtgta

SEQ ID NO: 39809 - DNA, 80 bp, synthetic construct
  misc_feature 1..80: note = Artificially Synthesized Probe
  source 1..80: mol_type = other DNA
accagaacctgacttgcaggtaggaggaacaagctgtgcagatgtgtgctcagaggcggcttctccccactgcctcccgg

SEQ ID NO: 39810 - DNA, 80 bp, synthetic construct
  misc_feature 1..80: note = Artificially Synthesized Probe
  source 1..80: mol_type = other DNA
tctcgggtgcaatggcgtaggccagtttctgaaagagaaagagagtgcaggggtcagtgcagaccagtacccactgccag

SEQ ID NO: 39811 - DNA, 80 bp, synthetic construct
  misc_feature 1..80: note = Artificially Synthesized Probe
  source 1..80: mol_type = other DNA
tcagagtttggccatgcgaggggtaagggcgctggctgttcaggtccgccgggctgtaggcatcctccagctctgcgctg

SEQ ID NO: 39812 - DNA, 80 bp, synthetic construct
  misc_feature 1..80: note = Artificially Synthesized Probe
  source 1..80: mol_type = other DNA
caggcacaagcacacacagacacatgcacacacagacacacacagacatgtggacatacttaaagacacacacatgaata

SEQ ID NO: 39813 - DNA, 80 bp, synthetic construct
  misc_feature 1..80: note = Artificially Synthesized Probe
  source 1..80: mol_type = other DNA
ccttcccaaggacacaagtgaagctctgatagatatggtttatgatgtagcttaaaatgcaattttttcccaattgtcca

SEQ ID NO: 39814 - DNA, 80 bp, synthetic construct
  misc_feature 1..80: note = Artificially Synthesized Probe
  source 1..80: mol_type = other DNA
caggggactatgccgcagcctgaagaaacagatgataacacagacgttatgtttctgctgaaatcagaacttcataggaa

SEQ ID NO: 39815 - DNA, 80 bp, synthetic construct
  misc_feature 1..80: note = Artificially Synthesized Probe
  source 1..80: mol_type = other DNA
agcctccaggcctctgtggttcagtgggggaagcactgcaggcaatccctaatgaaagtgtgcggccaccttccaacaaa

SEQ ID NO: 39816 - DNA, 80 bp, synthetic construct
  misc_feature 1..80: note = Artificially Synthesized Probe
  source 1..80: mol_type = other DNA
ctgtgtaaccgtcaccaccgtccatcttcagaactccatcctccaaaatgaaattctgccctcatgaaacgccaactcct

SEQ ID NO: 39817 - DNA, 80 bp, synthetic construct
  misc_feature 1..80: note = Artificially Synthesized Probe
  source 1..80: mol_type = other DNA
ggcacatcttattagagcacaggttttgtttcatttagatgagaggggcgtggatttctctttggaaaaataacacagat

SEQ ID NO: 39818 - DNA, 80 bp, synthetic construct
  misc_feature 1..80: note = Artificially Synthesized Probe
  source 1..80: mol_type = other DNA
agcatgtggggaaagggcagccctggctccaggctgggttttctgttgctgtttaaaccactggtggaagtcccaggaca

SEQ ID NO: 39819 - DNA, 80 bp, synthetic construct
  misc_feature 1..80: note = Artificially Synthesized Probe
  source 1..80: mol_type = other DNA
tgcacacaaattgtttcactcactgcaaaactctggtttgagtccctaaaattcaacccacatgcagcttcttagggcca

SEQ ID NO: 39820 - DNA, 80 bp, synthetic construct
  misc_feature 1..80: note = Artificially Synthesized Probe
  source 1..80: mol_type = other DNA
tgctgcacgggctcagcttggccagattttcctgagcaagatgcgtcccccacacaaagctttcagctgcacctggcctt

SEQ ID NO: 39821 - DNA, 80 bp, synthetic construct
  misc_feature 1..80: note = Artificially Synthesized Probe
  source 1..80: mol_type = other DNA
aaacagaacccgccctgcttgccacagagcccacgctgtgctctcccgcccatcctgccccaccccgccccgagaagcat

SEQ ID NO: 39822 - DNA, 80 bp, synthetic construct
  misc_feature 1..80: note = Artificially Synthesized Probe
  source 1..80: mol_type = other DNA
ttctaaaattagcaaaacatttagggatacattcctgacctccgccttccaggcacatgaggaagctgaggtcctcccac

SEQ ID NO: 39823 - DNA, 80 bp, synthetic construct
  misc_feature 1..80: note = Artificially Synthesized Probe
  source 1..80: mol_type = other DNA
gcatttatttgcagatgttccctttctcccgctttgactgaattttttttcctagtggaaagaacatgggcttaggaggc

SEQ ID NO: 39824 - DNA, 80 bp, synthetic construct
  misc_feature 1..80: note = Artificially Synthesized Probe
  source 1..80: mol_type = other DNA
acagctcattcctccccttccctgagctgcatgttcccacaccgcgtggcaagcaaacatctagagggccctcagtgaca

SEQ ID NO: 39825 - DNA, 80 bp, synthetic construct
  misc_feature 1..80: note = Artificially Synthesized Probe
  source 1..80: mol_type = other DNA
tcaggaaccagctgagctgcagcagctgcaattttccagtcattattcttaatttactgtgtctggggaagggggcggga

SEQ ID NO: 39826 - DNA, 80 bp, synthetic construct
  misc_feature 1..80: note = Artificially Synthesized Probe
  source 1..80: mol_type = other DNA
aatcaaaatcgtgttgggagctgcctcgctgtcgcttctgtctgaaaggccacgcagctcacaggtttgcgggttcagtg

SEQ ID NO: 39827 - DNA, 80 bp, synthetic construct
  misc_feature 1..80: note = Artificially Synthesized Probe
  source 1..80: mol_type = other DNA
aacaaccctcggaacagcacagattcatccacatgctgcataatggtggcaccctgataaccctcagaaagtcatgaact

SEQ ID NO: 39828 - DNA, 80 bp, synthetic construct
  misc_feature 1..80: note = Artificially Synthesized Probe
  source 1..80: mol_type = other DNA
ccattgtggtattttaaaaagtcagccacaacctgctaaggtgagggcactgcggagaccattcagtgactcagatgccc

SEQ ID NO: 39829 - DNA, 80 bp, synthetic construct
  misc_feature 1..80: note = Artificially Synthesized Probe
  source 1..80: mol_type = other DNA
gtgtgtgtatgtatctatctccatccatcctattgtatatccatcctatctacctacctatcatccatccatccacccat

SEQ ID NO: 39830 - DNA, 80 bp, synthetic construct
  misc_feature 1..80: note = Artificially Synthesized Probe
  source 1..80: mol_type = other DNA
cctattcttcctagctggagcactaggctctacgttgtccttgtggtatttttctttgattctgtaacatgccatggtcc

SEQ ID NO: 39831 - DNA, 80 bp, synthetic construct
  misc_feature 1..80: note = Artificially Synthesized Probe
  source 1..80: mol_type = other DNA
agctgcagcctgagtctagatggagtttctgatgtaatttgatttagatgactcgtgctgtatcacaggtacttgggatt

SEQ ID NO: 39832 - DNA, 80 bp, synthetic construct
  misc_feature 1..80: note = Artificially Synthesized Probe
  source 1..80: mol_type = other DNA
agtatttttatcaacaaaaaaatcatcttgtgtgtgccttcctgccagaaacactgctgtgagtgcttccctcctgaggc

SEQ ID NO: 39833 - DNA, 80 bp, synthetic construct
  misc_feature 1..80: note = Artificially Synthesized Probe
  source 1..80: mol_type = other DNA
gaggtctggcccacaggccctggcagaggtgtcagggccgcccttgaaacccgtggagcacgtgggaggcccaggaagcc

SEQ ID NO: 39834 - DNA, 80 bp, synthetic construct
  misc_feature 1..80: note = Artificially Synthesized Probe
  source 1..80: mol_type = other DNA
gctgggtacccactgctgcccacaagacagccccagggtccctctccagggatgaggccgagcaaactctagcaataatg

SEQ ID NO: 39835 - DNA, 80 bp, synthetic construct
  misc_feature 1..80: note = Artificially Synthesized Probe
  source 1..80: mol_type = other DNA
gggccttcttctcactcctcctgccacacaccaggctctgcccctgctggccagtccccgtcgttctgctcccccagcaa

SEQ ID NO: 39836 - DNA, 80 bp, synthetic construct
  misc_feature 1..80: note = Artificially Synthesized Probe
  source 1..80: mol_type = other DNA
gagggagccaaggcagtgaggtggtgaaacaagcttccaaaggataaaattgtgccaaagcacgttaacttcctattaga

SEQ ID NO: 39837 - DNA, 80 bp, synthetic construct
  misc_feature 1..80: note = Artificially Synthesized Probe
  source 1..80: mol_type = other DNA
aatgacagaccacttcacacccattaggatggctatgatcaaaacaaacaagcagaaagtaagtgttgtcaaggatgtgg

SEQ ID NO: 39838 - DNA, 80 bp, synthetic construct
  misc_feature 1..80: note = Artificially Synthesized Probe
  source 1..80: mol_type = other DNA
aaatggaaaccccaatctacatacaggaccggacagcactagagatggtgcctatgcaggtaaatataaaacatttcttt

SEQ ID NO: 39839 - DNA, 80 bp, synthetic construct
  misc_feature 1..80: note = Artificially Synthesized Probe
  source 1..80: mol_type = other DNA
ctctctgacatttatgcaactttccaaccaaagacagcagaatacatattctttctaggtgcatgtggaacattcaccag

SEQ ID NO: 39840 - DNA, 80 bp, synthetic construct
  misc_feature 1..80: note = Artificially Synthesized Probe
  source 1..80: mol_type = other DNA
aactcaatcccttttgtgtttactgacaaagtcaggcatgcccattatctaggacaaagagctgcactgtcacacatcac

SEQ ID NO: 39841 - DNA, 80 bp, synthetic construct
  misc_feature 1..80: note = Artificially Synthesized Probe
  source 1..80: mol_type = other DNA
ctccctcgagaatgttaaaatctacttggacaaatggtgtgactgtgcattatttggacaattttatcatttcccgcttg

SEQ ID NO: 39842 - DNA, 80 bp, synthetic construct
  misc_feature 1..80: note = Artificially Synthesized Probe
  source 1..80: mol_type = other DNA
caaaggcacctactggctgttaaaactggaattagtcttactggtcaaagttccttttcctaccttgaagtggactcatt

SEQ ID NO: 39843 - DNA, 80 bp, synthetic construct
  misc_feature 1..80: note = Artificially Synthesized Probe
  source 1..80: mol_type = other DNA
tacgctggcatgggaggtggaaagaggcccagagacagaaataaagccatgcaggtaaacaacaaaacaaagtcttgtga

SEQ ID NO: 39844 - DNA, 80 bp, synthetic construct
  misc_feature 1..80: note = Artificially Synthesized Probe
  source 1..80: mol_type = other DNA
cccagggacaccaaggtcacccccagccacatatggtcatccatccccaccacagccactcaggatccataagagtcatc

SEQ ID NO: 39845 - DNA, 80 bp, synthetic construct
  misc_feature 1..80: note = Artificially Synthesized Probe
  source 1..80: mol_type = other DNA
tcaaaaccatccacagccatctacagacatccacagccatccacagccatctgcatttgcccataactatctacggccac

SEQ ID NO: 39846 - DNA, 80 bp, synthetic construct
  misc_feature 1..80: note = Artificially Synthesized Probe
  source 1..80: mol_type = other DNA
caaaactttgttttaaacaaatctaagatcaggagtgcgggtaatcccccttggaaagcatgctcagtagtggtgacgat

SEQ ID NO: 39847 - DNA, 80 bp, synthetic construct
  misc_feature 1..80: note = Artificially Synthesized Probe
  source 1..80: mol_type = other DNA
acatcaccactggccacactggctgatgcggctcccagagcaaatgggcctgctctgatccatgggacagtgcagccccc

SEQ ID NO: 39848 - DNA, 80 bp, synthetic construct
  misc_feature 1..80: note = Artificially Synthesized Probe
  source 1..80: mol_type = other DNA
tgactataaaatattttatattcaatacaatcgaatggtggggtttccagggcgtctgtaaaatggggttgcccttggca

SEQ ID NO: 39849 - DNA, 80 bp, synthetic construct
  misc_feature 1..80: note = Artificially Synthesized Probe
  source 1..80: mol_type = other DNA
ctggtgagactacgggaaatgcacgtgagtcatggctgctgagcagctgggcctcaccatgaactccgccctctggcttt

SEQ ID NO: 39850 - DNA, 80 bp, synthetic construct
  misc_feature 1..80: note = Artificially Synthesized Probe
  source 1..80: mol_type = other DNA
gctctgaaattcttagaaattgcttcttgacattttatggactacaccatgaagacccacaacggcagctttgttggtga

SEQ ID NO: 39851 - DNA, 80 bp, synthetic construct
  misc_feature 1..80: note = Artificially Synthesized Probe
  source 1..80: mol_type = other DNA
ctacctgcagatcccgccaaggggtcgtctggcaccagtgcatgcccaaagcatctgtctctcactctgaagatgtgtgt

SEQ ID NO: 39852 - DNA, 80 bp, synthetic construct
  misc_feature 1..80: note = Artificially Synthesized Probe
  source 1..80: mol_type = other DNA
aacaatggataacagatggatgaatggatagatgaatagatagaagatggatggatggatagatccatagatagatgaat

SEQ ID NO: 39853 - DNA, 80 bp, synthetic construct
  misc_feature 1..80: note = Artificially Synthesized Probe
  source 1..80: mol_type = other DNA
tagagcaagggaatgaactatccagtccttgtcactgcagatctttaaggtgggacccaagttcaagtggcgtgtgccat

SEQ ID NO: 39854 - DNA, 80 bp, synthetic construct
  misc_feature 1..80: note = Artificially Synthesized Probe
  source 1..80: mol_type = other DNA
ggctgggaggcccaaagaggctcctgggaagggatcaccaatgttcttggacgtccccggtggccctgcctcgatcttcg

SEQ ID NO: 39855 - DNA, 80 bp, synthetic construct
  misc_feature 1..80: note = Artificially Synthesized Probe
  source 1..80: mol_type = other DNA
cggagggcagagccccgaggcattcacgggcattcctctgggaagggatgggtgcgttctcagcgcctgagatggtacag

SEQ ID NO: 39856 - DNA, 80 bp, synthetic construct
  misc_feature 1..80: note = Artificially Synthesized Probe
  source 1..80: mol_type = other DNA
aagcaaaatcagccactgtaaagagagtttagacataaccatcacaactgcttcctcaaaaagtgtctgtacaagccaca

SEQ ID NO: 39857 - DNA, 80 bp, synthetic construct
  misc_feature 1..80: note = Artificially Synthesized Probe
  source 1..80: mol_type = other DNA
acacagacaaagcccccgcgagatggagcggcggtgtacaaaacccactccgatcggatctgggatgcgccgcaccccta

SEQ ID NO: 39858 - DNA, 80 bp, synthetic construct
  misc_feature 1..80: note = Artificially Synthesized Probe
  source 1..80: mol_type = other DNA
gtcagttttacccttctgtaaataaggatggtgatactgttatccaggcctaaaaagcaggaagtgcaacaaacccttag

SEQ ID NO: 39859 - DNA, 80 bp, synthetic construct
  misc_feature 1..80: note = Artificially Synthesized Probe
  source 1..80: mol_type = other DNA
tcaagagcctgattatcagttctcacatggaaatctcaacagatttcaaaagcaactcaccacaagtgtcagacacaaaa

SEQ ID NO: 39860 - DNA, 80 bp, synthetic construct
  misc_feature 1..80: note = Artificially Synthesized Probe
  source 1..80: mol_type = other DNA
aaagactttaatcttgagagagcagaggtaatgtgatgaatgtaatttgctcccagagcctctagaaaataaagcagtgt

SEQ ID NO: 39861 - DNA, 80 bp, synthetic construct
  misc_feature 1..80: note = Artificially Synthesized Probe
  source 1..80: mol_type = other DNA
aagcacttcacagactaataactgaacttaataaaagatgttggtggatctcattttcactgtttcatgtacatgtccta

SEQ ID NO: 39862 - DNA, 80 bp, synthetic construct
  misc_feature 1..80: note = Artificially Synthesized Probe
  source 1..80: mol_type = other DNA
gttgcatcaccaccgactgtggtgtggctttggatgcctgaggctgagttgattctggtggatgtctgacctcgcttaac

SEQ ID NO: 39863 - DNA, 80 bp, synthetic construct
  misc_feature 1..80: note = Artificially Synthesized Probe
  source 1..80: mol_type = other DNA
acctctcttgaccaaatgatctagcttatcaccaccaaagatggcacaaactgacatgtgtctcttgatgtaaaatactg

SEQ ID NO: 39864 - DNA, 80 bp, synthetic construct
  misc_feature 1..80: note = Artificially Synthesized Probe
  source 1..80: mol_type = other DNA
ttcagtgattttgtgcatgaaacaggttctgactagattttcactactgggatccatcaccaggtcaggcatggaacttt

SEQ ID NO: 39865 - DNA, 80 bp, synthetic construct
  misc_feature 1..80: note = Artificially Synthesized Probe
  source 1..80: mol_type = other DNA
agtggagcaagcacgggataggtggtagtggttgataccccaattaaataatcaactataaatccttatccttggacaca

SEQ ID NO: 39866 - DNA, 80 bp, synthetic construct
  misc_feature 1..80: note = Artificially Synthesized Probe
  source 1..80: mol_type = other DNA
acattaggtatatctcctaatgctatccctctcctgtccccccacccacaacaagccccggtgtgagatgttccccttcc

SEQ ID NO: 39867 - DNA, 80 bp, synthetic construct
  misc_feature 1..80: note = Artificially Synthesized Probe
  source 1..80: mol_type = other DNA
tgcgccactgcactccagcctgggcgactgagtgagactcatctcaaaaaaaaaaaaaaaaattaaattaaattaaaaaa

SEQ ID NO: 39868 - DNA, 80 bp, synthetic construct
  misc_feature 1..80: note = Artificially Synthesized Probe
  source 1..80: mol_type = other DNA
ggatggctgataagtagcagatgacgttggactcgaacattcatttgttgcatcggtgactaagggtgatgcaaaactca

SEQ ID NO: 39869 - DNA, 80 bp, synthetic construct
  misc_feature 1..80: note = Artificially Synthesized Probe
  source 1..80: mol_type = other DNA
atgatgaagtaatagccttttctggaggcttagttttcttacttactagactatgtacaacactggagggaagagacaac

SEQ ID NO: 39870 - DNA, 80 bp, synthetic construct
  misc_feature 1..80: note = Artificially Synthesized Probe
  source 1..80: mol_type = other DNA
ttcatcttccataagccctctttctcctgctctattttcagtgcattggaatcatttgctacatatcgtctttctcctcc

SEQ ID NO: 39871 - DNA, 80 bp, synthetic construct
  misc_feature 1..80: note = Artificially Synthesized Probe
  source 1..80: mol_type = other DNA
ctccacaataaagctgttatattcagctgcaatttgtgttacagccacaattcagaagacacttctgtcagaatgttccc

SEQ ID NO: 39872 - DNA, 80 bp, synthetic construct
  misc_feature 1..80: note = Artificially Synthesized Probe
  source 1..80: mol_type = other DNA
gtatgagtatcatgtattagtccaattttgtacttagttgaaaatgtccgtaatagtttttttggttctcctccccctgc

SEQ ID NO: 39873 - DNA, 80 bp, synthetic construct
  misc_feature 1..80: note = Artificially Synthesized Probe
  source 1..80: mol_type = other DNA
aatacttgattcaagtgcagctagcttctcctataaaagccagcagaatcttggtgaaggtatatgacattctctacttc

SEQ ID NO: 39874 - DNA, 80 bp, synthetic construct
  misc_feature 1..80: note = Artificially Synthesized Probe
  source 1..80: mol_type = other DNA
acgaggaaagtttaatgtaacaaagttatttgattatttattcaacatttcaggtggacgcattcacattttctctcccc

SEQ ID NO: 39875 - DNA, 80 bp, synthetic construct
  misc_feature 1..80: note = Artificially Synthesized Probe
  source 1..80: mol_type = other DNA
tattctcactcataggtgggaattgaacaatgagatcacatggacacaggaaggggaatatcacactctggggactgtgg

SEQ ID NO: 39876 - DNA, 80 bp, synthetic construct
  misc_feature 1..80: note = Artificially Synthesized Probe
  source 1..80: mol_type = other DNA
tgacaaacctgagaaaaacaagaaatggggaaaggattccctatttaataaatggtgctgggaaaactggctagccatat

SEQ ID NO: 39877 - DNA, 80 bp, synthetic construct; identical to SEQ ID NO: 34969
  misc_feature 1..80: note = Artificially Synthesized Probe
  source 1..80: mol_type = other DNA

SEQ ID NO: 39878 - DNA, 80 bp, synthetic construct
  misc_feature 1..80: note = Artificially Synthesized Probe
  source 1..80: mol_type = other DNA
tctcttttgatctttgttggtttgaagtctgttttatcagagactaggattgcaacccctgcctttttttgttttccatt

SEQ ID NO: 39879 - DNA, 80 bp, synthetic construct; identical to SEQ ID NO: 30696
  misc_feature 1..80: note = Artificially Synthesized Probe
  source 1..80: mol_type = other DNA

SEQ ID NO: 39880 - DNA, 80 bp, synthetic construct
  misc_feature 1..80: note = Artificially Synthesized Probe
  source 1..80: mol_type = other DNA
gaaagacttcttgaggtagaacatggctaataaatttcttggatcactcacatgcaccatttaaatagtaattctgaaga

SEQ ID NO: 39881 - DNA, 80 bp, synthetic construct
  misc_feature 1..80: note = Artificially Synthesized Probe
  source 1..80: mol_type = other DNA
ccgctttcttacagagatcatcaacagaaactttgctttcggcaccaaagtcctttgcctctacttgagcaatgatgtct

SEQ ID NO: 39882 - DNA, 80 bp, synthetic construct
  misc_feature 1..80: note = Artificially Synthesized Probe
  source 1..80: mol_type = other DNA
aggagttaaaaccttcgctgaaaagtaatgcctttggtgggaacatacaaagtcagtacatctcacagctgcatgctgtg

SEQ ID NO: 39883 - DNA, 80 bp, synthetic construct
  misc_feature 1..80: note = Artificially Synthesized Probe
  source 1..80: mol_type = other DNA
ctgaaacaaggcacagacaggctgccatagatccaggcacaaagtttgttacccaaagtacacatttaggtaaacattcc

SEQ ID NO: 39884 - DNA, 80 bp, synthetic construct
  misc_feature 1..80: note = Artificially Synthesized Probe
  source 1..80: mol_type = other DNA
ttagctctgagtacaatgcatgtctgcaggaactgcccaaactctacagattccaaagtcagattgcttttctggactaa

SEQ ID NO: 39885 - DNA, 80 bp, synthetic construct
  misc_feature 1..80: note = Artificially Synthesized Probe
  source 1..80: mol_type = other DNA
aacatcgatgtaatgagcatgtgtttcttcttccagtcccatagctgcgtttcttaagtaggcctgaagagattccacta

SEQ ID NO: 39886 - DNA, 80 bp, synthetic construct
  misc_feature 1..80: note = Artificially Synthesized Probe
  source 1..80: mol_type = other DNA
ctcacaattatcttccttttaaatgactggttgagcaacattcaaatggggaagtcaaattgctttcctgggttaaagag

SEQ ID NO: 39887 - DNA, 80 bp, synthetic construct
  misc_feature 1..80: note = Artificially Synthesized Probe
  source 1..80: mol_type = other DNA
ggtccaatatgaagttggctaacttaccttgtaagggtacaaagggcagaaataataacacttgctagactcaaagatcc

SEQ ID NO: 39888 - DNA, 80 bp, synthetic construct
  misc_feature 1..80: note = Artificially Synthesized Probe
  source 1..80: mol_type = other DNA
ctccatctctacaaaaaaatataaaaattgttcaggcgtggtgacacacgcccgtggtcccagctacttgggaggctgaa

SEQ ID NO: 39889 - DNA, 80 bp, synthetic construct
  misc_feature 1..80: note = Artificially Synthesized Probe
  source 1..80: mol_type = other DNA
gtcccttacttctctgtttttcctgaccctgtgattccctcaaccatgctcatgacattttaattaaaactgccacatct

SEQ ID NO: 39890 - DNA, 80 bp, synthetic construct
  misc_feature 1..80: note = Artificially Synthesized Probe
  source 1..80: mol_type = other DNA
actctatttcctccagtagtttgccctgcagtttttccacatctgtcagttgctcttgcaagcttaggtattcatctaag

SEQ ID NO: 39891 - DNA, 80 bp, synthetic construct
  misc_feature 1..80: note = Artificially Synthesized Probe
  source 1..80: mol_type = other DNA
tctactccagttacacccagtgctgtttcaatgttttgtgtcattcgaaaaggtactttctcaggaactctaaggctttt

SEQ ID NO: 39892 - DNA, 80 bp, synthetic construct
  misc_feature 1..80: note = Artificially Synthesized Probe
  source 1..80: mol_type = other DNA
ttgatgtacacattattctgtcacccaggtaatgaacatagtatccaacaggtattttttcctacctcaccctcctcctg

SEQ ID NO: 39893 - DNA, 80 bp, synthetic construct
  misc_feature 1..80: note = Artificially Synthesized Probe
  source 1..80: mol_type = other DNA
cagggccaattttactgtaataaagttcactaggacggggtacaattccaggattctgaggagtttggtaggaatcttgg

SEQ ID NO: 39894 - DNA, 80 bp, synthetic construct
  misc_feature 1..80: note = Artificially Synthesized Probe
  source 1..80: mol_type = other DNA
gaacaaccacacattccccctctccaaatttgtctcaagttaagataaacccaatgccatcacttttgcctcttatataa

SEQ ID NO: 39895 - DNA, 80 bp, synthetic construct
  misc_feature 1..80: note = Artificially Synthesized Probe
  source 1..80: mol_type = other DNA
attggcagtagatattagcattattagctgtacctcacttgtcctgcttgtacaagttcatacacaaagtgggggtggaa

SEQ ID NO: 39896 - DNA, 80 bp, synthetic construct
  misc_feature 1..80: note = Artificially Synthesized Probe
  source 1..80: mol_type = other DNA
caactatctgctgttcttatttctacatttaactcagtactgggatctgggccatcctggatgggttaacgctggtggcc

SEQ ID NO: 39897 - DNA, 80 bp, synthetic construct
  misc_feature 1..80: note = Artificially Synthesized Probe
  source 1..80: mol_type = other DNA
aattggaaacaccccaagtgcccaatgacaaaagaataaattgtggtattttcatataatagatcattgtttagctacac

SEQ ID NO: 39898 - DNA, 80 bp, synthetic construct
  misc_feature 1..80: note = Artificially Synthesized Probe
  source 1..80: mol_type = other DNA
ctcaaattcagtaaggaaatcagttaggagcaataaaggtaagagacagagaaaagagggagggagaaggaaaagctgga

SEQ ID NO: 39899 - DNA, 80 bp, synthetic construct
  misc_feature 1..80: note = Artificially Synthesized Probe
  source 1..80: mol_type = other DNA
caaagcaaatacgatgggcttcatcaaagctgtgtgcttctccctcatgattgcaattttctcttctctgaccaagaaga

SEQ ID NO: 39900 - DNA, 80 bp, synthetic construct
  misc_feature 1..80: note = Artificially Synthesized Probe
  source 1..80: mol_type = other DNA
tcatgaccccagacttggcaatgattccttggatatggcaccaaaagcacagacaaattaaattgagctacatcaaaatt

SEQ ID NO: 39901 - DNA, 80 bp, synthetic construct
  misc_feature 1..80: note = Artificially Synthesized Probe
  source 1..80: mol_type = other DNA
aatagagatggcaagtagaatagaggtggccaggaactgaggtgagggggaaatgaagagataatttttaatgagtacag

SEQ ID NO: 39902 - DNA, 80 bp, synthetic construct
  misc_feature 1..80: note = Artificially Synthesized Probe
  source 1..80: mol_type = other DNA
cactgataatctatttgactcaagagcactcattgaactcatttgccttccaggcatagaactgattaaagattgtggat

SEQ ID NO: 39903 - DNA, 80 bp, synthetic construct
  misc_feature 1..80: note = Artificially Synthesized Probe
  source 1..80: mol_type = other DNA
gagaaggttacaaatactttggcgcacatacacttcagggtggtttaagcgtgagaaaagttgcggaataattccttcag

SEQ ID NO: 39904 - DNA, 80 bp, synthetic construct
  misc_feature 1..80: note = Artificially Synthesized Probe
  source 1..80: mol_type = other DNA
tgtgctacatacttgaccagcgttgagtttaaggaaagtaaagtatgcactgcaagagagtttgtacaggctgaatattc

SEQ ID NO: 39905 - DNA, 80 bp, synthetic construct
  misc_feature 1..80: note = Artificially Synthesized Probe
  source 1..80: mol_type = other DNA
agatacgctgctgtttacagcaagaactgatcgatatagcttagcttggcaaataaaatccatgcctttgaggactgcaa

SEQ ID NO: 39906 - DNA, 80 bp, synthetic construct
  misc_feature 1..80: note = Artificially Synthesized Probe
  source 1..80: mol_type = other DNA
agacgaacaccttctccctgactataaaaataaacaagtcatcagtatttcagctacccaaactttaccatatcagcaga

SEQ ID NO: 39907 - DNA, 80 bp, synthetic construct
  misc_feature 1..80: note = Artificially Synthesized Probe
  source 1..80: mol_type = other DNA
gcactcaaacatggacagaatcaactaccctatttgtaaggtatctttgtgttactagcactagcaccagaatgggaaac

SEQ ID NO: 39908 - DNA, 80 bp, synthetic construct
  misc_feature 1..80: note = Artificially Synthesized Probe
  source 1..80: mol_type = other DNA
ggcctacagaaaaccacaaagtcagaacttagaacctttaaaagcaaatgatggagggaggcacttggattaggaaacaa

SEQ ID NO: 39909 - DNA, 80 bp, synthetic construct
  misc_feature 1..80: note = Artificially Synthesized Probe
  source 1..80: mol_type = other DNA
cacattccctcgttttctagcaaattttgctgctgttagacctaattccatgagatggcttctaattgggactgtttgtt

SEQ ID NO: 39910 - DNA, 80 bp, synthetic construct
  misc_feature 1..80: note = Artificially Synthesized Probe
  source 1..80: mol_type = other DNA
tctcttaggtgaactgagtcaactaagaatcattattttctctggcctgcacacgttttttctaaccaagtcagcctgcc

SEQ ID NO: 39911 - DNA, 80 bp, synthetic construct
  misc_feature 1..80: note = Artificially Synthesized Probe
  source 1..80: mol_type = other DNA
ctcaaaaaaaaaaaaaaacaggactggaaaggagatgagggtacttgtgaagccatattatatgacacgctctgtgctag

SEQ ID NO: 39912 - DNA, 80 bp, synthetic construct
  misc_feature 1..80: note = Artificially Synthesized Probe
  source 1..80: mol_type = other DNA
taaaatttttttaagttaagctacgtgacccaacaaggtgcattcactcgagagaaacacaaatatacgtccactcaaag

SEQ ID NO: 39913 - DNA, 80 bp, synthetic construct
  misc_feature 1..80: note = Artificially Synthesized Probe
  source 1..80: mol_type = other DNA
ccgcctaaaggaactgtctttacatacaccacctcccaccccgaaattagaaggaaaaaactgagcaatttgccatcctt

SEQ ID NO: 39914 - DNA, 80 bp, synthetic construct
  misc_feature 1..80: note = Artificially Synthesized Probe
  source 1..80: mol_type = other DNA
gatccggacttaacatgttaggaagcagttttttcatgtctaccaaagttaaataaaacgtcattaagttcatgtgcttt

SEQ ID NO: 39915 - DNA, 80 bp, synthetic construct
  misc_feature 1..80: note = Artificially Synthesized Probe
  source 1..80: mol_type = other DNA
aagacagcaaagtacacagcatttttctgacaaaattccttccacgaggatgccattattttggtttttatgttgaagat

SEQ ID NO: 39916 - DNA, 80 bp, synthetic construct
  misc_feature 1..80: note = Artificially Synthesized Probe
  source 1..80: mol_type = other DNA
ctctacccctacccccaatccaccatacactgccaaaattctgtctatagcaactttgactgctttccttgaggcagaga

SEQ ID NO: 39917 - DNA, 80 bp, synthetic construct
  misc_feature 1..80: note = Artificially Synthesized Probe
  source 1..80: mol_type = other DNA
acttctctgcccttatatcctactgtttaaggcactcctaaacacagaggcctcccagctatttccagaatactccaagc

SEQ ID NO: 39918 - DNA, 80 bp, synthetic construct
  misc_feature 1..80: note = Artificially Synthesized Probe
  source 1..80: mol_type = other DNA
tcaagtcatggatagcgttctgccattcctgcacagcagcccaatcggcaattgagatgtagcactcacatgctttattt

SEQ ID NO: 39919 - DNA, 80 bp, synthetic construct
  misc_feature 1..80: note = Artificially Synthesized Probe
  source 1..80: mol_type = other DNA
caaggttttgctatgttggccagggtgatctcaaactcctggactcaagcaatccgctcacctcagtctccccaagtact

SEQ ID NO: 39920 - DNA, 80 bp, synthetic construct
  misc_feature 1..80: note = Artificially Synthesized Probe
  source 1..80: mol_type = other DNA
gctaatattttttgtatttttagtagagacagggtttcaccatgttaggctagtctcaaactcctgacctcaggtgatcc

SEQ ID NO: 39921 - DNA, 80 bp, synthetic construct
  misc_feature 1..80: note = Artificially Synthesized Probe
  source 1..80: mol_type = other DNA
cattcagaaaaattagtcacccaataccattaaaacataaatccctataaaatttacaactgatcagtctgtgcctgctt

SEQ ID NO: 39922 - DNA, 80 bp, synthetic construct
  misc_feature 1..80: note = Artificially Synthesized Probe
  source 1..80: mol_type = other DNA
ggcgtgagccaccgcgcccggcctattttaacttctaacactgtaactctggcagttgttgcttttacaaaatacaggat

SEQ ID NO: 39923 - DNA, 80 bp, synthetic construct
  misc_feature 1..80: note = Artificially Synthesized Probe
  source 1..80: mol_type = other DNA
gacttcgaatgatacctgaaagcaaagacaacattctgaatttttaaaaatcttaaaagttcctagaataagtgtgagtt

SEQ ID NO: 39924 - DNA, 80 bp, synthetic construct
  misc_feature 1..80: note = Artificially Synthesized Probe
  source 1..80: mol_type = other DNA
tcttgggggtggaatgtattacttggtgctttactcatgtgacttcttaatgctaaagaaatttcttgaatttctgtgtg

SEQ ID NO: 39925 - DNA, 80 bp, synthetic construct
  misc_feature 1..80: note = Artificially Synthesized Probe
  source 1..80: mol_type = other DNA
aagtagacaaccagtagaggctgtaaatatcacagaatgtctttgctccaaaacaactgttataccttaggacaacatct

SEQ ID NO: 39926 - DNA, 80 bp, synthetic construct
  misc_feature 1..80: note = Artificially Synthesized Probe
  source 1..80: mol_type = other DNA
aaaatttatggaaagacggaagagagaataaaggtgcgtatgtttcagacttcttcattaaaacagctgcttccaaagcc

SEQ ID NO: 39927 - DNA, 80 bp, synthetic construct
  misc_feature 1..80: note = Artificially Synthesized Probe
  source 1..80: mol_type = other DNA
agaatacaatgtgtagagcacagcatactgaatggcagggaagtgaacagccaggtcactgtgcacaatcatcagattct

SEQ ID NO: 39928 - DNA, 80 bp, synthetic construct
  misc_feature 1..80: note = Artificially Synthesized Probe
  source 1..80: mol_type = other DNA
acaaaacacaggaatgagagtacctgtgttccaagaaaactttcttttttgagtcagagtctcttgctctgttgcccagg

SEQ ID NO: 39929 - DNA, 80 bp, synthetic construct
  misc_feature 1..80: note = Artificially Synthesized Probe
  source 1..80: mol_type = other DNA
tttattccctaattatgtccattactttctttctttgtgttttttttcttttgagacagagtctggttctgtcgcccaga

SEQ ID NO: 39930 - DNA, 80 bp, synthetic construct
  misc_feature 1..80: note = Artificially Synthesized Probe
  source 1..80: mol_type = other DNA
tataaaatgagatatgtggaggatgggacccaagtctaaacacgaaattcacttatgtttcatagacaccttctattcat

SEQ ID NO: 39931 - DNA, 80 bp, synthetic construct
  misc_feature 1..80: note = Artificially Synthesized Probe
  source 1..80: mol_type = other DNA
ccaggcatgtcttaaatatggctgtttgttacacacagtgattctgcagacatcttgacatgacagtgaaatacataaat

SEQ ID NO: 39932 - DNA, 80 bp, synthetic construct
  misc_feature 1..80: note = Artificially Synthesized Probe
  source 1..80: mol_type = other DNA
gataacgcaagaatagtagtttagatgatggtataaacagtttttctacaaatgatgatggcagtttcgtatttatctgt

SEQ ID NO: 39933 - DNA, 80 bp, synthetic construct
  misc_feature 1..80: note = Artificially Synthesized Probe
  source 1..80: mol_type = other DNA
aatgtccataataaaagtgaggggaggatatttatggttaagaaattaaaggaggccagccgggcgcggtggctcacgcc

SEQ ID NO: 39934 - DNA, 80 bp, synthetic construct
  misc_feature 1..80: note = Artificially Synthesized Probe
  source 1..80: mol_type = other DNA
attgcttgagcccaagaattcaagaccagcctgggtaacatggcaaaactccatctctacaaaataatacaaaaaattag

SEQ ID NO: 39935 - DNA, 80 bp, synthetic construct
  misc_feature 1..80: note = Artificially Synthesized Probe
  source 1..80: mol_type = other DNA
tggaatctgccatcctctatttcccatatacccaacttcgtttctcccaatgtcactaaatggcggaagctcagaatctt

SEQ ID NO: 39936 - DNA, 80 bp, synthetic construct
  misc_feature 1..80: note = Artificially Synthesized Probe
  source 1..80: mol_type = other DNA
ctacaaaaataaaaaattagcaggagctatagtgggaagatcacttgagcccaagagatagagactgcactgagtcgtga

SEQ ID NO: 39937 - DNA, 80 bp, synthetic construct
  misc_feature 1..80: note = Artificially Synthesized Probe
  source 1..80: mol_type = other DNA
gactatatcacacatgcttctttctccttattcaaagcagagtacaatgcctggggttcatttcttgtgtcttttccact

SEQ ID NO: 39938 - DNA, 80 bp, synthetic construct
  misc_feature 1..80: note = Artificially Synthesized Probe
  source 1..80: mol_type = other DNA
aagagcatgcacatgaagagcaaagggagattacaagacctggtctacagatgtgtaattgaagaagtacgatatatgaa

SEQ ID NO: 39939 - DNA, 80 bp, synthetic construct
  misc_feature 1..80: note = Artificially Synthesized Probe
  source 1..80: mol_type = other DNA
gaagaccgggaacaaaaaataaaaataaataacaaaaaatgtctttagaaaaataccagctaccaagagtatgtaaagct

SEQ ID NO: 39940 - DNA, 80 bp, synthetic construct
  misc_feature 1..80: note = Artificially Synthesized Probe
  source 1..80: mol_type = other DNA
gaaacaaactgaaatgtgcaaatgagccacgttagtcattcacttaaactccaaaaaaatgggaaacaaaaccatttctc

SEQ ID NO: 39941 - DNA, 80 bp, synthetic construct
  misc_feature 1..80: note = Artificially Synthesized Probe
  source 1..80: mol_type = other DNA
aaagaatgcacttaacacatttacaaagcaattctggtgtatccacattttcaagaatagactgcaggctggtcattaca

SEQ ID NO: 39942 - DNA, 80 bp, synthetic construct
  misc_feature 1..80: note = Artificially Synthesized Probe
  source 1..80: mol_type = other DNA
gaaaaccatcattttaggctgggtgcagtggctcacacctgtaaccccaacactttgggaggacgaggcaggtggatcac

SEQ ID NO: 39943 - DNA, 80 bp, synthetic construct
  misc_feature 1..80: note = Artificially Synthesized Probe
  source 1..80: mol_type = other DNA
agtagctgggactacaggtgcatgccaccacgcccgacttatttttttttcctttttttttttttttttaatagaaacag

SEQ ID NO: 39944 - DNA, 80 bp, synthetic construct
  misc_feature 1..80: note = Artificially Synthesized Probe
  source 1..80: mol_type = other DNA
aggaatgatgttctaatatattcagatacacaaatgtgaaataaaactaagtagagctggtattcatttacacataatta

SEQ ID NO: 39945 - DNA, 80 bp, synthetic construct
  misc_feature 1..80: note = Artificially Synthesized Probe
  source 1..80: mol_type = other DNA
tgagccaccgcacctggcgtgtaagccaatttcttagaagaaatctctccctctttctccacatatatgcatatatgtat

SEQ ID NO: 39946 - DNA, 80 bp, synthetic construct
  misc_feature 1..80: note = Artificially Synthesized Probe
  source 1..80: mol_type = other DNA
tacagaaacttaaaaggataacagtaatgagtaactctataaaataaaaccatcaaaaggcactaaggtttatgaccagc

SEQ ID NO: 39947 - DNA, 80 bp, synthetic construct
  misc_feature 1..80: note = Artificially Synthesized Probe
  source 1..80: mol_type = other DNA
aattcacccactggaaacacagagctgtgatcatcaacaaaaaaataaactcaaaaagcttgttttatttactttgaaat

SEQ ID NO: 39948 - DNA, 80 bp, synthetic construct
  misc_feature 1..80: note = Artificially Synthesized Probe
  source 1..80: mol_type = other DNA
caaggactccctctgtcgcccaggttgacatgcagaggtgtgatcacatctcactgcaaccctgaattcctgggctcaag

SEQ ID NO: 39949 - DNA, 80 bp, synthetic construct
  misc_feature 1..80: note = Artificially Synthesized Probe
  source 1..80: mol_type = other DNA
gaatataggtcctatcactcttttgttcatctctatattccagatcccagcagagtacctggcaaataacagaccctcaa

SEQ ID NO: 39950 - DNA, 80 bp, synthetic construct
  misc_feature 1..80: note = Artificially Synthesized Probe
  source 1..80: mol_type = other DNA
acaaatcacaaagggtctgacagtttcatttctaaggtatgagaaaacattggtaaaaaaagaaaccagaaggctgggca

SEQ ID NO: 39951 - DNA, 80 bp, synthetic construct
  misc_feature 1..80: note = Artificially Synthesized Probe
  source 1..80: mol_type = other DNA
cacacacacagtattaaaaaaaaaaaaaaaaaagtcaaaaactaaatgtccaaaaagtaattacatctgacaaagcccca

SEQ ID NO: 39952 - DNA, 80 bp, synthetic construct
  misc_feature 1..80: note = Artificially Synthesized Probe
  source 1..80: mol_type = other DNA
taagaggcttctcttttaaaatgtactataacctttctagtgggaaatgaatgtaaacaatttttacctgcacagtaggc

SEQ ID NO: 39953 - DNA, 80 bp, synthetic construct
  misc_feature 1..80: note = Artificially Synthesized Probe
  source 1..80: mol_type = other DNA
agcaagaaagttgggggtataagaaggcaggaaggtgagacaggtaggttcaaaaaacatgcttgtagcaataagaaaat

SEQ ID NO: 39954 - DNA, 80 bp, synthetic construct
  misc_feature 1..80: note = Artificially Synthesized Probe
  source 1..80: mol_type = other DNA
ggcaatgtcttaccaagttattttctaagtactgattaggtactgtagtattgaagaccccattgcagatgccttaattg

SEQ ID NO: 39955 - DNA, 80 bp, synthetic construct
  misc_feature 1..80: note = Artificially Synthesized Probe
  source 1..80: mol_type = other DNA
gcatctatataaatcatagcatacgattactttctgaaaggagattgaaacataagagagcttataatcttttctgacag

SEQ ID NO: 39956 - DNA, 80 bp, synthetic construct
  misc_feature 1..80: note = Artificially Synthesized Probe
  source 1..80: mol_type = other DNA
aaaaccaggagccgcttccccgttggttagaaataaggtttctaaatcccctaagttatgaacactgagatttttttccc

SEQ ID NO: 39957 - DNA, 80 bp, synthetic construct
  misc_feature 1..80: note = Artificially Synthesized Probe
  source 1..80: mol_type = other DNA
attcttgtaagtattagagagaaaaagagagagagtgtcatctctggaaagtgtgaagtcagggaattccctactaggaa

SEQ ID NO: 39958 - DNA, 80 bp, synthetic construct
  misc_feature 1..80: note = Artificially Synthesized Probe
  source 1..80: mol_type = other DNA
atgttttttgtagagacaggtgtctgattatgttgctcaggctgctctcaatttcctggactcaagcaatcctcccacct

SEQ ID NO: 39959 - DNA, 80 bp, synthetic construct
  misc_feature 1..80: note = Artificially Synthesized Probe
  source 1..80: mol_type = other DNA
ggcatgcaaccatggaaccccagtaaaaactttggacataaaaaacagagtgagcttccctggtaggcaataattcatga

SEQ ID NO: 39960 - DNA, 80 bp, synthetic construct
  misc_feature 1..80: note = Artificially Synthesized Probe
  source 1..80: mol_type = other DNA
ccagtaactccaggagggcagtagatctgattttaacctttgttttacatgcataattgtcttcagagaaaagctgaaga

SEQ ID NO: 39961 - DNA, 80 bp, synthetic construct
  misc_feature 1..80: note = Artificially Synthesized Probe
  source 1..80: mol_type = other DNA
tgaagtgcggtgacgtgatctcgactcactgcaagctccgcctcccggattcacgccattctcctgcctcagcctcccga

SEQ ID NO: 39962 - DNA, 80 bp, synthetic construct
  misc_feature 1..80: note = Artificially Synthesized Probe
  source 1..80: mol_type = other DNA
ggtgggtggatcatgacgtcaggagttcaagaccagcctcgccaatgtagtgaaaccccgtctcaactaaaaatacaaat

SEQ ID NO: 39963 - DNA, 80 bp, synthetic construct
  misc_feature 1..80: note = Artificially Synthesized Probe
  source 1..80: mol_type = other DNA
ctatccagacattcccattctcttcaaattccaaaatatcctatcacctcccctccccatacacacattctacttcacca

SEQ ID NO: 39964 - DNA, 80 bp, synthetic construct
  misc_feature 1..80: note = Artificially Synthesized Probe
  source 1..80: mol_type = other DNA
taacacacactggtccaatttctgccccatcactcttggcaaaatccattatgacctccaggctgctaaatccaagatac

SEQ ID NO: 39965 - DNA, 80 bp, synthetic construct
  misc_feature 1..80: note = Artificially Synthesized Probe
  source 1..80: mol_type = other DNA
atatcttactctatgacctctttaatagatgaaggacaaaaaaggctgaaaatgtacaaagatatgcatccctccccgac

SEQ ID NO: 39966 - DNA, 80 bp, synthetic construct
  misc_feature 1..80: note = Artificially Synthesized Probe
  source 1..80: mol_type = other DNA
gttattctgataaagttcctttagccaacaggttgaagcacattcccagggaatgacatgtttataagattttctaacaa

SEQ ID NO: 39967 - DNA, 80 bp, synthetic construct
  misc_feature 1..80: note = Artificially Synthesized Probe
  source 1..80: mol_type = other DNA
ctgaaaaaggaagatgcctttcaagataatcacactattaactgtaggaaaatgtattaaatgaagacagcttttgctag

SEQ ID NO: 39968 - DNA, 80 bp, synthetic construct
  misc_feature 1..80: note = Artificially Synthesized Probe
  source 1..80: mol_type = other DNA
ggtctcccaaagcaccaccatgcccggcccaaaatcttgtaattgcttaatactgtatatacattcttataatgatatga

SEQ ID NO: 39969 - DNA, 80 bp, synthetic construct
  misc_feature 1..80: note = Artificially Synthesized Probe
  source 1..80: mol_type = other DNA
taatcccagaactttgggaggctgaagcggatgtatcacctgagatcaggagtttgagaccagcctggccaacatggtga

SEQ ID NO: 39970 - DNA, 80 bp, synthetic construct
  misc_feature 1..80: note = Artificially Synthesized Probe
  source 1..80: mol_type = other DNA
cttactcaggtccttcaaaaacaatataaactacgacttcaggttgattcctttaaatctgactaatgaataaatgttaa

SEQ ID NO: 39971 - DNA, 80 bp, synthetic construct
  misc_feature 1..80: note = Artificially Synthesized Probe
  source 1..80: mol_type = other DNA
aaaatgttagcaatgttatcaaatgtggacgaaaagctaatatatgtcactatgtaatccaagacatattcattagtgga

SEQ ID NO: 39972 - DNA, 80 bp, synthetic construct
  misc_feature 1..80: note = Artificially Synthesized Probe
  source 1..80: mol_type = other DNA
tttgtgtttcattccccaatcagcaggcacgcaactgacaagaagtgtgtttccccaggcattctaatgggatgccagaa

SEQ ID NO: 39973 - DNA, 80 bp, synthetic construct
  misc_feature 1..80: note = Artificially Synthesized Probe
  source 1..80: mol_type = other DNA
gccataagaggaacgctttccccaaaaacacatcctacaagaacagtgttgtaatctctggagttaacactaactataaa

SEQ ID NO: 39974 - DNA, 80 bp, synthetic construct
  misc_feature 1..80: note = Artificially Synthesized Probe
  source 1..80: mol_type = other DNA
aatttagtaagttatactctacattaaaaaacacacacaaaaaaaaacacagaataagggagcatttcccatacatatga

SEQ ID NO: 39975 - DNA, 80 bp, synthetic construct
  misc_feature 1..80: note = Artificially Synthesized Probe
  source 1..80: mol_type = other DNA
aggtatgagccaccatacatacacagccttatcttaaattgttaaatataaacataatactcaggtccttagcagcccct

SEQ ID NO: 39976 - DNA, 80 bp, synthetic construct
  misc_feature 1..80: note = Artificially Synthesized Probe
  source 1..80: mol_type = other DNA
gcttcagcttcacctcttatttgtattactcctcagaagtacccaatttctctacacactgacaatttgcacctggtctt

SEQ ID NO: 39977 - DNA, 80 bp, synthetic construct
  misc_feature 1..80: note = Artificially Synthesized Probe
  source 1..80: mol_type = other DNA
tgcagtgagccaagactgcaccagtgcatttcagcctgggcaacacagtgagaccccatctctaaaaaaaaaatttatga

SEQ ID NO: 39978 - DNA, 80 bp, synthetic construct
  misc_feature 1..80: note = Artificially Synthesized Probe
  source 1..80: mol_type = other DNA
taaaaaagttagccgggtgtggtggcacatgccggtaatctgatctacttaggaggctgagacaggaaaatcgcttgtac

SEQ ID NO: 39979 - DNA, 80 bp, synthetic construct
  misc_feature 1..80: note = Artificially Synthesized Probe
  source 1..80: mol_type = other DNA
ctggccaacatggtgaaatcccatctccactaaaaacacaaaaattagccgggcatagtggcatgtacctgtattcccag

SEQ ID NO: 39980 - DNA, 80 bp, synthetic construct
  misc_feature 1..80: note = Artificially Synthesized Probe
  source 1..80: mol_type = other DNA
gtacaattatgaattacacatttaattttaaaacacatcattctgatctctgtcttgattgatactagaagattatcttc

SEQ ID NO: 39981 - DNA, 80 bp, synthetic construct
  misc_feature 1..80: note = Artificially Synthesized Probe
  source 1..80: mol_type = other DNA
tgggagcacagtgaatgaaaaggaagactataagccagtgccatataaatgcttactgttggaggtatgcttctatggaa

SEQ ID NO: 39982 - DNA, 80 bp, synthetic construct
  misc_feature 1..80: note = Artificially Synthesized Probe
  source 1..80: mol_type = other DNA
tttaagcaagaagcaagatcaagatccgttctgtcagttacctggagtctgtcgtctttctgaataggggacagaatcac

SEQ ID NO: 39983 - DNA, 80 bp, synthetic construct
  misc_feature 1..80: note = Artificially Synthesized Probe
  source 1..80: mol_type = other DNA
aggaaacaaaagggcttcccaacaacttgcgcgttctacattatttggccagtttctggacaattataacaattgtgctc

SEQ ID NO: 39984 - DNA, 80 bp, synthetic construct
  misc_feature 1..80: note = Artificially Synthesized Probe
  source 1..80: mol_type = other DNA
gggagggtcctggactctcagcatctcccaactcggggtcagggggaggctgtaactggaatgccccccacccccacccc

SEQ ID NO: 39985 - DNA, 80 bp, synthetic construct
  misc_feature 1..80: note = Artificially Synthesized Probe
  source 1..80: mol_type = other DNA
gagttggagagtaggagaagagaaatccaaggcaacatttgaccagcctgggcaacatagtgtgactccgagtctgcaaa

SEQ ID NO: 39986 - DNA, 80 bp, synthetic construct
  misc_feature 1..80: note = Artificially Synthesized Probe
  source 1..80: mol_type = other DNA
agtgagccaccacgaaattttattataaatggagggtagagaaattgggcaataaatggagggggaagtgagttaagagg

SEQ ID NO: 39987 - DNA, 80 bp, synthetic construct
  misc_feature 1..80: note = Artificially Synthesized Probe
  source 1..80: mol_type = other DNA
catctctaataaaaatacagaaaaattagccgggaatggtggcaggtgcctgtaatcccagctactcaagaggctgtggc

SEQ ID NO: 39988 - DNA, 80 bp, synthetic construct
  misc_feature 1..80: note = Artificially Synthesized Probe
  source 1..80: mol_type = other DNA
gtaagttgcagagcctagaaggtgatggttaagagagtgggattcttgaaactgcatttatggagaggttgtggttattg

SEQ ID NO: 39989 - DNA, 80 bp, synthetic construct
  misc_feature 1..80: note = Artificially Synthesized Probe
  source 1..80: mol_type = other DNA
tggctactttttgtcaggattttcaaggctgggaattttgagaggggaatggaggagaataatctgaaagtgcaagtaag

SEQ ID NO: 39990 - DNA, 80 bp, synthetic construct
  misc_feature 1..80: note = Artificially Synthesized Probe
  source 1..80: mol_type = other DNA
agttgctagagctacagtagctggggactgagcagctagggattggcaggctatctctttttttcatgtagtctcatgaa

SEQ ID NO: 39991 - DNA, 80 bp, synthetic construct
  misc_feature 1..80: note = Artificially Synthesized Probe
  source 1..80: mol_type = other DNA
acctcctgcgctcagtcttcttgtctcagccttctgagtagctgaaattacgagcacacgccacaatgcctggctaattt

SEQ ID NO: 39992 - DNA, 80 bp, synthetic construct
  misc_feature 1..80: note = Artificially Synthesized Probe
  source 1..80: mol_type = other DNA
gggtaatcagcaagcttcacatacgtaaggtgggtatgtgaagtaaacacagtatgtgaagtaaacacagtggaccttag

SEQ ID NO: 39993 - DNA, 80 bp, synthetic construct
  misc_feature 1..80: note = Artificially Synthesized Probe
  source 1..80: mol_type = other DNA
ccaattagaaaatctttaaatcttcctatgacctagaaacctccctacccccactttgagttgtcctgcctttcctgaca

SEQ ID NO: 39994 - DNA, 80 bp, synthetic construct
  misc_feature 1..80: note = Artificially Synthesized Probe
  source 1..80: mol_type = other DNA
tttctttattttgtaacttagtctttttgcttagaggctctctgaggatgggagggggttcttcctcccatccctaggaa

SEQ ID NO: 39995 - DNA, 80 bp, synthetic construct
  misc_feature 1..80: note = Artificially Synthesized Probe
  source 1..80: mol_type = other DNA
atatcttcccttccaagtgcgaatgtaaccttaagtcagttaacctctttgtgattacttttcttatctgcaaagtgact

SEQ ID NO: 39996 - DNA, 80 bp, synthetic construct
  misc_feature 1..80: note = Artificially Synthesized Probe
  source 1..80: mol_type = other DNA
gtatgttcatgttgttgcgcaatagatcttcggaagtttttcgtcttgcaacctgaaactctacccattagcaaattccc

SEQ ID NO: 39997 - DNA, 80 bp, synthetic construct
  misc_feature 1..80: note = Artificially Synthesized Probe
  source 1..80: mol_type = other DNA
agtagagatggggtttcaccttgttggccatgctggtctcgaactcctgacctcgtgatctgcctgcttctgcctcccaa

SEQ ID NO: 39998 - DNA, 80 bp, synthetic construct
  misc_feature 1..80: note = Artificially Synthesized Probe
  source 1..80: mol_type = other DNA
tgaggtgggagggtcatttgaacacaggaatttgaggggagaaaaaaagaagagagaaagagaagtgaaggaaggaagaa

SEQ ID NO: 39999 - DNA, 80 bp, synthetic construct
  misc_feature 1..80: note = Artificially Synthesized Probe
  source 1..80: mol_type = other DNA
gatggtagtatgagttagttaaatcaggtgatatcctcctttagaagttgatagcctatatatgtcatcctttgtggagg

SEQ ID NO: 40000 - DNA, 80 bp, synthetic construct
  misc_feature 1..80: note = Artificially Synthesized Probe
  source 1..80: mol_type = other DNA
gcaccaagcatacagatttcatgtctttctcatagttactcttgtaacatgagctaaagatcagacctctatgtcacctt

SEQ ID NO: 40001 - DNA, 80 bp, synthetic construct
  misc_feature 1..80: note = Artificially Synthesized Probe
  source 1..80: mol_type = other DNA
gtaatgaaaccgttggggccctacattgctatgacatccaaagggccatgaatatcaggaagaaagataattaacagggt

SEQ ID NO: 40002 - DNA, 80 bp, synthetic construct
  misc_feature 1..80: note = Artificially Synthesized Probe
  source 1..80: mol_type = other DNA
gaatattttggtgtcttttgagccaactttagtttcatcattaccaagggggaagagagctaacagttgatgagcacttg

SEQ ID NO: 40003 - DNA, 80 bp, synthetic construct
  misc_feature 1..80: note = Artificially Synthesized Probe
  source 1..80: mol_type = other DNA
tattaggtattagactaataattagcacacttacttaagttagaaagtataataatgcgccggacgcggtagctcacgcc

SEQ ID NO: 40004 - DNA, 80 bp, synthetic construct
  misc_feature 1..80: note = Artificially Synthesized Probe
  source 1..80: mol_type = other DNA
ctcagggggctgatttttataaggagagatttgctagttttcacaatatgtcctctaagttggcatgtatagctaaacag

SEQ ID NO: 40005 - DNA, 80 bp, synthetic construct
  misc_feature 1..80: note = Artificially Synthesized Probe
  source 1..80: mol_type = other DNA
aagctctaggttgccttctttcctggcagaagttggtgtctatgccataaggaggtagttcctgttagaagggatttaat

SEQ ID NO: 40006 - DNA, 80 bp, synthetic construct
  misc_feature 1..80: note = Artificially Synthesized Probe
  source 1..80: mol_type = other DNA
atgctttgggaagtatgttaatttcatggtacatgagtggctatcatactggctattatatggtaagtaatcactcagca

SEQ ID NO: 40007 - DNA, 80 bp, synthetic construct
  misc_feature 1..80: note = Artificially Synthesized Probe
  source 1..80: mol_type = other DNA
ctaaaattatttttaaaagtaagctcttgtgccctgctaaaattatgatgtgatattgtaggcacttgtatttttagtaa

SEQ ID NO: 40008 - DNA, 80 bp, synthetic construct
  misc_feature 1..80: note = Artificially Synthesized Probe
  source 1..80: mol_type = other DNA
ttatgttctaaataactttcttgagaaataattcacatggtgtgcagtttacctttgaaagtatacaagttggctgggca

SEQ ID NO: 40009 - DNA, 80 bp, synthetic construct
  misc_feature 1..80: note = Artificially Synthesized Probe
  source 1..80: mol_type = other DNA
tgaagccacgtggttgagataggctctgagtctagcttttaacctctatctttttgtcttagaaatctaagcagaatgca

SEQ ID NO: 40010 - DNA, 80 bp, synthetic construct
  misc_feature 1..80: note = Artificially Synthesized Probe
  source 1..80: mol_type = other DNA
ggttcaagtgattctcctgcctcagcttcccgagtagctgtgattacagccatatgccaccacgcccagccagttttgtg

SEQ ID NO: 40011 - DNA, 80 bp, synthetic construct
  misc_feature 1..80: note = Artificially Synthesized Probe
  source 1..80: mol_type = other DNA
agtgataatgccactgcacctggctaatttttatttttatttatttatttttttttgagacagagtcttgctctgtcacc

SEQ ID NO: 40012 - DNA, 80 bp, synthetic construct
  misc_feature 1..80: note = Artificially Synthesized Probe
  source 1..80: mol_type = other DNA
gcaggaaatgctggcatagagcagcactaaatgacaccactaaagaaacgatcagacagatctggaatgtgaagcgttat

SEQ ID NO: 40013 - DNA, 80 bp, synthetic construct
  misc_feature 1..80: note = Artificially Synthesized Probe
  source 1..80: mol_type = other DNA
ggtgggattgtcaaagaagagggcaactggaagagaactgtcagttatttttggatcagtctttaattcatcatgacggg

SEQ ID NO: 40014 - DNA, 80 bp, synthetic construct
  misc_feature 1..80: note = Artificially Synthesized Probe
  source 1..80: mol_type = other DNA
atggtgcaatctcggctcaccacaacctccacctcccgggttcaagcaattctcctgcctcagcctcccaagtagctggg

SEQ ID NO: 40015 - DNA, 80 bp, synthetic construct; identical to SEQ ID NO: 39985
  misc_feature 1..80: note = Artificially Synthesized Probe
  source 1..80: mol_type = other DNA

SEQ ID NO: 40016 - DNA, 80 bp, synthetic construct; identical to SEQ ID NO: 39986
  misc_feature 1..80: note = Artificially Synthesized Probe
  source 1..80: mol_type = other DNA

SEQ ID NO: 40017 - DNA, 80 bp, synthetic construct; identical to SEQ ID NO: 39987
  misc_feature 1..80: note = Artificially Synthesized Probe
  source 1..80: mol_type = other DNA

SEQ ID NO: 40018 - DNA, 80 bp, synthetic construct; identical to SEQ ID NO: 39988
  misc_feature 1..80: note = Artificially Synthesized Probe
  source 1..80: mol_type = other DNA

SEQ ID NO: 40019 - DNA, 80 bp, synthetic construct
  misc_feature 1..80: note = Artificially Synthesized Probe
  source 1..80: mol_type = other DNA
aggtacagtgatatgaagtgtgtggaggagaaaagaggaaacatctatcatttgagatggctgcgaaaggaaaaggcatc

SEQ ID NO: 40020 - DNA, 80 bp, synthetic construct
  misc_feature 1..80: note = Artificially Synthesized Probe
  source 1..80: mol_type = other DNA
ggtctcagggtagatgtattttaagtctttaaggagctgtcaaactcttcctcaaagtggtggttgtaccatgttacttt

SEQ ID NO: 40021 - DNA, 80 bp, synthetic construct; identical to SEQ ID NO: 39992
  misc_feature 1..80: note = Artificially Synthesized Probe
  source 1..80: mol_type = other DNA

SEQ ID NO: 40022 - DNA, 80 bp, synthetic construct
  misc_feature 1..80: note = Artificially Synthesized Probe
  source 1..80: mol_type = other DNA
ctattaaaccacatttgtaactttagttaaaatcagtcacatatatcacagggctatttctgactctcaattctgttaca

SEQ ID NO: 40023 - DNA, 80 bp, synthetic construct
  misc_feature 1..80: note = Artificially Synthesized Probe
  source 1..80: mol_type = other DNA
tgaaccaccatgcctggccagttctgttatttttaaaacccaagtttccctggtcatatcttggttggatgaagcgtatt

SEQ ID NO: 40024 - DNA, 80 bp, synthetic construct
  misc_feature 1..80: note = Artificially Synthesized Probe
  source 1..80: mol_type = other DNA
aagttttgtatttttaatagagacggggttttgccacattggcaggctggtctcaaactcctgatgtcaagtgatccacc

SEQ ID NO: 40025 - DNA, 80 bp, synthetic construct; identical to SEQ ID NO: 39996
  misc_feature 1..80: note = Artificially Synthesized Probe
  source 1..80: mol_type = other DNA

SEQ ID NO: 40026 - DNA, 80 bp, synthetic construct; identical to SEQ ID NO: 39997
  misc_feature 1..80: note = Artificially Synthesized Probe
  source 1..80: mol_type = other DNA

SEQ ID NO: 40027 - DNA, 80 bp, synthetic construct; identical to SEQ ID NO: 39998
  misc_feature 1..80: note = Artificially Synthesized Probe
  source 1..80: mol_type = other DNA

SEQ ID NO: 40028 - DNA, 80 bp, synthetic construct; identical to SEQ ID NO: 39999
  misc_feature 1..80: note = Artificially Synthesized Probe
  source 1..80: mol_type = other DNA

SEQ ID NO: 40029 - DNA, 80 bp, synthetic construct; identical to SEQ ID NO: 40000
  misc_feature 1..80: note = Artificially Synthesized Probe
  source 1..80: mol_type = other DNA

SEQ ID NO: 40030 - DNA, 80 bp, synthetic construct; identical to SEQ ID NO: 40001
  misc_feature 1..80: note = Artificially Synthesized Probe
  source 1..80: mol_type = other DNA

SEQ ID NO: 40031 - DNA, 80 bp, synthetic construct; identical to SEQ ID NO: 40002
  misc_feature 1..80: note = Artificially Synthesized Probe
  source 1..80: mol_type = other DNA

SEQ ID NO: 40032 - DNA, 80 bp, synthetic construct; identical to SEQ ID NO: 40003
  misc_feature 1..80: note = Artificially Synthesized Probe
  source 1..80: mol_type = other DNA

SEQ ID NO: 40033 - DNA, 80 bp, synthetic construct; identical to SEQ ID NO: 40004
  misc_feature 1..80: note = Artificially Synthesized Probe
  source 1..80: mol_type = other DNA

SEQ ID NO: 40034 - DNA, 80 bp, synthetic construct; identical to SEQ ID NO: 40005
  misc_feature 1..80: note = Artificially Synthesized Probe
  source 1..80: mol_type = other DNA

SEQ ID NO: 40035 - DNA, 80 bp, synthetic construct; identical to SEQ ID NO: 40006
  misc_feature 1..80: note = Artificially Synthesized Probe
  source 1..80: mol_type = other DNA

SEQ ID NO: 40036 - DNA, 80 bp, synthetic construct; identical to SEQ ID NO: 40007
  misc_feature 1..80: note = Artificially Synthesized Probe
  source 1..80: mol_type = other DNA

SEQ ID NO: 40037 - DNA, 80 bp, synthetic construct; identical to SEQ ID NO: 40008
  misc_feature 1..80: note = Artificially Synthesized Probe
  source 1..80: mol_type = other DNA

SEQ ID NO: 40038 - DNA, 80 bp, synthetic construct; identical to SEQ ID NO: 40009
  misc_feature 1..80: note = Artificially Synthesized Probe
  source 1..80: mol_type = other DNA

SEQ ID NO: 40039 - DNA, 80 bp, synthetic construct; identical to SEQ ID NO: 40010
  misc_feature 1..80: note = Artificially Synthesized Probe
  source 1..80: mol_type = other DNA

SEQ ID NO: 40040 - DNA, 80 bp, synthetic construct; identical to SEQ ID NO: 40011
  misc_feature 1..80: note = Artificially Synthesized Probe
  source 1..80: mol_type = other DNA

SEQ ID NO: 40041 - DNA, 80 bp, synthetic construct; identical to SEQ ID NO: 40012
  misc_feature 1..80: note = Artificially Synthesized Probe
  source 1..80: mol_type = other DNA

SEQ ID NO: 40042 - DNA, 80 bp, synthetic construct; identical to SEQ ID NO: 40013
  misc_feature 1..80: note = Artificially Synthesized Probe
  source 1..80: mol_type = other DNA

SEQ ID NO: 40043 - DNA, 80 bp, synthetic construct; identical to SEQ ID NO: 40014
  misc_feature 1..80: note = Artificially Synthesized Probe
  source 1..80: mol_type = other DNA

SEQ ID NO: 40044 - DNA, 80 bp, synthetic construct
  misc_feature 1..80: note = Artificially Synthesized Probe
  source 1..80: mol_type = other DNA
tcttcacgggcctgagtgttattagagaagcgctttcttcccttctcaggacagaactggaggcaggcggcggctccccg

SEQ ID NO: 40045 - DNA, 80 bp, synthetic construct; identical to SEQ ID NO: 40044
  misc_feature 1..80: note = Artificially Synthesized Probe
  source 1..80: mol_type = other DNA

SEQ ID NO: 40046 - DNA, 80 bp, synthetic construct
  misc_feature 1..80: note = Artificially Synthesized Probe
  source 1..80: mol_type = other DNA
tactcttaaagcacactagaggagacagagaaactaaggccaattctccaaaggagatcatagcattttcttccaggact

SEQ ID NO: 40047 - DNA, 80 bp, synthetic construct
  misc_feature 1..80: note = Artificially Synthesized Probe
  source 1..80: mol_type = other DNA
attgttttgatggtgcccatgccgtgggtccgtataagagagtgctatcaattgataccgtaattatcaatgcatatagc

SEQ ID NO: 40048 - DNA, 80 bp, synthetic construct
  misc_feature 1..80: note = Artificially Synthesized Probe
  source 1..80: mol_type = other DNA
ctgaagggcacctggtcactaagcagatccgaatatttctcaagtcatcctgccattatttttctttcttcgtgggagtt

SEQ ID NO: 40049 - DNA, 80 bp, synthetic construct
  misc_feature 1..80: note = Artificially Synthesized Probe
  source 1..80: mol_type = other DNA
atcaaaataagccttcttgccaatccaggatcttagaatggggattgttattaagattgtcagcagaacattggtttgga

SEQ ID NO: 40050 - DNA, 80 bp, synthetic construct
  misc_feature 1..80: note = Artificially Synthesized Probe
  source 1..80: mol_type = other DNA
ttgctctgaaagtgaaaataacagacattcttatgtggttttgcagttccaggccagacatcaaatagcaaagattgtaa

SEQ ID NO: 40051 - DNA, 80 bp, synthetic construct
  misc_feature 1..80: note = Artificially Synthesized Probe
  source 1..80: mol_type = other DNA
gcgtcagggtgttttgtttatctcttactctgttcagtgatcagtgaaggcgctagaatcaaataaatccaccctgcata

SEQ ID NO: 40052 - DNA, 80 bp, synthetic construct
  misc_feature 1..80: note = Artificially Synthesized Probe
  source 1..80: mol_type = other DNA
gatggaaacgtgttgttggagtgagtagactaataattctaatgtctttgggcacgttttcagttttagaatggtagggt

SEQ ID NO: 40053 - DNA, 80 bp, synthetic construct
  misc_feature 1..80: note = Artificially Synthesized Probe
  source 1..80: mol_type = other DNA
gtccagctccctgtgtgtgacaagcacttctggaccctctagaaggtttcattacctttaatgaagcataaaataaacac

SEQ ID NO: 40054 - DNA, 80 bp, synthetic construct
  misc_feature 1..80: note = Artificially Synthesized Probe
  source 1..80: mol_type = other DNA
tcttccagtatttggggtgtttgtgtagactaaatgagatattcatgttgaagtgctggatgcatgtagtagatgctgct

SEQ ID NO: 40055 - DNA, 80 bp, synthetic construct
  misc_feature 1..80: note = Artificially Synthesized Probe
  source 1..80: mol_type = other DNA
attaaggtgcctgtaagaataaaaaacccactttacactctgtacccttctctcctaaaacatgacagagccctctctct

SEQ ID NO: 40056 - DNA, 80 bp, synthetic construct
  misc_feature 1..80: note = Artificially Synthesized Probe
  source 1..80: mol_type = other DNA
ggggcctggactggctaaatagggtgctattttctttttgctgtgaggtcagtccactttgtgagtcgggttttattcaa

SEQ ID NO: 40057 - DNA, 80 bp, synthetic construct
  misc_feature 1..80: note = Artificially Synthesized Probe
  source 1..80: mol_type = other DNA
tctcagtctaccctggagttcaacaaaaaggagaaaagaatttccctggcaaagccaagtggagagttagaggctaggct

SEQ ID NO: 40058 - DNA, 80 bp, synthetic construct
  misc_feature 1..80: note = Artificially Synthesized Probe
  source 1..80: mol_type = other DNA
tctgagagctgaggcatcgctgaagtgtttgtgaagaagaattgaactaacctagaactaacctcagccgaaatctaact

SEQ ID NO: 40059 - DNA, 80 bp, synthetic construct
  misc_feature 1..80: note = Artificially Synthesized Probe
  source 1..80: mol_type = other DNA
ggcagccgacttggggtctggtctatgagttttcttctttaagatataaaagaattaactggtgaactttgtaatcaact

SEQ ID NO: 40060 - DNA, 80 bp, synthetic construct
  misc_feature 1..80: note = Artificially Synthesized Probe
  source 1..80: mol_type = other DNA
gcgaagtgacttcatctgcttctggttcaattgctagatagtttaaaagagggtcccacacacatcgttccctaatgaca

SEQ ID NO: 40061 - DNA, 80 bp, synthetic construct
  misc_feature 1..80: note = Artificially Synthesized Probe
  source 1..80: mol_type = other DNA
tgtccaccgaggtgaatgagttcagtcttcatccctctgcctgtgaggcatgagctcaggggaaaagcaacaacaagact

SEQ ID NO: 40062 - DNA, 80 bp, synthetic construct
  misc_feature 1..80: note = Artificially Synthesized Probe
  source 1..80: mol_type = other DNA
tgggcctcttgcacttactccaaaacaattaagctcctaggaaggctggggggatgtcatgataacataatcctgcagtg

SEQ ID NO: 40063 - DNA, 80 bp, synthetic construct
  misc_feature 1..80: note = Artificially Synthesized Probe
  source 1..80: mol_type = other DNA
actccctctgttgtcatcaacagtgtggaaacgtggtcataattatgaataatgcttactatatccagggccttgttcaa

SEQ ID NO: 40064 - DNA, 80 bp, synthetic construct
  misc_feature 1..80: note = Artificially Synthesized Probe
  source 1..80: mol_type = other DNA
cgctggcccgattcattttctctgtgctttggtttcctcatcgctcaatcatgtttccttcaagtgataggcttcaaata

SEQ ID NO: 40065 - DNA, 80 bp, synthetic construct
  misc_feature 1..80: note = Artificially Synthesized Probe
  source 1..80: mol_type = other DNA
tgtttgataatgagtaatcactatcaaactgggtcagtgtgagggagggctacaggaaatccttggacctcagctctaaa

SEQ ID NO: 40066 - DNA, 80 bp, synthetic construct
  misc_feature 1..80: note = Artificially Synthesized Probe
  source 1..80: mol_type = other DNA
cctatgaatttttttttcagggctgctattatttgagaagctgtgatattttaagtcaaggatacgatgtgcatcactag

SEQ ID NO: 40067 - DNA, 80 bp, synthetic construct
  misc_feature 1..80: note = Artificially Synthesized Probe
  source 1..80: mol_type = other DNA
atgtgtcgaggtggtgcatctctttaggaagtgactaacctcaggcactttgagtttgctttgccaactctctgtgtaga

SEQ ID NO: 40068 - DNA, 80 bp, synthetic construct
  misc_feature 1..80: note = Artificially Synthesized Probe
  source 1..80: mol_type = other DNA
aggctcattccccagtgaggcctgggaagaagcagttattttgaggggtttgagaggttactaaaatctgctagttttac

SEQ ID NO: 40069 - DNA, 80 bp, synthetic construct
  misc_feature 1..80: note = Artificially Synthesized Probe
  source 1..80: mol_type = other DNA
ctccttccacttggctactcggataatagctctggagactggcttttggatgacgctccataacaattagctgacagtga

SEQ ID NO: 40070 - DNA, 80 bp, synthetic construct
  misc_feature 1..80: note = Artificially Synthesized Probe
  source 1..80: mol_type = other DNA
ctctttgtttttgtttctatatttttcactcagtggaataggcctccatcctgccgctgctttctgtggtcttttctttc

SEQ ID NO: 40071 - DNA, 80 bp, synthetic construct
  misc_feature 1..80: note = Artificially Synthesized Probe
  source 1..80: mol_type = other DNA
atgaagcgaggtgctactctgagagctggaactgggaggctctggatgaagcaaggtgctctgagagctggaacattggg

SEQ ID NO: 40072 - DNA, 80 bp, synthetic construct
  misc_feature 1..80: note = Artificially Synthesized Probe
  source 1..80: mol_type = other DNA
ctgcagcacttctgccgtccagactgcagtgggagtgtgcttaacaaatcagtgctctcaaacacacacacacacacaca

SEQ ID NO: 40073 - DNA, 80 bp, synthetic construct
  misc_feature 1..80: note = Artificially Synthesized Probe
  source 1..80: mol_type = other DNA
tagtggatgcatttcactgataattaccctgtaataaaagtaactcaggggggctctgaggtttgtactcttcttttctc

SEQ ID NO: 40074 - DNA, 80 bp, synthetic construct
  misc_feature 1..80: note = Artificially Synthesized Probe
  source 1..80: mol_type = other DNA
tttatccataattctgtttcttttcgtctcaagaagaaactctagaagcagcacgcatacagacatcaggtgatacaagc

SEQ ID NO: 40075 - DNA, 80 bp, synthetic construct
  misc_feature 1..80: note = Artificially Synthesized Probe
  source 1..80: mol_type = other DNA
cctttataagtgactgtgtgcttcagtgcagaattccttctgctgtgagccaaggctaatctccatcacaattgcccaca

SEQ ID NO: 40076 - DNA, 80 bp, synthetic construct
  misc_feature 1..80: note = Artificially Synthesized Probe
  source 1..80: mol_type = other DNA
gaggcatttccagaataatttttacccaaacatgaaacaaataaggaatatcaaatgtgagatgctgagagtttcttata

SEQ ID NO: 40077 - DNA, 80 bp, synthetic construct
  misc_feature 1..80: note = Artificially Synthesized Probe
  source 1..80: mol_type = other DNA
tgagtaatgatgttgagcatcttttcttattcaagtcctgtgcccatttttcaattgggttatttttgttgttgttgact

SEQ ID NO: 40078 - DNA, 80 bp, synthetic construct
  misc_feature 1..80: note = Artificially Synthesized Probe
  source 1..80: mol_type = other DNA
tcatctttgaattatgagtgtggctgcttaaggtaacaatgtcacatgtttattctgataagactttccgtgttgctgca

SEQ ID NO: 40079 - DNA, 80 bp, synthetic construct
  misc_feature 1..80: note = Artificially Synthesized Probe
  source 1..80: mol_type = other DNA
tagaaacagaccaaaacttgagaatttggtgcaggccgtccttgtcatccctacttgggagaggaatagttagggctgaa

SEQ ID NO: 40080 - DNA, 80 bp, synthetic construct
  misc_feature 1..80: note = Artificially Synthesized Probe
  source 1..80: mol_type = other DNA
ctctctctacaagctctctgtcagtaatgccgctatgtccctgcctttaaatactatttgtgcttgataatttacaaacg

SEQ ID NO: 40081 - DNA, 80 bp, synthetic construct
  misc_feature 1..80: note = Artificially Synthesized Probe
  source 1..80: mol_type = other DNA
actttgaagtgtgtggaaggcagcttggatagtcctggcatgtttgatggatgtcacatttcaatgcctttccttcctct

SEQ ID NO: 40082 - DNA, 80 bp, synthetic construct
  misc_feature 1..80: note = Artificially Synthesized Probe
  source 1..80: mol_type = other DNA
agttgggaaatacatgagagtcttggctgcactttagatttgggagttaacagatatggcggaaataactatgatgggag

SEQ ID NO: 40083 - DNA, 80 bp, synthetic construct
  misc_feature 1..80: note = Artificially Synthesized Probe
  source 1..80: mol_type = other DNA
ctttaaaagctgcagtcgatgtagtttcattttcatgtgggtctgcacttttcaaaccttggtgtcaactaggaacagat

SEQ ID NO: 40084 - DNA, 80 bp, synthetic construct
  misc_feature 1..80: note = Artificially Synthesized Probe
  source 1..80: mol_type = other DNA
tttatccaccagaggtaccccgagcatgtaggatattcattagtctttgttgtaaggacctaaggcatgccatgctctga

SEQ ID NO: 40085 - DNA, 80 bp, synthetic construct
  misc_feature 1..80: note = Artificially Synthesized Probe
  source 1..80: mol_type = other DNA
tggtatcaggtctagaacagccctgggttacagagaatgattctgccattgatcagcaatttaagatacaatgttcgatt

SEQ ID NO: 40086 - DNA, 80 bp, synthetic construct
  misc_feature 1..80: note = Artificially Synthesized Probe
  source 1..80: mol_type = other DNA
acttcacccaaaaccctttattttactttttcctccttggaagccagacattaaagactaggacactcagaagcaactta

SEQ ID NO: 40087 - DNA, 80 bp, synthetic construct
  misc_feature 1..80: note = Artificially Synthesized Probe
  source 1..80: mol_type = other DNA
agaaactttggaggccagaaagcggtgggcagataaattcagggtgctaaaaggaaaatcaaaaacaaaacaatcaaact

SEQ ID NO: 40088 - DNA, 80 bp, synthetic construct
  misc_feature 1..80: note = Artificially Synthesized Probe
  source 1..80: mol_type = other DNA
atgtctacaagagacttgttttagatcttatgtaacttgtgtctaaaggcaaaagtagcttgaaaggaaagaatggaaaa

SEQ ID NO: 40089 - DNA, 80 bp, synthetic construct
  misc_feature 1..80: note = Artificially Synthesized Probe
  source 1..80: mol_type = other DNA
actcagactagaaggaaactacctcaacataataaaagccacatatgaaaaacaaaaccattgtaaacattatattaaat

SEQ ID NO: 40090 - DNA, 80 bp, synthetic construct
  misc_feature 1..80: note = Artificially Synthesized Probe
  source 1..80: mol_type = other DNA
tggaaagaggacagtcttttcaacaaatggcatgagaaaaccaggtatctatatgcaaaagaatgatattggacctttgc

SEQ ID NO: 40091 - DNA, 80 bp, synthetic construct
  misc_feature 1..80: note = Artificially Synthesized Probe
  source 1..80: mol_type = other DNA
ttcatccttaaaatgaagaaaaataatcctgacacaggcagcaatgtggatgaaccttgaggacatgatgccgagtgata

SEQ ID NO: 40092 - DNA, 80 bp, synthetic construct
  misc_feature 1..80: note = Artificially Synthesized Probe
  source 1..80: mol_type = other DNA
agcagattaatcatttactagggctgaggaggttgtgtggaaataggggctgtgactgctaatagctatgtttttttggg

SEQ ID NO: 40093 - DNA, 80 bp, synthetic construct
  misc_feature 1..80: note = Artificially Synthesized Probe
  source 1..80: mol_type = other DNA
ctctttgctacttcttccccaaaatttgtaataagccatgcagcagagatgggaagtttgatttggcgtattcttacatg

SEQ ID NO: 40094 - DNA, 80 bp, synthetic construct
  misc_feature 1..80: note = Artificially Synthesized Probe
  source 1..80: mol_type = other DNA
cagtctttatttcagaatataagagatgctgtgccaacagtatttgggaattgcttctatatggtgcattttagtattta

SEQ ID NO: 40095 - DNA, 80 bp, synthetic construct
  misc_feature 1..80: note = Artificially Synthesized Probe
  source 1..80: mol_type = other DNA
atgcccatctgtgtctgttttctcttcttatgagggtgctagttgcatgagtttgctggactgctgtaacaacataccca

SEQ ID NO: 40096 - DNA, 80 bp, synthetic construct
  misc_feature 1..80: note = Artificially Synthesized Probe
  source 1..80: mol_type = other DNA
atctgggtccccttggatcacactgttttagagggaaatatgtcgaatcatctggttccccttggatcacactgttttag

SEQ ID NO: 40097 - DNA, 80 bp, synthetic construct; identical to SEQ ID NO: 40096
  misc_feature 1..80: note = Artificially Synthesized Probe
  source 1..80: mol_type = other DNA

SEQ ID NO: 40098 - DNA, 80 bp, synthetic construct
  misc_feature 1..80: note = Artificially Synthesized Probe
  source 1..80: mol_type = other DNA
agggctccttggaacaaccttgacatctattgggacatctcctgtcttcaaatccctccattctgaccacacgcttactg

SEQ ID NO: 40099 - DNA, 80 bp, synthetic construct
  misc_feature 1..80: note = Artificially Synthesized Probe
  source 1..80: mol_type = other DNA
ctctctggaataagtgcaggtatcgctaactacatcgaaatattatttttaaccattttcgagccacccacacattctcc

SEQ ID NO: 40100 - DNA, 80 bp, synthetic construct
  misc_feature 1..80: note = Artificially Synthesized Probe
  source 1..80: mol_type = other DNA
tgtcctgacgctctcccaccaccacaaaataatttgtcactctgagcaagacattgcatttctctggctttaatattgcc

SEQ ID NO: 40101 - DNA, 80 bp, synthetic construct
  misc_feature 1..80: note = Artificially Synthesized Probe
  source 1..80: mol_type = other DNA
acaagatcttctgtagctttgcatgatgatgaaggcaaatgttttgtgaatgatgtatggatggcaaagtaagtgacaag

SEQ ID NO: 40102 - DNA, 80 bp, synthetic construct
  misc_feature 1..80: note = Artificially Synthesized Probe
  source 1..80: mol_type = other DNA
ataagctggtctccttaggtttcagcagacacgcacctaatgcgcacccaaccagtaaatacatgaaaagagtgaatact

SEQ ID NO: 40103 - DNA, 80 bp, synthetic construct
  misc_feature 1..80: note = Artificially Synthesized Probe
  source 1..80: mol_type = other DNA
tttctataaagtacagatcgtagatgtgggatgctgtgagcacctcccgaacgataaatgagtgtgtgtttgctgtggtg

SEQ ID NO: 40104 - DNA, 80 bp, synthetic construct
  misc_feature 1..80: note = Artificially Synthesized Probe
  source 1..80: mol_type = other DNA
cattttagttaatttaaacgtgaatagattcatgtggctaatggtttgtgtgttggactgtccaagcctgggggaagcct

SEQ ID NO: 40105 - DNA, 80 bp, synthetic construct
  misc_feature 1..80: note = Artificially Synthesized Probe
  source 1..80: mol_type = other DNA
tctttttattacagagaaaagaattcgcccttcctttcataggtatctgtggcctccgcggcatgtggtggtgaatgcgg

SEQ ID NO: 40106 - DNA, 80 bp, synthetic construct
  misc_feature 1..80: note = Artificially Synthesized Probe
  source 1..80: mol_type = other DNA
tgcctctcggacatattgtttccagcaaggatctgcctttctgtttcctattttaaatccttcagttatgcctctcagtg

SEQ ID NO: 40107 - DNA, 80 bp, synthetic construct
  misc_feature 1..80: note = Artificially Synthesized Probe
  source 1..80: mol_type = other DNA
gtgccgttgggcatgtgggaaccgcagtccaacgtgtgcttcatacttactttcatggttgatttgtacttttattttca

SEQ ID NO: 40108 - DNA, 80 bp, synthetic construct
  misc_feature 1..80: note = Artificially Synthesized Probe
  source 1..80: mol_type = other DNA
ttgttaggttaaaggtactaatgcagtaaagtgtttagaacaatgcctggcccgggtgctcagtgttcaagctgtgagca

SEQ ID NO: 40109 - DNA, 80 bp, synthetic construct
  misc_feature 1..80: note = Artificially Synthesized Probe
  source 1..80: mol_type = other DNA
cgtggccggatgctaaggataatctttcgttgtcattgccagagataattattgcattaatgtaacaccatcctcatcat

SEQ ID NO: 40110 - DNA, 80 bp, synthetic construct
  misc_feature 1..80: note = Artificially Synthesized Probe
  source 1..80: mol_type = other DNA
caggcttcctgaagaaacctgctctctcttcttgaacttctaatttagctccctttttactgcacacttctcattttctc

SEQ ID NO: 40111 - DNA, 80 bp, synthetic construct
  misc_feature 1..80: note = Artificially Synthesized Probe
  source 1..80: mol_type = other DNA
agttatttcactcagactcttaaacttactaagacaagctgcctttgaaaagctgacgaccagtgtctctgattcatgcc

SEQ ID NO: 40112 - DNA, 80 bp, synthetic construct
  misc_feature 1..80: note = Artificially Synthesized Probe
  source 1..80: mol_type = other DNA
cgcatggtggttttcttcatggtactcgtccacatatgaaagagctcgttattttatcctcacagctacctcaaaggtga

SEQ ID NO: 40113 - DNA, 80 bp, synthetic construct
  misc_feature 1..80: note = Artificially Synthesized Probe
  source 1..80: mol_type = other DNA
tcatttgtggatgtacatttctgccctctggattttcagcttcactagggcaggctcttcttcaaaatcccatcctcctg

SEQ ID NO: 40114 - DNA, 80 bp, synthetic construct
  misc_feature 1..80: note = Artificially Synthesized Probe
  source 1..80: mol_type = other DNA
gcgggctctgaaacaggatttccatatttgcttggaagatttaggttctgtgttctaaaagagtaggaccctgttttctg

SEQ ID NO: 40115 - DNA, 80 bp, synthetic construct
  misc_feature 1..80: note = Artificially Synthesized Probe
  source 1..80: mol_type = other DNA
gaaacatagaccatgactttgatccattgagtctgtctgactggttttctaatgtgtgagctacttggtgtccacaaaga

SEQ ID NO: 40116 - DNA, 80 bp, synthetic construct
  misc_feature 1..80: note = Artificially Synthesized Probe
  source 1..80: mol_type = other DNA
cagcatctcctcacttagggtttcaggaaatacatagagaccacctcttaaacataaaaattaacaggatttaggttatt

SEQ ID NO: 40117 - DNA, 80 bp, synthetic construct
  misc_feature 1..80: note = Artificially Synthesized Probe
  source 1..80: mol_type = other DNA
tcttgtgtgccctacctggctttgagtccagctttggcttttggctaatctctgtttttaattcttttattggcgtgaag

SEQ ID NO: 40118 - DNA, 80 bp, synthetic construct
  misc_feature 1..80: note = Artificially Synthesized Probe
  source 1..80: mol_type = other DNA
ggccattaggtgatttctatggcctgcggagaggattcctgtgccttaggcattttcagagaaatacacaagcttcctct

SEQ ID NO: 40119 - DNA, 80 bp, synthetic construct
  misc_feature 1..80: note = Artificially Synthesized Probe
  source 1..80: mol_type = other DNA
ttttgagagtggatcaagataaagacaaggattgtagcttggactgtgcgggttcgccccagaaacctctctgcgcatct

SEQ ID NO: 40120 - DNA, 80 bp, synthetic construct
  misc_feature 1..80: note = Artificially Synthesized Probe
  source 1..80: mol_type = other DNA
aaacagatttcagttacttttgcagacgacgaaggcagaattttgccttgttctttaggcctgagagttcttcctactga

SEQ ID NO: 40121 - DNA, 80 bp, synthetic construct
  misc_feature 1..80: note = Artificially Synthesized Probe
  source 1..80: mol_type = other DNA
gtggagcttaaagtcccgttctggtttgtcggtcagatgctgtttctaaagtgtttatcatgtgatgatgttatcctccc

SEQ ID NO: 40122 - DNA, 80 bp, synthetic construct
  misc_feature 1..80: note = Artificially Synthesized Probe
  source 1..80: mol_type = other DNA
tgactccatctaactttagcccaaatagaaaacaacaacacttggaaaatgtgtggaagtgaaagatctatatatataca

SEQ ID NO: 40123 - DNA, 80 bp, synthetic construct
  misc_feature 1..80: note = Artificially Synthesized Probe
  source 1..80: mol_type = other DNA
tatttactaagcagcttggttctatgtgattctaaaactatgatcaatttgcttcaacctgattctttcaataagtcctg

SEQ ID NO: 40124 - DNA, 80 bp, synthetic construct
  misc_feature 1..80: note = Artificially Synthesized Probe
  source 1..80: mol_type = other DNA
gactcacactggagaaagactcagatgtgatttgataccttggctgtagttataaatctcagctatctgtgctgagaaag

SEQ ID NO: 40125 - DNA, 80 bp, synthetic construct
  misc_feature 1..80: note = Artificially Synthesized Probe
  source 1..80: mol_type = other DNA
cggagaggctccgtccgctttccgctccacgagttgcctccagttaagtctgttccctgctgggggctgcctttgaaaag

SEQ ID NO: 40126 - DNA, 80 bp, synthetic construct
  misc_feature 1..80: note = Artificially Synthesized Probe
  source 1..80: mol_type = other DNA
atgccaggagaacttggaactattttgagatttctggaaacagatattggacaaaagcagcttccttggagatctgagga

SEQ ID NO: 40127 - DNA, 80 bp, synthetic construct
  misc_feature 1..80: note = Artificially Synthesized Probe
  source 1..80: mol_type = other DNA
acactccagaggaaccaggcctccccgtggggctccgtccacgcgctctgctccttctgttgcagttttcctgagagcac

SEQ ID NO: 40128 - DNA, 80 bp, synthetic construct
  misc_feature 1..80: note = Artificially Synthesized Probe
  source 1..80: mol_type = other DNA
tgtgcatgtgtggatgtgtgagagcgtgtgtatgcttgtgtgagtgcatgtatgtgacaatgcatgtatgtgtgtgaatg

SEQ ID NO: 40129 - DNA, 80 bp, synthetic construct
  misc_feature 1..80: note = Artificially Synthesized Probe
  source 1..80: mol_type = other DNA
catgtttgtgtgttcatgtgcgtgcgtgcatgtgtgagtgagcattagtgtccgtgattctttctgtgccctgggctcct

SEQ ID NO: 40130 - DNA, 80 bp, synthetic construct
  misc_feature 1..80: note = Artificially Synthesized Probe
  source 1..80: mol_type = other DNA
cagcactttcatctatattaggatattaggatggaaaagaatacttcagttctgctggagagtgttgcagcatggcattc

SEQ ID NO: 40131 - DNA, 80 bp, synthetic construct
  misc_feature 1..80: note = Artificially Synthesized Probe
  source 1..80: mol_type = other DNA
cagatctctgtaaaatgttcagcaaagcaatctctgctgattcttgcctaatcctgttttgagagattctagcaaagtag

SEQ ID NO: 40132 - DNA, 80 bp, synthetic construct
  misc_feature 1..80: note = Artificially Synthesized Probe
  source 1..80: mol_type = other DNA
caaaacaaaacctgttgttagtgatgccttgctaagcaatgatgagttctttctttataaagtcccggctctgcaggtaa

SEQ ID NO: 40133 - DNA, 80 bp, synthetic construct
  misc_feature 1..80: note = Artificially Synthesized Probe
  source 1..80: mol_type = other DNA
acattgatgtaccatctctggtgtagacatacatcagcatacatacatgaaccgtgaaaacatcaggctaagtggaggaa

SEQ ID NO: 40134 - DNA, 80 bp, synthetic construct
  misc_feature 1..80: note = Artificially Synthesized Probe
  source 1..80: mol_type = other DNA
ggcatcaacctccgcacctggccgtcatacagtaatttaaaaaattatgttgcttatgttctggggatttaataatcaaa

SEQ ID NO: 40135 - DNA, 80 bp, synthetic construct
  misc_feature 1..80: note = Artificially Synthesized Probe
  source 1..80: mol_type = other DNA
taatttatagctccatctgtacctcgtggagacctcgcaagctggaactcatatcacttttcctttttagacagtcaaaa

SEQ ID NO: 40136 - DNA, 80 bp, synthetic construct
  misc_feature 1..80: note = Artificially Synthesized Probe
  source 1..80: mol_type = other DNA
tccacagtgagcttagatatgcctggaagtctaaagacttttccagttttgctcatccttggggtgtcttcttaagtagt

SEQ ID NO: 40137 - DNA, 80 bp, synthetic construct
  misc_feature 1..80: note = Artificially Synthesized Probe
  source 1..80: mol_type = other DNA
tatgaatttagcctggaagcttccttagtgaggccaattagaccgtgctaacctggcttgcagcttagaatttaatttta

SEQ ID NO: 40138 - DNA, 80 bp, synthetic construct
  misc_feature 1..80: note = Artificially Synthesized Probe
  source 1..80: mol_type = other DNA
cccacactagcagtcagtaaagtgctgatttgggccccttttatctctaaaaccctggggtcaagacctgcacactttct

SEQ ID NO: 40139 - DNA, 80 bp, synthetic construct
  misc_feature 1..80: note = Artificially Synthesized Probe
  source 1..80: mol_type = other DNA
tatatatcttttaatctggaattctgtttattattcaaatgtttttcaagcttcctgagccatggccctggccagaactc

SEQ ID NO: 40140 - DNA, 80 bp, synthetic construct
  misc_feature 1..80: note = Artificially Synthesized Probe
  source 1..80: mol_type = other DNA
ccctggttcacctgttcggtgcaactagtatattccgcaggtctacagagttacggaaaaactctcttaatccctggctg

SEQ ID NO: 40141 - DNA, 80 bp, synthetic construct
  misc_feature 1..80: note = Artificially Synthesized Probe
  source 1..80: mol_type = other DNA
aatccataaattcctattaatcagataatataatgagacaatccagcagaaaaacggccaaaagtctcgagcaggcagca

SEQ ID NO: 40142 - DNA, 80 bp, synthetic construct
  misc_feature 1..80: note = Artificially Synthesized Probe
  source 1..80: mol_type = other DNA
atcttttgtgcacttttctgtatgggtgtcaatattttaggaatttaaaatgttaaaacgtgcaacgccactgaaagcgg

SEQ ID NO: 40143 - DNA, 80 bp, synthetic construct
  misc_feature 1..80: note = Artificially Synthesized Probe
  source 1..80: mol_type = other DNA
tcatgttctgcgctgctgagagcaggtgtttcttgctcacagtttagagatgtatgtgcttctcagagccctgctgatgt

SEQ ID NO: 40144 - DNA, 80 bp, synthetic construct
  misc_feature 1..80: note = Artificially Synthesized Probe
  source 1..80: mol_type = other DNA
tctgggtttggggaaggccctgttataaatgatggatgatcttggagtcgcatgaatctcagtacatgatatacatttat

SEQ ID NO: 40145 - DNA, 80 bp, synthetic construct
  misc_feature 1..80: note = Artificially Synthesized Probe
  source 1..80: mol_type = other DNA
gtaggaaatgcaccgaaaattgaggcctctttctagatggccatgaaaacaatgagaggtggtcacttcagcaatcaagc

SEQ ID NO: 40146 - DNA, 80 bp, synthetic construct
  misc_feature 1..80: note = Artificially Synthesized Probe
  source 1..80: mol_type = other DNA
tcctctgttatactttagtgtacatttaatttggcggctaatttgtactggagcctcacatgagttgagaacagtatcct

SEQ ID NO: 40147 - DNA, 80 bp, synthetic construct
  misc_feature 1..80: note = Artificially Synthesized Probe
  source 1..80: mol_type = other DNA
aaaacaaatggattgcatttggtttcttcatccacagaaacaccgaagtggcaaaactgaggttgagctggaggtgagga

SEQ ID NO: 40148 - DNA, 80 bp, synthetic construct
  misc_feature 1..80: note = Artificially Synthesized Probe
  source 1..80: mol_type = other DNA
tcatgttatcttgaggattatttgaccatgggcactcaggaaaatagaaaataggtgatattcctcctgtgcaaattgct

SEQ ID NO: 40149 - DNA, 80 bp, synthetic construct
  misc_feature 1..80: note = Artificially Synthesized Probe
  source 1..80: mol_type = other DNA
ctaaggagtgcagaggagtctcaggtggctggagcccacagggtggatggatgcagttctgtcagcacgaaggggaaagg

SEQ ID NO: 40150 - DNA, 80 bp, synthetic construct
  misc_feature 1..80: note = Artificially Synthesized Probe
  source 1..80: mol_type = other DNA
ctgctggcatgtaggggagtggggtgaccgctgctggaatgtgggggagtggggtgaccgctgctggaatgtgggggagt

SEQ ID NO: 40151 - DNA, 80 bp, synthetic construct
  misc_feature 1..80: note = Artificially Synthesized Probe
  source 1..80: mol_type = other DNA
ccaagggcatctccatgccagcgcccagacaggcagctccgtcccactgcaccatttcacacaccacccttttccaccct

SEQ ID NO: 40152 - DNA, 80 bp, synthetic construct
  misc_feature 1..80: note = Artificially Synthesized Probe
  source 1..80: mol_type = other DNA
ttggtgggctttcaccacactgcccactccagagatgaagaaacagaggtttcgagtggtgaaggtgcctggccaggggc

SEQ ID NO: 40153 - DNA, 80 bp, synthetic construct
  misc_feature 1..80: note = Artificially Synthesized Probe
  source 1..80: mol_type = other DNA
ccccattatgacaaaacccacccctttagaatagcatttagatggaatgggatctcacaaatgggagcaattcagatgtg

SEQ ID NO: 40154 - DNA, 80 bp, synthetic construct
  misc_feature 1..80: note = Artificially Synthesized Probe
  source 1..80: mol_type = other DNA
tttgagagcttcaggaggtggccacacagtgaggttagctttgtatcctaggggattcttaccaagaaaaaccttgtatt

SEQ ID NO: 40155 - DNA, 80 bp, synthetic construct
  misc_feature 1..80: note = Artificially Synthesized Probe
  source 1..80: mol_type = other DNA
ctgggcatgtgtatggctatgggaattccacgttaattctaaacagaatattcaactgccagtaaactctgagacgaact

SEQ ID NO: 40156 - DNA, 80 bp, synthetic construct
  misc_feature 1..80: note = Artificially Synthesized Probe
  source 1..80: mol_type = other DNA
attctaaaccattgcagttattgaggaccctgataaagatgcctcaactcctccctacaaggaggaagaggaacagtttt

SEQ ID NO: 40157 - DNA, 80 bp, synthetic construct
  misc_feature 1..80: note = Artificially Synthesized Probe
  source 1..80: mol_type = other DNA
tgtaacaggtgtgagctggaacagaagaagcctcacagtcaaggaagatagctcattttccagccgaaaaatgatgacag

SEQ ID NO: 40158 - DNA, 80 bp, synthetic construct
  misc_feature 1..80: note = Artificially Synthesized Probe
  source 1..80: mol_type = other DNA
tgtttaaaatatgtttcccattttgttttattttcttggaagaagattgtaaaatattcaaccacagaatattcctagtt

SEQ ID NO: 40159 - DNA, 80 bp, synthetic construct
  misc_feature 1..80: note = Artificially Synthesized Probe
  source 1..80: mol_type = other DNA
ggcctgtgattggctctgatagtttagaactgatcggatattttccacgtgaagttaggtcagtgtctagcctcgagcat

SEQ ID NO: 40160 - DNA, 80 bp, synthetic construct
  misc_feature 1..80: note = Artificially Synthesized Probe
  source 1..80: mol_type = other DNA
cactgtttttcctgatgtctttggagcgagggattttcagatattgccatggtgcattctcatgagggtttcgttaaata

SEQ ID NO: 40161 - DNA, 80 bp, synthetic construct
  misc_feature 1..80: note = Artificially Synthesized Probe
  source 1..80: mol_type = other DNA
tataatgaatctttcaactgagtgaaaacgttgtatgttatgtgaatagccattttaactacacaagaatatatttttgt

SEQ ID NO: 40162 - DNA, 80 bp, synthetic construct
  misc_feature 1..80: note = Artificially Synthesized Probe
  source 1..80: mol_type = other DNA
aaaactctgttgttcaggggtcagctgtaaatattctcacttggttactcagtcatgaaaataattcttattatttgatc

SEQ ID NO: 40163 - DNA, 80 bp, synthetic construct
  misc_feature 1..80: note = Artificially Synthesized Probe
  source 1..80: mol_type = other DNA
gaaatcactgcctccagccccggagtcttagctgtgtggcatcttcttgttactttacccttctgggcggagatgaggaa

SEQ ID NO: 40164 - DNA, 80 bp, synthetic construct
  misc_feature 1..80: note = Artificially Synthesized Probe
  source 1..80: mol_type = other DNA
tcaggcttcagcagattaagctccatgtaaacctgtggaagaagagcatttctgtgtctcacctctcacttgccacttgc

SEQ ID NO: 40165 - DNA, 80 bp, synthetic construct
  misc_feature 1..80: note = Artificially Synthesized Probe
  source 1..80: mol_type = other DNA
catgaatttgtatgaaaataatgtgacttttgttcccgcagacatagaatatggttgccatgcatccaaatgcccatgtg

SEQ ID NO: 40166 - DNA, 80 bp, synthetic construct
  misc_feature 1..80: note = Artificially Synthesized Probe
  source 1..80: mol_type = other DNA
acccattcataataaaacacatcccctctagacagaaaagcatatgatcgtggcatgtcaaagccaaggagggctctatc

SEQ ID NO: 40167 - DNA, 80 bp, synthetic construct
  misc_feature 1..80: note = Artificially Synthesized Probe
  source 1..80: mol_type = other DNA
ggaggaccagataagccccatcatgtgatacttactctatgcagatttcttaaagtcatgctgaaaaacttgtctcgatt

SEQ ID NO: 40168 - DNA, 80 bp, synthetic construct
  misc_feature 1..80: note = Artificially Synthesized Probe
  source 1..80: mol_type = other DNA
tcattagccagccgggatgagactaagtgcttaaaggctatttcatgttggagatttaaaaaagcacatattgcaaaagc

SEQ ID NO: 40169 - DNA, 80 bp, synthetic construct
  misc_feature 1..80: note = Artificially Synthesized Probe
  source 1..80: mol_type = other DNA
cccacatggggtgcgggagcagccttgggatgattagcttttaaggggagtccggctctgcaccctcggtccccagcagc

SEQ ID NO: 40170 - DNA, 80 bp, synthetic construct
  misc_feature 1..80: note = Artificially Synthesized Probe
  source 1..80: mol_type = other DNA
atgttcaggacatcccgcagttcatggagcccctcagtggaaatacttctttgctttatttagggatgataatttttgtt

SEQ ID NO: 40171 - DNA, 80 bp, synthetic construct
  misc_feature 1..80: note = Artificially Synthesized Probe
  source 1..80: mol_type = other DNA
ttagaatagccatgtgaacttggagctgcttgtctcataggaagttcatttttcaaaatctcttaagtggctgaggccag

SEQ ID NO: 40172 - DNA, 80 bp, synthetic construct
  misc_feature 1..80: note = Artificially Synthesized Probe
  source 1..80: mol_type = other DNA
tcgtagtgacaggattaataggaccaagatttacatgttgttatgaaatttgtgtcgtcgtgattacagatttggcttga

SEQ ID NO: 40173 - DNA, 80 bp, synthetic construct
  misc_feature 1..80: note = Artificially Synthesized Probe
  source 1..80: mol_type = other DNA
atttatctcgggtgactagtaaagaattttaccagcccccctaatatttttaccagtccatcctcctttgtgaaaggaca

SEQ ID NO: 40174 - DNA, 80 bp, synthetic construct
  misc_feature 1..80: note = Artificially Synthesized Probe
  source 1..80: mol_type = other DNA
ggctctcactgcattcttggaggaggtgtcattttcctgccctgagacacgaggctctcactgtgttctcggaggaggtg

SEQ ID NO: 40175 - DNA, 80 bp, synthetic construct; identical to SEQ ID NO: 40174
  misc_feature 1..80: note = Artificially Synthesized Probe
  source 1..80: mol_type = other DNA

SEQ ID NO: 40176 - DNA, 80 bp, synthetic construct
  misc_feature 1..80: note = Artificially Synthesized Probe
  source 1..80: mol_type = other DNA
agtgttttatcacgtgatggtcctgccccgggagagcgttgcccgtggagctgttttcccggtgatcacgcagggatctg

SEQ ID NO: 40177 - DNA, 80 bp, synthetic construct
  misc_feature 1..80: note = Artificially Synthesized Probe
  source 1..80: mol_type = other DNA
aatgggtccccagcagacactgaatctgccagaaccttgatcttgagcttctagcctctcaactgtgacaaatgaatgcc

SEQ ID NO: 40178 - DNA, 80 bp, synthetic construct
  misc_feature 1..80: note = Artificially Synthesized Probe
  source 1..80: mol_type = other DNA
taacctggacctggaggggtaggacttgaagttaatcccactgggtaattttttccttcagtcttgaacatgttttttta

SEQ ID NO: 40179 - DNA, 80 bp, synthetic construct
  misc_feature 1..80: note = Artificially Synthesized Probe
  source 1..80: mol_type = other DNA
tcccagtgaaaaacggctttacaataggaatgcttgtgatgtctagtaaagaaaagggatactagtgaaagaggtttggg

SEQ ID NO: 40180 - DNA, 80 bp, synthetic construct
  misc_feature 1..80: note = Artificially Synthesized Probe
  source 1..80: mol_type = other DNA
ggagagtagagtattttgtatttttgtgtttgccaggatgatcttgatctcttgacctcatgatctgcccgtctcagcct

SEQ ID NO: 40181 - DNA, 80 bp, synthetic construct
  misc_feature 1..80: note = Artificially Synthesized Probe
  source 1..80: mol_type = other DNA
caaatatttggagtcttgagcaaataaaaggagagggagaaaccagaagcatttccgagactagaggacttgattcggtc

SEQ ID NO: 40182 - DNA, 80 bp, synthetic construct
  misc_feature 1..80: note = Artificially Synthesized Probe
  source 1..80: mol_type = other DNA
cagttttacttttagagaaaaaaattatgcagaaagcgcagagtttccaggtacctccagagcacccacacctccaccac

SEQ ID NO: 40183 - DNA, 80 bp, synthetic construct
  misc_feature 1..80: note = Artificially Synthesized Probe
  source 1..80: mol_type = other DNA
ctgtatatcttctttgatagggtgtcggttcagatattatgcctgatttttaattaattggggtttttttaattgttgaa

SEQ ID NO: 40184 - DNA, 80 bp, synthetic construct
  misc_feature 1..80: note = Artificially Synthesized Probe
  source 1..80: mol_type = other DNA
ggtgactagaaaaaacgtcaaagaagtcaggaaatgagaggtgcaatgcacagaagacagtgagaagatgtgacttctct

SEQ ID NO: 40185 - DNA, 80 bp, synthetic construct
  misc_feature 1..80: note = Artificially Synthesized Probe
  source 1..80: mol_type = other DNA
tacataaccatctcaggttattggaaaaatgcagcctccgagccagacgtgccgatgggacacagggatcctgaacgtgt

SEQ ID NO: 40186 - DNA, 80 bp, synthetic construct
  misc_feature 1..80: note = Artificially Synthesized Probe
  source 1..80: mol_type = other DNA
cgatgttcacttcctccccgcatccccgggtgccgggaccagggctgtgtgctccctgaacgcgatgttcatttcctccc

SEQ ID NO: 40187 - DNA, 80 bp, synthetic construct
  misc_feature 1..80: note = Artificially Synthesized Probe
  source 1..80: mol_type = other DNA
gcgtgctccttggacgcgatgctcatttccttcccacatccccgggtgctgggaccagggctgcgtggtccctgaatgcg

SEQ ID NO: 40188 - DNA, 80 bp, synthetic construct
  misc_feature 1..80: note = Artificially Synthesized Probe
  source 1..80: mol_type = other DNA
ggaagaatgtcttgcccaccctagaagacgaggaaaagaggctggaaacaagcgcactcaatatttcctgcagctgtctt

SEQ ID NO: 40189 - DNA, 80 bp, synthetic construct
  misc_feature 1..80: note = Artificially Synthesized Probe
  source 1..80: mol_type = other DNA
tctgcaaaagctaaacatttagactctgctccactcgaacactcctgccaagaagtctctttaggtattctgtctttgtc

SEQ ID NO: 40190 - DNA, 80 bp, synthetic construct
  misc_feature 1..80: note = Artificially Synthesized Probe
  source 1..80: mol_type = other DNA
tccttgatcatcactcagttcctctctcaggatcatcctccaccattgtgactttactgacttgggtgccctcccaagca

SEQ ID NO: 40191 - DNA, 80 bp, synthetic construct
  misc_feature 1..80: note = Artificially Synthesized Probe
  source 1..80: mol_type = other DNA
cagagactcatcgtcgatgtgaacacacatccctaaatctagtttacatgcttaaattgagcactttgctcctcagtcac

SEQ ID NO: 40192 - DNA, 80 bp, synthetic construct
  misc_feature 1..80: note = Artificially Synthesized Probe
  source 1..80: mol_type = other DNA
ctgccttgatcacaactgatcccactgaatccatctttttctaagtttggggctcctgaagaaaatggaagtagttgcgt

SEQ ID NO: 40193 - DNA, 80 bp, synthetic construct
  misc_feature 1..80: note = Artificially Synthesized Probe
  source 1..80: mol_type = other DNA
tttctcctaagaacaagcatggcttcgttctggggttttccgagaagagagaagaattctacacacgggttgagttatat

SEQ ID NO: 40194 - DNA, 80 bp, synthetic construct
  misc_feature 1..80: note = Artificially Synthesized Probe
  source 1..80: mol_type = other DNA
tagattcagtgtccaaattctacagaatctgacagagaataaagtcgcatttctgtagcacttttctggcatagctgtgt

SEQ ID NO: 40195 - DNA, 80 bp, synthetic construct
  misc_feature 1..80: note = Artificially Synthesized Probe
  source 1..80: mol_type = other DNA
tgaatatgaattcccatgcagcctttcctggctctgtgatcttgaggaagacagcaactttttctgagcctcagctttct

SEQ ID NO: 40196 - DNA, 80 bp, synthetic construct
  misc_feature 1..80: note = Artificially Synthesized Probe
  source 1..80: mol_type = other DNA
cctagtcacattcttgccgggcgcatttcttgccgtcactgagttttaggcaatgcaatcattgcacagttattaacaga

SEQ ID NO: 40197 - DNA, 80 bp, synthetic construct
  misc_feature 1..80: note = Artificially Synthesized Probe
  source 1..80: mol_type = other DNA
agggatgtcatggattggttttggggtgacttctttatgttacagctctggagtctcaggcaatcctgctaacagcaatt

SEQ ID NO: 40198 - DNA, 80 bp, synthetic construct
  misc_feature 1..80: note = Artificially Synthesized Probe
  source 1..80: mol_type = other DNA
tcaaaagtaattcatgctagccatagaaaattcaaaaaatacaggtggaaggaaaaaaactaaataacctgcatccaggc

SEQ ID NO: 40199 - DNA, 80 bp, synthetic construct
  misc_feature 1..80: note = Artificially Synthesized Probe
  source 1..80: mol_type = other DNA
aatctgagttcttccgacgtgggacctaaactgaattgagacattctggtgggtttattcacactttctaatgaaaacct

SEQ ID NO: 40200 - DNA, 80 bp, synthetic construct
  misc_feature 1..80: note = Artificially Synthesized Probe
  source 1..80: mol_type = other DNA
ccctcactcttggaagcaactgctcttttgattccaatcaccatacattacatttttttaaaaacaaggcatccctctgt

SEQ ID NO: 40201 - DNA, 80 bp, synthetic construct
  misc_feature 1..80: note = Artificially Synthesized Probe
  source 1..80: mol_type = other DNA
taatgaagtccacttttttttgtcttttgtgcttagtgctttctgcatctgccctagagatctttgtctaacccaatatc

SEQ ID NO: 40202 - DNA, 80 bp, synthetic construct
  misc_feature 1..80: note = Artificially Synthesized Probe
  source 1..80: mol_type = other DNA
tttcaaatatgctctttatcagacagagaaggcttttctctacacctagtctaccaagagttttgctatttaattattga

SEQ ID NO: 40203 - DNA, 80 bp, synthetic construct
  misc_feature 1..80: note = Artificially Synthesized Probe
  source 1..80: mol_type = other DNA
ccttccactgggtggcttataaacaacagaaattcatttctcatagctctggaggctggaagtccaagatccaggcactg

SEQ ID NO: 40204 - DNA, 80 bp, synthetic construct
  misc_feature 1..80: note = Artificially Synthesized Probe
  source 1..80: mol_type = other DNA
gagtaaacagaaaatagcacccaccagcctaaactagacgtgaattatgtcattatgatgttcatttctttaatagttaa

SEQ ID NO: 40205 - DNA, 80 bp, synthetic construct
  misc_feature 1..80: note = Artificially Synthesized Probe
  source 1..80: mol_type = other DNA
tgagtttagggggcagccggcctggtgttggtcaggtgtggcattagtttacggggcagccggtctggtggtggtcaggt

SEQ ID NO: 40206 - DNA, 80 bp, synthetic construct
  misc_feature 1..80: note = Artificially Synthesized Probe
  source 1..80: mol_type = other DNA
tatcatctaaaaactcctcttggttgtcagattatttgaacaaactgtcagacacattataagtcacaagcatctaatgc

SEQ ID NO: 40207 - DNA, 80 bp, synthetic construct
  misc_feature 1..80: note = Artificially Synthesized Probe
  source 1..80: mol_type = other DNA
tttccagaatttctagctttatttttctctatcaatggtcatttttggaagcgtagcctactccatctggaatcaaacat

SEQ ID NO: 40208 - DNA, 80 bp, synthetic construct
  misc_feature 1..80: note = Artificially Synthesized Probe
  source 1..80: mol_type = other DNA
tcctccttcctgaggcctcgcgggcatctttctagaggatctccgagctcctcctccttcctgaggcctcacgagcatct

SEQ ID NO: 40209 - DNA, 80 bp, synthetic construct
  misc_feature 1..80: note = Artificially Synthesized Probe
  source 1..80: mol_type = other DNA
tccttcctgaggcctcacgggcgtctttctagaggatctccgagctcctcctccttcctgaggcctcacgggcatctttc

SEQ ID NO: 40210 - DNA, 80 bp, synthetic construct; identical to SEQ ID NO: 40208
  misc_feature 1..80: note = Artificially Synthesized Probe
  source 1..80: mol_type = other DNA

SEQ ID NO: 40211 - DNA, 80 bp, synthetic construct
  misc_feature 1..80: note = Artificially Synthesized Probe
  source 1..80: mol_type = other DNA
attgcatgggttaacagccctcatcaaccacgatgtttatataaacatacacgaagtttcttctgactctgctctaatat

SEQ ID NO: 40212 - DNA, 80 bp, synthetic construct
  misc_feature 1..80: note = Artificially Synthesized Probe
  source 1..80: mol_type = other DNA
ttctgcaaagcaacaacctccagaaacatttcgcacaacccctgctgttttctgtttcttccatgacctaaagtaactta

SEQ ID NO: 40213 - DNA, 80 bp, synthetic construct
  misc_feature 1..80: note = Artificially Synthesized Probe
  source 1..80: mol_type = other DNA
aacatttgtggaactgtgtcaatatgccacactgcacctataatcgcttttaatccccagaacaatcctttctgctgggc

SEQ ID NO: 40214 - DNA, 80 bp, synthetic construct
  misc_feature 1..80: note = Artificially Synthesized Probe
  source 1..80: mol_type = other DNA
cagttttcagtaacaaagcttgttttggaaagagtgcagtggaaattttcacgatttggggctgaacaacttttagatag

SEQ ID NO: 40215 - DNA, 80 bp, synthetic construct
  misc_feature 1..80: note = Artificially Synthesized Probe
  source 1..80: mol_type = other DNA
tcacacacccacacacacacataccacacacacacccccacactgtttcacacacactcatacccacacacaaccactca

SEQ ID NO: 40216 - DNA, 80 bp, synthetic construct
  misc_feature 1..80: note = Artificially Synthesized Probe
  source 1..80: mol_type = other DNA
actcacacacacatactctccccacacacacactcacacacagtctgtccatcagctgtgggtgttgcacctcttcacct

SEQ ID NO: 40217 - DNA, 80 bp, synthetic construct
  misc_feature 1..80: note = Artificially Synthesized Probe
  source 1..80: mol_type = other DNA
cgtgagggttttcacagtagctcctgaagaacaagagctgtgtgttcatggaaattgtataaccgtgagtagaaatggtt

SEQ ID NO: 40218 - DNA, 80 bp, synthetic construct
  misc_feature 1..80: note = Artificially Synthesized Probe
  source 1..80: mol_type = other DNA
cagcatttactacgctgtgcctgaagaacctgccaacgtccactattgtgataggctagaaacacagtaacccctctctt

SEQ ID NO: 40219 - DNA, 80 bp, synthetic construct
  misc_feature 1..80: note = Artificially Synthesized Probe
  source 1..80: mol_type = other DNA
tgcaaacagttagacaggtggtagacacaaagatggtagaggtggtggggcaagaccagggctgggcccagtgagggcag

SEQ ID NO: 40220 - DNA, 80 bp, synthetic construct
  misc_feature 1..80: note = Artificially Synthesized Probe
  source 1..80: mol_type = other DNA
ggtaaacatgtggtataatgtcaaatgctctggaggaaaaaaaaaaaaaccagtaatccacaagagggacttgggatggg

SEQ ID NO: 40221 - DNA, 80 bp, synthetic construct
  misc_feature 1..80: note = Artificially Synthesized Probe
  source 1..80: mol_type = other DNA
tagaaggagatatgaggaggggcagaggcttcagcccttcctagtgcccctgacttttgtgtcaaaattggcatcttcgt

SEQ ID NO: 40222 - DNA, 80 bp, synthetic construct
  misc_feature 1..80: note = Artificially Synthesized Probe
  source 1..80: mol_type = other DNA
ataggatttgcaacatacctctatcccaaatgtggaacaaaaccgaaatgcccgtccaggtggctggcttcctgattgct

SEQ ID NO: 40223 - DNA, 80 bp, synthetic construct
  misc_feature 1..80: note = Artificially Synthesized Probe
  source 1..80: mol_type = other DNA
tgaagtaaataggatcttgtagccctttctttaagaatgaaaaaagaaaatagggcagagggagaggatgagaactggcg

SEQ ID NO: 40224 - DNA, 80 bp, synthetic construct
  misc_feature 1..80: note = Artificially Synthesized Probe
  source 1..80: mol_type = other DNA
tcattgatgctaagtgggaccagagagtcgtttttttttttttaacactgaggcagactttcgtagcttcacgaggtgga

SEQ ID NO: 40225 - DNA, 80 bp, synthetic construct
  misc_feature 1..80: note = Artificially Synthesized Probe
  source 1..80: mol_type = other DNA
acacagcaccctaacctctctagatgctcctgaaccccacagcccaaagaaccctttattcattctacctacatttcact

SEQ ID NO: 40226 - DNA, 80 bp, synthetic construct
  misc_feature 1..80: note = Artificially Synthesized Probe
  source 1..80: mol_type = other DNA
ttttttttaatgagagtatggtccttgtgtgagcaatcaacttgctttctgttgaatgaatcagcttctttctggatctc

SEQ ID NO: 40227 - DNA, 80 bp, synthetic construct
  misc_feature 1..80: note = Artificially Synthesized Probe
  source 1..80: mol_type = other DNA
aactggtccttgatattgagaaacatgatgtcattgtcttctctgagtgtcagaggtgccatttggagatacagcatccc

SEQ ID NO: 40228 - DNA, 80 bp, synthetic construct
  misc_feature 1..80: note = Artificially Synthesized Probe
  source 1..80: mol_type = other DNA
acaaaaccacaccttcttaaaccacaccttcctaaaccagatcttcttaaaccagcccttcctaaaccacaccttcttct

SEQ ID NO: 40229 - DNA, 80 bp, synthetic construct
  misc_feature 1..80: note = Artificially Synthesized Probe
  source 1..80: mol_type = other DNA
gttttcttttcctactagaagactttttggctaagtgatactggtaagctttgacttactagccatgtggttttgcttat

SEQ ID NO: 40230 - DNA, 80 bp, synthetic construct
  misc_feature 1..80: note = Artificially Synthesized Probe
  source 1..80: mol_type = other DNA
tgtgtctttcactctcggatacggttttccggctgactctcattctcaggaccaatcgtattcgaatgagcagactggct

SEQ ID NO: 40231 - DNA, 80 bp, synthetic construct
  misc_feature 1..80: note = Artificially Synthesized Probe
  source 1..80: mol_type = other DNA
cagccagcacagggcctcttcacacctacagccagcacatggagcctcttcacacctacagccagcacagggcctcttca

SEQ ID NO: 40232 - DNA, 80 bp, synthetic construct; identical to SEQ ID NO: 40231
  misc_feature 1..80: note = Artificially Synthesized Probe
  source 1..80: mol_type = other DNA

SEQ ID NO: 40233 - DNA, 80 bp, synthetic construct
  misc_feature 1..80: note = Artificially Synthesized Probe
  source 1..80: mol_type = other DNA
ttagcactattctaattttttgaagattagttatggttttctgagagagcataaaatgaaccttaccttgccctaagtgg

SEQ ID NO: 40234 - DNA, 80 bp, synthetic construct
  misc_feature 1..80: note = Artificially Synthesized Probe
  source 1..80: mol_type = other DNA
cttggaagagagagctgaatctacattattttattttttgaccactaagttggatgtctaaatatgaaatttgcccatga

SEQ ID NO: 40235 - DNA, 80 bp, synthetic construct
  misc_feature 1..80: note = Artificially Synthesized Probe
  source 1..80: mol_type = other DNA
agctggagctatagtttctcccatgacctttcaagcaaaagtttaggactctgatgggccaggggcactccactcttgtc

SEQ ID NO: 40236 - DNA, 80 bp, synthetic construct
  misc_feature 1..80: note = Artificially Synthesized Probe
  source 1..80: mol_type = other DNA
gagaggtggtaaaagagttaagacaaggccagggaatgacgatggaagggctaggaatgtcccgcatggggtgagcacag

SEQ ID NO: 40237 - DNA, 80 bp, synthetic construct
  misc_feature 1..80: note = Artificially Synthesized Probe
  source 1..80: mol_type = other DNA
gacttccctcctatcttttctgaattgattgaggctctaccataatcaaattaaaacctcctataacgcaagtctcactt

SEQ ID NO: 40238 - DNA, 80 bp, synthetic construct
  misc_feature 1..80: note = Artificially Synthesized Probe
  source 1..80: mol_type = other DNA
tttctaattttgcaagcaagtatttattacatgcctgttgcataggtggtgcttgccaatgttctgggagatgcaagtca

SEQ ID NO: 40239 - DNA, 80 bp, synthetic construct
  misc_feature 1..80: note = Artificially Synthesized Probe
  source 1..80: mol_type = other DNA
taaattgttcaagtgtaaatttcagcagacacactttagtgttttgagtttctgtcctatttatgcatcttttctctacg

SEQ ID NO: 40240 - DNA, 80 bp, synthetic construct
  misc_feature 1..80: note = Artificially Synthesized Probe
  source 1..80: mol_type = other DNA
aattaaactcctttacattaaaaaaaaaaagacaaggatagtcctgtgcctctcctggtgcctggcaagtctcccctttg

SEQ ID NO: 40241 - DNA, 80 bp, synthetic construct
  misc_feature 1..80: note = Artificially Synthesized Probe
  source 1..80: mol_type = other DNA
ctgttcgtgctctattgtccagggtatctctatagaaatgctctaaatataggaagcccaagaagatagtagagattgag

SEQ ID NO: 40242 - DNA, 80 bp, synthetic construct
  misc_feature 1..80: note = Artificially Synthesized Probe
  source 1..80: mol_type = other DNA
tggaagctaatctgagctgcatgtgaacacgcacatatgtagacgaagctcgctagagaaacattctgtacaataaagta

SEQ ID NO: 40243 - DNA, 80 bp, synthetic construct
  misc_feature 1..80: note = Artificially Synthesized Probe
  source 1..80: mol_type = other DNA
tggatcgcagcgctgcagagtccccttcctggagcctgctggggtttcaggcccaaggcagacagcagcttcgatgtggg

SEQ ID NO: 40244 - DNA, 80 bp, synthetic construct
  misc_feature 1..80: note = Artificially Synthesized Probe
  source 1..80: mol_type = other DNA
aatctacattgtggaggaattaattctttttacttttaggttatgcgagacagacctgtctcactcctcgcacagactca

SEQ ID NO: 40245 - DNA, 80 bp, synthetic construct
  misc_feature 1..80: note = Artificially Synthesized Probe
  source 1..80: mol_type = other DNA
acactccaggccccataaccttggaggagctagatatttgtaaaaatctagcccaagaaaaatatgtatagaaaattacc

SEQ ID NO: 40246 - DNA, 80 bp, synthetic construct
  misc_feature 1..80: note = Artificially Synthesized Probe
  source 1..80: mol_type = other DNA
ggactgtactgcacagctgtgagggcacgtgcaagggatcctttcaaactgtgcctccactggaaactgaaaattgtcag

SEQ ID NO: 40247 - DNA, 80 bp, synthetic construct
  misc_feature 1..80: note = Artificially Synthesized Probe
  source 1..80: mol_type = other DNA
tctggaggacctgctgcaagattactaaactgtgcgtggtacagtagatgggactgtgctgaaggcactacctgctctcc

SEQ ID NO: 40248 - DNA, 80 bp, synthetic construct
  misc_feature 1..80: note = Artificially Synthesized Probe
  source 1..80: mol_type = other DNA
gtaaatccttttgccatcttacttacattccctttcaaagcttattcttttgcttgaaacaccggggtgggtggcttggt

SEQ ID NO: 40249 - DNA, 80 bp, synthetic construct
  misc_feature 1..80: note = Artificially Synthesized Probe
  source 1..80: mol_type = other DNA
gtctcctatagtgctcccaggcttattaggaagaggaaattcccacctaataaattttgatcagacggtctgctctcaaa

SEQ ID NO: 40250 - DNA, 80 bp, synthetic construct
  misc_feature 1..80: note = Artificially Synthesized Probe
  source 1..80: mol_type = other DNA
ctttgattatgtgtccaggtgagaaggtgcatgaggtctttcttcaggaattctccctgaagagcagagtgaagagttca

SEQ ID NO: 40251 - DNA, 80 bp, synthetic construct
  misc_feature 1..80: note = Artificially Synthesized Probe
  source 1..80: mol_type = other DNA
tgattgttgaaaacactgcacctccagtacgtacacaacccaggtgcatgactttggcttcgttgtatttcatattgtag

SEQ ID NO: 40252 - DNA, 80 bp, synthetic construct
  misc_feature 1..80: note = Artificially Synthesized Probe
  source 1..80: mol_type = other DNA
gaaaaaataacagaggtcagggtgtgaaagcaggagggtgttcttggagcagagacactgtcattttgggtttaagttga

SEQ ID NO: 40253 - DNA, 80 bp, synthetic construct
  misc_feature 1..80: note = Artificially Synthesized Probe
  source 1..80: mol_type = other DNA
tattaaaagttcatggtcctgagagagaagtccagcaattgagatgggagctaaaacttttgcatagtgcagctggtttt

SEQ ID NO: 40254 - DNA, 80 bp, synthetic construct
  misc_feature 1..80: note = Artificially Synthesized Probe
  source 1..80: mol_type = other DNA
agtttatcatctagctgtggaggtttaacatgtactaagctggtgctaatgcagaatcccaagaggaaataaagagcgca

SEQ ID NO: 40255 - DNA, 80 bp, synthetic construct
  misc_feature 1..80: note = Artificially Synthesized Probe
  source 1..80: mol_type = other DNA
tgtgttggttgtagatgccagtgttgaggtcagtgacatgattagctgatcacatgcttaataatgttgttttggatagg

SEQ ID NO: 40256 - DNA, 80 bp, synthetic construct
  misc_feature 1..80: note = Artificially Synthesized Probe
  source 1..80: mol_type = other DNA
agtcctgcatgctcatcaccttattgtgacagcagcaaggaggttgtttcatttaatggaatatgcttttctactccttg

SEQ ID NO: 40257 - DNA, 80 bp, synthetic construct
  misc_feature 1..80: note = Artificially Synthesized Probe
  source 1..80: mol_type = other DNA
gttcatgggacaccgttcagctgattgggccacagactttagtccccagataaataatgctctctttaaataatgttgtt

SEQ ID NO: 40258 - DNA, 80 bp, synthetic construct
  misc_feature 1..80: note = Artificially Synthesized Probe
  source 1..80: mol_type = other DNA
caaatttaaaacaaacagaccataggattccacaggcttggttccgacatcctagcaatgtttcagaggctgaaattgtc

SEQ ID NO: 40259 - DNA, 80 bp, synthetic construct
  misc_feature 1..80: note = Artificially Synthesized Probe
  source 1..80: mol_type = other DNA
tgggggcatagatatgcttttgtgtttgggtttctgaggaggtcattactccatgtatttgggtagttgaagcctctggg

SEQ ID NO: 40260 - DNA, 80 bp, synthetic construct
  misc_feature 1..80: note = Artificially Synthesized Probe
  source 1..80: mol_type = other DNA
agaaataatcctaatgtttggcaaaatactgattgcacagaacacctccttaaaacatgagtgtgccctgaaatgctcgc

SEQ ID NO: 40261 - DNA, 80 bp, synthetic construct
  misc_feature 1..80: note = Artificially Synthesized Probe
  source 1..80: mol_type = other DNA
gcactgacttctaaccaagtgcccacttctatcagtgtattagttatcagtgttaattcatcaaagcactatctaaagcc

SEQ ID NO: 40262 - DNA, 80 bp, synthetic construct
  misc_feature 1..80: note = Artificially Synthesized Probe
  source 1..80: mol_type = other DNA
ttccacatgtccatctctgtgtacttgttatgttccagaggctctatttggccctggttataaccaaaccttcaaagccc

SEQ ID NO: 40263 - DNA, 80 bp, synthetic construct
  misc_feature 1..80: note = Artificially Synthesized Probe
  source 1..80: mol_type = other DNA
acactccctggaccacacagctgggacatgctctttgaagagtgctggaggaaaatctgcgcttggaataaaacaaagaa

SEQ ID NO: 40264 - DNA, 80 bp, synthetic construct
  misc_feature 1..80: note = Artificially Synthesized Probe
  source 1..80: mol_type = other DNA
tgcacaaagagaggaccaatcaaatgttgggtcaatgtgaatgcctttctttttttttttttttttttttttgagacaga

SEQ ID NO: 40265 - DNA, 80 bp, synthetic construct
  misc_feature 1..80: note = Artificially Synthesized Probe
  source 1..80: mol_type = other DNA
ccacacaggctttgagaatgctcagttcccgccttaaaattctgaccaaatcttcaaaaatccaaccctgtgggctttct

SEQ ID NO: 40266 - DNA, 80 bp, synthetic construct
  misc_feature 1..80: note = Artificially Synthesized Probe
  source 1..80: mol_type = other DNA
tccagacaggaggcgactgagggagcagctgggaacttgtatccatttgtatttaaaagacaaagagaaaagaagaaact

SEQ ID NO: 40267 - DNA, 80 bp, synthetic construct
  misc_feature 1..80: note = Artificially Synthesized Probe
  source 1..80: mol_type = other DNA
ggtcgtttctcttttacctcaagcctcgttgctcctctcatgcgtttgctagatctgggacatctcagggtgatgaaatt

SEQ ID NO: 40268 - DNA, 80 bp, synthetic construct
  misc_feature 1..80: note = Artificially Synthesized Probe
  source 1..80: mol_type = other DNA
gcagcctcaggtcctctgcctttctgaggggatgttcgatgagactgttacttctttcttggaaagtagcatttgccccg

SEQ ID NO: 40269 - DNA, 80 bp, synthetic construct
  misc_feature 1..80: note = Artificially Synthesized Probe
  source 1..80: mol_type = other DNA
ggccgtctaaaacttttcttagtaaaaaatggaatctaaattgggcagaaggtgtgtggtgtaaactcccttcctgctgt

SEQ ID NO: 40270 - DNA, 80 bp, synthetic construct
  misc_feature 1..80: note = Artificially Synthesized Probe
  source 1..80: mol_type = other DNA
tgagtgacactgcccacctccgattgcagttctgaagatcagtgagatactaatgcctgtgaattttagtctcacgtaat

SEQ ID NO: 40271 - DNA, 80 bp, synthetic construct
  misc_feature 1..80: note = Artificially Synthesized Probe
  source 1..80: mol_type = other DNA
agcacttcctgcagagggctttgtgctttgaaattgcactttagagtcatcgattggattgtaaatactttgaatgacaa

SEQ ID NO: 40272 - DNA, 80 bp, synthetic construct
  misc_feature 1..80: note = Artificially Synthesized Probe
  source 1..80: mol_type = other DNA
agattgttttcgcaaactaagctaaactgcaaactaaaaatgaaggcagtaaatgaattgctaactaaactaaattgcaa

SEQ ID NO: 40273 - DNA, 80 bp, synthetic construct
  misc_feature 1..80: note = Artificially Synthesized Probe
  source 1..80: mol_type = other DNA
tttctttaaattgttatatctgatgaccagtgctgcaggctgagacaccaggaccatgagaactacaagcaggggttatg

SEQ ID NO: 40274 - DNA, 80 bp, synthetic construct
  misc_feature 1..80: note = Artificially Synthesized Probe
  source 1..80: mol_type = other DNA
ttaggaactcaccaaccctgtacctgagctccaaccagatgttaggaactcaccacccctgtacctgagctccaaccaga

SEQ ID NO: 40275 - DNA, 80 bp, synthetic construct
  misc_feature 1..80: note = Artificially Synthesized Probe
  source 1..80: mol_type = other DNA
tgcacctgagctccaaccagatgttaggaactcaccaaccctgcacctgagctccaaccagatgttaggaactcaccaac

SEQ ID NO: 40276 - DNA, 80 bp, synthetic construct
  misc_feature 1..80: note = Artificially Synthesized Probe
  source 1..80: mol_type = other DNA
acgtgtgtgctagatccccctgcacgtgtgtactagatttccctcacacatgtgtgctagatcccttgcacatgtatcct

SEQ ID NO: 40277 - DNA, 80 bp, synthetic construct
  misc_feature 1..80: note = Artificially Synthesized Probe
  source 1..80: mol_type = other DNA
aagctttagtttgaagctttttgtatagggtctttgtggttaatgcacgtcctgccgtcctgatgatgtcttcacgggag

SEQ ID NO: 40278 - DNA, 80 bp, synthetic construct
  misc_feature 1..80: note = Artificially Synthesized Probe
  source 1..80: mol_type = other DNA
gttgcccatgtgtgatttcccccttgcttttccctttctctgtattcagcacctgcccactgggtttcctgagcacttct

SEQ ID NO: 40279 - DNA, 80 bp, synthetic construct
  misc_feature 1..80: note = Artificially Synthesized Probe
  source 1..80: mol_type = other DNA
actaatttcttcaattaaaccgaagtgaatgttgactctttgtaagggggttggatgagttccagcaattggcgggtttt

SEQ ID NO: 40280 - DNA, 80 bp, synthetic construct
  misc_feature 1..80: note = Artificially Synthesized Probe
  source 1..80: mol_type = other DNA
tgtaggttgggtgaggatggaggttgttggctgggtgaggatggaggttgtaggttgagtcagggtggaggttgtaggtt

SEQ ID NO: 40281 - DNA, 80 bp, synthetic construct
  misc_feature 1..80: note = Artificially Synthesized Probe
  source 1..80: mol_type = other DNA
atgaaggtaacttttatgagtcatgaccttccatgggtcacgcttcatgcaagtgactacagaatcgcgatggcttagga

SEQ ID NO: 40282 - DNA, 80 bp, synthetic construct
  misc_feature 1..80: note = Artificially Synthesized Probe
  source 1..80: mol_type = other DNA
aaaaacctaaagatccaggaagaaattagtgagaacattctaaatatccacactgttgctaagttttttttgttccctat

SEQ ID NO: 40283 - DNA, 80 bp, synthetic construct
  misc_feature 1..80: note = Artificially Synthesized Probe
  source 1..80: mol_type = other DNA
gatgaaggatacttccctcatctattgattcatttgaaaactattgaccaagtactttctgctctagatattgacagaat

SEQ ID NO: 40284 - DNA, 80 bp, synthetic construct
  misc_feature 1..80: note = Artificially Synthesized Probe
  source 1..80: mol_type = other DNA
tcgggctttgactctactcgaagctttgaaaaaaactattttgagccaaacacgttcatctctcctgattttaatataga

SEQ ID NO: 40285 - DNA, 80 bp, synthetic construct
  misc_feature 1..80: note = Artificially Synthesized Probe
  source 1..80: mol_type = other DNA
ctctgatttttaataatatcttttttttttcctgctagcccccagaggtcatgctgaaagtacgtctaatagacaggtaa

SEQ ID NO: 40286 - DNA, 80 bp, synthetic construct
  misc_feature 1..80: note = Artificially Synthesized Probe
  source 1..80: mol_type = other DNA
atttaagtggaggcggccagcacacaccttggatgtaatttaaaaccatttcctgaggaaagatgtgtgatatgctttcc

SEQ ID NO: 40287 - DNA, 80 bp, synthetic construct
  misc_feature 1..80: note = Artificially Synthesized Probe
  source 1..80: mol_type = other DNA
acagaagaagggatcaacatttgtcggaattggcactcttggaaaactaagtctaggagatcatatattgcttttttttt

SEQ ID NO: 40288 - DNA, 80 bp, synthetic construct
  misc_feature 1..80: note = Artificially Synthesized Probe
  source 1..80: mol_type = other DNA
ccctacaggcagttaacatgcatgggctggtttgtttcttgggattttctgttagtttgtcttgttttgctttccagaga

SEQ ID NO: 40289 - DNA, 80 bp, synthetic construct
  misc_feature 1..80: note = Artificially Synthesized Probe
  source 1..80: mol_type = other DNA
ttgtagaatgattttgtgatgttgtgatgcttgtggagcatcgcgtaaggcttcttgcttatttaaactgtgcaaggtaa

SEQ ID NO: 40290 - DNA, 80 bp, synthetic construct
  misc_feature 1..80: note = Artificially Synthesized Probe
  source 1..80: mol_type = other DNA
aaaaataaattttaaaaaaagctggtgcttttctccaagttatacaactagaagcctgagcccactcctcgcattcccct

SEQ ID NO: 40291 - DNA, 80 bp, synthetic construct
  misc_feature 1..80: note = Artificially Synthesized Probe
  source 1..80: mol_type = other DNA
aaaaagtgatctttgtaaaactgtcttagcattggccatgacgattgtgcagtaaagacagtgctgtgaagggcattagc

SEQ ID NO: 40292 - DNA, 80 bp, synthetic construct
  misc_feature 1..80: note = Artificially Synthesized Probe
  source 1..80: mol_type = other DNA
atataattatacaatgctcatttgtctttgtctttatccctgtgtgttgtctgaggttggtcagtctagtatgggtctag

SEQ ID NO: 40293 - DNA, 80 bp, synthetic construct
  misc_feature 1..80: note = Artificially Synthesized Probe
  source 1..80: mol_type = other DNA
tcagttaacaagaggacaggcataaatcgaacctgtgtgttgatgcagccagccgcgccgcccctgcgtcctggtccctc

SEQ ID NO: 40294 - DNA, 80 bp, synthetic construct
  misc_feature 1..80: note = Artificially Synthesized Probe
  source 1..80: mol_type = other DNA
tgttaaagttgaaatcatgctcagtacaaagattgtgtctttgttgcaaaagctggaatttttatggtccccagcctgct

SEQ ID NO: 40295 - DNA, 80 bp, synthetic construct
  misc_feature 1..80: note = Artificially Synthesized Probe
  source 1..80: mol_type = other DNA
tatgtcacaaggtccttaacgcacagcctacaacttaagcattttctatccccacagcacctcataatcatgtgaaaaag

SEQ ID NO: 40296 - DNA, 80 bp, synthetic construct
  misc_feature 1..80: note = Artificially Synthesized Probe
  source 1..80: mol_type = other DNA
gtgatgagctgtgtttactgagcatgatgaagtaaagctcaacgtgattactctgaagtccagccttactgtcagtctaa

SEQ ID NO: 40297 - DNA, 80 bp, synthetic construct
  misc_feature 1..80: note = Artificially Synthesized Probe
  source 1..80: mol_type = other DNA
aacagaaatgttggcccaaagaaaaacgaaaagttcttggaaaccttcaagttgccacccacagcacagcctcgagttgt

SEQ ID NO: 40298 - DNA, 80 bp, synthetic construct
  misc_feature 1..80: note = Artificially Synthesized Probe
  source 1..80: mol_type = other DNA
ctgtttgctacaagatgtgattggcgctttctttctaataaggaccttgattatttgaaacagcctgtctgaattgtatt

SEQ ID NO: 40299 - DNA, 80 bp, synthetic construct
  misc_feature 1..80: note = Artificially Synthesized Probe
  source 1..80: mol_type = other DNA
aagcatctgagctcctaagaaggttccccattccttctatgctttggttatgtttctcatccttgctgactcatctttaa

SEQ ID NO: 40300 - DNA, 80 bp, synthetic construct
  misc_feature 1..80: note = Artificially Synthesized Probe
  source 1..80: mol_type = other DNA
tgaatagtcgactttggattattttcagctaacactagatgtcactttcccccagtccatactaaagttccctgtaaaat

SEQ ID NO: 40301 - DNA, 80 bp, synthetic construct
  misc_feature 1..80: note = Artificially Synthesized Probe
  source 1..80: mol_type = other DNA
agtggcagtggtctctaagtatggactgaccaggaaatcactgtaattactcctaccttcatcaaaatagtttaaatgac

SEQ ID NO: 40302 - DNA, 80 bp, synthetic construct
  misc_feature 1..80: note = Artificially Synthesized Probe
  source 1..80: mol_type = other DNA
acacagcccggggaactcggttctgccctgctgcgtggtagctgacccatgtgtcagttgagccaataagtatatatctg

SEQ ID NO: 40303 - DNA, 80 bp, synthetic construct
  misc_feature 1..80: note = Artificially Synthesized Probe
  source 1..80: mol_type = other DNA
agtgccatttggagaattgctttatcatgatgcaccttacgtacgtgcagacacagacacacagaatttagagaagaatg

SEQ ID NO: 40304 - DNA, 80 bp, synthetic construct
  misc_feature 1..80: note = Artificially Synthesized Probe
  source 1..80: mol_type = other DNA
gctgagaaatggccccaaatgcgtttcctttaagtggttattgcttgtgagacaaaaggataacaacaggaattaggaaa

SEQ ID NO: 40305 - DNA, 80 bp, synthetic construct
  misc_feature 1..80: note = Artificially Synthesized Probe
  source 1..80: mol_type = other DNA
attcttttggttttaatcagggtggaatcagaatgcttttagatttgtaatttccatgttggcaggaggaagggagtcag

SEQ ID NO: 40306 - DNA, 80 bp, synthetic construct
  misc_feature 1..80: note = Artificially Synthesized Probe
  source 1..80: mol_type = other DNA
taagaaatatccatcaattaccatcatccccctgcttaaggttcttctgtatcagtggagaggcttcgggcaggtgttcc

SEQ ID NO: 40307 - DNA, 80 bp, synthetic construct
  misc_feature 1..80: note = Artificially Synthesized Probe
  source 1..80: mol_type = other DNA
ctggacgggcagctcccatgaatgctgccagctactgtagatagtgctgatcacaataatttatgatttctgattttatc

SEQ ID NO: 40308 - DNA, 80 bp, synthetic construct
  misc_feature 1..80: note = Artificially Synthesized Probe
  source 1..80: mol_type = other DNA
ctggtgtgcacacttcatgtgaagctgctgaggaaaatttactttttagaacagcagtacttcttcccagatgagcagat

SEQ ID NO: 40309 - DNA, 80 bp, synthetic construct
  misc_feature 1..80: note = Artificially Synthesized Probe
  source 1..80: mol_type = other DNA
gaatactgatgatttttggcgtggtaacatgatttctcataccactcctgtagtctaaagctggtttgagtgcctgcttt

SEQ ID NO: 40310 - DNA, 80 bp, synthetic construct
  misc_feature 1..80: note = Artificially Synthesized Probe
  source 1..80: mol_type = other DNA
tttttcttttccacagtttttgactggcttgaatagtgcctggcccatactaggtgcccagtaaaaattggctgaagata

SEQ ID NO: 40311 - DNA, 80 bp, synthetic construct
  misc_feature 1..80: note = Artificially Synthesized Probe
  source 1..80: mol_type = other DNA
caggaagaatctgagcagccttgccgtccactgcgtgtgacactcggttccatgcttggggtaggttctgagaagagctc

SEQ ID NO: 40312 - DNA, 80 bp, synthetic construct
  misc_feature 1..80: note = Artificially Synthesized Probe
  source 1..80: mol_type = other DNA
ctggaattccactggatggggtggggggtttccttctgtcttttactccatctgtgttgtccatgcagctgggcccccta

SEQ ID NO: 40313 - DNA, 80 bp, synthetic construct
  misc_feature 1..80: note = Artificially Synthesized Probe
  source 1..80: mol_type = other DNA
gataatttctcattgtgttcatttgaactctgatggtgagaattctttaaggaatatgttcctttcatctttatctgtaa

SEQ ID NO: 40314 - DNA, 80 bp, synthetic construct
  misc_feature 1..80: note = Artificially Synthesized Probe
  source 1..80: mol_type = other DNA
tcagtgggcatttgcttctacattcacgttggatgttggtttgtttctcttcatgttgtgcctttgcctgttttggcgtc

SEQ ID NO: 40315 - DNA, 80 bp, synthetic construct
  misc_feature 1..80: note = Artificially Synthesized Probe
  source 1..80: mol_type = other DNA
tggggtatttcttgccttttattgccagtgtttaccaccatgtattacctatagagtggtgctttaatcccttcccataa

SEQ ID NO: 40316 - DNA, 80 bp, synthetic construct
  misc_feature 1..80: note = Artificially Synthesized Probe
  source 1..80: mol_type = other DNA
tcacctccctgcttagctgtgcttctagatattttatttttgtgtgtgattatggtgaacaggattgcttcttgatttgg

SEQ ID NO: 40317 - DNA, 80 bp, synthetic construct
  misc_feature 1..80: note = Artificially Synthesized Probe
  source 1..80: mol_type = other DNA
gtatatacccagtaatgggatggctgggtcaaatggtatttctagttctagatccctgaggaatcgccatgaacagacac

SEQ ID NO: 40318 - DNA, 80 bp, synthetic construct
  misc_feature 1..80: note = Artificially Synthesized Probe
  source 1..80: mol_type = other DNA
ttaagatatgatgttaggttgttaattggaggtcttttttaactttttgatatgggtgttcagcactataaacttttgtc

SEQ ID NO: 40319 - DNA, 80 bp, synthetic construct
  misc_feature 1..80: note = Artificially Synthesized Probe
  source 1..80: mol_type = other DNA
tagtgagtgagttctcatgagatctggttgtgtaacagtgtgtagcaaccccacccctttactcttgctcccaccatata

SEQ ID NO: 40320 - DNA, 80 bp, synthetic construct
  misc_feature 1..80: note = Artificially Synthesized Probe
  source 1..80: mol_type = other DNA
ctgcctttttctttttctcctctctttctagaactgtaactgcctgttactgagtttctgattttcccacagctctgata

SEQ ID NO: 40321 - DNA, 80 bp, synthetic construct
  misc_feature 1..80: note = Artificially Synthesized Probe
  source 1..80: mol_type = other DNA
gtgagggagggagattttctgaatcattcatgaagctctaggttttcaaaggtgtcttatcagctgaagtttctaaaatg

SEQ ID NO: 40322 - DNA, 80 bp, synthetic construct
  misc_feature 1..80: note = Artificially Synthesized Probe
  source 1..80: mol_type = other DNA
gttcccctgtgactcttaggagatttgcaggagaaagtctctggggcaaggagtattgagtacattgacatctactatat

SEQ ID NO: 40323 - DNA, 80 bp, synthetic construct
  misc_feature 1..80: note = Artificially Synthesized Probe
  source 1..80: mol_type = other DNA
agtggttctctatgtgtacattgtctttggaatgattgagaggtggagtccaaggccttgttagtaaatgtggaagccag

SEQ ID NO: 40324 - DNA, 80 bp, synthetic construct
  misc_feature 1..80: note = Artificially Synthesized Probe
  source 1..80: mol_type = other DNA
cttcctagcttcctcctgccaccattcactgttaatgtaggtgatccaggaagccgcaggttcttctctgaagaaaagag

SEQ ID NO: 40325 - DNA, 80 bp, synthetic construct
  misc_feature 1..80: note = Artificially Synthesized Probe
  source 1..80: mol_type = other DNA
tctcttgtatatttattcatacttgtttccttgtttattgtgtgtgaccccattgaagcatgggatggagacatacccaa

SEQ ID NO: 40326 - DNA, 80 bp, synthetic construct
  misc_feature 1..80: note = Artificially Synthesized Probe
  source 1..80: mol_type = other DNA
tggcttttgggttgggggggtattgacctggtttgtggtgaaagctgatttctgtggtataaatacatctatagtggctg

SEQ ID NO: 40327 - DNA, 80 bp, synthetic construct
  misc_feature 1..80: note = Artificially Synthesized Probe
  source 1..80: mol_type = other DNA
tcctccttatagttaattcttcatcacacagccatctaaacaagtgctgtgtattcatgttagggtccaggtacagttgt

SEQ ID NO: 40328 - DNA, 80 bp, synthetic construct
  misc_feature 1..80: note = Artificially Synthesized Probe
  source 1..80: mol_type = other DNA
gctgtgtcctgaatttgaaatatgaaccaccctccagcatgcttctcaggtaccatttttactactgttcagactcattc

SEQ ID NO: 40329 - DNA, 80 bp, synthetic construct
  misc_feature 1..80: note = Artificially Synthesized Probe
  source 1..80: mol_type = other DNA
ttggtctttccataaatttattaagtcactcacctgtgttggcaaagccctaaatagaatcctgctctccttgttttctt

SEQ ID NO: 40330 - DNA, 80 bp, synthetic construct
  misc_feature 1..80: note = Artificially Synthesized Probe
  source 1..80: mol_type = other DNA
cattcaacactgattgtggacttggtcactttgtaactgagcctcgcctagaatggaagtcccaaggtgcagagactgtg

SEQ ID NO: 40331 - DNA, 80 bp, synthetic construct
  misc_feature 1..80: note = Artificially Synthesized Probe
  source 1..80: mol_type = other DNA
gtccctggttggatttaaagtgttgtaggtaccagttttcttagaaattggtccagaatatattgagtagagggagatta

SEQ ID NO: 40332 - DNA, 80 bp, synthetic construct
  misc_feature 1..80: note = Artificially Synthesized Probe
  source 1..80: mol_type = other DNA
acttctcagttcctgaacccagaccttaggtcttcaagtctaatgcttattttattggggcacagtagaagttttattat

SEQ ID NO: 40333 - DNA, 80 bp, synthetic construct
  misc_feature 1..80: note = Artificially Synthesized Probe
  source 1..80: mol_type = other DNA
agatgctggtaaactgatatctcaggccttcagtcagaaatctagcattctctgtggttgattttatggtattcttgcct

SEQ ID NO: 40334 - DNA, 80 bp, synthetic construct
  misc_feature 1..80: note = Artificially Synthesized Probe
  source 1..80: mol_type = other DNA
aggttgtcatggttagttaaaaagggaagatttcagataagacacatttggaaccttctggacagctcaggatcccctaa

SEQ ID NO: 40335 - DNA, 80 bp, synthetic construct
  misc_feature 1..80: note = Artificially Synthesized Probe
  source 1..80: mol_type = other DNA
ggcctttacagtaggggcaggattgtcagcgtcagaggagaggtgaggatggaaggagaggttcgcggttaagtgcctgg

SEQ ID NO: 40336 - DNA, 80 bp, synthetic construct
  misc_feature 1..80: note = Artificially Synthesized Probe
  source 1..80: mol_type = other DNA
tccattgctcttgggttaagctcccaggagtgtgcctgctggtcattttaggaagtatattcgcaattttatgggatttt

SEQ ID NO: 40337 - DNA, 80 bp, synthetic construct
  misc_feature 1..80: note = Artificially Synthesized Probe
  source 1..80: mol_type = other DNA
gtccctgtttccattcctagtttgctgagggtttttaatcctaaattgtgttgaatttagtggaaaacttactttgcatc

SEQ ID NO: 40338 - DNA, 80 bp, synthetic construct
  misc_feature 1..80: note = Artificially Synthesized Probe
  source 1..80: mol_type = other DNA
cctcctaacaccatcacattgcagattagagcttcaacatcatctaggaattttaggaggacccagatattcagtccata

SEQ ID NO: 40339 - DNA, 80 bp, synthetic construct
  misc_feature 1..80: note = Artificially Synthesized Probe
  source 1..80: mol_type = other DNA
atcctgttatagttttgacctaatactcatgaatggggatgtgaggcatgttttttgctccaggtagcacccagggcatc

SEQ ID NO: 40340 - DNA, 80 bp, synthetic construct
  misc_feature 1..80: note = Artificially Synthesized Probe
  source 1..80: mol_type = other DNA
acttcaagaatctttgcaatacaagatgagtgaatgaatgaatggaataaattaccatcaactgacccaaatctaccttc

SEQ ID NO: 40341 - DNA, 80 bp, synthetic construct
  misc_feature 1..80: note = Artificially Synthesized Probe
  source 1..80: mol_type = other DNA
ggttcttttgcttagcataatgatttcaagttccatgcacattatagtattagaccgttttcttgttactaccagataca

SEQ ID NO: 40342 - DNA, 80 bp, synthetic construct
  misc_feature 1..80: note = Artificially Synthesized Probe
  source 1..80: mol_type = other DNA
aattgtggatatccagagagcccagcatcatattttcaaaagtcttttcttctctcctttgaattgtcctggaaatcctg

SEQ ID NO: 40343 - DNA, 80 bp, synthetic construct
  misc_feature 1..80: note = Artificially Synthesized Probe
  source 1..80: mol_type = other DNA
tcttttttcctcctaatattcctttgataggcacacccagtaaaatgttaaatggaagtggcaagaataaacgtatttgt

SEQ ID NO: 40344 - DNA, 80 bp, synthetic construct
  misc_feature 1..80: note = Artificially Synthesized Probe
  source 1..80: mol_type = other DNA
attttcccaaagctctttcacaccgcactttctttgacttattacttccttcctctctacaaagagcagcacaacttccc

SEQ ID NO: 40345 - DNA, 80 bp, synthetic construct
  misc_feature 1..80: note = Artificially Synthesized Probe
  source 1..80: mol_type = other DNA
tcaagtgagactttttttctgttttgccaatactagtaccctatgtgtgtctggtcatcaactcagcagcacttcgttct

SEQ ID NO: 40346 - DNA, 80 bp, synthetic construct
  misc_feature 1..80: note = Artificially Synthesized Probe
  source 1..80: mol_type = other DNA
atcacctactagcctagagctggaactacacaacccattacaaaacctgttgacacaagcgaacagcacaaagaagcatg

SEQ ID NO: 40347 - DNA, 80 bp, synthetic construct
  misc_feature 1..80: note = Artificially Synthesized Probe
  source 1..80: mol_type = other DNA
aattccctcatcttgctggagatttagacctccagatataagaggcccagagaactctagaaagatacattgcaaaatgg

SEQ ID NO: 40348 - DNA, 80 bp, synthetic construct
  misc_feature 1..80: note = Artificially Synthesized Probe
  source 1..80: mol_type = other DNA
atgcagattggctaaattgatttaaaacaacaacaacattattcaaccatatgctgcttacaagaaacccacctgagtgg

SEQ ID NO: 40349 - DNA, 80 bp, synthetic construct
  misc_feature 1..80: note = Artificially Synthesized Probe
  source 1..80: mol_type = other DNA
catcaaggaaccaggaaaagaagaacaaaccaaacccaaagctaacagaagaaaataaataaagataaaagcaaaaccaa

SEQ ID NO: 40350 - DNA, 80 bp, synthetic construct
  misc_feature 1..80: note = Artificially Synthesized Probe
  source 1..80: mol_type = other DNA
caaacaccaaaaacatgctcctaagagctggaacaagatgaagatgttcactctcacctctcctattcaacatagtactg

SEQ ID NO: 40351 - DNA, 80 bp, synthetic construct
  misc_feature 1..80: note = Artificially Synthesized Probe
  source 1..80: mol_type = other DNA
agaatctacaaggaatgcaaaaaactcaataacaaaagcaaccacttaaaagtaggcaaaagtaggcaaaagacatgaac

SEQ ID NO: 40352 - DNA, 80 bp, synthetic construct
  misc_feature 1..80: note = Artificially Synthesized Probe
  source 1..80: mol_type = other DNA
tccctgcatgtttccacttccaagtgagagctgaataaagtgtacacacaaccatagtagaataatagacctggagactc

SEQ ID NO: 40353 - DNA, 80 bp, synthetic construct
  misc_feature 1..80: note = Artificially Synthesized Probe
  source 1..80: mol_type = other DNA
tgtaatttgctaggcttctcccctttattccttaatgtgtactgtattctggggcttctgaaatccccatgcaaactgaa

SEQ ID NO: 40354 - DNA, 80 bp, synthetic construct
  misc_feature 1..80: note = Artificially Synthesized Probe
  source 1..80: mol_type = other DNA
tattcttaacatagaacctagcagttgtgctctctggactttacccaaatgaattgaaaacttatgtacccacacaaaaa

SEQ ID NO: 40355 - DNA, 80 bp, synthetic construct
  misc_feature 1..80: note = Artificially Synthesized Probe
  source 1..80: mol_type = other DNA
ttttacatgccaactgaattatatggaggaagccaagataaataattagcaatatagtcttcagggacatatgagcagag

SEQ ID NO: 40356 - DNA, 80 bp, synthetic construct
  misc_feature 1..80: note = Artificially Synthesized Probe
  source 1..80: mol_type = other DNA
tccctaaataatatattgtaacagtgttgttatggcatttacattgtggtagatagaagtaatctggagatgatttagag

SEQ ID NO: 40357 - DNA, 80 bp, synthetic construct
  misc_feature 1..80: note = Artificially Synthesized Probe
  source 1..80: mol_type = other DNA
acctccaccccctgcctcagcttcctgaatagctgggattacagatgactgccactgcacctggttaattttataatttt

SEQ ID NO: 40358 - DNA, 80 bp, synthetic construct
  misc_feature 1..80: note = Artificially Synthesized Probe
  source 1..80: mol_type = other DNA
attgttattaaactcaggtttcccaggttttgtgctcagtgttcatttcagttctttctgaaaggccctaggttacctaa

SEQ ID NO: 40359 - DNA, 80 bp, synthetic construct
  misc_feature 1..80: note = Artificially Synthesized Probe
  source 1..80: mol_type = other DNA
catgctgcttctgatactggtgaatctcccaaccacgtggaaccacgtgaattctctcctcattttccctttcctgatct

SEQ ID NO: 40360 - DNA, 80 bp, synthetic construct
  misc_feature 1..80: note = Artificially Synthesized Probe
  source 1..80: mol_type = other DNA
acaatcagcctcatgagcgtggtgtgtgggattctgaatgaatctgtccctctggtcaaaatcactcaagcatttatctg

SEQ ID NO: 40361 - DNA, 80 bp, synthetic construct
  misc_feature 1..80: note = Artificially Synthesized Probe
  source 1..80: mol_type = other DNA
attgttttttctttttggttgctggtggccatgtcttgtgagcagcataaaaaactgtgattgtgatgttgctatttctg

SEQ ID NO: 40362 - DNA, 80 bp, synthetic construct
  misc_feature 1..80: note = Artificially Synthesized Probe
  source 1..80: mol_type = other DNA
tggagagggatttattcataaaggcagagagaagggtgatctagaaagggatttatatgggcagagagaagggtggtctg

SEQ ID NO: 40363 - DNA, 80 bp, synthetic construct
  misc_feature 1..80: note = Artificially Synthesized Probe
  source 1..80: mol_type = other DNA
gggtgctctggagagggatttatatgggcagagagaagggtggtctgtagagggatttataaggacagagagaagggtgg

SEQ ID NO: 40364 - DNA, 80 bp, synthetic construct
  misc_feature 1..80: note = Artificially Synthesized Probe
  source 1..80: mol_type = other DNA
taaggacagagagaagggtggtctggagaaggatttatatgggcagagagaagggtggtctgtagagggatttataaggg

SEQ ID NO: 40365 - DNA, 80 bp, synthetic construct
  misc_feature 1..80: note = Artificially Synthesized Probe
  source 1..80: mol_type = other DNA
tattatttttcaaaaacacaccataaaccaagttaactgacagaatacaagctggaaggacgtgtgttctatttatgtga

SEQ ID NO: 40366 - DNA, 80 bp, synthetic construct
  misc_feature 1..80: note = Artificially Synthesized Probe
  source 1..80: mol_type = other DNA
tcaggctggactttctgacaggctgcctccagcagagaccgaaagcaggcatttgaaggaggaaggctgagacaggaatt

SEQ ID NO: 40367 - DNA, 80 bp, synthetic construct
  misc_feature 1..80: note = Artificially Synthesized Probe
  source 1..80: mol_type = other DNA
acaaacatgcaaacaaatgcacatgcatgcacacatgtagagacacatacgtgcacattcacacccagaatatatgcata

SEQ ID NO: 40368 - DNA, 80 bp, synthetic construct
  misc_feature 1..80: note = Artificially Synthesized Probe
  source 1..80: mol_type = other DNA
tgtcttcatttactggccacaatcggcataagctgctgcttctgaaagatgcccttgaaatttggtgcccactcctgaga

SEQ ID NO: 40369 - DNA, 80 bp, synthetic construct
  misc_feature 1..80: note = Artificially Synthesized Probe
  source 1..80: mol_type = other DNA
ggttgaaatcagacaggccagatatcatgtctgtgagtcttggagggtcttggagaacatgctaagaagttttcatttta

SEQ ID NO: 40370 - DNA, 80 bp, synthetic construct
  misc_feature 1..80: note = Artificially Synthesized Probe
  source 1..80: mol_type = other DNA
acaagaacaacacagaaacactatgggccactgacagttattcccaatagccattcaggcatgaatctcttctgatatta

SEQ ID NO: 40371 - DNA, 80 bp, synthetic construct
  misc_feature 1..80: note = Artificially Synthesized Probe
  source 1..80: mol_type = other DNA
aaactgtctgccacatcaggaagtcccattattcatgagctgagtttttcacttaagagagtaactcacagacttctctg

SEQ ID NO: 40372 - DNA, 80 bp, synthetic construct
  misc_feature 1..80: note = Artificially Synthesized Probe
  source 1..80: mol_type = other DNA
gtcatcctcctgccttggcctcccaaagtgctgcaattaaaagtgtgagccaccacacctggcttgaattttgttttatg

SEQ ID NO: 40373 - DNA, 80 bp, synthetic construct
  misc_feature 1..80: note = Artificially Synthesized Probe
  source 1..80: mol_type = other DNA
tgtagctgagaagctgcagttaacattgtagcatcttgatagcgaatataaatccatagaccttgagaaacaaggcctag

SEQ ID NO: 40374 - DNA, 80 bp, synthetic construct
  misc_feature 1..80: note = Artificially Synthesized Probe
  source 1..80: mol_type = other DNA
ttttatttaaattttctgcagtcagaatgtgcaaatagttgatgttgtctttattttccatcactgagataaaaggcctg

SEQ ID NO: 40375 - DNA, 80 bp, synthetic construct
  misc_feature 1..80: note = Artificially Synthesized Probe
  source 1..80: mol_type = other DNA
attctcccacctcaccctccaaaatgctgggattacaggcatgagccaccgtgcccacccaagactatttttaatgaaaa

SEQ ID NO: 40376 - DNA, 80 bp, synthetic construct
  misc_feature 1..80: note = Artificially Synthesized Probe
  source 1..80: mol_type = other DNA
ggggattcgcttcccatggctgctgttttttactgcagagcacaaacttaatatttttagttctggaggtaggaagtcta

SEQ ID NO: 40377 - DNA, 80 bp, synthetic construct
  misc_feature 1..80: note = Artificially Synthesized Probe
  source 1..80: mol_type = other DNA
gcattaattcagaatctgctattcagtgcataaagaactcattagagttaccagtacagggacttagccctctgacaata

SEQ ID NO: 40378 - DNA, 80 bp, synthetic construct
  misc_feature 1..80: note = Artificially Synthesized Probe
  source 1..80: mol_type = other DNA
tcttgctgctgcagttagttctctgtgtcccgtgactcttttccatgtgcttcttgcacaccctaaaaacagctctcccc

SEQ ID NO: 40379 - DNA, 80 bp, synthetic construct
  misc_feature 1..80: note = Artificially Synthesized Probe
  source 1..80: mol_type = other DNA
ataagcaggtgcatcactgaaggtgcgtctgacccacaatcactatccagcaagtaactcatgcatctctgttgagtaaa

SEQ ID NO: 40380 - DNA, 80 bp, synthetic construct
  misc_feature 1..80: note = Artificially Synthesized Probe
  source 1..80: mol_type = other DNA
ttacacgcttttacagtgaatttgtatctactttttaataggaccaggccagttctagagtctagagtttttagtaatgt

SEQ ID NO: 40381 - DNA, 80 bp, synthetic construct
  misc_feature 1..80: note = Artificially Synthesized Probe
  source 1..80: mol_type = other DNA
ttcctgtatcatttccagtgttttacactctcgctaaatagaagctgttgatgcagagtgactcggcagccattcccttt

SEQ ID NO: 40382 - DNA, 80 bp, synthetic construct
  misc_feature 1..80: note = Artificially Synthesized Probe
  source 1..80: mol_type = other DNA
gtgttcctgtcagaggcatggtgaagggtactgagcactgctgtacactcattttccatcttctcaaaaatctacaatta

SEQ ID NO: 40383 - DNA, 80 bp, synthetic construct
  misc_feature 1..80: note = Artificially Synthesized Probe
  source 1..80: mol_type = other DNA
ccattcacatgaaatatcatgcataggtcaatccacagaaactgaaagtagatttgcatttcctagcgatgggaaattgg

SEQ ID NO: 40384 - DNA, 80 bp, synthetic construct
  misc_feature 1..80: note = Artificially Synthesized Probe
  source 1..80: mol_type = other DNA
caaatgctcttaaacagtttgagttagttactttgtatctacctcattggtagatacacccttggtgtattccaatgtac

SEQ ID NO: 40385 - DNA, 80 bp, synthetic construct
  misc_feature 1..80: note = Artificially Synthesized Probe
  source 1..80: mol_type = other DNA
tttgcttagtaaaatctcctctgatcactgctagcctttgatcaacttttggagtcctgaaaaagttgtggccaacaatt

SEQ ID NO: 40386 - DNA, 80 bp, synthetic construct
  misc_feature 1..80: note = Artificially Synthesized Probe
  source 1..80: mol_type = other DNA
ctgttcttgggttagtttgcttggaataatggcctccagctccatccatattcctacaaaaaaacttgatctcattcttt

SEQ ID NO: 40387 - DNA, 80 bp, synthetic construct
  misc_feature 1..80: note = Artificially Synthesized Probe
  source 1..80: mol_type = other DNA
tggcaatgattgtctgtaactgatcctggcagtgctctatggtgctgtagaatgagtattataaaatgtattgagggtta

SEQ ID NO: 40388 - DNA, 80 bp, synthetic construct
  misc_feature 1..80: note = Artificially Synthesized Probe
  source 1..80: mol_type = other DNA
tgccatctgttaataggctcataagatttttgtctcttggtttttctaggtgatttttaacttacggtttattagcatca

SEQ ID NO: 40389 - DNA, 80 bp, synthetic construct
  misc_feature 1..80: note = Artificially Synthesized Probe
  source 1..80: mol_type = other DNA
accgtgtctctctctctgcgtcttattagcctggtgagaacagggcattcatcctatagtgtctcaccatgtgagagact

SEQ ID NO: 40390 - DNA, 80 bp, synthetic construct
  misc_feature 1..80: note = Artificially Synthesized Probe
  source 1..80: mol_type = other DNA
ggctacaacatgttatttatccactcatgagggatggactttctggtcgtctttaagcttggctgttatgaatcctgagg

SEQ ID NO: 40391 - DNA, 80 bp, synthetic construct
  misc_feature 1..80: note = Artificially Synthesized Probe
  source 1..80: mol_type = other DNA
aaaaacatgcatcttggccacatcttccactttgcaaatctgtaagttcatatggagtgtgcataaagctcccacagact

SEQ ID NO: 40392 - DNA, 80 bp, synthetic construct
  misc_feature 1..80: note = Artificially Synthesized Probe
  source 1..80: mol_type = other DNA
tatttattgacatttttttctggattatggaaaaatataagcgctgctcctaataacaccactgggaagctgtgcagctg

SEQ ID NO: 40393 - DNA, 80 bp, synthetic construct
  misc_feature 1..80: note = Artificially Synthesized Probe
  source 1..80: mol_type = other DNA
gaagaaacctcatttctgaagaggctaaaacgcataatgacagtgtaagtagcagaataactaaatcctccctgtcctgc

SEQ ID NO: 40394 - DNA, 80 bp, synthetic construct
  misc_feature 1..80: note = Artificially Synthesized Probe
  source 1..80: mol_type = other DNA
atagtttggatatttgtccctgccaaatctcaagttgaattgtgatctccagtgttggaggtggagcctggtgggaggtg

SEQ ID NO: 40395 - DNA, 80 bp, synthetic construct
  misc_feature 1..80: note = Artificially Synthesized Probe
  source 1..80: mol_type = other DNA
ggataatggcctccagctccatccatgttgctgtaaagcacagaatttcatcatttttatgactgcatagtattccatgg

SEQ ID NO: 40396 - DNA, 80 bp, synthetic construct
  misc_feature 1..80: note = Artificially Synthesized Probe
  source 1..80: mol_type = other DNA
ttactctgttgatagtttcttttgccctgaagacactctttagcttaattaggtaccatttgtcaacttttgtttctgtt

SEQ ID NO: 40397 - DNA, 80 bp, synthetic construct
  misc_feature 1..80: note = Artificially Synthesized Probe
  source 1..80: mol_type = other DNA
atcatatcatctgtgaaaagagataggttgactcttggaagccttctatgtctttctcttgcctgattgctttggctagg

SEQ ID NO: 40398 - DNA, 80 bp, synthetic construct
  misc_feature 1..80: note = Artificially Synthesized Probe
  source 1..80: mol_type = other DNA
tcttcacactgctttagctttgtccctgattctagtatgttatatcttagttttcattagtttcaaagaatttcttgatt

SEQ ID NO: 40399 - DNA, 80 bp, synthetic construct
  misc_feature 1..80: note = Artificially Synthesized Probe
  source 1..80: mol_type = other DNA
ccttgaatgtgagatgggttccttgaagactgcatttgtttaggtgttgcttttatccaacttgccatctgtgccttttt

SEQ ID NO: 40400 - DNA, 80 bp, synthetic construct
  misc_feature 1..80: note = Artificially Synthesized Probe
  source 1..80: mol_type = other DNA
ctggttctttctcatccatgtggtgagatgtgtgctgatactccttcagctgtgtggtgtaatttgtgtacagtcagttg

SEQ ID NO: 40401 - DNA, 80 bp, synthetic construct
  misc_feature 1..80: note = Artificially Synthesized Probe
  source 1..80: mol_type = other DNA
acaccccgacatctggtcagtcactaccagtcaagagtgaattagtgaatgacttgtaacttcactatgataattttccc

SEQ ID NO: 40402 - DNA, 80 bp, synthetic construct
  misc_feature 1..80: note = Artificially Synthesized Probe
  source 1..80: mol_type = other DNA
acaatcagtgaacctccattgacaagtcattgtcacccaagtctggagttcaaacgaggatacactcttggtgttgtaca

SEQ ID NO: 40403 - DNA, 80 bp, synthetic construct
  misc_feature 1..80: note = Artificially Synthesized Probe
  source 1..80: mol_type = other DNA
aatcccattgctgttttaactggcagttctccagtgacatgttattgaatatcttcccatatgcttatctgccatctgta

SEQ ID NO: 40404 - DNA, 80 bp, synthetic construct
  misc_feature 1..80: note = Artificially Synthesized Probe
  source 1..80: mol_type = other DNA
atgcgtagatacttttggattatctccatgctcaataatatcatctatgaaaaatgctggttttattttttcaatgttta

SEQ ID NO: 40405 - DNA, 80 bp, synthetic construct
  misc_feature 1..80: note = Artificially Synthesized Probe
  source 1..80: mol_type = other DNA
ctctcacagaatcctgacattcagaggctgttggttgttggatattttattacacaacattagagaactcttccatgtta

SEQ ID NO: 40406 - DNA, 80 bp, synthetic construct
  misc_feature 1..80: note = Artificially Synthesized Probe
  source 1..80: mol_type = other DNA
aacatactctgacttcagtcctttgagatttttgaggttttctttatgaccctgcgttttgtccacgtaggaaggagggt

SEQ ID NO: 40407 - DNA, 80 bp, synthetic construct
  misc_feature 1..80: note = Artificially Synthesized Probe
  source 1..80: mol_type = other DNA
gattactttaacctgcattcaccttccttatcctttcctccattcttttctgagctgatgactccctttcaggtaattct

SEQ ID NO: 40408 - DNA, 80 bp, synthetic construct
  misc_feature 1..80: note = Artificially Synthesized Probe
  source 1..80: mol_type = other DNA
gtacacagcaatagcataattaagccccatgctaatgaagtcttttccccagaccttggatcagaatatcacttgttaat

SEQ ID NO: 40409 - DNA, 80 bp, synthetic construct
  misc_feature 1..80: note = Artificially Synthesized Probe
  source 1..80: mol_type = other DNA
ttgtgtgggtcaggatttttcatggacgtcactagatcagtgtgctgaatgcccatcgagacaaaaatactaattttgag

SEQ ID NO: 40410 - DNA, 80 bp, synthetic construct
  misc_feature 1..80: note = Artificially Synthesized Probe
  source 1..80: mol_type = other DNA
gcagcgccacgctgtgctgtggggagggagggagagcgtcgcgctgtgctgtggggagggagggagggagagcgcagcgc

SEQ ID NO: 40411 - DNA, 80 bp, synthetic construct
  misc_feature 1..80: note = Artificially Synthesized Probe
  source 1..80: mol_type = other DNA
catgcatgtaaaggggagcatattaagtagtagtaactcacacgttcacaagtgtgaacatagtccgtctgcaagctgag

SEQ ID NO: 40412 - DNA, 80 bp, synthetic construct
  misc_feature 1..80: note = Artificially Synthesized Probe
  source 1..80: mol_type = other DNA
cctgttactgcatagatgcaaaaatcctagtgtctcctcagctgctgctgtctgcttttgtctgattaaagtttggttga

SEQ ID NO: 40413 - DNA, 80 bp, synthetic construct
  misc_feature 1..80: note = Artificially Synthesized Probe
  source 1..80: mol_type = other DNA
caccttctgccatctcttagagctggagtgaatattctacaaacctgtttttagatttgatcttgagaaggaatgtagga

SEQ ID NO: 40414 - DNA, 80 bp, synthetic construct
  misc_feature 1..80: note = Artificially Synthesized Probe
  source 1..80: mol_type = other DNA
gtgtttggagagagagaagtgcatagatacagagatagaagtgtcctaccgtggagcactgagcagtcctggaaccaaag

SEQ ID NO: 40415 - DNA, 80 bp, synthetic construct
  misc_feature 1..80: note = Artificially Synthesized Probe
  source 1..80: mol_type = other DNA
aaaggtattgtgagatcatgatcaatggggtcacatttctgcacaacttgtgtgcagaagtgctgattgcctttgttcca

SEQ ID NO: 40416 - DNA, 80 bp, synthetic construct
  misc_feature 1..80: note = Artificially Synthesized Probe
  source 1..80: mol_type = other DNA
acgtttgtcattgtctcctaaatttgaacatgatcaagcccactctcagccgtgcaccaaggatatacttttgttgttgt

SEQ ID NO: 40417 - DNA, 80 bp, synthetic construct
  misc_feature 1..80: note = Artificially Synthesized Probe
  source 1..80: mol_type = other DNA
gcatacttttttttaaaattcgtaaagtataaacccttcctagaggagcagatatccaccggtgatgctgccgggctcct

SEQ ID NO: 40418 - DNA, 80 bp, synthetic construct
  misc_feature 1..80: note = Artificially Synthesized Probe
  source 1..80: mol_type = other DNA
cttcagactgaaaggaaatgaaagcagatagaaatgtgaactgcagggtgaaatatgaagtgcctgaaattaaatataaa

SEQ ID NO: 40419 - DNA, 80 bp, synthetic construct
  misc_feature 1..80: note = Artificially Synthesized Probe
  source 1..80: mol_type = other DNA
attgtgggaaggagattttatgagaaaagtgtgaaaatagccagcttattttcactctgtccgttggttacacgtcagct

SEQ ID NO: 40420 - DNA, 80 bp, synthetic construct
  misc_feature 1..80: note = Artificially Synthesized Probe
  source 1..80: mol_type = other DNA
gaatttgacgaactcttagaaagcattttctgcattctgctgggtgtgggaatgttttccctgcaaaacgttgtcaagat

SEQ ID NO: 40421 - DNA, 80 bp, synthetic construct
  misc_feature 1..80: note = Artificially Synthesized Probe
  source 1..80: mol_type = other DNA
gcaaaaaaaaaaaaaagtgagaaatgcgcactaaaatgttgtgtaacataaccacatttaccgaagaatgtattccagta

SEQ ID NO: 40422 - DNA, 80 bp, synthetic construct
  misc_feature 1..80: note = Artificially Synthesized Probe
  source 1..80: mol_type = other DNA
aggaaattcgagtgaggttatatagcagatcaaatgacccccacccgtaaatcatgcctgggtgcaacacaggcttctgt

SEQ ID NO: 40423 - DNA, 80 bp, synthetic construct
  misc_feature 1..80: note = Artificially Synthesized Probe
  source 1..80: mol_type = other DNA
gactagaaatgccagtttttacctccaggctgcttagaacaaagcttaaaaggctgagtaaaaatgtgcatttgaaagac

SEQ ID NO: 40424 - DNA, 80 bp, synthetic construct
  misc_feature 1..80: note = Artificially Synthesized Probe
  source 1..80: mol_type = other DNA
aaaacaaaacaaaaaagcaaccctagaaagctgtctagttgataactcagctcaagagatgtccccgggaactctgggcc

SEQ ID NO: 40425 - DNA, 80 bp, synthetic construct
  misc_feature 1..80: note = Artificially Synthesized Probe
  source 1..80: mol_type = other DNA
gttgagagttacattcatgtttaaggtccggaaaggaagcttcttatcagctctgttgagcctctagtaactggatttta

SEQ ID NO: 40426 - DNA, 80 bp, synthetic construct
  misc_feature 1..80: note = Artificially Synthesized Probe
  source 1..80: mol_type = other DNA
aaaaaaaaaactagagaagatcaagcttagtgagggtgtcgtgttgaatgcttagataggcagagagctaggcctcttgc

SEQ ID NO: 40427 - DNA, 80 bp, synthetic construct
  misc_feature 1..80: note = Artificially Synthesized Probe
  source 1..80: mol_type = other DNA
gagaagtcagttcctggctttgaattttcaaaggacaagctgactctctgactctcttattctgggctaatggagtttgt

SEQ ID NO: 40428 - DNA, 80 bp, synthetic construct
  misc_feature 1..80: note = Artificially Synthesized Probe
  source 1..80: mol_type = other DNA
tgaacattgctgaaatgacaacagaggatctagaatattccgtgagcttagttgatgacacagtggcagggtttaagagg

SEQ ID NO: 40429 - DNA, 80 bp, synthetic construct
  misc_feature 1..80: note = Artificially Synthesized Probe
  source 1..80: mol_type = other DNA
gtatgtggctgttgaaccttaattttgacaagataaagatgttggatggactctcaatattgatatgtgggttcaaaagg

SEQ ID NO: 40430 - DNA, 80 bp, synthetic construct
  misc_feature 1..80: note = Artificially Synthesized Probe
  source 1..80: mol_type = other DNA
ctaagagaaacaatagtttttaggaatgtatccatttgattcacatggcactgtgaagtttttgaatcagttttacgtgt

SEQ ID NO: 40431 - DNA, 80 bp, synthetic construct
  misc_feature 1..80: note = Artificially Synthesized Probe
  source 1..80: mol_type = other DNA
cctccaggggcttatgttctacatatgactaaagtcattggtcacgcaaaaatcttcaatgccagttataccaccagtat

SEQ ID NO: 40432 - DNA, 80 bp, synthetic construct
  misc_feature 1..80: note = Artificially Synthesized Probe
  source 1..80: mol_type = other DNA
gtgctatgcttccaacaaagacatacgagaatgatctcagcagagatgcactcagctgcataaataaattaaaaagcagt

SEQ ID NO: 40433 - DNA, 80 bp, synthetic construct
  misc_feature 1..80: note = Artificially Synthesized Probe
  source 1..80: mol_type = other DNA
ttttctacatccctgtgactgttgatctctctggaacgaactttgtgaaatgaggcatatgacacccatgtttacagtta

SEQ ID NO: 40434 - DNA, 80 bp, synthetic construct
  misc_feature 1..80: note = Artificially Synthesized Probe
  source 1..80: mol_type = other DNA
ctttgagaaatggcaaactttggggagattttgttcagagaatgatgttacctgaaccgtattttaacagggccgcccag

SEQ ID NO: 40435 - DNA, 80 bp, synthetic construct
  misc_feature 1..80: note = Artificially Synthesized Probe
  source 1..80: mol_type = other DNA
gcagtgcctggagggcatattactgcatattacggcaaataattctctctggaaaactaaggccaatttgacataatgtg

SEQ ID NO: 40436 - DNA, 80 bp, synthetic construct
  misc_feature 1..80: note = Artificially Synthesized Probe
  source 1..80: mol_type = other DNA
aaaacttttattcatgtgctgacctcagcatattgatacacttgctcttctgtggtgtgtatgtgcctatgtgtatgtgt

SEQ ID NO: 40437 - DNA, 80 bp, synthetic construct
  misc_feature 1..80: note = Artificially Synthesized Probe
  source 1..80: mol_type = other DNA
tcatgctggttagctagaattctgttttcccagtcgagtgttcacttataagagttacacgttacacacactcatgggga

SEQ ID NO: 40438 - DNA, 80 bp, synthetic construct
  misc_feature 1..80: note = Artificially Synthesized Probe
  source 1..80: mol_type = other DNA
tctggcttggttggcagcttccctcggcgatggtctgtggttcccatgagtgctgaggaggcctccactgtggaaacaag

SEQ ID NO: 40439 - DNA, 80 bp, synthetic construct
  misc_feature 1..80: note = Artificially Synthesized Probe
  source 1..80: mol_type = other DNA
cttcctcctcggctgtcgttacttccaatgtgttcctttcctactccaggccaacaaaccttcacacagatattttatga

SEQ ID NO: 40440 - DNA, 80 bp, synthetic construct
  misc_feature 1..80: note = Artificially Synthesized Probe
  source 1..80: mol_type = other DNA
gagtcctcctgtcctttaccttggaaataaaatgaagggggcatttccccccttactcgcaatcctgtgatcagtgtttc

SEQ ID NO: 40441 - DNA, 80 bp, synthetic construct
  misc_feature 1..80: note = Artificially Synthesized Probe
  source 1..80: mol_type = other DNA
aagagtgggcttgagcaaagaaaaaaatcaaggaagctttcgtaatcattttaaacttaccctgcttaatagagattttt

SEQ ID NO: 40442 - DNA, 80 bp, synthetic construct
  misc_feature 1..80: note = Artificially Synthesized Probe
  source 1..80: mol_type = other DNA
ccacacaagaaacagacaaccacaagcagcaccaacacaaacagtgctgggtgactattaaaatagtgtgagtttagaga

SEQ ID NO: 40443 - DNA, 80 bp, synthetic construct
  misc_feature 1..80: note = Artificially Synthesized Probe
  source 1..80: mol_type = other DNA
aaggaggcagggctgacaagtctacgtaagtgctggcagatagcagccctcaggtttagatggccgacagatagcaggag

SEQ ID NO: 40444 - DNA, 80 bp, synthetic construct
  misc_feature 1..80: note = Artificially Synthesized Probe
  source 1..80: mol_type = other DNA
aaaatgtaggtgtattgcttctataacaaccaacgtgaaggaaacccaagatctgtgatttgaatttgaattgaagaagt

SEQ ID NO: 40445 - DNA, 80 bp, synthetic construct
  misc_feature 1..80: note = Artificially Synthesized Probe
  source 1..80: mol_type = other DNA
ccagatgtcttgctgattgcctggctggctttaagtgggaggatatccttcttacgaaaatcactaactacacttctgta

SEQ ID NO: 40446 - DNA, 80 bp, synthetic construct
  misc_feature 1..80: note = Artificially Synthesized Probe
  source 1..80: mol_type = other DNA
tttacatatgtttgtgtacgagggtgtgtgcacacaaaagcacactttataaagaaatcaaatagcgcgtcactcaagta

SEQ ID NO: 40447 - DNA, 80 bp, synthetic construct
  misc_feature 1..80: note = Artificially Synthesized Probe
  source 1..80: mol_type = other DNA
acttgaggcgtttttccctcaccagttgagtccacccagaggaaagtcatagaccagttaaataccacccttttgtcttg

SEQ ID NO: 40448 - DNA, 80 bp, synthetic construct
  misc_feature 1..80: note = Artificially Synthesized Probe
  source 1..80: mol_type = other DNA
ctcatactcagggctttgggtgtgagaagccagatccaactcctcaagaaggtggaatactatggaatcattgaattttt

SEQ ID NO: 40449 - DNA, 80 bp, synthetic construct
  misc_feature 1..80: note = Artificially Synthesized Probe
  source 1..80: mol_type = other DNA
agaaaaaaaaacccttattttctaggtccctcgcctttcccacatctccattctctccttacaagagtgaggccaggcct

SEQ ID NO: 40450 - DNA, 80 bp, synthetic construct
  misc_feature 1..80: note = Artificially Synthesized Probe
  source 1..80: mol_type = other DNA
actttaaggggtatgtactgggagagcattgaggcagcggactgttttggttgcattagaaatgccttttgatgacatta

SEQ ID NO: 40451 - DNA, 80 bp, synthetic construct
  misc_feature 1..80: note = Artificially Synthesized Probe
  source 1..80: mol_type = other DNA
tggcttcctgggctgcaggcgaaggccttataggtgtgtcctcatatggtagagttactggcaagggctggcttcctgga

SEQ ID NO: 40452 - DNA, 80 bp, synthetic construct
  misc_feature 1..80: note = Artificially Synthesized Probe
  source 1..80: mol_type = other DNA
acagtacagctctcactttccagatgcagaaacttgattttagagagatttagagacctaaatacctaaatggctagtac

SEQ ID NO: 40453 - DNA, 80 bp, synthetic construct
  misc_feature 1..80: note = Artificially Synthesized Probe
  source 1..80: mol_type = other DNA
actaataaaaattgtacatgcttaaggtgtacagggtatgttctcatatgcatatacattgtgaaatgcacactacaaac

SEQ ID NO: 40454 - DNA, 80 bp, synthetic construct
  misc_feature 1..80: note = Artificially Synthesized Probe
  source 1..80: mol_type = other DNA
ctaatttttggtttctttcctttgagtttatgaagtatttccccctaagaaggacattcctggggtatctcaggctgcgg

SEQ ID NO: 40455 - DNA, 80 bp, synthetic construct
  misc_feature 1..80: note = Artificially Synthesized Probe
  source 1..80: mol_type = other DNA
catacgtgcaataccacggagtaaagatttgaaatagtgtcattactgtcatatttagccaaagttgctttggaaatata

SEQ ID NO: 40456 - DNA, 80 bp, synthetic construct
  misc_feature 1..80: note = Artificially Synthesized Probe
  source 1..80: mol_type = other DNA
taatcacaagaataactgacattcatagggagagattactctgtgtagaatcgaaaagtgagggtgggatttctggccac

SEQ ID NO: 40457 - DNA, 80 bp, synthetic construct
  misc_feature 1..80: note = Artificially Synthesized Probe
  source 1..80: mol_type = other DNA
tggcgggaaaagtgagagagctatgcaggcctctgaatgaaaggacgattcttttccagggtttttttttttggtttctt

SEQ ID NO: 40458 - DNA, 80 bp, synthetic construct
  misc_feature 1..80: note = Artificially Synthesized Probe
  source 1..80: mol_type = other DNA
taaggttagccagtaggtaacgttcagtaaaggatgtttatggtcaattcagaaggaaaatccattttacctgtagggga

SEQ ID NO: 40459 - DNA, 80 bp, synthetic construct
  misc_feature 1..80: note = Artificially Synthesized Probe
  source 1..80: mol_type = other DNA
aggaatacctacggatgctaagagaagctgtctgcattcctccacattttagatcctcttctggatgagcaggtctgcag

SEQ ID NO: 40460 - DNA, 80 bp, synthetic construct
  misc_feature 1..80: note = Artificially Synthesized Probe
  source 1..80: mol_type = other DNA
cagaggacgatatcagggtaagagaatttttaaagagaggcatttaaattaagtgaatggcactgaggtgcttccccaga

SEQ ID NO: 40461 - DNA, 80 bp, synthetic construct
  misc_feature 1..80: note = Artificially Synthesized Probe
  source 1..80: mol_type = other DNA
gagtagagaagcaaaaaatagactgatttcttgctttcagagcatgtacattatagtcggagaagataataagcaaagat

SEQ ID NO: 40462 - DNA, 80 bp, synthetic construct
  misc_feature 1..80: note = Artificially Synthesized Probe
  source 1..80: mol_type = other DNA
tctttccgtcctcccgtggcaccatccttagcttgtgggttttatcctcatgttcattgccttatatttgcaaaatggtg

SEQ ID NO: 40463 - DNA, 80 bp, synthetic construct
  misc_feature 1..80: note = Artificially Synthesized Probe
  source 1..80: mol_type = other DNA
cgctctccaaaaaatctgttttaatacctaaaatcaccatgggcgattggatttgacaccgttctatacatagattttat

SEQ ID NO: 40464 - DNA, 80 bp, synthetic construct
  misc_feature 1..80: note = Artificially Synthesized Probe
  source 1..80: mol_type = other DNA
tcgggtgcagggtatggagagctccttggtaagagtggacacgtgctgtcactcgggtgcagggtatggagagctccttg

SEQ ID NO: 40465 - DNA, 80 bp, synthetic construct
  misc_feature 1..80: note = Artificially Synthesized Probe
  source 1..80: mol_type = other DNA
gctccttggtaagagtggacacgtgctgtcactcgggtgcagggtatggagagctccttggtaatagtggacacgtgctg

SEQ ID NO: 40466 - DNA, 80 bp, synthetic construct; identical to SEQ ID NO: 40464
  misc_feature 1..80: note = Artificially Synthesized Probe
  source 1..80: mol_type = other DNA

SEQ ID NO: 40467 - DNA, 80 bp, synthetic construct
  misc_feature 1..80: note = Artificially Synthesized Probe
  source 1..80: mol_type = other DNA
aaaaccacatgctgaaaaaggatgtggaagtcagagggtgccatctgcataggaattcctgacattgatacttgtcatac

SEQ ID NO: 40468 - DNA, 80 bp, synthetic construct
  misc_feature 1..80: note = Artificially Synthesized Probe
  source 1..80: mol_type = other DNA
tcaccatgacatgggcctccacctgtattttattgttctctagaattttcacctgttattggtgtcttagtgccatgcac

SEQ ID NO: 40469 - DNA, 80 bp, synthetic construct
  misc_feature 1..80: note = Artificially Synthesized Probe
  source 1..80: mol_type = other DNA
taaaatggacttagtagctgaatgagaaatgccgaaacctcaaaaagaatcacaagaaacatcagaagccctgaagtgtg

SEQ ID NO: 40470 - DNA, 80 bp, synthetic construct
  misc_feature 1..80: note = Artificially Synthesized Probe
  source 1..80: mol_type = other DNA
aaacccttacagtactttgaggataatcatgtatactaagtgaggtttaagccttacactgctttgagaaggatcgtgtg

SEQ ID NO: 40471 - DNA, 80 bp, synthetic construct
  misc_feature 1..80: note = Artificially Synthesized Probe
  source 1..80: mol_type = other DNA
aaccctcacagtacttggaggaggatcatgtatactaagtgaggtttaatacttacatttcattgaggaggattttgtgt

SEQ ID NO: 40472 - DNA, 80 bp, synthetic construct
  misc_feature 1..80: note = Artificially Synthesized Probe
  source 1..80: mol_type = other DNA
gatcgtgtttcctaagtgaagtttaacccttacagtcctttgaggagggtggtgtgtactaagtgaggtttaactcttac

SEQ ID NO: 40473 - DNA, 80 bp, synthetic construct
  misc_feature 1..80: note = Artificially Synthesized Probe
  source 1..80: mol_type = other DNA
cttacagtcgtttgaggaggatcgtgtgtgccaagtgaggtttaacccttacagtcctttgagaaggatcgtgtgtacta

SEQ ID NO: 40474 - DNA, 80 bp, synthetic construct
  misc_feature 1..80: note = Artificially Synthesized Probe
  source 1..80: mol_type = other DNA
ccttgtgcagggacagtcactgaagtttggggaagtctaggaattttaaaagaacaggattttggaaatgaattcaggtc

SEQ ID NO: 40475 - DNA, 80 bp, synthetic construct
  misc_feature 1..80: note = Artificially Synthesized Probe
  source 1..80: mol_type = other DNA
cctggtgtatgggtgccgtggtgtgtcagtgccctggtgtgtgggtgctctggtgtgtgggtgccctggtttacgggttt

SEQ ID NO: 40476 - DNA, 80 bp, synthetic construct
  misc_feature 1..80: note = Artificially Synthesized Probe
  source 1..80: mol_type = other DNA
ctgtgccctgttggttttgggtccaggattgcagctgtgccctgtatcccaagagctgagcttctgaagaaccccttatc

SEQ ID NO: 40477 - DNA, 80 bp, synthetic construct
  misc_feature 1..80: note = Artificially Synthesized Probe
  source 1..80: mol_type = other DNA
aaaataattactgaaaacttggaagttttcagtcttgggagagatatgggcattcaatttcatgaagctcaaagatcacc

SEQ ID NO: 40478 - DNA, 80 bp, synthetic construct
  misc_feature 1..80: note = Artificially Synthesized Probe
  source 1..80: mol_type = other DNA
caaaggcagacgagagtggaggaaagggacagaggatctgcaaacaacaaaaaaaataagagaatggcattgctcatttc

SEQ ID NO: 40479 - DNA, 80 bp, synthetic construct
  misc_feature 1..80: note = Artificially Synthesized Probe
  source 1..80: mol_type = other DNA
tagtggtgaagtagactgaaaaagagatgatcccaactatatactggctataagagacccgctttatctttaaggacaca

SEQ ID NO: 40480 - DNA, 80 bp, synthetic construct
  misc_feature 1..80: note = Artificially Synthesized Probe
  source 1..80: mol_type = other DNA
aaggtggcaggaaagagaatgaaggcaggaggaactagctaccacttgtagaaccatcagaccttgtgagaacccactca

SEQ ID NO: 40481 - DNA, 80 bp, synthetic construct
  misc_feature 1..80: note = Artificially Synthesized Probe
  source 1..80: mol_type = other DNA
caatatgaacaaacgctttaacattaagatcctctgcaagacaaggatgcccagtcttgccgattttattcaacatgaca

SEQ ID NO: 40482 - DNA, 80 bp, synthetic construct
  misc_feature 1..80: note = Artificially Synthesized Probe
  source 1..80: mol_type = other DNA
tggacttccacatgtgaaagagtgaaattggactcttgtcttacaccgtataggaaacctaccaaaaatggatgaaagtc

SEQ ID NO: 40483 - DNA, 80 bp, synthetic construct
  misc_feature 1..80: note = Artificially Synthesized Probe
  source 1..80: mol_type = other DNA
aaataccacatgacctcacttatgggtggaacctgacgaaaaggtcaaacacgcagagaaggagaataatacagtggtca

SEQ ID NO: 40484 - DNA, 80 bp, synthetic construct
  misc_feature 1..80: note = Artificially Synthesized Probe
  source 1..80: mol_type = other DNA
ccctctccctcccttcctttgccttcaaagcacccatgcatttgtgcatatttttatttgtatccttaggtttgaagttt

SEQ ID NO: 40485 - DNA, 80 bp, synthetic construct
  misc_feature 1..80: note = Artificially Synthesized Probe
  source 1..80: mol_type = other DNA
gaatagtgctccactgtgtatatacaccacgttgtctttattcattcacctgttgtgggacacttagctttgttccgtat

SEQ ID NO: 40486 - DNA, 80 bp, synthetic construct
  misc_feature 1..80: note = Artificially Synthesized Probe
  source 1..80: mol_type = other DNA
gtcattggtattttgatagggtttgcatttaatttttagatcgctttggggagtatgttcatattaacagtcttgatttt

SEQ ID NO: 40487 - DNA, 80 bp, synthetic construct
  misc_feature 1..80: note = Artificially Synthesized Probe
  source 1..80: mol_type = other DNA
tttgaatttacctttgtgttattatggaagttttcttctttcaacaggctttgcaacataatgaatatctgccttacaca

SEQ ID NO: 40488 - DNA, 80 bp, synthetic construct
  misc_feature 1..80: note = Artificially Synthesized Probe
  source 1..80: mol_type = other DNA
agcctttccatcttcagagaaaaatgttatacagcagaggaatcgacctcgaataaacgacatatacattttatgcaggc

SEQ ID NO: 40489 - DNA, 80 bp, synthetic construct
  misc_feature 1..80: note = Artificially Synthesized Probe
  source 1..80: mol_type = other DNA
ctcctgagtaaataggctgtcactcatcatggacatggacatcccagattcatagatgacattctttggagccatttggt

SEQ ID NO: 40490 - DNA, 80 bp, synthetic construct
  misc_feature 1..80: note = Artificially Synthesized Probe
  source 1..80: mol_type = other DNA
tgctaatgagatgcagtcagctttctgtggggttgacgcaggtttccaactgtaagacattctggtctgttaagatcata

SEQ ID NO: 40491 - DNA, 80 bp, synthetic construct
  misc_feature 1..80: note = Artificially Synthesized Probe
  source 1..80: mol_type = other DNA
gccaccgcacctggccactaatcctttttcttttgagctcttcacctaatgtgaaaatgtttccattacttgcacctata

SEQ ID NO: 40492 - DNA, 80 bp, synthetic construct
  misc_feature 1..80: note = Artificially Synthesized Probe
  source 1..80: mol_type = other DNA
tctctacagtttggccacatatgtgtccccaaacaacacattgtttagttttgcttggttttgaacgtcacagtaattaa

SEQ ID NO: 40493 - DNA, 80 bp, synthetic construct
  misc_feature 1..80: note = Artificially Synthesized Probe
  source 1..80: mol_type = other DNA
cagtggctgtattaccgtagggatgaactagaatcacttttcagctaaaatcaacaaaccttgcctaatctgaccaaata

SEQ ID NO: 40494 - DNA, 80 bp, synthetic construct
  misc_feature 1..80: note = Artificially Synthesized Probe
  source 1..80: mol_type = other DNA
gccattgggtggttgatgggactgggcacggtggagcagggggcgtcgctcgttggggaggctccagccgcacaggagcc

SEQ ID NO: 40495 - DNA, 80 bp, synthetic construct
  misc_feature 1..80: note = Artificially Synthesized Probe
  source 1..80: mol_type = other DNA
acaaagaggttaagtcatttactgtgtgattaccataggtatcattttaaaaacacattacctcggccaggcgtggtggc

SEQ ID NO: 40496 - DNA, 80 bp, synthetic construct
  misc_feature 1..80: note = Artificially Synthesized Probe
  source 1..80: mol_type = other DNA
tgagaactttgtttggatcgcttaacatcagtaccattgctgtacagaatcggtaccattacgtacactgatatgaaaac

SEQ ID NO: 40497 - DNA, 80 bp, synthetic construct
  misc_feature 1..80: note = Artificially Synthesized Probe
  source 1..80: mol_type = other DNA
gtaaatcaatctagctttccttatgaagaggccaatctagctttccttatgaagtggccgcctattgctatgtgttcaca

SEQ ID NO: 40498 - DNA, 80 bp, synthetic construct
  misc_feature 1..80: note = Artificially Synthesized Probe
  source 1..80: mol_type = other DNA
tgcccactgtcgactgttgtgtgctgactggggcacttcacgagcattcctgtcagggatcctcacaaacgctgtaaaat

SEQ ID NO: 40499 - DNA, 80 bp, synthetic construct
  misc_feature 1..80: note = Artificially Synthesized Probe
  source 1..80: mol_type = other DNA
ggaatcacttcctacacgctcactcagaattcatctgtgtcttcattcaagatgtgtagttatcgacctctaatttgtgc

SEQ ID NO: 40500 - DNA, 80 bp, synthetic construct
  misc_feature 1..80: note = Artificially Synthesized Probe
  source 1..80: mol_type = other DNA
agacgtataaatcatatggtttcacttcctcatttttcagagtaaattctggcttcaattaattctaaaagaaaaatgtc

SEQ ID NO: 40501 - DNA, 80 bp, synthetic construct
  misc_feature 1..80: note = Artificially Synthesized Probe
  source 1..80: mol_type = other DNA
catcttatgttgggaaaaatggtgtggacactctgagcaggaaggaaccttccaaatcatctattttgaacagcaggtca

SEQ ID NO: 40502 - DNA, 80 bp, synthetic construct
  misc_feature 1..80: note = Artificially Synthesized Probe
  source 1..80: mol_type = other DNA
cactcatagatgtgaatctctgctttacggaggctaacagggagatctgcagtacaaagagttggtgggctttcctcaaa

SEQ ID NO: 40503 - DNA, 80 bp, synthetic construct
  misc_feature 1..80: note = Artificially Synthesized Probe
  source 1..80: mol_type = other DNA
ttcaattcagaatctccagtcattcaatccagaatctctagtcattgcacccatattaatacatttggtctaatccaaca

SEQ ID NO: 40504 - DNA, 80 bp, synthetic construct
  misc_feature 1..80: note = Artificially Synthesized Probe
  source 1..80: mol_type = other DNA
cagttcttaagaggaaaaaaaacagaaatttattgcaattctcatgaaaactctggaacgcttgcacatctcccacagtt

SEQ ID NO: 40505 - DNA, 80 bp, synthetic construct
  misc_feature 1..80: note = Artificially Synthesized Probe
  source 1..80: mol_type = other DNA
ccatatcagatactgtacagtgtctgctcttaaaccaaaatggagttaaactagagatcaataacagatagctgggaagt

SEQ ID NO: 40506 - DNA, 80 bp, synthetic construct
  misc_feature 1..80: note = Artificially Synthesized Probe
  source 1..80: mol_type = other DNA
atctattaaatgaattaaatcaatagttaataactttctcaaacagaaagtgccaggccagacgggttccctggtgagtt

SEQ ID NO: 40507 - DNA, 80 bp, synthetic construct
  misc_feature 1..80: note = Artificially Synthesized Probe
  source 1..80: mol_type = other DNA
ccacataaatatagtcaacttctctttcacagaagagcaaaaacattataatggggaaaaggcagtcttcaacaaatgga

SEQ ID NO: 40508 - DNA, 80 bp, synthetic construct
  misc_feature 1..80: note = Artificially Synthesized Probe
  source 1..80: mol_type = other DNA
gaaaatctgcagataatgatgtcagtgattccacacagggaaggaaatctttgatagtcaacagagtgaggctaatgact

SEQ ID NO: 40509 - DNA, 80 bp, synthetic construct
  misc_feature 1..80: note = Artificially Synthesized Probe
  source 1..80: mol_type = other DNA
ccgctccttgtgtgatcacccagatgatgaagccagcatgaaatgagagtgaacatgtggaggggttgctctcttgaggc

SEQ ID NO: 40510 - DNA, 80 bp, synthetic construct
  misc_feature 1..80: note = Artificially Synthesized Probe
  source 1..80: mol_type = other DNA
agcagtggtttggaaaaatctatccaccatgtcttttctaggttcaggtggtaacattattcctacccaccctcaacaga

SEQ ID NO: 40511 - DNA, 80 bp, synthetic construct
  misc_feature 1..80: note = Artificially Synthesized Probe
  source 1..80: mol_type = other DNA
catcttactttgtatctattggggatcgaaaaggctgtctgtcactcatgagtgagtgaaatgtataaaagtaaatttag

SEQ ID NO: 40512 - DNA, 80 bp, synthetic construct
  misc_feature 1..80: note = Artificially Synthesized Probe
  source 1..80: mol_type = other DNA
tggtgctttgttgtttgttgcttgtttggctcaaacatttcctaatgttttgttttcccggtgctaccttctgataaatg

SEQ ID NO: 40513 - DNA, 80 bp, synthetic construct
  misc_feature 1..80: note = Artificially Synthesized Probe
  source 1..80: mol_type = other DNA
gttagggctccaccaaagaaacagagcgagtaggaaagatattgggtacacatgtgtatacatgtttgtgcacatgcatg

SEQ ID NO: 40514 - DNA, 80 bp, synthetic construct
  misc_feature 1..80: note = Artificially Synthesized Probe
  source 1..80: mol_type = other DNA
ttattatccatttttttattatactttaaagttttagggtacatgtgcacaacgtgcaggttagttacatatgtatatgt

SEQ ID NO: 40515 - DNA, 80 bp, synthetic construct
  misc_feature 1..80: note = Artificially Synthesized Probe
  source 1..80: mol_type = other DNA
ggaaccagctatgaaatacaaaagtcgaatagaaatctcttgcaaaacagaatgttacttatataagcaaaaaacaggaa

SEQ ID NO: 40516 - DNA, 80 bp, synthetic construct
  misc_feature 1..80: note = Artificially Synthesized Probe
  source 1..80: mol_type = other DNA
ccccccacacacatatatagaccacacacacccacaccacacacataaacaccatgcaaatatatatggacatacacaca

SEQ ID NO: 40517 - DNA, 80 bp, synthetic construct
  misc_feature 1..80: note = Artificially Synthesized Probe
  source 1..80: mol_type = other DNA
gttgcactaaggaagggtttcatggtagaagggttccctggcaaggactactctgaagggaaggaagccacataaaggaa

SEQ ID NO: 40518 - DNA, 80 bp, synthetic construct
  misc_feature 1..80: note = Artificially Synthesized Probe
  source 1..80: mol_type = other DNA
attcactcagcataccccatgtgcacttcaatcccgtacattactgtttagcagaaatagtcaaaactcggcttcttcct

SEQ ID NO: 40519 - DNA, 80 bp, synthetic construct
  misc_feature 1..80: note = Artificially Synthesized Probe
  source 1..80: mol_type = other DNA
gagaactacagtggagtttttctctgttgaggtcacagaattttttcagactctggaaataactcagcttctggtgtgca

SEQ ID NO: 40520 - DNA, 80 bp, synthetic construct
  misc_feature 1..80: note = Artificially Synthesized Probe
  source 1..80: mol_type = other DNA
tgaataacacatcagtgcacatttccaaatcatgtttcaagtgacctatgtgtaagcacgccaaagtgtatcttctgggg

SEQ ID NO: 40521 - DNA, 80 bp, synthetic construct
  misc_feature 1..80: note = Artificially Synthesized Probe
  source 1..80: mol_type = other DNA
ctcacattttttttccagaacacgtggggcattaacaattatttaggccacaaggaacccaagaagaaacgcaacacaga

SEQ ID NO: 40522 - DNA, 80 bp, synthetic construct
  misc_feature 1..80: note = Artificially Synthesized Probe
  source 1..80: mol_type = other DNA
tatctgatcaatatgaccaaactgccctcagacgagaaaacgttcttacaaaggcatagaatttccagaagaacacacac

SEQ ID NO: 40523 - DNA, 80 bp, synthetic construct
  misc_feature 1..80: note = Artificially Synthesized Probe
  source 1..80: mol_type = other DNA
aggccatggctactggtgttaatttgctgcaaaaagcagtgactgctgctgtgggctgaaggaggctgccccctaggcag

SEQ ID NO: 40524 - DNA, 80 bp, synthetic construct
  misc_feature 1..80: note = Artificially Synthesized Probe
  source 1..80: mol_type = other DNA
gttctgttacttctgacaaaattgtccattgtaataagtgcagattcctgtaagcaagggatggcagattttcctgcttc

SEQ ID NO: 40525 - DNA, 80 bp, synthetic construct
  misc_feature 1..80: note = Artificially Synthesized Probe
  source 1..80: mol_type = other DNA
gatcacaggaagtgggcatgtgaagcctcccaactggaagtgggcttttgagggatcccaacaggaagtgagtgtgggaa

SEQ ID NO: 40526 - DNA, 80 bp, synthetic construct
  misc_feature 1..80: note = Artificially Synthesized Probe
  source 1..80: mol_type = other DNA
aaactttctaaatccagtcttcaaaacccattcaagctacatcaggtgtcttagggagctgtgcagaactgtaatcctcc

SEQ ID NO: 40527 - DNA, 80 bp, synthetic construct
  misc_feature 1..80: note = Artificially Synthesized Probe
  source 1..80: mol_type = other DNA
aatatttaaattagtatttgtggtttgttttgccacagttaatccatgttttgccagtgactgaacacaggctgtttgta

SEQ ID NO: 40528 - DNA, 80 bp, synthetic construct
  misc_feature 1..80: note = Artificially Synthesized Probe
  source 1..80: mol_type = other DNA
cgtgcttctcgactgtgcttctcgtcacttaactacatgctcgttccttcatgcaaactcaccatgattgtatttatcta

SEQ ID NO: 40529 - DNA, 80 bp, synthetic construct
  misc_feature 1..80: note = Artificially Synthesized Probe
  source 1..80: mol_type = other DNA
ttctgagagctaccaacactccataaaaccttgtgccaaccctccaagctcacgtgggatctgattcttctggtatgcta

SEQ ID NO: 40530 - DNA, 80 bp, synthetic construct
  misc_feature 1..80: note = Artificially Synthesized Probe
  source 1..80: mol_type = other DNA
gaactgaagcctacaagccacccacagacgacagaactgaaaccaacaagccgcccacagacggcagaactgaagcctag

SEQ ID NO: 40531 - DNA, 80 bp, synthetic construct
  misc_feature 1..80: note = Artificially Synthesized Probe
  source 1..80: mol_type = other DNA
gcaggataactatgctattcacaatcttaggaaaatcgatcttcctgccattgtagcaaacctggatcagtaagattcac

SEQ ID NO: 40532 - DNA, 80 bp, synthetic construct
  misc_feature 1..80: note = Artificially Synthesized Probe
  source 1..80: mol_type = other DNA
cctggggtgcagatcacagaggccaggggtgctgagtccccattaattcaataagtgtctattctccttttatttcattc

SEQ ID NO: 40533 - DNA, 80 bp, synthetic construct
  misc_feature 1..80: note = Artificially Synthesized Probe
  source 1..80: mol_type = other DNA
tctgtttgggggatattgtgaattataccaccatgagcatccgtgaatgcgtttttcttgggagatgttttccttcccac

SEQ ID NO: 40534 - DNA, 80 bp, synthetic construct
  misc_feature 1..80: note = Artificially Synthesized Probe
  source 1..80: mol_type = other DNA
tacgggtataaaataacaggcattgggaaagaatttcaaatagataacagtgaaatgtgcttctgaacgctaaagggcag

SEQ ID NO: 40535 - DNA, 80 bp, synthetic construct
  misc_feature 1..80: note = Artificially Synthesized Probe
  source 1..80: mol_type = other DNA
taagtgctttgagtgtgagcttttcaatattgtctctggaaaaaaccttttgagtggcctggtatgatcatctcctttca

SEQ ID NO: 40536 - DNA, 80 bp, synthetic construct
  misc_feature 1..80: note = Artificially Synthesized Probe
  source 1..80: mol_type = other DNA
tgattgcattataggatattttaagttcataattcacagcatctcagtgagcaggcaagaattctttgagtcctgcctct

SEQ ID NO: 40537 - DNA, 80 bp, synthetic construct
  misc_feature 1..80: note = Artificially Synthesized Probe
  source 1..80: mol_type = other DNA
agattataccaggatgttctattttcaaaataacagcaagttttctacaaaagtggctgtgcagtttatattcacacagc

SEQ ID NO: 40538 - DNA, 80 bp, synthetic construct
  misc_feature 1..80: note = Artificially Synthesized Probe
  source 1..80: mol_type = other DNA
gagcgcaggcgtgtgctgctgagacctctgttgtattctattggtcaatatcaatggcaatatcacactatgtaattact

SEQ ID NO: 40539 - DNA, 80 bp, synthetic construct
  misc_feature 1..80: note = Artificially Synthesized Probe
  source 1..80: mol_type = other DNA
cagggaatctgaattgcagagtttaaaaatagctttaatatgttcgttttagaaggctatcaagactcaatattgagacc

SEQ ID NO: 40540 - DNA, 80 bp, synthetic construct
  misc_feature 1..80: note = Artificially Synthesized Probe
  source 1..80: mol_type = other DNA
caaaccaccatggcacacgtttaccaatgtaacaaacctgcacatcctgcagatgtactctggaacttaaaaataaaaat

SEQ ID NO: 40541 - DNA, 80 bp, synthetic construct
  misc_feature 1..80: note = Artificially Synthesized Probe
  source 1..80: mol_type = other DNA
atgtaaaagccaatttgctgtgcagtgagttgaccattgggctctctcttgtagagacgatttaaagcattgtgacaatg

SEQ ID NO: 40542 - DNA, 80 bp, synthetic construct
  misc_feature 1..80: note = Artificially Synthesized Probe
  source 1..80: mol_type = other DNA
ggtgtttgtagtattctttgatggtagtttgcatttctgtgggatcggtggtgatatcccttttatcattttttattgca

SEQ ID NO: 40543 - DNA, 80 bp, synthetic construct
  misc_feature 1..80: note = Artificially Synthesized Probe
  source 1..80: mol_type = other DNA
gagaaaatttttgcaacctactcatctgacaaaaggctaatatccagaatctacaatgaactcaaacaaatttacaagaa

SEQ ID NO: 40544 - DNA, 80 bp, synthetic construct
  misc_feature 1..80: note = Artificially Synthesized Probe
  source 1..80: mol_type = other DNA
gcactcaagagtgtgttttatggtacctagcaaagtggtaatactagcattgatagtgtctatggactggagaataaaac

SEQ ID NO: 40545 - DNA, 80 bp, synthetic construct
  misc_feature 1..80: note = Artificially Synthesized Probe
  source 1..80: mol_type = other DNA
gcttctgctttagctctgcccctgcaagtctaatgtgggactcactagttttcctttgtaagaaacctttaccaaaaatg

SEQ ID NO: 40546 - DNA, 80 bp, synthetic construct
  misc_feature 1..80: note = Artificially Synthesized Probe
  source 1..80: mol_type = other DNA
gcctgtttttgaatttcacatgaatgagagtcatattcttgtgtctgactttgtttgctcaatattatgacattatatgc

SEQ ID NO: 40547 - DNA, 80 bp, synthetic construct
  misc_feature 1..80: note = Artificially Synthesized Probe
  source 1..80: mol_type = other DNA
aaaaaatataaaatagttattgcttggcttgtagaatttcagcgagttgaatggagatgaactgaatgtggagtgttgag

SEQ ID NO: 40548 - DNA, 80 bp, synthetic construct
  misc_feature 1..80: note = Artificially Synthesized Probe
  source 1..80: mol_type = other DNA
aatagcaagagaaaatctgcccccacgattcaatcacctcccatcaggcccttcttctgacattggggattacaattcaa

SEQ ID NO: 40549 - DNA, 80 bp, synthetic construct
  misc_feature 1..80: note = Artificially Synthesized Probe
  source 1..80: mol_type = other DNA
ttccctgaaaatggatttttcttttctaccacatggataggctgcaaattttccaaactttaacactctgctttccttct

SEQ ID NO: 40550 - DNA, 80 bp, synthetic construct
  misc_feature 1..80: note = Artificially Synthesized Probe
  source 1..80: mol_type = other DNA
cgtagctagagtgggaggaagagcaagaagggggaggtgctacacacttttaataaaccagatctcatgaaatctcactg

SEQ ID NO: 40551 - DNA, 80 bp, synthetic construct
  misc_feature 1..80: note = Artificially Synthesized Probe
  source 1..80: mol_type = other DNA
gcaatcttaaaatcagctagggcaagcagagatcatttccaaagaatggcaatttagttgacagcagatttctcaacaac

SEQ ID NO: 40552 - DNA, 80 bp, synthetic construct
  misc_feature 1..80: note = Artificially Synthesized Probe
  source 1..80: mol_type = other DNA
ttgctaggtaagagtcagaggcctattagataaaataataacaaacaagaaaattcagcttttgctatttaaaagagaca

SEQ ID NO: 40553 - DNA, 80 bp, synthetic construct
  misc_feature 1..80: note = Artificially Synthesized Probe
  source 1..80: mol_type = other DNA
gacagttctcaacatatttgtaagagcaaagtcccagcatagtcaaggtattattgaagcaggagttgggggtcttgttc

SEQ ID NO: 40554 - DNA, 80 bp, synthetic construct
  misc_feature 1..80: note = Artificially Synthesized Probe
  source 1..80: mol_type = other DNA
agctgggtagacgaagttttactaggaatagatttagtggcaaattgaagtgcatttgaattgctctcatgtagacttta

SEQ ID NO: 40555 - DNA, 80 bp, synthetic construct
  misc_feature 1..80: note = Artificially Synthesized Probe
  source 1..80: mol_type = other DNA
ccacaaaaggttctgtttcacggctgtgttttctgtttaggtgatttagaaaggtctgagtgcaggaagcagtgtttctg

SEQ ID NO: 40556 - DNA, 80 bp, synthetic construct
  misc_feature 1..80: note = Artificially Synthesized Probe
  source 1..80: mol_type = other DNA
ttcctcattgttgtaatagcttcaccccaaattcagaactctttgttctgtttcaaagttgctccttaaaataggtggct

SEQ ID NO: 40557 - DNA, 80 bp, synthetic construct
  misc_feature 1..80: note = Artificially Synthesized Probe
  source 1..80: mol_type = other DNA
ctcccagcaatgtcctcaggcagtttcaccttgtgaccacatacagctgtgaaaatcacatatatttacacatttaaagt

SEQ ID NO: 40558 - DNA, 80 bp, synthetic construct
  misc_feature 1..80: note = Artificially Synthesized Probe
  source 1..80: mol_type = other DNA
gatggtttccagcatcatccatgttccagcaaaagacatgaattcatcctttttaatggctgcatagtactccatggtat

SEQ ID NO: 40559 - DNA, 80 bp, synthetic construct
  misc_feature 1..80: note = Artificially Synthesized Probe
  source 1..80: mol_type = other DNA
ctctaaaggcctacagtatataatagtttgagtttggaatcttttttttgtgtcatgcataactcaaactttgcatatca

SEQ ID NO: 40560 - DNA, 80 bp, synthetic construct
  misc_feature 1..80: note = Artificially Synthesized Probe
  source 1..80: mol_type = other DNA
actggttctacacaaaatgattaagggagccctacacctggaagtgaaaggaccacatctaccatcatgaaaaaacatga

SEQ ID NO: 40561 - DNA, 80 bp, synthetic construct
  misc_feature 1..80: note = Artificially Synthesized Probe
  source 1..80: mol_type = other DNA
ttctcatcagcacacagaactttgctgggatagatcatacattaggccacaaaaaaaagtgggaacaaatttataagaat

SEQ ID NO: 40562 - DNA, 80 bp, synthetic construct
  misc_feature 1..80: note = Artificially Synthesized Probe
  source 1..80: mol_type = other DNA
tttcctaactcattctacaatgccagcattacgtaatgcaaaaaccagaaaaggacacagcaaagaaaggaaacaacagg

SEQ ID NO: 40563 - DNA, 80 bp, synthetic construct
  misc_feature 1..80: note = Artificially Synthesized Probe
  source 1..80: mol_type = other DNA
agctgaaaaataaatcaagacaccaatccctttcacaatagctatgaaaaaatatttaggaataagtttaatcaaagagg

SEQ ID NO: 40564 - DNA, 80 bp, synthetic construct
  misc_feature 1..80: note = Artificially Synthesized Probe
  source 1..80: mol_type = other DNA
attacagactctggaaggatgaggagaaaatagaagtcttatacactgtttttagaaatgtacgttagtacaaccactct

SEQ ID NO: 40565 - DNA, 80 bp, synthetic construct
  misc_feature 1..80: note = Artificially Synthesized Probe
  source 1..80: mol_type = other DNA
acctccagtggtctgaattacatatcatggagtcccagaatgagaataagaatgcaaagaataggagtgaacatgaagca

SEQ ID NO: 40566 - DNA, 80 bp, synthetic construct
  misc_feature 1..80: note = Artificially Synthesized Probe
  source 1..80: mol_type = other DNA
aagaatttgttcaacagagtagaaaaaatccaggggaacaaaaagaccaatagcaacatgtaattaagcccagcagtatg

SEQ ID NO: 40567 - DNA, 80 bp, synthetic construct
  misc_feature 1..80: note = Artificially Synthesized Probe
  source 1..80: mol_type = other DNA
aatcccagataactctgtgaaactgggataacactgataaccaaaaccttccactgagattaagagtgacaaatgttaca

SEQ ID NO: 40568 - DNA, 80 bp, synthetic construct
  misc_feature 1..80: note = Artificially Synthesized Probe
  source 1..80: mol_type = other DNA
aggtgttatgtggatgaggtagaaatactctgtttcataatttggatttgggctgcatgggctatatatatttgacaaaa

SEQ ID NO: 40569 - DNA, 80 bp, synthetic construct
  misc_feature 1..80: note = Artificially Synthesized Probe
  source 1..80: mol_type = other DNA
ctagaatgtggttgtatttctatgataatcagagaacgtagacttaagagtgtgctccgaacactactttgtgtccatac

SEQ ID NO: 40570 - DNA, 80 bp, synthetic construct
  misc_feature 1..80: note = Artificially Synthesized Probe
  source 1..80: mol_type = other DNA
tgttggaagcagcaagattacaaaaagctgacaggtacaagctatagggtttgtgatcagctggtaggaacatgcctcat

SEQ ID NO: 40571 - DNA, 80 bp, synthetic construct
  misc_feature 1..80: note = Artificially Synthesized Probe
  source 1..80: mol_type = other DNA
tacacatcaggtgatcagaaggtatttcagtgtcattctcgtgcatgcaccaaaggtgaatctcttaccagaagttagag

SEQ ID NO: 40572 - DNA, 80 bp, synthetic construct
  misc_feature 1..80: note = Artificially Synthesized Probe
  source 1..80: mol_type = other DNA
gatagggttggctctttaagtggtggattaaccaatgtgtaaggtatgcatttataaggaatgaagtctcaaataacgtt

SEQ ID NO: 40573 - DNA, 80 bp, synthetic construct
  misc_feature 1..80: note = Artificially Synthesized Probe
  source 1..80: mol_type = other DNA
cagttggaaaacagcgggagaaaatgtcttaaatccgggtagaagagcacttctttctttccagatctttcagaaacaac

SEQ ID NO: 40574 - DNA, 80 bp, synthetic construct
  misc_feature 1..80: note = Artificially Synthesized Probe
  source 1..80: mol_type = other DNA
attagactggaaataaagactgacttcttgtccaagtctcagatgtttttagaaatgccacttaaactctgtgggcctct

SEQ ID NO: 40575 - DNA, 80 bp, synthetic construct
  misc_feature 1..80: note = Artificially Synthesized Probe
  source 1..80: mol_type = other DNA
tagattgtaaaggagctgaaaatccctactgcctggtgacatcaaccatcgtaacctcacagtgaaagatatgactcacg

SEQ ID NO: 40576 - DNA, 80 bp, synthetic construct
  misc_feature 1..80: note = Artificially Synthesized Probe
  source 1..80: mol_type = other DNA
tgaatgtgatgaagattggctgttctagctttggtttaaggatgaattcaggtcataagatggaaatgtctcctactctg

SEQ ID NO: 40577 - DNA, 80 bp, synthetic construct
  misc_feature 1..80: note = Artificially Synthesized Probe
  source 1..80: mol_type = other DNA
tgattggaagtttcctgaggctttcctagaagcagaagctgccatgcttcctatgtagactacagaactgtgagctggtt

SEQ ID NO: 40578 - DNA, 80 bp, synthetic construct
  misc_feature 1..80: note = Artificially Synthesized Probe
  source 1..80: mol_type = other DNA
aaagattaataaaaacaagtaagataattatttgcccaattatttcattcagggttggggagactggagtctgtgctgga

SEQ ID NO: 40579 - DNA, 80 bp, synthetic construct
  misc_feature 1..80: note = Artificially Synthesized Probe
  source 1..80: mol_type = other DNA
atagtttggatattcagagtgttttatggttccatatacattttaggattgtgttttctatttctttgaaaaatatcatt

SEQ ID NO: 40580 - DNA, 80 bp, synthetic construct
  misc_feature 1..80: note = Artificially Synthesized Probe
  source 1..80: mol_type = other DNA
aggatattggcctgtaatttttgtttcttgtaaggttctcatctggctttggtattaggataatgctggcctcataaagg

SEQ ID NO: 40581 - DNA, 80 bp, synthetic construct
  misc_feature 1..80: note = Artificially Synthesized Probe
  source 1..80: mol_type = other DNA
tcttccacaatggttgaactagtttacagtcccaccaacagtgtaaaaatgttcctatttctccacatcctctccagcac

SEQ ID NO: 40582 - DNA, 80 bp, synthetic construct
  misc_feature 1..80: note = Artificially Synthesized Probe
  source 1..80: mol_type = other DNA
aatgggaactatgcgtttggataaattatgtgtcattgtgaatgaggattaaatcattggctacacagtacgagaaaaga

SEQ ID NO: 40583 - DNA, 80 bp, synthetic construct
  misc_feature 1..80: note = Artificially Synthesized Probe
  source 1..80: mol_type = other DNA
aactcaaggtcagctgagttgagacgttgattgcatttgcagaatcccttcacagaaacacctagtttctgttgattgaa

SEQ ID NO: 40584 - DNA, 80 bp, synthetic construct
  misc_feature 1..80: note = Artificially Synthesized Probe
  source 1..80: mol_type = other DNA
tgagaaccagctgttaaaagtgtatggcacctgccctctttccttccaactcctgctatgcccatgtcaagtgctggctc

SEQ ID NO: 40585 - DNA, 80 bp, synthetic construct
  misc_feature 1..80: note = Artificially Synthesized Probe
  source 1..80: mol_type = other DNA
ttacaataaaatttcatttgctttgtaggcactcaccttatttcagaagaagaaggcagatgggctctatagtagtcata

SEQ ID NO: 40586 - DNA, 80 bp, synthetic construct
  misc_feature 1..80: note = Artificially Synthesized Probe
  source 1..80: mol_type = other DNA
ctgctccttctttcctgggaattcagaatcattcttgagaaatcactctgcatctgtgtcattctcccaactcacttctc

SEQ ID NO: 40587 - DNA, 80 bp, synthetic construct
  misc_feature 1..80: note = Artificially Synthesized Probe
  source 1..80: mol_type = other DNA
ttcttctcggtctctgtctctgtctctatctctgtctctgtctctctctgtctctgtctgtgtctctctctgtctctgcc

SEQ ID NO: 40588 - DNA, 80 bp, synthetic construct
  misc_feature 1..80: note = Artificially Synthesized Probe
  source 1..80: mol_type = other DNA
ggtgctggatcgctgtagaggaaagcggtgcagtgatggagggcgtctccctgtcctgcctgctgctggaggtgctggat

SEQ ID NO: 40589 - DNA, 80 bp, synthetic construct
  misc_feature 1..80: note = Artificially Synthesized Probe
  source 1..80: mol_type = other DNA
cctggctctgaagacctcgttttagtcagtgtgggctgccatagcccagttccacagatgggtgaccttagttccacaga

SEQ ID NO: 40590 - DNA, 80 bp, synthetic construct
  misc_feature 1..80: note = Artificially Synthesized Probe
  source 1..80: mol_type = other DNA
acggaacccctccagcaggtgcagttgtgtttaacacctaaacaaatatataggaaaaatgcagtgttaggcaggaaaac

SEQ ID NO: 40591 - DNA, 80 bp, synthetic construct
  misc_feature 1..80: note = Artificially Synthesized Probe
  source 1..80: mol_type = other DNA
attgcagagacgttcgttcccagggatctgaatgaagtagaaaagtgcagatgctcagggatgattcgtcctgctcttga

SEQ ID NO: 40592 - DNA, 80 bp, synthetic construct
  misc_feature 1..80: note = Artificially Synthesized Probe
  source 1..80: mol_type = other DNA
ggagaccaagccaggcttcttatcttaattttcttcagctataggtaaaaccgcaagtctcttatgcaaaatagttatag

SEQ ID NO: 40593 - DNA, 80 bp, synthetic construct
  misc_feature 1..80: note = Artificially Synthesized Probe
  source 1..80: mol_type = other DNA
tccgctccgccacgaatccgtttccccacggtatccaccctggagtcctgcagcttccacacaagctcctcaggcctgtt

SEQ ID NO: 40594 - DNA, 80 bp, synthetic construct
  misc_feature 1..80: note = Artificially Synthesized Probe
  source 1..80: mol_type = other DNA
aatgtggctttgacatttacaaaatatggttctcttaggatcagagaacatggactgcaaggccggctctggccctgatc

SEQ ID NO: 40595 - DNA, 80 bp, synthetic construct
  misc_feature 1..80: note = Artificially Synthesized Probe
  source 1..80: mol_type = other DNA
ccgattggtgtatttacaatccctgagctagacataaaggttctccaagtccccaccagactcaggagcccagctggctt

SEQ ID NO: 40596 - DNA, 80 bp, synthetic construct
  misc_feature 1..80: note = Artificially Synthesized Probe
  source 1..80: mol_type = other DNA
gtttacagagaagaaaaggccgatgctgaagccgagaagatttcgggacagttctgtgagtgatgccttcacctggatga

SEQ ID NO: 40597 - DNA, 80 bp, synthetic construct
  misc_feature 1..80: note = Artificially Synthesized Probe
  source 1..80: mol_type = other DNA
gtgacctacttaggataatgacagtgcctcttccatagggtaactgcgggggtgaaatagatccaaaaggtgaattactt

SEQ ID NO: 40598 - DNA, 80 bp, synthetic construct
  misc_feature 1..80: note = Artificially Synthesized Probe
  source 1..80: mol_type = other DNA
aagtgacagagaagggtgaggaggtgccctgtgagacaccacaggggagaaattctctttcttggacctattgaactttt

SEQ ID NO: 40599 - DNA, 80 bp, synthetic construct
  misc_feature 1..80: note = Artificially Synthesized Probe
  source 1..80: mol_type = other DNA
catgcacactctccttattttccaaagcatgaaggcttaaagtaaacaggcatgtgtgcaatgcacacctttcctctctg

SEQ ID NO: 40600 - DNA, 80 bp, synthetic construct
  misc_feature 1..80: note = Artificially Synthesized Probe
  source 1..80: mol_type = other DNA
atgtgtgtccatcaaagagcatgttagctcctgagcagcagatgctctgtgaattttagctccgataatgaccttggcca

SEQ ID NO: 40601 - DNA, 80 bp, synthetic construct
  misc_feature 1..80: note = Artificially Synthesized Probe
  source 1..80: mol_type = other DNA
catccatgcatttggtgcatacgtcaccaaccctgagaatcaggaaatgccaactccctgagaagacactgtcgttagta

SEQ ID NO: 40602 - DNA, 80 bp, synthetic construct
  misc_feature 1..80: note = Artificially Synthesized Probe
  source 1..80: mol_type = other DNA
attcttctaaagtctgtttttggtctgagagttggttggccaagagtatggaatacatgactgtttatcgaggtgttcac

SEQ ID NO: 40603 - DNA, 80 bp, synthetic construct
  misc_feature 1..80: note = Artificially Synthesized Probe
  source 1..80: mol_type = other DNA
tcaagagtaccttgttcatcgccatcaggcagaatatcagccacaagtagataaacctcacattctgattcaagaaacac

SEQ ID NO: 40604 - DNA, 80 bp, synthetic construct
  misc_feature 1..80: note = Artificially Synthesized Probe
  source 1..80: mol_type = other DNA
gggtcttcgaaagaataaccagtaagaatcctgcagacaataactccagaatttcaggagcactgttctttccttgacaa

SEQ ID NO: 40605 - DNA, 80 bp, synthetic construct
  misc_feature 1..80: note = Artificially Synthesized Probe
  source 1..80: mol_type = other DNA
gatattaaaagtcaacaggattttaaaaattaaagaaatgaaaagagatggggtgggaacgaagacttgatgacacgggc

SEQ ID NO: 40606 - DNA, 80 bp, synthetic construct
  misc_feature 1..80: note = Artificially Synthesized Probe
  source 1..80: mol_type = other DNA
tcccggctgtgtggctgtgggctgtgggaacattatgattctgcacctccacttcctcggtgaaattttggaaaacaaca

SEQ ID NO: 40607 - DNA, 80 bp, synthetic construct
  misc_feature 1..80: note = Artificially Synthesized Probe
  source 1..80: mol_type = other DNA
ttttaagcattatattattttcttaaataaaatccttactaggaaagcttcattctcaggagggctttggcccagtgggt

SEQ ID NO: 40608 - DNA, 80 bp, synthetic construct
  misc_feature 1..80: note = Artificially Synthesized Probe
  source 1..80: mol_type = other DNA
agcatacgtgggaatgggcagcatttatggacttggcctttacgtgtttcagagaaatgctgacttttgtagctatactg

SEQ ID NO: 40609 - DNA, 80 bp, synthetic construct
  misc_feature 1..80: note = Artificially Synthesized Probe
  source 1..80: mol_type = other DNA
gtagtttatttggaaattgatcttagagctgagcttcattatgtaggatgatgaagaactagccctgctatatccggatg

SEQ ID NO: 40610 - DNA, 80 bp, synthetic construct
  misc_feature 1..80: note = Artificially Synthesized Probe
  source 1..80: mol_type = other DNA
actaacaggcatttcagattactggcggtctattattgccatcttgggccaacagtagctctttattcactccttaatac

SEQ ID NO: 40611 - DNA, 80 bp, synthetic construct
  misc_feature 1..80: note = Artificially Synthesized Probe
  source 1..80: mol_type = other DNA
ggcaaaagaaaaacatcactttaaatctctctaccccgtatgaatctaattaggctgtgacccttagaatttctcatcag

SEQ ID NO: 40612 - DNA, 80 bp, synthetic construct
  misc_feature 1..80: note = Artificially Synthesized Probe
  source 1..80: mol_type = other DNA
tcagccatcctgacaaatacaataagcttgtttttgcctgctgcagttatccagcagccagctgctccgaagatttagat

SEQ ID NO: 40613 - DNA, 80 bp, synthetic construct
  misc_feature 1..80: note = Artificially Synthesized Probe
  source 1..80: mol_type = other DNA
accacatctatgtggttcctgagcctccatgggacgtaagtataacccactaggaacttggaagttcatgatccagtgaa

SEQ ID NO: 40614 - DNA, 80 bp, synthetic construct
  misc_feature 1..80: note = Artificially Synthesized Probe
  source 1..80: mol_type = other DNA
tactacctcatagaaaaatctgaaatactaccttctaatagaatataattcaatacagtcgttttaaaagataaaccaac

SEQ ID NO: 40615 - DNA, 80 bp, synthetic construct
  misc_feature 1..80: note = Artificially Synthesized Probe
  source 1..80: mol_type = other DNA
tataaatttatggctgaatgctatcgttctgcaatttcattttccagtgcccaccggtaccattctccccaaactgactg

SEQ ID NO: 40616 - DNA, 80 bp, synthetic construct
  misc_feature 1..80: note = Artificially Synthesized Probe
  source 1..80: mol_type = other DNA
gttggccttttatggaactcagggattcttcaaaccctaatgggcagatcctaattcaataaccattgaaaagcaagggt

SEQ ID NO: 40617 - DNA, 80 bp, synthetic construct
  misc_feature 1..80: note = Artificially Synthesized Probe
  source 1..80: mol_type = other DNA
ttcttcatacctgctgtgggtagagagtccatttcttattttaaatgcagttttgttttgttaaaatgcaggcgagtctt

SEQ ID NO: 40618 - DNA, 80 bp, synthetic construct
  misc_feature 1..80: note = Artificially Synthesized Probe
  source 1..80: mol_type = other DNA
agtaatttctgcagaagatgacttggcaccatctccattctctcttcagagccatcagcagggcttctttccatcattgt

SEQ ID NO: 40619 - DNA, 80 bp, synthetic construct
  misc_feature 1..80: note = Artificially Synthesized Probe
  source 1..80: mol_type = other DNA
gggatgtactcattggtgagtgctggatctttgtaagtttgaaatgtttaaagatttccaaagggaggtttttgagtaga

SEQ ID NO: 40620 - DNA, 80 bp, synthetic construct
  misc_feature 1..80: note = Artificially Synthesized Probe
  source 1..80: mol_type = other DNA
accatgtccagcatcacctctgacatagagaagatgctgcctggttacaggtggaataatctataaaatcagtactgagg

SEQ ID NO: 40621 - DNA, 80 bp, synthetic construct
  misc_feature 1..80: note = Artificially Synthesized Probe
  source 1..80: mol_type = other DNA
aggtaaagtccttctttgaacggtggcttttgatctcgttcaagatgaggaagaggaagaatattgaaggagaatagaga

SEQ ID NO: 40622 - DNA, 80 bp, synthetic construct
  misc_feature 1..80: note = Artificially Synthesized Probe
  source 1..80: mol_type = other DNA
ctggccttgctgcactttgggagtcatgatggatacatcaacaataaattgcttaaaaataaaaagtcaagatctctgag

SEQ ID NO: 40623 - DNA, 80 bp, synthetic construct
  misc_feature 1..80: note = Artificially Synthesized Probe
  source 1..80: mol_type = other DNA
acctgatgcctgcactttcactaaattagagaagcattcacatcacatccatgtagggagaggaaggatatctgtgaaag

SEQ ID NO: 40624 - DNA, 80 bp, synthetic construct
  misc_feature 1..80: note = Artificially Synthesized Probe
  source 1..80: mol_type = other DNA
ccaagctttgtcttagaacatgactcaaatccctgctgttttgtcacatattgatatcagactagtatggaaaatgcatt

SEQ ID NO: 40625 - DNA, 80 bp, synthetic construct
  misc_feature 1..80: note = Artificially Synthesized Probe
  source 1..80: mol_type = other DNA
ggcttttaaactctgaaataagcacctgaaactccctctagcaaattcgagatgtaactcttatggcctgaataccagat

SEQ ID NO: 40626 - DNA, 80 bp, synthetic construct
  misc_feature 1..80: note = Artificially Synthesized Probe
  source 1..80: mol_type = other DNA
ctgtgaggtgctatttaaagttcacaaggtaggtatcttttgcacttcagatgctttcatacaaataagatgccctttgg

SEQ ID NO: 40627 - DNA, 80 bp, synthetic construct
  misc_feature 1..80: note = Artificially Synthesized Probe
  source 1..80: mol_type = other DNA
caccgtgtcctagtatgtgactcagtgcatcatgtaaacaaaccacctgtgtctttttcatgtaggagtacacaaaacag

SEQ ID NO: 40628 - DNA, 80 bp, synthetic construct
  misc_feature 1..80: note = Artificially Synthesized Probe
  source 1..80: mol_type = other DNA
agatgttctttaggtactggggtgtctttgagagattattgtatcttacatatgtggttcattagtaagctatagagcca

SEQ ID NO: 40629 - DNA, 80 bp, synthetic construct
  misc_feature 1..80: note = Artificially Synthesized Probe
  source 1..80: mol_type = other DNA
gggtagtcctgtttggataatatcaacactgagaggaagaattcctaaatgattttcctaaagccatgtcaggacaaaac

SEQ ID NO: 40630 - DNA, 80 bp, synthetic construct
  misc_feature 1..80: note = Artificially Synthesized Probe
  source 1..80: mol_type = other DNA
cactgcgatccacaaggtctgagtgattgtttttaaaggagctacaggaactatctggggaaatgagctatatatgaata

SEQ ID NO: 40631 - DNA, 80 bp, synthetic construct
  misc_feature 1..80: note = Artificially Synthesized Probe
  source 1..80: mol_type = other DNA
atcaaatcgacatgtacggcctggctcagcattgccttaggacgtgtgtctttatgaaagcacgtagtgaactcatgtga

SEQ ID NO: 40632 - DNA, 80 bp, synthetic construct
  misc_feature 1..80: note = Artificially Synthesized Probe
  source 1..80: mol_type = other DNA
ctgcagcgtggttgccaccatttcagaccattcatctcataaacagatgatgtaaacttatggtgtcaataaatacagtg

SEQ ID NO: 40633 - DNA, 80 bp, synthetic construct
  misc_feature 1..80: note = Artificially Synthesized Probe
  source 1..80: mol_type = other DNA
agaatcatgatgggaagacccagcaggtgggcagctccccttcctttctgctgccatatgcagggctgtgggtgaacacc

SEQ ID NO: 40634 - DNA, 80 bp, synthetic construct
  misc_feature 1..80: note = Artificially Synthesized Probe
  source 1..80: mol_type = other DNA
gggttaaacgattaaccagaaatggaacaacatcattacatcattccctttgtcaggcctttgggttggcagaatgagct

SEQ ID NO: 40635 - DNA, 80 bp, synthetic construct
  misc_feature 1..80: note = Artificially Synthesized Probe
  source 1..80: mol_type = other DNA
gtgtctgagacatagcattggggaatatgtagcagtttatcgggggaaaagaggaatcttcagaaggtgagaatctttca

SEQ ID NO: 40636 - DNA, 80 bp, synthetic construct
  misc_feature 1..80: note = Artificially Synthesized Probe
  source 1..80: mol_type = other DNA
atcccaggctgctgtgattttcccctcaaattgggcaccctaaattggaattatggttgattcctgatgcttaaagtaac

SEQ ID NO: 40637 - DNA, 80 bp, synthetic construct
  misc_feature 1..80: note = Artificially Synthesized Probe
  source 1..80: mol_type = other DNA
agcccttctggaggctaagaaaagaggatcccttgagcctcagaattagagaccagcccaggcaaccaagcccaagaaac

SEQ ID NO: 40638 - DNA, 80 bp, synthetic construct
  misc_feature 1..80: note = Artificially Synthesized Probe
  source 1..80: mol_type = other DNA
tgggagggacaaagcatttcaaaattagatggactcactccctcttcatgaattagagaaaatacttctccaaaactcca

SEQ ID NO: 40639 - DNA, 80 bp, synthetic construct
  misc_feature 1..80: note = Artificially Synthesized Probe
  source 1..80: mol_type = other DNA
acaaatatcgttccaagttatccagaattcagtgtcacacacatgcataagagaataacagaccttccatgttccagcct

SEQ ID NO: 40640 - DNA, 80 bp, synthetic construct
  misc_feature 1..80: note = Artificially Synthesized Probe
  source 1..80: mol_type = other DNA
agtgtgccaccgagatccctcacaggtgcagttcacaatagggttcccgctcctgtgagaatctaatacttctgctcatc

SEQ ID NO: 40641 - DNA, 80 bp, synthetic construct
  misc_feature 1..80: note = Artificially Synthesized Probe
  source 1..80: mol_type = other DNA
tgagctgctctcacagaacaccaatctcttctgcctgtttccaagtttcagaaatttttctgataatttctcctttttgt

SEQ ID NO: 40642 - DNA, 80 bp, synthetic construct
  misc_feature 1..80: note = Artificially Synthesized Probe
  source 1..80: mol_type = other DNA
tcacagcacacatattagaatgagtaaattttaaaagactgatgatgccaagtgttggtgaaggaactggaactctcatt

SEQ ID NO: 40643 - DNA, 80 bp, synthetic construct
  misc_feature 1..80: note = Artificially Synthesized Probe
  source 1..80: mol_type = other DNA
gtgcaaaggggccaaatatgaagtgtgtcctggctttacgacagcctatccttgtaaaaactaattcattcctgaaaaat

SEQ ID NO: 40644 - DNA, 80 bp, synthetic construct
  misc_feature 1..80: note = Artificially Synthesized Probe
  source 1..80: mol_type = other DNA
aaacagccatactgctgctacgaagaaagttctgaacaagatcaacgtgctgaataagaacaaaccagccacaatactcc

SEQ ID NO: 40645 - DNA, 80 bp, synthetic construct
  misc_feature 1..80: note = Artificially Synthesized Probe
  source 1..80: mol_type = other DNA
actgaaaacctggaaaggattcaccaccctagatttcattagaaacatttgtgactcatgggaggacatcagagtatcaa

SEQ ID NO: 40646 - DNA, 80 bp, synthetic construct
  misc_feature 1..80: note = Artificially Synthesized Probe
  source 1..80: mol_type = other DNA
taatgctttgcatacttcatagattacagtatagtgtaagcccaatttttatatgcacccagaaaccaaaaaattagtaa

SEQ ID NO: 40647 - DNA, 80 bp, synthetic construct
  misc_feature 1..80: note = Artificially Synthesized Probe
  source 1..80: mol_type = other DNA
accatgctattgtttatggaggacaggaggtgctagtgaggtatgttgttacctgaccatctgctaagttcttttattta

SEQ ID NO: 40648 - DNA, 80 bp, synthetic construct
  misc_feature 1..80: note = Artificially Synthesized Probe
  source 1..80: mol_type = other DNA
agttttctttcatttgctatatctgtaccgcatctctgatgtgctgcgtgctttttgcgatgttttcagatgggaagttg

SEQ ID NO: 40649 - DNA, 80 bp, synthetic construct
  misc_feature 1..80: note = Artificially Synthesized Probe
  source 1..80: mol_type = other DNA
tcagaggctcctgggactcctcaccattttggagcctcatccaaatttatgttaaaattcagcttttccttaaaattgtt

SEQ ID NO: 40650 - DNA, 80 bp, synthetic construct
  misc_feature 1..80: note = Artificially Synthesized Probe
  source 1..80: mol_type = other DNA
tgtgtgtttatgtggtgtgttgtgtggtgtgtgtgtttggtgtggtgtgtgtgtatgtggtgtgtgtgtgcacaagtgtg

SEQ ID NO: 40651 - DNA, 80 bp, synthetic construct
  misc_feature 1..80: note = Artificially Synthesized Probe
  source 1..80: mol_type = other DNA
ttcagctgaaaacatcgttgatcaaagaaacgctactgcatgctttggaagtcagaaatgcacccaacacattcagaagg

SEQ ID NO: 40652 - DNA, 80 bp, synthetic construct
  misc_feature 1..80: note = Artificially Synthesized Probe
  source 1..80: mol_type = other DNA
ctcagccccgtggcccttgtgctcatcagcactgacagtcccttggctgtaaggtgtctcttgtccactgcccagttaca

SEQ ID NO: 40653 - DNA, 80 bp, synthetic construct
  misc_feature 1..80: note = Artificially Synthesized Probe
  source 1..80: mol_type = other DNA
ctggagtagggagcgggctgcagctggcaatttatttctccaaaagccattatggcttaatttaattcgattggaactaa

SEQ ID NO: 40654 - DNA, 80 bp, synthetic construct
  misc_feature 1..80: note = Artificially Synthesized Probe
  source 1..80: mol_type = other DNA
ttttctgcctggtttatatttgctggcagctgattagatggtgcccacccagattaagggtgggtctgcctttcccagcc

SEQ ID NO: 40655 - DNA, 80 bp, synthetic construct
  misc_feature 1..80: note = Artificially Synthesized Probe
  source 1..80: mol_type = other DNA
gggttcctccttctggaactaagacctctaggacagcagaacataatgtcgagggaactggaaacagaaattttgctagg

SEQ ID NO: 40656 - DNA, 80 bp, synthetic construct
  misc_feature 1..80: note = Artificially Synthesized Probe
  source 1..80: mol_type = other DNA
atttaatttctttagagaaaagctgataattggaaatagaaatagtccaacaggaggcaccagggcctctgtggatgcag

SEQ ID NO: 40657 - DNA, 80 bp, synthetic construct
  misc_feature 1..80: note = Artificially Synthesized Probe
  source 1..80: mol_type = other DNA
ggagaacctacagtgaacaaaacagacaattctctgtgcacagatctgacatcatatctagaccactcagagcaatgtgt

SEQ ID NO: 40658 - DNA, 80 bp, synthetic construct
  misc_feature 1..80: note = Artificially Synthesized Probe
  source 1..80: mol_type = other DNA
gacttcagatttctggtctactcttacgcctgattcctttcagccttggcctttgagattgttgattactgctccttaat

SEQ ID NO: 40659 - DNA, 80 bp, synthetic construct
  misc_feature 1..80: note = Artificially Synthesized Probe
  source 1..80: mol_type = other DNA
ttgtttatccgttcatcctttgatggacacttgagttgtttctacctttgggctgctgggaataatgttgctataaaaat

SEQ ID NO: 40660 - DNA, 80 bp, synthetic construct
  misc_feature 1..80: note = Artificially Synthesized Probe
  source 1..80: mol_type = other DNA
ttaactccaacagtgggaaatgcaatacatcagattctggtgtggacacagagccaaaccatatcaatgggtgtacaaat

SEQ ID NO: 40661 - DNA, 80 bp, synthetic construct
  misc_feature 1..80: note = Artificially Synthesized Probe
  source 1..80: mol_type = other DNA
attgaatggtcttgacaactttgttaggaattatctgagcacctatgtgagggtttctttcatcgctctctgttctgttc

SEQ ID NO: 40662 - DNA, 80 bp, synthetic construct
  misc_feature 1..80: note = Artificially Synthesized Probe
  source 1..80: mol_type = other DNA
gtagaatccttgtctgggtttggtatcaaggtaacactgacctcatagaatgactgggaaagtatatccttctcttcagg

SEQ ID NO: 40663 - DNA, 80 bp, synthetic construct
  misc_feature 1..80: note = Artificially Synthesized Probe
  source 1..80: mol_type = other DNA
ttaacattttttaaggcttgttttgcggccgagcatgtggagcgaaccttgtaaagtatgatatctacatgggagaagtg

SEQ ID NO: 40664 - DNA, 80 bp, synthetic construct
  misc_feature 1..80: note = Artificially Synthesized Probe
  source 1..80: mol_type = other DNA
ctccaatcagaaatgcagaaaggaactcactctctgctacttcttcatgtaaaggggttcatcatccatcttgtaagcag

SEQ ID NO: 40665 - DNA, 80 bp, synthetic construct
  misc_feature 1..80: note = Artificially Synthesized Probe
  source 1..80: mol_type = other DNA
gtgtagcccagaaatgtaatgattgaggaaatttcgagtgacataggaatgacagccgtagaggactgagtctccaatgt

SEQ ID NO: 40666 - DNA, 80 bp, synthetic construct
  misc_feature 1..80: note = Artificially Synthesized Probe
  source 1..80: mol_type = other DNA
cgctacctgccccttaggcatacatttcacaattagagaagcctcttctacccgtgtattagtaaaactgaaaaatacag

SEQ ID NO: 40667 - DNA, 80 bp, synthetic construct
  misc_feature 1..80: note = Artificially Synthesized Probe
  source 1..80: mol_type = other DNA
cacatctccattaaatgtgtgctgctgccttgtgtctattgcatgagctatacttgagacattgtccacctgtcactaat

SEQ ID NO: 40668 - DNA, 80 bp, synthetic construct
  misc_feature 1..80: note = Artificially Synthesized Probe
  source 1..80: mol_type = other DNA
agagtaggggcaggtgggatttcaatctatcagcatgtcagcacagtgtattttatatacatttcattcatttatttatt

SEQ ID NO: 40669 - DNA, 80 bp, synthetic construct
  misc_feature 1..80: note = Artificially Synthesized Probe
  source 1..80: mol_type = other DNA
aggcgcaacatcgggagccaacagtcagaggcaggaacatgccctgcactgctgctttccgggccgtggaaacacatctg

SEQ ID NO: 40670 - DNA, 80 bp, synthetic construct
  misc_feature 1..80: note = Artificially Synthesized Probe
  source 1..80: mol_type = other DNA
gtcatctgtaaaatgaggatgaaagcaccatctcgtgagtttaccatgagaattcaacgtaaggcacttagcctagttcc

SEQ ID NO: 40671 - DNA, 80 bp, synthetic construct
  misc_feature 1..80: note = Artificially Synthesized Probe
  source 1..80: mol_type = other DNA
ttctcaagagccctagaaaatttgatgagtcattaggctgactgtgtgcgagaggaaattctccaccgacagcctgaagc

SEQ ID NO: 40672 - DNA, 80 bp, synthetic construct
  misc_feature 1..80: note = Artificially Synthesized Probe
  source 1..80: mol_type = other DNA
gacactacagaggccagaagggagtgtcccaatattgttttaagtgctgaaagaaaagaattggcacacagaagacttta

SEQ ID NO: 40673 - DNA, 80 bp, synthetic construct
  misc_feature 1..80: note = Artificially Synthesized Probe
  source 1..80: mol_type = other DNA
aaacagagattggcagaggagattaacaagatgaccaagctctagtcaagaaacttacttcaaaggtaaccatgtagatg

SEQ ID NO: 40674 - DNA, 80 bp, synthetic construct
  misc_feature 1..80: note = Artificially Synthesized Probe
  source 1..80: mol_type = other DNA
caaataaaaaataatgaggatatgaaaatgagaaccctgtaatatatcaaagtttgtgaggcacagctgaatcagggctg

SEQ ID NO: 40675 - DNA, 80 bp, synthetic construct
  misc_feature 1..80: note = Artificially Synthesized Probe
  source 1..80: mol_type = other DNA
catctcacctgagtagcacggctgtggcatcctgttcttggtgttcagaacacagaaaagaaatcttgtcttggccggtg

SEQ ID NO: 40676 - DNA, 80 bp, synthetic construct
  misc_feature 1..80: note = Artificially Synthesized Probe
  source 1..80: mol_type = other DNA
atcaaaatttgctgggcagtctatgaggatgtctttcaagaaaccagtacacaaaaataaacattcccagactccctccg

SEQ ID NO: 40677 - DNA, 80 bp, synthetic construct
  misc_feature 1..80: note = Artificially Synthesized Probe
  source 1..80: mol_type = other DNA
gtggcgttggctggatccccgtttatcctggaagggtcaggagctgtgtgaagcccaaggcagatgggtccttccagcct

SEQ ID NO: 40678 - DNA, 80 bp, synthetic construct
  misc_feature 1..80: note = Artificially Synthesized Probe
  source 1..80: mol_type = other DNA
tgtgtatgcgagagagagaagagagagaaggagggaaagagagagagtgtaggcatcaagcacccatttcccacaagagt

SEQ ID NO: 40679 - DNA, 80 bp, synthetic construct
  misc_feature 1..80: note = Artificially Synthesized Probe
  source 1..80: mol_type = other DNA
aggtacaatgagctagcagaaagaaaattcagtggtttactgtgttttcaaacacgcgtaggagaatagagattggctgg

SEQ ID NO: 40680 - DNA, 80 bp, synthetic construct
  misc_feature 1..80: note = Artificially Synthesized Probe
  source 1..80: mol_type = other DNA
ttttattagcaatcccaaatcgggctgcaccccctttacaaaatagagccccgtttgttatctcatggtcatttcctaac

SEQ ID NO: 40681 - DNA, 80 bp, synthetic construct
  misc_feature 1..80: note = Artificially Synthesized Probe
  source 1..80: mol_type = other DNA
cttgctcttaatattatttggaagccagttcttcataaccttactgtgcatgtccttctgagataagggaggtaatgaag

SEQ ID NO: 40682 - DNA, 80 bp, synthetic construct
  misc_feature 1..80: note = Artificially Synthesized Probe
  source 1..80: mol_type = other DNA
taaagcagcagtgttttaaatccttggtaaccagaccgtccaactcagctgagctcctataattaaagcgcatttgtcta

SEQ ID NO: 40683 - DNA, 80 bp, synthetic construct
  misc_feature 1..80: note = Artificially Synthesized Probe
  source 1..80: mol_type = other DNA
catcctccttcgaagcctgtgtgtggtcagatttcttgattgcccacttctgcttgccagataaagacaagcaattattt

SEQ ID NO: 40684 - DNA, 80 bp, synthetic construct
  misc_feature 1..80: note = Artificially Synthesized Probe
  source 1..80: mol_type = other DNA
cgttcttggggacacgttgaaaagctagccttgtctctaaatggtaacttctattctaaatctaccaccaggccacttcc

SEQ ID NO: 40685 - DNA, 80 bp, synthetic construct
  misc_feature 1..80: note = Artificially Synthesized Probe
  source 1..80: mol_type = other DNA
tggagaagggctcagaattgtgaaattaaactgttacccagtccacttttacataaagtgtgcagaaatgccatccataa

SEQ ID NO: 40686 - DNA, 80 bp, synthetic construct
  misc_feature 1..80: note = Artificially Synthesized Probe
  source 1..80: mol_type = other DNA
tcttctgctcgcgacaagaatggatacacatgcttcacttctggaattgacaaccacgggatattagtccattctcatac

SEQ ID NO: 40687 - DNA, 80 bp, synthetic construct
  misc_feature 1..80: note = Artificially Synthesized Probe
  source 1..80: mol_type = other DNA
cgtcaatggtcagatgggatagaaatgttcttgaaacttcttccctgttttctgcagcccctttgtctctcctgacactt

SEQ ID NO: 40688 - DNA, 80 bp, synthetic construct
  misc_feature 1..80: note = Artificially Synthesized Probe
  source 1..80: mol_type = other DNA
tgaagcacgagtccttcctgaaaattaggcaataaatacgccgaaagagcctgtcgaggtcaaatatcccttatctgaaa

SEQ ID NO: 40689 - DNA, 80 bp, synthetic construct
  misc_feature 1..80: note = Artificially Synthesized Probe
  source 1..80: mol_type = other DNA
atttagcatgaggccagcattggagaaggttgggattctggaacatttagcgtccggccagcattggagaaggttgggat

SEQ ID NO: 40690 - DNA, 80 bp, synthetic construct
  misc_feature 1..80: note = Artificially Synthesized Probe
  source 1..80: mol_type = other DNA
ggtgtggaaacagattgtcaatactttgcacacatttttttctctgatggaattaatctgagcaacatgtcacacatggc

SEQ ID NO: 40691 - DNA, 80 bp, synthetic construct
  misc_feature 1..80: note = Artificially Synthesized Probe
  source 1..80: mol_type = other DNA
gattcaggtgggacacaggctttgagaccggcatcgctgccttgtgatgctttgtttggattgcatctatttccatcgtg

SEQ ID NO: 40692 - DNA, 80 bp, synthetic construct
  misc_feature 1..80: note = Artificially Synthesized Probe
  source 1..80: mol_type = other DNA
taattagtgcatgatgggaacacttgagtttctcctgaaatctagggaggagttctggggcttggggagcagagtgaaat

SEQ ID NO: 40693 - DNA, 80 bp, synthetic construct
  misc_feature 1..80: note = Artificially Synthesized Probe
  source 1..80: mol_type = other DNA
accgtgtatttttcactctataatgatctgtgagagtaaaccccactgaaaattacgcctctgccatcaatgagtcagcc

SEQ ID NO: 40694 - DNA, 80 bp, synthetic construct
  misc_feature 1..80: note = Artificially Synthesized Probe
  source 1..80: mol_type = other DNA
ttcaaaatggtaaattgaagttaaagcattcagtcacaaaacttcacttgcagcaggggcaagtcagaatgaagactgct

SEQ ID NO: 40695 - DNA, 80 bp, synthetic construct
  misc_feature 1..80: note = Artificially Synthesized Probe
  source 1..80: mol_type = other DNA
tcaaggccatttcattcatagggcacattcactttgtaaaactcatgagccaaccccttacttttctcaataaccctgta

SEQ ID NO: 40696 - DNA, 80 bp, synthetic construct
  misc_feature 1..80: note = Artificially Synthesized Probe
  source 1..80: mol_type = other DNA
gctgagatgccccccagtagtctgggacatggctaacagtcatattgctgagacctcccgccacccagtaatgtgggaca

SEQ ID NO: 40697 - DNA, 80 bp, synthetic construct
  misc_feature 1..80: note = Artificially Synthesized Probe
  source 1..80: mol_type = other DNA
atgactggccacatgggttccttctacgttggttttgccagaatattttcttagggaatttcagattagactctttaaag

SEQ ID NO: 40698 - DNA, 80 bp, synthetic construct
  misc_feature 1..80: note = Artificially Synthesized Probe
  source 1..80: mol_type = other DNA
gaaacaataattgcctgtgggtgacaaaagacagaatagccatggttaaagactcaattggcaaagaaatttggttattt

SEQ ID NO: 40699 - DNA, 80 bp, synthetic construct
  misc_feature 1..80: note = Artificially Synthesized Probe
  source 1..80: mol_type = other DNA
catgaggccaacagaatctgtcactctcccccccaccctttttgcaatctactctgaatgtaaatgaaaaatcttttact

SEQ ID NO: 40700 - DNA, 80 bp, synthetic construct
  misc_feature 1..80: note = Artificially Synthesized Probe
  source 1..80: mol_type = other DNA
tttacagctgtttaatttatctattcattctaattttttggaaaatttcatgggacattagacaaatccagccattgtgt

SEQ ID NO: 40701 - DNA, 80 bp, synthetic construct
  misc_feature 1..80: note = Artificially Synthesized Probe
  source 1..80: mol_type = other DNA
cacacaaaatgagtgcattggttagcaggggtttaagaaaagagggactctgtcaccaagatgctttcatagaaagaaca

SEQ ID NO: 40702 - DNA, 80 bp, synthetic construct
  misc_feature 1..80: note = Artificially Synthesized Probe
  source 1..80: mol_type = other DNA
aaagatgaagcaaaactctccgccttttcaagatccagacacctccagggtcagcttgagaaagaaagttctggtagcat

SEQ ID NO: 40703 - DNA, 80 bp, synthetic construct
  misc_feature 1..80: note = Artificially Synthesized Probe
  source 1..80: mol_type = other DNA
tggtggtctaaagaatttccatgctgtttcaaatctgatctcacctggaatactgcctagctaattccctagatgagact

SEQ ID NO: 40704 - DNA, 80 bp, synthetic construct
  misc_feature 1..80: note = Artificially Synthesized Probe
  source 1..80: mol_type = other DNA
caggatcccttgactttattctttccttgcctggtaatcttgactggtaacttgagtgagacaagccttatgaagtttgt

SEQ ID NO: 40705 - DNA, 80 bp, synthetic construct
  misc_feature 1..80: note = Artificially Synthesized Probe
  source 1..80: mol_type = other DNA
ctagtgagtgaaaagttatccctgttaattttgagacattaagatgaattggccattcagaaattaggggaaaatagaaa

SEQ ID NO: 40706 - DNA, 80 bp, synthetic construct
  misc_feature 1..80: note = Artificially Synthesized Probe
  source 1..80: mol_type = other DNA
ctgaaagtaatctacaaattcagtccccatcaaaatatcataattcttcacagaactagaaaaagcaaacctaaaattta

SEQ ID NO: 40707 - DNA, 80 bp, synthetic construct
  misc_feature 1..80: note = Artificially Synthesized Probe
  source 1..80: mol_type = other DNA
acctgctggtgggaatgtaaactagcacaaccactgtggaaaacagtgtggagattccttgaagaactaaaagtaggact

SEQ ID NO: 40708 - DNA, 80 bp, synthetic construct
  misc_feature 1..80: note = Artificially Synthesized Probe
  source 1..80: mol_type = other DNA
actaattgcccttttcataaagagattcatgtgtttttgtctctcaacttggggcccagccactgtgaccctaaagcgca

SEQ ID NO: 40709 - DNA, 80 bp, synthetic construct
  misc_feature 1..80: note = Artificially Synthesized Probe
  source 1..80: mol_type = other DNA
gaggtgtcaatttccaattctccccactctctctgtgcttagtgacactgaacatttgtttcatagacttgctggccatc

SEQ ID NO: 40710 - DNA, 80 bp, synthetic construct
  misc_feature 1..80: note = Artificially Synthesized Probe
  source 1..80: mol_type = other DNA
aataatgctactgtgaacacaggtgctcaaatatctgcttgagtccctgctttaaattattcgggtattgaacaagagta

SEQ ID NO: 40711 - DNA, 80 bp, synthetic construct
  misc_feature 1..80: note = Artificially Synthesized Probe
  source 1..80: mol_type = other DNA
cacataggccaggttttacttctgtgctctctggtgtattccattcatctgtatgtctctctttataccagtacagtgtt

SEQ ID NO: 40712 - DNA, 80 bp, synthetic construct
  misc_feature 1..80: note = Artificially Synthesized Probe
  source 1..80: mol_type = other DNA
ctaggtcatatcataactctatttaactttcttatggaactgctcatctgttctccacagcgcctatacttgtttacatt

SEQ ID NO: 40713 - DNA, 80 bp, synthetic construct
  misc_feature 1..80: note = Artificially Synthesized Probe
  source 1..80: mol_type = other DNA
gtcacatctcatcagtaaaaagacttgctcattgtgagggctgattatttctctgatgtgtgaatcttaagctgatgaat

SEQ ID NO: 40714 - DNA, 80 bp, synthetic construct
  misc_feature 1..80: note = Artificially Synthesized Probe
  source 1..80: mol_type = other DNA
gggatgttttgcacagggcaattacagtttattttcttcctaatttttttataacaaaatatccccattttacaggcaag

SEQ ID NO: 40715 - DNA, 80 bp, synthetic construct
  misc_feature 1..80: note = Artificially Synthesized Probe
  source 1..80: mol_type = other DNA
tccatgtgccaggcttcagggagccacctgctgagacccaacaatgctctttttgtttcctaatttttatcgcttttttt

SEQ ID NO: 40716 - DNA, 80 bp, synthetic construct
  misc_feature 1..80: note = Artificially Synthesized Probe
  source 1..80: mol_type = other DNA
tcgcacttttccccctgttctgggcacgcctggcccagctctgtaggacagcagcagcttcctctcactgggacttttaa

SEQ ID NO: 40717 - DNA, 80 bp, synthetic construct; identical to SEQ ID NO: 40716
  misc_feature 1..80: note = Artificially Synthesized Probe
  source 1..80: mol_type = other DNA

SEQ ID NO: 40718 - DNA, 80 bp, synthetic construct
  misc_feature 1..80: note = Artificially Synthesized Probe
  source 1..80: mol_type = other DNA
aggaagagtggactcgcacttttcccctgttctgggcacgcctggcccagctctgtaggacagcggcagcttcctctcac

SEQ ID NO: 40719 - DNA, 80 bp, synthetic construct; identical to SEQ ID NO: 40716
  misc_feature 1..80: note = Artificially Synthesized Probe
  source 1..80: mol_type = other DNA

SEQ ID NO: 40720 - DNA, 80 bp, synthetic construct
  misc_feature 1..80: note = Artificially Synthesized Probe
  source 1..80: mol_type = other DNA
agctccctccaacgcgggcttcagcattcacaactagaggaagacgaagaggatggcaacaggaaatcgaatgctgccaa

SEQ ID NO: 40721 - DNA, 80 bp, synthetic construct
  misc_feature 1..80: note = Artificially Synthesized Probe
  source 1..80: mol_type = other DNA
caaaattggttttgaaagcactagtttacaaccactggttcttcttaaagaccacaacatcatctctcactccctgttcc

SEQ ID NO: 40722 - DNA, 80 bp, synthetic construct
  misc_feature 1..80: note = Artificially Synthesized Probe
  source 1..80: mol_type = other DNA
tgttgggtgtgcctcatgatgcctctctggcattaacatcaacatattctttaagtctgaaaacaaacattttacaacct

SEQ ID NO: 40723 - DNA, 80 bp, synthetic construct
  misc_feature 1..80: note = Artificially Synthesized Probe
  source 1..80: mol_type = other DNA
gagctcttagcagaattcaggttcctaccacaatgctaaccttgtggcccttcattaattatacaaaggcagttttggtc

SEQ ID NO: 40724 - DNA, 80 bp, synthetic construct
  misc_feature 1..80: note = Artificially Synthesized Probe
  source 1..80: mol_type = other DNA
atttcagacattgcatccccctccctgcgatgcctattaggataattatggttttttaatgtgtggtgattcctcagaaa

SEQ ID NO: 40725 - DNA, 80 bp, synthetic construct
  misc_feature 1..80: note = Artificially Synthesized Probe
  source 1..80: mol_type = other DNA
tatgtctctggaggcacaggaagaggcaagactgatagattcagagttgtttgcacaagtcagatgttttttaaccttct

SEQ ID NO: 40726 - DNA, 80 bp, synthetic construct
  misc_feature 1..80: note = Artificially Synthesized Probe
  source 1..80: mol_type = other DNA
atcatttactcctccaaggtgcaatgaaaatgacgagttgcaaccaaagccatcttctgctcaatcctcctggcaccttt

SEQ ID NO: 40727 - DNA, 80 bp, synthetic construct
  misc_feature 1..80: note = Artificially Synthesized Probe
  source 1..80: mol_type = other DNA
caatgtctgctgggtattgatgttgtaccggaaaccttaccattctcatcagccacctcattcagtcaccacagcagttc

SEQ ID NO: 40728 - DNA, 80 bp, synthetic construct
  misc_feature 1..80: note = Artificially Synthesized Probe
  source 1..80: mol_type = other DNA
gaggacatttggtaatattagcatttatgtgttgattgaaagtgtcactctggtgatagatggggcatgcctgcgcgtaa

SEQ ID NO: 40729 - DNA, 80 bp, synthetic construct
  misc_feature 1..80: note = Artificially Synthesized Probe
  source 1..80: mol_type = other DNA
tgacgtgtgagaagagaatactttgggactttacagcaggttaaaatcttattttttcagggttggtaaatacctctggg

SEQ ID NO: 40730 - DNA, 80 bp, synthetic construct
  misc_feature 1..80: note = Artificially Synthesized Probe
  source 1..80: mol_type = other DNA
tagctgcaccaatttacctttccacccacaatgtgcaagggttgcagcttctccacaccgttgtcaacacggtattttct

SEQ ID NO: 40731 - DNA, 80 bp, synthetic construct
  misc_feature 1..80: note = Artificially Synthesized Probe
  source 1..80: mol_type = other DNA
atgtctgtaaaaatgccattgagattttgatggatgttgcattgaatctatagatcactttgggtagtatacacatttta

SEQ ID NO: 40732 - DNA, 80 bp, synthetic construct
  misc_feature 1..80: note = Artificially Synthesized Probe
  source 1..80: mol_type = other DNA
ggtagaattccccagtggagccatctcttcctcatttttcttttgttggaatgtttttgattactgattcactctccttc

SEQ ID NO: 40733 - DNA, 80 bp, synthetic construct
  misc_feature 1..80: note = Artificially Synthesized Probe
  source 1..80: mol_type = other DNA
gcttttgtagttgaagaagatactaggtatgatgtcagtcttcttatatttgttaatatgtggcttgaagtctatggcct

SEQ ID NO: 40734 - DNA, 80 bp, synthetic construct
  misc_feature 1..80: note = Artificially Synthesized Probe
  source 1..80: mol_type = other DNA
gtctcttgtaacaatttctattttgtctaagtacagccaccctgcccttttgtttgcatgagatattttattccatctct

SEQ ID NO: 40735 - DNA, 80 bp, synthetic construct
  misc_feature 1..80: note = Artificially Synthesized Probe
  source 1..80: mol_type = other DNA
aaaaaaagtctgtccctaggggattttctttccttctcactcagacagaagcagcaaacatacggtgtctgatttcaccc

SEQ ID NO: 40736 - DNA, 80 bp, synthetic construct
  misc_feature 1..80: note = Artificially Synthesized Probe
  source 1..80: mol_type = other DNA
caaacacattttgggaaatgctgctgtgttgataccatcacatttcagtaaaacttccatgaaagtcaccgacgctgagc

SEQ ID NO: 40737 - DNA, 80 bp, synthetic construct
  misc_feature 1..80: note = Artificially Synthesized Probe
  source 1..80: mol_type = other DNA
ggtcaccgacgctgagcatttcagtagaacttccgtgaaagtcaccaatgctgagcatttcaatagaacttccatgaagg

SEQ ID NO: 40738 - DNA, 80 bp, synthetic construct
  misc_feature 1..80: note = Artificially Synthesized Probe
  source 1..80: mol_type = other DNA
cctacatagtcccaaataaactttgggagagcctctctctgtcattgtattaggctgacactccctaacccaacatattg

SEQ ID NO: 40739 - DNA, 80 bp, synthetic construct
  misc_feature 1..80: note = Artificially Synthesized Probe
  source 1..80: mol_type = other DNA
tagctgtttggcttcttatttctgtgcattgtgctattattggatacatcttgggaacttgtaaagcaattttcagtttc

SEQ ID NO: 40740 - DNA, 80 bp, synthetic construct
  misc_feature 1..80: note = Artificially Synthesized Probe
  source 1..80: mol_type = other DNA
gctggctcgctggctctccacttggcattagtggtattagaacaagcttcaggtattcacttctcacagctggtcacacc

SEQ ID NO: 40741 - DNA, 80 bp, synthetic construct
  misc_feature 1..80: note = Artificially Synthesized Probe
  source 1..80: mol_type = other DNA
tgcaaacaaagaagaaagacaacattagaagaatgcacttagaccttcttttctaccaatagaatgggggtggcaggacg

SEQ ID NO: 40742 - DNA, 80 bp, synthetic construct
  misc_feature 1..80: note = Artificially Synthesized Probe
  source 1..80: mol_type = other DNA
tgttcttccaacaattataataaacacttgatctgattttctcctccaggaactcgagttccaggacctgagggctgtcc

SEQ ID NO: 40743 - DNA, 80 bp, synthetic construct
  misc_feature 1..80: note = Artificially Synthesized Probe
  source 1..80: mol_type = other DNA
cttcctccaggaaaactgctttccctctttaatattcactatcctcttctcacagcctgtaagcctcgctcaaattaggg

SEQ ID NO: 40744 - DNA, 80 bp, synthetic construct
  misc_feature 1..80: note = Artificially Synthesized Probe
  source 1..80: mol_type = other DNA
gatctaggcaccactcctgacaggctccaccctgcccagcggggagaaatgcagaggccacagccgctgaggacacgggc

SEQ ID NO: 40745 - DNA, 80 bp, synthetic construct
  misc_feature 1..80: note = Artificially Synthesized Probe
  source 1..80: mol_type = other DNA
gacttccagacgctaccacagcaggggccgaggggagttcggtcatcagaggcgccctgcagggccacccacagagggac

SEQ ID NO: 40746 - DNA, 80 bp, synthetic construct
  misc_feature 1..80: note = Artificially Synthesized Probe
  source 1..80: mol_type = other DNA
atcaagctcatccctcaacacgtgggtttctcaccaacacaagggcctgggaaaacttcgaaccccgtttgcaaacagcc

SEQ ID NO: 40747 - DNA, 80 bp, synthetic construct
  misc_feature 1..80: note = Artificially Synthesized Probe
  source 1..80: mol_type = other DNA
aagaatctgaaatttaagtaaacatgtaaaacaaagacagagacagtcagctgagaaacccaagacacggtgacaagact

SEQ ID NO: 40748 - DNA, 80 bp, synthetic construct
  misc_feature 1..80: note = Artificially Synthesized Probe
  source 1..80: mol_type = other DNA
ccctgggcgcttgtcaggcagagggggctacaagatgactcagagctgcccccgtggtctgaagccccgagatccacatc

SEQ ID NO: 40749 - DNA, 80 bp, synthetic construct
  misc_feature 1..80: note = Artificially Synthesized Probe
  source 1..80: mol_type = other DNA
cttcccctctcccagggtccagggctccgccccaggaggcccaggatgggtggagcccagcaacttgcggaagaacccct

SEQ ID NO: 40750 - DNA, 80 bp, synthetic construct
  misc_feature 1..80: note = Artificially Synthesized Probe
  source 1..80: mol_type = other DNA
acactctcaacaggtttctgcgggatcgcgggggtcctgcccatccaaattcagaaagctccggcgccaggtgtttgctc

SEQ ID NO: 40751 - DNA, 80 bp, synthetic construct
  misc_feature 1..80: note = Artificially Synthesized Probe
  source 1..80: mol_type = other DNA
agtgaggggcctggtccaccctgcaaaccaacaaagctctggggacagaaatcgcagttctccagagctctgtgtgaggc

SEQ ID NO: 40752 - DNA, 80 bp, synthetic construct
  misc_feature 1..80: note = Artificially Synthesized Probe
  source 1..80: mol_type = other DNA
cagacgcctgcacccgaccctggaactggcgtcttttcctcgctaatctgcgaggaaaaaaaaaatgtttttcagggcaa

SEQ ID NO: 40753 - DNA, 80 bp, synthetic construct
  misc_feature 1..80: note = Artificially Synthesized Probe
  source 1..80: mol_type = other DNA
tcctgcccagtctcaggctgtcctgaggccagagaagggggtggaagagcatacctgagagcgggaggcctggtgcggct

SEQ ID NO: 40754 - DNA, 80 bp, synthetic construct
  misc_feature 1..80: note = Artificially Synthesized Probe
  source 1..80: mol_type = other DNA
caacagcgtggtcagaacccaggccctggagtccataggtcttggtgccaggccttgagcaggcctctgtctttcctggg

SEQ ID NO: 40755 - DNA, 80 bp, synthetic construct
  misc_feature 1..80: note = Artificially Synthesized Probe
  source 1..80: mol_type = other DNA
cacgcctggctaattttcgtatttttagtagagatggggtttcaccatggccaggctggtctcaaactcttgactttagg

SEQ ID NO: 40756 - DNA, 80 bp, synthetic construct
  misc_feature 1..80: note = Artificially Synthesized Probe
  source 1..80: mol_type = other DNA
attgaactgatattgcacttttttcaaaagtcagttggttgtacttgtatggaactatttctgagttctcaattctgttt

SEQ ID NO: 40757 - DNA, 80 bp, synthetic construct
  misc_feature 1..80: note = Artificially Synthesized Probe
  source 1..80: mol_type = other DNA
acttttatcagaggaatgccagtccttttaaattatcaagcccagagagacattaaaataagacagcaggcccggcacgg

SEQ ID NO: 40758 - DNA, 80 bp, synthetic construct
  misc_feature 1..80: note = Artificially Synthesized Probe
  source 1..80: mol_type = other DNA
gacgaacgagattctgaaaataaaaatccctggtacataagccaaaatttcagagtcaactacagattttcaaaggctat

SEQ ID NO: 40759 - DNA, 80 bp, synthetic construct
  misc_feature 1..80: note = Artificially Synthesized Probe
  source 1..80: mol_type = other DNA
gtcccttcctggggcaggtggctcgggacccagcctcttctgtgtggggtgatatggggcctgtgctgggcccccgaggg

SEQ ID NO: 40760 - DNA, 80 bp, synthetic construct
  misc_feature 1..80: note = Artificially Synthesized Probe
  source 1..80: mol_type = other DNA
agttgtgaggaccgtgggggtggagggtctgtgtgtggaagccctttgtgaatgacaaagccctgtcctctatgccttgc

SEQ ID NO: 40761 - DNA, 80 bp, synthetic construct
  misc_feature 1..80: note = Artificially Synthesized Probe
  source 1..80: mol_type = other DNA
aaggcttcactcctcctcccctgcgggactccactctgttaacaccatctcactgtgactcagtggcacttccactggac

SEQ ID NO: 40762 - DNA, 80 bp, synthetic construct
  misc_feature 1..80: note = Artificially Synthesized Probe
  source 1..80: mol_type = other DNA
aaaggaacctgaggaagcccttgaggagtgactcaggaagtgatttattaagacgcacagagaggaatcatatagaaaac

SEQ ID NO: 40763 - DNA, 80 bp, synthetic construct
  misc_feature 1..80: note = Artificially Synthesized Probe
  source 1..80: mol_type = other DNA
ccagcagagcaggagcttaggagcccaatcttcaagggctggagagaccagggaggcagtgccacaacccacagtcccct

SEQ ID NO: 40764 - DNA, 80 bp, synthetic construct
  misc_feature 1..80: note = Artificially Synthesized Probe
  source 1..80: mol_type = other DNA
agtccccctcagcaccggccgaagacacccagtgcctccagccaccatcaccactgaccaaggcactgtctttttcaggg

SEQ ID NO: 40765 - DNA, 80 bp, synthetic construct
  misc_feature 1..80: note = Artificially Synthesized Probe
  source 1..80: mol_type = other DNA
tgagaataactttacttgttttttgggaggaggttaatgggtgggaggggtgagaggggagatctgatttacatacggac

SEQ ID NO: 40766 - DNA, 80 bp, synthetic construct
  misc_feature 1..80: note = Artificially Synthesized Probe
  source 1..80: mol_type = other DNA
acccacatgctcacacacatgcttgtgcaatgcacccaaacgccagattgcacccacacccacccacttgcacattcaca

SEQ ID NO: 40767 - DNA, 80 bp, synthetic construct
  misc_feature 1..80: note = Artificially Synthesized Probe
  source 1..80: mol_type = other DNA
caagtctcacacacacttatgcttacaaactcatgctcacacacatgctaacacttcacacatgctaacacctcacacat

SEQ ID NO: 40768 - DNA, 80 bp, synthetic construct
  misc_feature 1..80: note = Artificially Synthesized Probe
  source 1..80: mol_type = other DNA
acctatgcccattcacacacacttatatcacacacatccctgcttacatacacattcacacatatacacttgctcacaca

SEQ ID NO: 40769 - DNA, 80 bp, synthetic construct
  misc_feature 1..80: note = Artificially Synthesized Probe
  source 1..80: mol_type = other DNA
gcaggggacaatggcaggcacaggagactggaggaagaagaccagggaaaaggggggccagttgaggtgctgcacatagg

SEQ ID NO: 40770 - DNA, 80 bp, synthetic construct
  misc_feature 1..80: note = Artificially Synthesized Probe
  source 1..80: mol_type = other DNA
ggggtgagctcagggttgggcagggcaggaaaaggttatagtaacattaaataatactgccaggccatatggggcctaac

SEQ ID NO: 40771 - DNA, 80 bp, synthetic construct
  misc_feature 1..80: note = Artificially Synthesized Probe
  source 1..80: mol_type = other DNA
actgcactccagcctggcgacagagtgagactctgcctcaaaaaaaaaaaaactcggccgggcgcagtggctcacgcctg

SEQ ID NO: 40772 - DNA, 80 bp, synthetic construct
  misc_feature 1..80: note = Artificially Synthesized Probe
  source 1..80: mol_type = other DNA
cacaaacacctaatcacacatccctaatagataatcatgatttttggttctggactggatctcggagtactcgctttcta

SEQ ID NO: 40773 - DNA, 80 bp, synthetic construct
  misc_feature 1..80: note = Artificially Synthesized Probe
  source 1..80: mol_type = other DNA
cgcccagctgagaccctgtctcttaacaaaaaagtattcagtgtgcagggggaggggcttacaaaaaattttttttaact

SEQ ID NO: 40774 - DNA, 80 bp, synthetic construct
  misc_feature 1..80: note = Artificially Synthesized Probe
  source 1..80: mol_type = other DNA
aaaccccgtctctacaaaaatataaaaattagctgggcctgatggcaggtgcctgtaatcccagctactcaggaggctga

SEQ ID NO: 40775 - DNA, 80 bp, synthetic construct
  misc_feature 1..80: note = Artificially Synthesized Probe
  source 1..80: mol_type = other DNA
gccagcatttcccaaagctggtctcagtccaccatcatccatcacttggagaggctggaaaagcctgtaaatgtgggatc

SEQ ID NO: 40776 - DNA, 80 bp, synthetic construct
  misc_feature 1..80: note = Artificially Synthesized Probe
  source 1..80: mol_type = other DNA
ctaaccctagcactcaggaggtggccactacagtataatctatcttttgcataggaggaatctatggctcagagaagtta

SEQ ID NO: 40777 - DNA, 80 bp, synthetic construct
  misc_feature 1..80: note = Artificially Synthesized Probe
  source 1..80: mol_type = other DNA
gagcaaaagtgtgatcaaaacagagaagaaagatgaggaatcaggaaaggaggggccaagaaaaaaaccttctcagaaga

SEQ ID NO: 40778 - DNA, 80 bp, synthetic construct
  misc_feature 1..80: note = Artificially Synthesized Probe
  source 1..80: mol_type = other DNA
caaatcccagcacactcattaggatagcttctagttaaaaaaaaaagaaagaaaaaaagaaaataacaagtgttagtgaa

SEQ ID NO: 40779 - DNA, 80 bp, synthetic construct
  misc_feature 1..80: note = Artificially Synthesized Probe
  source 1..80: mol_type = other DNA
aaaacgtggcgcgcgcatacaatggaatatgattcaaccttaaagatgaaggaaatgctgacacgtgctacaccatgggt

SEQ ID NO: 40780 - DNA, 80 bp, synthetic construct
  misc_feature 1..80: note = Artificially Synthesized Probe
  source 1..80: mol_type = other DNA
tcctggattattgcaatagtttcctcaatgttcttttttccagctcctattcttgcctcttttccatctgctctccaccc

SEQ ID NO: 40781 - DNA, 80 bp, synthetic construct
  misc_feature 1..80: note = Artificially Synthesized Probe
  source 1..80: mol_type = other DNA
tggtggcacacacctgtaatcccagctacccaggaggctgaagcaggagaattgctggaacccgggaagtggaggctgca

SEQ ID NO: 40782 - DNA, 80 bp, synthetic construct
  misc_feature 1..80: note = Artificially Synthesized Probe
  source 1..80: mol_type = other DNA
tggcactcgcttgtagttccagctactcgggaggctgaggcaggagaatcgcttgaacccgggaggtggaggttgcagtg

SEQ ID NO: 40783 - DNA, 80 bp, synthetic construct
  misc_feature 1..80: note = Artificially Synthesized Probe
  source 1..80: mol_type = other DNA
ccctgaccactcaaatgaaagcagccccccatgtagacactccgcattacatctgcagaaaatggtctctttgtctgatt

SEQ ID NO: 40784 - DNA, 80 bp, synthetic construct
  misc_feature 1..80: note = Artificially Synthesized Probe
  source 1..80: mol_type = other DNA
tcactaagcttcagtacctaaaaatgtggacaaagaggacgtgcaggaattgacagaagtgtgtgggggtctctatggtt

SEQ ID NO: 40785 - DNA, 80 bp, synthetic construct
  misc_feature 1..80: note = Artificially Synthesized Probe
  source 1..80: mol_type = other DNA
ctgagatataaggaacctgcttggaccctgagccacgaaaacacatgctttctctaaagtgctcactccatcaggcccag

SEQ ID NO: 40786 - DNA, 80 bp, synthetic construct
  misc_feature 1..80: note = Artificially Synthesized Probe
  source 1..80: mol_type = other DNA
tttggttgtcatgattggccatggccctggcatgtggtaggtagaagcaaggatgccactaagcttcctacggtacccgg

SEQ ID NO: 40787 - DNA, 80 bp, synthetic construct
  misc_feature 1..80: note = Artificially Synthesized Probe
  source 1..80: mol_type = other DNA
gccacctcacgctcacactcacactcacgcctgtgtgcccccatcctcatcccacacacctctcctggtcacactgatgc

SEQ ID NO: 40788 - DNA, 80 bp, synthetic construct
  misc_feature 1..80: note = Artificially Synthesized Probe
  source 1..80: mol_type = other DNA
agaattgagaggtcagggatcagagacagtgggcctgtggctttcttgaggcagaattggctctttctgagacaacctcc

SEQ ID NO: 40789 - DNA, 80 bp, synthetic construct
  misc_feature 1..80: note = Artificially Synthesized Probe
  source 1..80: mol_type = other DNA
ctctccctgaactccagccctggggccagccctaactgcactgtctcagctccactcctggctcctttccagcaccagtc

SEQ ID NO: 40790 - DNA, 80 bp, synthetic construct
  misc_feature 1..80: note = Artificially Synthesized Probe
  source 1..80: mol_type = other DNA
tcagagaggtttatttcacacttacaggcacacacagacacagaccagagactcccagcagcagagcccaagcactggct

SEQ ID NO: 40791 - DNA, 80 bp, synthetic construct
  misc_feature 1..80: note = Artificially Synthesized Probe
  source 1..80: mol_type = other DNA
ggcttagtgccctggagctagagagcagtgcttggttgagtcctgccaacagcttccagatcctcacccaggccagaacc

SEQ ID NO: 40792 - DNA, 80 bp, synthetic construct
  misc_feature 1..80: note = Artificially Synthesized Probe
  source 1..80: mol_type = other DNA
ggacggttttcctgcttgggaatgttcctgggctgtgagatccactcttctgggcaggtggttagcacctaacgtttttc

SEQ ID NO: 40793 - DNA, 80 bp, synthetic construct
  misc_feature 1..80: note = Artificially Synthesized Probe
  source 1..80: mol_type = other DNA
gctgcgccgctgtcgcagaggaaggcggccgccagtagcagagcccagcacgttgcgggtgcccagttcatcttcgtggg

SEQ ID NO: 40794 - DNA, 80 bp, synthetic construct
  misc_feature 1..80: note = Artificially Synthesized Probe
  source 1..80: mol_type = other DNA
aggaggatgggtgttccgcgcagcttccggggctctccccgagtcccaccccccggcccgccccgatggacttctcttcg

SEQ ID NO: 40795 - DNA, 80 bp, synthetic construct
  misc_feature 1..80: note = Artificially Synthesized Probe
  source 1..80: mol_type = other DNA
ccccacctcgtagcgccaggctctgcgggcggggagacgttaagcggacaggaatgggcccagggcgggctcggaacgac

SEQ ID NO: 40796 - DNA, 80 bp, synthetic construct
  misc_feature 1..80: note = Artificially Synthesized Probe
  source 1..80: mol_type = other DNA
gaatttttgcagtgggctgtaggagtatctttgtggggctgaccatgattttggcagccctttcccccccaagccggaca

SEQ ID NO: 40797 - DNA, 80 bp, synthetic construct
  misc_feature 1..80: note = Artificially Synthesized Probe
  source 1..80: mol_type = other DNA
ttccctgcaccagtgcaaggagaccttttcctatcagagaggacttgggaagggccatggctcccctctaatgattgctg

SEQ ID NO: 40798 - DNA, 80 bp, synthetic construct
  misc_feature 1..80: note = Artificially Synthesized Probe
  source 1..80: mol_type = other DNA
agaggcttgtccaaggtcacacggctagatggtggcagatctgaaactagaagcagatttaccaactctcaattctctat

SEQ ID NO: 40799 - DNA, 80 bp, synthetic construct
  misc_feature 1..80: note = Artificially Synthesized Probe
  source 1..80: mol_type = other DNA
tttcttttgctgaattgggctgactattgaggctgcattgcatattcactcccaaagtgccagctattaaatgataggaa

SEQ ID NO: 40800 - DNA, 80 bp, synthetic construct
  misc_feature 1..80: note = Artificially Synthesized Probe
  source 1..80: mol_type = other DNA
ttaatctctggaaattctttacaaccctggtcagattcatggtcataaactgaagcctttggcctctagcctgttagctt

SEQ ID NO: 40801 - DNA, 80 bp, synthetic construct
  misc_feature 1..80: note = Artificially Synthesized Probe
  source 1..80: mol_type = other DNA
agctactctgcagcagtaaggtgaactggaagaaaatgaaactcttggaaactttcaagtaccatactctgcatcttgca

SEQ ID NO: 40802 - DNA, 80 bp, synthetic construct
  misc_feature 1..80: note = Artificially Synthesized Probe
  source 1..80: mol_type = other DNA
tctggcaagcaccattgtactttgtctctatttgataactccagatactgcaggtaagtggaatcatattgtatatattt

SEQ ID NO: 40803 - DNA, 80 bp, synthetic construct
  misc_feature 1..80: note = Artificially Synthesized Probe
  source 1..80: mol_type = other DNA
cttgagcccaggagttcaagaccaaactgggaaacatagtgggaccccatctttgcaagaaaaaaaaacaaaaaacaaaa

SEQ ID NO: 40804 - DNA, 80 bp, synthetic construct
  misc_feature 1..80: note = Artificially Synthesized Probe
  source 1..80: mol_type = other DNA
aggctcccactggagatctactcagaatgttcttaatatggcttctttcttctaatgattgactccctattgcctgctaa

SEQ ID NO: 40805 - DNA, 80 bp, synthetic construct
  misc_feature 1..80: note = Artificially Synthesized Probe
  source 1..80: mol_type = other DNA
cccacacagttcttctcttaatagatctcatatggcattgatctcatactgccttatgtttggaatatttgtatttcatt

SEQ ID NO: 40806 - DNA, 80 bp, synthetic construct
  misc_feature 1..80: note = Artificially Synthesized Probe
  source 1..80: mol_type = other DNA
gtttacaactcactgagcaccttcaggaaagaatggtcttttattcatttctgcatgtccagctcctgacacatagtaag

SEQ ID NO: 40807 - DNA, 80 bp, synthetic construct
  misc_feature 1..80: note = Artificially Synthesized Probe
  source 1..80: mol_type = other DNA
ttaaccatatcttctaaatgcattaatcagtggagaggtgacccagaaatcactgtgaaagttgggaccttatctttgct

SEQ ID NO: 40808 - DNA, 80 bp, synthetic construct
  misc_feature 1..80: note = Artificially Synthesized Probe
  source 1..80: mol_type = other DNA
ttcagttgaaactatgagatgctgtacacactcagttgattgtcctcatttcctagtaacttggtacaataaagaattaa

SEQ ID NO: 40809 - DNA, 80 bp, synthetic construct
  misc_feature 1..80: note = Artificially Synthesized Probe
  source 1..80: mol_type = other DNA
agagcagttgaagtgatacttgttgaagtatcacgatctaataggaagatgtgcctcacagctggagaaaaatcgagggg

SEQ ID NO: 40810 - DNA, 80 bp, synthetic construct
  misc_feature 1..80: note = Artificially Synthesized Probe
  source 1..80: mol_type = other DNA
ggaaggatagaaaccagagaatagatagcacaggttcttcctactcccctcttctacttctggtttaaggtttcatcttt

SEQ ID NO: 40811 - DNA, 80 bp, synthetic construct
  misc_feature 1..80: note = Artificially Synthesized Probe
  source 1..80: mol_type = other DNA
tttaaagaagagacttgatgaattgaactcatgtttttgctgctgtggccacaccctctttacagacatttgcttcattt

SEQ ID NO: 40812 - DNA, 80 bp, synthetic construct
  misc_feature 1..80: note = Artificially Synthesized Probe
  source 1..80: mol_type = other DNA
aacccattaatctattaatccattcatgatgacatgccttcatgatccagtcacctcttgaaggccccaccatggggatt

SEQ ID NO: 40813 - DNA, 80 bp, synthetic construct
  misc_feature 1..80: note = Artificially Synthesized Probe
  source 1..80: mol_type = other DNA
atgtagctttttaggattggcctttttttttcactgagcacaagtctctgaagactcattcaggttgttgtgcatatcaa

SEQ ID NO: 40814 - DNA, 80 bp, synthetic construct
  misc_feature 1..80: note = Artificially Synthesized Probe
  source 1..80: mol_type = other DNA
ctctgcaccctagtctgggtgacagaaggagaccctgtctcaaaaaaaaaaaaaaaaagaaagaaattccaaatttaata

SEQ ID NO: 40815 - DNA, 80 bp, synthetic construct
  misc_feature 1..80: note = Artificially Synthesized Probe
  source 1..80: mol_type = other DNA
cccacagcaatacaagaaatgacatcagccagcagatgactgaaaatgagtggtgttgataagaacttgaggaattttga

SEQ ID NO: 40816 - DNA, 80 bp, synthetic construct
  misc_feature 1..80: note = Artificially Synthesized Probe
  source 1..80: mol_type = other DNA
tggagtcacctgtgagggaattgcgagtccccatttactgaacaagaaatttgagtcaggcagatgatccgaggtgatgg

SEQ ID NO: 40817 - DNA, 80 bp, synthetic construct
  misc_feature 1..80: note = Artificially Synthesized Probe
  source 1..80: mol_type = other DNA
ttagtgttatttctattttgaggagagtggcctatgagtacttctcatccaatgtgttcaatccaaggagactataggag

SEQ ID NO: 40818 - DNA, 80 bp, synthetic construct
  misc_feature 1..80: note = Artificially Synthesized Probe
  source 1..80: mol_type = other DNA
attttgcacgtatttgtttacacatctcttgtctgctaagctatgagctctttgagagcagggactgtttctgtttatcg

SEQ ID NO: 40819 - DNA, 80 bp, synthetic construct
  misc_feature 1..80: note = Artificially Synthesized Probe
  source 1..80: mol_type = other DNA
ctttctgtgcctcaatttcttcaaccgttgacaatatgaccgtgtatcatcacataatacactatgatgtgaagtttatg

SEQ ID NO: 40820 - DNA, 80 bp, synthetic construct
  misc_feature 1..80: note = Artificially Synthesized Probe
  source 1..80: mol_type = other DNA
aaaaaaaaaaaaagattacattccttctcaaccagccaaaggagccattttccaatctcttatcttgttggggtgtgtta

SEQ ID NO: 40821 - DNA, 80 bp, synthetic construct
  misc_feature 1..80: note = Artificially Synthesized Probe
  source 1..80: mol_type = other DNA
cacacacacacacacaccttaccttatttaggatctcccagaagataattttaagtatttgtaatttctatatattttaa

SEQ ID NO: 40822 - DNA, 80 bp, synthetic construct
  misc_feature 1..80: note = Artificially Synthesized Probe
  source 1..80: mol_type = other DNA
ccaccatacccagcccagaatggtattcttaacgtatggacttaaaaggagcatttgcaaggaagagtggcagtggcagt

SEQ ID NO: 40823 - DNA, 80 bp, synthetic construct
  misc_feature 1..80: note = Artificially Synthesized Probe
  source 1..80: mol_type = other DNA
cccggcctcgtttcctaattttaaaaatgaaattgttggagtagatcatcacaatcccttttagttaagtctgctcactg

SEQ ID NO: 40824 - DNA, 80 bp, synthetic construct
  misc_feature 1..80: note = Artificially Synthesized Probe
  source 1..80: mol_type = other DNA
tcaataggttgaacatttctatcaccccaaaaagtcccttcacggtccttggctttaatcttcctctttccttccccaac

SEQ ID NO: 40825 - DNA, 80 bp, synthetic construct
  misc_feature 1..80: note = Artificially Synthesized Probe
  source 1..80: mol_type = other DNA
ggatatgatccagaatggtggtctctacttttctatttgctcctatttagccacccagtttgggagtagccctgtgtatt

SEQ ID NO: 40826 - DNA, 80 bp, synthetic construct
  misc_feature 1..80: note = Artificially Synthesized Probe
  source 1..80: mol_type = other DNA
gacttagttgaaagccccaagtgtgtatatctgaagtgtttgtacaaagatgggggcagagagctgctcatgtctgcaaa

SEQ ID NO: 40827 - DNA, 80 bp, synthetic construct
  misc_feature 1..80: note = Artificially Synthesized Probe
  source 1..80: mol_type = other DNA
gacagctatagttgaaactcatttccttttgtttctttgaaatcatagagtttgggaaagagagggattttaattagaag

SEQ ID NO: 40828 - DNA, 80 bp, synthetic construct
  misc_feature 1..80: note = Artificially Synthesized Probe
  source 1..80: mol_type = other DNA
cctgagaaataggcaggtatactggaaacaccttcttatctggggcaattggactagtaattggtcagttaattccaaaa

SEQ ID NO: 40829 - DNA, 80 bp, synthetic construct
  misc_feature 1..80: note = Artificially Synthesized Probe
  source 1..80: mol_type = other DNA
tttaatatgtaattaaaataacaagtatacctagcgtgaactaactactgaccctgaagcagccaacctggctggtggga

SEQ ID NO: 40830 - DNA, 80 bp, synthetic construct
  misc_feature 1..80: note = Artificially Synthesized Probe
  source 1..80: mol_type = other DNA
ctgcctagagggagaaactgacacttacttttggctttctgggaaccagggtaggtcctctcttaattgaagagaattaa

SEQ ID NO: 40831 - DNA, 80 bp, synthetic construct
  misc_feature 1..80: note = Artificially Synthesized Probe
  source 1..80: mol_type = other DNA
aggccaccttctttagtcccccttccccaaagaagagccgtagctagtattgtggttggcattaaattgatataaagaca

SEQ ID NO: 40832 - DNA, 80 bp, synthetic construct
  misc_feature 1..80: note = Artificially Synthesized Probe
  source 1..80: mol_type = other DNA
aaaaaaaaaaaaaaagacattgactggtcttggcagtctttgggttttattctgaactgtgtagagttggccaactcagg

SEQ ID NO: 40833 - DNA, 80 bp, synthetic construct
  misc_feature 1..80: note = Artificially Synthesized Probe
  source 1..80: mol_type = other DNA
acttacataataaaataagaatctccccaatggccctttcctgtctgctggtctctgtgatgaagtgggccaccctaggg

SEQ ID NO: 40834 - DNA, 80 bp, synthetic construct
  misc_feature 1..80: note = Artificially Synthesized Probe
  source 1..80: mol_type = other DNA
cagactttagtctatattttcagatttattttgattataaagtgtagtctccccccgccaccccctgtctgcttttcttt

SEQ ID NO: 40835 - DNA, 80 bp, synthetic construct
  misc_feature 1..80: note = Artificially Synthesized Probe
  source 1..80: mol_type = other DNA
ccatgtaataaaaagagatcaattttacagacttctggttttaggtcatgcacagaggtgaagttctgcacaggtactgg

SEQ ID NO: 40836 - DNA, 80 bp, synthetic construct
  misc_feature 1..80: note = Artificially Synthesized Probe
  source 1..80: mol_type = other DNA
cagttggaccaattactcagcttcccaatctgatggtgtggttgatagaaatgtttcctggtggcattttcccacaggat

SEQ ID NO: 40837 - DNA, 80 bp, synthetic construct
  misc_feature 1..80: note = Artificially Synthesized Probe
  source 1..80: mol_type = other DNA
gcatgttcttgtttatgttaactgtgtactttgactgttcaagatccccattacttttcacttgtcatgccacatcattg

SEQ ID NO: 40838 - DNA, 80 bp, synthetic construct
  misc_feature 1..80: note = Artificially Synthesized Probe
  source 1..80: mol_type = other DNA
tgtccctgaagattctgctgttggccctggactacttaattctgtttgctcaccaaatcggtgacataagttacaagtta

SEQ ID NO: 40839 - DNA, 80 bp, synthetic construct
  misc_feature 1..80: note = Artificially Synthesized Probe
  source 1..80: mol_type = other DNA
tgagcccagggctgcgccagcagcatttcacttttaatccttagtattgttaggcctatacttccacctatagaggtggc

SEQ ID NO: 40840 - DNA, 80 bp, synthetic construct
  misc_feature 1..80: note = Artificially Synthesized Probe
  source 1..80: mol_type = other DNA
tcaagggtcatcttgacagaggagcttctgcagttgggaattgttacctttctcagagcagtgctattgggaaaaaaaaa

SEQ ID NO: 40841 - DNA, 80 bp, synthetic construct
  misc_feature 1..80: note = Artificially Synthesized Probe
  source 1..80: mol_type = other DNA
atggaattcagatcatgtttacccctctgttcaaattctccagtgactttccagtttttacatgatctggctcctactac

SEQ ID NO: 40842 - DNA, 80 bp, synthetic construct
  misc_feature 1..80: note = Artificially Synthesized Probe
  source 1..80: mol_type = other DNA
ctccataagggaagggattttgtctgttttgttctgttgtatccctaaatacctagaaggtgctcagtaaatatttgttg

SEQ ID NO: 40843 - DNA, 80 bp, synthetic construct
  misc_feature 1..80: note = Artificially Synthesized Probe
  source 1..80: mol_type = other DNA
ctccctgtgcagcatgtcctgaagctggcctgcctccatcctctttctaagtgtgtgaggtcttttgttaaacagggtaa

SEQ ID NO: 40844 - DNA, 80 bp, synthetic construct
  misc_feature 1..80: note = Artificially Synthesized Probe
  source 1..80: mol_type = other DNA
acatcttcaggttttgtaggattacctttagccctctaagtgatcagatctgcctcactgtcactcatgggagcccttga

SEQ ID NO: 40845 - DNA, 80 bp, synthetic construct
  misc_feature 1..80: note = Artificially Synthesized Probe
  source 1..80: mol_type = other DNA
taggactctttgaaagggtacagtatggatgacagtcttggctaaatgtaatcagatccaggaagctggagtcagtgtga

SEQ ID NO: 40846 - DNA, 80 bp, synthetic construct
  misc_feature 1..80: note = Artificially Synthesized Probe
  source 1..80: mol_type = other DNA
acttcctagcctccagaactgtaagaaattcttttcttcttttctttcctccctccctcacttccttcactctctctctc

SEQ ID NO: 40847 - DNA, 80 bp, synthetic construct
  misc_feature 1..80: note = Artificially Synthesized Probe
  source 1..80: mol_type = other DNA
tttcagaataatgagttagtgactagtaacctccactgtagtgaccaatagttttttttcctgaatatcgtaatgagctc

SEQ ID NO: 40848 - DNA, 80 bp, synthetic construct
  misc_feature 1..80: note = Artificially Synthesized Probe
  source 1..80: mol_type = other DNA
tttttcctattgcaattcatgagtctcagcatcttctgaatggtgtttagtaggtcatcatgttgagttcctgctctagg

SEQ ID NO: 40849 - DNA, 80 bp, synthetic construct
  misc_feature 1..80: note = Artificially Synthesized Probe
  source 1..80: mol_type = other DNA
aatgtagacacttggaatccatggagaatccctaagttgcattttagccttcatgttatgtctcctttcctaaccttttt

SEQ ID NO: 40850 - DNA, 80 bp, synthetic construct
  misc_feature 1..80: note = Artificially Synthesized Probe
  source 1..80: mol_type = other DNA
aagtgatcctcttgcctcagcctgttaagtagcagggactacaattgtgcaccactacacactgctattttttttttttt

SEQ ID NO: 40851 - DNA, 80 bp, synthetic construct
  misc_feature 1..80: note = Artificially Synthesized Probe
  source 1..80: mol_type = other DNA
gaacagtcatacccatgggtttgtatatcgtccatggctatttttaatgttagaagagcagagttgagtagtttcaacag

SEQ ID NO: 40852 - DNA, 80 bp, synthetic construct
  misc_feature 1..80: note = Artificially Synthesized Probe
  source 1..80: mol_type = other DNA
gcatattttttctgcagaagctgataggctcagatgaagctttgccttatctgttcctctggctgccaacctctttctct

SEQ ID NO: 40853 - DNA, 80 bp, synthetic construct
  misc_feature 1..80: note = Artificially Synthesized Probe
  source 1..80: mol_type = other DNA
ctgacaggcagaggtaagtagtttaaagcctgattacctagtcccaaagtggacgaaatggagccttgaaccaaataaat

SEQ ID NO: 40854 - DNA, 80 bp, synthetic construct
  misc_feature 1..80: note = Artificially Synthesized Probe
  source 1..80: mol_type = other DNA
tcgtattcacgagtgcaacattgatgatgaatctgacatcccttcataacttaagaatcattagtatgactgccccatgg

SEQ ID NO: 40855 - DNA, 80 bp, synthetic construct
  misc_feature 1..80: note = Artificially Synthesized Probe
  source 1..80: mol_type = other DNA
cttgtataccttcattctcagtacaaaacccttagcacccattatctcattcttccccaccaaagcccttggagatgaag

SEQ ID NO: 40856 - DNA, 80 bp, synthetic construct
  misc_feature 1..80: note = Artificially Synthesized Probe
  source 1..80: mol_type = other DNA
aggaatacaagtatttccttttgattgggcaattaagacttttttttttcctataaaggttctcctgatagtgccacttg

SEQ ID NO: 40857 - DNA, 80 bp, synthetic construct
  misc_feature 1..80: note = Artificially Synthesized Probe
  source 1..80: mol_type = other DNA
cttctagagtagtttcttatgccttggaaaggggataacactgaaggcaagaaagcaatgtgttgtattacttggtagca

SEQ ID NO: 40858 - DNA, 80 bp, synthetic construct
  misc_feature 1..80: note = Artificially Synthesized Probe
  source 1..80: mol_type = other DNA
ttccttttctttggggcaaaccaaagcaatgagaataggagaaggtcaggagaggaggcatgtctaaatgacagttataa

SEQ ID NO: 40859 - DNA, 80 bp, synthetic construct
  misc_feature 1..80: note = Artificially Synthesized Probe
  source 1..80: mol_type = other DNA
aaacctaggttttggtatattgatttaacttaaattgagacctctgccattcaggggataaagctctggacattctacat

SEQ ID NO: 40860 - DNA, 80 bp, synthetic construct
  misc_feature 1..80: note = Artificially Synthesized Probe
  source 1..80: mol_type = other DNA
tttttattgcttaaaatatgatgagatgcctggacattcagctgccatcttgtgatgtaaagtgctgtgttaactcactg

SEQ ID NO: 40861 - DNA, 80 bp, synthetic construct
  misc_feature 1..80: note = Artificially Synthesized Probe
  source 1..80: mol_type = other DNA
taacttttcaaaatatgtttaagggtaagataaaaacaagatatattattttggcagagaactggaaattcaaaactgga

SEQ ID NO: 40862 - DNA, 80 bp, synthetic construct
  misc_feature 1..80: note = Artificially Synthesized Probe
  source 1..80: mol_type = other DNA
gtaggagagtaagaacaaaagggggctaaggacattataaaaagtattagtataaagataaccactagaacaaaaatgcg

SEQ ID NO: 40863 - DNA, 80 bp, synthetic construct
  misc_feature 1..80: note = Artificially Synthesized Probe
  source 1..80: mol_type = other DNA
agcactagcgatgctctattttttatctgggtgctggttgcatgattttgttaactttgtgaaaattctttaagctggat

SEQ ID NO: 40864 - DNA, 80 bp, synthetic construct
  misc_feature 1..80: note = Artificially Synthesized Probe
  source 1..80: mol_type = other DNA
tttatggcagcaaaaaattggaaacaatggcaggtaccaccaaaaaaaagagactggttgaataaacaaaagcatagcta

SEQ ID NO: 40865 - DNA, 80 bp, synthetic construct
  misc_feature 1..80: note = Artificially Synthesized Probe
  source 1..80: mol_type = other DNA
tgggcaagatttcaggaagcaggattttggttcccttactttaaaatgcatggagaatggctgggtttggtggcccatgc

SEQ ID NO: 40866 - DNA, 80 bp, synthetic construct
  misc_feature 1..80: note = Artificially Synthesized Probe
  source 1..80: mol_type = other DNA
tccttctcagaacatacccagaaataatgattctctattttgagtactttcttgtgcagtatactaaccaggtgcctact

SEQ ID NO: 40867 - DNA, 80 bp, synthetic construct
  misc_feature 1..80: note = Artificially Synthesized Probe
  source 1..80: mol_type = other DNA
gaatttttcagagtagaattgggatccagagtgagaaactttctccctgaaggggctccctggacttttgctcttggcga

SEQ ID NO: 40868 - DNA, 80 bp, synthetic construct
  misc_feature 1..80: note = Artificially Synthesized Probe
  source 1..80: mol_type = other DNA
taaaaaataaaaaattcaccgggtgtgatggtgtgttcctgtagtccctgctaatcccagaggctggagtgggatgattg

SEQ ID NO: 40869 - DNA, 80 bp, synthetic construct
  misc_feature 1..80: note = Artificially Synthesized Probe
  source 1..80: mol_type = other DNA
cctgctttgctttaaatctctatttgccttagagcagtcatctgtagtgtggtgaccacaggctttctaatgtctatggg

SEQ ID NO: 40870 - DNA, 80 bp, synthetic construct
  misc_feature 1..80: note = Artificially Synthesized Probe
  source 1..80: mol_type = other DNA
gaaatttaaccctctggcttctttccacttcccctcccttatataaaacttggttgttgtttttgtgtgtggggtggggg

SEQ ID NO: 40871 - DNA, 80 bp, synthetic construct
  misc_feature 1..80: note = Artificially Synthesized Probe
  source 1..80: mol_type = other DNA
aaatgaggcaaaattgtttttcttcatgcttcagagccatgctgctctataaggaagtctatattaaataggtaaagaca

SEQ ID NO: 40872 - DNA, 80 bp, synthetic construct
  misc_feature 1..80: note = Artificially Synthesized Probe
  source 1..80: mol_type = other DNA
gaatatataaattgctagtatttagaaggtaataagtacagtaaggagcatcaagaatgctgggtagttgtgaggggagt

SEQ ID NO: 40873 - DNA, 80 bp, synthetic construct
  misc_feature 1..80: note = Artificially Synthesized Probe
  source 1..80: mol_type = other DNA
gaggggaaagttgattataagggagaatatacaaaacctggcatcgaagccttactagagacctggaacctactcttttt

SEQ ID NO: 40874 - DNA, 80 bp, synthetic construct
  misc_feature 1..80: note = Artificially Synthesized Probe
  source 1..80: mol_type = other DNA
atgaaataatagaagtgaaagcactttgaaactcagaaagtccaggaagaaatcggctggttgtctccactctcttcatt

SEQ ID NO: 40875 - DNA, 80 bp, synthetic construct
  misc_feature 1..80: note = Artificially Synthesized Probe
  source 1..80: mol_type = other DNA
atctgcacatagttaactctgaggctttgttggaatccgccaaagattcattgttaaagacagggaaagcacaactcatt

SEQ ID NO: 40876 - DNA, 80 bp, synthetic construct
  misc_feature 1..80: note = Artificially Synthesized Probe
  source 1..80: mol_type = other DNA
gagaccagcctggccaacatagcgaaatcctgtctctactaaaatacttataatcctagctactccagaggctgaggcat

SEQ ID NO: 40877 - DNA, 80 bp, synthetic construct
  misc_feature 1..80: note = Artificially Synthesized Probe
  source 1..80: mol_type = other DNA
tctactttggctctctgttggaggggaacacttatgtcattaaaaacattgtactttgcttatctaattcccactctgtg

SEQ ID NO: 40878 - DNA, 80 bp, synthetic construct
  misc_feature 1..80: note = Artificially Synthesized Probe
  source 1..80: mol_type = other DNA
caagaccaacctggccaacatggtgtaaccccatctctactaaaaatacaaaaattagccgggcatggtggcacaccatt

SEQ ID NO: 40879 - DNA, 80 bp, synthetic construct
  misc_feature 1..80: note = Artificially Synthesized Probe
  source 1..80: mol_type = other DNA
aattggatggcttggtactgttttttatgcttctagttgacaattgggttttatcaatgtcttagacttcttgttgttgg

SEQ ID NO: 40880 - DNA, 80 bp, synthetic construct
  misc_feature 1..80: note = Artificially Synthesized Probe
  source 1..80: mol_type = other DNA
tttaaatcttcttctcactggcctctgtgattctgtgaacctggttattacatgttcaaaaagtgtcagcttatttgaaa

SEQ ID NO: 40881 - DNA, 80 bp, synthetic construct
  misc_feature 1..80: note = Artificially Synthesized Probe
  source 1..80: mol_type = other DNA
ttgttccaaatcccatcacccaaaaaacagctcttgattcattcattcaatgtgcctttattgagtgcttactctatgtg

SEQ ID NO: 40882 - DNA, 80 bp, synthetic construct
  misc_feature 1..80: note = Artificially Synthesized Probe
  source 1..80: mol_type = other DNA
gatacagatttgggaatcaccagacatagaatggaatgggatctgataggaagcaaggagagatagaaaacagatcctat

SEQ ID NO: 40883 - DNA, 80 bp, synthetic construct
  misc_feature 1..80: note = Artificially Synthesized Probe
  source 1..80: mol_type = other DNA
aaaactgttaggaggctaaagtcactattaatatttttaaagacatttttagttatatcttcactttagatgattgtctg

SEQ ID NO: 40884 - DNA, 80 bp, synthetic construct
  misc_feature 1..80: note = Artificially Synthesized Probe
  source 1..80: mol_type = other DNA
cagatttagttctctggatatttttttctgttttatttattgtcttcctctgcatttattgtgagtctcttaagcctttt

SEQ ID NO: 40885 - DNA, 80 bp, synthetic construct
  misc_feature 1..80: note = Artificially Synthesized Probe
  source 1..80: mol_type = other DNA
ttctagttctgcctttggtggccatgtggtttattccacagcttttcaaactgcaggttgagaccttttactaaatcatg

SEQ ID NO: 40886 - DNA, 80 bp, synthetic construct
  misc_feature 1..80: note = Artificially Synthesized Probe
  source 1..80: mol_type = other DNA
tgaggtagatactgttattaacaaaattttacagaatagggacattcttgcatagagagagaagtaatttgcccaaggtc

SEQ ID NO: 40887 - DNA, 80 bp, synthetic construct
  misc_feature 1..80: note = Artificially Synthesized Probe
  source 1..80: mol_type = other DNA
caaggtaggtgtcttagtctagagtccttgaaaatataaattagagggagaggcaaaagcgtacacttcatttgcaagag

SEQ ID NO: 40888 - DNA, 80 bp, synthetic construct
  misc_feature 1..80: note = Artificially Synthesized Probe
  source 1..80: mol_type = other DNA
ttaatcatttttgtttgtccttctcactggtaacgaataggtgcttggtccctgcttgttgaactaaacttgaaacaatg

SEQ ID NO: 40889 - DNA, 80 bp, synthetic construct
  misc_feature 1..80: note = Artificially Synthesized Probe
  source 1..80: mol_type = other DNA
cttatactcttaaatatttttgcatttagtcctccttttctccaattcaattgtaagctccttgagagtaagagactgtc

SEQ ID NO: 40890 - DNA, 80 bp, synthetic construct
  misc_feature 1..80: note = Artificially Synthesized Probe
  source 1..80: mol_type = other DNA
agctccatttctggctgcttgagatccaaactactctattggcctttggagctattcctcctcttgcacctttatctttg

SEQ ID NO: 40891 - DNA, 80 bp, synthetic construct
  misc_feature 1..80: note = Artificially Synthesized Probe
  source 1..80: mol_type = other DNA
tacctccagaagcctgactatagtaatgggattccccactgatcttcctgagctttcaacactttcattgtagtatttat

SEQ ID NO: 40892 - DNA, 80 bp, synthetic construct
  misc_feature 1..80: note = Artificially Synthesized Probe
  source 1..80: mol_type = other DNA
tagagtaaagtaatgcagaaaaagactatcagtcacactctttgaggaagaatatttgctgtttcctagtttactgaaag

SEQ ID NO: 40893 - DNA, 80 bp, synthetic construct
  misc_feature 1..80: note = Artificially Synthesized Probe
  source 1..80: mol_type = other DNA
ctcccccattttctccttagaaatgtggtattcatgacttaatcagagaaaattcctgaagaagaagatgaattttgaaa

SEQ ID NO: 40894 - DNA, 80 bp, synthetic construct
  misc_feature 1..80: note = Artificially Synthesized Probe
  source 1..80: mol_type = other DNA
attctcaggaaccttttaaagaaattgggttcctcttgcaagggaagctgcaatttttattcaagtgtcatttttaaaaa

SEQ ID NO: 40895 - DNA, 80 bp, synthetic construct
  misc_feature 1..80: note = Artificially Synthesized Probe
  source 1..80: mol_type = other DNA
agttggtatcgtgaagcatggtgtaagtggtatgagtggtgtgagtctttgagtgtgtacacatgatgtgcacatgcatg

SEQ ID NO: 40896 - DNA, 80 bp, synthetic construct
  misc_feature 1..80: note = Artificially Synthesized Probe
  source 1..80: mol_type = other DNA
gtcttacttcagttttctccttagtgtaatcaggataattgtggataccttacagactacctgtgagaattaaatgagat

SEQ ID NO: 40897 - DNA, 80 bp, synthetic construct
  misc_feature 1..80: note = Artificially Synthesized Probe
  source 1..80: mol_type = other DNA
cggatggaatttaagtaatattagtaagcattctgaatgccctctcaatgtacagtctgcccacccaatggctattacta

SEQ ID NO: 40898 - DNA, 80 bp, synthetic construct
  misc_feature 1..80: note = Artificially Synthesized Probe
  source 1..80: mol_type = other DNA
atagacagaaagcattgttgcaactgtgctatttgggaatgaatttggggcacacataaggaaaggcataatataggtgc

SEQ ID NO: 40899 - DNA, 80 bp, synthetic construct
  misc_feature 1..80: note = Artificially Synthesized Probe
  source 1..80: mol_type = other DNA
ccagaagacaacccagattctggctctgtgccactagaaacatagtaatataaatggtagataggaatgttattattttt

SEQ ID NO: 40900 - DNA, 80 bp, synthetic construct
  misc_feature 1..80: note = Artificially Synthesized Probe
  source 1..80: mol_type = other DNA
ccctagtttagatcatcatcttttttgcctgaatgattgcagtatttactagatcttctatagcagagattttcaaccct

SEQ ID NO: 40901 - DNA, 80 bp, synthetic construct
  misc_feature 1..80: note = Artificially Synthesized Probe
  source 1..80: mol_type = other DNA
atcatctgtactgttagaaatgcagtatcttaggtcctactccagtccttataacaagatcccacaacatagcatgtgat

SEQ ID NO: 40902 - DNA, 80 bp, synthetic construct
  misc_feature 1..80: note = Artificially Synthesized Probe
  source 1..80: mol_type = other DNA
tgccttaataatacaggacacaaattatcctttaaaagccagctctgtgcaatgaagatggggttaaggttgaggagaac

SEQ ID NO: 40903 - DNA, 80 bp, synthetic construct
  misc_feature 1..80: note = Artificially Synthesized Probe
  source 1..80: mol_type = other DNA
ctccacatcctcaccagagcagctagatacagagtgtcgattggtgcactcacaaatcttgagctaaacacagggtgctg

SEQ ID NO: 40904 - DNA, 80 bp, synthetic construct
  misc_feature 1..80: note = Artificially Synthesized Probe
  source 1..80: mol_type = other DNA
cagccttggccagcccagaaaggggctcccacagtgcaggggggggtgctgaagggctcctcgaattccattaaagtggg

SEQ ID NO: 40905 - DNA, 80 bp, synthetic construct
  misc_feature 1..80: note = Artificially Synthesized Probe
  source 1..80: mol_type = other DNA
cagtctacttattcaacaaattacttttaaatacctactgagtactgtgctctgtgttgattcctataggaactaacata

SEQ ID NO: 40906 - DNA, 80 bp, synthetic construct
  misc_feature 1..80: note = Artificially Synthesized Probe
  source 1..80: mol_type = other DNA
tgaggtaagaggttatgactggggatagctagcagaatcttcggagtaaaagtgattgtgggagagatgaaagtatatga

SEQ ID NO: 40907 - DNA, 80 bp, synthetic construct
  misc_feature 1..80: note = Artificially Synthesized Probe
  source 1..80: mol_type = other DNA
ttagttctgtttgtttttccacaattaaactcgtggcctgcctgctcaagttcagtgaatacctaaagagtccacgtagc

SEQ ID NO: 40908 - DNA, 80 bp, synthetic construct
  misc_feature 1..80: note = Artificially Synthesized Probe
  source 1..80: mol_type = other DNA
ggaggtcaagttcaatggatgggagataaaaaaattaaaatgccagtgctaggcattgatcctttaagcttaatacagtt

SEQ ID NO: 40909 - DNA, 80 bp, synthetic construct
  misc_feature 1..80: note = Artificially Synthesized Probe
  source 1..80: mol_type = other DNA
ctctccttctttctccttcccccagagaatgagagatgctgcagatagaactgtagcgattatttgaccctatgttattc

SEQ ID NO: 40910 - DNA, 80 bp, synthetic construct
  misc_feature 1..80: note = Artificially Synthesized Probe
  source 1..80: mol_type = other DNA
aaagaacaaagcacttttgaggtacagtgagtagactggtttagctgggagaataagtggatgtggaagaagtggacaaa

SEQ ID NO: 40911 - DNA, 80 bp, synthetic construct
  misc_feature 1..80: note = Artificially Synthesized Probe
  source 1..80: mol_type = other DNA
cccaaagtgctgggattacaggcataagcctctgtgcccagctgaaatctagtgttttttaacagaagttaggagaaaga

SEQ ID NO: 40912 - DNA, 80 bp, synthetic construct
  misc_feature 1..80: note = Artificially Synthesized Probe
  source 1..80: mol_type = other DNA
ccatggaaaatgttatagttgtggttgcaaatcggaaaagggtggaagaccagaaggttcctcattgacttatggagtga

SEQ ID NO: 40913 - DNA, 80 bp, synthetic construct
  misc_feature 1..80: note = Artificially Synthesized Probe
  source 1..80: mol_type = other DNA
ggatgctcaataaatggtagctgatataattatcaggaaaagtcaatcctgatagttaagatcagccacagaagagtcag

SEQ ID NO: 40914 - DNA, 80 bp, synthetic construct
  misc_feature 1..80: note = Artificially Synthesized Probe
  source 1..80: mol_type = other DNA
ctgggttgtttgtctcatgaggccaaacagaagctcccaagcttctgcataaatggctttatatcttccttttagggtag

SEQ ID NO: 40915 - DNA, 80 bp, synthetic construct
  misc_feature 1..80: note = Artificially Synthesized Probe
  source 1..80: mol_type = other DNA
taggatttgggtttttcagagttgaaataggttcatcttttctgctagctcctccttttatacatctccactgtcgttgc

SEQ ID NO: 40916 - DNA, 80 bp, synthetic construct
  misc_feature 1..80: note = Artificially Synthesized Probe
  source 1..80: mol_type = other DNA
cacatggtgagagtgggagtgagagtcgggggaggtcccagacttttgaacaaccagatctcttgtgaactaagtgagca

SEQ ID NO: 40917 - DNA, 80 bp, synthetic construct
  misc_feature 1..80: note = Artificially Synthesized Probe
  source 1..80: mol_type = other DNA
agatgaaaaaaagcgatttaccagatctgggaatgtttttgagccactctagcaaaaaacaactggcttgaaaatctttg

SEQ ID NO: 40918 - DNA, 80 bp, synthetic construct
  misc_feature 1..80: note = Artificially Synthesized Probe
  source 1..80: mol_type = other DNA
aggaagctcatggtgtcatgtggaagacagagagtttatgggaaaaagataacacaaaataatatacacttactgccaaa

SEQ ID NO: 40919 - DNA, 80 bp, synthetic construct
  misc_feature 1..80: note = Artificially Synthesized Probe
  source 1..80: mol_type = other DNA
taccatctttattttaatgttcatattgttctatatttggccaatggagtcccttcaagctggcttctgtgtcttattga

SEQ ID NO: 40920 - DNA, 80 bp, synthetic construct
  misc_feature 1..80: note = Artificially Synthesized Probe
  source 1..80: mol_type = other DNA
ttattagccttgagggccaagacacaatgttcaaaagttagctgactagttctttctttcctatcttagtctgttttgtg

SEQ ID NO: 40921 - DNA, 80 bp, synthetic construct
  misc_feature 1..80: note = Artificially Synthesized Probe
  source 1..80: mol_type = other DNA
atcagcatcagcatctgctcagctgtaggccatgattgtctgtactgtttaccagcagctcatgtaatatgcttgatgta

SEQ ID NO: 40922 - DNA, 80 bp, synthetic construct
  misc_feature 1..80: note = Artificially Synthesized Probe
  source 1..80: mol_type = other DNA
tataccttgccactttccatctcttcttcatattcctcacttagcaaaggctggtttttaaaacctttattctcattttt

SEQ ID NO: 40923 - DNA, 80 bp, synthetic construct
  misc_feature 1..80: note = Artificially Synthesized Probe
  source 1..80: mol_type = other DNA
aattatctcccataatttaagaccattactctggagcagtgactttaaaacattttgatcatgaatctctatattttata

SEQ ID NO: 40924 - DNA, 80 bp, synthetic construct
  misc_feature 1..80: note = Artificially Synthesized Probe
  source 1..80: mol_type = other DNA
actgggaatcttctcgttacaggatgaccccaatcacttaggtttacttctggatcttgataattccttgatagtcctct

SEQ ID NO: 40925 - DNA, 80 bp, synthetic construct
  misc_feature 1..80: note = Artificially Synthesized Probe
  source 1..80: mol_type = other DNA
gtactccaacctgggcaacagagcaagaccccatctctgcaaaaaaaaagtatgggccgggtgcggtggttcacacctgt

SEQ ID NO: 40926 - DNA, 80 bp, synthetic construct
  misc_feature 1..80: note = Artificially Synthesized Probe
  source 1..80: mol_type = other DNA
ctcgtcatctagcattaggtatatctcccaatgctatccctcccccctccccccaccccaccacagtccccagagtgtga

SEQ ID NO: 40927 - DNA, 80 bp, synthetic construct
  misc_feature 1..80: note = Artificially Synthesized Probe
  source 1..80: mol_type = other DNA
gaagtccttgcccacgcctatgtcctgaatggtaatgcctaggttttcttctagggtttttatggttttaggtctaacgt

SEQ ID NO: 40928 - DNA, 80 bp, synthetic construct
  misc_feature 1..80: note = Artificially Synthesized Probe
  source 1..80: mol_type = other DNA
catgtggtttttgtctttggctctgtttatatgctggattacatttattgatttgcgtatattgaaccagccttgcatcc

SEQ ID NO: 40929 - DNA, 80 bp, synthetic construct; identical to SEQ ID NO: 28000
  misc_feature 1..80: note = Artificially Synthesized Probe
  source 1..80: mol_type = other DNA

SEQ ID NO: 40930 - DNA, 80 bp, synthetic construct
  misc_feature 1..80: note = Artificially Synthesized Probe
  source 1..80: mol_type = other DNA
tgcccttaacatttttcccttcatttcaactttggtgaatctgacaattatgtgtcttggagttgctcttctcgaggagt

SEQ ID NO: 40931 - DNA, 80 bp, synthetic construct
  misc_feature 1..80: note = Artificially Synthesized Probe
  source 1..80: mol_type = other DNA
ttatccatgttgctccccgagggtgaggaaccggcggggcgaggcgaaggtctctggtgcgggcggcgcggctctgtgtc

SEQ ID NO: 40932 - DNA, 80 bp, synthetic construct
  misc_feature 1..80: note = Artificially Synthesized Probe
  source 1..80: mol_type = other DNA
caaataacacatgagaactgataatgacacatgcagccaatctgatgactgtgtagacttcattccatttagatctatag

SEQ ID NO: 40933 - DNA, 80 bp, synthetic construct
  misc_feature 1..80: note = Artificially Synthesized Probe
  source 1..80: mol_type = other DNA
ggtttaaaagcctctttattcattcctccctatagttctgggaatgctagtgctaacacatgggatgtaaacaaagggaa

SEQ ID NO: 40934 - DNA, 80 bp, synthetic construct
  misc_feature 1..80: note = Artificially Synthesized Probe
  source 1..80: mol_type = other DNA
tagactatattatttttgcctttggcacttttctctgtctctgaactctcctcctctgatctcattgctggcaacgctga

SEQ ID NO: 40935 - DNA, 80 bp, synthetic construct
  misc_feature 1..80: note = Artificially Synthesized Probe
  source 1..80: mol_type = other DNA
gttggtatctctctcacgtcttcccagagccttacggctgctttgttaattgcctgttgctgctgtcttactcaaaccat

SEQ ID NO: 40936 - DNA, 80 bp, synthetic construct
  misc_feature 1..80: note = Artificially Synthesized Probe
  source 1..80: mol_type = other DNA
attttgtctgctttttagggattagtgtttgaggaggtttgcagctgctcagcacattcctaagggatgcagaccctttc

SEQ ID NO: 40937 - DNA, 80 bp, synthetic construct
  misc_feature 1..80: note = Artificially Synthesized Probe
  source 1..80: mol_type = other DNA
catcacctagcagctattccccttcataaatattaattggataagccccaacatgtataataggcatcgcaacaactgat

SEQ ID NO: 40938 - DNA, 80 bp, synthetic construct
  misc_feature 1..80: note = Artificially Synthesized Probe
  source 1..80: mol_type = other DNA
tgagccacaccttacaagttctcaataaaacttattagcattaagtgataaggcattttattttaaaagatttctacttc

SEQ ID NO: 40939 - DNA, 80 bp, synthetic construct
  misc_feature 1..80: note = Artificially Synthesized Probe
  source 1..80: mol_type = other DNA
tccagttcacttttttttccccagatactaaacattttgaaaggagtaaattaattatgtgtctctcttcctctcagctg

SEQ ID NO: 40940 - DNA, 80 bp, synthetic construct
  misc_feature 1..80: note = Artificially Synthesized Probe
  source 1..80: mol_type = other DNA
ttgtctcaaaaaaaaaagggaatgagcgccttggtttagcactttactgctccactcaagctgtagacattttaggaacg

SEQ ID NO: 40941 - DNA, 80 bp, synthetic construct
  misc_feature 1..80: note = Artificially Synthesized Probe
  source 1..80: mol_type = other DNA
ggtgagcttcaggaaaaatatctttatttctggattggctttgattgctgtgattttaggacacggactatagttgtaga

SEQ ID NO: 40942 - DNA, 80 bp, synthetic construct
  misc_feature 1..80: note = Artificially Synthesized Probe
  source 1..80: mol_type = other DNA
ccggaagactttccagaaggcaaataatcttcctaaaagttataggtagaaaaagattatagagggctatttagaattca

SEQ ID NO: 40943 - DNA, 80 bp, synthetic construct
  misc_feature 1..80: note = Artificially Synthesized Probe
  source 1..80: mol_type = other DNA
ttcgtctgtgaatgatattcctagccatgggctcagggttgacttccttaagccgtgtattactatgctagagcgtgagg

SEQ ID NO: 40944 - DNA, 80 bp, synthetic construct
  misc_feature 1..80: note = Artificially Synthesized Probe
  source 1..80: mol_type = other DNA
agaacaacctgggcaacataacaagaccttgtctctaaaaaaattttaaaagttagctgagcatggtggcctgtgcctgt

SEQ ID NO: 40945 - DNA, 80 bp, synthetic construct
  misc_feature 1..80: note = Artificially Synthesized Probe
  source 1..80: mol_type = other DNA
cccatttctctggggacataggcttagaaaagataccttaatttgtggtatggctgtacacacctgtgctttatgtgaat

SEQ ID NO: 40946 - DNA, 80 bp, synthetic construct
  misc_feature 1..80: note = Artificially Synthesized Probe
  source 1..80: mol_type = other DNA
gagagagagattaagaaaaatgaaatgaagctaatgtttaactccagtcacctggctctagaatccaacgttttcatcta

SEQ ID NO: 40947 - DNA, 80 bp, synthetic construct
  misc_feature 1..80: note = Artificially Synthesized Probe
  source 1..80: mol_type = other DNA
cctacaggagagaggataatcctgttttctctttttacttagctggaacacactaaaagtacctctgactttgctttctc

SEQ ID NO: 40948 - DNA, 80 bp, synthetic construct
  misc_feature 1..80: note = Artificially Synthesized Probe
  source 1..80: mol_type = other DNA
attcactaggatggttaaaattaaaacatctggcaataccaagtgttaaggaagttggccagaaccctcatatgttgcta

SEQ ID NO: 40949 - DNA, 80 bp, synthetic construct
  misc_feature 1..80: note = Artificially Synthesized Probe
  source 1..80: mol_type = other DNA
ccatggtggtacattagacagactttatcatattatacacttaaaatgtgtacattttattatgtaaattatgcctcaat

SEQ ID NO: 40950 - DNA, 80 bp, synthetic construct
  misc_feature 1..80: note = Artificially Synthesized Probe
  source 1..80: mol_type = other DNA
tgagtgatttaaccctccctcccttccccgtctaccatatccctcctgctcgtctgaactcagtatctgtgattggactg

SEQ ID NO: 40951 - DNA, 80 bp, synthetic construct
  misc_feature 1..80: note = Artificially Synthesized Probe
  source 1..80: mol_type = other DNA
gatgacaaagtaataatagtaacctttcgtaaaattcacactgtgaatacctcccactgtagtaggccctagatgtgtat

SEQ ID NO: 40952 - DNA, 80 bp, synthetic construct
  misc_feature 1..80: note = Artificially Synthesized Probe
  source 1..80: mol_type = other DNA
ttgctttgttatcaattgcatgtatgttagactacttgattcagtcccacagcttgttaatattctgtccatttttttca

SEQ ID NO: 40953 - DNA, 80 bp, synthetic construct
  misc_feature 1..80: note = Artificially Synthesized Probe
  source 1..80: mol_type = other DNA
catcatgcttggctaatttttttagagatggggtctcgctgtggtgcccaggctaggcttgaactctggggctcaaatga

SEQ ID NO: 40954 - DNA, 80 bp, synthetic construct
  misc_feature 1..80: note = Artificially Synthesized Probe
  source 1..80: mol_type = other DNA
gacaactagtttgtccaagccagtatctaatgcacacagttttatgtcccttaagtgtactttaatctagtattattttc

SEQ ID NO: 40955 - DNA, 80 bp, synthetic construct
  misc_feature 1..80: note = Artificially Synthesized Probe
  source 1..80: mol_type = other DNA
tacagctcatcaggcaccatgcaaatagtagtttgtaaaaacgtattagtcttgggagaaaccacacacacgaatagtgt

SEQ ID NO: 40956 - DNA, 80 bp, synthetic construct
  misc_feature 1..80: note = Artificially Synthesized Probe
  source 1..80: mol_type = other DNA
atttgaattctttgcactaattgtttaaaagaccataggaacctcagaccatccctcttcatggtctcaagagctcccag

SEQ ID NO: 40957 - DNA, 80 bp, synthetic construct
  misc_feature 1..80: note = Artificially Synthesized Probe
  source 1..80: mol_type = other DNA
actttcctcatctttacactaatgaaattactcataccctcactgttccttctcagaatgctataggcatcagtaaaacc

SEQ ID NO: 40958 - DNA, 80 bp, synthetic construct
  misc_feature 1..80: note = Artificially Synthesized Probe
  source 1..80: mol_type = other DNA
tagatttcttacatctcaggtgaaagacagaccatagactcccaaagcaggttacaatttagatagcaatgtaatgagtc

SEQ ID NO: 40959 - DNA, 80 bp, synthetic construct
  misc_feature 1..80: note = Artificially Synthesized Probe
  source 1..80: mol_type = other DNA
ataatacataaaaaagtaaatatataatatatcagatgatgataaaatgaaacagggcaaagaggatggggtacaaggga

SEQ ID NO: 40960 - DNA, 80 bp, synthetic construct
  misc_feature 1..80: note = Artificially Synthesized Probe
  source 1..80: mol_type = other DNA
tactcactgctctgtccagtacataccatatttctgacttcagctttagacatggtaaagggaaggtttagtgagggcaa

SEQ ID NO: 40961 - DNA, 80 bp, synthetic construct
  misc_feature 1..80: note = Artificially Synthesized Probe
  source 1..80: mol_type = other DNA
atttttcaaacattgatatatcagcattggtccttctgatgaaacacaagatgaggttttccctgctgagtgtcaggcag

SEQ ID NO: 40962 - DNA, 80 bp, synthetic construct
  misc_feature 1..80: note = Artificially Synthesized Probe
  source 1..80: mol_type = other DNA
tgttggttggaggaaagaggctcttgtagtttatgaattaaagaaaaaaaattcctgatctgggaatgagaatcttatcc

SEQ ID NO: 40963 - DNA, 80 bp, synthetic construct
  misc_feature 1..80: note = Artificially Synthesized Probe
  source 1..80: mol_type = other DNA
gaaattaacacggaggtaatactataatctctcaatcttactgaaatttcacttgttgccttgctaatgtccaattcaaa

SEQ ID NO: 40964 - DNA, 80 bp, synthetic construct
  misc_feature 1..80: note = Artificially Synthesized Probe
  source 1..80: mol_type = other DNA
tattaaacatattgtaggtttcattaaatgatgtttcacaaggtgttgcttctcctggaccaaattcctgttgttcagct

SEQ ID NO: 40965 - DNA, 80 bp, synthetic construct
  misc_feature 1..80: note = Artificially Synthesized Probe
  source 1..80: mol_type = other DNA
cagttggatctgtggttgacagaagaatttcaacacacattcaaatcagctcctaagatagattgtctgagttccctggg

SEQ ID NO: 40966 - DNA, 80 bp, synthetic construct
  misc_feature 1..80: note = Artificially Synthesized Probe
  source 1..80: mol_type = other DNA
tcctccagaatatttagggttaactaaaaattataaaaacataccacagagctagtccactctttatgcctagggtttac

SEQ ID NO: 40967 - DNA, 80 bp, synthetic construct
  misc_feature 1..80: note = Artificially Synthesized Probe
  source 1..80: mol_type = other DNA
atcaagaatattcttttgtatatgtctttcttgctgtgaaaatttatggcctttcttccccctatcttcgctctgtaatt

SEQ ID NO: 40968 - DNA, 80 bp, synthetic construct
  misc_feature 1..80: note = Artificially Synthesized Probe
  source 1..80: mol_type = other DNA
tggccccatatagagcttttatacgtgccaatttttagaatttcttgtagagttcctccatttggtggtcaccagaggat

SEQ ID NO: 40969 - DNA, 80 bp, synthetic construct
  misc_feature 1..80: note = Artificially Synthesized Probe
  source 1..80: mol_type = other DNA
agaaatagactaaggcagtttcatagagactgaagcctggattcaaattatcttaacctctaattggattaaggtgattt

SEQ ID NO: 40970 - DNA, 80 bp, synthetic construct
  misc_feature 1..80: note = Artificially Synthesized Probe
  source 1..80: mol_type = other DNA
tggaaaactgaaaattcctccaaaacttaagcatagaattaacctgtgacccatcaattccacatctaggtgtataccca

SEQ ID NO: 40971 - DNA, 80 bp, synthetic construct
  misc_feature 1..80: note = Artificially Synthesized Probe
  source 1..80: mol_type = other DNA
atttgaagagataatggctgtgaatttccctaaactataaaagacttcaagccacagactgaagcattatgagccccaaa

SEQ ID NO: 40972 - DNA, 80 bp, synthetic construct
  misc_feature 1..80: note = Artificially Synthesized Probe
  source 1..80: mol_type = other DNA
atatagatctaagtgaataatcactgttaaaaacaacactaataatcatctgtggggttttccttttttagatgtgtggg

SEQ ID NO: 40973 - DNA, 80 bp, synthetic construct
  misc_feature 1..80: note = Artificially Synthesized Probe
  source 1..80: mol_type = other DNA
atagaaagcaattagcaagttggtgggtttaaaccataatataaggtgtaaattgacttatgcaaattaaagacagattt

SEQ ID NO: 40974 - DNA, 80 bp, synthetic construct
  misc_feature 1..80: note = Artificially Synthesized Probe
  source 1..80: mol_type = other DNA
tgagagatttaacacacctgtctcagtgaatgattaaacaactagaccaaaaaagtcagtaaaaatacagaagagttgaa

SEQ ID NO: 40975 - DNA, 80 bp, synthetic construct
  misc_feature 1..80: note = Artificially Synthesized Probe
  source 1..80: mol_type = other DNA
cagtgttctaaaactacacagatctctcgatgaattggctttgctgctgggttcctctttcttaaaagtatttaatcagc

SEQ ID NO: 40976 - DNA, 80 bp, synthetic construct
  misc_feature 1..80: note = Artificially Synthesized Probe
  source 1..80: mol_type = other DNA
atgttgttttgagtttattttcttagtattaggataggtcattcaaagagattggaacaaccatggaagaacattcagat

SEQ ID NO: 40977 - DNA, 80 bp, synthetic construct
  misc_feature 1..80: note = Artificially Synthesized Probe
  source 1..80: mol_type = other DNA
tctcttttaatactgcatgtggtccttgataggctactgaccctggaaaagtcatttcaacttttagggctcattggtga

SEQ ID NO: 40978 - DNA, 80 bp, synthetic construct
  misc_feature 1..80: note = Artificially Synthesized Probe
  source 1..80: mol_type = other DNA
cctttgagattggaagaattgcattctgatgggcccagacgttagattaatgtccatctttctcaacaggttgtaaactt

SEQ ID NO: 40979 - DNA, 80 bp, synthetic construct
  misc_feature 1..80: note = Artificially Synthesized Probe
  source 1..80: mol_type = other DNA
acatctgtcgtcccagctacatgggaagctgagggaggaggatcacgtgacagttgagcccaagagttcaaggctgcagt

SEQ ID NO: 40980 - DNA, 80 bp, synthetic construct
  misc_feature 1..80: note = Artificially Synthesized Probe
  source 1..80: mol_type = other DNA
gaccagacacagtgcccaccatcacctagcactggccctgctaccaaacagtcattccttttagccctctcctccccacc

SEQ ID NO: 40981 - DNA, 80 bp, synthetic construct
  misc_feature 1..80: note = Artificially Synthesized Probe
  source 1..80: mol_type = other DNA
agatgacacagtgcatttcagttctgtttccaatgctgttatctgttggaaaaaggaagctttcctacccattttgtcag

SEQ ID NO: 40982 - DNA, 80 bp, synthetic construct
  misc_feature 1..80: note = Artificially Synthesized Probe
  source 1..80: mol_type = other DNA
tagaggaataggagctttctcctttaacctctgccattcaaacataaggaggagttaagaaacgataggctggcaggggg

SEQ ID NO: 40983 - DNA, 80 bp, synthetic construct
  misc_feature 1..80: note = Artificially Synthesized Probe
  source 1..80: mol_type = other DNA
ctcatgacagaggccacacataggttatattccataatgaataccttaatagaaaaatgggcagagaacaccttaataag

SEQ ID NO: 40984 - DNA, 80 bp, synthetic construct
  misc_feature 1..80: note = Artificially Synthesized Probe
  source 1..80: mol_type = other DNA
cctctcaatgacccatgctgccaatcagttttagctctcttaggtttggcatacaacacttagtatagaaggtgtgacaa

SEQ ID NO: 40985 - DNA, 80 bp, synthetic construct
  misc_feature 1..80: note = Artificially Synthesized Probe
  source 1..80: mol_type = other DNA
gcagctccaagatgatttgatgaaggtcctgaacgagctctactcggtaaatcagatgggttgcttggctctttaacaag

SEQ ID NO: 40986 - DNA, 80 bp, synthetic construct
  misc_feature 1..80: note = Artificially Synthesized Probe
  source 1..80: mol_type = other DNA
tcattctccagggtttctccatcctgtttgaaggtgatactgatttctgatgtttacttgcttatttgctgcattttttc

SEQ ID NO: 40987 - DNA, 80 bp, synthetic construct
  misc_feature 1..80: note = Artificially Synthesized Probe
  source 1..80: mol_type = other DNA
tcctatgtctcttcatatgctgtgctttaaaaaaaaaaaaataagtgaaagggcgtaagctgtgtttgagtgaggaagaa

SEQ ID NO: 40988 - DNA, 80 bp, synthetic construct
  misc_feature 1..80: note = Artificially Synthesized Probe
  source 1..80: mol_type = other DNA
agtagttgggtgagttatacttcctgaaatattaggctatagctaaggatcaaataggtttccagagtctgtaggccatt

SEQ ID NO: 40989 - DNA, 80 bp, synthetic construct
  misc_feature 1..80: note = Artificially Synthesized Probe
  source 1..80: mol_type = other DNA
acctttttttaggggactagttatccaagggttggtaattttagtacctttgaaccttgatgatccaaggagcaggaccc

SEQ ID NO: 40990 - DNA, 80 bp, synthetic construct
  misc_feature 1..80: note = Artificially Synthesized Probe
  source 1..80: mol_type = other DNA
tattgccaagaactcttttcttgttctctacatgttcccttttttgttgcatccaacttttgtttcatgatgcagtatcg

SEQ ID NO: 40991 - DNA, 80 bp, synthetic construct
  misc_feature 1..80: note = Artificially Synthesized Probe
  source 1..80: mol_type = other DNA
ccggcctgttctcagactttcaatagcttattttgtgtttagctctaccttcatcccactgctacttatttctcttcggg

SEQ ID NO: 40992 - DNA, 80 bp, synthetic construct
  misc_feature 1..80: note = Artificially Synthesized Probe
  source 1..80: mol_type = other DNA
gaaggcactaataaagcttctccagtatttacccagaagagagattcagtgtcattcagtcatttgggcaaccactttgt

SEQ ID NO: 40993 - DNA, 80 bp, synthetic construct
  misc_feature 1..80: note = Artificially Synthesized Probe
  source 1..80: mol_type = other DNA
gattccaccatttactcattgtatgaccttgggtatgatagttaatctctctgagccttatttccttatctttagaaata

SEQ ID NO: 40994 - DNA, 80 bp, synthetic construct
  misc_feature 1..80: note = Artificially Synthesized Probe
  source 1..80: mol_type = other DNA
aaagccaggaatatactaagtgctcagtaaatgataactggcattgcagttgctgtgagagggtgtttgatctggataaa

SEQ ID NO: 40995 - DNA, 80 bp, synthetic construct
  misc_feature 1..80: note = Artificially Synthesized Probe
  source 1..80: mol_type = other DNA
actgaaaatgaggccttgctctgtgccctggcaggaatactaggtattggaagaactgggcacgtgggatccaagtttct

SEQ ID NO: 40996 - DNA, 80 bp, synthetic construct
  misc_feature 1..80: note = Artificially Synthesized Probe
  source 1..80: mol_type = other DNA
gagagtttagatgacttagtcagagtcagttaacaaatgacagaggcaaaatttgcacctaggcctgatgactcaaccca

SEQ ID NO: 40997 - DNA, 80 bp, synthetic construct
  misc_feature 1..80: note = Artificially Synthesized Probe
  source 1..80: mol_type = other DNA
caccctttctcacctctccttccagtcatcaaagtgaggcatctggagccagccaatttagcatcccagtctctggggct

SEQ ID NO: 40998 - DNA, 80 bp, synthetic construct
  misc_feature 1..80: note = Artificially Synthesized Probe
  source 1..80: mol_type = other DNA
ttaaaaaaaaaaaaacgtctgctaagagcctaatttcacaggatgtggtgtgacatgccattgaaaaagaggctgcctta

SEQ ID NO: 40999 - DNA, 80 bp, synthetic construct
  misc_feature 1..80: note = Artificially Synthesized Probe
  source 1..80: mol_type = other DNA
agttttctttaccttagtagcctccagtgcttaatatatagctgagcacatagtgtgtttactgaaggaagaaaggaata

SEQ ID NO: 41000 - DNA, 80 bp, synthetic construct
  misc_feature 1..80: note = Artificially Synthesized Probe
  source 1..80: mol_type = other DNA
atggatgaatgaagaacagggcattgtcctcatgcatagctggagtgttgtaagtgccgtgtacatgtatggaaggtctg

SEQ ID NO: 41001 - DNA, 80 bp, synthetic construct
  misc_feature 1..80: note = Artificially Synthesized Probe
  source 1..80: mol_type = other DNA
gtcagtggatttggagctatattagtatttttttaaagtgtctacatggtaccaaatatctgtaaatatattgcctgtta

SEQ ID NO: 41002 - DNA, 80 bp, synthetic construct
  misc_feature 1..80: note = Artificially Synthesized Probe
  source 1..80: mol_type = other DNA
cacactcatacactctgtgggccgtgttacttctgttcattagacttataggcatagagctcatcaacagggtctacata

SEQ ID NO: 41003 - DNA, 80 bp, synthetic construct
  misc_feature 1..80: note = Artificially Synthesized Probe
  source 1..80: mol_type = other DNA
ctactgcttgaaagccactagcctggccaaatctgttcattttactatggaagaaacaggtccagagaaggggagtggct

SEQ ID NO: 41004 - DNA, 80 bp, synthetic construct
  misc_feature 1..80: note = Artificially Synthesized Probe
  source 1..80: mol_type = other DNA
acttaggctaccatgcaagtctgaaccgggctctacgcaccttcctctctgctgagttaaacctggaacagtcgaagcat

SEQ ID NO: 41005 - DNA, 80 bp, synthetic construct
  misc_feature 1..80: note = Artificially Synthesized Probe
  source 1..80: mol_type = other DNA
ttaactccattctcagacaggccattctcccatggaggcaaggtgactgcatttccagccttccctggtaggttgaaatc

SEQ ID NO: 41006 - DNA, 80 bp, synthetic construct
  misc_feature 1..80: note = Artificially Synthesized Probe
  source 1..80: mol_type = other DNA
ttttccctccatgattcctctctgctaggtctgggttactttaaaaatcaatagctcactcttctgccagggccctccct

SEQ ID NO: 41007 - DNA, 80 bp, synthetic construct
  misc_feature 1..80: note = Artificially Synthesized Probe
  source 1..80: mol_type = other DNA
gggagacagtggaacagccattccttcacacaggggaaagctaattggcaataatccttgcgggaaggtcagactcctct

SEQ ID NO: 41008 - DNA, 80 bp, synthetic construct
  misc_feature 1..80: note = Artificially Synthesized Probe
  source 1..80: mol_type = other DNA
ctacatcctgcccttgaactccaggaagttgctcttgcattgccaaaggttgtgctctattttgagcttttgcgaaatgc

SEQ ID NO: 41009 - DNA, 80 bp, synthetic construct
  misc_feature 1..80: note = Artificially Synthesized Probe
  source 1..80: mol_type = other DNA
ggaggccaccctgcaaaccatccaggacattgtgactgtcgaggactttgatgtgtctgactgcttccagtacagcaact

SEQ ID NO: 41010 - DNA, 80 bp, synthetic construct
  misc_feature 1..80: note = Artificially Synthesized Probe
  source 1..80: mol_type = other DNA
aaatatagccagtgaatatgcatactgattctgaatgaaaggaattaacttttcagtcaagaaacagtctgcatgcagta

SEQ ID NO: 41011 - DNA, 80 bp, synthetic construct
  misc_feature 1..80: note = Artificially Synthesized Probe
  source 1..80: mol_type = other DNA
tagtgcatgaatggcagccaggatgagtggaattggagaagcatcacacacacagtgacttttgtgtttgatcttgaaga

SEQ ID NO: 41012 - DNA, 80 bp, synthetic construct
  misc_feature 1..80: note = Artificially Synthesized Probe
  source 1..80: mol_type = other DNA
ctgcctgagttcatcatttttgtgactggtacttgaagtgcatcagatgattaatttcatgataagagggctttttgggg

SEQ ID NO: 41013 - DNA, 80 bp, synthetic construct
  misc_feature 1..80: note = Artificially Synthesized Probe
  source 1..80: mol_type = other DNA
aatcaatcaatcagtaaatccagagaggatgggtagctcacaaaagctggacccaccactctggttacagggtctctggc

SEQ ID NO: 41014 - DNA, 80 bp, synthetic construct
  misc_feature 1..80: note = Artificially Synthesized Probe
  source 1..80: mol_type = other DNA
tgtatgaatgtgccatcatttgtttaacaaattccctcctcataggcagtgatgctcgctgtttagccaaggtttaccaa

SEQ ID NO: 41015 - DNA, 80 bp, synthetic construct
  misc_feature 1..80: note = Artificially Synthesized Probe
  source 1..80: mol_type = other DNA
gggttcacgcagattaaatccaaggcataagcaacatccagtgagttttatacccccatggtaagagtgtatttaaaggg

SEQ ID NO: 41016 - DNA, 80 bp, synthetic construct
  misc_feature 1..80: note = Artificially Synthesized Probe
  source 1..80: mol_type = other DNA
gctccttcattgaggaaaaccccaggtagccactttgattttgggtgtttggtgaaggaaggaaaaagaactacctaata

SEQ ID NO: 41017 - DNA, 80 bp, synthetic construct
  misc_feature 1..80: note = Artificially Synthesized Probe
  source 1..80: mol_type = other DNA
tgcatttattgagtatctgctatctgctaggcgtggtagtatcagggatgcaaaggataatgaatgacatggtctctgac

SEQ ID NO: 41018 - DNA, 80 bp, synthetic construct
  misc_feature 1..80: note = Artificially Synthesized Probe
  source 1..80: mol_type = other DNA
tccacctatctacctcagtgatctcatatatcaccagtaattcacggatcacactttgggaaacctggccatttgacttc

SEQ ID NO: 41019 - DNA, 80 bp, synthetic construct
  misc_feature 1..80: note = Artificially Synthesized Probe
  source 1..80: mol_type = other DNA
agagagaacaaatctgaaagtgcagcacagcaatcatattttgactgtgagagcaggtgggatcacatttccaaaacttc

SEQ ID NO: 41020 - DNA, 80 bp, synthetic construct
  misc_feature 1..80: note = Artificially Synthesized Probe
  source 1..80: mol_type = other DNA
cttgttgtatgaatgcctttcttttcttggcttgttggatgtggaagcacacaccccaaatgactgcttgagtaatgggg

SEQ ID NO: 41021 - DNA, 80 bp, synthetic construct
  misc_feature 1..80: note = Artificially Synthesized Probe
  source 1..80: mol_type = other DNA
acttcttattataccagaacctcctacccaccttttttgccctgtccttttcctgccttggatgatttcccagatgatta

SEQ ID NO: 41022 - DNA, 80 bp, synthetic construct
  misc_feature 1..80: note = Artificially Synthesized Probe
  source 1..80: mol_type = other DNA
gaatgggtttactcacacatttatgcaccaaatgtgctactatggagggatgaaggctgatcattagtgctgcaaattgt

SEQ ID NO: 41023 - DNA, 80 bp, synthetic construct
  misc_feature 1..80: note = Artificially Synthesized Probe
  source 1..80: mol_type = other DNA
caggagaatttactatgaatctaaagctagaatatccatatcttctctgttctctcccgcaaacaactcctcttgttctc

SEQ ID NO: 41024 - DNA, 80 bp, synthetic construct
  misc_feature 1..80: note = Artificially Synthesized Probe
  source 1..80: mol_type = other DNA
aaggggttatcatttgctgaaattgtcccagagaccccctaacgccactgaattgcaagtaacataaacattcaactgta

SEQ ID NO: 41025 - DNA, 80 bp, synthetic construct
  misc_feature 1..80: note = Artificially Synthesized Probe
  source 1..80: mol_type = other DNA
ctgaggctaaacacagattggaaaacattgacctagaggattctcaaggttgtttccaaactagatgttctacactctaa

SEQ ID NO: 41026 - DNA, 80 bp, synthetic construct
  misc_feature 1..80: note = Artificially Synthesized Probe
  source 1..80: mol_type = other DNA
gtgtgcaggacagacacctctgacttcatgcctgcatttggaatgtatcatttagtcatagtatgtttaatatggtggca

SEQ ID NO: 41027 - DNA, 80 bp, synthetic construct
  misc_feature 1..80: note = Artificially Synthesized Probe
  source 1..80: mol_type = other DNA
cattttccctttaacactaagaaaagaaatgagcttgaagtttgttcttttcagttccttggctgaaaccaggcatcttg

SEQ ID NO: 41028 - DNA, 80 bp, synthetic construct
  misc_feature 1..80: note = Artificially Synthesized Probe
  source 1..80: mol_type = other DNA
actagacattcatacttgaaagttgtgatagcaccttctaccttcagcatcagtctcaccgtcccccatcacattttgat

SEQ ID NO: 41029 - DNA, 80 bp, synthetic construct
  misc_feature 1..80: note = Artificially Synthesized Probe
  source 1..80: mol_type = other DNA
cattggaggagggaagaagacagagagaaaggaagagacgaatagtacataaaaatgtagacactgctcagtcagtgctc

SEQ ID NO: 41030 - DNA, 80 bp, synthetic construct
  misc_feature 1..80: note = Artificially Synthesized Probe
  source 1..80: mol_type = other DNA
acggacatgcaggttaatatttttcttgccctgtttcctgccaaccctttgtacttgcctttaactaccactgatattcc

SEQ ID NO: 41031 - DNA, 80 bp, synthetic construct
  misc_feature 1..80: note = Artificially Synthesized Probe
  source 1..80: mol_type = other DNA
cttcttgacccctcactccccgctacccttcccagtctccagaaaccgtcattctactctctgccttcatgcaatcaaat

SEQ ID NO: 41032 - DNA, 80 bp, synthetic construct
  misc_feature 1..80: note = Artificially Synthesized Probe
  source 1..80: mol_type = other DNA
atctttgcccagaccagtacccttgaagcattgccccaatggttttttttttagtcatttcatagttcaggtcttacatt

SEQ ID NO: 41033 - DNA, 80 bp, synthetic construct
  misc_feature 1..80: note = Artificially Synthesized Probe
  source 1..80: mol_type = other DNA
ccctctccctgatctctttcttccacacagctgaattattgtacattcagctgcattataaaaccctactggtttaggcc

SEQ ID NO: 41034 - DNA, 80 bp, synthetic construct
  misc_feature 1..80: note = Artificially Synthesized Probe
  source 1..80: mol_type = other DNA
ggttttgccacttgccagctgtgtgaccatagcagctacttaacctcactaagccttcatttcttcatttttcttttctt

SEQ ID NO: 41035 - DNA, 80 bp, synthetic construct
  misc_feature 1..80: note = Artificially Synthesized Probe
  source 1..80: mol_type = other DNA
actggaggcacaggcagtattcctggcatgcaaggccgtgtaagagagtaatgagaggtctttgaaagagtttaaataat

SEQ ID NO: 41036 - DNA, 80 bp, synthetic construct
  misc_feature 1..80: note = Artificially Synthesized Probe
  source 1..80: mol_type = other DNA
tgcaagtgtgggtatctcccactgtacagcctgaccattttgtcactttctgtaccagactagtttgaaaacaactcctt

SEQ ID NO: 41037 - DNA, 80 bp, synthetic construct
  misc_feature 1..80: note = Artificially Synthesized Probe
  source 1..80: mol_type = other DNA
gcattgtatatcagtattgaacagtcaacaaatttatcaagtccctgatcaatgctgggtaccatgcattgccatgcagg

SEQ ID NO: 41038 - DNA, 80 bp, synthetic construct
  misc_feature 1..80: note = Artificially Synthesized Probe
  source 1..80: mol_type = other DNA
agatgggaagccactggagaattttgaacagggagtcatctttttaaaggatccctgatgctctatggagctaagactgt

SEQ ID NO: 41039 - DNA, 80 bp, synthetic construct
  misc_feature 1..80: note = Artificially Synthesized Probe
  source 1..80: mol_type = other DNA
atctaggaactaatatttaattggttacttataggggatggatggaaaaaacgtgaaaagaatggggcaatgggaaatgg

SEQ ID NO: 41040 - DNA, 80 bp, synthetic construct
  misc_feature 1..80: note = Artificially Synthesized Probe
  source 1..80: mol_type = other DNA
tatcctcaaatcccatgggaggtagacattatagtccccattatatagatgagaaagctcagtggtgggtgagggtgatt

SEQ ID NO: 41041 - DNA, 80 bp, synthetic construct
  misc_feature 1..80: note = Artificially Synthesized Probe
  source 1..80: mol_type = other DNA
tttaacattgcctgccactctgtgaggaatattctggagattcctttataggagcagacaacttaaggcctattacaagc

SEQ ID NO: 41042 - DNA, 80 bp, synthetic construct
  misc_feature 1..80: note = Artificially Synthesized Probe
  source 1..80: mol_type = other DNA
taaggctgactatcactcatcaatcccctcatccagagaatgagattgttgccaacctttaccttgttgtgacattatta

SEQ ID NO: 41043 - DNA, 80 bp, synthetic construct
  misc_feature 1..80: note = Artificially Synthesized Probe
  source 1..80: mol_type = other DNA
tcctgctgcctcagcttcctgagtacatttttctattcttgaccctagatgatttaaaaaagtaccaatgggtcacttct

SEQ ID NO: 41044 - DNA, 80 bp, synthetic construct
  misc_feature 1..80: note = Artificially Synthesized Probe
  source 1..80: mol_type = other DNA
tgaggttggccctatcattaaatctaattacatctgatatgaaattttccatagggagctctggcatgattgttctgtaa

SEQ ID NO: 41045 - DNA, 80 bp, synthetic construct
  misc_feature 1..80: note = Artificially Synthesized Probe
  source 1..80: mol_type = other DNA
gtttagcttgtggtactggaacaccctctcatttgtttgccagggaaaacaatcaatggaaacttggattaatacaggtc

SEQ ID NO: 41046 - DNA, 80 bp, synthetic construct
  misc_feature 1..80: note = Artificially Synthesized Probe
  source 1..80: mol_type = other DNA
tcttcctaatccagtacttcccatctctttttcatataaaggcactcatagaaaatggcagtgtttacatggcacactgt

SEQ ID NO: 41047 - DNA, 80 bp, synthetic construct
  misc_feature 1..80: note = Artificially Synthesized Probe
  source 1..80: mol_type = other DNA
tcaggctttggcttgggcactggaagttcctctatggacctatgcctattcatccatcccaacaaaatatttattgagca

SEQ ID NO: 41048 - DNA, 80 bp, synthetic construct
  misc_feature 1..80: note = Artificially Synthesized Probe
  source 1..80: mol_type = other DNA
acagggacatagggtggtcatttatggagttggagaagacaaggtgtggagaaaggaatcaagacaatgtgttgatgtgg

SEQ ID NO: 41049 - DNA, 80 bp, synthetic construct
  misc_feature 1..80: note = Artificially Synthesized Probe
  source 1..80: mol_type = other DNA
tctgcttaaaaggaatacaactttagagaccatttcataagtgtcagcttgcttccaagtttgtggtcaacctggcctta

SEQ ID NO: 41050 - DNA, 80 bp, synthetic construct
  misc_feature 1..80: note = Artificially Synthesized Probe
  source 1..80: mol_type = other DNA
aactgtagaaatacagtagaactctttgaggacatggcatgagtgactacaagtcgacaccaaaaattttaaagcagaga

SEQ ID NO: 41051 - DNA, 80 bp, synthetic construct
  misc_feature 1..80: note = Artificially Synthesized Probe
  source 1..80: mol_type = other DNA
aagaaccactgcttcagcccctaaacttagatgttcccactgtatattggaaaagaaaaatggattttcatctgtatttt

SEQ ID NO: 41052 - DNA, 80 bp, synthetic construct
  misc_feature 1..80: note = Artificially Synthesized Probe
  source 1..80: mol_type = other DNA
ctgcatttgattccaggctctagagaacagtgattctcaactcttttctcccatcacgtccataataccactcttcaagt

SEQ ID NO: 41053 - DNA, 80 bp, synthetic construct
  misc_feature 1..80: note = Artificially Synthesized Probe
  source 1..80: mol_type = other DNA
aaagagagaagggatcagagctgcaagcaagtacctctagtttgcatttcctgagctcctgaatgaccattctggttgtc

SEQ ID NO: 41054 - DNA, 80 bp, synthetic construct
  misc_feature 1..80: note = Artificially Synthesized Probe
  source 1..80: mol_type = other DNA
caaatcactatttctattttatggatgaagtagctgcaacccagaaaggccagtgacagtattttaggccactctagtga

SEQ ID NO: 41055 - DNA, 80 bp, synthetic construct
  misc_feature 1..80: note = Artificially Synthesized Probe
  source 1..80: mol_type = other DNA
ctacccacctgtttcttgtgcactcaacatttattagcagcctctggaaaaaccacaagattagtcagggaacattacta

SEQ ID NO: 41056 - DNA, 80 bp, synthetic construct
  misc_feature 1..80: note = Artificially Synthesized Probe
  source 1..80: mol_type = other DNA
gcgctgttttttaacaagccttccatggctcgctgaagtttagaactgttgccttactggctggctgtgtaaataaactt

SEQ ID NO: 41057 - DNA, 80 bp, synthetic construct
  misc_feature 1..80: note = Artificially Synthesized Probe
  source 1..80: mol_type = other DNA
ttaaatttcatgaattatttcaagaacttgacccagcttctctcccctgccctccaacccgtaattggatcctgccctgt

SEQ ID NO: 41058 - DNA, 80 bp, synthetic construct
  misc_feature 1..80: note = Artificially Synthesized Probe
  source 1..80: mol_type = other DNA
ttggtcccttatcatagcctagactcctgccagacagctggagaacaaagtgaaggaaagtacatttgaaaaacagtaag

SEQ ID NO: 41059 - DNA, 80 bp, synthetic construct
  misc_feature 1..80: note = Artificially Synthesized Probe
  source 1..80: mol_type = other DNA
aaaatgagtagtgggttagagcctacctcgtggccagctctgctagaggctttatatatgttatctcttaatctgtagtg

SEQ ID NO: 41060 - DNA, 80 bp, synthetic construct
  misc_feature 1..80: note = Artificially Synthesized Probe
  source 1..80: mol_type = other DNA
atgcttaaaaatatagtatggcaagtttgatgatagacgtcaaggcatgaagatctttggaaacaccaaagaagttactg

SEQ ID NO: 41061 - DNA, 80 bp, synthetic construct
  misc_feature 1..80: note = Artificially Synthesized Probe
  source 1..80: mol_type = other DNA
gtctgcaggtcccaagaacatgtgtttacttcttttccacccttctcagaatgtgagcccatcgaggccattgccaagtt

SEQ ID NO: 41062 - DNA, 80 bp, synthetic construct
  misc_feature 1..80: note = Artificially Synthesized Probe
  source 1..80: mol_type = other DNA
gtccccagctcccctcccttggatacgatgctgtcagtgtttttagtccttcccttaatattattttttaaaggttgata

SEQ ID NO: 41063 - DNA, 80 bp, synthetic construct
  misc_feature 1..80: note = Artificially Synthesized Probe
  source 1..80: mol_type = other DNA
atgtagccgatatttatcttgcaaacatcaacaagtaagctctgcttttcattttctgctcccctgaatgacttgcaaca

SEQ ID NO: 41064 - DNA, 80 bp, synthetic construct
  misc_feature 1..80: note = Artificially Synthesized Probe
  source 1..80: mol_type = other DNA
gacactgagactggaaggagaataaaggatgcttgttgtttttaaactataccaggtttcccagatctcttggctttttt

SEQ ID NO: 41065 - DNA, 80 bp, synthetic construct
  misc_feature 1..80: note = Artificially Synthesized Probe
  source 1..80: mol_type = other DNA
ggtactcacgcttcactcagatcccccaccagattgagctccttgaacccaggaactatatcttccttttctttacatcc

SEQ ID NO: 41066 - DNA, 80 bp, synthetic construct
  misc_feature 1..80: note = Artificially Synthesized Probe
  source 1..80: mol_type = other DNA
ttcagatctgattccaagacaaaatgaaattatccagcagcaggcaacacccatgtaactgggattctgccaagccattt

SEQ ID NO: 41067 - DNA, 80 bp, synthetic construct
  misc_feature 1..80: note = Artificially Synthesized Probe
  source 1..80: mol_type = other DNA
gatcacactgccctttctgtttgtgattgaaggcaaaggaagcgtccagaatctgggagcatccggaaaacttttcggag

SEQ ID NO: 41068 - DNA, 80 bp, synthetic construct
  misc_feature 1..80: note = Artificially Synthesized Probe
  source 1..80: mol_type = other DNA
gggtagatgatcaattaagaacctgcacctggttttaaagacctaaaaaatactctggctgcagagagctctggtaacca

SEQ ID NO: 41069 - DNA, 80 bp, synthetic construct
  misc_feature 1..80: note = Artificially Synthesized Probe
  source 1..80: mol_type = other DNA
tgaaactttcctcagcccctgaggaggaaggactaaccctcttcacctttggccttgaagtccaagagaataaagatcat

SEQ ID NO: 41070 - DNA, 80 bp, synthetic construct
  misc_feature 1..80: note = Artificially Synthesized Probe
  source 1..80: mol_type = other DNA
cagtctactgacaagtcttgtactgtctgagggataataatttaattgttctagacaaggggactatagggactgactgt

SEQ ID NO: 41071 - DNA, 80 bp, synthetic construct
  misc_feature 1..80: note = Artificially Synthesized Probe
  source 1..80: mol_type = other DNA
gtttccatcacaaactttgttctgtctgggccagagaacctagcctttgaaatctctccatcatatgaaacataacggga

SEQ ID NO: 41072 - DNA, 80 bp, synthetic construct
  misc_feature 1..80: note = Artificially Synthesized Probe
  source 1..80: mol_type = other DNA
caggctcatgggtctcagacagcaacttgagttaaagctgaaactcatccttcttctctgtgttttctggtttaaaagct

SEQ ID NO: 41073 - DNA, 80 bp, synthetic construct
  misc_feature 1..80: note = Artificially Synthesized Probe
  source 1..80: mol_type = other DNA
ctactagcatcccaatttagaaaatagaggagtttgtagccagcagcctgtaaactggaaacactggtctcagccaacct

SEQ ID NO: 41074 - DNA, 80 bp, synthetic construct
  misc_feature 1..80: note = Artificially Synthesized Probe
  source 1..80: mol_type = other DNA
tgttgtcgtggacaccaaggacactgctagtctgggactcgggttgacagagacacccctcagcctgggctcctctggac

SEQ ID NO: 41075 - DNA, 80 bp, synthetic construct
  misc_feature 1..80: note = Artificially Synthesized Probe
  source 1..80: mol_type = other DNA
aaaactagatacgatatagttggaatcgtgtggaaggaagtacatcaggaggcatataagtccatttgggacctgtaatc

SEQ ID NO: 41076 - DNA, 80 bp, synthetic construct
  misc_feature 1..80: note = Artificially Synthesized Probe
  source 1..80: mol_type = other DNA
cgagttccagaaggggataatacagctgactgcagaagagcaataatcaaatagtagaagaaaatttactacgttggtgg

SEQ ID NO: 41077 - DNA, 80 bp, synthetic construct
  misc_feature 1..80: note = Artificially Synthesized Probe
  source 1..80: mol_type = other DNA
gaggtggatgcagccacgaatgcaaggccacacaaggtggatggaagagttgtggaaccaaagagagctgtctcaagaga

SEQ ID NO: 41078 - DNA, 80 bp, synthetic construct
  misc_feature 1..80: note = Artificially Synthesized Probe
  source 1..80: mol_type = other DNA
ccagtagcagcagtagctatggcagtggcggaagattttaattaggcaacaaagcttagcatgagaggagagccagcgaa

SEQ ID NO: 41079 - DNA, 80 bp, synthetic construct
  misc_feature 1..80: note = Artificially Synthesized Probe
  source 1..80: mol_type = other DNA
catttctggcaaaaaataatttttaaaaaagggacatcctcttggatgtttcataaacaattcaaacttagctaatcaaa

SEQ ID NO: 41080 - DNA, 80 bp, synthetic construct
  misc_feature 1..80: note = Artificially Synthesized Probe
  source 1..80: mol_type = other DNA
tcttctgttcctataatgaacatgtatggaatcatctccccagcattctcccctttattttcacttggaaaatgcccctt

SEQ ID NO: 41081 - DNA, 80 bp, synthetic construct
  misc_feature 1..80: note = Artificially Synthesized Probe
  source 1..80: mol_type = other DNA
tgagccactgcatcctgccaagggggcataattgacatttattcataaaaatattgagacttcaggcctggcatggtttt

SEQ ID NO: 41082 - DNA, 80 bp, synthetic construct
  misc_feature 1..80: note = Artificially Synthesized Probe
  source 1..80: mol_type = other DNA
cacgcccagccaactattttttgttctcttgtttttttgtttttaagagacagggtcttgctcttgcagtggtacaataa

SEQ ID NO: 41083 - DNA, 80 bp, synthetic construct
  misc_feature 1..80: note = Artificially Synthesized Probe
  source 1..80: mol_type = other DNA
tgggaggctgaggcgggaagatcacttgagctcaagagtttgaagctgcagggagccataattgagccactgtacaccag

SEQ ID NO: 41084 - DNA, 80 bp, synthetic construct
  misc_feature 1..80: note = Artificially Synthesized Probe
  source 1..80: mol_type = other DNA
ccgggactaccagtgtgtgtcactgcccccagctaaattattgtatttttgtaaaagaagtactattaagtcattttaaa

SEQ ID NO: 41085 - DNA, 80 bp, synthetic construct
  misc_feature 1..80: note = Artificially Synthesized Probe
  source 1..80: mol_type = other DNA
tatagattcttttgtaataaggaaaaatagagaaacttcatatttaactgctacaatagacacagtggaaagtggaagct

SEQ ID NO: 41086 - DNA, 80 bp, synthetic construct
  misc_feature 1..80: note = Artificially Synthesized Probe
  source 1..80: mol_type = other DNA
ataatataaaaattgaatccaattcattcaagtagcttcacaacgatgattaaaagaaaggtggagctgggcacggtggc

SEQ ID NO: 41087 - DNA, 80 bp, synthetic construct
  misc_feature 1..80: note = Artificially Synthesized Probe
  source 1..80: mol_type = other DNA
atgacagaccacctatatgatggtggtccttggtcccataaggttataccacacatttactgtacgatttctgtgtttag

SEQ ID NO: 41088 - DNA, 80 bp, synthetic construct
  misc_feature 1..80: note = Artificially Synthesized Probe
  source 1..80: mol_type = other DNA
gtagagacagggtttcaccgtgttagccaggatgttcttgatctgaccttgtgatccgcccgcctctgcctcccaaagtg

SEQ ID NO: 41089 - DNA, 80 bp, synthetic construct
  misc_feature 1..80: note = Artificially Synthesized Probe
  source 1..80: mol_type = other DNA
tgttttaatcaaatatgtgaattcaccatccctctttttcagattcgtggtgctctcaatgccgtcagaagcttggttcc

SEQ ID NO: 41090 - DNA, 80 bp, synthetic construct
  misc_feature 1..80: note = Artificially Synthesized Probe
  source 1..80: mol_type = other DNA
ccacataagtttctattctaaattctcctgactttttcctctcgttttcctctcccaggaattcctgcttatattgtggt

SEQ ID NO: 41091 - DNA, 80 bp, synthetic construct
  misc_feature 1..80: note = Artificially Synthesized Probe
  source 1..80: mol_type = other DNA
atcaattctcacctatattcaattcagtagccaaactggtctctctgcatccacccttgccacactacaggcttttttga

SEQ ID NO: 41092 - DNA, 80 bp, synthetic construct
  misc_feature 1..80: note = Artificially Synthesized Probe
  source 1..80: mol_type = other DNA
gtagtttcttctcagctccctgcagcctccgcttcctgggttcaagagattctcatgcctcagccaccagagtagctggg

SEQ ID NO: 41093 - DNA, 80 bp, synthetic construct
  misc_feature 1..80: note = Artificially Synthesized Probe
  source 1..80: mol_type = other DNA
actttcagtccagagaaaatgttgcaaaaagagttacagaagaaacagaaggcatcatggtacatcccaaccaggagcct

SEQ ID NO: 41094 - DNA, 80 bp, synthetic construct
  misc_feature 1..80: note = Artificially Synthesized Probe
  source 1..80: mol_type = other DNA
cgcacccagccaactctcttcttaatccatgacaattttacagcacaaaagcagttacaagtgacaccatcatagtcttt

SEQ ID NO: 41095 - DNA, 80 bp, synthetic construct
  misc_feature 1..80: note = Artificially Synthesized Probe
  source 1..80: mol_type = other DNA
taagatgtcttaatattcctcttcccaggctctgaaacctagtgtgaaggtatatgctgctgaaccctcaaatgcagatg

SEQ ID NO: 41096 - DNA, 80 bp, synthetic construct
  misc_feature 1..80: note = Artificially Synthesized Probe
  source 1..80: mol_type = other DNA
ctggtacatatggatcataagtccatttggggaagactcgtttatacaggttcatcagtactgtgtcttgagattttagc

SEQ ID NO: 41097 - DNA, 80 bp, synthetic construct
  misc_feature 1..80: note = Artificially Synthesized Probe
  source 1..80: mol_type = other DNA
cctagcccaatctgaggctaagattggtaaactgtaagcccacacttaaccttgtcaataggttcttgaaaacttgtact

SEQ ID NO: 41098 - DNA, 80 bp, synthetic construct
  misc_feature 1..80: note = Artificially Synthesized Probe
  source 1..80: mol_type = other DNA
agggcaagagagcggagtgcatggtgacagaagttggggatggttccagtgaggctgagccctttctgaaggcagtgatt

SEQ ID NO: 41099 - DNA, 80 bp, synthetic construct
  misc_feature 1..80: note = Artificially Synthesized Probe
  source 1..80: mol_type = other DNA
cctcgtgctgggttagcctggaaggagttggcagggtgcaggctagacctccacccagtcatggaggacttggtgctgag

SEQ ID NO: 41100 - DNA, 80 bp, synthetic construct
  misc_feature 1..80: note = Artificially Synthesized Probe
  source 1..80: mol_type = other DNA
gaggcaggaggatcacttgagcacaggtcgaggctgcagtgagctgtgatcacagcaccacttcgatccagctcgggcaa

SEQ ID NO: 41101 - DNA, 80 bp, synthetic construct
  misc_feature 1..80: note = Artificially Synthesized Probe
  source 1..80: mol_type = other DNA
ccagccatgctctccccctgcccaccccacagagccctctctggaccttgtgccagcaccctgctccagtgaatctttca

SEQ ID NO: 41102 - DNA, 80 bp, synthetic construct
  misc_feature 1..80: note = Artificially Synthesized Probe
  source 1..80: mol_type = other DNA
acccctgctcaggccgaggtcccccagggaggggcttgtccctggtctggatcctaggggacactttgattctctgctgg

SEQ ID NO: 41103 - DNA, 80 bp, synthetic construct
  misc_feature 1..80: note = Artificially Synthesized Probe
  source 1..80: mol_type = other DNA
tttacagatgtctgtcattgctgtgggggtgacggtccctgcgctggcctggagagaggttcggggccaacgggcagcgg

SEQ ID NO: 41104 - DNA, 80 bp, synthetic construct
  misc_feature 1..80: note = Artificially Synthesized Probe
  source 1..80: mol_type = other DNA
tgctgcgcttcgccaagatgaagaccgtcaccaacatctacattctcaacctggcagtggccgacgtcctgtacatgctg

SEQ ID NO: 41105 - DNA, 80 bp, synthetic construct
  misc_feature 1..80: note = Artificially Synthesized Probe
  source 1..80: mol_type = other DNA
ctccgccatgccgtgcaagtgctcagggccgcctcaccctccatctggccccagcccatgccggccttccctctggggag

SEQ ID NO: 41106 - DNA, 80 bp, synthetic construct
  misc_feature 1..80: note = Artificially Synthesized Probe
  source 1..80: mol_type = other DNA
ccagaacgtgggcccagagagccttgctggggtctctggggcaccttggccttgctctgaggctggaaggagaaggacca

SEQ ID NO: 41107 - DNA, 80 bp, synthetic construct
  misc_feature 1..80: note = Artificially Synthesized Probe
  source 1..80: mol_type = other DNA
ctaggttgttcagacaactcaatggacagacagtgcctaatagaatttaaccactacgaatatttccaaatgaaattctt

SEQ ID NO: 41108 - DNA, 80 bp, synthetic construct
  misc_feature 1..80: note = Artificially Synthesized Probe
  source 1..80: mol_type = other DNA
tggcgtcactgaagtggatgttcaatgagaaaataataaggatgaatgctgcagttggagttcaagagaggaggcatttt

SEQ ID NO: 41109 - DNA, 80 bp, synthetic construct
  misc_feature 1..80: note = Artificially Synthesized Probe
  source 1..80: mol_type = other DNA
caagcaatcctccccagtcagcctcctaagtagctgggactacaggtatgcaccaccatgcctggccaatttttttactt

SEQ ID NO: 41110 - DNA, 80 bp, synthetic construct
  misc_feature 1..80: note = Artificially Synthesized Probe
  source 1..80: mol_type = other DNA
ggctctctttgtctctctgtgtctcagtttatttctgtctctttctgtgtctctttgtctgtgtctctgtgtccctctgt

SEQ ID NO: 41111 - DNA, 80 bp, synthetic construct
  misc_feature 1..80: note = Artificially Synthesized Probe
  source 1..80: mol_type = other DNA
aacctgtctgacgggtttgagattccacatgggacaggctttctcacctccgcactgacgctaggacagctgggttgaag

SEQ ID NO: 41112 - DNA, 80 bp, synthetic construct
  misc_feature 1..80: note = Artificially Synthesized Probe
  source 1..80: mol_type = other DNA
atctcggctcacagaacccttgaactccttgcctggagcaatcctccctcctcagcctccagagtagctgggatgacagg

SEQ ID NO: 41113 - DNA, 80 bp, synthetic construct
  misc_feature 1..80: note = Artificially Synthesized Probe
  source 1..80: mol_type = other DNA
acagagaacagacacaccctgagggggtccccaggccacgaagaagccggatgctggagcagcctaggacacagacacct

SEQ ID NO: 41114 - DNA, 80 bp, synthetic construct
  misc_feature 1..80: note = Artificially Synthesized Probe
  source 1..80: mol_type = other DNA
gtgctgggatgacaggcgtgagccacagtgctcagcccaggccagcatctacagggcacaagtgggaatctgggttctag

SEQ ID NO: 41115 - DNA, 80 bp, synthetic construct
  misc_feature 1..80: note = Artificially Synthesized Probe
  source 1..80: mol_type = other DNA
gaattttttgctcatggaactgaaagatttagggatagagctaactcaaggccacccctctcagcaccgttgatgttctg

SEQ ID NO: 41116 - DNA, 80 bp, synthetic construct
  misc_feature 1..80: note = Artificially Synthesized Probe
  source 1..80: mol_type = other DNA
tgcccggtctctcttattttttttttcttcaacagactttgcctttatggggaaaagatgatgccataagccccaaatct

SEQ ID NO: 41117 - DNA, 80 bp, synthetic construct
  misc_feature 1..80: note = Artificially Synthesized Probe
  source 1..80: mol_type = other DNA
ccgtctctactaaaaatacaaaaaattagccaggcgtggtggtgggcgcctatagtcccagctactcaggaggctgaggc

SEQ ID NO: 41118 - DNA, 80 bp, synthetic construct
  misc_feature 1..80: note = Artificially Synthesized Probe
  source 1..80: mol_type = other DNA
tcccaagtacctggaactacaggcgcccaccatcacacccagctagttttttttttgttttgttttttgttttttttgag

SEQ ID NO: 41119 - DNA, 80 bp, synthetic construct
  misc_feature 1..80: note = Artificially Synthesized Probe
  source 1..80: mol_type = other DNA
agtaactgggattacaggcacaagccatcatgcccaggtaatagttttaaggttttttttagtagagatggggatctcac

SEQ ID NO: 41120 - DNA, 80 bp, synthetic construct
  misc_feature 1..80: note = Artificially Synthesized Probe
  source 1..80: mol_type = other DNA
tcagcctggcctacaaaaaaatatttaaaaatttgctgggtgtgggaggctgaagtcagaggatcacctgagcccaggga

SEQ ID NO: 41121 - DNA, 80 bp, synthetic construct
  misc_feature 1..80: note = Artificially Synthesized Probe
  source 1..80: mol_type = other DNA
aaaaaaaaaaaaaaaggacattattagagttggaaggaaatgaccataggcccagggttccacggtccagaccaccacac

SEQ ID NO: 41122 - DNA, 80 bp, synthetic construct
  misc_feature 1..80: note = Artificially Synthesized Probe
  source 1..80: mol_type = other DNA
atgaaacccagttgtttttcctgttaagtttcccacagtctagaatttgctgatttttttctgtgataatttaagttttt

SEQ ID NO: 41123 - DNA, 80 bp, synthetic construct
  misc_feature 1..80: note = Artificially Synthesized Probe
  source 1..80: mol_type = other DNA
cccaggccctcatctggaacctagggctctgtggaaactgtggcactcacatgtaaacctggcttccacctgaaacccca

SEQ ID NO: 41124 - DNA, 80 bp, synthetic construct
  misc_feature 1..80: note = Artificially Synthesized Probe
  source 1..80: mol_type = other DNA
tttgtatttttaatagagacagggtttcaccgtgttagccaggatggtctcgatctcctgaccccgtgatctgcccccct

SEQ ID NO: 41125 - DNA, 80 bp, synthetic construct
  misc_feature 1..80: note = Artificially Synthesized Probe
  source 1..80: mol_type = other DNA
caaggccccgacttttagaccactagtggaggaggtctgggacacgggtctgcggccagagagaggccaggagggaggac

SEQ ID NO: 41126 - DNA, 80 bp, synthetic construct
  misc_feature 1..80: note = Artificially Synthesized Probe
  source 1..80: mol_type = other DNA
agaaaaaaaaaaggaaaacccagttccccacctagaacccaggccccgacctgaaacctgggcccctccacttgtaacca

SEQ ID NO: 41127 - DNA, 80 bp, synthetic construct
  misc_feature 1..80: note = Artificially Synthesized Probe
  source 1..80: mol_type = other DNA
tctgtgtgtttggggggagtcatgggtgggtaggagagatgacaggtgacagcctggaggaagagatggagggaggcttg

SEQ ID NO: 41128 - DNA, 80 bp, synthetic construct
  misc_feature 1..80: note = Artificially Synthesized Probe
  source 1..80: mol_type = other DNA
ataaatagtcataagcatcactttttcctattaccatagcattaccatttgtcacggtttacccacccgaggtcactctg

SEQ ID NO: 41129 - DNA, 80 bp, synthetic construct
  misc_feature 1..80: note = Artificially Synthesized Probe
  source 1..80: mol_type = other DNA
tacgagttcggtggggattcatacaacagtgcatctcattcccgaccgtgtcttatctttgatgacagggtcatcgttaa

SEQ ID NO: 41130 - DNA, 80 bp, synthetic construct
  misc_feature 1..80: note = Artificially Synthesized Probe
  source 1..80: mol_type = other DNA
gagctaccgcgcctggcccctagtttttgtactttttgtagagattggttttcaccatgttgcccaggctggtcttggac

SEQ ID NO: 41131 - DNA, 80 bp, synthetic construct
  misc_feature 1..80: note = Artificially Synthesized Probe
  source 1..80: mol_type = other DNA
gggcatatatcttggggtggaattgccagtacatatagcaactctatgtttaaacttttgactcttttccaaaggggttg

SEQ ID NO: 41132 - DNA, 80 bp, synthetic construct
  misc_feature 1..80: note = Artificially Synthesized Probe
  source 1..80: mol_type = other DNA
agtgctgggattacaggcgtgagccactgtgtctggccagtgagatattttatttgtgccctttttttttttttttgaga

SEQ ID NO: 41133 - DNA, 80 bp, synthetic construct
  misc_feature 1..80: note = Artificially Synthesized Probe
  source 1..80: mol_type = other DNA
gtggaattctccaagaagtgtttggagagatggaagaccacgtctgcaaaggagaagtgaagtttgaagagaaggcaaaa

SEQ ID NO: 41134 - DNA, 80 bp, synthetic construct
  misc_feature 1..80: note = Artificially Synthesized Probe
  source 1..80: mol_type = other DNA
gcctgtgcagtgggcttgttttgctaagaatgtgaattctagtacagctcagtattagcttcagtataaaactgtacaaa

SEQ ID NO: 41135 - DNA, 80 bp, synthetic construct
  misc_feature 1..80: note = Artificially Synthesized Probe
  source 1..80: mol_type = other DNA
cggggctagcacaggagggttcaatattttcaaccttatcaagccatattttggcaactcttgtttttcacgagaagccc

SEQ ID NO: 41136 - DNA, 80 bp, synthetic construct
  misc_feature 1..80: note = Artificially Synthesized Probe
  source 1..80: mol_type = other DNA
agtaagtatggcttgctggggtcggggccgggccgggccagtcacggtgctgatggttctgtcttccttccttctctcct

SEQ ID NO: 41137 - DNA, 80 bp, synthetic construct
  misc_feature 1..80: note = Artificially Synthesized Probe
  source 1..80: mol_type = other DNA
gctgggctaggcctcgagggactggcaaggacaccctgcgcagggcaccatgaccttggaaggaggtccggggaggggct

SEQ ID NO: 41138 - DNA, 80 bp, synthetic construct
  misc_feature 1..80: note = Artificially Synthesized Probe
  source 1..80: mol_type = other DNA
ccgggtagaaggtgtggccagtgccttgagtcagtggagcagttgcctgtgcctggtctctgtgagatgggttggtcagg

SEQ ID NO: 41139 - DNA, 80 bp, synthetic construct
  misc_feature 1..80: note = Artificially Synthesized Probe
  source 1..80: mol_type = other DNA
gggtgagccctgtcccttcctggtcactgtctgccatcaggagctgccccgcttacagctgtgattcaggagccactgca

SEQ ID NO: 41140 - DNA, 80 bp, synthetic construct
  misc_feature 1..80: note = Artificially Synthesized Probe
  source 1..80: mol_type = other DNA
atagaaaaactagccaggtgtggtggcacatgccaataatcccagctacttcatctgaggtcaggagttcaagaccagcc

SEQ ID NO: 41141 - DNA, 80 bp, synthetic construct
  misc_feature 1..80: note = Artificially Synthesized Probe
  source 1..80: mol_type = other DNA
gttgcaaaacactgtgctttcgtatcttttctttctacctgtttggaaatgtgaaaatcactgctgccgtaggaaacggg

SEQ ID NO: 41142 - DNA, 80 bp, synthetic construct
  misc_feature 1..80: note = Artificially Synthesized Probe
  source 1..80: mol_type = other DNA
ccacctttttattttttattttatagagacaagggcttgctgtgttgcccaggctggtcttgaacccctgaccttaagta

SEQ ID NO: 41143 - DNA, 80 bp, synthetic construct
  misc_feature 1..80: note = Artificially Synthesized Probe
  source 1..80: mol_type = other DNA
tgtcctcaaggggcatccgcgccgtggcctgggtccgaacctctctgctgttcacggctgcgtcactttccagtgtgtgg

SEQ ID NO: 41144 - DNA, 80 bp, synthetic construct
  misc_feature 1..80: note = Artificially Synthesized Probe
  source 1..80: mol_type = other DNA
ccagagcggtgctggacctgaaggcccgtggctccctcagctccactgaggaggctggaatagtgtcctgggccaccttc

SEQ ID NO: 41145 - DNA, 80 bp, synthetic construct
  misc_feature 1..80: note = Artificially Synthesized Probe
  source 1..80: mol_type = other DNA
agaggcagccctgagctgggggtggggaaggctgggtcgtgggatacccctgacaccccaagttttttttttgagatgga

SEQ ID NO: 41146 - DNA, 80 bp, synthetic construct
  misc_feature 1..80: note = Artificially Synthesized Probe
  source 1..80: mol_type = other DNA
gatgacttgagcctagtagttcaaacgagaccagcctgggcagcacggtgaaactgtctctactaaaatacaaaaattag

SEQ ID NO: 41147 - DNA, 80 bp, synthetic construct
  misc_feature 1..80: note = Artificially Synthesized Probe
  source 1..80: mol_type = other DNA
tgccacagtctgggctccatctgtgctaccattgcagtagtctggtttctaggaagcaaaactgttactgagttacaaag

SEQ ID NO: 41148 - DNA, 80 bp, synthetic construct
  misc_feature 1..80: note = Artificially Synthesized Probe
  source 1..80: mol_type = other DNA
ggcacaaaaatgtcatccagctggtggatgtgttatacaacgaagagaagcagaaaatatatcctttccggtgttgggac

SEQ ID NO: 41149 - DNA, 80 bp, synthetic construct
  misc_feature 1..80: note = Artificially Synthesized Probe
  source 1..80: mol_type = other DNA
aatgctggacagcgtgccggagaagcgtttcccagtgtgccaggcccacgggtgcgtgcgcggggcaggggccagggtgg

SEQ ID NO: 41150 - DNA, 80 bp, synthetic construct
  misc_feature 1..80: note = Artificially Synthesized Probe
  source 1..80: mol_type = other DNA
gtgaggggcagggaggcctcggccccaggacgggtgtgtgctgcccgcaggtacttctgtcagctgattgacggcctgga

SEQ ID NO: 41151 - DNA, 80 bp, synthetic construct
  misc_feature 1..80: note = Artificially Synthesized Probe
  source 1..80: mol_type = other DNA
cgaaatgaagctacaacatcaccacgggtctgtaccccttcgaaggggacaacatctacaagttgtttgagaacatcggg

SEQ ID NO: 41152 - DNA, 80 bp, synthetic construct
  misc_feature 1..80: note = Artificially Synthesized Probe
  source 1..80: mol_type = other DNA
ggtctctgggcagtgtcctgttaccggccagacccaggcgccttgtccgaactggggtctgagtgaggacatgcgtccgt

SEQ ID NO: 41153 - DNA, 80 bp, synthetic construct
  misc_feature 1..80: note = Artificially Synthesized Probe
  source 1..80: mol_type = other DNA
acttggaggacctgcacggcgcggacgaggacgaggacctcttcgacatcgaggatgacatcatctacactcaggacttc

SEQ ID NO: 41154 - DNA, 80 bp, synthetic construct
  misc_feature 1..80: note = Artificially Synthesized Probe
  source 1..80: mol_type = other DNA
cagggtctcagctcctgggctcttggatttgcagcaccacgaccatcgcgtctggtctgttggaacgggaggtgctgctg

SEQ ID NO: 41155 - DNA, 80 bp, synthetic construct
  misc_feature 1..80: note = Artificially Synthesized Probe
  source 1..80: mol_type = other DNA
caccagagacgggctgggcccaagctcagacctatgggtgcaattggtgcctcctcaccaaggtcttttttatctttttt

SEQ ID NO: 41156 - DNA, 80 bp, synthetic construct
  misc_feature 1..80: note = Artificially Synthesized Probe
  source 1..80: mol_type = other DNA
cctgcagtcagtacctgggtggggtcccacctgcggccatggcaggtgcaacagacgtggtggaggggacactcctgccc

SEQ ID NO: 41157 - DNA, 80 bp, synthetic construct
  misc_feature 1..80: note = Artificially Synthesized Probe
  source 1..80: mol_type = other DNA
tgtggcggggctctgggggggcgtgccgtcctcacagccacctctcagagtgggtgcattccgaggaccctgccctgggc

SEQ ID NO: 41158 - DNA, 80 bp, synthetic construct
  misc_feature 1..80: note = Artificially Synthesized Probe
  source 1..80: mol_type = other DNA
aaggtggatttgagctgtggctgtgaggggtgtttgggagctgctgggtggcaggggggctgtggggtcgggctcacgtc

SEQ ID NO: 41159 - DNA, 80 bp, synthetic construct
  misc_feature 1..80: note = Artificially Synthesized Probe
  source 1..80: mol_type = other DNA
ggcccggtggcatcgagtgggtgccgtgtatcttgcaggcacagaacctcccggggaagatggagggattattgccctgc

SEQ ID NO: 41160 - DNA, 80 bp, synthetic construct
  misc_feature 1..80: note = Artificially Synthesized Probe
  source 1..80: mol_type = other DNA
tcctctaggcagggcggtctgtagctcaaacccctttaattgggggagattagaaaaaagtgattccattttacagatga

SEQ ID NO: 41161 - DNA, 80 bp, synthetic construct
  misc_feature 1..80: note = Artificially Synthesized Probe
  source 1..80: mol_type = other DNA
aggtgcttatcatggatcacccaagcatgcgcatcttgtcttcctgctgcaaaatgtcagatatcctggctgagggcatc

SEQ ID NO: 41162 - DNA, 80 bp, synthetic construct
  misc_feature 1..80: note = Artificially Synthesized Probe
  source 1..80: mol_type = other DNA
tgtgcatctgtgtatgcatgtgtgtgcgtgtttgcatgtgtgtctatgtatgtgtctgtgtgcatgtgcatgtgtgtgcg

SEQ ID NO: 41163 - DNA, 80 bp, synthetic construct
  misc_feature 1..80: note = Artificially Synthesized Probe
  source 1..80: mol_type = other DNA
cgagcccctgttcagtgagctaggccgctctcgtctggcaaaggtggtgaagacgttgaaggagattcaccttgccttcc

SEQ ID NO: 41164 - DNA, 80 bp, synthetic construct
  misc_feature 1..80: note = Artificially Synthesized Probe
  source 1..80: mol_type = other DNA
accgcaagtggggaccccacccagccccaccccgatgccgacccccccttaaccgcgtgcaacacctaacctttaacctc

SEQ ID NO: 41165 - DNA, 80 bp, synthetic construct
  misc_feature 1..80: note = Artificially Synthesized Probe
  source 1..80: mol_type = other DNA
gagagcaagaggctgaccacggacaaggtaggggcggacccaggtcaccaaaggcgctggtggaaggaagcccccctccc

SEQ ID NO: 41166 - DNA, 80 bp, synthetic construct
  misc_feature 1..80: note = Artificially Synthesized Probe
  source 1..80: mol_type = other DNA
acaggaatgtggcctattcataggtgggtgggaccttggagaggtaggcagggccttggagaggtgcgacctgggagagg

SEQ ID NO: 41167 - DNA, 80 bp, synthetic construct
  misc_feature 1..80: note = Artificially Synthesized Probe
  source 1..80: mol_type = other DNA
ttgagagacctggtgctgagatgaggtaggacccaaatgtcctcttgccgaggatcctggggatgtccttggcccgcctc

SEQ ID NO: 41168 - DNA, 80 bp, synthetic construct
  misc_feature 1..80: note = Artificially Synthesized Probe
  source 1..80: mol_type = other DNA
aaagcagtgtttcgggtctggtctggggcccagaggacactggggcctctcccagtcccagcttacacaataggcagggg

SEQ ID NO: 41169 - DNA, 80 bp, synthetic construct
  misc_feature 1..80: note = Artificially Synthesized Probe
  source 1..80: mol_type = other DNA
tcagcctccctcctgctgaggtgctaagcctcagggcttaggggaaaatgctcattgctggcattcccttggcaccgatc

SEQ ID NO: 41170 - DNA, 80 bp, synthetic construct
  misc_feature 1..80: note = Artificially Synthesized Probe
  source 1..80: mol_type = other DNA
gcttgtaccttctaggtgtctggactccagagtccttggagtcagggacctggtttgctgagggacagggacagccccac

SEQ ID NO: 41171 - DNA, 80 bp, synthetic construct
  misc_feature 1..80: note = Artificially Synthesized Probe
  source 1..80: mol_type = other DNA
caggtgcccaccatcacgtacagataattttctcaaatttttgtagggatgatgtcttgtaatgttgaacaggctggtcc

SEQ ID NO: 41172 - DNA, 80 bp, synthetic construct
  misc_feature 1..80: note = Artificially Synthesized Probe
  source 1..80: mol_type = other DNA
ccgctgccaggtggggccttagtggggaggcctgggccaagaaggcaggatggggaatctggtcctgctgtgggggctgc

SEQ ID NO: 41173 - DNA, 80 bp, synthetic construct
  misc_feature 1..80: note = Artificially Synthesized Probe
  source 1..80: mol_type = other DNA
cctccttccctggattcacatgccccacacctggacctttgctttttctttttattgtgggatttattttattttatttt

SEQ ID NO: 41174 - DNA, 80 bp, synthetic construct
  misc_feature 1..80: note = Artificially Synthesized Probe
  source 1..80: mol_type = other DNA
aactcaaggaagggcacccgcatgaagatgggagctcggtgacacttctccaggtcaccaccctggtagatcatgtccag

SEQ ID NO: 41175 - DNA, 80 bp, synthetic construct
  misc_feature 1..80: note = Artificially Synthesized Probe
  source 1..80: mol_type = other DNA
gatgactcagcaaaagcacaggcctaggcagggtggctcccacctataatcccagaccctagggaggctgaggccaggag

SEQ ID NO: 41176 - DNA, 80 bp, synthetic construct
  misc_feature 1..80: note = Artificially Synthesized Probe
  source 1..80: mol_type = other DNA
gactgagtttgctgtgtagaaaacagaagaatgaaaggggaaaggcccaatggtgggtttgtttttgtaggttttttttt

SEQ ID NO: 41177 - DNA, 80 bp, synthetic construct
  misc_feature 1..80: note = Artificially Synthesized Probe
  source 1..80: mol_type = other DNA
tttgatgtaggtttcacctaggatctcattgtatgatcagtaacatatgaaaccgtacacccaccagtgccaagacggct

SEQ ID NO: 41178 - DNA, 80 bp, synthetic construct
  misc_feature 1..80: note = Artificially Synthesized Probe
  source 1..80: mol_type = other DNA
cagtatctggaggggattagggacactgagctccagcagggctatccagtgtgcctgcagaaacaaggttggtcacaggc

SEQ ID NO: 41179 - DNA, 80 bp, synthetic construct
  misc_feature 1..80: note = Artificially Synthesized Probe
  source 1..80: mol_type = other DNA
agtgcaaaggttggggtgggagagactaacgagagtcataaagcacctagccggtgagatagtaagtattcaggtaaaga

SEQ ID NO: 41180 - DNA, 80 bp, synthetic construct
  misc_feature 1..80: note = Artificially Synthesized Probe
  source 1..80: mol_type = other DNA
ccagcatgcccaccaagacccctacgctggcccgcatcctggatcatcacctccgccccagccagctcctccccggagtt

SEQ ID NO: 41181 - DNA, 80 bp, synthetic construct
  misc_feature 1..80: note = Artificially Synthesized Probe
  source 1..80: mol_type = other DNA
tctgaaatgccttcgcgctaacttggtgctgcaggttcctatggcacctttggatgcttaaaacccttcaaatctatcca

SEQ ID NO: 41182 - DNA, 80 bp, synthetic construct
  misc_feature 1..80: note = Artificially Synthesized Probe
  source 1..80: mol_type = other DNA
attggaaataggatgtagaactgaagggcagtggtgacaataatgatacttgtttgtaccccttctaaagtatctcatct

SEQ ID NO: 41183 - DNA, 80 bp, synthetic construct
  misc_feature 1..80: note = Artificially Synthesized Probe
  source 1..80: mol_type = other DNA
cactgcgcctggccggctgactacagattttttaagtgaccatttaaaaagtgaaattttcatcttgtttggcatcaatc
